United States Patent Application Publication US 2014/0259212 A1 - sequence listing, part 15

SEQ ID NO: 48294 - DNA, 1938 bp, Anaplasma phagocytophilum HZ
  CDS (1)..(1938): transl_table=11
atggcggctgagcgtataataggtatagatctaggtactacgaattcctgtgttgctgttatggaggctggtaccgcaaaggtgatagaaaacagtgaaggttcgaggaccaccccgtctgttgttgcgtttactgataatgaaaggctagtaggggaattggctaagcggcaagcaaatatcaatgctcagaacacgatatatgcgagcaaaaggattatcggccgcagatacgatgacatgagggatttgaagtgtccttatgaggtgtttcctgcaaagaacggtgatgcttggataagagcaaagggtgagggttattctccggttcagattggcgcgtttgtcttggaaaagatcaaggaaactgctgagagatactttggtgctccagtgaagaaggcggttattacggtgcctgcgtattttaacgatgctcaacgtcaggcaacaaaggatgctggtacgattgctggcctagatgttgtgagaataattaatgaacctacagcagcagctttggcgtacgggttagataagggtgacaagcaaaggactatagtagtatacgatcttggtggtggtacatttgacgtatctgttttggagatagctgacggtgtatttgaagttaaagctactaatggtgatactaagcttggtggtgaggactttgataatgccatcatggaacatatgatggagagtttccaaaaagaaacaggtataaatctacgtaatgaccctatggctgttcagcgggtcaaggaggctgcggagaaggctaagattgagttatctaccaggttagagacagatataactcttccgtttatttctagcgacagcactggcgcgaagcacttgagtttgaagctgagtagggctaagtttgagggtttggtagacgagttaatcgagcgcactatagagccatgtaagaaggctttgagtgatgcgggtattaaggataacagtaaggtcgacgaggttgtgctagttggtggtatgaccagggttcctaaggttattcaaagggtgaaagacttctttgggaaagagccatgtcaaggtgtaaatccagatgaagttgtagctgtaggtgctgcgatacagggtggtatcttaacaggtgatgttcgtgatgtcttgttgttggatgttgctccgctatctttgggtatagaaactttgggtggtgtatttacgcctttgattgagcgtaatactacaattcctactaagaagtcgcaggtgttctctacggctgaagatggtcaaactgcggtgactattaaggtgtaccaaggtgagcgtaagatggcaatcgacaataagttgttggggcagtttagtctggagggtattcctcatgctccacgcggtgttcctcaaattgaggtgacttttgacatagacgctaatggtatagtgcacgtttcagcaaaggataaggcttcaggtaaggagcagactattaagatacagtcttctggtggcttaagtgatgaagaaatcaagaagatggtcaaagatgctcaggaccgggcggaagacgatgaaaagcgtaagaagcatgtggagctgaagaatagttctgaggggctgatacattctgtagagaagtctttgaaggattatggagataaggttgcgggtgctgataagtctaatatcgagagcgctatcaaggatttgagagagtgcttgaatgatagcaactgtagtactgatactctgcagcagaagtatgatgcgcttatgaatctatccatgaagctgggagaagctgcatatgcggctaataagaatgacggtgcgggaagtgctgatcaatctggaagcagtagtgggggttctgatggtaatccggaagagcgtgttgtagattccgaatatcaggagattaataaggacgaggacaagaagaatacttag

SEQ ID NO: 48295 - protein, 645 aa, Anaplasma phagocytophilum HZ
MAAERIIGIDLGTTNSCVAVMEAGTAKVIENSEGSRTTPSVVAFTDNERLVGELAKRQANINAQNTIYASKRIIGRRYDDMRDLKCPYEVFPAKNGDAWIRAKGEGYSPVQIGAFVLEKIKETAERYFGAPVKKAVITVPAYFNDAQRQATKDAGTIAGLDVVRIINEPTAAALAYGLDKGDKQRTIVVYDLGGGTFDVSVLEIADGVFEVKATNGDTKLGGEDFDNAIMEHMMESFQKETGINLRNDPMAVQRVKEAAEKAKIELSTRLETDITLPFISSDSTGAKHLSLKLSRAKFEGLVDELIERTIEPCKKALSDAGIKDNSKVDEVVLVGGMTRVPKVIQRVKDFFGKEPCQGVNPDEVVAVGAAIQGGILTGDVRDVLLLDVAPLSLGIETLGGVFTPLIERNTTIPTKKSQVFSTAEDGQTAVTIKVYQGERKMAIDNKLLGQFSLEGIPHAPRGVPQIEVTFDIDANGIVHVSAKDKASGKEQTIKIQSSGGLSDEEIKKMVKDAQDRAEDDEKRKKHVELKNSSEGLIHSVEKSLKDYGDKVAGADKSNIESAIKDLRECLNDSNCSTDTLQQKYDALMNLSMKLGEAAYAANKNDGAGSADQSGSSSGGSDGNPEERVVDSEYQEINKDEDKKNT

SEQ ID NO: 48296 - DNA, 1911 bp, Neorickettsia sennetsu str. Miyayama
  CDS (1)..(1911): transl_table=11
atggcgggcgaaatagcaataggtatagacttaggaactacaaactcatgtgtagctatcaaggataaagttatagaaaacgcggagggagcaagaactacaccttcggtggttgcatttacatcagatggtcagactcttgttggtgctccggcacagaggcaggctgttacaaatgctaagaacacaatcgttgcttccaagcgacttataggaagacgctttaaggacaacgttatcaagggaatacagagggactatccgtacaagattatagaggcaaaaaacggtgatgcatggatcgaggcaggaggtaaatcttattctccaagtcaaataggtgcaaatgtactgatcaaactaaaagaagcagctgagacctatactggcaaaaaagtcactaaagctgtgattacagtaccagcttattttgacgatgcacaacgtcaagcaacaaaagatgcaggaagaatagctggactagaagtccttaggattataaacgaacccacagccgcagcactagcttatggtttggataaaactgccacaacaaagaatattgctgtatttgacttaggtggtggaactttcgatgtttcaattctagagcttggtgacggagtctttgaggtaaaagcaacaaacggtgatacccatctgggaggtgaggattttgacaggatgatacttaacttcctagttgaagaatttaagaaagaaaatggcatggatcttaagaatgatccactcgctctacagagactcaaggaagcagcagagaaagcaaaaaaagagctatctagtacccaggaaacagatattaatcttccatacattactgctgacgctgcaggtcctaaacacctgaatgtgaagttcaccagagcaaaacttgaatcccttgtttctgatcttatcgatagaacaatagaaccttgcaaaaaggctctgaaggattcggggctcaaaagagaggagatcaatgaggttgttcttgtaggtgggatgacaagaatgccagctgtggtcaaaaaagtaactgaattctttggtaaggagccacacaaaggtgtaaacccggatgaagttgtagccatcggtgctgcgatacaagcaaatatattagctggtggaagtgatgcacaagatatagtactgctggacgtcacaccactttccctgggcatagaaacattgggaggtgtcttcacgaagctcatagaccgtaacacgacaatcccaactaagagatcacaaacattttccactgcagaggacaatcagtctgccgtgacaatcagagtcttccagggagaaaggcagatggctagtgataacaagcttttgggacaatttagcttggaaggtattccccctgcaccgcgcggaatgccacagatcgaagtgacattcgacatcgatgcaaatggaatagtgcatgtatcggcaaaggataaaggtactggaaaagagcaaacggtgaagatacaagcttccggtggtttgacagaagaagaaattaagaaaatggtagatgaggctgcttcgaaagccgatgaagacaaaaagagaagagagctggttgaagcgaaaaatagcgcggaaagcttgattcactctaccgagaagtcactttctgaatacggtagtaagattagttcatcggataaacaaagtatagatgatgcaattagtgatcttaagagtgttttagcaaaagatgatgcttccctgattaaggaaaaaaccgatgctctctctaaggtttctatgaaactgggtgaggcaatgtataaagaatcacaaagtgcatccaatgacccctcgcctaagaatgacagcacagaagaaggagaaagagtcgtagatcctgaatatgaggaggtaaaagacgaggacagtaagtga

SEQ ID NO: 48297 - protein, 636 aa, Neorickettsia sennetsu str. Miyayama
MAGEIAIGIDLGTTNSCVAIKDKVIENAEGARTTPSVVAFTSDGQTLVGAPAQRQAVTNAKNTIVASKRLIGRRFKDNVIKGIQRDYPYKIIEAKNGDAWIEAGGKSYSPSQIGANVLIKLKEAAETYTGKKVTKAVITVPAYFDDAQRQATKDAGRIAGLEVLRIINEPTAAALAYGLDKTATTKNIAVFDLGGGTFDVSILELGDGVFEVKATNGDTHLGGEDFDRMILNFLVEEFKKENGMDLKNDPLALQRLKEAAEKAKKELSSTQETDINLPYITADAAGPKHLNVKFTRAKLESLVSDLIDRTIEPCKKALKDSGLKREEINEVVLVGGMTRMPAVVKKVTEFFGKEPHKGVNPDEVVAIGAAIQANILAGGSDAQDIVLLDVTPLSLGIETLGGVFTKLIDRNTTIPTKRSQTFSTAEDNQSAVTIRVFQGERQMASDNKLLGQFSLEGIPPAPRGMPQIEVTFDIDANGIVHVSAKDKGTGKEQTVKIQASGGLTEEEIKKMVDEAASKADEDKKRRELVEAKNSAESLIHSTEKSLSEYGSKISSSDKQSIDDAISDLKSVLAKDDASLIKEKTDALSKVSMKLGEAMYKESQSASNDPSPKNDSTEEGERVVDPEYEEVKDEDSK

SEQ ID NO: 48298 - DNA, 1932 bp, Saccharophagus degradans 2-40
  CDS (1)..(1932): transl_table=11
atgggtaaaattattggtatagatttgggtacaactaactcgtgtgtatccatcttagaaggtaacaaagcaaaagtaattgagaactctgaaggtgaccgcactacaccttctattgttgcatttactgaagacggcgaaattctagtaggtcagagcgctaagcgtcaggctgttactaacccgcaaaacaccttgtttgccgttaagcgtttgatcggtcgtaagtttaccgacgacgttgtacaaaaagatatttccatggtgccgtacaaaattatcgcggcagataatggcgatgcatgggtagaagtgaaaggcgacaaaaaagcaccgcctcaaatttctgctgaagtattgaaaaaaatgaagaaaaccgctgaagattacttgggcgaaaccgttaccgaagcggttattacggtacctgcgtacttcaacgactctcagcgtcaagcaactaaagacgccggtaaaattgctggtttagacgttaagcgtattattaacgagcctacagcagcggcactggcttacggtatggataaatccaaaggcgacagcactattgctgtatacgacctaggtggtggtactttcgatatttctatcatcgaaattgccgatgtagatggcgagcaccagttcgaagtactttctactaacggtgatactttccttggtggtgaagatttcgatttgcgcttaattgaatacttggcagaagagtttaagaaaacaaacggtatcgatttacacaacgatccgcttgcattgcaacgcttaaaagaagcggcagagaaagccaaaatcgagctttcttctagccagcaaacagaagttaacttgccatacattactgccgatgccactggccctaaacacttagtagtgaagctttcgcgcgctaagttagagtctttggttgaagagcttgtaaaccgttctttagagccgttaaaaatggctattaaagacgctggcgtttctgtaagcgacatcgacgacgtaattttggtgggtggtcaaacccgtatgccaatggtgcaggctgctgttgccaagttctttggtaaagagccacgtaaagatgtaaacccagatgaagcagtagcaatgggtgcagctattcaaggtgcggtactttctggtgacgttaaagacgtattgttgctagacgtaaccccattaagcttgggtatcgaaaccatgggcggtgtagcaacgccattaatcgagaagaatacgactatcccgactaaaaagtcgcaagtattctctactgcagacgacaaccaaacagctgtaactattcacgtagtacagggtgagcgtaagcaagcgtcgcagaataaatcgttaggtcgtttcgacttggcggacattcctcctgcaccacgcggcatgccacaaatcgaagttactttcgatattgatgccaacggtatcttgaatgtgtctgctaaagataaggctacaggtaaagagcaatctatcgttattaaggcttcttctggcttaagcgatgatgaaatcgaaaaaatggtgcaggacgcagaagctaacgccgatgcggaccgcaagttcgaagaagttgtgactgcgagaaacacgctggaagggcttattcatgcaaccaagaaaacgcttgaagaggcgggtgataaggcgacggcagacgaaaaatctgcaatcgaaagcgcaattgcagaagccgaagaagcagctaaaggcgaagataaagatgcgatggaagcggctactaaaaagctaactgaagcatctagctctcttgctcaaaaactgtatgcagagcaaggcgctgcgggtgcaggtgcagcaggcgctgctgatgccgccgcagatcagccagcagacgatggcgcagttgacgctgagtttgaagaagtaaaagaagacgacggcaagtaa

SEQ ID NO: 48299 - protein, 643 aa, Saccharophagus degradans 2-40
MGKIIGIDLGTTNSCVSILEGNKAKVIENSEGDRTTPSIVAFTEDGEILVGQSAKRQAVTNPQNTLFAVKRLIGRKFTDDVVQKDISMVPYKIIAADNGDAWVEVKGDKKAPPQISAEVLKKMKKTAEDYLGETVTEAVITVPAYFNDSQRQATKDAGKIAGLDVKRIINEPTAAALAYGMDKSKGDSTIAVYDLGGGTFDISIIEIADVDGEHQFEVLSTNGDTFLGGEDFDLRLIEYLAEEFKKTNGIDLHNDPLALQRLKEAAEKAKIELSSSQQTEVNLPYITADATGPKHLVVKLSRAKLESLVEELVNRSLEPLKMAIKDAGVSVSDIDDVILVGGQTRMPMVQAAVAKFFGKEPRKDVNPDEAVAMGAAIQGAVLSGDVKDVLLLDVTPLSLGIETMGGVATPLIEKNTTIPTKKSQVFSTADDNQTAVTIHVVQGERKQASQNKSLGRFDLADIPPAPRGMPQIEVTFDIDANGILNVSAKDKATGKEQSIVIKASSGLSDDEIEKMVQDAEANADADRKFEEVVTARNTLEGLIHATKKTLEEAGDKATADEKSAIESAIAEAEEAAKGEDKDAMEAATKKLTEASSSLAQKLYAEQGAAGAGAAGAADAAADQPADDGAVDAEFEEVKEDDGK

SEQ ID NO: 48300 - DNA, 1923 bp, Methylobacillus flagellatus KT
  CDS (1)..(1923): transl_table=11
atgggaaaaattatcggtattgacttaggcaccaccaactcctgcgtagccgtgatggagggtggaaagcctcgcgtgatcgagaacgccgaaggcgcacgcaccacaccttccgtcattgcctatcaggaagacggtgaaattctggtaggcgctcctgccaagcgccaggcggtgaccaatccgaaaaatactctatttgccgtcaagcgcctgattggtcgccgctttgacgaaaaggaagttcagaaagacatcggcctcatgccttacaccatcaccaaggctgacaacggtgatgcatgggtagaagtccgcggccagaagctggcgccaccgcaaatctccgcagaagtgttgcgcaagatgaagaaaaccgcagaggactacctgggtgaagaggtcaccgaggccgtcatcacggtacctgcctacttcaacgacagccaacgccaggccaccaaagatgcaggccgtatcgctggcctggaagtcaagcgtatcattaatgaaccgactgcggctgcactggcttttggtctggacaaacaggaaggtgatcgtaagattgcagtctacgacttgggcggcggtactttcgatatttccatcatcgagatttccgaaattgatggtgagcaccagttcgaggtattgtccaccaacggtgacaccttcctgggcggcgaagacttcgataaccgcctgatcgatttcctggcggacgaattcaagaaggaaaacggtatcgacctgcgcaacgacttgctggccaagcagcgcttgaaggaggccgcagaaaaggccaagatcgagctttcttccagcacgcagaccgaagtcaacctgccttacattaccgcggatgccagcggaccaaaacacttggtggtgaagatcacacgcgccaagttcgagagcctggtggaagacttgatcgagcgctccatcaagccatgcgaagttgcattgaaggatgcaggagtcaaggtatccgatatccaggacgtgatcttggttggcggtcagacccgcatgcccaaggtgcaggaaaaggtcaaggaattcttcggtaaggaacctcgcaaggatgtgaaccctgacgaagctgtcgctgtaggtgccgctatccagggtggcgtactgcaaggcgacgtgaaggatgttctcttgctcgacgtcactccgctttccttgggaatcgaaaccctgggtggcgtgatgaccaaactgatccagaagaacaccacgatcccgaccaaggcatcgcaagtgttctcgacagccgaggacaaccagtctgccgtaacgatccacgtcctgcaaggtgagcgtgaaatggcatccggcaacaagagcctgggtcagttcaacctgactgatatcccgcccgcaccgcgtggcatgccacagatcgaagtcaccttcgacatcgacgccaatggtatcttgcatgtatcggccaaggataaggcgacaggcaaggaaaacaagattaccatcaaggcgaactctggcttatccgatgaagagatcaagcgcatggaggaagaggctgccaaatatgcagacgaggacaagaagctgcgtgaactggttgacgcacgcaatagcgccgacagtgctatccacagcgtgaagaaatccctggccgagcatggtgacaaactggatgcggctgaaaagggagccattgaaaaggcggtacaagagctggaagacgtcatcaagggtgacgacaaggcagcgatcgagagcaagactaatgccttgatcgaggcctcgcagaaacttggtgaaaaagtctacgctgccggcgaaaccgaaagcagcgccgcagaaccaggcgagccacaggaaaagacagtggatgccgaagtggtggatgctgagttcgaggaagtcaaggatgacaagaagtaa

SEQ ID NO: 48301 - protein, 640 aa, Methylobacillus flagellatus KT
MGKIIGIDLGTTNSCVAVMEGGKPRVIENAEGARTTPSVIAYQEDGEILVGAPAKRQAVTNPKNTLFAVKRLIGRRFDEKEVQKDIGLMPYTITKADNGDAWVEVRGQKLAPPQISAEVLRKMKKTAEDYLGEEVTEAVITVPAYFNDSQRQATKDAGRIAGLEVKRIINEPTAAALAFGLDKQEGDRKIAVYDLGGGTFDISIIEISEIDGEHQFEVLSTNGDTFLGGEDFDNRLIDFLADEFKKENGIDLRNDLLAKQRLKEAAEKAKIELSSSTQTEVNLPYITADASGPKHLVVKITRAKFESLVEDLIERSIKPCEVALKDAGVKVSDIQDVILVGGQTRMPKVQEKVKEFFGKEPRKDVNPDEAVAVGAAIQGGVLQGDVKDVLLLDVTPLSLGIETLGGVMTKLIQKNTTIPTKASQVFSTAEDNQSAVTIHVLQGEREMASGNKSLGQFNLTDIPPAPRGMPQIEVTFDIDANGILHVSAKDKATGKENKITIKANSGLSDEEIKRMEEEAAKYADEDKKLRELVDARNSADSAIHSVKKSLAEHGDKLDAAEKGAIEKAVQELEDVIKGDDKAAIESKTNALIEASQKLGEKVYAAGETESSAAEPGEPQEKTVDAEVVDAEFEEVKDDKK

SEQ ID NO: 48302 - DNA, 1962 bp, Burkholderia xenovorans LB400
  CDS (1)..(1962): transl_table=11
atgggcaaaatcatcggcatcgacctcggcacgaccaactcgtgcgtggcgatcatggaaggcaattcggtcaaggtgatcgagaactcggaaggcgcgcgcaccacgccgtcgatcatcgcttacatggaagacggcgagattctcgtcggcgcgcctgcgaagcgccagtcggtcacgaacccgaagaacacgctgtacgcagtcaagcgcctgatcggccgccgtttcgaagaaaaagaagtgcagaaagacatcggcctgatgccgtacaagatcatcaaggccgataacggcgacgcatgggtcgaagtgcgcgaccagaagctcgctccgccgcaaatctccgcggaagtgctgcgcaagatgaagaagaccgctgaagactatctcggcgagccggtcaccgaggcggtgatcacggttcccgcgtacttcaacgacagccagcgtcaggcaaccaaagatgcaggccgcattgccggtctggaagtgaagcggatcatcaacgaaccgaccgccgctgctctggctttcggcctcgacaagaacgaaaagggcgaccgcaagatcgcggtgtatgacctgggtggcggtacgttcgacgtgtcgatcatcgaaatcgcggatgtcgacggtgaaaagcagttcgaagtgctgtccacgaacggcgatacgttcctcggcggtgaagacttcgaccagcgcatcatcgattacatcatcggcgagttcaagaaagagcagggcgtcgatctgtcgaaagacgtgctcgcgctgcaacgcctgaaggaatcggctgagaaggccaagatcgagctgtcgtcgagccagcaaaccgaaatcaacctgccgtacatcacggccgacgcatcgggtccgaagcatttgaacctgaaaattacgcgtgcgaagctggaagcgctggttgaagagctgatcgagcgcacgatcgaaccgtgccgcgtggcgatcaaggacgcaggcgtgaaggtcggcgaaatcgacgacgtgattctggtcggcggtatgacccgcatgccgaaggtgcaggaaaaggtcaaggagttcttcggcaaggatccgcgccgtgacgtgaacccggacgaagccgtggccgttggcgccgcgatccagggccaggtgttgtcgggcgaccgcaaggacgttctgctgctcgacgtgaccccgctgtcgctcggcatcgaaacgctcggcggcgtgatgaccaagatgatcaacaagaacaccacgatcccgaccaagcactcacaggtctactccacggccgacgacaatcagggcgccgtgacgatcaaggtgttccagggcgaacgcgaaatggcagccggcaacaagctgctgggcgagttcaacctggaaggcattccgccggcaccgcgcggcacgccgcagatcgaggtgagcttcgacatcgacgcgaatggcattctgcacgtcggcgcgaaagacaaggcgaccggcaaggaaaaccgcatcacgatcaaggcgaactcgggtctgtccgaagccgaaatcgagaagatggtgaaggacgccgaagccaacgccgaagaagatcacaagctgcgtgagctggccgatgcccgcaatcagggcgacgcgctggtccacagcacgaagaaggcgctcaccgaatacggcgacaagctggaagccggcgagaaggaaaagatcgaatccgcgctgaaggatctcgaagaaacgctgaagagcggttcgagcgacaaggccgcgatcgaagccaagatcgaagtggtggccaccgcctcgcagaagatgggcgagaagatgtacgcggacatgcaggctgcgcaaggtgctgaagccgcggcagcgggcgcggcgggtgcgggcggcgcgggtgcatcggcgggtggcgcgagccagcagcaggacgacgtggtcgacgccgagttcaaggaagtcaagaaagactaa

SEQ ID NO: 48303 - protein, 653 aa, Burkholderia xenovorans LB400
MGKIIGIDLGTTNSCVAIMEGNSVKVIENSEGARTTPSIIAYMEDGEILVGAPAKRQSVTNPKNTLYAVKRLIGRRFEEKEVQKDIGLMPYKIIKADNGDAWVEVRDQKLAPPQISAEVLRKMKKTAEDYLGEPVTEAVITVPAYFNDSQRQATKDAGRIAGLEVKRIINEPTAAALAFGLDKNEKGDRKIAVYDLGGGTFDVSIIEIADVDGEKQFEVLSTNGDTFLGGEDFDQRIIDYIIGEFKKEQGVDLSKDVLALQRLKESAEKAKIELSSSQQTEINLPYITADASGPKHLNLKITRAKLEALVEELIERTIEPCRVAIKDAGVKVGEIDDVILVGGMTRMPKVQEKVKEFFGKDPRRDVNPDEAVAVGAAIQGQVLSGDRKDVLLLDVTPLSLGIETLGGVMTKMINKNTTIPTKHSQVYSTADDNQGAVTIKVFQGEREMAAGNKLLGEFNLEGIPPAPRGTPQIEVSFDIDANGILHVGAKDKATGKENRITIKANSGLSEAEIEKMVKDAEANAEEDHKLRELADARNQGDALVHSTKKALTEYGDKLEAGEKEKIESALKDLEETLKSGSSDKAAIEAKIEVVATASQKMGEKMYADMQAAQGAEAAAAGAAGAGGAGASAGGASQQQDDVVDAEFKEVKKD

SEQ ID NO: 48304 - DNA, 1863 bp, Methanococcoides burtonii DSM 6242
  CDS (1)..(1863): transl_table=11
atgggaaagatattgggtattgaccttggaactactaattcatgtatggctgtgatcgaaggtggtaaacctactgtaattccaaatgctgaaggtggaaggacaactccatcagtggttggtttttcaaagaagggagacaagcttgtaggtcaggtagcaaaaagacagatgatagctaatcctgggaacagtgtaagttctatcaaacgtcatatcggtgaaggcgactataaggtcaatctcagcggtaaggattacactccgcaggaagtttccgctatgatcctgaggaagctcaaggatgacgctgaagcttatctaggcgagaccatcactcagacggttataactgtacctgcttattttaatgattctcagagacaggctaccaaagatgccggacagatcgcaggtcttgaggtcctaagaattatcaatgagcctactgcagcatctcttgcatatggtcttgacaaagaggaaggcgaccacaagatcctcgtttacgatctcggaggaggtactttcgatgtatccatccttgagttaggcgatggtgtatttgaagtgctttccacaagcggtaatacccaccttggtggtgatgatttcgatcagaggatcacagagttccttgttgaggaattcaagaaggctgaaggcatcgatctgtcaaatgacaaagctgccctccagcgtctcaatgatgctgcagagaaagcaaagatcgagctttccggtgttgcttctacaaatgtgaaccttccgttcattacagcggattccaatggtcagccaaaacatatcgatattgatattacaagggcacagttcgagaagatgaccgaagaccttgtggctaagaccctcgaatcaatgaagatggctcttagtgatgcgaagttgaccacaaaagacattgaccgtgtacttcttatcggcggttctacgaggacccctgcagtatataatcttgtcaagaacttcatcggaaaggatccatacaagaacatcaatcctgatgaggcagttgcagttggtgcagctattcaggcaggcgttctttccggtgaggttcacgatgtcctccttcttgatgtcacaccactgacaatgggtatagaaactctcggaggggttgcaaccccacttatcgagaggaacactacaattcctgttaagaagagccagatattttcaactgcggcagatagccagccatctgtggagattcatatcctgcagggtgagcgtggtatcgcatctgcgaacaagaccctcggtcgttttgtgcttgacggcataccacctgcaccaaggggactgccacagatcgaagtaacattcgatatcgattccaatggtatccttcatgtcaatgcaaaggatctcggtaccggcaaggaacagtccatctctatacagaaaccaggtggattgtccgatgaagagatcgagaggatggtaaaggatgcagagttgcacgctgaggaagataaggcacgcaaggaagaggtcgagacaaggaacaatgctgattctcttgttaatgctgctgaaaataccttgaaggaagctggagatgttgcaaccaatgagcagaaagaacagatcgaagctgcgatcgctgatctgaaaactgcacttgaaggggaagacctcgaggctatcaagagcaaaacagaagcacttcaggaatctgtctataaggtttctgctgcaatgtacgagaaagctcagaaagaggcttctgctggtgctgaagcttctgaagatgcaagtggtccttcatcaactggctctgcatcagatgatgatgtcgttgatgcggactatgaagttgttgacgaagacaaataa

SEQ ID NO: 48305 - protein, 620 aa, Methanococcoides burtonii DSM 6242
MGKILGIDLGTTNSCMAVIEGGKPTVIPNAEGGRTTPSVVGFSKKGDKLVGQVAKRQMIANPGNSVSSIKRHIGEGDYKVNLSGKDYTPQEVSAMILRKLKDDAEAYLGETITQTVITVPAYFNDSQRQATKDAGQIAGLEVLRIINEPTAASLAYGLDKEEGDHKILVYDLGGGTFDVSILELGDGVFEVLSTSGNTHLGGDDFDQRITEFLVEEFKKAEGIDLSNDKAALQRLNDAAEKAKIELSGVASTNVNLPFITADSNGQPKHIDIDITRAQFEKMTEDLVAKTLESMKMALSDAKLTTKDIDRVLLIGGSTRTPAVYNLVKNFIGKDPYKNINPDEAVAVGAAIQAGVLSGEVHDVLLLDVTPLTMGIETLGGVATPLIERNTTIPVKKSQIFSTAADSQPSVEIHILQGERGIASANKTLGRFVLDGIPPAPRGLPQIEVTFDIDSNGILHVNAKDLGTGKEQSISIQKPGGLSDEEIERMVKDAELHAEEDKARKEEVETRNNADSLVNAAENTLKEAGDVATNEQKEQIEAAIADLKTALEGEDLEAIKSKTEALQESVYKVSAAMYEKAQKEASAGAEASEDASGPSSTGSASDDDVVDADYEVVDEDK

SEQ ID NO: 48306 - DNA, 1935 bp, Acidobacteria bacterium Ellin345
  CDS (1)..(1935): transl_table=11
atggcgaagattattggaattgacctcggcactacgaactccgtggtggccgtgatggaaggtggggaaccgaaggttatccccaatgaagaagggggccggactacgccttcagttgttggcttcacgaagaccggcgagcggttggtgggacaggtggcgaaacgccaggcgattaccaaccctgagaacacgattttctcgataaagcgcttcatgggacgtcggtacaacgaagtcaatgaagagatgaagatggtgccctacaaggtacagcaggcgggcgaccacgtggcggtgctggcgcagggcaaggaatacagcccggccgagatctcggcgtacatcctgcaaaagctgaagaaggcggcggaagactatctcggcgagacggtcacggaagccgtgatcacggtgcctgcatacttcaatgacgcgcagcggcaggcgaccaaggatgcgggcaagattgccggtctcgacgtaaagcgcatcatcaacgaaccgacggcggctgcgctggcctacgggctcgacaagaagaaggacgaaaccatcgccgtgtacgacttcggcggcggcaccttcgatatttcgatcctggaagtgggcgaaggcgtaatcgaagtgaagtcgaccaatggcgatacgcatcttggcggcgacaacatcgaccagcgcattgtcgagtggctgattgacgagttcaagaagaaggaaggcctggatctgcgggcgaagggcaacgagatggcgctgcagcgtctgcgtgacggtgcggagcgcgccaagatcgagctctcgacgacgatggagacggagatcaacctgccgtttatcaccgccgatgcgagtggcccaaagcacctggtagagcggctgacccgttcgaagctggaagagatggtgcgcgacctggtcgatcgttcgattgagccgtgccggcaggcgttgaaagacgccggcattgacgccagcaagatcgatgaagtagtgctggtcggcggtcagacgcgtatgccgcggattcagcaggtagtgaaggaattcttcgggcgcgagccgcaccgtggcgtgaacccggatgaagtcgtggcgattggcgcggcgatccagggtggcgtgctcaagggcgaggtgaaagacctgctcctgctcgacgtgactccgctgacgctctcgattgagacgctgggtggagtggcgacgccgatgattccgcgtaacacgacgattccgaccaagaagacggaaacgttctcgaccgcagctgacaaccagaactcggttgagatccacgtgctgcagggcgagcgtccgatggcggggcagaaccgcacgctgggcaagttccacctgaccggtttgccgccggctccgcgtggcgtgccacagatcgaagtgacgttcgacattgatgcgaacggcattctgaacgtgacggcgaaggacaatgccaccggcaaggaccagaagatcacgattacgtcgtcttccggcttgagcaaggaagaagtggagcgcatggcgaaagaagcggatgcgcacgccgcggaagacaaagccaagaaggaagagatcgaggcccgcaaccaactcgacggcatggtgtaccagatcgaaaagatgctgaaagagaatggggacaagatcagcccaagcgaacgcggcgacgtggagaacgcgctggccgattcgaagaaggcgctggagaccaacgacgcaaagcagatgaacgcggcgcgcgagcggctcacggcggcttcgcacaagctggccgaggcgatgtacaagcaggctgctccaggggcaggagctcccggagctggtcctggtccggaagcggcgggcggcgcgcagcaggcgcaggctgagccgaagaaggacgaaggtgtgatcgacgctgagtacgtggacgtggacgagaagaaataa

SEQ ID NO: 48307 - protein, 644 aa, Acidobacteria bacterium Ellin345
MAKIIGIDLGTTNSVVAVMEGGEPKVIPNEEGGRTTPSVVGFTKTGERLVGQVAKRQAITNPENTIFSIKRFMGRRYNEVNEEMKMVPYKVQQAGDHVAVLAQGKEYSPAEISAYILQKLKKAAEDYLGETVTEAVITVPAYFNDAQRQATKDAGKIAGLDVKRIINEPTAAALAYGLDKKKDETIAVYDFGGGTFDISILEVGEGVIEVKSTNGDTHLGGDNIDQRIVEWLIDEFKKKEGLDLRAKGNEMALQRLRDGAERAKIELSTTMETEINLPFITADASGPKHLVERLTRSKLEEMVRDLVDRSIEPCRQALKDAGIDASKIDEVVLVGGQTRMPRIQQVVKEFFGREPHRGVNPDEVVAIGAAIQGGVLKGEVKDLLLLDVTPLTLSIETLGGVATPMIPRNTTIPTKKTETFSTAADNQNSVEIHVLQGERPMAGQNRTLGKFHLTGLPPAPRGVPQIEVTFDIDANGILNVTAKDNATGKDQKITITSSSGLSKEEVERMAKEADAHAAEDKAKKEEIEARNQLDGMVYQIEKMLKENGDKISPSERGDVENALADSKKALETNDAKQMNAARERLTAASHKLAEAMYKQAAPGAGAPGAGPGPEAAGGAQQAQAEPKKDEGVIDAEYVDVDEKK

SEQ ID NO: 48308 - DNA, 1929 bp, Silicibacter sp. TM1040
  CDS (1)..(1929): transl_table=11
atgagcaaagtgatcgggattgacctcgggaccaccaactcctgcgttgccatcatggacggctctcagccgcgcgtgatcgaaaacgccgagggtgcacgcaccaccccttcgatcgttgccttcaccgatgaagagcgccttgttggacagcctgcaaaacgccaggccgtgaccaacccggacaacaccatctttggtgtgaagcgcctcattggccgtcggtttgacgacagcgacctcgccaaggacaagaaaaacctgcccttcgccgtaatcaacggcggcaacggcgacgcatgggtcgaagcgaagtccgagaagtactccccctcccagatttccgccttcatccttggtaagatgaaggaaaccgccgagagctatcttggcgaagaagtgacgcaagcggtcatcaccgttcctgcgtatttcaacgacgcccagcgtcaggccaccaaagacgccggcaagatcgctggcctcgaggtgctgcgcatcatcaacgagccgactgcagcggcgctggcctatggcctcgacaaggccgaaacccagaccatcgcagtctatgaccttggtggcggtacctttgacgttaccatcctcgagatcgacgatggcctgtttgaagtgaaatccaccaacggtgacaccttcctcggtggtgaagacttcgacatgcgcatcgtgaactacctcgcggatgagttcaaaaaagagcatggcgtcgacctgaccaaagacaagatggcgcttcagcgtctgaaagaagcggcagagaaagccaagatcgagctgtcgtcctcttcgcagaccgagatcaaccagccgttcatctcgatggacccgtcgtctggccagccgctgcacttggtcatcaaactgacccgcgcaaagctcgaaagcctcgtgggcgacctgatcaagaactccatgaagccctgcgccgccgcgctgaaggatgctggcctgtccgcgtccgacattgacgaggtggttctggtcggtggtatgacccgcatgccgaaggtcatcgaagaggtgaccaaattctttggcaaggagccgcacaagggtgtgaacccggacgaagtggttgccatgggcgccgccattcaggctggtgttctgcagggtgacgtgaaggacgttgttcttctcgacgtgaccccgctgtcgctcggcatcgaaacccttggtggcgtcttcacccgcctgatcgaccgcaacaccacgatcccgacgaagaagtctcaggtcttctccaccgccgaggacaaccagaacgccgtgaccattcgcgtattccagggtgaacgcgaaatggcagccgacaacaagatgctcggtcagttcaacctcgaagacatcccgcccgcaccgcgcggcatgcctcagatcgaagtgacctttgacatcgacgccaacggtatcgtttcggtgtccgccaaagacaaaggcactggcaaagagcagaagatcaccatccaagcgtctggtggcctgtccgacgaggacatcgaaaagatggtcaaggacgccgaggacaatgccgaggctgacaaggaacgtcgcgagctcatcgaagcacgcaaccaggccgagagcctgatccactcgaccgagaaatcgatcgaagatcacggcgacaaggttgatccctcgaccatcgaggcgattgaactggcgattgcggcgctcaaagacgatctcgaaggcgacaaggcgaatgccgagaagatcaaatccggcatccagaacgtcaccgaagcggcgatgcgtctgggcgaggcgatctacaaggcacaagccgaagaaggtggcgcggacgagccctctgccgctgatgaagatgcttccgcaggccccggtgacgacgacatcgttgatgccgagtttgaagatctggacgacaacaagcgctaa

SEQ ID NO: 48309 - protein, 642 aa, Silicibacter sp. TM1040
MSKVIGIDLGTTNSCVAIMDGSQPRVIENAEGARTTPSIVAFTDEERLVGQPAKRQAVTNPDNTIFGVKRLIGRRFDDSDLAKDKKNLPFAVINGGNGDAWVEAKSEKYSPSQISAFILGKMKETAESYLGEEVTQAVITVPAYFNDAQRQATKDAGKIAGLEVLRIINEPTAAALAYGLDKAETQTIAVYDLGGGTFDVTILEIDDGLFEVKSTNGDTFLGGEDFDMRIVNYLADEFKKEHGVDLTKDKMALQRLKEAAEKAKIELSSSSQTEINQPFISMDPSSGQPLHLVIKLTRAKLESLVGDLIKNSMKPCAAALKDAGLSASDIDEVVLVGGMTRMPKVIEEVTKFFGKEPHKGVNPDEVVAMGAAIQAGVLQGDVKDVVLLDVTPLSLGIETLGGVFTRLIDRNTTIPTKKSQVFSTAEDNQNAVTIRVFQGEREMAADNKMLGQFNLEDIPPAPRGMPQIEVTFDIDANGIVSVSAKDKGTGKEQKITIQASGGLSDEDIEKMVKDAEDNAEADKERRELIEARNQAESLIHSTEKSIEDHGDKVDPSTIEAIELAIAALKDDLEGDKANAEKIKSGIQNVTEAAMRLGEAIYKAQAEEGGADEPSAADEDASAGPGDDDIVDAEFEDLDDNKR

SEQ ID NO: 48310 - DNA, 1911 bp, Myxococcus xanthus DK 1622
  CDS (1)..(1911): transl_table=11
gtgggcaagattatcgggatcgacctgggcaccacgaacagtgtggtcgcgatcatggagggtcgcgagcccaaggtgatcgtcaacgaggaaggcagccgcatcacgccctcggtggtcgcgttcacgaaggacggggagcgtctggttggtcaggtggcgaagcgccagtccatcaccaacccggagcggaccatctactccagcaagcgcttcatgggccggcggcacgacgaggtgtccgaggaggccacgctggtcccctacaaggtcgcccgggggcccaacggcgatgcgcgcgtggacatcgacggcaagcagtacagcgcgccggagatcagcgcgcaggtgctgctgaagctgaagcgcgcggcggagaactacctgggtgagaaggtgacggaggcggtcatcaccgtccccgcgtacttcaacgacgcccagcgccaggccaccaaggacgcgggtgaaatcgcgggcctcacagtgcgccgcatcgtgaacgagccgaccgccgcggcgctcgcgtacggcctggacaagaagaaggacgagaagatcgccgtctacgactttggcggtggcacgttcgacgtgtccatcctcgaggtgggcgagaacgtggtcgacgtgctcgcgaccaacggtgacacgcacctgggcggtgacaacatcgacctgcggatcatggactggctgatcaccgagttcaagaaggacaccgggctcgacgtcagcaaggacaagatggtcctccagcgcctgaaggaggcggcggagaaggcgaagatcgagctgtccgccgcgatggagacggacatcaacctgccgttcctcaccgcggacgcgacgggtccgaagcacctcaacgtcaagctcacgcgcgccaagttcgaggcgatgattgacgacctcatcgagcgctcgctggagccctgccgcaagtgtctcaaggacgcgggcgtggagccgaaggacctcaacgagatcgtcctcgtcggcggcaccacgcgcatcccgaaggtgcaggaggccgtgaagcgcctgttcggcaaggagccgaaccgctcggtgaacccggacgaagtcgttgcggtgggcgccgcggtgcaggccggcgtgctctccggcgaggtgaaggacatcctcctgctggacgtgacgccgctgagcctgggtgtggagacgctgggcggggtgatgacgaagctcatcgagcgcaacaccaccatccccacgcgcaagtcggagaccttctccacggccgcggacggccagacgcaggtggagatccacgtgctccagggcgagcgtgagatggcgggcgacaaccgcagcctcggccgcttccacctgacgggcatgccgccggcgccgcgtggcgtgccgcagatcgaggtgacgttcgacatcgacgcgaacggcatcctcaacgtcagcgccaaggacaaggccacgggcaaggagcagaaggtcaccatcacccactcgtccggtctggcgaaggacgaggtggagaagatggtcgccgacgcccgctccaacgaggcggccgacaagggccgccgcgagctggtggagatgaagaaccaggcggagagccagtcctacgcggccgagaagctgctgaaggagaacaaggacaagctgtccgcggacacggcgaaggcgctcgaggacgccgtggcggagctcaacaaggtccgcgacggccaggacaaggacgccatcaagacggcgctcgatgcgctccaggccgccagctacaaggccgccgaggagatgtaccgcgccacgggcggcgcgccgggtgccgagggcgctccgggtgctggtccttccgcggcgccgggctcgcaggccagcgccaagaaggacgacgtggtggacgccgagttccgccagtcttag

SEQ ID NO: 48311 - protein, 636 aa, Myxococcus xanthus DK 1622
MGKIIGIDLGTTNSVVAIMEGREPKVIVNEEGSRITPSVVAFTKDGERLVGQVAKRQSITNPERTIYSSKRFMGRRHDEVSEEATLVPYKVARGPNGDARVDIDGKQYSAPEISAQVLLKLKRAAENYLGEKVTEAVITVPAYFNDAQRQATKDAGEIAGLTVRRIVNEPTAAALAYGLDKKKDEKIAVYDFGGGTFDVSILEVGENVVDVLATNGDTHLGGDNIDLRIMDWLITEFKKDTGLDVSKDKMVLQRLKEAAEKAKIELSAAMETDINLPFLTADATGPKHLNVKLTRAKFEAMIDDLIERSLEPCRKCLKDAGVEPKDLNEIVLVGGTTRIPKVQEAVKRLFGKEPNRSVNPDEVVAVGAAVQAGVLSGEVKDILLLDVTPLSLGVETLGGVMTKLIERNTTIPTRKSETFSTAADGQTQVEIHVLQGEREMAGDNRSLGRFHLTGMPPAPRGVPQIEVTFDIDANGILNVSAKDKATGKEQKVTITHSSGLAKDEVEKMVADARSNEAADKGRRELVEMKNQAESQSYAAEKLLKENKDKLSADTAKALEDAVAELNKVRDGQDKDAIKTALDALQAASYKAAEEMYRATGGAPGAEGAPGAGPSAAPGSQASAKKDDVVDAEFRQS

SEQ ID NO: 48312 - DNA, 1869 bp, Mycobacterium sp. MCS
  CDS (1)..(1869): transl_table=11
atggctcgtgcggtcggaatcgacctcgggaccaccaactccgtcgtcgcagtgctggagggtggcgaccccgtcgtcgtcgccaactccgagggctcgcgtacgacgccgtccgtcgtcgcgttcgcgcgcaacggtgaagtgctggtcggacaacccgccaagaaccaggcggtgaccaacgtcgaccgcaccatccggtcggtcaagcggcatatgggcaccgactggaacaccgagatcgacggtaagaagtacaccgcccaggagatcagcgcccgcacgctcatgaagctgaagcgcgatgcggagagctacctcggcgaggacatcaccgacgccgtcatcaccgtgcccgcctacttcaacgacgcccagcgtcaggccaccaaggaagccggccagatcgccggcctcaacgtcctgcgcatcgtcaacgaaccgaccgccgcggcgctggcctacggcctcgacaagggtgagaaggaacagaccatcctggtcttcgacctcggtggcggcaccttcgacgtctcgctgctcgagatcggcgagggtgtggtcgaggtgcgtgccacctccggtgacaaccacctcggtggcgacgactgggacgagcgtgtcgtgacgtggctcgtcgacaagttcaaggcctccagcggcatcgacctgaccaaggacaagatggccatgcagcggctccgcgaagccgccgagaaggccaagatcgagctcagctcgagccagagcacctcgatcaacctgccctacatcaccgtcgacgccgacaagaacccgctgttcctcgacgaacagctcacacgcgccgaattccagcgcatcacccaggatctgctcgaccgcacgcggcagccgttccagtcggtgatcaaggacgccggcatctcggtcggcgacatcgaccacgtcgtgctcgtcggcggctccacccggatgcccgcggtctccgaactggtcaaggagatgaccggcggcaaggaacccaacaagggcgtcaacccggacgaggtcgtcgccgtcggcgccgcgctgcaggccggtgtgctcaagggtgaggtcaaggacgtcctgctgctcgacgtcaccccgctgtccctcggtatcgagaccaagggtggtgtgatgaccaagctcatcgagcgcaacaccacgatcccgaccaagcgctcggagacgttcaccacggccgacgacaaccagccgtcggtgcagatccaggtcttccagggtgagcgcgagatcgcctcgcacaacaagctgctcggctccttcgagctgaccggtatcccgcccgccccgcgcggtgtcccgcagatcgaggtcaccttcgacatcgacgccaacggcatcgtgcacgtcaccgccaaggacaagggcaccggcaaggagaacacgatccgcatccaggagggctccggcctgtccaaggaggagatcgaccggatgatcaaggacgccgaggcgcacgccgacgaggaccgcaagcggcgtgaagaggccgacgtccgcaaccaggcagagacgctggtctaccagacggagaagttcgtcaaggaacaacgcgaagccgagggcggcagcaaggtccccgaggacgtgttgaccaaggtcgacggcgcgatctccgaggccaagacggcgctcgccggcaccgacatcggcgcgatcaaggcggcgatggagaagctgggcaccgagagccaggcgctcggccaggcgatctacgaggccacccaggccgagcaggccgctggcggtggcgccggtggcgccgacggttcgtccagcagcagcgatgacgacgtcgtggatgccgaggtcgtcgacgatgaccgggagaacaagtga

SEQ ID NO: 48313 - protein, 622 aa, Mycobacterium sp. MCS
MARAVGIDLGTTNSVVAVLEGGDPVVVANSEGSRTTPSVVAFARNGEVLVGQPAKNQAVTNVDRTIRSVKRHMGTDWNTEIDGKKYTAQEISARTLMKLKRDAESYLGEDITDAVITVPAYFNDAQRQATKEAGQIAGLNVLRIVNEPTAAALAYGLDKGEKEQTILVFDLGGGTFDVSLLEIGEGVVEVRATSGDNHLGGDDWDERVVTWLVDKFKASSGIDLTKDKMAMQRLREAAEKAKIELSSSQSTSINLPYITVDADKNPLFLDEQLTRAEFQRITQDLLDRTRQPFQSVIKDAGISVGDIDHVVLVGGSTRMPAVSELVKEMTGGKEPNKGVNPDEVVAVGAALQAGVLKGEVKDVLLLDVTPLSLGIETKGGVMTKLIERNTTIPTKRSETFTTADDNQPSVQIQVFQGEREIASHNKLLGSFELTGIPPAPRGVPQIEVTFDIDANGIVHVTAKDKGTGKENTIRIQEGSGLSKEEIDRMIKDAEAHADEDRKRREEADVRNQAETLVYQTEKFVKEQREAEGGSKVPEDVLTKVDGAISEAKTALAGTDIGAIKAAMEKLGTESQALGQAIYEATQAEQAAGGGAGGADGSSSSSDDDVVDAEVVDDDRENK

SEQ ID NO: 48314 - DNA, 1911 bp, Rubrobacter xylanophilus DSM 9941
  CDS (1)..(1911): transl_table=11
atgggcaagagcatcgggatagaccttgggacgacaaacagctgcgttgccgttctggagggtggggatccggtggtcatcccgaacgcggagggtgagcggaccacgccctctgtcgtggcgtttgacaggaagagcggggagcggcttgtcgggcagcttgcccggcggcaggcggttaccaatcccgagcggacggtctactccataaagcgctttatgggccgccgctacaacgacgtcaagcaggaggccgagcgggtcgggtaccaggtggttcctgggccgcacggggacgtacgcgtccggctcggcgacaaggactactcgccgccggagatctcggcgatgatcctgcagaagctcaagcgggacgcggaggactacctgggcgaggaggtgaccgacgcggtcatcaccgtgccggcgtacttcgaggatgcgcagcgccaggccaccaaggacgctggcaggatcgcggggctcaacgtcaagaggatcatcaacgagcccacggcggccgcgctggcgtacggtctggacaaggagaacgaccagaccatcctcgtcttcgacctgggcggcggtacgttcgacgtctccatcctcgagctgggcgacggcgtcttcgaggtgaaggccacgagcggcaacaaccacctcggcggagacgacttcgacgccaaggtggtcgagtggatcgtggaggagttcaagaaggccgaggggatagacctctccagggacaagatggcgatgcagcggctcgtggaggccgcggagaaggccaagaaggagctctcctccacgacgagcaccaacataaacctgccgttcatcacggccgacgccaacggcccgaagcacctggacctcacgctcacccgggcccagttcaacaagctcaccgcggacctcgtcgaggccaccgccgggccggtgcgccaggcgatgcaggacgcggggctcaagccgggtgacgtggaccaggtgatcctggtcggcggctccacccgtatacccgcggtgcaggagaaggtcaaggagctcacgggcaaggagccgcacaagggcatcaacccggacgaggtggtggccatcggcgcggccatccaggccggggtgctcgccggcgaggtcaaggacgtgctcctgctcgacgtcacgccgctctctttgggcatcgagaccaagggcggcgtgttcaccaagctcatcgagcggaacacgaccattccgacgcgcaagagcgagatcttcaccaccgccgaggacaaccagcagtcggtggagatcaaggtgtaccagggcgagcgcgagatcgcggcgcacaacaagctgatcggcaacttccagctggtcggtatcccgcccgccccgcgcggggtgccgcagatcgaggtgaccttcgacatcgacgccaacggcatcctgaacgtcggggcgaaggacctcggcaccggcaaggagcagaagatcacgataaccgcctccagcgggctctccgaccaggagatagagcagatggtccgcgacgccgaggcccacgccgaggaggaccgcagaaagcgggaggaggcggagatccgcaacaacgcggacaacctcgtctactcggtcgagcgctcgctgaaggaggtcgacggcaaggtggactcctctaccagggaggagatcgagaaggccatcaaggaggccaaggaggcgctcgccggcgacgatatcgaggagataaagcggaagcaggaggcgctgatgtccgcctcccacaagctctcgcaggtcctctaccagcaggcccaggagcagcagcagtccggctcctcgggcggctcctccgatgaggacgtggtggaggacgccgagatcgtcgacgaggaggatgaggagaagcgcgacgacaacaggtag

SEQ ID NO: 48315 - protein, 636 aa, Rubrobacter xylanophilus DSM 9941
MGKSIGIDLGTTNSCVAVLEGGDPVVIPNAEGERTTPSVVAFDRKSGERLVGQLARRQAVTNPERTVYSIKRFMGRRYNDVKQEAERVGYQVVPGPHGDVRVRLGDKDYSPPEISAMILQKLKRDAEDYLGEEVTDAVITVPAYFEDAQRQATKDAGRIAGLNVKRIINEPTAAALAYGLDKENDQTILVFDLGGGTFDVSILELGDGVFEVKATSGNNHLGGDDFDAKVVEWIVEEFKKAEGIDLSRDKMAMQRLVEAAEKAKKELSSTTSTNINLPFITADANGPKHLDLTLTRAQFNKLTADLVEATAGPVRQAMQDAGLKPGDVDQVILVGGSTRIPAVQEKVKELTGKEPHKGINPDEVVAIGAAIQAGVLAGEVKDVLLLDVTPLSLGIETKGGVFTKLIERNTTIPTRKSEIFTTAEDNQQSVEIKVYQGEREIAAHNKLIGNFQLVGIPPAPRGVPQIEVTFDIDANGILNVGAKDLGTGKEQKITITASSGLSDQEIEQMVRDAEAHAEEDRRKREEAEIRNNADNLVYSVERSLKEVDGKVDSSTREEIEKAIKEAKEALAGDDIEEIKRKQEALMSASHKLSQVLYQQAQEQQQSGSSGGSSDEDVVEDAEIVDEEDEEKRDDNR

SEQ ID NO: 48316 - DNA, 1911 bp, Mesorhizobium sp. BNC1
  CDS (1)..(1911): transl_table=11
atggcaaaagttatcggtatcgacctcggaaccaccaattcctgcgtcgccgtgatggatggcaaggacgcgaaggtcattgagaatgcggaaggcgcgcgcaccacgccttcgattgtcgccttcaccgattccgacgagcgcctcgtgggtcagccggccaagcgccaggcggtgaccaatcctgaaaacaccttcttcgcaatcaagcgccttattggccgccggttcgaagatccgatggtcgagaaggacaagaagcttgtcccctataagatcgtaaaggccgacaatggcgacgcctgggtcgaatcccatggcacgaaatattccccctcgcagatttccgcgatgatccttcagaagatgaaggagaccgccgaatcctatctcggcgagaaggtcgagaaagcggtcatcaccgttcccgcctattttaacgacgcccagcgtcaggccaccaaggatgccggcaaaatcgcgggccttgaggtgctccgcatcatcaatgagccgacagcggccgcccttgcctacggcctcgacaagaaggaaggtaagaccatcgccgtctacgaccttggcggcggcaccttcgacatctcgatccttgagatcggcgacggcgtgttcgaggtgaagtcgaccaacggcgacactttcctcggcggcgaggatttcgacatgcggctcgtcaattacctggccgacgagttcaagaaggagcagggcatcgacctgaagaacgacaagctcgcccttcagcgcctgaaagaggctgctgagaaggccaagatcgagctgtcgtcctcctcgcagaccgaaatcaacctgcccttcatcaccgccgatcagactgggccgaagcacctggcgatcaagctcacccgcgccaagttcgagagcctggtggaggacctcgtcacgcgcacgatcgagccttgcagggctgcgctcaaggacgcgggcctctccgccggcgaaattgacgaagtggtgcttgtgggcggcatgacgcgcatgcccaaggtgcaggagacggtgaagaacttcttcggcaaggagccgcacaagggcgtgaacccggacgaggtggttgccatgggtgctgccatccaggcaggcgtgctccagggcgatgtgaaggacgtcctgctgctcgatgtcaccccgctgtcgctgggcatcgagacgctgggcggtgtgttcacgcgcctcatcgaccgcaacacgacgatcccgaccaagaagagccaggtcttctcgaccgccgaggacaatcagaacgcggtgacgatccgcgtcttccagggcgagcgcgagatggcggccgacaacaagctgctcggccagttcgacctcgtgggtatcccgcccgcaccgcgcggcatgccgcagatcgaagtgacctttgacattgacgccaacggcatcgtcaacgtttcggccaaggacaagggcaccggcaaggagcagcagatccgcatccaggcttccggtggtctctccgatgccgagatcgagaagatggtgaaggacgccgaggccaatgctgaagcggacaagaagcgccgcgagacggtcgaggtgaagaatcaggccgaggcgctgatccactccaccgagaaatcgctcaaggactacggagacaaggtctccgaggatgaccgtaaggcaatcgagaatgcgattgccgagcttaagaccgcgaccgaaggcgaagatgccgacgcgatccgggccaagacaaccgcgctcgcggaagcttccatgaagcttggccaggccgtctacgaggcgagccaggcggaaaacgctgcgggcggcaccgaggagaccggcggcgcgaaggatgatgtggttgacgccgatttcgaagaaatcgacgaggacgacaagaagtcggcctga

SEQ ID NO: 48317 - protein, 636 aa, Mesorhizobium sp. BNC1
MAKVIGIDLGTTNSCVAVMDGKDAKVIENAEGARTTPSIVAFTDSDERLVGQPAKRQAVTNPENTFFAIKRLIGRRFEDPMVEKDKKLVPYKIVKADNGDAWVESHGTKYSPSQISAMILQKMKETAESYLGEKVEKAVITVPAYFNDAQRQATKDAGKIAGLEVLRIINEPTAAALAYGLDKKEGKTIAVYDLGGGTFDISILEIGDGVFEVKSTNGDTFLGGEDFDMRLVNYLADEFKKEQGIDLKNDKLALQRLKEAAEKAKIELSSSSQTEINLPFITADQTGPKHLAIKLTRAKFESLVEDLVTRTIEPCRAALKDAGLSAGEIDEVVLVGGMTRMPKVQETVKNFFGKEPHKGVNPDEVVAMGAAIQAGVLQGDVKDVLLLDVTPLSLGIETLGGVFTRLIDRNTTIPTKKSQVFSTAEDNQNAVTIRVFQGEREMAADNKLLGQFDLVGIPPAPRGMPQIEVTFDIDANGIVNVSAKDKGTGKEQQIRIQASGGLSDAEIEKMVKDAEANAEADKKRRETVEVKNQAEALIHSTEKSLKDYGDKVSEDDRKAIENAIAELKTATEGEDADAIRAKTTALAEASMKLGQAVYEASQAENAAGGTEETGGAKDDVVDADFEEIDEDDKKSA

SEQ ID NO: 48318 - DNA, 1899 bp, Cytophaga hutchinsonii ATCC 33406
  CDS (1)..(1899): transl_table=11
atgggaaaaattatcggtatcgacttaggaacaacaaactcatgcgttgcagtaatggaaggcagtgaggcagttgtaattccaaacagcgaaggtaaaagaacaacaccttcaatagtggcgtttcttgaaaatggcgaacgtaaagtaggtgatcctgctaaacgccaggctattaccaaccctacaaacacgatcagttcgattaagcgtttcatgggtaaaaaattcagcgaatcaaaaagtgaagctgaccgtgcaacatacaaattagaagctggcagtaacgatacaccaagagtccgtatcgcagacagacaatatacacctcaggagctttctgcaatgattcttcagaaaatgaagactacagcagaagaatacttaggtcatgaagtaaaagaagcagttattacagtacctgcttatttcaatgatgcagaacgtcaggcaactaaagaagcaggtcagattgctggtttagaagttaaacgtatcatcaatgagcctactgctgctgcgcttgcgtacggtatggataaaaaaggcaaagacatgactgttgcagtattcgatttaggtggcggtacgtttgatgtatctgtacttgaattgggcgacggtgtatttgaagtaaaatctaccaatggtgatgtacacttaggtggtgacaactttgatgaagtgatcattgactggttggctggcgaatttaaatctgaagaaggcctggatctccgtcaggacccgatggcgttacaacgtttgaaagaagctgctgaaaaagctaaaattgaattatcaagttccgcttctacagaaatcaacctgccatacatcatgccggttaatggtatgccaaagcacttagttaaaacattaacaagagcaaaattcgaacaacttgcagatagcttaattaaacgtacgttagatccttgtaagcaggcattgaaagatgcaggtttatcaatcggtcagattgacgaagtaatcctggtaggtggttctacacgtattccaagaattcaggaagaagttgaaaaattcttcggtaaaaaaccttctaaaggtgttaacccggatgaagtagttgcattaggtgctgcgattcaaggtggtgtattaacaggtgaagtaaccgatgtcttattgttagacgttattccattgtctcttggtatcgaaacaatgggtggtgtgttcactaaattgatcgaagcaaacacaacaattccttctaaaaaatctgaggtattctctacggcatctgataatcagccttcggttgaaattcacgtattgcagggtgagcgtgcatttgcaaaggataacagatctatcggacgtttccacttaggcgatattcctcctgctccgcgtaacgttcctcagattgaagttacgtttgatatcgatgcaaacggtatcttaaacgtatctgctaaagataaaggaactggcaaagagcagaaaatccgtatcgaagcatcttcaggtttatctgcggatgaaatcgaacgtatgagaaacgaagcgaaagcaaacgaaggtaaagacagagaagaaaaagagaagattgaaaaaatcaatcaggctgattcaatgatcttccagacagaaaaacaattgaaagagtttggtgacaaactttctgccggaaacaaatctgcgatcgaagcttcgttagaagatttgaaaaaagcgtttgaagcaaaagacatctctgcaattgatacagcaatggctgcgatcaacacggcatggcaggcagcttctcaggaaatgtacagcgctgaacaaggtgctggtcagccaggagcggatgcaggtcagtctggcccttcagacagcgttactgacgttgaatttgaagaagtagacggagacaagaagtaa

SEQ ID NO: 48319 - protein, 632 aa, Cytophaga hutchinsonii ATCC 33406
MGKIIGIDLGTTNSCVAVMEGSEAVVIPNSEGKRTTPSIVAFLENGERKVGDPAKRQAITNPTNTISSIKRFMGKKFSESKSEADRATYKLEAGSNDTPRVRIADRQYTPQELSAMILQKMKTTAEEYLGHEVKEAVITVPAYFNDAERQATKEAGQIAGLEVKRIINEPTAAALAYGMDKKGKDMTVAVFDLGGGTFDVSVLELGDGVFEVKSTNGDVHLGGDNFDEVIIDWLAGEFKSEEGLDLRQDPMALQRLKEAAEKAKIELSSSASTEINLPYIMPVNGMPKHLVKTLTRAKFEQLADSLIKRTLDPCKQALKDAGLSIGQIDEVILVGGSTRIPRIQEEVEKFFGKKPSKGVNPDEVVALGAAIQGGVLTGEVTDVLLLDVIPLSLGIETMGGVFTKLIEANTTIPSKKSEVFSTASDNQPSVEIHVLQGERAFAKDNRSIGRFHLGDIPPAPRNVPQIEVTFDIDANGILNVSAKDKGTGKEQKIRIEASSGLSADEIERMRNEAKANEGKDREEKEKIEKINQADSMIFQTEKQLKEFGDKLSAGNKSAIEASLEDLKKAFEAKDISAIDTAMAAINTAWQAASQEMYSAEQGAGQPGADAGQSGPSDSVTDVEFEEVDGDKK

SEQ ID NO: 48320 - DNA, 1845 bp, Rhodococcus sp. RHA1
  CDS (1)..(1845): transl_table=11
atggctcgtgccgtcggtatcgacctcggtacaacgaactcggtcgtgtctgtgctggaaggcggcgagcccgtagtggtcgccaacgccgaaggttcacgcaccaccccgtcgatcgtcgccttcgccaagaacggtgaggtgctggtcggccagcccgccaagaaccaggccgtcaccaacgtcgatcgcaccatccgctccgtcaagcgccacatcggtaccgactggaacgtggagatcgacggcaagaagtacacgccccaggagatcagcgcgcgcacgctcatgaagctgaagcgcgacgccgaggcgtacctgggtgaggacatcacggacgccgtgatcaccgtccccgcgtacttcgaggacgcccagcgtcaggccacgaaggaagccggccagatcgccggtctcaacgtcctgcgcatcgtcaacgagcccaccgcggccgcactggcctacggcctggacaagggcgacaaggaacagaccatcctggtcttcgacctcggtggcggcaccttcgacgtctcgctgctcgaaatcggcgacggcgtcgtcgaggttcgcgccacgtccggtgacaaccacctcggtggtgacgactgggacgagcgcatcgtcacgtggctcgtcgacaagttcaaggctcagaacggcatcgatctgaccaaggacaagatggcactgcagcgtctccgcgaggctgccgagaaggccaagatcgaactgtcctcgtcgcagagcacgtcgatcaacctgccctacatcaccgtcgacgcggacaagaacccgctgttcctcgacgagcagttgtcccgcagcgagttccagaagatcacgtccgatctcctcgaccgcacccgcgcgccgttccaggccgtgatcaaggacagcggcatcgccgtcaaggacatcgaccacgtcgtgctcgtcggtggttccacccgtatgcccgcagtctccgatctggtgcgcgagctgaccggtggccgtgagcccaacaagggtgtcaacccggacgaggtcgtcgccgtcggcgccgccctgcaggccggtgtcctcaagggcgaggtcaaggacgtgctgctcctcgacgtcaccccgctgtccctcggcatcgagaccaagggtggcgtgatgaccaagctcatcgagcgcaacaccaccatcccgaccaagcgttccgagaccttcaccaccgctgacgacaaccagccttcggtgcagatccaggtgttccagggtgagcgcgaaatcgcctcgcacaacaagctgctcggctcgttcgagctggccgacctgccgcccgccccgcgtggcgtgccgcagatcgaggtcaccttcgacatcgatgccaacggcatcgtgcacgtgaccgccaaggacaagggcacgggcaaggagaacacgatcaagatccaggacggctccggtctgtccaaggaagagatcgagcggatggtcaaggacgccgaggctcacgccgaggaagacaaggcccgccgcgaagaggccgaggtgcgcaaccaggccgagtcgctggtgcaccagaccgagaagttcatcaaggacaacgaggacaaggtgcccgccgacgtcaaggagaaggtcgaggctgccatcaaggaagccaacgacgctctcgcaggcaccgacatcgcggccgtcaagaccgcggtcgagaagctggccaccgagtcgcaggccctcggccaggcgatctacgaggccagtgccgctgaggaagccgccaacaccgacggctccggcgcgaatggtgccgacgacgtcgtcgacgccgaggtcgtggacgagccgtccgactcggagaagaagtga

SEQ ID NO: 48321 - protein, 614 aa, Rhodococcus sp. RHA1
MARAVGIDLGTTNSVVSVLEGGEPVVVANAEGSRTTPSIVAFAKNGEVLVGQPAKNQAVTNVDRTIRSVKRHIGTDWNVEIDGKKYTPQEISARTLMKLKRDAEAYLGEDITDAVITVPAYFEDAQRQATKEAGQIAGLNVLRIVNEPTAAALAYGLDKGDKEQTILVFDLGGGTFDVSLLEIGDGVVEVRATSGDNHLGGDDWDERIVTWLVDKFKAQNGIDLTKDKMALQRLREAAEKAKIELSSSQSTSINLPYITVDADKNPLFLDEQLSRSEFQKITSDLLDRTRAPFQAVIKDSGIAVKDIDHVVLVGGSTRMPAVSDLVRELTGGREPNKGVNPDEVVAVGAALQAGVLKGEVKDVLLLDVTPLSLGIETKGGVMTKLIERNTTIPTKRSETFTTADDNQPSVQIQVFQGEREIASHNKLLGSFELADLPPAPRGVPQIEVTFDIDANGIVHVTAKDKGTGKENTIKIQDGSGLSKEEIERMVKDAEAHAEEDKARREEAEVRNQAESLVHQTEKFIKDNEDKVPADVKEKVEAAIKEANDALAGTDIAAVKTAVEKLATESQALGQAIYEASAAEEAANTDGSGANGADDVVDAEVVDEPSDSEKK

SEQ ID NO: 48322 - DNA, 1881 bp, Rhodococcus sp. RHA1
  CDS (1)..(1881): transl_table=11
atggcgaccgctgtgggaatagacctaggcaccaccaactcggttatcgcaagctggcaaggcggcgagccggtggtgatctccaatgtcgagggagcgcggacgacgccgtcggtggtggcgttcaccgagagcggtgaacgcctagtgggtcagcttgcccgacggcaggcgatcttgaatccgaagggcacgatctactcggcgaaacgcttcatcggacgccattacgacgagatctccgaggaggccaaagcggtcagcttcgacgtcgtgccgggtgacaacggtgaggcccgattcgacgtgcggggaaagaagtacgcgccggaggagatcagtgccctcgtgctgcgcaagctcgtcgacgacgcgagcaagttcctcggtgaaaaggtcaaggaagcggtcatcaccgttccggcctacttcaacgacgcgcagcgcaacgccaccaaggacgccggccggatcgcaggcctcgaggttttgcggatcatcaacgagccgaccgctgcggcactggcgtacggcatggacaagcagacccacgaaaccgtactggtcttcgacctcggtggcggcaccttcgatgtgagcctgctcgacgtcggcgagggagtagtcgaggttcgttccacggccggcgactcccacctcggcggcgacgacttcgaccgacgcctggtggactacctcgccgacgaattccagcgtgcggagaatatcgatctgcgcaaggatgcgcaggcgttgcagcgcctcttcgaggccgcggagaaagccaaggtcgagttgtcctcggtgacacaggcccaggtcaacttgcccttcgtcaccgctgacgcgaacggtcccaagcacctcaccaccacgatcatgcggtcgaagttcgaggatctgacggcggatctggtggaacgctgcctcgacccggtgaagcaggcgatgagtgacgccaaggtcaccgccaacgacatcgacgaggtgatcctggtcggtggttcgacacgtattccggcggtgcaggcgctggttcgccggctcaccggcggtaaggacccccacatgggcgtcaacccggacgaggtcgtggcgctcggtgccgcagtccaggcgggcgtgctcaagggcgaggtctccgatgtgctgttgctcgatgtcaccccgctgtccctcggcgtcgagacgcagggcggggtgatgaccaagatcatcgagcgcaacacgacgatcccggcccggcgcagcgaagtgttctccacggcggaggacaatcagtccgccgtcgacgtcgtggtgctgcagggcgaacgcgaacgagccgccgacaaccgggtgctcggccggttccggctggaagacatccgccccgcgccgcgtggcgaggcccaagtcgaagtcactttcgatatcgacgccaacggcatcctcaacgtcaccgcccgcgacaaggacaccggcaaggagcagagcatcacgatcagtgagcagggcaacctggacaccagtgaggtcgagcgcatgctggcagaggccgaacggaaccggggtgaggacgaggagctgcgcaaagcggtcgacgcacgcaacgcgctcgattcggttgcatatcaagtggaacggcgactcgccgaactcggtgacagtgcgccaccgcacgacaaggcgcgggccgagatgctgatcgccgacgccaggaaggccgtgaaagacggtgcttcacccgcggaggtagagccactcacctcggagctgcagcagctgctctacgggctaacgccggtccaggacggcggcgacggacatcaggctggaggcgcagaggctgcgtcgtcggatgacgacgacgtgatcgacgccgaattcgatcgaagctga

SEQ ID NO: 48323 - protein, 626 aa, Rhodococcus sp. RHA1
MATAVGIDLGTTNSVIASWQGGEPVVISNVEGARTTPSVVAFTESGERLVGQLARRQAILNPKGTIYSAKRFIGRHYDEISEEAKAVSFDVVPGDNGEARFDVRGKKYAPEEISALVLRKLVDDASKFLGEKVKEAVITVPAYFNDAQRNATKDAGRIAGLEVLRIINEPTAAALAYGMDKQTHETVLVFDLGGGTFDVSLLDVGEGVVEVRSTAGDSHLGGDDFDRRLVDYLADEFQRAENIDLRKDAQALQRLFEAAEKAKVELSSVTQAQVNLPFVTADANGPKHLTTTIMRSKFEDLTADLVERCLDPVKQAMSDAKVTANDIDEVILVGGSTRIPAVQALVRRLTGGKDPHMGVNPDEVVALGAAVQAGVLKGEVSDVLLLDVTPLSLGVETQGGVMTKIIERNTTIPARRSEVFSTAEDNQSAVDVVVLQGERERAADNRVLGRFRLEDIRPAPRGEAQVEVTFDIDANGILNVTARDKDTGKEQSITISEQGNLDTSEVERMLAEAERNRGEDEELRKAVDARNALDSVAYQVERRLAELGDSAPPHDKARAEMLIADARKAVKDGASPAEVEPLTSELQQLLYGLTPVQDGGDGHQAGGAEAASSDDDDVIDAEFDRS

SEQ ID NO: 48324 - DNA, 1848 bp, Rhodococcus sp. RHA1
  CDS (1)..(1848): transl_table=11
atggctcgcgcggtgggaatcgatttggggaccacgaactcggtggtgtgcgtgctcgagggcggcgacccggtggtggtcgccaactcggaaggttcgcgcacgacaccgtcggtggtggcgttcgcgaagaacggtgaggtgctggtcggccagcccgccaagaaccaggcggtgacgaacgtggaccggacggtgcgatcggtgaaacgggagatcggcaccgactggcatgtggcgatcgacgacaagaagtacagcgctcaggagatcagcgcgcgcacgctcatgaagctgaagcgcgacgccgaggcgtacctgggtgaggacatcacggacgccgtgatcaccgtccccgcgtacttcgaggacgcccagcgtcaggccacgaaggaagccggccagatcgccggtctcaacgtcctgcgcatcgtcaacgagcccaccgcggccgcactggcctacggcctggacaagggcgacaaggaacagaccatcctggtcttcgacctcggtggcggcacgttcgacgtctcgctgctcgaaatcggcgagggcgtcgtcgaggttcgcgccacgtccggtgacaaccacctcggtggtgacgactgggacgaccggatcgtgaagtggctggccgacaagttcaaggctcagaacggtatcgatctgaccaaggacaagatggctctgcagcgtctccgcgaggctgccgagaaggccaagatcgaactgtcctcgtcgcagagcacgtcgatcaacctgccctacatcaccgtcgacgcggacaagaacccgctgttcctcgacgagcagttgtcccgcagcgagttcgagaagatcacgtccgatcttctcgaccgcacccgggccccgttccaatcggtgatcaaggacgcgaagatctccgtcaaggacatcgaccaagtcgtgctcgtcggtggctccacccgtatgccggccgtgacgaatctggtgcgcgagctgaccggcgggaaggaaccgaacaagggtgtcaacccggacgaggtcgtcgccgtcggcgccgccctgcaggccggtgttctcaagggcgaggtcaaggatgtgctgctcctcgacgtcaccccgctgtccctcggcatcgagaccaagggtggcgtgatgaccaagctcatcgagcgcaacaccaccatcccgaccaagcgttccgagacgttcaccaccgctgacgacaaccagccttcggtgcagatccaggtgttccagggtgagcgcgaaatcgcctcgcacaacaagctgctcggctcgttcgagctggccgggattccgccggcaccgcggggggtgccgcagatcgaggtcaccttcgacatcgacgccaacggcatcgtgcacgtgaccgccaaggacaagggcacgggcaaggagaacacgatcaagattcaggagggttccggtctgtcgaaggaagagatcgaccggatgatcaaggacgccgaggctcacgctgccgaggacgcccaacgcagggaggaagcggaggtgcgcaaccaggccgagtcgctggtgtaccagaccgagaagttcatcaaggacaacgaggacaaggtgcccgccgacgtcaaggagaaggtcgagtcgtcgatcacgaatgcccaggagaagttgaagggcagcgacgtcacggccatcaaagaggccatcgagaaactgaccaccgactcgcaagctttgggccaggcgatctacgacgcgcaggcgaaggactcggccgccaccggcggtgggaacggttcctcgggaggggccgaggaggtcttcgacgctgaggtggtggacgaacccggacgggaggacaaccgatga

SEQ ID NO: 48325 - protein, 615 aa, Rhodococcus sp. RHA1
MARAVGIDLGTTNSVVCVLEGGDPVVVANSEGSRTTPSVVAFAKNGEVLVGQPAKNQAVTNVDRTVRSVKREIGTDWHVAIDDKKYSAQEISARTLMKLKRDAEAYLGEDITDAVITVPAYFEDAQRQATKEAGQIAGLNVLRIVNEPTAAALAYGLDKGDKEQTILVFDLGGGTFDVSLLEIGEGVVEVRATSGDNHLGGDDWDDRIVKWLADKFKAQNGIDLTKDKMALQRLREAAEKAKIELSSSQSTSINLPYITVDADKNPLFLDEQLSRSEFEKITSDLLDRTRAPFQSVIKDAKISVKDIDQVVLVGGSTRMPAVTNLVRELTGGKEPNKGVNPDEVVAVGAALQAGVLKGEVKDVLLLDVTPLSLGIETKGGVMTKLIERNTTIPTKRSETFTTADDNQPSVQIQVFQGEREIASHNKLLGSFELAGIPPAPRGVPQIEVTFDIDANGIVHVTAKDKGTGKENTIKIQEGSGLSKEEIDRMIKDAEAHAAEDAQRREEAEVRNQAESLVYQTEKFIKDNEDKVPADVKEKVESSITNAQEKLKGSDVTAIKEAIEKLTTDSQALGQAIYDAQAKDSAATGGGNGSSGGAEEVFDAEVVDEPGREDNR

SEQ ID NO: 48326 - DNA, 1884 bp, Rhodococcus sp. RHA1
  CDS (1)..(1884): transl_table=11
atggcacgggcggtgggaatcgacctgggcaccacgaactcggtggtgtgcgtgctcgagggcggcgacccggtggtggtcgccaactccgagggctcacgcacgacaccgtcggtggtggcgttcgcgaagaacggtgaggtgctggtcggccagcccgccaagaaccaggcggtgacgaacgtggaccggacggtgcggtcggtgaaacgggagatcggcaccgactggcatgtcaagatcgacgacaagaactacaccgcgcaggagatcagcgcccgggtgctgatgaaactcaagcgggacgcggaatcgtatctgggtgaggacatcaccgacgccgtgatcaccgtccccgcctacttcaacgacgcccagcgtcaggccacgaaagaagccggccagatcgccgggctgaacgtgctgcggatcatcaacgagcccaccgcggccgccctggcctacggcctcgacaagggcgaaaaggaacagaccattctggtcttcgacctcggtggcggcaccttcgacgtctcgctgctcgaaatcggcgagggcgtcgtcgaagtccgggccacctccggtgacaaccacctcggtggtgacgactgggacgaccggatcgtgaagtggctggccgacaaattcaaggcgagcagcggattcgatctgaccaaggacaagatggcgatgcagcgactgcgggaggccgcggagaaggccaagatcgaactgtcctcctcgcagagcacgtcgatcaacctgccctacatcaccgtcgacgcggacaagaacccgctgttcctcgacgagcagctctcccgcagcgagttcgagaagatcacctccgacctgttggaccgcacccgggccccgttccaatcggtgatcacggacgcgaagatctccgtgggcgacatcgaccacgtggtgctcgtcggtggttccacccggatgcccgcggtgacgaatctggtgcgcgagttgaccggtgggaaggaaccgaacaagggtgtcaacccggacgaggtcgtcgccgtcggtgccgccctgcaggccggtgtcctcggcggtgaggtcaaggacgtgttgctcctcgacgtcaccccgctctcgctcggtatcgagaccaagggtggggtgatgaccaagctgatcgagcgcaacaccaccatcccgaccaagcggtcggagaccttcaccaccgcggacgacaaccagccttcggtgcagatccaggtgtatcagggtgagcgtgaaatcgcctcgcacaacaagctgctcggctcgttcgagctgaccgggattccgccggccccgcggggggtgccgcagatcgaggtcaccttcgacatcgacgccaacggcatcgtgcacgtgaccgcgaaggacaagggcaccgggaaggagaacacgatccggatccaggaagggtcggcgctgtcgaaggaggatatcgaccggatgatccgcgacgccgaggcgcacgccgccgaggacagccgccgccgggaggaggccgagacccgcaaccaggccgagtcgctggtgtaccagaccgagaagttcatcaaggacaacgaggacaaggtgcccgccgacgtcaaggacaaggtccagtccgcgatcaagaacgtccaggacgcgttggccggcaccgacatcggcgcggtgaagaccgcagtggagaaactgggcaccgagtcccaggccctcggccaggccatctatgccgcccaggccgcctcggaaggcgggacgggcgggggcgacggcggcgccggcgcggccgccggagcgggtgcgtcggggaacgggcagggcgccgacgacgaggtcgtcgacgccgaggtggtggacgaaccccgggagggacaccgatga

SEQ ID NO: 48327 - protein, 627 aa, Rhodococcus sp. RHA1
MARAVGIDLGTTNSVVCVLEGGDPVVVANSEGSRTTPSVVAFAKNGEVLVGQPAKNQAVTNVDRTVRSVKREIGTDWHVKIDDKNYTAQEISARVLMKLKRDAESYLGEDITDAVITVPAYFNDAQRQATKEAGQIAGLNVLRIINEPTAAALAYGLDKGEKEQTILVFDLGGGTFDVSLLEIGEGVVEVRATSGDNHLGGDDWDDRIVKWLADKFKASSGFDLTKDKMAMQRLREAAEKAKIELSSSQSTSINLPYITVDADKNPLFLDEQLSRSEFEKITSDLLDRTRAPFQSVITDAKISVGDIDHVVLVGGSTRMPAVTNLVRELTGGKEPNKGVNPDEVVAVGAALQAGVLGGEVKDVLLLDVTPLSLGIETKGGVMTKLIERNTTIPTKRSETFTTADDNQPSVQIQVYQGEREIASHNKLLGSFELTGIPPAPRGVPQIEVTFDIDANGIVHVTAKDKGTGKENTIRIQEGSALSKEDIDRMIRDAEAHAAEDSRRREEAETRNQAESLVYQTEKFIKDNEDKVPADVKDKVQSAIKNVQDALAGTDIGAVKTAVEKLGTESQALGQAIYAAQAASEGGTGGGDGGAGAAAGAGASGNGQGADDEVVDAEVVDEPREGHR

SEQ ID NO: 48328 - DNA, 1917 bp, Trichodesmium erythraeum IMS101
  CDS (1)..(1917): transl_table=11
atggcaaaagtagtcggaattgatttaggcacaacaaactcttgtgttgcagttatggaaggtggtaagcctacagttatagctaatgcagaaggttttcgtacaacgccttcggtagtagcttatggcaaaaaagaagaacaactggtaggtcaaattgccaagcgtcaagcggtgatgaacacccaaaatactttctattcggtaaagcggtttatcgggcgtaaatttgatgaagtaacccatgaaaccactgaagtttcctataaagttctcaacattaacggtaacgttaaattagattgccaagcactaaaaaaacaatttgcctctgaagaaatttcagcccaagtacttcgtaaactaatagatgatgctagtaaatatcttggtgaacaagtaacgcaagccgtaattaccgtacctgcttacttcaatgactcccaaagacaagcaaccaaggatgctggtaaaattgctggtgtagaagtactgcgaattatcaacgaaccaacagcagcttctctagcttatggtttagataaaaaaagtaacgaaactattttagtatttgaccttggtggtggtacattcgacgtttctattctagaagtgggtgatggtgtctttgaagtattagctacttctggtgatactcaccttggtggtgatgactttgataagaaaattgttgattatctcgctgcagaattcaacaaagtagaaggcattgatctgcgtaaagataaacaagcactacaacgtttaacagaagcagcagaaaaagctaagattgaactttctagtgttacccaggcagaaattaacttaccatttattactgctactcaagatgggcccaagcatttagatctaactcttactagagctgaatttgaaggtctatgttccgacctcattgatcgctgtcgtattcctgtagaaaatgccattcgggatgcgaagttagataaaaaagccatcgatgaagtagtattggttggtggttccactcgaattccagcagttcaagaaatagtcaaaaaagtcctaggtaaagaaccaaatcaaagtgttaaccctgatgaagttgtagctgttggagctgctattcaagctggtgtgttagcaggtgaagttaaagatattctcttattagatgttactcctctatctctgggtgtggaaactcttggtggagtaatgaccaaaattattccgcgcaacactactattcctactaaaaaatcagaagtattttcaactgctgtagatggtcagacaaatgtagaaattcatgtactgcagggcgaacgagaaatgtctagcgataacaagagtctgggaactttccgcttagatggtatccccgcagcacctcgtggcgtacctcaaattgaagttacctttgatattgatgctaatggtattctgaatgtaactgcgaaggataaaggtactggaaaagaacaatctattagtattacaggtgcttcgactcttcctgatacagaagtcgatcggatggttaaagaagcagaagcaaatgctactgcagacaaagagcgccgtgataaaattgaccgtaagaaccaagctgactctctagcatatcaggctgagaagcaaattcaggagttgggggataaggttcctgaagcggataagactaaaattgaaggcttgattaaagacttgcgcgatgctgtcgctcaagaagacgatgagaagattacttctctgactactgagttacaacaagctctctacagtgttagcagcaatatgtatcaacaatctggtggtgcacctggtgaaggttctacaccaaatagtgatgctggttctggtgcttcttcttcaaatgctacaggtggagatgatgtaattgatgctgattttactgaaacaaagtaa

SEQ ID NO: 48329 - protein, 638 aa, Trichodesmium erythraeum IMS101
MAKVVGIDLGTTNSCVAVMEGGKPTVIANAEGFRTTPSVVAYGKKEEQLVGQIAKRQAVMNTQNTFYSVKRFIGRKFDEVTHETTEVSYKVLNINGNVKLDCQALKKQFASEEISAQVLRKLIDDASKYLGEQVTQAVITVPAYFNDSQRQATKDAGKIAGVEVLRIINEPTAASLAYGLDKKSNETILVFDLGGGTFDVSILEVGDGVFEVLATSGDTHLGGDDFDKKIVDYLAAEFNKVEGIDLRKDKQALQRLTEAAEKAKIELSSVTQAEINLPFITATQDGPKHLDLTLTRAEFEGLCSDLIDRCRIPVENAIRDAKLDKKAIDEVVLVGGSTRIPAVQEIVKKVLGKEPNQSVNPDEVVAVGAAIQAGVLAGEVKDILLLDVTPLSLGVETLGGVMTKIIPRNTTIPTKKSEVFSTAVDGQTNVEIHVLQGEREMSSDNKSLGTFRLDGIPAAPRGVPQIEVTFDIDANGILNVTAKDKGTGKEQSISITGASTLPDTEVDRMVKEAEANATADKERRDKIDRKNQADSLAYQAEKQIQELGDKVPEADKTKIEGLIKDLRDAVAQEDDEKITSLTTELQQALYSVSSNMYQQSGGAPGEGSTPNSDAGSGASSSNATGGDDVIDADFTETK

SEQ ID NO: 48330 - DNA, 2013 bp, Trichodesmium erythraeum IMS101
  CDS (1)..(2013): transl_table=11
atgggcaaagtagttggcatagacctgggtacaacaaactccgttgtttccgttatggaaggaggaaaaccaatagtgatagctaacttagaaggaatgcggacaacaccatctgtagttggcttcacaaaggaaggagaacgaatagttggacaaatggccagaaggcaaatagttctgaatccccagaacaccttctacggagtcaaacgatatattggacgtaaatactctgaactatcaccagaatcaaagcgcgttccatatacaattcgccgggacgaatacggcaatatcaaaatcaaatgtccccgaatgaaacgagattttgctcctgaagaactatcagctatgatactgcggaaactagcagatgaagcaagtcgttatctgggagaagaggtaacaggagcagtaattactgtaccagcatattttaatgactcccaaagacaagctactcgcgatgcagggactattgcgggcttagaagtgaaacgtattttgaatgaaccaacggcagcatctttggcctatggattagaaagtacagaaaatcagttaattctagtttttgacttaggtggaggtacatttgatgtttcaattttagaagtaggagatggagtatttgaagtcaaggctaccagtggagatactcaattagggggtaatgactttgaccaaagagtggttgactggttagctgaacaatttctagagtcagaaggaatagacttaaggaatgaccgtcaagctctacaaagactgactgaagctgccgaaaaagccaaaattgaattatctggggttggggtaacagaggttaatcttccctttattactgctacagaagatggccctaagcatctggaaactaggttgactagatcccaatttgaaggactttgtgaagatttagtttctagaatccgacgtcctgtaaaaatggccttaaaagatgctagtattaatccctctatgattgatgaagtagtattagtaggtggttcaactcgtattccttttgtccaagacttagtttattctcttatagatagagaagcaaatcagggagtgaaccctgatgaggttgtggcggtaggagcggctattcaggctggtattttagctggtgatgtgcgagatgtgctgcttttggatgttactccattgtctgtgggtttagaaactattgggggggtgatgaaaaaacttattcctcggaatactactattccagtcagacgttctgatatcttttctactgcagaaaataatcagactttagttgagattcatgtgattcagggagaacgagaaatagctgctgataataagtctcttggaaaatttaagcttactggtattccccctgcaccacgaggtgtgccacaggtgcaagtatcttttgatgttgatgctaatggtattttgcaggtgacggcaatggataagactactggtagaactcaaagtattactattcaaggagcttctactttaagtcagcaggaaattactcagatgattcaggatgcggaaaaatttgctgaagcagacagacttaaacgggagcaagtggacaagcgtaaccgggctgaggctttggcctttcaggcagaacgaaaactgcgagaggtagccttggattatggtatgcagtttgcagccagaagtcgtcaacgcattgagatgttgattagggagctgcgggatagtttggaacgggatgatgaacggggtattgatcgggtaggagttgacttacaagatgctctctacgatctcaaacgtgaggtttcaatttatacctcctctgaaaatgatgataacttctttggctctgtgcgccggacaatatctggcgaagagcgtaaccctagggatagggaacgttatgattatgaaagtagggtttatagtcgtcctcctgatcgagttagttctaatcgagctaatcgttattatcaaagtcaagattgggatgatgatgatgatgattggctataa

SEQ ID NO: 48331 - protein, 670 aa, Trichodesmium erythraeum IMS101
MGKVVGIDLGTTNSVVSVMEGGKPIVIANLEGMRTTPSVVGFTKEGERIVGQMARRQIVLNPQNTFYGVKRYIGRKYSELSPESKRVPYTIRRDEYGNIKIKCPRMKRDFAPEELSAMILRKLADEASRYLGEEVTGAVITVPAYFNDSQRQATRDAGTIAGLEVKRILNEPTAASLAYGLESTENQLILVFDLGGGTFDVSILEVGDGVFEVKATSGDTQLGGNDFDQRVVDWLAEQFLESEGIDLRNDRQALQRLTEAAEKAKIELSGVGVTEVNLPFITATEDGPKHLETRLTRSQFEGLCEDLVSRIRRPVKMALKDASINPSMIDEVVLVGGSTRIPFVQDLVYSLIDREANQGVNPDEVVAVGAAIQAGILAGDVRDVLLLDVTPLSVGLETIGGVMKKLIPRNTTIPVRRSDIFSTAENNQTLVEIHVIQGEREIAADNKSLGKFKLTGIPPAPRGVPQVQVSFDVDANGILQVTAMDKTTGRTQSITIQGASTLSQQEITQMIQDAEKFAEADRLKREQVDKRNRAEALAFQAERKLREVALDYGMQFAARSRQRIEMLIRELRDSLERDDERGIDRVGVDLQDALYDLKREVSIYTSSENDDNFFGSVRRTISGEERNPRDRERYDYESRVYSRPPDRVSSNRANRYYQSQDWDDDDDDWL

SEQ ID NO: 48332 - DNA, 1881 bp, Synechococcus sp. CC9311
  CDS (1)..(1881): transl_table=11
atgacaaaagtaattggcattgacttgggcacgactaacagttgtgcatctgtgatggaaggtggaacccccaccgtgatcgccaatgcagaaggatttagaacaacaccctctgtggtggcctacaccaagagcaaagagcaattagtcggccaaatcgctaaacgtcaagcggtgatgaatccagagaatacctttggatcagttaaacgctttattggaaggcgatcggatgaagtagcgacggaaaccaaagatgttccctacaccgtggaaacggttggaacaaaggtcaagatcaaatcagcatggatggagaagtcattttcacctgaggagatcagcgccagtgtgcttagaaaactcgctgatgacgcttcgaagtatctaggtcaagccgtgactcaagcggtagtcactgttcccgcttacttcaatgactcccagcgtcaggccacaaaagatgctggaaaaatcgctggtttagaggttctaagaatcatcaacgaacccactgctgcagctcttgcctacgggtttgacaaaaaagatgcagagaaaatcctggtctttgacctcgggggtggaacttttgatgtctccatcctggaagtaggagatggtgtcttcgaagtgatcagcacctgtggagacgcacaccttggaggagataacttcgacaaagtgcttgtggatcacatggctgacaccttccagaaagcggagggtatagatctcaggaaagatgcacaagccctacaacgcctcaccgaggcagctgaaaaagcaaagatcgaactctcttcttccacacagagcgaagtcaatctgcctttcataacagcaacagcggatgggccaaagcatctaacgatgacagtgacacgagggaaatttgaggagttgtcttcaaacctgattgaccgatgtaagaaaccaattcaacaggcgatgcaagacgccaatctctccaagagtgacctgaacgaagtagtcatggttggtggtagttcacggattcctgcagtcctagaactcgtcaaagttgctacaggccaagatccaaatcagaccgtaaatcctgatgaggtggttgccattggtgctgctgttcagggaggtgtgctctcaggcgaggtgaaagacattcttttactggatgtcacacctctctcattgggtgtggaaacaatgggtagcgtggtgaatgtaatggttcctcgaaacacaaccattcctacgaacaaaactgagatttattccacagcaatggatggtcaaacaacagtagaaatacacattatccaaggtgagcgccagatggtatctgacaacaagagccttggaaccttccgtttagatgggatccctgctgccccacgtggtgtccctcaagtagaagtagcctttgacattgatgcgaatggcatcctgagtgtcacagctaaggacaaaggatcaggcaaggaacaatcaatcacaatcactggtgcctcaacgcttagtgaaagcgaggtaaatcgaatggtgaaggacgcagaagcgaacgctgaatcagatcagcaaaagcgggaagcgatcgacaccaaaaaccaagcggaatcagtgatttatcaagctgagaagcaattactggaattagaaaacaaggtcacccctgagtccaggaccaaagtggagttagttctttctgaactcaaagaaacgcttcaaacagacaacacacaacacatccaagaccgtattgaaggagtgaaaactgcattgatggaaatgggtgccactctgcactctcaacaagacggagcccctcaagcttcagaagaaaacaatgagagcgatgatgtgatcgatgctgaatttgtcgaatcacccaagtaa

SEQ ID NO: 48333 - protein, 626 aa, Synechococcus sp. CC9311
MTKVIGIDLGTTNSCASVMEGGTPTVIANAEGFRTTPSVVAYTKSKEQLVGQIAKRQAVMNPENTFGSVKRFIGRRSDEVATETKDVPYTVETVGTKVKIKSAWMEKSFSPEEISASVLRKLADDASKYLGQAVTQAVVTVPAYFNDSQRQATKDAGKIAGLEVLRIINEPTAAALAYGFDKKDAEKILVFDLGGGTFDVSILEVGDGVFEVISTCGDAHLGGDNFDKVLVDHMADTFQKAEGIDLRKDAQALQRLTEAAEKAKIELSSSTQSEVNLPFITATADGPKHLTMTVTRGKFEELSSNLIDRCKKPIQQAMQDANLSKSDLNEVVMVGGSSRIPAVLELVKVATGQDPNQTVNPDEVVAIGAAVQGGVLSGEVKDILLLDVTPLSLGVETMGSVVNVMVPRNTTIPTNKTEIYSTAMDGQTTVEIHIIQGERQMVSDNKSLGTFRLDGIPAAPRGVPQVEVAFDIDANGILSVTAKDKGSGKEQSITITGASTLSESEVNRMVKDAEANAESDQQKREAIDTKNQAESVIYQAEKQLLELENKVTPESRTKVELVLSELKETLQTDNTQHIQDRIEGVKTALMEMGATLHSQQDGAPQASEENNESDDVIDAEFVESPK

SEQ ID NO: 48334 - DNA, 1914 bp, Synechococcus sp. CC9311
  CDS (1)..(1914): transl_table=11
atgggcaaggttgtcggcattgatttaggtaccaccaacagttgtgtctcggtgatggagggcggcaagcccaccgtgatcgccaatgctgagggcttccgcaccactccatcggtggtggcctacacaaaaaatcaggatcagctggtcggtcagatcgcaaagcgccaagcggtgatgaacaccgacaacacgttttattccgttaagcgcttcattggtcgccgcgttgatgaggtcaacgaggaatcgaaagaggtgagctacggcgttgaaaaggccggctccaatgtgaaggtcaagtgccccgttctcgataagcagttcgctcctgaagaggtgagcgctcaggtgctgcgcaaactggctgaagatgctggtaagtacctcggtgaaaccgtgacccaagcggtcattaccgttcccgcttacttcaacgattctcagcgccaggccacaaaagacgccggaaagatcgccggccttgaagtgctgcgaatcatcaacgagcccacagctgcagcgttggcctacggcctcgataaaaagagcaacgaacgcatcctcgtgttcgaccttggaggcggcacctttgacgtgtctgtgctggaagtgggagatggagtgtttgaagtgctctccacttcgggagatacgcacctaggtggtgatgatttcgacaaggtgattgttgatcacctggccgaaagcttcaaatccaacgaaggaatcgatcttcgtcaggacaagcaggctttgcagcgtctcaccgaagccgctgagaaggcgaaaattgagctttcgagcgcgactcagagcgaaatcaatctgccctttattacggcgaccccggaaggacctaagcatctcgatctcaccctcacgcgcggcaagtttgaagagctggcttccacgttgatcgatcgttgccgcatcccggttgagcaggctctgaaagacgccaagctttcatcgagtgagcttgacgagattgtgatggtgggtggttccactcggatcccggctgtgctcgagctcgtgaagcgcaccaccggaaaggaccccaaccaaaccgtgaaccctgatgaggtggtggcgatcggagccgccatccaaggcggtgtgttggctggtgaagtcaaggacatcctgttgctggatgtcacacccctatccctaggcgtcgagacgctgggtggggtgatgacgaaaatgatcacgaggaacaccaccgtcccaaccaaaaaatcagagacctactccactgctgtggatggtcaaaccaacgttgaaattcacgtgctccagggtgagcgcgagatggcttccgataacaagagtctcggtaccttccgtctggatggcatcccatccgcccctcgtggcgttcctcagatcgaagtcacgtttgacattgatgccaatggcattttgagtgtcacagccaaggacaagggcagcggcaaagagcagtcgatttcgatcaccggagcctccaccctctctgacaatgaagtggagaagatggtgaaggatgctgagagcaatgccagcgctgataaggagaagcgggagaagatcgacctgaagaatcaggctgaaaccctcgtgtatcaggccgaaaagcaactggctgaacttggcgacaaagttgatgccgaggccaagtccaaggttgaagagaagtccaccaagctcaaggaagccactgaaaaagaagactttgagtcgatgaagtctctccttgaggagctacagcaggagctttatacggttggtgcttctgtttaccaacaggctggtgcagaagcagcagcttctggtgaagagggtgcagcagctggcaactccggggatggatctagcaatgctggagatgatgttatcgatgctgaatttactgaaaccaagtaa

SEQ ID NO: 48335 - protein, 637 aa, Synechococcus sp. CC9311
MGKVVGIDLGTTNSCVSVMEGGKPTVIANAEGFRTTPSVVAYTKNQDQLVGQIAKRQAVMNTDNTFYSVKRFIGRRVDEVNEESKEVSYGVEKAGSNVKVKCPVLDKQFAPEEVSAQVLRKLAEDAGKYLGETVTQAVITVPAYFNDSQRQATKDAGKIAGLEVLRIINEPTAAALAYGLDKKSNERILVFDLGGGTFDVSVLEVGDGVFEVLSTSGDTHLGGDDFDKVIVDHLAESFKSNEGIDLRQDKQALQRLTEAAEKAKIELSSATQSEINLPFITATPEGPKHLDLTLTRGKFEELASTLIDRCRIPVEQALKDAKLSSSELDEIVMVGGSTRIPAVLELVKRTTGKDPNQTVNPDEVVAIGAAIQGGVLAGEVKDILLLDVTPLSLGVETLGGVMTKMITRNTTVPTKKSETYSTAVDGQTNVEIHVLQGEREMASDNKSLGTFRLDGIPSAPRGVPQIEVTFDIDANGILSVTAKDKGSGKEQSISITGASTLSDNEVEKMVKDAESNASADKEKREKIDLKNQAETLVYQAEKQLAELGDKVDAEAKSKVEEKSTKLKEATEKEDFESMKSLLEELQQELYTVGASVYQQAGAEAAASGEEGAAAGNSGDGSSNAGDDVIDAEFTETK

SEQ ID NO: 48336 - DNA, 2016 bp, Alkalilimnicola ehrlichei MLHE-1
  CDS (1)..(2016): transl_table=11
atggcagcccggcgccgcgccggggcagggtccacggacaacagcattcaggagcattttatgagtaagatcatcggcatcgacctgggcaccaccaactcctgcgtggccgtcatggacggtggcagcacccgggtcatcgagaacagcgagggcgatcgcaccaccccctcggtggtggccttcgccgaagacggcgaggtgctcaccggcgcgccggccaagcgccaggcggtgaccaacccggaaaacaccgtgtttgcggtgaagcgcctgatcggccgccgcttcgaagaggacgtggtgcagcgcgacgtgcgcgagatgccctacaagatcgtcaaggccgataacggggacgcctgggtggaggtgcgcggcaagaagatggcgccgccggagatctccgcccgcaccctgcagaagatgaaaaagaccgccgaggactacctgggcgagaccgtcaccgaggcggtcatcactgtcccggcctacttcaacgactctcagcgccaggccaccaaggacgccggtaagatcgccgggctggaggtcaagcgcatcatcaacgagcccaccgcggcggccctggcctacggtctggacaagaagggcggcgatcgcaaggtggccgtctacgacctgggcggcggcaccttcgacatctccatcatcgagatcgccgaggtggacggcgagcaccagttcgaggtgctggccaccaacggtgacaccttcctgggcggcgaggacttcgaccgggcggtcatcgactacctgatcgccgagttcaagaaggaccagggcatcgacctgggcggcgaccgcctggccatgcagcgcctcaaggaggccgctgagaaggccaagattgagctctcgtcggcccagcagaccgaagtgaatctgccctacatcacggccgatcaggccggcccgaagcacctggccatcaagctcacccgggccaagctggagtcgctggtcgagggcctgatcaagcgcaccatcgagccctgcaaggtggccctgaaggatgccggcctgtccgccagcgatgtggacgaggtgatcctggtgggcggccagacccgcatgcccaaggtccaggaggccgtcacccagttcttcggcaaggagccgcgcaaggacgtcaacccggacgaggccgtggccgtgggtgccgccatccagggcggtgtgctgggcggtgacgtcaaggacgtgctgctgctggatgtcaccccgctctccctgggcatcgagaccctgggcggggtgatgaccaagctgatcgagaagaacaccaccatcccgaccaaggcctcgcagaccttctccacggccgaggacaaccagggggcggtgacggtgcacgtgctccagggtgagcgcgagatggccaaggacaacaagagcctgggccgcttcgacctgaccgacatcccgccggcaccgcgcggcgtgccgcagatcgaggtcaccttcgacatcgacgccaacggcatcctgcacgtctccgccaaggacaaggccaccggcaaggagaacaagatcgtcatcaaggcctcctccggtctgtccgaggaggagatcgagaacatggtcaaggacgccgaggcccacgccgaggaggaccgcaaggcgcgcgagttggtggaggcccgcaaccaggccgataacatgatccatgccaccaacaagtcgctgagcgagttcggcgacaagatcgactccggcgagaagcagtccatcgaggaggcgatcaaggagctggaagaggccatgaagggcgatgacaaggaggccatcgaggctaagacccagcagctggccgagcgctccggcaagctggccgagaagatgtacgccgcccagggtggcgaggaggccgcggagcaggcggccggcggcgagcagcagcaggccggtggcagcggcaagtccgaggacgacgtggtcgacgcggagttcgaggaggtcaaggatcaggacgaggacaaggaccgcaagtaa

SEQ ID NO: 48337 - protein, 671 aa, Alkalilimnicola ehrlichei MLHE-1
MAARRRAGAGSTDNSIQEHFMSKIIGIDLGTTNSCVAVMDGGSTRVIENSEGDRTTPSVVAFAEDGEVLTGAPAKRQAVTNPENTVFAVKRLIGRRFEEDVVQRDVREMPYKIVKADNGDAWVEVRGKKMAPPEISARTLQKMKKTAEDYLGETVTEAVITVPAYFNDSQRQATKDAGKIAGLEVKRIINEPTAAALAYGLDKKGGDRKVAVYDLGGGTFDISIIEIAEVDGEHQFEVLATNGDTFLGGEDFDRAVIDYLIAEFKKDQGIDLGGDRLAMQRLKEAAEKAKIELSSAQQTEVNLPYITADQAGPKHLAIKLTRAKLESLVEGLIKRTIEPCKVALKDAGLSASDVDEVILVGGQTRMPKVQEAVTQFFGKEPRKDVNPDEAVAVGAAIQGGVLGGDVKDVLLLDVTPLSLGIETLGGVMTKLIEKNTTIPTKASQTFSTAEDNQGAVTVHVLQGEREMAKDNKSLGRFDLTDIPPAPRGVPQIEVTFDIDANGILHVSAKDKATGKENKIVIKASSGLSEEEIENMVKDAEAHAEEDRKARELVEARNQADNMIHATNKSLSEFGDKIDSGEKQSIEEAIKELEEAMKGDDKEAIEAKTQQLAERSGKLAEKMYAAQGGEEAAEQAAGGEQQQAGGSGKSEDDVVDAEFEEVKDQDEDKDRK

SEQ ID NO: 48338 - DNA, 1896 bp, Hyphomonas neptunium ATCC 15444
  CDS (1)..(1896): transl_table=11
atgagcaagatcatcggcatcgaccttggcaccaccaactcctgcgtggcagttatggaaggcggccaggcgaaggttatcgaaaacgccgaaggcgcccgcaccaccccttcagttgtggccttcaccgaaaacggcgaccgcctgatcggccagcccgcccgccgtcagggcgtgaccaatccggacttcaccttctacgccatcaaacgcctcatcgggcgcacctttgatgatccgaccgcgcagaaggacaaggccatgagccccttcagcatcgtcaaggcccccaatggcgacgcctgggtcaaaggccgcgacaaggattactctccccaggaaatctcggccttcatcctgacgaagatgaaagagaccgccgaagcctatctcggctcgaaggtcacacaggcggtcatcaccgtcccggcctacttcaacgacgcccagcgccaggccacgaaagatgctggccgcatcgccggccttgaagtgctccgcatcatcaacgagccgacggcggccgcccttgcctatggcctcgacaaaggcggcaacaagaccatcgcggtttacgaccttggcggcggcacgttcgacgtctcgctgctcgaaatcggcgacggcgtcttcgaagtgctctccaccaatggcgacaccttcctcggcggtgaagacttcgacctgcgcgtcgtcgacttcctggcttccgagttcaagaaggaacagggcatcgacctgaaaggcgacaagctggccctccagcgcctgaaggaagaagccgagaaagccaagaaagagctctcttcggccacccagtatgaagtgaacctccccttcatcacggcagacgccacaggcccgaaacacctcaacatcaagctgacgcgcgccaagttcgaaagcctggtcgaagacctcgtcaagcgcacgatcgatccctgccagaaggccctcaaggacgctggcaagaccccggcccagatcgacgaagtcgttctcgttggcggcatgacgcgcatgccggccgttcaggaagcggtgaagaagttcttcaaccgcgagccgcataaaggtgtgaacccggatgaagtcgtcgccatcggcgcggcaatccagggcggcgtgctgcaaggcgacgtgaaagacgtggtcctgctcgacgtgaccccgctctcgctcggcatcgaaacccttggcggcatcttcacccgtctgatcgaacgcaacacgacgatcccgacgaagaagtcccaggtcttctcgacggccgaagacaaccagcctgcggtcaccatcaaggtcgcccagggcgagcgcgaaatggcgagcgacaacaaacagctcggccagttcaacctcgaaggcattgccccggccccgcgcggcctgccacagatcgaagtcacctttgacatcgacgccaacggcatcgtctcggtctcggccaaggacaaggccaccggcaaggaacagcagatcaccatccaggcagatggcggcctctccgaagccgacatcaagaacatgatggctgacgctgagtccaacgccagcacggacaaggcccgccgcgaactcgtcgaagcgaaaaaccacgccgaagccctgatccatcagaccgagaagcagctgatcgaacacggcgccaaagtcactgacgccatcaaaggcgatatcgagaaagccatcgctgacctgaaagaggccgctgccggcgacaacgccgccgacatcgccgccaagcatcaggccctgatgaacgccgcgatgaaactcggcgaagccatctacgccgcccagggcgccgacgccggcgaaggcgaagacgcccctcagtccggcaatgacgacgtcgtcgacgccgacttcgaagaagtcgacgagcgcaagtaa

SEQ ID NO: 48339 - protein, 631 aa, Hyphomonas neptunium ATCC 15444
MSKIIGIDLGTTNSCVAVMEGGQAKVIENAEGARTTPSVVAFTENGDRLIGQPARRQGVTNPDFTFYAIKRLIGRTFDDPTAQKDKAMSPFSIVKAPNGDAWVKGRDKDYSPQEISAFILTKMKETAEAYLGSKVTQAVITVPAYFNDAQRQATKDAGRIAGLEVLRIINEPTAAALAYGLDKGGNKTIAVYDLGGGTFDVSLLEIGDGVFEVLSTNGDTFLGGEDFDLRVVDFLASEFKKEQGIDLKGDKLALQRLKEEAEKAKKELSSATQYEVNLPFITADATGPKHLNIKLTRAKFESLVEDLVKRTIDPCQKALKDAGKTPAQIDEVVLVGGMTRMPAVQEAVKKFFNREPHKGVNPDEVVAIGAAIQGGVLQGDVKDVVLLDVTPLSLGIETLGGIFTRLIERNTTIPTKKSQVFSTAEDNQPAVTIKVAQGEREMASDNKQLGQFNLEGIAPAPRGLPQIEVTFDIDANGIVSVSAKDKATGKEQQITIQADGGLSEADIKNMMADAESNASTDKARRELVEAKNHAEALIHQTEKQLIEHGAKVTDAIKGDIEKAIADLKEAAAGDNAADIAAKHQALMNAAMKLGEAIYAAQGADAGEGEDAPQSGNDDVVDADFEEVDERK

SEQ ID NO: 48340 - DNA, 1860 bp, Pediococcus pentosaceus ATCC 25745
  CDS (1)..(1860): transl_table=11
atggcaagtaataaaattattggtattgatttaggtactacaaactctgcagttgctgtcatggacggtgacaaaccaaaaattatcacaaaccctgaaggagcacgtacaactccatcagttgttgcttttaagaatggtgaaactcaagttggggaagttgctaagcgtcaagcaatcactaaccctgatacaattgcttcaatcaaacgtcacatcggtgaagctggctataaagtaaccgttgatggcaagtcttatacaccacaagaagtttcagcaatgattttaagttatatcaagaaatttgctgaagattaccttggtgaagaagtagataaagctgttatcacagtacctgcttactttgatgattcacaacgtcaagctacaaaggacgctggtaagattgctggcttggatgttaaacgtattatcaacgaacctacagcatcttcattagcttacggactagatcaaaacggtaaggatgaaaagattctcgtttatgatttaggtggtggtacttttgatgtttccgttcttgaattaggggatggcgtattccaagttctttcaacaaacggtgatacacaccttggtggtgacgactttgatcaaaagatcatcgactggttagttgatgaattcaagaaagacaatggcgtagacttatcacaagataagatggctcttcaacgtttgaaggacgccgctgaaaaagctaagaaggacctttcaggtgttagcgaagctcaaatcagtctaccatttatttcagctggcgaagccggaccattacatcttgaaaagactttgacacgtgcgcaatttgatcaattaactgctgacctagtggaacgtactaaggctccagttgaaaatgcgcttaaagatgctggactttcagcttctgaaattgacgaagtcatcttaaatggtggttcaacacgtattcctgccgttcaagaagccgttaagaactggacaggtaaggaacctaaccactcaatcaaccctgatgaagccgtagctttaggtgctgctgttcaaggtggtgtgcttactggtgatgttaaggacgttgttttacttgacgttactccactctcacttggtattgaaacaatgggtggtgtattcactaagttaatcgatcgtaatacaacaattccaacaagtaagtcacaagtattctcaacagctgctgacaaccaaccagctgtagatatccatgtacttcaaggtgaacgtccaatggctgctgataacaagacacttggtcgtttccaacttactgatattccagctgctcctcgtggaattccacaaatcgaagttaagtttgatattgataagaatggtatcgtaaacgtttctgcaactgataagggtactggtaaggaacaaaagattacaatcaagagttcatcgggtctaagtgatgaagaaattgatcgcatgatgaaggaagctaaagaaaacgaagaagccgacaagaaacgtaaagaagaagttgaccttcgtaacgaagttgatcaattaatctttacaacggataagactttgaaagaccttgaaggtaaagtttctgaagatgaaatcaagaaggctaaagatgctaaagaagctcttgaaaaggctcaaaaagataacaatcttgacgaaatgaaagctaagaaagatgacttgagcaagattgttcaagatctatctgtaaagctttaccaacaagctcaagaagcccaagggcaagctgctgatggagctcaagccaacgctggtgacgctaagactgatgatgacaatacagtcaatggtgattttgaagaagttgatccggacaaggataacaaataa

SEQ ID NO: 48341 - protein, 619 aa, Pediococcus pentosaceus ATCC 25745
MASNKIIGIDLGTTNSAVAVMDGDKPKIITNPEGARTTPSVVAFKNGETQVGEVAKRQAITNPDTIASIKRHIGEAGYKVTVDGKSYTPQEVSAMILSYIKKFAEDYLGEEVDKAVITVPAYFDDSQRQATKDAGKIAGLDVKRIINEPTASSLAYGLDQNGKDEKILVYDLGGGTFDVSVLELGDGVFQVLSTNGDTHLGGDDFDQKIIDWLVDEFKKDNGVDLSQDKMALQRLKDAAEKAKKDLSGVSEAQISLPFISAGEAGPLHLEKTLTRAQFDQLTADLVERTKAPVENALKDAGLSASEIDEVILNGGSTRIPAVQEAVKNWTGKEPNHSINPDEAVALGAAVQGGVLTGDVKDVVLLDVTPLSLGIETMGGVFTKLIDRNTTIPTSKSQVFSTAADNQPAVDIHVLQGERPMAADNKTLGRFQLTDIPAAPRGIPQIEVKFDIDKNGIVNVSATDKGTGKEQKITIKSSSGLSDEEIDRMMKEAKENEEADKKRKEEVDLRNEVDQLIFTTDKTLKDLEGKVSEDEIKKAKDAKEALEKAQKDNNLDEMKAKKDDLSKIVQDLSVKLYQQAQEAQGQAADGAQANAGDAKTDDDNTVNGDFEEVDPDKDNK

SEQ ID NO: 48342 - DNA, 1848 bp, Leuconostoc mesenteroides subsp. mesenteroides ATCC 8293
  CDS (1)..(1848): transl_table=11
atgtcaaaaattattggtattgatttaggaacgacaaactcagctgttgctgtccttgaaggtggcgaaccaaagatcatcacaaatccagatggtggtcgtacaacaccttcagttgtctcatttaaaaatggcgaaagtcaagtgggtgatgttgcaaagcgtcaagcaattacaaacccagacacgattatttcaatcaagtctcacatgggtgaagctggttataaagttaatgccaatggtaaagactacacaccacaagaaatttcagcaatgattttgcaatatattaagggctatgctgaagattacttaggtgaaaaggttgaaaaagctgttatcacagttcctgcctactttaacgacgcacaacgtcaagctactaaggatgccggtaagattgctggtctggaagtagaacgtatcattaacgaaccaacagctgccgcattggcttatggtttggacaagctagataaggatgaaaaaattcttgtctatgacttaggtggtggaacattcgatgtgtcaatccttgaattaggagatggcgtgtttgaagttttgtcaacaaacggtgatactcatcttggtggtgatgactttgataacaaagttattgactatttggcagaacaatttaagtcagaaaatggtgttgatttaaaggatgacaaattagctttgcaacgtttgaaggatgccgcagaatcagctaagaagactttgtcatctgcaaacgaagctcaaattgatttgccatttattgcttcaggtgataacggaccattgcacttacagacatcattgacacgtgcaaagtttaacgaattaacagctgatttgattaagaaagcagagcaacctgttttgagtgctttgaaggatgccggattgtcattctctgacatcgacgaggttatcttgaacggtggttcaactcgtattccagccgtacaagaatctgttaagaagatgacaggtaaggaacctaaccactcaattaaccctgatgaagctgttgctttgggcgctgccgttcaaggtggtgtcattactggtgatgttaaggatgttgttttgcttgatgttacaccattgtcattgggtattgagacaatgggtggtgtgttcactaagttgattgaacgcaacacaacgattccaacttcaaagtcacaagtattctcaactgcagctgacaatcaaccagctgttgacattcatgttttgcaaggtgaacgttcaatggctgccgacaacaagacattgggtcgattccaattagcagatattccggccgcaccacgtggtgtacctcaaattgaagtgacatttgacattgatcgtaacggtattgttaatgtttctgctaaggacttaggaacacagaaggagcaaaagattacaatccaagctgctggtggtttgtcagacgaagaaattgaaaagatgatgaacgatgccaaggcaaacgaagaggctgatgctaagaagaaagaagctgtcgatacacgcaacgaagctgatcaattgattttccaaactgaaaagactttggaagaagttggtgacaagttgggtgacgatgaaaagaagccaacacaagacgctttggaagctttgaaaaaagctaaggaagatgccgcagctgatgatgctgatttgacagatttgaaggctaagtcagaagaattaactaaggtagctggtgaattagcaatgaagttgtatcaacaagcagcgccaaaggacggagctgaaggagacgcaaagtctgctgatgacaacacagttgatggtgattttgaagaagttgatccaaataaagacgacaagaagtaa

SEQ ID NO: 48343 - protein, 615 aa, Leuconostoc mesenteroides subsp. mesenteroides ATCC 8293
MSKIIGIDLGTTNSAVAVLEGGEPKIITNPDGGRTTPSVVSFKNGESQVGDVAKRQAITNPDTIISIKSHMGEAGYKVNANGKDYTPQEISAMILQYIKGYAEDYLGEKVEKAVITVPAYFNDAQRQATKDAGKIAGLEVERIINEPTAAALAYGLDKLDKDEKILVYDLGGGTFDVSILELGDGVFEVLSTNGDTHLGGDDFDNKVIDYLAEQFKSENGVDLKDDKLALQRLKDAAESAKKTLSSANEAQIDLPFIASGDNGPLHLQTSLTRAKFNELTADLIKKAEQPVLSALKDAGLSFSDIDEVILNGGSTRIPAVQESVKKMTGKEPNHSINPDEAVALGAAVQGGVITGDVKDVVLLDVTPLSLGIETMGGVFTKLIERNTTIPTSKSQVFSTAADNQPAVDIHVLQGERSMAADNKTLGRFQLADIPAAPRGVPQIEVTFDIDRNGIVNVSAKDLGTQKEQKITIQAAGGLSDEEIEKMMNDAKANEEADAKKKEAVDTRNEADQLIFQTEKTLEEVGDKLGDDEKKPTQDALEALKKAKEDAAADDADLTDLKAKSEELTKVAGELAMKLYQQAAPKDGAEGDAKSADDNTVDGDFEEVDPNKDDKK

SEQ ID NO: 48344 - DNA, 1911 bp, Solibacter usitatus Ellin6076
  CDS (1)..(1911): transl_table=11
atgggaaagattattggtattgacttgggcacgaccaactcgtgcgtagccgtcatggaaggcggccagcccacggtcatcgcaaatcaggaaggcaatcgcaccactccgtccgttgtggcattcaccaagagcggtgagcggttggttggccaggtcgccaagcgccaggccattaccaatcccgaaaacacggtcttctctatcaagcgctttatggggcgccggtatgacgaagtcaacgaagaaatgaagatggtgccctataaggtagtccgcggcgaaaacggcgatgcccgcgtggacatcatgggcaaaaagtattctccgcccgagatctcggcgatgatcctcacgaagctgaaggaggccgccgaatcgtatctgggagagaaagttacccaggccgtgattacggttccggcctacttcaacgatgcccagcgccaggccaccaaggatgcgggcaagatcgcggggctggacgtcctgcgcatcatcaacgagccgaccgcggccgcgctggcctacggactcgataagaagaagaacgaaaccatcgcggtctacgatttcggcggcggaacgttcgatatctcggtgctcgaagtgggcgaaggcgtggtcgaggtgaaatcgaccaacggcgatacccacctgggcggcgacaacatcgatcagcgcgtgatcgattggatcgtaagcgaattcaagaaagagaacggcatcgatctgtccaaggaccagatggccctgcagcgtctcaaggaagcagccgagaaggccaagatggagctttccacgctgctcgagaccgagatcaacctgccttttatcaccgccgacgcgaccggccccaagcacctccagatgaggctgagccgctcgcgattcgaacagatggtggaagacattctgcagcgctcgatgggcccgtgcaaacaggccatgacggacgcgtcggtaacccccagccagatcgacgaagtggttctggttggcggacagacccgcatgccgcggatccagacgctggtccgcgagcttttccagcgtgacccgcaccagggcgtgaacccggacgaagtcgtcgccatcggcgccgccgttcagggtggcgtgttgggcggcgaagtgaaagacgtgctgctgctcgatgtcaccccgctctcgctcggtatcgagactatggggggcgtgttcaccaaactgatcgagcgcaacaccaccatccccacccgtaagagcgaggtcttctccaccgccagcgacaaccagccgtcggtagagatcaaggtctaccagggtgagcgcgccatggcccgcgacaaccggctgctgggcgtattccagctcggcaacattccgccggcgccgcgcggcgtgccgcagattgaggttacgttcgacatcgatgccaacggtatcttgaacgtgacagcgaaagatcgcggcaccaacaacgagcagaagatcacgatcaccagctccagcggcctctccaaggacgaggtcgagaagatggccagggacgcggaagccaatgccgcggacgatcgcaaactgaaggacacgatcgacgcgcgcaatcgcgccgacgccatggtctacaacgtcgaaaagacgctgaaggagcatcgcgccaaggtcggcgaggccgaagccaaggaaatcgaggccgccctcgaagagaccaagaagacgctcaacgaaaacgacgctgagaagatcaacgccgcggtcgatcgcctgaccaccgccagccacaaactggccgaagccatgtacaagagcagcagtcagcccggagctcaagaggctcctccgactgacggccagccgaagcccgatgagaagggtaaggacaatgtcgtcgacgccgaattcgtagacgtagacgataagaagtaa

SEQ ID NO: 48345 - protein, 636 aa, Solibacter usitatus Ellin6076
MGKIIGIDLGTTNSCVAVMEGGQPTVIANQEGNRTTPSVVAFTKSGERLVGQVAKRQAITNPENTVFSIKRFMGRRYDEVNEEMKMVPYKVVRGENGDARVDIMGKKYSPPEISAMILTKLKEAAESYLGEKVTQAVITVPAYFNDAQRQATKDAGKIAGLDVLRIINEPTAAALAYGLDKKKNETIAVYDFGGGTFDISVLEVGEGVVEVKSTNGDTHLGGDNIDQRVIDWIVSEFKKENGIDLSKDQMALQRLKEAAEKAKMELSTLLETEINLPFITADATGPKHLQMRLSRSRFEQMVEDILQRSMGPCKQAMTDASVTPSQIDEVVLVGGQTRMPRIQTLVRELFQRDPHQGVNPDEVVAIGAAVQGGVLGGEVKDVLLLDVTPLSLGIETMGGVFTKLIERNTTIPTRKSEVFSTASDNQPSVEIKVYQGERAMARDNRLLGVFQLGNIPPAPRGVPQIEVTFDIDANGILNVTAKDRGTNNEQKITITSSSGLSKDEVEKMARDAEANAADDRKLKDTIDARNRADAMVYNVEKTLKEHRAKVGEAEAKEIEAALEETKKTLNENDAEKINAAVDRLTTASHKLAEAMYKSSSQPGAQEAPPTDGQPKPDEKGKDNVVDAEFVDVDDKK

SEQ ID NO: 48346 - DNA, 1962 bp, Magnetococcus sp. MC-1
  CDS (1)..(1962): transl_table=11
atgggcaaagtggttggcattgatctgggtaccaccaactcctgtgtctcaatcatggagggcggcgagcctaaagtcattgagaatagtgaaggggtgcgtaccaccccctcgatggtggcgtttaccaatcaaggggagcgtctggtggggcaagctgccaaacgtcaggcggtaaccaacccgaccaataccctctatgcgatcaaacgtctcatcgggcgtcgctttagcgatccgttgaccgctaaagatcaaggcttggttccctataaaatcgtcaaagcagataatggcgatgcttgggtggaagccgatggtaaaaaaatgagcccctccgagtgctccgcgatgattctgcaaaagatgaagcagaccgccgaagattacctcggagagagcgtgagcgaggcggttatcaccgttcccgcgtactttaatgatgcccaacgtcaagccactaaagatgccgggcgtatcgccggccttgaggtgttgcgcattattaacgagcccaccgccgccgccttggcctatgggttggacaaaaaggatggtcaaaccatcgccgtgttcgacttgggggggggtacctttgacatctccattctggagatcggtgacggcgtgtttgaagtaaaatccaccaatggggataccttcctgggtggtgaagatttcgatatggccattatcgactatctggccgatcaattcaaaaaagagaacagcattgatctgcgcaaggattccatggcgctgcaacgcctcaaggaggccgctgagaaggctaagattgagctttccagcagcaaccagaccgacattaacctgccctttatcactgccgatgccagtggccccaagcacttaaacctgagcttgacccgggctaagctggaatcgctggtggatgagttggtgcagcgcaccctcgccccctgccgcaccgccctgaaggatgctggcatgaccgcggctgacattgatgaggtgatcttggtggggggtatgacccgcatgcccaaagtgcaggcagtggtgggtcagttttttggtaaagagccccacaagggtgtgaaccccgacgaagtcgtggccattggtgcggccatccaggggggggtgctcaagggtgaagtgcaggatgtgttgttgctggatgtgaccccgctctccttgggtattgagaccctgggcggtgtgttcaccaaattgattgagaaaaataccaccgtgcctacccggaagtcgcaagtcttttcgacggcagccgacaatcagtcggccgtgaccattcgggtagcccagggcgagcgcgaaatgttctccgacaataaaaccttggggcagtttgatctggttggtatcgcccccgcgccccgtggcatgccccagattgaggtgacctttgacattgacgccaatggcatggtgcatgtgtccgccaaggataaaggtaccggtaaagagcagtccattcatattgaagcctcgggcggtttgacctcggaagagattgatcgcatggtgcatgaggccgagtcccatgcggaagaggatgccaagaagcgtgccctgatcgaagcccgcaacaatgcggactctctggtctattccagtgagaaatcgttgaaagagcacagcgataagctggacgatgcgttgaaaaaccagattaccgccgccattgaagatcttaaagcggtgatgcccaaggaggatcctgaggccatcagcagcaagacccaagcgctcatggagctttccatgaagatgggtgagcagatctataaggaaaatcctgaagccgctggcatggatcctgaagccgcagcccatgcagcagggatgcatgggggtgcagccacgggtggtggcgatggggcaaacaaacatggcaagggcgccgaagatgtggtagaagccgagtttgaagaggtcaacgacgacaaaaaatag

SEQ ID NO: 48347 - protein, 653 aa, Magnetococcus sp. MC-1
MGKVVGIDLGTTNSCVSIMEGGEPKVIENSEGVRTTPSMVAFTNQGERLVGQAAKRQAVTNPTNTLYAIKRLIGRRFSDPLTAKDQGLVPYKIVKADNGDAWVEADGKKMSPSECSAMILQKMKQTAEDYLGESVSEAVITVPAYFNDAQRQATKDAGRIAGLEVLRIINEPTAAALAYGLDKKDGQTIAVFDLGGGTFDISILEIGDGVFEVKSTNGDTFLGGEDFDMAIIDYLADQFKKENSIDLRKDSMALQRLKEAAEKAKIELSSSNQTDINLPFITADASGPKHLNLSLTRAKLESLVDELVQRTLAPCRTALKDAGMTAADIDEVILVGGMTRMPKVQAVVGQFFGKEPHKGVNPDEVVAIGAAIQGGVLKGEVQDVLLLDVTPLSLGIETLGGVFTKLIEKNTTVPTRKSQVFSTAADNQSAVTIRVAQGEREMFSDNKTLGQFDLVGIAPAPRGMPQIEVTFDIDANGMVHVSAKDKGTGKEQSIHIEASGGLTSEEIDRMVHEAESHAEEDAKKRALIEARNNADSLVYSSEKSLKEHSDKLDDALKNQITAAIEDLKAVMPKEDPEAISSKTQALMELSMKMGEQIYKENPEAAGMDPEAAAHAAGMHGGAATGGGDGANKHGKGAEDVVEAEFEEVNDDKK

SEQ ID NO: 48348 - DNA, 1869 bp, Mycobacterium smegmatis str. MC2 155
  CDS (1)..(1869): transl_table=11
atggctcgtgcggtcggtatcgacctcgggaccaccaactccgtcgtggcggttctggaaggcggcgatccagtcgtcgtcgcgaactccgagggctctcggaccaccccttcggtcgtcgcgttcgcgcgcaacggcgaggtgctggtcggtcagcccgccaagaaccaggcggtgaccaacgtcgaccgcaccatccgttcggtcaagcgccacgtcggcacggactggaacatcgagatcgacgacaagaagtacacgccgcaggagatcagcgcgcgtgtgctcatgaagctcaagcgtgacgccgagagctacctcggtgaggacatcaccgacgccgtcatcacggtcccggcgtacttcaacgacgcccagcgtcaggccaccaaggaagccggccagatcgccggcctcaacgtgctccgcatcgtcaacgagcccaccgcggccgcgctggcgtacggcctggacaagggcgagaaggaacagaccatcctggtcttcgacctcggtggcggcacgttcgacgtctcgctgctggagatcggcgacggtgtcgtcgaggtccgcgcgacctccggtgacaaccacctcggtggcgacgactgggacgaccggatcgtcacgtggctggtcgacaagttcaagggcagctcgggcatcgacctgaccaaggacaagatggccatgcagcgcctgcgtgaggcggccgagaaggccaagatcgaactctcgagctcgcagagcacgtcgatcaacctgccgtacatcacggtcgacgccgacaagaacccactgttcctcgacgagcagctgacccgcgcggagttccagcgcatcacccaggatctgctcgaccgcacccggcagccgttccagcaggtcatcaaggacgccggcatctcggtgtccgacatcgaccacgtggtgctggtgggcggttcgacccgtatgcccgcggtgaccgacctggtcaaggaactgaccggcggcaaggagcccaacaagggcgtcaaccccgacgaggttgtcgcggtgggtgctgcgctgcaggccggtgtgctcaagggcgaggtgaaagacgttctgctgcttgacgtcaccccgctatccctcggtatcgagaccaagggtggcgtgatgaccaagctgatcgagcgcaacaccacgatcccgaccaagcggtcggagaccttcaccaccgccgacgacaaccagccgtcggtgcagatccaggtctaccagggtgagcgcgagatcgcctcgcacaacaagctgctcggcagcttcgagctgaccggtatcccgccggccccgcgtggcgtgccccagatcgaggtcaccttcgacatcgacgccaacggcatcgtccacgtcaccgccaaggacaagggcaccggcaaggagaacacgatcaagatccaggaaggctccggcctttccaaggaagagatcgaccggatgatcaaggacgccgaggcgcacgccgaggaggaccgcaagcgtcgcgaagaggccgacgtgcgcaaccaggccgagtcgctggtctaccagacggagaagttcgtcgctgaacagaggggcgcagcgtccgacggtggcggttcgaaggtgcccgaggagacgctggccaaggtcgattcggcgatcgccgacgccaagaaggcgctcgaaggcaccgacatctcggccatcaagtccgctatggagaagctcggcgtggagagccaggccctgggccaggcgatctacgaggccacccaggccgaacagcccgcgggcggctcggacaacggggccccgggtgacgacaacgtggtcgacgccgaggttgtcgacgatgacgctggcaaggagaacaagtga

SEQ ID NO: 48349 - protein, 622 aa, Mycobacterium smegmatis str. MC2 155
MARAVGIDLGTTNSVVAVLEGGDPVVVANSEGSRTTPSVVAFARNGEVLVGQPAKNQAVTNVDRTIRSVKRHVGTDWNIEIDDKKYTPQEISARVLMKLKRDAESYLGEDITDAVITVPAYFNDAQRQATKEAGQIAGLNVLRIVNEPTAAALAYGLDKGEKEQTILVFDLGGGTFDVSLLEIGDGVVEVRATSGDNHLGGDDWDDRIVTWLVDKFKGSSGIDLTKDKMAMQRLREAAEKAKIELSSSQSTSINLPYITVDADKNPLFLDEQLTRAEFQRITQDLLDRTRQPFQQVIKDAGISVSDIDHVVLVGGSTRMPAVTDLVKELTGGKEPNKGVNPDEVVAVGAALQAGVLKGEVKDVLLLDVTPLSLGIETKGGVMTKLIERNTTIPTKRSETFTTADDNQPSVQIQVYQGEREIASHNKLLGSFELTGIPPAPRGVPQIEVTFDIDANGIVHVTAKDKGTGKENTIKIQEGSGLSKEEIDRMIKDAEAHAEEDRKRREEADVRNQAESLVYQTEKFVAEQRGAASDGGGSKVPEETLAKVDSAIADAKKALEGTDISAIKSAMEKLGVESQALGQAIYEATQAEQPAGGSDNGAPGDDNVVDAEVVDDDAGKENK

SEQ ID NO: 48350 - DNA, 1866 bp, Nocardioides sp. JS614
  CDS (1)..(1866): transl_table=11
atggcacgtgcggtcggcatcgacctgggcacgacgaacagcgtcgtggccgttctggagggtggcgagcccaccgtcatcgccaacgcagagggtgcccgcaccacgccgtcggtggttgcgttcgccaagtccggcgaggtgctcgtcggcgaggtcgccaagcggcaggccgtgaccaacgtcgaccggaccatccggtcggtcaagcggcacatgggcaccgactggttgaccaagatcgacgacaaggacttcacgccgcagcagatcagcgcgttcgtgctgcagaagctcaagcgcgacgccgaggcctacctcggcgagcccgtgaccgacgccgtcatcacggtcccggcgtacttctccgacgcccagcgtcaggccaccaaggaggccggtgagatcgcgggcctcaacgtgtcgcggatcgtcaacgagccgaccgcagcggcgctggcctacggcctggacaagggcgacgaccagacgatcctcgtcttcgacctcggcggcggcacgttcgacgtgtccctgctcgagatcggcgagggcgtggtcgaggtcaaggcgacctccggtgacaaccacctcggtggcgacgactgggacgcccggatcgtcgactggatggtcaagaagttcaaggacaacaacggcgtcgacctcgcggccgacaagatcgccaagcagcgcctccaggaggccgccgagaaggcgaagatcgagctgtcctcctcgtccgagaccacgatccacctgccctacatcacccacggcgagtccggtccgctgcacttcgaggagaagctcacccgcagcgagttccagcggctcaccaccgacctgctcgaccgcaccaagggcccgttccagagcgtgctcaaggacggcggcgtcgcgatcaaggacatcgaccacgtggtcctggtcggcggctcgacccggatgcccgcggtcaccgaggtcgtcaaggagctgctcggcggcaaggagcccaacaagggcgtcaaccccgacgaggtcgtggccgtcggtgccgcgctccaggccggcgtcctcaagggcgaggtcaaggacgtgctgctgctcgacgtcaccccgctgtcgctcggcatcgagaccaagggcggcgtgatgaccacgctgatcgagcgcaacaccacgatcccgaccaagcgctcggagatcttcacgaccgccgacgacaaccagccgtcggtcgagatcaaggtcgcccagggcgagcgccagatgtgggcgcagaaccagccgctcggcaacttcgagctcaccggcctgccgccggcgccgcggggcatcccgaagatcgaggtcaccttcgacatcgacgccaacggcatcgtgcacgtgaccgccaaggaccaggcctccggcaaggagcagtccatgacgatctcgggcggctccgcgctcggcaaggacgagatcgaccggatggtccgcgaggccgagcagtacgccgaggaggacgccaagcgtcgcgaggcggtcgagacccgcaaccaggccgagcagctcgtctacacgaccgagaagttcctcgacgagaacagcgacaagctgcccgacgacgtgaagaccgaggtccgcgccgacgtcgacgccctgaaggtgaccctcgagaaggaggacgccagcgccgacgacatccgcgccggcgtcaccaagctcggcgagtcgagccagaagatgggcgcggcgatgtacgccgccgccgaggccgactcggccgcggccggcggctcggcgggggcgaccggtgagtccgacgacgacgtcgtcgacgccgagatcgtcgacgagggcggcgccgacgacggggccgagggcgagtccaagtga

SEQ ID NO: 48351 - protein, 621 aa, Nocardioides sp. JS614
MARAVGIDLGTTNSVVAVLEGGEPTVIANAEGARTTPSVVAFAKSGEVLVGEVAKRQAVTNVDRTIRSVKRHMGTDWLTKIDDKDFTPQQISAFVLQKLKRDAEAYLGEPVTDAVITVPAYFSDAQRQATKEAGEIAGLNVSRIVNEPTAAALAYGLDKGDDQTILVFDLGGGTFDVSLLEIGEGVVEVKATSGDNHLGGDDWDARIVDWMVKKFKDNNGVDLAADKIAKQRLQEAAEKAKIELSSSSETTIHLPYITHGESGPLHFEEKLTRSEFQRLTTDLLDRTKGPFQSVLKDGGVAIKDIDHVVLVGGSTRMPAVTEVVKELLGGKEPNKGVNPDEVVAVGAALQAGVLKGEVKDVLLLDVTPLSLGIETKGGVMTTLIERNTTIPTKRSEIFTTADDNQPSVEIKVAQGERQMWAQNQPLGNFELTGLPPAPRGIPKIEVTFDIDANGIVHVTAKDQASGKEQSMTISGGSALGKDEIDRMVREAEQYAEEDAKRREAVETRNQAEQLVYTTEKFLDENSDKLPDDVKTEVRADVDALKVTLEKEDASADDIRAGVTKLGESSQKMGAAMYAAAEADSAAAGGSAGATGESDDDVVDAEIVDEGGADDGAEGESK

SEQ ID NO: 48352 - DNA, 1926 bp, Azoarcus sp. BH72
  CDS (1)..(1926): transl_table=11
atgggcaagatcatcggtatcgacctcggcaccaccaacagctgcgtttccgtcatggaaggcggcaagccgaaggtcatcgaaaactcggaaggcgcgcgcaccaccccgtcggtggtcgcttacgcggaagacggtgaaatcctggtcggcgcgccggccaagcgccaggcggtcaccaacgcacgcaacacgctgttcgcggtcaagcgcctgatcggccgccgcttcgaagaaaaggaagtgcagaaggacatcgacctgatgccctacaccatcgccaaggccgacaacggtgacgcctgggtggaagtgcgcggcaagaagatcgccccgccgcaggtttcggccgaagtgctgcgcaagatgaagaagaccgccgaagactacctcggcgaagaagtgaccgaagccgtcatcaccgtgccggcctacttcaacgacagccagcgccaggccaccaaggacgccggtcgcatcgccgggctggaagtgaagcgcatcatcaacgagccgaccgcggccgcgctcgccttcggcatggacaagaagccgggcgactccaagatcgcggtgtatgacctcggcggcggcaccttcgacatctccatcatcgagatcgccgacatcgacggcgagcaccagttcgaagtgctcgccaccaacggcgacaccttcctcggcggcgaggacttcgaccagcgcatcatcgactacatcgtcaccgagttcaaaaaggaacagggcgtcgatctgaagaacgacgtgctcgcgctgcagcgcctgaaggaagcggcggagaaggccaagatcgagctgtcctcgggctcgcagaccgaagtcaacctgccctacatcaccgccgacgccaccggaccgaagcacctggcgatcaagatcacccgcgccaagttcgagtcgctggtggaagacctgatcgagcgttcgatcgaaccctgccgcatcgcgctgaaggacgccggcgtcaaggtgtccgacatcgacgacgtgatcctggtcggcggccagacccgcatgccgaaggtcatcgaaaaggtgaaggagttcttcgggaaggaaccgcgccgcgacgtgaacccggacgaagccgtggccgtgggcgcctccatccagggcggcgtgctgcagggcgaagtcaaggacgtgctgctgctcgacgtcaccccgctgtcgctcggcatcgaaaccctgggcggcgtgatgaccaagctgatccagaagaacaccaccatcccgaccaaggcgagccaggtgttctccaccgccgacgacaaccagtccgcggtgaccatccacgtgctgcagggcgagcgcgagatggcctccggcaacaagagcctgggccagttcaacctgtccgacatcccgccggcgccgcgcggcatgccgcagatcgaggtcaccttcgacatcgacgccaacggcatcctgcacgtatcggccaaggacaaggccaccggcaaggaaaacaagatcaagatccaggcgaactccggcctgtcggatgaagaagtcgaacgcatggtgcgcgacgccgccgctcacgccgaggaagacaagaaggcgcacgagctggtcgacgcccgcaaccagtgcgacgcgctgatccactcgaccaagaaggcgctggccgagcacggcgacaagatcggcgccgacgacaaggccaagatcgaggccgcgatgaaggatgcggaagaagcgatcaagagcggcgacaaggacagcatcgaagccaagagccaggcgctggcgatggcgagccagaaactgggcgaagcgatgtacggccagcagcaggccgaaggcggtgcgcaggccgccggcgcggcgggcggcagcagcaaggccgacgacgccgacgtggtcgacgccgaattcaccgaagtgaaggacaagaagtaa

SEQ ID NO: 48353 - protein, 641 aa, Azoarcus sp. BH72
MGKIIGIDLGTTNSCVSVMEGGKPKVIENSEGARTTPSVVAYAEDGEILVGAPAKRQAVTNARNTLFAVKRLIGRRFEEKEVQKDIDLMPYTIAKADNGDAWVEVRGKKIAPPQVSAEVLRKMKKTAEDYLGEEVTEAVITVPAYFNDSQRQATKDAGRIAGLEVKRIINEPTAAALAFGMDKKPGDSKIAVYDLGGGTFDISIIEIADIDGEHQFEVLATNGDTFLGGEDFDQRIIDYIVTEFKKEQGVDLKNDVLALQRLKEAAEKAKIELSSGSQTEVNLPYITADATGPKHLAIKITRAKFESLVEDLIERSIEPCRIALKDAGVKVSDIDDVILVGGQTRMPKVIEKVKEFFGKEPRRDVNPDEAVAVGASIQGGVLQGEVKDVLLLDVTPLSLGIETLGGVMTKLIQKNTTIPTKASQVFSTADDNQSAVTIHVLQGEREMASGNKSLGQFNLSDIPPAPRGMPQIEVTFDIDANGILHVSAKDKATGKENKIKIQANSGLSDEEVERMVRDAAAHAEEDKKAHELVDARNQCDALIHSTKKALAEHGDKIGADDKAKIEAAMKDAEEAIKSGDKDSIEAKSQALAMASQKLGEAMYGQQQAEGGAQAAGAAGGSSKADDADVVDAEFTEVKDKK

SEQ ID NO: 48354 - DNA, 1929 bp, Neisseria meningitidis FAM18
  CDS (1)..(1929): transl_table=11
atggcaaaagtaatcggtatcgacttaggtacaaccaactcttgtttggccatttccgaaaacggtcaaaccaaagtgatcgaaaacgcagaaggcgcacgcaccacgccgtccgttatcgcttatttggacggcggcgaaatcctcgtcggtgcgcctgccaaacgccaagcggtaaccaacgccaaaaacactatttacgccgccaaacgtttgatcggccacaaatttgaagacaaagaagtccaacgcgacatcgaatctatgcctttcgaaatcatcaaagccaacaacggcgacgcatgggtaaaagcacaaggcaaagagctgtctcctcctcaaatttccgcagaagtcctgcgtaaaatgaaagaagccgccgaagcttacttgggcgaaaaagtaaccgaagccgtgattaccgtccctgcctacttcaacgacagccaacgtcaagccaccaaagacgcaggccgtatcgccggtttggacgtgaaacgcatcatcaacgagccgaccgcagccgctttggcattcggtatggacaaaggcgacaacaaagaccgcaaagtagccgtatatgacttgggcggcggtactttcgatatttccatcatcgaaatcgccaacctcgacggcgacaaacaattcgaagtattggcaaccaacggcgataccttcttgggcggtgaagacttcgaccaacgcctcatcgaccacatcatcgccgagttcaaaaaagaacaaggcattgatttgaaacaagacgtgatggctctacaacgcctgaaagaagctgccgaaaaagccaaaatcgaattgtccagcggccagcaaaccgaaattaacctgccgtacatcaccatggacgcaaccggcccgaaacacttggcgatgaaaattacccgcgccaaattcgaaagcctggttgaagacctgattgcccgctctatcgagccttgccgcaccgcattgaaagatgccggcttgagcaccagcgacatcgacgacgtaattttggtcggcggtcagtcccgtatgccgaaagtacaagaagccgttagagatttcttcggcaaagaaccgcgcaaagacgtgaaccctgacgaagccgttgccgtaggcgcagcgatccaaggcgaagtattgagcggcggccgcagcgacgtattgctgctggacgtaacccctctgtccttgggtatcgaaaccatgggcggcgtgatgaccaagctgattcaaaagaacacaactatcccgactaaagcgtcgcaagtgttctctaccgccgaagacaaccaaagcgcagtaaccatccacgtactgcaaggcgaacgcgaacgcgcttctgccaacaaatctttgggtcagttcaacttgggcgacatcgcacccgcaccgcgcggtatgccgcaaatcgaagtcaccttcgacatcgacgccaacggcatcctgcacgtttccgccaaagacaaaggcactggcaaagcagccaacatcaccatccaaggttcttcaggtttgagcgaagaagaaatcgaacgcatggtgaaagatgccgaagccaatgccgaggaagataaaaaactgactgaattggtcgcttcccgcaaccaagctgaagccctgattcactctgtgaaaaaatctttggccgactacggcgacaaactcgacgcagccgagaaagaaaaaatcgaagccgcgctgaaagaagccgaagaagcagttaaaggcgacgacaaagccgctatcgatgccaaaaccgaggcgctgggcgcagccagccaaaaactgggggaaatggtttacgctcaagcacaagctgaagcccaagcaggcgaaagcgaacaagccaatgcttctgcaaagaaagacgatgatgtcgtagatgccgactttgaagaagtaaaagacgacaaaaaataa

SEQ ID NO: 48355 - protein, 642 aa, Neisseria meningitidis FAM18
MAKVIGIDLGTTNSCLAISENGQTKVIENAEGARTTPSVIAYLDGGEILVGAPAKRQAVTNAKNTIYAAKRLIGHKFEDKEVQRDIESMPFEIIKANNGDAWVKAQGKELSPPQISAEVLRKMKEAAEAYLGEKVTEAVITVPAYFNDSQRQATKDAGRIAGLDVKRIINEPTAAALAFGMDKGDNKDRKVAVYDLGGGTFDISIIEIANLDGDKQFEVLATNGDTFLGGEDFDQRLIDHIIAEFKKEQGIDLKQDVMALQRLKEAAEKAKIELSSGQQTEINLPYITMDATGPKHLAMKITRAKFESLVEDLIARSIEPCRTALKDAGLSTSDIDDVILVGGQSRMPKVQEAVRDFFGKEPRKDVNPDEAVAVGAAIQGEVLSGGRSDVLLLDVTPLSLGIETMGGVMTKLIQKNTTIPTKASQVFSTAEDNQSAVTIHVLQGERERASANKSLGQFNLGDIAPAPRGMPQIEVTFDIDANGILHVSAKDKGTGKAANITIQGSSGLSEEEIERMVKDAEANAEEDKKLTELVASRNQAEALIHSVKKSLADYGDKLDAAEKEKIEAALKEAEEAVKGDDKAAIDAKTEALGAASQKLGEMVYAQAQAEAQAGESEQANASAKKDDDVVDADFEEVKDDKK

SEQ ID NO: 48356 - DNA, 1935 bp, Magnetospirillum magnetotacticum MS-1
  CDS (1)..(1935): transl_table=11
atgagcaaggttatcggcatcgacctgggcaccacgaattcgtgcgtcgccgtgatggaaggcaagaacgccaaggtcatcgaaaacgccgaaggcatgcggaccacgccctccatgacggcgttcaccgaatcgggcgagcgtctggtcggccagccggccaagcgccaggcggtgaccaatcccaccagcaccctgttcgccatcaagcgcctgatcgggcgccgcttcgacgacccgatcaccaagaaggacatgaacctcgtcccctaccacatcgtggcgggcgacaacggcgacgcctgggtcgaggcccgcgacgccaagtacagccccagccaggtctcggccttcatcctgcagaagatgaaggaaaccgccgaaggctatctgggcgagaaggtcacccaggcggtgatcaccgtcccggcctatttcaacgacgcccagcgtcaggccaccaaggacgcgggccgcatcgccggtctggaggtgctgcgcatcatcaacgagcccaccgcggccgccctggcctatggcctggagaagaagagcgcaggcaccatcgccgtctatgacctgggcggcggcaccttcgacgtctcggtgctggaaatcggcgacggcgtgttcgaggtgaagtccaccaacggcgacaccttcctgggcggcgaagactttgacgcccgcatcatggattacctggccgacgagttcaaaaaggagcagggcatcgacctgcgcaaggaccgtctggccctgcagcgcctgaaggaagccgccgagaaggccaagatcgagctgtcgtcctccatgcagaccgaggtgaacctgccgttcatcaccgccgacgcctcggggcccaagcacctcaacatcaagctgacccgctccaagctggaagccctggtcgaggatctggtcgcccgcaccgtcgagccctgcaaggcggccttgaaggacgccggcgtcaaggccagcgaaatcgacgaagtcattctggtgggcggcatgacccgcatgcccaagatccaggaagtggtgaaggaattcttcggccgcgagccccataagggcgtcaaccccgatgaagtggtcgccatcggcgccgccatccagggcggcgtgctgaagggcgaggtcaaggacgtcctgctgctcgacgtcaccccgctctcgctcggcatcgagaccctgggcggcgtcttcacccgcctgatcgaccgcaacaccaccatccccacccgcaagtcccaggtgttctccaccgccgaggataaccagaccgccgtcaccatccgcgtcttccagggcgagcgcgaaatggccgccgacaacaaggtgctgggccagttcgatctggtgggcattcccccggcgccgcgcggcgtgccccaggtggaagtgaccttcgacatcgacgccaacggcctggtcaatgtcagcgccaaggacaaggccaccggcaaggagcagcagatccgcatccaggcctcgggcggcctgtccgataccgacatcgagaagatggtcaaggaagccgagatccacgccgccgaggacaagaagcgcaaggagctgatcgaggcgcgcaaccacgccgacggcctgatccacaccacggaaaagagcctcaaggaattcggcgacaaggccggggccgagctcaccggcgccatcgaaaaggaaatcacggccctcaaggccgtcatggaaaaggacgatgtcgaggccatcaaggccaagaccgaagacctgatgcaggcctccatgaagctgggcgaggccatgtacaaggcccaggaagccgctggcggctccgaagccgaggctgcggccggtggcggtgcccatggcggagcctcgggcggccatgacgacaaggtggtcgacgccgacttcgaggaagtcgacggcgacaagaagggcaagtaa

SEQ ID NO: 48357 - protein, 644 aa, Magnetospirillum magnetotacticum MS-1
MSKVIGIDLGTTNSCVAVMEGKNAKVIENAEGMRTTPSMTAFTESGERLVGQPAKRQAVTNPTSTLFAIKRLIGRRFDDPITKKDMNLVPYHIVAGDNGDAWVEARDAKYSPSQVSAFILQKMKETAEGYLGEKVTQAVITVPAYFNDAQRQATKDAGRIAGLEVLRIINEPTAAALAYGLEKKSAGTIAVYDLGGGTFDVSVLEIGDGVFEVKSTNGDTFLGGEDFDARIMDYLADEFKKEQGIDLRKDRLALQRLKEAAEKAKIELSSSMQTEVNLPFITADASGPKHLNIKLTRSKLEALVEDLVARTVEPCKAALKDAGVKASEIDEVILVGGMTRMPKIQEVVKEFFGREPHKGVNPDEVVAIGAAIQGGVLKGEVKDVLLLDVTPLSLGIETLGGVFTRLIDRNTTIPTRKSQVFSTAEDNQTAVTIRVFQGEREMAADNKVLGQFDLVGIPPAPRGVPQVEVTFDIDANGLVNVSAKDKATGKEQQIRIQASGGLSDTDIEKMVKEAEIHAAEDKKRKELIEARNHADGLIHTTEKSLKEFGDKAGAELTGAIEKEITALKAVMEKDDVEAIKAKTEDLMQASMKLGEAMYKAQEAAGGSEAEAAAGGGAHGGASGGHDDKVVDADFEEVDGDKKGK

SEQ ID NO: 48358 - DNA, 1905 bp, Nostoc punctiforme PCC 73102
  CDS (1)..(1905): transl_table=11
atggcaaaagtagttggaattgacttaggaacaacgaactcctgcgtggcagtgatggaaggtggtaaacctactgtaattgctaatgctgaaggttttcggacaacgccatcagtagtggcatttgcgaaaaatggcgacaacttggttggccaaatcgccaaacgccaagcggtgatgaaccccgaaaatacgttttactcagtcaaacgctttatcggtcgccgctacgatgaagtgagtaacgaagcaactgaagtttcttacaaagttctcagcagcaacggcaatgtcaaattagattgtccgatagctggtaaaccgtttgctcctgaagaaatttctgcaaaagttcttcgcaaactagttgaagatgccagcaaatatcttggtgaaactgttagccaagctgtaatcaccgttcccgcatactttaacgactcccaacggcaagcgacaaaggacgctggtaaaattgcaggtattgaagttctgcgaattatcaacgagccgactgctgcttctctagcttatgggtttgacaagaagagtaacgaaaccattcttgtatttgaccttggtggtggtaccttcgacgtatccgtgctggaagtaggagatggagtttttgaagtactagccacatctggagatacacaccttggtggtgatgacttcgataaaaaaatagttgacttcttagctgaaaagttcaagaaagccgaaggcattgaactacgcaaagacaaacaagctttacaacgtctgacagaagccgcagaaaaagccaaaattgagctttctagcgttacccaagcagaaattaacctaccatttatcaccgctacccaggatgggcctaagcacctggatacaaccctgactcgtgccacctttgaagaactttgttctgacttaatcgaccgttgccgtgttcctgtggaaaacgctctccgcgatgccaagttaagcaaaggcgatattgatgaagtggtgttggttggtggttctacccgtattcccgcagttcaacagattgtgaagcaggtattgggtaaagaccccaaccaaagcgttaaccctgatgaagtcgtagcaattggtgcagcaattcaagcaggtgtactgaataatgaagtcactggcatcttattgttagatgtatcaccactttctttgggtgttgaaacattgggtggcgtgatgaccaaaattatcccccgcaacaccacaatccccaccaagaaatcggaagtcttctccaccgcagtggatggacaaaccaacgtagaaattcacgtccttcaaggtgaacgcgaattttctaacgataacaagagtttgggaaccttccgccttgatggtattcctcctgcaccacgtggcgttcctcaaattgaagtggtgttcgatattgacgctaacggtatccttaacgtcaccgctaaggacaaaggtactggcaaagaacagtccatcagcataactggtgcttccaccctggataaaactgacgttgaccggatggtaagagaagctgaacaaaacgcttcatctgacaaagaccgacgtgagaagattgaacgcaagaaccaagccgactccttggcataccaagctgaaaagcagttacaagaattgggcgataaagttcccgatgctgacaagactaaagttgaaggtttggtgaaagaactgcgggaagcagttgcgaaagaagacgatgagcaaatcaagaagctcaccccagaattgcaacaagctctattcgctgttggtagtaacatctatcaacaagctggtgcgggtgctgcaccaggtgctgaacctcaagatggtggttctacctctagctctggtagcggcgatgatgtgattgacgctgattttacagagagtaaataa

SEQ ID NO: 48359 - protein, 634 aa, Nostoc punctiforme PCC 73102
MAKVVGIDLGTTNSCVAVMEGGKPTVIANAEGFRTTPSVVAFAKNGDNLVGQIAKRQAVMNPENTFYSVKRFIGRRYDEVSNEATEVSYKVLSSNGNVKLDCPIAGKPFAPEEISAKVLRKLVEDASKYLGETVSQAVITVPAYFNDSQRQATKDAGKIAGIEVLRIINEPTAASLAYGFDKKSNETILVFDLGGGTFDVSVLEVGDGVFEVLATSGDTHLGGDDFDKKIVDFLAEKFKKAEGIELRKDKQALQRLTEAAEKAKIELSSVTQAEINLPFITATQDGPKHLDTTLTRATFEELCSDLIDRCRVPVENALRDAKLSKGDIDEVVLVGGSTRIPAVQQIVKQVLGKDPNQSVNPDEVVAIGAAIQAGVLNNEVTGILLLDVSPLSLGVETLGGVMTKIIPRNTTIPTKKSEVFSTAVDGQTNVEIHVLQGEREFSNDNKSLGTFRLDGIPPAPRGVPQIEVVFDIDANGILNVTAKDKGTGKEQSISITGASTLDKTDVDRMVREAEQNASSDKDRREKIERKNQADSLAYQAEKQLQELGDKVPDADKTKVEGLVKELREAVAKEDDEQIKKLTPELQQALFAVGSNIYQQAGAGAAPGAEPQDGGSTSSSGSGDDVIDADFTESK

SEQ ID NO: 48360 - DNA, 1887 bp, Nostoc punctiforme PCC 73102
  CDS (1)..(1887): transl_table=11
atggcaaaagttgttggaattgatttagggacaactaactcttgtattgcagtcatcgaaggcggacaaccactcgtgattgcgaatgcagaaggacaacgcatcactccctctgtagttgcatatacaaaaacaggcgaacgtttggttggtcaaattgctcgacgacaggcggtaatgaatccagagaatacgttctactcagtcaaacggtttatcggacgcaaacacgatgaaatcacccacgaagcgagtgaagtttcttacaaagtcgttcgcgatcgcaacggtaacgtcaaactcgattgtccggcgctcaaaaaacaattcgcgcctgaagaaatttccgctcaagttttgcgaaaacttacagatgatgccagcaaatatctaggagaacccattacgcaagcagtcattactgtgcctgcttacttcaatgattcgcaacgacaagcgaccaaagatgcaggcaaaattgcagggctagaagtactccgcatcattaacgaacctacggctgcggcacttgcttatggtttagacaaaaagggcaacgaaacaatcttagtctttgacttaggaggcggcacgttcgacgtttcaattctagaagttggagaaggtgtgtttgaagtcaaagccacgagtggggatacgcatttaggcggcgatgactttgataaaaagattgtcgattatgttgcaaatgattttcagcgccacgaaggtattgatttacgcaaagataagcaagccctgcaacggttaactgaagccgcagaaaaagccaaaattgaactctctagcgctacccaaacaacgattaatctccccttcatcacggcaactcaagagggaccaaagcacctcgatataactttaactagggcggagtttgagaaactctgcgctgacttgctcgatcgctgccgcattccagttgagcaagctctcaacgatgccaatctgaacaatgccaatctcgatgaagttgttctagtaggcggttccacccgaattcccgccgtgcaacaactcgtcaaacgcatcacaggcaaagatccaaatcagggagtgaacccggatgaagtagttgctgtgggtgcagcaattcagggtggagtactggcgggagaagtgaaagatgtgctgctgctagatgtaacaccgctttctttaggggtggaaacaatgggcggggtaatgacaaaaattattccccgcaacacgacgattccggtgaagaaatccgagacgttttcaaccgccgctgatggccagtcgaatgtcgaaattcatgttctgcaaggagaacgggaacttgtggcagacaataagagtttaggtacgtttcggctcgatggcattcctccggctccgcgtggagtacctcaaattgaagtgacgttcgacctcgatgcaaatgggttactatcggtaactgctaaagatcgcgccactggtaaagaacaatcgattacaatctcaggcgcttcgacgctggataaacgcgatgtggaacgcatggtacgagatgcagaaactcatgcccaagaagatcgccaacgccgcgagcaaatcgacaccaaaaataatgcggactcgctggtttatcaggcagaaaaacaactgcaagacttgaatggtcgagtttctcaagcagataaaagtagggcgcaacaattgattgacgagttgcgatcggcaattgagcgagaaaactacgagcaaatgcgatcgctcactaccaatcttcaacaagcgctcatgcaaatcggtagcgccgtttacgcccaagctagcacagctactaacaatcctaatcccacaaatcagccaaccggacaaaacgacgatgtgattgatgctgattttgttggctaa

SEQ ID NO: 48361 - protein, 628 aa, Nostoc punctiforme PCC 73102
MAKVVGIDLGTTNSCIAVIEGGQPLVIANAEGQRITPSVVAYTKTGERLVGQIARRQAVMNPENTFYSVKRFIGRKHDEITHEASEVSYKVVRDRNGNVKLDCPALKKQFAPEEISAQVLRKLTDDASKYLGEPITQAVITVPAYFNDSQRQATKDAGKIAGLEVLRIINEPTAAALAYGLDKKGNETILVFDLGGGTFDVSILEVGEGVFEVKATSGDTHLGGDDFDKKIVDYVANDFQRHEGIDLRKDKQALQRLTEAAEKAKIELSSATQTTINLPFITATQEGPKHLDITLTRAEFEKLCADLLDRCRIPVEQALNDANLNNANLDEVVLVGGSTRIPAVQQLVKRITGKDPNQGVNPDEVVAVGAAIQGGVLAGEVKDVLLLDVTPLSLGVETMGGVMTKIIPRNTTIPVKKSETFSTAADGQSNVEIHVLQGERELVADNKSLGTFRLDGIPPAPRGVPQIEVTFDLDANGLLSVTAKDRATGKEQSITISGASTLDKRDVERMVRDAETHAQEDRQRREQIDTKNNADSLVYQAEKQLQDLNGRVSQADKSRAQQLIDELRSAIERENYEQMRSLTTNLQQALMQIGSAVYAQASTATNNPNPTNQPTGQNDDVIDADFVG

SEQ ID NO: 48362 - DNA, 1959 bp, Nostoc punctiforme PCC 73102
  CDS (1)..(1959): transl_table=11
atgggaaaagttattggaatcgacttaggcactactaacagttgcgtcgcagttttggagggcggtcaaccactggtgatctccaattctgaaggtggacgaactactccaagtattgtgggatttggcaagagtggcgatcgcttggttggtcaattggcaaagcgccaagccgtaaccaatgccgaaaacacaatttacagtattaaacgatttatcgggcggcgttgggaagacactgacacagaacgcgaacgtgtaccctacaactgtgtcaaaggtcgagacgataccgttgatgtccaaattcgctcaaaaaactacacaccacaagaactatccgccatgatcctgcaaaagctgaagcaggatgcggaaaactttttgggtgaagaagtcactcaggcagtgatcaccgtacctgcatattttacagatgctcaaagacaagctactaaagatgctggcacaattgccggattagaagttctgcgaatcatcaatgaaccaacagctgcggctttagcttttggattggaaaagcaagaccaagagcaactaattttagtatttgacttaggaggcggtacttttgacgtatcgatcctgcaacttggggatggcgtttttgaagttaaggctacttgtggtaataaccacttaggtggagacgactttgataatgcgatcgtgcgttggctgatggaacgcttccagcaacaagagaaaatcgacctttcccaagataagatggcactgcaacgcctacgggaagcagcagaaaaggccaaaattgaactctccagcatggtgaatacttccgtcaatctgccgttcatcacatctgatgagaccggcccaaagcatctagaaatggagttcagccgctctaaatttgaggaactggcagggaaattaattgaaggtactatcgaaccaatgatccaagcactcaaagatgcggatctgaaaccatcagccatagatcggattattttagtaggtggttctacccgaattcccgcagtccaaaacgcgctgattaagtttttcaatggcaaagctcccgatcgctctatcaaccctgacgaagcggtagcattgggagcagctatccaagcaggggtcttgggtggggaagtcgataatcttttattgttggatgtcacccccctgtctctgggaattgaaaccttgggtgaagtattcaccaagattattgaacgcaacaccacaattcctactagtaagtcacaaattttttccacagcagttgatggacaaacctcggtagaaattcacattctccaaggtgaacgggcaatgtcacgggataacaagagtcttggcaagtttcttctagcaggcattcccccatcgccccgtggtgtgccgcaaattgaagtatcttttgaaattgatgtcaacggtatcttgaaggtttctgcccaagacaaaggcacaggtagagaacagagtatcaggattaccaatacaggtggcttgagtactaacgaagtcgaacggatgcgccaagaggccgaactgttttctgaagaagatagaagacgtaaagaactggttgaactcaaaaaccaagcagataatctgttgttcagttacgaatctaccatcaaggataatagcaactttatcggcgagcagatgaagactttggctagtgaaaaagtttcacaactccaagctgcaatgattgactccagcatctcgactgtggaatttaagcagcgcttagacgagttccaacaaacactgtttgcaattggtgctgatgtctataaccgagctaacagccaaacagatgagattgaggaggcttcagctagtctttttaccccagaagtagactcaccaatgaacggtacactaataccacaattcaactttgattttgacgaagaaagtaccgcacaggttgattatgaggcgatagattag

SEQ ID NO: 48363 - protein, 652 aa, Nostoc punctiforme PCC 73102
MGKVIGIDLGTTNSCVAVLEGGQPLVISNSEGGRTTPSIVGFGKSGDRLVGQLAKRQAVTNAENTIYSIKRFIGRRWEDTDTERERVPYNCVKGRDDTVDVQIRSKNYTPQELSAMILQKLKQDAENFLGEEVTQAVITVPAYFTDAQRQATKDAGTIAGLEVLRIINEPTAAALAFGLEKQDQEQLILVFDLGGGTFDVSILQLGDGVFEVKATCGNNHLGGDDFDNAIVRWLMERFQQQEKIDLSQDKMALQRLREAAEKAKIELSSMVNTSVNLPFITSDETGPKHLEMEFSRSKFEELAGKLIEGTIEPMIQALKDADLKPSAIDRIILVGGSTRIPAVQNALIKFFNGKAPDRSINPDEAVALGAAIQAGVLGGEVDNLLLLDVTPLSLGIETLGEVFTKIIERNTTIPTSKSQIFSTAVDGQTSVEIHILQGERAMSRDNKSLGKFLLAGIPPSPRGVPQIEVSFEIDVNGILKVSAQDKGTGREQSIRITNTGGLSTNEVERMRQEAELFSEEDRRRKELVELKNQADNLLFSYESTIKDNSNFIGEQMKTLASEKVSQLQAAMIDSSISTVEFKQRLDEFQQTLFAIGADVYNRANSQTDEIEEASASLFTPEVDSPMNGTLIPQFNFDFDEESTAQVDYEAID

SEQ ID NO: 48364 - DNA, 1908 bp, Haemophilus somnus 2336
  CDS (1)..(1908): transl_table=11
atgggaaaaattatcggtattgacttaggaacaacaaactcttgtgtggctgtaatggacggcgacaaaccacgtgtcattgaaaacgctgaaggcgaacgcacaaccccatccattattgcttatacaaatgataatgaaaccttagtaggacaaccagcgaaacgtcaggctgtgacgaacccgaaaaatacattatttgcgatcaaacgtttaattggtcgtcgctttgaagatcaagaagtacaacgtgacgttgctattatgccttttgaaatcactaaagccgataacggcgatgcttgggtatcggtaaaaggtgaaaaaatggcacctccgcaaatttcagctgaagtgttgaaaaaaatgaaaaaaactgcggaagattttttaggtgaaacagtgacggaagctgtaatcacagtgccggcttattttaatgacgcacaacgccaagcaacaaaagatgccggacgtattgccggtcttgaagtcaaacgtattattaacgaaccgacagcggcggctcttgcttatggtttagataaaggtaaaggcaaccaaacaattgccgtttatgacttgggtggtggtacatttgacttatctattatcgaaatcgatgaagtcggtggcgaaaaaacgtttgaagttttagcaacaaacggagatactcacctagggggggaagactttgacaaccgtgtaattaactacctagttgatgagttcaaaaaagaacagggcgtagatttacgtaacgatccacttgcaatgcaacgtttaaaagaagctggtgaaaaagcaaaaattgagctttcttccgctcaacaaactgatgtcaatttaccttatatcactgctgatgctaccggacctaaacatttaaacattaaattgactcgtgcgaaattagaagcgttagtggaagatttagttgcacgttcaatggagcctgtgaaagttgcactttccgatgcaggtttaagcgtttccgaaatcaatgatgtcattttggtgggcggacaaacccgtatgccgttagtacaacagaaagtcgctgaattctttggtaaagagcctcgcagagacgttaacccggatgaagcggttgctattggtgcagctgtacaaggcggtgttttagccggtgatgttaaagatgttttattgttagacgtaacaccattatcactcggtattgaaacaatgggcggcgtgatgacaactttgattgagaaaaatacaacaattccgacgaaaaaatcgcaagtattttcaaccgctgaagataatcaaagtgcggtgactattcacgtacttcaaggggaacgtaaacaagcctctgccaataagtctttaggtcaatttaatcttgaaggtattaaccctgcaccacgtggtatgcctcaaattgaagtaacctttgatattgatgcagatggtattatccatgtttcagcaaaagataaaggtactggtaaagaacaaaaaattacgattaaagcatcttcaggtttaagtgatgaagaaattcaacaaatggttcgtgatgcggaagctaatgcggaagcggatcgtaaatttgaagagttagttcaagctcgtaaccaagcggatcacttagtacatagtacccgcaaacaattagcagaagttggagagaaattatcagctgaagacaaagcaccaattgaaagtgcggtcaatgaacttgaaactgcggcaaaaggtgaagataaaactgaaattgatgccaaagtacaagcattaattcaagtttccgaaaaactacttcaagcaagtcaacaacaagcacaagctgatgccggtgcacaacaatctcaaagtacgaaaggtggagaggatgttgttgatgctgaatttgaagaagtaaaagataaataa

SEQ ID NO: 48365 - protein, 635 aa, Haemophilus somnus 2336
MGKIIGIDLGTTNSCVAVMDGDKPRVIENAEGERTTPSIIAYTNDNETLVGQPAKRQAVTNPKNTLFAIKRLIGRRFEDQEVQRDVAIMPFEITKADNGDAWVSVKGEKMAPPQISAEVLKKMKKTAEDFLGETVTEAVITVPAYFNDAQRQATKDAGRIAGLEVKRIINEPTAAALAYGLDKGKGNQTIAVYDLGGGTFDLSIIEIDEVGGEKTFEVLATNGDTHLGGEDFDNRVINYLVDEFKKEQGVDLRNDPLAMQRLKEAGEKAKIELSSAQQTDVNLPYITADATGPKHLNIKLTRAKLEALVEDLVARSMEPVKVALSDAGLSVSEINDVILVGGQTRMPLVQQKVAEFFGKEPRRDVNPDEAVAIGAAVQGGVLAGDVKDVLLLDVTPLSLGIETMGGVMTTLIEKNTTIPTKKSQVFSTAEDNQSAVTIHVLQGERKQASANKSLGQFNLEGINPAPRGMPQIEVTFDIDADGIIHVSAKDKGTGKEQKITIKASSGLSDEEIQQMVRDAEANAEADRKFEELVQARNQADHLVHSTRKQLAEVGEKLSAEDKAPIESAVNELETAAKGEDKTEIDAKVQALIQVSEKLLQASQQQAQADAGAQQSQSTKGGEDVVDAEFEEVKDK

SEQ ID NO: 48366 - DNA, 1899 bp, Actinobacillus pleuropneumoniae serovar 1 str. 4074
  CDS (1)..(1899): transl_table=11
atgggtaaaatcattggtattgacttaggtacaacaaactcttgtgtagcggtaatggacggtgacaaagcacgtgtaatcgagaatgcggaaggtgcacgtacaactccgtcaatcattgcttatacggataacgaaacgttagttggtcaaccggcaaaacgtcaggcgattacaaacccgaaaaatacattatttgcaatcaaacgtttaatcggtcgtcgttttgaaagtgaagaagtacaacgcgatattaaaattatgcctttcgaaatcacacgtgctgacaacggcgatgcatgggtaaacgtaaaaggcgataagttagcaccaccgcaaatttcagcagaagtgttgaaaaaaatgaaaaaaacagcggaagatttccttggtgaagcggtaactgaagcggttatcactgtgccggcatactttaacgatgcgcaacgtcaagcgacaatcgatgcaggtcgtatcgcaggtttagatgttaaacgtatcatcaacgaaccgacagcagcagcgttagcgttcggtttaggttcaactaaagaaaaccaagtgatcgcagtttacgacttaggtggtggtacattcgatatctcaatcatcgaaatcgataacttcgacggcgaacaaacattcgaagtattagcaaccggcggtaacactcacttaggtggtgaggacttcgataaccgtgtaatcgactacattattgacgagttcaaaaaagaacaaggcgtggatttacgcaacgacccaatggcattacaacgtgttaaagaagcggcggaaaaagcgaaaatcgaactttcttcagcacaatctaccgaagtaaatcttccgtatatcacagcggatgcgacaggtcctaaacacttagcgatcaacgtaacccgtgcgaaattagaagcattagtagaagatttagttgcaagctcaatcgagtcacttaaaaccgtattaaaagacgcaggtaaatcagtgaatgaaatcaacgacattatcctcgttggtggtcaaacacgtatgccgttagtacaacaaaaagtggctgaattcttcggtaaagaagctcgtaaagacgtgaatccggatgaagcggtagcaatcggtgctgcagttcaaggcggtgtattaaaaggtgatgtaaaagacgttcttttattagacgttacaccattatctttaggtatcgaaactatgggcggcgtgatgaccgtgttaattgagaaaaacactacgattccaacgaagaaatcacaagtgttctcaaccgcggaagacaatcaatcagcggtaacgatccacgtattacaaggtgagcgtaaacaagcgtctgcgaacaaatctttaggtcaattcaaccttgaaggtattaacccagcaccacgtggtatgccgcaaatcgaagtaactttcgatatcgatgcgaacggtgtaatcaacgtatctgcgaaagataaaaatacaggtaaagagcaacaaatccgtatccaagcgtcttcaggtttatctgacgaagaaatcgaacaaatggttcgtgatgcggaagctaacgcagaagcggataaaaaattcgaagagttagttcaagcacgtaaccaagcggacggtatcgcgcatgcaactcgtaaacaaatcgaagaagctggtgatgcgttaaatgcagatgataaagcgaaaatcgaagcagctatcgctgacttagaaaaagcggctaaaggcgatgataaagcagaaatcgatgcgaaaactgaagcgttaatcaaagcgtccgaacctttaatgcaagcggctcaagctaaagcgcaagcaggtgaacaaccgcaacaatctgcaaaagatgacggcgtagtggatgctgagtttgaagaagtgaaagataataaataa

SEQ ID NO: 48367 - protein, 632 aa, Actinobacillus pleuropneumoniae serovar 1 str. 4074
MGKIIGIDLGTTNSCVAVMDGDKARVIENAEGARTTPSIIAYTDNETLVGQPAKRQAITNPKNTLFAIKRLIGRRFESEEVQRDIKIMPFEITRADNGDAWVNVKGDKLAPPQISAEVLKKMKKTAEDFLGEAVTEAVITVPAYFNDAQRQATIDAGRIAGLDVKRIINEPTAAALAFGLGSTKENQVIAVYDLGGGTFDISIIEIDNFDGEQTFEVLATGGNTHLGGEDFDNRVIDYIIDEFKKEQGVDLRNDPMALQRVKEAAEKAKIELSSAQSTEVNLPYITADATGPKHLAINVTRAKLEALVEDLVASSIESLKTVLKDAGKSVNEINDIILVGGQTRMPLVQQKVAEFFGKEARKDVNPDEAVAIGAAVQGGVLKGDVKDVLLLDVTPLSLGIETMGGVMTVLIEKNTTIPTKKSQVFSTAEDNQSAVTIHVLQGERKQASANKSLGQFNLEGINPAPRGMPQIEVTFDIDANGVINVSAKDKNTGKEQQIRIQASSGLSDEEIEQMVRDAEANAEADKKFEELVQARNQADGIAHATRKQIEEAGDALNADDKAKIEAAIADLEKAAKGDDKAEIDAKTEALIKASEPLMQAAQAKAQAGEQPQQSAKDDGVVDAEFEEVKDNK

SEQ ID NO: 48368 - DNA, 1830 bp, Fusobacterium nucleatum subsp. vincentii ATCC 49256
  CDS (1)..(1830): transl_table=11
atgagtaaaataataggaattgatttaggaacaacaaactcttgtgtagcaataatggaaggtggaaatgtaacaataataccaaactctgaaggagcaagaacaactccatcagttgtaaatattaaagataatggtgaagtggttgtaggagaaatagcaaaaagacaagctgttacaaatcctacttcaacagtaagttcgatcaaaactcatatgggttctgattacaaagtagaaatttttggaaagaaatatactccacaagaaatttctgctaaaatattacaaaaattgaaaaaagatgctgaagcttacttaggtgaagaagttaaagaagcagttatcacagtaccagcttactttactgactctcaaagacaagctacaaaagatgctggaacaatagcaggattagatgtaaaaagaattataaatgaaccaactgctgctgctcttgcttatggacttgaaaagaaaaaagaagaaaaagtattagtatttgatcttggtggaggaacatttgacgtatctgttcttgaaatatcagatggtgttatagaagttatatcaacagcaggaaacaaccacttaggtggagatgattttgataatgaagttataaattggttagttacagaatttaagaaagaaactggaattgatttatcaaatgataaaatggcttaccaaagattaaaagatgcagctgaaaaagctaaaaaagaattatcaacattaatggaaacttcaatttcattaccattcataactatggatgcaacaggacctaaacacttagaaatgaaattgacaagagcaaaattcaatgatttaacaaaacatcttgttgaagcaacacaaggacctacaaaaacagctttaaaagatgcaaatcttgatgcaaatcaaatagatgaaatcttacttgttggaggttctacaagaataccagcagttcaagaatgggttgaaaatttctttggaaagaaacctaataagggaataaaccctgatgaagttgttgctgcaggtgctgcaatacaaggtggagtattaatgggagatgttaaagatgtattacttcttgatgtaactccattatcattaggaattgaaactcttggtggagtatttacaaagatgatagaaaagaatactactatcccagttaagaagtcacaagtgtattcaacagctgtggataaccaaccagcagttactataaatgtattacaaggagaaagatcaagagctgctgataaccataaattaggagaatttaaccttgaaggtatccctgctgctccaagaggtgtacctcaaatagaagttacatttgatatagatgctaatggtatagttcatgtatctgcaaaagatttaggaacaggaaaagaaaataaagtaactatctctggttcaagtaatctttcaaaagaagaaattgaaagaatgactaaggaagcagaagcacatgcagaagaagataaaaaattccaagaattagttgaaactagaaataaagcagaccaattaatctctgctactgaaaaaactttaaaggaaaatcctgataaagtaagtgaaggagataagaaaaatatagaagctgctattgaagaattgaagaaagttaaagatggagatgataaatctgcaatagactcagctatggaaaaattatctcaagcatctcataaatttgcagaagaattatataaagaagctcaagcacaggcacaagctcaacaacaagctggtgcaggagctaatgcaggttctgataaaaaagatgaagatgtggcagaagcagaagttgtggactaa

SEQ ID NO: 48369 - protein, 609 aa, Fusobacterium nucleatum subsp. vincentii ATCC 49256
MSKIIGIDLGTTNSCVAIMEGGNVTIIPNSEGARTTPSVVNIKDNGEVVVGEIAKRQAVTNPTSTVSSIKTHMGSDYKVEIFGKKYTPQEISAKILQKLKKDAEAYLGEEVKEAVITVPAYFTDSQRQATKDAGTIAGLDVKRIINEPTAAALAYGLEKKKEEKVLVFDLGGGTFDVSVLEISDGVIEVISTAGNNHLGGDDFDNEVINWLVTEFKKETGIDLSNDKMAYQRLKDAAEKAKKELSTLMETSISLPFITMDATGPKHLEMKLTRAKFNDLTKHLVEATQGPTKTALKDANLDANQIDEILLVGGSTRIPAVQEWVENFFGKKPNKGINPDEVVAAGAAIQGGVLMGDVKDVLLLDVTPLSLGIETLGGVFTKMIEKNTTIPVKKSQVYSTAVDNQPAVTINVLQGERSRAADNHKLGEFNLEGIPAAPRGVPQIEVTFDIDANGIVHVSAKDLGTGKENKVTISGSSNLSKEEIERMTKEAEAHAEEDKKFQELVETRNKADQLISATEKTLKENPDKVSEGDKKNIEAAIEELKKVKDGDDKSAIDSAMEKLSQASHKFAEELYKEAQAQAQAQQQAGAGANAGSDKKDEDVAEAEVVD

SEQ ID NO: 48370 - DNA, 1884 bp, Rickettsia rickettsii
  CDS (1)..(1884): transl_table=11
atgggaaaagtaataggtatcgaccttgggactaccaactcttgtgttgcagtcatggaaggtaaagaaccaaaggtaatagaaaatgcagaaggtgaaagaactaccccgtcaataatagcttttgcaaacggcgaaaaattagtcgggcaatctgctaagaggcaagcagtaactaaccctcgcaatactatatatgcggtaaagcgattaatcggtagaaattttatcgatcctatggttaggaaagaccaaggtattgtaccgtataatatagtgaaagccgataacggggatgcatgggtcgaagcggataataataaatattcaccaagtcaaattagtgcattcattttacaaaaaatgaaagaaactgctgagaattatttaggggacaaagtaacacaagcagtaattaccgtacctgcttattttaatgatgcacagcgtcaagcaacgaaagacgctggtaaaatagcaggtcttgaggtccttagaataatcaacgagccgactgctgcagctcttgcttacggtttcgagaaatcggcaagtaaaactattgcagtatacgatcttggcggcggaacattcgatgtttcaattcttgagatctctgacggtgtttttgaagtgaaatcaacaaacggcgatacattccttggcggtgaagatttcgatacaagaatattaaaccatttaatagatgtattcaaaaaagaaaacggtatagatttaagtaaagatcctttagcacttcaacgtttgaaagaagccgcagaaaaagctaagaaagagctatcttctgcagtaactaccgatattaatttaccttatattacggctgatagtagcggtccaaaacacttaaatattaaatttactagagctgaactagaaaaattagtagatgatttaattgaaaaaacaattgagccttgccgtaaagcattacaggatgcaggttttaaagcttctgatattcaagaagtagtattagtaggcggtatgactagaatgccgaaagtacaagaagccgtaaaaaaattcttcggacgtgagccgcataaaggcgtaaatcccgatgaggttgtagctcttggtgctgctattcaaggcggagtactgaataaagaagtaacggatatattattattagacgttacacctctatcccttggcattgaaactcttggcggtgtatttacaagattaattgatcgtaatactactatacctactaagaaaagtcaggtattctcaactgctgatgataaccagcatgccgtaactattagagtattccaaggtgaacgtgaaatggcaaaagataataaattacttggtcagtttaatctcgaaggtatacctcctgcaccaagaggtttgccacaaatagaagtaacgtttgacattgatgctaacggaatagtgcatgtttcagctaaagataaagcaagcggtaaagagcagaaagtaactattcaagcttccggtggtcttagcgatgcagaaattgaacaaatggttaaagatgccgaacaaaatgctgatgaagacaaaaagcgtaaggaacttattgaagcaaaaaatgctgccgatagtttagtttattctactgaaaaaactcttacagaatatggcgataaattatcatcagacgataaaggagctgttgaagaagcattagccgctttaaaagccgtgcttgagtcggaagatactgctttgattaaagaaaagactgcaagtttaactgcagctagcatgaaaatcggtgaagcgatgtataaagcacaaagcgagagccaacctgctgcagaaaatgccactaatgatgaaaaaatagtagatgccgactttcaagatgtagagaagaagtag

SEQ ID NO: 48371 - protein, 627 aa, Rickettsia rickettsii
MGKVIGIDLGTTNSCVAVMEGKEPKVIENAEGERTTPSIIAFANGEKLVGQSAKRQAVTNPRNTIYAVKRLIGRNFIDPMVRKDQGIVPYNIVKADNGDAWVEADNNKYSPSQISAFILQKMKETAENYLGDKVTQAVITVPAYFNDAQRQATKDAGKIAGLEVLRIINEPTAAALAYGFEKSASKTIAVYDLGGGTFDVSILEISDGVFEVKSTNGDTFLGGEDFDTRILNHLIDVFKKENGIDLSKDPLALQRLKEAAEKAKKELSSAVTTDINLPYITADSSGPKHLNIKFTRAELEKLVDDLIEKTIEPCRKALQDAGFKASDIQEVVLVGGMTRMPKVQEAVKKFFGREPHKGVNPDEVVALGAAIQGGVLNKEVTDILLLDVTPLSLGIETLGGVFTRLIDRNTTIPTKKSQVFSTADDNQHAVTIRVFQGEREMAKDNKLLGQFNLEGIPPAPRGLPQIEVTFDIDANGIVHVSAKDKASGKEQKVTIQASGGLSDAEIEQMVKDAEQNADEDKKRKELIEAKNAADSLVYSTEKTLTEYGDKLSSDDKGAVEEALAALKAVLESEDTALIKEKTASLTAASMKIGEAMYKAQSESQPAAENATNDEKIVDADFQDVEKK

SEQ ID NO: 48372 - DNA, 1908 bp, Haemophilus influenzae R2866
  CDS (1)..(1908): transl_table=11
atgggaaaaattattggtattgacttaggtacaacaaactcttgtgtagctgtaatggacggcgacaaagctcgcgttattgaaaatgcagaaggtgcacgtactactccgtcaatcattgcatatacagataatgaaaccttagttggtcagccagcaaaacgccaagcaatcactaacccgaaaaatactttgtttgcgattaaacgtttaattggtcgtcgttttgaaagtgaagaagttcaacgcgatattaaaattatgcctttcgaaattactcgtgccgacaatggtgatgcgtgggtaaacgtgaaaggcgacaaattagccccgccacaaatctctgctgaagtattgaaaaaaatgaaaaaaactgcagaagatttcttgggtgaagcggtaactgaagcagtaattactgtgcctgcatactttaatgatgcacaacgtcaagcaacgattgatgcaggtaaaattgcaggcttagatgtaaaacgtatcattaatgaaccaacagcggctgcgttagcgtttggtttaggttcaagcaaagagaaccaagtgatcgctgtttacgacttaggtggtggtacatttgatatttcaatcatcgaaattgataactttgatggcgaacaaactttcgaagtattggcaaccggtggtaacactcacttaggtggtgaagactttgataaccgtgtcattgattacattattgatgagttcaaaaaagaacaaaatatcgatttacgtaatgatgctatggcattacaacgtgtgaaagaagctgcagagaaagcaaaaattgaactttcatcagctcaatctactgaagtgaaccttccgtacatcactgcagatgcgacaggccctaaacacttagcattaaatatcactcgtgcaaaattagaagcattagtagaagatttagtggcaagctcaattgagtctttgaaagcggtattaaaagatgcagataaaggtgtaagcgaaatccacgatattattcttgtgggtggccaaactcgtatgccacttgtacaacaaaaagttgctgagttctttggtaaagaagcgcgtaaagatgtaaaccctgatgaagcggtggcaatcggtgcggcagttcaaggtggtgtattaaaaggtgatgtgaaagatgttcttttattagacgtaactccattatctttaggtatcgaaaccatgggcggtgtgatgaccactttaattgagaaaaataccacgattccaactaaaaaatcgcaagtattctcaacagcagaagataaccaaagtgcggtaactattcacgttcttcaaggcgaacgtaaacgtgcggcagacaataaatctttaggtcaattcaacctagaaggtattaatcctgcgccgcgtggtatgccacaaattgaagtaacatttgatatcgatgcaaacggcgtaatcaacgtatcagcaaaagataaaaatacgggtaaagagcaacaaattcgtattcaagcatcatctggtttatctgatgaagaaattcaacaaatggtgcgtgatgcagaagcaaatgctgatgcagaccgtaaatttgaagaagttgttcaagctcgtaaccaagcagatggtattgctcacgcaacacgtaaacaaattgcagaagctggcgatgcattgaatgtcgcagacaaagagaaaattgaagcagtagtcgctgagcttgaaacagcagcaaaaggcgaagataaagcagaaattgaagcaaaaattgaagcggtaattaaagcctctgaaccattaatgcaagcagtgcaagcaaaagctcaacaagctggtggcgagcaaccacaacaatcatcagcaaaagatgatggcgtggtagatgctgaatttgaagaagtgaaagataataaataa

SEQ ID NO: 48373 - protein, 635 aa, Haemophilus influenzae R2866
MGKIIGIDLGTTNSCVAVMDGDKARVIENAEGARTTPSIIAYTDNETLVGQPAKRQAITNPKNTLFAIKRLIGRRFESEEVQRDIKIMPFEITRADNGDAWVNVKGDKLAPPQISAEVLKKMKKTAEDFLGEAVTEAVITVPAYFNDAQRQATIDAGKIAGLDVKRIINEPTAAALAFGLGSSKENQVIAVYDLGGGTFDISIIEIDNFDGEQTFEVLATGGNTHLGGEDFDNRVIDYIIDEFKKEQNIDLRNDAMALQRVKEAAEKAKIELSSAQSTEVNLPYITADATGPKHLALNITRAKLEALVEDLVASSIESLKAVLKDADKGVSEIHDIILVGGQTRMPLVQQKVAEFFGKEARKDVNPDEAVAIGAAVQGGVLKGDVKDVLLLDVTPLSLGIETMGGVMTTLIEKNTTIPTKKSQVFSTAEDNQSAVTIHVLQGERKRAADNKSLGQFNLEGINPAPRGMPQIEVTFDIDANGVINVSAKDKNTGKEQQIRIQASSGLSDEEIQQMVRDAEANADADRKFEEVVQARNQADGIAHATRKQIAEAGDALNVADKEKIEAVVAELETAAKGEDKAEIEAKIEAVIKASEPLMQAVQAKAQQAGGEQPQQSSAKDDGVVDAEFEEVKDNK

SEQ ID NO: 48374 - DNA, 1884 bp, Rickettsia akari str. Hartford
  CDS (1)..(1884): transl_table=11
atgggaaaagtaataggtattgaccttgggactactaactcttgtgttgcagtcatggaaggtaaagagccgaaagtaatagaaaatgcagaaggtgagagaactacgccgtcaataatagcttttgcaaatggcgaaaaattagttggacaatcagctaagagacaagcagtaaccaatcctagcaatactatatatgcggtaaagcgattaatcggtagaaattttaccgatcctatggttaagaaagaccaggatatcgtaccatataatatagttaaagccgataacggtgacgcatgggtcgaagcggatagcaataaatattcaccaagccaaattagtgcttttattttacaaaaaatgaaagaaactgccgaaaattatttaggcgaaaaagtaacgcaagcagtaattaccgtacctgcttattttaatgatgcacagcgtcaagcaacgaaagatgcaggtaaaatagcaggtcttgaggtacttagaataattaacgagccgactgccgcagctcttgcttacggtttcgataaagcggccagtaaaactattgcagtatacgatcttggcggcggaacgttcgatgtttcaattcttgaaatcggtgacggtgtttttgaagtaaaatcaacgaacggtgatacattccttggcggcgaggattttgatacaagaatattaaaccatttaatagatgtattcaaaaaagaaagcggtatagatttacgtaatgatcctttagcacttcaacgtttaaaagaagcggcagaaaaggctaaaaaagagctatcttccgcagtaactactgatattaatttaccttatattacagctgatagtacaggaccaaaacatttaaatattaaatttactagagcagaattcgaaaaattagtagatgatttaattgaaaaaaccgttgagccttgtattacagcattaaaggatgcaggtttaaaggcttctgatattcaggaggtagtgcttgtcggcggtatgactagaatgccgaaagtacaagaagctgtaaagaaattttttgggcgcgaacctcataagggcgtgaatcctgatgaggttgtagctcttggtgctgctattcagggaggggtacttaataaagaagtaacggatatattattattagacgttacgcctctatcccttggtattgaaacccttggcggcgtatttacaaggttaatcgatcgtaatactactatacctactaaaaaaagtcaggtattctcaactgcggatgataatcagcatgccgtaactattagagtgtttcaaggtgaacgtgaaatggcagcgagtaataaattacttggtcaatttaatcttgaaggcatacctcctgcaccgagaggtgttccacaaatagaggtaacatttgatattgacgttaatggaatagtgcatgtttcagctaaagataaagcaagcggtaaggagcagaaagtaactattcaggcttccggcggtcttagcgatgccgaaatcgaacaaatggttaaagatgctgaacagaatgcctatgaagataaaaaacgtaaggaacttattgaagcgaaaaatgctgcagatagtttagtttattctactgaaaagagtcttacggagtacggtgataaattatcatcagaagataaaggcgctgctgaagaagcactatctgctttaaaagctgttcttgaatcggaagatgctgctttaattaaagaaaagacagagagattaactgcagctagtatgaaaatcggtgaagcaatgtataaagcacaaagcgaaaatcagcctgctggcgaaaatactgctaacgatgacaaagtagtagatgccgattttcaggatgtagcgaagaagtaa

SEQ ID NO: 48375 - protein, 627 aa, Rickettsia akari str. Hartford
MGKVIGIDLGTTNSCVAVMEGKEPKVIENAEGERTTPSIIAFANGEKLVGQSAKRQAVTNPSNTIYAVKRLIGRNFTDPMVKKDQDIVPYNIVKADNGDAWVEADSNKYSPSQISAFILQKMKETAENYLGEKVTQAVITVPAYFNDAQRQATKDAGKIAGLEVLRIINEPTAAALAYGFDKAASKTIAVYDLGGGTFDVSILEIGDGVFEVKSTNGDTFLGGEDFDTRILNHLIDVFKKESGIDLRNDPLALQRLKEAAEKAKKELSSAVTTDINLPYITADSTGPKHLNIKFTRAEFEKLVDDLIEKTVEPCITALKDAGLKASDIQEVVLVGGMTRMPKVQEAVKKFFGREPHKGVNPDEVVALGAAIQGGVLNKEVTDILLLDVTPLSLGIETLGGVFTRLIDRNTTIPTKKSQVFSTADDNQHAVTIRVFQGEREMAASNKLLGQFNLEGIPPAPRGVPQIEVTFDIDVNGIVHVSAKDKASGKEQKVTIQASGGLSDAEIEQMVKDAEQNAYEDKKRKELIEAKNAADSLVYSTEKSLTEYGDKLSSEDKGAAEEALSALKAVLESEDAALIKEKTERLTAASMKIGEAMYKAQSENQPAGENTANDDKVVDADFQDVAKK

SEQ ID NO: 48376 - DNA, 1920 bp, Crocosphaera watsonii WH 8501
  CDS (1)..(1920): transl_table=11
atgggaaaagttgtcggtattgatttaggaaccactaactcttgtgtagcggtaatggaagggggaaaacccaccgttatcgccaacgcagaagggtttagaaccaccccctctgtagtcgcttatgccaaaaacggcgatcgcttagtgggacagatcgctaagcgtcaaggggtaatgaaccccgataacactttttattcagtgaaacgctttattggtcgtaaacacgaagaagtgaccaacgaagctacagaagtatcatataaagtcttacgagatagcaacgccaacgttaaactagattgtccggcccaaagcaaacaatttgcccccgaagaaatctcggcacaggttctccgtaaattagtcgaagatgccagtaaatacctcggtgaaaccgttaccgaagcagtaattaccgttcctgcttattttaacgactctcagcgtcaagctaccaaagacgcgggaaaaattgccggaattgaagtaaaacggattatcaacgaacccaccgccgcttctttggcctacgggttagataaaaagagtaacgaaaccatcctcgtctttgacttagggggtggaaccttcgacgtatccattctcgaagtaggggacggtgtatttgaagtattagctacttctggagacacccacttaggaggggacgactttgataaaaaaattgtcgactttctcgccggagaattccaaaaaaatgaagggattgatctacgcaaagataaacaagctttacaacggttgaccgaagcagccgagaaagccaaaattgaactctctagcgtcacccaaagcgaaattaacctgcccttcatcaccgctacccaagaaggtcccaaacacctcgacactactttaacacgggcgcaatttgaagaactctgttccgatctcatcgatcgcagtcgcatccccgtagaaaaatctatgaaggatgctaaactcagcaatagcgacatcgatgaagtggtactggttgggggttccacccgtattcctgcggtacaagagttagtccaaaaaatcctcaacaaagaacccaacaaaggggttaaccccgatgaagtggtggctatgggtgcagccattcaagggggtgtattagccggggaagtcaaagatatccttctgttggatgtaacacctctctccttgggtgtagaaaccttgggcggtgtcatgaccaaaattattccccgtaacaccaccattcccaccaaaaaatccgaggtattctccactgcggttgatggccaaagtaatgtagaaattcatgttctgcaaggggaaagggaaatggccaatgataacaaagacttaggtttattccgcttagatggtattcctgctgcacctcgtggcgttcctcaaatcgaagttacctttgatatcgatgctaatggtatcctcaatgtgactgccaaggataaaggcaccggtaaagaacagtccattagtattaccggggcttctaccttaccggataacgaagtcgatcgcatggttaaagaagcggaagctaatgctaatgaagataaggaacgtcgggaaaaaattgaccgtaagaaccaagctgactctttagtttatcaagctgataaacaactgagtgagttaggggataaaattcctgaagcagacaaaactaaagctgaagggttgatcaaagacctcaaagatgcgatcgcccaagacgatgatgataaaatcaagtctttaaccgaagagttacaacaactgctttacagcattggtagcagcgtttatcaacaagctggtggtgcgcctggtgaggcccctggtgctgatgctggaacccctcctggtggcggaacttctagcggtggcgatgatgtcattgacgcagaattttctgagtctgatcctaaataa

SEQ ID NO: 48377 - protein, 639 aa, Crocosphaera watsonii WH 8501
MGKVVGIDLGTTNSCVAVMEGGKPTVIANAEGFRTTPSVVAYAKNGDRLVGQIAKRQGVMNPDNTFYSVKRFIGRKHEEVTNEATEVSYKVLRDSNANVKLDCPAQSKQFAPEEISAQVLRKLVEDASKYLGETVTEAVITVPAYFNDSQRQATKDAGKIAGIEVKRIINEPTAASLAYGLDKKSNETILVFDLGGGTFDVSILEVGDGVFEVLATSGDTHLGGDDFDKKIVDFLAGEFQKNEGIDLRKDKQALQRLTEAAEKAKIELSSVTQSEINLPFITATQEGPKHLDTTLTRAQFEELCSDLIDRSRIPVEKSMKDAKLSNSDIDEVVLVGGSTRIPAVQELVQKILNKEPNKGVNPDEVVAMGAAIQGGVLAGEVKDILLLDVTPLSLGVETLGGVMTKIIPRNTTIPTKKSEVFSTAVDGQSNVEIHVLQGEREMANDNKDLGLFRLDGIPAAPRGVPQIEVTFDIDANGILNVTAKDKGTGKEQSISITGASTLPDNEVDRMVKEAEANANEDKERREKIDRKNQADSLVYQADKQLSELGDKIPEADKTKAEGLIKDLKDAIAQDDDDKIKSLTEELQQLLYSIGSSVYQQAGGAPGEAPGADAGTPPGGGTSSGGDDVIDAEFSESDPK

SEQ ID NO: 48378 - DNA, 2223 bp, Crocosphaera watsonii WH 8501
  CDS (1)..(2223): transl_table=11
atgggcaaagtagtcggcattgatctggggacaactaattctgtcgttgcagtaatggaaggcggaaaaccagtcgtgatcgccaactcagaaggaatgcgtactaccccttctgtggttggcttcaataaagatggagaattagtcgttggacaaatggccagacgacaagcggttttgaacccccaaaacacctattatggggtgaagcggtttatgggacgaaaatacccagaattaacccccgaatcaaaacaagttccctacaccatccgtcgggatgaatacggtagcattaaaataaaatgtcctcgcctcaaaaaagactttgctcccgaagaaatttcagctaaaattctccgtaaattggcagaagaagcggaacgctacttaggagaacctgttacaggagccgtgatcaccgttccggcctattttaacgattcccaacgccaagccactcgggacgctggcagaatcgctggattagaggttttacgaattatcaacgaacccacagcagcgtcattggcctatgggttggatcaagaaaggtcacaaaaaattctcgtctttgacttaggaggaggaactttcgatgtatctgtgttggaagtgggagatggagtgtttgaagtcagagctaccagtggggatacccaactaggaggaggagactttgataaacgcattgtcgattggttggccgagcaatttttagaacaggaaaaagtcgaccttcgtaaagatagacaagcattacaacggctgacagaagcagcagaaaaggcgaaaattgagctatcaggggtcagtgtcaccgatattaacctccccttcattactgccaccgaagagggttccaagcacatagaaacccgtctgatgcgccctcaattcgaggatctctgcggagacttagtaagtcgtctcactcgtcccattaaacgggctttgaacgatgctagattaacccctgtacagatcgatgaggtggtgttagtgggtggggggactagaatgcccatgatcaaagccctggtacggagttttatcgataaagaacccaacgaaaatgttaaccccgatgaagtagtagcggtgggggcggccattcaatcgggtattttggcaggggaagtgaaagaaatcttgttattggatgttactcctctgtctttgggtttggaaaccattggaggtgtcactaaaaagttgataccccgtaacaccactattcctgtacgtcgttccgatatcttttctactggggaaaataatcaaactatggtagaggttcatgtggtgcaaggagaaagggaaatgtctaaggataataaatccttgggacggtttaaattaacagggataccaccagcaccaaggggcattcctcaagtgcaggtagcttttgatatcgacgctaacggaattttacaggtgacggcacgcgatcgcaccacaggcagagaacaaagtgtggtggttcaaggtgcttctactcttagcgaaggggaaattaatcggatgattaatgaagcagcggagtttgctgaggaagatagacagagaagggaaaggatcgaaaaacggaataaggccaaagctctaacggatcaggcattacgtcgtttaaaagacgttactttggactttggaacccaatttaccagtggttatcgtcgtcaaatcgaagctttaaatgcagagatcatggatagtttagataaagacgacgaaagacgactagatcgggcgcaagcagacttagaagatgttttgtacgaactgaagcgagaagtgcgtttacaatatgaggatgaagaagatgagggcatttttgattctatccgtcgtaccctagtgggagacgatgaggacgactatccttatactccccgtggttcaagttatggtaacgattatgatacaccccgttatccagaaagatcagactatggacaaccccgttacgatgaacgtcgttatgatgagcgtcaaacctatggttctcctccttctcgttatgaacgcaatgatcgttacgatgacgaatacgatgaatgggacagcggcgatcgccccagtccccgatcccgtcgtccttctcctgaaccccgtcgctatcctcccaaagactccgatagctattacacccgcgatcgctcccgtcgtattcccaaagaaaaccaatgggatgaagaggatgatgattggttttga

SEQ ID NO: 48379 - protein, 740 aa, Crocosphaera watsonii WH 8501
MGKVVGIDLGTTNSVVAVMEGGKPVVIANSEGMRTTPSVVGFNKDGELVVGQMARRQAVLNPQNTYYGVKRFMGRKYPELTPESKQVPYTIRRDEYGSIKIKCPRLKKDFAPEEISAKILRKLAEEAERYLGEPVTGAVITVPAYFNDSQRQATRDAGRIAGLEVLRIINEPTAASLAYGLDQERSQKILVFDLGGGTFDVSVLEVGDGVFEVRATSGDTQLGGGDFDKRIVDWLAEQFLEQEKVDLRKDRQALQRLTEAAEKAKIELSGVSVTDINLPFITATEEGSKHIETRLMRPQFEDLCGDLVSRLTRPIKRALNDARLTPVQIDEVVLVGGGTRMPMIKALVRSFIDKEPNENVNPDEVVAVGAAIQSGILAGEVKEILLLDVTPLSLGLETIGGVTKKLIPRNTTIPVRRSDIFSTGENNQTMVEVHVVQGEREMSKDNKSLGRFKLTGIPPAPRGIPQVQVAFDIDANGILQVTARDRTTGREQSVVVQGASTLSEGEINRMINEAAEFAEEDRQRRERIEKRNKAKALTDQALRRLKDVTLDFGTQFTSGYRRQIEALNAEIMDSLDKDDERRLDRAQADLEDVLYELKREVRLQYEDEEDEGIFDSIRRTLVGDDEDDYPYTPRGSSYGNDYDTPRYPERSDYGQPRYDERRYDERQTYGSPPSRYERNDRYDDEYDEWDSGDRPSPRSRRPSPEPRRYPPKDSDSYYTRDRSRRIPKENQWDEEDDDWF

SEQ ID NO: 48380 - DNA, 1827 bp, Exiguobacterium sibiricum 255-15
  CDS (1)..(1827): transl_table=11
atggcaaaaatcattggtattgacttaggaacaacaaactcatgtgtcgcagtaatggaaggtggagagcctgtcgttatcgcaaacgctgaaggaaaccgtacgactccatctgtcgttgctttcaaaaacggcgagcgtcaagtcggggaagtcgcaaaacgtcaagccatcacaaacccgaacacaatcatgtcgatcaaacgtcatatgggtacagactataaagtcgaagtagaaggcaaagactacacaccacaagaagtatctgccatcattcttcaaaaactcaaagcacaagcggaagactaccttggtgaaaaagtaacggaagcggtcatcacggttcctgcttactttaacgatgcagaacgccaagcaacaaaagatgcaggaacaatcgctggtcttgacgtcaaacggatcatcaacgagccgacggcagcagcacttgcttacggtcttgaaaaaggcgaagaccacacaatcctcatctatgacttaggtggcggtacattcgacgtttcgattctcgaactcggagacggtgttttcgaagtcgtttcaactgccggtgacagccgtcttggtggagatgactttgaccaaaaaatcatcgaccacttggttgcagaattcaaaaaagacaacggcatcgatcttgcccaagataaaatggcgcttcaacgcttaaaagatgctgctgaaaaagcgaagaaagacctctcaggtgtctcttccacacaaatcagtcttccgttcatcacggctggcgcagcaggtccacttcaccttgaaatgacattgtcacgtgcgaagttcgacgatttgacagctgatctcgtagaacggacgatggctccaacacgtcgtgccctcagcgatgctggcatgacaccggacaaaatcgacaaaatcatcctcgttggtggatcaacacgtattcctgcagttcaaaaagccgttcaagacttcacaggcaaagaatcattcaaaggcgttaacccggatgaagtcgttgccctcggagcagctgttcaaggtggcgtattgacaggggacgtcaaagacgttgtccttctcgacgtcacaccactttcgctcggaatcgaaacaatgggtagcgtgatgacgaaattgatcgatcgtaacacgacgatcccgacttcaaaatcacaagtcttctcaacagctgctgacaaccaaccagccgttgacatccatgttcttcaaggggaacgtccgatggcatcagacaataaaacgcttggtcgtttccaattgacagacattccgccagcacaacgtggtgtgccgcaaatcgaagttaaattcgacatcgatgcaaacggaatcgttaacgtatcagcgaaagatcttggtacgaacaaagaacaatcgatcacaatccaatcatcaagcggtttgactgaagcagacatcgaccaaatggtcaaagatgcagaagcaaacgcggatgctgataacaaacgtaaagaagaagtagaacttcgtaacgaagcggatcaacttgtcttcgcaacggataaagcagtcaaagatcttggcgagcaaattgacgcagctgataaagaaaaagcggaagcggcaaaagaaaaagtaacaactgcactcgcaggaacagacgtcgaagcgattcgttctgcaaaagacgaattatcaacggttgttcaagaattgacacaaaaagtttacgaaaacatggctcaacaacaagcgggcgctgaaggtgcgcaagctggtggacaagatgacaatgtcatggacgctgaatttgaagaagtcgacgataaagacaacaaataa

SEQ ID NO: 48381 - protein, 608 aa, Exiguobacterium sibiricum 255-15
MAKIIGIDLGTTNSCVAVMEGGEPVVIANAEGNRTTPSVVAFKNGERQVGEVAKRQAITNPNTIMSIKRHMGTDYKVEVEGKDYTPQEVSAIILQKLKAQAEDYLGEKVTEAVITVPAYFNDAERQATKDAGTIAGLDVKRIINEPTAAALAYGLEKGEDHTILIYDLGGGTFDVSILELGDGVFEVVSTAGDSRLGGDDFDQKIIDHLVAEFKKDNGIDLAQDKMALQRLKDAAEKAKKDLSGVSSTQISLPFITAGAAGPLHLEMTLSRAKFDDLTADLVERTMAPTRRALSDAGMTPDKIDKIILVGGSTRIPAVQKAVQDFTGKESFKGVNPDEVVALGAAVQGGVLTGDVKDVVLLDVTPLSLGIETMGSVMTKLIDRNTTIPTSKSQVFSTAADNQPAVDIHVLQGERPMASDNKTLGRFQLTDIPPAQRGVPQIEVKFDIDANGIVNVSAKDLGTNKEQSITIQSSSGLTEADIDQMVKDAEANADADNKRKEEVELRNEADQLVFATDKAVKDLGEQIDAADKEKAEAAKEKVTTALAGTDVEAIRSAKDELSTVVQELTQKVYENMAQQQAGAEGAQAGGQDDNVMDAEFEEVDDKDNK

SEQ ID NO: 48382 - DNA, 1923 bp, Prosthecochloris aestuarii DSM 271
  CDS (1)..(1923): transl_table=11
atgggaaagattatcggaattgaccttggcacaacaaactcatgcgttgccgtcatgcagggaacacagccaacggtcatcgaaaactctgaaggctatcggacgactccatcgatggtagcattcacaaaaaacggcgaaaggcttatcggacatgccgcaaaacgtcaggcaattaccaacgcaaaaaacactgttttttcaatcaagcgatttatgggtcgcaagtttgatgaagtacccaacgagaaaaaaatcgctccgtataaggttgtcaatatcaatggcgaggcaagagttgaaatcgacgacaaaaactactctcctcaggaaatttcagcaatgattctgcagaaaatgaagcagacagcagaagatttccttggtgagaaggttaccgaagcggtgatcaccgtaccggcatatttcaatgacgcgcagcgtcaggcaacaaaggatgctggaaaaattgcagggcttgaagtcaaacgaatcattaacgagccaactgcggcagctcttgcctatggtctcgacaagaaaaaagagaatgaaaaagtcgcggttttcgatcttggtggtggaaccttcgacatctcgatccttgaactcggtgacggtgtttttgaggtcaaatcaaccgatggcgacacccatcttggtggcgacgacttcgatcagacaatcatcgattttcttgccgacgaattcaaaaaacaggaaggcattgatctgagaactgatgctatcgcattgcagagactcaaagaagcagcagaaaaagccaaaatcgagctctcatcgagaacagataccgagatcaacctgccctttatcacagcaactcaggagggtcctaaacaccttgtcgtcaatttgacaagggcaaagttcgaagctcttgcttcaacactgtttgacaatattatggcgccatgtaaacgggcgattaaaaacgccaaagtcaacatcagcgagattgatgaagttgtcctggtaggtggttcaacccgtatcccgaaagtacaggagctggtaaaggaactctttaaaagagaacccaataaaagcgtcaatccggacgaagtagttgctgtcggtgctgcgattcagggcggcgttctgactggagaggtcagcgatgtcctgcttcttgatgtcactcccctctcattgggtatcgaaacccttggcggagtcatgacaaagttgatcgaagcaaacacaaccatcccgactaaaaagcaggaagttttttctacagctgcagacaatcagacatctgtcgaagtccatgtccttcagggtgaacgcccgatggcttcagataacaaaactcttggcagattccatctgggagatattcctcctgcacctcgcggtatgccgcaggtcgaggtcgcattcgatattgatgccaatggtattctccatgtgtcagccaaagacaaggcgactggcaaggagcagagcatcagaatcgaggctggaggcaagctcaatgatgcagagatcgaaaaaatgaagaatgacgctaaagcccatgctgaagaagacgctaaacgaaaagaagaggtagaaaccaaaaacgctgccgactctttgatcttcagcacggaaaagcagcttcaggagcttggcgacaaaataccggctgataagaaagcgccgctggaaagcgctctggataggctcaaagaagcccacaaatcaggcagcgctgatgcaatcaaaccggctatggacgaagtcaataccatctggaatgacattgcttcacagctctaccaggcagcagacgctccaggaagcggcacaccaaaccctgaagccgaaagcggaaaacaggaatcttcaggaaaaaccgacggccaagtcgatgccgagtacgaagtcattgacggcaatgacaaagacaagtga

SEQ ID NO: 48383 - protein, 640 aa, Prosthecochloris aestuarii DSM 271
MGKIIGIDLGTTNSCVAVMQGTQPTVIENSEGYRTTPSMVAFTKNGERLIGHAAKRQAITNAKNTVFSIKRFMGRKFDEVPNEKKIAPYKVVNINGEARVEIDDKNYSPQEISAMILQKMKQTAEDFLGEKVTEAVITVPAYFNDAQRQATKDAGKIAGLEVKRIINEPTAAALAYGLDKKKENEKVAVFDLGGGTFDISILELGDGVFEVKSTDGDTHLGGDDFDQTIIDFLADEFKKQEGIDLRTDAIALQRLKEAAEKAKIELSSRTDTEINLPFITATQEGPKHLVVNLTRAKFEALASTLFDNIMAPCKRAIKNAKVNISEIDEVVLVGGSTRIPKVQELVKELFKREPNKSVNPDEVVAVGAAIQGGVLTGEVSDVLLLDVTPLSLGIETLGGVMTKLIEANTTIPTKKQEVFSTAADNQTSVEVHVLQGERPMASDNKTLGRFHLGDIPPAPRGMPQVEVAFDIDANGILHVSAKDKATGKEQSIRIEAGGKLNDAEIEKMKNDAKAHAEEDAKRKEEVETKNAADSLIFSTEKQLQELGDKIPADKKAPLESALDRLKEAHKSGSADAIKPAMDEVNTIWNDIASQLYQAADAPGSGTPNPEAESGKQESSGKTDGQVDAEYEVIDGNDKDK

SEQ ID NO: 48384 - DNA, 1872 bp, Kineococcus radiotolerans SRS30216
  CDS (1)..(1872): transl_table=11
atggcacgtgcggtcggcatcgacctcgggaccaccaactccgtcgtctccgtcctcgagggcggcgaaccgacggtcatcgccaacgccgagggcgggcgcaccacgccctccgtcgtcgccttcgccaagaacggcgaggtgctggtcggggagatcgccaagcgccaggccgtcaccaacatcgaccgcaccgtccgctcggtcaagcgcgaggtcggcaccaactggtcgacgacgatcgacgacaagaagtacaccccgcaggagatcagcgcccgcgtgctgcagaagctcaagcgcgacgcggagagctacctcggcgaggccgtcaccgacgccgtcatcaccgtccccgcgtacttcaacgacgcgcagcgccaggccaccaaggaggccggtgagatcgcgggcctcaacgtcctgcgcatcatcaacgagcccaccgccgccgctctcgcctacgggctcgagaagggcaaggaggacgagctcatcctcgtcttcgacctcggcggcggcaccttcgacgtctccctcctcgaggtcggcaaggacgaggacggcttctccaccatccaggtccgcgccacctccggcgacaaccacctcggcggcgacgactgggaccagcgcgtcgtcgaccacctgctcaagaaggtctccagcgcctacggcatcgacctgtccaaggacaagatcgcgatgcagcgcctgcgcgagtccgccgagcaggccaagaaggagctgtcgacggccaccagcaccggcatctccctgcagtacctgtcgatgagcgagaacggccccgtccacctggacgagaccctcacccgcgcgcagttcgagcagatgacccaggacctgctggaccgcaccaagaagcccttccacgacgtcatccgcgacgccgacgtgaagctcgccgacatccaccacgtcgtgctcgtcggcggctccacccgcatgccggccgtgaccggcgtcgtcaaggaactgctcggcggcaaggagcccaacaagggcgtcaaccccgacgaggtcgtcgccatcggcgccgccctccaggccggtgtcctcaagggcgagcgcaaggacgtcctgctcatcgacgtcaccccgctgtccctgggcatcgagaccaagggcgggatcatgacgaagctcatcgagcgcaacaccgcgatcccgaccaagcgctccgaggtgttcaccaccgccgacgacaaccagccctcggtgctcatccaggtgttccagggcgagcgcgagctggcccgtgacaacaagccgctgggcaccttcgagctgaccggcatcgcccccgccccgcgcggggtgccgcaggtcgaggtcaccttcgacatcgacgccaacggcatcgtgcacgtgaacgcgaaggaccgcggcacgggcaaggagcagtcgatgaccatctccggcggcagcgcgctgtcgaaggaggacatcgagcgcatggtcaaggacgcggagcagcacgcgaacgaggacaagcagcgccgcgaggaggccgaggcccgcaaccaggccgagggtctcgtctaccagaccgagaagttcgtcgccgacaactccgacaagctccccgaggacggcaaggccgaggtccaggccgccgtggcggagctgaagaccgccctcgccggcaccgacgcggccgagatcaaggccaagtccgacgccgtcgcgcaggcctcccagaagctgggggcggccatgtacgccgcccaggccgagggcggcgccgccggtgacgcgggtgcgcaggccgggccggacttcaccaagccctccgcctccgacgaggacgtggtggacgccgaggtcgtcgacgacgagaaggacaagtga

SEQ ID NO: 48385 - protein, 623 aa, Kineococcus radiotolerans SRS30216
MARAVGIDLGTTNSVVSVLEGGEPTVIANAEGGRTTPSVVAFAKNGEVLVGEIAKRQAVTNIDRTVRSVKREVGTNWSTTIDDKKYTPQEISARVLQKLKRDAESYLGEAVTDAVITVPAYFNDAQRQATKEAGEIAGLNVLRIINEPTAAALAYGLEKGKEDELILVFDLGGGTFDVSLLEVGKDEDGFSTIQVRATSGDNHLGGDDWDQRVVDHLLKKVSSAYGIDLSKDKIAMQRLRESAEQAKKELSTATSTGISLQYLSMSENGPVHLDETLTRAQFEQMTQDLLDRTKKPFHDVIRDADVKLADIHHVVLVGGSTRMPAVTGVVKELLGGKEPNKGVNPDEVVAIGAALQAGVLKGERKDVLLIDVTPLSLGIETKGGIMTKLIERNTAIPTKRSEVFTTADDNQPSVLIQVFQGERELARDNKPLGTFELTGIAPAPRGVPQVEVTFDIDANGIVHVNAKDRGTGKEQSMTISGGSALSKEDIERMVKDAEQHANEDKQRREEAEARNQAEGLVYQTEKFVADNSDKLPEDGKAEVQAAVAELKTALAGTDAAEIKAKSDAVAQASQKLGAAMYAAQAEGGAAGDAGAQAGPDFTKPSASDEDVVDAEVVDDEKDK

SEQ ID NO: 48386 - DNA, 1911 bp, Croceibacter atlanticus HTCC2559
  CDS (1)..(1911): transl_table=11
atgagtaaaataattggaattgacttgggtactaccaacagttgcgttgccgtaatggaaggtaacgagcctacggtaatcccaaatgctgaaggtaagcgcacaactccttctgtcattgcttttgtagatggcggtgagattaaagtgggtgacccagcaaaaagacaagcagtaactaacccaacaaaaacggtttcttctattaagcgttttatgggtaacaaattcagtgaatcttctaaagaagttgaaagtgctgcatacgatgtaaaaaaaggagataacgatacgccaagagtagatatagacggtcgtttatatacaccacaggaattatctgctatgattcttcagaaaatgaagaaaacagctgaagattatcttggtacagacgttactggagctgtaattacagtaccagcatactttaatgatagccaacgccaagcaactaaagaagctggtgagattgcaggtcttaaagtagagcgtattattaatgagcctactgctgctgcattggcttatggtttagataagaaagatacagaccaaaagattgttgtatttgactttggtggtggtactcatgacgtttctatcctagaattaggtgacggcgtttttgaagtattatctacagatggtgacacacaccttggtggtgatgatgttgaccaaaagataattaactggttggcagatgagttcaaatctgaagaagatatgaaccttaagaaagatcctatggcgttacaacgtcttaaggaagctgcagagaaagcaaaaattgagttgtcttcttctaaccaaacagaaatcaatttaccttacattacagctactgcaagcggaccaaaacacttggtacgtacattaacacgtagcaaatttgagcaattaattgatgatttagtaaaacgcacaattactccttgtgaaaaagcacttaaagctgctggattaagcaagagtgatatagatgaggttatccttgttggtggttctacacgtattcctgcagtacaagaagctgtagagaaattctttggtaagaagccaagtaaaggtgtaaacccagatgaggttgtagctgttggtgctgcaatacaaggtggtgtattaacaggagacgtaaaagacgttcttttattagatgttacaccattatctctaggtattgaaactatgggtggcgttatgactaagttgattgaggcaaacacgactattcctacgaataagtctcaggtcttctcaacggcggcagataaccagccaagtgtagaaattcacgtattacaaggtgagcgtccaatggcggcagataacaagacaattggtagattccatttgtctgatattccaccagcacaacgtggtgttcctcaaattgaagtgactttcgatattgatgctaacggtatcattaaagtaagtgcagaagataaagcaactggtaagaagcaagatattaagattgaagcgtcttctggtttaagcgaagaggaaatcaagaaaatgaaagctgaagctgaagctaatgcagatgcagatgctaagactaaagaaaaagttgataagattaacgaggcagatgctatggttttccaaacggaaaagcaacttaaagaatttggtgataaattatctgatgataagaaagcaccaattgaagaagcattaactgagttaaaggctgcacacgcaactggcgatgtagaccaaattcaaccagctttagataagataaacgaagcttggaaagtagctagtgaagaaatgtacaaagcacaagcagaagctcaacaaggcgctccaactggagatgctggtcaagctgaaggtgatgctagttcttctgaaggtagcgatgtagaagatgtagattttgaagaagtaaaataa

SEQ ID NO: 48387 - protein, 636 aa, Croceibacter atlanticus HTCC2559
MSKIIGIDLGTTNSCVAVMEGNEPTVIPNAEGKRTTPSVIAFVDGGEIKVGDPAKRQAVTNPTKTVSSIKRFMGNKFSESSKEVESAAYDVKKGDNDTPRVDIDGRLYTPQELSAMILQKMKKTAEDYLGTDVTGAVITVPAYFNDSQRQATKEAGEIAGLKVERIINEPTAAALAYGLDKKDTDQKIVVFDFGGGTHDVSILELGDGVFEVLSTDGDTHLGGDDVDQKIINWLADEFKSEEDMNLKKDPMALQRLKEAAEKAKIELSSSNQTEINLPYITATASGPKHLVRTLTRSKFEQLIDDLVKRTITPCEKALKAAGLSKSDIDEVILVGGSTRIPAVQEAVEKFFGKKPSKGVNPDEVVAVGAAIQGGVLTGDVKDVLLLDVTPLSLGIETMGGVMTKLIEANTTIPTNKSQVFSTAADNQPSVEIHVLQGERPMAADNKTIGRFHLSDIPPAQRGVPQIEVTFDIDANGIIKVSAEDKATGKKQDIKIEASSGLSEEEIKKMKAEAEANADADAKTKEKVDKINEADAMVFQTEKQLKEFGDKLSDDKKAPIEEALTELKAAHATGDVDQIQPALDKINEAWKVASEEMYKAQAEAQQGAPTGDAGQAEGDASSSEGSDVEDVDFEEVK

SEQ ID NO: 48388 - DNA, 1908 bp, Sulfitobacter sp. EE-36
  CDS (1)..(1908): transl_table=11
atggccaaagttattggtatcgacctaggaacgacaaacagctgtatcgccatcatggacggcagccagcctcgcgttatcgaaaacgccgaaggcgcgcgcaccacgccctccatcgttgcgttcacagacgacgaacgtctggttgggcagcctgccaaacggcaagcggttaccaaccccgacaacacaattttcggcgtgaaacgcctgatcggccgtcgcaatgacgacgcggatctggccaaggacaaaaagaacctgcccttcaccgtcatggacggtgggaacggtgacgcatgggtacaagccaagggcgagaaatactccccctcgcaaatctctgcgttcatccttggcaaaatgaaagaaacagcggaatcctatctgggcgaagaagtcacccaggccgtgatcactgttcctgcctactttaacgacgctcagcgtcaggcgaccaaagacgcgggcaagattgccggtctggaagtgctgcggatcatcaacgaaccgacagcggcggccctggcctatggtctggacaagaaagacacgcaaaccatcgcggtctatgaccttggcggcggtacattcgacgtgaccatccttgaaatcgacgatggcctgttcgaagtgaaatccaccaacggtgacacgttcctgggtggtgaagacttcgacatgcgcatcgtgaactaccttgcggatgaattcaaaaagaccaacggcgtcgacctgacgcaagacaagatggcgcttcagcgtctgaaagaagcggcagagaaggccaagatcgaactgtccagcgcaagccagacagagatcaaccagccgttcatctcgatgggcaaagatggctcgccactgcacatggtgatgaagctgacccgctccaagctggagcaattggttggcgacctgatcaaagcgtcgatgaagccctgcgcagccgcgttgaaagatgccggtgtatccgcatccgagatcgacgaagtcgttctggtcggcggtatgacccgtatgccgcgcgtcatcgaggaagtgaccaagttcttcggcaaagagccccataagggtgtgaaccctgacgaggttgttgccttgggtgcggccattcaggccggtgttctgcaaggcgacgtcaaagacgttgttctgctggacgtgacaccgttgagccttggtatcgaaacgctgggtggcgtgttcacccgtctgatcgaccgcaacacgacgatcccgacgaagaagtcgcaggtcttctcgaccgccgaggataaccaaagcgccgtgaccatccgcgtcttccaaggggagcgtgaaatggctgcggacaacaagatccttggcgcgttcaatctggaaagcatcccacccgcaccccgcggtatgccccagatcgaagtgacctttgacatcgacgcaaacggtatcgttgccgtaggcgcgctggataaaggcacaggcaaagagcagaagatcacgatccaagcgtccggcggtctgtccgatgcggatatcgaaaagatggtgaaagacgccgaagaaaatgccgacgccgacaaagagcgccgcgcattgatcgaggcgaaaaaccaggcggaatcgctgatccactcgaccgagaagtcgctggaagagcattctgacaaggttgacccgaccaccgtcgaagcgatcgaactggccattgctgcgttgaacgacgaactggcaaccgacaatgttgataagatcaacaacggtatccagaacgttaccgaagcggcgatgaaactgggcgaagccatctacaaggcggctcaggacgaaaacgaagacgttgccccggctgcggatgcacccgaaggtgacgacgatatcgtcgatgccgatttcgaagatctggacgataacaagcgcgcgtaa

SEQ ID NO: 48389 - protein, 635 aa, Sulfitobacter sp. EE-36
MAKVIGIDLGTTNSCIAIMDGSQPRVIENAEGARTTPSIVAFTDDERLVGQPAKRQAVTNPDNTIFGVKRLIGRRNDDADLAKDKKNLPFTVMDGGNGDAWVQAKGEKYSPSQISAFILGKMKETAESYLGEEVTQAVITVPAYFNDAQRQATKDAGKIAGLEVLRIINEPTAAALAYGLDKKDTQTIAVYDLGGGTFDVTILEIDDGLFEVKSTNGDTFLGGEDFDMRIVNYLADEFKKTNGVDLTQDKMALQRLKEAAEKAKIELSSASQTEINQPFISMGKDGSPLHMVMKLTRSKLEQLVGDLIKASMKPCAAALKDAGVSASEIDEVVLVGGMTRMPRVIEEVTKFFGKEPHKGVNPDEVVALGAAIQAGVLQGDVKDVVLLDVTPLSLGIETLGGVFTRLIDRNTTIPTKKSQVFSTAEDNQSAVTIRVFQGEREMAADNKILGAFNLESIPPAPRGMPQIEVTFDIDANGIVAVGALDKGTGKEQKITIQASGGLSDADIEKMVKDAEENADADKERRALIEAKNQAESLIHSTEKSLEEHSDKVDPTTVEAIELAIAALNDELATDNVDKINNGIQNVTEAAMKLGEAIYKAAQDENEDVAPAADAPEGDDDIVDADFEDLDDNKRA

SEQ ID NO: 48390 - DNA, 1944 bp, Roseovarius nubinhibens ISM
  CDS (1)..(1944): transl_table=11
ttgaagaaagaagggatcgaaaacatgtcgaaagtgatcgggattgacctcggtacaaccaattcctgcgttgccatcatggacggcagccaggcgcgcgtgatcgagaactcggaaggtgcccgcaccacgccgtcgatcgtcgcatttacagatagcgagcggctcgttggtcaaccggccaaacgccaggctgtcaccaacccggaaaacaccgtctttggcgtcaaacgtctgatcggccgccgtgccgacgacgcggatctggccaaggacaagaagaacatgccgttcaacgtcatcgacggcggcaacggcgacgcctgggtcgaggcccgcggtgagaaatactcgccgagccagatcagtgcgttcatcctgggcaagatgaaagagacagccgaaagctatctcggcgaggaagtgacccaagcggtcattaccgttcccgcctatttcaacgacgcccagcgtcaggccaccaaagacgccggcaagatcgccggtctcgaagtgctgcgcatcatcaacgagccgaccgcggccgcgctggcctatggtctcgacaaggacgaaacccacacgatcgcggtctatgacctcggcggcgggaccttcgacgtgaccattctcgagatcgacgaaggcctcttcgaagtcaaatccaccaatggcgacacgttccttggcggtgaagactttgacatgcgcatcgtcaactacctcgccgacgagttcaaaaaagagcacggcgtcgacctgaccaaagacaagatggccctgcagcgtctcaaggaagcggcagaaaaggccaagatcgagctctcgagctcgagccagaccgaaatcaaccagcccttcatctcgatggggtcggacggtcagccgctgcacatggtcatgaaactgacccgtgccaagctcgaaagcctcgtgggcgacctgatcaaagcctcgctcaagccctgccaggccgcgctcaaggatgccggtctctcggccagcgacattgacgaggtcgtgctcgtcggtggtcagacccggatgcccaaggtcatcgaggaagtcaccaaattcttcggcaaagagccccacaagggcgtcaaccccgacgaagtggtggccatgggcgccgccatccaggccggtgttctgcaaggcgacgtcaaggatgttgtgctgctcgacgtgaccccgctgtcgctcggcatcgaaacgctgggcggtgtcttcacccgtctgatcgaccgcaacaccacgatccccaccaacaagagccagatcttctccaccgccgaggacaaccaatcggccgtgacgatccgggtcttccagggcgaacgtgaaatggcggccgacaacaagatgctcggtcagttcaacctcgaggacatcccgcccgcaccgcgcggcatgccgcagatcgaggtgaccttcgacatcgacgccaacggcatcgtctcggttcaggccaaggacaaaggcactggcaaagagcacaagatcacgatccaggcctccggcggtctctccgacgaagacatcgaaaagatggtcaaggacgccgaggacaatgccgaggccgacaaggcccgtcgcgaactggtcgaggcccgcaaccaggccgaaagcctcatcaactcgaccgagaaatcggtggaagagcatggcgacaaggtcgacccgaccaccgtcgaggcgatcgaactggccatcgcggccctgcgcgacgatctcgacaaggacgacgctgccgccgacaagatcaagagcggcatccagaacgtcaccgaagcggccatgaaacttggcgaagccatctacaaggcaagccaggaagaggccggttcggaaccctccgccgccgatgaagccggcgccggtggcgatgacgacatcgtggatgccgatttcgaagatctcggcgaagacaagcgctcctga

SEQ ID NO: 48391 - protein, 647 aa, Roseovarius nubinhibens ISM
MKKEGIENMSKVIGIDLGTTNSCVAIMDGSQARVIENSEGARTTPSIVAFTDSERLVGQPAKRQAVTNPENTVFGVKRLIGRRADDADLAKDKKNMPFNVIDGGNGDAWVEARGEKYSPSQISAFILGKMKETAESYLGEEVTQAVITVPAYFNDAQRQATKDAGKIAGLEVLRIINEPTAAALAYGLDKDETHTIAVYDLGGGTFDVTILEIDEGLFEVKSTNGDTFLGGEDFDMRIVNYLADEFKKEHGVDLTKDKMALQRLKEAAEKAKIELSSSSQTEINQPFISMGSDGQPLHMVMKLTRAKLESLVGDLIKASLKPCQAALKDAGLSASDIDEVVLVGGQTRMPKVIEEVTKFFGKEPHKGVNPDEVVAMGAAIQAGVLQGDVKDVVLLDVTPLSLGIETLGGVFTRLIDRNTTIPTNKSQIFSTAEDNQSAVTIRVFQGEREMAADNKMLGQFNLEDIPPAPRGMPQIEVTFDIDANGIVSVQAKDKGTGKEHKITIQASGGLSDEDIEKMVKDAEDNAEADKARRELVEARNQAESLINSTEKSVEEHGDKVDPTTVEAIELAIAALRDDLDKDDAAADKIKSGIQNVTEAAMKLGEAIYKASQEEAGSEPSAADEAGAGGDDDIVDADFEDLGEDKRS

SEQ ID NO: 48392 - DNA, 1911 bp, Oceanicola batsensis HTCC2597
  CDS (1)..(1911): transl_table=11
atgtccaaagtgatcggtatcgaccttggcaccaccaactcctgcgttgccatcatggatgggtcgcagcccaaggtcatcgaaaactccgaaggtgcgcgcacgaccccgtcgatcgtcgccttcaccgacgaagagcggctcgtcggtcagtctgccaagcggcaggccgtcacgaactccaccaacacgatcttcggcgtcaagcgcctgatcggccgtcggttcgacgacagcgacctggcgaaggacaagaagaacctgccgttcgccgtggtcgatggcggcaatggcgacgcgtgggtggaagccaagggcgagaaatactccccctcgcagatttccgccttcatcctcggcaagatgaaggaaaccgccgagtcctacctgggcgaagaggtcagccaggccgtgatcacggttccggcctacttcaacgacgcccagcgtcaggccaccaaggacgccggcaagatcgccgggctcgaggtgctgcggatcatcaacgaaccgacggccgccgcgctggcctatggcctggacaaggacaacagccacacgatcgcggtctacgacctcggcggcggcaccttcgacgtcaccatcctcgagatcgacgacggcctgttcgaagtgaaatccaccaacggcgacacgttcctcggcggtgaagacttcgacatgcgcatcgtcaactacctggccgacgagttcaaaaaggaacacaacgtcgacctgacccaggacaagatggcgctgcagcgtctcaaggaagcggccgagaaggcgaagatcgaactgtcctcctcgcagacgaccgagatcaaccagccgttcatctcgatggggtcgaacggtcagccgctgcacatggtcatgaagctgacccgtgccaagctggaaacccttgtgggcgacctgatcaagtcctcgctcaaaccgtgccaggccgcgctcaaggatgccggtctgacgacgggtgacgtggacgaggtcgttctggtgggcggcatgacccgcatgcccaaggtcgtcgaagaggtgacgaagttcttcgggaaagagccgcacaagggcgtgaacccggacgaggtcgtcgcgctcggcgccgcgatccaggccggtgtccttcagggcgacgtgaaggacgtggtgctgctggacgtgaccccgctgtcgctggggatcgagacgctgggtggcgtgttcacccgcctgatcgaccgcaacacgacgatcccgaccaagaagagccaggtcttctcgaccgccgaggacaaccagaatgccgtgaccatccgggtcttccagggtgaacgcgagatggcgaccgacaacaagatgctcggtcagttcaatctcgaagacatccccccggcgccgcgcgggatgccgcagatcgaggtgaccttcgacatcgacgccaacggcatcgtctcggtcggtgccaaggacaagggcaccaacaaggaacagaagatcacgatccaggcctcgggcggtctctccgacgaggacatcgacaagatggtcaaggacgccgaggagaacgccgaggcggacaagtcccgccgcgagctggtcgaagccaagaaccaggccgaaagcctcgtccactcgaccgagaagtcgctggaagaacatggcgacaaggtcgatccctcgaccgtcgaggcgatcgagctggccgtggccgcgctcaaggacgagctggagaacgacaatgccgacaagatcaaggccggcattcagaacgtgaccgaagcggccatgaagctgggcgaggcgatctacaaggcgcagcaggacgagggcgaagacgcgccttcggcggctgatgccggtccggcggatgacgatgacatcgtcgatgcggacttcgaggatctggatgacaacaagcgtgcgtga

SEQ ID NO: 48393 - protein, 636 aa, Oceanicola batsensis HTCC2597
MSKVIGIDLGTTNSCVAIMDGSQPKVIENSEGARTTPSIVAFTDEERLVGQSAKRQAVTNSTNTIFGVKRLIGRRFDDSDLAKDKKNLPFAVVDGGNGDAWVEAKGEKYSPSQISAFILGKMKETAESYLGEEVSQAVITVPAYFNDAQRQATKDAGKIAGLEVLRIINEPTAAALAYGLDKDNSHTIAVYDLGGGTFDVTILEIDDGLFEVKSTNGDTFLGGEDFDMRIVNYLADEFKKEHNVDLTQDKMALQRLKEAAEKAKIELSSSQTTEINQPFISMGSNGQPLHMVMKLTRAKLETLVGDLIKSSLKPCQAALKDAGLTTGDVDEVVLVGGMTRMPKVVEEVTKFFGKEPHKGVNPDEVVALGAAIQAGVLQGDVKDVVLLDVTPLSLGIETLGGVFTRLIDRNTTIPTKKSQVFSTAEDNQNAVTIRVFQGEREMATDNKMLGQFNLEDIPPAPRGMPQIEVTFDIDANGIVSVGAKDKGTNKEQKITIQASGGLSDEDIDKMVKDAEENAEADKSRRELVEAKNQAESLVHSTEKSLEEHGDKVDPSTVEAIELAVAALKDELENDNADKIKAGIQNVTEAAMKLGEAIYKAQQDEGEDAPSAADAGPADDDDIVDADFEDLDDNKRA

SEQ ID NO: 48394 - DNA, 1905 bp, Prochlorococcus marinus str. MIT 9211
  CDS (1)..(1905): transl_table=11
atggggaaggttgttggaattgaccttggtacgactaatagctgtgtagcagttatggagggagggaagcctactgtaattgccaatgcggagggttttcgtacaactccttcagtggttgcatatacaaaaaatcaagatcaattggttgggcaaattgccaaacggcaggctgtaatgaatccggagaatactttctattcttcaaaacgttttgtaggaagacgtgtcgacgaggttaattcagaatctaaagaagtcagttattcggtagaaaaggcaggttctaacgtgaaattgaaatgtcccatacttgataagcaattttcacctgaagaagttagtgctcaggttttgagaaaactgtctgaagatgctggaaaatatctgggtgaaaatgttactcaagcagttattactgtcccagcttatttcaatgattcacaaagacaagcaactaaggatgctggaaagatagctggcttagaggttcttagaattataaatgagcctacagcggcagctcttgcttatggtttagacaaaaaaagtaatgaaagaattttagtatttgatcttggaggaggcacatttgatgtttctgttctagaagttggagatggcgtttttgaagttttatctacctctggtgatacacatcttggaggagatgattttgataaggtgattgttgatcatttagcaagcacttttaaaagcaatgaaggaattgatttaagacaggataaacaagccttacaacgtttaaccgagtctgcagaaaaggcaaaaattgaactttctaatgcaactcaaagcgaaatcaaccttccgtttattacagctactccagaagggcctaagcatttagatttaactttgacacgcgcaaaatttgaagaactagcctcaaatttgattgatcgctgtcgtgtaccagtcgaacaggctcttaaagatgcaaagttgtctactggagagatagatgaaatcgtgatggttggaggttccacacgtatgccagctgttaaggaattggtaaaaagagtgactgggaaagaccctaatcaaactgtcaatcctgatgaagttgttgccgttggtgctgctattcagggaggcgttttggctggtgaagtcaaagatattttacttcttgatgtcaccccgctttctctaggtgttgagacgcttggtggtgtaatgacaaaaatgattactagaaatacgactgtaccgactaaaaaagcagagacgtattcaacagcagttgatggccagacaaatgtagagattcatgttctccaaggtgaaagagaaatggcctctgacaataaaagcctaggtacatttcgcttggatggaatacctcctgcacctagaggagtgcctcaaattgaggtgacttttgatatagatgcgaatggaattcttagtgtgactgctaaggataaaggcagtggtaaagagcaaagtatttctattactggtgcttcaactctttcagataatgaagttgataaaatggttaaagatgctgaagttaatgcaacagcagataaagataagcgtgaaaggattgatttaaaaaaccaggcagaaacattggtttatcagaccgaaaagcaacttggtgagcttggagataaggttgaaccagatgcaaaagtaaaagttgaagaaaagcgtatgaaattgaaagaggctactgataaggatgattttgaaactatgaaaactttggttgaagaactacaacaagaactctattctttaggggcttctgtttatcaacaagcaaatgcagcttctcaagcagccgagacttctggaaatgataccggtaattctaatggtgggaataatgatgatgtaattgatgctgaatttacagaatctaaataa

SEQ ID NO: 48395 - protein, 634 aa, Prochlorococcus marinus str. MIT 9211
MGKVVGIDLGTTNSCVAVMEGGKPTVIANAEGFRTTPSVVAYTKNQDQLVGQIAKRQAVMNPENTFYSSKRFVGRRVDEVNSESKEVSYSVEKAGSNVKLKCPILDKQFSPEEVSAQVLRKLSEDAGKYLGENVTQAVITVPAYFNDSQRQATKDAGKIAGLEVLRIINEPTAAALAYGLDKKSNERILVFDLGGGTFDVSVLEVGDGVFEVLSTSGDTHLGGDDFDKVIVDHLASTFKSNEGIDLRQDKQALQRLTESAEKAKIELSNATQSEINLPFITATPEGPKHLDLTLTRAKFEELASNLIDRCRVPVEQALKDAKLSTGEIDEIVMVGGSTRMPAVKELVKRVTGKDPNQTVNPDEVVAVGAAIQGGVLAGEVKDILLLDVTPLSLGVETLGGVMTKMITRNTTVPTKKAETYSTAVDGQTNVEIHVLQGEREMASDNKSLGTFRLDGIPPAPRGVPQIEVTFDIDANGILSVTAKDKGSGKEQSISITGASTLSDNEVDKMVKDAEVNATADKDKRERIDLKNQAETLVYQTEKQLGELGDKVEPDAKVKVEEKRMKLKEATDKDDFETMKTLVEELQQELYSLGASVYQQANAASQAAETSGNDTGNSNGGNNDDVIDAEFTESK

SEQ ID NO: 48396 - DNA, 1935 bp, Erythrobacter sp. NAP1
  CDS (1)..(1935): transl_table=11
atgggtaaagtaatcggtatcgacctcggcaccaccaacagctgcgttgctgtcatggatggcggtaagcccaaggttatcgagaattcggaaggcgctcgcacgacgccttcgatcgtcgccttcaccaaggatggcgaacgtctgattggccagcccgcaaagcgccaggccgtcaccaaccccgacaacactcttttcgcgatcaagcgcctcatcggccgccgcttcgacgatcctaccaccaagaaggatatggacatcgtcccctacaacatcgtcaagggcaagaacggcgatgcatgggtttcagcaggcggcgaagagtattcgccttcgcagatttcggcgttcatcctgcagaagatgaaggaaaccgctgagagctatctcggcgaaacggttgagcaggccgtcatcacggtccctgcctacttcaacgacgcccagcgtcaggcaaccaaggatgcagggcaaattgccggcctggaagtccttcgcattatcaacgagccgacggcggctgcgcttgcctatggcatggacaaggaagacggcaagaccatcgccgtttacgaccttggcggcggtacgttcgacgtctcgatcctcgagatcggcgacggcgtctttgaagtgaagtcgaccaacggtgacaccttccttggcggtgaagacttcgacaatgcgattgtcgagcacctcgccgaagccttcaagaagaaggaaaacatggacctgaagaccgacaagctcgctcttcagcgcctcaaggaagccgcagaaaaggccaagatcgagctttcgagctcggccacgaccgaagtcaatctgccctttatcaccgctcgcatggaaggtggctcgtccaccccgctgcacctcgtcgagacaatcagccgcgctgacctcgaaaagatggtcggcgacctgattaaccgcactctcgatccgtgcaagaaggcgcttgccgatgcaggcgtatcgaaggacgagatcgacgaagtgatcttggttggcgggatgacccgcatgcccaaggttcgcgaagtggttgagaagttcttcgaagccaagccgcacaccggcgtgaacccggacgaagtcgttgcgatgggtgctgccattcaggcgggcgttctgcagggcgacgtcaaggacgtgctgctgctcgacgttaccccgctttcgctgggtatcgaaacgctgggcggtgtcttcactcgcatgatcgatcgcaacacgacgatcccgaccaagaaaacccagacctactcgaccgccgaagacaaccagaacgcggtgacgatcaaggtcttccagggtgagcgcgaaatggcggcagataacaagctgcttggcaatttcgacctcgtaggcattccgcctgcaccgcgcggtgtcccgcagatcgaagtgaccttcgacatcgacgcgaacggcatcgtgtccgtcagcgcgaaggacaagggcaccggcaaggagcaaacgatcaagatccaggcttcgggcggtctgtccgacagcgacatcgatcagatggtccaggatgccgagaagtttgcagaagaggacaagaagcgccgcgctggcgccgaggcccgcaaccaggccgacagccttgtccacgcaaccgaaaagcagctcgaagaaaacggcgacaagatcgacgccgaaaccaagagtgccgttgaggaagcgattgctgcaaccaagaccgctctcgaaggcgacgatgccgacgaaatcaacgccaaagcccaggaactcacgcaagctgcgatgaagatgggcgagcagatctacaagcaggagcaggaaaacgctgcgcctgaaggtggcgatgctggcgaagaggccgctgctgaagaagagagcgacgaagacgtcgtcgacgccgagttctcggaagtcgacgaagacaagaagggctaa

SEQ ID NO: 48397 - protein, 644 aa, Erythrobacter sp. NAP1
MGKVIGIDLGTTNSCVAVMDGGKPKVIENSEGARTTPSIVAFTKDGERLIGQPAKRQAVTNPDNTLFAIKRLIGRRFDDPTTKKDMDIVPYNIVKGKNGDAWVSAGGEEYSPSQISAFILQKMKETAESYLGETVEQAVITVPAYFNDAQRQATKDAGQIAGLEVLRIINEPTAAALAYGMDKEDGKTIAVYDLGGGTFDVSILEIGDGVFEVKSTNGDTFLGGEDFDNAIVEHLAEAFKKKENMDLKTDKLALQRLKEAAEKAKIELSSSATTEVNLPFITARMEGGSSTPLHLVETISRADLEKMVGDLINRTLDPCKKALADAGVSKDEIDEVILVGGMTRMPKVREVVEKFFEAKPHTGVNPDEVVAMGAAIQAGVLQGDVKDVLLLDVTPLSLGIETLGGVFTRMIDRNTTIPTKKTQTYSTAEDNQNAVTIKVFQGEREMAADNKLLGNFDLVGIPPAPRGVPQIEVTFDIDANGIVSVSAKDKGTGKEQTIKIQASGGLSDSDIDQMVQDAEKFAEEDKKRRAGAEARNQADSLVHATEKQLEENGDKIDAETKSAVEEAIAATKTALEGDDADEINAKAQELTQAAMKMGEQIYKQEQENAAPEGGDAGEEAAAEEESDEDVVDAEFSEVDEDKKG

SEQ ID NO: 48398 - DNA, 1911 bp, Synechococcus sp. RS9917
  CDS (1)..(1911): transl_table=11
atgggcaaagttgtcggcattgaccttggaaccacgaatagctgcgtggcggtgatggagggtggcaagcccaccgtgatcgccaatgcggaagggtttcgcaccacaccgtcggtggtggcctacacgaagaaccaggatcagctggtggggcagatcgccaaacgtcaggcggtgatgaaccccgacaacaccttttattccgtcaagcggttcatcggtcgtcgtgtcgatgaagtgaatgaggagtcgaaggaggtcagctattccgttgagaaagctggctccaacgtcaaggtgaagtgcccggtgctcgacaagcaattcgcccctgaggaggtgagtgcccaggtgctgcgcaagttggctgaggatgccggcaaatacctgggagaaaccgtgacccaggcggtgatcaccgttcccgcctatttcaacgattcccagcgccaggccaccaaggatgccggcaagatcgccggccttgaggtgctgcgcatcatcaacgagcccaccgccgctgctctcgcctacggcctcgacaagaagagcaatgagcgcatcctggtcttcgacctcgggggcggcaccttcgatgtgtccgtgctcgaagtgggcgacggcgtgttcgaggtgctctccacctccggcgacacccacctcggcggtgatgacttcgacaaggtgatcgtggatcacctggccgacagcttcaaagccaacgaaggcattgacctgcgtcaagacaagcaggccctgcagcgcctcacggaagcggccgaaaaagccaagatcgaactctccagcgccacgcagagcgagatcaatctgcccttcatcaccgcaacccctgaaggcccgaagcatctcgacctcaccctcacccgcgccaagttcgaggagctggcctccaagctgatcgatcgttgccgcgtgccggtggagcaggcgctcaaggacgccaagctctccgctggtgaactcgatgagatcgtgatggtgggtggatccacccggatccccgccgtgctggagctggtgaagcggatcaccggcaaggatcccaatcagaccgtgaaccccgatgaggtggtagccgtgggcgccgccattcagggcggtgtgctcgccggtgaggtgaaggacatcctgctgctggatgtcacccccctgtctctcggtgtggagaccctgggtggtgtgatgaccaagatgatcccgcgcaacaccaccgttcccaccaagaaatcggagacctattccacagcggtggatggtcagaccaatgtggagattcatgtgctccagggtgagcgcgagatggccagcgacaacaaatcgctcggcaccttccggctcgatggcatcccccccgctccccgtggcgtgcctcagatcgaagtgaccttcgacatcgatgccaacggcatcctgagcgtgaccgcgaaggacaagggcagcggcaaggagcagagcatctcgatcaccggcgcctccacactctccgaacaggaagtggaaagcatggtgaaggatgccgaggccaatgccagtgccgacaaggagaagcgtgagcggatcgacctgaagaatcaggcggaaacgctcgtgtatcaggcggagaagcagctgggcgaactcggtgacaaggtggatgccgcggccaaggccaaggtggaggagaagcgcacccagctgaaggaagccaccgagaaggaagacttcgacagcatgaagtctctgctggagcagttgcagcaggagctctacgccttgggtgcctcggtgtatcaacaggccggcgctgatggcgctgcagcccccggcgccgatggcgctgccggtgccgccggatccacgagcgatgccggtgatgatgtgatcgatgcggaattcaccgaatcgaagtga

SEQ ID NO: 48399 - protein, 636 aa, Synechococcus sp. RS9917
MGKVVGIDLGTTNSCVAVMEGGKPTVIANAEGFRTTPSVVAYTKNQDQLVGQIAKRQAVMNPDNTFYSVKRFIGRRVDEVNEESKEVSYSVEKAGSNVKVKCPVLDKQFAPEEVSAQVLRKLAEDAGKYLGETVTQAVITVPAYFNDSQRQATKDAGKIAGLEVLRIINEPTAAALAYGLDKKSNERILVFDLGGGTFDVSVLEVGDGVFEVLSTSGDTHLGGDDFDKVIVDHLADSFKANEGIDLRQDKQALQRLTEAAEKAKIELSSATQSEINLPFITATPEGPKHLDLTLTRAKFEELASKLIDRCRVPVEQALKDAKLSAGELDEIVMVGGSTRIPAVLELVKRITGKDPNQTVNPDEVVAVGAAIQGGVLAGEVKDILLLDVTPLSLGVETLGGVMTKMIPRNTTVPTKKSETYSTAVDGQTNVEIHVLQGEREMASDNKSLGTFRLDGIPPAPRGVPQIEVTFDIDANGILSVTAKDKGSGKEQSISITGASTLSEQEVESMVKDAEANASADKEKRERIDLKNQAETLVYQAEKQLGELGDKVDAAAKAKVEEKRTQLKEATEKEDFDSMKSLLEQLQQELYALGASVYQQAGADGAAAPGADGAAGAAGSTSDAGDDVIDAEFTESK

SEQ ID NO: 48400 - DNA, 1920 bp, Synechococcus sp. WH 5701
  CDS (1)..(1920): transl_table=11
atgggcaaggttgtcggcattgacctgggcacgacgaacagctgcgtggcggtgatggagggcggcaagcccactgtgatcgccaacgcagaagggttccggaccacaccatcagtggtggcctacaccaagaaccaggatcagctggtgggccagatcgccaagcgccaggcggtgatgaaccctgagaacaccttctactcggtgaagcggttcatcggccgccgggtcgatgaggtgaacgaagaatcgaaggaagtgagctatggcgtcgagaaggcgggcgccaatgtgaaggtgaagtgcccggtgctgaacaagcagttcgcccctgaagaggtgagcgcccaggtgctgcgcaagctggccgacgacgccggcaagtacctcggtgaaaccgtcacccaggcggtgatcacggtgccggcctacttcaacgactcccagcgtcaggccaccaaggatgccggcaagatcgccggcctcgaggtgctgcgcatcatcaacgagcccacggcggcggccctggcctacggcctggatcgcaagagcaacgagcgcatcctggtcttcgacctgggcggcggcacgttcgacgtctcggtgctcgaggtgggcgatggcgtcttcgaggtgctctccaccagtggcgacacccacctgggcggcgacgacttcgacaaggtgatcgtcgatcatctggccgccagcttcaaggccaatgagggcatcgatctgcgccaggacaagcaggccctgcaacgcctgaccgaggcggccgagaaggccaagatcgagctctccagtgccacccagagcgagatcaacctgccgttcatcacggccactcccgagggtcccaagcacctcgatctcaccctcacccgggcgaaattcgaggagctggcctccaagctgatcgaccgctgtcgcgtgccggtggagcaggcgctcaaggacgccaagctctcctcgtcagagcttgatgaagtggtgatggtgggtggttccacccgcatccccgccgtgctcgagctggtcaagcgggtcaccggcaaggagcccaaccagacggtgaaccccgatgaggtggtggccgtgggtgccgcgatccagggcggcgtgctggccggtgaggtgaaggacatccttctcctcgatgtcaccccgctgtcgctgggcgtcgaaaccctgggtggcgtgatgaccaagatgatcacccgcaacaccaccatccccaccaagaaagccgaggtgtactccaccgcggtggatggacagaccaacgtcgagatccacgtgcttcagggtgagcgcgaacttgcctccgacaacaagagtctcggcaccttccgcctcgacggcatcccgccgtcgccccgcggcgtcccccagatcgaggtcaccttcgacatcgacgccaacggcatcctcagcgtcaccgccaaggacaagggcagcggcaaggagcagagcatctcgatcaccggggcttccaccctcagtgagaccgaggtggagaagatggtgaaggatgccgagaccaactcggcggccgacaaggagaagcgcgagcgcatcgacctgaagaaccaggccgaaactctcctctaccagtcggagaagcaggtcaccgacctgggcgacaaggtgagcgctgaggtgaaaaccaagatggaggagaagcgccagcagctccaggaggctctcgacaaggaggactacgaggccatgaagacccgactcgaggagctccagaaagagctctatgaagtgggcgcctccgtctaccagcaggccggcgctgaagccggtgccagcgctggagaacccggcggcaatggtgctgccggcgccacgtcgtcctcaggccccagtgccgatgatgtgatcgacgccgagttcaccgagagcaagtga

SEQ ID NO: 48401 - protein, 639 aa, Synechococcus sp. WH 5701
MGKVVGIDLGTTNSCVAVMEGGKPTVIANAEGFRTTPSVVAYTKNQDQLVGQIAKRQAVMNPENTFYSVKRFIGRRVDEVNEESKEVSYGVEKAGANVKVKCPVLNKQFAPEEVSAQVLRKLADDAGKYLGETVTQAVITVPAYFNDSQRQATKDAGKIAGLEVLRIINEPTAAALAYGLDRKSNERILVFDLGGGTFDVSVLEVGDGVFEVLSTSGDTHLGGDDFDKVIVDHLAASFKANEGIDLRQDKQALQRLTEAAEKAKIELSSATQSEINLPFITATPEGPKHLDLTLTRAKFEELASKLIDRCRVPVEQALKDAKLSSSELDEVVMVGGSTRIPAVLELVKRVTGKEPNQTVNPDEVVAVGAAIQGGVLAGEVKDILLLDVTPLSLGVETLGGVMTKMITRNTTIPTKKAEVYSTAVDGQTNVEIHVLQGERELASDNKSLGTFRLDGIPPSPRGVPQIEVTFDIDANGILSVTAKDKGSGKEQSISITGASTLSETEVEKMVKDAETNSAADKEKRERIDLKNQAETLLYQSEKQVTDLGDKVSAEVKTKMEEKRQQLQEALDKEDYEAMKTRLEELQKELYEVGASVYQQAGAEAGASAGEPGGNGAAGATSSSGPSADDVIDAEFTESK

SEQ ID NO: 48402 - DNA, 1917 bp, Synechococcus sp. WH 7805
  CDS (1)..(1917): transl_table=11
atgggaaaagttgtcggcattgatctcggaaccaccaacagctgtgtgtcggtgatggagggcggcaagcccaccgtgatcgccaacgccgagggcttccgcaccacgccatcggtggtggcgtacaccaagaaccaggatcagctggtgggtcagatcgccaagcgtcaggcggtgatgaatccagacaacactttttattcggtgaagcgcttcatcggccggcgggtcgatgaagtgaatgaggaatccaaggaagtgagctattcggtcgagaaggccggctcgaatgtgaaggtgaagtgcccggttctcgagaagcaatttgctcctgaagaggtcagcgctcaggtgctgcgcaagttggctgaagacgccggcaagtacttgggtgaaaccgtgacccaggcagtgatcactgttcctgcttacttcaacgactcccagcgtcaggccaccaaggatgccggcaagatcgccggtctcgaggtgctgcgcatcatcaacgagcccaccgccgctgctcttgcctacggcctcgacaagaagagcaacgagcgcatcctggtgtttgacctcggcggcggcaccttcgatgtgtccgtgctcgaagtgggcgacggagtgttcgaggtgctctccacctccggtgacacccatctgggtggtgatgactttgacaaggtgatcgtcgatcacctggccgacagcttcaaggccaacgaaggtattgatctgcgtcaggacaagcaggctcttcagcgtctgaccgaagcggctgaaaaagccaagatcgagctctccagtgctacgcagagcgagatcaatctgccgttcatcacggccactcccgagggacccaagcatctcgatctcaccctcacccgtggaaagttcgaagagctcgcctccaacctgatcgaccgctgccgcattcctgtggagcaggcgctgaaggacgccaagttgtcctccagcgagctcgacgagattgtgatggtgggtggttccacccgcatccccgctgtgctggagctggtcaagcggaccaccggcaaggaccccaatcagacggtgaatcctgatgaggtggtggctgtgggtgctgccattcagggcggtgtcctcgccggtgaagtgaaggacatccttcttctggatgtcaccccactgtccctgggtgtggaaaccctcggtggtgtgatgaccaagatgatcacccgcaacaccacggttcctaccaagaagtccgagacctactccacggccgtggacggccagaccaatgtggagattcacgtgctccagggtgagcgcgagatggcctccgataacaagagcttgggaaccttccgcctcgatggaattcctgcagctccccgcggcgtgccccagatcgaagtgaccttcgacatcgacgccaacggcattctcagcgtcaccgccaaggacaagggcagcggtaaggagcagtccatctccatcaccggtgcctccaccctcagtgattccgaagtggacaagatggtgaaggatgcggaagccaacgccagtgctgacaaggagaagcgcgagaagatcgacctgaagaatcaggctgaaactcttgtgtatcaggccgaaaagcagatgggcgagctcggcgacaaggtggatgcggatgccaaagccaaggttgaagagaagcgcaccaagctcaaggaggccaccgagaaggaggactacgacgcgatgaagactctgctcgaggaacttcagcaggagctctacaccgtgggtgcttctgtctaccaacaggccggtgcggaagccggcgctgcacctggtggcgatgctggtgccggagccgatgcagccagcggatcatcagatgctggtgatgatgtgatcgacgccgaattcactgaaaccaagtga

SEQ ID NO: 48403 - protein, 638 aa, Synechococcus sp. WH 7805
MGKVVGIDLGTTNSCVSVMEGGKPTVIANAEGFRTTPSVVAYTKNQDQLVGQIAKRQAVMNPDNTFYSVKRFIGRRVDEVNEESKEVSYSVEKAGSNVKVKCPVLEKQFAPEEVSAQVLRKLAEDAGKYLGETVTQAVITVPAYFNDSQRQATKDAGKIAGLEVLRIINEPTAAALAYGLDKKSNERILVFDLGGGTFDVSVLEVGDGVFEVLSTSGDTHLGGDDFDKVIVDHLADSFKANEGIDLRQDKQALQRLTEAAEKAKIELSSATQSEINLPFITATPEGPKHLDLTLTRGKFEELASNLIDRCRIPVEQALKDAKLSSSELDEIVMVGGSTRIPAVLELVKRTTGKDPNQTVNPDEVVAVGAAIQGGVLAGEVKDILLLDVTPLSLGVETLGGVMTKMITRNTTVPTKKSETYSTAVDGQTNVEIHVLQGEREMASDNKSLGTFRLDGIPAAPRGVPQIEVTFDIDANGILSVTAKDKGSGKEQSISITGASTLSDSEVDKMVKDAEANASADKEKREKIDLKNQAETLVYQAEKQMGELGDKVDADAKAKVEEKRTKLKEATEKEDYDAMKTLLEELQQELYTVGASVYQQAGAEAGAAPGGDAGAGADAASGSSDAGDDVIDAEFTETK

SEQ ID NO: 48404 - DNA, 1923 bp, Pseudoalteromonas tunicata D2
  CDS (1)..(1923): transl_table=11
atgggtaaaattattggaatcgatttaggtacgacgaattcgtgtgtatcagttttagaaggtggtaagccacgcgtaatcgagaattcggaaggcgaccgtacaactccatcaatcatcgcatatacagctgatggtgaaacgttagtaggtcaaccggcaaaacgccaagcggttacaaacccacaaaatacattatttgcgattaaacgtttaattggccgtcgttttgaagacgaagaagtacaacgtgatatcgctatcatgccattcaaaattgttaaagcagacaatggtgatgcatgggtagaagcgcgtggtgaaaaacgtgccgcgccacaaatttctgctgaagttttgaaaaaaatgaagaaaacagcagaagattatttaggtgagccggttactgaagcagtaatcacagtgcctgcttatttcaacgattcacaacgtcaagcaacaaaagatgcaggtcgtatcgcgggtcttgaagttaaacgtattatcaatgagcctacagcggctgcacttgcttatggtattgagcgtaagcaaggtgataatgttgttgctgtttatgacttaggtggtggtacgttcgatatttcaatcattgaaattgatgatgttgaaggcgagcaaacgtttgaagtacttgctacaaacggtgatacacacttaggtggtgaagatttcgataaccgtgttatcaattacttagtaactgaattcaagaaagatcaaggcattgaccttaaaaatgatccacttgcaatgcaacgtgttaaagaagctgctgaaaaagctaaaattgaattgtcatcagctcaatctacagaagtaaatcttccgtatgtaactgctgatgcaacaggtcctaagcatatgaacgtgaaattatcacgcgctaagcttgagtctttagttgaagatttagtattaaaatcacttgagccacttaaaaaagcacttgcagatgcagatctttcagtaagtgaagtgaatgacattatccttgtgggtggtcaaacacgtatgcctatggtgcaaaaagcagttgctgacttctttggtaaagaaccacgcaaagacgttaaccctgatgaagcggtagctatgggtgcagctgttcaaggtggtgtacttgcgggtgaggttaaagacgtattattactagacgtatgtccattatcacttggtattgagactatgggtcaagtaatgactgctctgattgagaaaaatactactatcccaacgaaaaagtcacaaactttctctactgcggaagataatcaatcagcggtaacgatccatgtactacaaggtgaacgtaaacgttctagcgataacaaatcactaggtcagttcaaccttgaaggtattcgtcctgcgcaacgtggtgctccacaaattgaagtaacatttgatgttgatgctgatggtatcttacatgtatctgcaaaagataaagatacgggtaaagagcaaaaaattaccattcaagcaaactcaggtttatcagatgatgaagttgaagcgatgatccgtgatgcagaagccaatgctgaagctgataaaaagtttgctgagttagtgggcattcgtaaccaagctgatgcacttgttcacggtacacgtaaacaagttgaagaagctggtgatgacttacctgcagcagataaagaagtaattgaagcagcagttgttgagcttgaaacagcaattaagagcgataacaaagaagaaattgaagcaaaaactcaagctttaatggaaaaatcgcaaaagctgatggaaattgctcaagctaaagcacaaggtcagcaagctggcggtgctgagcaacaacaaaaatcttcagccaaacaagatgatgatgttgtagatgctgagtttgaagaagtaaaagacgataaataa

SEQ ID NO: 48405 - protein, 640 aa, Pseudoalteromonas tunicata D2
MGKIIGIDLGTTNSCVSVLEGGKPRVIENSEGDRTTPSIIAYTADGETLVGQPAKRQAVTNPQNTLFAIKRLIGRRFEDEEVQRDIAIMPFKIVKADNGDAWVEARGEKRAAPQISAEVLKKMKKTAEDYLGEPVTEAVITVPAYFNDSQRQATKDAGRIAGLEVKRIINEPTAAALAYGIERKQGDNVVAVYDLGGGTFDISIIEIDDVEGEQTFEVLATNGDTHLGGEDFDNRVINYLVTEFKKDQGIDLKNDPLAMQRVKEAAEKAKIELSSAQSTEVNLPYVTADATGPKHMNVKLSRAKLESLVEDLVLKSLEPLKKALADADLSVSEVNDIILVGGQTRMPMVQKAVADFFGKEPRKDVNPDEAVAMGAAVQGGVLAGEVKDVLLLDVCPLSLGIETMGQVMTALIEKNTTIPTKKSQTFSTAEDNQSAVTIHVLQGERKRSSDNKSLGQFNLEGIRPAQRGAPQIEVTFDVDADGILHVSAKDKDTGKEQKITIQANSGLSDDEVEAMIRDAEANAEADKKFAELVGIRNQADALVHGTRKQVEEAGDDLPAADKEVIEAAVVELETAIKSDNKEEIEAKTQALMEKSQKLMEIAQAKAQGQQAGGAEQQQKSSAKQDDDVVDAEFEEVKDDK

SEQ ID NO: 48406 - DNA, 1914 bp, Photobacterium sp. SKA34
  CDS (1)..(1914): transl_table=11
atgggtaaaatcattggtattgacttaggtactacaaactcttgtgtagcagtacttgacggcgacaaaccacgtgtaatcgaaaacgcagaaggcgagcgtacaacagcatcagttgttgcctacactcaagatggtgaaacgctagttggtcaaccagcaaaacgtcaggcagtaacaaaccctgaaaacacactattcgcaatcaagcgtctaatcggtcgtcgttttgaggacgaagaagttcagcgtgatatcgaaatcatgccttacaaaattgttaaggctgacaacggtgatgcatgggtagaagcaaaaggccaaaaaatggctgctcctcaagtatctgctgaaattctgaagaaaatgaagaaaacagctgaagattaccttggcgagtcagtaactggcgcagtaatcacagttcctgcttacttcaacgatgcgcagcgtcaagcaacaaaagatgctggccgtatcgcaggtttagatgttaaacgtatcattaacgaaccaacagcagcagcgctagcttacggcctagacaaacaaggtggtgatcgcactatcgctgtttatgaccttggtggtggtacttttgatatttcaatcatcgagattgatgaagttgaaggtgagaaaacatttgaagttctagcaactaacggtgatacacaccttggtggtgaagacttcgatactcgtctaattaactacttagtagaagaattcaagaaagagcaaggtatcaatcttaagaccgatcctcttgcgatgcagcgtctaaaagaagctgcagaaaaagcgaaaatcgaactatcatctgcacaacaaactgatgtaaacctaccttacattacagcagatgctactggtcctaagcacatgaacatcaaagtgactcgtgcaaaactagaatctctagttgaagacctagttcaacgctctctagacccactaaaagttgcgctagcagatgctgacctaactgttggtgacatcacagatgttatcctagttggtggtcaaactcgtatgcctatggttcaagctaaagtaactgaattctttggtaaagagccacgtaaagacgttaaccctgatgaagcggttgctgtaggtgctgctgttcaaggtggtgtacttgctggtgatgttaaagacgttctacttctagacgttactccactatctcttggtattgaaaccatgggtggcgtaatgactaaacttatcgagaagaacacaactatcccaacaaaagcgaaccaagtgttctctactgctgaagataaccaaagcgcggtaactatccacgtaattcaaggtgagcgtaagcaagcaagcttcaacaagtctctaggtcaattcaacctagaaggcattcaagctgcacctcgtggtatgccacaaatcgaagtaactttcgaccttgatgctgatggtatcctaaacgtatctgcaaaagataagactacgggtaaagagcagaagatcactatccaagcgtctggtggtctaagcgatgctgatatcgagaaaatggttcaagaagctgaagctaacaaagaaaacgacaaaaagtttgaagagttagttactgctcgtaaccaagctgaccagctaattcacggtactcgtaagcaaatcgaagaagcgggtgacgcacttcctgctgatgagaaagcaaaaatcgaagctgcagttgctgaactagaagaagcacgtaaaggcgaagataaagaagcaattgatgcgaaagttcaagcagttgttgctgcttctcaaaagctaatggaaatcgctcaacagaaagcacaagctcaacaagctgatggtgctggtgagcaacaagctaagcaagacgacgacgttgttgatgctgagtttgaagaagttaaagacaacaaataa

SEQ ID NO: 48407 - protein, 637 aa, Photobacterium sp. SKA34
MGKIIGIDLGTTNSCVAVLDGDKPRVIENAEGERTTASVVAYTQDGETLVGQPAKRQAVTNPENTLFAIKRLIGRRFEDEEVQRDIEIMPYKIVKADNGDAWVEAKGQKMAAPQVSAEILKKMKKTAEDYLGESVTGAVITVPAYFNDAQRQATKDAGRIAGLDVKRIINEPTAAALAYGLDKQGGDRTIAVYDLGGGTFDISIIEIDEVEGEKTFEVLATNGDTHLGGEDFDTRLINYLVEEFKKEQGINLKTDPLAMQRLKEAAEKAKIELSSAQQTDVNLPYITADATGPKHMNIKVTRAKLESLVEDLVQRSLDPLKVALADADLTVGDITDVILVGGQTRMPMVQAKVTEFFGKEPRKDVNPDEAVAVGAAVQGGVLAGDVKDVLLLDVTPLSLGIETMGGVMTKLIEKNTTIPTKANQVFSTAEDNQSAVTIHVIQGERKQASFNKSLGQFNLEGIQAAPRGMPQIEVTFDLDADGILNVSAKDKTTGKEQKITIQASGGLSDADIEKMVQEAEANKENDKKFEELVTARNQADQLIHGTRKQIEEAGDALPADEKAKIEAAVAELEEARKGEDKEAIDAKVQAVVAASQKLMEIAQQKAQAQQADGAGEQQAKQDDDVVDAEFEEVKDNK

SEQ ID NO: 48408 - DNA, 1896 bp, Xanthobacter autotrophicus Py2
  CDS (1)..(1896): transl_table=11
atggccaagatcatcggtatcgacctcggcaccaccaattcctgcgtcgcggtgatggaggggtccaccccgaaagtcatcgagaacgccgagggcgcgcgcaccacgccctccatcgtcgccttcacggaggacggcgagcgtctcgtcggccagcccgccaagcgccagagcgtcaccaatcccgagcgcaccttcttcgcggtgaagcgcctcatcggccgccgctacgacgacccgaccgtcgagaaggacaagcatctcgtcccctactccatcgtgcgcgccgacaatggcgatgcctgggtggaagcggacggcaagaagtattccccctcgcagatctccgccttcgtcctgcagaagatgaaggagaccgccgagtcgttcctgggtgagaaggtcgagaaggcggtcatcaccgtcccggcctacttcaacgacgcccagcgccaggccaccaaggacgccggccgcatcgccggccttgaggtgctgcgcatcatcaacgagcccacggcggcggcgctggcctatggcctcgacaagaagtcggccggcaccatcgcggtgtacgacctcggcggcggcaccttcgacgtgtcggtgctggagatcggcgacggcgtgttcgaggtgaagtccaccaacggcgacaccttcctcggcggtgaagacttcgacatgcggctcgtcacctatctggcggacgagttcaagaaggagcagggcatcgacctgcgcaacgacaagctggccctccagcgcctcaaggaggccgccgagaaggcgaagatcgagctgtcgagcgcgacccagaccgagatcaacctgcccttcattaccgccgatgccacgggcccgaagcatctcacgctgaagctcacccgcgccaagttcgaggcgctggtggacgacctcatccagcgcacggtggagccctgccggctcgcgctcaaggatgccggcctcaccgccgggcagatcgacgaggtggtcctcgtcggcggcatgacccgcatgcccaaggtgcaggaagtggtgaagcagttcttcggcaaggagccccacaagggcgtcaacccggacgaagtggtcgccatcggcgccgcggtccaggccggcgtgctccagggcgacgtgaaggacgtgctgctgctcgacgtgaccccgctgtccctgggcatcgagaccctgggcggcgtgttcacccggctcatcgaccgcaacaccaccatcccgacgaagaagagccagaccttctccaccgccgaggatggccagaccgcggtgaccatccgcgtgttccagggcgagcgcgagatggcggcggacaacaagatgctcggccagttcgacctcatgggcatcccgcccgcgccccgcggcgtgccgcaggtggaggtgaccttcgacatcgacgccaacggcatcgtgcaggtctccgccaaggacaagggcaccggcaaggagcagcagatccgcatccaggcctcgggcggcctgaatgacgccgacatcgagaagatggtgaaggacgccgaggcccacgcggccgaggacaagaagcgccgggccctggtggaagccaagaaccacgcggaagccctcgtccactccaccgagaaggccgtcgcggagcatggcgacaaggtcggcgcggtggagaagggcgccatcgaggcggccctggcggatctcaagtcgacgctggaaggcgatgacgtggaggccatcacggccaagaccaacaccctggcccaggcctccctcaagctcggcgaggccatgtatgcggcccagcagccgggtgccgagggcgccgccaagccggcggacgacgtggtggacgccgagttcaccgaggtcgacgacgacaagaagaagtcggcgtga

SEQ ID NO: 48409 - protein, 631 aa, Xanthobacter autotrophicus Py2
MAKIIGIDLGTTNSCVAVMEGSTPKVIENAEGARTTPSIVAFTEDGERLVGQPAKRQSVTNPERTFFAVKRLIGRRYDDPTVEKDKHLVPYSIVRADNGDAWVEADGKKYSPSQISAFVLQKMKETAESFLGEKVEKAVITVPAYFNDAQRQATKDAGRIAGLEVLRIINEPTAAALAYGLDKKSAGTIAVYDLGGGTFDVSVLEIGDGVFEVKSTNGDTFLGGEDFDMRLVTYLADEFKKEQGIDLRNDKLALQRLKEAAEKAKIELSSATQTEINLPFITADATGPKHLTLKLTRAKFEALVDDLIQRTVEPCRLALKDAGLTAGQIDEVVLVGGMTRMPKVQEVVKQFFGKEPHKGVNPDEVVAIGAAVQAGVLQGDVKDVLLLDVTPLSLGIETLGGVFTRLIDRNTTIPTKKSQTFSTAEDGQTAVTIRVFQGEREMAADNKMLGQFDLMGIPPAPRGVPQVEVTFDIDANGIVQVSAKDKGTGKEQQIRIQASGGLNDADIEKMVKDAEAHAAEDKKRRALVEAKNHAEALVHSTEKAVAEHGDKVGAVEKGAIEAALADLKSTLEGDDVEAITAKTNTLAQASLKLGEAMYAAQQPGAEGAAKPADDVVDAEFTEVDDDKKKSA

SEQ ID NO: 48410 - DNA, 1902 bp, Flavobacteria bacterium BBFL7
  CDS (1)..(1902): transl_table=11
atgagtaaaataattggaatagacttagggacaacaaacagctgtgtttctgtaatggaaggaagcgagcctgtagtaattcctaatgctgaaggaaaaagaactactccatctgtaatcgcctttgttgaaggtggtgagattaaagtaggtgatcctgcaaaaagacaagcggtaactaaccctactaaaacggttgcatctgttaagcgttttatgggtaataaatttagtgagtctagtaaagaagctgcacgtgtaccttacaatgtagttaaaggtgataatgatacaccacgtgtagacatcgatggtcgtttatatacacctcaagaattaagtgctatgattcttcaaaaaatgaagaaaacagcagaagattatttaggacaagaagtaactggtgctgttattactgtacctgcatactttaacgattctcaacgtcaggcaactaaagaagctggtgagatcgcaggtcttaaagtagagcgtatcattaatgagcctactgctgcggcactagcttatggtatggataaaaaagatacagatcagaagatcgttgtatttgactttggtggtggaacacatgatgtttctatattagaattaggtgatggtgtatttgaagtactatctactgatggtgatactcacttaggtggtgatgatgttgatcaaaaaatcatcgactggttagcagacgagtttaaggctgccgaagatatcgatcttagacaagatcctatggctttacaacgtcttaaagaagcagcagagaaagcaaaaattgaactttcttctagtgcacagactgaaatcaacttaccatatgtaacggctactgctagtggtcctaagcaccttgtaaaaactcttactagatctgcgtttgaaaaattaatcaacgacctagtaaaaagaactatagagccatgtcaaacagcattaaaaaatgcaggtctttcaactggtgatattgatgagatcatccttgtaggtggatcaactcgtattcctgcagtacaggaagctgttgagaaattctttggtaaagctccatcaaaaggtgtgaatcctgatgaggttgtagcgattggtgctgcaattcaaggtggtgttttaacaggtgatgttaaggatgtacttctattagatgtaacgccactttctttaggtattgaaactatgggtggtgtaatgactaaattgattgagtctaatacaacaatccctactaaaaaatctcaagtattctctacagcagcagataatcaacctagtgttgaaattcacgtaatccaaggagagcgttctatggctgcagataataaaacgataggtcgtttccatttatctgacattccaccagcacgtcgtggtactccacagattgaagttacttttgatatcgatgcaaatggtatcatcaaagtaagtgctgaagataaagcaactggtaagaaacaagatatccgtatcgaagcttcttctggacttagtgaagaagaaatcgagaaaatgaagcaggatgctgctgcaaatgctgatgctgatgcaaaagcaaaagaaactgcagataagttgaacgcggcagatcaaatgattttccaaacagagcaacagttagaagaatttggtgataagctacctgaagataaaaaagcgccaattactgaggcacttactgaattgaaagcagcttatgagactaaagacatcgcagtaatcgatcctgctctagaaaaattaaatacagtttggacagcagcaagtgaagaaatgtataaagctcaagcagatgctcaaggtggacaacctggaccagacgctggtgctgatcaagctgcagacaatacaagtgatgttgaagatgtagattttgaagaagttaaataa

SEQ ID NO: 48411 - protein, 633 aa, Flavobacteria bacterium BBFL7
MSKIIGIDLGTTNSCVSVMEGSEPVVIPNAEGKRTTPSVIAFVEGGEIKVGDPAKRQAVTNPTKTVASVKRFMGNKFSESSKEAARVPYNVVKGDNDTPRVDIDGRLYTPQELSAMILQKMKKTAEDYLGQEVTGAVITVPAYFNDSQRQATKEAGEIAGLKVERIINEPTAAALAYGMDKKDTDQKIVVFDFGGGTHDVSILELGDGVFEVLSTDGDTHLGGDDVDQKIIDWLADEFKAAEDIDLRQDPMALQRLKEAAEKAKIELSSSAQTEINLPYVTATASGPKHLVKTLTRSAFEKLINDLVKRTIEPCQTALKNAGLSTGDIDEIILVGGSTRIPAVQEAVEKFFGKAPSKGVNPDEVVAIGAAIQGGVLTGDVKDVLLLDVTPLSLGIETMGGVMTKLIESNTTIPTKKSQVFSTAADNQPSVEIHVIQGERSMAADNKTIGRFHLSDIPPARRGTPQIEVTFDIDANGIIKVSAEDKATGKKQDIRIEASSGLSEEEIEKMKQDAAANADADAKAKETADKLNAADQMIFQTEQQLEEFGDKLPEDKKAPITEALTELKAAYETKDIAVIDPALEKLNTVWTAASEEMYKAQADAQGGQPGPDAGADQAADNTSDVEDVDFEEVK

SEQ ID NO: 48412 - DNA, 1944 bp, marine gamma proteobacterium HTCC2207
  CDS (1)..(1944): transl_table=11
atgggcaaaattatcggaatcgaccttggaaccaccaactcttgtgttgcggtccttgaaggcgataaacccaaagtaatagaaaatgcagaaggtgcacgtactacaccatctgttgtagcgtacaccgacgaaggtgaaatcttagttgggcagtcggccaagcgccaggcagtgaccaacccgcacaacacagtctacgcggtaaagcgtttaatcggtcgtcgttttgaagacgatgtcgtgcagaaagacatcaaaatggtgccgtacaaaattgttaaagctgacaatggcgatgcctgggtcgaagttaaaggcgacagcaaagcagcgccacagatttcagctgaaatcctcaagaaaatgaaaaagaccgctgaagactatctcggcgagtcagtcactgaagcggttattaccgttccggcttatttcaacgactcacagcgtcaggcaactaaagatgccggccgtatcgccggtctcgacgtcaagcgtattatcaacgagccaacagctgcggcactggcttatggtattgataaagctgctggcgatcgtgtggttgcagtttacgatctcggtggtggtacttttgatatttcgattattgaaattgccgatgtcgatggtgaaaagcagttcgaagttctggcaactaacggcgacacgttcctcggtggtgaagactttgatatgcgcctgatcgaatacttatcagctgaatttaagcgtgagagctcaattgatattcacggtgacccactggctatgcagcgtctaaaagaagctgctgaaaaagcgaagatcgaactctcttcaagccagcaaactgaagtgaatctgccttacatcactgctgatgcgacaggtcccaagcacttggttgttaagctaacgcgtaccaaattggaatcattggttgaagatctggttgagcgttcattggcgccactgagaatcgccctgaaagacgctggcaaatccgttggcgaaatcgacgagattattcttgttggtggccagactcgtatgcccaaggttcaggagaaagtgactgagttctttggtaaagagccacgtaaagatgttaaccccgacgaagcagttgccgtgggtgctgccctgcagggtgcggtactggctggtgatgtgaccgacgtgctgctgctcgacgtaaccccgctgagcctgggtattgaaaccatgggtggcgttgccactccagtgatcgagaagaacacgacgattcctaccaagaaatcacagatcttctcaaccgctgatgacaaccaaactgctgtaaccattcacgtggttcagggcgagcgcaagcaagctacaggtaacaaatcactgggtcgttttgacttggctgatataccgccggccccgcgcggtatgcctcagattgaagtgaccttcgacatcgatgccaacggtatcttgcatgtaggcgcaaaagacaaggctactggtaaagagcagtcgatcattattaaagcctcttcaggtctctctgatgaagagatcgatgcaatggttaaagatgctgaagccaatgctgccgacgatcagaagttcgctgatctggtccaagctcgcaacacagccgacggtctagcacacgctgctaagaagactcttgaagacgctggcgacaaagcatcagaagaagagaagactgcgattgaagcggctattaaaggtgttgaggaagctgttcagggcgaagatagtgacgccattgaagctgcgaccaaagtactctctgaagcctctgcagctctggcccaaaagctctacgccgaacaggccgaagcgggtcaagctgaaggcggcgagcaggctgctggtgatgacgcaatggatgctgaattcgaagaagtgaaagaagagaccgcagaagaaacagcagaagagaaagaagacaagaaataa

SEQ ID NO: 48413 - protein, 647 aa, marine gamma proteobacterium HTCC2207
MGKIIGIDLGTTNSCVAVLEGDKPKVIENAEGARTTPSVVAYTDEGEILVGQSAKRQAVTNPHNTVYAVKRLIGRRFEDDVVQKDIKMVPYKIVKADNGDAWVEVKGDSKAAPQISAEILKKMKKTAEDYLGESVTEAVITVPAYFNDSQRQATKDAGRIAGLDVKRIINEPTAAALAYGIDKAAGDRVVAVYDLGGGTFDISIIEIADVDGEKQFEVLATNGDTFLGGEDFDMRLIEYLSAEFKRESSIDIHGDPLAMQRLKEAAEKAKIELSSSQQTEVNLPYITADATGPKHLVVKLTRTKLESLVEDLVERSLAPLRIALKDAGKSVGEIDEIILVGGQTRMPKVQEKVTEFFGKEPRKDVNPDEAVAVGAALQGAVLAGDVTDVLLLDVTPLSLGIETMGGVATPVIEKNTTIPTKKSQIFSTADDNQTAVTIHVVQGERKQATGNKSLGRFDLADIPPAPRGMPQIEVTFDIDANGILHVGAKDKATGKEQSIIIKASSGLSDEEIDAMVKDAEANAADDQKFADLVQARNTADGLAHAAKKTLEDAGDKASEEEKTAIEAAIKGVEEAVQGEDSDAIEAATKVLSEASAALAQKLYAEQAEAGQAEGGEQAAGDDAMDAEFEEVKEETAEETAEEKEDKK

SEQ ID NO: 48414 - DNA, 1929 bp, delta proteobacterium MLMS-1
  CDS (1)..(1929): transl_table=11
atgggtaaaataattggaattgacctgggaaccaccaactcttgcgtggcggtcatggaaggcggtgaagccaaggtgatcaccaacgccgagggtaatcgcaccaccccgtcggtggtggcttttaacgacgccgccgagcggctggtggggcaggtggccaagcgccaggcggtgaccaaccccacccggaccctgtacgccatcaagcggctgatcggtcgtaagttcaccgatgacgcggttaaaaagagcctggagatcagccccttcaaaatcgtcgagggcaaagatggcgacgccgtggtggaagtggatggcaagcagtacgcgccggccgaaatctcggccatgaccctgggtaagatgaagcagaccgccgaggagtacctgggcgagacggtcaccgacgcggtgatcacggtaccggcctacttcaatgattcccagcgccaggccaccaaggacgccggtcagatcgccggcctgaatgtccagcggatcatcaacgagcccaccgccgcctcgctggcctatggcctggacaagaagagcgaggagaagatcgcggtctttgaccttggtggcggaaccttcgatgtttccatcctggagatcggcgacggggtctttgaagtaaaatccaccaacggcgacaccttcctgggtggcgaagactttgatatgcggatcgtcaactggctggccgacgagttcaagcgcgagcaggggattgatctgcgtagcgacaaaatggccctgcagcggctccgggaagaggcggaaaaggccaagcaggagctctcctccaccgtggagaccaatatcaacctgccctttatcaccgccgacgcttccgggcccaagcatctcaatatcaaattgagccgctccaagctggaatccctggtcggggatctcatcgagcgcaccttgggcccctgtcagaccgccctcaaggacgccggggtcagcgcttccgacatcgacgaggtgattctggtcggtggcatgacccggatgcccaaggtccaggagaaggtcaaggagatctttggccaggagccccaccggggggttaaccccgacgaggtggtggcccttggcgctgccatccagggcggggtgttgcagggcgatgtcaaggacgtgctgctgcttgatgtcaccccgctttccctggggatcgagaccctgggtggggtgatgaccaagctgatcgagaagaacaccaccatccccaccaagaagagtcaggttttctcgacggcggccgacaaccagccggcggtctccattcacgtgctccagggtgagcgggagatggccaccgataacaagaccatcggccggttcgatctggcggacctgccgccggccccccgtggagtgccccaggtcgaggtaaccttcgatctggacgccaacgggatcctccacgtctcggccaaggatatgggcaccggcaaggagcagtccatcaagatccaggcctccagcgggctttccgaggaagagattgaacggatgcagaaggatgccgagagccacgccgaggaagatcgtaagcgcagggccctggtcgaggcccgcaaccaggccgacgccttgatctactccaccgagaaatcattgaaggatctgggcgataaagtggacgccgagaccaagggcaaggtggaaagtgagatcgcttccctgcgccaggtgatggagcaggatgatcccgaggcgatccagaaggggattgaatccctgacccaggcctcccacaagctggccgagatgatgtactcccagagcggtggccagggtggagccaccggcggtggcccggaaagcggcggtgccgacggcgagtccggccagagccagggcggcggccaggatgatgacgtggtcgacgccgattatgaggaagtaaagtag

SEQ ID NO: 48415 - protein, 642 aa, delta proteobacterium MLMS-1
MGKIIGIDLGTTNSCVAVMEGGEAKVITNAEGNRTTPSVVAFNDAAERLVGQVAKRQAVTNPTRTLYAIKRLIGRKFTDDAVKKSLEISPFKIVEGKDGDAVVEVDGKQYAPAEISAMTLGKMKQTAEEYLGETVTDAVITVPAYFNDSQRQATKDAGQIAGLNVQRIINEPTAASLAYGLDKKSEEKIAVFDLGGGTFDVSILEIGDGVFEVKSTNGDTFLGGEDFDMRIVNWLADEFKREQGIDLRSDKMALQRLREEAEKAKQELSSTVETNINLPFITADASGPKHLNIKLSRSKLESLVGDLIERTLGPCQTALKDAGVSASDIDEVILVGGMTRMPKVQEKVKEIFGQEPHRGVNPDEVVALGAAIQGGVLQGDVKDVLLLDVTPLSLGIETLGGVMTKLIEKNTTIPTKKSQVFSTAADNQPAVSIHVLQGEREMATDNKTIGRFDLADLPPAPRGVPQVEVTFDLDANGILHVSAKDMGTGKEQSIKIQASSGLSEEEIERMQKDAESHAEEDRKRRALVEARNQADALIYSTEKSLKDLGDKVDAETKGKVESEIASLRQVMEQDDPEAIQKGIESLTQASHKLAEMMYSQSGGQGGATGGGPESGGADGESGQSQGGGQDDDVVDADYEEVK

SEQ ID NO: 48416 - DNA, 2007 bp, Rickettsiella grylli
  CDS (1)..(2007): transl_table=11
atggcaagtgcacaaccaaaaaacactataatcggcatcgatttgggtacgacaaactcttgcatggctattatggaaggaggcaaagcaaaggtcattgataacatagaaggtcggaaaactacaccctctattgttagttttgatcataatgaaattaaagtaggtgaagtggctaagcgtcaatccgtcacgaagccggctgaaactatttttgccgtaaaacgcttgataggtcgtaaatttactgatgctgaagtacaaaaagatatcaagatggttccctataagatcgttcctgcaaaaaacggagatgcttgggttgaagtcaacggtaaaaaattgtctccccaagaaatttctgcgcaaatcttaatgaaattaaaaagggacgctgagaaatatttaggctatgaagtaaaagatgcgattattaccgtgcccgcttactttaatgattcacaacgtcaagcaacgaaagatgcaggccgaattgcgggtttagaggttaagcgtattatcaatgagcctaccgctgcagcactcgcttatggattagataaaaaaaacaaaagcgcaaaagggactgatgccaaaatagccgtttatgatttaggtggtggtacttttgatatttccattattgaaatcgccgaagtggatggcgagcatcaattcgaagtactcgcaacgaatggcgatacttttctcggtggtgaagattttgatttgcgcgttattaattatttagccgatgaatttaaaaaggaccaaggtattgacttacacaaggatccacttgctttacaacgactcaaagaagccgctgaaaaagcgaagatagaactttcgtcaacccacgaaacggatattaatctcccttatattaccgctgatagtagtggccctaaacatcttcatattaaattaacgcgtgctaaactggagtctcttgttgacgatcttatcaaacaaagcatagaaccctgcaaaaaagccattaaagatgccaaactttctgttgaagagatatcacaaattattttagtgggtggacaaacccgcatgcctaaagtacaagaaattgttaaaaattatttcggtaaggaagcgcgccatgatgtcaaccctgatgaagccgtcgcgataggtgctgctattcaaggtggtgtattagcgggtgatgtgaaagatgtactgttgctcgatgtgactccgctttcattaggaatagaaaccttaggcggaatcatgacgccgcttattgaaagaaataccactattcctactaagaaaagccaagtattttcaacggcagaagataatcagcccgcagtaaccatacatgtattgcaaggtgaaagagaacaagcgaaagacaatagaaccttgggacgttttgacttgacagatattccgccgggtccacgcggtacaccacagatcgaagtcacctttgatatcgatgcaaacggtattattaacgtatctgctaaaaataaaacaacggggaaagaacaaaagattgttatcaaatccggtagtggtttatctgaagaagaaattcaaaaaatggtcaaggacgctgaaatacatgcggatgaggatcgcaaattccgcgagcttattaaaacacggaatgaagcagacagtttaatcgatggcgttagtaaggctttaaccaatgccggtgataaaattaacgccgatgaaaaagctcaattagaaaaagcaatcgaggaattaaaagacgcgttgaaaggcactgacaaagaaaacattgaagctaaactaaaagcgcttacagaaacatcgagcaaaatgtctgaccgtctccatgcacaacccgatgcgagtgcccaggataccaccaccgcaaatcaaacggacgacgctcctcacgagcaaacagagagcgctaaagacaacaaagacgatgttgttgatgccgtatttgaagaagtgaaagataaggacaaaaaagataacgataaaaataaaggataa

SEQ ID NO: 48417 - protein, 668 aa, Rickettsiella grylli
MASAQPKNTIIGIDLGTTNSCMAIMEGGKAKVIDNIEGRKTTPSIVSFDHNEIKVGEVAKRQSVTKPAETIFAVKRLIGRKFTDAEVQKDIKMVPYKIVPAKNGDAWVEVNGKKLSPQEISAQILMKLKRDAEKYLGYEVKDAIITVPAYFNDSQRQATKDAGRIAGLEVKRIINEPTAAALAYGLDKKNKSAKGTDAKIAVYDLGGGTFDISIIEIAEVDGEHQFEVLATNGDTFLGGEDFDLRVINYLADEFKKDQGIDLHKDPLALQRLKEAAEKAKIELSSTHETDINLPYITADSSGPKHLHIKLTRAKLESLVDDLIKQSIEPCKKAIKDAKLSVEEISQIILVGGQTRMPKVQEIVKNYFGKEARHDVNPDEAVAIGAAIQGGVLAGDVKDVLLLDVTPLSLGIETLGGIMTPLIERNTTIPTKKSQVFSTAEDNQPAVTIHVLQGEREQAKDNRTLGRFDLTDIPPGPRGTPQIEVTFDIDANGIINVSAKNKTTGKEQKIVIKSGSGLSEEEIQKMVKDAEIHADEDRKFRELIKTRNEADSLIDGVSKALTNAGDKINADEKAQLEKAIEELKDALKGTDKENIEAKLKALTETSSKMSDRLHAQPDASAQDTTTANQTDDAPHEQTESAKDNKDDVVDAVFEEVKDKDKKDNDKNKG

SEQ ID NO: 48418 - DNA, 1917 bp, Oceanobacter sp. RED65
  CDS (1)..(1917): transl_table=11
atgggtaagatcattggtatcgacttaggcacaacaaactcttgtttgtctgtattggatggcgacaaagcacgcgtaattgaaaacgcggaaggcgatcgcactacaccttctatcatcgcatatgcagatgatggcgagattttagtaggtcagcctgcaaaacgtcaggcggttactaacccacaaaacacattatacgccatcaagcgtttaatcggtcgtcgctttgaagatgatgtcgtacagaaagacattaagatggtgccttacaccattacaaaagcagacaatggtgatgcttgggtcgaagtaaaaggcgaaaaatttgcaccgccacaaatttctgctgaagttcttaagaaaatgaagaaaacagcggaagactatcttggtgaaaaagtaactgaagccgttatcactgtaccggcttactttaacgattcacagcgtcaggcaacaaaagacgcaggtaaaatcgcaggcctagaagtcaagcgtatcatcaacgagccaacagcggctgcattggcttatggtatcgacaaagaaggcggtgaccgcactatcgcagtttacgacttgggtggtggtacattcgatatctccatcatcgaagttgctgacgtggatggtgagaaacaattcgaagtattggcaaccaatggtgatactttcctaggtggtgaagactttgatatgcgcttgatcgaattcctagcggatgagttcaagaaagatcaaggtatggatctacgcggtgatgcactggctatgcagcgtctgaaagaagcggcagagaaagcgaaagtagaattgtcatcggcttctcagactgacgttaatctaccttacatcacagcggatgcatcaggtcctaaacacttaaatgtaaaagtgactcgtgccaagcttgagtctcttgtagaagagttggttaagaactcgttgaagccttgtgaaatggctcttaaagatgcgggtgtaagtgcatctgaagtagacgaagtgattttggttggtggtcaaactcgtatgccactagtacaaaaatctgttgcagatttcttcggcaaggaaccacgtaaagacgtgaacccagacgaagcagtagccatgggtgctgcaattcagggtgccgtactatctggtgacgttaaggatgttcttctactagacgtaacgccactaaccttgggtattgaaaccatgggtggtgttgccacagccgtaatcgagaagaacacgacgattccaactaagaaatcacaagtgttctcaacagctgatgacaaccagtctgcggtaacgattcatgttgtacagggtgagcgtaagcaagcgtctcagaacaagtctctaggtcgtttcgacttggctgacattccacctgcgccacgtggtgtaccgcaaatcgaagtaacttttgacatcgatgcgaacggtattcttaacgtaagcgcgaaggataaggcaacgggtaaagagcaatctatcgtgattaaagcctcttctggcttgaacgatgatgaaatcgaaaaaatggtgaaagacgctgaagcgaatgcggaagcggataaaaaattcgaagagatgattcaagtacgtaacacggctgatggtcttgttcacgcaactaagaaaacgcttgaagaagctggcgacaaagccactgacgaagagaagtctgcaattgaagcagctatcgcggaagtggaagaagcccttaaaggtgatgataaagacgccatcgaagcggcaacgaacaagcttactgaagcctcttcaggtttagctcagaagatgtatgctgagcaagcacaacaggcgcaaggcgctgaaggtgctcaggaagaagctggcaaagatgacgatgtcgtagatgctgagttcgaagaagtgaaagacaacaagtag

SEQ ID NO: 48419 - protein, 638 aa, Oceanobacter sp. RED65
MGKIIGIDLGTTNSCLSVLDGDKARVIENAEGDRTTPSIIAYADDGEILVGQPAKRQAVTNPQNTLYAIKRLIGRRFEDDVVQKDIKMVPYTITKADNGDAWVEVKGEKFAPPQISAEVLKKMKKTAEDYLGEKVTEAVITVPAYFNDSQRQATKDAGKIAGLEVKRIINEPTAAALAYGIDKEGGDRTIAVYDLGGGTFDISIIEVADVDGEKQFEVLATNGDTFLGGEDFDMRLIEFLADEFKKDQGMDLRGDALAMQRLKEAAEKAKVELSSASQTDVNLPYITADASGPKHLNVKVTRAKLESLVEELVKNSLKPCEMALKDAGVSASEVDEVILVGGQTRMPLVQKSVADFFGKEPRKDVNPDEAVAMGAAIQGAVLSGDVKDVLLLDVTPLTLGIETMGGVATAVIEKNTTIPTKKSQVFSTADDNQSAVTIHVVQGERKQASQNKSLGRFDLADIPPAPRGVPQIEVTFDIDANGILNVSAKDKATGKEQSIVIKASSGLNDDEIEKMVKDAEANAEADKKFEEMIQVRNTADGLVHATKKTLEEAGDKATDEEKSAIEAAIAEVEEALKGDDKDAIEAATNKLTEASSGLAQKMYAEQAQQAQGAEGAQEEAGKDDDVVDAEFEEVKDNK

SEQ ID NO: 48420 - DNA, 1845 bp, Desulfitobacterium hafniense DCB-2
  CDS (1)..(1845): transl_table=11
atgggtaaagtgattggcattgacttaggaaccaccaactcttgtgtggcagttatggaaggcggcgaggctgtcgttatcaccaatgcggaagggaatcggacgactccttctgtagttggtttttccaagaccggagaacgcttggccggtcaagtggctaagcgtcaggcggtttctaatccggataagaccgtcatctccattaagagacatatgggaacagattacaaagtgaaaattgacgataagagctattctccccaggagatttccgcaatgattctgcaaaagctgaaagcagatgccgaagcttatctgggacagacggtcacagaggccgtcattaccgtaccggcttatttcaccgatgcccagcggcaggctaccaaagatgcgggaaccatcgccggtctggatgttaagcggattatcaacgagcctacagcggcggctttggcctatggtttagacaagcaagaggatcaaaccgttctggtctttgacttagggggaggaaccttcgacgtatccctgctggagctttcccagggtatggttgaggttaaagccaccagcggcaacaataaactgggtggggacgactttgaccaacgcctgattgactatatggtagctgagtttaaaaaagatcaaggtgtggatttggccaaagaccgtgttgccctccaacgcttgaaagaagcagccgagaaagccaaagtggagctttccggagtgagcaccaccaatgtgaacctgccctttatcaccatgactggcgagggaccggctcacttggatatgaatattacacgggctaaatttgaggaattgaccgcggatctggtcgaggctacccttggacctacccgtcaggctttagccgatgccaaactctcttggaacgaagtgaatcaagtcattctcgtaggcggatccacccggattcctgccgtacaggaagctatcaaaaagctgagcggcaaggagccccataaaggtgtcaatccggatgaagtggtagccttgggtgctgccattcaaggcggagttctggccggggaagtgaaggatattattctcgtggacgttactcccctgtccttgggtattgaaaccctgggtggtgtctttacccggattatcgatcgcaataccaccgttcctaccacgaagagccaggttttctctactgcggcggacagccaaacttctgtggatatccacgtcctccaaggagagcgtgaaatggcggcctataacaaaaccttaggccggttccaactttccggaatcccccccgctcctcgtggcatccctcaaatcgaagtgaagttcgatattgatgccaatggtatcgtccatgtttccgctaaggatatggctacaggtaatgaacaaaaggtcaccattaccgcttccacaggcttaagccaggaagaaatcgagaagatgaaaaaagatgccgaagctcatgccgatgaagataaaaagcgcaaagaattgattgacgctaagaaccaagcagactctatggtctaccaaaccgaaaagaccctgaaggattttgaaggcaagatccctgacaatgaagcagagcccatcaagaaagctcttgaagaattaaagaccgcagccgccggggaaaatatcgagctgatcaaagaaaagaccgaaggggtaaccaaggtcctctatcccatcatcgagaagatgtatcagcaaaccggcggagcagcaccgggaccggacatgggagcagaccccggagcgggcggcgctcaaggggatgacaatgtggtggatgccgaatatactgaagtagataaggatcaaaaataa

SEQ ID NO: 48421 - protein, 614 aa, Desulfitobacterium hafniense DCB-2
MGKVIGIDLGTTNSCVAVMEGGEAVVITNAEGNRTTPSVVGFSKTGERLAGQVAKRQAVSNPDKTVISIKRHMGTDYKVKIDDKSYSPQEISAMILQKLKADAEAYLGQTVTEAVITVPAYFTDAQRQATKDAGTIAGLDVKRIINEPTAAALAYGLDKQEDQTVLVFDLGGGTFDVSLLELSQGMVEVKATSGNNKLGGDDFDQRLIDYMVAEFKKDQGVDLAKDRVALQRLKEAAEKAKVELSGVSTTNVNLPFITMTGEGPAHLDMNITRAKFEELTADLVEATLGPTRQALADAKLSWNEVNQVILVGGSTRIPAVQEAIKKLSGKEPHKGVNPDEVVALGAAIQGGVLAGEVKDIILVDVTPLSLGIETLGGVFTRIIDRNTTVPTTKSQVFSTAADSQTSVDIHVLQGEREMAAYNKTLGRFQLSGIPPAPRGIPQIEVKFDIDANGIVHVSAKDMATGNEQKVTITASTGLSQEEIEKMKKDAEAHADEDKKRKELIDAKNQADSMVYQTEKTLKDFEGKIPDNEAEPIKKALEELKTAAAGENIELIKEKTEGVTKVLYPIIEKMYQQTGGAAPGPDMGADPGAGGAQGDDNVVDAEYTEVDKDQK

SEQ ID NO: 48422 - DNA, 1908 bp, Synechococcus sp. RS9916
  CDS (1)..(1908): transl_table=11
atgggcaaggttgtaggcattgacctcggcaccacgaacagctgcgtttccgtgatggaaggtggcaagcccaccgtgatcgccaacgcagaaggattccgcaccaccccctcggtggttgcttacaccaagaaccaggatcagctggtcggtcagatcgccaagcgtcaggcggttatgaatcccgacaacactttttattccgtcaagcgtttcatcggtcgccgcgtcgatgaggtgaacgaagagtcgaaggaagtgagctatggcgtcgagaaggccggcgccaacgtgaaggtgaagtgcccggtcctcgagaagcagttcgcgcccgaagaagtcagcgcccaggtgctgcgcaagctggctgaggacgccggcaaatacctcggtgagagcatcacccaggcggtgatcactgttcccgcttatttcaacgactcccagcgtcaggccaccaaggacgccggcaagatcgccggtctggaagtgctgcgcatcatcaacgagcccaccgccgcggctctggcctacggcctcgacaagaagagcaacgagcgcatcctggtttttgacctgggcggcggcaccttcgacgtgtccgtcctggaagtgggtgacggcgtgttcgaggtgctctcgaccgctggtgacacccacctcggtggtgacgatttcgacaaggtgatcgtggatcacctggctgacactttcaagtcgaacgaaggaatcgatctgcgtcaggacaagcaggccctgcagcgcctcaccgaggcggctgaaaaagccaaggttgagctctccaacgccacccagagtgaaatcaatctgccgttcatcacggcaactcctgaaggtccgaagcacctcgacctcaccctcacccgcgccaagttcgaagagctggcttccaagctgatcgaccgttgcgccacccctgtggagcaggcgctcaaggacgccaagctgtcctcctccgagctcgacgagatcgtgatggtgggtggttccacccgcatccccgcggtgctcgagctggtgaagcgcatcaccggtaaagatcccaaccagaccgtgaaccccgatgaagtggtggccgtgggtgctgccattcagggcggtgtgctcgccggtgaggtcaaggacatccttctgctggacgtcactcccctctccctgggtgtggaaaccctcggcggtgtgatgaccaagatgatcaaccgcaacaccacggttcccaccaagaagtcggagacctattccaccgccgtggatggtcagaccaacgtggaaatccacgtgctccagggcgagcgcgagatggcatccgacaacaagtcgctcggaaccttccgtctcgatggcattccccctgctccccgtggcgtgccccagatcgaagtgaccttcgacatcgacgccaacggcatcctcagcgtcaccgccaaggacaagggcagcggcaaggagcagagcatctcgatcaccggtgcttcgaccctcagtgagaacgaggtggagaagatggtgaaggatgccgaagccaacgccagcgctgacaaggagaagcgcgagcggatcgacgtcaagaaccaggctgaaaccctcgtctaccaggccgagaagcagctgggtgagttgggcgacaaggtcgatgccgacgccaaggccaaggtggaagacaagcgcgtcaagctcaaggaagccgttgagaaggacgacttcgaggcgatgaaggcccagttggaggaactccagcaggagctttatgccctgggtgcgtccgtctatcagcaggccggtgctgacgctgctgcccctggtgctgatgctggtgccgccggtggcaatggtgctgcaggtggcgccgacgacgtgatcgacgctgaattcactgagtcgaagtga

SEQ ID NO: 48423 - protein, 635 aa, Synechococcus sp. RS9916
MGKVVGIDLGTTNSCVSVMEGGKPTVIANAEGFRTTPSVVAYTKNQDQLVGQIAKRQAVMNPDNTFYSVKRFIGRRVDEVNEESKEVSYGVEKAGANVKVKCPVLEKQFAPEEVSAQVLRKLAEDAGKYLGESITQAVITVPAYFNDSQRQATKDAGKIAGLEVLRIINEPTAAALAYGLDKKSNERILVFDLGGGTFDVSVLEVGDGVFEVLSTAGDTHLGGDDFDKVIVDHLADTFKSNEGIDLRQDKQALQRLTEAAEKAKVELSNATQSEINLPFITATPEGPKHLDLTLTRAKFEELASKLIDRCATPVEQALKDAKLSSSELDEIVMVGGSTRIPAVLELVKRITGKDPNQTVNPDEVVAVGAAIQGGVLAGEVKDILLLDVTPLSLGVETLGGVMTKMINRNTTVPTKKSETYSTAVDGQTNVEIHVLQGEREMASDNKSLGTFRLDGIPPAPRGVPQIEVTFDIDANGILSVTAKDKGSGKEQSISITGASTLSENEVEKMVKDAEANASADKEKRERIDVKNQAETLVYQAEKQLGELGDKVDADAKAKVEDKRVKLKEAVEKDDFEAMKAQLEELQQELYALGASVYQQAGADAAAPGADAGAAGGNGAAGGADDVIDAEFTESK

SEQ ID NO: 48424 - DNA, 1914 bp, Vibrio sp. Ex25
  CDS (1)..(1914): transl_table=11
atgggtaaaatcattggtattgacttaggtactactaactcatgtgttgctgtattagacggcgacaaaccacgtgtaattgaaaacgcagagggcgaacgtactactgcatcggttattgcttacactgacggtgagacgctagtaggtcaacctgcgaaacgtcaagcagtaactaacccagaaaacacgctatttgcaattaagcgtctaatcggtcgtcgttttgaagacgaagaagttcagcgtgacatccaaatcatgccttacaaaattgttaaggctgacaacggtgacgcttgggtagaagcaaaaggccaaaaaatggcggctcctcaggtttctgctgaagttcttaagaaaatgaagaaaactgctgaagatttccttggtgaggaagtaactggcgcagttatcactgtacctgcttactttaacgatgctcagcgtcaagctacaaaagatgctggccgtatcgcaggtctagaagttaaacgtatcatcaacgaaccaacagcagcagcgctagcttacggtcttgataagaaaggcggcgatcgcactatcgcggtatacgaccttggtggtggtacattcgatatctctatcatcgaaatcgatgaagttgaaggcgagaaaacattcgaagttctagcgactaacggtgatactcaccttggtggtgaagactttgataaccgcctaatcaactacttagtagacgagtttaagaaagagcaaggtatcgatcttaagaacgatccactagcaatgcagcgtgttaaagaagcagcagaaaaagcgaaaatcgagctttcttctacttctcaaactgacgtaaacctaccttacgttactgcagatgcaactggtcctaagcacatgaacattaaagtgactcgtgcaaaactagaatctctagttgaagacctagtacaacgctctcttgagccactaaaagtagctctagctgacgctgatctatcagtaaacgacatcactgacgtaatcctagttggtggtcagactcgtatgccaatggttcaagcgaaagttgctgagttctttggtaaagaagcgcgccgtgacgtaaaccctgacgaagcagtagcaatgggtgctgcagttcaaggtggtgtacttgctggtgacgttaaagacgtactactactagacgtaactccactgtctctaggtatcgagacaatgggtggcgtgatgactaagttagttgagaagaacacaactatcccaactaaagcgaaccaagttttctctacagcggaagacaaccagagcgcggttactatccacgttctacaaggtgagcgtaagcaagcgatgtacaacaagtctctaggtcaattcaacctagaaggcatccagcctgcaccacgtggtatgccacaaatcgaggttacttttgaccttgatgcggacggtatcctacacgtgtcagcgaaagacaagcagactggtaaagagcagaagatcactatccaagcttctggcggcctgagcgatgaagacatcgagaaaatggttcaagaagcagaagctaacaaagaagcggacaaaaagttcgaagagctagcgactgcacgtaaccaagctgaccaaatgattcacggtactcgtaagcaagtagaagaagctggtgaagcactacctgcagaagagaaagagaagattgaagcagcaatttctgagctagaaacagcgcgcaaaggcgaagacaaagaagctatcgatgctaaagttcaagcactaatgaccgcttctcaaaaactgatggaaatcgctcaacaacaagctcaagcgcagcaagcacaaggtgctgacgccgatgcacagtctaaagaagacgacgttgtagatgctgagttcgaagaagttaaagacgacaagaaataa

SEQ ID NO: 48425 - protein, 637 aa, Vibrio sp. Ex25
MGKIIGIDLGTTNSCVAVLDGDKPRVIENAEGERTTASVIAYTDGETLVGQPAKRQAVTNPENTLFAIKRLIGRRFEDEEVQRDIQIMPYKIVKADNGDAWVEAKGQKMAAPQVSAEVLKKMKKTAEDFLGEEVTGAVITVPAYFNDAQRQATKDAGRIAGLEVKRIINEPTAAALAYGLDKKGGDRTIAVYDLGGGTFDISIIEIDEVEGEKTFEVLATNGDTHLGGEDFDNRLINYLVDEFKKEQGIDLKNDPLAMQRVKEAAEKAKIELSSTSQTDVNLPYVTADATGPKHMNIKVTRAKLESLVEDLVQRSLEPLKVALADADLSVNDITDVILVGGQTRMPMVQAKVAEFFGKEARRDVNPDEAVAMGAAVQGGVLAGDVKDVLLLDVTPLSLGIETMGGVMTKLVEKNTTIPTKANQVFSTAEDNQSAVTIHVLQGERKQAMYNKSLGQFNLEGIQPAPRGMPQIEVTFDLDADGILHVSAKDKQTGKEQKITIQASGGLSDEDIEKMVQEAEANKEADKKFEELATARNQADQMIHGTRKQVEEAGEALPAEEKEKIEAAISELETARKGEDKEAIDAKVQALMTASQKLMEIAQQQAQAQQAQGADADAQSKEDDVVDAEFEEVKDDKK

SEQ ID NO: 48426 - DNA, 1917 bp, Alteromonadales bacterium TW-7
  CDS (1)..(1917): transl_table=11
atgggtaaaattatcggaatcgatttaggtactacaaactcttgtgttgcagtacttgatggtgacaaagcacgtgttatagaaaacgcggaaggcgatcgcacaaccccgtctatcattgcttacacgcaagacggtgaaacattagtaggtcaatctgctaagcgtcaagcggttactaaccctactaacacattatttgcaattaagcgtttaattggtcgtcgttttgaagacgaagaagtacaacgcgatatcggcattatgccatttaaaatcatcaaagctgataacggcgatgcatgggtagaagcgggtggcgaaaaacgcgctgcaccacaaatttctgctgaagtactgaaaaaaatgaaaaaaactgcagaagacttcttaggtgaagaagtaactgaagcggtaattacagtacctgcatactttaacgattcacaacgtcaagcaactaaagatgctggtcgtattgctggtcttgaagttaaacgtatcatcaatgagccaactgctgctgccctagcttacggcatggacaaaaacaaaggcgaaaacattgttgctgtatacgatttaggtggtggtacgttcgatttatcaatcattgaaattgatgaagttgaaggcgagcacacatttgaagtactagctacaaatggtgatactcacttaggtggtgaagatttcgataaccgcgttatcaactacttagtagcagagtttaagaaagaccaaggcttagatctaaaaacagatccacttgcaatgcaacgtgttaaagaagctgcagaaaaagcaaaaattgaactttcttcagcacaatctacagaagttaaccttccgtacgtaactgctgatgcaacaggtcctaagcacatgaacgtgaaactaacacgcgctaagcttgagtcacttgttgaagatttagtaactaaatctctagagccgcttaaacgtgcacttgctgattctgatttatcagtaggcgacatcaacgacattattcttgttggtggtcaaacacgtatgcctttagtacaaaaaacagttgctgatttcttcggtaaagagccacgtaaagacgttaaccctgatgaagctgtagctgtaggcgcggcaatccaaggtggcgtactagcaggtgatgttaaagacgtactattactagacgtttctccattgtctctaggtattgaaacaatgggttctgtaatgacagcacttattgagaagaacacgacgattcctactaagaaatcacaaacgttctcaacagcagaagataaccagtctgcggtaacaattcatgtgttacaaggtgagcgtaaacgttcaagcgacaacaaatctttaggtcaatttaaccttgaaggtattcgtcctgctcaacgtggtacaccacaaatcgaagtaacatttgatgttgatgctgacggtatcttacatgtatctgctaaagataaagacacaggtaaagagcaaaaaattactattcaagcgtcttcaggtttaagcgatgaagaagttgaaaaaatggtacgtgatgcagaagcgcacgctgaagaagacaaaaagtttgaagagcttgtagctgttcgtaaccaagcagatgcaatggttcacggtacacgtaagcaagttgaagaagcgggcgatgctttaccaagtgaagataaagaagcgattgaagcggcagttgtagacttagaagctgcaattaagagcgacaacaaagacgaaattgaagctaaaacgcaagcacttgctaaaaagtctcaaaagttaatggaaattgctcaagctaaagcacagcaaggtcaagcagacgcaggtgagcaacaacaatcagctaagcaagatgatgatgttgttgatgcagagtttgaagaagtaaaagacgacaagtaa

SEQ ID NO: 48427 - protein, 638 aa, Alteromonadales bacterium TW-7
MGKIIGIDLGTTNSCVAVLDGDKARVIENAEGDRTTPSIIAYTQDGETLVGQSAKRQAVTNPTNTLFAIKRLIGRRFEDEEVQRDIGIMPFKIIKADNGDAWVEAGGEKRAAPQISAEVLKKMKKTAEDFLGEEVTEAVITVPAYFNDSQRQATKDAGRIAGLEVKRIINEPTAAALAYGMDKNKGENIVAVYDLGGGTFDLSIIEIDEVEGEHTFEVLATNGDTHLGGEDFDNRVINYLVAEFKKDQGLDLKTDPLAMQRVKEAAEKAKIELSSAQSTEVNLPYVTADATGPKHMNVKLTRAKLESLVEDLVTKSLEPLKRALADSDLSVGDINDIILVGGQTRMPLVQKTVADFFGKEPRKDVNPDEAVAVGAAIQGGVLAGDVKDVLLLDVSPLSLGIETMGSVMTALIEKNTTIPTKKSQTFSTAEDNQSAVTIHVLQGERKRSSDNKSLGQFNLEGIRPAQRGTPQIEVTFDVDADGILHVSAKDKDTGKEQKITIQASSGLSDEEVEKMVRDAEAHAEEDKKFEELVAVRNQADAMVHGTRKQVEEAGDALPSEDKEAIEAAVVDLEAAIKSDNKDEIEAKTQALAKKSQKLMEIAQAKAQQGQADAGEQQQSAKQDDDVVDAEFEEVKDDK

SEQ ID NO: 48428 - DNA, 1926 bp, marine gamma proteobacterium HTCC2143
  CDS (1)..(1926): transl_table=11
atgggtaaaattatcggaatcgacttgggaaccaccaattcatgtgttgctgtacttgacggtgatggtccgcgggttatcgaaaatggcgaaggcgatcgtactactccgtcaattgttggctacgctgaagatggcgaaatcttggtcggtcagagcgccaagcgtcaggctgtcactaatccgaccaatactattttcgcggttaagcggttgatcggaagaaagtataaagacgatgttgtacaaaaagacatctcgatggttccgtatacgatcgctgcagctgacaatggcgacgcatgggtatctgcgcgaggcaaaactatggctcctccacaggtttctgcggaaatcctgatgaaaatgaaaagaacagctgaagagtttctcggtgagtcagtcactgaagcggtagtcaccgtgccagcttattttaatgactcgcagcgacaagccaccaaggacgctgggaaaattgccggtttggaaatcaaacgtattatcaacgagccgactgcggcagccttggcctacggtatggacaaggcaaaaggtgaccatacaattgcagtgtatgacttgggtggcggtaccttcgatatatctatcatcgagattgcagaagttgatggcgaacatcagtttgaagtgctgtctacaaacggtgacacattcctgggcggggaagattttgatatgcgtctgattgaatatttgtcagatgaattcaaaaaagaaagcggtatggacttgaaaggtgatccgttggctatgcagcgtctcaaggaagccgctgaaaaagcaaaaattgagctgtcttccagtcagcaaacagaagttaatctcccgtacattacggcagatgcctccggtcctaaacacttggtggttaagttgtctcgtgccaagctagaatccttagttgaagaactggttgtcaactcattggcgcctgttaaacaagcgctacaagatgctgatttgtccaccggtgatattgacgatgtaattctagttggtggtcaaactcgtatgccaatggttcaaactaaggtcgctgaattcttcggtaaagagcctcgcaaggatgttaaccccgatgaagctgttgccatgggtgcggctattcagggcggtgtattaagcggcgatgtcaccgatgtattgctgttagacgtaacacctctgacgctgggtattgaaacaatgggtggtgttgccacagcattgattgagaaaaataccacgattcctactaagaaatcgcagatattctcaaccgctgaagacaaccagtctgcggtaactattcacgttgttcagggtgagcgtaagcaggcctctggcaataaatcattgggtcgtttcgatctgacggacattccaccttctcagcgcggtatgccacaaattgaagttaccttcgatttggacgctaacggtatcttgcatgttggcgcaaaagacaaggcgacaggtaaagaacagtctattcgcatcactgcgtcctcgggtttgtcggatgaagagattgaaaaaatggttcaggatgccgaagtgaatgctgaggctgatcagaaatttgaggagctagttaccagccgcaatacccttgaaggattaatcaatgcgactaaaaagactgttgaagaagccggtgataaggcaactgatgacgaaaaagcagcgatcgaaggtgcggtgaaagaagcggaagaagctttggcgggcgaagacatagccgccatggaagctgccacccagaagctgactgaaacgtctggtcctctggcacaaaagatgtacgcagaacaggccgagcaagcggaaggcggcggtggtgcagattctgctgaacaaacagaagctggcgacgacgtcgttgatgctgagtttgaagaagtgaaagaagataacaagtaa

SEQ ID NO: 48429 - protein, 641 aa, marine gamma proteobacterium HTCC2143
MGKIIGIDLGTTNSCVAVLDGDGPRVIENGEGDRTTPSIVGYAEDGEILVGQSAKRQAVTNPTNTIFAVKRLIGRKYKDDVVQKDISMVPYTIAAADNGDAWVSARGKTMAPPQVSAEILMKMKRTAEEFLGESVTEAVVTVPAYFNDSQRQATKDAGKIAGLEIKRIINEPTAAALAYGMDKAKGDHTIAVYDLGGGTFDISIIEIAEVDGEHQFEVLSTNGDTFLGGEDFDMRLIEYLSDEFKKESGMDLKGDPLAMQRLKEAAEKAKIELSSSQQTEVNLPYITADASGPKHLVVKLSRAKLESLVEELVVNSLAPVKQALQDADLSTGDIDDVILVGGQTRMPMVQTKVAEFFGKEPRKDVNPDEAVAMGAAIQGGVLSGDVTDVLLLDVTPLTLGIETMGGVATALIEKNTTIPTKKSQIFSTAEDNQSAVTIHVVQGERKQASGNKSLGRFDLTDIPPSQRGMPQIEVTFDLDANGILHVGAKDKATGKEQSIRITASSGLSDEEIEKMVQDAEVNAEADQKFEELVTSRNTLEGLINATKKTVEEAGDKATDDEKAAIEGAVKEAEEALAGEDIAAMEAATQKLTETSGPLAQKMYAEQAEQAEGGGGADSAEQTEAGDDVVDAEFEEVKEDNK

SEQ ID NO: 48430 - DNA, 1938 bp, marine gamma proteobacterium HTCC2080
  CDS (1)..(1938): transl_table=11
atgggcaaaattattggaatagaccttggaaccaccaattcgtgtgtatcggtattggaaggtggaaaggcgcgagttattgaaaatgcagaaggcgggcgcaccacgccttcaattgtcgcttatgccgacgatgatgagattctggtggggcaggcggctaagcgtcaggccgttaccaaccctaccaacacgctctacgcggtaaagcgcctaatcgggcgccgctttgaagataaagtggtacaaaaggacatcaagatggtgccctataacattgtcaaagccgacaatggtgatgcttgggtcgaggccaaaggcaacagcatggcgcctccacaggtgtctgctgaagtcctgcgcaagatgaagaagaccgcggaagaatttttgggtgaaacggtctcagaagcggtaattacagtgccggcttacttcaacgattcgcagcgtcaggccacgaaagacgctggaaagattgccggactcgaggtgaagcgcattatcaatgagccaacggcagctgcattggcttatggcatggacaagtctcagggagatcgcacaattgcggtatacgatctgggtggcggtaccttcgacatttcagtgattgaaattgccgaggtcgacggtgagcatcagtttgaggttctcgcaaccaatggcgatacctttctcggcggagaagatttcgaccttcgattgatcgagtatttggcggatgaattcaaacgagagaatggcattgacttgcacggtgatcctcttgcgttgcagcgccttaaagaagctgccgaaaaagccaagattgaactctctagtgcccagcagacggaggtcaacctaccgtacattactgccgatgccacgggccccaagcacctggtggtgaagttgtctcggtctaagctcgagtctttagtggaggatctggtcacacgttcattagatcccgtaaaaactgcattggcagatgcaggactgtcgccctctgaaatacaagacgttatcttggtcggtggacagacgcgtatgcccttagtgcagacgacagtaactgacttctttggtaaggagcctcgcaaggatgtaaatcctgatgaggcggtcgctatgggcgcttctattcagggtgctgtgctcgctggtgacgtcaaagatgttctgttgcttgacgtgacaccgctgactcttggtattgaaacgatgggtagtgttgcgacaccgttaattgagaagaacaccacgattccaactaaaaaatctcaggtgttttcaacagctgaagacaatcagacggcggtaactattcacgtggttcagggtgagcgcaaacaggcggcccaaaataagtcgctcggtcggtttgaccttgctgatattccaccggcaccgcgaggcgtgcctcaggttgaggtgacttttgaccttgatgccaacggtattcttaatgtgtctgccaaagacaaagccacgggcaaagagcagtcgattcgtattacggcgtcgggtggtctctctgaggacgagattgagcaaatggtgcaagacgccgaagctaacgcagaggccgataagaagttcgaagagatgattactgtccgaaacagctgcgatggcatggttcacgctgcgcgaaagactctcgaggaagcgggagagcactcaacggtcgacgagcgcgcggctattgaagccgcaattgccgaggctgaagaagccatgcaaggcgatgataaagaggcgatcgaggcagctacgaccaaaatcacagaggcaacgggtccggtagcgcagaagatgtacgcggcgcaagaggctgaaggtgcagcggaggccgcaggtgctgaggcgggcgcttctacaggttctgctgacgacggtgacgttgttgatgctgagtttgaggaagtcaaagaagacgacaagccataa

SEQ ID NO: 48431 - protein, 645 aa, marine gamma proteobacterium HTCC2080
MGKIIGIDLGTTNSCVSVLEGGKARVIENAEGGRTTPSIVAYADDDEILVGQAAKRQAVTNPTNTLYAVKRLIGRRFEDKVVQKDIKMVPYNIVKADNGDAWVEAKGNSMAPPQVSAEVLRKMKKTAEEFLGETVSEAVITVPAYFNDSQRQATKDAGKIAGLEVKRIINEPTAAALAYGMDKSQGDRTIAVYDLGGGTFDISVIEIAEVDGEHQFEVLATNGDTFLGGEDFDLRLIEYLADEFKRENGIDLHGDPLALQRLKEAAEKAKIELSSAQQTEVNLPYITADATGPKHLVVKLSRSKLESLVEDLVTRSLDPVKTALADAGLSPSEIQDVILVGGQTRMPLVQTTVTDFFGKEPRKDVNPDEAVAMGASIQGAVLAGDVKDVLLLDVTPLTLGIETMGSVATPLIEKNTTIPTKKSQVFSTAEDNQTAVTIHVVQGERKQAAQNKSLGRFDLADIPPAPRGVPQVEVTFDLDANGILNVSAKDKATGKEQSIRITASGGLSEDEIEQMVQDAEANAEADKKFEEMITVRNSCDGMVHAARKTLEEAGEHSTVDERAAIEAAIAEAEEAMQGDDKEAIEAATTKITEATGPVAQKMYAAQEAEGAAEAAGAEAGASTGSADDGDVVDAEFEEVKEDDKP

SEQ ID NO: 48432 - DNA, 2094 bp, Lytechinus variegatus
  CDS (1)..(2094)
atgttgacggcagctagaatagcaactaattgtcttcgaggcacatcaggttgtgtgaagcagatatcacaacagagacatttttccagcattttaagatcgagctcatgcagcgtattaaactcagatgccaggcatcatcagagacatccttcaagatgttacgcttcagaaactgtcagaggagccgtcatcggtatagatcttggaacgacaaactcctgcgttgcaatcatggaaggaaaaactccaaaggtacttgagaatgcagaaggagcaagaacgacgccctcagtggtggctttcacaaaggatgatgagagacttgttggtatgccagccaagagacaggctgtcacaaatgcacagaacactctatatgccacaaaacgtctgatcggaagaagatttgatgatcctgaaacacagaaggacattggaacagtatcatatgaaatagtcaaagcttcaaatggagatgcctgggtgaaagccaatgacaaggtctactctcctagtcaagtcggtgcatttgttcttactaagatgaaggaaactgcagagaactacctgggaactccagccaagaatgcagttgtcacagttccagcttatttcaatgattcacaaagacaggcgactaaagatgcaggtcagattgctggattaaatgttttgagagttattaatgaacctactgctgcagctcttgcctatggtatggataaatcaggagatagcatcattgttgtatacgatcttggtggtggaacttttgatgtgtctgtgcttgagatccaaaaaggagtatttgaagtgaaatcaaccaatggagatacattcctgggtggagaggactttgacaatgcgcttgttaacttccttgttaaagaattcaagaaagattctggcattgatgtgaccaaagacaacatggcactacagagagtaagagaagcagctgagaaggccaagaccgaactctccagctctctccagactgatatcaacttaccatacctgacaatggatcagtcggggcctaaacacatgaacctgaaactctccagagcaaagtttgaatctctgacagagcatttgatcaagaggactgtagaaccatgtaagaaagccattcaggatgctgagatcaacaaatcagatatcaaggaggttcttctggttggtggaatgtcaaggatgccaaaggttcaacagctagtgcaggatttgtttggtcgtcaacctagtaagtcggtgaatcctgatgaggcagttgctgtaggtgctgctatccaaggtggagtccttgctggtgatgtcactgatgttcttctcttggatgtcactccactatcccttggtatcgagacattgggtggagtcttcaccaaactcatcaacaggaatacaaccatcccaaccaagaaagctcaggtattctcaacagctgctgatggacagactcaggtagagatcaaagtatgtcagggagaaagagagatggcactagataataagactcttggacagtttcaattggttggtatccctcctgcccctcgtggagtacctcagattgaagtgacctttgatattgatgctaatggtattgtgaatgtatctgcaagggataagggaactggaaaggaacaacagattgtaatccagtcatctgggggtcttagcaatgatgagatcgagaacatggttagagctgcagagaaatttgctgccgaggacaaaatcaagaaggagcgtgttgagattgtgaactcagctgaaaacatcatccatgacactgagaccaagatggaggagttcaaggatcagttaccggaagaggaatgtagtaaactcaaagaacagattgccaatgtcaaggaagtcttagccgacaaggataacaagagtcccgaagacatcagggaagcttcatctgctttacaacaggcatcactcaagctctttgagatggcttataagaagatggcatcagagcgcgaatcatccggaggatcatcaagctctgaaggaagctcagattcaacctcagattcagggagtcaagaccaagaaaagaaagaaaactag

SEQ ID NO: 48433 - protein, 697 aa, Lytechinus variegatus
MLTAARIATNCLRGTSGCVKQISQQRHFSSILRSSSCSVLNSDARHHQRHPSRCYASETVRGAVIGIDLGTTNSCVAIMEGKTPKVLENAEGARTTPSVVAFTKDDERLVGMPAKRQAVTNAQNTLYATKRLIGRRFDDPETQKDIGTVSYEIVKASNGDAWVKANDKVYSPSQVGAFVLTKMKETAENYLGTPAKNAVVTVPAYFNDSQRQATKDAGQIAGLNVLRVINEPTAAALAYGMDKSGDSIIVVYDLGGGTFDVSVLEIQKGVFEVKSTNGDTFLGGEDFDNALVNFLVKEFKKDSGIDVTKDNMALQRVREAAEKAKTELSSSLQTDINLPYLTMDQSGPKHMNLKLSRAKFESLTEHLIKRTVEPCKKAIQDAEINKSDIKEVLLVGGMSRMPKVQQLVQDLFGRQPSKSVNPDEAVAVGAAIQGGVLAGDVTDVLLLDVTPLSLGIETLGGVFTKLINRNTTIPTKKAQVFSTAADGQTQVEIKVCQGEREMALDNKTLGQFQLVGIPPAPRGVPQIEVTFDIDANGIVNVSARDKGTGKEQQIVIQSSGGLSNDEIENMVRAAEKFAAEDKIKKERVEIVNSAENIIHDTETKMEEFKDQLPEEECSKLKEQIANVKEVLADKDNKSPEDIREASSALQQASLKLFEMAYKKMASERESSGGSSSSEGSSDSTSDSGSQDQEKKEN

SEQ ID NO: 48434 - DNA, 1923 bp, Rhagoletis pomonella
  CDS (1)..(1923)
atggtagcaattggtattgatttgggaacaacatactcctgtgtgggagtcttccagcatggcaaagtggagatcatcgccaatgaccagggcaaccgcacaacacccagctatgtggcgttcaccgactccgagcgcctcatcggcgatgcagcaaagaaccaggttgccatgaatccaaagaacacagtattcgatgccaagcgattgattggacgcaagtatgacgaccccaagatcatggaagacatcaaacactggccattcaaagtggtgagcgatggaggcaagccgaaaatttgcgtcgaatataaaggggagaacaaacgctttgcgccagaagaaatcagttcaatggtgctcaccaagatgaaggagacagccgaggcatatctgggcacaactgtcacagacgcagtcatcacagttcccgcatatttcaatgattcacagaggcaagcgacaaaggatgccggtcggattgctggtttgaatgtgctgagaatcatcaacgaacccactgcagccgcattggcctatggtctggacaagaatctgaaaggtgaacgcaatgtgctgatcttcgatttgggcggcggtacctttgatgtttccatcttgacaattgatgaaggttcattgtttgaagttcgtgcaactgccggcgatactcatctaggtggagaggactttgacaaccgtctcgttaaccactttgcggaagaattcaaacgcaaatataaaaaggatttgcggacgaatcccagagcgttgcgtcgtctaagaacagcggcagagcgggcgaaacgaacactgtcatccagcacggaggcgactattgagattgacgctttgtatgaaggtgtagatttctatacaaaaattagtcgagctcgcttcgaagagatgtgtggtgatttgttccgcagtacattggatcccgtagagaaggctcttaatgatgcgaaaatggataagagtcagattcacgacattgtactcgttggtggttcaacacgcataccaaaggtccaaagtttacttcaatcattctttggaggtaagagtttgaacctctctatcaacccagacgaggctgtggcttatggtgcagcgatacaggcagccatattgagcggtgataagagcagccaaattcaagatgtgcttttggtggacgtggcaccattgtcacttggaattgaaactgctggcggagtgatgacaaaacttatagaacgaaacagtcgcattccatgcaaacagtcaaaaacctttacaacttatgcagataaccaacccgcagtcaccatccaagtgtttgagggcgaacgtgccatgaccaaagataataatttgttgggcactttcaacttaactggaattccaccagcgccgcgtggtgttcccaagatagatgttacatttgatttggacgccaatggcattttaaatgtgactgcaaaggagatgagcactggaaatgcgaagaatatagtcataaagaacgacaaaggccgtctatctcaagcagacatcgatcgtatggttaatgaagctgaaaaatatgcggaggaagacgagaagcagcgccaacgtgttgctgctcgcaatcaacttgagagttatgtgtttaatgtcaagcaagcagcagatgaagccggtagtaaaataagtcaatcggataaagatcgtgtcctcgaaaagtgtagcgagacaattaaatggctggatgccaataccactgccgaaaaggaggagttcgagtacaaattggaagagttgacgaagatctgtagtccaatcatgacaaaaatgcaccaggaggcaggcgctggcccacagcctagtaattgcggccagcaatctggtaattttgctggaggccaatatggtggaccaactgtggaggaagtagactaa

SEQ ID NO: 48435 - protein, 640 aa, Rhagoletis pomonella
MVAIGIDLGTTYSCVGVFQHGKVEIIANDQGNRTTPSYVAFTDSERLIGDAAKNQVAMNPKNTVFDAKRLIGRKYDDPKIMEDIKHWPFKVVSDGGKPKICVEYKGENKRFAPEEISSMVLTKMKETAEAYLGTTVTDAVITVPAYFNDSQRQATKDAGRIAGLNVLRIINEPTAAALAYGLDKNLKGERNVLIFDLGGGTFDVSILTIDEGSLFEVRATAGDTHLGGEDFDNRLVNHFAEEFKRKYKKDLRTNPRALRRLRTAAERAKRTLSSSTEATIEIDALYEGVDFYTKISRARFEEMCGDLFRSTLDPVEKALNDAKMDKSQIHDIVLVGGSTRIPKVQSLLQSFFGGKSLNLSINPDEAVAYGAAIQAAILSGDKSSQIQDVLLVDVAPLSLGIETAGGVMTKLIERNSRIPCKQSKTFTTYADNQPAVTIQVFEGERAMTKDNNLLGTFNLTGIPPAPRGVPKIDVTFDLDANGILNVTAKEMSTGNAKNIVIKNDKGRLSQADIDRMVNEAEKYAEEDEKQRQRVAARNQLESYVFNVKQAADEAGSKISQSDKDRVLEKCSETIKWLDANTTAEKEEFEYKLEELTKICSPIMTKMHQEAGAGPQPSNCGQQSGNFAGGQYGGPTVEEVD

SEQ ID NO: 48436 - DNA, 1953 bp, Blomia tropicalis
  CDS (1)..(1953)
atgtctccaaatcctgcaattggtattgatctcggaaccacatattcatgtgttggtgtatttcagcatggaaaagtggaaattattgccaacgaccaaggaaatcgtaccacaccatcatatgttgcttttaccgatactgaacgattgattggagatgcggctaagaatcaagtatcaatgaatccatccaatacggtgtttgatgctaaacgattgattggaaggcgatttgatgatacatcggttcaagctgatatgaaacattggccatttaaggtgataaaagatggcgataaaccacgaattgaagtcgaatataagagtgaaaacagacgtttcacaccggaagagatctcatcgatggtattaaccaagatgaaggaaacagccgaagcttatcttggacataaggttactaatgctgttattaccgttcctgcatatttcaatgattcacaacgacaagcaacaaaagatgctggtaccatcgctggtttgaacgttcttcgaatcatcaatgaacctacggcagctgctatcgcttatggtttagataagaaaaccaatggtgaaaagaatgtgttgatattcgatttgggtggcggaacttttgatgtgtcgatattgaccatcgaggatggaatctttgaagtaaaatcgactgctggtgatactcatcttggtggcgaggactttgacaaccgattggtaaatcattttgtacaagaatttaagcgtaaacataacaaggatgtgttcggaaacaaacgtgctttacgacgattgcgaacggcttgtgaacgagcaaagcgcacactatcgtcatcatcacaagcatcagttgaaattgattcattgattgaaggaatcgatttctattcaagtattacacgagcacgttttgaagagttgtgttccgatctattccgttcaacattggaaccggttgagaaggcattgcgcgatgctaaattggataaatcaaagattgacgatattgttttggtgggtggttcaacgcgtattccaaagattcaaaaattgttgcaagactttttcaatggacgtgagttgaacaaatcgatcaatccggatgaggcggtagcatatggtgcggcggtacaagcagccattcttagtggtgatacatctgaagccgtacaagatttattgttgttggatgttgctccactttcattgggaattgaaacagctggcggcgttatgactgctttgatcaaacgtaacactacgattccaaccaaacaaacacaaacatttacgacctattctgacaatcaaccgggagtcaacatcaaggtatacgaaggtgaacgtacaatgacgaaggacaacaaccttttgggtacattcgagttgagtggaataccacctgcaccgcgaggcgtccctcagattgaggttacatttgatatcgatgctaatggcattttgaacgttaccgcacaagataagagtaccggaaagcagaataagattacgatcagtaatgataaaggtcgattgagtaaggaagatatcgaacgaatggttaatgatgctgaaaagtataaggatgaagatgaaaagcaacgacaacgtatctcggcacgaaacgctttggagagttatgcattcacaattaagtcgacgttggatgatgaaactgtcaaaacaaaaatatccgaagatgatcgaaagaagattaacgacaaaattgctgatacaatgaaatggttggatggtaatgcattggcagaaaaggaagagtttgaacatcaacaaaaagaattggaagccgtatgcaatccaatcatgagtaaattacatcaagctgctggtggtcaacagatgccaggaggatttcccggtggattccctggtggattcaatccatcaacacaaacagccggaggaaattcggggccaaccgtggaagaagtcgattaa

SEQ ID NO: 48437 - protein, 650 aa, Blomia tropicalis
MSPNPAIGIDLGTTYSCVGVFQHGKVEIIANDQGNRTTPSYVAFTDTERLIGDAAKNQVSMNPSNTVFDAKRLIGRRFDDTSVQADMKHWPFKVIKDGDKPRIEVEYKSENRRFTPEEISSMVLTKMKETAEAYLGHKVTNAVITVPAYFNDSQRQATKDAGTIAGLNVLRIINEPTAAAIAYGLDKKTNGEKNVLIFDLGGGTFDVSILTIEDGIFEVKSTAGDTHLGGEDFDNRLVNHFVQEFKRKHNKDVFGNKRALRRLRTACERAKRTLSSSSQASVEIDSLIEGIDFYSSITRARFEELCSDLFRSTLEPVEKALRDAKLDKSKIDDIVLVGGSTRIPKIQKLLQDFFNGRELNKSINPDEAVAYGAAVQAAILSGDTSEAVQDLLLLDVAPLSLGIETAGGVMTALIKRNTTIPTKQTQTFTTYSDNQPGVNIKVYEGERTMTKDNNLLGTFELSGIPPAPRGVPQIEVTFDIDANGILNVTAQDKSTGKQNKITISNDKGRLSKEDIERMVNDAEKYKDEDEKQRQRISARNALESYAFTIKSTLDDETVKTKISEDDRKKINDKIADTMKWLDGNALAEKEEFEHQQKELEAVCNPIMSKLHQAAGGQQMPGGFPGGFPGGFNPSTQTAGGNSGPTVEEVD

SEQ ID NO: 48438 - DNA, 2111 bp, Blastocladiella emersonii
  CDS (36)..(2000)
acgacgacccccgcaacccaacaacgcaccccaccatgctgtcgctgacccgcagcgccgccgtgcgcaagtccctgctccaggcccgctatgcgtcgaccaagccgacgggcgccgtgatcggcatcgacctcggcaccaccaactcgtgcgtggccgtcatggagggcaaggagccgcgcgtcatcgagaacgccgagggcacgcgcaccacgccctcggtcgtggcctttgccaaggacggcgagctgctcgtcggcaacgcggccaagcgccaggccgtcgtcaaccccgccaacacgctgttcgccatcaagcgcctcatcggccgcaagtacacggacaagatcgtgcaggacgacgccaagcacgtgccctacaagatcgtggcccacaagaacggcgacgcctgggtcgaggcccgcggcaagcagtactcgccgtcgcagatcggcgccttcgtgctcatgaagatgaaggagacggccgaggcctacctcggcaagtcggtcaaggacgccgtggtcacggtccccgcctacttcaacgacgcgcagcgccaggccaccaaggacgccggctcgatcgccggcctcacggtccaccgcgtcatcaacgagcccacggccgccgccctcgcctacggcatggacaagaacgccgacgacaaggtgatcgccgtgtacgatctcggcggcggtaccttcgatatctcgatcctcgagatgcagaagggcgtgttcgaggtcaagtcgaccaacggcgacacgcacctcggcggcgaggacttcgacaactacctcatcaagtgggtcgtcgaggagttcaagaaggaggagggcgtcgacatctcgggcgaccgcatggccatccagcgcgtgcgcgaggcgtgcgagaaggccaagatcgagctgtcgtcgaccatgcagaccgacatcaacctgcccttcatcacggccgacgcgaccggccccaagcacatcaactacaagctcacccgctccaagttcgagcagctcaccaaggacctgatcgaccgcaccgtcgagccgtgcaagaaggccctgcgcgacgcccaggtgtcgaccaagcagatcgacgaggtgatcctcgtcggcggcatgtcgcgcatgcccaaggtccagaccatggtcaaggaactcttcggccgcgacccctccaagggcgtcaaccccgacgaggccgtcgccatcggcgcctcgatccagggcggtgtcctcgccggtgacgtgacggacctgctcctcctcgacgtgaccccgctgtcgctcggtatcgagaccctcggcggcgtcttcacccgcctcatcaaccgcaacaccaccatcccgaccaagaagtcgcaggtcttctccaccgccgccgacggccagacccaggtcgagatccgcgtgttccagggcgagcgcgagctcgtgcgcgacaacaagctgctcggcaacttccagctcggcggcctcccgcccgcgcccaagggtgtgccccagatcgaggtcaccttcgacattgacgccgacggtatcgtcaacgtgtcggcgtcggacaaggccaccaacaaggacacgtccatcaccattgccggtcagtcgggtctgtccaaggacgagatcgagtccatggtcgccgacgccgagcagcacaaggagtcggacgctgcgcgccgcgagtcgatcgaggagcgcaaccgcgccgagtcgatcattgccgataccgagaagtccatggacgagtacaaggaccacatcaacaaggaggaggccgagaagatcaagacccagatcacggcgctgcgcgagaccatgggcaaggacggcatcacggccgaccagatccgccaggcgtaccacgacgtgcagcaggcgtcgctcaagctgttcgaggccgcctacaaggcccgcgcctccaactcgtcgtcgtcgtccgactcgtcgtcgtccacgtccgaggccgagttcaaggatgccgacaagaagaactaaggtggttgggagcgcgttaggtagctgttaattgtatgattctctctctctctttttgggctcgcgctgtcccttcgcggtagcgactatatatatattaattccgatcct

SEQ ID NO: 48439 - protein, 654 aa, Blastocladiella emersonii
MLSLTRSAAVRKSLLQARYASTKPTGAVIGIDLGTTNSCVAVMEGKEPRVIENAEGTRTTPSVVAFAKDGELLVGNAAKRQAVVNPANTLFAIKRLIGRKYTDKIVQDDAKHVPYKIVAHKNGDAWVEARGKQYSPSQIGAFVLMKMKETAEAYLGKSVKDAVVTVPAYFNDAQRQATKDAGSIAGLTVHRVINEPTAAALAYGMDKNADDKVIAVYDLGGGTFDISILEMQKGVFEVKSTNGDTHLGGEDFDNYLIKWVVEEFKKEEGVDISGDRMAIQRVREACEKAKIELSSTMQTDINLPFITADATGPKHINYKLTRSKFEQLTKDLIDRTVEPCKKALRDAQVSTKQIDEVILVGGMSRMPKVQTMVKELFGRDPSKGVNPDEAVAIGASIQGGVLAGDVTDLLLLDVTPLSLGIETLGGVFTRLINRNTTIPTKKSQVFSTAADGQTQVEIRVFQGERELVRDNKLLGNFQLGGLPPAPKGVPQIEVTFDIDADGIVNVSASDKATNKDTSITIAGQSGLSKDEIESMVADAEQHKESDAARRESIEERNRAESIIADTEKSMDEYKDHINKEEAEKIKTQITALRETMGKDGITADQIRQAYHDVQQASLKLFEAAYKARASNSSSSSDSSSSTSEAEFKDADKKN

SEQ ID NO: 48440 - DNA, 1938 bp, Mirocaris fortunata
  CDS (1)..(1938)
atggccaagacaaccgctgtgggtatagatttaggaactacatactcgtgtgtgggagtattccagcatggcaaagtagaaatcattgcaaatgaccagggtaacagaactacgccatcttatgtggccttcacagacacagagaggctcattggagatgcagccaagaatcaggtagccatgaatcccaacaacacagtttttgatgccaagaggctgattggacggaaatttgacgaaggagttgttcaggcagacatgaagcactggcccttcgacgttgtgagcgacggcggcaaacccaagatcacagtggagtacaaaggtgagaagaagtccttctacccagaagagatttcctccatggttcttatcaagatgaaggagactgccgaagcattcttgggaggtactatcaaggatgcagtcgtcacggttcctgcctattttaacgattcccagcgtcaagccaccaaggatgcaggaaccatctccggtctcaatgtgctacgtatcattaacgaacctactgctgctgccattgcctatggcttggacaaaaaggttgggggtgaaaggaatgttttgatctttgatttaggaggtggcacttttgatgtatctattttaactattgaagatggtatatttgaagtaaagtcaacagcaggtgatactcatttgggaggtgaagatttcgacaacagaatggttaatcatttcattcaagaattcaagaggaagtacaaaaaagacccatccgagaacaagcgtgccttacgtcgtctcagaaccgcgtgtgaacgtgcaaagcgtactttgtctgcttcagcgcaggccagtattgaaatagactccttgtttgaaggcatagatttctatacttcagttacacgtgccaggtttgaagaactgtgtggcgatctcttccgtggcactctggaacctgtggagaagtctctaagagatgccaagatggataaggcccaaatccacgacattgttctagtgggtggttccactaggattccaaagatccagaaactcttgcaagatttcttcaatggcaaagaactaaataaatctatcaatccagatgaagcagttgcctatggtgctgctgtacaggcagccatcttgtgtggtgacaagtctgaagctgtccaagacttgttgttgttagatgtaacccccttgtccttgggaattgagactgctggtggggtcatgactccacttatcaaacgtaataccaccattcccacgaagcaaacccaaacctttaccacatactccgacaatcaacctggtgtacttatccaagtgtttgaaggggagagagctatgaccaaggacaacaatatattgggcaagtttgagttgacaggtattccacctgcaccacgaggagtaccgcaaattgaagtcacgtttgacatagatgccaacggtattctgaacgtttcggcagtcgataagtctaccgggaaagagaataaaatcaccatcaccaatgataaaggtagacttagtaaggaagatattgaacgcatggttcaggaggcggagaaatacaaagccgacgacgagaagcagagggaacgtatttcggccaagaactctctggagtcttactgcttcaacatgaaatctactgttgaagatgacaagtttaaggacaaggtgtctgaggaagaccggactaagatccttgaagcctgcaacgatgccataaagtggctagattcaaatcagttgggcgacaaggaagagtacgaacataagttgaaagaaatcgagcagatctgcaatcccatcatcacaaagatgtaccaggctgccggaggaccacctccaggtggtatgcccggaggcttccctactgctgctggaactggagatgattggggtggtgccgctgatggggccacatggtaa

SEQ ID NO: 48441 - protein, 645 aa, Mirocaris fortunata
MAKTTAVGIDLGTTYSCVGVFQHGKVEIIANDQGNRTTPSYVAFTDTERLIGDAAKNQVAMNPNNTVFDAKRLIGRKFDEGVVQADMKHWPFDVVSDGGKPKITVEYKGEKKSFYPEEISSMVLIKMKETAEAFLGGTIKDAVVTVPAYFNDSQRQATKDAGTISGLNVLRIINEPTAAAIAYGLDKKVGGERNVLIFDLGGGTFDVSILTIEDGIFEVKSTAGDTHLGGEDFDNRMVNHFIQEFKRKYKKDPSENKRALRRLRTACERAKRTLSASAQASIEIDSLFEGIDFYTSVTRARFEELCGDLFRGTLEPVEKSLRDAKMDKAQIHDIVLVGGSTRIPKIQKLLQDFFNGKELNKSINPDEAVAYGAAVQAAILCGDKSEAVQDLLLLDVTPLSLGIETAGGVMTPLIKRNTTIPTKQTQTFTTYSDNQPGVLIQVFEGERAMTKDNNILGKFELTGIPPAPRGVPQIEVTFDIDANGILNVSAVDKSTGKENKITITNDKGRLSKEDIERMVQEAEKYKADDEKQRERISAKNSLESYCFNMKSTVEDDKFKDKVSEEDRTKILEACNDAIKWLDSNQLGDKEEYEHKLKEIEQICNPIITKMYQAAGGPPPGGMPGGFPTAAGTGDDWGGAADGATW

SEQ ID NO: 48442 - DNA, 2031 bp, Medicago truncatula
  CDS (1)..(2031)
atggccgctgcaaccgctttgctccgctctctccgccgccgtgatgctgcttcttccaccgtcactgcctttcgttcgttgacaggcaacactaaacctgcatatgtaggtcacaattggtcaagtttgtctcgaccattcagttcaagggctgctggaaatgatgttattggtattgatttgggtacaactaattcatgtgtttctgttatggaaggaaagaatccaaaagtcgttgagaattctgaaggtgcacgaaccacaccatccgtggttgccttcactcagaaaggggagctgcttgtaggcacaccagccaagcgtcaggctgtaactaacccagaaaacactatctctggtgccaagcgtttgattggtaggcgatttgatgatcctcaaactcaaaaagagatgaaaatggttccatacaagattgttaaggctccaaatggagatgcatgggttgaagctaaagggcagcagtattcacctagccagattggtgccttcgttctcaccaaaatgaaggaaactgcagaagcttatcttggaaagacagttcctaaggctgttattactgttccagcttatttcaatgatgctcaaaggcaggcaacaaaagatgccggtagaattgcaggtctcgaggtgcttagaatcatcaatgagcccactgctgctgcactttcatatgggatgaacaaggaaggcctcattgctgtttttgaccttggtggtggaacatttgatgtttccattttagaaatttctaatggtgtttttgaggtgaaagcgaccaacggtgacactttcttgggaggagaggactttgacaatgccttgttggattttctggtgaatgagtttaagaggtctgagagtatagacctttcaaaggataagcttgccttgcaaaggctccgtgaagctgctgagaaagctaagatagaactgtcttcaacatctcagacagaaattaacctgcctttcatcactgctgatgcatctggtgcaaagcatctcaacatcacattaactagatccaaatttgaggctttagtaaataacttgatcgaaagaactaaggctccatgtcagagctgtttgaaggatgcaaacatatctaccaaggacattgacgaagttcttcttgttggagggatgactcgtgtgccaaaagtccaagaggtggtttcgacaatttttggcaagtctccttgtaaaggggttaatcctgatgaggcagttgcaatgggagcagcactccagggtggtatcctacgtggagatgtcaaagagctcctactattggatgttacaccactctctctgggtattgagactttgggtggtatctttacaaggttaatcaaccgcaacactactattcctactaaaaagagtcaggtcttttcaacggcagctgacaatcaaacacaagtaggtatcaaagtgttacaaggtgagcgggaaatggcttccgacaacaaaatgcttggagaatttgagctagttggccttcctcctgctcccagaggtatgcctcagattgaggtcacctttgacattgatgccaacggtattgttaccgtgtctgccaaggacaagtccactggtaaagagcagcaaattactattaagtcgtctggtgggctttctgatgatgagatccaaaatatggtcaaagaagccgagttgcatgctcagaaagaccaagaaagaaagagtttgatcgatattagaaactctgcagacacatcaatttacagcattgagaaaagcctaagtgaatatagggagaagatacctgccgaagtggcaaaggaaattgaggatgctgtttctgatttgagaagtgcgatggctggggacagtgcagatgaaatcaagtcgaaacttgatgctgcaaacaaggccgtctccaagattggagagcacatgtcaggtggctctagtagtggtccctcatctgatggttctcaaggtggggaccaggctccagaggcagaatatgaagaggtgaagaagtaa

SEQ ID NO: 48443 - protein, 676 aa, Medicago truncatula
MAAATALLRSLRRRDAASSTVTAFRSLTGNTKPAYVGHNWSSLSRPFSSRAAGNDVIGIDLGTTNSCVSVMEGKNPKVVENSEGARTTPSVVAFTQKGELLVGTPAKRQAVTNPENTISGAKRLIGRRFDDPQTQKEMKMVPYKIVKAPNGDAWVEAKGQQYSPSQIGAFVLTKMKETAEAYLGKTVPKAVITVPAYFNDAQRQATKDAGRIAGLEVLRIINEPTAAALSYGMNKEGLIAVFDLGGGTFDVSILEISNGVFEVKATNGDTFLGGEDFDNALLDFLVNEFKRSESIDLSKDKLALQRLREAAEKAKIELSSTSQTEINLPFITADASGAKHLNITLTRSKFEALVNNLIERTKAPCQSCLKDANISTKDIDEVLLVGGMTRVPKVQEVVSTIFGKSPCKGVNPDEAVAMGAALQGGILRGDVKELLLLDVTPLSLGIETLGGIFTRLINRNTTIPTKKSQVFSTAADNQTQVGIKVLQGEREMASDNKMLGEFELVGLPPAPRGMPQIEVTFDIDANGIVTVSAKDKSTGKEQQITIKSSGGLSDDEIQNMVKEAELHAQKDQERKSLIDIRNSADTSIYSIEKSLSEYREKIPAEVAKEIEDAVSDLRSAMAGDSADEIKSKLDAANKAVSKIGEHMSGGSSSGPSSDGSQGGDQAPEAEYEEVKK

SEQ ID NO: 48444 - DNA, 1962 bp, Laternula elliptica
  CDS (1)..(1962)
atggcaaaggcaccagccatcggtatcgacttgggaaccacctattcctgtgtgggagttttccaacacggaaaggttgaaattatcgccaacgaccagggtaatcgaaccaccccaagctatgtagccttcacagacacggaacgactgattggagatgctgccaaaaatcaagtggctatgaatccatcaaacacaatcttcgatgccaagcgtttgattggcaggaagtttgaagagcaaaatgtgcaatccgatatgaagttctggccttttactgtcttgagcgatggtggcaaaccaaagatgcaagtagactacaagggcgagaagaagacattcttccctgaagaaatttcatctatggtcctcaataagatgaaggacacagctgaagcatacttaggaaagaccgtaacaaatgcagttgtgacagttcctgcttacttcaatgattcccagcgacaggcaaccaaagatgccggcaccatctctgggttgaacattttgcgtattatcaatgagccaacagctgcagctatcgcctacggcttggacaagaaggttggaggtgagagaaatgtcttgatcttcgatttgggaggcggtacctttgatgtatccgtcttgacaatagaagacggtatctttgaagtgaaatccacatctggtgatacccacttgggtggtgaggactttgataaccgcatggtcaaccactttatccaagagttcaagcgcaaacacaagaaagacatctcggaaaacaagcgagcagtgcgacgtttgagaacagcatgtgaacgcgccaagagaacactttcatccagtacccaggccagtattgagattgactccttgtttgagggtatcgattattacaccagtataactagggctaggtttgaagaactcaatgcagatcttttccgtggaacgctagagcctgttgagaagtcattgagagacgccaagatggacaaaggaacaatcaacgacatagtacttgtaggaggttcaactcgtatccccaaaatccagaagctcctccaagacttcttcaatggaaaggaactgaacaaaagcatcaacccagatgaggctgttgcatacggagctgctgtccaggctgccattcttcacggagataaatccgaagaagtccaggatctgcttcttcttgacgtcaccccactgtctctgggaattgagacagctggtggcgtgatgacctccctcattaagagaaacaccacaatcccaaccaagcagactcaaaccttcaccacatactctgacaatcagccaggtgtgttgatccaagtttacgagggtgagagagccatgactaaggataacaacctccttggaaagtttgagctgaccggaattccacctgcacctcgtggtgtgccccagattgaggttacctttgacattgatgccaacggtattctcaacgtctctgccgctgacaagagcaccggcaaggaaaacaagatcaccatcaccaatgacaaaggtcgtttgtcaaaggatgacattgaccgaatggttaatgacgccgagaagtacaagaatgaagatgaaaaacagaagaaccgcattcaggccaagaattctctggaaagttatagctttaacatgaagtccactgtcgaggacgagaaactgaaggacaagatcagcgaagaagataaaaagataattcttgacaagtgtaacgatgtgatcacctggttggacgccaatcaactcgccgaaacggaggagtttgagcaacagcagaaagacctggaaaaggcgtgcaatccaatcgttaccaaactatacggcggtgctggaggtccgggtggtatgcccggaggtatgccaggaggattcggtgccggagcacccggagaaggagcagctccaggtggcggatccggtggtggaccaaccattgaggaggttgattaa

SEQ ID NO: 48445 - protein, 653 aa, Laternula elliptica
MAKAPAIGIDLGTTYSCVGVFQHGKVEIIANDQGNRTTPSYVAFTDTERLIGDAAKNQVAMNPSNTIFDAKRLIGRKFEEQNVQSDMKFWPFTVLSDGGKPKMQVDYKGEKKTFFPEEISSMVLNKMKDTAEAYLGKTVTNAVVTVPAYFNDSQRQATKDAGTISGLNILRIINEPTAAAIAYGLDKKVGGERNVLIFDLGGGTFDVSVLTIEDGIFEVKSTSGDTHLGGEDFDNRMVNHFIQEFKRKHKKDISENKRAVRRLRTACERAKRTLSSSTQASIEIDSLFEGIDYYTSITRARFEELNADLFRGTLEPVEKSLRDAKMDKGTINDIVLVGGSTRIPKIQKLLQDFFNGKELNKSINPDEAVAYGAAVQAAILHGDKSEEVQDLLLLDVTPLSLGIETAGGVMTSLIKRNTTIPTKQTQTFTTYSDNQPGVLIQVYEGERAMTKDNNLLGKFELTGIPPAPRGVPQIEVTFDIDANGILNVSAADKSTGKENKITITNDKGRLSKDDIDRMVNDAEKYKNEDEKQKNRIQAKNSLESYSFNMKSTVEDEKLKDKISEEDKKIILDKCNDVITWLDANQLAETEEFEQQQKDLEKACNPIVTKLYGGAGGPGGMPGGMPGGFGAGAPGEGAAPGGGSGGGPTIEEVD

SEQ ID NO: 48446 - DNA, 1983 bp, Plodia interpunctella
  CDS (1)..(1983)
atggtaaagatgcggtggagtctgtttgctttggccctggtggtcgcggctgtgtgcgccgacgacaagaaggaaaaggataaggacatcggcaccgtcatcggtatcgacttgggtaccacctactcatgtgtgggtgtgtacaggaatggacgtgtggagatcatcgccaatgaccagggtaaccgtatcactccctcatatgtagcattcacaagcgacggcgagcgtctaatcggtgacgccgccaagaaccagctgaccactaaccccgaaaacacagtattcgacgccaagcgtctcattggtcgcgaatggagtgactccactgtccaacatgacgtcaaattcttccccttcaaagtagttgagaagaacagcaaaccccatgtcgctgtcaaaaccgctcagggtgaaaaggtcttcgctcctgaagaaatctctgcgatggttctcaccaagatgaaagaaactgccgaagcttacctcggtaagaaggttacccatgctgttgttactgtcccagcttacttcaacgacgcccagcgtcaagccaccaaggacgccggtgtcattgctggtctcaacgtcatgagaatcatcaacgaacctaccgccgccgctatcgcccacggtcttgacaagaaagaaggagaaaagaatgtccttgtctttgacttgggtggcggtacctttgatgtgtctctgctcactatcgacaatggagtgtttgaagtggttgctaccaatggtgacactcacttgggtggtgaagacttcgaccagagggtgatggagcatttcatcaagctatacaagaagaagaagggcaaggacatcaggaaagacaaccgtgcggtgcagaaactgcgtcgtgaggttgagaaggcaaagagagctctgtcttccagccaccaggtaaagatcgaaattgaatccttctttgagggtgatgacttctctgaaacccttaccagagctaagttcgaagagttgaacatggacttgttcagatctaccctgaaacccgtgcagaaggtattggaagacgccgacatgaacaagaaggatgttgatgaaatcgtattggttggtggttctactcgtattcccaaggttcagcaactggtcaaggaattcttcaacggtaaagagccatcccgaggcatcaaccctgatgaggccgtcgcttatggtgccgccgtccaggctggagtactcagcggtgaacaagacactgacgccattgtccttctcgacgtcaaccctcttaccatgggtatcgagactgttggaggagtgatgaccaagcttattccacgtaacactgtcattcccacaaagaaatctcagatcttctctactgccagtgacaaccaacatactgtcaccattcaagtatacgaaggtgaaagacccatgaccaaggacaaccacttactcggaaaattcgacctcactggcattcctccagcacccagaggtatcccacaaattgaagtcacatttgagatcgacgccaacggtattctgcaagtgtcggcggagggcaagggaacaggaaacagggaaaagattgtcatcacaaatgatcagaacagattaacacctgaagacattgagagaatgatcaaggacgccgagaagttcgccgatgacgataagaaactaaaggagcgcgtcgaatcaaggaacgaactggaaagttatgcttactcgataaagaaccagctccaagataaggagaaactaggcgctaaagtcagtgaagacgagaaggctaagatggaagaagctatcgatgccgcgatcaagtggcttgaagagaaccaagatgcagactcggaagagtacaagagacagaagaagagcgtcgaagatgtagtccagcccattatcgcgaaactgtaccagggacaaggaggggtccccccgcccggcggcccaggaggcgacgatgaagacttcaaggacgagttgtaa

SEQ ID NO: 48447 - protein, 660 aa, Plodia interpunctella
MVKMRWSLFALALVVAAVCADDKKEKDKDIGTVIGIDLGTTYSCVGVYRNGRVEIIANDQGNRITPSYVAFTSDGERLIGDAAKNQLTTNPENTVFDAKRLIGREWSDSTVQHDVKFFPFKVVEKNSKPHVAVKTAQGEKVFAPEEISAMVLTKMKETAEAYLGKKVTHAVVTVPAYFNDAQRQATKDAGVIAGLNVMRIINEPTAAAIAHGLDKKEGEKNVLVFDLGGGTFDVSLLTIDNGVFEVVATNGDTHLGGEDFDQRVMEHFIKLYKKKKGKDIRKDNRAVQKLRREVEKAKRALSSSHQVKIEIESFFEGDDFSETLTRAKFEELNMDLFRSTLKPVQKVLEDADMNKKDVDEIVLVGGSTRIPKVQQLVKEFFNGKEPSRGINPDEAVAYGAAVQAGVLSGEQDTDAIVLLDVNPLTMGIETVGGVMTKLIPRNTVIPTKKSQIFSTASDNQHTVTIQVYEGERPMTKDNHLLGKFDLTGIPPAPRGIPQIEVTFEIDANGILQVSAEGKGTGNREKIVITNDQNRLTPEDIERMIKDAEKFADDDKKLKERVESRNELESYAYSIKNQLQDKEKLGAKVSEDEKAKMEEAIDAAIKWLEENQDADSEEYKRQKKSVEDVVQPIIAKLYQGQGGVPPPGGPGGDDEDFKDEL

SEQ ID NO: 48448 - DNA, 1971 bp, Rhynchosciara americana
  CDS (1)..(1971)
atggccgcacctaaagtcgctccagctgttggtattgatttgggaaccacgtattcttgtgttggtgtttttcaacatggcaaagttgaaatcattgccaacgatcagggcaaccgtaccacaccatcgtacgttgcatttacggaaacagaacgattaattggcgatgctgccaaaaatcaagttgccatgaacccatcgaacaccattttcgacgcaaaacgtttgatcggccgtaaattcgacgatcccgtcatccaagccgacatgaaacattggccgttcgacgtgcgcaactttgatacaaaaccgaaaatcgaagtcacttacaaggatgagaaaaagacattcttcccggaagaaattagttccatggtgttgaccaagatgaaggaaactgccgaagcttatttgggcaagacagtgacaaatgccgttataacggtacccgcctatttcaacgattcacaacgtcaggccaccaaggatgctggaaccatttccggtatgaatgtacttcgtatcatcaatgaaccgactgccgctgccatcgcttatggcttggacaaaaaggctgtcggtgaacgcaacgtattgattttcgatctaggtggtggtacttttgatgtatctattctgtcaattgatgatggaatctttgaggtcaagtcaactgctggtgatactcacttgggcggagaagatttcgacaatcgtttggtcaatcacttcgttcaggaattcaaacgtaaacacaaaagggatttgactaccaacaaacggtcgctccgtcgtttacgtacagcgtgtgaacgcgcgaagagaactttgtcatcatccactcaggccagcattgaaatcgactcactgttcgagggtaccgatttctatacatcaattacacgagctcgctttgaagaattgaatgccgatttgttccgttcaacaatggaacctgtcgaaaaagccattcgggacgcaaaaatggacaagagtagcatccacgacattgtcttagttggtggatcaactcgaattccaaaggtccagaaattgcttcaagatttcttcaatggaaaagaattgaacaaatcgatcaatcctgacgaggccgttgcttatggtgctgccgttcaagctgctattttacatggcgacaaatccgaagaggtccaagatttacttttgttggatgtcacgccgttgtcgttgggtattgaaacagctggcggtgtcatgagcgttctgatcaaacgaaacacaaccattccaaccaaacaaacccaaacattcaccacttattccgataatcaacccggtgttttgatccaagtattcgaaggcgaacgatccatgacaaaagacaacaatttgttgggcaaattcgaattatcaggaattcctccagcaccacgtggcgtaccacaaatcgaggttacattcgatattgatgccaacggcatcttgaacgtaactgcattggagaaatccacaaacaaggaaaacaaaattaccatcaccaatgacaagggacgtctcagcaaggaagacatagaacgaatggtaaacgaagccgagaagtatcgatctgaagacgagaaacaaaaggaaactgtttccgctaagaacgccttagagtcgtactgtttcaacatgaaggccactatggatgaagacaatttgaaaggaaagattgccgaatctgacaaaactttgatccttgacaaatgtaatgaaacgatcaaatggttagatggcaaccagtttgccgaaaaagaagaattcgaacatcgtcaaaaagaattggagggcatctgtaatccaatcatcacgaaactgtatcaaggagctggcgttccccctggttcaatgccgggtggtttccaaggtttcccaggtggtatgccaggtgctggtggacctgctccgggcgctggtggtgctggaccaacaatcgaagaagtcgactaa

SEQ ID NO: 48449 - protein, 656 aa, Rhynchosciara americana
MAAPKVAPAVGIDLGTTYSCVGVFQHGKVEIIANDQGNRTTPSYVAFTETERLIGDAAKNQVAMNPSNTIFDAKRLIGRKFDDPVIQADMKHWPFDVRNFDTKPKIEVTYKDEKKTFFPEEISSMVLTKMKETAEAYLGKTVTNAVITVPAYFNDSQRQATKDAGTISGMNVLRIINEPTAAAIAYGLDKKAVGERNVLIFDLGGGTFDVSILSIDDGIFEVKSTAGDTHLGGEDFDNRLVNHFVQEFKRKHKRDLTTNKRSLRRLRTACERAKRTLSSSTQASIEIDSLFEGTDFYTSITRARFEELNADLFRSTMEPVEKAIRDAKMDKSSIHDIVLVGGSTRIPKVQKLLQDFFNGKELNKSINPDEAVAYGAAVQAAILHGDKSEEVQDLLLLDVTPLSLGIETAGGVMSVLIKRNTTIPTKQTQTFTTYSDNQPGVLIQVFEGERSMTKDNNLLGKFELSGIPPAPRGVPQIEVTFDIDANGILNVTALEKSTNKENKITITNDKGRLSKEDIERMVNEAEKYRSEDEKQKETVSAKNALESYCFNMKATMDEDNLKGKIAESDKTLILDKCNETIKWLDGNQFAEKEEFEHRQKELEGICNPIITKLYQGAGVPPGSMPGGFQGFPGGMPGAGGPAPGAGGAGPTIEEVD

SEQ ID NO: 48450 - DNA, 1923 bp, Lucilia cuprina
  CDS (1)..(1923)
atgcctgctattggaatcgatctgggcaccacctactcctgcgtgggtgtctaccaacatggcaaggtggagattatcgccaacgaccagggcaaccgcattacgccctccgtggtggccttcaccgacacggagcggctagtcggcgacggtgccaagaaccagctcccgcagaaccccgagaacaccatctacaccatcaagcgcctgattggccgcaagtacgaggatcccaccgtgcagaacgataagaagcttctgtcgtatgaggtggtccccgacaaggccggcaagccactggttcaggtgaccgtcaaggggcagaagaagcagttcactcccgaggaggtgagcgccatggtgctgcagaagatgaaggagatctctgagaccttcctcggcgagaaggtgaagaacgccgtcgtgacggtccctgcctacttcaacgacgcgcagcgccagtcgaccaaggatgccggtacgattgccggtctcaacgtggtgcgcatcatcaacgagccgaccgccgctgccatcgcctacggcttgaacaaggctggtgagaagaacatcctcgtctttgatctcggcggcggcacgtttgatgtgtccctgctctcgattgacgagggatcactgttcgaggtgcgctccaccgccggagacacacacttgggcggcgaggactttgacaaccggctagtcactcatctggcggacgagttcaagcgcaagtacaagaaggatctgcgctccaaccctcgcgccctacgacgcctcagaacagcagctgaacgggccaagcgcacactctcctccagcacggaggccaccatcgagattgacgcactgtttgagggccaagacttctacaccaaagtgagccgcgccaggtttgaggagctgaacatggcgctcttcaagaacaccctgtccccggtgcagaaggcgctggaggactccaagatgaagaagagtcagatccacgagatcgtcctcgtcggtggttctacccgcatccccaaggtgcagcagctcatcaaggacttcttcggcggcaaggagctcaacaagggcatcaaccccgacgaggccgtcgcgtacggcgccgccgtccaggctgcggtgctcaccggcgactccgaggtcggtggcaaggtgctcatggtggatgtgattcccctctctctcggcatcgagacggtgggcggggtcatgaccaagctgatcgagcgcaacacccagatccccaccaagaagagccagatcttctccacctatcaggacaaccagccgggcgtccttatccaggtcttcgagggggagcgccagatgaccaaggacaaccgtctgctcggcaagttcgatctctccggcatcccccccgccccgcgcggcgtgccgcagatagaggtgaccttcgacgtggacgagaactcaatcctgaaggtcagcgcgaaggagatgagcacgggcaaggccaagaacatcacgatcaagaacgacaagggacggctctcgcaggccgagattgatcgcatggtgaacgaggctgaaaagtacgccgacgaggacgagaagcatcgccagcgaataacctctagaaatgccctggagagctacgtcttcaatgtgaagcaggccgtggaacaggcacctgctggcaaattggacgaggctgacaagaactccgtcttggacaagtgcaacgacactatccggtggctggacagcaacaccactgccgagaaggaggagttcgaccacaagctggaggagctcacccgccactgctcccccatcatgaccaagatgcatcagcagggtgcgggagctggagctggtggtccgggagcaaactgcggccagcaggcgggaggatttggaggctactctggacccacggtcgaggaggtcgactaa

SEQ ID NO: 48451 - protein, 640 aa, Lucilia cuprina
MPAIGIDLGTTYSCVGVYQHGKVEIIANDQGNRITPSVVAFTDTERLVGDGAKNQLPQNPENTIYTIKRLIGRKYEDPTVQNDKKLLSYEVVPDKAGKPLVQVTVKGQKKQFTPEEVSAMVLQKMKEISETFLGEKVKNAVVTVPAYFNDAQRQSTKDAGTIAGLNVVRIINEPTAAAIAYGLNKAGEKNILVFDLGGGTFDVSLLSIDEGSLFEVRSTAGDTHLGGEDFDNRLVTHLADEFKRKYKKDLRSNPRALRRLRTAAERAKRTLSSSTEATIEIDALFEGQDFYTKVSRARFEELNMALFKNTLSPVQKALEDSKMKKSQIHEIVLVGGSTRIPKVQQLIKDFFGGKELNKGINPDEAVAYGAAVQAAVLTGDSEVGGKVLMVDVIPLSLGIETVGGVMTKLIERNTQIPTKKSQIFSTYQDNQPGVLIQVFEGERQMTKDNRLLGKFDLSGIPPAPRGVPQIEVTFDVDENSILKVSAKEMSTGKAKNITIKNDKGRLSQAEIDRMVNEAEKYADEDEKHRQRITSRNALESYVFNVKQAVEQAPAGKLDEADKNSVLDKCNDTIRWLDSNTTAEKEEFDHKLEELTRHCSPIMTKMHQQGAGAGAGGPGANCGQQAGGFGGYSGPTVEEVD

SEQ ID NO: 48452 - DNA, 1959 bp, Penaeus vannamei
  CDS (1)..(1959)
atggcaaaggcacctgctgtcggtattgatctgggaaccacctactcctgcgtgggtgtgttccagcatggcaaggtggagatcatcgccaacgaccagggcaaccgcaccacgccctcctacgtcgccttcacagacacagagcgtctgattggtgacgccgccaagaaccaggtggcgatgaaccccaacaacactgtattcgatgccaagcgactgatcggccgcaaattcgaagaccacacagtccagagcgacatgaagcattggcccttcaccatcatcaacgagagcacaaagccaaagatccaggtggagtacaagggagacaagaagaccttctaccccgaggagatctcctcgatggtgctcatcaaaatgaaggagaccgctgaggcttacctgggatccacagtgaaggatgctgtagtcactgtgcctgcctacttcaacgattctcagcgtcaggccaccaaggacgctggaaccatctcgggtctgaatgtgctgcgtatcattaacgaacctaccgctgctgccatcgcctacggcctcgacaagaaggttggcggtgagcgcaacgtcttgatcttcgatcttggcggcggtaccttcgatgtgtccatccttaccatcgaggatggcatcttcgaggtcaagtcaacagctggtgacactcacttgggcggtgaagacttcgacaaccgcatggtgaaccacttcatccaggaattcaagcgcaagtacaagaaggacccaagtgagaacaagcgctccctgcgtcgcctgcgtactgcctgtgagcgtgcgaagcgtaccctgtcttcctcgacacaggccagcgtggagatcgactccctcttcgaaggtatcgatttctacacctccatcacccgtgctcgcttcgaggagctgtgcgccgatctgttccgtggcaccttggagcccgtggagaagtccctccgtgatgccaagatggacaaggcccagatccacgacatcgtccttgtcggaggatccacccgtatccccaagatccagaagctcctccaggacttcttcaacggcaaggagctgaacaagtccatcaaccccgatgaggctgtggcctacggtgccgccgtccaggccgccatcttgtgtggtgacaagtccgaggctgtgcaggacctgttgctgttggacgtgacccccttgtccctgggtatcgagactgccagtggtgtgatgaccgctctcatcaagcgtaacaccaccatccccaccaagcagactcagaccttcaccacctactctgacaaccagccaggtgtgctcatccaggtgtacgagggagagcgtgccatgaccaaggacaacaacctcctgggtaagttcgagctgagtggcatcccacctgctcctcgtggcgtgcctcagatcgaggtcaccttcgacattgacgccaacggcatcctgaacgtatccgccgtggacaagtctaccggcaaggagaacaagattaccatcaccaacgacaagggtcgcctctccaaggaggagatcgagcgcatggtgcaggacgccgagaagtacaaggctgacgatgagaagcagagggaccgtatttctgccaagaactccctggagtcttactgcttcaacatgaagtcaacagttgaggacgagaagttcaaggagaagatttctgaagaggaccgcaacaagattttggagacctgcaacgagactatcaagtggctggacatgaaccagctgggcgagaaggaagagtatgagcacaagcagaaggagatcgagcaggtgtgcaaccccatcattaccaagatgtatgctgctgctggtggtgctcctccaggtggcatgcccggcggcttcccaggtggtgccccaggtgccggcggtgctgctcccggtgctggtggttcctccggacccaccatcgaggaggtcgattaa

SEQ ID NO: 48453 - protein, 652 aa, Penaeus vannamei
MAKAPAVGIDLGTTYSCVGVFQHGKVEIIANDQGNRTTPSYVAFTDTERLIGDAAKNQVAMNPNNTVFDAKRLIGRKFEDHTVQSDMKHWPFTIINESTKPKIQVEYKGDKKTFYPEEISSMVLIKMKETAEAYLGSTVKDAVVTVPAYFNDSQRQATKDAGTISGLNVLRIINEPTAAAIAYGLDKKVGGERNVLIFDLGGGTFDVSILTIEDGIFEVKSTAGDTHLGGEDFDNRMVNHFIQEFKRKYKKDPSENKRSLRRLRTACERAKRTLSSSTQASVEIDSLFEGIDFYTSITRARFEELCADLFRGTLEPVEKSLRDAKMDKAQIHDIVLVGGSTRIPKIQKLLQDFFNGKELNKSINPDEAVAYGAAVQAAILCGDKSEAVQDLLLLDVTPLSLGIETASGVMTALIKRNTTIPTKQTQTFTTYSDNQPGVLIQVYEGERAMTKDNNLLGKFELSGIPPAPRGVPQIEVTFDIDANGILNVSAVDKSTGKENKITITNDKGRLSKEEIERMVQDAEKYKADDEKQRDRISAKNSLESYCFNMKSTVEDEKFKEKISEEDRNKILETCNETIKWLDMNQLGEKEEYEHKQKEIEQVCNPIITKMYAAAGGAPPGGMPGGFPGGAPGAGGAAPGAGGSSGPTIEEVD

SEQ ID NO: 48454 - DNA, 1968 bp, Perna viridis
  CDS (1)..(1968)
atggctaaagcaccagcagttggaattgatcttggaaccacatactcctgtgttggagtatttcagcatggtaaagttgaaattattgccaatgaccaaggaaacagaacaacaccgtcatatgttgctttcacagacacagaacgtcttattggtgacgctgcaaagaatcaagtggccatgaacccagttaacacagtttttgatgccaaaagattaataggaagaaagtttgatgatgcatcagtacagtccgacatgaaacactggccattcactgttatcaatgattcttcaaaaccaaaaatccgagttgaatataaaggtgaacagaagaccttcttcccagaagaaatttcctctatggtgttagttaaaatgaaagaaacagctgaatcatacttgggaaagacaatcaccaacagtgtagtcacagtaccagcttatttcaatgactcgcaaagacaggcaacaaaagatgctggaaccatctctggaatgaatgtgctgcgtatcatcaatgaacctacagctgcagctattgcctatggtttagacaaaaaggctacaggtgaaagaaatgttctcatttttgatcttggaggaggaacttttgatgtatccattctgacaattgaagatggtatctttgaagtcaagtccacctctggagacactcacttaggtggggaagattttgacaacagaatggtgaatcacttcatccaagaattcaaacgcaaacacaagaaagacattagtgaaaacaagagagctgttcgtcgtctgagaacagcctgtgaaagagcaaagagaacactttcttcaagcacacaggccagtgtagagattgattctttgtttgagggtatagatttctacaccagcattacaagagccagatttgaagagttgaatgctgatctcttcagaggtactttggaaccagtagaaaagtcgttgagagatgccaaaatggacaaagcttcaattcatgacattgtacttgttggtggttctacaagaattcccaaaatccagaaacttctgcaagacttcttcaatggaaaggatctgaacaaatccattaacccagatgaagctgttgcttatggagcagctgtgcaagccgccatcttgtctggagacaagtcagaggaagtacaagatttgttactgttagatgttgcaccactttctcttggtattgagaccgctggtggtgtgatgacctcgcttatcaaacgtaacacaaccattccaactaaacagacccaaacttttaccacatactctgacaaccagcctggtgtgttgattcaggtttatgaaggagaaagagctatgaccaaggataacaacttgcttgggaagtttgagttgacgggaattcctccagcaccaagaggtgtaccacaaattgaagtcacctttgacattgatgccaatggtattctcaatgtatcagccgtcgacaagagcactggcaaagaaaacaagattactattaccaatgacaaaggacgattgagcaaagaagaaattgaacgtatggtcaatgatgcagagaaatacaaggatgaagatgagaaacagaaagatagaataggtgcaaagaactcgctagagagctatgctttcaacatgaaatcaactgtagaagatgagaaactgaaggataaaatcagtgaagacgacaagaaagttatcatggacaaatgtgatgaaatcatcaaatggttagatgctaacacactggcagaaaaggaggagttcgaagacaaacaaaaggagttggaaaaaacatgcaatcctattatcaccaaactctaccaggctgctggtggtgcaccaggtggggcaggaggtatgccgggtggtatgcctaatttcggtggagctggtggaccaactggtggtgctggaagtggtggtagtggtggaccaaccattgaggaagttgactaa

SEQ ID NO: 48455 - protein, 655 aa, Perna viridis
MAKAPAVGIDLGTTYSCVGVFQHGKVEIIANDQGNRTTPSYVAFTDTERLIGDAAKNQVAMNPVNTVFDAKRLIGRKFDDASVQSDMKHWPFTVINDSSKPKIRVEYKGEQKTFFPEEISSMVLVKMKETAESYLGKTITNSVVTVPAYFNDSQRQATKDAGTISGMNVLRIINEPTAAAIAYGLDKKATGERNVLIFDLGGGTFDVSILTIEDGIFEVKSTSGDTHLGGEDFDNRMVNHFIQEFKRKHKKDISENKRAVRRLRTACERAKRTLSSSTQASVEIDSLFEGIDFYTSITRARFEELNADLFRGTLEPVEKSLRDAKMDKASIHDIVLVGGSTRIPKIQKLLQDFFNGKDLNKSINPDEAVAYGAAVQAAILSGDKSEEVQDLLLLDVAPLSLGIETAGGVMTSLIKRNTTIPTKQTQTFTTYSDNQPGVLIQVYEGERAMTKDNNLLGKFELTGIPPAPRGVPQIEVTFDIDANGILNVSAVDKSTGKENKITITNDKGRLSKEEIERMVNDAEKYKDEDEKQKDRIGAKNSLESYAFNMKSTVEDEKLKDKISEDDKKVIMDKCDEIIKWLDANTLAEKEEFEDKQKELEKTCNPIITKLYQAAGGAPGGAGGMPGGMPNFGGAGGPTGGAGSGGSGGPTIEEVD

SEQ ID NO: 48456 - DNA, 1923 bp, Bombyx mori
  CDS (1)..(1923)
atgccagctatcggaatcgatttgggaacgacatactcatgtgttggagtatggcagcacgggaacgtggagatcatcgcgaacgaccagggcaaccgtaccacaccatcgtacgtcgcgttcacggacacggagcgtctcatcggcgacgcagccaagaaccaggtcgccttgaaccctaacaacaccgtgttcgacgcgaaggggctgatcgggaggaaattcgacgaccccaagattcagcaggacatgaagcactggcccttcaaagtaatcaacgactgcggcaaaccgaaaatacagatcgagttcaaaggtgagacgaaacgatttgcgccagaagaaattagcagcatggtgctgacaaaaatgaaggagacggcggaagcctatctgggaagtacagtgcgggatgcggtagtcacagttccggcatacttcaacgactcccagcgtcaggccaccaaggacgccggagccatcgccggcctgaacgtgcttcgcatcatcaacgagcccacagccgccgcgctcgcgtacggtctcgacaagaacctcaagggtgagagaaatgttcttatcttcgatctgggtggaggaaccttcgacgtgtccatcctgactatcgacgagggatcgttgttcgaagtgaagtccacagccggcgacacgcacctgggaggcgaagactttgataaccgactagtcaaccatcttgcggaagagttcaagcgcaagtacaagaaggatctgcgcctgaactctcgcgcactccgacgcctccgcacggccgctgagcgcgccaagaggacactctcatccagcaccgaggccaccatcgagattgacgctctgtatgagggcatcgacttctacacgcgagtctcccgcgcccgcttcgaggaactgaacgcggacctgttcaggggaactctggaacccgtcgagaaggcactcaaggatgctaaactcgacaagagtcagatccacgacgtggtcctcgtcggaggctccacccgcattccgaaagtacaaactatgctccaaaacttcttctgtgggaagaaactgaacttatccatcaatccggacgaagccgtagcctacggtgcagcagtccaggcagccatcctgagcggcgagaccgactccaagatacaggacgtcttgttggtcgacgtggctcctctgtccctcggtattgagacagccggcggcgtgatgacgaagatcatcgaacgaaactcaaagattccgtgcaaacagtctcagacattcacgacgtactcagacaaccagccggccgtcaccatccaggtgtacgagggagagagagcgatgacaaaggacaacaacctactgggcacgttcgacctgacggggatcccgcccgcgccgcgaggagtgcccaagatcgacgtgacgttcgacatggacgctaacggcatcctgaacgtgtcggccaaggagaacagcaccggccgcagcaagaacatcgtgatcaagaacgacaagggtcgtctctcgcaagcggagatcgatcgcatgctgtccgaggcagagcggtacaaggaggaagacgagaagcagagacagcgcgtggccgctcggaaccagctcgaattgtatttgttcagcgtgaagcaggcgctcgacgaggccggcgacaaactgagcgacgcggacaagagcacggcgcgcgacgcgtgtgacgaggcgctgcggtggctggacaacaacactctcgctgaccaggatgaatacgagcacaagctaaaggatgtgcagcgagtgtgttcgccggtcatgagcaagatgcacggtgcggcgcccggcggtatgccaggaggaatgccgggcggtatgccgggaggataccaacaagcgaggagtgatggacccacagttgaggaagtcgactaa

SEQ ID NO: 48457 - protein, 640 aa, Bombyx mori
MPAIGIDLGTTYSCVGVWQHGNVEIIANDQGNRTTPSYVAFTDTERLIGDAAKNQVALNPNNTVFDAKGLIGRKFDDPKIQQDMKHWPFKVINDCGKPKIQIEFKGETKRFAPEEISSMVLTKMKETAEAYLGSTVRDAVVTVPAYFNDSQRQATKDAGAIAGLNVLRIINEPTAAALAYGLDKNLKGERNVLIFDLGGGTFDVSILTIDEGSLFEVKSTAGDTHLGGEDFDNRLVNHLAEEFKRKYKKDLRLNSRALRRLRTAAERAKRTLSSSTEATIEIDALYEGIDFYTRVSRARFEELNADLFRGTLEPVEKALKDAKLDKSQIHDVVLVGGSTRIPKVQTMLQNFFCGKKLNLSINPDEAVAYGAAVQAAILSGETDSKIQDVLLVDVAPLSLGIETAGGVMTKIIERNSKIPCKQSQTFTTYSDNQPAVTIQVYEGERAMTKDNNLLGTFDLTGIPPAPRGVPKIDVTFDMDANGILNVSAKENSTGRSKNIVIKNDKGRLSQAEIDRMLSEAERYKEEDEKQRQRVAARNQLELYLFSVKQALDEAGDKLSDADKSTARDACDEALRWLDNNTLADQDEYEHKLKDVQRVCSPVMSKMHGAAPGGMPGGMPGGMPGGYQQARSDGPTVEEVD

SEQ ID NO: 48458 - DNA, 1956 bp, Harmonia axyridis
  CDS (1)..(1956)
atggcaaaagcacccgcagttggtattgatttgggaaccacctactcttgtgtcggtgttttccaacatggaaaagttgaaattattgccaacgatcaaggaaacaggacaacaccgtcctatgtcgcttttaccgacactgagcgtctcattggagatgctgccaaaaaccaggtggcgatgaaccccaataacacaatatttgatgcgaaacgtcttattgggcgtcgttttgatgacaccactgtccaagctgatatgaagcactggccttttgaagtcattaatgatggaagcaaaccaaaaatcaaggtagattacaaaggagaagcaaaaacattctaccctgaagaagtaagctctatggttctcacaaagatgaaggaaactgctgaagcttatttgggaaaaactgtcaccaatgctgttatcaccgtacctgcctactttaacgattcccaaagacaggctaccaaagatgctggtaccatcgctggtctccaagttctacgtatcatcaatgaacctaccgcagctgctattgcctacggtttggacaagaaagccactggtgaaagaaatgtactcatcttcgatttgggaggtggtacctttgatgtctccatcttaactattgaagatggtatctttgaagtaaagtcaactgctggtgacacccatttgggaggagaagatttcgacaacaggatggtcaatcactttgtacaagagttcaagcgtaaatacaaaaaagatttgaccaccaacaaacgtgctcttcgtcgtctccgtacatcatgtgaaagggctaagcgtactctatcatcctccactcaagccagtattgaaatcgactcactctttgagggtattgatttctacacatccatcactcgtgctagatttgaagaattgaacgccgatttgttcaggtcaaccatggaacctgttgagaagtccatccgtgatgccaaaatggacaagacccaaatccatgacatcgttttggtaggtggttccacacgtatccctaaagtacagaagcttctccaagacttcttcaatggaaaggaactcaacaaatccatcaaccctgatgaagctgtagcctatggtgctgctgtacaagctgccattttgcacggtgataagtctgaagaagtacaagatttgcttcttcttgatgttacaccattgtcacttggtattgagactgctggaggagttatgactgctcttattaagaggaatactaccattccaactaagcaaactcagaccttcaccacttactctgacaatcaacctggagtacttatccaggtttatgaaggagaacgtgccatgacaaaggataacaatcttttgggtaaattcgagctgaccggtatcccacctgcaccacgtggtgtcccacaaatcgaagtaacattcgatattgatgctaatggtatcttgaatgtaacagccattgaaaaaaccaccaacaaagaaaacaaaattaccatcaccaacgacaaaggtcgtcttagtaaagaggacattgaacgtatggttaacgatgctgaaaaataccgtagtgaagatgagaagcaaaagagcaccattgctgccaagaacggtttggaatcttactgcttccaagtcaagagcacgattgaggatgaaaatctcaagagcaaaatcagcgaaactgataagacaaccatcatggaaaaatgtaacgaagttattgcttggttagatgccaatcaattggcagaaaaagaagaatatgagcacaagcataaggaattggaaaatatttgtaagccaatcatcactgccttgtatcaaggtgctggtggagttcccggtggcatgccaggtggtatgccaggtggcttcccaggacctggaggtgccgcacctggcggaaccggtggtgctggaccaactatcgaagaagttgattaa

SEQ ID NO: 48459 - protein, 651 aa, Harmonia axyridis
MAKAPAVGIDLGTTYSCVGVFQHGKVEIIANDQGNRTTPSYVAFTDTERLIGDAAKNQVAMNPNNTIFDAKRLIGRRFDDTTVQADMKHWPFEVINDGSKPKIKVDYKGEAKTFYPEEVSSMVLTKMKETAEAYLGKTVTNAVITVPAYFNDSQRQATKDAGTIAGLQVLRIINEPTAAAIAYGLDKKATGERNVLIFDLGGGTFDVSILTIEDGIFEVKSTAGDTHLGGEDFDNRMVNHFVQEFKRKYKKDLTTNKRALRRLRTSCERAKRTLSSSTQASIEIDSLFEGIDFYTSITRARFEELNADLFRSTMEPVEKSIRDAKMDKTQIHDIVLVGGSTRIPKVQKLLQDFFNGKELNKSINPDEAVAYGAAVQAAILHGDKSEEVQDLLLLDVTPLSLGIETAGGVMTALIKRNTTIPTKQTQTFTTYSDNQPGVLIQVYEGERAMTKDNNLLGKFELTGIPPAPRGVPQIEVTFDIDANGILNVTAIEKTTNKENKITITNDKGRLSKEDIERMVNDAEKYRSEDEKQKSTIAAKNGLESYCFQVKSTIEDENLKSKISETDKTTIMEKCNEVIAWLDANQLAEKEEYEHKHKELENICKPIITALYQGAGGVPGGMPGGMPGGFPGPGGAAPGGTGGAGPTIEEVD

SEQ ID NO: 48460 - DNA, 2430 bp, Citrullus lanatus
  CDS (37)..(2154)
acccatttcacctgattctctttactttcttccttaatggcttcctccaccgttcagatccatggcctcggagctccgtcctttgctgcggcctccatgaggaaatctaaccacgtctcttcacgcactgtgttcttcggccagaaactcggcaattcttctgcttttcctaccgccacatttttgaagttgaggagcaatattagccgtagaaattccagtgtcaggccattgaggattgttaatgagaaagttgtgggaattgatcttggaactactaactccgcagttgcggccatggaaggtgggaagccaactattgtaaccaacgccgaaggcaagagaacgacgccatcggtggtggcttacacaaaaatcggagacaggcttgtgggtcaaattgcgaacagacaggcagttgtaaatcccagagatactttcttttcggtcaagaggtttattggtagaaagatgtcggaggtggatgaggaatccaagcaggtctcctaccgagtagtacgcgacgagaatggaaatgtgaagctggaatgccccgcgattggaaaacaatttgctgctgaagaaatttcagctcaggtcttaaggaagctagtggacgatgcttcgaagtttttgaatgataaagtaaccaaggctgtagtgacagtgcctgcctacttcaatgattctcaaagaacggccacaaaggatgccggtcgtattgctggtcttgaagttctgcgtattatcaatgaacccactgccgcttcattagcttatggatttgagaagaagagcaatgaaacgatcttggtctttgatcttggtgggggtacttttgatgtttcagtgctcgaggtgggcgatggagtgtttgaagtgctttctacatcgggagatacacatttgggtggtgatgacttcgacaagagaattgttgactggctcgccgcaaatttcaaaagggatgaaggtattgatttgctgaaagacaaacaggctcttcagcggctaactgagacagctgagaaagcgaaaatggagctgtcatctttgacccaggccaacattagtttgcctttcatcactgccacggcagatggccctaagcacattgagaccacacttaccagggccaagtttgaggaattgtgctcagatcttctttataggcttaagactccagttgaaaactccttgagggatgcaaaactctccttcaaggatgttcatgaggtggtccttgtgggtggatccacacgtattcctgctgttcaggaactcgtgaagaagatgactgggaaggaaccaaatgtcactgtcaatcctgatgaagttgttgcgctaggtgctgctgttcaggctggtgttttggctggtgacgtcagtgacattgtgctattggatgtgagtccgttatctttgggtcttgagactcttgggggtgtaatgacaaaaattatccccagaaacactacacttcctacctccaagtcagaggtcttctccacagccgctgatggtcaaacaagcgtggagattaatgttcttcaaggagaacgagaatttgtgagggacaacaaatcactcggtagcttccgattagacggtatcccccctgcaccacgtggggtgcctcagattgaagtcaaatttgacatagatgccaatggaatcctctcggttactgcaatcgacaaaggcacaggcaagaagcaagatataaccattactggtgctagcacattgccaagtgatgaggtggagcggatggttagcgaacggaggaagtttgcaaaggaggacaaggagaagagagatgctatcgacacgaagaaccaagctgattctgttgtgtatcagacagagaagcaactgaaggagcttggagacaaggtgcctgggccagtgaaggagaaggttgaatcgaaacttggggaattgaaggaagcaatttcaggtggctcaaccgaagccattaaggaagctatggctgctctaaatcaagaggtgatgcagctgggacaatccttgtacaatcagccgggtgctgcccctggagcaggtgctgggagcgaatcagggccatcggaatcaacgggcaaaggacctgaaggagatgtcatcgatgccgactttactgacagcaaatgagaagattaaaattgggtttccccttttctgaatagaaaattttgctctcatgggctcggatttgtattttgatttgatttttgcggggcaggatcggattggggtgttggtttgaggatttgttgaataagccactgtcccatgatattagcttgataaattacgtgatctctgtaaaagtaaaaaatgctttacatggacactatcacagctaaaatttgaacggcagatgtaacttccaaattttgccatacggttgttagcccaaaaaaaaaa

SEQ ID NO: 48461 - protein, 705 aa, Citrullus lanatus
MASSTVQIHGLGAPSFAAASMRKSNHVSSRTVFFGQKLGNSSAFPTATFLKLRSNISRRNSSVRPLRIVNEKVVGIDLGTTNSAVAAMEGGKPTIVTNAEGKRTTPSVVAYTKIGDRLVGQIANRQAVVNPRDTFFSVKRFIGRKMSEVDEESKQVSYRVVRDENGNVKLECPAIGKQFAAEEISAQVLRKLVDDASKFLNDKVTKAVVTVPAYFNDSQRTATKDAGRIAGLEVLRIINEPTAASLAYGFEKKSNETILVFDLGGGTFDVSVLEVGDGVFEVLSTSGDTHLGGDDFDKRIVDWLAANFKRDEGIDLLKDKQALQRLTETAEKAKMELSSLTQANISLPFITATADGPKHIETTLTRAKFEELCSDLLYRLKTPVENSLRDAKLSFKDVHEVVLVGGSTRIPAVQELVKKMTGKEPNVTVNPDEVVALGAAVQAGVLAGDVSDIVLLDVSPLSLGLETLGGVMTKIIPRNTTLPTSKSEVFSTAADGQTSVEINVLQGEREFVRDNKSLGSFRLDGIPPAPRGVPQIEVKFDIDANGILSVTAIDKGTGKKQDITITGASTLPSDEVERMVSERRKFAKEDKEKRDAIDTKNQADSVVYQTEKQLKELGDKVPGPVKEKVESKLGELKEAISGGSTEAIKEAMAALNQEVMQLGQSLYNQPGAAPGAGAGSESGPSESTGKGPEGDVIDADFTDSK

SEQ ID NO: 48462 - DNA, 2184 bp, Spinacia oleracea
  CDS (48)..(2003)
ggcacgagctccctctcaaattcttgttgtaaaatctagcgagtacaatgtccggtaaaggcgaaggtccggcgatcggtatcgatctcggcacgacctactcgtgcgtcggagtatggcagcacgaccgtgttgaaatcattgctaatgaccagggtaacaggacgacgccatcttacgtcgctttcactgattccgagaggttgatcggtgatgctgcgaagaatcaggtcgctatgaaccctatcaacaccgtatttgatgctaagcggttgattggtagaagattcagtgatgcttcagttcagagtgacatgaaactctggccattcaaggttatccctggtgctggtgacaagcctatgattgtggtctcatacaagggtgaagataaagagtttgccgctgaagagatttcatctatggttctcattaagatgagagaaatcgcagaggccttccttggtttaacaataaagaacgcagttgtgactgttcctgcctacttcaatgattctcaacgtcaagccacaaaagacgctggagttattgctggtttgaatgtcatgcgaattattaacgagcctactgcagctgccattgcttatggtcttgacaagaaagcaaccagtgttggtgagaagaatgttttgatcttcgatctcggtggtggtacctttgatgtttctctcctcactattgaagagggtatatttgaagttaaagccaccgctggagacacccatcttggtggtgaagatttcgataacagaatggtgaaccactttgtgcaagagtttaagaggaagcacaagaaggatatcagtggcaaccctagagctcttagaaggttgaggacttcttgtgaaagagcaaagaggactctctcatccaccgctcaaacaacaattgagattgattctcttttcgagggagttgatttctacacaaccattactcgtgctcgttttgaagagttgaacatggatttgtttaggaagtgtatggagccagttgagaagtgtttgagagatgcgaaaatggacaagagcacagtacatgatgttgttcttgttggtggatccactagaattcccaaggtccagcagttgttgcaggatttcttcaatggcaaagagctctgcaaaagcatcaaccctgatgaagctgttgcttacggggcagctgttcaagccgctatcctaagtggtgagggcaatgagaaggtgcaggatcttttgcttctggatgtcacccctctctccctgggtttggaaacagccggtggtgtcatgacagtgttgatccccaggaacacaaccatcccaaccaagaaggaacaagtgttctcaacatactctgacaatcaacctggtgtgttgatccaagtctacgagggtgaaagaacaagaaccagggacaacaacttgctaggaaaattcgaactttctggcattcctccagctccaagaggagtccctcagattactgtgtgcttcgatatcgatgccaatggtatcttgaacgtgtctgctgaggataaaaccacagggcagaagaacaagatcaccattacaaatgacaagggtagactctcaaaggaagagattgagaagatggtccaagaggctgagaaatacaaatctgaagatgaggagcacaagaagaaggtggagtcaaagaatgctctagagaactacgcctacaacatgaggaacactgttaaggatgagaagatcagctccaagatatcagaagctgataagaagaagattgaggaatccattgacaatgcaatcaactggcttgaaagcaaccagcttgctgaggctgatgagtttgaagataagatgaaggagctggagagtatttgcaaccccatcattgctaagatgtaccaaggtgctggtggtgaagccggtggtgtgcccatggatgatgatgaggtcccctctgctggtgcaagcagcggccctggacctaagattgaggaggttgactaaattttctgtcatgttgggcagttagaaagatgtttggtttcgtttcctgtctgttagaaacaatatttttagtgttcccatttaaatttttgcttaaatgcagctttgttcgtcctttggatgagctatatatgctgcttctattatcactagagttctgaatatgttgaatattttcggt

SEQ ID NO: 48463 - protein, 651 aa, Spinacia oleracea
MSGKGEGPAIGIDLGTTYSCVGVWQHDRVEIIANDQGNRTTPSYVAFTDSERLIGDAAKNQVAMNPINTVFDAKRLIGRRFSDASVQSDMKLWPFKVIPGAGDKPMIVVSYKGEDKEFAAEEISSMVLIKMREIAEAFLGLTIKNAVVTVPAYFNDSQRQATKDAGVIAGLNVMRIINEPTAAAIAYGLDKKATSVGEKNVLIFDLGGGTFDVSLLTIEEGIFEVKATAGDTHLGGEDFDNRMVNHFVQEFKRKHKKDISGNPRALRRLRTSCERAKRTLSSTAQTTIEIDSLFEGVDFYTTITRARFEELNMDLFRKCMEPVEKCLRDAKMDKSTVHDVVLVGGSTRIPKVQQLLQDFFNGKELCKSINPDEAVAYGAAVQAAILSGEGNEKVQDLLLLDVTPLSLGLETAGGVMTVLIPRNTTIPTKKEQVFSTYSDNQPGVLIQVYEGERTRTRDNNLLGKFELSGIPPAPRGVPQITVCFDIDANGILNVSAEDKTTGQKNKITITNDKGRLSKEEIEKMVQEAEKYKSEDEEHKKKVESKNALENYAYNMRNTVKDEKISSKISEADKKKIEESIDNAINWLESNQLAEADEFEDKMKELESICNPIIAKMYQGAGGEAGGVPMDDDEVPSAGASSGPGPKIEEVD

SEQ ID NO: 48464 - DNA, 2417 bp, Oryza sativa
  CDS (121)..(2112)
cgctctagaggatccaactggttcggcccacctctgaaggttccagaatcgatagagaagcttcgagagagagaggtggaggaggagagacgagcgcgtggtggtggtggtgttggcggcatggatcgggttcgcggatctgcgttcctgctcggcgtcctgctcgcaggatccctgtttgcattttctgttgcgaaggaggagaccaagaagctcggtaccgtgatcggtattgatcttggtacaacctactcgtgtgtcggtgtgtacaagaatggtcatgtcgagattatcgccaatgaccagggtaaccgtatcacaccctcatgggttgcattcaccgatagcgagaggctcatcggtgaggctgccaagaaccaggcagctgtgaacccagagaggaccatcttcgatgtcaaacgtgacattggaagaaagtttgaagagaaggaagttcagagggacatgaaacttgtcccctacaagattgtgaacaagatcggtaagccctacattcaggtcaagatcaaggatggagagaacaaggtcttcagccctgaggaggtcagtgctatgatccttggaaagatgaaggagactgctgaggcataccttggcaagaagatcaacgatgctgtcgtgactgttcctgcgtacttcaatgacgcgcagaggcaggcaaccaaggatgccggtgtcattgctggcctgaatgttgctaggatcatcaatgagccaactgctgctgctattgcgtacggtttggacaagaagggtggtgagaagaacatccttgtctttgaccttggtggtgggacattcgatgtcagtatcttgaccattgacaacggtgtgtttgaggtgttggccaccaatggtgacactcatcttggaggtgaggactttgaccagagaatcatggagtacttcatcaagttgatcaagaagaagtacagcaaggacatcagcaaggacaaccgtgctcttggaaagctgaggagggaagctgagcgtgccaagagggccctcagcaaccagcaccaggtccgtgttgagattgagtccctctttgacgggaccgatttctcggagccgctgacccgtgccagatttgaggagttgaacaatgatctgttccgcaagaccatgggacctgtcaagaaggctatggacgatgctggccttgagaagagccagattcatgagattgttcttgtcggtggtagcaccaggattcccaaggttcagcagctcctcagagactacttcgagggcaaggagcccaacaagggtgtcaaccctgatgaggctgttgcctatggtgctgcggttcagggaagcattctcagcggcgagggcggtgacgaaaccaaagatatccttctcctggatgtggcaccccttaccctcggtatcgagactgtcggtggagtcatgaccaagttgatccccaggaacaccgtcatccccaccaagaagtcccaggtgttcaccacctaccaggatcagcagacaaccgtctccatccaggtctttgagggtgagcgcagcatgaccaaggactgccgtcttctcggcaagttcgacctatctggcattccagcagcaccaaggggcaccccccagattgaggtgaccttcgaggtggacgccaacggcatcctgaacgtgaaggctgaggacaagggcaccggcaagtcggagaagatcacgatcacgaacgagaaggggcgcctgagccaggaggagatcgaccggatggtgcgagaggcggaggagtttgcggaggaggacaagaaggtgaaggagcggatcgacgcccgcaaccagctcgagacctacgtgtacaacatgaagaacaccgtcggcgacaaggacaagctggcggacaagctggagagcgaggagaaggagaaggtggaggaggccctcaaggaggccctcgagtggctggacgagaaccagaccgccgagaaggaggagtacgaggagaagctcaaggaggtcgaggccgtctgcaaccccatcatctccgccgtctaccagaggaccggtggcgccccgggtggccgacggcgagggcggctcgacgacgagcatgacgagctgtagatgatgatgatgatgatctgattcgattgattcaaaggagacagccaatttttgtaagagatggccggttacttttagtggggtgacttactactaccttgggttggggtttaggggtagcaagaggggagagttttatttgcagaacaccagaaaagagactaaatctctcctcttgttacttgtgttgctctcttagtttgttactctgtcgagtgtagaacagctcttccttttgctacttccttctgatttccatgtgaactgtgaagaagaagaagaaacataagtaaattttaattact

SEQ ID NO: 48465 - protein, 663 aa, Oryza sativa
MDRVRGSAFLLGVLLAGSLFAFSVAKEETKKLGTVIGIDLGTTYSCVGVYKNGHVEIIANDQGNRITPSWVAFTDSERLIGEAAKNQAAVNPERTIFDVKRDIGRKFEEKEVQRDMKLVPYKIVNKIGKPYIQVKIKDGENKVFSPEEVSAMILGKMKETAEAYLGKKINDAVVTVPAYFNDAQRQATKDAGVIAGLNVARIINEPTAAAIAYGLDKKGGEKNILVFDLGGGTFDVSILTIDNGVFEVLATNGDTHLGGEDFDQRIMEYFIKLIKKKYSKDISKDNRALGKLRREAERAKRALSNQHQVRVEIESLFDGTDFSEPLTRARFEELNNDLFRKTMGPVKKAMDDAGLEKSQIHEIVLVGGSTRIPKVQQLLRDYFEGKEPNKGVNPDEAVAYGAAVQGSILSGEGGDETKDILLLDVAPLTLGIETVGGVMTKLIPRNTVIPTKKSQVFTTYQDQQTTVSIQVFEGERSMTKDCRLLGKFDLSGIPAAPRGTPQIEVTFEVDANGILNVKAEDKGTGKSEKITITNEKGRLSQEEIDRMVREAEEFAEEDKKVKERIDARNQLETYVYNMKNTVGDKDKLADKLESEEKEKVEEALKEALEWLDENQTAEKEEYEEKLKEVEAVCNPIISAVYQRTGGAPGGRRRGRLDDEHDEL

SEQ ID NO: 48466 - DNA, 1911 bp, Biomphalaria glabrata
  CDS (1)..(1911)
atgtcaggacgaaataaggctcccgcaattggtattgacctggggacaacctattcttgtgtgggtgtgttccaacatggcaaggtggagataatcgccaacgatcaaggcaacaggacaactcccagctatgtggcctttaccgacacagaacgcttggtgggtgacgcggccaagaaccaggctgccatgaatccaagtaacacagtctacgacgccaagaggctgatcggcagaaagtttgatgacaagacagtccagaacgatatgaagcattggcccttcaaggttgtggaagttgatggtcgacctaagatccaagctgagtacagaggcgagaacaaactcttcgccccagaggagatcagctcgatggttctcaccaagatgaaagagacggccgaggcttatctgggccagaaaatcacagattccgtgatcacagtgcctgcttatttcaacgattcacagaggcaagccacaaaagatgctggtgctatcgctggactcaacgtcctccgaataatcaatgagcccacagccgctgccctggcatatggccttgacaaaggtcataaaggagagaagaatgttttgattttcgacctgggtggtggcactttcgacgtcagcatcttgaccatcgatgaagggtcgatgtttgaagtcaaggctactgctggcgacacccatctgggaggtgaagactttgataacagaatggtcactcactttgtgcaggagttcaaacgtaaatataacaaagacatgagcagcaacccaagggccatcagacgtcttcaaacagcatgtgaacgagccaagagaaccctctccagcagctctgaagcttccattgagatagactcgctctatgaaggtattgacttttacactaagattacaagagccagatttgaagagctgtgtggtgaccttttcagatcaaccctgcagcctgttgagacagcactgagagatgccaaactagacaagggcaaaatagatgaagttgtactggttggcgggtcaactcgcattccaaaagtccagaagcttctgacggacttcttcaatggcaaagagctgaacaaatctataaacccagacgaagctgtagcttatggtgctgcagttcaagctgctgtgttgactggcgacacaagcgacaccatcaaagacgttctgttggtggatgttgctccactctcactgggtattgaaactgctggaggcgtcatgactccactggtcaagagaggcaccaccattccaaccaaaacctcccagatcttcaccacatacgtggacaatcagccaggcgtcgacattcaggtctacgaaggtgagcgtgctatgaccaaagacaacaacctgttgggcaagttccacctcaccggcatccctcctgcacccagaggcgttccccagatagaggtcacattcgacatcgacgccaacggtatcctcaacgtcagcccccaggacaagagcactggtaaaaccaacaacatcaccatcaaaaacgacaagggccgactcatccaggctgaaattgacaggatgctctcagacgcggagaaatacaaagacgaggacaagaagcagcaggatagagtgtcggccaggaaccagctggagaactacgtcttcaatgtcaaacaagctgttgatgccgctggggagaagctgtcttcaagtgacaaggacacggtgctgaacgcctgcagcagcacgctgaaatggctggacaataactctttggccgagaaagaagagtatgaggacaaattgaaggagatacagaaactcagctcttccgtcatggccaagctgcactcccagggcggctcagcaccaggacacactcaggaccataacagtggcccaacagttgaagaagtagattaa

SEQ ID NO: 48467 - protein, 636 aa, Biomphalaria glabrata
MSGRNKAPAIGIDLGTTYSCVGVFQHGKVEIIANDQGNRTTPSYVAFTDTERLVGDAAKNQAAMNPSNTVYDAKRLIGRKFDDKTVQNDMKHWPFKVVEVDGRPKIQAEYRGENKLFAPEEISSMVLTKMKETAEAYLGQKITDSVITVPAYFNDSQRQATKDAGAIAGLNVLRIINEPTAAALAYGLDKGHKGEKNVLIFDLGGGTFDVSILTIDEGSMFEVKATAGDTHLGGEDFDNRMVTHFVQEFKRKYNKDMSSNPRAIRRLQTACERAKRTLSSSSEASIEIDSLYEGIDFYTKITRARFEELCGDLFRSTLQPVETALRDAKLDKGKIDEVVLVGGSTRIPKVQKLLTDFFNGKELNKSINPDEAVAYGAAVQAAVLTGDTSDTIKDVLLVDVAPLSLGIETAGGVMTPLVKRGTTIPTKTSQIFTTYVDNQPGVDIQVYEGERAMTKDNNLLGKFHLTGIPPAPRGVPQIEVTFDIDANGILNVSPQDKSTGKTNNITIKNDKGRLIQAEIDRMLSDAEKYKDEDKKQQDRVSARNQLENYVFNVKQAVDAAGEKLSSSDKDTVLNACSSTLKWLDNNSLAEKEEYEDKLKEIQKLSSSVMAKLHSQGGSAPGHTQDHNSGPTVEEVD

SEQ ID NO: 48468 - DNA, 2574 bp, Spinacia oleracea
  CDS (161)..(2308)
gaattcggcacgagcgagtttttttttttttttttttttttttttttttttttttttttttctattcacctactctcatttctctccctcctcttccggcaaaccctaattctctctccccaaatctccatttccggaagcttagaccttcttcacaacaatggcgtcttcagcaactcaaatccacgttctgggcgccacccccttcacaacctcgtcttcaaaaccctcttcttcaaggccgaactcggtctttttcggccagaagatgagccctagcacagcctgtatcggaaaccctaaatcggcgtttttaaggcttaagaagagctctggtggccgtcgtcggagcgctggtgtagggccggtgagggttgttaacgagaaggtcgtaggaattgacctcgggacaacgaattctgcggttgccgccatggaaggagggaagcctacaattgttactaacgccgaaggccagcgaacgacgccgtcggtggtggcatatacgaaaaatggagagagattggttgggcagattgcgaagcgtcaagcggtcgtgaatcccgagaacactttcttttcggtgaagaggtttattgggaggaaaatgacggaggttgatgaggagtcaaagcaggtgagctatacggtggtcagggatgagaataataatgtcaagcttgagtgccctgctattggtaaacagtttgctgcggaagagatctctgctcaagtgttgagaaaacttgttgatgatgcatcaaagtttttgaatgacaaagtaactaaggccgtagtcacagtgcctgcgtatttcaatgattctcaaaggacagcaacaaaggatgcagggcgcattgctggtttggaagtccttcgaatcatcaacgagcctactgctgcctctttggcttatgggtttgaaaagaagaacaatgaaactattttggtgtttgaccttggaggtggtacctttgatgtgtcagttcttgaggttggtgatggagtttttgaagtactttcaacctctggagatacacatttgggtggtgatgattttgacaagagaattgttgattggctagcttcaagctttaagagagatgaaggtattgaccttttgaaggacaagcaagctctacaacgtctaactgagacagccgagaaagccaagatggagttgtcatcattaactcaggcaaatattagcttgccgttcatcactgccactgctgatggacctaagcatattgaaaccactttaacaagggccaagtttgaggaactttgttcagaccttctggacaggctgagaaccccagttgagaattcactgagagatgcaaaactctccttcagtgatttagacgaagtgatcctagtgggtggctctacccgtatcccagctgttatcgagttggtcaagaagatgaccggaaaagccccaaacgtgactgttaatcctgatgaagttgttgctctcggggctgcagtgcaggctggtgtcttagctggagatgtaagtgacattgtgcttttggacgttacaccactatctattggtcttgaaacacttggtggagtaatgaccaagattatcccacgaaacacaaccttgcccacatcgaagtcagaagtcttctcaacagctgcagatggacagacaagtgttgagattaatgtccttcagggagagcgagagtttgtaagagataacaaatctcttggtagcttccgtttagatggtatcccaccagctcctcgaggtgttcctcaggtcgaagttaaattcgacattgatgctaatggtattctctcagttaccgccattgacaagggtacaggaaagaagcaagatatcacaattaccggagctagtactctgcctggtgatgaggtagagagaatggttagcgaggctgagaaatttgccaaggaagacaaggaaaagagagaagtgattgacacgaagaaccaggctgattccgttgtataccagacagaaaagcagttgaaggaactcggagaaaaggttccagttccagttaaagaaaaggtggaagctaaactgggagagctcaaggatgccattaatggaggtgaaactcaagctataaaggatgccatggctgctcttaaccaggaagtaatgcaactcggtcagtcactttacaaccagcctggtgcaggaggtgaaccaggtgcaggcccaggcccaacaccaggagcagagtctggcccgtcagattcaacgagcaaaggacccgaaggagatgttattgatgctgacttcacagacagcaagtgagcttgttgaagaagttgtgtcaaaaatgcattaaatcttttttcaacggctgtgtataagattatttttaggcagcaaaaagcctgtgtttggttcctagttatttttagttctgaggagagaatttggtaggaaaatatagatgtcaagggttcttacgaattttgtcatagttttgtttgcattatttgaagcttatagaacaatggatgttcatgtaatcagaatatatgagatcaataataggcaaagtaggatgttgattc

SEQ ID NO: 48469 - protein, 715 aa, Spinacia oleracea
MASSATQIHVLGATPFTTSSSKPSSSRPNSVFFGQKMSPSTACIGNPKSAFLRLKKSSGGRRRSAGVGPVRVVNEKVVGIDLGTTNSAVAAMEGGKPTIVTNAEGQRTTPSVVAYTKNGERLVGQIAKRQAVVNPENTFFSVKRFIGRKMTEVDEESKQVSYTVVRDENNNVKLECPAIGKQFAAEEISAQVLRKLVDDASKFLNDKVTKAVVTVPAYFNDSQRTATKDAGRIAGLEVLRIINEPTAASLAYGFEKKNNETILVFDLGGGTFDVSVLEVGDGVFEVLSTSGDTHLGGDDFDKRIVDWLASSFKRDEGIDLLKDKQALQRLTETAEKAKMELSSLTQANISLPFITATADGPKHIETTLTRAKFEELCSDLLDRLRTPVENSLRDAKLSFSDLDEVILVGGSTRIPAVIELVKKMTGKAPNVTVNPDEVVALGAAVQAGVLAGDVSDIVLLDVTPLSIGLETLGGVMTKIIPRNTTLPTSKSEVFSTAADGQTSVEINVLQGEREFVRDNKSLGSFRLDGIPPAPRGVPQVEVKFDIDANGILSVTAIDKGTGKKQDITITGASTLPGDEVERMVSEAEKFAKEDKEKREVIDTKNQADSVVYQTEKQLKELGEKVPVPVKEKVEAKLGELKDAINGGETQAIKDAMAALNQEVMQLGQSLYNQPGAGGEPGAGPGPTPGAESGPSDSTSKGPEGDVIDADFTDSK

SEQ ID NO: 48470 - DNA, 2538 bp, Spinacia oleracea
  CDS (155)..(2182)
gaattcggcacgaggagaactagtctcgagtttttttcattttgccctttttcgcttgtataggaaaattcaacccaggagagagaaaaaccctccgcaacttccaccgtcttctttctcttacttatcagatctactcttctatctacctaccatggccactgcactccgccgctgtctccgccctgagcagttccgctcttttcctgcctttaaatcgttggctggaaatgctagtccatcgttgtctagtccatatatggcacaaagattggcaagcttggtgagacctttcagttcaagacctgctgggaatgatgtgattggtattgacttgggtaccactaactcttgtgtttctgtcatggagggaaagagtgccaaagtgattgagaatgctgaaggtgctcgcactacgccttcagtagtcgcattcaacccaaagggtgagcttcttgtgggtactcctgccaagcgtcaagcagttactaaccccaccaacacaatctttgggactaaacgtttgattgggagagttttcagtgatcctcaaacacagaaagaaatgaagatggtcccgtataagattgtgaaagctcctaatggagatgcatgggttgaagctaacggccaacaatattctccaagccaggttggagcctttgtcttgaccaagatgaaggaaactgctgaggcttatcttgggaaaacagtttctaaggctgtggttactgttccagcttacttcaatgatgctcagagacaagcaactaaagatgctggaaagattgcaggacttgatgtgcagagaattataaatgaacctactgctgctgctctttcttatgggatgaccaacaaggagggtcttattgcagtttttgatcttggtggtggaacctttgatgtctctatccttgagatatccaatggtgtttttgaggttaaagcaacaaatggtgacacatttttgggaggagaagacttcgacaacactttgttggagtttttggtgtctgaatttaagaaaacggaaggcattgatttgagtagtgatcgtcttgccttgcaaaggcttcgtgaagctgctgagaaggcgaagatagagctctcatctacatctcagacagacatcagccttccctttatcagtgcagattcttctggagcgaagcacttgaacattacactctcaaggtcaaagtttgaatcacttgtagggaatttgattgaaagaactcgagccccttgtaaaaattgtttgaaggatgctggtgtttcacttaatgaagttgatgaggttcttcttgtggggggtatgacccgagtgccaaaagtacaggaaatagtgcaggagatctttggcaaatctccaagcaaaggagttaaccccgatgaagctgttgctatgggtgctgccatccagggtggtatattgcggggtgatgtcaaggatttgcttcttttggatgttactcccctctctcttggtattgaaacacttggtggtgttttcaccagattgataaacaggaacacaaccatccccacgaagaagagccaggtgttctcaactgcagccgacaaccaaactcaggtcggcattaaggtattacaaggtgaacgtgaaatggcaagtgacaacaagatgctaggggagtttgaactccagggtattccacctgctccacgaggccttccccaaattgaggtgacctttgatattgatgcaaatggtattgtaactgtttctgccaaggacaaggctaccaacaaagagcagaatattaccataaaatcctctggtgggttatcagaacatgagattgagaagatggtgaaggaagctgaaatacatgcccagaaagatcaagagaggaagtctcttatcgatgccaggaacacagcagacacaaccatctacagcgttgagaagagtttgggtgaatacagagagaagattccaaccgaaattgcaaaggaaatcgaagatgctgtttccgacttgagaagtgccatgcaaaatgacaaccttgaggagatcaaagcaaagactgatgctgcaaacaaagccgtgtcaaagatcggggaacatatgtctggcggtcaaggtggtggttcttcctcatccggtggcgctgaccagacccctgaagccgagtatgaagaggccaagaagtagactgactgacggagtcttatgtttttaaggtgcacattttaaacattgttagttcatagctaagattaccatcacttcaattttgttttgatcgttcattagtgtagtagtagtgtatgaggctctgtggaattgactggaaatgggtatattttggtgaggaagctgcgtagaaaataatttttgttgagcgactttgagggttattgaccctccttacatgggaatttaaatttgtaagtttcctcaacttttgtttttgggcaaattcctcttcttttttttatcggtggtgatttattttagtttgaaaataatttgctcatacgcagaaccaataatgaatttcttattac

SEQ ID NO: 48471 - protein, 675 aa, Spinacia oleracea
MATALRRCLRPEQFRSFPAFKSLAGNASPSLSSPYMAQRLASLVRPFSSRPAGNDVIGIDLGTTNSCVSVMEGKSAKVIENAEGARTTPSVVAFNPKGELLVGTPAKRQAVTNPTNTIFGTKRLIGRVFSDPQTQKEMKMVPYKIVKAPNGDAWVEANGQQYSPSQVGAFVLTKMKETAEAYLGKTVSKAVVTVPAYFNDAQRQATKDAGKIAGLDVQRIINEPTAAALSYGMTNKEGLIAVFDLGGGTFDVSILEISNGVFEVKATNGDTFLGGEDFDNTLLEFLVSEFKKTEGIDLSSDRLALQRLREAAEKAKIELSSTSQTDISLPFISADSSGAKHLNITLSRSKFESLVGNLIERTRAPCKNCLKDAGVSLNEVDEVLLVGGMTRVPKVQEIVQEIFGKSPSKGVNPDEAVAMGAAIQGGILRGDVKDLLLLDVTPLSLGIETLGGVFTRLINRNTTIPTKKSQVFSTAADNQTQVGIKVLQGEREMASDNKMLGEFELQGIPPAPRGLPQIEVTFDIDANGIVTVSAKDKATNKEQNITIKSSGGLSEHEIEKMVKEAEIHAQKDQERKSLIDARNTADTTIYSVEKSLGEYREKIPTEIAKEIEDAVSDLRSAMQNDNLEEIKAKTDAANKAVSKIGEHMSGGQGGGSSSSGGADQTPEAEYEEAKK

SEQ ID NO: 48472 - DNA, 1968 bp, Pneumocystis carinii
  CDS (1)..(1968)
atgaataaaatacagaaaaaagtagtaaaacattatttttggattgtattattgttattatttgcattaccaagaagtggaaggagtcaaaaagaagaatcatatggagcggtcattggaattgatttaggaacaacatattcatgtgttggagtcatgcaatcaggacgggtagaaattctaccaaatgatcaaggaaataggattacgccgtcatatgtagcgtttacgaatgaagaaagacttgtaggagatgcggcgaaaaatcaagcaccagcgaatccgttaaatacgatatttgatgttaaacgattaattggacgacgatttgatgaagccgatgttcaatcggatattaagaattttccatttaaggtgaatcatcatgagggtaaacctcatgtagaagtgaatattgcgggggaaaagaaaacatttacgccggaagaaatatcggctatggtacttcgtaaaatgaaagaaatagcagaatcgtatttaggacgaacagtgacacacgcagtggtgacggttccggcatattttaatgatgcacaacggcaagctaccaaagatgcaggtacaattgcgggacttaatgtgttgcgtattgttaatgagccgacggcggcagcaattgcatatggattagataagaaagaaggagaacgtcttattattgtgtatgatttaggaggaggtacgtttgatgtatcacttttatcgattgaagatggggtattcgaggtgattgcgacggcaggagatacacatttaggaggggaagattttgatcatcaagtgatggcacattttaaaacgttatttcatcaaaaacatggagttagacttgatagtgatccaaaagccttaggaaagcttaaacgagaagtagaaaaggctaaacgaacgttatcatcacaaatgtcagcaagagttgagatagaatcattatatcagggtattgatttttcagaaacattaacacgtgcaaaatttgaagaaatcaatatgcacttgttcaaaaaaacaatgaaaccggttgaacaagttttaaaagatgggaatgtaaagaaatcagacattgatgatattgttttagtcggaggatcaactcgtattcccaaagtgcaacaattattggaggaattttttgacggaaaaaaagtgtcaaaaagtattaatcctgatgaagcagtagcctatggagcaacggtacaaggtggaattttatcacatgaagaaggagtcgaagatattgtattagtagacgtaaatccgttaacactgggaattgaaacaacgggtggagtaatgacgaaattgatcgcacgtaataccgtcattcccacacgtaaatctcaaatcttttctacggcaacggataaccaagcagttgtattgattcaagtgtttgaaggtgaacgtccattaacaaaagataacaatatgttgggtaaatttgaattaaccggaatcccaccagcacctcgtggagtacctcaaatcgaagtaacctttgagattgatgccaatggagtcttaacggtttcagcaatggataaaggtgcaggtaaatccgagtcaattaccatcaagaatgataagggccgattatcacaagaggaaattgatcgtatgattaaagaagccgaacaatttgcagatgaagatcgtgcacagaaagaaaagattgaagcaagaaattccttagaatcctatgttcatacgttaaagaatcaattaaaggatactgaaggaatgggcggaaaactaagtgaagaagacaaaaagacgatttcagatgccgttgaagaaacactcaagtggttggagcaaaattctatgacagcaacaactgttgattttgaagaaaaaagaaatgcattgtctgacatagtaatgcctattacatctaaattatacgaatcagctaaagatgatacacctcctcatgacgaactttaa

SEQ ID NO: 48473 - protein, 655 aa, Pneumocystis carinii
MNKIQKKVVKHYFWIVLLLLFALPRSGRSQKEESYGAVIGIDLGTTYSCVGVMQSGRVEILPNDQGNRITPSYVAFTNEERLVGDAAKNQAPANPLNTIFDVKRLIGRRFDEADVQSDIKNFPFKVNHHEGKPHVEVNIAGEKKTFTPEEISAMVLRKMKEIAESYLGRTVTHAVVTVPAYFNDAQRQATKDAGTIAGLNVLRIVNEPTAAAIAYGLDKKEGERLIIVYDLGGGTFDVSLLSIEDGVFEVIATAGDTHLGGEDFDHQVMAHFKTLFHQKHGVRLDSDPKALGKLKREVEKAKRTLSSQMSARVEIESLYQGIDFSETLTRAKFEEINMHLFKKTMKPVEQVLKDGNVKKSDIDDIVLVGGSTRIPKVQQLLEEFFDGKKVSKSINPDEAVAYGATVQGGILSHEEGVEDIVLVDVNPLTLGIETTGGVMTKLIARNTVIPTRKSQIFSTATDNQAVVLIQVFEGERPLTKDNNMLGKFELTGIPPAPRGVPQIEVTFEIDANGVLTVSAMDKGAGKSESITIKNDKGRLSQEEIDRMIKEAEQFADEDRAQKEKIEARNSLESYVHTLKNQLKDTEGMGGKLSEEDKKTISDAVEETLKWLEQNSMTATTVDFEEKRNALSDIVMPITSKLYESAKDDTPPHDEL

SEQ ID NO: 48474 - DNA, 2107 bp, Cryptococcus curvatus
  CDS (56)..(1987)
cccactttctccaccactctcaactctctcttccccacttccactcttcataatcatgtccaaggctatcggtatcgacctcggcaccacatactcctgtgtcgccgtctggcagcaggaccgtgtcgaaattatcgccaacgaccagggcaaccgcacaacgccctcctatgtcgctttcaccgactcggagcgtctcatcggcgacgctgccaagaaccaggtcgccatgaacccctacaacaccgtcttcgacgccaagcgtctcatcggccgcaagttcgaggacgccgaggtgcagtccgacatgaagcactggccattcaaggtcatctcaaggctggcaagccttcatcaggtcgagtacgcgcgaggagaagagttctctcccgaggagatctcctccatggtcctcatcaagatgaaggagaccgctgaggcttaccttggtggcaccgtctccaaggctgtcgtcaccgtccccgcctacttcaacgactcgcagcgtcaggccaccaaggacgccggtaccatcgctggtctcgaggtcctccgtatcatcaacgagcccaccgccgccgctatcgcttacggcctcgacaagaagtctgagggcgagaagaacgtcctcatcttcgaccttggtggtggtaccttcgacgtgtcgctcctgaccattgaggagggcatctttgaggtcaaggctactgccggtgacacccaccttggtggtgaggactttgacaaccgtctcgtcaaccactttgtccaggagttcaagcgcaagaacaagaaggacatcacctcgaacgcccgtgctctccgtcgtctccgcaccgcttgcgagcgtgctaagcgcactctctcgtcggccgctcagacctcgatcgagatcgactcgctctacgacggcattgacttctacacctcgatcacccgtgctcgcttcgaggagctctgccaggacctcttccgctcgaccatggagcccgtggagaaggttctccgtgactccaagattgacaagtcgtcggtcaacgagattgtccttgttggtggctcgacccgtatccccaagatccagaagctcgtttccgacatgttctctggccgtgagcccaaccgctcgatcaaccccgacgaggccgtcgcctacggtgccgccgtccaggcttcgatcctcaacggtgagacctcggaggctacccaggacctcctcctcctcgacgttgcccctctgtcgctcggtatcgagaccgccggcggcatcatgactcccctcatcaagcgcaacaccaccgttcccaccaagaagtcggagatcttctcgacttacgccgacaaccagcccggtgtccttatccaggtctacgagggtgagcgtgccaagaccaaggactgcaaccttctcggcaagttcgagctctctggcatccctcccgccccccgcggtgttccccagatcgaggtttcgttcgacgtcgacgccaacggtatcctcaacgtcaacgcttcggacaagaccaccggcaagtcgaaccgcatcaccatcaccaacgacaagggtcgtctgtccaaggaggagattgagcgcatgcttgccgaggccgagaagtacgctgccgaggacaaggaggtcgccgagcgtgttcaggccaagaacgccctcgagtcatacacctactcgctcaagtcgactctctcggagaacgccgacaagttctctgccgaggacaaggagactctccagaaggctgtcgacgactgcatcaagttcctcgacaccgccgactctgcctccaaggacgagatcgagtcgcaccagaaggagctcgaggctctctccggccccatcatgcagcgcttctactgctcgaccggcggtgctcccggcggcgctcccggtggcgctcccggcggcttccccggtgctggtggccccggtgcgtcgcacgaagacgggccctcggtcgaggaggtcgactaagtgcactccccgtcctagcaagctacggcggtcgcctgtgcacctagatcgaccggccgtggcctcaaaacgagccgtagtacgagaacgagcctcatatgtacagtgatttagtagtag

SEQ ID NO: 48475 - protein, 643 aa, Cryptococcus curvatus
MSKAIGIDLGTTYSCVAVWQQDRVEIIANDQGNRTTPSYVAFTDSERLIGDAAKNQVAMNPYNTVFDAKRLIGRKFEDAEVQSDMKHWPFKVISRLASLHQVEYARGEEFSPEEISSMVLIKMKETAEAYLGGTVSKAVVTVPAYFNDSQRQATKDAGTIAGLEVLRIINEPTAAAIAYGLDKKSEGEKNVLIFDLGGGTFDVSLLTIEEGIFEVKATAGDTHLGGEDFDNRLVNHFVQEFKRKNKKDITSNARALRRLRTACERAKRTLSSAAQTSIEIDSLYDGIDFYTSITRARFEELCQDLFRSTMEPVEKVLRDSKIDKSSVNEIVLVGGSTRIPKIQKLVSDMFSGREPNRSINPDEAVAYGAAVQASILNGETSEATQDLLLLDVAPLSLGIETAGGIMTPLIKRNTTVPTKKSEIFSTYADNQPGVLIQVYEGERAKTKDCNLLGKFELSGIPPAPRGVPQIEVSFDVDANGILNVNASDKTTGKSNRITITNDKGRLSKEEIERMLAEAEKYAAEDKEVAERVQAKNALESYTYSLKSTLSENADKFSAEDKETLQKAVDDCIKFLDTADSASKDEIESHQKELEALSGPIMQRFYCSTGGAPGGAPGGAPGGFPGAGGPGASHEDGPSVEEVD

SEQ ID NO: 48476 - DNA, 1965 bp, Mamestra brassicae
  CDS (1)..(1965)
atggcagcaactaaagcacccgctgtaggtatcgatttgggtaccacctactcatgcgtgggagttttccagcatggcaaggtggagatcatcgccaacgaccagggcaacaggaccacgccctcatatgtcgcgttcaccgacaccgagcgtctcatcggagatgccgccaagaaccaggtggcgatgaaccctaacaacacaattttcgatgccaaacgtctcatcggccgcaaattcgaagatgccaccgtacaagccgacatgaagcactggcccttcgaggtagtcagtgatggtggcaaaccaaagatcaaggtctcatacaagggagaagacaaaaccttcttccctgaggaagttagctcaatggtgctcacaaaaatgaaggaaacagccgaggcctacctcggcaaaacggtgcagaatgcagtaatcacggttccagcgtacttcaacgactcacagagacaagccacaaaagatgcgggtaccatctccggcttgaacgttctccgaatcatcaatgaaccgactgctgctgcgattgcgtacggccttgacaagaaggggagtggagaacgtaacgttctgattttcgatctcggcggcggtaccttcgacgtgtccatcctgaccatcgaggatggtatcttcgaagtaaagtccaccgccggtgacacgcatttgggaggagaggacttcgacgaccgaatggtgaaccactttgtgcaggaattcaagaggaagtacaagaaggacctcgccaccaacaaaagggcccttcggcgactgcgcactgcctgcgaaagggcgaagagaactctctcctcgtccacccaggctagcattgaaatcgactctctgttcgagggtatcgacttctacacctccatcaccagggctcgtttcgaagagctgaacgccgatctgttcaggtccaccatggagcccgtagagaagtcccctcgtgatgcgaagatggacaaatcccaaatccacgacatcgtacttgttggtggttccactcgtatccccaaagtgcagaagctccttcaagacttcttcaatggcaaggagctaaacaaatccatcaaccccgacgaggccgtcgcctacggtgccgccgtccaggccgccatcttgcacggtgacaagtctgaggaggtccaggacctgctgctgctcgacgtgaccccgctgtcgctcggtattgaaaccgccggcggtgtcatgaccaccctcatcaagcgcaacaccaccatccccaccaagcagacccagacattcaccacctactcggacaaccagcctggagtactcatccaggtgttcgagggcgagcgcgccatgaccaaggataacaacttactcggaaagttcgagctgaccggcatccctcccgcgccccgtggcgtgccccagatcgaagtcaccttcgacatcgacgctaacggcattctcaacgtgtctgccgtcgagaagtcgactaacaaggagaacaagatcaccatcaccaacgacaagggccgtctctccaaggaggagatcgagcgcatggtcaacgaggccgagaagtacaggactgaagacgagaagcagaaggagaccatccaggctaagaacgccctggaatcttactgcttcaacatgaagtccaccatggaggacgagaagctcaaggacaagatctcagactccgacaagcagaccatcctggacaagtgcaacgataccatcaaatggctggactccaaccagctggctgacaaggaagaatacgagcacaagcagaaggaattggaaggcatctgcaacccaatcatcaccaagatgtaccagggagcaggtggcatgcccggtggtatgcccggaggcatgcccggcttccccggcggcgctcccggcgcgggtggcgcagcccccggtggcggtgccggacctaccatcgaggaggtcgactaa

SEQ ID NO: 48477 - protein, 654 aa, Mamestra brassicae
MAATKAPAVGIDLGTTYSCVGVFQHGKVEIIANDQGNRTTPSYVAFTDTERLIGDAAKNQVAMNPNNTIFDAKRLIGRKFEDATVQADMKHWPFEVVSDGGKPKIKVSYKGEDKTFFPEEVSSMVLTKMKETAEAYLGKTVQNAVITVPAYFNDSQRQATKDAGTISGLNVLRIINEPTAAAIAYGLDKKGSGERNVLIFDLGGGTFDVSILTIEDGIFEVKSTAGDTHLGGEDFDDRMVNHFVQEFKRKYKKDLATNKRALRRLRTACERAKRTLSSSTQASIEIDSLFEGIDFYTSITRARFEELNADLFRSTMEPVEKSPRDAKMDKSQIHDIVLVGGSTRIPKVQKLLQDFFNGKELNKSINPDEAVAYGAAVQAAILHGDKSEEVQDLLLLDVTPLSLGIETAGGVMTTLIKRNTTIPTKQTQTFTTYSDNQPGVLIQVFEGERAMTKDNNLLGKFELTGIPPAPRGVPQIEVTFDIDANGILNVSAVEKSTNKENKITITNDKGRLSKEEIERMVNEAEKYRTEDEKQKETIQAKNALESYCFNMKSTMEDEKLKDKISDSDKQTILDKCNDTIKWLDSNQLADKEEYEHKQKELEGICNPIITKMYQGAGGMPGGMPGGMPGFPGGAPGAGGAAPGGGAGPTIEEVD

SEQ ID NO: 48478 - DNA, 1917 bp, Mamestra brassicae
  CDS (1)..(1917)
atgccagctatcggaattgatctgggaacgacgtactcgtgcgtcggcgtgtggcagcacgggaacgtggagatcatcgccaacgaccagggcaaccgtactacaccatcctatgtggccttcacggacacggagcgcctcatcggagacgcagccaagaaccaggtcgccctgaaccccagcaacacagtgttcgacgctaagcgactcatcgggaggaagttcgacgactccaagatccagcaagacatgaagcactggcccttcaaggtggtgaatgagtgcggcaagcccaagatcgtagtggatttcaagggcgaagcgaagcggttcgcgcccgaggagatcagcagcatggtgctgacgaagatgaaggagacggcggaagcgtacctcggcagcagtgtgcgcgacgcggtcatcacagtgccggcctacttcaacgactcgcagcgccaggccaccaaggacgcgggcgccatcgccgggctcaacgtgctccgcatcatcaacgagcccaccgccgccgcgctcgcatacggcctcgataagaacctcaagggcgagaggaacgtcctcatcttcgacctcggcggcggaacgttcgacgtgtcgatcctcaccatcgacgaaggctcgttgttcgaagtgcgcgcgacggcgggcgacacccatctcggaggcgaggactttgacaaccgcctggtgaaccacctcgcggacgagttcaagcgcaagtacaagaaagacatgagcatgaacccgcgcgcactgcgccgcctgcgcaccgccgctgagcgcgccaagcgcacgctgtcgtccagcacagaagccaccatcgagatcgacgcgctctacgagggcatcgacttctacacgcgcgtgtcccgcgcgcgcttcgaggagctgtgcgcagacctgtttcgaggcaccctcgatcccgtggagaaggcgctcaaggacgccaagatggacaagagccagatccacgatgtcgtgcttgtcggaggctccaccaggatcccgaaggtgcagagtctgctgcagaacttcttctgtggcaagaaactcaacctgtccatcaaccccgacgaagccgtggcgtacggcgcggccgtgcaggcagctatcctgagcggcgagcaagacgcgaagatccaggacgtgttgctagtggacgtggcccctctgtcgctcggcatcgagaccgccggcggcgtcatgacgaagatcatcgagcgcaactcgaagatcccgtgcaagcagtcgcagacgttcaccacgtactccgacaaccagccggcggtcacaatccaagtgtacgagggcgagcgagcgatgacgaaggacaacaacctgctgggcaccttcgacctgaccggcattccgcccgcgccgcgcggcgtgcccaagatcgacgtcaccttcgacctggacgcgaacggcattctcaacgtgtcggccaaggagaacagcaccggccgcagcaagaacatcgtcatcaagaacgacaagggccggctgtcgcaggcggagatcgagcgcatgctcgccgaggcggagcgatacaaggacgaggacgagaagcagaggcagcgcgtggcggcgaggaatcagctcgaagcgtacgtgttcagcgtgaagcaggcgctggacgacgccgccgctgcagacaagctctcggagcaggacaagagcaccgcgaggagtgcgtgcgacgaagcgctcaagtggctcgacaacaacacgctggcggagcaggaggagtacgagcaccggctgaaggatgtgcagcgcgtgtgctcgcccatcatgagcaagatgcacggcgcgggggccggcggcccaggaggcatgcctggcggctacggtaaccaccagcagaacagcgggcctaatgtcgaagaagtcgattaa

SEQ ID NO: 48479 - protein, 638 aa, Mamestra brassicae
MPAIGIDLGTTYSCVGVWQHGNVEIIANDQGNRTTPSYVAFTDTERLIGDAAKNQVALNPSNTVFDAKRLIGRKFDDSKIQQDMKHWPFKVVNECGKPKIVVDFKGEAKRFAPEEISSMVLTKMKETAEAYLGSSVRDAVITVPAYFNDSQRQATKDAGAIAGLNVLRIINEPTAAALAYGLDKNLKGERNVLIFDLGGGTFDVSILTIDEGSLFEVRATAGDTHLGGEDFDNRLVNHLADEFKRKYKKDMSMNPRALRRLRTAAERAKRTLSSSTEATIEIDALYEGIDFYTRVSRARFEELCADLFRGTLDPVEKALKDAKMDKSQIHDVVLVGGSTRIPKVQSLLQNFFCGKKLNLSINPDEAVAYGAAVQAAILSGEQDAKIQDVLLVDVAPLSLGIETAGGVMTKIIERNSKIPCKQSQTFTTYSDNQPAVTIQVYEGERAMTKDNNLLGTFDLTGIPPAPRGVPKIDVTFDLDANGILNVSAKENSTGRSKNIVIKNDKGRLSQAEIERMLAEAERYKDEDEKQRQRVAARNQLEAYVFSVKQALDDAAAADKLSEQDKSTARSACDEALKWLDNNTLAEQEEYEHRLKDVQRVCSPIMSKMHGAGAGGPGGMPGGYGNHQQNSGPNVEEVD

SEQ ID NO: 48480 - DNA, 1980 bp, Trichoplusia ni
  CDS (1)..(1980)
atgctcaaaatgcggtggagtatcttagcgttggcctgcgtggtcgtggcggtttacgccgacgagaagaaggataaagaaaaggagatcggcacagtcatcggtatcgacttgggtaccacttactcatgtgtgggtgtgtacaagaacggccgtgtggaaatcattgctaacgaccagggtaaccgtatcactccctcgtatgtggcattcaccgctgatggcgagcgtcttattggtgacgccgccaagaaccagctgaccaccaaccctgaaaacacagtctttgatgccaagcgtctcattggtcgtgaatggagtgactccactgtccagcatgatgttaaattcttccccttcaaggtggttgaaaagaacagcaaaccccatgtttcggtcatgacttctcagggtgacaaaatctttgctcctgaagaaatctccgctatggtcctcaccaagatgaaggaaactgctgaggcttacctcggcaagaaagtgactcacgccgtcgtaactgtccccgcctacttcaacgacgctcagcgtcaagccaccaaggacgccggtgccatcgctggtctccaggtgatgagaatcatcaacgagcctaccgccgctgccatcgcttacggtcttgacaagaaagagggcgagaagaacgtacttgtattcgatttgggtggtggtactttcgacgtgtctctgctcaccatcgacaatggagtctttgaagtagtggccaccaatggtgacacccacttgggtggtgaggacttcgaccagagggtcatggagcacttcatcaaactgtacaagaagaagaagggcaaggacatcaggaaagacaaccgtgccgtacagaaactgcgtcgtgaagttgagaaggctaagagggctctttcctccagtcaccaagtcaagatcgaaattgaatccttcttcgaaggtgaagacttcgccgaaaccctcaccagggctaagttcgaagaattgaacatggatcttttcagatctaccctcaagcctgtacaaaaggtcttggaagatgctgacatgaacaaaaaggatgttgatgagattgtactggttggtggttctactcgtatccccaaggttcagcaattagtcaaggaatttttcaacggcaaggagccttcccgaggcatcaaccccgacgaagctgtcgcttacggtgccgccgtacaagccggcgtgctcagcggagaacaagacactgacgctatcgtgctcctcgacgtcaaccctctcaccatgggtatcgagactgtcggaggtgtcatggccaagctcatcccccgtaacactgtcatccctactaagaagtcacagatcttctctactgctagcgacaaccaacacactgttacaatccaggtgtatgaaggtgaacgtcctatgaccaaggacaaccacttactcggaaagtttgatcttactggcattcctccagcgccacgtggtattcctcaaatcgaggtcaccttcgaaattgatgctaacggtattctgcaagtatcggccgaagacaaaggaacaggaaaccgcgaaaagattgtcatcactaacgaccagaacaggctgacacctgaggatatcgagagaatgatcaaggacgctgaaaagttcgccgatgaggacaagaggctcaaggagcgcgttgagtccaggaacgagctggagagctatgcttactccatcaagaaccagctccaggacaaagaaaaacttggtgccaagttgagcgatgacgaaaagactaagatggaagaggctattgatgctgccatcaaatggttagaagacaaccaagatgttgactcagaagagtacaagaaacagaagaaatcacttgaagatgtggttcagcccatcattgccaagctctaccaaggccagggaggcgtacctccgcccggcgccggaggagaagaagaagacttcaaggacgagttgtaa

SEQ ID NO: 48481 - protein, 659 aa, Trichoplusia ni
MLKMRWSILALACVVVAVYADEKKDKEKEIGTVIGIDLGTTYSCVGVYKNGRVEIIANDQGNRITPSYVAFTADGERLIGDAAKNQLTTNPENTVFDAKRLIGREWSDSTVQHDVKFFPFKVVEKNSKPHVSVMTSQGDKIFAPEEISAMVLTKMKETAEAYLGKKVTHAVVTVPAYFNDAQRQATKDAGAIAGLQVMRIINEPTAAAIAYGLDKKEGEKNVLVFDLGGGTFDVSLLTIDNGVFEVVATNGDTHLGGEDFDQRVMEHFIKLYKKKKGKDIRKDNRAVQKLRREVEKAKRALSSSHQVKIEIESFFEGEDFAETLTRAKFEELNMDLFRSTLKPVQKVLEDADMNKKDVDEIVLVGGSTRIPKVQQLVKEFFNGKEPSRGINPDEAVAYGAAVQAGVLSGEQDTDAIVLLDVNPLTMGIETVGGVMAKLIPRNTVIPTKKSQIFSTASDNQHTVTIQVYEGERPMTKDNHLLGKFDLTGIPPAPRGIPQIEVTFEIDANGILQVSAEDKGTGNREKIVITNDQNRLTPEDIERMIKDAEKFADEDKRLKERVESRNELESYAYSIKNQLQDKEKLGAKLSDDEKTKMEEAIDAAIKWLEDNQDVDSEEYKKQKKSLEDVVQPIIAKLYQGQGGVPPPGAGGEEEDFKDEL

SEQ ID NO: 48482 - DNA, 2304 bp, Isatis tinctoria
  CDS (76)..(2082)
gcggggagaaaagaagaagaagaagaagaagacgcgagagagatctaacacacacaggcacacaaagtattcgatatggctcgctcattcggagcaaacggcactgttgtgctggcgatcatcttcttcggatgtttattcgccttgtgcactgctaaagaagaggccaccaagttaggaacagtgatagggatagatcttggtaccacctactcttgcgttggtgtttacaagaatggtcacgttgaaatcatagccaacgaccaaggaaaccgtattacaccttcctgggttggtttcaccgactccgagaggctcattggcgaggctgctaagaaccaggcggctgttaaccctgagagaaccatcttcgacgtcaagagattgatcgggagaaaattcgaggacaaagaagtccaaaaggacaggaagcttgtaccttaccagattgtcaacaaggatggcaagccgtacattcaagtcaagatcaaggatggtgagaccaaggttttctctcctgaggagatcagtgccatgattcttactaagatgaaggagactgctgaagcttaccttggaaagaaaatcaaggatgccgttgtcaccgttccagcttacttcaacgatgcccagaggcaggctacaaaggatgctggtgttattgctggtctcaatgttgccagaatcatcaacgaacccactgctgctgctattgcctatggtcttgacaagaagggtggtgagaagaacatccttgtctttgaccttggtggtggtacctttgatgtcagtgtcttgaccattgacaacggagtgttcgaggttctttcgacaaatggtgacactcacttgggaggtgaggactttgaccacaggatcatggagtactttatcaagttgatcaagaagaagcaccaaaaggacatcagcaaggacaacaaggctcttggaaagctccgcagggaatgtgagagggccaagagagctcttagtagccagcaccaagtccgtgtagagattgagtccctctttgatggtgttgatttctccgagcctctcacaagagctcgtttcgaggagctgaacaatgacttgttcaggaagaccatgggacccgtgaagaaggccatggacgatgctggtctgcagaagagtcagatcgatgagattgtcctcgttggtggaagtaccaggatcccgaaggttcagcagctgttgaaggacttcttcgaagggaaagagccgaacaagggtgtgaaccccgacgaggctgttgcttatggtgccgctgtccagggtggtattttgagcggagaaggcggtgatgagaccaaagatatccttctccttgacgttgcaccactcactctgggtattgagaccgtgggaggagtgatgacaaaactgatcccgagaaacacagttatcccaaccaagaagtctcaggttttcactacataccaagaccagcagacaaccgtctccattcaggtctttgaaggtgagcgaagtctcaccaaggactgcaggctgctcgggaagttcgacctcaacggaatcccaccggccccaagaggaacacctcaaatcgaggtcacgtttgaagtggacgccaacggtatcctgaacgtgaaagcagaggacaaggcgagtggtaaatcagagaagatcacgatcacaaacgagaagggtcgtctgagccaggaagagattgaccggatggtgaaggaggcagaggagtttgcagaggaagacaagaaggtgaaggagagaatcgacgccaggaacagcctggagacatacgtttacaacatgaagaaccaagtaagcgacaaggacaagcttgcagacaaactggaggcggatgagaaggagaagatcgaggcagcgaccaaagaagccttggagtggcttgacgagaaccaaaactcagaaaaggaagattacgaggagaagttgaaggaagtagaggccgtgtgtaacccaatcatcacggccgtttatcagaggtcaggtggtgcaccaggtgcaggaggagaatcagcgcccgaggaggaggatgagtctcacgatgagctctaagatgtttttaaatgttcttgtctctttattgtttaacaaaccccctttagagggacgccttggtcaagttttgaggataaagaaagacaactcttttggtcttctctttattatgtctgatacatttctttagtcgaatactttttttattggtagaagctacctttactttaaacattttgccagattgagcaagtgccaaaaaaaaaaaaaaaaaaaaaa

SEQ ID NO: 48483 - protein, 668 aa, Isatis tinctoria
MARSFGANGTVVLAIIFFGCLFALCTAKEEATKLGTVIGIDLGTTYSCVGVYKNGHVEIIANDQGNRITPSWVGFTDSERLIGEAAKNQAAVNPERTIFDVKRLIGRKFEDKEVQKDRKLVPYQIVNKDGKPYIQVKIKDGETKVFSPEEISAMILTKMKETAEAYLGKKIKDAVVTVPAYFNDAQRQATKDAGVIAGLNVARIINEPTAAAIAYGLDKKGGEKNILVFDLGGGTFDVSVLTIDNGVFEVLSTNGDTHLGGEDFDHRIMEYFIKLIKKKHQKDISKDNKALGKLRRECERAKRALSSQHQVRVEIESLFDGVDFSEPLTRARFEELNNDLFRKTMGPVKKAMDDAGLQKSQIDEIVLVGGSTRIPKVQQLLKDFFEGKEPNKGVNPDEAVAYGAAVQGGILSGEGGDETKDILLLDVAPLTLGIETVGGVMTKLIPRNTVIPTKKSQVFTTYQDQQTTVSIQVFEGERSLTKDCRLLGKFDLNGIPPAPRGTPQIEVTFEVDANGILNVKAEDKASGKSEKITITNEKGRLSQEEIDRMVKEAEEFAEEDKKVKERIDARNSLETYVYNMKNQVSDKDKLADKLEADEKEKIEAATKEALEWLDENQNSEKEDYEEKLKEVEAVCNPIITAVYQRSGGAPGAGGESAPEEEDESHDEL

SEQ ID NO: 48484 - DNA, 1863 bp, Streptomyces kanamyceticus
  CDS (1)..(1863): transl_table=11
atggcacgtgcggtcgggatcgatctcgggacgacgaactcagtggtggccgtgctggagggcggtgagcccaccgtcgtcgtcaacgcggagggcgcgcgcaccacgccgtcggtcgtggcgttcgcgaagagcggcgacgttctggtgggcgaggtcgccaagcggcaggcggtcacgaacgtggagcggaccgcgcgctccgtcaaacgccacatgggcgacggcggttggcgcttcccggagagcggctccgtggacggcacccgctacaccgcgcaggagctgtccgcgcgcgtcctgcagaagctcaagcgcgacgccgagtcctacctgggggaagacgtcaccgacgcggtggtcaccgtgcccgcgtacttcgacgacacccaacgccaggccaccaaggaggccggtgagatcgcgggcctgaaggtcctgcgcatcatcaacgagccgacggccgcggccctcgcgtacggcctggacaagggcgacgaccagaccgtgctcgtcttcgacctcggcggcggcaccttcgacgtctccctcctggagatgggcgacggcgtcatcgaggtcaaggccaccaacggcgacacccagctcggcggcgacgactgggaccagcggatcgtcgagcacctggtgcggcagttcaagaacggccacggcgtggacctcgccaaggacaagatggcgctccaacgcctgcgcgagggcgcggagaaggcgaagatcgagctgtcctcgtcgagcgagacggacatcaacctgccctacatcaccgcatccgcggacggaccgctgcacctggccgaaaaactgacgcgcgctcagttccaggagctcacctcggacttgctcgaccgctgcaagcagcccttccaccaggcggtcaaggacgcgggcgtcaagctgtccgcggtcgaccacgtgatcctggtgggcggctccacgcggatgcccgcggtgagcgagctggtcagggagctcaccggcaaggacccgcacaagggcgtcaaccccgacgaggtggtggcactcggcgcggccttgcaggccggggtgatccgcggcgacgtgaaggacgtgctgctgctcgacgtgaccccgctgtccctgggcatcgagaccaagggcggcatcatgaccaagctcatcgagcgcaacaccacgatccccaccaagcgttcggagaccttctcgaccgccgaggacaaccagccgtcggtgggcatccaggtcttccagggcgagcgggagatcgccgcgtacaacaagaagctcggcgtcttcgacctcaccggactgccgcccgccccgcgcggcgtccccaagatcgaggtcaccttcgacatcgacgccaacggaatcatgcacgtgtccgcgaaggacgaggccaccgggcgcgagcagcgcatgacggtgaccggcggttccgcgctgcccaaggacgacatcaaccgcatggtccgcgaggccgaggaacacgcggaggaggaccgcaggcgccgcgaggccgcggagacccgcaaccaggcggagcagctcgtctaccagaccgaacgcttcctgcgcgacaacgaagagcggatccccgccgacacgaagaccgaagtggaggcggccgcggcggagttgaaggacctcctgaagaaccgggcggaggacaccgcggccctgcgcacgggcgccgagaagctcgcctcggtcagccagaagatgggccaggcgatgtacgcgaactctggcgggggcgcctcgcaagaacggacagcctcggagcccgcggccgaggagggcgtggtggacgcggagatcgtggacgaggacgacaagaacgagaagggcggggcgtag

SEQ ID NO: 48485 - protein, 620 aa, Streptomyces kanamyceticus
MARAVGIDLGTTNSVVAVLEGGEPTVVVNAEGARTTPSVVAFAKSGDVLVGEVAKRQAVTNVERTARSVKRHMGDGGWRFPESGSVDGTRYTAQELSARVLQKLKRDAESYLGEDVTDAVVTVPAYFDDTQRQATKEAGEIAGLKVLRIINEPTAAALAYGLDKGDDQTVLVFDLGGGTFDVSLLEMGDGVIEVKATNGDTQLGGDDWDQRIVEHLVRQFKNGHGVDLAKDKMALQRLREGAEKAKIELSSSSETDINLPYITASADGPLHLAEKLTRAQFQELTSDLLDRCKQPFHQAVKDAGVKLSAVDHVILVGGSTRMPAVSELVRELTGKDPHKGVNPDEVVALGAALQAGVIRGDVKDVLLLDVTPLSLGIETKGGIMTKLIERNTTIPTKRSETFSTAEDNQPSVGIQVFQGEREIAAYNKKLGVFDLTGLPPAPRGVPKIEVTFDIDANGIMHVSAKDEATGREQRMTVTGGSALPKDDINRMVREAEEHAEEDRRRREAAETRNQAEQLVYQTERFLRDNEERIPADTKTEVEAAAAELKDLLKNRAEDTAALRTGAEKLASVSQKMGQAMYANSGGGASQERTASEPAAEEGVVDAEIVDEDDKNEKGGA

SEQ ID NO: 48486 - DNA, 1947 bp, Metapenaeus ensis
  CDS (1)..(1947)
atgagtaaggcatcagcagtcggtatcgatctgggcaccacgtactcgtgcgtgggcgtgttccagcatgggaaggtggagatcatcgccaacgaccagggcaaccgcacgacgccctcatacgttgccttcacagacacggaacgcctgatcggcgatgccgccaagaaccaggtggccatgaaccccaacaacactgtgttcgacgccaagcgtcttatcggacgcaagttcgacgacgccaccgtccagagcgacatgaagcactggcccttcaccatcgtgaacgaaagcacgaagcccaagatccaggtggagtacaagggcgacaagaagaccttctaccctgaggagatctcttccatggtgcttatcaagatgaaggaaactgctgaggcgtaccttggtgccaccgtcaaggacgccgtggtgacggtacctgcctacttcaacgactcccagcgccaggccaccaaggatgctggcaccatctccggtcttaacgtgctgcgtatcatcaatgaacccaccgctgccgccatcgcctacggtctcgacaagaaagtgggcggcgaacgcaacgttttgatcttcgatcttggcggtggtaccttcgatgtgtcgatcctgacaattgaggacggcatcttcgaggtaaagtctacagcaggagacactcacttgggcggcgaggacttcgacaaccgcatggtgaaccacttcatccaggagttcaagcgcaagtacaagaaggatcccagcgagaacaagcgttcccttcgtcgtctgcgaactgcttgcgagcgagcaaagcgtaccctttcctcttctactcaagctagtgttgagatcgactccctgttcgaaggcattgacttctacacttccatcacccgtgcccgtttcgaggaactgtgcgcggatcttttccgtggtaccctcgaacccgtggagaagtctcttcgcgatgccaagatggacaaggcccaaatccacgacatcgttttggttggtggctccacccgtatccccaagatccagaagttgcttcaggacttcttcaacggcaaggagctgaacaagtctatcaaccccgatgaggccgtagcctacggtgccgccgttcaggccgctatcctttgcggtgacaagtccgaggctgtgcaggacttgctccttctcgacgttactcccttgtcccttggtatcgagactgctggcggtgtgatgactgccctcatcaagcgtaacaccaccattcccaccaagcagacccagaccttcacgacctactctgacaatcaaccaggtgtacttatccaggtatacgaaggagagcgtgccatgacaaaggacaacaacctgttgggcaagttcgaacttagtggcattcctccagccccccgtggcgttcctcaaattgaggtgaccttcgacattgacgccaacggtattttgaacgtatctgccgtggataagtctactggcaaggagaacaagatcaccatcactaacgacaagggtcgtctctccaaggaggagatcgagcgcatggttcaggacgccgagaagtacaaggctgacgatgagaagcagagagaccgtatttccgctaagaactccctcgagtcctactgcttcaacatgaaatctactgttgaagatgagaagttcaaggataagatttcagaggaggaccgaaccaagattctggaaatgtgcaatgaagctatcaagtggctcgacggaaaccaattgggcgagaaggaagaatacgaacacaaacagaaggaaattgaacaagtgtgcaatcccatcatcactaaaatgtacggcgctgcaggaggtcctcctccaggtggcatgcctggtggtatgggcggtgctgctccaggtggtgctggaactggaggttcctctggtcccaccattgaggaggtcgactaa

SEQ ID NO: 48487 - protein, 648 aa, Metapenaeus ensis
MSKASAVGIDLGTTYSCVGVFQHGKVEIIANDQGNRTTPSYVAFTDTERLIGDAAKNQVAMNPNNTVFDAKRLIGRKFDDATVQSDMKHWPFTIVNESTKPKIQVEYKGDKKTFYPEEISSMVLIKMKETAEAYLGATVKDAVVTVPAYFNDSQRQATKDAGTISGLNVLRIINEPTAAAIAYGLDKKVGGERNVLIFDLGGGTFDVSILTIEDGIFEVKSTAGDTHLGGEDFDNRMVNHFIQEFKRKYKKDPSENKRSLRRLRTACERAKRTLSSSTQASVEIDSLFEGIDFYTSITRARFEELCADLFRGTLEPVEKSLRDAKMDKAQIHDIVLVGGSTRIPKIQKLLQDFFNGKELNKSINPDEAVAYGAAVQAAILCGDKSEAVQDLLLLDVTPLSLGIETAGGVMTALIKRNTTIPTKQTQTFTTYSDNQPGVLIQVYEGERAMTKDNNLLGKFELSGIPPAPRGVPQIEVTFDIDANGILNVSAVDKSTGKENKITITNDKGRLSKEEIERMVQDAEKYKADDEKQRDRISAKNSLESYCFNMKSTVEDEKFKDKISEEDRTKILEMCNEAIKWLDGNQLGEKEEYEHKQKEIEQVCNPIITKMYGAAGGPPPGGMPGGMGGAAPGGAGTGGSSGPTIEEVD

SEQ ID NO: 48488 - DNA, 1857 bp, Medicago truncatula
  CDS (1)..(1857)
atggcgaggatatacgacggaaatgctgtgggaatagaccttggaacaacctattcttgtgttggtgtttggttggaagaaaagaacagagttgagattattcacaacgatgaaggcaataaaatcacaccttcctttgttgcttttaccgatgatcaaaggttggttggtggtgctgctaaggatcaggctgctatcaacccagagaacactgtctttgatgccaagaggttaattggtaggaagtttagtgatcccgttgttcaaaatgatataatgttgtggccattcaaggttatctctggtgttaatgacaaacctatgattactgttaagtacaagggtcaagaaaagaacctatgtgctgaggaaatatcatctatcatcctcacaaacatgaagaagattgcagagacatatttgaaatcacctgttcaaaatgcagttgtgactgtgcctgcttatttcaatgattctcagcgaaaagccaccatggatgctggtgccattgctggccttaatgttatgaggataatcaatgaacccactgctgcagctattgcatatggccttgacaacaaaggtaactgtgatggtgaacgaaatatttttgtgtttgatcttggtggtgggacttttgatgtgtctctcctcacaattaaaggtgatgtctttgaagttaaagcaaccgctggaaatactcaccttgggggaggggactttgataacagaatgttgaactactttgttgaggaatttaagagaaagaacaatgtggatattactaagaacccaagagctttgaggcggttaagaacggcatgtgaaaaggcaaaaaggacactttctttcaaattggtcactactattgaaattgattatttatgtgagggcgtcgatttctcttcatcaatcacgcgtgtcaagtttgaggaaatcaatatggacctttttaatgagtgtataaatactgttgagagttgtcttaccgattctaagatagagaagaatggtgtagacgatattgtccttgtcggtggctcgtccagaattcccaaagtacaggaactattgagtgacttcttcaatgggaaagatttatgcaagaacatcaatcctgatgaggctgttgctagtggggctgcagttcaggcttctttgctgtgtaaagactttaagaaagttccaaacttggtgctgcgagatgttacccctctgtcacttggtatctcaggccatggagatattatggctgtggttattcctaggaatactactgtacctgtcaaaaggccacatgaatgtggtactgctaaagataaccaatcctcagcccgaattaaggtttatgagggtgagagagcaagagctagtgacaacaatctgcttggcttttttaatctttcgtgcgtcccgggtgctcctcgtgggcatccctttgaggtatgcttcaccatcgatgaaaatggtatcctaactgtttctgcgaaggaaatatcctctggcaatacaaacgaaataacgataaccaatgacaaagaaaggttatcggctgatgaaattaaaagactgattcaagaagcagaggtgtacctcgctgaggatcagaaattcctaaggaaggctaaggtaatgaattcattagatgattgtgtttacaagttaaggaatgctctaaagaataaggatattaaactaaagtgctcttctcaaaaagttaaaaagatcaatcatgcaattacaatggctacaaatttgcttgataagaataaccaggagaatgacatagatgttcttgtggatcatctgaaggagcttgagagcatgttggaagaccttttggtcaagagtggctag

SEQ ID NO: 48489 - protein, 618 aa, Medicago truncatula
MARIYDGNAVGIDLGTTYSCVGVWLEEKNRVEIIHNDEGNKITPSFVAFTDDQRLVGGAAKDQAAINPENTVFDAKRLIGRKFSDPVVQNDIMLWPFKVISGVNDKPMITVKYKGQEKNLCAEEISSIILTNMKKIAETYLKSPVQNAVVTVPAYFNDSQRKATMDAGAIAGLNVMRIINEPTAAAIAYGLDNKGNCDGERNIFVFDLGGGTFDVSLLTIKGDVFEVKATAGNTHLGGGDFDNRMLNYFVEEFKRKNNVDITKNPRALRRLRTACEKAKRTLSFKLVTTIEIDYLCEGVDFSSSITRVKFEEINMDLFNECINTVESCLTDSKIEKNGVDDIVLVGGSSRIPKVQELLSDFFNGKDLCKNINPDEAVASGAAVQASLLCKDFKKVPNLVLRDVTPLSLGISGHGDIMAVVIPRNTTVPVKRPHECGTAKDNQSSARIKVYEGERARASDNNLLGFFNLSCVPGAPRGHPFEVCFTIDENGILTVSAKEISSGNTNEITITNDKERLSADEIKRLIQEAEVYLAEDQKFLRKAKVMNSLDDCVYKLRNALKNKDIKLKCSSQKVKKINHAITMATNLLDKNNQENDIDVLVDHLKELESMLEDLLVKSG

SEQ ID NO: 48490 - DNA, 2028 bp, Medicago truncatula
  CDS (1)..(2028)
atggccgccgtcttgcgccgtgctctccgccgcgatcttgcttcttcctctgcctctgcctttcgatcgttgacaggcagcactaagccatcatatgcagctcaaaagtgggcaagtttggctcgacctttcagttctaggcctgctggtagtgatgttattggaattgatttgggtactaccaattcatgtgtttctttaatggagggaaagaatcctaaagttattgagaattctgaaggagctcggacaacaccatcagtggttgccttcaaccagaaaggagagctgcttgttggtacacctgccaagcgtcaggctgtaaccaacccaacaaatactctttttggcaccaaacgtttgattggtaggcgctttgatgatccgcaaacacaaaaggagatgaaaatggtaccctataagattgttaaggcacccaatggagatgcatgggttgaaatcaataagcagcagtattctcccagccaaattggtgcttttgttcttactaagatgaaggaaactgctgaggcataccttggaaaaacaatttctaaagctgtagttactgttccagcttacttcaatgatgctcagaggcaggcaacaaaagatgctggtagaattgccggtcttgaagtgaagagaattatcaatgagcccactgcagctgcactttcatatgggatgaacaacaaggaggggctcattgccgtttttgatctcggaggtggaacatttgatgtgtccattttagaaatttcaaacggtgtgtttgaggtgaaagctaccaatggtgacactttcttgggaggagaagattttgataatgctttgttggactttctagtaagcgaattcaagagaactgatagtattgatcttgcaaaggataagcttgccttgcagaggcttcgagaagctgctgagaaagcaaaaatagaactctcttcaacttcacaaactgaaataaatcttcctttcatcactgctgatgcatccggtgcaaagcatttgaatatcactttgactagatcaaagtttgaggctttggtaaataacctgattgaaaggacaaaggcaccctgtaagagctgcttgaaagatgccaacatatctatcaaggatgttgatgaggttcttctcgtcggagggatgactcgtgtacctaaagtgcaggaggtggtttcagagatctttggaaagagtcctagcaaaggagtaaatcctgatgaggctgttgcaatgggagcagctcttcagggtggtattctccgtggagatgttaaagagctgctactcctagatgtcactcctctatctctgggtattgagactttgggtggtatctttacaagattgatctcccgcaacacaacaattcctacaaagaagagtcaggtgttttcgacagcagctgacaatcagactcaagtgggtatcaaggtgctccaaggggagcgggaaatggctgcagacaacaagagtcttggggaatttgaccttgttggcattcctcctgccccaagaggtttgcctcagattgaagtcacatttgacatagatgccaatgggattgttactgtctctgccaaagacaaatccactggaaaagaacaacagattaccatccgctcgtcaggaggactctcagatgatgaaattaataatatggtcaaagaagctgagttgcatgctcagagagatcaggaaaggaaagcacttattgatatcaagaatagtgctgacacatcaatctactcgattgaaaagagtttgagcgagtatagggaaaagattcctagtgaggttgcgaaggaaattgaaaactcggtctcagatttgagaacggctatggaaggagaaagtgttgatgaaattaagacaaaacttgatgctgctaacaaagccgtgtcaaagattggtcagcatatgtcaggtgggtcaagtggaggttcctctgatggaggttctccaggtggtggtgatcaggctccagaggcagagtatgaagaggtcaagaagtga

SEQ ID NO: 48491 - protein, 675 aa, Medicago truncatula
MAAVLRRALRRDLASSSASAFRSLTGSTKPSYAAQKWASLARPFSSRPAGSDVIGIDLGTTNSCVSLMEGKNPKVIENSEGARTTPSVVAFNQKGELLVGTPAKRQAVTNPTNTLFGTKRLIGRRFDDPQTQKEMKMVPYKIVKAPNGDAWVEINKQQYSPSQIGAFVLTKMKETAEAYLGKTISKAVVTVPAYFNDAQRQATKDAGRIAGLEVKRIINEPTAAALSYGMNNKEGLIAVFDLGGGTFDVSILEISNGVFEVKATNGDTFLGGEDFDNALLDFLVSEFKRTDSIDLAKDKLALQRLREAAEKAKIELSSTSQTEINLPFITADASGAKHLNITLTRSKFEALVNNLIERTKAPCKSCLKDANISIKDVDEVLLVGGMTRVPKVQEVVSEIFGKSPSKGVNPDEAVAMGAALQGGILRGDVKELLLLDVTPLSLGIETLGGIFTRLISRNTTIPTKKSQVFSTAADNQTQVGIKVLQGEREMAADNKSLGEFDLVGIPPAPRGLPQIEVTFDIDANGIVTVSAKDKSTGKEQQITIRSSGGLSDDEINNMVKEAELHAQRDQERKALIDIKNSADTSIYSIEKSLSEYREKIPSEVAKEIENSVSDLRTAMEGESVDEIKTKLDAANKAVSKIGQHMSGGSSGGSSDGGSPGGGDQAPEAEYEEVKK

SEQ ID NO: 48492 - DNA, 2124 bp, Medicago truncatula
  CDS (1)..(2124)
atggcttcctcaagtgctgcccaaatacatggtctaggtttctccccactccgaaaaccttcttcttccacttccaattcttcttcctattccaaaacccttttcttcggtcaccgtctcaattctaatcacgccaccttccctcgcgccgcattccccaaattatccaccaataggaagcctttcaccttccgtgtcgtcaatgagaaagtcgtcggtatcgatttgggtactaccaattccgccgtcgccgccatggaaggtggcaaacctaccatcatcaccaacgccgaaggtcagcgtaccactccctctgtcgttgcttacaccaagaacggtgatagactcgtcggtcagattgccaagcgtcaggccgtcgttaatcccgagaacaccttcttctctgtgaagagattcattggtaggaagatgtctgaggttgacgaagagtctaagcaagtctcttacagagtcattagagacgataacggcaacgtcaaactcgattgtccagctattggaaaatcatttgctgctgaagaaatttctgctcaggtgttgaggaagcttgtagatgatgcttcaaagtttttgaatgataaagtaactaaggctgtagtcactgtacctgcatacttcaatgattcacaaaggactgctaccaaggatgcaggcaggattgctggtcttgaagttcttcgaattatcaatgaaccaactgctgcatccttggcttatggtttcgaaaggaaaaacaatgaaaccattttggtctttgaccttggaggtggtacttttgatgtctcagtgcttgaggttggtgatggagtctttgaagtgctctctacttctggtgatacacacttgggtggtgatgattttgataagagagttgttgattggttggctggagacttcaagagagacgaaggtatagaccttttgaaggacaaacaagctcttcagcgtcttaccgagacagctgagaaagctaaaatggagctttcatccctcactcaaacaaatatcagtttgccgttcataactgccacagcagatggccccaaacatattgagaccactcttacaagggctaaatttgaggaattatgttcagatcttcttgacagactcaggacaccagtggaaaattcattgagggatgcaaaactctcaatcaaggatattgatgaggtgattcttgttggtggatcaacacgtatccctgctgttcaggagcttgtaaagaagatgactggaaaagatccaaatgtcactgtcaatccagatgaagtggttgcccttggggctgcagttcaggctggtgtcttggctggagatgtcagcgacattgtgctgttagatgtttctccattgtccttgggtttggaaactctaggtggggtgatgacaaaaattattcccagaaacactacccttcccacctcaaaatcagaggttttctctaccgctgctgatggacaaaccagtgtagaaattaatgtccttcagggtgagagagaatttgttagggacaataaatctcttggtagcttccgcttggacggtattcctcctgctccccgtggggttccgcagattgaagtgaagttcgacattgatgcaaatggcattctgtcagttgctgccatagacaagggcacagggaagaaacaagatattaccattactggtgccagcaccttgcctggtgatgaggttgagaggatggtcaatgaggctgagagattttcaaaggaggacaaggagaagagggatgcaatagacacaaagaatcaggcggactctgttgtctaccagactgaaaagcaattgaaagagctaggagaaaaggtacctggccctgtgaaagaaaaggttgaagcaaagttggtagagcttaaagatgctatttctggtggttcaacccaaactatgaaagatgccatggctgccctcaatcaggaagttatgcagcttggacagtctctatataaccaacccggagctgcagatgcagcaggacctacaccacctggtagcgagtctggccccacagactcatcatcaggcaagggagcagatggagatgtgattgatgctgattttactgactctaaatga

SEQ ID NO: 48493 - protein, 707 aa, Medicago truncatula
MASSSAAQIHGLGFSPLRKPSSSTSNSSSYSKTLFFGHRLNSNHATFPRAAFPKLSTNRKPFTFRVVNEKVVGIDLGTTNSAVAAMEGGKPTIITNAEGQRTTPSVVAYTKNGDRLVGQIAKRQAVVNPENTFFSVKRFIGRKMSEVDEESKQVSYRVIRDDNGNVKLDCPAIGKSFAAEEISAQVLRKLVDDASKFLNDKVTKAVVTVPAYFNDSQRTATKDAGRIAGLEVLRIINEPTAASLAYGFERKNNETILVFDLGGGTFDVSVLEVGDGVFEVLSTSGDTHLGGDDFDKRVVDWLAGDFKRDEGIDLLKDKQALQRLTETAEKAKMELSSLTQTNISLPFITATADGPKHIETTLTRAKFEELCSDLLDRLRTPVENSLRDAKLSIKDIDEVILVGGSTRIPAVQELVKKMTGKDPNVTVNPDEVVALGAAVQAGVLAGDVSDIVLLDVSPLSLGLETLGGVMTKIIPRNTTLPTSKSEVFSTAADGQTSVEINVLQGEREFVRDNKSLGSFRLDGIPPAPRGVPQIEVKFDIDANGILSVAAIDKGTGKKQDITITGASTLPGDEVERMVNEAERFSKEDKEKRDAIDTKNQADSVVYQTEKQLKELGEKVPGPVKEKVEAKLVELKDAISGGSTQTMKDAMAALNQEVMQLGQSLYNQPGAADAAGPTPPGSESGPTDSSSGKGADGDVIDADFTDSK

SEQ ID NO: 48494 - DNA, 1932 bp, Drosophila auraria
  CDS (1)..(1932)
atgcctgccattggaatcgacctgggcaccacgtactcctgcgtgggcgtctaccagcatggaaaggtggagatcatcgccaacgaccagggcaaccgcaccacgccctcctacgtggcattcacagactccgagcgtctgatcggcgacccggccaagaaccaggtggcgatgaacccccggaacacggtgtttgacgccaagcgcctcatcggacgcaagtacgacgacccgaagatcgcggaggacatgaagcactggcccttcaaggtggtcagcgacggcggaaagcccaagatcggcgtggagttcaagggcgaggccaagcgcttcgcccccgaggaaatcagctcgatggtgctggtcaagatgcgggagacggcggaggcctatctgggcgagacggtcacggacgcggtcatcactgtgcccgcctacttcaacgactcgcagcgccaggccaccaaggacgccggccgcatcgccgggctgaacgtgctccggatcatcaacgagcccacggcggcggcactggcctacgggctggacaagaacctccagggggagcgcaacgtgctcatcttcgacttgggcggcggcaccttcgacgtctccatcctgaccatcgacgagggatccctgttcgaggtccgggccaccgccggagacacgcacctgggcggtgaggacttcgacaaccggctggtcacccacctggccgatgagttcaagcgcaagttccgaaaggacctccgctccaaccccagagccctgcgccgcctccgcacggctgctgagcgggcaaagcgcacactgtcctccagcacggaagccaccatcgagatcgacgcgctgttcgagggccacgacttctacaccaaggtgagccgcgcccgcttcgaggagctgtgcgcagacctcttccgcaacaccctgcagcccgtggagaaggcgctcaccgacgccaagatggacaagggccagatccacgacatcgtgcttgtgggcggctccactcgcatccccaaggtcgaggccctgctgcaggagtacttccacggcaagagcctcaacctgtccatcaatcccgacgaggcagtggcctacggagccgccgtgcaggccgcgatcctcagcggcgaccagaccggaaagatccaggacgtgctgctggtggacgtggctcccctctcgctcggcatcgagaccgccggccgggtgatgaccaagctgatcgagcgcaactgccgcatcccgtgcaagcagacgaagaccttctccacgtactcggacaaccagcccggagtctccatccaggtgtacgagggcgagcgcgcgatgaccaaggacaacaatgcgctgggcaccttcgacctgtccggcattccgccagcccctcgtggagtgccccagatcgaggtcaccttcgacatggacgccaacggcatcctgaacgtctctgccaaggagatgagcacgggcaaggccaagaacatcacaatcaagaacgacaagggacggctctcgcaggctgagatcgaccgcatggtaaacgaggcggagaagtacgcagacgaggacgagaagcaccgccagcgcatcgcctctcggaacgcgctggagagctacgtcttcaacgtgaagcaggcggtggagcaggctggcgccggaaagctggacgaggccgacaagaactccgtcttggagaagtgcaacgagaccatcagctggctggactccaacaccaccgccgagaaggaggagttcgaccacaggctggaggagctcacccgccactgctcgcccatcatgacaaagatgcatcagcagggagcgggagcgcaagcaggcggtggtcctggagccaactgtggccagcaggctggaggctttggcggttactcaggacccacagtggaggaagtcgactaa

SEQ ID NO: 48495 - protein, 643 aa, Drosophila auraria
MPAIGIDLGTTYSCVGVYQHGKVEIIANDQGNRTTPSYVAFTDSERLIGDPAKNQVAMNPRNTVFDAKRLIGRKYDDPKIAEDMKHWPFKVVSDGGKPKIGVEFKGEAKRFAPEEISSMVLVKMRETAEAYLGETVTDAVITVPAYFNDSQRQATKDAGRIAGLNVLRIINEPTAAALAYGLDKNLQGERNVLIFDLGGGTFDVSILTIDEGSLFEVRATAGDTHLGGEDFDNRLVTHLADEFKRKFRKDLRSNPRALRRLRTAAERAKRTLSSSTEATIEIDALFEGHDFYTKVSRARFEELCADLFRNTLQPVEKALTDAKMDKGQIHDIVLVGGSTRIPKVEALLQEYFHGKSLNLSINPDEAVAYGAAVQAAILSGDQTGKIQDVLLVDVAPLSLGIETAGRVMTKLIERNCRIPCKQTKTFSTYSDNQPGVSIQVYEGERAMTKDNNALGTFDLSGIPPAPRGVPQIEVTFDMDANGILNVSAKEMSTGKAKNITIKNDKGRLSQAEIDRMVNEAEKYADEDEKHRQRIASRNALESYVFNVKQAVEQAGAGKLDEADKNSVLEKCNETISWLDSNTTAEKEEFDHRLEELTRHCSPIMTKMHQQGAGAQAGGGPGANCGQQAGGFGGYSGPTVEEVD

SEQ ID NO: 48496 - DNA, 1977 bp, Urechis caupo
  CDS (1)..(1977)
atggcaaaagcaccagcagtcggaattgatctgggtaccacctactcctgtgttggagtgttccaacacggaaaagtggaaatcattgccaacgatcaaggcaaccgcacaacaccaagctatgttgccttcaccgattctgagcgtcttgtaggcgactctgccaagaaccaggtggcaatgaacccaaccaacacagtgtttgatgccaagcgtctaattggccgtcgctttgatgaaagttcagtgcaatcagacatgaagcactggccatttgaagtcatcagtgaaaatggccgaccaaagatcacgatcgaatacaagggagaaaaaaagacattcttcccagaggaagtctcatccatggtgctgaacaaaatgaaggaggttgcggaagcttacctcggaaagactgtgaatgatgccgtcatcacagtaccagcctacttcaatgactcccagcgtcaggcaacaaaagacgctggagtcatctctggactcaacattctgagaatcatcaacgagcctacagctgctgccattgcttatggtctcgacaagaaagtgggaggggagaggaatgtacttatctttgacttgggaggtggtacctttgatgtgtctgttctgaccattgaggatggcatctttgaagtcaagtcaacggctggagatacccatcttggaggtgaagattttgacaaccgcatggtgaaccattttgtacaggagttcaagcgtaaacacaagaaggacatcacagacaacaagcgctccgtgcgtcgtctccgtacagcttgtgagagggccaagcggaccctgtccagctcttcccaggccagcattgagattgactcgctctatgagggtgtcgatttctacaccagcatcacaagggctcgctttgaggagctcaactcggacttgttccgtggaaccctcgagcctgtggagagatccctgcgtgatgccaagtacgacaaggctatgattcatgatattgtgcttgttggcggatccacccgtatccccaagatccagaaactgctccaggatttcttcaatggcaaggaactcaacaagtccatcaacccagacgaggcggtggcctacggtgcagctgttcaggcagccatcttgcacggagacaagtctgaggaggtgcaggacctgctgttgctggatgtggcaccgctgtccctcggtatcgagaccgctggtggcgtgatgacctccctcatcaagaggaacaccacagtacccaccaagcagactcagactttcaccacctatgctgacaaccagcccggggtgctcattcaggtgtatgagggcgagagggccatgaccaaggacaacaaccttctgggtaaatttgagctgagtggcatccccccagcccctcgtggagtcccgcagattgaggtgacctttgacattgatgcaaacggcatcctcaacgtgtcggccgtagacaagagcactggcaaagaaaacaagatcacaatcaccaatgacaagggtcgtctgagcaaggaggatatcgagcgcatggtgaaggaagctgagcagtacaagggggaggatgaggcccagcgcgaaccaatcaccgccaagaactctcttgagagctatgctttcaacatgaaatccactgtggaagatgagaaagtcaaggacaagatttccgacgaggacaagactaagatcattgacaagtgtaacgaggtcatcacctggctcgacgctaaccagctcgctgacaaggacgagtttgcccatcagcagaaggaattggagggtgtgtgtgttcctgttatgaccaagctgtaccaggcaggtggagctcctggtggtatgcccggtggaatgcctggaggcatgcctggtggtatgcccggtggtatgcctggcggtgctggtggagcccctccctccggtggaagcggtggtcccactattgaagaggtcgattaa

SEQ ID NO: 48497 - protein, 658 aa, Urechis caupo
MAKAPAVGIDLGTTYSCVGVFQHGKVEIIANDQGNRTTPSYVAFTDSERLVGDSAKNQVAMNPTNTVFDAKRLIGRRFDESSVQSDMKHWPFEVISENGRPKITIEYKGEKKTFFPEEVSSMVLNKMKEVAEAYLGKTVNDAVITVPAYFNDSQRQATKDAGVISGLNILRIINEPTAAAIAYGLDKKVGGERNVLIFDLGGGTFDVSVLTIEDGIFEVKSTAGDTHLGGEDFDNRMVNHFVQEFKRKHKKDITDNKRSVRRLRTACERAKRTLSSSSQASIEIDSLYEGVDFYTSITRARFEELNSDLFRGTLEPVERSLRDAKYDKAMIHDIVLVGGSTRIPKIQKLLQDFFNGKELNKSINPDEAVAYGAAVQAAILHGDKSEEVQDLLLLDVAPLSLGIETAGGVMTSLIKRNTTVPTKQTQTFTTYADNQPGVLIQVYEGERAMTKDNNLLGKFELSGIPPAPRGVPQIEVTFDIDANGILNVSAVDKSTGKENKITITNDKGRLSKEDIERMVKEAEQYKGEDEAQREPITAKNSLESYAFNMKSTVEDEKVKDKISDEDKTKIIDKCNEVITWLDANQLADKDEFAHQQKELEGVCVPVMTKLYQAGGAPGGMPGGMPGGMPGGMPGGMPGGAGGAPPSGGSGGPTIEEVD

SEQ ID NO: 48498 - DNA, 2362 bp, Metarhizium anisopliae
  CDS (142)..(2133)
ctctctacatccctctctacatcctctcttcactctaccgcctttgtcaatccaatcaaactcactgatttgaattgggtcttcaacacacaccaagatacccgatttgttctcccccgcactcgcatcacaaccaccacaatgagcggcaaggtcactgctgttggtatcgatctgggcaccacgtactcgtgcgttggtgtcttcgaccaggagaaatgtgaaattatcgccaacgaccagggtaaccgaacgaccccttcatacgtcgccttcaacgacaccgagcgtctgatcggagatgccgccaagaaccaggtcaccaagaaccctgagaacacagtctttgacgccaagcgattgattggccgaaagttctccgatgccgatgtccaggccgacatgaagcacttccccttcaaggtcatcgataagtccggcaagcccgctgtcgaggtccaatacatgggcgagaccaagaccttcacacctgaggaaatctcatctatgattctcatgaagatgcgtgagaccgcagaggcttttattggcgagactgtcaacaatgccgtcatcactgtccctgcctacttcaacgactctcagcgtcaggccaccaaggacgctggtctcatcgccggcctgaacgtcctgcgaatcatcaacgaacccactgccgccgccattgcctatggcttcgacaagattcgccctgaggacaaggacaaggatgatatccccgagcgcaatatcctcatcttcgatcttggtggtggtactttcgatgtctccctcctcgccgttgccggaggtgtctttgaagtcaagtccaccgctggtgacactcacttgggtggtgaggactttgacaaccgattggtgaaccactttgtaaatgagttcaaacgcaagcacaagaaggatctcaccaccaactcacgtgctctgcgccgtcttcgaagcgcctgtgagcgtgccaagcgtgccctgtcttcggcttcccagacctctattgagatcgactctctgatggagaacatcgacttctacacctccatcacccgagctcgtttcgaagagctttgccaggatctcttccgttctaccatgcagcctctcgaccgcgtcatctcggatgccaagatcgacaagaaccaggttgacgagattgtcctcgtcggtggctctacccgtatcccccgtatccagaagctcatcactgagtacttcaacggcaagcagcccagcaagtccatcaatcccgatgaggctgtcgcctacggtgctgccgtccaggccgctatcctgtctggctacaactctcagaccaccagcagcattctgctgctcgatgtcgcccctctctctcttggtattgagaccgctggtggcatgatgaccaagcttatcccccgaaacaccaccattcccaccaagaagtccgaggttttctctactttctccgacaaccagcctggtgttcttatccaagtctttgaaggtgaacgtcagcgcaccaaggacaacaacctgctcggcaagtttgagctcactggtattcctcccgctccccgtggtgttccccagattgaggtcacctttgatctcgatgccaatggtatcatgaacgtttccgctgttgagaagggcaccggcaagtccaacaagattgtcatcaccaacgacaagggccgcctgtccaaggaggagattgagcgcatgctggctgatgccgagaagtataaggaagctgatgaggccgagggtcgccgtgtcggcgcccgaaatgcccttgatcattacgcttccaacctgcgcaccacccttcaggagcctggcgttgatgagaagcttgacgccggcgacaaagagaagctcgccgccgctgccgacattagctcttggcttgaccagaacgagcaggccagcgccgaggagtatgaggccaagcagaaggagattgaggccattgccaaccccatcatgatgaagttttacggagctggtggccaggctggcggtatgcccggcggtatgcctggcggtcctggcggtcctggcggcttccctggcgctggtggccctggtggtgctggtggcgatgacggcccgaccgtcgaggaggtcgactaaattccttgatacccatggctttcatcagactggcccaaaaatgtggaggatttacggggtgtcttgagatgatttttagagtttgctttaattttttcgctttgcattcgcggttatgagcaagggatacaaaaactgggttgatttacctggactgtactttaatgagttaaatgaataaaatggcatagccctaaaaaaaaaaaaaaaaaaaaaaaaaaaaaaaaaa

SEQ ID NO: 48499 - protein, 663 aa, Metarhizium anisopliae
MSGKVTAVGIDLGTTYSCVGVFDQEKCEIIANDQGNRTTPSYVAFNDTERLIGDAAKNQVTKNPENTVFDAKRLIGRKFSDADVQADMKHFPFKVIDKSGKPAVEVQYMGETKTFTPEEISSMILMKMRETAEAFIGETVNNAVITVPAYFNDSQRQATKDAGLIAGLNVLRIINEPTAAAIAYGFDKIRPEDKDKDDIPERNILIFDLGGGTFDVSLLAVAGGVFEVKSTAGDTHLGGEDFDNRLVNHFVNEFKRKHKKDLTTNSRALRRLRSACERAKRALSSASQTSIEIDSLMENIDFYTSITRARFEELCQDLFRSTMQPLDRVISDAKIDKNQVDEIVLVGGSTRIPRIQKLITEYFNGKQPSKSINPDEAVAYGAAVQAAILSGYNSQTTSSILLLDVAPLSLGIETAGGMMTKLIPRNTTIPTKKSEVFSTFSDNQPGVLIQVFEGERQRTKDNNLLGKFELTGIPPAPRGVPQIEVTFDLDANGIMNVSAVEKGTGKSNKIVITNDKGRLSKEEIERMLADAEKYKEADEAEGRRVGARNALDHYASNLRTTLQEPGVDEKLDAGDKEKLAAAADISSWLDQNEQASAEEYEAKQKEIEAIANPIMMKFYGAGGQAGGMPGGMPGGPGGPGGFPGAGGPGGAGGDDGPTVEEVD

SEQ ID NO: 48500 - DNA, 1890 bp, Streptomyces fradiae
  CDS (1)..(1890): transl_table=11
atggcacgcgcagtgggtatcgacctcggtacgaccaactcggtggtgagcgtcctggagggcggtgagcccgcggtcgtcacgaacacggagggcgcgaggaccacgccgtccgtcgtgggcttcgccaagaacggcgacgtgctggtgggcgaggtggccaagcggcaggccgtcaccaacgtggaccgcaccgtccgctccgtgaagcggcacatgggcgacacgggctggcgcttccccgagaacggcgacatcgacggcaggcggtacaccgcgcaggagatctcggcgcgcatcctgcagaagctgaagcgcgacgccgagggctacctcggcgaggacgtcagggacgccgtgatcaccgtcccggcgtacttcaacgacgccgagcgcaccgcgaccaaggaggccggcgagatcgcggggctgaacgtcctgcgcatcgtcaacgagccgaccgccgccgccctggcgtacggcctcgacaaggagagcgaccagacgatcctcgtcttcgacctcggcggcggcaccttcgacgtgtcgctgctggagatcggcgacggcgtcgtcgaggtcaaggccaccaacggcgacacccacctgggcggcgacgactgggaccagcggatcgtggagcacctcgcgggccgcttcaggaacgcgtacgggatcgacatcaccaaggaccgcatggcgacgcagcgcctgcgcgaggccgccgagaaggcgaagatcgagctgtccgccgccaccgagacctcggtcaacctcccctacctgagcgcctcggcggagggcccgctgcacctggacgagaagctcacccgcgcccagttccagcagatgacctccgacctgctggagcggtgccaggtccccttccggaacgccgtgaaggacgccggcatcgagatctccgggatcgaccacgtcatcctcgtcggcggctccacccgcatgcccgccgtggcggacctggtgaaggagctgaccggcaaggacccgcacaagggtgtgaacccggacgaggtcgtcgcgatcggcgcctcgctccaggccggtgtgctcaagggcgaggtcaaggacgtcctgctgctcgacgtcaccccgctgtccctcggcatcgagaccaagggcggcatcatgaccaagctgatcgagcgcaacaccacgatcccgacgaagcgctccgagatcttcacgacggcggaggacaaccagccgtcggtgcagatccaggtctaccagggcgagcgcgagatcgccgcgtacaacaagaagctcggcatgttcgagctgaccggtctgcccccggcgccgcgcggcgtcccgcagatcgaggtgtccttcgacatcgacgccaacggcatcatgcacgtcacggcgaaggacctcggcaccggcaaggagcagaagatgaccgtcaccggcggctcctcgctcccgaaggacgacatcgaccggatggtccgcgaggcggagcgccacgcggaggaggaccacaggcgccgcgaggccgccgaggcccgcaaccagggcgagcagctcgtctaccagaccgagaagttcctcgccgaccacgccgacggcacgggcaaggtccccggtgagatcaggaccgaggtcgagacggcggtgaccgagctcaaggagaagctgaagggcgacgacacggcgcagatccgcacggccgcggagcgggtcgcggccgtctcccagaagctcggccaggccgtgtacgccgacgcccaggccgcccaggccgcgggcggcgcccaggccggccccgagggcggcgaggcgggaggccgggacgaggacgaggtggtcgacgccgagatcgtcgacgaggacgaccgggcacggcgcggaggtcccgcgtga

SEQ ID NO: 48501 - protein, 629 aa, Streptomyces fradiae
MARAVGIDLGTTNSVVSVLEGGEPAVVTNTEGARTTPSVVGFAKNGDVLVGEVAKRQAVTNVDRTVRSVKRHMGDTGWRFPENGDIDGRRYTAQEISARILQKLKRDAEGYLGEDVRDAVITVPAYFNDAERTATKEAGEIAGLNVLRIVNEPTAAALAYGLDKESDQTILVFDLGGGTFDVSLLEIGDGVVEVKATNGDTHLGGDDWDQRIVEHLAGRFRNAYGIDITKDRMATQRLREAAEKAKIELSAATETSVNLPYLSASAEGPLHLDEKLTRAQFQQMTSDLLERCQVPFRNAVKDAGIEISGIDHVILVGGSTRMPAVADLVKELTGKDPHKGVNPDEVVAIGASLQAGVLKGEVKDVLLLDVTPLSLGIETKGGIMTKLIERNTTIPTKRSEIFTTAEDNQPSVQIQVYQGEREIAAYNKKLGMFELTGLPPAPRGVPQIEVSFDIDANGIMHVTAKDLGTGKEQKMTVTGGSSLPKDDIDRMVREAERHAEEDHRRREAAEARNQGEQLVYQTEKFLADHADGTGKVPGEIRTEVETAVTELKEKLKGDDTAQIRTAAERVAAVSQKLGQAVYADAQAAQAAGGAQAGPEGGEAGGRDEDEVVDAEIVDEDDRARRGGPA

SEQ ID NO: 48502 - DNA, 1968 bp, Haliotis discus hannai
  CDS (1)..(1968)
atgagtaagcaagcagtgggaatcgatttgggaaccacctactcttgtgttggagttttccaacatggaaaagtcgaaatcattgcgaacgaccaaggaaaccgaaccactccaagttacgtggccttcactgacacagaacgtctcattggagatgctgcaaagaaccaggttgccatgaacccagagaacacaatcttcgatgccaaacgtctcattggaagaagattcgaggaggcaaatgttcagtctgacatgaagcactggccatttaatgttttgagtgatggaggcaaacccaagatccaagtaaattacaaagatgaaccaaagactttctacccagaagagatttcctccatggtgcttacaaagatgaaggaaacagctgaacaatatcttggaaagacaatcacagatgctgttgtaacagtcccagcttacttcaacgactctcaacgacaggctactaaagatgcagggacaatctctggtctcaatgttttacgtatcatcaatgagccaacagctgcagctattgcgtatggtcttgacaagaaggttggtggtgaacgcaatgtacttatctttgatcttggcggtggtacatttgatgtgtctatcctgaccattgaagatggtatttttgaggtgaaatccacagctggagacacccatttgggtggtgaggactttgacaatcgtatggtgaaccactttatccaggagttcaagaggaaacacaagaaggatatctctgataacaagagggctgtgaggcgtctgagaacagcctgcgagagagcaaagagaaccctgtcctctagcacccaggccagcatagagatcgactccctgtttgagggagtggattactacaccagcataacccgagccaggtttgaggagctcaatgctgatctcttccgtggcacactggagcccgtagagaaagctttgcgcgacgccaaagcagacaaggcttccatccatgacatagtactggttggagggtcaacacgtatccccaagatccagaaactcctccaggacttcttcaacggcaaggagctatgcaagagcatcaaccccgatgaggctgttgcttatggtgctgccgtccaggccgccatccttcatggtgacaagtccgaggaagtccaggacctgctactgctggatgtcacacccctgtcacttggtattgagactgctggcggtgtgatgactgtcctcatcaagaggaacaccaccatccccaccaaacagacccagaccttcacaacatactcggacaatcaacctggtgtgctgatccaggtctatgagggtgagagagctatgaccaaggacaacaacatcttgggcaagttcgagctgactggaattcccccagcacccagaggtgtcccacagattgaagtaacattcgacattgatgccaatggtatcctcaatgtatcagctgtggacaagagcaccatgaaggagaacaagatcaccatcacaaacgacaaaggtcgcttgtcaaaggaggagatagagcgtatggtgaacgaggctgagaattacaaggcagaggacgagaagcagaaagaccgtatccaggctaagaatggtctggagagctacgctttcaacatgaagtccactgtagaggacgagaaattgaaagacaagatcagtgaagatgacaagaagaccatcaccgacaagtgtaacgatgtcatcagctggctggactctaaccagcttgccgagaaggatgagttcgaacacaagcagaaggagctggagggagtgtgtaaccccatcatcaccaagttgtaccaggcagctggaggtgctggtggtatgcccggtggtatgcccggtggtatgcccggtggtgcaggaggactgccaggtggtgccgacggtcagaccggcggcagctccggaggcccaaccatcgaggaggtcgattaa

SEQ ID NO: 48503 - protein, 655 aa, Haliotis discus hannai
MSKQAVGIDLGTTYSCVGVFQHGKVEIIANDQGNRTTPSYVAFTDTERLIGDAAKNQVAMNPENTIFDAKRLIGRRFEEANVQSDMKHWPFNVLSDGGKPKIQVNYKDEPKTFYPEEISSMVLTKMKETAEQYLGKTITDAVVTVPAYFNDSQRQATKDAGTISGLNVLRIINEPTAAAIAYGLDKKVGGERNVLIFDLGGGTFDVSILTIEDGIFEVKSTAGDTHLGGEDFDNRMVNHFIQEFKRKHKKDISDNKRAVRRLRTACERAKRTLSSSTQASIEIDSLFEGVDYYTSITRARFEELNADLFRGTLEPVEKALRDAKADKASIHDIVLVGGSTRIPKIQKLLQDFFNGKELCKSINPDEAVAYGAAVQAAILHGDKSEEVQDLLLLDVTPLSLGIETAGGVMTVLIKRNTTIPTKQTQTFTTYSDNQPGVLIQVYEGERAMTKDNNILGKFELTGIPPAPRGVPQIEVTFDIDANGILNVSAVDKSTMKENKITITNDKGRLSKEEIERMVNEAENYKAEDEKQKDRIQAKNGLESYAFNMKSTVEDEKLKDKISEDDKKTITDKCNDVISWLDSNQLAEKDEFEHKQKELEGVCNPIITKLYQAAGGAGGMPGGMPGGMPGGAGGLPGGADGQTGGSSGGPTIEEVD

SEQ ID NO: 48504 - DNA, 1965 bp, Tetranychus urticae
  CDS (1)..(1965)
atgagtaaaactcctgctattggtattgatcttggtacaacttactcttgtgttggtgttttccagcatggaaaagttgaaatcatcgccaatgaccaaggaaaccgaacaacgcctagctatgtgggtttcactgataccgaaaggttaattggtgatgctgctaaaaatcaagtagctatgaatccatctaacaccgtgttcgatgctaaaaggttgattggtcgacgcttcgatgatgccactgttcaatccgacatgaaacactggccgttcaaagtcattaattccgcatccaagcctaagatccaggtcgattttaagggtgaaactaaaaccttctgccctgaagaaatctcagctatggtgcttaccaagatgaaggagaccgccgaagcatacttgggtaagcctgttaccaatgctgttataactgtacctgcctacttcaatgatagtcaaagacaagccactaaagatgccggtaccattgctggtttaaatgttatgagaataattaatgaaccaactgcagcagccattgcttatggtttagataagaaaggtggtggtgaaaagaacatcctaatctttgacttgggtggtggtacttttgatgtatctgtcttgactattgaagatggtgtcttcgaggtcaaatcaactgctggtgatactcatcttggtggtgaagactttgataacagaatggttaaccacttcatcgaagaatttaaaaagaaacataagaaggatattacatccaacaaacgagctgttaggagattaagaactgcttgtgaacgagcaaagagaaccttatcctcatctactcaagccagcattgaaatcgactctcttcatgaaggtatcgatttctactcaacaattactagagctcgtttcgaagaactctgctcagatctattccgatcaacattggatccagtcgagaaggctcttcgtgatgctaaactagacaaggctcaagtcaatgaaattgtacttgttggaggttcaacaagaattccaaagatccagaaacttcttcaagatttcttcaatggtaaagaactcaacaagagtattaacccagatgaagctgttgcttacggtgcagctgttcaagctgcaatccttaatggtgataaggatgaaacagttaaagatttattacttcttgatgtaactccactatctcttggtattgaaactgctggtggagtaatgactgcactgattaaacgaaacaccaccattccaactaagacatctcaaatatttactacttactcagataatcaacctggtgtactaattcaagtatacgaaggtgaaagagcaatgaccaaagataacaatcttttgggtaaatttgaattaactggtattcctccagctcctcgaggtgttccacaaatcgaagttaccttcgatattgatgctaatggtatattaaatgtatcagcagtcgataagagtaccggccgagaaaacaaaattaccatcaccaatgataaaggacgtctttctaaggaacaaattgaaaagatggttaacgaagctgaaaaatataaagaagatgacgaaaaagttaaagaacgagttgctgctaagaatggcttggaaagttatgctttcagtatgaaacagactatggaagagcctaacataaaagataaagtgcctgaagaagaccgcaaaaaggttgctgataaagttgatgaagttttaaaatggttagatgctaatcaattggcagagaaggaggaattcgagtttaaacaaaaagaattacaagaactttgtaatccaatcattactaaaatgtatcaaggtgccggtggagctcctggtgctggaggtatgcccggtggaatgcctggtggcttcccaggaggtgctcccggtggagctccaaaatcaggtggacctggtggacctactattgaagaagttgattag

SEQ ID NO: 48505 - protein, 654 aa, Tetranychus urticae
MSKTPAIGIDLGTTYSCVGVFQHGKVEIIANDQGNRTTPSYVGFTDTERLIGDAAKNQVAMNPSNTVFDAKRLIGRRFDDATVQSDMKHWPFKVINSASKPKIQVDFKGETKTFCPEEISAMVLTKMKETAEAYLGKPVTNAVITVPAYFNDSQRQATKDAGTIAGLNVMRIINEPTAAAIAYGLDKKGGGEKNILIFDLGGGTFDVSVLTIEDGVFEVKSTAGDTHLGGEDFDNRMVNHFIEEFKKKHKKDITSNKRAVRRLRTACERAKRTLSSSTQASIEIDSLHEGIDFYSTITRARFEELCSDLFRSTLDPVEKALRDAKLDKAQVNEIVLVGGSTRIPKIQKLLQDFFNGKELNKSINPDEAVAYGAAVQAAILNGDKDETVKDLLLLDVTPLSLGIETAGGVMTALIKRNTTIPTKTSQIFTTYSDNQPGVLIQVYEGERAMTKDNNLLGKFELTGIPPAPRGVPQIEVTFDIDANGILNVSAVDKSTGRENKITITNDKGRLSKEQIEKMVNEAEKYKEDDEKVKERVAAKNGLESYAFSMKQTMEEPNIKDKVPEEDRKKVADKVDEVLKWLDANQLAEKEEFEFKQKELQELCNPIITKMYQGAGGAPGAGGMPGGMPGGFPGGAPGGAPKSGGPGGPTIEEVD

SEQ ID NO: 48506 - DNA, 1908 bp, Procambarus clarkii
  CDS (1)..(1908)
atggcggatccagtaattggcatcgacctgggcacgacgtactcgtgcgtgggcgtgttccagcagggcaaggtggagatcatcgccaacgaccagggcaacaggaccacgccttcgtacgtcgccctcaccgacacagaacgactcattggcgatgcagccaagaaccagacggccctcaaccccagcaacacaatctttgatgccaaacgactcatcggccgtaagttcaatgacccaaccgtgcagaacgacaagaaacattggccttttgacgtggtcgacagcaacggcaaacccaaaatacaggttgaatacaagggagagagaaagactttcaaccccgaggagatctcgtccatggtgttgaccaagatgaaggagacggcagaagcgtatctgggccagaaagtgaaggacgccgtcatcacagttcccgcctacttcaacgactctcagcgtcaggccaccaaagacgcaggtgtcatcgccggactgaacgttctgcgcatcatcaacgaacccaccgctgctgcaattgcttatgggcttgacaaaaaagtaggcggtagaggagaacgtaatgttttgatcttcgacctcggcggcggaaccttcgatgtgtcgatccttagcatcgatgaaggcgtcttcgaggtaaagtctactgccggagatactcacttgggcggcgaagattttgacaacagaatggtgaaccacttcaaacaagagttccagagaaaatacaagaaagatttaggtggcaataaacgagctgttcgtcgactgagaactgcctgcgagagagccaaacgaactctttcatcctccactcaggccagcgtggagatcgactctctgttcgagggtattgactattacacgtccatcacccgcgccaggtttgaagagctgtgttcagacctcttccgagggacactagagccagtggagaaggctttgagagacgcaaagatagacaaagctggcatccatgaactggtgttggtgggagggtctacccgcatcccaaagatacaaaaattgctgcaagacttattcaacggaaaggaactcaacaaatcaatcaacccagacgaggcggtggcctacggtgctgccgtacaagcggccatcctacacggagaccagtctgagggcgtgaaggatgttctcctgctggacgtggcgcctctgtcgctgggtatagagacagcaggtggagtgatgacagctctcatcaaacgcaacacaaccatcccaaccaagcaacagcaagtattcaccacgtattctgacaaccagccaggtgtgttgatccaggtgtatgaaggagagcgagccatgacaaaagacaacaatcttttgggcaagtttgaattgagtggcatccctcccgcacctcgcggagtgcctcagatcgaagtaaccttcgacatcgatgctaatggcatccttaacgtatctgcggccgacaagtcgaccggcaaggagaacaagatcaccatcaccaatgacaagggtcgccttagtaaagaagagatagagagaatggtaaacgaagcagagaaataccacgaagacgacgccaaacaacgagaaagagtggaagccaagaaccgcttagaggctctgtgcttcagcatcaagtcggcagtctctgaaccttcagttggcgacaaactctcagccgaggagaagagatccgtcgaggagaaagctcaagaaactctcaactggctggacgccaaccagctggcagagaaggaggaatacgagcaccagatgaaggagttggagagagtgtggcgtcctctggccagcaaggtgcatgggcagggcgccggcggaggccagggaggagcttccgctagctcgggacccacagtcgaggaggtcgactag

SEQ ID NO: 48507 - protein, 635 aa, Procambarus clarkii
MADPVIGIDLGTTYSCVGVFQQGKVEIIANDQGNRTTPSYVALTDTERLIGDAAKNQTALNPSNTIFDAKRLIGRKFNDPTVQNDKKHWPFDVVDSNGKPKIQVEYKGERKTFNPEEISSMVLTKMKETAEAYLGQKVKDAVITVPAYFNDSQRQATKDAGVIAGLNVLRIINEPTAAAIAYGLDKKVGGRGERNVLIFDLGGGTFDVSILSIDEGVFEVKSTAGDTHLGGEDFDNRMVNHFKQEFQRKYKKDLGGNKRAVRRLRTACERAKRTLSSSTQASVEIDSLFEGIDYYTSITRARFEELCSDLFRGTLEPVEKALRDAKIDKAGIHELVLVGGSTRIPKIQKLLQDLFNGKELNKSINPDEAVAYGAAVQAAILHGDQSEGVKDVLLLDVAPLSLGIETAGGVMTALIKRNTTIPTKQQQVFTTYSDNQPGVLIQVYEGERAMTKDNNLLGKFELSGIPPAPRGVPQIEVTFDIDANGILNVSAADKSTGKENKITITNDKGRLSKEEIERMVNEAEKYHEDDAKQRERVEAKNRLEALCFSIKSAVSEPSVGDKLSAEEKRSVEEKAQETLNWLDANQLAEKEEYEHQMKELERVWRPLASKVHGQGAGGGQGGASASSGPTVEEVD

SEQ ID NO: 48508 - DNA, 1881 bp, Plutella xylostella
  CDS (1)..(1881)
atggcaacgaaagcacccgcagtaggaatcgacctgggaaccacgtactcttgcgtgggagtgttccagcatgggaaggtggagatcatcgccaacgaccagggcaaccgcaccacgccctcgtacgtcgccttcaccgacaccgagcgtctcatcggagacgccgccaagaaccaggtggcgatgaaccccaacaacaccatcttcgatgccaagcgtcttattggacgcaagtttgaagatgctaccgtccaagccgacatgaagcactggccttttgaagtggtcagtgatggaggcaagccaaagatcaaggtagcatacaagggagaagacaaaaccttcttccctgaagaagttagctcaatggtgcttacaaaaatgaaggaaactgctgaggcttacctcggtaaaacggtgcagaatgcagtaatcacggttcccgcctatttcaatgactcacaaaggcaggccacaaaagattcgggtacgatctctggcttaaatgttctccgtattatcaacgaaccgactgctgctgcgattgcttacggtctcgacaagaagggaggtggcgaacgtaacgttctcattttcgaccttggtggcggcacctttgatgtgtccatcctgaccatcgaggatggtatctttgaagtcaagtctaccgccggtgacactcacttgggaggtgaagacttcgacaaccgcatggtcaaccacttcgtgcaggagttcaagaggaagtacaagaaggacctcaccaccaacaagagggccctgaggcgactccgcaccgcctgcgagagggcgaagagaactctctcttcctccacccaggcgagcattgaaattgactccctgtatgagggtattgacttctacacatccatcaccagggctcgttttgaagagctgaacgctgacctgttccgttccaccatggagccggtcgagaagtcgctccgtgacgccaagatggacaaggcccagatccacgacattgtgcttgtcggcggctccactcgtatcccgaaggtacagaagctgctgcaggacttcttcaatggcaaggagctgaacaagtccatcaaccccgacgaggccgtggcgtacggcgccgccgtgcaggccgccatcctgcacggagacaagtctgaggaggtgcaggacctgctgctgctggacgtgaccccgctgtcgctcggaatcgagaccgccggaggagtcatgaccacgctcatcaagcgcaacaccaccatccccaccaagcagactcagaccttcaccacctactccgacaaccagcccggagtgctcatccaggtgttcgagggcgagcgtgccatgaccaaggacaacaacctcctgggcaagttcgagctgaccggcatcccgccggcgccgcgcggcgtgccccagatcgaggtcacgttcgacatcgacgccaacggtatcctcaacgtgagcgccatcgagaagtccaccaacaaggagaacaagatcaccatcaccaacgacaagggtcgcctgtcgaaggaggacatcgagcgcatggtcaacgaggcagagaagtaccgcaacgaggatgagaagcagaaggagacgatcggcgccaagaacgcgctcgagtcgtactgcttcaacatgaagtctaccatggaggacgagaagctcaaggacaagatcaccgactccgacaagcagatcatcctggacaagtgcaacgacaccatcaagtggctcgactccaaccagctggctgacaaggaggagtacgagcacaagcagaaggagctcgagggcatctgcaacccaatcatcaccaagctgtaccccggcgccggaggtgctggccctaccatcgaggaggtcgactaa

SEQ ID NO: 48509 - protein, 626 aa, Plutella xylostella
MATKAPAVGIDLGTTYSCVGVFQHGKVEIIANDQGNRTTPSYVAFTDTERLIGDAAKNQVAMNPNNTIFDAKRLIGRKFEDATVQADMKHWPFEVVSDGGKPKIKVAYKGEDKTFFPEEVSSMVLTKMKETAEAYLGKTVQNAVITVPAYFNDSQRQATKDSGTISGLNVLRIINEPTAAAIAYGLDKKGGGERNVLIFDLGGGTFDVSILTIEDGIFEVKSTAGDTHLGGEDFDNRMVNHFVQEFKRKYKKDLTTNKRALRRLRTACERAKRTLSSSTQASIEIDSLYEGIDFYTSITRARFEELNADLFRSTMEPVEKSLRDAKMDKAQIHDIVLVGGSTRIPKVQKLLQDFFNGKELNKSINPDEAVAYGAAVQAAILHGDKSEEVQDLLLLDVTPLSLGIETAGGVMTTLIKRNTTIPTKQTQTFTTYSDNQPGVLIQVFEGERAMTKDNNLLGKFELTGIPPAPRGVPQIEVTFDIDANGILNVSAIEKSTNKENKITITNDKGRLSKEDIERMVNEAEKYRNEDEKQKETIGAKNALESYCFNMKSTMEDEKLKDKITDSDKQIILDKCNDTIKWLDSNQLADKEEYEHKQKELEGICNPIITKLYPGAGGAGPTIEEVD

SEQ ID NO: 48510 - DNA, 1935 bp, Chlorella pyrenoidosa
  CDS (1)..(1935)
atgagctccccagccatcggcatcgacctgggcactacttacagctgcgtgggtctctggcagcatgaccgtgtagagatcattgccaacgagcagggaaaccgcaccacgccctcctatgtggccttcaccgacactgagcgcctgattggcgatgctgccaagaaccaggtggcaatgaaccccatcaacactgttttcgatgccaagcgcctgatcggtcgcaagttctccgaccccaccatccagcacgacatctcgcactggcccttcaaggtggttgctgggcccggcgacaaacccatgatccaggtgtcttacaagggcgaggacaagacgttcgcacctgaggagatctcctccatggtgctggtcaagatgaaggagattgcgcaggcatacgtgggtgccgacaaggaggtgaagaaggcggtggtcaccgtgcccgcctacttcaacgactcgcaacgccaagccaccaaggacgctggtgttattgctggcctggaggtgatgcgcatcatcaacgagcccacagcagctgccatcgcttacggcctggacaagaagggcaccaccagcggcgagcaaaacgtgctcatttttgatctgggtggtggcacttttgatgtttccctgcttaccatcgaggagggcatcttcgaggtgaaggccaccgcgggggacacccacctgggcggtgaggactttgacaaccgcctggtgaacttttttgtccaggagttcaagcgcaagtacaagaaggacatttcctccaacccccgcgcgctgcgccgcctgcgcacatcatgcgagcgtgccaagcgcaccctgtcctcctcgacccaggcctccattgaaatcgactcactgtatgagggcatcgatttctactcgtccatcacccgcgcccgctttgaagagctcaacatggacctgttccgcaagtgcatggagcctgtggagaaggtgctgcgcgatgccaaaatggacaagggccaagtgaacgaggtggtgcttgtcggcggctctacccgcatccccaaggtgcagcagctgctccaggacttcttcaatggcaaggagctttgcaagtccatcaacccggatgaggcggttgcctatggagcagcagtgcaggcagccattctgaatggcgagacgcacgagaaggtgcaggacctgctgctgctggatgtcatccccctgtctttgggcctggagacggcgggtggtgtgatgaccgtgctcatctcgcgtaacacaaccatccccaccaagaaggagcaggtcttctccacctactctgacaaccagcctggcgtactcatccaggtgtacgagggtgaacgctcccgcaccaaggacaacaacctgctgggcaaatttgagctgactggcatcccgcccgcgccccgcggcgtaccccagatcaacgtgaccttcgatgtggatgccaacggcatcctgaatgtgtctgctgaggacaagaccacgggcaacaagaacaagatcactatcactaatgacaagggtcgcctcagcaaggaggagatcgagcgcatggtccaggaggcagagaagtacaaggcagaggacgaaacccatcgcgctcgggtggaggctcgcaacggcctggagaactacgcatactccatgcgaaacaccattaaggatgccaacctggcagacaagctgagcgccgaggagaaggagaagattgagaaggcagtggacaaggtcgttgaatggctcgatcacaaccagctggccgaggaggaggaaattacgcaccagcggaccgagctggagggtgtgtgcaacccaatcattaccaagctgtaccagggtggcgctgtgccgccggacgcggccggcgctgcccccgcctctgcggcaggtggtcagggccccaccattgaggaggtggactaa

SEQ ID NO: 48511 - protein, 644 aa, Chlorella pyrenoidosa
MSSPAIGIDLGTTYSCVGLWQHDRVEIIANEQGNRTTPSYVAFTDTERLIGDAAKNQVAMNPINTVFDAKRLIGRKFSDPTIQHDISHWPFKVVAGPGDKPMIQVSYKGEDKTFAPEEISSMVLVKMKEIAQAYVGADKEVKKAVVTVPAYFNDSQRQATKDAGVIAGLEVMRIINEPTAAAIAYGLDKKGTTSGEQNVLIFDLGGGTFDVSLLTIEEGIFEVKATAGDTHLGGEDFDNRLVNFFVQEFKRKYKKDISSNPRALRRLRTSCERAKRTLSSSTQASIEIDSLYEGIDFYSSITRARFEELNMDLFRKCMEPVEKVLRDAKMDKGQVNEVVLVGGSTRIPKVQQLLQDFFNGKELCKSINPDEAVAYGAAVQAAILNGETHEKVQDLLLLDVIPLSLGLETAGGVMTVLISRNTTIPTKKEQVFSTYSDNQPGVLIQVYEGERSRTKDNNLLGKFELTGIPPAPRGVPQINVTFDVDANGILNVSAEDKTTGNKNKITITNDKGRLSKEEIERMVQEAEKYKAEDETHRARVEARNGLENYAYSMRNTIKDANLADKLSAEEKEKIEKAVDKVVEWLDHNQLAEEEEITHQRTELEGVCNPIITKLYQGGAVPPDAAGAAPASAAGGQGPTIEEVD

SEQ ID NO: 48512 - DNA, 2040 bp, Chlamydomonas reinhardtii
  CDS (1)..(2040)
atgccggttcagcagatgacttctatgcgcagccagtccctggctggcgctccagtggcacccgtcaaggcgggccgcgctggcgtttcgcgccgtgccctggccgtcagcgtccgtgctgagaaggtcgtgggtatcgatctgggcacgaccaactcggctgtggctgccatggagggtggcaagccgaccatcatcaccaacgctgagggcggccgcaccaccccctcggtggtggcgttcaccaagaccggcgaccgtctggttggccagattgccaagcgccaggctgtggtcaaccccgagaacactttcttctccgtaaagcgcttcatcggccgccgcatgtcggaggtcggctcggagtccacccaagtgccttaccgggtgattgaggacggcggcaacgtgaagatcaagtgccccaacgccggtaaggacttcgctcccgaggagatcagcgcgcaggtgctgcgcaagctgacggaggacgccgccaagttcctgaacgacaaggtggagaaggcggtcatcaccgtgcccgcctacttcaatgactcccagcgccaggccaccaaggacgcgggcaagattgccggtctggaggtgctgcgcatcatcaacgagcccaccgccgcctcgctggcgtacggctttgacaagaaggccaacgagaccatcctggtgttcgaccttggcggcggcaccttcgatgtgtcagtgctggaggtgggcgacggcgtgttcgaggtgctgtccaccagcggcgacacccacctgggcggtgacgacttcgacaagcgcatcgtggacttcctggctgatgacttcaagaagagcgagggcattgacctgcgcaaggaccgccaggcgctacagcgcctgaccgaggcggccgagaaggccaagattgagctgtcgggaatggcccagacctccatcaacctgcccttcattactgccaccgccgatggtcccaagcacatcgacacccagctgacccgcgccaagttcgaggagatgtgcaacgacctgctggagcgctgcaaggtgccggtgcagcaggccctgcgcgatgccaagctgtccatcagcgacatccaggaggtcatcctggtgggcggctccacccgcatccccgcggtgcaggagattgtgcgcaagctgtcgggcggcaaggaccccaacgtgacggtcaaccccgacgaggtggtggctctgggcgcggcggtgcaggccggtgtcctggccggcgaggtgtcggacatcgtcctgctggacgtgaccccgctgtcgctgggcctggagaccctgggcggcgtcatgaccaagctcatcccccgcaacaccaccctgcccacctccaagtctgaggtcttctccaccgccgccgacggtcagacttcggtggagatcaacgtgctgcagggcgagcgcgagtttgcccgcgacaacaagtcgctgggcaccttccgcctggacggcatcccgcccgcgccccgcggtgtgccccagattgaggtcaagttcgacattgacgcgaacggcatcctgtccgtgaccgccaccgacaagggcactagcaagaagcaggacatccgcatcaccggcgcctccaccctggacaagggcgacgtggagcgcatggtcaaggaggcggagaagttcgccggcgaggacaagaagcgccgcgagagcgtggagaccaagaaccaggcggagaccatggtgtaccagaccgagaagcagctcaaggagtttgagggcaaggtgccggccgacattaaggccaaggtggaggccaagctgggcgagctcaaggcggcgctgccggccgacgatgctgaggccaccaaggccgccatgaacgcgctgcagcaggaggtgatggctatgggccaggccatgtacagccaggctggcgctgcgccaggcggcgccccgggcgctgagcccggcgccggcgcgggcgcgggtggcgcccccggcggcaagaaggacgacgacgtcattgacgccgagttcactgacaagaagtaa

SEQ ID NO: 48513 - protein, 679 aa, Chlamydomonas reinhardtii
MPVQQMTSMRSQSLAGAPVAPVKAGRAGVSRRALAVSVRAEKVVGIDLGTTNSAVAAMEGGKPTIITNAEGGRTTPSVVAFTKTGDRLVGQIAKRQAVVNPENTFFSVKRFIGRRMSEVGSESTQVPYRVIEDGGNVKIKCPNAGKDFAPEEISAQVLRKLTEDAAKFLNDKVEKAVITVPAYFNDSQRQATKDAGKIAGLEVLRIINEPTAASLAYGFDKKANETILVFDLGGGTFDVSVLEVGDGVFEVLSTSGDTHLGGDDFDKRIVDFLADDFKKSEGIDLRKDRQALQRLTEAAEKAKIELSGMAQTSINLPFITATADGPKHIDTQLTRAKFEEMCNDLLERCKVPVQQALRDAKLSISDIQEVILVGGSTRIPAVQEIVRKLSGGKDPNVTVNPDEVVALGAAVQAGVLAGEVSDIVLLDVTPLSLGLETLGGVMTKLIPRNTTLPTSKSEVFSTAADGQTSVEINVLQGEREFARDNKSLGTFRLDGIPPAPRGVPQIEVKFDIDANGILSVTATDKGTSKKQDIRITGASTLDKGDVERMVKEAEKFAGEDKKRRESVETKNQAETMVYQTEKQLKEFEGKVPADIKAKVEAKLGELKAALPADDAEATKAAMNALQQEVMAMGQAMYSQAGAAPGGAPGAEPGAGAGAGGAPGGKKDDDVIDAEFTDKK

SEQ ID NO: 48514 - DNA, 2511 bp, Cucumis sativus
  CDS (101)..(2224)
aactcttctctctcaatttcccagcgacttcttcctttttcattcttaattcaatccatttctcttctctttccctcctttctctgcaatttcttccttaatgggtgcatctaccgctcagatccatggcctcggagctccttcctttgctgcggcctccatgcgcaaatctaacaacgtttcttcacgctctgtcttcttcggccagaaactcggcaactcttctgcttttcctgccgccgcttttttgaatttgagaagtaatactagccgtaggaattccagtgtcaggccattgaggattgttaacgagaaagttgtgggaattgatcttggaactactaactctgctgttgccgccatggaaggtgggaagcccactattgtaactaatgctgaaggacagagaacgacgccatcggtggtggcttacacgaaaaatggagataggcttgtgggtcaaattgccaaacggcaggcagttgtaaatcccgagaatactttcttttcggtgaagaggttcattggtagaaagatgtcggaggtggatgaggagtctaagcaggtctcctaccgagtagagcgcgatgagaatggaaatgtgaagctggaatgtcccgcgattggaaaacaatttgccgctgaagaaatttcagctcaggtcttaaggaagctagtggatgatgcttcgaagtttttgaatgataaagtaacgaaggctgtggtgacagtgcctgcctactttaatgattctcaaagaacggccacgaaggatgctggtcgtattgctggtcttgaagttttgcgtattatcaatgaacccactgccgcttcattagcttatggatttgagaagaagagcaatgaaacgatcttggtgtttgatcttggtggtggtacttttgatgtttcagtgcttgaagtgggcgatggagtgtttgaagtgctttctacatcaggggatacacatttgggtggtgatgacttcgacaagagaattgttgactggcttgctgcaaatttcaaaagggatgaaggcattgatttgttgaaagacaagcaggcccttcagcggctaactgagacagctgagaaagccaaaatggagctgtcatctttgacccaggccaacattagtttgcctttcatcactgccacggcagatggccccaagcacattgagaccacaattacaagggccaagtttgaggaattgtgttcagatcttcttgataggctgaagactccagttgaaaactccttaagggatgcaaaactctccttcaaggatattgatgaggtgattcttgtcggtggatcaacccgtattcctgccgttcaggaactcgtcaagaagatgactgggaaggaaccaaatgtgactgtcaatcctgatgaagttgttgcattaggtgctgctgttcaggctggtgttttggctggagacgttagtgacattgtgctattggatgtgagtccgctatctttgggtcttgagactcttggtggtgtaatgaccaaaattatccccagaaacactacacttcctacctcaaagtccgaggtcttctcgacagctgctgatggtcagacaagtgtcgagattaatgttcttcaaggagaacgagaatttgtgagggacaacaaatcacttggtagcttccgactagacggcattccccctgcaccacgtggggtgcctcagattgaagtcaaattcgatatcgatgccaatggaatcctctcggttactgcaattgacaaaggctctggcaagaagcaagatatcaccattactggtgctagcacattgcctagtgatgaggtggagcggatggttagcgaagctgataagtttgccaaggaggacaaggagaagagagatgccatcgatacgaagaaccaggctgattctgttgtgtatcagacagagaagcaactgaaggagcttggagacaaagtgcctgggccagtgaaggagaaggtggaatcaaaacttggggaattgaaggaggcaatttcaggtggctcaaccgaggccattaaggaagcaatggctgctctaaatcaagaggtgatgcaactgggacaatccttgtacaatcagcctggtgctggtgctgctcctggaccgggtgctagcagcgaatcagggccatcggaatcaacaggcaaaggacccgaaggagatgtcattgatgccgattttagtgacagcaaatgaaaagattaaaatttgttttcccccctattctgaatagaaaattttgctctcaacgggctcggatttgtattccgatttgatttttctggggcaggattggattggggtgttggtttgagaaaattgttggtagccactgtcccattgatattagcttttataaaataggtgatctctataagagtaaaatgctttacatggacactataagtagaatttgaggcggcagctgtaacttccaaaatttttccatacggttgtgtttcatgtttactgctactactgca

SEQ ID NO: 48515 - protein, 707 aa, Cucumis sativus
MGASTAQIHGLGAPSFAAASMRKSNNVSSRSVFFGQKLGNSSAFPAAAFLNLRSNTSRRNSSVRPLRIVNEKVVGIDLGTTNSAVAAMEGGKPTIVTNAEGQRTTPSVVAYTKNGDRLVGQIAKRQAVVNPENTFFSVKRFIGRKMSEVDEESKQVSYRVERDENGNVKLECPAIGKQFAAEEISAQVLRKLVDDASKFLNDKVTKAVVTVPAYFNDSQRTATKDAGRIAGLEVLRIINEPTAASLAYGFEKKSNETILVFDLGGGTFDVSVLEVGDGVFEVLSTSGDTHLGGDDFDKRIVDWLAANFKRDEGIDLLKDKQALQRLTETAEKAKMELSSLTQANISLPFITATADGPKHIETTITRAKFEELCSDLLDRLKTPVENSLRDAKLSFKDIDEVILVGGSTRIPAVQELVKKMTGKEPNVTVNPDEVVALGAAVQAGVLAGDVSDIVLLDVSPLSLGLETLGGVMTKIIPRNTTLPTSKSEVFSTAADGQTSVEINVLQGEREFVRDNKSLGSFRLDGIPPAPRGVPQIEVKFDIDANGILSVTAIDKGSGKKQDITITGASTLPSDEVERMVSEADKFAKEDKEKRDAIDTKNQADSVVYQTEKQLKELGDKVPGPVKEKVESKLGELKEAISGGSTEAIKEAMAALNQEVMQLGQSLYNQPGAGAAPGPGASSESGPSESTGKGPEGDVIDADFSDSK

SEQ ID NO: 48516 - DNA, 2239 bp, Glycine max
  CDS (90)..(2090)
ggcacgagaccttttctacttataatcttaacaattgcagcagaagaagataaagaaagagaaaaagtgtgtgtgtgtgagagagagcaatggctggctcgtgggcacgccgttctctgattgttctggctatcatttccttcggatgtttatttgcaatttccattgctaaggaggaagccacaaaattggggacggtcatcgggattgatctgacgacctattcatgtgttggtgttacagacgcagttgaaatcatagccaatgatcaaggtaaccgtatcaccccatcgtgggttgctttcaccgacagtgagagactaattggagaggctgccaagatcgtggcagctgtcaacccagtaaggaccatctttgatgtcaagagacttattggaagaaagttcgaagataaggaagttcaaagagatatgaagcttgttccttataagattgtcaacaaggatggaaaaccttacatacaagtgaaaattaaggatggtgagaccaaggtgttcagccctgaggaaatcagtgccatgattctgactaagatgaaggaaactgcggaagcattccttggaaagaaaattaatgatgccgtggtcactgtcccagcttacttcaatgatgctcagaggcaggccaccaaggatgctggtgtcattgctggtctcaatgttgctagaattatcaatgaacccactgctgctgccattgcctatggattggacaagaaaggtggcgagaagaacattctagtctttgatcttggtggtgggacctttgatgtcagtatcttgacaattgataatggtgtttttgaagttcttgacacaaatggagatactcatcttggaggtgaggactttgatcagagaataatggagtacttcattaaattgatcaagaaaaagcatggaaaggatattagcaaggacaacagagcacttggcaagctgaggagagaggctgagcgtgcaaagagggctctcagcagccagcaccaggtccgcgtggaaattgaatcactttttgatggtgttgatttttctgagccactcacccgagctcgttttgaggagttgaacaatgatttgttccggaagaccatggggccagtgaagaaggctatggaagatgcaggattacagaagagtcagattgatgagattgttcttgttggtggaagcacaaggattccaaaggtacaacagcttttgaaggactactttgatggaaaggagccaaacaagggtgtcaaccctgatgaagcagttgcctatggtgctgcagtgcaaggaagcattttgagtggagagggtggtgaagaaaccaaagacatccttctcctggatgtggctcccctcactctcggaattgaaactgttggtggagtcatgacaaagttgattcccagaaacactgttatccaaccgaagaaatctcaggtgttcaccacctatcaggaccagcagactacagtctccattcaggttttcgaaggcgagaggagtctcacaaaggattgccgccttcttgggaaatttgatctgtctggaattcctccagcaccaagggggacgcctcaaattgaagtgaccttcgaagttgatgccgaacgcggcattctaaatgtgaaggctagaagagctaagggcactggtaaatcagaaagatcaccgattagcaacgaaaagggacgtcttagccaggaagaaattgagagaatggttcgcgaagcagaggagtttgcagaggaagacaagaaggtgaaggagaggatcgatgctcgcaacagtcttgaaacctatgtatacaacatgaagaaccagatcagtgacaaggacaagctcgctgacaagttggagtctgatgaaaaggagaaaattgagactgctgtgaaagaagcactggaatggctggatgacaaccagagtatggagaaagaagattatgaagagaagctgaaggaggaagccgtttgcaacccaatcattagtgctgtgtatcagagatctggaggagccccaggcggtggtggtgcatcaggcgaagaagacgaggacgattctcacgatgagctctagttagtcggagtctgttaaatttttatgatagctggaattaagaagtcccctgcgcttgcttttttggtggcgatgataagatactttgtgaaattacttgtactttacttttttgttagttttacgacgcaacttcctcgtgccgatcg

SEQ ID NO: 48517 - protein, 666 aa, Glycine max
MAGSWARRSLIVLAIISFGCLFAISIAKEEATKLGTVIGIDLTTYSCVGVTDAVEIIANDQGNRITPSWVAFTDSERLIGEAAKIVAAVNPVRTIFDVKRLIGRKFEDKEVQRDMKLVPYKIVNKDGKPYIQVKIKDGETKVFSPEEISAMILTKMKETAEAFLGKKINDAVVTVPAYFNDAQRQATKDAGVIAGLNVARIINEPTAAAIAYGLDKKGGEKNILVFDLGGGTFDVSILTIDNGVFEVLDTNGDTHLGGEDFDQRIMEYFIKLIKKKHGKDISKDNRALGKLRREAERAKRALSSQHQVRVEIESLFDGVDFSEPLTRARFEELNNDLFRKTMGPVKKAMEDAGLQKSQIDEIVLVGGSTRIPKVQQLLKDYFDGKEPNKGVNPDEAVAYGAAVQGSILSGEGGEETKDILLLDVAPLTLGIETVGGVMTKLIPRNTVIQPKKSQVFTTYQDQQTTVSIQVFEGERSLTKDCRLLGKFDLSGIPPAPRGTPQIEVTFEVDAERGILNVKARRAKGTGKSERSPISNEKGRLSQEEIERMVREAEEFAEEDKKVKERIDARNSLETYVYNMKNQISDKDKLADKLESDEKEKIETAVKEALEWLDDNQSMEKEDYEEKLKEEAVCNPIISAVYQRSGGAPGGGGASGEEDEDDSHDEL

SEQ ID NO: 48518 - DNA, 1914 bp, Mytilus galloprovincialis
  CDS (1)..(1914)
atggcaggaaaaggtccagcaatcggaattgatttaggaacaacatactcttgtgttggtgttttccagcatggcaaagtagacatcatagccaacgaccagggtaacagaacaactccaagttatgtggctttcacggatactgaaagactggttggtgatgcagctaaaaatcaagtcgcattgaacgctacaaatacaatattcgatgccaagagactgatcggcagaaattttagtgattcgacagttcagtcagacataaaacattggccattcaaagtcatcaacagcggaggcaagccaaaactacaagctgaacacaaaggagaaacaaaaacatttacaccagaagaaataagttcaatggtattggttaaaatgaaagaaactgccgaggcttatctcggacagaaagttacagatgccgtcatcacagtacctgcatactttaatgattctcaaagactagccacaaaggatgctggtttcattgcaggacttaacgtactacgaataataaatgagccaacagctgctgctctagcttatggtctggacaagaatttatcaggcgagaaaaacgttttaatatttgatttgggaggaggaacattcgacgtttctatacttacgatagacgagggttctttatttgaagttcgctcaacagccggagatactcaccttggtggcgaagactttgacaacagaatggtcaatcattttgtaaatgaattcaagagaaaatgtggtaaagacatttctggaaacaatcgtgcactcagaagattgagaactgcttgtgagaaagcaaagagaacattatcaagcagtacagaggcaaacgttgagatagactcattgtttgagggaacagacttttacacaaaaataacaagagcacggtttgaagaactgtgctcagatttgttcagaacaacactggaaccagttgaaaaagctttaagagacgctaaacttgataaaagtagtattcaagagattgtacttgtcggaggttcaacaaggataccaaaaatacagaaaatgctgtcagaatttatgaatggtaaagaacttaataaatctgtcaatccagatgaagctgttgcttacggtgcagccgtccaagctgctatcctgtcaggcgatcgtagcgacactatcaaagatgtacttttagttgacgtagctccattgtcccttggtattgaaactgcaggtggtgtaatggccaaactaattgacaggaatacaaaaatccctacaaaggcttcacagatatttacaacatattccgacaaccaaccagcagttagcattcaggtttttgaaggtgaaagggctatgaccaaagacaataatcatttaggaaagtttgatctcactggtatacctccagctcctcgaggtgtgccgaagattgaagtggaattcgatattgatgcaaacggacttttaaatgtttcggctaaagaccaaagcagtggaaattccaagaaaattacaatcaccaatgacagaggaagactcagtaaagaggacattgatcgaatggtttctgatgctgagaaatataaagaagaagatgaaaaacaaacccagcgtataacttcaagaaatcaattagaaaactacatattcagtgttaagcaagctatcggagattctggagacaagctgtcaacacaggacaaagatgatttaggcaaagcctgcgaagagtcacttaaatggttggacaataattctctagcagagaaagaagaatacgatgacaaaatgaaagaactacagaaaatatgtacccctgtcatgtcaaaacttcatggtggtgctcaaaatggacaatcaaatagcacaggaggacaaagcacatctaatggacctactgtagaagaagttgattaa

SEQ ID NO: 48519 - protein, 637 aa, Mytilus galloprovincialis
MAGKGPAIGIDLGTTYSCVGVFQHGKVDIIANDQGNRTTPSYVAFTDTERLVGDAAKNQVALNATNTIFDAKRLIGRNFSDSTVQSDIKHWPFKVINSGGKPKLQAEHKGETKTFTPEEISSMVLVKMKETAEAYLGQKVTDAVITVPAYFNDSQRLATKDAGFIAGLNVLRIINEPTAAALAYGLDKNLSGEKNVLIFDLGGGTFDVSILTIDEGSLFEVRSTAGDTHLGGEDFDNRMVNHFVNEFKRKCGKDISGNNRALRRLRTACEKAKRTLSSSTEANVEIDSLFEGTDFYTKITRARFEELCSDLFRTTLEPVEKALRDAKLDKSSIQEIVLVGGSTRIPKIQKMLSEFMNGKELNKSVNPDEAVAYGAAVQAAILSGDRSDTIKDVLLVDVAPLSLGIETAGGVMAKLIDRNTKIPTKASQIFTTYSDNQPAVSIQVFEGERAMTKDNNHLGKFDLTGIPPAPRGVPKIEVEFDIDANGLLNVSAKDQSSGNSKKITITNDRGRLSKEDIDRMVSDAEKYKEEDEKQTQRITSRNQLENYIFSVKQAIGDSGDKLSTQDKDDLGKACEESLKWLDNNSLAEKEEYDDKMKELQKICTPVMSKLHGGAQNGQSNSTGGQSTSNGPTVEEVD

SEQ ID NO: 48520 - DNA, 1971 bp, Homarus americanus
  CDS (1)..(1971)
atggcaaaaacgactgcagttggaattgatttgggcaccacctattcctgtgtaggagtgttccagcatgggaaggtggaaatcatcgccaatgatcagggtaatcgcactaccccttcctatgtggccttcacagacacagagcgtctcattggagatgctgccaagaaccaggtggccatgaaccctaacaacacagtcttcgacgcaaaacgtcttattggcagaaagttcgatgatcacaatgtgcagagcgacatgaaacattggccctttgaagtgatcaacgagaacacaaaaccaaagattcaagtagagtataagggagacaagaaaactttctatcctgaagaaatttcctcaatggtgcttatcaagatgaaagaaacggctgaagcatacctcggtacgacagtgaaggatgctgtagttactgttcctgcatattttaatgattctcagcgccaggcaaccaaggacgctggcaccatctccggtctaaacgtgctgcgtatcatcaatgaacccaccgccgctgccatcgcttacggtctagacaaaaaagtaggcggtgagcgtaatgtcctcatcttcgatcttggcggtgggaccttcgacgtttccatcctgaccatcgaggatggaatctttgaagtaaaatctactgcaggtgatacacatttaggtggcgaagatttcgacaaccgtatggttaatcacttcctacaagagttcaagcgaaagtacaaaaaggatccccaagaaaacaaacgtgcccttcgtcgtctccgtactgcctgtgagcgtgcgaagcgtactctatcatcctcaactcaggccagtgtagaaatagattccttgtttgagggcatcgacttctacacttctgttactcgtgcccgtttcgaagaattgtgcgccgatttattccgtggaacactagaacctgtggagaaagctcttcgtgatgccaagatggacaaggcccagatccacgacatcgttctggttggaggttctacccgtatccccaagatccagaagctattgcaagacttcttcaatggcaaggaattgaacaagtctatcaatcctgatgaagctgtggcttatggtgctgctgtccaggctgccatcttgtgtggtgacaagtcggaagctgtgcaagacttgttgctgctcgacgtaactcccctctccttgggtattgaaactgcaggtggagtgatgactgccctcatcaagcgtaacaccactattcccactaagcaaacacaaactttcactacctactctgacaaccaaccaggtgtacttattcaagtttacgagggtgagcgtgcaatgacgaaggacaacaatcttcttggtaagttcgagttgactggcatcccacctgcaccacgaggagtaccacagattgaggtgaccttcgatattgatgccaacggtatcctgaatgtgtctgcagtagacaagagtaccggtaaggaaaacaagataacaatcaccaacgacaagggccgcctcagcaaagaggaaatcgaacgtatggtccaagatgcggagaagtacaaggccgaggatgagaagcaaagggatcgcatctctgccaagaattctttggagtcttattgtttcaatatgaagtcaacagtggaagaagacaagttcaaggataaagtttcagaagaggaccgtaacaagatcctagaagcttgtaatgatgcaatcaaatggctagatgcaaaccagctaggcgagaaggaggaatatgaacacaagcagaaggaaattgagcagatctgcaaccccatcattaccaagatgtaccaagcggctggaggtgctcctcccggaggcatgccaggtggtatgcctggaggcttccctggtgctcctggaggtgcccctggtgctgcccctggaggtggtggctcgtctggcccaaccatcgaggaagtcgattaa

SEQ ID NO: 48521 - protein, 656 aa, Homarus americanus
MAKTTAVGIDLGTTYSCVGVFQHGKVEIIANDQGNRTTPSYVAFTDTERLIGDAAKNQVAMNPNNTVFDAKRLIGRKFDDHNVQSDMKHWPFEVINENTKPKIQVEYKGDKKTFYPEEISSMVLIKMKETAEAYLGTTVKDAVVTVPAYFNDSQRQATKDAGTISGLNVLRIINEPTAAAIAYGLDKKVGGERNVLIFDLGGGTFDVSILTIEDGIFEVKSTAGDTHLGGEDFDNRMVNHFLQEFKRKYKKDPQENKRALRRLRTACERAKRTLSSSTQASVEIDSLFEGIDFYTSVTRARFEELCADLFRGTLEPVEKALRDAKMDKAQIHDIVLVGGSTRIPKIQKLLQDFFNGKELNKSINPDEAVAYGAAVQAAILCGDKSEAVQDLLLLDVTPLSLGIETAGGVMTALIKRNTTIPTKQTQTFTTYSDNQPGVLIQVYEGERAMTKDNNLLGKFELTGIPPAPRGVPQIEVTFDIDANGILNVSAVDKSTGKENKITITNDKGRLSKEEIERMVQDAEKYKAEDEKQRDRISAKNSLESYCFNMKSTVEEDKFKDKVSEEDRNKILEACNDAIKWLDANQLGEKEEYEHKQKEIEQICNPIITKMYQAAGGAPPGGMPGGMPGGFPGAPGGAPGAAPGGGGSSGPTIEEVD

SEQ ID NO: 48522 - DNA, 1953 bp, Pachygrapsus marmoratus
  CDS (1)..(1953)
atgtccaagggagcagcagtgggtattgacctgggaaccacctactcctgcgtgggtgtgttccagcatggcaaggtggagattatcgccaacgaccagggcaacagaacaacgccctcctatgtggccttcacagacaccgagcgtctcatcggtgacgctgccaagaaccaggtagcaatgaaccccaacaacaccgtattcgatgcaaagagactcatcggcaggaagttcaacgatcacaacgtccagagcgacatgaagcactggccattcgacgtgattgacgacaacacaaagccaaagatcaaagtagaatacaagggagaggccaaatccttctaccccgaggagatttcatccatggtgctgatcaagatgaaggagactgccgaagcgtaccttggcagcgtcgtaaaggacgctgtcgtcactgtcccggcctacttcaacgactcccagcgtcaagccaccaaggacgccgggaccatctctggtctcaatgtgctgcgtatcatcaacgaacccaccgccgccgccatcgcctacggcctcgacaaaaaggtaggcggtgagcgcaacgtgctcatcttcgatcttggcggtgggactttcgatgtgtccatcctaaccatcgaggatggcatcttcgaagtaaagtccaccgcaggagacactcacttgggtggggaggacttcgacaacaggatggtgaaccacttcctccaagagttcaagcggaagtacaagaaggacccgtctgagagtaagcgtgccctccgacgcctccgcaccgcttgtgagcgtgcgaagcgtacgctttcctcctccgcccaggccagcgtggagatagactctctcttcgagggcatcgatttctacacttccatcacccgtgcccgttttgaggagctctgcgctgacctgttccgcggtaccttggagcctgtggagaaggccctgcgtgatgccaagatggacaaggcccagatccatgacatcgtgcttgtgggtggttccacccgcatccccaagattcagaagctgctgcaggacttctttaacggcaaggagctcaacaagtctatcaaccccgacgaggctgtagcctacggcgcggcggtgcaggcggccatcctctgcggcgacaagtctgaggccgtgcaggatctgctgctgctcgacgtaacccctctctccctgggtattgagactgccggcggcgtgatgactgccctcatcaagcgtaacaccaccatccccaccaaacagacacagaccttcaccacctactccgataaccagccaggtgtgctcatccaggtgtacgagggcgagcgagccatgaccaaggacaacaaccttcttggcaagttcgaattgactggcattcccccggcgcctcgaggcgtgcctcagatcgaggtgaccttcgacatcgacgctaacggcatcctgaacgtgtctgcggtggacaagtctactggcaaggagaacaagatcaccatcactaacgacaagggccgcctcagcaaggaggaaatcgaacgtatggtgcaggacgccgagaagtacaaggtcgaggacgagaagcagagggaccgtatcggtgccaagaacgccctcgagtcttactgcttcaacatgaagtccaccgtggaggaggacaagttcaaggacaaggtgagcgaggaggaccgtaacaaaatcatggaggcctgcaatgaaaccatcaagtggctggacgccaaccaattgggcgagaaggaagaatacgaacacaaacagaaggacatcgagcagatctgcaaccctatcatcactaagatgtaccaggctgcaggcggtgctcctccaggtggcatgcctggtggcttccctggtgcaggcggtgcccctggtgctgcgcccggcggtggttcatctgggcccaccatcgaggaagtcgattaa

SEQ ID NO: 48523 - protein, 650 aa, Pachygrapsus marmoratus
MSKGAAVGIDLGTTYSCVGVFQHGKVEIIANDQGNRTTPSYVAFTDTERLIGDAAKNQVAMNPNNTVFDAKRLIGRKFNDHNVQSDMKHWPFDVIDDNTKPKIKVEYKGEAKSFYPEEISSMVLIKMKETAEAYLGSVVKDAVVTVPAYFNDSQRQATKDAGTISGLNVLRIINEPTAAAIAYGLDKKVGGERNVLIFDLGGGTFDVSILTIEDGIFEVKSTAGDTHLGGEDFDNRMVNHFLQEFKRKYKKDPSESKRALRRLRTACERAKRTLSSSAQASVEIDSLFEGIDFYTSITRARFEELCADLFRGTLEPVEKALRDAKMDKAQIHDIVLVGGSTRIPKIQKLLQDFFNGKELNKSINPDEAVAYGAAVQAAILCGDKSEAVQDLLLLDVTPLSLGIETAGGVMTALIKRNTTIPTKQTQTFTTYSDNQPGVLIQVYEGERAMTKDNNLLGKFELTGIPPAPRGVPQIEVTFDIDANGILNVSAVDKSTGKENKITITNDKGRLSKEEIERMVQDAEKYKVEDEKQRDRIGAKNALESYCFNMKSTVEEDKFKDKVSEEDRNKIMEACNETIKWLDANQLGEKEEYEHKQKDIEQICNPIITKMYQAAGGAPPGGMPGGFPGAGGAPGAAPGGGSSGPTIEEVD

SEQ ID NO: 48524 - DNA, 1959 bp, Chilo suppressalis
  CDS (1)..(1959)
atggcgaaagcacccgcagttggtatcgacttgggcaccacgtactcgtgcgtgggtgtgttccagcatggcaaggtggagatcatcgcaaacgaccagggcaacaggaccacgccgtcgtatgtcgcattcactgacactgagcgcctcatcggcgacgccgccaagaaccaggtggcgatgaacccaaacaacaccatcttcgatgccaaacgtcttattggacgtaagtttgaagatgccacagtccaagctgacatgaagcactggccttttgaggttgtcagtgatggaggtaaaccaaagattaaagtagcctacaaaggtgaagataagactttcttccctgaagaagtaagctcaatggtgcttacaaagatgaaggaaacagccgaggcctacctcggtaaaactgtgcagaatgcagtaattacggttccagcatacttcaacgactctcaaagacaggccacaaaagattcaggtacaatctctggtctgaacgttctccgaatcatcaacgaacctactgctgctgcgattgcttacggtcttgacaagaagggaggtggagaacgtaacgtccttattttcgatcttggtggtggcacttttgatgtgtccatcttgaccattgaggatggtatctttgaggtgaaatctactgctggtgacacacatttgggtggagaggactttgacaaccgtatggtcaactacttcgttcaggagttcaagaggaagtacaagaaggatctcaccaccaataagagggctctgcgacgtctccgaacagcgtgtgagagagcgaagcgaaccctgtcttcatccacccaggccagcattgaaattgattccttatatgaaggtatcgacttctacacgtctatcaccagggcgcgtttcgaagaactgaatgctgacctcttcagatcaaccatggagccagtggagaagtctctccgtgatgccaagatggacaaggatcaaatccacgacatcgtcctcgtcggcggatccacccgtattcctaaagtgcaaaagctgttgcaagacttcttcaatggcaaggagctgaacaaatccatcaaccccgacgaggccgtcgcgtacggcgccgccgtccaggctgccattctccacggcgacaagtctgaggaagtacaggacctgttgttgcttgacgtcactcccctgtcgctcggtatcgagaccgctggtggagtgatgaccaccctcatcaagcgcaacaccaccatccccaccaagcagactcagaccttcactacctactctgacaatcaacccggtgtgctcatccaagttttcgagggtgagcgtgccatgaccaaggacaacaacttacttggaaagttcgaactgactggcattccccctgctccgcgtggcgtgcctcagatcgaggtgaccttcgatattgacgcaaacggcatcctgaacgtgtccgccgtcgagaagtccaccaacaaggagaacaagatcacgatcaccaacgacaagggccgcctttcgaaggaggagatcgaacgcatggtcaacgaagctgagaagtacaggaacgaggacgagaaacagaaggataccatcggcgccaagaacgcacttgagtcttactgcttcaacatgaagtcgacgatggaggatgctaatctgaaggataagatttctgagactgacaagcagaccatcctcgacaagtgcaatgacaccatcaagtggctggactctaaccagctggctgacaaggaggagtacgagcacaagcagaaagaactggaaggcatttgcaatccaatcatcactaagttgtaccagggagcgggtggagcccccggaggcatgcccggtggtatgcctggtttccccggcggagccccgggcgccggcggcgcagcccctggtggcggcgccggccctaccatcgaggaggtcgattaa

SEQ ID NO: 48525 - protein, 652 aa, Chilo suppressalis
MAKAPAVGIDLGTTYSCVGVFQHGKVEIIANDQGNRTTPSYVAFTDTERLIGDAAKNQVAMNPNNTIFDAKRLIGRKFEDATVQADMKHWPFEVVSDGGKPKIKVAYKGEDKTFFPEEVSSMVLTKMKETAEAYLGKTVQNAVITVPAYFNDSQRQATKDSGTISGLNVLRIINEPTAAAIAYGLDKKGGGERNVLIFDLGGGTFDVSILTIEDGIFEVKSTAGDTHLGGEDFDNRMVNYFVQEFKRKYKKDLTTNKRALRRLRTACERAKRTLSSSTQASIEIDSLYEGIDFYTSITRARFEELNADLFRSTMEPVEKSLRDAKMDKDQIHDIVLVGGSTRIPKVQKLLQDFFNGKELNKSINPDEAVAYGAAVQAAILHGDKSEEVQDLLLLDVTPLSLGIETAGGVMTTLIKRNTTIPTKQTQTFTTYSDNQPGVLIQVFEGERAMTKDNNLLGKFELTGIPPAPRGVPQIEVTFDIDANGILNVSAVEKSTNKENKITITNDKGRLSKEEIERMVNEAEKYRNEDEKQKDTIGAKNALESYCFNMKSTMEDANLKDKISETDKQTILDKCNDTIKWLDSNQLADKEEYEHKQKELEGICNPIITKLYQGAGGAPGGMPGGMPGFPGGAPGAGGAAPGGGAGPTIEEVD

SEQ ID NO: 48526 - DNA, 2626 bp, Pseudotsuga menziesii
  CDS (314)..(2341)
gaagctgccgtggtcgcagataatgcaattgcaatgctgaggtttctctgagaggatcgatagtcgggacgattttctctgtttcgatacatatcctttcgcttttcaacgatatcgcttcgttttcagccatttaattcgcatacgtgaacgaagatcggccgcagtgaaggttatcttgtcgatttcgctgttgtgagctttttgcactgcgataacacaccaataggtgtcacttcgctttcattcacgaggtattgaggttgcttctgcttaaaatttgatgcgcgagggttttggaaaggcgccagccatgggacggaagcagaaatgcgctgggttcaacaacgctggaaaagatttcaacggctttatgttccttgcggcgtttatcactgctggttttcttttcagctctgttattgctgcagaagaagcagcaaagttaggaacagtaattggtatagatctcggaaccacgtattcttgtgttggtgtttacaaaaatggtcatgttgaaatcatagcaaatgaccaaggaaataggattacaccttcttgggttgccttcactgataccgaaagactcatcggagaggctgccaaaaaccaggcggcaatgaatcctgaaaggaccgtttttgatgtgaaacggttgattggaagaaagtatgaggacaaggaggtgcaaaaagacatcaaacttttgccctacaaaattgtaaacaaagatgggaagccttacattcaggtgaagatcagggatggtgaaatcaaagtttttagtcccgaggaaattagtgcaatgattttgttgaaaatgaaggaaacagctgagtcctaccttggaaggaaaatcaaggatgcagttgttacagttccagcatatttcaatgatgcacaaagacaggccaccaaggatgctggtgtaattgctgggttaaatgttgctcgtataataaatgagccaactgctgcagcaattgcatatggtttggataaaaagggaggagaaaagaacattcttgtttatgaccttggaggtggaacttttgatgtcagtattctcaccattgataatggtgtttttgaagtgttgtcaaccagcggggatactcatttaggaggagaggacttcgatcaacgagttatggattacttcattaaattggtcaagaaaaaacacaacaaagatattagcaaggataacagagctcttggcaaacttaggagggagtgtgagagggccaaaagagctctgagcagccagcatcaagttcgtgttgaaattgaatcactttttgatggtgttgatttttcagaaccattaacaagagcaagattcgaggaactcaatatggacctcttcaagaaaactcttgggccagtaaagaaggctctagatgatgctaacttgcagaagactgaaattaatgaacttgtgcttgttggaggaagtactcgcataccaaaggttcagcaattattgaaggacttatttgatggcaaggagcctaacaaaggtgttaatccagatgaagctgtggcttatggggctgctgttcagggtggtattctgagtggtgagggaggtgacgaaacaaaagatattcttctattggatgttgctcccctcagcctaggtatagaaactgttggtggagtaatgaccaaacttattccgaggaacactgtcattccaacaaagaagtcacaagtgttcacaacttatcaagatcagcaaaccactgtttcaatcaaggtttatgaaggagagcggagtcttacaaaggattgccgagaattaggcaaatttgatctgtctggaatccctccagctcctcgtggtgtgccacagattgaggtcacctttgaggttgatgccaacggtatcctcaatgtaagagcagaggacaagggcaccaagaaaaccgaaaagattaccatcacaaatgacaaaggtagattgagccaggaagaaatagaaagaatggtcaaggaggcagaggagtttgcagaggaggataagaaagtgaaggacaaaattgatgcgaggaacaatcttgaaacatatgtctacaacatgaaaagcaccattaatgagaaggataaattggcagataaaattgattccgaagacaaggagaagatcgaaactgctatcaaagaagcattggaatggcttgatgacaaccagtcggctgagaaggaggacttcgaggagaagttgaaagaggtggaagctgtatgcagtcccatcatcaagcaagtatatgagaaaactggaggaggatcttctggaggcgatgatgaagacgaggactcgcatgaagaactctaagccatttcagtttctgttgaattttagttgtacaaatcacgatgaactaattctacagaagagatctctgagcataatagggtttatgaggatgattggcaacgaacaagagattcaactgatgaaagtcaaatgactgtttgttttttctatcaatcagaatgttattttcacagattgaaattggcaacgaacaagagattcaactgatgaaagtcaaatgactatttgtttgttttttctatcaatcagaatgttattttcacagatttttcaatctgtagt

SEQ ID NO: 48527 - protein, 675 aa, Pseudotsuga menziesii
MGRKQKCAGFNNAGKDFNGFMFLAAFITAGFLFSSVIAAEEAAKLGTVIGIDLGTTYSCVGVYKNGHVEIIANDQGNRITPSWVAFTDTERLIGEAAKNQAAMNPERTVFDVKRLIGRKYEDKEVQKDIKLLPYKIVNKDGKPYIQVKIRDGEIKVFSPEEISAMILLKMKETAESYLGRKIKDAVVTVPAYFNDAQRQATKDAGVIAGLNVARIINEPTAAAIAYGLDKKGGEKNILVYDLGGGTFDVSILTIDNGVFEVLSTSGDTHLGGEDFDQRVMDYFIKLVKKKHNKDISKDNRALGKLRRECERAKRALSSQHQVRVEIESLFDGVDFSEPLTRARFEELNMDLFKKTLGPVKKALDDANLQKTEINELVLVGGSTRIPKVQQLLKDLFDGKEPNKGVNPDEAVAYGAAVQGGILSGEGGDETKDILLLDVAPLSLGIETVGGVMTKLIPRNTVIPTKKSQVFTTYQDQQTTVSIKVYEGERSLTKDCRELGKFDLSGIPPAPRGVPQIEVTFEVDANGILNVRAEDKGTKKTEKITITNDKGRLSQEEIERMVKEAEEFAEEDKKVKDKIDARNNLETYVYNMKSTINEKDKLADKIDSEDKEKIETAIKEALEWLDDNQSAEKEDFEEKLKEVEAVCSPIIKQVYEKTGGGSSGGDDEDEDSHEEL

SEQ ID NO: 48528 - DNA, 2208 bp, Pisum sativum
  CDS (44)..(1990)
caacaaagcaaaaaataatcaaactctcttcagaaaaactgttatggcgacaaaagaaggtaaagccattggcatagacctcggcacaacctacagctgcgtcggcgtttggcaaaacgaccgcgttgagatcatccctaacgaccaaggcaaccgaaccacgccatcctacgtggcattcaccgacaccgagagactcatcggcgatgcagccaagaatcaagttgcaatgaatccgcagaacaccgttttcgacgcgaaacgtttaatcggccgtagattctccgatgaatcagttcaaaacgacatgaaactatggccgtttaaagtcgttccaggtcccgccgaaaaaccgatgatcgttgttaattataaaggcgaagagaagaaattcgcggcggaggagatttcttcaatggtgttgatcaaaatgagggaagtagcagaagcgtttttaggtcaatcggtgaaaaacgcggttgttactgttccggcttattttaacgattctcagagacaagctacgaaggacgccggtgctatctctggtttgaatgtgcttaggataatcaacgaacctactgctgcagcaattgcttatggtttggataaaaaagcttcgaggaaaggtgaacagaacgtgcttattttcgacttaggcggtggaactttcgatgtttctcttcttactattgaagaagggattttcgaagtgaaagctacggctggagatactcatcttggaggtgaagattttgataacagaatggtgaatcattttgcttcggaattcaggaggaagaataagaaagatattagtggaaatgcaagagcattaagaagattgagaactgcttgtgagagagcgaagagaacgctttcttcgaccgcacaaactactattgaaattgattctttgtatgaaggaattgatttctatgcaaccattacaagggcaagatttgaagaattgaatatggatttgtttaggaagtgtatggagcctgttgagaagtgtcttcgtgatgcaaaaatcgataagagtcaagttcatgaagttgttctagttggtggatcaactaggattccgaaagttcaacagcttttgcaggatttcttcaatgggaaagagctttgcaagagtattaacccggatgaagctgttgcttatggtgctgctgttcaagccgccattttgactggtgaaggcgatgaaaaggttcaagatcttttgttgcttgatgttactcctcttagcttgggtctagaaactgccggtggtgttatgacggttttgattccgaggaacacgacgattccgactaagaaggagcagattttttcgacatattcagataatcaacctggtgttttgattcaagtttttgaaggtgaacgtgcgagaacaaaggataataatcttcttgggaaatttgaactcactggtataccaccagctccgagaggtgtgccacaggttaatgtttgttttgatattgatgcgaatgggatattgaatgtttctgcggaagataaaacagctggcgtgaagaacaagataactataacaaatgataaagggaggttgagtaaggaagagatagagaagatggtgaaagatgcagagaagtataaggcagaggatgaagaggtgaagaggaaagtggaagctaagaattcgcttgagaattatgcttacaatatgaggaatactattaaggatgacaagattggtgggaagttgagtaatgatgatagagagaagattgagaaggctgtggaggaggctattcagtggttggaagggaatcaattgggtgaagtggaggagtttgaggataagcagaaggagttggaaggggtttgtaatcctattattgccaagatgtatcaaggtggtgctggtggagatgtgcctatgggagatggtatgcctggtggtggttctaatggatcaggacccggtcctaagattgaagaggttgactaaagaagccatagccagggctagggcctaggggcatgtctgtttttaagaccttggttgggtctatggagttactatgaaagtgtcttgtatcttgtgtatgttatgttatagaatgtaggtttggtaaagtgggtttgttgagtcttgatgttttttaagctttttgtgaactatgtattttgtttttttatcaagtacttatgaatagtgtaatttcg

SEQ ID NO: 48529 - protein, 648 aa, Pisum sativum
MATKEGKAIGIDLGTTYSCVGVWQNDRVEIIPNDQGNRTTPSYVAFTDTERLIGDAAKNQVAMNPQNTVFDAKRLIGRRFSDESVQNDMKLWPFKVVPGPAEKPMIVVNYKGEEKKFAAEEISSMVLIKMREVAEAFLGQSVKNAVVTVPAYFNDSQRQATKDAGAISGLNVLRIINEPTAAAIAYGLDKKASRKGEQNVLIFDLGGGTFDVSLLTIEEGIFEVKATAGDTHLGGEDFDNRMVNHFASEFRRKNKKDISGNARALRRLRTACERAKRTLSSTAQTTIEIDSLYEGIDFYATITRARFEELNMDLFRKCMEPVEKCLRDAKIDKSQVHEVVLVGGSTRIPKVQQLLQDFFNGKELCKSINPDEAVAYGAAVQAAILTGEGDEKVQDLLLLDVTPLSLGLETAGGVMTVLIPRNTTIPTKKEQIFSTYSDNQPGVLIQVFEGERARTKDNNLLGKFELTGIPPAPRGVPQVNVCFDIDANGILNVSAEDKTAGVKNKITITNDKGRLSKEEIEKMVKDAEKYKAEDEEVKRKVEAKNSLENYAYNMRNTIKDDKIGGKLSNDDREKIEKAVEEAIQWLEGNQLGEVEEFEDKQKELEGVCNPIIAKMYQGGAGGDVPMGDGMPGGGSNGSGPGPKIEEVD

SEQ ID NO: 48530 - DNA, 2122 bp, Pisum sativum
  CDS (36)..(1979)
catttattttccgattagccaaaaggtaaaatccaatggccggaaaaggagagggaccggctatcggaatcgatctcggaaccacctactcctgtgtaggagtatggcaacatgatagagttgaaatcattgccaacgaccaaggtaacagaactacaccgtcttatgtcgctttcactgactccgagcgtctcatcggtgatgccgctaagaaccaggtcgccatgaatcctatcaacaccgtcttcgatgcaaagaggttgattggtcgtagagtctctgatgcatctgttcagagtgacatgaagttgtggccttttaagatcattgctggtcctgctgagaagccaatgattgttgttaactacaagggtgaagataagcaatttgctgctgaagagatctcttcaatggttctgatgaagatgcgtgagattgctgaagcttaccttggctctgcattagacgacgttgtcactgtccctgcttactttaatgattctcagcgtcaagctaccaaggatgctggtgttattgctggtcttaatgtcatgcgaatcatcaatgagcccactgctgctgccattgcatatgggctagacaagaaagcaacaagtgttggtgaaaagaatgtcttgatttttgaccttggtggtggtacttttgatgtctctttgcttactattgaagagggtatctttgaggtgaaagccacagctggagacacccatcttggaggtgaggattttgataacagaatggtgaaccactttgttcaagagttcaagagaaagaacaagaaggacattagtggcaaccccagggcactcaggcgattgaggactgcatgtgagagggcgaagagaactctttcatctactgcccagactaccattgaaattgactctctatttgagggaattgatttctactcccctattactcgtgccagatttgaggagctcaacatggatctctttaggaaatgtatggaaccagttgagaaatgtttgagagatgccaagatggacaaaaaaagcatccatgatgttgttcttgttggtggttctactagaattccaaaggttcaacaacttttgcaggatttctttaatggaaaggagctatgcaaaagcattaatcccgatgaggctgttgcgtatggagctgctgtccaggctgcaattttgagtggtgaggggaatgagaaggtgcaggatcttctccttcttgatgttacccctctctctcttggtttggagactgctgggggtgtgatgactgttctgatccaaaggaataccaccattccaacaaagaaagaacaggttttctcaacctattctgacaaccagcctggtgtgttgatccaagtctttgaaggagagagaacaaggactagggataacaatttgttgggcaagtttgaactttctggtattcctcctgctcccagaggtgttccccaaattactgtgtgctttgacattgatgccaacggtatattgaatgtctctgctgaagacaagactaccgggcagaagaacaagatcaccatcacaaatgacaagggtaggctttcaaaggatgatattgagaagatggttcaagaggctgagaagtacaagtctgaggatgaagagcataagaagaaggttgaagccaagaatgcattggaaaactatgcatacaacatgaggaacaccatcaaggatgacaagattgcaggcaaacttgattctgaagacaagaagaagattgaggacaccattgagcaggctatccagtggttagacagcaaccaacttgcagaggcagatgagtttgaggacaaaatgaaggaattggaaagtgtctgcaaccctatcattgccaagatgtaccagggtggtgcaggtcctgacatgggtgctgctgcagatgatgatgctcctactggtggaagtggtgctggccctaagattgaggaagtcgactaagtgtagtttctttcatcctaactatgatttatattttcaagttatatttaatttgatgcatttgccgcttatattgtttgcttttagctggtttttggagctatttaggctacttcgttatgttgtactgttaaggattgtgt

SEQ ID NO: 48531 - protein, 647 aa, Pisum sativum
MAGKGEGPAIGIDLGTTYSCVGVWQHDRVEIIANDQGNRTTPSYVAFTDSERLIGDAAKNQVAMNPINTVFDAKRLIGRRVSDASVQSDMKLWPFKIIAGPAEKPMIVVNYKGEDKQFAAEEISSMVLMKMREIAEAYLGSALDDVVTVPAYFNDSQRQATKDAGVIAGLNVMRIINEPTAAAIAYGLDKKATSVGEKNVLIFDLGGGTFDVSLLTIEEGIFEVKATAGDTHLGGEDFDNRMVNHFVQEFKRKNKKDISGNPRALRRLRTACERAKRTLSSTAQTTIEIDSLFEGIDFYSPITRARFEELNMDLFRKCMEPVEKCLRDAKMDKKSIHDVVLVGGSTRIPKVQQLLQDFFNGKELCKSINPDEAVAYGAAVQAAILSGEGNEKVQDLLLLDVTPLSLGLETAGGVMTVLIQRNTTIPTKKEQVFSTYSDNQPGVLIQVFEGERTRTRDNNLLGKFELSGIPPAPRGVPQITVCFDIDANGILNVSAEDKTTGQKNKITITNDKGRLSKDDIEKMVQEAEKYKSEDEEHKKKVEAKNALENYAYNMRNTIKDDKIAGKLDSEDKKKIEDTIEQAIQWLDSNQLAEADEFEDKMKELESVCNPIIAKMYQGGAGPDMGAAADDDAPTGGSGAGPKIEEVD

SEQ ID NO: 48532 - DNA, 2194 bp, Phaeodactylum tricornutum
  CDS (140)..(2119)
cgaaagcaaacaacgcgtcgtcccacccagcgagccgctttgttctcataccagattacacacagtcataccgattgtattcgactactcttgtgtgtttgtacacagttattggtcgatttgcttttaaataaagaacatgatgttcatgagaattgccgtagcagcactggccttgctggctgctccctccattcgtgccgaagaggctggtgaagaggccaagatgggtaccgtgatcggtatcgatctcggcaccacgtattcgtgtgtcggcgtgttcaagaacggagcgctggaaatcattgccaacgaccagggaaaccgtatcactccttcatacgttgcttttatgcccagtggagaacgtcttgtgggtgacgctgccaagaatcaggccaccatcaaccccgaaaacaccgtttttgacgtcaagcgtctcatcggacgcaaatactcggacaagtccgtgcaggccgacaagaagctcgtcccctacgaaattatctcggataaggacaagcccatgatcgaagtcatccagaacgagaaaaccttcaagttcgctcctaaagaagtctccgccatggtgttgcaaaaaatgaagcttacggccgagacattcttgggcaaggaaatcaagcacgccgttgttaccgttccggcgtacttcaatgatgcccagcgccaggcgaccaaggatgccggaacaattgctggtctcaaggtcgaacgcatcatcaacgaaccgactgcagctgccattgcatatggtatggacaagaccggcggggaatccaacgttctcgtctttgatctcggtggtggaactttcgatgtcactcttttgaccatcgataacggcgtcttcgaggtgctggccacgaatggtgacacccacttgggtggagaagattttgatcagcgcgttatgcagtacttcatcaaaatgatgaagaaaaagtccgacgtggacatttccaaagacaagcgtgcgttgcagaagctccgtaaggaagtcgaacgcgttaagcgagctctttcttcgcagcagcaggcccgacttgaaattgaagatttggcggaaggctttgacctcagcgagactttgacgcgtgcccgttttgaggagctcaacaacgatttgttcaaaaagaccatgggaccggttgctcgtgtcatggaggatgccgatctctccaagagcgaaatcgacgaaattgtgttggtgggaggttccacccgtatccccaaggttcagcaactcattagtgaatactttggtggtaaggaacccagtaagggtatcaaccccgatgaggctgtcgcctacggtgctgccgtgcagggcggtattctttccggcgaaggcggtgacgcgaccagtgaaattcttctgttagacgtcaccccgctttctcagggtatcgaaactgtcggaggtgtcatgactaagctcatcaaccgtggtaccaccattcccactaagaaatctcaaaccttctccactcaccaggataatcagaacgtagttttgattcaggtttacgagggtgagcgttctatgaccaaggacaaccacaatctcggaaagtttgagttgactggaatcccgccggctcctcggggcgtccctcagattgaggtcacctttgaagttgacgccaacggaattcttcaggtgtctgctgaagataagggaaccgggaaggccgaaaagatcacgattactgccgaaaagggtcgcctcagtgaagaagagatcgagcgcatggtccgggaagcggaagaattcgccgaagaggacaagaaggtcaaggaacgcatcgatgcccgcaatggactcgaatcttacttgtacaacctcaagaataccttggacgatgatgaaaagggccttgccgacaatctctccgccgaagacaaaaaagaactgcaagatatgattgacgagaccttggactggatggacggaaatcccgaagccgacaaagaggactacgacgaaaagctaaaggaagttgaacaagtggccaatcccatcatgcgaaatgtctactccggtggtgccggcggtggcgccgaggatgacgccgactttgctgacgatgagttgtaaactgggtacatttttggatcgcccattcttttacaaaacagttagataacgcaataaatcttttctcacacactc

SEQ ID NO: 48533 - protein, 659 aa, Phaeodactylum tricornutum
MMFMRIAVAALALLAAPSIRAEEAGEEAKMGTVIGIDLGTTYSCVGVFKNGALEIIANDQGNRITPSYVAFMPSGERLVGDAAKNQATINPENTVFDVKRLIGRKYSDKSVQADKKLVPYEIISDKDKPMIEVIQNEKTFKFAPKEVSAMVLQKMKLTAETFLGKEIKHAVVTVPAYFNDAQRQATKDAGTIAGLKVERIINEPTAAAIAYGMDKTGGESNVLVFDLGGGTFDVTLLTIDNGVFEVLATNGDTHLGGEDFDQRVMQYFIKMMKKKSDVDISKDKRALQKLRKEVERVKRALSSQQQARLEIEDLAEGFDLSETLTRARFEELNNDLFKKTMGPVARVMEDADLSKSEIDEIVLVGGSTRIPKVQQLISEYFGGKEPSKGINPDEAVAYGAAVQGGILSGEGGDATSEILLLDVTPLSQGIETVGGVMTKLINRGTTIPTKKSQTFSTHQDNQNVVLIQVYEGERSMTKDNHNLGKFELTGIPPAPRGVPQIEVTFEVDANGILQVSAEDKGTGKAEKITITAEKGRLSEEEIERMVREAEEFAEEDKKVKERIDARNGLESYLYNLKNTLDDDEKGLADNLSAEDKKELQDMIDETLDWMDGNPEADKEDYDEKLKEVEQVANPIMRNVYSGGAGGGAEDDADFADDEL

SEQ ID NO: 48534 - DNA, 2147 bp, Lilium longiflorum
  CDS (9)..(1958)
gcaaatccatggcgggcaaagacgaggttccggcgatcggaatcgacctcggtaccacctactcctgcgtcggagtgtggcagcacgatcgggtggagatcatcgcgaacgatcagggcaatcgcaccactccctcctacgttgccttcactgacactgagaggctcatcggtgatgcggcgaagaatcaggtcgccatgaaccccaccaacaccgtcttcgatgccaagcggctgatcggccgtcacttcagcgacccctctgttcaggccgatatgaagctgtggcccttcaaggtgatctccggcacccgtgacaagccaatgatcgtcgtccagtacaagggcgaggagaagcagttcgctgtcgaggaggtctcctccatggtcctcgtcaagatgcgggagatagctgtagcctaccttggccgcagcatcaataatgccgtcgtcaccgtcccggcctacttcaatgactcccagcgccaggccaccaaggacgccggtgccattgccggcctcaatgtcctccgtatcatcaatgagcccactgccgccgccatcgcctatggtctcgacaagaaggccaccagccccagcgagaagaatgtcctcatctttgaccttggtggtggcaccttcgatgtctccctcctcactattgaggaaggtatcttcgaggtgaaggccaccgccggtgacacccatctcggcggtgaggacttcgacaacaggatggtgaaccacttcgcgcaggagtttaagcggaaacacaagaaagacatcagcggcaatcctcgagctctccggcgactccgcactgcctgtgagagggcaaagaggaccctctcctctactgcccagacaacaattgagattgattccctctgtgacggaattgatttctactccaccatcactagggccagatttgaggagctgaacattgaccttttccgcaagtgcatggatccagtggagaagtgcttgacggacgccaagatggacaagagcagcgtccatgatgttgtgctagtcggcggctcgactagaatccctaaagtgcagcagctactgcaggattttttcaatggcaaggagctctgcaagagcataaaccctgatgaggctgttgcttatggtgctgcagtccaggcggcaatcctcagtggagagaggaacgagaaggtacaggacctgcttctgctagatgtaacaccgctgtccctcggactagagacagccggcggtgtgatgactattcttattcctcgcaacacaactatcccaaccaagaaggagcaggtcttctccacctacactgacaaccaatctggtgtgctgatccaagtctatgaaggtgagaggaccaggtccaaggacaacaaccttcttggcaagttcgagctcttgggcatcagtccagcggcccgtggcgtcccgcagatcactgtcacattcgacatagatgccaacggtattctgaatgtctcggcggaggacaagaccactaggcagaagaacaagatcactattaccaatgacaagggtcggctcagcaaggaggagatcgaaaagatggtgaaggaggctgagaggtacaagtcggaggatgagaagcacaaaaagcaggtggcggcgaagaatgctctggagacttatatttataacatgaggaacgctgtcaacgatgagaggattacgtcaaagctgcctgcagaggtcaaaaagaagattgatgatgctatggagggggcgatacagtggctggaggcgaatcagcttgccgaggttgatgagttcgacgataagaggagggagcttgaggggatatgcaaaccggtaattgaaaaattgtgccagggaattggtgtgattgcggacaggatggggatgaacgaggatggcacagctagccgcactggcggtgctggaccgaagattgaggaggttgactaatctggggatgttttggagtttgcctgtaccagcgtcaagaaacggtctggtgaaactgtcagtagggttttctgtattgttttgctgactttggttttttagcatagtgggttgcttgttatgtttcgtcgtgtgtaaggggctagtgaatgatatttcccacatgattcacaattagtttggagccag

SEQ ID NO: 48535 - protein, 649 aa, Lilium longiflorum
MAGKDEVPAIGIDLGTTYSCVGVWQHDRVEIIANDQGNRTTPSYVAFTDTERLIGDAAKNQVAMNPTNTVFDAKRLIGRHFSDPSVQADMKLWPFKVISGTRDKPMIVVQYKGEEKQFAVEEVSSMVLVKMREIAVAYLGRSINNAVVTVPAYFNDSQRQATKDAGAIAGLNVLRIINEPTAAAIAYGLDKKATSPSEKNVLIFDLGGGTFDVSLLTIEEGIFEVKATAGDTHLGGEDFDNRMVNHFAQEFKRKHKKDISGNPRALRRLRTACERAKRTLSSTAQTTIEIDSLCDGIDFYSTITRARFEELNIDLFRKCMDPVEKCLTDAKMDKSSVHDVVLVGGSTRIPKVQQLLQDFFNGKELCKSINPDEAVAYGAAVQAAILSGERNEKVQDLLLLDVTPLSLGLETAGGVMTILIPRNTTIPTKKEQVFSTYTDNQSGVLIQVYEGERTRSKDNNLLGKFELLGISPAARGVPQITVTFDIDANGILNVSAEDKTTRQKNKITITNDKGRLSKEEIEKMVKEAERYKSEDEKHKKQVAAKNALETYIYNMRNAVNDERITSKLPAEVKKKIDDAMEGAIQWLEANQLAEVDEFDDKRRELEGICKPVIEKLCQGIGVIADRMGMNEDGTASRTGGAGPKIEEVD

SEQ ID NO: 48536 - DNA, 1866 bp, Lactobacillus reuteri
  CDS (1)..(1866): transl_table=11
atggcaagtaataagattattggtattgatttaggtactactaactctgcggttgctgttatggaaggtaatgaacctaagattatcaccaacccagaaggaagtcggacaacaccatctgttgtttcatttaagaatggtgaaactcaagttggagaagtagcaaagcgtcaagcaattactaatcctaacactatttcatcaatcaagagtcacatgggtgaagcaggatacactgttgaagttgatggtaagaaatatactccacaagaaatttcagcaatgattttgcaataccttaagaaatatgctgaagactacattggtgatactgttactcaagcagttattactgttcctgcatactttaatgatgctcaacgtcaagctactaaggatgccggtaaaattgcgggccttgatgtaaagcggattattaacgaacctactgcttcatccctagcatacggtcttgacaagaaggacaaagatgaaaagatccttgtttatgaccttggtggtggtacattcgatgtttccatccttgaattaggtgacggtgtcttccaagttctttctactaatggtgatactcatttaggtggggatgactttgaccaaaagatcatggattggttaattgatggctttaaggaagaacatggtgttgatctttctcaagataagatggctcttcaacgtttgaaggatgctgctgaaaaggctaagaaggacttgtcaggtgttcaagaggcacaaatcagcttaccatttatttcagctggtgaaaacggtccattacacttggaaaagacattaagccgggcacaatttaaccaattaactaatgacttagttgaacggacaaagcaaccagtattgaatgctttgaaagatgctgatcttacttttgatgacattgatgaagttatcttaaatggtggatctactcgtattcctgctgttcaagaaatggttaaggaattaactggtaaggaacctaaccactcaattaatcctgacgaagccgttgctcttggtgcagctattcaaggtggggttcttactggtgatgttaaggatgtcgtattacttgatgttactccactttcacttggtattgaaaccatgggtggtgtcttcactaagttgattgaccgtaacacaactattcctacttcaaagagtcaaatcttctccactgctgctgataaccaaccagctgttgatattcacgttcttcaaggtgaacgtccaatggcagcagataacaagactttaggtaacttccaactaactgatattcctgctgctcctcgtggtgttcctcaaatcaaagttacatttgatatcgataagaacggtattgttaatgtttctgctgaagatcaaggaactcacaagaagcaaaacatcactatcaagtctaactcaggtttaagtgatgaagaaattggacggatgaagaaggatgctgaagagcatgttgtagccgacaagaagaagaaggaagaagttgacttaaagaatgaagttgaccaagaactcttccaagttgataagactttgaaggaagttaagggtaaagttcctgaagatgatatcaagaaggctgaaagtgctcgtgacgaattaaagaaggctaaagaaagcggcaaccttgatgaaatgaaagctaagaaggatgctttaaacaaagttattcaagaccttagcgtaaagctttaccaacaagctcaaggtgcacaaggtggcgctgctaatggtcagcctggtgataaccaacaaaatggtaataacaacggtaatgatgacaatactgttgatggtgattttaaggacgttacaccagacgacaagaaatag

SEQ ID NO: 48537 - protein, 621 aa, Lactobacillus reuteri
MASNKIIGIDLGTTNSAVAVMEGNEPKIITNPEGSRTTPSVVSFKNGETQVGEVAKRQAITNPNTISSIKSHMGEAGYTVEVDGKKYTPQEISAMILQYLKKYAEDYIGDTVTQAVITVPAYFNDAQRQATKDAGKIAGLDVKRIINEPTASSLAYGLDKKDKDEKILVYDLGGGTFDVSILELGDGVFQVLSTNGDTHLGGDDFDQKIMDWLIDGFKEEHGVDLSQDKMALQRLKDAAEKAKKDLSGVQEAQISLPFISAGENGPLHLEKTLSRAQFNQLTNDLVERTKQPVLNALKDADLTFDDIDEVILNGGSTRIPAVQEMVKELTGKEPNHSINPDEAVALGAAIQGGVLTGDVKDVVLLDVTPLSLGIETMGGVFTKLIDRNTTIPTSKSQIFSTAADNQPAVDIHVLQGERPMAADNKTLGNFQLTDIPAAPRGVPQIKVTFDIDKNGIVNVSAEDQGTHKKQNITIKSNSGLSDEEIGRMKKDAEEHVVADKKKKEEVDLKNEVDQELFQVDKTLKEVKGKVPEDDIKKAESARDELKKAKESGNLDEMKAKKDALNKVIQDLSVKLYQQAQGAQGGAANGQPGDNQQNGNNNGNDDNTVDGDFKDVTPDDKK

SEQ ID NO: 48538 - DNA, 1914 bp, Mytilus galloprovincialis
  CDS (1)..(1914)
atggcaggaaaaggtccagcaatcggaattgatttaggaacaacatactcttgtgttggtgttttccagcatggcaaagtagacatcatagccaacgaccagggtaacagaacaactccaagttatgtggctttcacggatactgaaagactggttggtgatgcagctaaaaatcaagtcgcattgaacgctacaaatacaatattcgatgccaagagactgatcggcagaaattttagtgattcgacagttcagtcagacataaaacattggccattcaaagtcatcaacagcggaggcaagccaaaactacaagctgaacacaaaggagaaacaaaaacatttacaccagaagaaataagttcaatggtattggttaaaatgaaagaaactgccgaggcttatctcggacagaaagttacagatgccgtcatcacagtacctgcatactttaatgattctcaaagactagccacaaaggatgctggtttcattgcaggacttaacgtactacgaataataaatgagccaacagctgctgctctagcttatggtctggacaagaatttatcaggcgagaaaaacgttttaatatttgatttgggaggaggaacattcgacgtttctatacttacgatagacgagggttctttatttgaagttcgctcaacagccggagatactcaccttggtggtgaagactttgacaacagaatggtcaatcattttgtaaatgaattcaagagaaaatgtggtaaagacatttctggtaacaatcgtgcactcagaagattgagaactgcttgtgagaaagcaaagagaacattatcaagcagtacagaggcaaacgttgagatagactcattgtttgagggaacagacttttacacaaaaataacaagagcacggtttgaagaactgtgctcagatttgttcagaacaacactggaaccagttgaaaaagctttaagagacgctaaacttgataaaagtagtattcaagagattgtgcttgtcggaggttcaactaggataccaaaaatacagaaaatgctgtcagaatttatgaatggtaaagaacttaataaatctgtcaatccagatgaagctgttgcttacggtgcagccgtccaagctgctatcctgtcaggcgatcgtagcgacactatcaaagatgtacttttagttgacgtagctcctttgtcccttggtattgaaactgcaggtggtgtaatggccaaactaattgacaggaatacaaaaatccctacaaaggcttcacagatatttacaacatattccgacaaccaaccagcagttagcattcaggtttttgaaggtgaaagggctatgaccaaagacaataatcatttaggaaagtttgatctcactggtatacctccagctcctcgaggtgtgccgaagattgaagtggaattcgatattgatgcaaacggacttttaaatgtttcggctaaagaccaaagcagtggaaattccaagaaaattacaatcaccaatgacagaggaagactcagtaaagaggacattgatcgaatggtttctgatgctgagaaatataaagaagaagatgaaaaacaaacccagcgtatcacttcaagaaatcaattagaaaactacatattcagtgttaagcaagctatcggagattctggagacaagctgtcaacacaggacaaagatgatttaggcaaagcctgcgaagagtcacttaaatggttagacaataattctctggcagagaaagacgaatacgatgacaaaatgaaagaactacagaaaatatgtacccctgtcatgtcaaaacttcatggtggtgctcaaaatggacaatcaaatagtacagaaggatacagctcttctaatggacctactgtagaagaagttgattaa

SEQ ID NO: 48539 - protein, 637 aa, Mytilus galloprovincialis
MAGKGPAIGIDLGTTYSCVGVFQHGKVDIIANDQGNRTTPSYVAFTDTERLVGDAAKNQVALNATNTIFDAKRLIGRNFSDSTVQSDIKHWPFKVINSGGKPKLQAEHKGETKTFTPEEISSMVLVKMKETAEAYLGQKVTDAVITVPAYFNDSQRLATKDAGFIAGLNVLRIINEPTAAALAYGLDKNLSGEKNVLIFDLGGGTFDVSILTIDEGSLFEVRSTAGDTHLGGEDFDNRMVNHFVNEFKRKCGKDISGNNRALRRLRTACEKAKRTLSSSTEANVEIDSLFEGTDFYTKITRARFEELCSDLFRTTLEPVEKALRDAKLDKSSIQEIVLVGGSTRIPKIQKMLSEFMNGKELNKSVNPDEAVAYGAAVQAAILSGDRSDTIKDVLLVDVAPLSLGIETAGGVMAKLIDRNTKIPTKASQIFTTYSDNQPAVSIQVFEGERAMTKDNNHLGKFDLTGIPPAPRGVPKIEVEFDIDANGLLNVSAKDQSSGNSKKITITNDRGRLSKEDIDRMVSDAEKYKEEDEKQTQRITSRNQLENYIFSVKQAIGDSGDKLSTQDKDDLGKACEESLKWLDNNSLAEKDEYDDKMKELQKICTPVMSKLHGGAQNGQSNSTEGYSSSNGPTVEEVD

SEQ ID NO: 48540 - DNA, 2070 bp, Mytilus galloprovincialis
  CDS (1)..(2070)
atgtccctctctctatttatttgtagccgtaagtcagtatttcacagtttcaaactccaagtaaaagttggttttatctcagttatacagaaatattataaaaataattcttttctttccagatatttatcgaggacaaaagtgaaatatctagatatgacaggaaaaagtccagcaatcggaattgatttaggaacaacatactcttgtgttggtgttttccagcatggaaaagtagacatcatagccaacgaccaggggaacagaacaactcctagttatgtggcgttcacagatactgaaagactggttggtgacgcagctaaaaatcaagtagcactaaacgctacaaatacaattttcgatgccaagagactgatcggcagaaattttagtgattccacagttcagtcagacatgaaacattggccattcaaagtcatcaacagcggaggcaagccaaaactacaagctgaacacaaaggagaaacaaaaacatttaccccagaggaaataagttcaatggtattggttaaaatgaaagaaactgccgaagcttatctcggacagaaagttatagatgccgtcatcacagtgcctgcatactttaatgattctcaaagactagccacaaaagatgctggtttcattgcaggacttaatgtactacgaataataaacgagccgacagctgctgctttagcttatggtctcgacaaaaatttatcaggcgaaaaaaacgtgttaatatttgatttaggaggaggaacattcgacgtttctatacttacgatagacgaaggttcattgttcgaagttcgctcaacagccggagatactcaccttggtggcgaagactttgataacagaatggtgaatcattttgtaaatgaattcaagagaaaatgtggtaaagacatttctggtaacaatcgtgcactcagaagattgagaactgcttgtgagaaagcaaagagaacattatcaagcagtacagaggcaaacgttgagatagactcattgtttgagggaacagacttttacacaaaaataacaagagcacgatttgaagaactgtgctcagatttgttcagaacgacactggaaccagttgaaaaagctttaagagacgcgaaacttgataaaagtagtattcaagagattgtacttgtcggaggttcaacaaggataccaaaaatacagaaaatgctgtcagaatttatgaatgggaaagaacttaataaatctgtcaatccagatgaagctgttgcttacggtgcagccgttcaagctgctattctgtccggcgatcgtagcgacactatcaaagatgtacttttagttgacgtagctccattgtcccttggtattgaaactgcaggtggtgtaatggccaaacttattgacagaaatacaaaaatccctacaaaagcctctcagatatttacaacatattcagacaaccaaccagcagttagcattcaagtttttgaaggtgaaagggctatgaccaaagacaataatcatttgggaaagtttgatctcactggtatacctccagcaccccgcggtgttccaaagattgaagtagaattcgatattgatgcaaacggacttttaaatgtttcggctaaggaccaaagcagtggaaattcaaagaaaattacaatcaccaatgacagaggtaggctcagtaaagaggacattgatcgaatggtttccgatgctgagaaatataaagaagaagatgaaaaacaaacccagcgtatcacttcaagaaatcaattagaaaactacatattcagtgtcaagcaagctatcggagattctggagacaagctgtcaacacaggacaaagaggatttaggtaaagcctgcgaagagtcacttaaatggttagacaataattctctggcagagaaagaagaatacgatgacaaaatgaaagaactagagaaagtatgtacgcctgtcatgtcaaaacttcatggtggtgctcaaaatggaccatcaagtagtacaggaggacacaactcttctaatggacctactgtagaagaagttgattaa

SEQ ID NO: 48541 - protein, 689 aa, Mytilus galloprovincialis
MSLSLFICSRKSVFHSFKLQVKVGFISVIQKYYKNNSFLSRYLSRTKVKYLDMTGKSPAIGIDLGTTYSCVGVFQHGKVDIIANDQGNRTTPSYVAFTDTERLVGDAAKNQVALNATNTIFDAKRLIGRNFSDSTVQSDMKHWPFKVINSGGKPKLQAEHKGETKTFTPEEISSMVLVKMKETAEAYLGQKVIDAVITVPAYFNDSQRLATKDAGFIAGLNVLRIINEPTAAALAYGLDKNLSGEKNVLIFDLGGGTFDVSILTIDEGSLFEVRSTAGDTHLGGEDFDNRMVNHFVNEFKRKCGKDISGNNRALRRLRTACEKAKRTLSSSTEANVEIDSLFEGTDFYTKITRARFEELCSDLFRTTLEPVEKALRDAKLDKSSIQEIVLVGGSTRIPKIQKMLSEFMNGKELNKSVNPDEAVAYGAAVQAAILSGDRSDTIKDVLLVDVAPLSLGIETAGGVMAKLIDRNTKIPTKASQIFTTYSDNQPAVSIQVFEGERAMTKDNNHLGKFDLTGIPPAPRGVPKIEVEFDIDANGLLNVSAKDQSSGNSKKITITNDRGRLSKEDIDRMVSDAEKYKEEDEKQTQRITSRNQLENYIFSVKQAIGDSGDKLSTQDKEDLGKACEESLKWLDNNSLAEKEEYDDKMKELEKVCTPVMSKLHGGAQNGPSSSTGGHNSSNGPTVEEVD

SEQ ID NO: 48542 - DNA, 1917 bp, Culex pipiens
  CDS (1)..(1917)
atgtctgcgattggaatcgatttgggcacgacgtattcgtgcgttggagtgttccagcatggcaaggttgaaatcatcccgaatgatcagggcaaccggacgactcccagctatgtggccttttcggacacggaacggttgattggcgacgcggcaaagaaccaggttgccatgaacccacgcaacacggtcttcgatgccaagcgactgattgggcgccgattcgacgatccgaagatccaggccgacttgaagcactggccattccaggtgatcagtgacggtggcaagccaaagatcgagatcgagttcaaaggcgaacgtaagcggtttgcaccggaagagatcagttccatggtgttgaccaagatgaaggaaactgctgaggcgtatctgggcaagtcggttaagaacgcggtcatcaccgtaccggcgtacttcaacgattctcaacgccaggccactaaggatgctggagccatcgccgggctgaacgttatgagaattatcaacgaaccgacggctgcggcgttggcctacggactggacaagaacctaaagggtgaacgaaatgtgctgatcttcgatttgggtggtggcaccttcgacgtatccatcttgaccattgacgagggctcactgtttgaggtgcgttccacggccggtgatactcacctgggaggagaagactttgataaccgaatggtgtcccactttgtggacgagttcaagcgcaaatacaagaaggacgtctcgtcaaatccacgtgctctgagacgtctacgaacggcctgcgagcgagccaagcgtacactgtcctcgagcactgaagcgactgtcgagatcgatgccctgctggacggaatcgactattacaccaagatttcaagggctcgatttgaggaactgtgctcggacttgttccgtaacacgctgcaaccggtggagcgagccctctcggatgccaaaatggacaagagcgccatccatgacattgtcctagttggcggatcgacccgaatcccgaaagtgcagtcactgctgcaaaacttcttctgtggaaaagctctgaacctttcgattaatccggacgaggccgtagcttacggtgcagcagttcaggcagctattctgaacggagacaaggatgaaaagattcaggatgttttgctggtggatgtggctcctctgtcgcttggaattgaaactgccggaggagtgatgaccaagctgatcgaacgcaacagtcgcatcccatgcaagcaaactcaaaccttctcaacgtacgcggacaaccaaccaggagtctcgattcaggtgtttgagggagaacgagccatgaccaaggacaacaaccggctgggtcagtttgatttgtccggaattcctccggcaccacgtggcgttccacagattgaggtcactttcgacttggatgccaacggaatcttgaacgtgtcggccaaggaaatgagctctggcaaggagaagaacatcaccatcaagaacgacaagggacgactcagccaggccgacattgaccggatggtttcggaagcggaccgattccgcgaggaagacgaaaaacagagagaacgcattgcggccagaaaccaactggagggctattgcttccagctgaaacagacgctggacacggccggggacaaactgagcgattcggatcggaacacggtcaaggacaaatgcgacgaaacgcttcgatggctggacggaaacacgatggccgagaaggacgagtttgagcacaagatgaaggagctgaaccaggtgtgcagtccaatcatgacgcgattgcaccagggatcgatgcctggagctgaggccaccagctgtggacagcaggcgggaggatttggtggacgaggtggtcccaccgttgaggaggttgactaa

SEQ ID NO: 48543 - protein, 638 aa, Culex pipiens
MSAIGIDLGTTYSCVGVFQHGKVEIIPNDQGNRTTPSYVAFSDTERLIGDAAKNQVAMNPRNTVFDAKRLIGRRFDDPKIQADLKHWPFQVISDGGKPKIEIEFKGERKRFAPEEISSMVLTKMKETAEAYLGKSVKNAVITVPAYFNDSQRQATKDAGAIAGLNVMRIINEPTAAALAYGLDKNLKGERNVLIFDLGGGTFDVSILTIDEGSLFEVRSTAGDTHLGGEDFDNRMVSHFVDEFKRKYKKDVSSNPRALRRLRTACERAKRTLSSSTEATVEIDALLDGIDYYTKISRARFEELCSDLFRNTLQPVERALSDAKMDKSAIHDIVLVGGSTRIPKVQSLLQNFFCGKALNLSINPDEAVAYGAAVQAAILNGDKDEKIQDVLLVDVAPLSLGIETAGGVMTKLIERNSRIPCKQTQTFSTYADNQPGVSIQVFEGERAMTKDNNRLGQFDLSGIPPAPRGVPQIEVTFDLDANGILNVSAKEMSSGKEKNITIKNDKGRLSQADIDRMVSEADRFREEDEKQRERIAARNQLEGYCFQLKQTLDTAGDKLSDSDRNTVKDKCDETLRWLDGNTMAEKDEFEHKMKELNQVCSPIMTRLHQGSMPGAEATSCGQQAGGFGGRGGPTVEEVD

SEQ ID NO: 48544 - DNA, 2040 bp, Pichia pastoris
  CDS (1)..(2037)
atgctgtcgttaaaaccatcttggctgactttggcggcattaatgtatgccatgctattggtcgtagtgccatttgctaaacctgttagagctgacgatgtcgaatcttatggaacagtgattggtatcgatttgggtaccacgtactcttgtgtcggtgtgatgaagtcgggtcgtgtagaaattcttgctaatgaccaaggtaacagaatcactccttcctacgttagtttcactgaagacgagagactggttggtgatgctgctaagaacttagctgcttctaacccaaaaaacaccatctttgatattaagagattgatcggtatgaagtatgatgccccagaggtccaaagagacttgaagcgtcttccttacactgtcaagagcaagaacggccaacctgtcgtttctgtcgagtacaagggtgaggagaagtctttcactcctgaggagatttccgccatggtcttgggtaagatgaagttgatcgctgaggactacttaggaaagaaagtcactcatgctgtcgttaccgttccagcctacttcaacgacgctcaacgtcaagccactaaggatgccggtctcatcgccggtttgactgttctgagaattgtgaacgagcctaccgccgctgcccttgcttacggtttggacaagactggtgaggaaagacagatcatcgtctacgacttgggtggaggaaccttcgatgtttctctgctttctattgagggtggtgctttcgaggttcttgctaccgccggtgacacccacttgggtggtgaggactttgactacagagttgttcgccacttcgttaagattttcaagaagaagcataacattgacatcagcaacaatgataaggctttaggtaagctgaagagagaggtcgaaaaggccaagcgtactttgtcttcccagatgactaccagaattgagattgactctttcgtcgacggtatcgacttctctgagcaactgtctagagctaagtttgaggagatcaacattgaattattcaagaagacactgaaaccagttgaacaagtcctcaaagacgctggtgtcaagaaatctgaaattgatgacattgtcttggttggtggttctaccagaattccaaaggttcaacaattattggaggattactttgacggaaagaaggcttctaagggaattaacccagatgaagctgtcgcatacggtgctgctgttcaggctggtgttttgtctggtgaggaaggtgtcgatgacatcgtcttgcttgatgtgaaccccctaactctgggtatcgagactactggtggcgttatgactaccttaatcaacagaaacactgctatcccaactaagaaatctcaaattttctccactgctgctgacaaccagccaactgtgttgattcaagtttatgagggtgagagagccttggctaaggacaacaacttgcttggtaaattcgagctgactggtattccaccagctccaagaggtactcctcaagttgaggttacttttgttttagacgctaacggaattttgaaggtctctgccaccgataagggaactggaaaatccgagtccatcaccatcaacaatgatcgtggtagattgtccaaggaggaggttgaccgtatggttgaagaggccgagaagtacgccgctgaggatgctgcactaagagaaaagattgaggctagaaacgctctggagaactacgctcattcccttaggaaccaagttactgatgactctgaaaccgggcttggttctaaattggacgaggacgacaaagagacattgacagatgccatcaaagataccctagagttcttggaagacaacttcgacaccgcaaccaaggaagaattagacgaacaaagagaaaagctttccaagattgcttacccaatcacttctaagctatacggtgctccagagggtggtactccacctggtggtcaaggttttgacgatgatgatggagactttgactacgactatgactatgatcatgatgagttgtagata

SEQ ID NO: 48545 - protein, 678 aa, Pichia pastoris
MLSLKPSWLTLAALMYAMLLVVVPFAKPVRADDVESYGTVIGIDLGTTYSCVGVMKSGRVEILANDQGNRITPSYVSFTEDERLVGDAAKNLAASNPKNTIFDIKRLIGMKYDAPEVQRDLKRLPYTVKSKNGQPVVSVEYKGEEKSFTPEEISAMVLGKMKLIAEDYLGKKVTHAVVTVPAYFNDAQRQATKDAGLIAGLTVLRIVNEPTAAALAYGLDKTGEERQIIVYDLGGGTFDVSLLSIEGGAFEVLATAGDTHLGGEDFDYRVVRHFVKIFKKKHNIDISNNDKALGKLKREVEKAKRTLSSQMTTRIEIDSFVDGIDFSEQLSRAKFEEINIELFKKTLKPVEQVLKDAGVKKSEIDDIVLVGGSTRIPKVQQLLEDYFDGKKASKGINPDEAVAYGAAVQAGVLSGEEGVDDIVLLDVNPLTLGIETTGGVMTTLINRNTAIPTKKSQIFSTAADNQPTVLIQVYEGERALAKDNNLLGKFELTGIPPAPRGTPQVEVTFVLDANGILKVSATDKGTGKSESITINNDRGRLSKEEVDRMVEEAEKYAAEDAALREKIEARNALENYAHSLRNQVTDDSETGLGSKLDEDDKETLTDAIKDTLEFLEDNFDTATKEELDEQREKLSKIAYPITSKLYGAPEGGTPPGGQGFDDDDGDFDYDYDYDHDEL

SEQ ID NO: 48546 - DNA, 2204 bp, Penicillium marneffei
  CDS (93)..(2003)
cctgtacactatcttctatcctcatttccttactttcccgtgatacccctcttcccatacacacccacatacacacaacatacacattcaccatggcccccgctatcggtatcgatttgggaaccacctactcctgcgtgggtgtcttccgtgatgaccgtatcgaaatcattgccaacgatcagggtaaccgaaccaccccctcgttcgttgccttcaccgactccgagcgtctcattggtgatgctgccaagaatcaggtcgccatgaaccctcacaacacagtcttcgatgctaagcgtttgatcggccgcaaattctccgatcctgaggtccaggctgatgccaagcacttccctttcaagatcatcgagaaggccaccaagcccgttatcgaggtcgagttcaagggtgaggtcaagcagttcacacctgaggaaatctcttccatggtcttgatcaagatgcgtgagactgctgaggcctacctcggtggtaccgttaacaacgctgtcatcactgtccccgcctacttcaacgactcccagcgtcaggccaccaaggatgctggtctcattgccggtttgaacgtcctccgtatcatcaacgaacctactgctgccgccattgcctacggtctcgacaagaaggttgagggtgagcgcaacgttctcatcttcgatcttggtggtggtaccttcgatgtctctctcctcaccatcgaggacggtatcttcgaggtcaaggccaccgccggtgacactcacttgggtggtgaggacttcgactctcgccttgtcaaccactttgcctccgagttcaagaggaaatataagaaggatttgaccaccaatgctcgtgctctccgccgtctccgcactgcctgtgagcgtgctaagcgtaccctctcttcttccgcccagacctccattgagatcgactctctcttcgagggtattgacttctacacctccatcacccgtgctcgtttcgaggagctctgccaggatctcttccgttccaccatggagcccgtcgagcgtgtcctccgtgatgccaagaccgacaagtcttctgtccacgaaatcgtcttggtcggtggttccacccgtatccccaagatccagaagctcgtcaccgacttcttcaacaaggagcccaacaagtccatcaaccccgatgaggctgttgcctacggtgctgccgtccaggctgctatcctttctggtgacacttcttccaagtccaccaacgaaatcttgcttctcgacgttgctcctctctccgtcggtattgagactgctggaggtgtcatgactcctctcatcaagcgcaacaccaccatccccaccaagaagtccgagaccttctccacctactccgacaaccagcccggtgtgttgattcaggtctacgagggtgagcgtgctcgtaccaaggacaacaacttgctcggcaagttcgagctcactggcatcccccctgctcctcgtggtgttcctcagatcgaggtcaccttcgacatggacgccaacggtatcatgaacgtctctgccgttgagaagggtaccggtaagagcaacaagattgtcatcaccaacgacaagggccgtctctccaaggaggaaatcgagcgcatgttggctgaggctgagaagtacaaggctgaggatgaggccgaggctacccgtatccaggccaagaacggtcttgagtcttatgcttactccctcaagaacaccctcagcgagggcaagctcaccattgacgcttccgagaaggagaagctcgaggctgagatcgaaaagaccatcagctggctcgacagcaaccagaccgccaccaaggacgagtacgaggctcagcagaaggagctcgagagcgttgctaaccccatcatctccgcagcctatggcggagcaggagctgctcccggagctaccggtgcttctgctacccgcgaggctgatgaggttgaggagcgccctgaggagctcgactaaacgcctaatgagtttgaagtttgatgagctttggagttttttaaaattcttttcatttgtcttatcatttcctttgttggccaaaaattccttgctatgcgagattcggcgctaatgtcatgacggttatgttttatgagcatagatgcgcaatgcgctaatcaatcaattccttcttattctttgaaaaaaaaaaaaaaa

SEQ ID NO: 48547 - protein, 636 aa, Penicillium marneffei
MAPAIGIDLGTTYSCVGVFRDDRIEIIANDQGNRTTPSFVAFTDSERLIGDAAKNQVAMNPHNTVFDAKRLIGRKFSDPEVQADAKHFPFKIIEKATKPVIEVEFKGEVKQFTPEEISSMVLIKMRETAEAYLGGTVNNAVITVPAYFNDSQRQATKDAGLIAGLNVLRIINEPTAAAIAYGLDKKVEGERNVLIFDLGGGTFDVSLLTIEDGIFEVKATAGDTHLGGEDFDSRLVNHFASEFKRKYKKDLTTNARALRRLRTACERAKRTLSSSAQTSIEIDSLFEGIDFYTSITRARFEELCQDLFRSTMEPVERVLRDAKTDKSSVHEIVLVGGSTRIPKIQKLVTDFFNKEPNKSINPDEAVAYGAAVQAAILSGDTSSKSTNEILLLDVAPLSVGIETAGGVMTPLIKRNTTIPTKKSETFSTYSDNQPGVLIQVYEGERARTKDNNLLGKFELTGIPPAPRGVPQIEVTFDMDANGIMNVSAVEKGTGKSNKIVITNDKGRLSKEEIERMLAEAEKYKAEDEAEATRIQAKNGLESYAYSLKNTLSEGKLTIDASEKEKLEAEIEKTISWLDSNQTATKDEYEAQQKELESVANPIISAAYGGAGAAPGATGASATREADEVEERPEELD

SEQ ID NO: 48548 - DNA, 2299 bp, Glycine max
  CDS (53)..(2059)
ggcacgagatcgtccatcgagaaaggaagaaaagaaacaaggtgacatcatcatggcttgctcgttttctcgcgggtctctgcttcctctcgccatcatcgtttccttaggatgtctatttgcgatttccattgcaaaggaggaagccaccaagttggggacggtcattgggattgatcttggaacgacctattcatgtgttggtgtttacaagaacggccatgttgaaatcatagccaatgaccaaggtaaccgtatcaccccttcttgggttgctttcaccgacagtgagagactcattggggaggctgccaagaatctggcagctgtcaacccagaaagggtcatctttgatgtcaagagacttattggaagaaagtttgaagataaggaagttcaacgagacatgaagcttgttccttataagattgtcaacaaggatggaaaaccttacatacaggtgaaaattaaggatggtgagaccaaggtgttcagccctgaggaaatcagtgccatgattctgaccaagatgaaggaaactgcggaagcattccttgggaagaaaattaatgatgctgtggtcactgtcccagcttacttcaatgatgctcagaggcaggccaccaaagatgctggtgtcattgctggtctcaatgttgctagaattattaatgaacctactgctgctgccattgcgtatggattggacaagaaaggtggcgagaagaacattcttgtttttgaccttgggggtggaacatttgatgtcagtatcttgacaattgataatggtgtttttgaggttcttgctacaaatggagatactcatcttggaggtgaggactttgatcagagaataatggagtacttcattaaattgatcaataaaaagcataaaaaggatattagcaaggacagccgagcacttagcaagctgaggagagaggctgaacgtgcaaagagagctctcagcagccagcaccaggtccgcgtggaaattgaatcactttttgatggtgttgatttttctgagccactcacccgagctcggtttgaggagttgaacaatgacttgttccggaagaccatgggaccagtgaagaaggctatggaagatgctggattacagaagaatcaaattgacgagattgttcttgtcggtggaagcacaaggattccaaaggtacaacagcttttgaaggactactttgatggaaaggagccaaacaagggtgtcaaccctgatgaagcagttgcctatggtgctgcagtgcaaggaagcattttgagtggagagggtggtgaggaaaccaaagatatccttctcttggatgtggctcccctcacccttggaattgaaactgttggtggggtgatgacgaagttgattcccagaaatactgttatccctaccaagaaatcccaggtgtttaccacctaccaggatcagcagagtaccgtctccattcaggtttttgaaggggagaggagtctcacaaaggattgccgtctgcttgggaaatttgaactgtctggaattcctccagctccaaggggtacccctcaaattgaagtgaccttcgaagttgatgcaaatggcattctaaatgtgaaggcagaagacaagggcactggtaaatcagaaaagataacaattacaaatgaaaagggacgtcttagccaggaggaaattgagcggatggttcgcgaagcagaagagtttgctgaggaagacaaaaaagtgaaggagaggattgatgctcgtaacagtcttgaaacctatgtctacaacatgaaaaaccaggtcagtgacaaagacaagctcgctgacaagttggagtctgatgaaaaagagaaagttgagactgcagtgaaagaagcattggaatggctggatgacaaccagagcgtggagaaagaagaatatgaggagaagctcaaagaggtggaagctgtttgcaacccaatcatcagtgctgtctatcagagatcaggtggagccccaggtggtggtgcatcaggcgaggacgacgatgaagattctcatgacgagctctagagatgttgttgcttaagcagtagcattaaatgatgagcagtagtgtaggttaaacggagtcttcaaaattttgtaacaggtggaaattgacaatagtttccccagctcttgtatctttggtgccgaaaatactttaaagatgaatgcttgaatttgttttaggatcgctagtttaaccaccatacttcttcggctttccgatattcgtttttatcttcatgctagggaggacggttggac

SEQ ID NO: 48549 - protein, 668 aa, Glycine max
MACSFSRGSLLPLAIIVSLGCLFAISIAKEEATKLGTVIGIDLGTTYSCVGVYKNGHVEIIANDQGNRITPSWVAFTDSERLIGEAAKNLAAVNPERVIFDVKRLIGRKFEDKEVQRDMKLVPYKIVNKDGKPYIQVKIKDGETKVFSPEEISAMILTKMKETAEAFLGKKINDAVVTVPAYFNDAQRQATKDAGVIAGLNVARIINEPTAAAIAYGLDKKGGEKNILVFDLGGGTFDVSILTIDNGVFEVLATNGDTHLGGEDFDQRIMEYFIKLINKKHKKDISKDSRALSKLRREAERAKRALSSQHQVRVEIESLFDGVDFSEPLTRARFEELNNDLFRKTMGPVKKAMEDAGLQKNQIDEIVLVGGSTRIPKVQQLLKDYFDGKEPNKGVNPDEAVAYGAAVQGSILSGEGGEETKDILLLDVAPLTLGIETVGGVMTKLIPRNTVIPTKKSQVFTTYQDQQSTVSIQVFEGERSLTKDCRLLGKFELSGIPPAPRGTPQIEVTFEVDANGILNVKAEDKGTGKSEKITITNEKGRLSQEEIERMVREAEEFAEEDKKVKERIDARNSLETYVYNMKNQVSDKDKLADKLESDEKEKVETAVKEALEWLDDNQSVEKEEYEEKLKEVEAVCNPIISAVYQRSGGAPGGGASGEDDDEDSHDEL

SEQ ID NO: 48550 - DNA, 1926 bp, Pseudomonas putida
  CDS (1)..(1926): transl_table=11
atgggtaaaatcatcggtatcgacttggggaccaccaactcgtgcgtctccatcctggaaaacggtaacgtcaaagtcatcgaaaacgccgaaggtgcgcgtactaccccttcgatcgtggcctatgccaacgatggcgaaatcctggtaggccagtctgccaagcgtcaggctgtcaccaacccgcacaacaccctgttcgcagtgaagcgcctgattggccgtcgcttcgaagagcaagtggtgcaaaaagacatcgagctggtgccgtacaaaatcgccaaggccgacaacggtgacgcctgggtcgaagtcaacggccagaaaatggcgccgccgcaaatcagcgccgaagtcctgaaaaagatgaagaagaccgccgaagactacctcggcgagccggtcacggaggcggtcatcaccgtgacggcctacttcagcgacagccagcgtcaggccaccaaagacgccggtcgcatcgcgggcctggacgtaaagcgcatcatcaacgaaccgaccgctgcggcactggcctatggcatggacaaagccaagggcgaccacactgtcatcgtttatgacctgggtggcggtaccttcgacgtttcggtcatcgaaatcgccgaagtcgacggtgagcaccagtttgaagtactggctaccaacggcgacaccttcctgggtggcgaagacttcgacatgctgctgattgactacctcgtcgaggagttcaagaaagagtccggcatgaacctgaagggcgacccgctggccatgcagcgcctgaaagaagccgctgaaaaggccaagatcgagctgtcgtgccgcgcagcagaccgacggtacatcactgcagatgccaccggtcgtaagcacttgaacgtgaaaatctcccgcgccaagctggagtcgctggttgaaggcctggtgcagcgcaccatcgagccttgccgcatcgcgctgaaagatgccggcatcgacgccagcaagatcgacgacgtgatcctggtcggcggccagacccgtatgccgctggtacagaaaaccgttgccgacttcttcggcaaggaagcccgcaaggacgtcaacccggacgaagccgtcgccacgggcgccgctatccagggtgctgtattggccggtgacgtgaaagacgtactgctgctggacgtcagcccgctgaccctgggtatcgaaaccatgggtggcgtgatgactgcgctgatcgagaagaacaccaccatcccgaccaagaagtcgcaggtgttctcgactgccgacgacaaccagagcgccgtgaccattcacgtgctgcaaggtgagcgtaagcaggcttcgagcaacaagtcgctgggcaagttcgacctggccgagatcccgccagcaccacgcggtgttccacagatcgaagtgaccttcgacatcgacgccaacggcatcctgcacgtcggcgcgaaagacaaggccaccggcaagacccagtcgatcgtgatcaaggccaactccggcctgtccgatgacgaaatcgagcgcatggtgcgtgacgccgaggccaacgccgaggaggaccgcaagttcgaagagctggccgctgcccgtaaccagggtgatgcgggtgatgcactggttcactcgacccgcaagatggtcgctgatgcaggtgacaaggtcaccgctgaagagaaaaccgccatcgaagcggcagtcgttgccctggaagccgctgtcaaaggcgacgacaaggccgcgatcgaagccaaggtcgaagagctgtccaaggtctccgcgccagtggctcagaagatgtacgccgagcagcaagccgaacagcctcagggcggcgcgcagcaggccgaaccggaagccaagcacgatgacgtggttgacgccgagttcgaagaagtaaaaggcgacgacaagaagtaa

SEQ ID NO: 48551 - protein, 641 aa, Pseudomonas putida
MGKIIGIDLGTTNSCVSILENGNVKVIENAEGARTTPSIVAYANDGEILVGQSAKRQAVTNPHNTLFAVKRLIGRRFEEQVVQKDIELVPYKIAKADNGDAWVEVNGQKMAPPQISAEVLKKMKKTAEDYLGEPVTEAVITVTAYFSDSQRQATKDAGRIAGLDVKRIINEPTAAALAYGMDKAKGDHTVIVYDLGGGTFDVSVIEIAEVDGEHQFEVLATNGDTFLGGEDFDMLLIDYLVEEFKKESGMNLKGDPLAMQRLKEAAEKAKIELSCRAADRRYITADATGRKHLNVKISRAKLESLVEGLVQRTIEPCRIALKDAGIDASKIDDVILVGGQTRMPLVQKTVADFFGKEARKDVNPDEAVATGAAIQGAVLAGDVKDVLLLDVSPLTLGIETMGGVMTALIEKNTTIPTKKSQVFSTADDNQSAVTIHVLQGERKQASSNKSLGKFDLAEIPPAPRGVPQIEVTFDIDANGILHVGAKDKATGKTQSIVIKANSGLSDDEIERMVRDAEANAEEDRKFEELAAARNQGDAGDALVHSTRKMVADAGDKVTAEEKTAIEAAVVALEAAVKGDDKAAIEAKVEELSKVSAPVAQKMYAEQQAEQPQGGAQQAEPEAKHDDVVDAEFEEVKGDDKK

SEQ ID NO: 48552 - DNA, 1920 bp, Rhizobium tropici
  CDS (1)..(1920): transl_table=11
atggcaaaagtaattggtatcgaccttggaacgacaaattcctgcgtcgccgtcatggacggtaaagacgcaaaagtgatcgaaaatgccgaaggcgcccggacgaccccctccatggttgccttcaccgacgatggtgaacgtctcgtcggccagccggccaagcgccaggctgtcaccaaccccacaaacaccctcttcgctgtcaagcgcctcatcggccgccgctacgaagatccgacggtcgagaaggacaagcaccttgttcccttcaacatcgttcggggcgacaatggcgacgcctgggtagaagccaacggcaagggctattcgcccgcacagatttccgcaatgatccttcagaagatgaaggaaaccgccgaatcctacctcggcgaaaaggtcgaaaaggccgtcatcaccgttcccgcatacttcaacgacgcgcagcgccaggcaaccaaggatgccggcaagatcgccggtcttgaagtcctgcgcatcatcaacgagccgacggctgcagcccttgcttacggcctcgacaagaaggacggcaagaccatcgccgtttacgaccttggcggcggcaccttcgatatctccatcctggaaatcggcgacggcgtcttcgaagtgaagtcgaccaacggcgataccttcctcggcggtgaagacttcgacatgcgcctcgtcgaatatctcgtcgccgagttcaagaaggacaacggcatcgatctcaagggcgacaagcttgctctgcagcgcctcaaggaagctgccgaaaaggccaagatcgaactttcgtccgcacagcagaccgaaatcaacctgcccttcattacggcggacgctaccggcccgaagcacctgacgctgaagctgacccgcgccaagctggaaagcctggtcgacgatctcgtccagcgcaccatcgctccgtgcaaggcagccctcaaggatgccggcgttacggctgccgagatcgacgaagtcgttctcgtcggcggcatgagccgcatgccgaaggtacaggaagtcgtcaagcagctgttcggcaaggagccgcacaagggcgtcaacccggatgaagtcgtcgcgctcggcgccgctatccaggccggcgttctgcagggcgatgtcaaggacgttctgctcctcgacgtgaccccgctgtctctcggcatcgaaacgctgggcggcgtcttcacccgtctgatcgaacgcaacacgacgatcccgacgaagaagtcccagaccttctcgaccgccgacgacaaccagtcggccgtgaccatccgtgtttcgcagggcgagcgcgaaatggctgcagacaacaagctgctcggccagttcgacctcgtcggcctgccgccggcaccgcgcggtgttccgcagatcgaagtcaccttcgatatcgacgccaacggcatcgtccaggtttcggccaaggataagggcaccggcaaggaacagcagatccgcatccaggcttccggcggtctttccgacgccgacatcgagaagatggtcaaggatgccgaagcccatgctgccgaagacaagaagcgccgcgaaggtgtcgaagccaagaaccaggctgaaagcctgatccactccagcgagaagtcgctgaaggattacggcgacaaggtcaccgaagccgatcgcaccgcgatttccgatgcgattgcagcgctgaaggcggcaaccgaagcttccgaaccggatgccgaagacatcaaggccaagacccagacgcttatggaagtttccatgaagctcggccaggcgatctatgaatcgcagcaagcggaagccggttccggcgacgcctcggcagcaggcggcaaggacgatgtcgtcgatgccgactacgaggaaatcaaggacgaaggcgaccataagcggtctgcataa

SEQ ID NO: 48553 - protein, 639 aa, Rhizobium tropici
MAKVIGIDLGTTNSCVAVMDGKDAKVIENAEGARTTPSMVAFTDDGERLVGQPAKRQAVTNPTNTLFAVKRLIGRRYEDPTVEKDKHLVPFNIVRGDNGDAWVEANGKGYSPAQISAMILQKMKETAESYLGEKVEKAVITVPAYFNDAQRQATKDAGKIAGLEVLRIINEPTAAALAYGLDKKDGKTIAVYDLGGGTFDISILEIGDGVFEVKSTNGDTFLGGEDFDMRLVEYLVAEFKKDNGIDLKGDKLALQRLKEAAEKAKIELSSAQQTEINLPFITADATGPKHLTLKLTRAKLESLVDDLVQRTIAPCKAALKDAGVTAAEIDEVVLVGGMSRMPKVQEVVKQLFGKEPHKGVNPDEVVALGAAIQAGVLQGDVKDVLLLDVTPLSLGIETLGGVFTRLIERNTTIPTKKSQTFSTADDNQSAVTIRVSQGEREMAADNKLLGQFDLVGLPPAPRGVPQIEVTFDIDANGIVQVSAKDKGTGKEQQIRIQASGGLSDADIEKMVKDAEAHAAEDKKRREGVEAKNQAESLIHSSEKSLKDYGDKVTEADRTAISDAIAALKAATEASEPDAEDIKAKTQTLMEVSMKLGQAIYESQQAEAGSGDASAAGGKDDVVDADYEEIKDEGDHKRSA

SEQ ID NO: 48554 - DNA, 1917 bp, Rhizobium leguminosarum
  CDS (1)..(1917): transl_table=11
atggcaaaagtaattggtatcgaccttggaacgacgaattcctgcgtcgcagtcatggacggcaaggacgcgaaggttatcgagaatgcggaaggtgcacgcacgaccccttccatggtggcattttccgatgatggcgaacgcctcgtcggccagccggccaagcgccaggcagtcaccaacccgacgaacacgctctttgcggtcaagcgcctgatcggccgccgctacgaagatccgaccgtcgagaaggacaagcacctcgttcccttcaccatcgtcaagggcgacaatggcgacgcctgggtcgaagccaatggcaagggctattcgcccgcacagatttccgcgatgatccttcagaagatgaaggaaaccgccgaatcctatctcggcgaaaaggtcgagaaggccgttatcaccgttcccgcctatttcaacgacgcgcagcgccaggcaaccaaggatgccggccgcatcgctggtcttgaagttctgcgcatcatcaacgagccgaccgctgcagccctcgcctacggcctcgacaagaaagaaggcaagacaattgccgtctacgaccttggcggcggcaccttcgatatttcgatcctcgagatcggcgacggcgtcttcgaagtgaagtccaccaacggcgatactttcctcggcggtgaagacttcgacatgcgtctcgtcgaatatctcgttgccgagttcaagagggacaacggcatcgacctgaagaacgacaagcttgccctgcagcgcctcaaggaagctgcggaaaaggcaaagatcgagctttcgtcctcgcagcagaccgaaatcaacctgccgttcatcacggccgacgcctccggcccgaagcatctgacgctgaagctgacccgcgccaagctcgagagcctggtcgacgatctcgtccagcgcacgatcgcgccgtgcaaggcagcgctcaaggatgccggtgtcaccgctgccgaaatcgacgaagtggttctcgtcggtgggatgagccgcatgccgaaggtacaggaagtcgtcaagcagctgttcggcaaggagccgcataagggcgtcaacccggatgaagtggtggcgcttggtgctgccatccaggccggcgttctgcagggcgacgtcaaggatgtcctgctcctcgacgtgacgccgctgtcgctcggcatcgagaccctaggtggtgtcttcacccgcctgatcgaacgcaacacgacgatcccgacgaagaagagccagaccttctcgaccgccgaagacaaccagcaggccgtgaccatccgcgtttcacagggcgagcgtgaaatggctgccgacaacaagctgctcggccagttcgacctcgttggtctgccaccgtcgccgcgcggcatgccgcagatcgaagtcaccttcgacatcgacgccaacggcatcgtgcaggtttcggccaaggacaagggcaccggcaaggaacagcagatccgcatccaggcttccggcggtctttccgacgccgacatcgagaagatggtgaaggatgccgaagcccatgccaccgaagacaagaagcgccgcgaggccgtcgaagcccggaaccaggctgaaagcctgatccattcctcggaaaagtcgctgaaagattacggtgacaaggtttccgaggccgaccgcaccgcgatctcggatgcgatcgccgcgctgaagacggcgtcggaagcgtcggagcccgatgccgacgacatcaaggccaagacccagacgctgatggaagtgtcgatgaagctcggccaggcgatctatgaagcacagcaggccgaaagcggcgctgctggcgatgcctccgccgaaggcggcgacaatgtcgtcgatgccgactacgaggaaatcaaggacgacgaccgcaagaagtccgcgtaa

SEQ ID NO: 48555 - protein, 638 aa, Rhizobium leguminosarum
MAKVIGIDLGTTNSCVAVMDGKDAKVIENAEGARTTPSMVAFSDDGERLVGQPAKRQAVTNPTNTLFAVKRLIGRRYEDPTVEKDKHLVPFTIVKGDNGDAWVEANGKGYSPAQISAMILQKMKETAESYLGEKVEKAVITVPAYFNDAQRQATKDAGRIAGLEVLRIINEPTAAALAYGLDKKEGKTIAVYDLGGGTFDISILEIGDGVFEVKSTNGDTFLGGEDFDMRLVEYLVAEFKRDNGIDLKNDKLALQRLKEAAEKAKIELSSSQQTEINLPFITADASGPKHLTLKLTRAKLESLVDDLVQRTIAPCKAALKDAGVTAAEIDEVVLVGGMSRMPKVQEVVKQLFGKEPHKGVNPDEVVALGAAIQAGVLQGDVKDVLLLDVTPLSLGIETLGGVFTRLIERNTTIPTKKSQTFSTAEDNQQAVTIRVSQGEREMAADNKLLGQFDLVGLPPSPRGMPQIEVTFDIDANGIVQVSAKDKGTGKEQQIRIQASGGLSDADIEKMVKDAEAHATEDKKRREAVEARNQAESLIHSSEKSLKDYGDKVSEADRTAISDAIAALKTASEASEPDADDIKAKTQTLMEVSMKLGQAIYEAQQAESGAAGDASAEGGDNVVDADYEEIKDDDRKKSA

SEQ ID NO: 48556 - DNA, 1905 bp, Rhizobium galegae
  CDS (1)..(1905): transl_table=11
atggcaaaagtaattggcatcgacctcggtaccaccaactcctgcgtcgccatcatggacggcaaagatgcgaaggtgatcgagaacgccgaaggcgcgcgtaccacgccctccatggtcgcattttccgatgacggcgaacgcctcgtcggccagccggccaagcgccaggcagtgaccaaccccaccaataccctcttcgctgtgaagcgcctcatcggccgccgccacgaagatccgaccgtgcagaaggacaggggtctcgtccccttcgacatcgtcaaaggcgacaatggcgacgcctgggtcaaggctcagggcaaggcctattctcccgcacagatttccgcgatgatccttcagaagatgaaggaaactgccgaatcctatctcggtgaaaaggtcgaaaaggccgtcatcaccgttccggcatacttcaacgatgcccagcgccaggcgaccaaggatgcaggccgcatcgccggtcttgaagttctccgcatcatcaacgagccgaccgctgccgctctcgcctacggtctcgacaagaaggacggcaagacgatcgccgtctacgaccttggcggcggcacgttcgatatctcggttctcgaaatcggcgacggcgtcttcgaagtgaagtccaccaatggcgacaccttcctcggtggtgaagacttcgacatgcgtctggtcgaatatctcgcggccgagttcaagaaggacaacggcatcgacctgaagaacgacaagctcgctctgcagcgcctcaaggaagctgccgaaaaggccaagatcgaactctcgtcctcgcagcagaccgaaatcaacctgccgttcatcaccgccgacgcttccggtccgaagcacctgacgctgaagctgacccgcgccaagttcgaaagcctggtcgacgatctcgtccagcgcaccatcgcgccgtgcaaggcagccctcaaggatgccggcgtcaccgcagccgaaatcgatgaagtggttctcgtcggcggcatgagccgcatgccgaaggtccaggaagtcgtcaagcagctgttcggcaaggagccgcacaagggcgtcaacccggatgaagtcgtcgctctcggcgccgccatccaggccggcgttcttcagggcgatgtcaaggacgttctgcttctcgacgtgaccccgctgtcgctcggcatcgaaacgctcggtggcgtcttcacccgcctgatcgaccgtaacacgacgatcccgaccaagaagagccagaccttctcgaccgccgaagacaaccagcaggccgtgaccatccgcgtatcgcagggcgaacgcgaaatggcccaggacaacaagctgctcggccagttcgacctcgtcggcctgccgccgtcgccgcgcggcatgccgcagatcgaagtgaccttcgacatcgacgccaatggcatcgtccaggtttcggccaaggacaagggcaccggcaaggaacagcagatccgtatccaggcttccggcggtctctccgacgccgagatcgagaagatggtcaaggacgccgaggccaatgccgaagccgacaagaagcgccgtgccggcgtcgaagccaagaaccaggccgaaagcctcgttcactccagcgagaagtcgctgaaggaatatggcgacaaggtttccgagaccgaccgcaaggcgatcgaggatgcgatcgcttcgctgaagaccgccatcgaagctccggaaccggatgccgatgacatccaggcaaagacgcaggtcctgatggaagtatccatgaagcttggccaggccatctatgaggcccagcaggccgaaggcgagggttccgagggcggcaaggacgatatcgtcgatgccgactacgaggaaatcaaggacgaagaccgcaagcggtctgcctaa

SEQ ID NO: 48557 - protein, 634 aa, Rhizobium galegae
MAKVIGIDLGTTNSCVAIMDGKDAKVIENAEGARTTPSMVAFSDDGERLVGQPAKRQAVTNPTNTLFAVKRLIGRRHEDPTVQKDRGLVPFDIVKGDNGDAWVKAQGKAYSPAQISAMILQKMKETAESYLGEKVEKAVITVPAYFNDAQRQATKDAGRIAGLEVLRIINEPTAAALAYGLDKKDGKTIAVYDLGGGTFDISVLEIGDGVFEVKSTNGDTFLGGEDFDMRLVEYLAAEFKKDNGIDLKNDKLALQRLKEAAEKAKIELSSSQQTEINLPFITADASGPKHLTLKLTRAKFESLVDDLVQRTIAPCKAALKDAGVTAAEIDEVVLVGGMSRMPKVQEVVKQLFGKEPHKGVNPDEVVALGAAIQAGVLQGDVKDVLLLDVTPLSLGIETLGGVFTRLIDRNTTIPTKKSQTFSTAEDNQQAVTIRVSQGEREMAQDNKLLGQFDLVGLPPSPRGMPQIEVTFDIDANGIVQVSAKDKGTGKEQQIRIQASGGLSDAEIEKMVKDAEANAEADKKRRAGVEAKNQAESLVHSSEKSLKEYGDKVSETDRKAIEDAIASLKTAIEAPEPDADDIQAKTQVLMEVSMKLGQAIYEAQQAEGEGSEGGKDDIVDADYEEIKDEDRKRSA

SEQ ID NO: 48558 - DNA, 1917 bp, Agrobacterium vitis
  CDS (1)..(1917): transl_table=11
atggctaaagtaatcggtattgaccttggaacgaccaattcctgcgtttctgtcatggacggcaaggatgcgaaggtcattgaaaattcagagggcgcgcgtaccacgccgtccatggtggctttttctgacgatggtgagcgccttgtcggccagccggccaagcgccaggcggtgacaaaccccaccaacacgctcttcgctgtcaagcgcctgattggccgccgctacgaagatccgaccgttgaaaaggacaagggcctggtgcctttcccgatcatcaagggcgacaatggtgatgcctgggtcgaagcccagggcaagggctactcgccagcccagatctctgcgatgatcttgcagaagatgaaggaaacggcagaagcttacctcggcgaaaaggtcgaaaaggccgttatcaccgttcccgcttacttcaatgacgcccagcgtcaggccaccaaggatgcaggccgcatcgcgggtctcgaagttctgcgcatcatcaacgagccaaccgctgctgctttggcctatggcctcgacaagaccgaaggcaagaccattgccgtctacgacttgggcggtggtacgttcgatatttccgttctggaaatcggcgatggcgtgttcgaagtgaagtccaccaacggtgacaccttcctcggtggtgaagacttcgacatgcgtctggtcgagtatttggctgccgagttcaagaaggaacagggcattgagctgaagaacgacaagctcgctctccagcgcctgaaggaagccgctgaaaaggccaagatcgaactgtcctcgtcgcagcagactgaaatcaacctgccattcatcacggctgacgcttctggtccgaagcatttgaccatgaagctgacccgcgccaagtttgaaaacctggtggatgatctggttcagcgcactgttgcaccgtgcaaggcagccctcaaggacgctggcgtcagcgccgctgacattgatgaagttgttctggtgggcggcatgagccgcatgccgaaggtgcaggaagttgtaaagcagctgttcggcaaagaaccacacaagggtgtgaacccggacgaagtggttgccatgggtgctgccattcaggctggcgttctgcagggcgacgtcaaggacgttctgctgctcgacgtcaccccgctgtcgctcggcattgaaacccttggcggtgtcttcacccgtctgatcgaccgtaacacgacgatcccgaccaagaagagccaggtgttctcgaccgctgacgataaccagcaggctgtcaccatccgcgtatcgcagggcgagcgcgaaatggcccaggacaacaagctgcttggccagttcgacctggttggtctgccaccggcaccgcgcggcgttccgcagatcgaagtgaccttcgatatcgacgccaacggtattgtgcaggtctcggccaaggacaagggcaccggcaaggaacagcagatccgcattcaggcctctggtggtctgtcggatgctgacatcgaaaagatggtcaaggacgctgaagccaacgccgaagccgacaagaaccgtcgcgctgtggttgaagccaagaaccaggctgaaagcttgatccattccaccgaaaagtcggtgaaggattatggtgacaaggtttccgctgacgaccgcaaggcgattgaagatgccattgcggccctgaagtcttcggttgaaacctcggagccgaacgccgaggacatccaggccaagacccagaccttgatggaagtgtccatgaagcttggtcaggcgatttacgagtcccagcaggccgaaggcggtgctgaaggtgggccaagtggtcaccatgatgacggcatcgtcgatgccgactatgaagaagtgaaggacgacaacacgaagaagtctgcttga

SEQ ID NO: 48559 - protein, 638 aa, Agrobacterium vitis
MAKVIGIDLGTTNSCVSVMDGKDAKVIENSEGARTTPSMVAFSDDGERLVGQPAKRQAVTNPTNTLFAVKRLIGRRYEDPTVEKDKGLVPFPIIKGDNGDAWVEAQGKGYSPAQISAMILQKMKETAEAYLGEKVEKAVITVPAYFNDAQRQATKDAGRIAGLEVLRIINEPTAAALAYGLDKTEGKTIAVYDLGGGTFDISVLEIGDGVFEVKSTNGDTFLGGEDFDMRLVEYLAAEFKKEQGIELKNDKLALQRLKEAAEKAKIELSSSQQTEINLPFITADASGPKHLTMKLTRAKFENLVDDLVQRTVAPCKAALKDAGVSAADIDEVVLVGGMSRMPKVQEVVKQLFGKEPHKGVNPDEVVAMGAAIQAGVLQGDVKDVLLLDVTPLSLGIETLGGVFTRLIDRNTTIPTKKSQVFSTADDNQQAVTIRVSQGEREMAQDNKLLGQFDLVGLPPAPRGVPQIEVTFDIDANGIVQVSAKDKGTGKEQQIRIQASGGLSDADIEKMVKDAEANAEADKNRRAVVEAKNQAESLIHSTEKSVKDYGDKVSADDRKAIEDAIAALKSSVETSEPNAEDIQAKTQTLMEVSMKLGQAIYESQQAEGGAEGGPSGHHDDGIVDADYEEVKDDNTKKSA

SEQ ID NO: 48560 - DNA, 1905 bp, Agrobacterium rubi
  CDS (1)..(1905): transl_table=11
atggcaaaagtaatcggtatcgaccttggcacgaccaattcctgcgttgcagtgatggacggcaaggacaccaaagttattgaaaacgcggaaggtgcacgcacgaccccttccatggttgcattcagcgacgatggcgagcgtctggtcggccagcctgcaaagcgtcaggccgtcaccaacccgaccaacactctgtttgccgtcaagcgcctgatcggccgccgttacgaagatccgaccgtcgaaaaggacaagggcctcgttccgttcgagatcgtcaagggcgacaatggcgacgcctgggttcaggcacagggcaagggctactccccttcgcagatttccgccatgattcttcagaagatgaaggaaacggccgaatcctatctcggcgagaaggtcgaaaaggccgttatcaccgttccagcctactttaacgacgcacagcgtcaggccaccaaggatgcaggccgcatcgctggtcttgaagttctgcgcatcatcaacgagccgaccgcagctgccttggcttatggcctcgacaagacggaaggtaagacgattgccgtttacgacttgggcggcggtaccttcgatatttccgttctggaaatcggcgacggcgtgttcgaagtgaagtccaccaatggcgataccttccttggcggtgaagacttcgacatgcgtctggtcgaatatctggccggtgagttcaagaaggatcagggcattgatctcaagggcgacaagcttgcgcttcagcgcctgaaggaagctgccgaaaaggcaaagatcgaactgtcctcttcgcagcagaccgaaatcaacctgcccttcatcaccgctgatgcaaccggtcctaagcacctgacgctgaagctgacgcgtgccaagttcgaaagcctggtcgatgacctggttcagcgtactgttgcaccgtgcaaggcagccttgaaggatgctggagtcaccgcagccgagatcgacgaagtcgttctcgtcggtggtatgagccgcatgccgaaggttcaggaagtcgtcaagcagctgtttggcaaggagccgcataagggtgtgaacccggatgaagtggttgccatgggtgccgccattcaggccggtgttctgcagggtgacgtgaaggacgttctgcttctcgacgtaacaccgctgtcgctcggcatcgaaacgctgggtggtgtcttcacccgtctgatcgaccgtaacacgacgatcccgacgaagaagagccagaccttctcgacagccgaagacaaccagtctgccgtgaccatccgcgtttcccagggtgagcgcgaaatggcgcaggacaacaagcttctcggccagttcgacctcgtcggcctgccaccatcgccacgtggcgttccgcagatcgaagtcaccttcgatatcgacgccaacggcatcgtgcaggtttcggccaaggacaagggcaccggcaaggaacagcagatccgcatccaggcatctggtggtctgtccgacgccgacatcgacaagatggtgaaggacgccgaggccaatgccgaagccgacaagaagcgtcgtgccggtgtggaagccaagaaccaggccgaaagcctgatccactcctccgagaaatcggtcaaggagtatggtgacaaggtttctgaaacggaccgcaaggccatcgaagatgcgatcgctgcgctgaagacatcggttgaggcctccgagcctgacgccgacgacattcaggccaagactcagaccctcatggaagtctccatgaagcttggtcaggccgtctacgaagcccagcaggctgaaagcggcgaaggcgctgccgaaggtcacaaggatgacgtggtcgatgcagactacgaggaaatcaaggacgacaagaagtccgcataa

SEQ ID NO: 48561 - protein, 634 aa, Agrobacterium rubi
MAKVIGIDLGTTNSCVAVMDGKDTKVIENAEGARTTPSMVAFSDDGERLVGQPAKRQAVTNPTNTLFAVKRLIGRRYEDPTVEKDKGLVPFEIVKGDNGDAWVQAQGKGYSPSQISAMILQKMKETAESYLGEKVEKAVITVPAYFNDAQRQATKDAGRIAGLEVLRIINEPTAAALAYGLDKTEGKTIAVYDLGGGTFDISVLEIGDGVFEVKSTNGDTFLGGEDFDMRLVEYLAGEFKKDQGIDLKGDKLALQRLKEAAEKAKIELSSSQQTEINLPFITADATGPKHLTLKLTRAKFESLVDDLVQRTVAPCKAALKDAGVTAAEIDEVVLVGGMSRMPKVQEVVKQLFGKEPHKGVNPDEVVAMGAAIQAGVLQGDVKDVLLLDVTPLSLGIETLGGVFTRLIDRNTTIPTKKSQTFSTAEDNQSAVTIRVSQGEREMAQDNKLLGQFDLVGLPPSPRGVPQIEVTFDIDANGIVQVSAKDKGTGKEQQIRIQASGGLSDADIDKMVKDAEANAEADKKRRAGVEAKNQAESLIHSSEKSVKEYGDKVSETDRKAIEDAIAALKTSVEASEPDADDIQAKTQTLMEVSMKLGQAVYEAQQAESGEGAAEGHKDDVVDADYEEIKDDKKSA

SEQ ID NO: 48562 - DNA, 1920 bp, Agrobacterium rhizogenes
  CDS (1)..(1920): transl_table=11
atggcaaaagtaattggtattgaccttggcacgacaaattcctgcgtcgccgtcatggacggtaaagacgcgaaagtcatcgagaatgccgaaggcgcccgcactaccccctcaatggtagccttcactgaagacggcgaacgtctcgtcggccagccggccaagcgccaggcggtcaccaaccccaccaataccctctttgctgtcaagcgccttatcggccgccgctacgaagatccgaccgttgaaaaagacaagcaccttgttcctttcaatatcgtcaagggcgacaatggcgacgcctgggtcgaagcccacggcaagggctattcgcccgcgcaggtttccgcaatgatccttcagaagatgaaggaaaccgcagaagcctatctcggtgaaaaggtcgaaaaggccgtcatcaccgttccggcctacttcaacgacgcgcagcgccaggcaaccaaggatgccggccgcatcgccggtcttgaagtcctgcgtatcatcaacgagccgaccgctgcggccctcgcctacggcctcgacaagaaggacggcaagaccatcgccgtttacgaccttggcggcggcaccttcgatatctcgatcctggaaatcggcgacggcgtcttcgaagtgaagtcgaccaacggcgataccttccttggcggtgaagacttcgacatgcgtctcgtcgaatatctcgttgccgagttcaagaaggacaacggcatcgacctcaagggcgacaagcttgctctgcagcgcctcaaggaagctgccgaaaaggcgaagatcgaactgtcctccgcgcagcagaccgaaatcaacctgcccttcatcacggcagacgccaccggcccgaagcacctgacgctgaagctgactcgcgccaagctggaaagcctggtcgacgacctcgtgcagcgcgccatcgcgccgtgcaaggccgccctcaaggatgccggcgttacggctgccgagatcgacgaagtcgttctcgtcggcggcatgagccgcatgccgaaggtacaggaagtcgtcaagcagctgttcggcaaagagccgcacaagggcgtcaacccggatgaagtcgtcgctctcggcgccgccatccaggccggcgttctgcagggcgacgtcaaggacgtcctgctcctcgacgtgaccccgctgtctctcggcatcgaaacgctgggtggcgtcttcacccgtctgatcgagcgcaacaccacgatcccgacgaagaagtcgcagaccttctcgaccgccggcgacaaccagtcggccgtgaccatccgcgtctcgcagggcgagcgcgaaatggccgccgacaacaagctgctcggccagttcgacctcgtcggcctgccgccggcaccgcgcggcatgccgcagatcgaggtcaccttcgacatcgacgccaacggcatcgtccaggtttcggccaaggacaagggcaccggcaaggaacagcagattcgcatccaggcttcgggcggtctctccgacgccgacatcgagaagatggtcaaggatgccgaatcgcatgctgccgaagacaagaagcgccgcgaaggcgtggaagccaagaaccaggccgaaagcctgattcattccagcgagaagtcgctgaaggactttggcgacaaggtcaccgaggccgatcgcaacgcgatctccgaggcgattgcagcgctgaagacggcaaccgaagcatccgagccggacgctgaagacatcaaggccaagacccagacgctcatggaagtgtccatgaagctcggccaggctatctatgaggcccagcagtcggaagctccttccgctgatgcctcggcaggcggccaccacgacgacgtcgtcgatgccgactacgaggaaatcaaggacgaagacgaccgcaagcggtctgcataa

SEQ ID NO: 48563 - protein, 639 aa, Agrobacterium rhizogenes
MAKVIGIDLGTTNSCVAVMDGKDAKVIENAEGARTTPSMVAFTEDGERLVGQPAKRQAVTNPTNTLFAVKRLIGRRYEDPTVEKDKHLVPFNIVKGDNGDAWVEAHGKGYSPAQVSAMILQKMKETAEAYLGEKVEKAVITVPAYFNDAQRQATKDAGRIAGLEVLRIINEPTAAALAYGLDKKDGKTIAVYDLGGGTFDISILEIGDGVFEVKSTNGDTFLGGEDFDMRLVEYLVAEFKKDNGIDLKGDKLALQRLKEAAEKAKIELSSAQQTEINLPFITADATGPKHLTLKLTRAKLESLVDDLVQRAIAPCKAALKDAGVTAAEIDEVVLVGGMSRMPKVQEVVKQLFGKEPHKGVNPDEVVALGAAIQAGVLQGDVKDVLLLDVTPLSLGIETLGGVFTRLIERNTTIPTKKSQTFSTAGDNQSAVTIRVSQGEREMAADNKLLGQFDLVGLPPAPRGMPQIEVTFDIDANGIVQVSAKDKGTGKEQQIRIQASGGLSDADIEKMVKDAESHAAEDKKRREGVEAKNQAESLIHSSEKSLKDFGDKVTEADRNAISEAIAALKTATEASEPDAEDIKAKTQTLMEVSMKLGQAIYEAQQSEAPSADASAGGHHDDVVDADYEEIKDEDDRKRSA

SEQ ID NO: 48564 - DNA, 1965 bp, Mytilus galloprovincialis
  CDS (1)..(1965)
atggcaaaaacaggaccagcaattggaatagatcttggaactacatactcctgtgttggagtattccagcatggcaaagttgaaatcattgccaatgatcaaggaaacagaacaaccccaagctatgtcgccttcacagacaccgaaagattaataggtgatgctgccaagaaccaagtggcaatgaacccagtcaacacggtttttgatgccaagagattaattggtagaaagtttgatgacgctacagtacaatcagacatgaagcattggcctttcactgttgtcaatgatgcctccaaacctaaagttacggtagactacaaaggagaaacaaaaacatttttccctgaggaaatttcatcaatggtgctggtaaaaatgaaagaaactgcagaagcatatctaggaaagttagtcaacaacagtgtcattacagtcccagcttattttaatgattcacaaggacaagcaacaaaggatgctggtaccatctctggaatgaatgttctacgtattatcaatgagccaactgcagctgctattgcttatggtttggataagaaagtaggtggagaaagaaatgtactcatctttgacttgggtggtggaacttttgatgtgtcaatccttacaattaaggatggtatttttgaagttaaatcaacctctggtgatacccacttgggtggtgaagactttgacaacagaatggtcaatcatttcattcaagaattcaaacgcaagcacaaaaaagacattagtgaaaacaagcgtgctgtccgacgacttagaactgcttgtgaaagggcaaagagaaccctttcttcaagcacacaagcaagtgttgagattgactctctgtttgaaggagttgacttttatacaagcatcacaagagccaggtttgaggaattgaatgcagatcttttcagaggaaccatggaaccagttgaaaaagctctacgcgatgccaaactagacaaggctgctgtccatgaaattgtcttggtaggtggatcaaccagaattccaaaaatccagaagttacttcaggacttttttcaaggcaaagaattgaacaaatccattaaccctgatgaagctgtagcatacggtgcagctgtgcaggcagccattttgtcaggtgacaagtcagaagaggtacaagacttgttattgttagatgttaccccactgtctcttggtattgaaacagctggaggtgtgatgacagctctaatcaaacgtaatacaaccattccaacaaaacagacacaaaccttcactacctactctgacaatcagcctggtgtattaatccaggtttatgaaggagagagagctatgaccaaggacaacaacttgcttggaaagtttgaattaactggaatacctccagcaccaagaggtgtgccccagattgaagtgacctttgacattgatgccaatggtatcctgaatgtatctgcagtagataagagtactggtaaagagaacaaaatcaccatcactaacgacaaaggtcgtttgagcaaagaagaaattgaacgcatggtcaatgatgctgagaaatacaaggcagaagacgagaaacagaaggaccgtatcaccgccaaaaatagtctagaaagctactcatttaacatgaaacaaacagttgaagatgaaaaactcaaggataaaatcagtgaaagtgacaaaaaggaaatcatggacaaatgtgacgaaatcattaaatggttggatgccaacaatctggctgagaaggaagaatttgaacacaaacagaaagaacttgagggagtgtgtaatccaatcatcactaaactgtaccagtctgctggtggagccccaggtggtggtatgccaaactttggtggagctggtggagccccaggaggtgcacctggagcaggaggcactggtggaagtggtggaccaaccattgaagaggtcgactaa

SEQ ID NO: 48565 - protein, 654 aa, Mytilus galloprovincialis
MAKTGPAIGIDLGTTYSCVGVFQHGKVEIIANDQGNRTTPSYVAFTDTERLIGDAAKNQVAMNPVNTVFDAKRLIGRKFDDATVQSDMKHWPFTVVNDASKPKVTVDYKGETKTFFPEEISSMVLVKMKETAEAYLGKLVNNSVITVPAYFNDSQGQATKDAGTISGMNVLRIINEPTAAAIAYGLDKKVGGERNVLIFDLGGGTFDVSILTIKDGIFEVKSTSGDTHLGGEDFDNRMVNHFIQEFKRKHKKDISENKRAVRRLRTACERAKRTLSSSTQASVEIDSLFEGVDFYTSITRARFEELNADLFRGTMEPVEKALRDAKLDKAAVHEIVLVGGSTRIPKIQKLLQDFFQGKELNKSINPDEAVAYGAAVQAAILSGDKSEEVQDLLLLDVTPLSLGIETAGGVMTALIKRNTTIPTKQTQTFTTYSDNQPGVLIQVYEGERAMTKDNNLLGKFELTGIPPAPRGVPQIEVTFDIDANGILNVSAVDKSTGKENKITITNDKGRLSKEEIERMVNDAEKYKAEDEKQKDRITAKNSLESYSFNMKQTVEDEKLKDKISESDKKEIMDKCDEIIKWLDANNLAEKEEFEHKQKELEGVCNPIITKLYQSAGGAPGGGMPNFGGAGGAPGGAPGAGGTGGSGGPTIEEVD

SEQ ID NO: 48566 - DNA, 1929 bp, Liriomyza huidobrensis
  CDS (1)..(1929)
atgcctgcaattggaattgatttgggaacaacatactcctgcgttggtgtcttccaacatggaaaagtagaaataattgctaacgaccaaggaaatcgtacaacacccagttatgtggcattcacagattccgaaaggttgattggtgatgcggctaaaaaccaggtcgccatgaacccacaaaacacagtatttgatgccaaacgtttgattggtcgaaaattcgatgattccaaaatacaaagtgacatgaaacactggccattcaaagttgtgagtgattgtggcaaacccaagatctgtgttgaattcaaaggagaacaaaaaaagtttgcaccagaagaaatcagttcaatggtgttgacaaaaatgaaggaaacagcagaagcctatttgggtacaacagtgaaagatgcagttataacagttccagcctacttcaatgactcacaaagacaggccaccaaagatgctggtgccatagcaggattaaatgtgttgcgtataataaatgaaccaaccgcagccgccttggcgtatggtttggacaagaatctaaagggagaaaagaatgtgcttatctttgacttgggtggcggtacatttgatgtatccatcctcactattgatgaaggcagtctatttgaagtgagatccacagctggtgacacacatcttggtggtgaagatttcgacaatagactggtgaaccacttagccgaagaatttaaacgaaaatacaaaaaagatctacgttcaaatcccagagccttgcgtcgtctaagaactgctgctgaaagagcaaaacgtacattatcatcaagtacagaagccactatagaagttgatgctttgtatgaaggtgttgacttctacaccaaagttagcagagctcgttttgaggaactttgtgctgatttattccgcagtacattggaaccagtggaaaaggctttgaatgatgccaaaatggataagaatcaaattcatgatattgtgctcgtgggtggttcaacacgcataccaaaagtgcaaaacttgttgcagtcattcttctgtgggaagagtttgaatctatcaataaatccagatgaagctgtggcctatggtgcggctatacaagcagctatattgagtggcgacaagagcagtgaaattcaagatgttttactggttgatgtggccccattatctttgggcatagaaacagctggaggagtaatgacaaaactaattgaacgcaatagtcgcattcctagcaagcagtctaagaccttcaccacatattccgacaatcaaccggctgtgactatacaagtgtttgaaggtgaacgtgccatgactaaggacgacaacatgttgggtacattcaatttaactggtattcctccagcacctcgtggagtgcctaaagtggatgtgactttcgacttggatgccaatggtattttgaatgtcacagccaaggaaatgagcactggcaatgctaagaacataactatcaagaacgacaagggacgtttatctcaagctgatattgatcgtatggtttctgaggctgaaaagtatgctgaggaagatgaaaaacatcgccaaagaattgcagctcgtaatcagctagagggctatgtgttcaatttgaaacaagttgttgaagatgctggagctaaattgactgaagttgataaaaacaaaatcttggagaaatgcaatgaaaccattaaatggcttgacaacaacaccactgctgaaaaagaggaatacgattacaaatatgaagaagttacaaagttttgtactccaataacagcgaaaatgcaccagcaacaacaacagcctcatagtggttctgaccagaataattgtggccaacaatcaggatttggaggtggcaactatagtggtccaacagttgaagaagtggactaa

SEQ ID NO: 48567 - protein, 642 aa, Liriomyza huidobrensis
MPAIGIDLGTTYSCVGVFQHGKVEIIANDQGNRTTPSYVAFTDSERLIGDAAKNQVAMNPQNTVFDAKRLIGRKFDDSKIQSDMKHWPFKVVSDCGKPKICVEFKGEQKKFAPEEISSMVLTKMKETAEAYLGTTVKDAVITVPAYFNDSQRQATKDAGAIAGLNVLRIINEPTAAALAYGLDKNLKGEKNVLIFDLGGGTFDVSILTIDEGSLFEVRSTAGDTHLGGEDFDNRLVNHLAEEFKRKYKKDLRSNPRALRRLRTAAERAKRTLSSSTEATIEVDALYEGVDFYTKVSRARFEELCADLFRSTLEPVEKALNDAKMDKNQIHDIVLVGGSTRIPKVQNLLQSFFCGKSLNLSINPDEAVAYGAAIQAAILSGDKSSEIQDVLLVDVAPLSLGIETAGGVMTKLIERNSRIPSKQSKTFTTYSDNQPAVTIQVFEGERAMTKDDNMLGTFNLTGIPPAPRGVPKVDVTFDLDANGILNVTAKEMSTGNAKNITIKNDKGRLSQADIDRMVSEAEKYAEEDEKHRQRIAARNQLEGYVFNLKQVVEDAGAKLTEVDKNKILEKCNETIKWLDNNTTAEKEEYDYKYEEVTKFCTPITAKMHQQQQQPHSGSDQNNCGQQSGFGGGNYSGPTVEEVD

SEQ ID NO: 48568 - DNA, 1881 bp, Bifidobacterium breve
  CDS (1)..(1881): transl_table=11
atggcacgtgcagttggtatcgatctgggcaccacgaattcctgcatcgctacgctggaaggtggcgagcccaccgttatcgtcaacgctgagggcatgcgcaccaccccgtccgtggtcgcgttctccaagtcaggcgaaatcctcgtcggcgaggtggccaagcgtcaggctgtgaccaacgttgaccgcactatttcttctgtcaagcgtcacatgggcactgactggaccgtcgacatcgacggcaagaagtggaccccgcaggagatttccgcacagattctgatgaagctgaagagggacgctgaggcttacctcggtgagcccgtcaccgatgctgtcatcacctgcccggcatacttcaacgatgcccagcgtcaggccaccaaggacgccggcaagatcgcaggcctgaacgttctgcgtatcatcaacgagccgaccgcagctgctctggcctacggtctggagaagggcaaggaagacgagcgcatcctggtcttcgacctcggcggcggcaccttcgatgtctccctgctggagatcggcaaggacgacgacggcttctccaccattcaggtgcaggccaccaacggcgacaaccacctcggtggcgatgactgggatcagaaggtcatcgactggctggtcggcgaagtcaagaacaagtacggcgttgacctgtccaaggacaagttcgctctgcagcgcctgaaggaagccgctgaacaggccaagaaggagctgtcctcctcgaccagcacctccatctccatgcagtacctggccatgacccctgacggcaccccggtgcatctggacgagaccctgacccgtgcgcacttcgaggaaatgacctccgacctgctgggccgctgccgcacgccgttcaacaacgtgctgcacgacgccggcatctccgtgagcgacatcgaccacgtggtgctcgtcggtggttccactcgtatgcccgccgtcaaggacttggtcaaggaactcaccggtggtaaggaagcgaaccagtccgtgaacccggatgaggttgtggctgtcggcgctgccgtgcagtccggcgtcatcaagggcgaccgtaaggacgtcctgctgattgacgtgaccccgctgtccctcggtatcgaaaccaagggtggcatcatgaccaagctcatcgaccgcaacaccgccattccgaccaagcgttccgaggtcttctccactgctgaagacaaccagccgtccgtgctgattcaggtctaccagggtgagcgtgagttcgctcgcgacaacaagccgctgggcaccttcgagctgaccggcatcgctccggctccgcgtggcgtcccgcagatcgaagtcaccttcgacatcgacgccaacggcatcgtgcacgtgtccgccaaggataagggcaccggcaaggagcagtccatgaccatcaccggtggttccggcctgccgaaggacgagatcgaccgcatggtcaaggaagccgaggctcacgaggctgaggataagcagcgcaaggaagacgccgagacccgcaaccaggctgaagccttcgcttactccaccgagaagctcgtcaacgacaacaaggacaagctgtccgacgacatcgtcaaggaagtcaccgacaaggtgaacgctctgaaggaagccctgaagggtgacgacaccgataaggtcaagaccgctcagggtgagctgatgacctccgctcagaagatcggccaggtcctctacgcccagcagggtgctgaaggtgccgcggctggtgccggtgcggccggcgcttccgctggctccgcctccggttctgacgacgacaccgtcgaggccgaggtcgtggacgacgatgacgacaaggacaacaagtga

SEQ ID NO: 48569 - protein, 626 aa, Bifidobacterium breve
MARAVGIDLGTTNSCIATLEGGEPTVIVNAEGMRTTPSVVAFSKSGEILVGEVAKRQAVTNVDRTISSVKRHMGTDWTVDIDGKKWTPQEISAQILMKLKRDAEAYLGEPVTDAVITCPAYFNDAQRQATKDAGKIAGLNVLRIINEPTAAALAYGLEKGKEDERILVFDLGGGTFDVSLLEIGKDDDGFSTIQVQATNGDNHLGGDDWDQKVIDWLVGEVKNKYGVDLSKDKFALQRLKEAAEQAKKELSSSTSTSISMQYLAMTPDGTPVHLDETLTRAHFEEMTSDLLGRCRTPFNNVLHDAGISVSDIDHVVLVGGSTRMPAVKDLVKELTGGKEANQSVNPDEVVAVGAAVQSGVIKGDRKDVLLIDVTPLSLGIETKGGIMTKLIDRNTAIPTKRSEVFSTAEDNQPSVLIQVYQGEREFARDNKPLGTFELTGIAPAPRGVPQIEVTFDIDANGIVHVSAKDKGTGKEQSMTITGGSGLPKDEIDRMVKEAEAHEAEDKQRKEDAETRNQAEAFAYSTEKLVNDNKDKLSDDIVKEVTDKVNALKEALKGDDTDKVKTAQGELMTSAQKIGQVLYAQQGAEGAAAGAGAAGASAGSASGSDDDTVEAEVVDDDDDKDNK

SEQ ID NO: 48570 - DNA, 2302 bp, Medicago sativa
  CDS (105)..(2054)
cctagttttcgttcctctcttttctcaaacctaactttctttctctctctctgaaaccctaattttcagaaaccctaatttctgaaactctaatcttcgaagctatggctggtaaaggtgaaggtcctgcgattggaatagatctgggaacaacatactcgtgtgttggagtatggcaacacgatcgtgttgagatcattgctaatgatcaagggaaccgaacgacgccgtcttatgttgcttttactgatagtgaaagattgatcggtgatgctgctaagaatcaggtcgcgatgaatccaaccaacaccgtttttgacgccaagaggttgattggtaggagaatctctgatgcttctgttcagagtgacatgaaattgtggccttttaaggttaccgccggtcctggtgaaaagccaatgattggtgttaactacaagggtgaggaaaaactgtttgcatctgaggaaatctcatccatggttttgattaagatgcgtgagattgccgaagcttatcttggcgtcaccattaagaatgctgttgttactgtccctgcttacttcaacgattctcagcgtcaagcaacaaaagatgctggtgttatcgctggtttgaatgttttgagaattattaatgagccaactgctgccgctattgcatacggtcttgacaaaaaggcgacaagtgtcggtgagaagaacgtgttgatctttgatttgggaggtggtacttttgatgtgtcacttcttactatcgaagagggtatttttgaagttaaggccactgctggtgatacccatcttggtggtgaagattttgataacagaatggttaaccattttgttcaagagtttaagaggaagaacaagaaggatattagtggtaaccctagagcacttaggagattgagaaccgcatgtgagagagcgaagagaactctctcatctactgcacaaactaccattgagattgattctttgtttgagggtgttgatttttacaccacaatcacccgtgccagatttgaggaacttaacatggatctgttcaggaagtgtatggagcctgttgaaaagtgtttgagagatgctaagatggacaagagcactgttcatgacgttgttcttgttggtggttcaactaggatccccaaagttcagcaacttttgcaagacttcttcaatggtaaggagctttgcaaaagcatcaaccccgacgaggctgttgcttatggtgccgccgtccaagctgctatattgagtggtgaaggaaatgagaaggttcaagatttgttgcttttggatgtcaccccattgtctcaaggtttggagactgcaggaggtgtcatgactgtattgattcctaggaacactaccattccaaccaagaaggagcaagttttctctacttattcagacaaccaacctggtgtgttgatccaagtctatgaaggtgagagaaccagaaccaaggataacaacttgttgggtaagtttgagctttctggaattcctccagcaccccgtggtgttcctcagatcactgtttgttttgatattgatgccaatggtatcttgaatgtctctgctgaggacaaaacaaccgggcagaagaacaagattaccatcaccaacgacaagggaaggttgtcaaaggaagaaatcgagaagatggttcaagaagcagagaaatacaagagtgaagatgaggagcacaagaagaaggttgaggcaaagaactccttggagaactatgcatacaacatgagaaacaccattaaagacgagaaaatcagttcaaagctttctggaggagacaagaagcagattgaggatgcaattgagggagccattcaatggcttgatgccaaccagcttgctgaagccgatgagttcgaagacaagatgaaggagcttgaaaccatctgcaacccaatcattgcaaagatgtaccaaggtggagctggtgaaggtccagaagttgatgatgatgctgctccacctccaagtggcagtggcggtgctggtcccaagattgaggaggtcgactaagtgtaatagttagacttgttcgtagacagttatgcttgtgtttgtttttggtttggttatgcctttttagtattttgctacatgaacaatatgtctttttatttcaatgtcatttatttgaacggtgattgaaaaccaccgtgttttgctcattattactcttttggctgacatatacaattcagcatcatatttgcaattttcggtatcattaagctgctttcgtttctggatggtttatatactag

SEQ ID NO: 48571 - protein, 649 aa, Medicago sativa
MAGKGEGPAIGIDLGTTYSCVGVWQHDRVEIIANDQGNRTTPSYVAFTDSERLIGDAAKNQVAMNPTNTVFDAKRLIGRRISDASVQSDMKLWPFKVTAGPGEKPMIGVNYKGEEKLFASEEISSMVLIKMREIAEAYLGVTIKNAVVTVPAYFNDSQRQATKDAGVIAGLNVLRIINEPTAAAIAYGLDKKATSVGEKNVLIFDLGGGTFDVSLLTIEEGIFEVKATAGDTHLGGEDFDNRMVNHFVQEFKRKNKKDISGNPRALRRLRTACERAKRTLSSTAQTTIEIDSLFEGVDFYTTITRARFEELNMDLFRKCMEPVEKCLRDAKMDKSTVHDVVLVGGSTRIPKVQQLLQDFFNGKELCKSINPDEAVAYGAAVQAAILSGEGNEKVQDLLLLDVTPLSQGLETAGGVMTVLIPRNTTIPTKKEQVFSTYSDNQPGVLIQVYEGERTRTKDNNLLGKFELSGIPPAPRGVPQITVCFDIDANGILNVSAEDKTTGQKNKITITNDKGRLSKEEIEKMVQEAEKYKSEDEEHKKKVEAKNSLENYAYNMRNTIKDEKISSKLSGGDKKQIEDAIEGAIQWLDANQLAEADEFEDKMKELETICNPIIAKMYQGGAGEGPEVDDDAAPPPSGSGGAGPKIEEVD

SEQ ID NO: 48572 - DNA, 1947 bp, Burkholderia multivorans
  CDS (1)..(1947): transl_table=11
atgggaaagatcatcggtattgacctcggcaccacgaactcgtgcgtcgcggtgatggaaggcaaccaggtcaaggtcatcgagaactcggaaggtgcacgcaccacgccgtcgatcatcgcgtacatggacgacaacgaagtgctcgtcggcgcgccggccaagcgtcagtccgtgacgaacccgaagaacacgctgttcgcggtgaagcgcctgatcggccgccgcttcgaagagaaggaagtgcagaaggacatcggcctgatgccgtactcgatcatcaaggccgacaacggcgacgcatgggtcgaggcgcacgggcagaagctcgcgccgccgcaggtgtcggccgaagtgctgcgcaagatgaagaagacggccgaagactacctcggcgagccggtcacggaagccgtgatcacggtgccggcgtacttcaacgacagccagcgtcaggccaccaaggacgccggccgcatcgcgggcctcgaggtcaagcggatcatcaacgagccgaccgcggccgcgctcgcgttcggtctcgacaaggccgagaagggcgaccgcaagatcgccgtgtatgacctcggcggcggtaccttcgacgtgtcgatcatcgagatcgcggacgtcgacggcgagaagcagttcgaagtgctgtcgaccaacggcgacacgttcctcggcggcgaggacttcgaccagcggatcatcgattacatcatcggcgagttcaagaaggagcagggcgtcgacctgtcgaaggacgtgctcgcgctgcagcgcctgaaggaagcggccgaaaaggcgaagatcgagctgtcgtcgagccagcagaccgaaatcaacctgccgtacatcacggccgacgcatcgggtccgaagcacctgaacctcaagatcacgcgcgcgaagctcgaagcgctggtcgaagatctggtcgagcgcacgatcgaaccgtgccgcatcgcgatcaaggacgccggcgtcaaggtgtcggacatcgacgacgtgatcctcgtcggcggccagacgcgcatgccgaaggtgcaggagaaggtgaaggaattcttcggcaaggaaccgcgccgtgacgtgaacccggacgaagccgtcgccgtcggcgcggcgatccagggccaggtgctgtccggcgaccgcaaggacgtgctgctgctcgacgtgaccccgctgtcgctcggcatcgaaacgctcggcggcgtgatgacgaagatgatcagcaagaacacgacgatcccgacgaagcactcgcaggtgtattcgacggcggacgacaaccagtcggccgtgacgatcaaggtgtatcagggcgaacgcgaaatggcggccggcaacaagctgctcggcgagttcaacctcgaaggcatcccgcccgcaccgcgcggcgtgccgcagatcgaagtgaccttcgacatcgacgcgaacggcatcctgcacgtcggcgcgaaggacaaggcgaccggcaaggaaaacaagatcacgatcaaggccaactcgggtctgtccgaggcggaaatcgatcagatgatcaaggacgcggaagcgaacgcggcggaagatcacaagctgcgtgagctggccgattcgcgcaaccagggcgacgcgctcgtccacagcacgaagaaggcgctctccgagtacggcgacaagctggacgccggcgagaaggagaagatcgaggcggcgctgaagtcgctcgaggacgtgctgaaggacacgtcggccgacaaggccgcgatcgacgcgaaggtcgaggagcttggcaaggcatcgcagaagctcgtcgagaagatgtacgccgacatgcaggcccaggcgggtgcggccggcgcggccggtgcagcggagggcgcggcgcagggcggcgcgcagcaggctgcggacgacgtcgtcgacgccgagttcaaggaagtgaagaaggactga

SEQ ID NO: 48573 - protein, 648 aa, Burkholderia multivorans
MGKIIGIDLGTTNSCVAVMEGNQVKVIENSEGARTTPSIIAYMDDNEVLVGAPAKRQSVTNPKNTLFAVKRLIGRRFEEKEVQKDIGLMPYSIIKADNGDAWVEAHGQKLAPPQVSAEVLRKMKKTAEDYLGEPVTEAVITVPAYFNDSQRQATKDAGRIAGLEVKRIINEPTAAALAFGLDKAEKGDRKIAVYDLGGGTFDVSIIEIADVDGEKQFEVLSTNGDTFLGGEDFDQRIIDYIIGEFKKEQGVDLSKDVLALQRLKEAAEKAKIELSSSQQTEINLPYITADASGPKHLNLKITRAKLEALVEDLVERTIEPCRIAIKDAGVKVSDIDDVILVGGQTRMPKVQEKVKEFFGKEPRRDVNPDEAVAVGAAIQGQVLSGDRKDVLLLDVTPLSLGIETLGGVMTKMISKNTTIPTKHSQVYSTADDNQSAVTIKVYQGEREMAAGNKLLGEFNLEGIPPAPRGVPQIEVTFDIDANGILHVGAKDKATGKENKITIKANSGLSEAEIDQMIKDAEANAAEDHKLRELADSRNQGDALVHSTKKALSEYGDKLDAGEKEKIEAALKSLEDVLKDTSADKAAIDAKVEELGKASQKLVEKMYADMQAQAGAAGAAGAAEGAAQGGAQQAADDVVDAEFKEVKKD

SEQ ID NO: 48574 - DNA, 1923 bp, Piscirickettsia salmonis
  CDS (1)..(1923): transl_table=11
atggctgaaattattggtattgatttgggaacaaccaactcttgtgttgctgttcttgatggtgataaaccgcgtgtgattgagagtgcagaaggtgatcgtacgacaccctctattgtcgcttataccaatgatggggttacagtcggtcaaccggctaaacgtcaagcggtgaccaatccaaataataccctgtttgcagtcaaacgtttaattggccgtaagttttctgatgatacggtacagcgtgatatcgagcgccttccctatacaattgctgcagcggataacggtgatgcttggattgatgtaaatggtgaaaaactagcaccaccacaaatttctgcacaagtactcgcaaagatgaaaaaaacagccgaagattatttgggtgaagacgttaaagaagcggtgattacagttcctgcttattttaatgatgcgcaacgtcaagcgacgaaagatgcggggcgtattgctggtttagatgtcaagcgcattatcgatgagccaacagccgccgcactggcgtatggtatggataaaaagcgtggtgatggtgttattgctgtgtatgacttaggtggcggtacttttgatatttctattattgaaattgctgaagtggatggtgagcaccaatttgaagttttagcgaccaatggcgatacgcacttaggtggtgaagactttgatttacgcttaatcagttatttagttgatgagtttaaaaaagagcaaggtatagatttaaataatgacccactggcattgcagcgcttgaaagaagcttctgaaaaagccaaaatcgagctgtcttcaactcagcaaacagatgtgaacttgccttatattacagcggatgcaactggccctaagcacatgaatattcgcgtaacacgggctaaatttgaatcattagtagaagacttggtagaaggaacgattgagccgtgtcgtgtggcgctaaaagatgcgggtttatcagtgaatgatgtaaccgatgtgattttagtcggtggtcaaacacggatgccaaaagcacaagcagtcgttaaaaacttctttggtaaagagccgcgtcgtgatgtgaatccagatgaagcggttgcagtgggcgcagcaattcagggtggtgtgctggccggtgatgttaaagatgttttgttattagacgttacgccattatcactcgggattgagaccatgggtggggtgatgacgaagttgattgagaaaaatacgacgattccaacaaaagcttcgcaaaccttctcaacggcgcaagataatcaaactgcggtgactgtgcatgtgttgcaaggtgagcgcgaagtggcgacaggcaataaatcactgggtcgttttgatttggccgatattccgccagcaccacgtggtatgccacaagttgaggtgacttttgatattgatgcgaacggtattttaaatgtgtcggctaaagataaaggcacgggtaaagagcagtcgatcgttattcgcgcctctagtggcttatcggatgacgaagtggatgcgatgatcaaagatgctgaagatcatgctgatgatgataaaaaattccaagaactcgttggtgcgcgtaacaatgctgaggcgatgattcatgcgactgaaaaaggcttaaaagaagcaggtgacaaagtcgctgctgatgataaaacagccattgaaaaagcgattagtgagctaaaagatgttgtcagcggtaatgataaagcagtgattgatgaaaaagttgaagcattaacacaagcttcggcaaagatggctgaagtgctttatgctaatcagggggctgaagctgaggcggcggcagcggctggagcggagcaggctcaatctcaaacggatgagaagaaagatgatgatgtcgttgatgctgagtttgaagaagtttaa

SEQ ID NO: 48575 - protein, 640 aa, Piscirickettsia salmonis
MAEIIGIDLGTTNSCVAVLDGDKPRVIESAEGDRTTPSIVAYTNDGVTVGQPAKRQAVTNPNNTLFAVKRLIGRKFSDDTVQRDIERLPYTIAAADNGDAWIDVNGEKLAPPQISAQVLAKMKKTAEDYLGEDVKEAVITVPAYFNDAQRQATKDAGRIAGLDVKRIIDEPTAAALAYGMDKKRGDGVIAVYDLGGGTFDISIIEIAEVDGEHQFEVLATNGDTHLGGEDFDLRLISYLVDEFKKEQGIDLNNDPLALQRLKEASEKAKIELSSTQQTDVNLPYITADATGPKHMNIRVTRAKFESLVEDLVEGTIEPCRVALKDAGLSVNDVTDVILVGGQTRMPKAQAVVKNFFGKEPRRDVNPDEAVAVGAAIQGGVLAGDVKDVLLLDVTPLSLGIETMGGVMTKLIEKNTTIPTKASQTFSTAQDNQTAVTVHVLQGEREVATGNKSLGRFDLADIPPAPRGMPQVEVTFDIDANGILNVSAKDKGTGKEQSIVIRASSGLSDDEVDAMIKDAEDHADDDKKFQELVGARNNAEAMIHATEKGLKEAGDKVAADDKTAIEKAISELKDVVSGNDKAVIDEKVEALTQASAKMAEVLYANQGAEAEAAAAAGAEQAQSQTDEKKDDDVVDAEFEEV

SEQ ID NO: 48576 - DNA, 2314 bp, Vigna radiata
  CDS (81)..(2033)
ggtggtgttgtcgctgtggtttttcattttcttccttccttttagatctcttgtttgtctcagatacacgttgaaaaacaatggccggaaaaggtgagggtcctgctatcggaatcgatcttggaaccacgtactcttgtgtcggggtctggcaacatgaccgcgttgaaatcattgccaacgaccaaagcaacagaacgacgccgtcttacgttggattcaccgacaccgagcgtctaatcggtgacgccgccaagaaccaagtcgccatgaaccccatcaacaccgtcttcgatgcaaagaggttgattggtcgtagattcagcgatgcccctgttcagagtgatatcaaattgtggccttttaaggttattgctggtcctgcagataagccaactattgtagttaactacaagggcgaggagaaacaatttgctgctgaggaaatctcttccatggtgctcatgaagatgcgtgaaattgctgaggcttacctgggttctacagtgaagaatgctgtcgttaccgtccctgcttacttcaatgattctcagcgtcaactccaaggatgctgcgttatgcttggtctcaatgtcatgcgtattatcaatgagcctactgcagctgccattgcatatggtcttgataagaaagcatcaagtgtgggtgagaagaacgttttgatctttgatcttggtggtggcacattcgatgtttctttacttactatcgaagagggcatctttgaggtgaaagccacagctggtgacacccatcttggaggagaggattttgataacaggatggtgaaccactttgtgcaagagtttaagaggaagaacaagaaggacataagtggaaaccccagagcacttagaaggttgaggactgcttgtgagagggcaaagagaaccttgtcatctactgctcagactaccattgaaattgattctctatatgagggaatcgatttctactccaccattactcgtgcaagatttgaggagctcaatatggacttcttcagaaaatgtatggaaccagtggagaagtgtttgagggatgctaagatggacaaaagaagcgtggacgatgttgtccttgttggtggttctaccagaattcccaaggttcagcaactactccaggacttctttaatggaaaggagctgtgcaagagcatcaaccctgatgaggctgttgcttatggtgcggctgtccaggctgcgatcttaagtggtgaaggcaatgagaaggttcaagatcttctccttctcgatgttactcctctatctcttgggttggagaccgccggtggtgtgatgactgtcctgatccctaggaacactacaattccgacaaagaaagaacaggtgttctcaacttactctgataaccagcctggtgtgttgatccaggtctttgaaggtgagagagcaaggaccagagataacaatttgttgggcaaatttgaactttctggcattcctcctgctcccaggggtgttccacaaattacagtgtgctttgacatagatgccaatggtatcttgaacgtctctgctgaagataaaaccactggccagaaaaacaagatcactatcaccaatgacaagggtaggttgtcgaaggaagatattgagaagatggttcaagaggctgagaaatacaaatccgaggatgaagagcataagaagaaggtcgaggccaagaacgccttggaaaattacgcttacaatatgaggaacactgtgaaggatgacaaaattggtggcaaactggatcctgctgacaagaaaaagattgaggatgcaattgagcaagctatccaatggttggacagcaaccagcttgcagaggcagatgagtttgaggataaaatgaaggaattggaaagcgtctgcaatcctatcattgccaaaatgtaccagggtggtgccggtccagacatgggcggtgctcctccagcagatgatgaatatactccttctggtggaagtggggctggccccaagattgaggaagtcgactaaatcatatctgcttttcatcactcaaattgttttcttctcagaacctattttgatgcttttttgttggatttaactgcataataattcttcttgcatcggatactcattattttacccgtctggacataccttgcttgaagcattatgttgttatgtttatgtttttagatggttagattgaggatactcaattatctagatacatagattattctagattattctgttatctttagtcacacatttgtgttatgtgaagttctcagaacttttttatgttt

SEQ ID NO: 48577 - protein, 650 aa, Vigna radiata
MAGKGEGPAIGIDLGTTYSCVGVWQHDRVEIIANDQSNRTTPSYVGFTDTERLIGDAAKNQVAMNPINTVFDAKRLIGRRFSDAPVQSDIKLWPFKVIAGPADKPTIVVNYKGEEKQFAAEEISSMVLMKMREIAEAYLGSTVKNAVVTVPAYFNDSQRQLQGCCVMLGLNVMRIINEPTAAAIAYGLDKKASSVGEKNVLIFDLGGGTFDVSLLTIEEGIFEVKATAGDTHLGGEDFDNRMVNHFVQEFKRKNKKDISGNPRALRRLRTACERAKRTLSSTAQTTIEIDSLYEGIDFYSTITRARFEELNMDFFRKCMEPVEKCLRDAKMDKRSVDDVVLVGGSTRIPKVQQLLQDFFNGKELCKSINPDEAVAYGAAVQAAILSGEGNEKVQDLLLLDVTPLSLGLETAGGVMTVLIPRNTTIPTKKEQVFSTYSDNQPGVLIQVFEGERARTRDNNLLGKFELSGIPPAPRGVPQITVCFDIDANGILNVSAEDKTTGQKNKITITNDKGRLSKEDIEKMVQEAEKYKSEDEEHKKKVEAKNALENYAYNMRNTVKDDKIGGKLDPADKKKIEDAIEQAIQWLDSNQLAEADEFEDKMKELESVCNPIIAKMYQGGAGPDMGGAPPADDEYTPSGGSGAGPKIEEVD

SEQ ID NO: 48578 - DNA, 2264 bp, Vigna radiata
  CDS (11)..(1957)
agcagaacatatggccggtaaaggtgagggtccagccatcggaatcgatctcggaacaacgtactcctgcgttggtgtttggcagcatgatcgtgttgagatcattgccaacgaccaaggtaacagaacgacaccgtcttacgtcgggttcaccgacaccgagcgtctcatcggtgatgctgccaagaaccaggtcgccatgaaccctattaacactgtttttgatgccaagagattgattggtcgtaggttcaccgatgcctctgttcagagtgatattaaattgtggccttttaaggtgttttctggacctggtgataagccaatgattcaggttaactacaagggtgaagataaacagttttctgctgaagaaatctcttctatggtacttatgaaaatgcgtgagattgctgaagcttatcttggcactacggtcaagaatgctgttgttactgtccctgcttactttaacgattctcagcgtcaagctaccaaggatgctggtgttattgctggtcttaatgtcatgcgaattatcaatgagcctactgctgcggctattgcttatggtcttgacaagaaggctaccagtgtaggtgagaagaatgtgttgatttttgatctagggggtggtacctttgatgtctctttactaaccattgaagagggtatctttgaggtgaaagccacagctggggacactcatctcggaggtgaggattttgataacaggatggtgaatcattttgttcaggagttcaagagaaagaacaagaaagatatcagtggcaaccccagagcacttaggaggttgaggactgcttgtgagagggcaaagagaactctgtcctccactgcccaaaccaccattgaaattgattctttgtatgaaggaattgatttctattccaccattacccgtgccaggtttgaagagcttaatatggatctcttccggaagtgcatggaaccggttgagaagtgtttaagagatgctaagatggacaagaggactgtccatgatgttgttcttgttggtggttctactagaattcccaaggttcaacaacttctgcaggacttctttaacggaaaggagctctgcaagagcatcaatcctgatgaggctgtggcatatggtgctgctgtacaagctgctatcttgagtggtgagggtaacgagaaggtgcaagatcttcttctgctcgatgtcaccccactctctctggggttggaaactgctggtggggttatgactgtcttgatccccaggaacactacaatcccaacaaagaaagaacaggttttctcaacctattctgataaccagccaggtgttttgatccaggtttatgaaggtgagagaacaaggaccagagataataatttgctgggtaaatttgaactttcgggcattcctcctgcacccaggggtgttcctcaaatcacagtgtgctttgacatcgatgccaatggtatcttgaatgtctctgccgaagacaaaactactggccaaaagaacaagatcaccattaccaacgataagggtaggttgtcaaaggaagaaattgagaagatggtgcaagaggccgagaagtacaagtctgaagatgaagagcataagaagaaggtagaagcaaagaatgcattggagaactacgcatacaacatgaggaatactgtgaaggatgagaagattggaggaaagcttgacccagctgacaagaagaagatcgaggatgctgttgagcagactatacagtggctggacagcaaccaacttggagaggcagatgagtttgaggacaaaatgaaggaattggaaagcatctgcaatcctatcattgccaagatgtaccagggaggtgctggtccagacatgggaggtggaatggacgatgatgtgcctgctggtggaagtggtgctggtccaaagattgaggaagtagattaaatttaagttaatgcctacttgatctgctaatattagtcttgaagactcatttgaagtatcttgttcttggattatcgtttcacttttatttgttgagacatacaagcttttaagcttgtgttgtgttatggttgttcagtatttatcatgttttgttgtgagtttataatacggatcacggtttatctgttctggttcattatggatgacatattaagaccttctcagatggggtagtgtacattttcactgaggcatcacattcagaggatgttccgtcttaaattaaacatcatattagcagggt

SEQ ID NO: 48579 - protein, 648 aa, Vigna radiata
MAGKGEGPAIGIDLGTTYSCVGVWQHDRVEIIANDQGNRTTPSYVGFTDTERLIGDAAKNQVAMNPINTVFDAKRLIGRRFTDASVQSDIKLWPFKVFSGPGDKPMIQVNYKGEDKQFSAEEISSMVLMKMREIAEAYLGTTVKNAVVTVPAYFNDSQRQATKDAGVIAGLNVMRIINEPTAAAIAYGLDKKATSVGEKNVLIFDLGGGTFDVSLLTIEEGIFEVKATAGDTHLGGEDFDNRMVNHFVQEFKRKNKKDISGNPRALRRLRTACERAKRTLSSTAQTTIEIDSLYEGIDFYSTITRARFEELNMDLFRKCMEPVEKCLRDAKMDKRTVHDVVLVGGSTRIPKVQQLLQDFFNGKELCKSINPDEAVAYGAAVQAAILSGEGNEKVQDLLLLDVTPLSLGLETAGGVMTVLIPRNTTIPTKKEQVFSTYSDNQPGVLIQVYEGERTRTRDNNLLGKFELSGIPPAPRGVPQITVCFDIDANGILNVSAEDKTTGQKNKITITNDKGRLSKEEIEKMVQEAEKYKSEDEEHKKKVEAKNALENYAYNMRNTVKDEKIGGKLDPADKKKIEDAVEQTIQWLDSNQLGEADEFEDKMKELESICNPIIAKMYQGGAGPDMGGGMDDDVPAGGSGAGPKIEEVD

SEQ ID NO: 48580 - DNA, 2218 bp, Vigna radiata
  CDS (85)..(2034)
ggttcaagaaattgccggaagttttaattcctttttctacaattcgagttttaattccgttagggaaaacagttagcagaaaatatggccggtaaaggcgagggtcctgcgatcggaatcgatttgggaaccacctattcttgtgtcggcgtttggcagcacgatcgtgttgaaatcatagccaatgatcagggtaacagaactactccatcctacgtggctttcactgactcagaacggttgatcggcgatgcggcgaagaaccaggtcgctatgaacccaaccaacaccgttttcgatgctaagcgtttgattggtaggcgttttagtgatgcttctgtacagagtgacataaaattgtggccgttcaaagtgatttctggtgccggtgacaaacctatgattgtggtgaattacaagggggaggagaaacagttttccgctgaagaaatatcttccatggttctaatcaagatgaaggagattgcggaggcctttctcggatccacggtgaaaaatgccgtggttactgtccccgcttacttcaatgactcacagcgtcaagctaccaaggacgctggggtcatttcagggctcaatgtcatgcgtattatcaatgaacctactgcggctgccattgcttacgggcttgacaaaaaggccactagctctggggagaagaacgtgctcatatttgaccttggtggtgggactttcgatgtgtcccttctcaccattgaggaaggaattttcgaggtgaaagccaccgctggtgatactcacttgggaggtgaagattttgataacagaatggtgaaccatttcgttcaggagttcaagaggaagaacaagaaggatatcagtggaaatgcgcgagcattgaggaggttgagaactgcatgtgagagggcgaagaggactctctcttccaccgctcaaaccaccatcgagattgattccttgtatgagggtattgacttctacacaaccatcacccgtgcgagatttgaagagctgaacatggatctcttcaggaaatgcatggagcccgtggagaagtgtttgcgagatgcgaagatggataagagcacagtccatgatgttgttcttgtcggtggttccaccagaatacccaaggttcaacagttattgcaggacttcttcaatgggaaggagctctgcaagagcatcaaccccgatgaagccgttgcctatggtgctgcagtgcaggctgctattctcagtggtgagggtaatgagaaagttcaggatcttctgttgttggatgttagccctctctcccttggtttggagacagcaggaggtgtcatgactgtgttgattcccagaaacacaaccattcccaccaagaaggagcaggtgttttcaacctactcggacaaccagcccggtgtgttgattcaggtctatgaaggtgaacgtacgaggactcgcgataacaatttgctcggaaaattcgagctctctggaattcctcctgccccgagaggtgttccccagatcaatgtgtgctttgatatggatgccaacggtatattgaacgtgtctgcagaggacaagaccactggacaaaagaataagataacaattaccaacgacaagggtaggctttccaaagaagagattgaaaagatggtgcaggaagctgagaaatacaaggcggaggacgaggagcataagaaaaaggtggaagccaaaaattcattggaaaattatgcctataacatgaggaacacaattaaagatgaaaagattgcttccaagttgcctgctgatgataagaagaaaatagaagatgctattgatcaagccattcaatggctcgatgggaaccaacttggtgaggctgatgaatttgaggacaagatgaaggagttggagagcatatgcaatcccatcatcgctaagatgtaccaaggtgctggtggtgatgctggtggagccatggatgaggatggtcctgctcctgccagtggaagcggtgctggacccaaaattgaggaagtcgattaagcagaacaattgtcatgggttgttcttgattttgctaagaccctaagatatcatttctgttctcaaagtgttttaattggaattttactttacttttcttctttttcttcattaatgtactttttcctgtttcaatgtacacaatcatatgaagtttgcccatttatagggtagcgtttcaatt

SEQ ID NO: 48581 - protein, 649 aa, Vigna radiata
MAGKGEGPAIGIDLGTTYSCVGVWQHDRVEIIANDQGNRTTPSYVAFTDSERLIGDAAKNQVAMNPTNTVFDAKRLIGRRFSDASVQSDIKLWPFKVISGAGDKPMIVVNYKGEEKQFSAEEISSMVLIKMKEIAEAFLGSTVKNAVVTVPAYFNDSQRQATKDAGVISGLNVMRIINEPTAAAIAYGLDKKATSSGEKNVLIFDLGGGTFDVSLLTIEEGIFEVKATAGDTHLGGEDFDNRMVNHFVQEFKRKNKKDISGNARALRRLRTACERAKRTLSSTAQTTIEIDSLYEGIDFYTTITRARFEELNMDLFRKCMEPVEKCLRDAKMDKSTVHDVVLVGGSTRIPKVQQLLQDFFNGKELCKSINPDEAVAYGAAVQAAILSGEGNEKVQDLLLLDVSPLSLGLETAGGVMTVLIPRNTTIPTKKEQVFSTYSDNQPGVLIQVYEGERTRTRDNNLLGKFELSGIPPAPRGVPQINVCFDMDANGILNVSAEDKTTGQKNKITITNDKGRLSKEEIEKMVQEAEKYKAEDEEHKKKVEAKNSLENYAYNMRNTIKDEKIASKLPADDKKKIEDAIDQAIQWLDGNQLGEADEFEDKMKELESICNPIIAKMYQGAGGDAGGAMDEDGPAPASGSGAGPKIEEVD

SEQ ID NO: 48582 - DNA, 1845 bp, Aspergillus niger
  CDS (1)..(1845)
atggccgacgaagtttacgaaggtgccatcggcattgatcttggaaccacctactcctgtgtggccaactatgagggtaccaatgttgagatcattgccaacgagcagggtagctacactaccccatccttcgtttctttcaccgacaaggaacgcttgatcggtgaggccgcgaagaaccaggccgctatgaaccctaagaacaccatctttgacatcaagcgtcttatcggtcggcggttcgaagatcccatcgttaagaaggatgttgagtcatggcccttcaaggttgttgatcagggtggaaaccctgtggttgaggtcgagtaccttggcgaaaccaagactttcagtcctcaagaaatctcttctatggttctcatgaagatgaaagaggtcgcggaaaccaaactcggaaagaaggtcgagaaggcagtcatcaccgtgcccgcttatttcaacgacaaccagcgccaggctactaaggatgctggtgccattgctggtctcaacgtgctccgtatcatcaacgagcccactgcagcagcaattgcttatggccttggctccggcaagtctgataaggagcgtaacgttcttatctacgatcttggtggtggtactttcgatgtgtctctccttaacatccaaggtggtgtcttcactgttaaggctactgccggagatacccaccttggtggacaagactttgataccaacctcctggaccacttcaagaaggagttccagcgcaagactggcaaggacctctctggagacgcgagagccctccgtcgcctcagaaccgcttgcgagcgtgctaagcgtactttgtccaacgctacccagactactgtggaaatcgactctttgttcgatggcgaggacttcaattcctccatcacccgtgctcgctttgaagatctgaatgccaagtctttctccggtactctcgagccagtgcagcaggttctcaaggattctggccttgagaagagccaggtcgatgagatcgtgctcgttggtggttccacccgtatccctcgtatccagaagctgctcagcgatttcttcgatggcaagaagcttgaaaagagcatcaaccccgatgaagccgttgcctatggtgccgccgttcaggctggtatcttgtctggaaaggcttcttcggctgaaacccaggatcttcttctgcttgatgtcgttcccctgtctctcggtgttgctatggagggtaacatcttcgctcctgttgtggcccgtggtcagactgtgcctacgatcaagaagcgcactttcaccaccgtcgtcgataaccagaccacggtgcagttccccgtctaccagggtgagcgtaccaactgtgctgataacacctctctgggcgagttcaccctcgctcccatcccccctatgagggctggagaggccgcacttgaggtcgttttcgaagttgatgtcaacggtatcctcaaggttactgctaccgagaagtcttctggacgcagtgccaacatcaccatctccaatgccgtcggcaagctttccaccactgagattgagcagatgatcgatgacgctgcgaagttcaagtccagcgatgaggctttcaccaagaagttcgagtctcgccaacagctcgagtcctacatctcgcgtgttgaggaaatcgtctccgaccctaccatgtcgctgaagctgaagcgtggcaacaaggagaagatcgaatcggcactcagcgatgctatggcccagcttgagattgaagattcgactcccgaagatcttaagaagaaggagcttgctcttaagagactcattactaaggccatggccactcggtaa

SEQ ID NO: 48583 - protein, 614 aa, Aspergillus niger
MADEVYEGAIGIDLGTTYSCVANYEGTNVEIIANEQGSYTTPSFVSFTDKERLIGEAAKNQAAMNPKNTIFDIKRLIGRRFEDPIVKKDVESWPFKVVDQGGNPVVEVEYLGETKTFSPQEISSMVLMKMKEVAETKLGKKVEKAVITVPAYFNDNQRQATKDAGAIAGLNVLRIINEPTAAAIAYGLGSGKSDKERNVLIYDLGGGTFDVSLLNIQGGVFTVKATAGDTHLGGQDFDTNLLDHFKKEFQRKTGKDLSGDARALRRLRTACERAKRTLSNATQTTVEIDSLFDGEDFNSSITRARFEDLNAKSFSGTLEPVQQVLKDSGLEKSQVDEIVLVGGSTRIPRIQKLLSDFFDGKKLEKSINPDEAVAYGAAVQAGILSGKASSAETQDLLLLDVVPLSLGVAMEGNIFAPVVARGQTVPTIKKRTFTTVVDNQTTVQFPVYQGERTNCADNTSLGEFTLAPIPPMRAGEAALEVVFEVDVNGILKVTATEKSSGRSANITISNAVGKLSTTEIEQMIDDAAKFKSSDEAFTKKFESRQQLESYISRVEEIVSDPTMSLKLKRGNKEKIESALSDAMAQLEIEDSTPEDLKKKELALKRLITKAMATR

SEQ ID NO: 48584 - DNA, 1959 bp, Penaeus vannamei
  CDS (1)..(1959)
atggcaaaggcacctgctgtcggtattgatctgggaaccacctactcctgcgtgggtgtgttccagcatggcaaggtggagatcatcgccaacgaccagggcaaccgcaccacgccctcctacgtcgccttcacagacacagagcgtctgattggtgacgccgccaagaaccaggtggcgatgaaccccaacaacactgtattcgatgccaagcgactgatcggccgcaaattcgaagaccacacagtccagagcgacatgaagcattggcccttcaccatcatcaacgagagcacaaagccaaagatccaggtggagtacaagggagacaagaagaccttctaccccgaggagatctcctcgatggtgctcatcaaaatgaaggagaccgctgaggcttacctgggatccacagtgaaggatgctgtagtcactgtgcctgcctacttcaacgattctcagcgtcaggccaccaaggacgctggaaccatctcgggtctgaatgtgctgcgtatcattaacgaacctaccgctgctgccatcgcctacggcctcgacaagaaggttggcggtgagcgcaacgtcttgatcttcgatcttggcggcggtaccttcgatgtgtccatccttaccatcgaggatggcatcttcgaggtcaagtcaacagctggtgacactcacttgggcggtgaagacttcgacaaccgtatggtgaaccacttcatccaggaattcaagcgcaagtacaagaaggacccaagtgagaacaagcgctccctgcgtcgcctgcgtactgcctgtgagcgtgcgaagcgtaccctgtcttcctcgacacaggccagcgtggagatcgactccctcttcgaaggtatcgatttctacacctccatcacccgtgctcgcttcgaggagctgtgcgccgatctgttccgtggcaccttggagcccgtggagaagtccctccgtgatgcgaagatggacaaggcccagatccacgacatcgtccttgtcggaggatccacccgtatccccaagatccagaagctcctccaggacttcttcaacggcaaggagctgaacaagtccatcaaccccgatgaggctgtggcctacggtgccgccgtccaggccgccatcttgtgtggtgacaagtccgaggctgtgcaggacctgttgctgttggacgtgacccccttgtccctgggtatcgagactgccggtggtgtgatgaccgctctcatcaagcgtaacaccaccatccccaccaagcagactcagaccttcaccacctactctgacaaccagccaggtgtgctcatccaggtgtacgagggagagcgtgccatgaccaaggacaacaacctcctgggtaagttcgagctgagtggcatcccacctgctcctcgtggcgtgcctcagatcgaggtcaccttcgacattgacgccaacggcatcctgaacgtatccgccgtggacaagtctaccggcaaggagaacaagattaccatcaccaacgacaagggtcgcctctccaaggaggagatcgagcgcatggtgcaggacgccgagaagtacaaggctgacgatgagaagcagagggaccgtatttctgccaagaactccctggagtcttactgcttcaacatgaagtcaacagttgaggacgagaagttcaaggagaagatttctgaagaggaccgcaacaagattttggagacctgcaacgagactatcaagtggctggacatgaaccagctgggcgagaaggaagagtatgagcacaagcagaaggagatcgagcaggtgtgcaaccccatcattaccaagatgtatgctgctgctggtggtgctcctccaggtggcatgcccggcggcttcccaggtggtgccccaggtgccggcggtgctgctcccggtgctggtggttcctccggacccaccatcgaggaggtcgattaa

SEQ ID NO: 48585 - protein, 652 aa, Penaeus vannamei
MAKAPAVGIDLGTTYSCVGVFQHGKVEIIANDQGNRTTPSYVAFTDTERLIGDAAKNQVAMNPNNTVFDAKRLIGRKFEDHTVQSDMKHWPFTIINESTKPKIQVEYKGDKKTFYPEEISSMVLIKMKETAEAYLGSTVKDAVVTVPAYFNDSQRQATKDAGTISGLNVLRIINEPTAAAIAYGLDKKVGGERNVLIFDLGGGTFDVSILTIEDGIFEVKSTAGDTHLGGEDFDNRMVNHFIQEFKRKYKKDPSENKRSLRRLRTACERAKRTLSSSTQASVEIDSLFEGIDFYTSITRARFEELCADLFRGTLEPVEKSLRDAKMDKAQIHDIVLVGGSTRIPKIQKLLQDFFNGKELNKSINPDEAVAYGAAVQAAILCGDKSEAVQDLLLLDVTPLSLGIETAGGVMTALIKRNTTIPTKQTQTFTTYSDNQPGVLIQVYEGERAMTKDNNLLGKFELSGIPPAPRGVPQIEVTFDIDANGILNVSAVDKSTGKENKITITNDKGRLSKEEIERMVQDAEKYKADDEKQRDRISAKNSLESYCFNMKSTVEDEKFKEKISEEDRNKILETCNETIKWLDMNQLGEKEEYEHKQKEIEQVCNPIITKMYAAAGGAPPGGMPGGFPGGAPGAGGAAPGAGGSSGPTIEEVD

SEQ ID NO: 48586 - DNA, 1905 bp, Antheraea yamamai
  CDS (1)..(1905)
atgccagctattggaattgatctcggtacgacgtattcttgcgtcggtgtttggcaacatggaggagtggagatcatcgctaacgaccaagggaaccgtaccacaccatcgtacgtagcgtttacggacacggaacgactgatcggcgatgcagccaagaaccaagtcgctcttaaccccagcaacaccgtgttcgatgcgaagaggcttatcgggaggaaattcgacgaccagaagatacagcaagacatgaagcactggccgttcaaagttgtaaatgactgtggaaaaccaaagattcaagtagagttcaaaggcgaggcaaagaaattcgctcctgaggaaattagcagcatggtgttgacgaaaatgaaggatacggcagaagcatacctaggcacgactgttcgcgatgctgtgatcactgtaccggcttatttcaacgactctcagcgccaggccaccaaggacgccggagccattgccggtctgaatgtccttcgtataatcaatgagcccacagctgctgcgctcgcttacggcctcgacaagaacttgaaaggtgagagaaatgtgttgatcttcgacctgggcggtggtaccttcgatgtatccatcctgtcaatcgatgagggttcactctttgaagtgaaatcgacagccggtgatacccacctgggtggcgaggactttgacaacagactagtgaaccatcttgcggaggagttcaataggaaatacaagaaggacttacgaatgaaccctcgggcgcttcgtcgtctccgtacagctgctgagcgagccaagcgcaccctatcttcaagtactgaggctacgatcgagatcgatgctctgtacgagggtattgacttctacacgagggtatcccgcgctcgtttcgaagaactcaacgctgatctcttcagaggaactttggaaccggttgaaaaggcactcaaggacgcgaaacttgacaagggacagattcacgacgtggtcctcgttggtgggtccacacgcatcccgaaagtacagagcctgctccaaaacttcttctgcggcaagaagctgaacctgtccatcaatccggacgaagccgtggcattacgcgccgccgtacaagcagccattctgagcggtgaaacagactccaagatccaagacgtcttgcttgttgatgtggctccactatctcttggtatcgaaaccgctggtggtgtgatgactaaaatcgtcgagcgaaactctaaaatcccatgcaaacaatcacaaaccttcaccacctactcagacaaccaaccggcagtaactattcaagtgtatgaaggtgaaagagccatgactaaagacaacaatcttcttggcacgtttgacctgacgggcattccaccagcgccgcgaggagtaccgaagatcgatgtaaccttcgacatggacgctaacggcatcctgaacgtatctgccaaggagaacagcacgggcagaagcaagaacatcgtgattaagaacgataaaggtcgcctctcgcaggctgaaattgacaggatgctgtccgaagctgagaaatacaaagaggaagatgagaagcagcggcagagagtggcttctaggaaccagctcgaggcttacgtgtttagcgtcagacaggcgctggacgatgctggtaataagctgactgatgcagacaagagcacagcaaggaacgcttgtgacgaagcccttcgctggttggacaacaatactctggctgagcaagaagaatatgatcataaactgaaggaagttcagcgcatccgttccccagttatgacgaagatgcacggtggcggtgctgctgggggtacgcctggaggtgcaccaggttaccagccgaaggacggccctacagtcgaggaagtggattaa

SEQ ID NO: 48587 - protein, 634 aa, Antheraea yamamai
MPAIGIDLGTTYSCVGVWQHGGVEIIANDQGNRTTPSYVAFTDTERLIGDAAKNQVALNPSNTVFDAKRLIGRKFDDQKIQQDMKHWPFKVVNDCGKPKIQVEFKGEAKKFAPEEISSMVLTKMKDTAEAYLGTTVRDAVITVPAYFNDSQRQATKDAGAIAGLNVLRIINEPTAAALAYGLDKNLKGERNVLIFDLGGGTFDVSILSIDEGSLFEVKSTAGDTHLGGEDFDNRLVNHLAEEFNRKYKKDLRMNPRALRRLRTAAERAKRTLSSSTEATIEIDALYEGIDFYTRVSRARFEELNADLFRGTLEPVEKALKDAKLDKGQIHDVVLVGGSTRIPKVQSLLQNFFCGKKLNLSINPDEAVALRAAVQAAILSGETDSKIQDVLLVDVAPLSLGIETAGGVMTKIVERNSKIPCKQSQTFTTYSDNQPAVTIQVYEGERAMTKDNNLLGTFDLTGIPPAPRGVPKIDVTFDMDANGILNVSAKENSTGRSKNIVIKNDKGRLSQAEIDRMLSEAEKYKEEDEKQRQRVASRNQLEAYVFSVRQALDDAGNKLTDADKSTARNACDEALRWLDNNTLAEQEEYDHKLKEVQRIRSPVMTKMHGGGAAGGTPGGAPGYQPKDGPTVEEVD

SEQ ID NO: 48588 - DNA, 1911 bp, Vibrio fluvialis
  CDS (1)..(1911): transl_table=11
atgggtaaaatcattggtattgacttaggtactactaactcatgtgttgctgtgctagacggcgacaaacctcgcgtaatcgagaacgcagagggtgagcgtacaaccccttctgtaatcgcgtacacagatggtgaaacgctagttggtcagccagcgaaacgtcaagctgtaacaaacccggaaaacacgctatttgcaatcaagcgtcttatcggtcgtcgttatgaagacgaagaagtacagcgtgacatctcaattatgccttacaagatcgttcgtgcagacaacggcgatgcgtgggtagaagcgaaaggccaaaaaatggctgcgccacaggtttcagcagaagttctgaagaaaatgaagaaaactgcggaagattacctgggcgagaaagtaacgggtgccgttatcaccgttcctgcttacttcaacgatgcgcagcgtcaggcaacgaaagatgccggtcgtatcgcaggtcttgaagttaaacgtatcatcaacgaaccgactgctgctgcactggcttacggtctggacaaacagggcggcgatcgcgttatcgcagtatacgacctgggtggtggtgcatttgatatttcaatcatcgaaatcgatgaagttgaaggcgagaaaaccttcgaagttctggcaaccaacggtgatactcacctgggtggtgaagacttcgataaccgcatgatcaactacctggttgacgagttcaataaagaacaaggcatcaacctgaagaacgacccactggcgatgcagcgtctgaaagaagcggcagagaaagcgaagatcgaactgtcttcagctcagcaaactgatgtgaatctaccttacatcactgctgatgcaaccggtcctaagcacatgaacatcaaagtgactcgtgcgaaactggaatctctggttgaagacctggttcaacgttctctggatccactgaaagtggctctggctgatgcagacctgtctgtcagcgacatcactgacgttatcctggtgggtggtcagactcgtatgccaatggttcagaagaaagtggctgaattctttggtaaagaagcacgtcgtgacgtgaaccctgatgaagcagtagctgttggtgctgcggttcaaggtggcgtactggcgggtgaagtaaaagatgtactgctgctggacgtaactccgctgtctctgggtattgagacaatgggcggcgtaatgaccaaactgattgagaaaaacaccacgattccaaccaaagcgaatcaagtgttctcaacagccgaagacaaccagaacgcggtaacgattcacgtactgcaaggtgaacgtaaacaagcgaacttcaacaagtcgctgggtcagttcaacctagaaggcattcaggcagcaccacgtggtatgcctcagatcgaagtgacgttcgacctggatgcggatggtatcctgcacgtatcagcgaaagacaaacaaactggtgaagagcagaacatcactatccaagcgtctggtggtctgagcgacgaagaaatcgagaaaatggttcaggaagcagaagcgaacaaagaagcggacaaaaagttcgaagagctagcaactgcacgtaaccaagctgaccagatgatccacgcaactcgtaagcaggttgaagaagcgggtgacgctctgccagcagacgagaaagagaagatcgaagcggcgatcagtgagctggaaacagcgaaacgcggcgaagataaagcagaaatcgatgcgaaagttcaagcactgatgactgcttctcagaaactgatggaaatcgctcagcagaaagctcaggcacaaggtgctgacgctggccagcagtctacttctccagaagatgacgtggttgacgccgagtttgaagaagtgaaagacgacaagaaataa

SEQ ID NO: 48589 - protein, 636 aa, Vibrio fluvialis
MGKIIGIDLGTTNSCVAVLDGDKPRVIENAEGERTTPSVIAYTDGETLVGQPAKRQAVTNPENTLFAIKRLIGRRYEDEEVQRDISIMPYKIVRADNGDAWVEAKGQKMAAPQVSAEVLKKMKKTAEDYLGEKVTGAVITVPAYFNDAQRQATKDAGRIAGLEVKRIINEPTAAALAYGLDKQGGDRVIAVYDLGGGAFDISIIEIDEVEGEKTFEVLATNGDTHLGGEDFDNRMINYLVDEFNKEQGINLKNDPLAMQRLKEAAEKAKIELSSAQQTDVNLPYITADATGPKHMNIKVTRAKLESLVEDLVQRSLDPLKVALADADLSVSDITDVILVGGQTRMPMVQKKVAEFFGKEARRDVNPDEAVAVGAAVQGGVLAGEVKDVLLLDVTPLSLGIETMGGVMTKLIEKNTTIPTKANQVFSTAEDNQNAVTIHVLQGERKQANFNKSLGQFNLEGIQAAPRGMPQIEVTFDLDADGILHVSAKDKQTGEEQNITIQASGGLSDEEIEKMVQEAEANKEADKKFEELATARNQADQMIHATRKQVEEAGDALPADEKEKIEAAISELETAKRGEDKAEIDAKVQALMTASQKLMEIAQQKAQAQGADAGQQSTSPEDDVVDAEFEEVKDDKK

SEQ ID NO: 48590 - DNA, 3135 bp, Agrobacterium tumefaciens
  CDS (1)..(1905): transl_table=11
atggcaaaagtaatcggtatcgaccttggcacgaccaattcctgcgtcgcagtgatggacggcaaggacacgaaagtcattgaaaacgcggaaggcgcgcgcaccacgccgtccatggtggcattttccgacgatggcgaacgccttgtcggccagccggccaagcgccaggcggtcaccaacccgaccaacaccctgtttgcggtcaagcgcctcatcggccgccgttacgaagacccgaccgttgaaaaggacaaggccctcgtcccctttgaaatcgtcaagggcgacaatggcgacgcatgggtgaaggcgcaggacaagaattattccccttcgcagatttccgcgatgatccttcagaagatgaaggaaactgctgaatcctatctcggtgaaaaggtcgagaaggccgtcatcaccgttccggcctacttcaacgacgcccagcgtcaggcaaccaaggatgccggccgcatcgccggtctggatgttctgcgcatcatcaacgagccgaccgcggcagccctcgcttacggcctagacaagaaggacggcaagaccatcgccgtttacgaccttggcggcggtaccttcgatatttccgttctggaaatcggcgacggcgttttcgaagtgaagtccaccaatggtgataccttccttggcggtgaagacttcgacatgcgtctggtcgaatatctggccggcgagttcaagaaggatcagggcatcgacctgaagaacgacaagctcgctctgcagcgcctcaaggaagctgccgaaaaggcgaagatcgaactttcgtcctcgcagcagaccgaaatcaacctgccgttcatcacggcggacgcttccggtccgaagcacctgacgctgaagctgacccgcgccaagttcgaaagcctggtggacgatctggtgcagcgcaccgtcgctccctgcaaggcagccctcaaggatgccggcgttaccgctgccgagatcgatgaagttgttctcgtcggtggcatgagccgcatgccgaaggtacaggaagtcgttaagcagctgttcggcaaggagccgcacaagggcgtgaaccctgacgaagtggttgccatgggcgccgccatccaggctggcgttctgcagggcgacgtcaaggacgttctgctgctcgacgtgaccccgctgtcgctcggcatcgaaacactgggtggtgtcttcacccgtctgatcgatcgcaacacgacgatcccgaccaagaagagccagaccttctcgaccgccgaagacaaccagtcggccgtgaccatccgcgtttcgcagggcgagcgcgaaatggcgcaggacaacaagctgctcggccagttcgacctcgtcggcctgccgccgtcgccgcgcggtgttccgcagatcgaagtcaccttcgatatcgatgccaacggcatcgtgcaggtttcggccaaggacaaaggcaccggcaaggagcagcagatccgcatccaggcctccggtggtctttccgatgccgacatcgaaaagatggtcaaggacgccgaagccaatgccgaggccgacaagaagcgtcgcgccggtgtcgaggcgaagaaccaggccgaaagcctcattcactccaccgagaagtcggtgaaggaatatggcgacaaggtttccgagacggaccgcaaggccatcgaagacgccattgccagcctgaagaccgccgttgaagcttccgaaccggatgcagacgacattcaggcgaagacccagaccctcatggaagtttccatgaagctcggtcaggccatctacgaagcgcagcaggccgaggccggcgacgcttccgcagaaggcggcaaggacgacgtcgttgacgccgactatgaggaaatcaaggacgacaagaagtccgcgtaatcgcgtgacttccggtctcttctttatatatgcaagacatccggctgccgacgtgcagccggaaatccatttgcggggcttgttatcttaatggcgaaagcagacttttacgaaacacttggcgtcagcaagactgcggacgaaaaagagctgaaaagcgccttccgcaaactcgcgatgaaataccatccggacaaaaaccctgatgatgccgattccgaacggaaattcaaagaaatcaacgaagcctatgaaacgctgaaggacccgcagaagcgcgcggcctatgaccgtttcggccacgccgcgtttgaaaacggtggcatgggcggcggtggcggtggctttggcggcggcggttttgccaatggcggcttctccgatatcttcgaggacatcttcggcgagatgatgggcggcggacgcgcacgccgctcttcgggcgggcgtgaacgcggtgccgaccttcgctacaacatggaaatcacgctggaagaggccttcaccggcaagacagcgcagatcagggttccgacctcgatcacctgcgacgtctgttccggctcgggcgcaaaacccggcacgcagcccaagacctgcgccacctgtcagggttccggccgcgtgcgcgccgcgcagggtttcttctcggtggagcgcacctgcccgacctgccatggtcgcggacagacgatttccgatccctgcggcaagtgccacggtcagggccgtgtgacggaagagcgttcgctctccgtcaacattccctcgggcattgaggatggcacccgcattcgcctgcagggcgaaggcgaagccggcatgcgcggtggcccggcgggcgatctttacatcttcctgtccgtgcgtccgcatgagttcttccagcgtgacggtgctgatctttattgcaccgtgccgatctccatgacgacggcggcactcggtggcaccttcgatgtcacgacgctcgacggcacgaagtcgcgcgtcacggttccggaaggtacccagccgggcaagcagttccgcctgaagggcaagggcatgccggtgctgcgttcggcgcagacgggcgacctttatatccagattcagatcgagacgccgcagaagctcagcaagcgtcaacgtgagcttttgcaggagttcgagcagctctcctccaaggagaacaatccggaatcgaccggcttctttgcccggatgaagaaattctttgacggctga

SEQ ID NO: 48591 - protein, 634 aa, Agrobacterium tumefaciens
MAKVIGIDLGTTNSCVAVMDGKDTKVIENAEGARTTPSMVAFSDDGERLVGQPAKRQAVTNPTNTLFAVKRLIGRRYEDPTVEKDKALVPFEIVKGDNGDAWVKAQDKNYSPSQISAMILQKMKETAESYLGEKVEKAVITVPAYFNDAQRQATKDAGRIAGLDVLRIINEPTAAALAYGLDKKDGKTIAVYDLGGGTFDISVLEIGDGVFEVKSTNGDTFLGGEDFDMRLVEYLAGEFKKDQGIDLKNDKLALQRLKEAAEKAKIELSSSQQTEINLPFITADASGPKHLTLKLTRAKFESLVDDLVQRTVAPCKAALKDAGVTAAEIDEVVLVGGMSRMPKVQEVVKQLFGKEPHKGVNPDEVVAMGAAIQAGVLQGDVKDVLLLDVTPLSLGIETLGGVFTRLIDRNTTIPTKKSQTFSTAEDNQSAVTIRVSQGEREMAQDNKLLGQFDLVGLPPSPRGVPQIEVTFDIDANGIVQVSAKDKGTGKEQQIRIQASGGLSDADIEKMVKDAEANAEADKKRRAGVEAKNQAESLIHSTEKSVKEYGDKVSETDRKAIEDAIASLKTAVEASEPDADDIQAKTQTLMEVSMKLGQAIYEAQQAEAGDASAEGGKDDVVDADYEEIKDDKKSA

SEQ ID NO: 48592 - DNA, 1974 bp, Patinopecten yessoensis
  CDS (1)..(1974)
atggctaaccaagcagtgggaatcgatttgggaaccacctattcttgtgttggagttttccagcatggaagagtcgaaatcattgcgaatgaccagggaaatcgaccgaccccaagttatgtagcgtttacagacacagagcgtcttgcaggagatgccgccaagaaccaagtggctatgaatccctcaaacacaatttttgatgcaaaacgtctcataggtagaaaatttgatgatccctgtgtcacctccgataagaaacactggccttttgatgtggtcaacgttgaaggtaaaccaaaaatgagggtcaaatacaagactgaagaaaaggaattcttcccagaagaaatatcctcaatggttctcaacaaaatgaaggaaactgcagaagcctatcttggcaagactataacaaatgctgtagtaacagtcccagcctacttcaatgactctcagagacaggcaacaaaagatgctgggacaatttctggactgaatgttttacgtatcatcaatgaaccaacagcagctgcaattgcgtatggtcttgacaagaaggttggaggagaaaggaacgtactcatctttgatttaggtggtggtacttttgatgtatccattctgacaattgaggatggaatctttgaggtaaaatccacatctggggatacccacttaggtggtgaggactttgataaccgaatggttaaccacttcgtgcaggaattcaaacgtaaacacaagaaggacatctcggacaacaaaagggctgtacgtcgtctgagaacagcctgtgagcgagcaaagaggaccttgtcatcaagtgctcaggccagtgttgagattgactccctctatgaaggaatagatttctacaccagtatcactcgggcacgttttgaggagttgaatggagatcttttcagaggaaccttggaccctgtcgaaaaatcgctgcgtgatgctaaaattgacaaagctactatacatgacattgtactagttggaggttccacgcgtattccaaagatccagaaacttcttcaggacttcttcaatggcaaagaactaaacaagtcaattaatcccgatgaagctgttgcctatggtgcagctgtgcaggcagccatcctttctggagacaagtctgaggcagtccaggatctgttgctgttggccgtagctcctttgtccttgggtattgagactgctggaggtgtgatgacatcacttatcaaacgtaacacaactgttcccaccaagcagacccaaacatttaccacttactccgacaatcagcctggtgtgttgatccaggtttatgagggagagcgagcaatgaccaaagacaacaatctgctaggaaaattcgaactggccggaattccaccagcaccaagaggtgtacctcaaattgaggttacatttgatgtcgatgccaatggaatcctgaacgtttctgccgttgacaagagtactggcaaagagaataaaatcaccatcaccaatgacaaaggtcgtttgtccaaggaggagatcgaaaggatggtgaatgatgcagagaaatacaagtcagaagatgatacacaacgtaaccgtgtctcttccaagaacggtctagagagctatgctttccaaatgaaatccactgctgaggatgacaagctgaaggacaagataagtgaagaggataagaagacaatcagtgacaagtgttctgaagtgatcgcatggctagatgcaaaccagctggctgagaaggaggagtttgaacacaaacaaaaggagttggaggcgatttgtaatcccattgttaccaagctttaccagggagctggtggagctccaggaggcatgcctggtggtatgcctggtggaatgccaggtggtatgcctggtggtatgccaggtggtgccgacggtgcctccactggtggaagcggtggcccaaccatcgaggaggttgattaa

SEQ ID NO: 48593 - protein, 657 aa, Patinopecten yessoensis
MANQAVGIDLGTTYSCVGVFQHGRVEIIANDQGNRPTPSYVAFTDTERLAGDAAKNQVAMNPSNTIFDAKRLIGRKFDDPCVTSDKKHWPFDVVNVEGKPKMRVKYKTEEKEFFPEEISSMVLNKMKETAEAYLGKTITNAVVTVPAYFNDSQRQATKDAGTISGLNVLRIINEPTAAAIAYGLDKKVGGERNVLIFDLGGGTFDVSILTIEDGIFEVKSTSGDTHLGGEDFDNRMVNHFVQEFKRKHKKDISDNKRAVRRLRTACERAKRTLSSSAQASVEIDSLYEGIDFYTSITRARFEELNGDLFRGTLDPVEKSLRDAKIDKATIHDIVLVGGSTRIPKIQKLLQDFFNGKELNKSINPDEAVAYGAAVQAAILSGDKSEAVQDLLLLAVAPLSLGIETAGGVMTSLIKRNTTVPTKQTQTFTTYSDNQPGVLIQVYEGERAMTKDNNLLGKFELAGIPPAPRGVPQIEVTFDVDANGILNVSAVDKSTGKENKITITNDKGRLSKEEIERMVNDAEKYKSEDDTQRNRVSSKNGLESYAFQMKSTAEDDKLKDKISEEDKKTISDKCSEVIAWLDANQLAEKEEFEHKQKELEAICNPIVTKLYQGAGGAPGGMPGGMPGGMPGGMPGGMPGGADGASTGGSGGPTIEEVD

SEQ ID NO: 48594 - DNA, 1980 bp, Aequipecten irradians
  CDS (1)..(1980)
atgagcaagtctactgcaccatcagttggcattgatttgggaacaacctactcatgtgttggagtgtttcaacatggcaaagtagaaatcatcgccaatgaccaaggaaacaggacaaccccaagttatgtggcattcacagacacagagcgtctcgttggagatgcagccaagaaccaagtggcaatgaacccaacaaacacaatctttgatgccaaacgtcttatcggcagaaaatacgatgacccatgtgtgacatccgacaaaaaacactggccgtttaatgtggttaatgacaatggtaaaccaaaattgcaagtcaattacaagacagaagagaagactttcttccctgaggaaatttcctccatggttctcaacaaaatgaaggaaactgcagaagcttatttgggaaagaccgtaacaaatgcagtagtaacagtcccagcctacttcaacgactcgcagagacaggcaacaaaagatgctggaacaatttctggtcttaatgttcttcgtatcatcaacgagccaacagcagccgccattgcttacggtctggacaaaaaggttggcacagagaaaaatgttctcatctttgatttaggtggtggtacctttgatgtatccattctgacgattgaagatggaatctttgaggtgaaatccacatctggagacacccacttgggtggtgaggacttcgataaccgtatggtaaaccactttgttcaggaattcaagcgtaaacacaaaaaggacatacaagataacaaaagggctgttcgtcgtctgaggacagcatgtgagcgagcaaagagaaccttgtcatccagtgctcaggccagcgtggagattgattccctctatgaaggaattgatttctacaccagcatcacaagagcccgttttgaggagttgaacgcagatctattcagaggtaccttggaaccagtagaaaagtccctacgtgatgctaaactcgacaaaagtttaattcatgacatagtactggttggtgggtccacacgtattccaaagatccagaaacttcttcaagacttcttcaatggcaaagaactgaacaaatccattaatcccgatgaggccgtcgcctatggtgcagctgtccaagcagctatcctgtccggagacaagtcggaggaggtccaagatctactgttgttggatgtagctccattgtccctgggtatcgagaccgctggaggagtgatgacatcccttatcaagcgtaacacaactgtccccacaaaacagacccaaacattcaccacctactctgacaatcagcctggtgtgttgatccaagtatacgagggagaacgagcaatgaccaaagacaacaatctgcttggaaagtttgaactgaccggaattccaccagcacccagaggtgttccacagattgaggttaccttcgatgttgatgccaacggtatcttgaatgtgtctgccgtcgacaagagcactggcaaggaaaacaaaatcaccatcaccaatgacaaaggtcgtctgtcaaaggatgagatcgaaaggatggtgaacgacgcagagaaatacaaggcagaagatgatgtacaacgtagccgtgtctccgccaagaatgccctggagagctatgccttccagatgaaatccaccgttgaggatgacaacctcaagagcaagatcagcgaagacgacaagaagaccatcgttgacaagtgctcagaagtgatcacttggctagacgctaatcagctagctgaaaaggacgagtacgaacacaaacagaaggagttggagggcgtgtgtaatcccatcattaccaagctttaccagggagctggtggcgctggaggtatgcccggtggtatgcccggtggtatgcccggtggtatgcctggaggtatgccaggtggtgctgacagtcagtccactggtggaagcggtggcccaaccatcgaggaggtcgattaa

SEQ ID NO: 48595 - protein, 659 aa, Aequipecten irradians
MSKSTAPSVGIDLGTTYSCVGVFQHGKVEIIANDQGNRTTPSYVAFTDTERLVGDAAKNQVAMNPTNTIFDAKRLIGRKYDDPCVTSDKKHWPFNVVNDNGKPKLQVNYKTEEKTFFPEEISSMVLNKMKETAEAYLGKTVTNAVVTVPAYFNDSQRQATKDAGTISGLNVLRIINEPTAAAIAYGLDKKVGTEKNVLIFDLGGGTFDVSILTIEDGIFEVKSTSGDTHLGGEDFDNRMVNHFVQEFKRKHKKDIQDNKRAVRRLRTACERAKRTLSSSAQASVEIDSLYEGIDFYTSITRARFEELNADLFRGTLEPVEKSLRDAKLDKSLIHDIVLVGGSTRIPKIQKLLQDFFNGKELNKSINPDEAVAYGAAVQAAILSGDKSEEVQDLLLLDVAPLSLGIETAGGVMTSLIKRNTTVPTKQTQTFTTYSDNQPGVLIQVYEGERAMTKDNNLLGKFELTGIPPAPRGVPQIEVTFDVDANGILNVSAVDKSTGKENKITITNDKGRLSKDEIERMVNDAEKYKAEDDVQRSRVSAKNALESYAFQMKSTVEDDNLKSKISEDDKKTIVDKCSEVITWLDANQLAEKDEYEHKQKELEGVCNPIITKLYQGAGGAGGMPGGMPGGMPGGMPGGMPGGADSQSTGGSGGPTIEEVD

SEQ ID NO: 48596 - DNA, 1950 bp, Macrobrachium rosenbergii
  CDS (1)..(1950)
atggcgaaatcagctgctgttgggattgatctaggaactacatactcgtgtgtcggagtgttccagcatggcaaagttgagatcattgccaacgaccagggcaaccgaaccaccccttcgtatgtcgccttcacagacacagagcgccttattggtgatgctgccaagaatcaggtggccatgaaccccaacaacactgtatttgatgccaaacggctcattggccgaaagtttgatgacggtgttgttcagtctgacatgaagcattggccttttactgtcataaatgataatactaagccaaaaattcaagtagattacaagggtgaaacgaaaacatttttcccagaagaaatttcatcaatggttctaattaaaatgaaagaaactgcagaggcattcctgggcagcactgtgaaagatgctgttattactgttcctgcctacttcaatgattctcagcgtcaagctaccaaagatgcagggacaatctctggtctgaatgcccttcggatcattaatgagcctactgctgctgccatcgcttatggcttagacaagaaggttggaggagaacgcaatgttttgatctttgatcttggtggtggcacttttgatgtgtcaattctaaccattgaggatggaatttttgaggtaaaatccacagctggtgatactcacttgggtggtgaagattttgataacagaatggtaaatcacttcattcaagagttcaagcgaaagtacaaaaaagatccctctgagaacaaacgtgctcttcgccgtctccgtactgcttgtgagcgtgcaaagcgcactctttcagcctctgcccaagcaagtattgaaattgattctttgtatgagggtactgatttttacacatcggttactcgtgcaaggtttgaggagttgtgtggtgacttgttccgtggtacccttgagcctgtagagaaatccctgagagatgccaaaatggataaggcacagattcatgacattgttcttgttggaggatccactaggattcccaagattcagaaattactgcaagatttcttcaatgggaaagaactgaataaatctatcaatccagatgaagctgtagcatgtggtgctgctgtacaggcagctattttgtgtggtgataaatctgaggctgtgcaagatctgcttctcttggatgttacacctctgtctcttggtattgaaactgctggaggagttatgacggcactcattaaacgtaacaccacaatcccaaccaagcagactcagacattcaccacttattcagacaatcagcctggtgtgttaattcaagtttatgaaggagagcgtgcaatgacaaaggataacaacctcctgggtaaatttgaactctctggtattcctccagctccacgaggagtgccacaaattgaagtgacttttgatattgatgccaatggtatcctgaatgtgtctgctgcggacaagtcaactggtaaggagaacaaaatcacaatcacaaatgacaagggtcgcctcagtaaagaagaaattgaacgtatggttcaagaagctgaaaagtacaaagctgatgatgagaagcaacgtgatcgcattgcagcaaagaatagtttggaatcttactgcttcaacatgaagtccaccgtggaagatgacaagtttaaggacaaggtgccagaggaggatcgcaacaagataatggaagcttgcaatgatgccatcaaatggctggattctaatcagctgggagagaaggaagagtatgagcataaattgaaggaaatagaacaaatctgcaatcccatcatcacaaaaatgtatcaagcagctggtggtgcccctccaggtggtatgccaggtggcttcccaggtgcaccaggtggtggtgctgcacctggtggtggttcctctggcccaaccattgaagaagtagattaa

SEQ ID NO: 48597 - protein, 649 aa, Macrobrachium rosenbergii
MAKSAAVGIDLGTTYSCVGVFQHGKVEIIANDQGNRTTPSYVAFTDTERLIGDAAKNQVAMNPNNTVFDAKRLIGRKFDDGVVQSDMKHWPFTVINDNTKPKIQVDYKGETKTFFPEEISSMVLIKMKETAEAFLGSTVKDAVITVPAYFNDSQRQATKDAGTISGLNALRIINEPTAAAIAYGLDKKVGGERNVLIFDLGGGTFDVSILTIEDGIFEVKSTAGDTHLGGEDFDNRMVNHFIQEFKRKYKKDPSENKRALRRLRTACERAKRTLSASAQASIEIDSLYEGTDFYTSVTRARFEELCGDLFRGTLEPVEKSLRDAKMDKAQIHDIVLVGGSTRIPKIQKLLQDFFNGKELNKSINPDEAVACGAAVQAAILCGDKSEAVQDLLLLDVTPLSLGIETAGGVMTALIKRNTTIPTKQTQTFTTYSDNQPGVLIQVYEGERAMTKDNNLLGKFELSGIPPAPRGVPQIEVTFDIDANGILNVSAADKSTGKENKITITNDKGRLSKEEIERMVQEAEKYKADDEKQRDRIAAKNSLESYCFNMKSTVEDDKFKDKVPEEDRNKIMEACNDAIKWLDSNQLGEKEEYEHKLKEIEQICNPIITKMYQAAGGAPPGGMPGGFPGAPGGGAAPGGGSSGPTIEEVD

SEQ ID NO: 48598 - DNA, 1923 bp, Drosophila lummei
  CDS (1)..(1923)
atgccagccattggtattgatttgggaaccacgtactcgtgcgtgggtgtctatcagcatggcaaggtggagataattgccaatgaccagggcaataggacgacacccagctatgtggctttcacagattcggagcgtctgattggcgacgcggccaagaaccaggtggcgatgaaccccaagaacacagtattcgatgcgaagcgtctgattggtcgcaggtacgatgatccgaagatagcggaggacatcaagcactggcccttcaaggtggtcagcgacggaggcaagcccaagattggcgtcgagtttaagggggagcagaagcgttttgcgcccgaggagattagctcgatggtgctggtgaagatgaaggaaacggcggaggcgtacctgggccagagcatcacagacgcggtcatcacagtgcccgcctatttcaacgactcgcagcgccaggctaccaaagatgccggccacatagccggactgaacgtgcttaggatcatcaacgagccgaccgcggcggctctggcctatggcctggacaagaatctgaagggcgaacgcaatgttttgatcttcgatctgggcggcggcacctttgatgtctccattctaaccatcgacgagggctcactgttcgaggtgcggtcaacggctggagacacacatttgggcggcgaggactttgacaacagactggtaacccatctggcggaggagttcaagcgcaagtacaagaaggatctgcgctccaatcctcgcgccctgcgccgcctgcgcactgcggcggagcgagccaagcgcacgctctcgtcgagcacagaggctaccattgaggtggacgcgctgttcgagggccacgacttctacacgaaggtgagccgtgcccggttcgaggagctgtgcgccgatctgttccgcaacacactggcgccagtggaaaaggcgctcaacgatgccaagatggacaagcagcagatccacgatattgtgctcgtcggtggctcgacacgcattcccaaggtgcagagcctgcttcagcagttcttcggcggcaagagcctcaacctttccatcaatccggacgaggcggtggcctatggcgccgcagtccaagcagccatacttagcggcgaccagagcggcaagatccaggacgtgctcctggtggacgttgcgcccctttcgttgggcatcgagactgccggcggcgtcatgaccaagctgattgaacgcaactcccggatcccgtgcaagcagacgaagaccttctcaacgtactctgacaaccagccgggcgtttccattcaggtgtacgagggcgagcgcgccctcacgcagcacaacaattcactgggcacgttcgatttgtctggcataccgccggcaccgcgcggcgtgccccagatcgaggtcaccttcgacatggacgccaatggtatcctgaacgtgacggccaaggagatgagcaccggcaaggccaagaacattaccatcaagaacgacaagggccgcctctcgcaggcagagatcgaccgcatggtgaacgaggccgagcgctacgcggacgaggatgagaagcaccgagagcgcatcacggctcgcaacagcctcgagagctacgtctttggcgtcaagcaggccgtcgagcaggccagttccgacaagctgagtgaaagcgataagtcctccgtgctggacaagtgcagcgagaccgtcaagtggctcgacgccaacaccacagccgacaaggaggagttcgagtacaaactgaaggagcttactcagcactgctcccccatcatgaccaagctccatcagcagggacagcctcaaggaaacgccaactgtggtcagcaggcgggctttggtggtgctggtggctaccaaggacccaccgtggaggaagtcgattaa

SEQ ID NO: 48599 - protein, 640 aa, Drosophila lummei
MPAIGIDLGTTYSCVGVYQHGKVEIIANDQGNRTTPSYVAFTDSERLIGDAAKNQVAMNPKNTVFDAKRLIGRRYDDPKIAEDIKHWPFKVVSDGGKPKIGVEFKGEQKRFAPEEISSMVLVKMKETAEAYLGQSITDAVITVPAYFNDSQRQATKDAGHIAGLNVLRIINEPTAAALAYGLDKNLKGERNVLIFDLGGGTFDVSILTIDEGSLFEVRSTAGDTHLGGEDFDNRLVTHLAEEFKRKYKKDLRSNPRALRRLRTAAERAKRTLSSSTEATIEVDALFEGHDFYTKVSRARFEELCADLFRNTLAPVEKALNDAKMDKQQIHDIVLVGGSTRIPKVQSLLQQFFGGKSLNLSINPDEAVAYGAAVQAAILSGDQSGKIQDVLLVDVAPLSLGIETAGGVMTKLIERNSRIPCKQTKTFSTYSDNQPGVSIQVYEGERALTQHNNSLGTFDLSGIPPAPRGVPQIEVTFDMDANGILNVTAKEMSTGKAKNITIKNDKGRLSQAEIDRMVNEAERYADEDEKHRERITARNSLESYVFGVKQAVEQASSDKLSESDKSSVLDKCSETVKWLDANTTADKEEFEYKLKELTQHCSPIMTKLHQQGQPQGNANCGQQAGFGGAGGYQGPTVEEVD

SEQ ID NO: 48600 - DNA, 1926 bp, Drosophila virilis
  CDS (1)..(1926)
atgccagccattggtattgatttgggcaccacgtactcgtgcgtgggtgtctatcagcatggcaaggtggagataattgccaatgaccagggcaataggacgacacccagctatgtggctttcacagattcggagcgtctcattggcgacgcggccaagaaccaggtggcgatgaaccccaagaacacagtattcgatgcgaagcgtctgattggtcgcaggtacgatgatccgaagatagcggaggacatcaagcactggcccttcaaggtggtcagcgacggaggcaagcccaagattggcgtcgagtttaagggggagcagaagcgttttgcgcccgaggagattagctcgatggtgctggtgaagatgaaggaaacggcggaggcgtacctgggccaaagcatcacagacgcggtcatcacagtgcccgcctatttcaacgactcgcagcgccaggctaccaaagatgccggccacatagccggactgaacgtgctgaggatcatcaacgagccgacggcggcggcactggcctatggcctggacaagaatctgaagggcgaacgcaatgttttgatcttcgatctgggcggcggcacctttgatgtctccattctaaccatcgacgagggctcactgttcgaggtgcggtcaacggctggagacacacatttgggcggcgaggactttgacaacagactggtaacccatctggcggaggagtttaagcgcaagtacaagaaggatctgcgctccaatcctcgcgccctgcgccgcctgcgcactgcggcggagcgagccaagcgcacgctctcgtcgagcacagaagctaccattgaggtggacgcgctgttcgagggccacgacttctacacgaaggtgagccgtgcccggttcgaggagctgtgcgccgatctgttccgcaacacactggcgccagtggagaaggcgctcaacgatgccaagatggacaagcagcagatccacgatattgggctcgtcggtggctcgacacgcattcccaaggtgcagagcctgcttcagcagttcttcggcggcaagagcctcaacctttccatcaatcccgacgaggcggtggcctatggcgccgcagtccaagcagccatacttagcggcgaccagagcggcaagatccaggacgtgctcctggtggacgttgcgcccctttcgttgggcatcgagactgccggcggcgtcatgaccaagctgattgaacgcaactcccggatcccgtgcaagcagacgaagaccttctcaacgtactctgacaaccagccgggcgtctccattcaggtgtacgagggcgagcgcgccctcacgcagcacaacaattcgctgggcacgttcgatttgtctggcataccgccggcaccgcgcggcgtgccccaaatcgaggtcaccttcgacatggacgccaatggtatcctgaacgtgacggccaaggagatgagcaccggtaaggccaagaacattaccatcaagaacgacaagggccgcctctcgcaggcagagatcgaccgcatggtgaacgaggccgagcgctacgcggacgaggatgagaagcaccgagagcgcatcacggctcgcaacagcctcgagagctacgtcttcggcgtcaagcaggccgtggagcaggccagtcctgacaagctgagtgacagcgataagtcctccgtgctggacaagtgcagcgagaccgtcaagtggctcgacgccaacaccacagccgacaaggaggagttcgagtacaaactaaaagagctcacccagcactgctctcccatcatgaccaagctccaccagcagggacagcctcaaggaaacgccaactgtggtcagcaggcgggcggctttggtggtgccggtggctaccaaggacccaccgtggaggaagtcgattaa

SEQ ID NO: 48601 - protein, 641 aa, Drosophila virilis
MPAIGIDLGTTYSCVGVYQHGKVEIIANDQGNRTTPSYVAFTDSERLIGDAAKNQVAMNPKNTVFDAKRLIGRRYDDPKIAEDIKHWPFKVVSDGGKPKIGVEFKGEQKRFAPEEISSMVLVKMKETAEAYLGQSITDAVITVPAYFNDSQRQATKDAGHIAGLNVLRIINEPTAAALAYGLDKNLKGERNVLIFDLGGGTFDVSILTIDEGSLFEVRSTAGDTHLGGEDFDNRLVTHLAEEFKRKYKKDLRSNPRALRRLRTAAERAKRTLSSSTEATIEVDALFEGHDFYTKVSRARFEELCADLFRNTLAPVEKALNDAKMDKQQIHDIGLVGGSTRIPKVQSLLQQFFGGKSLNLSINPDEAVAYGAAVQAAILSGDQSGKIQDVLLVDVAPLSLGIETAGGVMTKLIERNSRIPCKQTKTFSTYSDNQPGVSIQVYEGERALTQHNNSLGTFDLSGIPPAPRGVPQIEVTFDMDANGILNVTAKEMSTGKAKNITIKNDKGRLSQAEIDRMVNEAERYADEDEKHRERITARNSLESYVFGVKQAVEQASPDKLSDSDKSSVLDKCSETVKWLDANTTADKEEFEYKLKELTQHCSPIMTKLHQQGQPQGNANCGQQAGGFGGAGGYQGPTVEEVD

SEQ ID NO: 48602 - DNA, 1926 bp, Drosophila virilis
  CDS (1)..(1926)
atgccagccattggtattgatttgggcaccacgtactcgtgcgtgggtgtctatcagcatggcaaggtggagataattgccaatgaccagggcaataggacgacacccagctatgtggctttcacagattcggagcgtctcattggcgacgcggccaagaaccaggtggcgatgaaccccaagaacacagtattcgatgcgaagcgtctgattggtcgcaggtacgatgatccgaagatagcggaggacatcaagcactggcccttcaaggtggtcagcgacggaggcaagcccaagattggcgtcgagtttaagggggagcagaagcgttttgcgcccgaggagattagctcgatggtgctggtgaagatgaaggaaacggcggaggcgtacctgggccaaagcatcacagacgcggtcatcacagtgcccgcctatttcaacgactcgcagcgccaggctaccaaagatgccggccacatagccggactgaacgtgctgaggatcatcaacgagccgacggcggcggcactggcctatggcctggacaagaatctgaagggcgaacgcaatgttttgatcttcgatctgggcggcggcacctttgatgtctccattctaaccatcgacgagggctcactgttcgaggtgcggtcaacggctggagacacacatttgggcggcgaggactttgacaacagactggtaacccatctggcggaggagtttaagcgcaagtacaagaaggatctgcgctccaatcctcgcgccctgcgccgcctgcgcactgcggcggagcgagccaagcgcacgctctcgtcgagcacagaagctaccattgaggtggacgcgctgttcgagggccacgacttctacacgaaggtgagccgtgcccggttcgaggagctgtgcgccgatctgttccgcaacacactggcgccagtggagaaggcgctcaacgatgccaagatggacaagcagcagatccacgatattgtgctcgtcggtggctcgacacgcattcccaaggtgcagagcctgcttcagcagttcttcggcggcaagagcctcaacctttccatcaatcccgacgaggcggtggcctatggcgccgcagtccaagcagccatacttagcggcgaccagagcggcaagatccaggacgtgctcctggtggacgttgcgcccctttcgttgggcatcgagactgccggcggcgtcatgaccaagctgattgaacgcaactcccggatcccgtgcaagcagacgaagaccttctcaacgtactctgacaaccagccgggcgtctccattcaggtgtacgagggcgagcgcgccctcacgcagcacaacaattcgctgggcacgttcaatttgtctggcataccgccggcaccgcgcggcgtgccccaaatcgaggtcaccttcgacatggacgccaatggtatcctgaacgtgacggccaaggagatgagcaccggcaaggccaagaacattaccatcaagaacgacaagggccgcctctcgcaggcagagatcgaccgcatggtgaacgaggccgagcgctacgcggacgaggatgagaagcaccgagagcgcatcacggctcgcaacagcctcgagagctacgtcttcggcgtcaagcaggccgtggagcaggccagtcctgacaagctgagtgacagcgataagtcctccgtgctggacaagtgcagcgagaccgtcaagtggctcgacgccaacaccacagccgacaaggaggagttcgagtacaaactaaaagagctcacccagcactgctctcccatcatgaccaagctccaccagcagggacagcctcaaggaaacgccaactgtggtcagcaggcgggcggctttggtggtgccggtggctaccaaggacccaccgtggaggaagtcgattaa

SEQ ID NO: 48603 - protein, 641 aa, Drosophila virilis
MPAIGIDLGTTYSCVGVYQHGKVEIIANDQGNRTTPSYVAFTDSERLIGDAAKNQVAMNPKNTVFDAKRLIGRRYDDPKIAEDIKHWPFKVVSDGGKPKIGVEFKGEQKRFAPEEISSMVLVKMKETAEAYLGQSITDAVITVPAYFNDSQRQATKDAGHIAGLNVLRIINEPTAAALAYGLDKNLKGERNVLIFDLGGGTFDVSILTIDEGSLFEVRSTAGDTHLGGEDFDNRLVTHLAEEFKRKYKKDLRSNPRALRRLRTAAERAKRTLSSSTEATIEVDALFEGHDFYTKVSRARFEELCADLFRNTLAPVEKALNDAKMDKQQIHDIVLVGGSTRIPKVQSLLQQFFGGKSLNLSINPDEAVAYGAAVQAAILSGDQSGKIQDVLLVDVAPLSLGIETAGGVMTKLIERNSRIPCKQTKTFSTYSDNQPGVSIQVYEGERALTQHNNSLGTFNLSGIPPAPRGVPQIEVTFDMDANGILNVTAKEMSTGKAKNITIKNDKGRLSQAEIDRMVNEAERYADEDEKHRERITARNSLESYVFGVKQAVEQASPDKLSDSDKSSVLDKCSETVKWLDANTTADKEEFEYKLKELTQHCSPIMTKLHQQGQPQGNANCGQQAGGFGGAGGYQGPTVEEVD

SEQ ID NO: 48604 - DNA, 1968 bp, Locusta migratoria
  CDS (1)..(1968)
atggcaaaggcacccgccgtcggaattgatttgggtaccacctactcctgtgttggagtattccagcacgggaaagtcgaaatcatcgccaatgatcaaggaaaccgtacaacacccagttatgtcgcatttacagatacagagcgacttattggcgatgctgccaaaaatcaggtggccatgaacccaagtaacactatttttgatgcaaagcgtcttattgggcgccgtttcgacgaccaggctgtacaaagtgatatgaagcattggcctttcaaagttataaatgatagtggcaaaccaaagattcaggttcagtacaaaggagaaacaaaaaccttcttccctgaggaggttagctcaatggttctaacaaaaatgaaagaaacggcagaggcataccttggaaagaatgtcagtaatgccgtgatcacagttcctgcctacttcaatgattcgcaaagacaagccaccaaagacgccggagccattgctggtctcaatgtgctgcgtattattaatgaacctacagcagctgcaattggctatgggctcgataaaaaggtaagtggtcatggtgaaagaaatgtccttatttttgatttgggtggtggtacatttgatgtgtctattttgacaatagaagatggtatctttgaagtaaaggccacagcaggagacactcatttgggaggtgaagactttgataatcgcatggtaaatcattttgttcaagaattcaaaagaaagtacaaaaaggaccttactaccaacaagagagcactgcgcagattgagaaccgcttgtgaaagagcgaagcgcacactgtcctcgtcaacacaggccagcattgaaatagattccctctatgagggcattgatttctatacctctatcaccagggcaaggtttgaagagctcaatgctgacttgttcagatccaccatggaacctgtggagaaagcacttcgtgatgctaagatggacaaggctcaaattcatgacattgtgttggtgggtgggtcaactcgtattccaaaagtacaaaaactgttgcaagatttctttaatggcaaggaactgaacaagtcgatcaacccagatgaggctgtagcatatggagctgctgttcaggcagcaattttggcaggcgacaagtctgaggaagtgcaggacctgttgctgcttgatgtcacaccactgtctctgggtattgaaactgctggtggtgtgatgaccactcttatcaaaagaaataccaccatcccaacaaagcagactcaaacattcacaacatattcagacaaccagcctggtgtgctcattcaggtatacgagggtgagcgtgccatgacaaaagataacaatcttctgggtaaatttgagttgactggaataccacctgccccacgaggtgtgcctcaaattgaagtgaccttcgatattgatgctaatggtatcttgaatgtaactgctgtggagaaatcgacaggcaaagagaacaagatcacaattacaaacgacaagggccgtttgagcaaggaagaaattgagcgcatggtcaacgaagctgaacgttatcgtgcagaggacgagaaacagaaggcgacaattgcggcaaagaacgggctcgagtcttactgcttcaatatgaaatctactgttgaagacgagaaactgaaagacaagatctccgactctgataagcagaccatcttggacaagtgcaatgaagtcatccgttggcttgatgccaaccagttggctgagaaggaagagtttgaggagaagcagaaggaactggagcagatctgcaatcccatcattaccaagttgtaccagggtgcaggcggagctcctggaggaatgcctggtggtttccctggaggcttcccaggtgccggtggagctgctgctggtggtgctggtgctggtggcgctggcccaactatcgaagaggtcgactaa

SEQ ID NO: 48605 - protein, 655 aa, Locusta migratoria
MAKAPAVGIDLGTTYSCVGVFQHGKVEIIANDQGNRTTPSYVAFTDTERLIGDAAKNQVAMNPSNTIFDAKRLIGRRFDDQAVQSDMKHWPFKVINDSGKPKIQVQYKGETKTFFPEEVSSMVLTKMKETAEAYLGKNVSNAVITVPAYFNDSQRQATKDAGAIAGLNVLRIINEPTAAAIGYGLDKKVSGHGERNVLIFDLGGGTFDVSILTIEDGIFEVKATAGDTHLGGEDFDNRMVNHFVQEFKRKYKKDLTTNKRALRRLRTACERAKRTLSSSTQASIEIDSLYEGIDFYTSITRARFEELNADLFRSTMEPVEKALRDAKMDKAQIHDIVLVGGSTRIPKVQKLLQDFFNGKELNKSINPDEAVAYGAAVQAAILAGDKSEEVQDLLLLDVTPLSLGIETAGGVMTTLIKRNTTIPTKQTQTFTTYSDNQPGVLIQVYEGERAMTKDNNLLGKFELTGIPPAPRGVPQIEVTFDIDANGILNVTAVEKSTGKENKITITNDKGRLSKEEIERMVNEAERYRAEDEKQKATIAAKNGLESYCFNMKSTVEDEKLKDKISDSDKQTILDKCNEVIRWLDANQLAEKEEFEEKQKELEQICNPIITKLYQGAGGAPGGMPGGFPGGFPGAGGAAAGGAGAGGAGPTIEEVD

SEQ ID NO: 48606 - DNA, 1968 bp, Chlamys farreri
  CDS (1)..(1968)
atggctgtcgctaaacaagctgttggtatcgatttgggaaccacctattcctgtgttggagtgttccagcatggaaaagtcgaaatcattgcgaatgaccagggaaaccgaacaaccccaagttatgtagcatttacagacacagagcgtcttgtaggagatgccgccaagaaccaagtggcaatgaatccctcaaacacaatttttgatgccaaacgtcttataggtagaaaatttactgatccctgtgtcgtctccgataagaaacactggccttttgatgtgatcaacgaagatggaaaaccaaaactgagggtcaactacaagactgaatcaaaaactttcttcccagaagaaatatcctcaatggtactcaacaaaatgaaggaaacagcagaagcctatcttggcaagactgtaacaaatgctgtagtgacagtcccagcctacttcaatgactctcagagacaggctacaaaagatgcaggaacaatttctggactgaatgttctacgtatcatcaatgaaccaacagcagctgccattgcatatggtcttgacaagaaggttggaggagaaaggaatgtactcatctttgatttaggtggtggtacttttgatgtatccattctgacaatcgaggatggaatctttgaggtaaaatcaacatctggggatacccatttaggtggtgaagactttgacaaccgaatggtgaaccactttgtgcaggaattcaaacgtaaacacaagaaggatatctctgacaacaaaagagctgtacgtcgtctgagaacagcttgtgagcgagcaaagaggaccttgtcatcaagtgctcaggccagtgtagagatcgactctctctatgaaggaatagatttctacaccagcattactcgggctcgttttgaggagttgaacgcagatcttttcagaggcacattagagcctgttgaaaaatcacttcgtgatgctaaaattgacaaatccgcaatccatgacattgtactagttggaggttccactcgtattccaaagatccagaaacttcttcaggacttcttcaatggcaaagaactgaacaagtccattaatcctgatgaggctgttgcctatggtgcagctgtgcaggcagccatcctttctggagacaagtctgaggaggtccaggatctgttgttgttggatgtagctcctttgtccttgggtattgagactgcaggaggagtgatgacatcacttatcaaacgtaacacaactgtccccaccaagcagacccaaacatttaccacatactctgacaatcagcctggtgtgttgatccaggtttatgagggagaacgagcaatgaccaaagacaacaatctgctcggaaagtttgaactgacaggaattccaccagcaccaagaggtgtacctcaaattgaggttacatttgatgttgatgccaacggtatcctgaacgtttctgctgttgacaagagtaccggcaaagagaataaaatcaccatcactaatgacaaaggtcgtttgtccaaagaggagatcgaaaggatggtgaatgatgctgagaaatacaaggcagaagatgatgtacaacgtaaccgtgtctccgccaagaacggtctcgagagctatgctttccaaatgaaatccactgccgaggatgataaacttaaggacaagataagtgaagaagacaagaagaccatcactgacaagtgttctgaggtgatctcctggctagatgcaaaccagctggcagagaaggaggagtttgaacacaaacagaaggagttggaagcagtttgtaatcccattgttaccaagctttaccagggagctggaggagctccaggaggcatgcctggtggtatgccaggaggtatgccaggaggtatgccaggtggtgctgatggtgcctccactggtggaggcggtggcccaaccattgaggaggttgattaa

SEQ ID NO: 48607 - protein, 655 aa, Chlamys farreri
MAVAKQAVGIDLGTTYSCVGVFQHGKVEIIANDQGNRTTPSYVAFTDTERLVGDAAKNQVAMNPSNTIFDAKRLIGRKFTDPCVVSDKKHWPFDVINEDGKPKLRVNYKTESKTFFPEEISSMVLNKMKETAEAYLGKTVTNAVVTVPAYFNDSQRQATKDAGTISGLNVLRIINEPTAAAIAYGLDKKVGGERNVLIFDLGGGTFDVSILTIEDGIFEVKSTSGDTHLGGEDFDNRMVNHFVQEFKRKHKKDISDNKRAVRRLRTACERAKRTLSSSAQASVEIDSLYEGIDFYTSITRARFEELNADLFRGTLEPVEKSLRDAKIDKSAIHDIVLVGGSTRIPKIQKLLQDFFNGKELNKSINPDEAVAYGAAVQAAILSGDKSEEVQDLLLLDVAPLSLGIETAGGVMTSLIKRNTTVPTKQTQTFTTYSDNQPGVLIQVYEGERAMTKDNNLLGKFELTGIPPAPRGVPQIEVTFDVDANGILNVSAVDKSTGKENKITITNDKGRLSKEEIERMVNDAEKYKAEDDVQRNRVSAKNGLESYAFQMKSTAEDDKLKDKISEEDKKTITDKCSEVISWLDANQLAEKEEFEHKQKELEAVCNPIVTKLYQGAGGAPGGMPGGMPGGMPGGMPGGADGASTGGGGGPTIEEVD

SEQ ID NO: 48608 - DNA, 1986 bp, Crassostrea gigas
  CDS (1)..(1986)
atgagaaagttactgtttcttggtttggccattttgctggtatcatggtccagagctgatgatgatgagggtgagaagaaaaaagacaaagaaagtgttgggacagtaattggaattgatttgggaaccacgtattcatgtgttggtgtattcaaaaatggacgagtagaaatcattgccaatgaccaaggaaaccgtatcaccccatcctatgttgccttcacagcagacaatgaacgattgattggagatgctgctaaaaatcagctgacctccaaccctgaaaacaccatttttgatgtcaaacgtttgattggtcgcacctgggatgacaaatctgttcagaaggacattcagtactatcctttcaaagtcatcaacaagaatggaaaaccacacatcagtgttgaggctagcggtgaggagaaagtctttgctcctgaagaagtttctgccatggttcttggaaagatgagggaaattgctgaaggattcttgggcaaaaagatcaacaatgctgtaatcactgttcctgcctacttcaatgatgcccagcgtcaggccacaaaggatgctggaaccattgctggtctcaatgtcatgagaattatcaacgagccaactgcagctgctattgcttatggtttggacaagaaggaaggagagaagaacatcctggtctttgatcttggtggcggtaccttcgatgtctctctgctgaccattgataatggagtgtttgaggttgttgctacaaatggtgacactcacttgggaggagaggactttgatcagagagttatggagcacttcatcaagctgtacaagaagaagaagggcaaagacatcaggaaggacaaccgtgctgttcagaaactccgtcgtgaagtggagaaagccaagagagctctttcctcccagcatcaggccaagatcgaaattgaatccctgtttgatggagaagatttctcagaaacattaacccgtgccagatttgaggaactcaacatggacttattcagatccacaatgaaaccagtgaaacaggtcttggaagacgctgacttgaaaaaagaagaaattgatgaaattgtattagttggaggctccactagaatccctaaggtccaacagcttgtcaaagacttcttcaatggaaaagagccaaaccgtggagtcaaccctgatgaggctgttgcttatggagctgctgtacaagctggagtgttgagtggagaggaagacactggtgaccttctgctgttggacgttaaccccttgaccatgggtatcgagactgttggcggtgtcatgaccaaactcatcccacgtaacactgttatccccaccaagaaatctcagatcttctccacagctgctgataaccaaccaactgtgaccatccaggtctttgaaggagaacgtccaatgaccaaggataaccacttgctcggaaagtttgacctgacaggaattcccccagcacctagaggagtcccacagattgaggttacatttgagatcgatgtaaacggtatcttgaaggttacagctgaggacaaaggaacaggaaccaagaaccacattgttatccagaacgacaacaacagactctcaccagaagacatcgaaagaatgatcaacgatgctgagaagtttgctgatgatgacaagaaagtgaaggagaaggttgaagccaaaaatgaactcgaaagctatgcatattctcttaaaaatcagataggagacaaagaaaaattgggaggaaaattgagtgatgaggataaaaagacaattgaagaagctgtggatgagaaaattaagtggatggaatctaatgctgatgctgaagtagaagacttaaaagcacaaaagaaagagttagaagagattgtgcagcctattatgaccaaactttatcagggagcaggtggtgcccctcccccatcaggagaagagggtgctgatgagaaggacgagttataa

SEQ ID NO: 48609 - protein, 661 aa, Crassostrea gigas
MRKLLFLGLAILLVSWSRADDDEGEKKKDKESVGTVIGIDLGTTYSCVGVFKNGRVEIIANDQGNRITPSYVAFTADNERLIGDAAKNQLTSNPENTIFDVKRLIGRTWDDKSVQKDIQYYPFKVINKNGKPHISVEASGEEKVFAPEEVSAMVLGKMREIAEGFLGKKINNAVITVPAYFNDAQRQATKDAGTIAGLNVMRIINEPTAAAIAYGLDKKEGEKNILVFDLGGGTFDVSLLTIDNGVFEVVATNGDTHLGGEDFDQRVMEHFIKLYKKKKGKDIRKDNRAVQKLRREVEKAKRALSSQHQAKIEIESLFDGEDFSETLTRARFEELNMDLFRSTMKPVKQVLEDADLKKEEIDEIVLVGGSTRIPKVQQLVKDFFNGKEPNRGVNPDEAVAYGAAVQAGVLSGEEDTGDLLLLDVNPLTMGIETVGGVMTKLIPRNTVIPTKKSQIFSTAADNQPTVTIQVFEGERPMTKDNHLLGKFDLTGIPPAPRGVPQIEVTFEIDVNGILKVTAEDKGTGTKNHIVIQNDNNRLSPEDIERMINDAEKFADDDKKVKEKVEAKNELESYAYSLKNQIGDKEKLGGKLSDEDKKTIEEAVDEKIKWMESNADAEVEDLKAQKKELEEIVQPIMTKLYQGAGGAPPPSGEEGADEKDEL

SEQ ID NO: 48610 - DNA, 1905 bp, Crassostrea gigas
  CDS (1)..(1905)
atggcaagtaaagctccagccatcggcatcgacctgggaacgacgttttcctgtgtcggtgtatttcaacatggaaaagtggaaatcatcgccaacgaccaaggaaacagaacgacgcccagctacgtcgccttcacagacacagaaagactgataggagatgcggctaaaaaccaggtagccatgaacgccaacaatacaatctttgacgccaagaggctgataggccgcaagttcaacgacgacagtgtacagtccgacatgaaacattggccgttcacggtgatcaatgatggaggaaagcccaagctagaagtggagttcaagaacgagaaaaagagatttacccccgaagaaatcagctcaatggtgctgaccaaaatgaaggagacagcagaagcctacttgggacaaactgtccgagacgcagtcgtcaccgttcctgcctatttcaacaacgcccagagagaggccactaaagacgccggagtgatagccggtctcaatgttctcaggatagtaaacgaacccacagctgctgctctggcttatggtctggataagaacatttccggtgagaaaaacgttctcatctttgacctcggaggtggtacatttgacgtgtccatccttaccattgatgagggttccatatttgaggttcgctccactgcaggggatactcacctgggaggtgaagatttcgacaacagaatggtcaatcactttgtgcaggaattcaagcgcaagtacaacaaagacatttcaaaaaataaccgttcactgagacgactcaggacggcttgcgagcgtgccaagagaacactgtccagcagttctgaggccaacattgagatcgactcgctgtttgagggaatggacttctacagcaaaatcacacgggctagatttgaagaaatgtgtgcagatttgttccgtggaaccttagaacctgtagagaaagccctgagggacgccaaaatggacaaatctaaaattcacgaggtggttttggttggagggtcgacaagaattccaaagatccagaaaatgctgcaagacttcatgggcggaaaagaactgaacaagtcgatcaacccagacgaagctgtggcctatggtgccgctgtccaagcggctattttgaagggagataagagtgatgccatcaaggacgttctcctggtcgatgtcactccactgtctctaggcattgaaactgctggaggggtcatgacaaagatcgttgaacgaaatgccaagattcctaccaaagcatcacagaccttcaccacatactccgataaccagcccggtgtatccattcaggtgtttgaaggtgaacgagccatgacaaaagacaataacaaactaggtacttttgaactgaatggaattcctcccgcccctcgaggtgtcccacagattgacgtggagtttgacattgacgccaacggtatcctgaacgtatcagccaaggacaagagcacgggaaagtccaataaaatcaccatcaccaacgacaaaggtcgtctgagtaaggccgacattgagagaatggtgaacgaggccgagacatacaaagaggaagacgataaacagcgtcagaggatagcggcccgcaatcagttagaatcctatgtcttcaccgtcaaacaggcagcagaggacacaggagacaaacttcagtctgaagacaaagagacaatatccagggtgtgcagtgaaacagtgtcctggctcgacaacaatgccctggcagaggttgacgaatatgaattcaaactgaaggaggttcagaaggtgtgttcacccatcatggccaaactacaccagaacgggtccacgggaaatccaggaccagctagttctagtcagggtccgactgtagaggagatggattaa

SEQ ID NO: 48611 - protein, 634 aa, Crassostrea gigas
MASKAPAIGIDLGTTFSCVGVFQHGKVEIIANDQGNRTTPSYVAFTDTERLIGDAAKNQVAMNANNTIFDAKRLIGRKFNDDSVQSDMKHWPFTVINDGGKPKLEVEFKNEKKRFTPEEISSMVLTKMKETAEAYLGQTVRDAVVTVPAYFNNAQREATKDAGVIAGLNVLRIVNEPTAAALAYGLDKNISGEKNVLIFDLGGGTFDVSILTIDEGSIFEVRSTAGDTHLGGEDFDNRMVNHFVQEFKRKYNKDISKNNRSLRRLRTACERAKRTLSSSSEANIEIDSLFEGMDFYSKITRARFEEMCADLFRGTLEPVEKALRDAKMDKSKIHEVVLVGGSTRIPKIQKMLQDFMGGKELNKSINPDEAVAYGAAVQAAILKGDKSDAIKDVLLVDVTPLSLGIETAGGVMTKIVERNAKIPTKASQTFTTYSDNQPGVSIQVFEGERAMTKDNNKLGTFELNGIPPAPRGVPQIDVEFDIDANGILNVSAKDKSTGKSNKITITNDKGRLSKADIERMVNEAETYKEEDDKQRQRIAARNQLESYVFTVKQAAEDTGDKLQSEDKETISRVCSETVSWLDNNALAEVDEYEFKLKEVQKVCSPIMAKLHQNGSTGNPGPASSSQGPTVEEMD

SEQ ID NO: 48612 - DNA, 3686 bp, Acetobacter aceti
  CDS (373)..(2274): transl_table=11
tgacccggcaggcaagccgtttgatgccaacctgcatcaggcaatggcagaacagccgagtgctgagcacgaagcccggtacgtcatgcaggcatggacgccaacatggacgctgcacgggcgcctgcttaagccagccatggtggtggttgccaaggcttcctgatcagggggttacggcatggcggcaggtaaaaaaatcctgcctgccaaggtgttttcccttcttgaaaaagagaaaacgccaccatacatcaggtttatcactcaggcctgcttttaccccgctacgggcagagcgggcgggtaaatgaaagcaagggccttttctggtgcttcgggccagatggggtcgctgaaagggaatatataatgagtaaagttattggtatcgaccttggtacgaccaactcctgcgttgcagtgcgtgaaggtaacgaaactaaggttatcgaaaacagcgaaggcgcacgtaccaccccgtctatggtggctttcaccgaagttggtgaaatgctggtgggtcaggctgcaaagcgacaggcagttaccaacccggccaacactttctacgctgttaagcgtctgatcggtcgtcgttttgatgatccgacagtccagaaagacaaggaaatggtgccctacgccattgttcagggtgacaacggcgatgcatgggttgaggcgcgcggcaaaaaatatgccccctcacagatttccgccttcgttctgggcaagatgaaggaaacggctgaatcctatctgggtgaaaaagtttctcaggccgttatcactgttccggcttactttaacgatgctcagcgtcaggccaccaaggatgcaggcaagattgccggccttgaagtgctgcgtatcatcaacgaacccacagcagctgctctggcttatgggctggaaaagaaaagcggcggcaccgtggctgtgtatgaccttggtggcggtacgtttgacgtttccgttctggaaatttccgatggcgtgatcgaagtgaaacccaccaacggtgatacgttcctgggtggtgaagactttgataaccgcatcatcggctatctggcagatgagttcaaacgcgaacagggtattgatctgcggtctgacaagctggctctgcagcgtctgaaagaagcagcagaaaaagccaagatcgaactgtcttcttccaaggaaacagaaatcaacctgccgttcatcacggctgatgcgtctggcccgaaacaccttgttctgaagctgacccgcgccaagctggaaagccttgtggacgacctggtgcagcgtacgctggaaccctgtaaggcagcgctgaaggatgctggcctgtctgcttctcagattgacgaaattctggttggcggtatgacccgtatgcctaaggttatcgaaacggttaaaggcttctttggtaaagaccctgcccgtaacgtgaaccccgatggagttgtggccattggtgctgctattcagggtgccgttctgaagggtgatgttaaagacgttctgctgctggacgtaaccccgctttctctgggtattgaaacgctgggtggtgtgttcacccgtctgatcgaccgcaacacaaccattccgaccaagaagagccaggtgttctccacggcggaagacaaccagagcgctgtgaccattaaggtctatcagggcgaacgcgaaatggcagccgataacaagctgctgggtaacttcgaccttaccggtattcccgcagctccgcgtggtgtgccgcagattgaagtgaccttcgatatcgatgccaacggcattgtgtctgtgtctgctaaggacaaggcaaccggtaaggaacagcagatcaagatccaagcttctggtggtctgtccgataccgatatcgacaagatggtgaaggacgctgaagccaacgctgaagccgataaagccaagcgtgagcaggtagaactgcgtaacaatgccgaagctctggtgcatcagactgaaaagtctctgaccgaagctggtgacaaggttccggccgctgaaaaagtagcgactgaaagccccattgctgctgttaaggccgctatggaaggcacagacgcagaagctctgaaacgcgcaaccgaacgtctgacacaggcagccatgaaggtgggtgaagctgcttacaaggctggtcaggctggtgaagctgctccagaagcagaagcagcaaagccggacgaaaaagaaatcgttgacgccgactttgaagacgtgaacgacaccaagaagtcctgatcggacgctatgcacaagggtgactatgtgacaaacatagtcaccctttactttattatctggcgtccgcgcttcattgtaaggcgggcgctttttgttgtttcggacacatgctgtgctcatgctttagaggcagcccccgacaagaggacttccatggccactcagctcgattactacgcaattcttgaagtttcccgaacagccacggccgatgaactcaagaaatcctatcgcaagctggccatgaagtatcatcccgatcggaaccccggggatgatgcagcagaagccaagttcaaggaaatcaaccaagcctacgatatcctgaaggacgaacaaaagcgcgctgcgtatgaccagtacggccatgccgcgtttgaaggcggtggccctggccccggcgggtttgactttagcggtggctttggtggcggtggtctgggcgatattttcgaacagatgtttggtgacatgatgggtggccgccgcggtggccgtgctcgcaccggcaacgatatccagactcatgttgaaattacgctggaagaagctttcagcggcgtaaagaaggatgtgcgggtgataacgcttggcgtgcgaacctgtcacggcaccggctctgatgatggcgcatcgggcgttgaagtctgcccaagctgtcacggtgcaggcaaggtgcgggcgcacgagggcttctttgttgtggaacgcccatgcccaacctgtcatggcgcaggcaaggtggtgaaaaacccctgcaagttttgccacggcgaaggcacagtggaaaaggaacgcacggttgaagtgcagattcctgccggtgtggaagatggcacccgcatccgtctttctggtgaaggagaggccgggggcaacggtgtgccgccgggtgatctgtatatccatgtttccgttacggaacatggtattttccagcgcgatggtgccaacatttattgccgcgtgccgtttcgcatggcgcaggctgctttgggcacagaaattgaagtgcctgttattgatggctcccgcaccaaggtgaaaattccggctggcacgcaaaccggtgcaacattttcgctgcgcggcaaaggcttctcggttctgcgctctaccgctcgtggcgatatgtacattcaggttacggtggaaacgccgcaaaacctcagcaagcgccagcgtgaactgttggaagaatttgaaaaagaagccggtgaggatgtgaagcagagccccgaacatacgggcttcttccgccgtgttcgggacttttttgaagggaaggaataagcgttcatgcgtatcggtattgcaggcataacggggcgcgtgggcccgtttgttggtggaagaagtgcaggccgcaggggcaaccctttctggcggacacacgtaagccgaacagc

SEQ ID NO: 48613 - protein, 633 aa, Acetobacter aceti
MSKVIGIDLGTTNSCVAVREGNETKVIENSEGARTTPSMVAFTEVGEMLVGQAAKRQAVTNPANTFYAVKRLIGRRFDDPTVQKDKEMVPYAIVQGDNGDAWVEARGKKYAPSQISAFVLGKMKETAESYLGEKVSQAVITVPAYFNDAQRQATKDAGKIAGLEVLRIINEPTAAALAYGLEKKSGGTVAVYDLGGGTFDVSVLEISDGVIEVKPTNGDTFLGGEDFDNRIIGYLADEFKREQGIDLRSDKLALQRLKEAAEKAKIELSSSKETEINLPFITADASGPKHLVLKLTRAKLESLVDDLVQRTLEPCKAALKDAGLSASQIDEILVGGMTRMPKVIETVKGFFGKDPARNVNPDGVVAIGAAIQGAVLKGDVKDVLLLDVTPLSLGIETLGGVFTRLIDRNTTIPTKKSQVFSTAEDNQSAVTIKVYQGEREMAADNKLLGNFDLTGIPAAPRGVPQIEVTFDIDANGIVSVSAKDKATGKEQQIKIQASGGLSDTDIDKMVKDAEANAEADKAKREQVELRNNAEALVHQTEKSLTEAGDKVPAAEKVATESPIAAVKAAMEGTDAEALKRATERLTQAAMKVGEAAYKAGQAGEAAPEAEAAKPDEKEIVDADFEDVNDTKKS

SEQ ID NO: 48614 - DNA, 1863 bp, Pseudomonas putida
  CDS (1)..(1863): transl_table=11
atggccctactgcagattgccgaacccggtcaaagccctcagcctcaccagcgccgcctggcgtgggggatcgacctgggtaccaccaactctctggtcgctgcactgcgtagcggccgcagcgagcccctgcccgacgcgcagggcaacgtcattctgccgtccgcggtgcgctacctcgacgggcgtatcgaagtggggcaggctgcgcgtgacgccgcctcaagcgacccgctgaacactgtgctgtcggtcaagcgcctgatggggcgcggcctggccgacgtcaagcaactgggcgagcaattgccgtaccgcttcgttggcggtgagtcgcacatgccgttcatcgacaccgtgcagggtccgaaaagcccggtggaagtgtctgccgacatcctgaaggtgttgcgcgaacgtgccgaagctaccttgggtggcgagctggtaggcgcggtgatcaccgtgccggcctatttcgatgacgcccagcgtcaggctaccaaagatgctgcgcgtctggccggcctgaacgtgctgcgcctgctcaacgaaccgactgcggccgccgtagcctacggcctggaccagaaagccgaaggcgtggtggccatctatgatctgggcggcggtactttcgatatttccatcctgcgcctgaccgctggcgtattcgaagtgctggccaccgggggtgataccgcccttgggggggatgacttcgatcacactattgccggctggatcatcgaacaggcgggtttgtcgtctgacctcgacccggctacccagcgcgcgctgctgcaaacgcgttgcgccgccaaggaggccctgaccgacgctgacgtggtcgacgtcagccacggtgcctggcacggtgagctgacccgcagcgccttcgaagccatgatcgaaccattggttgcccgcagcctgaaggcttgccgccgtgcggtgcgcgacagtggtgttgagctggaagaggtcagcgccgtagtcatggtcggtggttctacccgcgtgccgcgtgtgcgtgaggccgtcggtgcactgttcgggcgcaccccgctgacctcgatcgacccagaccaggtggtggccatcggtgccgccatccaggctgacaccttggccggcaaccgccgcgaaggtggcgagctgctgctgctcgatgtcatcccgctgtcgcttggtcttgagaccatgggcgggctgatggagaaggtgatcccgcgtaacaccaccattccggtggcgcgcgctcaggaattcaccacgtacaaagacggccagtcgggcatgatgatccacgtcctgcagggcgagcgcgagctgatcagtgactgccgttcgctggcccgtttcgagctgcgcggtattccggccatggttgccggtgctgcgaaaatccgcgttaccttccaggtggatgccgatggcctgctcagcgtcgctgcccgcgagctgggttcgggcgtggaagccagcattcaggtcaagccgtcctacggcctgaccgacggcgaaatcgcccgcatgctcaaggactccttcgaaaacgccggttccgacaagcacgcccgccagttgcgtgagcatcaggtagatggcgagcggctgctcgaggcggtacagggcgccctggacgccgacggcgagcgcctgctcagcagtgacgagcgcgacgccatcgaattccagatgcaagaactacgtgatttgctgaccggcaccgatggcgcagccatcgagcaacagaccaagcgtctgtcgcaggtgaccgatgcatttgccgcccgtcgccttgattcgacggtcaaagccgcactggccgggcgcaacctgaatgagatcgaggagtaa

SEQ ID NO: 48615 - protein, 620 aa, Pseudomonas putida
MALLQIAEPGQSPQPHQRRLAWGIDLGTTNSLVAALRSGRSEPLPDAQGNVILPSAVRYLDGRIEVGQAARDAASSDPLNTVLSVKRLMGRGLADVKQLGEQLPYRFVGGESHMPFIDTVQGPKSPVEVSADILKVLRERAEATLGGELVGAVITVPAYFDDAQRQATKDAARLAGLNVLRLLNEPTAAAVAYGLDQKAEGVVAIYDLGGGTFDISILRLTAGVFEVLATGGDTALGGDDFDHTIAGWIIEQAGLSSDLDPATQRALLQTRCAAKEALTDADVVDVSHGAWHGELTRSAFEAMIEPLVARSLKACRRAVRDSGVELEEVSAVVMVGGSTRVPRVREAVGALFGRTPLTSIDPDQVVAIGAAIQADTLAGNRREGGELLLLDVIPLSLGLETMGGLMEKVIPRNTTIPVARAQEFTTYKDGQSGMMIHVLQGERELISDCRSLARFELRGIPAMVAGAAKIRVTFQVDADGLLSVAARELGSGVEASIQVKPSYGLTDGEIARMLKDSFENAGSDKHARQLREHQVDGERLLEAVQGALDADGERLLSSDERDAIEFQMQELRDLLTGTDGAAIEQQTKRLSQVTDAFAARRLDSTVKAALAGRNLNEIEE

SEQ ID NO: 48616 - DNA, 2079 bp, Mya arenaria
  CDS (1)..(2079)
atgtttacttcagcaagacacacttcaagatcattgaagaagactttcggaacacatcaggctagaatgatttcaaatatatgcaaaaagattctggctggagagatcaaatcaaaaagtggtctttacttgcttccctctagattgaggtctgacaaagttaaaggccatgttatcggcattgacttgggtaccacaaactcatgtgttgccatcatggaggggaagacggggaaagtgttggagaatgctgaaggtgcccgcaccaccccctctgttgtcgccttcaccaaagatggggaacggcttgtaggaatgccagctaaacgacaggcagttacaaatgctgctaatactttacatgcaacaaagcgtctcattggtcgcagatttgaagacaaggaagtcaaaaaggacatggagacggtaccatacaagattgtgcgagcgaacaacggtgatgcctgggtggaggcccatggaaagacttactctccgagtcagattggtgcatttgtcctcatgaagatgaaggaaacagctgataactatcttgggcagccagtaaagaatgcagtagtcacagtcccagcatatttcaatgattcacagagacaggccaccaaagatgccggtcagatctcaggtttgaatgttcttagagtgatcaacgagcccacagctgctgctctagcttacggcatggacaagacgggtgataaaattattgctgtatatgacttgggaggcggcactttcgacatttccatcctggagatccagaaaggcgtgtttgaggtgaagtcgaccaatggtgatacgttcctcggtggagaggacttcgataatgtgctcgtgagctacctggctaaggagttccagaaagatcaaggtatagatgtgacaaaggacaacatggccatgcagcgactgagagaggcagcagagaaggctaagattgagctctcctcctcgctgcagacagacatcaacttgccatacctaacaatggatgctggcggcccaaagcacatgaacatgaagttgtcccgtgcaaagtttgagagccttgttgatgaccttattaaacgcactgttggcccatgcaacaaagctctgcaggatgccgagatcaagaagtctgatattggagacgtgctgctggttggaggaatgaccaggatgcccaaggtacagcaggttgtacaggaggtgtttggcagagctccaggcaagtctgtcaacccagatgaggccgttgcaatgggtgccgccatccagggtggtgttctagcaggtgatgtgactgacgtgttactcctggatgtgaccccgctgtcccttggtattgagactctcggtggagtgttctcaaggcttatcaccaggaacaccaccatccccaccaagaagtcacaggtgtactcaacagctgctgatggccagacgtctgttgagatcaaggttttccagggtgagagagaaatggctaaggacaacaagcttcttggacagttcatgctgagtggtgtcccccctatgccacgtggagtgccccagattgaggtggtatttgacattgacgctaatggcattgtcaacgtgtccgccagggaccagggaactggcaaggaacaacaaattgtgatccagtcatctggtggtctgtcaaaggacgagatagagaacatggtcaggaatgcagagaaatatgccgaggaggatgcccagaggaaggacatgatcgaggcagtgaatgcagcagagaccatgatccacgatgctgaggctaaaatgaatgacttcaaggaacagcttgaccaagaccagagtgaccagatgcgtaaggacattgctgcgatgcgtgaagtgatcgccaacaaggatagcgagacaccagaatcaatccgcaccaagctgaatgaactgcagcagtcaacacttaaactgtttgagatgacatacaagaaaaagatggcccaagatcagcagaatcagcaacaacagggtggcagtagcgacagcagcagcagcgacaccactgatgaacagaaggaaaaggaggagaagaagaactga

SEQ ID NO: 48617 - protein, 692 aa, Mya arenaria
MFTSARHTSRSLKKTFGTHQARMISNICKKILAGEIKSKSGLYLLPSRLRSDKVKGHVIGIDLGTTNSCVAIMEGKTGKVLENAEGARTTPSVVAFTKDGERLVGMPAKRQAVTNAANTLHATKRLIGRRFEDKEVKKDMETVPYKIVRANNGDAWVEAHGKTYSPSQIGAFVLMKMKETADNYLGQPVKNAVVTVPAYFNDSQRQATKDAGQISGLNVLRVINEPTAAALAYGMDKTGDKIIAVYDLGGGTFDISILEIQKGVFEVKSTNGDTFLGGEDFDNVLVSYLAKEFQKDQGIDVTKDNMAMQRLREAAEKAKIELSSSLQTDINLPYLTMDAGGPKHMNMKLSRAKFESLVDDLIKRTVGPCNKALQDAEIKKSDIGDVLLVGGMTRMPKVQQVVQEVFGRAPGKSVNPDEAVAMGAAIQGGVLAGDVTDVLLLDVTPLSLGIETLGGVFSRLITRNTTIPTKKSQVYSTAADGQTSVEIKVFQGEREMAKDNKLLGQFMLSGVPPMPRGVPQIEVVFDIDANGIVNVSARDQGTGKEQQIVIQSSGGLSKDEIENMVRNAEKYAEEDAQRKDMIEAVNAAETMIHDAEAKMNDFKEQLDQDQSDQMRKDIAAMREVIANKDSETPESIRTKLNELQQSTLKLFEMTYKKKMAQDQQNQQQQGGSSDSSSSDTTDEQKEKEEKKN

SEQ ID NO: 48618 - DNA, 2321 bp, Neocallimastix patriciarum
  CDS (99)..(2072)
ttttttcttcttttttctttgctaaattatattctatttttttattatataactttataaaataataaaggaatattttatatataaaagatataaaaatgtttctctctactttagctaagaaaagcaccacttttggtgtttctaatgttgttaagaatgccctttcctcaaaggtcatgagaactactccaagaatgttccaaagatttgaaagttctaaggttaagggtcaagttattggtattgatcttggtactactaattcttgtgttgctgttatggatggtaagaacccaagagttattgaaaatgctgaaggtgctcgtactactccttctgttgttgctttctctaaggaaggtgaacttatggttggtcaaccagctaagcgtcaagctgttgttaacccagaaaacactttatttgctactaagcgtttaattggtagaagattcgatgataaggctattgctaaggatatggaatctgtcccatacaagattattaagcataagaatggtgatgcttgggttcaagctcatgacaaacaatacagtccagcccaaattggtggtttcgtattaatgaaaatgaaggaaactgctgaaggtttccttggtaagtctgttaagaacgctgttgttactgttccagcttacttcaatgatgctcaacgtcaagctactaaggatgctggttctattgctggtttaaacgttcttcgtgttattaacgaaccaaccgctgctgctttagcttacggtttagataagaatggtgaccgtgttgttgctgtttacgatcttggtggtggtacattcgatatttctattttagaaattcaaaagggtgttttcgaagttaagtctactaatggtgatacccaccttggtggtgaagattttgatgctgctttagttaaacatatagttgaagctttcaagaaggaatctggtattgatctttctaaggaccgtatggctcttcaaagagttcgtgaagctgctgaaaaggctaagattgaattatcatctactatgactactgatatttctcttccattcattactgctgatgcctctggtccaaagcacattaacatgaaattcactcgtgctcaattcgaatccttaactaacaaattaattcaaagaactgttgaaccatgtaagaaggctattcgtgatgctggtgttaccaacaaggatatcaatgaagttatcttagtcggtggtatgagtagaatgccaaaggttcaacaatccgtttcttccttattcggtcgtgaaccaagtaagtctgttaacccagatgaagctgttgctattggtgctgctattcaaggtggtgttttagctggtgatgttactgatattcttttattagatgttactccattatctcttggtttagaaactcttggtggtgtcttcactagattaattaaccgtaacactactatcccaactaagaagagtcaagttttctctactgctgctgatggtcaaacccaagttgaaattaaggtttaccaaggtgaacgtgaattatgtcgtgacaacaaattattaggtgaattcaagttagttggtttaccaccagctccacgtggtgttccaaagattgaagttactttcgatattgatgctgatggtattgttaacgtttctgctaaggatcaagctactggtaaggatcaatctattaccattgctgcttcctctggtttaagtgaaagtgaaattgaaaacatgatcttagaagctgaaaagcatgctgaatctgataagaagaagaaggatgttattgaaattgttaacaacgctcaaactgttattgccgataccgaaaaggctatgaacgatttcaaggaacaattagatgctactgaatctgaaaagattaagggattactcgaagaattaaagggattatgtgctcaagatattgatagtttaactgttgaacaagttaagggtaagattgatgaagttcaacaagcttccttaaaacttttcgaattagtctacaagaacaagaataatgaaaacaacgaaaacaagcaataaccagtatattaattaaaaaaaaaagaaacatttgaatttaccccatgctatttttttttacttcttaaatagaagtaaatagcaaatgattttttttattttacactaaaccatcttattaattttattctttcataataatgaaaaataagaattaataagaaaaccctatatattttttttaatataaatatttcattttagaggaaaaagaaaagataaaaaataaaccaaaaaaaaaaaaaaaaa

SEQ ID NO: 48619 - protein, 657 aa, Neocallimastix patriciarum
MFLSTLAKKSTTFGVSNVVKNALSSKVMRTTPRMFQRFESSKVKGQVIGIDLGTTNSCVAVMDGKNPRVIENAEGARTTPSVVAFSKEGELMVGQPAKRQAVVNPENTLFATKRLIGRRFDDKAIAKDMESVPYKIIKHKNGDAWVQAHDKQYSPAQIGGFVLMKMKETAEGFLGKSVKNAVVTVPAYFNDAQRQATKDAGSIAGLNVLRVINEPTAAALAYGLDKNGDRVVAVYDLGGGTFDISILEIQKGVFEVKSTNGDTHLGGEDFDAALVKHIVEAFKKESGIDLSKDRMALQRVREAAEKAKIELSSTMTTDISLPFITADASGPKHINMKFTRAQFESLTNKLIQRTVEPCKKAIRDAGVTNKDINEVILVGGMSRMPKVQQSVSSLFGREPSKSVNPDEAVAIGAAIQGGVLAGDVTDILLLDVTPLSLGLETLGGVFTRLINRNTTIPTKKSQVFSTAADGQTQVEIKVYQGERELCRDNKLLGEFKLVGLPPAPRGVPKIEVTFDIDADGIVNVSAKDQATGKDQSITIAASSGLSESEIENMILEAEKHAESDKKKKDVIEIVNNAQTVIADTEKAMNDFKEQLDATESEKIKGLLEELKGLCAQDIDSLTVEQVKGKIDEVQQASLKLFELVYKNKNNENNENKQ

SEQ ID NO: 48620 - DNA, 2889 bp, Paracoccidioides brasiliensis
  CDS (130)..(2172)
cacgaggcgcatctgctcctcatatcccgctcttctgatttctcttccccttccttgcatctgtattactaggatccgtctatcttgtcccactgtattttaatatatatattctttgactatctcataatgcttgcttcccggttctcccgtgcgcttcctcgtgcggttccgtcttttgctcgttcttcctctcgttcctccgcttacaaactccctgctacaccattccgaagatggaactcaacagaaggcggagaggagaaggtgaagggccaagttatcggtatcgatttgggtaccaccaactccgctgttgctgtgatggagggcaagaccccaagaatcattgaaaacgccgaaggtgcacgaacaactccctcagtggttgctttcaccaaagatggtgagcggcttgtcggtattgccgctaaacgacaggctgttgttaaccctgagaataccctctttgcaactaagcgtttgatcggacgcaaattcaccgatcccgagtgccagcgtgacttgaaggaagttccttacaagatcgttcaacacgctaacggcgacgcatgggttgaggctcagggccaaaaatattctccatcccagattggaggctttgtcctccagaagatgaaggagactgctgaagcctatcttggcaaacccgtcaagaacggtgtcgtcacagttcccgcctacttcaatgattctcaacgtcaagctaccaaagatgccggtcaaatcgccggtctcaacgttctccgtgttgtcaatgagcctaccgctgctgctcttgcctacggtctcgagcgtgagcaggatcgcgtcgttgccgtctacgatcttggtggtggtactttcgacatctccattcttgaaatccagaagggtgtgttcgaagtcaagtccaccaatggtgacactcatcttggtggtgaggacttcgatatcacccttgtccgcaacgttgtgcaacaattcaagaaagagtccggtatcgatctctcaaacgatcgcatggctatccagcgtattcgtgaggcctgtgagaaggctaagatcgaactttcctccgctctccaaactgaaattaaccttcccttcatcaccgctgattcctccggtgctaagcatatcaactccaagatgactcgttctcagctcgaggctctcgttgaccctctgatttcccgcactatcgagcccgtgcgcaaggctttgaaggatgccaatctccaggctaaggacatccaggaggtcatccttgttggtggtatgacccgtatgcccaaggttggagagtccgtcaagagcatcttcggccgcgatcccgccaaatccgtcaacccagatgaggctgttgccattggtgctgccattcaaggagctgtcctcgctggtgaggtcaccgacgttcttctccttgacgttactcctctgtccctcggtattgaaacacttggtggtgtgttcactcgtctgatcaaccgcaacaccactatccctaccaagaagtcccagaccttctccactgccgctgatttccagactgccgtcgagatcaaggtttaccagggtgagcgtgagctcgtccgtgacaacaaactccttggaaacttccaacttgtcggaatcccacccgcccaccgtggtgtccctcagatcgaggtcaccttcgacattgatgctgattccatcgtccatgtccacgctaaggacaagtccactggcaaggaccagtccatcaccatcgcctccggctccggtctctctgacaccgagatccagaacatggtcgacgatgccgagaagttcggtgcccaggataaggaacgaaaagccgctatcgaagccgctaaccgcgccgacagcgtcctgaacgacactgagaaggccctcaaggaattcgaggacaaactcgacaagacagaggctgaccagatcaaggagaagattgcctctctccgtgaagtcgtcgccaaaagtcagtctggcgagggctccattaccgctgacgagttgaaggctaaggttgatgagctccagaatgccagtcttaccctgttcgacaagatgcacaaggcccgttctgaggaaggacagcagcagcaatcccagcaatcaaatgagggccagcagggtggtgagggagagaagaagccatgagaaacacaaatttgaatccttaaaaaagcctattctaattaatacaaaaagtagttatagactcctgggattccttttgctccttgcctgctctttcccataaatccatctcttcccccttttatctgactgaggtttcaaccttttcttttccctttgtgtattcatgtttcatgttcgattgtcgtcatttccatcaaaactttttttttatttccctgtataccagcctttttatgtgtttcttcatctctcccataaccggtgttggagtttaattttccttttttcttcttttttttatcgtcgttcttatactctttcatagcaatgttttacgtgtgccattttgtctttcaaggtcaccacggacttgggaacgatatgagatgggggagaaatctttttcaaccggtgcgttgagggataagcattgggaacggcggtccaaaacaaatatatgaattttttgtcaattaaaaaaatggtcgtggatcggggtgacaaaagcggtcttgggttggagaagatgggcgcaatcggtggtttgacaaggtagcccgactgatggggtggcatagctgccggttttacaccgtcttttctccctctatttatttctcttttcgttaatcatagaatagcaattctcctctcttgaagttatacattagttttaagtcttaactttcgcttctgaaaaaaaaaaaaaaaaaa

SEQ ID NO: 48621 - protein, 680 aa, Paracoccidioides brasiliensis
MLASRFSRALPRAVPSFARSSSRSSAYKLPATPFRRWNSTEGGEEKVKGQVIGIDLGTTNSAVAVMEGKTPRIIENAEGARTTPSVVAFTKDGERLVGIAAKRQAVVNPENTLFATKRLIGRKFTDPECQRDLKEVPYKIVQHANGDAWVEAQGQKYSPSQIGGFVLQKMKETAEAYLGKPVKNGVVTVPAYFNDSQRQATKDAGQIAGLNVLRVVNEPTAAALAYGLEREQDRVVAVYDLGGGTFDISILEIQKGVFEVKSTNGDTHLGGEDFDITLVRNVVQQFKKESGIDLSNDRMAIQRIREACEKAKIELSSALQTEINLPFITADSSGAKHINSKMTRSQLEALVDPLISRTIEPVRKALKDANLQAKDIQEVILVGGMTRMPKVGESVKSIFGRDPAKSVNPDEAVAIGAAIQGAVLAGEVTDVLLLDVTPLSLGIETLGGVFTRLINRNTTIPTKKSQTFSTAADFQTAVEIKVYQGERELVRDNKLLGNFQLVGIPPAHRGVPQIEVTFDIDADSIVHVHAKDKSTGKDQSITIASGSGLSDTEIQNMVDDAEKFGAQDKERKAAIEAANRADSVLNDTEKALKEFEDKLDKTEADQIKEKIASLREVVAKSQSGEGSITADELKAKVDELQNASLTLFDKMHKARSEEGQQQQSQQSNEGQQGGEGEKKP

SEQ ID NO: 48622 - DNA, 3952 bp, Trichoderma reesei
  CDS (1590)..(3608)
agctccttggcttgagtgcgtgatgaggaggctatgatgtaaacgaaaaaggtgataggggcaatatggaaggtaggagaaagagcttggggatcggatctgacaagacaaggttcacttgtggatgttggtgcttgcaaaggagcttggggttgcctggtgaggcaaatttacgaacgggagagaagcttgaggtaagagtttcagtctgacggtttgtaggtactgtgatcgacagagtattcgcgacggttcacattcgcatcggctaagtctaaagtgacaaaaggtgattgattgctcgaacctcggtcttgctcggtgaagctcgtgtcgaggccgagaaacgtcccatttctgcgtgattaggtcatgctgctcgatcgcgatcattccgatcattcgagcaagcagcttgcagctcagcatcactgggcgacggcgcatccagtaggaagccgtggacaaagatggatcgagcaatatcagccaattgcagccgcagtggccccccgggtgtggctagttgctcggtaaggtaactggtgggaaatggtggctgagctgaccgtggagcccaatggcatgaaagctccgggtttctgcgactcagaatctgggtacctgaggcaggcaaatcagctgttttgacgcctgagctgaccaggcaggtacgagtggttaggtactgtaattgcagtacccacgccggaagctgtccagcaccttctggcggcttgtggtgcttcatggtggggcagctgtgtacctactaccggtgcacagcagctgcagtgtatgggtgcacgaggtactggagaccccgccactgccccgcgatgcagtttttttccttctttgtcgccttgagagctggaggggagatgacatcaaagagaggggaatcatgaggggtgaaggaggaaggagccgcgaattggaggtacctgcgagtaagtaccaggaggaattgggaagcaattgatggaagcttctcatgggtaaggcaaaggtcaggtcaggcgaggtacctgtagctacgatagcaagcaaaacaaagaactagacaacggtagtacctagtaaacaaagaagggaaaaaaaaacaagcagatgcaatggcggggcagcagcgcagctgaagccatcatcaggcactgatgccccgccggaaaggaaagcacacagaagctcaaggcacgcaaaaatgccagcaaaaagcccagagagacaaagaaagaacgaaggcgaaaggcaaaacgcgcaggggaggggcttccagctgcttcggcgcctggcctaggcgtttgcagtgcctaccagaggcttctgttgtgcccctgcaggcggccggtgtgggcacccttggaacagtgtagaaccgcatcgaatctccatcccgctttatttagacgctgcgagcagaccgagctgcaccagatcttttctctccagaacatactcatccacaacaaacaatcatcacacgcacacttcacttctcctacacactcttcacacgctttttcctttttttcctttttttctagttctcacacacacatcacacacacacaatggctgctagtatgggaccagccgtcggtatcgacctgggtactacctactcatgcgtcggtatcttccgtgaggaccgatgtgatatcatcgccaacgaccagggtaaccgaacgacgccctcgttcgttgccttcaccgacaccgagcgtctgattggtgatgccgccaagaaccaggtcgccatgaacccccagaacaccgtcttcgacgccaagcggttgattggccgcaagttcgccgaccctgaggtccaggccgacatgaagcacttccccttcaaggtcatcgacaagaactccaagcccgtcatcgaggttgagttcaagggcgagaagaagaccttcacccccgaggagatctcctccatggtcctgaccaagatgcgtgaggccgccgaggcctaccttggtaccaccgtcaacaacgccgtcatcaccgtccccgcctacttcaacgacagccagcgtcaggctaccaaggacgccggtctcattgccggcctcaacgtcctgcgtatcatcaacgagcccaccgccgctgccatcgcctacggccttgacaagaaggtcgagggcgagcgcaacgtgctcatcttcgatctcggtggtggtaccttcgatgtgtccctcctgaccattgaggagggtatcttcgaggtcaagtccactgccggtgacactcacttgggtggtgaggacttcgacaaccgtctggtcaaccacttcgtcaacgagttcaagcgcaagcacaagaaggttagtagcagcacccatgttgccccccactctttagacgcacggcatatgctaactcccgaccgggatctgtccaccaacgctcgtgctctccgccgtctccgcactgcctgcgagcgtgctaagcgaactctgtcttcgtctgcccagacctcgattgagatcgactccctgtacgagggtatcgactactacacctccatcactcgtgcccgtttcgaggagctgtgccaggatctcttccgatccaccatccagcccgtcgaccgtgtccttgccgatgccaagatcgacaagtctcaggtccacgagatcgtcctcgtcggtggctccacccgtattccccgcatccagaagcccatcaccgactacttcaacggcaaggagcccaacaagtccatcaaccccgatgaggctgtcgcctacggtgccgccgtccaggccgccatcctgtctggtgacaccacttccaagtccaccaacgagatcctgcttctcgatgtcgctcccctgtctctcggtatcgagactgctggtggcatgatgaccaagctcatcccccgcaacaccaccatccccaccaagaagtccgaggtcttctccaccttctccgacaaccagcctggtgtgctcatccaggtctacgagggtgagcgccagcgcaccaaggacaacaacctgctcggcaagttcgagcttaccggcatcccccctgcgcctcgtggtgttccccagatcgaggtcaccttcgacgttgatgccaacggtatcatgaacgtctctgccgtcgagaagggcactggtaagtccaacaagattgtcatcaccaacgacaagggccgcctgtccaaggaggagattgagcgcatgctgtctgacgccgagaagtacaaggaggaggacgaggctgaggccaagcgtgtcagcgccaagaacggcctcgagtcgtacgcctactctctccgcaacaccctcaacgaccccaaggtcgatgagaagattgaggccgccgacaaggagacgctcaagtctgagattgacaagatcgtccagtggctcgatgacaaccagcaggcctctactgaggagtacgagtctcaccagaaggagcttgagggtgtcgccaaccccatcatgatgaagttctacggagctggtggtgagggtggcatgcccggtggcatgcccggcggtgccggtggcttccctggcgctggcggcgctcctcaccagggtggcgatgacggccctaccgtcgaggaggtcgactaaatgcacaacaagcccttttgataccccaaacatcatcagacttgagcctcaagcttggtaacgcgtctacgatgtgtggaggcctactctaggggatcaaggcatgatgcatgattaaattctttcctttgttctcatttgctttttccgcactagcatttcacggatatgaagggtaaaaaagctgggcgggttggccctggttttgtactttaatgagttttacgtttttaagggaaccaatacatcaatggtttaattaatcaagactgtctgactggtgactgtgaagttaaagtgactgtgaatttatatcattgactatatggagtaagtcaatggtt

SEQ ID NO: 48623 - protein, 672 aa, Trichoderma reesei
MGPAVGIDLGTTYSCVGIFREDRCDIIANDQGNRTTPSFVAFTDTERLIGDAAKNQVAMNPQNTVFDAKRLIGRKFADPEVQADMKHFPFKVIDKNSKPVIEVEFKGEKKTFTPEEISSMVLTKMREAAEAYLGTTVNNAVITVPAYFNDSQRQATKDAGLIAGLNVLRIINEPTAAAIAYGLDKKVEGERNVLIFDLGGGTFDVSLLTIEEGIFEVKSTAGDTHLGGEDFDNRLVNHFVNEFKRKHKKVSSSTHVAPHSLDARHMLTPDRDLSTNARALRRLRTACERAKRTLSSSAQTSIEIDSLYEGIDYYTSITRARFEELCQDLFRSTIQPVDRVLADAKIDKSQVHEIVLVGGSTRIPRIQKPITDYFNGKEPNKSINPDEAVAYGAAVQAAILSGDTTSKSTNEILLLDVAPLSLGIETAGGMMTKLIPRNTTIPTKKSEVFSTFSDNQPGVLIQVYEGERQRTKDNNLLGKFELTGIPPAPRGVPQIEVTFDVDANGIMNVSAVEKGTGKSNKIVITNDKGRLSKEEIERMLSDAEKYKEEDEAEAKRVSAKNGLESYAYSLRNTLNDPKVDEKIEAADKETLKSEIDKIVQWLDDNQQASTEEYESHQKELEGVANPIMMKFYGAGGEGGMPGGMPGGAGGFPGAGGAPHQGGDDGPTVEEVD

SEQ ID NO: 48624 - DNA, 2259 bp, Nicotiana tabacum
  CDS (103)..(2049)
ggcacgagaattctttattcccttgctttctctccgccgtcttcatattctcttttttgctttctcgtttttgcgttggtgtatagtgaagaaagctaagtaatggccggaaaaggagaaggtccggcgatcggaatcgatctcggaacaacttactcttgtgtcggtgtatggcaacatgatcgtgttgagattattgctaatgatcaagggaacaggacgacgccgtcttatgttggatttactgattctgaacgtctcattggtgatgccgctaagaatcaagtcgccatgaatcctattaacactgtttttgatgccaagaggcttattggaaggaggtttagtgatgcctctgtacagagtgacatcaaattgtggcctttcaagggtatttccggacctggtgacaagccaatgattgtagtcaactacaagggtgaagagaagcagtttgctgctgaagaaatctcttccatggggctaataaagatgaaggaaatggccgaggccttccttggatcaactgtgaaaaatgctgtggttactgtacctgcatacttcaatgactcacaacgtcaggctactaaggatgctggtgtcatatctggcttgaatgtcatgcgtattattaatgagcctacagcagctgccattgcttacggtcttgacaagaaagccactagtgtcggtgagaagaacgttcttatctttgatctaggtggtggtactttcgatgtgtccctccttactattgaagaaggcatttttgaggtgaaagccacagcaggagacactcaccttggaggtgaagattttgataacagaatggtgaaccactttgtccaggagttcaaaagaaagcacaagaaggacattaccggtaacccaagagcccttagaagattgagaacagcatgtgagagggcgaagagaactctttcttccactgcccagacaacaattgaaattgattccttgtatgagggagttgacttctattccaccattactcgtgccagatttgaggagttgaacatggatcttttcaggaagtgtatggagcccgttgagaaatgtttgagggatgccaagatggacaagagcactgtacatgatgttgttcttgttggtggatccactagaattcccaaggtacaacagctgttgcaagacttctttaatggtaaggagctttgcaaaagcatcaacccagatgaggctgttgcctatggtgctgcagtgcaagctgccattctaagtggagagggtaatgagaaggttcaagacttgttgcttctggatgtcacccctctatctcttgggttggaaactgctggaggagtgatgactgtcttgattccaaggaataccactattcctaccaagaaagagcaggtgttctctacatattctgacaaccaacctggagtgttgattcaggtgtatgagggtgagagagcaagaactagagccaacaacttgctgggtaaatttgagctttctggtatccctcctgcacctaggggtgtgccacagatcacagtctgctttgatattgatgccaatggtatcttgaacgtctctgctgaagacaagaccactggacagaagaacaagatcacaattaccaatgacaagggtaggttgtcaaaggaagaaattgaaaagatggtccaggaagcagagaagtacaaggctgaagatgaggaacacaagaagaaggtagaggccaagaacgcactggagaactatgcctacaacatgaggaacaccataaaggacgagaagattggttctaagctaagctcagatgacaagaaaaagatagaggatgctattgaccaggcaatttcatggcttgacagcaaccagcttgctgaagctgatgagtttgaagataagatgaaggagctcgagagcatctgcaatcccatcattgctaagatgtaccaaggtgctggtggtgaagccggtgcacctatggatgatgatgctcctccagctggtggtagcagtgcagggcccaagattgaggaggtcgactaagtgtgtggagtgatcagtgctcgttttctattttagtacagtacttatattgggtactttttatatttttgcaatggttaattgggtatcatattggtttcgttgataatagtatgctgttaaattttcatctttgatggctataaaatagtgtcatcgattttgcgttgtcaatgtctagttattagttacttttctatggaagtatat

SEQ ID NO: 48625 - protein, 648 aa, Nicotiana tabacum
MAGKGEGPAIGIDLGTTYSCVGVWQHDRVEIIANDQGNRTTPSYVGFTDSERLIGDAAKNQVAMNPINTVFDAKRLIGRRFSDASVQSDIKLWPFKGISGPGDKPMIVVNYKGEEKQFAAEEISSMGLIKMKEMAEAFLGSTVKNAVVTVPAYFNDSQRQATKDAGVISGLNVMRIINEPTAAAIAYGLDKKATSVGEKNVLIFDLGGGTFDVSLLTIEEGIFEVKATAGDTHLGGEDFDNRMVNHFVQEFKRKHKKDITGNPRALRRLRTACERAKRTLSSTAQTTIEIDSLYEGVDFYSTITRARFEELNMDLFRKCMEPVEKCLRDAKMDKSTVHDVVLVGGSTRIPKVQQLLQDFFNGKELCKSINPDEAVAYGAAVQAAILSGEGNEKVQDLLLLDVTPLSLGLETAGGVMTVLIPRNTTIPTKKEQVFSTYSDNQPGVLIQVYEGERARTRANNLLGKFELSGIPPAPRGVPQITVCFDIDANGILNVSAEDKTTGQKNKITITNDKGRLSKEEIEKMVQEAEKYKAEDEEHKKKVEAKNALENYAYNMRNTIKDEKIGSKLSSDDKKKIEDAIDQAISWLDSNQLAEADEFEDKMKELESICNPIIAKMYQGAGGEAGAPMDDDAPPAGGSSAGPKIEEVD

SEQ ID NO: 48626 - DNA, 1902 bp, Manduca sexta
  CDS (1)..(1902)
atgccagcaattggaattgacctcggcacgacgtactcgtgcgtcggcgtgtggcagcacagcaatgtggagatcatcgccaacgaccagggcaacagaacaacaccgtcgtacgtcgcgttcacggacaccgagcggctgatcggtgatgcggccaagaaccaggtggcgctgaaccccaacaacacagtgttcgacgcgaaacgaccgatcggcaggaagtttgacgacccgaagatccaacaggatatgaagcactggccgttcaaggtggtcagcgacggcggcaagcccaagatccaggtggagttcaaaggcgagatgaagaggtttgcgcccgaggaaatcagcagcatggtgctgaccaagatgaaggagacggccgaggcgtacctgggcagcgcggtgcgcgatgcggtcatcaccgtgccggcgtacttcaacgactcacagcgacaggcaaccaaggacgcaggcgccatcgcaggacttaacgtgctgcgcatcattaacgagcccaccgccgctgcactcgcgtacggccttgacaagaacctgaaaggcgagcgcaacgtgctcatctttgacttgggcggcggcacctttgatgtgtccatcctgagcatcgacgagggctcgctgttcgaggtgaaggcgacggcgggtgacactcacctaggcggcgaggacttcgacaaccgactggtgaaccacctcgccgaggagttccagcgcaagttcaagaaggacctacgttctagccctcgcgctctccggcgtctacgcaccgcagccgagcgagccaagcgcacgctctcctccagcactgaagcaactatcgagattgacgcgctgtacgagggcatcgacttctacacgcgagtgtcgcgcgcgcgctttgaggagctgaacgcggacctgttccgcggcacccttgaccccgtggagaaggcgctcaaggatgccaagatggacaagagtcagatccacgacgtggtcctcgtcggtggctcgacgcgcatacccaaggtgcagtcgctgcttcagaacttcttctgcggcaagaagctgaacctgtccatcaacccgggaccgaggcggtcgcgtacggcgccgccgtgcagccgccttctgcgcggcgccaccgactccaagatccaggacgtgctgctggtggacgtggctccactgtcgctcggaatcgagaccgctggtggcgtcatgcccaagatcgtcgagcgcaactccaagatcccgtgcaacagtcgcaaacgttcactaccgtactctgacaatcagccggcagtcaccatccaggtgtacgagggagagcgcgccatgaccaaggacaacaacctgctcggcacgttcgacttgaccggcatcccgccggcgcctcgcggcgtcccgaagatcgacgtcactttcgacatggacgcaaacggtatcctgaatgtgtccgccaaggagaacagcaccggccgctcgaagaacatcgtgatcaagaacgaccgcgggcgtctgtcgcaggcggaaatcgaacgcatgctcgccgaggcggagaggtacaaggaagaggacgagaagcagcggcagcgcgtggcggcacgcaaccagctcgaggcgtacgtgttcagcgtgcaacaggcgctcgacgacgccggcgacaagctcagcgagagcgacaagagcacggcgcgctccgcttgtgctgcggcgctacgttggctcgacaacaacaccctcgccgagcaagaagagtacgagcacaagctcaaggacctgcagcgcgtctgctcaccggtcatgccgaagatgcacggcggcgccggtgccggggccgcgccaggagggcaacaacacggcagaggtgccggacccaccgtcgaagaggtcgactaa

SEQ ID NO: 48627 - protein, 633 aa, Manduca sexta
MPAIGIDLGTTYSCVGVWQHSNVEIIANDQGNRTTPSYVAFTDTERLIGDAAKNQVALNPNNTVFDAKRPIGRKFDDPKIQQDMKHWPFKVVSDGGKPKIQVEFKGEMKRFAPEEISSMVLTKMKETAEAYLGSAVRDAVITVPAYFNDSQRQATKDAGAIAGLNVLRIINEPTAAALAYGLDKNLKGERNVLIFDLGGGTFDVSILSIDEGSLFEVKATAGDTHLGGEDFDNRLVNHLAEEFQRKFKKDLRSSPRALRRLRTAAERAKRTLSSSTEATIEIDALYEGIDFYTRVSRARFEELNADLFRGTLDPVEKALKDAKMDKSQIHDVVLVGGSTRIPKVQSLLQNFFCGKKLNLSINPGPRRSRTAPPCSRLLRGATDSKIQDVLLVDVAPLSLGIETAGGVMPKIVERNSKIPCNSRKRSLPYSDNQPAVTIQVYEGERAMTKDNNLLGTFDLTGIPPAPRGVPKIDVTFDMDANGILNVSAKENSTGRSKNIVIKNDRGRLSQAEIERMLAEAERYKEEDEKQRQRVAARNQLEAYVFSVQQALDDAGDKLSESDKSTARSACAAALRWLDNNTLAEQEEYEHKLKDLQRVCSPVMPKMHGGAGAGAAPGGQQHGRGAGPTVEEVD

SEQ ID NO: 48628 - DNA, 1950 bp, Balanus amphitrite
  CDS (1)..(1950)
atggcgaaagctccagcgattggaattgatctcgggactacgtactcctgtgtaggagtattccagcatggcaaggtggaaatcattgccaatgaccagggcaacctgacgacgcccagctatgtgaccttcaccgacacggagcggctgatcggagacgccgccaagaaccaggtggccatgaaccccagcaacacggtgttcgatgcaaagcggttgatcggccggcgattcgacgacactgccgtgcagtccgacatgaagcactggcctttcaaggtcatcagcgacagcggcaagcccaagatccgcgtcgagtacaagaacgaggacaagacgttcgcgccggaggagatcagctcgatggtgctgaccaagatgaaggagacggccgaggcgtacctgggcaagaccgtcaccgatgccgtcatcaccgtgccggcctacttcaacgactctcagcgtcgggcgaccaaggacgccggcgcgatcgccggtctgaacgtactgcgcatcatcaacgagcccaccgcggcggccatcgcctacggcctcgacaagaaggtcggcggcgagcgcaacgtgctcatcttcgacctgggcggcggcaccttcgatgtgtcgatccttaccatcgaggacggcatcttcgaggtgaagtcgaccgccggagacacccatctcggcggagaggacttcgacaaccgcatggtcaacttcttcgtccaagagttcaagcgcaagcacaagaaggatctctcaaccaacaagcgcgcgctgcgtcgtcttcggacggcctgcgaacgggcgaagcggactctgtcgtcgtcatcccaagcttcgatcgagatcgactcgctgatggaaggcatcgacttctacacgtccatcacccgcgcccggttcgaggagatgaacgccgacctgttccgcggcaccctcgagcccgtcgagaaggcgctgcgtgatgctaagatggacaagggcgccgtccacgacatcgtcttggtcggcggctcaacacgcattcctaagatccagaaactcctgcaggacttcttcaatgggaaggagctcaacaagtccatcaaccccgacgaggccgtggcgtacggcgctgccgttcaggctgccatcctgcacggcgacaagtctgaggcggtgcaggacctgctgctcctggacgtgacgcccctctcgctcggtatcgagacggccggaggcgtgatgaccgcccccatcaagcggaacaccacgatcccgaccaagcagacgcagaccttcacgacgtactccgacaaccagccgggtgtgctcatccaggtctacgagggtgagcgagccatgaccaaggataacaacctcctgggcaagttcgagctgaccggcatcccgccggcaccgcgcggcttgccccagatcgaggtcaccttggacattgacgccaacggcatcttgaacgtcagcgcggccgacaagtcgaccggcaaggccagcaacatcaccatcaccaacgacaagggtcgcctcaccaaggaggagatcgagcggatggttaacgaggccgagcagttcaatcaggaggacgagggccagcgggagaagatatcccccaagaacgctctggagtcgtattgcttcaacatgaagtcgaccgtcgaggatgacaaggtcaaagacaagatctccgagtccgacaagacgaccatcatcgataagtgcaacgacaccatcaagtggttggacggcaaccagctggcggagaaggacgagttcgagcgcaagcagaaggagttggagcagatctgcaaccccatcatcagcaagctgtaccagggcgcgggtggcgccgctcccggtggtatgcccggtggtatgccgggaggcatgcccggcggtgacgcccccaagggaggcgccggcggcccgaccatcgaggaggtcgactaa

SEQ ID NO: 48629 - protein, 649 aa, Balanus amphitrite
MAKAPAIGIDLGTTYSCVGVFQHGKVEIIANDQGNLTTPSYVTFTDTERLIGDAAKNQVAMNPSNTVFDAKRLIGRRFDDTAVQSDMKHWPFKVISDSGKPKIRVEYKNEDKTFAPEEISSMVLTKMKETAEAYLGKTVTDAVITVPAYFNDSQRRATKDAGAIAGLNVLRIINEPTAAAIAYGLDKKVGGERNVLIFDLGGGTFDVSILTIEDGIFEVKSTAGDTHLGGEDFDNRMVNFFVQEFKRKHKKDLSTNKRALRRLRTACERAKRTLSSSSQASIEIDSLMEGIDFYTSITRARFEEMNADLFRGTLEPVEKALRDAKMDKGAVHDIVLVGGSTRIPKIQKLLQDFFNGKELNKSINPDEAVAYGAAVQAAILHGDKSEAVQDLLLLDVTPLSLGIETAGGVMTAPIKRNTTIPTKQTQTFTTYSDNQPGVLIQVYEGERAMTKDNNLLGKFELTGIPPAPRGLPQIEVTLDIDANGILNVSAADKSTGKASNITITNDKGRLTKEEIERMVNEAEQFNQEDEGQREKISPKNALESYCFNMKSTVEDDKVKDKISESDKTTIIDKCNDTIKWLDGNQLAEKDEFERKQKELEQICNPIISKLYQGAGGAAPGGMPGGMPGGMPGGDAPKGGAGGPTIEEVD

SEQ ID NO: 48630 - DNA, 1887 bp, Aquifex pyrophilus
  CDS (1)..(1887): transl_table=11
atggcggaaaagaaagaaaaaataatcggtatagacctcggaacgacgaactcagtcgtagcggttatgatgggagatgaggcggttgtaattcagaaccaagaaggttcaaggcttaccccctcagtcgtctcctggactaaggaaaaggaggttctcgtaggagaccccgcaaagagaagggctatccttgaccccgaaaatacggtatacgagagtaaaaggtttatagggaggaagtttgaagaggtaaaggaagaggcaaaaagagtttcctacaaggtagttcccgacgagaagggagacgcagcctttgatatacccaatgctggaaagctcgtaagacccgaggaggtgggagctcacgtcctcagaaagctaaaggaagcagcggaagcctttttaggtgagcccgtaaagaaggcggtaataaccgttcccgcatacttcaacgagagacaaagacaggcaacaaaggacgcgggaaagattgcaggtcttgaggtagtgaggatacttaacgagccgaccgctgccgcaatggcttacggactccacaagaaggaaaacgtaaggatacttgtttatgacttcggtggcggaacctttgacgtctcaatacttgaaggcggagacggtgttatagaggttaaggcgaccgcgggagatacccacctcggtggagctaacatagacgagaggataatggaatggctcattgaagagttcaaaaaggaacacggcatagacctcaggcaggacagaaccgtactccaaaggctgaaggaagcagcggaacaggctaagaaggagctttccttcaagatggagaccgagataaacctacccttcataacgatagaccccaatacgaaccagccccttcacctccaaaagaagctaacaagggcaagacttgaggaaatgataaatgacctcatagacaggaccatagacatagtcaaacaagctcttgaagatgctaagctaaagccctcggatatagacgaagtggttctcgtcggaggttcaacgagaatacccctcgttcaacaaaagattaaggaattcttcggaaaggaaccccacaagggattaaatcccgacgaagttgtcgcaatgggagcggcaatacaggcgggcgtccttgcgggagaagtaaaggaaattgttctcgtagacgtaacaccgctatccttgggagtagagacctacggaggcgttatgaccgttcttatacccaggaacacacccatacccgtaaggaagtgcgaggtattcacgacagcccacgactaccagaccgaggttgagatacacgtcctccagggagagagacccctcgcaaaggataacaaatcccttgcaaagttctatcttacgggaatacctcccgcaccgagaggcgttccaaaaatagaggtttgctttgacatagacgcggacggaatactccacgttacagctaaggacctcggaacgggtaaagagcagtccgtaagagtagagatatcctcgggactcacaccagaagagatagaaaggataataaaagaggcggaagagcacgcggaagaagacaggaagaagaaggagctcatagaggctaagaaccagcttgaccacctcgtttaccagcttgaaaagaccctaaaagaagcgggggataaagttcccgcggatgtaaagcaggaagcggaaaaggttattgaagaggcgaagaaaaccatagaaaccgcaacggatataaacgaagtcaaaagagttacagaaagagttctccaggtatcctcaaagctcggaacaaccctttacggggaagcgggtaagaccgagaagaaggacgaaggcggagagggagaggtagaggcaaaacccgttgattaa

SEQ ID NO: 48631 - protein, 628 aa, Aquifex pyrophilus
MAEKKEKIIGIDLGTTNSVVAVMMGDEAVVIQNQEGSRLTPSVVSWTKEKEVLVGDPAKRRAILDPENTVYESKRFIGRKFEEVKEEAKRVSYKVVPDEKGDAAFDIPNAGKLVRPEEVGAHVLRKLKEAAEAFLGEPVKKAVITVPAYFNERQRQATKDAGKIAGLEVVRILNEPTAAAMAYGLHKKENVRILVYDFGGGTFDVSILEGGDGVIEVKATAGDTHLGGANIDERIMEWLIEEFKKEHGIDLRQDRTVLQRLKEAAEQAKKELSFKMETEINLPFITIDPNTNQPLHLQKKLTRARLEEMINDLIDRTIDIVKQALEDAKLKPSDIDEVVLVGGSTRIPLVQQKIKEFFGKEPHKGLNPDEVVAMGAAIQAGVLAGEVKEIVLVDVTPLSLGVETYGGVMTVLIPRNTPIPVRKCEVFTTAHDYQTEVEIHVLQGERPLAKDNKSLAKFYLTGIPPAPRGVPKIEVCFDIDADGILHVTAKDLGTGKEQSVRVEISSGLTPEEIERIIKEAEEHAEEDRKKKELIEAKNQLDHLVYQLEKTLKEAGDKVPADVKQEAEKVIEEAKKTIETATDINEVKRVTERVLQVSSKLGTTLYGEAGKTEKKDEGGEGEVEAKPVD

SEQ ID NO: 48632 - DNA, 1953 bp, Cucurbita maxima
  CDS (1)..(1953)
atggccggcaagggagaaggtccggctatcggaatcgatctcggaaccacctactcttgcgttggtgtctggcaacatgaccgtgttgagatcattgccaatgaccagggtaacaggactactccttcctatgttggattcaccgacaccgagcgtttgattggtaatgctgctaagaaccaggtcgccatgaacccgataaacactgtctttgacgcgaagaggttgatcggaagaagattcagtgactcttcagtccagagcgacatcaagttgtggcctttcaaggtcatccctggccctggtgacaagcccatgattgaggttaactacaagggtgaagagaagcagttcgctgctgaagaaatctcttccatggttctcattaagatgcgtgagattgctgaagcttaccttggtttcaacgtgaagaatgccgtggtcaccgttcctgcttatttcaacgactcccaacgtcaggccaccaaggatgctggtgttattgctggtctcaatgtcatgagaatcatcaatgagcccacggctgctgccattgcctatggtcttgacaagaaggcaaccagtgttggggaaaagaacgttttgattttcgatcttggaggtggtacttttgatgtctctcttctcaccattgaagagggtatctttgaggtgaaggccactgctggagatactcaccttggtggtgaagatttcgacaatagattggtcaaccactttgtccaggaattcaagaggaagcacaagaaggacatcagtggcaacccaagggctctcagaaggttgagaacctcgtgtgagagggctaagaggactctctcatccactgctcagaccaccattgagattgactccttgtatgaaggaatcgacttctactctaccatcactcgtgccagattcgaggaattgaacatggatcttttcagaaagtgtatggaacccgtcgagaagtgtttgcgggatgcaaagatggacaagagcaccgtccacgatgttgttcttgtcggtggatccactaggatccccaaggtccaacagttactgcaggatttcttcaatggcaaggagctttgcaagagcattaaccccgatgaagctgttgcctatggtgccgcagttcaagctgccatcttgagcggtgaaggcaatgagaaagttcaagatcttcttttgttggatgttaccccactctcgcttggcttggaaaccgccggtggtgtcatgactgtcttgattccaagaaacaccacaattcccacgaagaaggagcaggtattctctacctactccgacaaccagcctggtgtgttgatccaagtatacgaaggagaaagaacaagaacccgcgacaacaatttgcttggaaaattcgagctctccggcatccctccagctcccagaggtgtacctcaaatcacagtgtgtttcgatatcgatgccaacggtatcttgaacgtgtctgcggaagacaagaccaccggccaaaagaacaagatcacaatcaccaacgacaagggaagactctcaaaggaggagatcgagaaaatggttcaagaggcagagaagtacaagtcggaggatgaagagcacaagaagaaggtagaagccaaaaacgccttggagaactacgcatacaacatgaggaacacagtgaacgacgagaagatcggcgccaagctatccccagctgacaagaagaagatcgaagatgccatcgagcagtccatccagtggcttgacgccaaccagctggctgaagccgatgagttcgaagacaagatgaaggagttggagagcatctgcaacccaatcatcgccaagatgtaccaaggcgctggagctgatatgggcggcgctggtgacgacagcatcccgaccggcgctagcggaggtagcggtgctggtcccaagatcgaggaagtcgactaa

SEQ ID NO: 48633 - protein, 650 aa, Cucurbita maxima
MAGKGEGPAIGIDLGTTYSCVGVWQHDRVEIIANDQGNRTTPSYVGFTDTERLIGNAAKNQVAMNPINTVFDAKRLIGRRFSDSSVQSDIKLWPFKVIPGPGDKPMIEVNYKGEEKQFAAEEISSMVLIKMREIAEAYLGFNVKNAVVTVPAYFNDSQRQATKDAGVIAGLNVMRIINEPTAAAIAYGLDKKATSVGEKNVLIFDLGGGTFDVSLLTIEEGIFEVKATAGDTHLGGEDFDNRLVNHFVQEFKRKHKKDISGNPRALRRLRTSCERAKRTLSSTAQTTIEIDSLYEGIDFYSTITRARFEELNMDLFRKCMEPVEKCLRDAKMDKSTVHDVVLVGGSTRIPKVQQLLQDFFNGKELCKSINPDEAVAYGAAVQAAILSGEGNEKVQDLLLLDVTPLSLGLETAGGVMTVLIPRNTTIPTKKEQVFSTYSDNQPGVLIQVYEGERTRTRDNNLLGKFELSGIPPAPRGVPQITVCFDIDANGILNVSAEDKTTGQKNKITITNDKGRLSKEEIEKMVQEAEKYKSEDEEHKKKVEAKNALENYAYNMRNTVNDEKIGAKLSPADKKKIEDAIEQSIQWLDANQLAEADEFEDKMKELESICNPIIAKMYQGAGADMGGAGDDSIPTGASGGSGAGPKIEEVD

SEQ ID NO: 48634 - DNA, 2116 bp, Arabidopsis thaliana
  CDS (38)..(2065)
acaaacgagatcgaagaagagttctcaacaacgaaaaatgatttttatcaaggaaaacacagcgaagatgacgaggaacaaagctattgcgtgtttggtttttctgactgtgcttgattttttaatgaatattggagcagctttgatgtcaagtttggcaatagaaggcgaagagcagaaactggggacggtgatagggatcgatctagggactacatattcatgtgttggtgtctatcataacaaacatgtggaaatcatagcaaacgatcaaggaaacagaattacaccatcttgggttgcatttactgataccgaacgtctcatcggggaagctgctaagaatcaagcagccaagaacccggagcgaaccatcttcgacccgaaacgtctgattggaagaaaatttgatgatcctgatgtacaaagggatatcaaattcttgccatacaaggttgtgaacaaagatgggaagccttacattcaagtgaaggttaaaggtgaagagaaattgtttagccctgaggaaataagtgctatgatactaaccaagatgaaagaaacagctgaagctttcttgggaaagaagattaaagatgctgtgatcacggttccagcgtatttcaatgatgcgcagaggcaagccacaaaggatgcaggggcaatcgcggggcttaacgtggttcgtataatcaatgagccaacgggtgctgccatagcttatggtttagacaaaaaaggtggggagtcaaacattctcgtatatgatcttggtggtggaacattcgatgttagtatccttaccatagacaatggagtctttgaagtcttatccacaagtggagacactcaccttggtggagaagattttgaccacagagtgatggactatttcatcaaacttgtcaagaagaagtataacaaagacattagcaaggatcacaaagcccttggtaaacttaggcgtgaatgtgagcttgcgaaacgatctttgagcaaccagcaccaagtccgtgttgagattgagtcgctctttgatggagttgatttctctgagcctttaacgagagcaagattcgaggaactcaacatggatttgttcaagaagactatggagccagtgaagaaggctcttaaagatgcgggtttgaagaaatctgatatcgacgagattgttcttgttggaggaagcactcgaatcccaaaagttcagcagatgttaaaggatttcttcgacggcaaggaacccagcaaagggactaaccctgatgaggctgtggcctatggcgccgcggtccaaggtggagtattaagtggtgaaggtggagaagaaacacaaaatattctactgcttgatgttgcgcctttgagtctcggtattgaaactgtcggaggcgtgatgacaaacattattccgaggaacacggtgatcccaacgaagaagtctcaggtgttcactacttaccaagatcagcaaactactgtgactatcaacgtctacgaaggcgagagaagcatgacgaaagataaccgcgagcttggaaaattcgatctcacaggcattcttcctgcacccaggggagtgccacagattgaggtgactttcgaagtggacgcaaatgggatcctgcaggtgaaagctgaagacaaagttgctaagacgtcacaatcgattacaataacgaacgataaaggtcgtttgacagaagaagagattgaggaaatgatcagagaagcagaggagtttgctgaggaagataagattatgaaggagaagattgatgcgaggaacaagcttgaaacgtatgtgtacaacatgaaaagtacagtggccgataaggagaagcttgcgaagaagataagtgatgaagataaagagaagatggaaggggttttgaaggaggctttggagtggttagaagagaatgtgaatgcagagaaggaagattatgatgagaaactgaaggaggtggagttggtttgtgacccggttattaagtcggtttacgagaaaaccgagggagagaatgaggacgacgatggagatgatcacgatgagttatagaatcgtataattgaaggtcttttgagtcggttagctataggatttgcagct

SEQ ID NO: 48635 - protein, 675 aa, Arabidopsis thaliana
MIFIKENTAKMTRNKAIACLVFLTVLDFLMNIGAALMSSLAIEGEEQKLGTVIGIDLGTTYSCVGVYHNKHVEIIANDQGNRITPSWVAFTDTERLIGEAAKNQAAKNPERTIFDPKRLIGRKFDDPDVQRDIKFLPYKVVNKDGKPYIQVKVKGEEKLFSPEEISAMILTKMKETAEAFLGKKIKDAVITVPAYFNDAQRQATKDAGAIAGLNVVRIINEPTGAAIAYGLDKKGGESNILVYDLGGGTFDVSILTIDNGVFEVLSTSGDTHLGGEDFDHRVMDYFIKLVKKKYNKDISKDHKALGKLRRECELAKRSLSNQHQVRVEIESLFDGVDFSEPLTRARFEELNMDLFKKTMEPVKKALKDAGLKKSDIDEIVLVGGSTRIPKVQQMLKDFFDGKEPSKGTNPDEAVAYGAAVQGGVLSGEGGEETQNILLLDVAPLSLGIETVGGVMTNIIPRNTVIPTKKSQVFTTYQDQQTTVTINVYEGERSMTKDNRELGKFDLTGILPAPRGVPQIEVTFEVDANGILQVKAEDKVAKTSQSITITNDKGRLTEEEIEEMIREAEEFAEEDKIMKEKIDARNKLETYVYNMKSTVADKEKLAKKISDEDKEKMEGVLKEALEWLEENVNAEKEDYDEKLKEVELVCDPVIKSVYEKTEGENEDDDGDDHDEL

SEQ ID NO: 48636 - DNA, 1935 bp, Chironomus tentans
  CDS (1)..(1935)
atgccatcaaagcagaaaacaggaacagcaattggtattgatcttggcacaacatactcgtgtgttggtgtctttcaacatggaaaagtcgagatcattgcgaatgatatgggaaatagaacaacaccaagttatgtagcattcacagactcagaacgattaattggagatgcagccaaaaatcaggtggcaatgaatccacaaaatacagtatttgatgcaaaacgtttgattggacgacgatttgatgatgagaagattcaagctgatatgaaacattggccattcaaagtcatcaatgattgtggaaagccaaagattcaagtcgaatttaaaggagaacataagagatttgcaccagaagaagtcagttcaatggtcttgacgaagatgagagagactgctgaagcatatataggacaaaaagtcacagatgcagtcattacagttcccgcctatttcaatgactcacaacgtcaagcaacaaaagatgctggtgctattgctggtctcaatgtcttgagaatcattaatgaaccaaccgcagcagcactagcttatggtctcgataagaatctcaaaggagaacgaaatgttctcatttttgatcttggtggtggaacttttgatgtctcaatcttaacaattgatgaaggctcattgtttgaagtcagatcaacagctggtgatacacatttgggtggtgaagattttgacaacagattagtgaatcatttcattgaagaatttaaacgcaaacatcgatcagatttgagtaaaaatattcgtgcattaagaagattaagaacagcatgtgaacgagccaagagaacattgtcatcatccacagaggcatcaattgaaattgacgcgttacatgaaggagttgatttctattcaaagatcacacgagcacgctttgaggaaatgaacatggatttattcagatcaacactcgaacccgttgagcgtgcattgagagatgctaaattagacaagagtcaaattcatgatgtagttcttgttggtggatcaactcgaatcccaaagatccagaaaatgcttcaagatttcttctgtggcaagagcttgaatttctcaattaatccagatgaggcagttgcctatggagcagcagttcaagcagctattctcactggtgatagcagctcaacaattcaagatgttttacttgtggatgttactccattatcattgggcattgaaacagctggtggtgtcatgacaaaactcatcgagagaaatgctcgaattccttgcaagcaacagaagacattcacaacatattcagataatcagcctgcagttaccatccaagtattcgaaggtgaaagagcaatgacaaaagataacaacttattgggaacattcaatttgactggaattccaccagcaccaagaggagttccacaaattgaagtcacatttgatctcgatgcaaatggcatcttgaatgtatcagccaaagatagttcaactggaaaacaagaaacaattacgatcaagaatgataaaggtcgtctctcaaaggctgaaatcgatcgaatgctttctgaggctgaaaaatatcgagaagaagatgaaaagcaccagcaacgaattcaagcaagaaatcaacttgaaagttatatttttggatgcaaacaagcagtagaagatgctccagctggcaaattgagcgaagaagataagaaaattgtccgtgacaagtgcacatctgaattgtcatggcttgattccaatactctcgctgagaaggaagaatttaaagatcatttgaaagatgtacagcgagtttgtggtccaatcatggctaaaatgcatggaggtgcaggtggaccgaaagcaggtggatgtggagcacaaagtggacagagagcacactctggtccaacagttgaggaagttgattaa

SEQ ID NO: 48637 - protein, 644 aa, Chironomus tentans
MPSKQKTGTAIGIDLGTTYSCVGVFQHGKVEIIANDMGNRTTPSYVAFTDSERLIGDAAKNQVAMNPQNTVFDAKRLIGRRFDDEKIQADMKHWPFKVINDCGKPKIQVEFKGEHKRFAPEEVSSMVLTKMRETAEAYIGQKVTDAVITVPAYFNDSQRQATKDAGAIAGLNVLRIINEPTAAALAYGLDKNLKGERNVLIFDLGGGTFDVSILTIDEGSLFEVRSTAGDTHLGGEDFDNRLVNHFIEEFKRKHRSDLSKNIRALRRLRTACERAKRTLSSSTEASIEIDALHEGVDFYSKITRARFEEMNMDLFRSTLEPVERALRDAKLDKSQIHDVVLVGGSTRIPKIQKMLQDFFCGKSLNFSINPDEAVAYGAAVQAAILTGDSSSTIQDVLLVDVTPLSLGIETAGGVMTKLIERNARIPCKQQKTFTTYSDNQPAVTIQVFEGERAMTKDNNLLGTFNLTGIPPAPRGVPQIEVTFDLDANGILNVSAKDSSTGKQETITIKNDKGRLSKAEIDRMLSEAEKYREEDEKHQQRIQARNQLESYIFGCKQAVEDAPAGKLSEEDKKIVRDKCTSELSWLDSNTLAEKEEFKDHLKDVQRVCGPIMAKMHGGAGGPKAGGCGAQSGQRAHSGPTVEEVD

SEQ ID NO: 48638 - DNA, 1980 bp, Spodoptera frugiperda
  CDS (1)..(1980)
atgatcaaaatgcggtggagtattttagcgttggcctgtgtggtcgtggcggtgtacgccgacgacaagaaagacaaggagaaggacatcggcaccgtgatcggtatcgacttggggaccacctactcttgtgttggtgtgtacaagaatggccgtgtggaaattattgctaatgaccagggtaaccgtatcactccctcatatgtggctttcactggtgatggggagcgtctcattggtgacgctgccaagaaccagctgaccaccaaccccgagaacaccgtcttcgatgccaagcgtcttattggtcgtgaatggagtgattccactgttcaacatgatgtcaaattcttccccttcaaggtggttgagaagaacagcaaacctcatgtttccgttaagacctcccagggtgacaaaatctttgctcctgaagaaatctctgctatggttcttaccaaaatgaaggaaaccgctgaggcttaccttggcaagaaggtgacccacgctgtcgtaacagtccctgcttacttcaacgacgctcagcgtcaagccaccaaggacgctggtgctatcgccggtcttcaggtcatgagaatcatcaacgagcctaccgccgccgctatcgcttacggtcttgacaagaaggaaggcgagaagaatgtgctcgtatttgacttgggtggtggtaccttcgacgtgtctctgctcaccatcgacaatggagtgtttgaagtagtagccaccaatggtgacactcacttgggtggtgaggactttgaccagagagtcatggagcactttatcaagttgtacaagaagaagaagggcaaggacatcagaaaagacaaccgcgccgtacagaagcttcgtcgtgaagttgagaaggccaagagagctttgtcctccagccaccaagtcaagattgaaattgaatcattcttcgaaggtgaagacttctccgagactcttaccagggctaagtttgaagaattgaacatggatctcttcaggtctactcttaaacctgtgcagaaggtattggaagacgccgacatgaacaagaaggatgttgatgaaatcgtgcttgtcggtggttctacccgtatccccaaggtgcagcagctggtcaaggaattcttcaatggaaaggagccttcccgaggtatcaaccctgacgaggctgtcgcttacggtgccgccgtccaggctggagtactcagcggtgaacaagacactgacgccattgtgctgctcgacgtcaatcctcttaccatgggtatcgagactgtcggaggtgtcatgaccaagctcatcccccgtaacaccgtcattcctaccaagaagtctcagatcttctccaccgccagtgacaaccagcacactgtcaccatccaggtgtatgaaggtgagcgtccaatgaccaaggacaaccacttgctcggaaagttcgacttgactggcattcctcctgcacctcgtggtatccctcagatcgaagttaccttcgaaatcgacgctaacggtatcttgcaagtgtctgctgaggacaagggtactggaaaccgagagaagattgtcatcaccaatgaccaaaacagactgacacctgaagatatcgagaggatgatcaaggatgccgagaggttcgctgacgaggacaagaggctcaaggagcgcgttgaggccaggaacgagctggaaagctatgcttactccatcaagaaccagctccaggacaaggagaagcttggctctaagttgagtgacgacgagaagactaagatggaggaggccatcgatgccgcgatcaagtggctcgaagacaaccaggatgtcgactcagaagaatacaagaaacagaagaagtcccttgaggacgttgttcaacccatcatcgccaagttgtaccaaggacaaggaggcgtgcccccgcccggcgcgggaggtgacgatgaagacttcaaggacgagttgtaa

SEQ ID NO: 48639 - protein, 659 aa, Spodoptera frugiperda
MIKMRWSILALACVVVAVYADDKKDKEKDIGTVIGIDLGTTYSCVGVYKNGRVEIIANDQGNRITPSYVAFTGDGERLIGDAAKNQLTTNPENTVFDAKRLIGREWSDSTVQHDVKFFPFKVVEKNSKPHVSVKTSQGDKIFAPEEISAMVLTKMKETAEAYLGKKVTHAVVTVPAYFNDAQRQATKDAGAIAGLQVMRIINEPTAAAIAYGLDKKEGEKNVLVFDLGGGTFDVSLLTIDNGVFEVVATNGDTHLGGEDFDQRVMEHFIKLYKKKKGKDIRKDNRAVQKLRREVEKAKRALSSSHQVKIEIESFFEGEDFSETLTRAKFEELNMDLFRSTLKPVQKVLEDADMNKKDVDEIVLVGGSTRIPKVQQLVKEFFNGKEPSRGINPDEAVAYGAAVQAGVLSGEQDTDAIVLLDVNPLTMGIETVGGVMTKLIPRNTVIPTKKSQIFSTASDNQHTVTIQVYEGERPMTKDNHLLGKFDLTGIPPAPRGIPQIEVTFEIDANGILQVSAEDKGTGNREKIVITNDQNRLTPEDIERMIKDAERFADEDKRLKERVEARNELESYAYSIKNQLQDKEKLGSKLSDDEKTKMEEAIDAAIKWLEDNQDVDSEEYKKQKKSLEDVVQPIIAKLYQGQGGVPPPGAGGDDEDFKDEL

SEQ ID NO: 48640 - DNA, 1971 bp, Cotesia rubecula
  CDS (1)..(1971)
atgtcgaaagcacctgcagttgggattgatttgggaactacgtactcttgtgtcggagtttttcaacacggtaaagttgaaataattgccaatgaccaaggaaaccgaactacccccagttatgtcgcatttaccgacactgaacggcttattggtgatgccgctaaaaatcaggtcgccatgaatcctaacaacaccatttttgacgccaaaagactgattggtcgccgattcgatgacccaacagtccaagcggacatgaagcactggccattcgaagtaataaacgacgctggtaagcccaaaatccaagtccagtacaaaggtgaattaaagaccttcttccccgaggaagtgagctcgatggtgctcgtcaagatgaaggaaaccgcggaagcttacctcggcgagactgtcaccaacgctgtaatcaccgtcccggcttatttcaacgactctcaacgtcaagctaccaaggacgcgggaataatatccggaatgaacgtcctacgtgttatcaacgagccaactgccgcggcgatagcttacggtttggacaagaaaaccaccggcgagcgtaacgtcctgatctttgacttgggtggcggaaccttcgacgtctccattccctccatcgaggacggtatcttcgaagtaaaatccaccgcaggagacactcacttgggaggcgaggactttgacaaccgtatggtcaatcactttgtccaggagttcaagcgcaaatacaagaaagatctgactaacaacaagcgtgcgctgcgtcgtcttaggaccgcttgcgagcgcgcgaagcgaactctttcttcatccagccaggctagcattgaaatcgactcgcttttcgggggaattgacttttacacttcaataactcgcgctaggtttgaggaactctgcgctgatttattccggaatactttggagccagtcgagaaatccctcagggatgccaagatcgacaagtcggctatccacgaaattgtccttgtcggaggttcaacccgaattccgaaaattcaaaagctgctccaggatttgttcaacggaaaggaactcaacaagtccatcaacccggacgaggctgtcgcttacggtgcagctgtccaagctgccattcttcacggggataaatcagaagctgttcaggatcttcttctgctggatgttgcgccactgtcgcttggaattgagaccgctggaggagtgatgactgctttgatcaagcgcaacactaccatcccgaccaaacagacccagacttttaccacctacgcggacaaccaacccggtgtcctcattcaggtctacgaaggagaacgtgccatgaccaaggacaacaatcttcttggaaagtttgaactttctggtattcctccggcacccagaggagtcccgcaaattgaggtgacctttgacatcgacgccaatggaattctcaatgtatccgctgctgataaaatgtccggaaaggaaaacaagatcactatcaccaatgacaagggaagacttagcaaggaggagattgaacgcatggtcaatgaagctgagaagtacaaacatgaggatgagaaacaaaaggagactattgctgccaaaaatgctcttgaagcttactgctttaacatgaagagcaccgttgaagatgacaagatcaagggcaagatcagtgaggatgataaaaaggttgtgttggataaatgcaatgagatcatcaaatggctcgatggaaatcaattggctgagaaggaagaatttgagcaaaagcaaaaggagattgaagctgtttgtaatccaattgttactaaattgtaccaaggagccggtggtatgcctggtggtatgcctggtggtatgcccggtggtatgcctggtggtatgcccggtggtatgcctggtgctggagcagcacctggagctggagctggaccaaccattgaagaagttgattaa

SEQ ID NO: 48641 - protein, 656 aa, Cotesia rubecula
MSKAPAVGIDLGTTYSCVGVFQHGKVEIIANDQGNRTTPSYVAFTDTERLIGDAAKNQVAMNPNNTIFDAKRLIGRRFDDPTVQADMKHWPFEVINDAGKPKIQVQYKGELKTFFPEEVSSMVLVKMKETAEAYLGETVTNAVITVPAYFNDSQRQATKDAGIISGMNVLRVINEPTAAAIAYGLDKKTTGERNVLIFDLGGGTFDVSIPSIEDGIFEVKSTAGDTHLGGEDFDNRMVNHFVQEFKRKYKKDLTNNKRALRRLRTACERAKRTLSSSSQASIEIDSLFGGIDFYTSITRARFEELCADLFRNTLEPVEKSLRDAKIDKSAIHEIVLVGGSTRIPKIQKLLQDLFNGKELNKSINPDEAVAYGAAVQAAILHGDKSEAVQDLLLLDVAPLSLGIETAGGVMTALIKRNTTIPTKQTQTFTTYADNQPGVLIQVYEGERAMTKDNNLLGKFELSGIPPAPRGVPQIEVTFDIDANGILNVSAADKMSGKENKITITNDKGRLSKEEIERMVNEAEKYKHEDEKQKETIAAKNALEAYCFNMKSTVEDDKIKGKISEDDKKVVLDKCNEIIKWLDGNQLAEKEEFEQKQKEIEAVCNPIVTKLYQGAGGMPGGMPGGMPGGMPGGMPGGMPGAGAAPGAGAGPTIEEVD

SEQ ID NO: 48642 - DNA, 1953 bp, Chironomus tentans
  CDS (1)..(1953)
atgtctaaagccccagccgtcggtatcgatttaggaacaacctattcatgtgtcggagtcttccagcatggaaaagttgaaattattgccaatgatcaaggtaatcgtacaactccatcttatgtcgcattcaccgacaccgagagattaattggtgatgctgccaagaatcaagttgctatgaatccaacaaataccatttttgatgctaagcgtttgattggacgcaaattcgatgatccagcagttcaatcggacatgaagcactggccattcgaggtcatttccaatgaaggaaagccaaaaatccaagttatgtacaaggatgaagccaagaacttcttcccagaagaaattagctcaatggtattgacaaagatgaaggaaacagccgaagcatacttgggaaagactgttacaaatgctgttattacagtcccagcctatttcaatgactcacaacgtcaagccacaaaggattcaggaaccatctctggattgaatgttttacgtattattaacgaaccaactgccgccgctattgcttacggtctcgataagaaagctgtcggtgaacgtaatgtcttgattttcgatttgggtggcggtaccttcgatgtttccattttgtcaatcgatgatggaatctttgaagtcaagtcaacagccggagacactcatttgggcggagaagatttcgataatcgcttagtcaatcatttcgctcaagaattcaagcgtaagcacaagaaggatttgacttctaacaagagagcacttcgtcgtttaagaacagcatgcgaacgtgcaaagagaactttatcatcatcaactcaagctagcattgagatcgattctttattcgaaggtattgacttctatacttcaattacaagagctcgtttcgaagaattgaatgctgatcttttccgttcaacaatggagcctgtcgagaaggccattcgtgacgccaagatggataaggcagcaattcacgacattgttcttgtcggtggatcaacacgtattccaaaagttcaaaaacttttgcaagatttcttcaacggcaaggaattgaacaagtcaattaatcctgatgaggccgttgcctacggtgctgccgttcaggctgctatcttacacggtgacaagtccgaagaagttcaagatttactcttgttggacgttaccccattgtcattgggtattgaaacagccggaggtgtcatgagcgttcttatcaagagaaacacaacaattccaacaaaacaaactcaaaccttcacaacatactctgataatcagccaggtgtcttgattcaagtctttgaaggtgaacgtgctatgactaaggacaataacttgctcggaaaattcgaattggctggaattccaccagcaccaagaggtgttccacaaatcgaagttacattcgatattgatgccaacggtattttgaacgttacagccttggagaagtcaacaaacaaggaaaataagatcacaattacaaatgacaagggacgtttgagcaaggaagatattgaacgtatggtcaatgaagctgaaaagtaccgcaatgaagatgatgctcaaaaggaaagaattacagccaagaatggattggaatcatactgtttcaacatgaaatcaaccatggaagatgagaagttgaaggataagatctcagagtctgataagaaaattatcatggataaatgtaatgagaccattaagtggcttgatgccaatcaattgggcgataaggaagaatacgaacatcgtcagaaagaattggaaggaatttgtaatccaattattactaaattgtatcaatcagctggtggtgcaccaggcggtatgccaaacttcccaggagcaccaggtgccggtgcaggacctaccccaggcgcaggatcaggatcaggaccaaccatcgaagaagtcgattaa

SEQ ID NO: 48643 - protein, 650 aa, Chironomus tentans
MSKAPAVGIDLGTTYSCVGVFQHGKVEIIANDQGNRTTPSYVAFTDTERLIGDAAKNQVAMNPTNTIFDAKRLIGRKFDDPAVQSDMKHWPFEVISNEGKPKIQVMYKDEAKNFFPEEISSMVLTKMKETAEAYLGKTVTNAVITVPAYFNDSQRQATKDSGTISGLNVLRIINEPTAAAIAYGLDKKAVGERNVLIFDLGGGTFDVSILSIDDGIFEVKSTAGDTHLGGEDFDNRLVNHFAQEFKRKHKKDLTSNKRALRRLRTACERAKRTLSSSTQASIEIDSLFEGIDFYTSITRARFEELNADLFRSTMEPVEKAIRDAKMDKAAIHDIVLVGGSTRIPKVQKLLQDFFNGKELNKSINPDEAVAYGAAVQAAILHGDKSEEVQDLLLLDVTPLSLGIETAGGVMSVLIKRNTTIPTKQTQTFTTYSDNQPGVLIQVFEGERAMTKDNNLLGKFELAGIPPAPRGVPQIEVTFDIDANGILNVTALEKSTNKENKITITNDKGRLSKEDIERMVNEAEKYRNEDDAQKERITAKNGLESYCFNMKSTMEDEKLKDKISESDKKIIMDKCNETIKWLDANQLGDKEEYEHRQKELEGICNPIITKLYQSAGGAPGGMPNFPGAPGAGAGPTPGAGSGSGPTIEEVD

SEQ ID NO: 48644 - DNA, 1866 bp, Meiothermus ruber
  CDS (1)..(1866): transl_table=11
atggcaaaagccgtaggaattgacttaggaacgaccaacagcgttatcgccatcatggaaggtggcagcccggtggtgctcgagaacgccgagggcgagcgcaccacccccagcgtggtggcttataaggggagcgaccaactggtgggccgggtggcccgccgtcaggccgtgcttaaccccgagggcaccgtcttcgagatcaagcgcttcatcgggcgccggtgggaagaggtgcaggacgaggtcaagcgggtgccctataaggtggtcaagggccccgatggcggggtgcgggtggatatcgccggcaagctctacacccccgaagagatttcggccatgatcctgcgcaagctggtggacgacgcctccaaaaagctgggggagaagatcaccaaggcggtgattaccgtaccagcctacttcaataacgcccagcgcgaggccaccgccaacgccggtaggattgccggcctcgaggtgctgcgcatcgtcaacgagcccaccgcggcggccctggcctatggcctggacaaaaaaggccacgagaccgtgctggtcttcgacctgggcgggggtaccttcgacgtgacggtgctggagatcggcgacggcgtctttgaggtcaaggccaccgcgggggatacccacctgggcggctccgacttcgaccatgccatcgtgaactggctggccgaggagttcaagaaggagtcgggcggggtggacttgaaggccgaccggcaggccctgcagcgcctgattgaagccgctgagaaggccaagatcgagctttcggcggttaccgagaccaccatcagcctgcccttcatcggcctcgacccgatctccaagacccccctgcacctcgagcgcaagctcacccgggccaagttcgaggagctgatccagcccctgctgaagaagatccgcggcccggtagaacaggccctgcgcgatgccggcctgagcgccagccagattgacgaggtgctgctggtaggtggttctacccgtgtgccggcggtgcagcagattgtgaaggagatgctgggcaaagagcccaaccgcagcgtcaaccccgacgaggtggtggccctgggggcggcggtgcaggccggtgtgctgaccgggcaggtggaggacgtggtgttgctggacgtgaccccgctctcgctgggggtggagaccaagggtggggtgttcacggtgctgattccgcgcaacaccaccgtaccgacccgcaagtcggagatcttcaccaccgccgagcacaaccagccctcggtggagatccacgtgctgcagggtgagcgccccatggccgccgacaacaagagcctgggccgcttccgtctcgagtgcatcccgcccatgccggccggcgtgccccagatcgaggtgaccttcgacatcgacgccaacggcatcctgcatgcgaccgccaaggagaaatccaccggcaaggaagcctccattaccatccagaacaccaccaccctctccgagcaggagatcgagcgcatgatcaaggaagccgaggccaacgccgaggccgaccgcaagcgtaaagagcacgccgatctcaagaacaacctcgatgccgcgcgcattcaggcggagcgggtgatgggggagaaggagagcaccgccgaggccaagagccgcctcgaggccgccatcagccgggccaagaccctggtggacaccgacggctccgacgccgacctgcgccaggccaccgaggagctgctcgcggccctgcaggcctacgagcagggggcggctgcgggcagccaggcccagagcagcacccccaagtccgacgacgtgatcgacgccgattacaaacccgccgactaa

SEQ ID NO: 48645 - protein, 621 aa, Meiothermus ruber
MAKAVGIDLGTTNSVIAIMEGGSPVVLENAEGERTTPSVVAYKGSDQLVGRVARRQAVLNPEGTVFEIKRFIGRRWEEVQDEVKRVPYKVVKGPDGGVRVDIAGKLYTPEEISAMILRKLVDDASKKLGEKITKAVITVPAYFNNAQREATANAGRIAGLEVLRIVNEPTAAALAYGLDKKGHETVLVFDLGGGTFDVTVLEIGDGVFEVKATAGDTHLGGSDFDHAIVNWLAEEFKKESGGVDLKADRQALQRLIEAAEKAKIELSAVTETTISLPFIGLDPISKTPLHLERKLTRAKFEELIQPLLKKIRGPVEQALRDAGLSASQIDEVLLVGGSTRVPAVQQIVKEMLGKEPNRSVNPDEVVALGAAVQAGVLTGQVEDVVLLDVTPLSLGVETKGGVFTVLIPRNTTVPTRKSEIFTTAEHNQPSVEIHVLQGERPMAADNKSLGRFRLECIPPMPAGVPQIEVTFDIDANGILHATAKEKSTGKEASITIQNTTTLSEQEIERMIKEAEANAEADRKRKEHADLKNNLDAARIQAERVMGEKESTAEAKSRLEAAISRAKTLVDTDGSDADLRQATEELLAALQAYEQGAAAGSQAQSSTPKSDDVIDADYKPAD

SEQ ID NO: 48646 - DNA, 1851 bp, Acholeplasma laidlawii
  CDS (1)..(1851): transl_table=4
atgaatggagtgaagacaatggcgaagacaaataaaattattggaattgacttaggaactacaaactcagttgtatcagtgatggaaggtaacgaagcaaaagttatcccaaatgctgaaggtggacgtacaacaccaagtatcgttgcttttaaaggtgacgaaatattagtgggtgaagttgcgaaacgccaacttattacaaacccagatacaatttatagtatcaaacgtcacatgggtgatttaaactataaagtaaaagcagctggtaaagaatttacacctcaacaaatttctgcttatatcttacaaaacttaaagaaaacagcagaagattacctaggtgcaacagttactgaagcagttattactgtacctgcatattttaatgacgctcaacgtcaagctacaaaagacgctggtacaatcgcaggattaaacgttagacgtattattaacgaaccaacagcatcagcactagcttatggtattgataaaacagacaaagaacaaactatcttagtatttgacttaggtggtggtacatttgacgtgtctatcttacacttagctgatggtacatttgaagttgtatcaacatcaggtgataacaaacttggtggggacgactttgaccacaaaatttatgaattcttagcagctgaatttaataaagaacacggtattgatttactaaaagataaaatggctttacaacgtctacgtgatgcagcagaaaaagctaagaaagaattatcaggtgtaacaacaagttctatttctctaccatttattacaatgggagcagcaggtccgttacactttgaatataacttaacgcgtgctaaatttaatgaattgactaaagatttagtagatcgtacaatggtatctgttagacgtgctttagctgatgctaaattaacaaactctgatattaatcaaatcttattagttggtggttcaacaagaattccagctgttcaagaacttgtaacaaaagaatttggtaaagaacctaatagatcggtaaaccctgatgaagttgtagcaatgggtgctgcaatccaaggtgctgttttagcaggggatgttaaagacgtattattacttgacgttacaccattatcattaggtattgaaacacttggtggtgtcgcaacaagtttaatcgaaagaaatacaacaattcctacatctaaatcacaagtattctcaactgcagcagataaccaaccagctgtagacattcacgtattacaaggtgaaagaccaatggcagctgacaataaaacacttggacgcttccaattaacagatattccaccagcaagacgtggtgtacctcaaattgaagttacatttgatattgacgcaaacggtattgtttctgttaaagctaaagacttaggtacaaataaagaacaaaagattacaatctctggtaacggtggattatctaaagaagaaattgatgcaatgatcaaacaagctgaagaaaacgcagaagcagataacaaacgtaaagaatctgcagatgctagaaacgaagctgatagcatgattttccaatctagaaaagcaatcgaagacttaggtgctgaagttacagatgaagaaaaagaaaccgtagaaaacgcaattaaagacttagaagaagcattaaaaggtgatgacgtagaagctattaaagctaaaaatgaagcacttgctaaagcgagccaatctattgctatgaaagcatacgaaaaagctaacaaatcaaacggatcagatgtaaacggagcaactgatgcagatgataataaagatgatgctgtagaagctgaatttactgaaaaacaataa

SEQ ID NO: 48647 - protein, 616 aa, Acholeplasma laidlawii
MNGVKTMAKTNKIIGIDLGTTNSVVSVMEGNEAKVIPNAEGGRTTPSIVAFKGDEILVGEVAKRQLITNPDTIYSIKRHMGDLNYKVKAAGKEFTPQQISAYILQNLKKTAEDYLGATVTEAVITVPAYFNDAQRQATKDAGTIAGLNVRRIINEPTASALAYGIDKTDKEQTILVFDLGGGTFDVSILHLADGTFEVVSTSGDNKLGGDDFDHKIYEFLAAEFNKEHGIDLLKDKMALQRLRDAAEKAKKELSGVTTSSISLPFITMGAAGPLHFEYNLTRAKFNELTKDLVDRTMVSVRRALADAKLTNSDINQILLVGGSTRIPAVQELVTKEFGKEPNRSVNPDEVVAMGAAIQGAVLAGDVKDVLLLDVTPLSLGIETLGGVATSLIERNTTIPTSKSQVFSTAADNQPAVDIHVLQGERPMAADNKTLGRFQLTDIPPARRGVPQIEVTFDIDANGIVSVKAKDLGTNKEQKITISGNGGLSKEEIDAMIKQAEENAEADNKRKESADARNEADSMIFQSRKAIEDLGAEVTDEEKETVENAIKDLEEALKGDDVEAIKAKNEALAKASQSIAMKAYEKANKSNGSDVNGATDADDNKDDAVEAEFTEKQ

SEQ ID NO: 48648 - DNA, 1917 bp, Colwellia maris
  CDS (1)..(1917): transl_table=11
atgggcaaaattatcggtattgacctaggaacaactaactcatgtgttgctgtattagacggcggcagtgtacgtgttattgaaaatgctgaaggcgatcgtacaacaccttcaattattggttacacagaagatggcgaaacgttagtaggtcaacctgctaaacgtcaatctgtaacaaaccctaaaaatacattgtacgccattaaacgcttaatcgggcgtcgttttgaagacgaagaagtacaacgtgatatcaaaataatgccttttggcattgttaaagcagacaacggcgatgcttgggttacagcacgtgataaaaatgtctctcctccacaagtttcagctgaagttttaaagaaaatgaaaaaaacagcagaagactatttaggtgaaacagttactgaagcagtaattactgttccggcatactttaacgattcacaacgtcaagcaactaaagatgctggtcgtattgcgggtcttgatgttaaacgtattatcaacgaaccaacggctgctgcacttgcttacggcatggacaaaaaagaaggcgacaaagttgttgcggtttacgatttaggtggtggtacattcgatatctcaattattgaaattgatgaagttgatggcgagcacacgtttgaagtactagcgactaatggcgatactcacttaggtggtgaagattttgataaccgtctaattaattatcttgtagctgaatttaagaaagaccaaggcatggacttaacgtctgatcctttagcaatgcagcgtttaaaagaagcagcagaaaaagctaaatgtgagttgtcttcagcacaacaaacggatgttaacttaccttacatcacagctgatgcctctggtcctaagcacatgaacattaaagtgactcgtgctaagttagaatctttagttgaagatatggttaaagcaacattaataccacttaaacaagcacttaaagatgcagatttatcagtaagtgacgtgaatgacgttatcttagttggtggtcagtctcgtatgcctatggtacaaaaagcggttactgagtttttcggtaaagagccacgtaaagatgttaacccagatgaagcagtagcagcaggtgcggcgattcaagcaggtgttctttcaggtgatgtaacagacgtgcttttactagacgttacgccattgtcactaggtattgaaacgatgggcggtgtgatgactaaagttatcgacaaaaacacaaccatccctactaaacagtcgcaaacgttctctacagctgatgataaccaatcagcggtaactgttcatgtttgtcaaggtgagcgtaagcaagcttctgcaaacaaatctttaggtcaatttaaccttgaaggtattgatgcagcaccacgcggtacaccacaaatcgaagtaactttcgatattgatgctgatggtatcttgcatgtaacagcaaaagataagaacacaggtaaagagcaaaaaattactatcaaagcttcttctggtttatctgatgaagaagtagagcaaatggtacgtgatgcagaagctaacgctgatgaagatgctaagttcgaggagttagttcaagttcgtaaccaagctgacggtatgattcactctactcgcaagcaagttgaagaagcgggcgaagaattaccaagcgaagataaagagaaaattgaagcggcattaactgagcttgaaacagctattaaaggccacgacaaagaagagattgacgctaaaactcaagcgcttatggaagcttcagctaagttaatggaaattgctcaagctaaacaacaagcacaaagcgctcctgaaggctctgctgatgccgacgctgcaccaggcgatgatgtagtagatgctgagtttgaagaagttaaagacgataagtaa

SEQ ID NO: 48649 - protein, 638 aa, Colwellia maris
MGKIIGIDLGTTNSCVAVLDGGSVRVIENAEGDRTTPSIIGYTEDGETLVGQPAKRQSVTNPKNTLYAIKRLIGRRFEDEEVQRDIKIMPFGIVKADNGDAWVTARDKNVSPPQVSAEVLKKMKKTAEDYLGETVTEAVITVPAYFNDSQRQATKDAGRIAGLDVKRIINEPTAAALAYGMDKKEGDKVVAVYDLGGGTFDISIIEIDEVDGEHTFEVLATNGDTHLGGEDFDNRLINYLVAEFKKDQGMDLTSDPLAMQRLKEAAEKAKCELSSAQQTDVNLPYITADASGPKHMNIKVTRAKLESLVEDMVKATLIPLKQALKDADLSVSDVNDVILVGGQSRMPMVQKAVTEFFGKEPRKDVNPDEAVAAGAAIQAGVLSGDVTDVLLLDVTPLSLGIETMGGVMTKVIDKNTTIPTKQSQTFSTADDNQSAVTVHVCQGERKQASANKSLGQFNLEGIDAAPRGTPQIEVTFDIDADGILHVTAKDKNTGKEQKITIKASSGLSDEEVEQMVRDAEANADEDAKFEELVQVRNQADGMIHSTRKQVEEAGEELPSEDKEKIEAALTELETAIKGHDKEEIDAKTQALMEASAKLMEIAQAKQQAQSAPEGSADADAAPGDDVVDAEFEEVKDDK

SEQ ID NO: 48650 - DNA, 2284 bp, Crypthecodinium cohnii
  CDS (58)..(2001)
gtgatcatcccaatcccattcatcgattcttgctgacctagcagctcatctctcgcgatggccaagaagacggcgatcggcatcgaccttggcacaacttattcctgtgtcggtgtgtggaagaacgatggcgtcgaaattatcgccaacgaccaaggcaaccgcactactccctcctatgttgccttcaccgacaccgaacgtttgatcggtgacgctgctaagaaccaagtggcacgcaatcccgaaaacactgttttcgacgcaaagcgtttgatcggccgcaagttcgcggaccccatcgtccaggccgacatcaagctctggcccttcaaggtcatcgctggcgctggcgacaaacccatgatcgttgtcaacgcccagggtgaggagaagaagttccatccggaagaaatcagcagcatgatcttgctgaagatgaaggagactgccgaggcttacttgggcagcaagatcaacgatgccgtggtgaccgtgccagcctacttcaacgactcccagcgacaggccaccaaggatgccggcaccatctccggcatgaacgtgctccgtatcatcaacgagcccaccgccgctgccatcgcctacggcttggacaagaagggcagcggtgagaagaacgtcttgatctacgacatgggaggtggcaccttcgatgtgagcttgttgaccatcgaggacggtatcttcgaggtgaaggccactgctggcgacacccacttgggtggcgaggatttcgacaatcgcatcctggatttctgcctccaagacttcaagcgaaagaaccgaggcaaggacatgtccggcaaccagcgagccctccgacgattgcgcactcagtgcgagcgagccaagaggaccctgtcctcttccactcaggccaccatcgagatcgactccttgttcgacggcatcgactactcctgctccctctcccgagcccgattcgaggagctgaacatggactacttcaggaactccatgggccccgtggagaagtgcttgaaggacagcggcatcgacaagcgcagcgtccacgaggtcgtcttggtcggcggttccacccgtatccccaaggtgcagtccatgatccaggaattcttcaacggcaaggagcccaacaagtccatcaaccccgacgaggccgtggcgtatggtgctgctgtccaggctgccatcttgactggtgagggctcctcccaggtgcaggacttgctgcttttggatgtgacccctctctccatgggtctggagaccgctggtggcgtcatgaccaagttgatcgagcgcaacaccaccatccccaccaagaagggccagaccttcaccacctacgccgacaaccagcctggtgtcttgatccaggtcttcgagggtgagcgagccatgaccaaggacaacaacttgctcggcaagttccacttggacggcatccctcctgctccccgtggcgtccctcagatcgaggtcacctttgacatcgatgccaacggtatcttgaacgtctctgcccaggacaagagcaccggcaagtccaaccagatcaccatcaccaacgagaagggccgtttgtcccaggccgagatcgaccgcatggtccaggaggccgagaagttccgtgccgaggacgagtctaaccgccagaagatcgaggccaagaacggcttggagaactactgcttcaccatgcgcaacaccttgcaggaggagaagctgaaggagaagttcgagggaggagacaaggagaagatcgaggcggctgtccaggaggcccttgattggttggacaagaaccagatggccgagaaggacgagttcgaggccaagcagaaggagttggagggcgtcgtgaaccccatcatgatgaaggtctatcaggccgctggtggcggtggcatgccagagggtggcatgcctggcggcggcccctcccctcccggccccggtgccggtggccccaccgttgaggaggtcgactagaggagcatgcctgcagcgtgaggttgatgagtcatcacgaatttgcttcacagcatagttaattccttttttgtctttttcttctttgggtagaagatgaacacattggagcagagcttgtatgccgttgctggcacgtcagctcaactcggtggcatcttctccgccaagttgccctctgcattcggttgcgattgtttggagcttcttagcaaagacccggtgttccgcaagatcacattgatcctcgtgtgtgacccacagaaaaaaaaaaaaaaaaaaa

SEQ ID NO: 48651 - protein, 647 aa, Crypthecodinium cohnii
MAKKTAIGIDLGTTYSCVGVWKNDGVEIIANDQGNRTTPSYVAFTDTERLIGDAAKNQVARNPENTVFDAKRLIGRKFADPIVQADIKLWPFKVIAGAGDKPMIVVNAQGEEKKFHPEEISSMILLKMKETAEAYLGSKINDAVVTVPAYFNDSQRQATKDAGTISGMNVLRIINEPTAAAIAYGLDKKGSGEKNVLIYDMGGGTFDVSLLTIEDGIFEVKATAGDTHLGGEDFDNRILDFCLQDFKRKNRGKDMSGNQRALRRLRTQCERAKRTLSSSTQATIEIDSLFDGIDYSCSLSRARFEELNMDYFRNSMGPVEKCLKDSGIDKRSVHEVVLVGGSTRIPKVQSMIQEFFNGKEPNKSINPDEAVAYGAAVQAAILTGEGSSQVQDLLLLDVTPLSMGLETAGGVMTKLIERNTTIPTKKGQTFTTYADNQPGVLIQVFEGERAMTKDNNLLGKFHLDGIPPAPRGVPQIEVTFDIDANGILNVSAQDKSTGKSNQITITNEKGRLSQAEIDRMVQEAEKFRAEDESNRQKIEAKNGLENYCFTMRNTLQEEKLKEKFEGGDKEKIEAAVQEALDWLDKNQMAEKDEFEAKQKELEGVVNPIMMKVYQAAGGGGMPEGGMPGGGPSPPGPGAGGPTVEEVD

SEQ ID NO: 48652 - DNA, 1887 bp, Botryllus schlosseri
  CDS (1)..(1887)
atgccagcgatcggtattgatctcggaacgacgtactcttgtgttggagtgtaccaacatggaaaggtggaaataatagccaacgaccaaggaaatcgcacaactccgagttacgtggctttcaccgacaccgagcgactaatcggagatgccgctaagaatcaagtggccatgaatccgaccaacacggttttcgatgcgaaaagattgatcggacgcaagttcaacgactctactgttaagagcgacaagaagcattggtcgttcaacgtgatagccgacggagataagccaaaaatcgaggttgaattcaaaggcgaaaagaaaagattcttcccagaagaaattagttccatgctgctaacaaaaatgaaagaaaccgcggaggcctatctaggacaaggcgttacagacgcagtcatctccgtaccggcgtacttcaacgattcgcaaagacaagcgactaaagatgcagccgtcattgccggcttgaacgttctgcgaataatcaacgaaccgacggcggctgctatagcgtacggacttgacaaaaagacttcggaacggaacattctaatattcgatctcggcggcggtactttcgacgtaagcgttctaaccatagactcgggaatattcgaagtaaaggcgacacgtggagacactcatctgggaggagaagatttcgacaacagaatggtcaatcattttgttcaagaattcaaacgtaaatacaaaaaggacttgacggtcaacaaacgctctttgagaagacttcgaactgcatgcgaaagagcgaaaagaacactttcgtcatcaacgcaagccagcatagaaatcgattcgcttttcgaaggcatcgatttctacagctccataaccagagccaggttcgaagagctgtgttctgatctgtttcgccaaactttggatcctgtggaacaggcgcttcgcgactcgaaactcgacaaaggcaagatcgacgaaatcgtcctcgttggcgggtccacgcgcataccgaaaatacagaagctattgcgcgactttttcaatggaaaagatctcaacaagtcgatcaatcccgacgaagccgtcgcgtatggagccgccgttcaagccgccattctctccggtgatcaatcggaacaagtcaaagacgtgctattgctcgacgttgctccgctgtctctcgggatcgagactgcaggcggtgttatgacgactttgatcaaacgcggaactacgataccagcgaaacagtcccaagttttcactacatactccgacaatcaaccggctgtaacaatccaagtttacgaaggcgaacgcgccctgacgaaagacaacaacttacttggaaagtttgatctcaccggcctaccaccagcgccgagaggcgtgcctcaaatcgaagtagctttcaatgtagaccagaacggaatcatgaacgtgtctgcttcggacaaaagcaccggtaaatcgcagaatatcacaatcacaaacgacaaaggtcggctgagtaaagacgaaattgagaggatggtccaggaagcagagaagtacaaagaagcagatgatcgcgaaagagaacgcatccaagcgaagaactctttagaatcgtacattttcaacgtgaaagcgtccgtggaagacgacaaagtcagcggcaagttatccgcgcaagacaagcagacgatattggataaatgcaacgaaagtctttcgtggctcgataacaatcacaccgccgagaaagacgagtacgaataccagcagaaggagttggaaaacgtgacgtcgccgatccttacaaagcttcatcaaggtcaaagcgcagattccaatggcggcaatgcaaccagaccgaccgtggaagaagtcgactaa

SEQ ID NO: 48653 - protein, 628 aa, Botryllus schlosseri
MPAIGIDLGTTYSCVGVYQHGKVEIIANDQGNRTTPSYVAFTDTERLIGDAAKNQVAMNPTNTVFDAKRLIGRKFNDSTVKSDKKHWSFNVIADGDKPKIEVEFKGEKKRFFPEEISSMLLTKMKETAEAYLGQGVTDAVISVPAYFNDSQRQATKDAAVIAGLNVLRIINEPTAAAIAYGLDKKTSERNILIFDLGGGTFDVSVLTIDSGIFEVKATRGDTHLGGEDFDNRMVNHFVQEFKRKYKKDLTVNKRSLRRLRTACERAKRTLSSSTQASIEIDSLFEGIDFYSSITRARFEELCSDLFRQTLDPVEQALRDSKLDKGKIDEIVLVGGSTRIPKIQKLLRDFFNGKDLNKSINPDEAVAYGAAVQAAILSGDQSEQVKDVLLLDVAPLSLGIETAGGVMTTLIKRGTTIPAKQSQVFTTYSDNQPAVTIQVYEGERALTKDNNLLGKFDLTGLPPAPRGVPQIEVAFNVDQNGIMNVSASDKSTGKSQNITITNDKGRLSKDEIERMVQEAEKYKEADDRERERIQAKNSLESYIFNVKASVEDDKVSGKLSAQDKQTILDKCNESLSWLDNNHTAEKDEYEYQQKELENVTSPILTKLHQGQSADSNGGNATRPTVEEVD

SEQ ID NO: 48654 - DNA, 1962 bp, Trichoplusia ni
  CDS (1)..(1962)
atggctgcaactaaagcacccgctgtaggtattgatttgggaaccacttactcgtgcgtgggagtattccagcacggtaaggtggagatcatcgccaacgaccagggcaacaggaccacgccctcatatgtcgcgttcaccgacaccgagcgtctcatcggagatgccgccaaaaaccaggtggcgatgaaccccaacaacacaatcttcgatgccaaacgacttattggccgcaaattcgaagatgccaccgtacaagccgacatgaagcactggccgtttgaggtagtcagtgacggtggcaaacctaagatcaaggttgcatacaagggtgaagataaaacattcttccctgaagaagttagctcaatggtactcacaaagatgaaggaaacggccgaggcctatctcggtaaaacggtgcagaatgcagtaattacggttccagcgtacttcaatgactcacagagacaagccacaaaagatgcaggtaccatctctggtttgaacgttctccgtatcatcaacgaaccgactgctgctgcgattgcttacggccttgacaagaaggggagtggagaacgtaatgttctgattttcgatctcggcggcggtaccttcgatgtgtccattttgacgatcgaagatggtatcttcgaagtaaagtccaccgccggagacacgcacttgggaggagaggacttcgacaaccgtatggtgaaccactttgtccaagaattcaagaggaaatacaagaaggacctcgccaccaacaagagggccctgcgacgacttcgcactgcctgtgaaagggcgaagagaactctctcctcgtccacccaggccagtattgaaattgattctctcttcgagggtattgatttctacacctccatcaccagggctcgttttgaggagctgaacgctgacttgttcagatctacaatggagcctgtagagaagtccctgcgtgaccgtaaaatggacaagtcccaaattcacgacatcgtactcgtaggtggttctactcgtattcccaaggtgcagaagctccttcaagacttctttaacggaaaggagcttaacaagtccatcaaccccgacgaggccgtagcttacggtgctgccgtccaggccgccatcttgcacggtgtaaagtctgaggaagttcaggatctgctactgcttgatgtcactccgctatcactcggtattgagaccgctggcggtgtcatgaccactctaatcaagcgcaacaccaccatccccaccaagcaaactcagaccttcaccacttactccgacaaccagcccggagtactcatccaggtgttcgaaggtgaacgtgccatgactaaggacaacaacttgctgggcaagttcgagcttaccggcatcccacccgcgccccgtggcgtacctcaaattgaggtcaccttcgacatcgacgccaacggaattctcaacgtatcagccattgagaagacaactaacaaggagaacaagatcacaattaccaacgacaagggccgattatccaaggaagagattgagcgtatggtcaacgaagctgagaagtacaggactgaggatgagaagcaaaaggagaccattcagtctaagaatgccttggaatcttactgcttcaacatgaaatccacaatggaagacgagaagctgaaggacaagatctcagactccgacaagcaaaccatccttgacaagtgcaacgacactatcaagtggttagattccaaccaattggccgacaaggaagagtatgagcacaagcagaaggagctcgaaggcatctgcaaccccatcatcaccaagatgtaccagggagccggcggtatgcccggtggcatgcctggcggtatgcccggcttccccggcggcgcccctgggtggcgcgcggcccctggtggcggtgccggacccaccatcgaggaggtcgactaa

SEQ ID NO: 48655 - protein, 653 aa, Trichoplusia ni
MAATKAPAVGIDLGTTYSCVGVFQHGKVEIIANDQGNRTTPSYVAFTDTERLIGDAAKNQVAMNPNNTIFDAKRLIGRKFEDATVQADMKHWPFEVVSDGGKPKIKVAYKGEDKTFFPEEVSSMVLTKMKETAEAYLGKTVQNAVITVPAYFNDSQRQATKDAGTISGLNVLRIINEPTAAAIAYGLDKKGSGERNVLIFDLGGGTFDVSILTIEDGIFEVKSTAGDTHLGGEDFDNRMVNHFVQEFKRKYKKDLATNKRALRRLRTACERAKRTLSSSTQASIEIDSLFEGIDFYTSITRARFEELNADLFRSTMEPVEKSLRDRKMDKSQIHDIVLVGGSTRIPKVQKLLQDFFNGKELNKSINPDEAVAYGAAVQAAILHGVKSEEVQDLLLLDVTPLSLGIETAGGVMTTLIKRNTTIPTKQTQTFTTYSDNQPGVLIQVFEGERAMTKDNNLLGKFELTGIPPAPRGVPQIEVTFDIDANGILNVSAIEKTTNKENKITITNDKGRLSKEEIERMVNEAEKYRTEDEKQKETIQSKNALESYCFNMKSTMEDEKLKDKISDSDKQTILDKCNDTIKWLDSNQLADKEEYEHKQKELEGICNPIITKMYQGAGGMPGGMPGGMPGFPGGAPGWRAAPGGGAGPTIEEVD

SEQ ID NO: 48656 - DNA, 1935 bp, Artemia sanfranciscana
  CDS (1)..(1935)
atggcaaaggcaccagcaataggaatagatcttggcacaacatactcatgtgttggtgttttccagcatggaaaggttgagatcattgctaatgatcaaggaaacagaactactccatcctatgttgcattcactgatactgaacgtcttattggggatgcagcaaagaatcaagttgcaatgaatccaaacaatactatctttgatgccaaaagattgattggacggcgcttcgaggatgcaactgtccagtcagatatgaaacactggccttttgacgtgatcagtgatggtggtaaaccaaaagtccaagtagaatttaagggtgaaaagaaaacatttgctcccgaagaagtctcatccatgatcctcgtgaagatgaaggaaactgcagaagcatatttaggttctcccgtctccaatgctgttattacagtacctgcttatttcaacgattctcaaagacaagccacaaaggatgcaggtgccattgctggcttaaatgttcttcgtattatcaacgaaccaactgctgctgcaattgcatatggtcttgataagaagacagttggcgaaaagaacgttctcatctttgatctcggtggcggtacctttgatgtatcaattttgactattgaagatggaatttttgaagttaagtccacagctggagatacccatttgggaggtgaagattttgacaaccgtcttgtgaatcattttgtacaggaattcaaacgtaaatataagaaagacattgccgtaaacaagcgtgctcttcgtcgcctccgtactgcatgcgaacgtgcaaagagaaccctttcatcctcaactcaagctagcattgaaattgactctctcttcgaaggcattgatttctatacctcaattactcgtgcccgttttgaggagctttgtgctgatcttttccgtggcacactggagcccgttgaaaaatcccttcgcgatgcaaaaatggacaaaggctctgttcatgaaatcgtgctagtcgggggatccactcgaatccccaaaatccaaaaacttcttcaagactttttcaatggaaagggattaaacaagtccatcacccaggatgaagccgttgcctatggtgctgctgttcaagctgccattcttcatggtgacaaatcggaggctgtccaagatctgttactccttgacgttgcccctctttccatgggtattgaaactgctggtggcgtaatgactgtccttatcaagcggaatactaccatcccaacaaaacagactcagaccttcacaacctactctgacaaccagccaggcgtcttgattcaggtttacgaaggtgagcgtactatgaccaaggacaacaatctcttgggaaaatttgagcttactggcattcctcctgcaccacgtggtgttccccaaattgaggtaactttcgatattgatgccaatggcatcttgaatgtttcagccgtggacaaatcaactggccgcgaaaataaaataactattactaacgataaaggccgtctctccaaagaagaaatcgagcgcatggttaacgacgctgaaaaatatcgtgcagaggatgaaaaacagcgtgaggttattgctgccaagaactccctcgaatcctactgcttcaatatgaaatctacaatggaggatgaaaagttcaaggacaagttacctgaagctgataagaacactattcttgacaaatgtaacgaaaccataaagtggttggatgtcaatcagttggctgagaaagaagaatacgaagagaagcaaaaggaaattgaaaaagtctgtaatccaattattaccaagctctatggccaagctgggggcatgctggcggattccctggtggtctggcggtccagctccgggtgctactgctccaggtgctggaacaggcagtggcccaactattga

SEQ ID NO: 48657 - protein, 644 aa, Artemia sanfranciscana
MAKAPAIGIDLGTTYSCVGVFQHGKVEIIANDQGNRTTPSYVAFTDTERLIGDAAKNQVAMNPNNTIFDAKRLIGRRFEDATVQSDMKHWPFDVISDGGKPKVQVEFKGEKKTFAPEEVSSMILVKMKETAEAYLGSPVSNAVITVPAYFNDSQRQATKDAGAIAGLNVLRIINEPTAAAIAYGLDKKTVGEKNVLIFDLGGGTFDVSILTIEDGIFEVKSTAGDTHLGGEDFDNRLVNHFVQEFKRKYKKDIAVNKRALRRLRTACERAKRTLSSSTQASIEIDSLFEGIDFYTSITRARFEELCADLFRGTLEPVEKSLRDAKMDKGSVHEIVLVGGSTRIPKIQKLLQDFFNGKGLNKSITQDEAVAYGAAVQAAILHGDKSEAVQDLLLLDVAPLSMGIETAGGVMTVLIKRNTTIPTKQTQTFTTYSDNQPGVLIQVYEGERTMTKDNNLLGKFELTGIPPAPRGVPQIEVTFDIDANGILNVSAVDKSTGRENKITITNDKGRLSKEEIERMVNDAEKYRAEDEKQREVIAAKNSLESYCFNMKSTMEDEKFKDKLPEADKNTILDKCNETIKWLDVNQLAEKEEYEEKQKEIEKVCNPIITKLYGQAGGMLADSLVVWRSSSGCYCSRCWNRQWPNY

SEQ ID NO: 48658 - DNA, 1965 bp, Paracoccidioides brasiliensis
  CDS (1)..(1965)
atggctccagctatcggtatcgatctcgggaccacgtattcgtgcgtgggtatcttccgagatgacagaattgaaatcattgccaacgaccagggtaaccggaccacaccctcgttcgttgccttcacagacaccgagcgtctgatcggggatgccgccaaaaatcaagtcgccatgaacccctccaacacagtctttgacgccaagcgtctcattggccgcaagttcgctgatcctgaggtccaatctgacatgaagcacttccccttcaaggtcattgacaaggcgggaaagccagtcatctccgttgagttcaagggcgaagagaagcagttcaccccggaggaaatctcctccatggtcctgacgaagatgagagaaactgcggaatcctaccttggaggcactgttaacaacgctgtcgttactgtccctgcctatttcaacgattcccagcgtcaagctaccaaggatgctggtctcatcgctggcctgaatgtccttcggatcatcaacgaacccactgctgccgccattgcctatggtcttgacaagaaggccgagggtgaacgcaacgttctcatcttcgacttgggtggtggcacctttgatgtctccctcctcaccattgaagaggacatcttcgaagtcaagtccactgctggtgacactcatcttggtggtgaggatttcgataaccgcctcgtgaaccattttgtcaatgaattcaagcgcaagcacaagaaggatctatcttcaaacgctcgtgctctccgccgtctccgcactgcctgcgaacgtgccaagcgcaccctctcctctgccgcacagacatccatcgaaatcgactccctatacgagggcattgatttctatacctccatcacccgtgcccgtttcgaggagctttgccaggacctcttccgctccaccatggacccagttgagcgcgtgctccgcgatgcaaagatcgataaatctagcgtccatgagatagtcctcgtgggtggatccacccgtatcccccgcatccagaagcttgtatccgacttcttcaacggcaaggagccaaacaagtccatcaatcccgatgaggctgttgcatatggtgccgccgtccaggccgccatcttgtctggcgacacgacttccaagtctactaatgaaatccttcttcttgacgtcgctcctctatctgtcggtatcgagactgcgggtggcgtcatgaccccactcatcaagagaaacaccactattcctaccaagaagtctgagacattctccacctttgccgacaaccagccaggtgtgctcatccaggtctttgagggtgaacgtgcccgcaccaaggataacaaccttctcggcaagtttgagctaaccggtatccctcccgcgccccgtggcgttcctcaaatcgaagtcaccttcgacgtcgacgcgaacggtatcatgaacgtctccgctctcgaaaagggaactggaaagaccaacaagatcgttatcacaaatgacaagggccgtctctccaaggaggagatcgagcgcatgcttgctgaggccgagaagtacaaggctgaagacgaagctgaggcttcccgcatctccgccaagaacggtctagaaagctacgcctattccctccggaacaccatcagcgactcgaaggtcgatgagaagctcgacgcctccgacaaggagaagctgaagaccgaaatcgacaagactgtctcttggctcgatgagaaccagactgctaccaaggaggagtttgaggcgcagcagaaggagcttgaaagtgttgccaacccaatcatgatgaaattctacggtgccggaggcgagggcggcgcaccaggtgccggattccctggcgctggtggaccgggcggtttccctggtgccggagctggcggtgctcacagtggtggtgacgacggtcctactgtcgaggaggttgactaa

SEQ ID NO: 48659 - protein, 654 aa, Paracoccidioides brasiliensis
MAPAIGIDLGTTYSCVGIFRDDRIEIIANDQGNRTTPSFVAFTDTERLIGDAAKNQVAMNPSNTVFDAKRLIGRKFADPEVQSDMKHFPFKVIDKAGKPVISVEFKGEEKQFTPEEISSMVLTKMRETAESYLGGTVNNAVVTVPAYFNDSQRQATKDAGLIAGLNVLRIINEPTAAAIAYGLDKKAEGERNVLIFDLGGGTFDVSLLTIEEDIFEVKSTAGDTHLGGEDFDNRLVNHFVNEFKRKHKKDLSSNARALRRLRTACERAKRTLSSAAQTSIEIDSLYEGIDFYTSITRARFEELCQDLFRSTMDPVERVLRDAKIDKSSVHEIVLVGGSTRIPRIQKLVSDFFNGKEPNKSINPDEAVAYGAAVQAAILSGDTTSKSTNEILLLDVAPLSVGIETAGGVMTPLIKRNTTIPTKKSETFSTFADNQPGVLIQVFEGERARTKDNNLLGKFELTGIPPAPRGVPQIEVTFDVDANGIMNVSALEKGTGKTNKIVITNDKGRLSKEEIERMLAEAEKYKAEDEAEASRISAKNGLESYAYSLRNTISDSKVDEKLDASDKEKLKTEIDKTVSWLDENQTATKEEFEAQQKELESVANPIMMKFYGAGGEGGAPGAGFPGAGGPGGFPGAGAGGAHSGGDDGPTVEEVD

SEQ ID NO: 48660 - DNA, 2336 bp, Cronartium ribicola
  CDS (22)..(2031)
agtctttttatcaacaaaaagatgtctcgtaccggacctcttcgaggatccggcttcaataggccactatgggccggtttactttcgactgctattatgttagcattcggtactcaaacttacgctcaatctaactccacagctaatttgggtagcgtgatcggtatcgatttgggtactacttactcttgtgttggtgtacaagaacgtggaagagtagaaatcttaaccaatgatcagggtaaccgtatcacaccttcatacgtagcatttactaccgatggtgatcgattaattggtgacgcagcaaagaaccaagctccatctaacccaacaaacacaatctttgacgccaaacggttaatcggacgtaaattcaatgacccagatgtacaacgagatattaaactttacccatttaaagtagttaagaaaggtgataaaccagctatccaagttgaagttaaaggagaaaaacgaacttttacacctgaggaggtttcagctatggttttgggaaaaatgaaagagacagcagaagcttaccttggtcgcaaggtttctaacgcagttgtcactgtcccagcttacttcaatgacgctcaacgtcaggcaactaaggatgctggtacgattgccggtttaaatgttcttcgtatcgttaacgaacctacagccgccgctatcgcctacggattagataagactaaaggcgagcgacaaattattgtatacgatctcggaggtggtacctttgatgtttcactcctatctatcgatgagggtgtcttcgaggtcttagctactgctggtgacactcacttgggtggtgaagatttcgataaccgattgatcgaacactttattaaactctggaaacgtaaacatgatggagaggacattactactaacttacgaacgatgggaaaactaaaacgtgatgtcgaaaaaatcaaacgaactctctctagtcaacaatcggctagaatcgaaattgaaagctttttcaacggtaaagatctctcggagactctcacccgagccaaattcgaagagctcaacatcgatcttttccgtaagaccatgaaaccagtcgaacaagtcctgaaggatgccaatgtcaagaaagacgccatcgatgatgtcgtcttggttggaggttcgactcgtatccctaaggttcaagaacttctcaaggagtactttaacggaaaggaaccttcaaagggtatcaaccccgatgaagctgtagctttcggtgcagctgttcaaggtggtatcttagctggtgaagaaggaaatgaagatttggtcctcatcgatgtttgcccattgactttgggtatcgaaactaccggtggtgtgatgaccaagttgatcgaccgaaacacggtagtacccactgagaagtctcagatcttctcaacagcctccgacaaccagcctactgtcttgattcaagtcttcgagggtgaacgaacgatgactaaggataaccaccagttgggcaagttcgaacttactggtatcccaccggcacccaaaggtgttcctcaagttgaggttacatttgaagttgacgccaacggtatcatgaaagtttctgctgctgacaagggcagtggtcgcgttgaatctatcactatcacaaatgacaagggtcgtctgagtcaagatgaaattgaccgaatggtcaaggaggccgctgatttcgctgaccaagatgaagctttgaagaagaagatcgaagcccgaaacgccttcgagaacttcatttatactatgaagaaccaagtggcggacaaagaaggtcttggtggaaagttagaatctgatgataagaagacgattcaagatgaacttaagaaggcacaagaatggctcgatgagaatactactacagctacagctgaagactttgacgagcagcgtgaagcccttcaagctgttatttcacctatcaccagcaaactttacgcttctggtggtggaggtggtgatgacccactcggatctcacgatgagctgtaaggggacggaaaggaatggattggagttcttttcttttctctcttttttttttgggtaaagaagtgcaggtggatggggggggacgaaggagggaaaggaacatgttgagtagagattttaaaagcaggtttttaaagagttgtcgtgtttttacaaagtaggtgtggtcgatgttgtttgtgtaaaaagggccctaagtggtacattagggggtggttaaaaaaaaaaaaaaaaaaaaaaaaaaaaaaaaaaaaaaaaaaaaaaaaaaaaaaaaaaaaaaaaaaaaaaaaaaaaaaaaaaaaaaa

SEQ ID NO: 48661 - protein, 669 aa, Cronartium ribicola
MSRTGPLRGSGFNRPLWAGLLSTAIMLAFGTQTYAQSNSTANLGSVIGIDLGTTYSCVGVQERGRVEILTNDQGNRITPSYVAFTTDGDRLIGDAAKNQAPSNPTNTIFDAKRLIGRKFNDPDVQRDIKLYPFKVVKKGDKPAIQVEVKGEKRTFTPEEVSAMVLGKMKETAEAYLGRKVSNAVVTVPAYFNDAQRQATKDAGTIAGLNVLRIVNEPTAAAIAYGLDKTKGERQIIVYDLGGGTFDVSLLSIDEGVFEVLATAGDTHLGGEDFDNRLIEHFIKLWKRKHDGEDITTNLRTMGKLKRDVEKIKRTLSSQQSARIEIESFFNGKDLSETLTRAKFEELNIDLFRKTMKPVEQVLKDANVKKDAIDDVVLVGGSTRIPKVQELLKEYFNGKEPSKGINPDEAVAFGAAVQGGILAGEEGNEDLVLIDVCPLTLGIETTGGVMTKLIDRNTVVPTEKSQIFSTASDNQPTVLIQVFEGERTMTKDNHQLGKFELTGIPPAPKGVPQVEVTFEVDANGIMKVSAADKGSGRVESITITNDKGRLSQDEIDRMVKEAADFADQDEALKKKIEARNAFENFIYTMKNQVADKEGLGGKLESDDKKTIQDELKKAQEWLDENTTTATAEDFDEQREALQAVISPITSKLYASGGGGGDDPLGSHDEL

SEQ ID NO: 48662 - DNA, 2007 bp, Corylus avellana
  CDS (1)..(2007)
atggctggctcgtggagagcacgcggctccttggtcgtactagcgattcttctcttcggatgtctattcgcaatttccattgcgaaagaggaagccacaaagttgggaacagtcattggtattgaccttggcacaacttattcttgtgttggtgtctacaagaacggtcatgttgaaatcatagccaacgaccaaggaaaccgtatcaccccatcatgggttggattcactgacggtgagagattgatcggtgaggctgctaagaaccaggcagctgtcaaccctgagaggaccatctttgatgtcaaaaggcttattggaagaaagtttgaagacaaggaggttcagaaggacatgaagcttgttccatacaagattgtgaataaggatggaaagccttacattcaagtcaagattaaggatggtgagaccaaggttttcagccctgaggagatcagtgctatgattctgattaagatgaaggaaacagctgaagcattccttgggaagaaaatcaaggatgctgtcgtcactgttcctgcatacttcaatgatgcccagaggcaggctactaaggatgcaggtattattgctggactgaatgttgccagaattatcaatgaaccaaccgcagccgccatcgcatatggtttggataaaaagggcggggagaagaacatccttgtttttgacttgggtggtgggacatttgatgtcagtatcttgaccattgataacggtgtttttgaggttctctccactaatggagacactcatcttggaggtgaggattttgatatgagaatcatggagtacttcatcaaattgattaagaaaaagcatggcaaggacatcagcaaggacaacagagctattggaaagctgaggagggaagctgagcgtgccaagagagctcttagtagccagcaccaagtccgtgtggagattgaatcactttttgatggtgttgacttttctgaaccactgacccgagctaggttcgaggagctgaacaatgattttgttcagaaagaccatgggacccgtgaagaagctatggaagatgctggattggcaaagaaccagattgatgagattgttcttgttggtggaagcaccaggattccaaaggttcaacagcttcttaaggactacttcgatgggaaggagccaaacaagggtgtgaacccagatgaagcagttgcctatggtgctgctgttcaaggaagcatcttgagtggagagggtggtgaagaaaccaaagatatccttctcctggatgtggctcctctgacccttggaattgaaactgttggtggagtgatgaccaagttgatccctagaaacactgttatcccaacaaagaaatctcaggttttcactacttaccaggatcagcagactaccgtatccattcaggtctttgaaggtgagaggagtctcacaaaggattgcaggaatcttgggaaatttgatctaactggagttccaccagctccaaggggaacccctcaaattgaagtcacatttgaagttgatgcaaatggtatcctaaatgttaaggcggaagacaagggcactggtaaatcagagaagatcaccatcaccaacgacaagggtcgcttgagccaggaggagatcgaccgcatggttcaggaggcggaagagtttgctgaggaagacaagaaggtgaaggaaaggattgatgctcgcaacacccttgagacctatgtgtataacatgaagaaccaggtcaacgacaaagacaagcttgctgataagcttgagtccgatgagaaggacaagatcgagtccgctgtgaaggacgcccttgaatggctcgacgacaaccagagcgctgagaaggaggactacgacgagaagctgaaagaggtggaagccgtttgcaacccaatcattaccgccgtttatcagaggtcgggtggagccccgggtggcggatctggggaggaggatgaggactcagagtcgcatgacgagctgtag

SEQ ID NO: 48663 - protein, 668 aa, Corylus avellana
MAGSWRARGSLVVLAILLFGCLFAISIAKEEATKLGTVIGIDLGTTYSCVGVYKNGHVEIIANDQGNRITPSWVGFTDGERLIGEAAKNQAAVNPERTIFDVKRLIGRKFEDKEVQKDMKLVPYKIVNKDGKPYIQVKIKDGETKVFSPEEISAMILIKMKETAEAFLGKKIKDAVVTVPAYFNDAQRQATKDAGIIAGLNVARIINEPTAAAIAYGLDKKGGEKNILVFDLGGGTFDVSILTIDNGVFEVLSTNGDTHLGGEDFDMRIMEYFIKLIKKKHGKDISKDNRAIGKLRREAERAKRALSSQHQVRVEIESLFDGVDFSEPLTRARFEELNNDFVQKDHGTREEAMEDAGLAKNQIDEIVLVGGSTRIPKVQQLLKDYFDGKEPNKGVNPDEAVAYGAAVQGSILSGEGGEETKDILLLDVAPLTLGIETVGGVMTKLIPRNTVIPTKKSQVFTTYQDQQTTVSIQVFEGERSLTKDCRNLGKFDLTGVPPAPRGTPQIEVTFEVDANGILNVKAEDKGTGKSEKITITNDKGRLSQEEIDRMVQEAEEFAEEDKKVKERIDARNTLETYVYNMKNQVNDKDKLADKLESDEKDKIESAVKDALEWLDDNQSAEKEDYDEKLKEVEAVCNPIITAVYQRSGGAPGGGSGEEDEDSESHDEL

SEQ ID NO: 48664 - DNA, 1932 bp, Drosophila mauritiana
  CDS (1)..(1932)
atgcctgctattggaatcgatctgggcaccacctactcctgcgtgggtgtttaccaacatggcaaggtggagattatcgccaacgaccagggcaaccgcaccactccgtcctacgtggctttcacagattcggaacgcctgatcggcgatccggccaagaaccaggtggccatgaaccccagaaacacagtgttcgacgccaagcgacttattggccgtaaatacgacgaccccaaaatcgcagaagacatgaagcactggcctttcaaggtggtaagcgactgcggaaagcccaagatcggcgtagagtataagggtgagtccaagcgatttgcccccgaggagatcagctcaatggtgctggccaagatgaaggagacggcggaggcgtatctgggcgagagcatcacggatgcagtcatcacagttccagcctacttcaacgactcccagcggcaggctaccaaagacgctggtcacatcgccggcctgaatgtgctccgcatcatcaatgagcccacggcggcagcaccggcctacggactggacaagaatctcaagggtgagcgcaatgtgcttatcttcgacttgggcggcggcaccttcgatgtctccatcctgaccatcgacgagggatcactgttcgaggtgcgctccacagccggagacacacacttgggcggcgaggactttgacaaccggctagttacacacctggcggaggagttcaagcgcaagtacaagaaggatctgcgctccaaccctcgcgccctacgacgcctcagaacagcagctgaacgggccaagcgcacactctcctccagcacggaggccaccatcgagatcgacgcattgtttgagggtcaggacttctacaccaaagtgagccgcgcaaggttcgaggagctgtgcgcagacctcttccgcaacaccctgcagcctgtggagaaggccctcaccgatgccaagatggacaagggtcagatccacgacatcgtgcttgtcggtggatccactcgcattcccaaggtgcaaagtctgctgcaggagttcttccacggcaagaacctcaacctatccatcaacccagacgaggcagtggcatacggagctgctgtgcaggccgctatcctcagcggagaccagagcggcaagatccaggacgtgctgctggtggacgtggccccactttcattgggaattgagactgctggaggtgtaatgaccaagctgatcgagcgcaactgccgcattccgtgcaagcagactaagactttctccacgtactcggacaaccagcccggagtctccatccaggtgtatgagggcgaacgtgcgatgacgaaggacaacaatgcattgggcaccttcgatctgtccggcattccacctgcaccaaggggtgtgccccagatagaagttaccttcgacttggacgccaatggaatcttgaacgtcagcgccaaggagatgagcacgggcaaggccaagaacatcacgatcaagaacgacaagggacgcctctcgcaggctgagattgatcgcatggtgaacgaggctgagcagtacgccgacgaggacgagaagcatcgccagcgcataacctctcgaaatgccctggagagctacgtcttcaatgtgaagcagtccgtggagcaggcacccgctggcaaattggacgaggccgacaagaactccgtcctggacaagtgcaacgacactatccgatggctggacagcaacaccaccgccgagaaggaggagttcgaccacaagatggaggagctcactcgccactgctcccccatcatgaccaagatgcatcagcagggagcgggagcgggagcagctggtggaccgggagccaactgcggccaacaggccggaggatttggcggctactctggacccacagtcgaggaggtcgactaa

SEQ ID NO: 48665 - protein, 643 aa, Drosophila mauritiana
MPAIGIDLGTTYSCVGVYQHGKVEIIANDQGNRTTPSYVAFTDSERLIGDPAKNQVAMNPRNTVFDAKRLIGRKYDDPKIAEDMKHWPFKVVSDCGKPKIGVEYKGESKRFAPEEISSMVLAKMKETAEAYLGESITDAVITVPAYFNDSQRQATKDAGHIAGLNVLRIINEPTAAAPAYGLDKNLKGERNVLIFDLGGGTFDVSILTIDEGSLFEVRSTAGDTHLGGEDFDNRLVTHLAEEFKRKYKKDLRSNPRALRRLRTAAERAKRTLSSSTEATIEIDALFEGQDFYTKVSRARFEELCADLFRNTLQPVEKALTDAKMDKGQIHDIVLVGGSTRIPKVQSLLQEFFHGKNLNLSINPDEAVAYGAAVQAAILSGDQSGKIQDVLLVDVAPLSLGIETAGGVMTKLIERNCRIPCKQTKTFSTYSDNQPGVSIQVYEGERAMTKDNNALGTFDLSGIPPAPRGVPQIEVTFDLDANGILNVSAKEMSTGKAKNITIKNDKGRLSQAEIDRMVNEAEQYADEDEKHRQRITSRNALESYVFNVKQSVEQAPAGKLDEADKNSVLDKCNDTIRWLDSNTTAEKEEFDHKMEELTRHCSPIMTKMHQQGAGAGAAGGPGANCGQQAGGFGGYSGPTVEEVD

SEQ ID NO: 48666 - DNA, 1950 bp, Drosophila mauritiana
  CDS (1)..(1950)
atgcctgctattggaatcgatctgggcaccacctactcctgcgtgggtgtctaccaacatggcaaggtggagattatcgccaacgaccagggcaaccgcaccacgccgtcctacgtggctttcacagattcggaacgcctcatcggcgatccggccaagaaccaggtggccatgaaccccagaaacacagtgttcgacgccaagcgacccatcggccgaaaatacgacgaccccaagatcgcagaggacattaagcactggcctttcaaggtggtaagcgaaggcggaaagcccaagatcggggtggagtataagggtgagtccaagagatttgcccccgaagaaatcagctcaatggtgctggtcaagatgaaggagacggcggaggcgtatctgggagagagcatcacagatgcagtcatcacagttccagcctacttcaacgactcccagcgccaggctaccaaagacgctggtcacatcgccggcctgaatgtgctccgcatcatcaatgagcccacggcggcagcactggcctacggactggacaagaacctcaagggtgagcgcaatgtgcttatcttcgacttgggcggcggcaccttcgatgtctccatcctgaccatcgacgagggatcactgttcgaggtgcgctccacagccggagacacacacttgggcggcgagggctttgacaaccggctagttacccacctggcggaggagttcaagcgcaagtacaagaaggatctgcgctccaaccctcgcgccctacgacgcctcagaacagcagctgaacgggccaagcgcacactctcctccagcacggaggccaccatcgagatcgacgcattgtttgagggtcaggacttctacaccaaagtgagccgagccaggtttgaggagctgtgcgcggacctcttccgcaacaccctgcagcctgtggaaaaggccctcaacgatgctaagatggacaagggtcagatccacgacatcgtgctcgtcggcggatccactcgcattcccaaggtacaaagtctgctgcaggagttcttccacggcaagaacctcaacctatccatcaacccagacgaggcagtggcatacggagctgctgtgcaggccgctatcctcagcggagaccagagcggcaagatccaagatgtgctgctagtggacgtggccccactttcattgggaattgagaccgctggaggtgtaatgaccaagttgatcgagcgcaactgccgcattccgtgcaagcagactaagacgttctccacatattcggacaaccagcccggagtctccatccaggtgtatgagggcgaacgtgcgatgacgaaggacaacaatgcattgggcaccttcgatctgtccggcattccgcctgcaccaaggggtgtgccccagatagaagttaccttcgatttggacgccaatggaatcctgaacgtcagcgccaaggagatgagcacgggcaaggccaagaacatcacgatcaagaacgacaagggacgcctctcgcaggccgagattgatcgcatggtgaacgaggctgagaagtacgccgacgaggacgagaagcagcgccagcgcataacctctcgaaatgccctggaaagctacgtcttcaatgtgaagcaggccgtggatcaggcacctgctggcaaactggacgaggccgacaagaactcagtcctggacaagtgcaacgacactatccggtggcttgacagcaacaccaccgccgagaaggaggagttcgaccacaagctggaggagctcacccgtcactgctcccccatcatgaccaagatgcatcagcagggtgcgggagcgggagccggagtaggtggtccgggagctggtggtccgggagcaaactgcggccagcaggcgggaggatttggaggctactctggacccacggtcgaggaggtcgactaa

SEQ ID NO: 48667 - protein, 649 aa, Drosophila mauritiana
MPAIGIDLGTTYSCVGVYQHGKVEIIANDQGNRTTPSYVAFTDSERLIGDPAKNQVAMNPRNTVFDAKRPIGRKYDDPKIAEDIKHWPFKVVSEGGKPKIGVEYKGESKRFAPEEISSMVLVKMKETAEAYLGESITDAVITVPAYFNDSQRQATKDAGHIAGLNVLRIINEPTAAALAYGLDKNLKGERNVLIFDLGGGTFDVSILTIDEGSLFEVRSTAGDTHLGGEGFDNRLVTHLAEEFKRKYKKDLRSNPRALRRLRTAAERAKRTLSSSTEATIEIDALFEGQDFYTKVSRARFEELCADLFRNTLQPVEKALNDAKMDKGQIHDIVLVGGSTRIPKVQSLLQEFFHGKNLNLSINPDEAVAYGAAVQAAILSGDQSGKIQDVLLVDVAPLSLGIETAGGVMTKLIERNCRIPCKQTKTFSTYSDNQPGVSIQVYEGERAMTKDNNALGTFDLSGIPPAPRGVPQIEVTFDLDANGILNVSAKEMSTGKAKNITIKNDKGRLSQAEIDRMVNEAEKYADEDEKQRQRITSRNALESYVFNVKQAVDQAPAGKLDEADKNSVLDKCNDTIRWLDSNTTAEKEEFDHKLEELTRHCSPIMTKMHQQGAGAGAGVGGPGAGGPGANCGQQAGGFGGYSGPTVEEVD

SEQ ID NO: 48668 - DNA, 1932 bp, Drosophila orena
  CDS (1)..(1932)
atgcctgctattggaatcgatctgggcaccacctactcctgcgtgggtgtctaccaacatggcaaggtggagattatcgccaatgaccagggcaaccgcaccacgccgtcctacgtggctttcacagattcggaacgcctcatcggcgatccggccaagaaccaggtggccatgaaccccaggaacacggtgttcgacgccaagcggctcatcggccgtaaatacgacgaccccaagatcgcagaggatatgaagcactggcctttcaaagtggtaagcgacggcggcaagcccaagatcggggtggagtataagggcgagtccaagagattcgcccccgaggagatcagctcaatggtgctggccaagatgaaggagacggcggaggcgtatctgggcgagagcatcacagatgcagtcatcacagtcccagcctacttcaacgactcccagcgccaggctaccaaggacgccggtcacatcgccggcctgaatgtgctccgcatcatcaacgagcccacggcggcggcactggcctacggactggacaagaacctcaagggtgagcgcaatgtgctaatcttcgacttgggcggcggcaccttcgatgtctccatcctgaccatcgacgagggatcactgttcgaagtgcgctctaccgccggagacacccacttgggtggtgaggactttgacaaccgcctagtcacccacctagcggaggagttcaagcgcaagtacaagaaggatttgcgctcaaaccctcgcgccttacgacgcgtcagaacagcggctgaacgggccaaacgcacgctctcctccagcaccgaggccaccatagagatcgacgcattatttgagggccacgacttctatactaaagtaagccgcgctaggttcgaggagctgtgcgcggacctcttccgcaacaccctgcagcctgtggagaaggccctcaccgatgccaagatggacaagggtcagatccatgacatcgtactggtcggtggatcaacgcgcattcccaaggtgcagagtctgctgcagcagttcttccacggcaagaacctcaacctatccatcaacccagacgaggccgtggcatacggagccgctgtgcaggccgctatcctcagcggcgaccagagcggcaagatccaggatgtgctgttggtggacgtggccccactctcattgggaattgagaccgctggcggcgtgatgacgaagctgatcgagcgcaactgccgcattccgtgcaagcagaccaagacgttctccacgtactccgacaatcagcccggcgtctccatccaggtgtatgagggcgaacgtgcgatgacgaaggacaacaatgcactgggcaccttcgatctgtccggcattccacctgcaccaaggggtgtgccccaaatagaagttaccttcgacttggacgccaatggaatcctgaacgtcagcgccaaggagatgagcacgggcaaggccaagaacatcacgatcaagaacgacaagggacgcctctcgcaggccgagattgatcgcatggtgaacgaggctgaaaagtacgccgacgaggacgagaagcagcgccagcgcataacctctcgaaatgccctggaaagctacgtcttcaatgtgaagcagtccgtggagcaggcacccgctggcaaactggacgaggccgacaaggactcggtcctggacaagtgcaacgacactatccggtggctggacagcaacaccactgccgataaggaggagttcgaccacaagatggaggagctcacgcgccactgctcccccatcatgaccaagatgcatcagcaggcagcgggagcaggagcagctggtagtccgggagccaactgcggccaacaggccgggggatttggcggctactctggacccactgtcgaggaggtcgactaa

SEQ ID NO: 48669 - protein, 643 aa, Drosophila orena
MPAIGIDLGTTYSCVGVYQHGKVEIIANDQGNRTTPSYVAFTDSERLIGDPAKNQVAMNPRNTVFDAKRLIGRKYDDPKIAEDMKHWPFKVVSDGGKPKIGVEYKGESKRFAPEEISSMVLAKMKETAEAYLGESITDAVITVPAYFNDSQRQATKDAGHIAGLNVLRIINEPTAAALAYGLDKNLKGERNVLIFDLGGGTFDVSILTIDEGSLFEVRSTAGDTHLGGEDFDNRLVTHLAEEFKRKYKKDLRSNPRALRRVRTAAERAKRTLSSSTEATIEIDALFEGHDFYTKVSRARFEELCADLFRNTLQPVEKALTDAKMDKGQIHDIVLVGGSTRIPKVQSLLQQFFHGKNLNLSINPDEAVAYGAAVQAAILSGDQSGKIQDVLLVDVAPLSLGIETAGGVMTKLIERNCRIPCKQTKTFSTYSDNQPGVSIQVYEGERAMTKDNNALGTFDLSGIPPAPRGVPQIEVTFDLDANGILNVSAKEMSTGKAKNITIKNDKGRLSQAEIDRMVNEAEKYADEDEKQRQRITSRNALESYVFNVKQSVEQAPAGKLDEADKDSVLDKCNDTIRWLDSNTTADKEEFDHKMEELTRHCSPIMTKMHQQAAGAGAAGSPGANCGQQAGGFGGYSGPTVEEVD

SEQ ID NO: 48670 - DNA, 1929 bp, Drosophila orena
  CDS (1)..(1929)
atgcctgctattggaatcgatctgggcaccacctactcctgcgtgggtgtctaccaacatggcaaggtggagattatcgccaacgaccagggcaaccgcaccacgccgtcgtacgtggctttcacagattcggaacgcctcattggcgatccggccaagaaccaggtggccatgaacccgaggaacacggtgttcgacgccaagcggctcatcggccgtaaatacgacgaccccaagatcgcagaggatatgaagcactggcctttcaaagtggtaagcgacagcggtaagcccaagatcggggtggagtataaaggcgagaccaagagattcgcccccgaggagatcagctcaatggtgctggccaagatgaaggagacggcggaggcgtatctgggcgagagcatcacagatgcagtcatcacagttccagcctacttcaacgactcccagcgccaggctaccaaggacgccggtcacattgccggcctgaatgtgctccgcatcatcaacgagcccacggcggcggcactggcctacggactggacaagaacctcaagggtgagcgcaatgtgctaatcttcgacttgggcggcggcaccttcgatgtctccatcctgaccatcgacgagggatcactgttcgaagtgcgctccaccgccggagacacgcacttgggcggcgaggactttgacaaccgtctagtcacccacctggcggaggagttcaagcggaagtacaagaaggatctgcgctctaaccctcgcgccctacgacgcctcagaacagcggctgaacgggccaagcgcactctctcctccagcacggaggccaccatcgaaatcgacgcattgtttgagggccacgacttctacactaaagtgagccgcgccaggttcgaggagctatgcgcggacctcttccgcaacaccctgcagcctgtggagaaggccctcaccgatgccaggatggacaagggtcagatccatgacatcgtgctagtcggtggatcaacccgcattcccaaggtgcagagcctgctgcagcagttcttccacggcaagaacctcaacctatccatcaacccagacgaggcagtggcatacggagccgctgtacaggccgctatccttagcggagaccagagcggcaagatccaggacgtgctgttggtggacgtagccccactctcattgggaattgagaccgctggcggcgtgatgacgaagctgatcgagcgcaactgccgcattccgtgcaagcagaccaagacgttctccacgtactcggacaatcagcccggagtctccatccaggtgtatgagggcgaacgtgcgatgacgaaggacaacaatgcactgggcaccttcgatctgtccggcattccacctgcaccaaggggtgtgccccagatagaagtcaccttcgacatggacgccaatggaatcctgaacgtcagcgccaaggagatgagcacgagcaaggccaagaacatcacgatcaagaacgacaaaggacgcctctcgcaggccgagattgatcgcatggttaacgaggctgagaagtacgccgacgaggacgagaagcagcgccagcggattacctctcgaaatgccctggagagctacgtcttcaatgtgaagcagtccgtggagcaggcacccgctggcaaactggacgaggccgacaagaactccgtcctggacaagtgcaacgatactatccggtggctggacagcaacaccactgccgagaaagcggagttcgaccacaagctggaggagctcacccgccactgctcccccatcatgaccaagatgcatcagcagggagcgggagcgggagctgcaggtccgggagcaaactgcggccagcaggcaggaggatttggaggctactctggacccacggtcgaggaggtcgactaa

SEQ ID NO: 48671 - protein, 642 aa, Drosophila orena
MPAIGIDLGTTYSCVGVYQHGKVEIIANDQGNRTTPSYVAFTDSERLIGDPAKNQVAMNPRNTVFDAKRLIGRKYDDPKIAEDMKHWPFKVVSDSGKPKIGVEYKGETKRFAPEEISSMVLAKMKETAEAYLGESITDAVITVPAYFNDSQRQATKDAGHIAGLNVLRIINEPTAAALAYGLDKNLKGERNVLIFDLGGGTFDVSILTIDEGSLFEVRSTAGDTHLGGEDFDNRLVTHLAEEFKRKYKKDLRSNPRALRRLRTAAERAKRTLSSSTEATIEIDALFEGHDFYTKVSRARFEELCADLFRNTLQPVEKALTDARMDKGQIHDIVLVGGSTRIPKVQSLLQQFFHGKNLNLSINPDEAVAYGAAVQAAILSGDQSGKIQDVLLVDVAPLSLGIETAGGVMTKLIERNCRIPCKQTKTFSTYSDNQPGVSIQVYEGERAMTKDNNALGTFDLSGIPPAPRGVPQIEVTFDMDANGILNVSAKEMSTSKAKNITIKNDKGRLSQAEIDRMVNEAEKYADEDEKQRQRITSRNALESYVFNVKQSVEQAPAGKLDEADKNSVLDKCNDTIRWLDSNTTAEKAEFDHKLEELTRHCSPIMTKMHQQGAGAGAAGPGANCGQQAGGFGGYSGPTVEEVD

SEQ ID NO: 48672 - DNA, 1932 bp, Drosophila simulans
  CDS (1)..(1932)
atgcctgctattggaatcgatctgggcaccacctactcctgcgtgggtgtctaccaacatggcaaggtggagattatcgccaacgaccagggcaaccgcaccacgccgtcctacgtggctttcacagattcggaacgcctgatcggcgatccggccaagaaccaggtggccatgaaccccagaaacacagtgttcgacgccaaacgacttattggccgtaaatacgacgaccccaaaatcgcagaagacatgaagcactggcctttcaaggtggtaagcgactgcggaaagcccaagatcggcgtagagtataagggtgagtccaagcgatttgcccccgaggagatcagctcaatggtgctggccaagatgaaggagacggcggaggcgtatctgggcgagagcatcacggatgcagtcatcacagttccagcctacttcaacgactcccagcgccaggctaccaaagacgcaggtcacatcgccggcctgaatgtgctccgcatcatcaatgagcccacggcggcagcactggcctacggactggacaagaatctcaagggtgagcgcaatgtgcttatcttcgacttgggtggcggcaccttcgatgtctccatcctgaccatcgacgagggatcactgttcgaggtgcgctccacagccggagacacacacttgggcggcgaggactttgacaaccgactagtcacccacctggcggaggagtttaagcgcaagtacaagaaggatctgcgctccaaccctcgcgccctacgacgcctcagaacagcagctgaacgggccaagcgcacgctctcctccagcacggaggccaccatcgagatcgacgcattgtttgagggtcaggacttctacaccaaagtgagccgcgcaaggttcgaggagctgtgcgcagacctcttccgcaacaccctgcagcctgtggagaaggccctcaccgatgctaagatggacaagggtcagatccacgacatcgtgcttgtcggcggatccactcgcattcccaaggtgcaaagtctgctgcaggagttcttccacggcaagaacctcaacctatccatcaacccagacgaggcagtggcatacggagctgctgtgcgggccgctatcctcagcggagaccagagcggcaagatccaggacgtgctgctggtggacgtggcgccactttcattgggaattgagaccgctggaggtgtaatgaccaagctgatcgagcgcaactgccgcattccgtgcaagcagactaagacgttctccacgtactcggacaaccagcccggagtctccatccaggtgtatgagggagaacgtgcgatgacgaaggacaacaatgcattgggcaccttcgatctgtccggcattccacctgcaccaaggggtgtgccccagatagaagttaccttcgacttggacgccaatggaatcctgaacgtcggcgccaaggagatgagcacgggcaaggccaagaacaccacgatcaagaacgacaagggacgcctctcgcaggccgagattgatcgcatggtgaacgaggctgagaagtacgccgacgaggacgagaagcagcgccagcgcataacctctcgaaatgccctggagagctacgtcttcaatgtgaagcagtccgtggagcaggcacccgctggcaaattggacgaggccgacaagaactccgtcctggacaagtgcaacgacactatccgatggctggacagcaacaccaccgccgagaaggaggagttcgaccacaagatggaggagctcactcgccactgctcccccatcatgaccaagatgcatcagcagggagcgggagcgggagcagctggtggaccgggagccaactgcggccaacaggccggaggatttgccggctactctggacccacagtggaggaggtcgactaa

SEQ ID NO: 48673 - protein, 643 aa, Drosophila simulans
MPAIGIDLGTTYSCVGVYQHGKVEIIANDQGNRTTPSYVAFTDSERLIGDPAKNQVAMNPRNTVFDAKRLIGRKYDDPKIAEDMKHWPFKVVSDCGKPKIGVEYKGESKRFAPEEISSMVLAKMKETAEAYLGESITDAVITVPAYFNDSQRQATKDAGHIAGLNVLRIINEPTAAALAYGLDKNLKGERNVLIFDLGGGTFDVSILTIDEGSLFEVRSTAGDTHLGGEDFDNRLVTHLAEEFKRKYKKDLRSNPRALRRLRTAAERAKRTLSSSTEATIEIDALFEGQDFYTKVSRARFEELCADLFRNTLQPVEKALTDAKMDKGQIHDIVLVGGSTRIPKVQSLLQEFFHGKNLNLSINPDEAVAYGAAVRAAILSGDQSGKIQDVLLVDVAPLSLGIETAGGVMTKLIERNCRIPCKQTKTFSTYSDNQPGVSIQVYEGERAMTKDNNALGTFDLSGIPPAPRGVPQIEVTFDLDANGILNVGAKEMSTGKAKNTTIKNDKGRLSQAEIDRMVNEAEKYADEDEKQRQRITSRNALESYVFNVKQSVEQAPAGKLDEADKNSVLDKCNDTIRWLDSNTTAEKEEFDHKMEELTRHCSPIMTKMHQQGAGAGAAGGPGANCGQQAGGFAGYSGPTVEEVD

SEQ ID NO: 48674 - DNA, 1935 bp, Drosophila simulans
  CDS (1)..(1935)
atgcctgctattggaatcgatctgggcaccacctactcctgcgtgggtgtctaccaacatggcaaggtggagattatcgccaacgaccagggcaaccgcaccacgccgtcctacgtggctttcacagattcggaacgcctgatcggcgatccggccaagaaccaggtggccatgaaccccagaaacacagtgttcgacgccaagcgactcatcggccgaaaatacgacgaccccaagatcgcagaggacattaagcactggcctttcaaggtggtaagcgacggcggaaagcccaagatcggggtggagtataagggtgagtccaagagatttgcccccgaagaaatcagttcaatggtgctggtaaagatgaaggagacggcggaggcgtatctgggtgagagcatcacagatgcagtcatcacagttccagcctacttcaacgactcccagcgccaggctaccaaagacgctggtcacatcgccggcctgaatgtgctccgcatcatcaatgagcccacggcggcagcactggcctacggactggacaagaacctcaagggtgagcgcaatgtgcttatcttcgacttgggcggcggcaccttcgatgtctccatcctgaccatcgacgagggatcactgttcgaggtgcgctccacagccggagacacacacttgggcggcgaggactttgacaaccggctagttacccacctggcggaggagttcaagcgcaagtacaagaaggatctgcgctccaaccctcgcgccctacgacgcctcagaacagcagctgaacgggccatgcgtacactctcctccagcacggaggccaccatcgagatcgacgcattgtttgagggtcaggacttctacaccaaagtgagccgcgccaggtttgaggagctgtgcgcggacctcttccgcaacaccctgcagcctgtggagaaggccctcaacgatgctaagatggacaagggtcagatccacgacatcgtgctcgtcggcggatccactcgcattcccaaggtacaaagtctgctgcaggagttcttccacggcaagaacctcaacctatccatcaacccagacgaggcagtggcatacggagctgctgtgcaggccgctatcctcagcggagaccagaccggcaagatccaggatgtgctgctagtggacgtggccccactttcattgggaattgagaccgctggaggtgtaatgaccaagctgatcgagcgcaactgccgcattccgtgcaagcagactaaggcgttctccacatattcggacaaccagcccggagtctccatccaggtgtatgagggcgaacgtgcgatgacgaaggacaacaatgcattgggcaccttcgatctgtccggcattccgcctgcaccaaggggtatgccccagatagaagttaccttcgatttggacgccaatggaatcctgaacgtcagcgccaaggagatgagcacgggcaaggccaagaacatcacgatcaagaacgacaagggacgcctctcgcaggccgagattgatcgcatggtgaacgaggctgagaagtacgccgacgaggacgagaagcagcgccagcgcattacctctcggaatgccctggaaagctacgtcttcaatgtgaagcaggccgtggatcaggcacctgctggcaaactggacgaggccgacaagaactcagtcctggacaagtgcaacgacactatccggtggcttgacagcaacaccaccgccgagaaggaggagttcgaccacaagctggaggagctcacccgccactgctcccccatcatgaccaagatgcatcagcagggtgcgggagcgggagccggagctggtggtccgggagcaaactgcggccagcaggcgggaggatttggaggctactctggacccacggtcgaggaggtcgactaa

SEQ ID NO: 48675 - protein, 644 aa, Drosophila simulans
MPAIGIDLGTTYSCVGVYQHGKVEIIANDQGNRTTPSYVAFTDSERLIGDPAKNQVAMNPRNTVFDAKRLIGRKYDDPKIAEDIKHWPFKVVSDGGKPKIGVEYKGESKRFAPEEISSMVLVKMKETAEAYLGESITDAVITVPAYFNDSQRQATKDAGHIAGLNVLRIINEPTAAALAYGLDKNLKGERNVLIFDLGGGTFDVSILTIDEGSLFEVRSTAGDTHLGGEDFDNRLVTHLAEEFKRKYKKDLRSNPRALRRLRTAAERAMRTLSSSTEATIEIDALFEGQDFYTKVSRARFEELCADLFRNTLQPVEKALNDAKMDKGQIHDIVLVGGSTRIPKVQSLLQEFFHGKNLNLSINPDEAVAYGAAVQAAILSGDQTGKIQDVLLVDVAPLSLGIETAGGVMTKLIERNCRIPCKQTKAFSTYSDNQPGVSIQVYEGERAMTKDNNALGTFDLSGIPPAPRGMPQIEVTFDLDANGILNVSAKEMSTGKAKNITIKNDKGRLSQAEIDRMVNEAEKYADEDEKQRQRITSRNALESYVFNVKQAVDQAPAGKLDEADKNSVLDKCNDTIRWLDSNTTAEKEEFDHKLEELTRHCSPIMTKMHQQGAGAGAGAGGPGANCGQQAGGFGGYSGPTVEEVD

SEQ ID NO: 48676 - DNA, 2764 bp, Dunaliella salina
  CDS (90)..(2102)
gacttatttcatttcactacgatcgcgacgaattgacaagtagttcagtagcaacacacatacagcagtagcgagcgcagacactcaagatgttgaataccagcttcaagcagacgatgaagggcacacctgtggccagcaggcaggtcgcgggcaggaggatgcccatgtctaggcgtggagctgtggctgtgcgtgcagagaaggtggtgggcatcgacttgggaaccaccaactccgctgtggcagcgatggagggaggcaagccgaccatcatcaccaacgctgagggtagccgcaccaccccctccgtggtggccttcaccaagggcggtgaccgcctggttggacagatcgccaagcgccaagccgtggtgaacccagagaacaccttcttctccgtcaagcgtttcatcggtcgcaaggcaggcgaggttggcgaggagaccaagcaagtgccatacagggttgttgagggctccgatagaaatgtgaagatcttttccagccatgctggcaaggagtttgcccctgaggagatcagctcccaggtgctgcgcaagttgaccgccgatgcctccaagttcttgaacgacaaggttgagaaggccgtcattactgtgcctgcctacttcaacgacagccaacgtcaagccaccaaggacgccggtaagattgctggcctggatgtgctgcgcatcatcaacgagcccactgccgcctcccttgcttatggctttgacaagaaggccaatgagagcatcctggtgtttgatctgggtggtggtacctttgatgtgtctgtcctggaggtcggtgacggtgtgtttgaggtgctgagcaccagcggagacacccacctgggtggtgatgactttgacaagcgcattgtggactacatggctgatgagttcaacaagaatgagggcatcgacctgcgcaaggacagacaggcactgcagaggttgactgaggctgctgagaaggccaagtgcgagctcagcaacctgacccagacaagcatcaacttgcccttcatcaccgccacccctgagggccccaagcacattgacacccagctgtctcgtgtcaagttcgaggagctgtgctctgacctgctgtcccgcgccaagatccccgtggagaatgccctgcgtgatgccaagctgaccatggcagacatcaacgaggtcactctggtgggtggctccactcgtattccctccgtcatcaatgttgtgcgcaccatgtgcggcaaggagccctgcgcctctgtgaaccccgatgaggtggtggccctgggagcagctgtgcaggctggtgtgctgtctggcgaggtcagcgacattgtgctgctggatgtgacacccctgtccctgggcctggagaccctgggcggtgtggccaccaagctcatcacccgcaacaccaccctgcccacctccaagtctgaggtgttctccactgctgccgacggccagaccagcgtggagatcaacgtgctgcagggtgagcgtgagtttgcccgcgacaacaagtccctgggcaccttccgcctggacggcatcccccctgccccccgaggcatgccccagattgaggtgaagttcgacattgatgccaacggtatcctgtccgtgactgccaccgacaagggctccggcaagaagcaggacatcaagattactggtgcctccaccctgggcaaggatgatgtggagaggatggtggctgacgctgagcgctttgctggtgaggacaagaagaagcgtgaggctgtggataccaagaaccaggcagagagcatgatctaccagacggagaagcagctggatgagttcaaggagaaggtgcctgaggatgtcaagtcttccatccagaaccgcgtgaaggagctgcgcgagagcgctggagctgatgatgtggagggcatgaagaagggcatcgaggccctgcaacaagaggtcatgaaaatgggccaggccatgtatggtcagccaggcggtgacgcgggtgcagcaggtgcccagccaggctccggtgagccccccaaggatggtgatggcggtgtgattgacgccgagtacactgacaagaagtaagctgctggacagtagctccccttgcctggagtgcgcagttctagctcttcctttgcagcaaagcaccaagctgcttgtgctctgtctgcgaggagagtgggcctgccattccacttggggtggggtggggcgctgttatggtggtcctgtactcatgacgcccgctgtggtgattgtgtggtgctcaggggatgggctggcatgcatcagcatgttgctgtgcgctggtgcgcttttgagcacactgagctcccagaccctctctgtttggccacactggtgaactgccaacttttctatgactccagcatgcttagtatcctgtccacgcccagctgaaaggagggcatgtagcatgtctggggatgccggccatgctggaatgtgcatgcacggtgtttattggatggggccccatcgaaatatgggaggccacttggccagtctgacatgtatgtacttgtgcctccatgacggtggagaatgacttgaaactgttttatggtttttcggaaagccatgtatttgtggttatttagttcagcagcgtgtgcgtcagatgtagtgcactctggctgcccttgctgctgtccatttcatgcactccatgttatttgtggaatttgagctgcccttgtcggctcctgtaaataactggaatg

SEQ ID NO: 48677 - protein, 670 aa, Dunaliella salina
MLNTSFKQTMKGTPVASRQVAGRRMPMSRRGAVAVRAEKVVGIDLGTTNSAVAAMEGGKPTIITNAEGSRTTPSVVAFTKGGDRLVGQIAKRQAVVNPENTFFSVKRFIGRKAGEVGEETKQVPYRVVEGSDRNVKIFSSHAGKEFAPEEISSQVLRKLTADASKFLNDKVEKAVITVPAYFNDSQRQATKDAGKIAGLDVLRIINEPTAASLAYGFDKKANESILVFDLGGGTFDVSVLEVGDGVFEVLSTSGDTHLGGDDFDKRIVDYMADEFNKNEGIDLRKDRQALQRLTEAAEKAKCELSNLTQTSINLPFITATPEGPKHIDTQLSRVKFEELCSDLLSRAKIPVENALRDAKLTMADINEVTLVGGSTRIPSVINVVRTMCGKEPCASVNPDEVVALGAAVQAGVLSGEVSDIVLLDVTPLSLGLETLGGVATKLITRNTTLPTSKSEVFSTAADGQTSVEINVLQGEREFARDNKSLGTFRLDGIPPAPRGMPQIEVKFDIDANGILSVTATDKGSGKKQDIKITGASTLGKDDVERMVADAERFAGEDKKKREAVDTKNQAESMIYQTEKQLDEFKEKVPEDVKSSIQNRVKELRESAGADDVEGMKKGIEALQQEVMKMGQAMYGQPGGDAGAAGAQPGSGEPPKDGDGGVIDAEYTDKK

SEQ ID NO: 48678 - DNA, 2617 bp, Cucumis sativus
  CDS (365)..(2308)
cgcgagctcgtttagtgaaccgtcagatcctagaagctttattgcggtagtttatcacagttaaattgctaacgcagtcagtgcttctgacacaacagtctcgaacttaagctgcagaagttggtcgtgaggcactgggcaggtaagtatcaaggttacaagacaggtttaaggagaccaatagaaactgggcttgtcgagacagagaagactcttgcgtttctgataggcacctattggtcttactgacatccactttgcctttctctccacaggtgtccactcccagttcaattacagctcttaaggctagagtacttaatacgactcactataggctagcctcgagtccactacctccattatggccggcaagggagaaggtccggctatcggtatcgatctcggtaccacttactcttgtgtgggtgtttggcaacacgatcgtgttgagatcattgccaatgaccagggtaacaggactactccttcctatgttgccttcaccgatactgagcgtttgattggtgatgctgctaagaaccaggtcaccatgaacccgattaacaccgtctttgacgcaaagaggttgatcggtagaagattcagcgactcttcagtccaaagtgacatcaagttgtggccattcaaggtcatccctggaccaggtgacaagcccatgatcattgtcagctacaagggtggagagaagcagttcgctgctgaagaaatctcttccatggttcttattaagatgcgtgaaattgccgaagcttacctcggttccactgtgaagaacgccgttgtcactgttcctgcttacttcaacgactcccaacgtcaagccaccaaggatgctggtgtcattgctggtctcaacgtcatgaggattatcaatgaacccaccgctgctgccattgcctacggtcttgacaagaaagcaacaagtgtcggtgaaaagaatgtctcgatcttcgatcttggtggtggtacttttgatgtctctcttctcaccattgaagagggtatcttcgaggtgaaggccactgctggagacactcatcttggtggggaagattttgacaacagacttgtcaaccactttgttcaaaaatttaagaggaagcacaagaaggatatcagtggcaaccccagagctcttagaaggctgagaacttcttgtgagagagctaagagaactctctcatctactgctcagaccaccattgagatcgattctttgtacgaaggaattgacttttactccaccattactcgtgctagatttgaggaattgaacatggatcttttcagaaagtgtatggaacccgtcgagaagtgtttgagagatgccaagatggacaagagcactgtccatgatgttgttcttgttggtggttctactagaattcccaaggtccaacagttgttgcaagacttcttcaatggcaaggaactctgcaagagcattaaccccgatgaagccgttgcctacggtgctgctgtacaagctgccatcttgagcggtgaaggcaatgagaaggtgcaggatcttcttctattggatgtcacccctctttctcttggtttggaaaccgccggtggagtcatgactgttcttatcccaagaaacaccacaattcccacgaagaaggaacaagtcttctctacatactccgacaaccagcccggtgtgttgatccaagtatacgaaggtgaaaggacaagaacccgcgacaacaacttgcttggaaaattcgaactctccggaatccctccagctcccaggggtgttccacaaatcacagtgtgctttgatatcgatgccaacggtatcttgaacgtctctgccgaagacaagaccacaggtcaaaagaacaaaatcaccattactaacgacaagggaagactctccaaggaggagattgagaagatggtccaagaggcagagaagtacaagtctgaagatgaggagcacaagaaaaaggttgaagccaagaatgctttggagaactacgcttacaacatgaggaacactgtgaacgacgagaagattggtgctaagctttcacccgccgacaagaagaagatcgacgatgccatcgagcagtccatccaatggctggacgccaaccagctagctgaggctgacgagttcgaagacaagatgaaggagttggagagcatttgcaacccaatcattgccaagatgtaccaaggtgccggagctgatatgggtggcggtgcagacgacagtgttccttccggcggtagcggtgctggacccaagattgaggaagtcgactaagttcccaatttttacagtttcggtttttggaagaaccttttcttttattttttggaacaatcgatttttgatttcgtggcttaattagtgaaagccactgttttaccggcgtaattttttttttccctctctctctgttattgttaagttttttaagacatttttagtggtggaaattactttggccacaaaaagaaacaccctgcgtttgtaacattttttcgttatgaaattattatttttcacaaaaaaaaaaaaaaaaaaaaaaaaaaaaaaaaaaaaaaaaaaaaaaaaaaaaaaaaaaaaaaa

SEQ ID NO: 48679 - protein, 647 aa, Cucumis sativus
MAGKGEGPAIGIDLGTTYSCVGVWQHDRVEIIANDQGNRTTPSYVAFTDTERLIGDAAKNQVTMNPINTVFDAKRLIGRRFSDSSVQSDIKLWPFKVIPGPGDKPMIIVSYKGGEKQFAAEEISSMVLIKMREIAEAYLGSTVKNAVVTVPAYFNDSQRQATKDAGVIAGLNVMRIINEPTAAAIAYGLDKKATSVGEKNVSIFDLGGGTFDVSLLTIEEGIFEVKATAGDTHLGGEDFDNRLVNHFVQKFKRKHKKDISGNPRALRRLRTSCERAKRTLSSTAQTTIEIDSLYEGIDFYSTITRARFEELNMDLFRKCMEPVEKCLRDAKMDKSTVHDVVLVGGSTRIPKVQQLLQDFFNGKELCKSINPDEAVAYGAAVQAAILSGEGNEKVQDLLLLDVTPLSLGLETAGGVMTVLIPRNTTIPTKKEQVFSTYSDNQPGVLIQVYEGERTRTRDNNLLGKFELSGIPPAPRGVPQITVCFDIDANGILNVSAEDKTTGQKNKITITNDKGRLSKEEIEKMVQEAEKYKSEDEEHKKKVEAKNALENYAYNMRNTVNDEKIGAKLSPADKKKIDDAIEQSIQWLDANQLAEADEFEDKMKELESICNPIIAKMYQGAGADMGGGADDSVPSGGSGAGPKIEEVD

SEQ ID NO: 48680 - DNA, 2370 bp, Cucumis sativus
  CDS (194)..(2152)
tcccattagaactctctagaaccctattttttttctccttaaaagtttctatataaaccttccgcctctcttctttctccttataactttcaaatcttctaaccctaaattctgcacccaccaatcagtttctcttgctttcctttcttatcatcgtagattcttttttcaatcgacgatttgaacgttcactatggccggtaaaggagaaggtccggctatcggaatcgatcttggaactacatactcttgcgtcggtgtgtggcagcatgatcgagttgagatctttgccaacgaccagggtaacaggaccacgccgtcgtatgttgctttcaccgactctgagcgcttgatcggtgatgcagctaagaatcaggtcgccatgaacccgattaataccgtttttgatgccaagcgtttaattggccgaagatttagcgatgcatcggtccagagtgatatcaagctctggccgtttaaagttattgctggtcctagcgataagccaatgatcgttgtaaactacaagggtgaggagaagcagttctctgctgaagaaatctcttctatggtgctcataaagatgaaggaaattgctgaggcgtatctcggcacaacagtgaagaatgccgtcgtcactgtcccggcttacttcaacgattctcagagacaggccaccaaggatgctggtgtcatttccggcctaaatgtgatgcgtattatcaatgaaccaacagctgccgccattgcttatggtcttgacaagaagtcaagcagctctggcgaaaagaacgttctaattttcgatttgggtggtggtacatttgatgtttcattgcttacaatcgaagaaggtatttttgaggtgaagtcaactgccggagacactcatctgggtggtgaagattttgacaacagattggttaaccatttcgtgcaagaattcaagagaaaaaacaagaaagacattagtggaaaccccagagctctaagaagattgagaaccgcttgtgaaagggcgaagaggacactttcctccacagctcaaactacaattgagattgattctctttacgaaggaattgacttctattcaaccattactcgtgctagatttgaagaactcaatatggatcttttcaggaagtgtatggaaccagttgagaagtgtttgagagatgccaagatggataaaagcactgtacatgatgttgttcttgttggtggttctactaggattcctaaagtgcagcaattgttgcaagatttcttcgatggcaaagagctttgcaagagtatcaaccctgatgaagctgttgcctatggagctgctgttcaagctgccattttgagtggtgagggtaatgagaaggttcaagatcttctgctcttggatgttacccctctttcccttggtctcgaaacagccggtggtgtgatgactgtcttgattccaaggaataccaccatccccaccaagaaagaacaagttttctctacatattccgacaatcagcctggtgttttgatccaagtctatgaaggtgagagagcaagaacccgcgacaacaacttgcttggaaaattcgagctctctggaatccctccggctccaagaggtgttcctcagattacagtttgcttcgacatcgacgccaatggtattctcaacgtctctgccgaggataaaaccactggtcagaagaacaagatcacaatcacgaatgacaaggggcggttgtcgaaggaagagattgagaagatggtgcaagaagcagagaaatacaaggcggatgatgaggagcacaagaagaaggttgaagcgaagaactccttggaaaactatgcttataacatgaggaacactgtgagggatgagaagttcagctccaaattggatccggcagacaaaaagaagattgaggatgccattgaacaggcagtccagtggcttgacaacaaccaacttgctgaagctgatgagttcgaagataaaatgaaggagcttgagagtatttgcaaccccatcgttgctaagatgtatcaaggtgctggaggacctggcatgggcggcggtgctatggatgacgatgatgctcctcctccatccggcggcagtggcgcgggtcctaagattgaagaagttgattaaatttagtttcttttgattgtgatgggaggattgaggcgatgaaaattttctttatacaatggaatgatgtattttgggtttctttttgtcctttaaattttgtttttgttttttggccaccccctagttaatgaagggaaaagtttatcttattgtaaattcatcgccaatccgtttaaaagaagacgcttttgaatcgtaaaaaaaaaaaaaaaaaa

SEQ ID NO: 48681 - protein, 652 aa, Cucumis sativus
MAGKGEGPAIGIDLGTTYSCVGVWQHDRVEIFANDQGNRTTPSYVAFTDSERLIGDAAKNQVAMNPINTVFDAKRLIGRRFSDASVQSDIKLWPFKVIAGPSDKPMIVVNYKGEEKQFSAEEISSMVLIKMKEIAEAYLGTTVKNAVVTVPAYFNDSQRQATKDAGVISGLNVMRIINEPTAAAIAYGLDKKSSSSGEKNVLIFDLGGGTFDVSLLTIEEGIFEVKSTAGDTHLGGEDFDNRLVNHFVQEFKRKNKKDISGNPRALRRLRTACERAKRTLSSTAQTTIEIDSLYEGIDFYSTITRARFEELNMDLFRKCMEPVEKCLRDAKMDKSTVHDVVLVGGSTRIPKVQQLLQDFFDGKELCKSINPDEAVAYGAAVQAAILSGEGNEKVQDLLLLDVTPLSLGLETAGGVMTVLIPRNTTIPTKKEQVFSTYSDNQPGVLIQVYEGERARTRDNNLLGKFELSGIPPAPRGVPQITVCFDIDANGILNVSAEDKTTGQKNKITITNDKGRLSKEEIEKMVQEAEKYKADDEEHKKKVEAKNSLENYAYNMRNTVRDEKFSSKLDPADKKKIEDAIEQAVQWLDNNQLAEADEFEDKMKELESICNPIVAKMYQGAGGPGMGGGAMDDDDAPPPSGGSGAGPKIEEVD

SEQ ID NO: 48682 - DNA, 2157 bp, Arabidopsis thaliana
  CDS (1)..(2157)
atggcttcctccgccgcccaaattcacatcctcggcggaatcggattccctaattcgttttgttcctcctccaccaaaaacctcgacaacaaaaccaattccattccacgaagcgtctttttcggcaacagaacaagtcctttcagtactccaacctccgccttccttcgtatgggacgaagaaacaacaacgcttcccgatacaccgttggtccagtccgtgtggttaacgagaaagtcgtcggaatcgatttaggcacgacgaattcagctgttgctgctatggaaggaggtaaaccaacgattgtgactaacgctgaaggtcaaagaactacaccttctgttgtggcttatactaagagtaaagatagacttgttggtcagattgctaaacgtcaagctgttgttaatccggagaatactttcttctctgttaagaggtttattggtagaagaatgaatgaagttgctgaagagtctaagcaggtttcttatagagttattaaagatgagaatggtaatgttaagcttgattgtcctgctattggtaaacaatttgctgctgaggagatttctgctcaggttttgaggaagcttgtggatgatgcttcgagatttttgaatgataaagtaacgaaagctgtcatcactgtgcctgcttacttcaatgattcacaaaggacggctactaaagatgctggtcgtattgctggattggaagttcttaggattattaatgagcctactgctgcttctttggcttatgggtttgagaggaaaagcaatgaaactattcttgtttttgatcttggtggtggtacttttgatgtctcagtccttgaggttggtgacggtgtttttgaagtgctttcgacttctggtgatacacatttgggaggtgatgactttgacaagagagtcgttgattggcttgcttcaaccttcaagaaggatgaaggtatagatcttctcaaagacaagcaagcgcttcagaggttgacggaggcagctgaaaaagctaaaattgagctttcctcactgactcagacaaacatgagtttgccttttatcactgcaacggctgatgggcctaagcacattgaaaccactctcaccaggggcaagtttgaagaattgtgctctgacttactcgacagggtcaggacacctgtggagaattccctgagggatgcaaaattcagcttcaaagatattgatgaggtgatccttgttggtggatccacacgtatccctgctgttcaggatcttgtaaggaagctgacaggaaaagaacccaatgtctcagtcaatcctgatgaagttgtagctttaggtgctgcagttcaggccggtgttctatcaggagatgtgagtgacattgttcttcttgatgtgacgccgctatcgcttggtttggaaactcttggtggtgtcatgaccaagatcattccaagaaacaccacacttccaacttctaagtcagaagtcttctcaactgctgcagatggacagacaagcgttgagattaatgtgttacagggtgagagagagttcgtaagagataacaagtctattggtagcttccgtcttgatggtattccacctgcaccacgtggagttccacaaatcgaggtcaaattcgacattgatgccaatggaattctatctgtcagtgcttcggaccaaggtacaggaaagaagcaggacatcaccattactggtgctagtaccttaccaaaggatgaggtagacacaatggtgcaagaagcagagaggtttgcaaaggaagacaaagaaaagagagatgcgattgacacaaagaaccaggctgactccgtcgtttaccagacagagaagcagcttaaagaacttggagagaaaattccaggtccagtgaaagaaaaggttgaggctaagctccaagagctgaaggagaagatagcaagcggatcaactcaagaaatcaaagacaccatggcagctcttaaccaagaagtgatgcagattggccagtctctgtacaaccaaccccaaccaggtggtgctgattctcctcctggaggtgaagcttcctcgtcgtctgacacatcatcctcagccaaaggtggagacaacggcggtgatgtgattgacgctgacttcacagacagcaattaa

SEQ ID NO: 48683 - protein, 718 aa, Arabidopsis thaliana
MASSAAQIHILGGIGFPNSFCSSSTKNLDNKTNSIPRSVFFGNRTSPFSTPTSAFLRMGRRNNNASRYTVGPVRVVNEKVVGIDLGTTNSAVAAMEGGKPTIVTNAEGQRTTPSVVAYTKSKDRLVGQIAKRQAVVNPENTFFSVKRFIGRRMNEVAEESKQVSYRVIKDENGNVKLDCPAIGKQFAAEEISAQVLRKLVDDASRFLNDKVTKAVITVPAYFNDSQRTATKDAGRIAGLEVLRIINEPTAASLAYGFERKSNETILVFDLGGGTFDVSVLEVGDGVFEVLSTSGDTHLGGDDFDKRVVDWLASTFKKDEGIDLLKDKQALQRLTEAAEKAKIELSSLTQTNMSLPFITATADGPKHIETTLTRGKFEELCSDLLDRVRTPVENSLRDAKFSFKDIDEVILVGGSTRIPAVQDLVRKLTGKEPNVSVNPDEVVALGAAVQAGVLSGDVSDIVLLDVTPLSLGLETLGGVMTKIIPRNTTLPTSKSEVFSTAADGQTSVEINVLQGEREFVRDNKSIGSFRLDGIPPAPRGVPQIEVKFDIDANGILSVSASDQGTGKKQDITITGASTLPKDEVDTMVQEAERFAKEDKEKRDAIDTKNQADSVVYQTEKQLKELGEKIPGPVKEKVEAKLQELKEKIASGSTQEIKDTMAALNQEVMQIGQSLYNQPQPGGADSPPGGEASSSSDTSSSAKGGDNGGDVIDADFTDSN

SEQ ID NO: 48684 - DNA, 1905 bp, Crassostrea virginica
  CDS (1)..(1905)
atggcaagtaaaggtcccgcgataggcattgatctgggaacgacgttttcctgtgtgggtgtgtttcagcacgggaaagtcgagatcatcgccaacgaccaaggcaacaggacgacgcccagttatgttgctttcacagacactgagaggctgatcggggattcggccaaaaatcaggtagctatgaacgctactaacaccatctttgatgctaaaagactgatcggacgtaagtttaacgacgaaagtgtccaggcagacatgaagcattggccattcacggtggtcagtgacggaggaaaacccaaactggaggtagagttcaagaacgagaaaaagaggtttactcccgaagaaatcagttccatggtgctgaccaaaatgaaggagacggccgaagcttacctgggacagtctgtccgtgatgccgtcatcacagttcctgcctatttcaataatgcccagagagaggccaccaaagacgccggagtgatagccggcctcaatgtcctcaggatcgtcaacgagcccacggccgccgccctggcttacggtctggacaagaacatctccggtgacaaaaatgtgctgatcttcgatctggggggtggaacatttgacgtgtccattctgaccatagacgagggctccatatttgaggtccgctccactgcaggggacacacatctgggaggtgaggatttcgacaatagaatggtcaaccactttgtgcaggaattcaagcgcaagtacaacaaagacatttccaagaacaaccgctccctgagacgactcaggacggcgtgcgaacgcgccaagagaacgctttccagcagctcggaggccaatattgagattgactctctctttgagggaaccgacttttacagcaaaatcacacgagccagatttgaggagctgtgtgccgatttgttccgcgccactttggagccggtggaaaaggctctgagggacgccaaactagacaaatccaagatccacgaggtggttctggtgggagggtcgacgaggattcccaaagttcagaagatgctgcaggatttcatgggtggcaaagaactgaacaagtccatcaatcaagacgaggccgtggcctacggtgctgccgtccaggccgccattctaaagggagacaggagtgacgtcatcaaagacgttctcctggtggatgtcaccccactgtctctgggtatcgaaactgccggaggagtcatgaccaagatcattgaacgcaatgccaagattcccaccaaggcatcccagacgttcaccacctattccgacaaccagcctggagtgtccatccaggtgtttgagggggagagggctatgaccaaggacaacaacaaattgggcacctttgaactgaacggaattcccccggctccccgtggtgtcccgcaaatcgaagtggagttcgacatcgacgccaacggcatcctgaacgtttcggccaaagacaagagcacaggcaagtctaacaaaatcaccatcaccaacgacaaaggtcggctgaccaaagccgacatcgagagaatggtgaacgaggcagagaggtacaaggaggaggacgacaagcagcgtcagaggatagcggcccgtaatcagctggagtcttacgtcttcaccgtcaaacaggccacggaggagaatggggacaagcttcagggcgaggacagggagaccgtgtccagggtgtgcagtgaaacggtgtcctggctggacaacaacgccctggcagaggtggacgagtacgaattcaaattgaaggaggttcagaaagtgtgttccccaatcatggccaaactccatcagaatggttccagtggaaattcaggtcatgccagctctggtcagggtcccactgtggaagaaatggactaa

SEQ ID NO: 48685 - protein, 634 aa, Crassostrea virginica
MASKGPAIGIDLGTTFSCVGVFQHGKVEIIANDQGNRTTPSYVAFTDTERLIGDSAKNQVAMNATNTIFDAKRLIGRKFNDESVQADMKHWPFTVVSDGGKPKLEVEFKNEKKRFTPEEISSMVLTKMKETAEAYLGQSVRDAVITVPAYFNNAQREATKDAGVIAGLNVLRIVNEPTAAALAYGLDKNISGDKNVLIFDLGGGTFDVSILTIDEGSIFEVRSTAGDTHLGGEDFDNRMVNHFVQEFKRKYNKDISKNNRSLRRLRTACERAKRTLSSSSEANIEIDSLFEGTDFYSKITRARFEELCADLFRATLEPVEKALRDAKLDKSKIHEVVLVGGSTRIPKVQKMLQDFMGGKELNKSINQDEAVAYGAAVQAAILKGDRSDVIKDVLLVDVTPLSLGIETAGGVMTKIIERNAKIPTKASQTFTTYSDNQPGVSIQVFEGERAMTKDNNKLGTFELNGIPPAPRGVPQIEVEFDIDANGILNVSAKDKSTGKSNKITITNDKGRLTKADIERMVNEAERYKEEDDKQRQRIAARNQLESYVFTVKQATEENGDKLQGEDRETVSRVCSETVSWLDNNALAEVDEYEFKLKEVQKVCSPIMAKLHQNGSSGNSGHASSGQGPTVEEMD

SEQ ID NO: 48686 - DNA, 2311 bp, Triticum aestivum
  CDS (115)..(2061)
tcgaaatcagagaggggcaaagcaaatcgcaccaggcaaactcagagggtcttccggcgaaccccaaagcgagagagcgagcgagcgattcccaggagaggagaggaggcggagatggccaagggcgaggggccggcgatcggcatcgacctcgggacgacctactcgtgcgtcggcgtctggcagcatgaccgggtcgagatcatcgccaacgaccagggcaaccgcaccacgccctcctacgtcgccttcaccgacaccgagcgcctcatcggcgacgccgccaagaaccaggtcgccatgaaccccaccaacaccgtcttcgatgcgaagcggctgattggcaggaggttctctgacccctccgtgcagagtgacatgaagctgtggcccttcaaggtcatccctggccctgcagacaagcccatgatcgtcgtcaactacaagggtgaggagaagcagttcgcagcggaggagatctcctccatggtgcttatcaagatgagggagatcgctgaggccttcctcggcaactctgtcaagaacgccgtggtcaccgttccggcctacttcaacgactcccagcgccaggccactaaggacgccggcgccatcgccgggctgaacgtgctgcgcatcatcaacgagcccactgctgctgccatcgcctacggccttgacaagaaggcgaccagcaccggtgagaagaacgtcctcatcttcgaccttggcggtggcactttcgatgtgtcgctgctgaccatcgaggagggcatcttcgaggtgaaggccaccgccggtgacactcacctgggtggggaggacttcgacaaccgcatggtgaaccacttcgtccaggagttcaagcgcaagcacaagaaggacatcaccggcaacccccgcgctcttcgtcgtctccgcacggcgtgcgagcgtgccaagcgcacgctgtcgtcgacggcccaaaccaccatcgagatcgactcgctgtacgagggtgtggacttctacactaccatcacacgggctcgctttgaggagctcaacatggacctcttccgcaagtgcatggagccggtggagaagtgcctccgcgacgccaagatggacaagagcacggtgcacgacgtggtgctggtcggtggctccacccgtatccccaaggtgcagcagttgctccaggacttcttcaacggcaaggagctgtgcaagagcatcaaccccgacgaggcagtggcgtatggcgcctccgtccaggctgccatcctgagcggagagggcaacgagaaggtgcaggacctgctgctgctcgacgtgacgcctctctccctgggtctggagaccgccggcggcgtcatgacgacgctcatcccgaggaacaccaccatccccaccaagaaggagcaggtcttctccacctactcggacaaccagccgggcgtcctgatccaggtgtacgagggcgagcgcgccaggaccaaggacaacaacctcctgggcaagttcgagctctccggcatcccgccggcgccccgcggtgtgccccagatcacggtgtgcttcgacatcgacgccaacggcatcctgaacgtgtctgcggaggacaagacgacggggcagaagaacaagatcaccatcaccaacgacaaggggcggctgagcaaggaggagattgagaagatggtgcaggaggcggagaggtacaaggcggaggacgaggagcacaagaagaaggtggacgccaagaacgcgctggagaactacgcctacaacatgcgcaacacggtcaaggacgacaagatcgcctccaagctcggcgcggacgacaagaagaaggtggaggaggcgatcgagggcaccatcagctggctggacgccaaccagctcgccgaggccgacgagttcgaggacaagatgaaggagctggagggcatctgcaaccccatcatcgccaagatgtaccagggcgccgcgccggacatgggcggcggcatgggcatggacgaggacatgccggccggcggcggcggcgctggccccaagatcgaggaggtggactaatttgttggtccgtgcccgtggtggtctccggtctgcgcgctacttgatgggttcgctgtctcggtgtccgtcctttggatgccgctcggtggtgtcagtcgtctgtcgttgtgtcatctagctggaagtagtagtagtcgttcgatggagtcgttggtctgaaggacatgatggatcatgatgtttgctttggtttggaacccttgaagcttagagcttctcgtttttaagtttgaatttggtgcttccc

SEQ ID NO: 48687 - protein, 648 aa, Triticum aestivum
MAKGEGPAIGIDLGTTYSCVGVWQHDRVEIIANDQGNRTTPSYVAFTDTERLIGDAAKNQVAMNPTNTVFDAKRLIGRRFSDPSVQSDMKLWPFKVIPGPADKPMIVVNYKGEEKQFAAEEISSMVLIKMREIAEAFLGNSVKNAVVTVPAYFNDSQRQATKDAGAIAGLNVLRIINEPTAAAIAYGLDKKATSTGEKNVLIFDLGGGTFDVSLLTIEEGIFEVKATAGDTHLGGEDFDNRMVNHFVQEFKRKHKKDITGNPRALRRLRTACERAKRTLSSTAQTTIEIDSLYEGVDFYTTITRARFEELNMDLFRKCMEPVEKCLRDAKMDKSTVHDVVLVGGSTRIPKVQQLLQDFFNGKELCKSINPDEAVAYGASVQAAILSGEGNEKVQDLLLLDVTPLSLGLETAGGVMTTLIPRNTTIPTKKEQVFSTYSDNQPGVLIQVYEGERARTKDNNLLGKFELSGIPPAPRGVPQITVCFDIDANGILNVSAEDKTTGQKNKITITNDKGRLSKEEIEKMVQEAERYKAEDEEHKKKVDAKNALENYAYNMRNTVKDDKIASKLGADDKKKVEEAIEGTISWLDANQLAEADEFEDKMKELEGICNPIIAKMYQGAAPDMGGGMGMDEDMPAGGGGAGPKIEEVD

SEQ ID NO: 48688 - DNA, 2001 bp, Arabidopsis thaliana
  CDS (1)..(2001)
atggcttccgtatctgcgtttaaatccgtttccgcaaatggaaagaattctatgtttgggaaattaggttacttggcgagacctttctgctcgaggcctgtggggaatgatgttattggtattgatttgggtactaccaattcttgtgtatctgtgatggagggaaagaccgctagggttattgagaatgcggaaggaagtcgaaccacaccatcggttgttgctatgaaccaaaaaggggaactccttgttggaacaccggctaaacgtcaggccgtgaccaatccaacaaacacgattttcggttctaaacgtttgattgggagacgttttgatgatccacagactcagaaggagatgaaaatggttccttacaagattgttaaggcacctaacggtgatgcttgggtcgaagccaatggacaaaagttttctcccagtcagattggagctaatgtcctcactaaaatgaaggaaacagctgaagcttacctcgggaaatctatcaacaaagctgttgttaccgttccagcttatttcaatgatgcacagagacaagccactaaggatgctgggaaaatcgctggtcttgatgtccagaggatcatcaacgaacctacagctgctgcactatcatatggtatgaacaacaaggaaggtgtcattgcagtgtttgatcttggaggtggaacctttgatgtttctatcttggaaatctcaagtggtgtttttgaggttaaagcaacaaatggagatacctttttgggaggagaagactttgacaacaccttgttggagtacttggttaatgagttcaaaagatcagataatattgatctgactaaagacaaccttgccctccagaggctgagagaagctgcagagaaggccaagattgagctctcatcgacaactcagaccgaaatcaacctgcctttcattacagcggatgcttcaggagctaagcacttgaacatcaccttaactaggtcaaagtttgaaggtttggtgggcaagttgattgagagaacaagatccccgtgccaaaactgcctgaaggatgctggagtcacaattaaggaagttgatgaggttcttcttgttggtggaatgacccgtgttcccaaagtgcaagagatagtttctgagatctttgggaagagtccttgtaaaggtgttaacccggatgaagcggttgccatgggagcagccattcaaggtggtatcctccgtggtgatgtgaaggatttgcttcttttggacgtggttcctctctcattgggtattgaaacattgggtgcagtcttcaccaagttgattccacgaaacaccactattcccacaaagaagtctcaggttttctccacagctgctgacaaccagatgcaagtgggaatcaaagttcttcagggagaacgtgaaatggcggctgacaacaaagtgcttggagaattcgaccttgttggcatcccaccggcacctagaggaatgccacagatcgaagttacattcgacattgatgcaaatggtattactactgtctcagcgaaagacaaagcaacaggtaaagagcagaatatcacaatcagatcttcaggtggtctctcagacgatgagattaacagaatggtgaaagaagctgagcttaacgcacagaaggatcaagagaagaagcaacttatcgaccttaggaacagtgctgatacaacaatttacagtgtagagaagagcttgagtgaatacagagagaagattccagctgagattgcctctgagatcgaaactgcagtgtctgatctcaggactgctatggctggtgaggatgtcgaggacatcaaggctaaggtcgaagctgcaaacaaggcagtgtcgaagatcggagaacacatgtctaagggatctggatcatctggttccgatggaagctctggtgagggtacaagtgggactgagcagacgcctgaagctgaattcgaggaggccagtggttcaaggaagtga

SEQ ID NO: 48689 - protein, 666 aa, Arabidopsis thaliana
MASVSAFKSVSANGKNSMFGKLGYLARPFCSRPVGNDVIGIDLGTTNSCVSVMEGKTARVIENAEGSRTTPSVVAMNQKGELLVGTPAKRQAVTNPTNTIFGSKRLIGRRFDDPQTQKEMKMVPYKIVKAPNGDAWVEANGQKFSPSQIGANVLTKMKETAEAYLGKSINKAVVTVPAYFNDAQRQATKDAGKIAGLDVQRIINEPTAAALSYGMNNKEGVIAVFDLGGGTFDVSILEISSGVFEVKATNGDTFLGGEDFDNTLLEYLVNEFKRSDNIDLTKDNLALQRLREAAEKAKIELSSTTQTEINLPFITADASGAKHLNITLTRSKFEGLVGKLIERTRSPCQNCLKDAGVTIKEVDEVLLVGGMTRVPKVQEIVSEIFGKSPCKGVNPDEAVAMGAAIQGGILRGDVKDLLLLDVVPLSLGIETLGAVFTKLIPRNTTIPTKKSQVFSTAADNQMQVGIKVLQGEREMAADNKVLGEFDLVGIPPAPRGMPQIEVTFDIDANGITTVSAKDKATGKEQNITIRSSGGLSDDEINRMVKEAELNAQKDQEKKQLIDLRNSADTTIYSVEKSLSEYREKIPAEIASEIETAVSDLRTAMAGEDVEDIKAKVEAANKAVSKIGEHMSKGSGSSGSDGSSGEGTSGTEQTPEAEFEEASGSRK

SEQ ID NO: 48690 - DNA, 2022 bp, Rhizopus stolonifer
  CDS (6)..(1961)
taaaaatgtctgaaggaaaatctgttggtattgatttgggtacaacctactcttgtgttggtgtctggcaaaacgatcgtgttgaaattatcgccaacgatcaaggtaaccgtaccactccctcttatgttggtttcaccgatagcgaacgtttgattggtgatgctgccaagaaccaagtcgccatgaacccttacaacaccgtttttgatgctaagcgtttgatcggtcgtcgtttcaacgatgctgaagtccaagctgatatgaagcactggtctttcaaggttgtcgaaaaggaatccaaacccatcatccaagttgaatacaagggtgaaaccaagactttcacccctgaagaaatctctgccatgatccttgtcaagatgaaggaaaccgctgaagcctacctcggttccgccgttaagaacgctgttatcactgttcccgcttatttcaacgacagtcaacgtcaagctaccaaggatgctggtttaatttccggtttgaacgtccaacgtattatcaacgaacctactgccgctgctattgcctatggtttggacaagaaggttgaaggtgaacgtaacgtcttgattttcgatttgggtggaggaactttcgatgtttcccttttgaccattgaagatggtatctttgaagtcaaggccactgctggtgacactcacttgggtggtgaagatttcgataaccgtcttgtcgctcactttatgcaagaattcaagcgcaagttcaagaaggacattactggtaacgctcgtgccatccgtcgtctccgtaccgcttgtgaacgtgcaaagcgtaccttgtcttctgccgctcaaaccaccatcgaaattgattctctctttgaaggtgttgatttctacacttccttgactcgtgcccgtttcgaagaattgaaccaagatcttttccgtaacaccatggaacccgttgaaaaggttctccgtgactccaagattgacaagtctcaagtccacgatatcgttctcgtcggtggttccactcgtatccccaaggtccaaaagttggtctctgacttcttcaacggtaaggaacccaacaagtccatcaaccccgatgaagccgttgcttacggtgccgctgtccaagccgccatcttgtctggtgatacctccgaaaagactcaagatctcttgttgttggatgttgctcccctttctctcggtattgaaaccgctggtggtgtcatgactgctcttatcaagcgtaacactactgtgcccaccaagaagtccgaagtcttctccacctacgctgacaaccaacccggtgtcctcatccaagtgtttgaaggtgaacgtgctcgtacaaaggataacaacattcttggtaaattcgaattgtccggtatcccccctgctcctcgtggtgtacctcaagttgaagttacttttgatgtggatgccaacggtatcttgaacgtctctgctcttgacaagaccactggtaaatccaacaagatcactatcaccaacgacaagggccgtctttccaaggaagacattgaacgtatggtgaacgatgccgaaaagtacaaggctgaagacgaagcagctgcttctcgtatccaagccaagaatggtctcgaatcctacgcctacaacctccgtaacacacttcaagatgaaaggtcggtaggtgctctccctgaagaagacaagaccaagttgaacgctgctgtagatgaatctatcaagtggctcgatgagtctcaagaggcctccaaggaagaatacgaatccaagcaaaaggaattggaagaaattgccaaccctatcatgatgaagttctatcaacaagctggtggtgctcctggtggtgctcctggtgccgctcccggtggtttccccggtgctggtgccgctcctggtagcactgacgaaactgatggtccttccattgaagaagttgattaaatcatttaaatatccccccccccttcacatcattgtatcatagcgaaaaaaaaaaaaaaaa

SEQ ID NO: 48691 - protein, 651 aa, Rhizopus stolonifer
MSEGKSVGIDLGTTYSCVGVWQNDRVEIIANDQGNRTTPSYVGFTDSERLIGDAAKNQVAMNPYNTVFDAKRLIGRRFNDAEVQADMKHWSFKVVEKESKPIIQVEYKGETKTFTPEEISAMILVKMKETAEAYLGSAVKNAVITVPAYFNDSQRQATKDAGLISGLNVQRIINEPTAAAIAYGLDKKVEGERNVLIFDLGGGTFDVSLLTIEDGIFEVKATAGDTHLGGEDFDNRLVAHFMQEFKRKFKKDITGNARAIRRLRTACERAKRTLSSAAQTTIEIDSLFEGVDFYTSLTRARFEELNQDLFRNTMEPVEKVLRDSKIDKSQVHDIVLVGGSTRIPKVQKLVSDFFNGKEPNKSINPDEAVAYGAAVQAAILSGDTSEKTQDLLLLDVAPLSLGIETAGGVMTALIKRNTTVPTKKSEVFSTYADNQPGVLIQVFEGERARTKDNNILGKFELSGIPPAPRGVPQVEVTFDVDANGILNVSALDKTTGKSNKITITNDKGRLSKEDIERMVNDAEKYKAEDEAAASRIQAKNGLESYAYNLRNTLQDERSVGALPEEDKTKLNAAVDESIKWLDESQEASKEEYESKQKELEEIANPIMMKFYQQAGGAPGGAPGAAPGGFPGAGAAPGSTDETDGPSIEEVD

SEQ ID NO: 48692 - DNA, 2019 bp, Aspergillus oryzae
  CDS (1)..(2019)
atggcgcgactatcgagtcgcaacggtgcggccaagccgttcactgcttggactaccatcttctaccttctccttgttttcatcgcgcccctggcattcttcggtaccgcacacgctgaggaggactctgtccaagacaactatggaactgtaattggtattgatttgggaacaacctactcttgtgttggtgtgatgcagaatggaaaggtcgagattctcgtcaacgaccaaggaaaccgtatcactccttcctacgtcgctttcaccgatgaggaacgcctggtcggtgacgccgctaagaaccaatacgccgccaaccccgtcaggaccatctttgacatcaagcgtctgattggtcgcaagtacgatgacaaggatgtcaccaaggacaccaagaacttccccttcaaggttgtcaacaaggatggcaagcctgtcgtgaaggttgacgtgaacaagacccccaagaccttcactcctgaggaggtttccgccatggtcctcggaaagatgaaggagatcgctgagggctacctcggaaagtctgtcacccacgccgtcgtcaccgtccccgcctacttcaacgacgcccagagacaggctaccaaggacgctggtaccatcgccggtctgaacgttctccgtgttgtcaacgaacctaccgccgccgctatcgcctacggattggacaagactggtgatgagcgccaggtcatcgtctacgatcttggtggtggtactttcgatgtctcccttctctccattgacaacggtgtcttcgaggttttggctaccgctggtgacactcaccttggtggtgaggactttgaccaccgtgtcatggactacttcgtcaagcagtacaacaagaagaacaacgttgacatcaccaaggacctcaagtccatgggtaagctcaagcgcgaagtcgagaaggccaagcgtactctctcttcccagatgtctactcgcattgaaatcgagtctttccacaacggcgaggacttctctgagaccctcacccgtgctaagttcgaagagctgaacatggatctgttcaagaagaccctcaagcccgttgagcaggtgctcaaggacgccaaggttaagaagtccgaggttgacgacattgtccttgttggtggatctacccgtattcccaaggtccaggctcttctcgaggagttcttcggtggcaagaaggccagcaagggtattaaccctgatgaggctgttgctttcggtgctgccgtccagggtggtgtcctttccggtgaggccggtaccgaggatgtcgttctgatggacgtcaaccctcttaccctcggtatcgagaccactggcggtgtcatgactaagctcatcccccgtaacaccgttatccctactcgcaagtcccagatcttctccaccgccgctgataatcagcctaccgttcttatccaagtttatgagggcgagcgttccttgaccaaggataacaacctcctcggcaagttcgagcttaccagcattccccccgctccccgtggtgttccccagattgaggtctccttcgatttggacgccaacggtatcctgaaggtcagcgccagcgacaagggcactggcaaggctgagtccatcaccatcaccaacgacaagggtcgtctctcccaggaggagatcgaccgcatggtcgctgaggccgaagagttcgctgaggaggacaaggccatcaagagcaagatcgaggcccgcaactctctggagaattatgccttcagcttgaagaaccaggtcaacgatgagaacggcttgggtggccagattgatgaggacgacaagcagaccatcctggacgccgtcaaggaggtcactgactggctcgaggacaacgctgccgaagccaccaccgaggacttcgaggagcagaaggagcagctgtccaacgtggcctaccccatcaccagcaagctctatggctctgctccggctgatgaggatgacgagccctctgggcatgacgaactgtaa

SEQ ID NO: 48693 - protein, 672 aa, Aspergillus oryzae
MARLSSRNGAAKPFTAWTTIFYLLLVFIAPLAFFGTAHAEEDSVQDNYGTVIGIDLGTTYSCVGVMQNGKVEILVNDQGNRITPSYVAFTDEERLVGDAAKNQYAANPVRTIFDIKRLIGRKYDDKDVTKDTKNFPFKVVNKDGKPVVKVDVNKTPKTFTPEEVSAMVLGKMKEIAEGYLGKSVTHAVVTVPAYFNDAQRQATKDAGTIAGLNVLRVVNEPTAAAIAYGLDKTGDERQVIVYDLGGGTFDVSLLSIDNGVFEVLATAGDTHLGGEDFDHRVMDYFVKQYNKKNNVDITKDLKSMGKLKREVEKAKRTLSSQMSTRIEIESFHNGEDFSETLTRAKFEELNMDLFKKTLKPVEQVLKDAKVKKSEVDDIVLVGGSTRIPKVQALLEEFFGGKKASKGINPDEAVAFGAAVQGGVLSGEAGTEDVVLMDVNPLTLGIETTGGVMTKLIPRNTVIPTRKSQIFSTAADNQPTVLIQVYEGERSLTKDNNLLGKFELTSIPPAPRGVPQIEVSFDLDANGILKVSASDKGTGKAESITITNDKGRLSQEEIDRMVAEAEEFAEEDKAIKSKIEARNSLENYAFSLKNQVNDENGLGGQIDEDDKQTILDAVKEVTDWLEDNAAEATTEDFEEQKEQLSNVAYPITSKLYGSAPADEDDEPSGHDEL

SEQ ID NO: 48694 - DNA, 1980 bp, Crassostrea gigas
  CDS (1)..(1980)
atgagcaagccagcacagcaagccattggaatagatcttggtaccacatattcctgtgttggagtattccagcatgggaaggtggaaatcatcgccaacgatcagggtaaccgaaccacccccagttatgtagcgttcacagacacagaaagactggtcggcgacgcagccaaaaaccaagtcgccatgaaccccaacaacacaatttttgatgccaagcgtctgatcggcagaaaattcaacgatgcttcagtacaatccgacatgaaacattggccattcacagtgatcaatcaagcaagtaaacccatgatcaaagtcgagtacaaaggggaagaaaagaccttctctgctgaggaagtctcatccatggtcctcaataaaatgaaggaaactgcagaagcatatcttggcaagacaattaacaatgccgtcgtcacagtcccagcttatttcaatgattcccagcgacaggctaccaaggacgctggtactatctcaggattaaatgtactacgtatcatcaacgagccaacagcagccgccattgcttacggtcttgacaagaaagttggcaaccaatcgcaaggtgagcgcaacgttctgatctttgacttgggaggaggaacctttgatgtctcaattctgaccattgaggacggaatctttgaggtgaaatccacatctggagacactcacttgggtggtgaagactttgacaatagaatggtgaaccactttattcaggaattcaagcgcaaacacaagaaggacatttctgaaaacaagcgagctgtccgacgtttgaggacagcctgtgaaagggcaaagaggaccctgtcctcaagctctcaggccagcattgagattgactctctgttcgagggtatcgatttctacacaagtatcaccagggctaggtttgaggagctgaatgccgatttgttccgaggcaccatggaacccgtggagaaggctctgagagatgccaagctggacaaggcccagatccacgacatcgtcctggtcggaggatccacacgtatcccaaagattcagaaactacttcaggacttcttcaacggcaaggaactgaacaaatccatcaaccctgacgaggctgttgcttatggagcagctgtccaggccgccattctgtccggagacaaatccgaggaggtacaggacttgctcctgttggacgtcacccccctgtccttgggtattgaaacagccggaggggtgatgaccaatctcatcaagagaaacaccaccattccaaccaaacagacgcagaccttcaccacatactccgacaaccaaccaggtgtgttgattcaggtgtatgagggagagcgagccatgaccaaggacaacaacctactcggaaagttcgagctgactggaattccccccgcacccaggggtgtgccccagattgaggtcacatttgacattgatgccaacggtatcctgaatgtgtcagctgtcgacaagagcacaggaaaggagaacaaaatcaccattaccaatgacaaaggtcgcctcagcaaggatgaaattgaccgtatggtcaacgaagctgagaaatacaagcaggaagacgagaagcagcgtgagaggatcgcagccaagaacgggttggaaagctacgccttcaacatgaaatccaccgtcgatgacgagaaactcaaggacaagatcagcgagggcgataagaagacaatccttgacaagtgtgaggagatcatcaagtggatggaccagaaccaactggccgacaaggaggagttcgagcacaaacagaaggaactggagggagtctgtaaccccatcatcaccaagctgtaccaggccagcggtggcgccccagggggtggcatgcctggaggaatgcccaactttggtggtggagctccaggaggtggtgcccccggcggtggtagcggtggtggacccaccattgaggaggtcgactaa

SEQ ID NO: 48695 - protein, 659 aa, Crassostrea gigas
MSKPAQQAIGIDLGTTYSCVGVFQHGKVEIIANDQGNRTTPSYVAFTDTERLVGDAAKNQVAMNPNNTIFDAKRLIGRKFNDASVQSDMKHWPFTVINQASKPMIKVEYKGEEKTFSAEEVSSMVLNKMKETAEAYLGKTINNAVVTVPAYFNDSQRQATKDAGTISGLNVLRIINEPTAAAIAYGLDKKVGNQSQGERNVLIFDLGGGTFDVSILTIEDGIFEVKSTSGDTHLGGEDFDNRMVNHFIQEFKRKHKKDISENKRAVRRLRTACERAKRTLSSSSQASIEIDSLFEGIDFYTSITRARFEELNADLFRGTMEPVEKALRDAKLDKAQIHDIVLVGGSTRIPKIQKLLQDFFNGKELNKSINPDEAVAYGAAVQAAILSGDKSEEVQDLLLLDVTPLSLGIETAGGVMTNLIKRNTTIPTKQTQTFTTYSDNQPGVLIQVYEGERAMTKDNNLLGKFELTGIPPAPRGVPQIEVTFDIDANGILNVSAVDKSTGKENKITITNDKGRLSKDEIDRMVNEAEKYKQEDEKQRERIAAKNGLESYAFNMKSTVDDEKLKDKISEGDKKTILDKCEEIIKWMDQNQLADKEEFEHKQKELEGVCNPIITKLYQASGGAPGGGMPGGMPNFGGGAPGGGAPGGGSGGGPTIEEVD

SEQ ID NO: 48696 - DNA, 2171 bp, Arabidopsis thaliana
  CDS (85)..(2037)
ccaacactcacaaattctcttaaagctcacagacgaattctttctatttttaatctttccggcgaacaattctgatctctaataatggcgggtaaaggtgaaggtccagctatcggtatcgatctcggtacaacctactcttgcgtcggtgtttggcaacatgaccgcgtcgaaatcatcgccaacgatcaaggcaaccgcaccactccttcctacgttgctttcactgacagcgagcgtctcatcggggatgctgccaagaatcaagtcgccatgaaccctaccaacaccgtcttcgatgctaagcgtctaatcggaagaagatacagtgatccctctgttcaagcggataagagtcactggccttttaaggttgtttccggtccaggtgagaagcctatgattgtggttaaccacaagggagaggagaaacagttttctgctgaggaaatctcgtcgattgttcttattaagatgcgggagattgcagaagctttccttggttctcctgttaagaacgctgtcgttatagttcctgcttatttcaacgactctcagcgtcaaggcactaaggacgctggagttatctctggtctcaacgtgatgcgtatcatcaatgagccaactgctgctgctattgcttacggtcttgacaagaaggcgtcgagtgttggcgagaagaatgttttgatctttgatttgggaggtggtacttttgatgtgtctttgcttacgattgaggaaggtatctttgaagtcaaggcaactgctggtgacacacatcttggtggtgaggacttcgacaacaggatggttaatcattttgttcaggagtttaagaggaagaacaagaaggatattactgggaacccgagagctttgaggaggcttaggacagcttgtgagcgggcgaagagaactctttcttcgactgctcagacgactatagagattgactctctttttgagggtattgatttctacactaccatcactcgtgctaggttcgaggagctcaacatggatttgtttaggaagtgtatggagccagtggagaagtgtttgagggatgctaagatggacaagagcagtgttcatgatgttgttgttgttggtggctctacaaggattcccaaagtgcagcagcttgtgcaagacttcttcaatgggaaagagctctgtaaaagcattaacccggacgaggctgttgcttacggagcagctgtgcaagctgcaatcttgagcggtgaagggaatgagaaggtccaggacttgttacttcttgatgtcactcctctgtccttgggtttggaaactgccggtggtgttatgactgttttgattccgaggaacaccacaattccgaccaagaaagagcagatattctctacctattcagacaaccagcccggtgtactgatccaggtctacgaaggagagagggcacgaacaaaggacaacaaccttttgggaaagttcgagctcagtggtataccacctgctccacgaggtgtaccgcagattactgtctgtttcgacatcgacgccaatggtatcctgaatgtgtcggctgaggacaagacgactggtcagaagaacaagatcacaatcacaaacgacaagggaaggttatcaaaggaagagatcgagaagatggtacaagaggcagagaagtacaaggctgaggatgaagaacacaagaagaaggtggatgcaaagaacgctctcgagaactatgcatacaacatgaggaacacgatcaaggacgagaagatcgcatctaagcttgacgcagctgacaagaagaagattgaggatgcaatcgaccaagctattgaatggttagatgggaatcaactggctgaggcagatgagttcgaggataagatgaaggagctcgagtctctttgcaaccctattattgcaagaatgtaccaaggagctgggcctgatatgggtggtgcaggaggaatggatgacgacacacctgctggtggtagcggcggtgctggcccaaagattgaagaagttgattaagccttttggcttttgtttactctgtttgcttgagattctagttggtttcttgttcttagttttatctttctatgtcactctgaaactggtgtgtgatcattttgatgttttaagaatttagctttaccgttttt

SEQ ID NO: 48697 - protein, 650 aa, Arabidopsis thaliana
MAGKGEGPAIGIDLGTTYSCVGVWQHDRVEIIANDQGNRTTPSYVAFTDSERLIGDAAKNQVAMNPTNTVFDAKRLIGRRYSDPSVQADKSHWPFKVVSGPGEKPMIVVNHKGEEKQFSAEEISSIVLIKMREIAEAFLGSPVKNAVVIVPAYFNDSQRQGTKDAGVISGLNVMRIINEPTAAAIAYGLDKKASSVGEKNVLIFDLGGGTFDVSLLTIEEGIFEVKATAGDTHLGGEDFDNRMVNHFVQEFKRKNKKDITGNPRALRRLRTACERAKRTLSSTAQTTIEIDSLFEGIDFYTTITRARFEELNMDLFRKCMEPVEKCLRDAKMDKSSVHDVVVVGGSTRIPKVQQLVQDFFNGKELCKSINPDEAVAYGAAVQAAILSGEGNEKVQDLLLLDVTPLSLGLETAGGVMTVLIPRNTTIPTKKEQIFSTYSDNQPGVLIQVYEGERARTKDNNLLGKFELSGIPPAPRGVPQITVCFDIDANGILNVSAEDKTTGQKNKITITNDKGRLSKEEIEKMVQEAEKYKAEDEEHKKKVDAKNALENYAYNMRNTIKDEKIASKLDAADKKKIEDAIDQAIEWLDGNQLAEADEFEDKMKELESLCNPIIARMYQGAGPDMGGAGGMDDDTPAGGSGGAGPKIEEVD

SEQ ID NO: 48698 - DNA, 2158 bp, Arabidopsis thaliana
  CDS (1)..(2010)
atggctcgctcgtttggagctaacagtaccgttgtgttggcgatcatcttcttcggatgtttatttgcgttgtcctctgcaatagaagaggctacgaagttaggatcagtgatagggatagatcttggtactacttactcttgtgttggtgtttacaagaatggtcatgtcgaaattattgccaatgaccaaggaaaccgtattacaccttcatgggttggttttactgactctgaaagactcattggtgaggctgctaagaatcaagcagctgttaatccagagaggactgtcttcgacgttaagagattgatcgggcgaaaatttgaggataaggaggttcaaaaggataggaaacttgtaccttaccagattgtgaacaaggatggtaagccatacattcaagtcaagatcaaggatggtgagactaaggttttcagtcctgaggagattagtgctatgattctgactaagatgaaggagacagctgaagcctaccttggaaagaaaatcaaggacgctgttgtcactgttccagcttacttcaatgatgctcaaaggcaagctactaaggatgctggtgttattgctgggctcaatgttgctagaatcattaatgaacctactgctgctgctattgcctatggtcttgataagaagggtggcgagaagaatatccttgtgtttgatcttggtggtggtacttttgatgtcagtgtcttgaccattgataacggagtgtttgaggttctctccacaaatggtgacactcacttgggaggtgaggactttgaccacagggtgatggagtacttcatcaagttgattaagaagaagcaccagaaggacatcagcaaggacaacaaggctcttggtaagctccgaagggaatgtgagagggcaaagagagctctaagtagtcagcaccaagtccgtgtagagattgagtcactctttgatggtgttgatttttctgagccactcaccagagctcgtttcgaggagcttaacaatgatttgttcaggaagaccatgggacctgtgaagaaggccatggatgatgccggtctacagaagagccagatcgatgagattgtccttgttggtggaagcaccaggatcccaaaggttcagcaactgttgaaggacttctttgaaggtaaagagccaaacaagggtgtgaaccccgacgaggctgttgcctatggtgctgctgttcagggtggtattttgagcggagaaggcggtgatgagaccaaagatatccttcttcttgatgttgcgccactcactttgggtatcgagactgtaggaggagtgatgacaaagttgatcccgagaaacacggttattccaaccaagaaatctcaggttttcacaacgtaccaagaccagcagactaccgtctccattcaggtctttgaaggtgaacgaagtctcaccaaggactgcaggctactcgggaaattcgacctcaatggaatcccaccggccccaagaggaacccctcaaatcgaggtcacattcgaagtggacgccaacggtattcttaatgtgaaagcagaggacaaggcgagtggtaaatcagagaagattactatcacaaacgagaagggtcgtctgagccaagaagagattgaccggatggtgaaggaggcagaggagtttgcagaggaagacaagaaggtaaaggagaagatcgacgccaggaatgccctggagacatacgtgtacaacatgaagaaccaagtgaacgacaaggacaagcttgccgacaaattggaaggagatgaaaaggagaagatcgaagcagcgacgaaagaggctttggagtggctcgacgaaaaccaaaactcagagaaagaagagtacgacgagaagctcaaggaggtagaggcagtgtgtaacccaatcatcacagcagtttaccagagatctggcggagcaccaggtggtgcaggaggagaatcatcgactgaggaggaagatgagtctcacgatgagctctagatgtcttttgttattgttaatttgttaaaccatagagacgagttttgaggatgaaacgtcgttttttttgtatttggtttcctttttatatggatttttaggaaaaggggagagattaagtaacgtcccttctttagtctccctggac

SEQ ID NO: 48699 - protein, 669 aa, Arabidopsis thaliana
MARSFGANSTVVLAIIFFGCLFALSSAIEEATKLGSVIGIDLGTTYSCVGVYKNGHVEIIANDQGNRITPSWVGFTDSERLIGEAAKNQAAVNPERTVFDVKRLIGRKFEDKEVQKDRKLVPYQIVNKDGKPYIQVKIKDGETKVFSPEEISAMILTKMKETAEAYLGKKIKDAVVTVPAYFNDAQRQATKDAGVIAGLNVARIINEPTAAAIAYGLDKKGGEKNILVFDLGGGTFDVSVLTIDNGVFEVLSTNGDTHLGGEDFDHRVMEYFIKLIKKKHQKDISKDNKALGKLRRECERAKRALSSQHQVRVEIESLFDGVDFSEPLTRARFEELNNDLFRKTMGPVKKAMDDAGLQKSQIDEIVLVGGSTRIPKVQQLLKDFFEGKEPNKGVNPDEAVAYGAAVQGGILSGEGGDETKDILLLDVAPLTLGIETVGGVMTKLIPRNTVIPTKKSQVFTTYQDQQTTVSIQVFEGERSLTKDCRLLGKFDLNGIPPAPRGTPQIEVTFEVDANGILNVKAEDKASGKSEKITITNEKGRLSQEEIDRMVKEAEEFAEEDKKVKEKIDARNALETYVYNMKNQVNDKDKLADKLEGDEKEKIEAATKEALEWLDENQNSEKEEYDEKLKEVEAVCNPIITAVYQRSGGAPGGAGGESSTEEEDESHDEL

SEQ ID NO: 48700 - DNA, 2007 bp, Arabidopsis thaliana
  CDS (1)..(2007)
atggctcgctcgtttggagcaaacagcactgttgtgcttgcgatcatcttcttcggatgtttatttgcgttttccactgcaaaagaagaggctacgaagttaggatcagttattgggatagatcttggtaccacttactcttgtgttggtgtttacaagaatggtcatgttgaaattattgccaatgaccaaggaaaccgtattacaccttcatgggttggttttactgactctgaaaggctcattggtgaggctgctaagaatcaggcggctgttaatcctgagaggactgtcttcgacgttaagagattgatcgggcgaaaatttgaggacaaggaggttcaaaaggacaggaaacttgtaccttaccagattgtgaacaaggatggtaagccatacattcaagtcaagatcaaggatggtgagactaaggttttcagtcctgaggagatcagtgccatgattctgactaagatgaaggagacagccgaagcctaccttggaaagaaaatcaaggacgctgttgtcactgttccagcttacttcaatgatgctcaaaggcaagctaccaaggatgccggtgttattgctgggctcaatgttgctagaatcatcaacgaacctactgctgctgctattgcctacggtcttgataagaagggtggtgagaagaacatccttgtatttgaccttggtggtggtacttttgatgtcagtgtcttgaccattgataacggagtgtttgaggttctctccacaaatggtgacactcacttgggaggtgaggactttgaccacaggatcatggagtacttcatcaagttaattaagaagaagcaccagaaggacatcagcaaggacaacaaggctcttggtaagctccgaagggaatgtgagagggcaaagagagctctaagcagtcagcaccaagtccgtgtagagattgagtcactctttgatggtgttgatttatctgagccactcaccagagctcgtttcgaggagcttaacaatgatttgttcaggaagaccatgggacctgtgaagaaggccatggatgatgccggtctacagaagagccagatcgatgagattgtccttgttggtggaagcaccaggatcccaaaggttcagcaactgttgaaggacttctttgaaggtaaagagccaaacaagggtgtgaaccccgacgaggctgttgcctatggtgctgctgttcagggtggtattttgagcggagaaggcggtgatgagaccaaagatatccttcttcttgatgttgcgccactcactttaggtatcgagactgtaggaggagtgatgacaaagttgatcccaagaaacacggttattccaaccaagaaatctcaggttttcacaacgtaccaagaccagcagaccaccgtctccattcaggtctttgaaggtgaaagaagtctcaccaaggactgcaggctactcgggaaattcgacctcactggagtcccaccggccccaagaggaacccctcaaatcgaggtcacatttgaagtggacgccaacggtattcttaatgtgaaagcagaggacaaggcgagtggtaaatcagagaagattacaatcacaaacgagaagggtcgtctgagccaagaagagattgaccggatggtgaaggaggcagaggagtttgcagaggaagacaagaaggtgaaggagaagatcgacgccaggaatgccctggagacatacgtgtacaacatgaagaaccaagtgagcgacaaggacaagcttgcagacaaattggaaggagatgagaaggagaagatagaagcagcgacgaaagaggccttggagtggctcgacgagaaccaaaactcagagaaagaagagtacgacgagaagctcaaggaggtagaggcagtgtgtaacccaatcatcacagcagtttaccagagatcaggcggagcaccaggtgcaggaggagaatcatcgactgaggaggaagatgagtctcacgatgagctctag

SEQ ID NO: 48701 - protein, 668 aa, Arabidopsis thaliana
MARSFGANSTVVLAIIFFGCLFAFSTAKEEATKLGSVIGIDLGTTYSCVGVYKNGHVEIIANDQGNRITPSWVGFTDSERLIGEAAKNQAAVNPERTVFDVKRLIGRKFEDKEVQKDRKLVPYQIVNKDGKPYIQVKIKDGETKVFSPEEISAMILTKMKETAEAYLGKKIKDAVVTVPAYFNDAQRQATKDAGVIAGLNVARIINEPTAAAIAYGLDKKGGEKNILVFDLGGGTFDVSVLTIDNGVFEVLSTNGDTHLGGEDFDHRIMEYFIKLIKKKHQKDISKDNKALGKLRRECERAKRALSSQHQVRVEIESLFDGVDLSEPLTRARFEELNNDLFRKTMGPVKKAMDDAGLQKSQIDEIVLVGGSTRIPKVQQLLKDFFEGKEPNKGVNPDEAVAYGAAVQGGILSGEGGDETKDILLLDVAPLTLGIETVGGVMTKLIPRNTVIPTKKSQVFTTYQDQQTTVSIQVFEGERSLTKDCRLLGKFDLTGVPPAPRGTPQIEVTFEVDANGILNVKAEDKASGKSEKITITNEKGRLSQEEIDRMVKEAEEFAEEDKKVKEKIDARNALETYVYNMKNQVSDKDKLADKLEGDEKEKIEAATKEALEWLDENQNSEKEEYDEKLKEVEAVCNPIITAVYQRSGGAPGAGGESSTEEEDESHDEL

SEQ ID NO: 48702 - DNA, 2338 bp, Zea mays
  CDS (127)..(2118)
aggacacagactatctcacccgactcgtcagacgtcagccagcagttcgaaaccaaggatcgatccaggagcttccggaaggcgaggcgcgcgcgcagcgtcgaggtgctggtgccggtgccgcccatggatcgggctcgcggatccgcgttcctgctcggcgtcctgctcgcaggatccttgttcgcgttttcagttgctaaagaggagaccaagaagctcgggaccgtgatcggtatcgatcttggtaccacctactcctgtgtcggtgtctacaagaacggtcatgtcgagatcatcgccaatgaccagggtaaccgtatcacaccctcatgggttgccttcaccgatagcgagaggctcatcggtgaggctgccaagaaccaggcagccgtcaaccctgagaggaccatctttgacgtcaagcgtctcatcggaagaaagttcgcggacaaggaagtccagagggacatgaaacttgttccctacaagattattaacaaggatggcaagccctacattcaggtcaagatcaaggatggggagaacaaggtcttcagccctgaggagatcagtgccatgattcttggcaagatgaaggatactgctgaggcataccttggcaagaagatcaatgatgctgtcgtcactgtccctgcgtacttcaatgatgcgcagaggcaggcaaccaaggatgctggtgtcattgctggcctcaatgttgctaggatcatcaatgagccaactgctgctgctattgcctatggtttggacaagaagggtggcgagaagaacatccttgtctttgaccttggtggtggcacttttgatgtcagtatcttgaccattgacaacggtgtgtttgaggtgctggccaccaatggtgacactcatcttggaggtgaggactttgaccagaggatcatggagtacttcatcaagttgatcaagaagaagtacagcaaggacatcagcaaggacaaccgtgctcttggaaagctgaggagggaagccgagcgcgccaagagagccctcagcaaccagcaccaggtccgtgttgagatcgagtccctctttgacgggaccgatttctcggagccgctgacccgtgccaggtttgaggagctgaacaacgacctcttccgcaagaccatgggccctgtcaagaaggccatggaggatgctggccttgagaagagccagatccacgagatcgtcctggttggtggaagcaccaggattcccaaggtccagcagctcctgcgggactacttcgacggcaaggagcccaacaagggtgtcaaccctgatgaggctgttgcctttggtgccgctgtgcagggaagcatcttgagcggcgagggtggtgacgagaccaaagatatcctcctccttgatgtggctcccctcaccctgggtatcgagaccgtcggtggagtcatgaccaagttgatcccgaggaacactgtcatcccgaccaagaagtcgcaggtgttcaccacctaccaggaccagcagaccactgtctccatccaggtctttgagggtgagcgcagtatgaccaaggactgccgtcttctcggcaagttcgacctcaacggcattgcgccagctccaaggggcacaccccagatcgaggtgaccttcgaggtggacgccaacggtatcctgaacgtgaaggcggaggacaagggcacgggcaagtcggagaagatcacgatcacgaacgagaaggggcggctgagccaggaggagatcgaccgcatggtgcgggaggcggaggagttcgcggaggaggacaagaaggtgaaggagcggatcgacgcccgcaaccagctggagacgtacgtgtacaacatgaagaacacggtgggcgacaaggacaagctcgcggacaagctggaggcggaggagaaggagaaggtggaggaggccctcaaggaggcgctggagtggctggacgacaaccagtcggccgagaaggaggactacgaggagaagctcaaggaggtggaggccgtgtgcaaccccatcgtgtcggccgtgtaccagcggtcgggcggcgcccctggcggtgacgctgacggcggtgttgacgacgaccacgacgagctgtagatggttgtagatggtggtggtgacgtggagtgccgggagccgagccaaattttgtaacggtgtttagcggcggacaatacttattactaatcttggtgctgctctgccaatagccgtgctgagcgtagaaactgtttgtttgtaatttttttttcttctacttccttggttgttcaggattcggattcgaattttatgtgaaaaaagaagtcgcgctttt

SEQ ID NO: 48703 - protein, 663 aa, Zea mays
MDRARGSAFLLGVLLAGSLFAFSVAKEETKKLGTVIGIDLGTTYSCVGVYKNGHVEIIANDQGNRITPSWVAFTDSERLIGEAAKNQAAVNPERTIFDVKRLIGRKFADKEVQRDMKLVPYKIINKDGKPYIQVKIKDGENKVFSPEEISAMILGKMKDTAEAYLGKKINDAVVTVPAYFNDAQRQATKDAGVIAGLNVARIINEPTAAAIAYGLDKKGGEKNILVFDLGGGTFDVSILTIDNGVFEVLATNGDTHLGGEDFDQRIMEYFIKLIKKKYSKDISKDNRALGKLRREAERAKRALSNQHQVRVEIESLFDGTDFSEPLTRARFEELNNDLFRKTMGPVKKAMEDAGLEKSQIHEIVLVGGSTRIPKVQQLLRDYFDGKEPNKGVNPDEAVAFGAAVQGSILSGEGGDETKDILLLDVAPLTLGIETVGGVMTKLIPRNTVIPTKKSQVFTTYQDQQTTVSIQVFEGERSMTKDCRLLGKFDLNGIAPAPRGTPQIEVTFEVDANGILNVKAEDKGTGKSEKITITNEKGRLSQEEIDRMVREAEEFAEEDKKVKERIDARNQLETYVYNMKNTVGDKDKLADKLEAEEKEKVEEALKEALEWLDDNQSAEKEDYEEKLKEVEAVCNPIVSAVYQRSGGAPGGDADGGVDDDHDEL

SEQ ID NO: 48704 - DNA, 2365 bp, Zea mays
  CDS (110)..(2101)
cgagcaagcagttcgaaacaaggatcgatccaggagcttccagaaggcgaggaggaagagggagaagggcgcgcgcgcgcgcagcgttcaagtggtgctggtgtcggccatggatcgggttcgtggatccgcgttcctgctcggcgtcctgctcgcaggatccctgttcgcgttttcagttgctaaggaggagaccaagaagctcggcactgtgattggtatcgatctcggaaccacctactcctgtgtgggtgtgtacaagaacggtcatgtcgagatcatcgccaatgaccagggtaaccgtatcacaccctcatgggttgccttcaccgatagcgagaggctcatcggtgaggctgccaagaaccaggcagctgtcaaccctgagaggaccatctttgacgtcaagcgtctcatcggaagaaagtttcaggataaggaagtccagagggacatgaaacttgtcccctacaagattattaacaaggatggcaagccatacattcaggtcaagatcaaggatggggagaacaaggtcttcagccccgaggagatcagtgccatgattcttggcaagatgaaggatactgctgaggcgtaccttggcaagaagatcaacgatgccgtcgtcactgtccctgcatacttcaatgatgcgcagaggcaggcaaccaaggatgctggtgtcattgccggcctcaatgttgctaggatcatcaatgagccaactgctgctgctattgcctatggtttggacaagaagggtggcgagaagaacatccttgtctttgaccttggtggtggtacttttgatgtcagtatcttgaccattgataacggtgtgtttgaggtgctggccaccaatggtgacacccatcttggaggtgaggattttgaccagaggatcatggaatacttcatcaagttgatcaagaagaagtacagcaaggacatcagcaaggacaaccgtgctcttggaaagctgaggagggaagctgagcgtgccaagagagcccttagcaaccagcaccaggtccgagttgagatcgagtccctctttgacgggaccgacttctcggagccgctgacccgtgccaggtttgaggagctgaacaacgatctgttccgcaagactatgggtcctgtcaagaaggccatggaggacgctggccttgagaagagccagatccacgagatcgtcctggttggtggaagcaccaggattcccaaggtccagcagctcctgaaggactacttcaatggcaaggagcccaacaagggtgtgaaccctgatgaggctgttgcctttggtgccgcggtgcagggaagcatcttgagcggcgagggtggtgacgagacaaaagatatcctcctccttgacgtggctcctctcaccctgggtattgagaccgtcggtggagtcatgaccaagttgatcccgaggaacactgtcatcccgaccaagaaatcgcaggtgttcaccacctaccaggaccagcagaccactgtctccatccaggtctttgagggtgagcgcagcatgaccaaggactgccgtcttctgggcaagttcgacctcaatggcattccgtcagctccgaggggcacaccccagatcgaggtgaccttcgaggtggacgccaacggtatcctgaacgtgaaggcggaggacaagggcacgggcaagtcggagaagatcacgatcacgaacgagaaggggcggctgagccaggaggagatcgaccgcatggtgcgggaggcggaggagttcgcggaggaggacaagaaggtgaaggagcggatcgacgcccgcaaccagctggagacgtacgtgtacaacatgaagaacacggtgggcgacaaggacaagctcgcggacaagctggaggcggaggagaaggagaaggtggaggaggccctcaaggaggcgctcgagtggctggacgacaaccagtccgccgagaaggaggactacgaggagaagctcaaggaggtggaggccgtgtgcaaccccatcgtgtcggccgtgtaccagcggtcgggcggcgcccccggtggcgatgccgacggcggcgtcgacgacgaccacgacgagctgtagatggtggtggggagcggtgacgtggagtgccgggaaccaagccaaattttgtaatgatgtttaggagggagggtggtggacaaaaaaactaatcttggtgctgctctgccaatagacgggctgagcatagaactttttttcccttctacttccttgtgattgttctttttatagaggattcgcattgcagtgtaatgtaaaaaaaagaagacgcgcttctgaaacttgttactacaagttaataatgaaatggtgcattgcatc

SEQ ID NO: 48705 - protein, 663 aa, Zea mays
MDRVRGSAFLLGVLLAGSLFAFSVAKEETKKLGTVIGIDLGTTYSCVGVYKNGHVEIIANDQGNRITPSWVAFTDSERLIGEAAKNQAAVNPERTIFDVKRLIGRKFQDKEVQRDMKLVPYKIINKDGKPYIQVKIKDGENKVFSPEEISAMILGKMKDTAEAYLGKKINDAVVTVPAYFNDAQRQATKDAGVIAGLNVARIINEPTAAAIAYGLDKKGGEKNILVFDLGGGTFDVSILTIDNGVFEVLATNGDTHLGGEDFDQRIMEYFIKLIKKKYSKDISKDNRALGKLRREAERAKRALSNQHQVRVEIESLFDGTDFSEPLTRARFEELNNDLFRKTMGPVKKAMEDAGLEKSQIHEIVLVGGSTRIPKVQQLLKDYFNGKEPNKGVNPDEAVAFGAAVQGSILSGEGGDETKDILLLDVAPLTLGIETVGGVMTKLIPRNTVIPTKKSQVFTTYQDQQTTVSIQVFEGERSMTKDCRLLGKFDLNGIPSAPRGTPQIEVTFEVDANGILNVKAEDKGTGKSEKITITNEKGRLSQEEIDRMVREAEEFAEEDKKVKERIDARNQLETYVYNMKNTVGDKDKLADKLEAEEKEKVEEALKEALEWLDDNQSAEKEDYEEKLKEVEAVCNPIVSAVYQRSGGAPGGDADGGVDDDHDEL

SEQ ID NO: 48706 - DNA, 2273 bp, Nicotiana tabacum
  CDS (87)..(2093)
ttccagaagagaaacgattcaacgacgaagatattgttcagaggcagtgttttgtagaaagaggagtccttgtggacctacgagctatggctggtgcgtggaagagacgcgcatccttgatcgttttcgcaatcgtcctgttcgggagcttgttcgcattttctatagctaaagaagaagctaccaagttaggaacagttattggtatagatcttggaacaacttactcatgtgttggtgtctacaagaacggacatgttgaaatcatagcaaacgaccaaggtaaccgtatcaccccttcatgggtagccttcactgatggtgagaggctgattggtgaagcagctaaaaatcaggctgctgttaatcctgagaggaccatatttgacgtcaaaagacttatcgggagaaagtttgatgacaaagaagtacaaagggacaagaaacttgttccatatgagattgttaacaaggatgggaaaccatatatccaagttaagatcaaagatggggagactaaggtcttcagtcctgaggagatcagtgctatgattctgaccaagatgaaagaaacagcagaagcttaccttggaaagaaaatcaaggatgcagttgtcacagttccagcatacttcaatgatgcccagaggcaggccactaaggatgccggtgttattgctggtttgaacgtggcaagaatcattaacgaaccaactgcagctgccattgcctatggattagataagaaaggtggtgaaaagaacatcctggtctttgaccttggtggtggtacatttgatgttagtatcctcactattgacaacggtgtttttgaggttcttgccacaaatggagacactcatctaggaggagaggattttgaccagagaattatggagtacttcattaaattgataaagaagaagcatggaaaggacatcagcaaggataacagggctttgggaaagctcaggagagaagccgagcgtgccaagagagcactgagcagtcagcatcaagtcagggttgagattgaatctctcttcgatggtgtagatttctctgaaccacttactcgggctcgttttgaggagctgaacaacgatttattcaggaagacaatgggtcctgttaagaaggctatggaggatgctggactagaaaagaaccagattgacgaaattgttttggttggtggaagtaccaggattcctaaagttcaacagcttttgaaagattattttgatggcaaagagcccaacaagggtgtcaaccccgacgaagcagttgcttatggtgcagctgtacaaggaggaatcttgagtggagagggaggtgatgaaaccaaagatattcttctactggatgttgctccactgactcttggtattgaaaccgttggaggagtgatgacaaagttgatcccaagaaacaccgttattcctactaagaaatctcaagtcttcaccacttaccaggatcagcagacaacagtcacaatttcggtctttgaaggtgaacgcagtctcacaaaggactgccggctacttgggaaattcgacttaactggaatagctccagctccaagaggaactcctcaaattgaagttacatttgaggttgatgccaacggtatcctgaatgtgaaagctgaagataaagcctctggaaagtcagagaagatcaccattaccaatgacaagggtcgcttgagtcaagaagaaattgaacgtatggtcaaggaggccgaggagtttgctgaggaggacaagaaggtgaaagaaagaattgacgcccgaaacagcctggagacttacgtatacaacatgaggaaccaaatcaatgacaaggacaaacttgcagacaagttagagtctgatgagaaggagaagattgaaaccgccacaaaagaagcacttgaatggttggacgacaaccagagtgctgagaaggaagattatgacgaaaaactgaaagaagtggaggctgtgtgcaacccaattatcacggctgtgtatcagagatctggtggagccccaggaggtgccagcgaggaatccaacgaggatgatgattcacatgacgagctgtaatagatttgtaggttatagttttctgttgccaaatagacatacaattttgatgatttctttgtgtaatttcaccaaatagagggtggaacgtagaacaactcggaagaaaccgtgggacgtaatgtcgctctggtatcctgcctcttgttcatttttttcgtacctgtatagagacgtaaa

SEQ ID NO: 48707 - protein, 668 aa, Nicotiana tabacum
MAGAWKRRASLIVFAIVLFGSLFAFSIAKEEATKLGTVIGIDLGTTYSCVGVYKNGHVEIIANDQGNRITPSWVAFTDGERLIGEAAKNQAAVNPERTIFDVKRLIGRKFDDKEVQRDKKLVPYEIVNKDGKPYIQVKIKDGETKVFSPEEISAMILTKMKETAEAYLGKKIKDAVVTVPAYFNDAQRQATKDAGVIAGLNVARIINEPTAAAIAYGLDKKGGEKNILVFDLGGGTFDVSILTIDNGVFEVLATNGDTHLGGEDFDQRIMEYFIKLIKKKHGKDISKDNRALGKLRREAERAKRALSSQHQVRVEIESLFDGVDFSEPLTRARFEELNNDLFRKTMGPVKKAMEDAGLEKNQIDEIVLVGGSTRIPKVQQLLKDYFDGKEPNKGVNPDEAVAYGAAVQGGILSGEGGDETKDILLLDVAPLTLGIETVGGVMTKLIPRNTVIPTKKSQVFTTYQDQQTTVTISVFEGERSLTKDCRLLGKFDLTGIAPAPRGTPQIEVTFEVDANGILNVKAEDKASGKSEKITITNDKGRLSQEEIERMVKEAEEFAEEDKKVKERIDARNSLETYVYNMRNQINDKDKLADKLESDEKEKIETATKEALEWLDDNQSAEKEDYDEKLKEVEAVCNPIITAVYQRSGGAPGGASEESNEDDDSHDEL

SEQ ID NO: 48708 - DNA, 2232 bp, Solanum lycopersicum
  CDS (120)..(2120)
atatatataaatctctcatcatttccagttcttcataactgaaaaagataaacagagggatcacattgtgttgtacctgtagcttagtgtattctacgttgattacgaaggaagaagctatggctgcctgttcgaggcgaggcaattctctcgtcgtgctagcgatcgttttattaggctgtctttctgcactttccaatgcaaaggaggaggctacaaaacttggtaccgttataggaattgatcttgggacaacctattcctgtgttggggtgtacaagaatggtcatgtggagattatagctaatgaccaaggaaacaggattacaccatcatgggttgcattcactgataacgagagattgattggtgaggctgccaagaacctggctgcggtcaacccagaaagaacaatctttgatgttaagaggctgattggaagaaaatttgaagataaggaagtacagagggatatgaagctggtaccgtacaagattgtcagcaaggatggaaagccctacatacaagtcaaaatcaaggatggagaagttaaggtatttagtcctgaggaaatcagcgccatgattttgacaaagatgaaagagacagccgaagcattccttgggaagactattaaggatgctgtggtcactgttcctgcatatttcaatgatgcacaaagacaggcgacaaaggatgctggtgttattgctggattaaatgttgctaggatcattaatgagccaacagctgcagccattgcctacggactggataagaaaggtggtgagaagaacattcttgtctttgaccttggtggtgggacattcgatgtcagtattctgaccattgacaatggtgtatttgaggttcttgcaacaaatggtgacacccatcttggaggtgaggactttgatcaaaggattatggaatacttcatcaagttgatcaagaagaagcatggaaaggacatcagcaaggacaacagagctcttggaaagctaaggagagaagctgagcgtgccaagagatcccttagtagccagcaccaagtccgggttgagattgaatcattatttgatggtactgatttctctgaaccactgacccgtgctcgctttgaggagttgaacaatgatctcttcagaaagacaatgggacctgtgaagaaggcaatggatgatgctggcctacaaaagaaccagattgatgagattgttcttgttggtggaagcaccagaattcctaaggtgcaacagctcctcaaagactattttgacgggaaggagcccagcaagggtgtaaatcctgatgaagcagttgcttatggtgctgctgttcaaggtggtatcctcagtggtgagggtggagatgaaactaaagatatccttctcctggatgtcgctcctctcacccttggtattgaaaccgttggtggtgtgatgaccaaatttatccccagaaataccgttatcccaaccaagaagtcccaggtcttcaccacttaccaagaccagcagaccactgtctccattcaggtttttgaaggtgaaaggagtcttaccaaggactgtaggaatctcgggaagtttgatcttacaggaattcctccagctccaaggggaaccccccaaattgaggtcacattcgaagttgatgccaatggtatcttgaatgtcaaagcagaagacaagggtactggaaaagcagagaagattaccattacaaacgacaagggccgcttaagccaagaagagattgagcgtatggttcgtgaagcagaagagtttgctgaggaagacaagaaagtgaaggagaagattgatgcccgtaacgctttggaaacctacgtgtacaacatgaagaatcaaatcaacgacaaggacaaattagctgacaaactcgagtctgatgagaaggagaagattgagacagcaacgaaagaagcccttgaatggttagacgataaccagagcgccgagaaagaggactatgacgagaagctcaaagaggtcgaggcagtttgcaacccaatcatcacagctgtttatcaacgatcaggtggagccccaggtggcggtgcatcggaagaagaagatgacagccatgatgagctgtaacgtgttccaaagaatctccattgatactgcaaagatgcggaaatgaggatatatagagtagtttgaagtgagggttagtgcaagtttgttcattcgttctgaaatctctccc

SEQ ID NO: 48709 - protein, 666 aa, Solanum lycopersicum
MAACSRRGNSLVVLAIVLLGCLSALSNAKEEATKLGTVIGIDLGTTYSCVGVYKNGHVEIIANDQGNRITPSWVAFTDNERLIGEAAKNLAAVNPERTIFDVKRLIGRKFEDKEVQRDMKLVPYKIVSKDGKPYIQVKIKDGEVKVFSPEEISAMILTKMKETAEAFLGKTIKDAVVTVPAYFNDAQRQATKDAGVIAGLNVARIINEPTAAAIAYGLDKKGGEKNILVFDLGGGTFDVSILTIDNGVFEVLATNGDTHLGGEDFDQRIMEYFIKLIKKKHGKDISKDNRALGKLRREAERAKRSLSSQHQVRVEIESLFDGTDFSEPLTRARFEELNNDLFRKTMGPVKKAMDDAGLQKNQIDEIVLVGGSTRIPKVQQLLKDYFDGKEPSKGVNPDEAVAYGAAVQGGILSGEGGDETKDILLLDVAPLTLGIETVGGVMTKFIPRNTVIPTKKSQVFTTYQDQQTTVSIQVFEGERSLTKDCRNLGKFDLTGIPPAPRGTPQIEVTFEVDANGILNVKAEDKGTGKAEKITITNDKGRLSQEEIERMVREAEEFAEEDKKVKEKIDARNALETYVYNMKNQINDKDKLADKLESDEKEKIETATKEALEWLDDNQSAEKEDYDEKLKEVEAVCNPIITAVYQRSGGAPGGGASEEEDDSHDEL

SEQ ID NO: 48710 - DNA, 2410 bp, Spinacia oleracea
  CDS (75)..(2081)
acaaaaccaggagttaggaagaagaagaggaagcgtcggtaaacctacgtcgttttatatcaccggcggagataatggcggtagcgtggaaatcacgcgcatcttcgatcgcattcggcatcgttttgctcggtagtttgtttgctttcgttagcgcgaaagatgaagctcccaagcttgggacagtcattggtattgatcttggtaccacctactcatgtgttggtgtgtacaaagatggtaaggttgaaattatagcaaatgaccaaggtaaccgtatcaccccatcatgggtcgccttcaccaacgacgagaggttgatcggggaggctgctaagaatcaggcagctgctaaccccgagaggactatcttcgatgtcaagaggctcatcggaagaaaattcgaggacaaagaggttcaaaaggacatgaagcttgtaccttacaagattgtaaacagggatggaaagccttacatccaagttaaggttcaagaaggtgagaccaaggttttcagccctgaggaaatcagtgccatgattcttaccaagatgaaggagacagccgaaactttccttggaaagaaaatcaaggatgctgttgtcactgttcctgcttactttaacgatgcccagaggcaagctaccaaggatgcaggagtcatcgctggtttgaacgttgctaggattattaatgagccaaccgcggcagccattgcatacggattggacaaaaggggtggtgagaagaacatccttgtcttcgaccttggtggtggaacattcgatgtcagtgttttgaccatcgacaatggtgtttttgaagttcttgcaaccaacggagacactcacttgggaggtgaggactttgaccaaaggctcatggaatacttcattaagttgatcaagaagaagcacaccaaggacattagcaaggacaacagagctcttggaaaattgaggagagagtgtgagcgtgccaagagagctttgagtagccagcaccaagtccgtgttgagattgagtctcttttcgacggtgttgatttctctgaaccactcaccagggctcgtttcgaggagttgaacaatgacctcttcaggaagaccatgggacccgtcaagaaggccatggatgacgctggtttggaaaagaaccagattgacgaaattgtccttgttggtggaagtaccaggattcccaaggttcaacagttgttgaaggagttcttcaacggaaaggagcccagcaagggagttaaccccgatgaggctgtcgcttttggtgctgctgttcagggaagtattcttagtggagagggtggtgaagagaccaaagaaatccttctattggatgttgcacctcttacccttggtattgagactgttggtggagtcatgaccaaattgattccaaggaacaccgttatcccaaccaaaaagtctcaagttttcaccacttaccaggaccagcagaccactgtcaccattcaggtctttgaaggtgaaaggagtctcaccaaggactgcagacttctcgggaaattcgatcttaccggaatcgcaccagctccaaggggaacccctcagattgaagtcacctttgaagtagacgccaacggtatcctaaacgtaaaggcagaagacaaagcctcaggaaaatccgagaagatcacaatcacaaacgacaagggtcgtctaagccaagaagaaatcgagagaatggtccgggaagccgaggagtttgccgaggaagacaagaaggtcaaggaaaagatcgacgcccgtaacagcttggaaacatacatctacaacatgaagaaccaaatcagtgacgcagacaagctggccgacaagctagagtctgacgagaaggagaagatcgagggagctgttaaggaggccctcgagtggttagatgacaaccagagtgccgagaaggaagattacgatgagaaactcaaggaagtcgaggctgtttgtaacccgatcatcaccgccgtttaccagagatctggtgggccctcaggtgaaagcggtgctgattcagaagattccgaggagggacatgacgagctttaagtgatgacttgtggatttattgttattaggtttagactgatggatctccttttgtttggggaggttttggcagggaaaactaaaaaaaagatgcattattaagaatgttacaagagttttagggggaaactaggatggggaagtgcttttgaattttcgggtttccccttttcccttcatcactaagttcaatttttgagggacagtgtataggatatttcaactgcttatatcagctgaaacaacttcttttttttttggttatttatgaattcataaaagcctctgttttgacaaatctgatgtagtgatcgtacattacttgtcct

SEQ ID NO: 48711 - protein, 668 aa, Spinacia oleracea
MAVAWKSRASSIAFGIVLLGSLFAFVSAKDEAPKLGTVIGIDLGTTYSCVGVYKDGKVEIIANDQGNRITPSWVAFTNDERLIGEAAKNQAAANPERTIFDVKRLIGRKFEDKEVQKDMKLVPYKIVNRDGKPYIQVKVQEGETKVFSPEEISAMILTKMKETAETFLGKKIKDAVVTVPAYFNDAQRQATKDAGVIAGLNVARIINEPTAAAIAYGLDKRGGEKNILVFDLGGGTFDVSVLTIDNGVFEVLATNGDTHLGGEDFDQRLMEYFIKLIKKKHTKDISKDNRALGKLRRECERAKRALSSQHQVRVEIESLFDGVDFSEPLTRARFEELNNDLFRKTMGPVKKAMDDAGLEKNQIDEIVLVGGSTRIPKVQQLLKEFFNGKEPSKGVNPDEAVAFGAAVQGSILSGEGGEETKEILLLDVAPLTLGIETVGGVMTKLIPRNTVIPTKKSQVFTTYQDQQTTVTIQVFEGERSLTKDCRLLGKFDLTGIAPAPRGTPQIEVTFEVDANGILNVKAEDKASGKSEKITITNDKGRLSQEEIERMVREAEEFAEEDKKVKEKIDARNSLETYIYNMKNQISDADKLADKLESDEKEKIEGAVKEALEWLDDNQSAEKEDYDEKLKEVEAVCNPIITAVYQRSGGPSGESGADSEDSEEGHDEL

SEQ ID NO: 48712 - DNA, 1902 bp, Colwellia psychrerythraea
  CDS (1)..(1902): transl_table=11
atgactaagattattggtatagatttaggtacaacaaattcatgtgtcgcggttatggaaggtggcattgccaaaattattgaaaatgcagaaggtagccgcacaaccccatcaattgttgcttatgcaaataatgaaacgttagcgggtcaacccgcaaaaagacagtccgtgaccaattctaccaacacattatttgcgattaagcgattgattggtcgtaaatttgacgataaagaagtgcaaaaagacattaagttagcgccttataaaatagtaaaagcggacaacggtgatgcgtgggttgaggtcgatggtaaagcattgtctccacaagaagtgtcagcacaaattttacgtaaattgaaaaaagatgctgaagcctatttaggtgaaacggtgacagatgcggttattaccgtgccggcatactttaatgattcgcagcgtcaagcaaccaaagatgcaggtaaaattgcaggacttaatgttaaacgtattattaatgaacccactgccgcagcattagcctatggcgttgataaaaatagtaacgctgatcaaaaagtggtggtttacgatttaggtggcggtacttttgatctttcaattattgaaatatccaatgtagacggtgaaaaacaatttgaagtattagcaaccaatggtgatacctttttagggggtgaagattttgatttacgcttaattaattaccttgctgatgaattcaaaaaagaaagtggtattgatattcatcaagatactttagcgttgcaacgcattaaagaagcggctgaaaaagcgaagatcgagttatcatcggcactacaaacagaggtgaatttaccgtacgttacggctgatgccagtggtcctaaacacttaaacgtaaaagttactcgagcaaaattagaatcattagttgatgatttagtaaaaagcaccatcgcaccgtgtgaacaagcattaaaagatgctggtttaagtaaagctgatgttagcgaggtaattttggtgggtggtcaaacacgtatgccaaaagtgcaagaagccgttaaaaccttcttttctaaagaaccacgaaaagatgtgaacccagatgaagcggttgcaatgggtgctgcaattcaagcgggggtgatgtcaggcgctgtagatgatgtgttattacttgatgtagcaccactatcactcggcattgaaacgttaggtggtgtaatgactaaacttattgaaaaaaacaccactataccaacccgcgcttctgaaacgttctctacggctgaagacaatcaagctgcggtaacagtacatgtgttgcaagggcaacgtgaaatggcaacagataataaatcgttgggtcaatttaacttaacggatattaatccaggtccacgaggctcagtacaagttgaagttacctttgatattgatgttaatggtattttgaatgtgtcagcgaaagacaaagcaacaggcaaggagcaaagcattaaaattaccgcctcaagtggcttaacggaagatgaaattaatcgcatggtgaaagaggctgaactgcacgcgagtgaagacaaacaaaagcgtgagttagttgatcaacgtaaccaagcagatcaattaattcataccgtgcaaacgtcaatgacgagtttagctcaagatcaacaaacggagcttaaaacattaattgagcaactgaaaatggcagttaatggcagtgataaagctgcaattgaaatgcgtcaaagtgcattacaagaagcttatagtaaaaccatgcaaactgaacaagcgcaatcgcaacaagcagctcagcatcaaggtaacgctgccaatgatggcgctaaggatgaagatataattgatgctgattttgaagacgtaagcaacggttaa

SEQ ID NO: 48713 - protein, 633 aa, Colwellia psychrerythraea
MTKIIGIDLGTTNSCVAVMEGGIAKIIENAEGSRTTPSIVAYANNETLAGQPAKRQSVTNSTNTLFAIKRLIGRKFDDKEVQKDIKLAPYKIVKADNGDAWVEVDGKALSPQEVSAQILRKLKKDAEAYLGETVTDAVITVPAYFNDSQRQATKDAGKIAGLNVKRIINEPTAAALAYGVDKNSNADQKVVVYDLGGGTFDLSIIEISNVDGEKQFEVLATNGDTFLGGEDFDLRLINYLADEFKKESGIDIHQDTLALQRIKEAAEKAKIELSSALQTEVNLPYVTADASGPKHLNVKVTRAKLESLVDDLVKSTIAPCEQALKDAGLSKADVSEVILVGGQTRMPKVQEAVKTFFSKEPRKDVNPDEAVAMGAAIQAGVMSGAVDDVLLLDVAPLSLGIETLGGVMTKLIEKNTTIPTRASETFSTAEDNQAAVTVHVLQGQREMATDNKSLGQFNLTDINPGPRGSVQVEVTFDIDVNGILNVSAKDKATGKEQSIKITASSGLTEDEINRMVKEAELHASEDKQKRELVDQRNQADQLIHTVQTSMTSLAQDQQTELKTLIEQLKMAVNGSDKAAIEMRQSALQEAYSKTMQTEQAQSQQAAQHQGNAANDGAKDEDIIDADFEDVSNG

SEQ ID NO: 48714 - DNA, 1920 bp, Photobacterium profundum
  CDS (1)..(1920): transl_table=11
atgggtagaattattggtattgacttgggtacaactaactcttgtgtagcagtacttgatggcgacaaaccgcgcgtaattgaaaatgcggaaggtgaacgaactacggcatctgttgttgcttacactcaagatggtgaaacgctagttggtcaaccagctaagcgccaagcagtaacaaacccagagaacacattatacgcaattaagcgtttaatcggtcgtcgctttgaagatgaagaagttcagcgtgaccttaaaatcatgcctttcaaaatcgttaaagcggataacggcgatgcatgggtagaagcgaaaggccaaaaaatggctgctcctcaagtatcggctgaaattcttaagaaaatgaagaaaacagctgaagacttcctaggcgaagaagtaacagcggcagttattactgttcctgcatactttaacgatgctcagcgtcaagcaacgaaagatgctggtcgtatcgctggcttagaagttaagcgtattatcaacgaaccaacagcagcagcacttgcttatggtcttgataagaaaggcggcgatcgcactatcgcagtttacgaccttggtggtggtacattcgatatctctatcatcgaaatcgatgaagtagaaggcgagaagactttcgaagttctttcaactaacggtgatacacaccttggtggtgaagatttcgataaccgcttgatcaactatttagttgaagaattcaaaaaagaacaaggcatggatcttcgcaacgatcctcttgcaatgcagcgtctaaaagaagctgctgagaaagcgaaaattgagctttcttctgcacaacaaactgatgtaaaccttccttacatcactgcagatgcgactggccctaagcacatgaacatcaaggtgactcgtgcgaagcttgagtctctagttgaagatcttgtacagcgttctcttgagccgctaaaagttgctctttctgatgctggtctatctgtaagcgaaatcactgacattatcgttgttggtggtcaaactcgtatgcctatggttcaagcaaaagttgctgagttctttggtaaagaaccacgtaaagacgtaaaccctgatgaagctgttgctgtaggcgcggctgttcaagctggtgttcttgcgggtgacgtgaaagatgtacttcttcttgatgtaacgccactatctcttggtatcgaaaccatgggtggtgttatgactaaactgatcgagaagaacacaactatcccaacgaaagcgaaccaagttttctctactgcagaagacaaccagagcgcggtaactatccacgttcttcagggcgagcgtaagcaatctagctacaacaaatcactaggtcagtttaaccttgaaggtattcaagctgctgctcgtggtatgccacaaatcgaagtaacattcgacctagatgctgatggtatcttgcacgtatctgctaaagataagagcacaggtaaagagcagaagatcacgattcaatcttcaagtggcttaagcgaagaagatatcgagaaaatggttcaagaagcagaagctaacaaagaatcggacaagaagttcgaagagttagtaacggctcgtaaccaagctgatcagctaattcacggtactcgtaagcaagttgaagaagctggcgaagcactaccagctgaagacaaagagaaaatcgaagctgctgtttctgaattagaagaagcacgtaaagcggaagataaagaagcaattgatgcgaaagttcaagcgttagttgctgcttctcagaagcttatggaaatcgctcaacagcaagctcaagctcagcaagcaccaggcggtgaaggcgagcaagaagcaaagcaagacgacaatgttgttgacgctgagttcgaagaagtaaaagacgaaaaaaaataa

SEQ ID NO: 48715 - protein, 639 aa, Photobacterium profundum
MGRIIGIDLGTTNSCVAVLDGDKPRVIENAEGERTTASVVAYTQDGETLVGQPAKRQAVTNPENTLYAIKRLIGRRFEDEEVQRDLKIMPFKIVKADNGDAWVEAKGQKMAAPQVSAEILKKMKKTAEDFLGEEVTAAVITVPAYFNDAQRQATKDAGRIAGLEVKRIINEPTAAALAYGLDKKGGDRTIAVYDLGGGTFDISIIEIDEVEGEKTFEVLSTNGDTHLGGEDFDNRLINYLVEEFKKEQGMDLRNDPLAMQRLKEAAEKAKIELSSAQQTDVNLPYITADATGPKHMNIKVTRAKLESLVEDLVQRSLEPLKVALSDAGLSVSEITDIIVVGGQTRMPMVQAKVAEFFGKEPRKDVNPDEAVAVGAAVQAGVLAGDVKDVLLLDVTPLSLGIETMGGVMTKLIEKNTTIPTKANQVFSTAEDNQSAVTIHVLQGERKQSSYNKSLGQFNLEGIQAAARGMPQIEVTFDLDADGILHVSAKDKSTGKEQKITIQSSSGLSEEDIEKMVQEAEANKESDKKFEELVTARNQADQLIHGTRKQVEEAGEALPAEDKEKIEAAVSELEEARKAEDKEAIDAKVQALVAASQKLMEIAQQQAQAQQAPGGEGEQEAKQDDNVVDAEFEEVKDEKK

SEQ ID NO: 48716 - DNA, 1869 bp, Streptomyces avermitilis
  CDS (1)..(1869): transl_table=11
atggcacgtgcggtcggcatcgacctgggcacgactaactccgtcgtcagcgttctggagggcggcgagcccaccgtcatcaccaacgccgagggcgccaggaccacgccgtccgtcgtcgccttcgccaagaacggtgaggtgctcgtcggcgaggtcgccaagcgtcaggcggtcacgaacgtcgacaggacggttcgttcggtcaagcgccacatgggcactgactggaagatcaacctggacggcaaggacttcaacccgcagcagatgagcgccttcatcctgcagaagctgaagcgggacgccgaggcctacctgggcgagaaggtcacggacgcggtcatcaccgtcccggcgtacttcaacgactcggagcgccaggcgacgaaggaggccggcgagatcgccggtctgaacgtcctgcgcatcgtcaacgagccgacggccgccgccctggcctacggcctcgacaaggacgaccagaccatcctcgtcttcgacctcggtggcggcacgttcgacgtgtccctcctggagatcggcgacggcgtcgtcgaggtgaaggccaccaacggtgacaaccacctcggtggcgacgactgggaccagcgtgtcgtcgactacctggtgcagcagttcaaggccggccacggtgtggacctggccaaggacaagatggccctccagcgcctccgcgaggccgccgagaaggccaagatcgagctgtcctcgtccaccgagacctcgatcaacctgccctacatcacggcgtccgccgagggcccgctgcacctggacgagaagctcacgcgcgcccagttccagcagctcaccgctgaccttctggagcgctgcaagacgccgttccacaacgtcatcaaggacgcgggcatcaacctctccgagatcgaccacgtcgttctcgtcggtggctccacccgtatgcccgccgtcgccgagctcgtcaaggagctgaccggcggccaggacgccaacaagggcgtgaacccggacgaggtcgtcgccatcggcgcggccctccaggccggtgtcctcaagggtgaggtcaaggacgtcctgctcctcgacgtgaccccgctgtccctcggtatcgagaccaagggcggcatcatgaccaagctcatcgagcgcaacaccacgatcccgaccaagcggtccgagatcttcacgacggccgaggacaaccagccgtccgtgcagatccaggtctaccagggcgagcgcgagatcgcggcgtacaacaagaagctcgggatgttcgagctgaccggtctgccgccggccccgcgcggggtcccgcagatcgaggtcgccttcgacatcgacgccaacggcatcatgcacgtgaccgcgaaggacctgggcacgggcaaggagcagaagatgaccgtcaccggcggctcctcgctgccgaaggacgaggtcgaccggatgcgccaggaggccgagcagtacgcggacgaggaccaccgtcgccgcgaggccgccgagacccgcaaccagggcgagcagctcgtctaccagacggagaagttcctcaaggacaacgaggacaaggtccccggcgaggtcaagaccgaggtcgaggcgtccatcgaggagctgaaggccgcgctcaagggcgagtccgccgaaggcgacaacaccgccgagatccgtacggccaccgagaaggtcgccgctgtctcgcagaagctgggccaggcgatgtacgccgacgcccaggccgcgcaggcggcgggcggcgccgagggtgccgccggcggcgagcacgccaaggccgctgacgacgacgtcgtcgacgccgagatcgtcgacgaggaccgcaaggacggtgccgcgtga

SEQ ID NO: 48717 - protein, 622 aa, Streptomyces avermitilis
MARAVGIDLGTTNSVVSVLEGGEPTVITNAEGARTTPSVVAFAKNGEVLVGEVAKRQAVTNVDRTVRSVKRHMGTDWKINLDGKDFNPQQMSAFILQKLKRDAEAYLGEKVTDAVITVPAYFNDSERQATKEAGEIAGLNVLRIVNEPTAAALAYGLDKDDQTILVFDLGGGTFDVSLLEIGDGVVEVKATNGDNHLGGDDWDQRVVDYLVQQFKAGHGVDLAKDKMALQRLREAAEKAKIELSSSTETSINLPYITASAEGPLHLDEKLTRAQFQQLTADLLERCKTPFHNVIKDAGINLSEIDHVVLVGGSTRMPAVAELVKELTGGQDANKGVNPDEVVAIGAALQAGVLKGEVKDVLLLDVTPLSLGIETKGGIMTKLIERNTTIPTKRSEIFTTAEDNQPSVQIQVYQGEREIAAYNKKLGMFELTGLPPAPRGVPQIEVAFDIDANGIMHVTAKDLGTGKEQKMTVTGGSSLPKDEVDRMRQEAEQYADEDHRRREAAETRNQGEQLVYQTEKFLKDNEDKVPGEVKTEVEASIEELKAALKGESAEGDNTAEIRTATEKVAAVSQKLGQAMYADAQAAQAAGGAEGAAGGEHAKAADDDVVDAEIVDEDRKDGAA

SEQ ID NO: 48718 - DNA, 1917 bp, Colwellia psychrerythraea
  CDS (1)..(1917): transl_table=11
atgggcaaaattattggtattgacctaggaacaactaactcatgtgttgctgttttagatggcgacagtgtacgtgttattgaaaatgcagaaggcgatcgtacaactccttctattattggttatacagccgaaggcgaaacattagtaggtcaacctgctaagcgtcaatctgtaactaacccagaaaacactttatatgcaattaaacgcttaatcggtcgtcgtttcgaagataaagaaacacaacgtgacatcgatattatgccatttggtattgttaaagcggataacggtgatgcttgggttcaagtaaaaggcgagaaaattgctccgccacaagtttcagctgaagttcttaagaaaatgaaaaagactgctgaagacttcttaggtgaaaccgtaactgaagctgttattactgtacctgcttactttaacgattcacaacgccaagcaacgaaagatgctggtcgtattgctggtcttgaagtcaaacgtattatcaacgaacctactgctgctgcccttgcttacggcatggacaaacaagaaggtgacaaagttgttgcagtttacgatttaggtggtggtacattcgatatttcaatcattgaaattgatgaaatggatggcgaacacacttttgaagtattagcgactaacggtgatactcacttaggtggtgaagattttgataaccgtttaatcaactaccttgtagctgaattcaaaaaagaccaaggcatggacttaacgtctgatcctttagcaatgcagcgtttaaaagaagcagcagaaaaagctaaatgtgaactttcttcagcacaacaaacagatgtaaacttaccttacatcactgctgatggttcaggtcctaagcacatgaacatcaaagtgactcgtgctaagttagaatcactagttgaagatatggttaaagcaacattagagccgcttaaacaagcgcttaaagatgcagacttatcagtaagcaagattgatgatgttattttagttggtggtcaatctcgtatgccactagttcaaaaaactgttactgatttcttcggtaaagagccacgtaaagatgttaaccctgatgaagcagtagcttctggtgcggcgattcaagcgggtgttctttctggtgatgtgactgacgttcttttattagacgttacaccactatcattaggtatcgaaactatgggcggtgtgatgactaaggttatcgacaaaaacactactatcccaactaagcaatcacaaactttctctacagctgatgataaccaagctgcagtaactgttcatgtttgtcagggtgagcgtaagcaagcttcagcaaacaaatctttaggtcaatttaaccttgaaggtattgaaccagcacaacgtggtacaccacaaatcgaagtaacttttgatattgatgctgatggtatcttgcacgttacggctaaagataagaatactggtaaagagcaaaaaatcactatcaaagcctcttctggtttatctgatgaagaagtagagcagatggtacgtgatgcagaagctaacgctgatgctgatgctaaatttgaagagctagtaactgcacgtaatcaagctgatggcatgattcacgcgactcgcaagcaagttgaagaagcaggcgaagagttaccaagcgaagataaagaaaaaattgaagcagcattaactgagcttgaagaagcagttaaaggtgatgataaagaagtaattgaagctaaaactcaagcacttatggaagcatcagctaagttaatggaaattgctcaagctaaagaacaagctcaaagcgctcctgaaggtgctcaagaagctgacgcagctcctgcagacgatgttgttgatgctgagtttgaagaagttaaagacgacaagtaa

SEQ ID NO: 48719 - protein, 638 aa, Colwellia psychrerythraea
MGKIIGIDLGTTNSCVAVLDGDSVRVIENAEGDRTTPSIIGYTAEGETLVGQPAKRQSVTNPENTLYAIKRLIGRRFEDKETQRDIDIMPFGIVKADNGDAWVQVKGEKIAPPQVSAEVLKKMKKTAEDFLGETVTEAVITVPAYFNDSQRQATKDAGRIAGLEVKRIINEPTAAALAYGMDKQEGDKVVAVYDLGGGTFDISIIEIDEMDGEHTFEVLATNGDTHLGGEDFDNRLINYLVAEFKKDQGMDLTSDPLAMQRLKEAAEKAKCELSSAQQTDVNLPYITADGSGPKHMNIKVTRAKLESLVEDMVKATLEPLKQALKDADLSVSKIDDVILVGGQSRMPLVQKTVTDFFGKEPRKDVNPDEAVASGAAIQAGVLSGDVTDVLLLDVTPLSLGIETMGGVMTKVIDKNTTIPTKQSQTFSTADDNQAAVTVHVCQGERKQASANKSLGQFNLEGIEPAQRGTPQIEVTFDIDADGILHVTAKDKNTGKEQKITIKASSGLSDEEVEQMVRDAEANADADAKFEELVTARNQADGMIHATRKQVEEAGEELPSEDKEKIEAALTELEEAVKGDDKEVIEAKTQALMEASAKLMEIAQAKEQAQSAPEGAQEADAAPADDVVDAEFEEVKDDK

SEQ ID NO: 48720 - DNA, 1902 bp, Prochlorococcus marinus
  CDS (1)..(1902): transl_table=11
atggggaaggttgtagggattgatcttggtacaactaatagctgtgttgctgtaatggagggagggaaacctacagtaattgcaaatgcagaaggttttcgaacaacaccttctgttgtggcttataccaaaaatcaagatcaactggttggtcagattgcaaaacgccaagcagtgatgaatccagagaatactttttattctgctaaacgttttgtaggaaggcgagtcgatgaagtaaatgaagagtctaaggaggttagttattctgtagagaagtcaggttctagcgtaaaactaaagtgcccagttttagataagcaattttcacctgaggaagttgctgctcaggttttaagaaaactttcagaagatgcaggtaagtatttaggagaaaatattaatcaagcggtgattactgtccctgcatatttcaatgattctcaacgtcaagctactaaggatgctggcaagattgctggattagaagttttaaggattattaatgaaccaacagcagcagcacttgcttatggattagatagaaaaagcaatgaacgcatactagtttttgatttaggtggtggtacttttgatgtttctgtactagaggttggtgatggagtatttgaagtcctttcaacgtctggtgatactcatttaggtggagatgatttcgacaaagtaattgttgatcatttagctgcaactttcaaagccaatgaaggtattgaccttcggcaagacaaacaagctcttcaacgccttacagaagcagcagaaaaggcaaagattgaattgtcaaatgctactcaaagtgaaattaatctaccttttattactgctactcctgaaggaccaaagcatgtagatttaacactcactagagcaaaatttgaagaattagcttctaatttgattgatcgttgtcgtgttcctgttgaacaggcattgaaagatgcaaagttatctaccggagagattgatgaaattgttatggttggaggatcaacacgtatgccagcagtaaaggaactagttaaaagagttacagggaaagatcctaatcaaacagttaatccagatgaagttgttgcagttggtgctgctattcagggaggggtattagccggagaagttaaggatattttgctgctggatgtgactccgttgtctttgggtgttgaaacgttgggtggtgtgatgactaaaatgattactcgaaatacgactgtacctactaaaaaaacagagacttattctactgctgttgatggtcagacaaacgttgaaattcacgttttacaaggtgaacgtgagatggcatcagataacaagagcttaggtacttttcgtttagatgggatccctccatctcctcgtggagtccctcagattgaggtaacttttgatattgatgcaaatggaattttaagtgtaactgcaaaagacaaaggtagtggtaaagagcaaagtatttctattacaggtgcatctactctttctgataatgaagttgagaagatggtgaaagatgccgaaactaatgcgactgcagataaagaaaaaagagatcgtatagatattaaaaatcaagcagaaacacttgtataccagactgagaaacaacttggagaattaggagataaagttgatgaagaagcaaaagcaaaagtcgaagcaaagcgaattcaattaaaagaagcaacagagaaagatgactacgaaacaatgaaaactcttgtcgaagaccttcaaaaggaattgtattctttaggtgcttctgtatatcaacagtctaatgctgcttctcaagcagcagatggaacctcatccgaatctaataattctactgagggaaatgatgatgtaattgatgctgaatttactgagtctaaataa

SEQ ID NO: 48721 - protein, 633 aa, Prochlorococcus marinus
MGKVVGIDLGTTNSCVAVMEGGKPTVIANAEGFRTTPSVVAYTKNQDQLVGQIAKRQAVMNPENTFYSAKRFVGRRVDEVNEESKEVSYSVEKSGSSVKLKCPVLDKQFSPEEVAAQVLRKLSEDAGKYLGENINQAVITVPAYFNDSQRQATKDAGKIAGLEVLRIINEPTAAALAYGLDRKSNERILVFDLGGGTFDVSVLEVGDGVFEVLSTSGDTHLGGDDFDKVIVDHLAATFKANEGIDLRQDKQALQRLTEAAEKAKIELSNATQSEINLPFITATPEGPKHVDLTLTRAKFEELASNLIDRCRVPVEQALKDAKLSTGEIDEIVMVGGSTRMPAVKELVKRVTGKDPNQTVNPDEVVAVGAAIQGGVLAGEVKDILLLDVTPLSLGVETLGGVMTKMITRNTTVPTKKTETYSTAVDGQTNVEIHVLQGEREMASDNKSLGTFRLDGIPPSPRGVPQIEVTFDIDANGILSVTAKDKGSGKEQSISITGASTLSDNEVEKMVKDAETNATADKEKRDRIDIKNQAETLVYQTEKQLGELGDKVDEEAKAKVEAKRIQLKEATEKDDYETMKTLVEDLQKELYSLGASVYQQSNAASQAADGTSSESNNSTEGNDDVIDAEFTESK

SEQ ID NO: 48722 - DNA, 1902 bp, Streptomyces avermitilis
  CDS (1)..(1902): transl_table=11
atggccaaggcagtgggcatcgacctgggcaccaccaactcggtgatcgccgtgtgggagggcggcgagccgtccgtcgtacccaacagcgagggcaaccgcacgacaccgtccgtggtggccttcaccgacaccggggaacgcctggtgggccagctggcccggcgccaggcgatcctcaacccgaagggcaccatctactcggccaagcggttcatcggccggcacttcgacgagatctccgacgaggccagggcggtgacgtacgacgtcgtcgagggcgacggcggggcggcccgcttcaaggtgcgcgacaagctgtacgcgcctgaggagatcagcgcacaggtgctgcgcaaactcgccgacgacgcctccaagcagctcggggagcgggtcacggaggcggtcatcacggtgcccgcctacttcaacgacgctcagcgcaccgccaccaaggacgccggacggatcgcgggactggaggtgctgcggatcatcaacgagccgacggcggccgccctcgcgtacggcatggacaagaaggagcacgagaccgtcctcgtcttcgacctgggcggcggcaccttcgacgtgagcatcctcgacgtcggcgacggcgtggtggaggtgcgctccaccgccggcgacagccacctgggcggcgacgacttcgaccgccgtctggtggattacctcgcggacgacttccagcaggagaacggcatcgacctgcgcaaggacccgcaggcgctgcaacgactgttcgaggcggcggagaaggccaagaccgagctcagttcggtgacgcagacgcaggtcagcctgccgttcatcaccgccgacgcctcgggccccaagcacctcaccgacacggtcatgcggtccacgttcgagcagatcaccagcgacctggtggagcgttgcctgggaccggtccagcaggcgatggccgacgccaaggtcggcgagagcgacatcgacgaggtcatcctcgtaggcggttccacacgtatcccggcggtgcaggctctggtccgccgactgaccggcggcaaggacccgaacatgagcgtcaaccccgacgaggtcgtcgccctgggcgccgcgatccaggccggggtgctcaagggcgaggtcaaggacgtcctgctgctcgacgtcacacccttgtcgctgggcgtggagacgcgcggtggagtgatgacgaagatcatcgagcggaacaccaccatcccggtgcgtcgcagcgagaccttctccaccgccgaggacaatcagccggccgtcgatgtggtggtcctccagggcgagcgcgagcgggccgccgacaaccgggtgctgggccggttccagctcaccgacatccggccggcgccgcggggcgaaccgcaggtcgaggtcaccttcgacatcgacgccaacggcatcctcaacgtcaccgcacgggacaaggacaccggcaaggaacagggcatcaccatcagcgagagctccaacctggaccgcagcgaggtcgaacgcatggtccaggaggccgagcgcaaccagggccaggaccaggcactccgcgaggccgtcgacgcccgcaacgaactcgacgccgtcgcgtaccaggtcgagaagcgcctcgccgaactgggcgacgcggcgcccgcgcacgagaaggcacgcgccgagatgctcgtgtccgacgcccgggcggcggtcaaggaagaggcgggcgtggagcgcgtgcggcccctgacctccgaactccagcaggtgctcgccggactggcggcccatcagggcgccgccaccgcggatggcggtcccgcccagcacgccgccaccggtggtcccacgagcggcggtggcggtggcgacgatgtcatcgacgccgagttcgacaagggctga

SEQ ID NO: 48723 - protein, 633 aa, Streptomyces avermitilis
MAKAVGIDLGTTNSVIAVWEGGEPSVVPNSEGNRTTPSVVAFTDTGERLVGQLARRQAILNPKGTIYSAKRFIGRHFDEISDEARAVTYDVVEGDGGAARFKVRDKLYAPEEISAQVLRKLADDASKQLGERVTEAVITVPAYFNDAQRTATKDAGRIAGLEVLRIINEPTAAALAYGMDKKEHETVLVFDLGGGTFDVSILDVGDGVVEVRSTAGDSHLGGDDFDRRLVDYLADDFQQENGIDLRKDPQALQRLFEAAEKAKTELSSVTQTQVSLPFITADASGPKHLTDTVMRSTFEQITSDLVERCLGPVQQAMADAKVGESDIDEVILVGGSTRIPAVQALVRRLTGGKDPNMSVNPDEVVALGAAIQAGVLKGEVKDVLLLDVTPLSLGVETRGGVMTKIIERNTTIPVRRSETFSTAEDNQPAVDVVVLQGERERAADNRVLGRFQLTDIRPAPRGEPQVEVTFDIDANGILNVTARDKDTGKEQGITISESSNLDRSEVERMVQEAERNQGQDQALREAVDARNELDAVAYQVEKRLAELGDAAPAHEKARAEMLVSDARAAVKEEAGVERVRPLTSELQQVLAGLAAHQGAATADGGPAQHAATGGPTSGGGGGDDVIDAEFDKG

SEQ ID NO: 48724 - DNA, 1902 bp, Actinobacillus actinomycetemcomitans
  CDS (1)..(1902): transl_table=11
atgggaaaaattgttggtattgacttaggtacaaccaactcttgcgttgccgtcatggaaggtgaaaaacctcgtgttatcgaaaacgcagaaggcgatcgtactactccgtcaatcattgcttatacaaatgacaatgaaactttagtcggtcaaccggcaaaacgccaagcggtaaccaacccgaaaaataccttattcgccatcaaacgtttaatcggccgtcgttttgaagatgaggaagtaaaacgcgatatcgacattatgccgttcgccattaccaaagcagacaacggcgatgcgtgggttgaagtgaaaggagaaaaattagcgcctccgcaaatttctgctgaagtattgaaaaaaatgaaaaaagctgccgaagattatttgggcgaaccggttaccgaggcggttattactgtgccggcatactttaacgacgcacaacgtcaggcaacaaaagatgcaggtcgtatcgcaggtttagacgttaaacgtatcatcaacgaaccgaccgccgcggcattagcttatggcttagacaaaggcaccggcaacaaaaccatcgcggtatacgacttaggtggcggtacattcgacttatctatcatcgaaatcgatgaagtaggcggcgaaaaaacctttgaagtattagcaaccaacggtgatacacacttaggtggtgaagactttgataaccgtatcatcaactacttagtggatgagttcaaaaaagaacagggcatcgacctacgcaacgacccgcttgcaatgcaacgtttaaaagaagcggcagaaaaagccaaaatcgagctttcttccgcccaacaaaccgatgtaaatcttccttacattacagcggatgcaaccggtcctaaacacttaaacatcaaattgactcgtgcaaaattagagtctttggttgaggatttagtggcgaaatcccttgagcctgtacgtattgcattaaaagatgcaggcaaatccccgtctgaaatcgacgatgtgattttagtcggcggtcaaacccgtatgccgcttgttcaacaagaagttgaaaaattcttcggcaaagcaccacgtaaagacgtgaatccggatgaagcggtcgctatcggtgctgcggtacaaggcggtgtgttagccggtgatgtgaaagatgtattattgttagacgtcaccccattatcattgggtatcgaaactatgggcggcgtaatgaccaccttaattgagaaaaacaccacgattcctaccaagaaatcacaagtgttctcaacagcggaagataaccaaagtgcggtaaccattcatgtgttacaaggtgagcgtaaacaagcgtcagccaataaatcgttaggtcaattcaatcttgaaggcatcaatccggttccacgcggtatgccgcaaattgaagtgaccttcgacatcgacgcagacggtattatccacgtttctgcgaaggataaaggcacaggtaaagaacaacaaatcaccattaaatcctcttccggtttaagcgatgaagaaattcaacaaatggtacgcgacgctgaagcaaatgccgaatccgaccgtaaatttgaagaattggtacaagcccgcaaccaagcggatcacttaatccacagcacacgcaaacaattggacgaagccggtgacaaagtacctgcagcagatcgcggcaccatcgaaagcgcattaagtgacttggaaaaagcggcgaagggcgaagataaagcagttatcgaagcaaaaatcaaagcattagccgaagttgcacaaaaacttgcacaaaccgctcaaccacacggcgatccacaacaagctcaaagcaacagcaaaccaaatgatgatgttgttgatgcagagtttgaagaagtgaaagataacaagtaa

SEQ ID NO: 48725 - protein, 633 aa, Actinobacillus actinomycetemcomitans
MGKIVGIDLGTTNSCVAVMEGEKPRVIENAEGDRTTPSIIAYTNDNETLVGQPAKRQAVTNPKNTLFAIKRLIGRRFEDEEVKRDIDIMPFAITKADNGDAWVEVKGEKLAPPQISAEVLKKMKKAAEDYLGEPVTEAVITVPAYFNDAQRQATKDAGRIAGLDVKRIINEPTAAALAYGLDKGTGNKTIAVYDLGGGTFDLSIIEIDEVGGEKTFEVLATNGDTHLGGEDFDNRIINYLVDEFKKEQGIDLRNDPLAMQRLKEAAEKAKIELSSAQQTDVNLPYITADATGPKHLNIKLTRAKLESLVEDLVAKSLEPVRIALKDAGKSPSEIDDVILVGGQTRMPLVQQEVEKFFGKAPRKDVNPDEAVAIGAAVQGGVLAGDVKDVLLLDVTPLSLGIETMGGVMTTLIEKNTTIPTKKSQVFSTAEDNQSAVTIHVLQGERKQASANKSLGQFNLEGINPVPRGMPQIEVTFDIDADGIIHVSAKDKGTGKEQQITIKSSSGLSDEEIQQMVRDAEANAESDRKFEELVQARNQADHLIHSTRKQLDEAGDKVPAADRGTIESALSDLEKAAKGEDKAVIEAKIKALAEVAQKLAQTAQPHGDPQQAQSNSKPNDDVVDAEFEEVKDNK

SEQ ID NO: 48726 - DNA, 1902 bp, Agrobacterium tumefaciens
  CDS (1)..(1902): transl_table=11
atggcaaaagtaatcggtatcgaccttggcacgaccaactcctgcgtcgcagtgatggatggcaaggacacgaaagtaattgaaaacgcagaaggcgcgcggaccacgccgtcgatggtggcattttccgacgatggcgaacgccttgtcggccagccggccaagcgccaggcagtcaccaacccgaccaacaccctgtttgcggtcaagcgccttatcggccgccgttatgaagacccgaccgtcgagaaggacaaggcactcgtccccttcgaaatcgtcaagggcgacaatggcgacgcctgggtgaaggctcaggacaagaattattccccttcgcagatttccgcgatgatccttcaaaagatgaaggaaacggctgaatcctatctcggcgaaaaggtcgagaaggccgtcatcaccgttccggcctactttaacgacgcccagcgtcaggccaccaaggatgccggccgcatcgccggtctcgatgttctgcgtatcatcaacgagccgacggcagcagccctcgcttacggcctcgacaagaaggaaggcaagaccattgccgtttacgaccttggcggcggcacgttcgatatttccgttctggaaatcggcgacggcgtctttgaagtgaagtcgaccaacggtgataccttcctcggtggtgaagacttcgacatgcgtctggtcgaatatctggccggcgagttcaagaaggatcagggcatcgacctgaagaacgacaagctcgctctgcagcgcctcaaggaagctgccgaaaaggcgaagatcgaactttcgtcctcgcagcagaccgaaatcaacctgccgttcatcacggctgatgcttccggtccgaagcacctgacgctgaagctgacccgcgccaagttcgaaagcctggttgacgatctggtgcaacgcactgtcgccccttgcaaggcagcactgaaggatgccggcgttaccgcggccgagatcgacgaagtcgttctcgtcggcggcatgagccgcatgcctaaggttcaggaagtcgtcaagcagctgttcggcaaggagccgcacaagggcgtgaacccggatgaagtggttgccatgggcgccgctattcaggccggcgttctgcagggcgacgtcaaggacgttctgctgctcgacgtgaccccgctgtcgctcggcatcgaaacgctgggtggcgtcttcacgcgtctgatcgatcgcaacaccacgatcccgacgaagaagagccagaccttctcgactgccgaagacaaccagtcggccgtgaccatccgcgtttcgcagggtgagcgcgaaatggcacaggacaacaagctgctcggccagttcgacctcgtcggtctgccgccgtcgccacgcggcgttccgcagatcgaagtgaccttcgatatcgacgccaacggcatcgtgcaggtatccgccaaggacaagggcaccggcaaggagcagcagatccgcatccaggcctccggtggtctctccgacgccgacatcgaaaagatggtgaaggacgccgaagccaatgccgaggccgacaagaagcgtcgcgccggtgtcgaagccaagaaccaggccgaaagcctcattcactccaccgaaaagtcggtgaaggaatatggcgacaaggtttccgagaccgaccgcaaggcgatcgaagacgccattgccagcctgaagaccgctgtcgaagccgccgagcctgacgcagacgacattcaggccaagacccagaccctcatggaagtctccatgaagcttggtcaggccatctacgaagcacagcaggccgaggccggtgatgcttccgcagaaggcaaggatgacgtcgtcgatgccgactatgaagaaatcaaggacgacaagaagtccgcataa

SEQ ID NO: 48727 - protein, 633 aa, Agrobacterium tumefaciens
MAKVIGIDLGTTNSCVAVMDGKDTKVIENAEGARTTPSMVAFSDDGERLVGQPAKRQAVTNPTNTLFAVKRLIGRRYEDPTVEKDKALVPFEIVKGDNGDAWVKAQDKNYSPSQISAMILQKMKETAESYLGEKVEKAVITVPAYFNDAQRQATKDAGRIAGLDVLRIINEPTAAALAYGLDKKEGKTIAVYDLGGGTFDISVLEIGDGVFEVKSTNGDTFLGGEDFDMRLVEYLAGEFKKDQGIDLKNDKLALQRLKEAAEKAKIELSSSQQTEINLPFITADASGPKHLTLKLTRAKFESLVDDLVQRTVAPCKAALKDAGVTAAEIDEVVLVGGMSRMPKVQEVVKQLFGKEPHKGVNPDEVVAMGAAIQAGVLQGDVKDVLLLDVTPLSLGIETLGGVFTRLIDRNTTIPTKKSQTFSTAEDNQSAVTIRVSQGEREMAQDNKLLGQFDLVGLPPSPRGVPQIEVTFDIDANGIVQVSAKDKGTGKEQQIRIQASGGLSDADIEKMVKDAEANAEADKKRRAGVEAKNQAESLIHSTEKSVKEYGDKVSETDRKAIEDAIASLKTAVEAAEPDADDIQAKTQTLMEVSMKLGQAIYEAQQAEAGDASAEGKDDVVDADYEEIKDDKKSA

SEQ ID NO: 48728 - DNA, 1899 bp, Aquifex aeolicus
  CDS (1)..(1899): transl_table=11
atggctgaaaagaaggaaaaaataattgggatagaccttggaactacgaactccgttgtttctgtaatgatgggggatgaagcggtagtaatccaaaaccaagaaggttcaaggttaaccccctcagtagtttcctggaccaaggaaaaggaaattctggtaggagaacccgcaaagagaagggcgatactggatcctgaaaacaccgtatacgaaagtaaaaggttcataggtaggaagtttgaagaagtaaaggaagaggcaaagagagtatcttacaaggtagttcccgatgaaaagggagacgccgcctttgacataccgaacgccggaaagctcgtgaggcctgaggaagtaggagcacacgttctcaggaagttaaaggaagctgcagaagcgttcctcggagaacccgtcaagaaagcggtgataaccgttcccgcatacttcaacgaaagacagaggcaggcgacaaaggacgcgggtaagatagcgggacttgaagttgtaaggatactgaacgaacccaccgccgcggcaatggcttacggactccacaagaaggacaacgtaaggatactcgtttacgacttcggaggaggaacctttgatgtttccatactggaaggcggtgagggcgtaatagaggtaaaggtaacggcgggagacacgcaccttggcggtgcaaacatagacgagaggataatggactggttaattgaagagttcaagaaggaaacgggaatagacctgagaaaggacagaaccgcactccagagactcaaggaagcttccgaacaggccaaaaaagaactctccttcaagatggaaacggaaattaacctgccgttcataaccatagaccccaacactaaccagcccctccacctccagaagaagctcaccagagcaagacttgaagaaatgattaaagacatcgttgacagaaccatagacatagttaaacaggcactagaagacgccaaactaaagccctccgacatagacgaagtggttcttgtaggcggttcaacgaggatacctttagttcagcaaaggattaaggagttcttcggaaaagagccccacaagggactgaaccccgacgaagttgtagcgatgggtgcggcaattcaggcaggtgttctcgcaggagaagtcaaggaaatcgttctcgttgacgtaacacccctgtctctcggagttgaaacctacggaggggtaatgactgttctcattcccagaaacaccccgatacccgtcagaaagtgtgaaatcttcacaaccgcccacgactatcaaacggaagttgaaatacacgtccttcagggtgaaagacctctcgctaaggacaacaagtccctcgctaaattctacctgacgggaatacctccggcacctagaggagtgcccaagatagaagtttgctttgacatagacgcggacggtatactccacgttaccgcaaaggacctcggaacgggtaaagagcagtccgtaagggtagaaatatcctccggactaacgcccgaagaaattgaaaggattatcaaggaagctgaagagcacgccgaagaagacaggaagaagaaagaactcattgaagctaagaaccagcttgaccacctcgtttaccagcttgaaaaggcactaaaagaagcgggagacaaagtacccgcagacgtaaagagcgaagcggaaaaggttatagaagaagctaagaaaaccatagaaaccgcaacggaaattgaacaggtaaaacaagttacggaaaaggttctccaggtttcctcaaagatgggaaccacactctacggtgaagccggaaaacaagcgggcggaggagaaaagaaggacgaaggtggagagggagaagtagaagccaaacccgttgattaa

SEQ ID NO: 48729 - protein, 632 aa, Aquifex aeolicus
MAEKKEKIIGIDLGTTNSVVSVMMGDEAVVIQNQEGSRLTPSVVSWTKEKEILVGEPAKRRAILDPENTVYESKRFIGRKFEEVKEEAKRVSYKVVPDEKGDAAFDIPNAGKLVRPEEVGAHVLRKLKEAAEAFLGEPVKKAVITVPAYFNERQRQATKDAGKIAGLEVVRILNEPTAAAMAYGLHKKDNVRILVYDFGGGTFDVSILEGGEGVIEVKVTAGDTHLGGANIDERIMDWLIEEFKKETGIDLRKDRTALQRLKEASEQAKKELSFKMETEINLPFITIDPNTNQPLHLQKKLTRARLEEMIKDIVDRTIDIVKQALEDAKLKPSDIDEVVLVGGSTRIPLVQQRIKEFFGKEPHKGLNPDEVVAMGAAIQAGVLAGEVKEIVLVDVTPLSLGVETYGGVMTVLIPRNTPIPVRKCEIFTTAHDYQTEVEIHVLQGERPLAKDNKSLAKFYLTGIPPAPRGVPKIEVCFDIDADGILHVTAKDLGTGKEQSVRVEISSGLTPEEIERIIKEAEEHAEEDRKKKELIEAKNQLDHLVYQLEKALKEAGDKVPADVKSEAEKVIEEAKKTIETATEIEQVKQVTEKVLQVSSKMGTTLYGEAGKQAGGGEKKDEGGEGEVEAKPVD

SEQ ID NO: 48730 - DNA, 1836 bp, Bacillus cereus
  CDS (1)..(1836): transl_table=11
  misc_feature (783)..(783): k is g or t
  misc_feature (784)..(784): k is g or t
  misc_feature (1011)..(1011): s is g or c
  misc_feature (1044)..(1044): r is g or a
atgagtaaaattatcggtattgacttaggtacaacaaactcttgtgtagctgttatggaaggtggagaaccaaaggttatcccaaatccagaaggaaaccgtacaacaccttctgttgtagctttcaaaaatgaagaacgtcaagttggggaagtagcaaagcgtcaagcaattacaaacccaaatacaatcatgtctgttaaacgtcatatgggtacagactacaaagtagaaatcgaaggtaaagaatatacacctcaagaaatttctgcaatcattttacaaaacttaaaagcttctgctgaagcatatttaggtgaaacagtaacgaaagctgttattacagtacctgcatacttcaacgatgcagagcgtcaagcaacgaaagatgctggtcgtatcgctggtttagaagttgaacgtatcattaacgaaccaacagcagcagcgcttgcttacggtttagaaaaacaagatgaagagcaaaaaatcttagtatatgacttaggtggcggtacatttgacgtatctatccttgagttagcagatggaacatttgaagttatttcaactgctggtgacaaccgtcttggtggagatgactttgaccaagttatcatcgatcacttagtagctgaattcaaaaaagaaaataacattgatttaagccaagataaaatggcacttcaacgtttgaaagatgcagctgaaaaagcgaaaaaagatctttcaggtgtaacacaaacacaaatttcattgccattcattagtgctggagctgckkgtccattacacttagaattaacattaacaagagcgaaattcgaagagctttcagcaaaccttgttgaaagaacattagaaccaactcgtcgtgctttaaaagatgctggtctatctgcaagtgaattagatcgcgttatccttgtaggtggttctactcgtatcccagctgtacaagaagctattaaacgtgaaactggtaaagaaccatataaaggtgtaaacccsgatgaagttgtagcattaggtgctgcagttcarggtggcgtacttactggtgatgtagaaggcgtactattattagatgtaactccactttctttaggtattgaaactatgggtggtgtgttcacgaaattaatcgagcgtaacactacaattccaacaagtaaatcacaagtattctcaacagctgctgataaccaaccagcagtagacattcacgtattacaaggtgagcgtccaatgtcagctgacaacaaaacgttaggacgtttccaattaacggatatcccaccagcaccacgtggtattccacaaatcgaagtaacattcgatattgatgcgaacggtatcgttaacgtacgtgcaaaagatttaggaacaagcaaagaacaagctattacaatccaatcttcttcaggtctttctgatgaagaagtagatcgtatggtaaaagaagcagaagcaaacgctgacgctgaccaaaaacgtaaggaagaagttgaacttcgtaacgaagctgaccaacttgtattccaaacagataaagttgtaaaagatttagaaggtaaagtagatgcagctgaagttgcaaaagcaacagaagcgaaagaagcattacaagctgcgattgagaagaacgagcttgaggaaatccgtgcgaaaaaagacgctttgcaagaaatcgtacaacaactaactgttaaactatatgagcaagctcaagcagctgcagggcaagcagaaggtgcacaaggagcacaagatgctggcgcgaagaaagacaatgtagtagacgctgagtttgaagaagtaaaagaagacaagtaa

SEQ ID NO: 48731 - protein, 611 aa, Bacillus cereus
  misc_feature (262)..(262): The Xaa at location 262 stands for Cys, or Gly.
MSKIIGIDLGTTNSCVAVMEGGEPKVIPNPEGNRTTPSVVAFKNEERQVGEVAKRQAITNPNTIMSVKRHMGTDYKVEIEGKEYTPQEISAIILQNLKASAEAYLGETVTKAVITVPAYFNDAERQATKDAGRIAGLEVERIINEPTAAALAYGLEKQDEEQKILVYDLGGGTFDVSILELADGTFEVISTAGDNRLGGDDFDQVIIDHLVAEFKKENNIDLSQDKMALQRLKDAAEKAKKDLSGVTQTQISLPFISAGAAXPLHLELTLTRAKFEELSANLVERTLEPTRRALKDAGLSASELDRVILVGGSTRIPAVQEAIKRETGKEPYKGVNPDEVVALGAAVQGGVLTGDVEGVLLLDVTPLSLGIETMGGVFTKLIERNTTIPTSKSQVFSTAADNQPAVDIHVLQGERPMSADNKTLGRFQLTDIPPAPRGIPQIEVTFDIDANGIVNVRAKDLGTSKEQAITIQSSSGLSDEEVDRMVKEAEANADADQKRKEEVELRNEADQLVFQTDKVVKDLEGKVDAAEVAKATEAKEALQAAIEKNELEEIRAKKDALQEIVQQLTVKLYEQAQAAAGQAEGAQGAQDAGAKKDNVVDAEFEEVKEDK

SEQ ID NO: 48732 - DNA, 1836 bp, Bacillus cereus
  CDS (1)..(1836): transl_table=11
atgagtaaaattatcggtattgacttaggtacaacaaactcttgtgtagctgttatggaaggtggagaaccaaaggttatcccaaatccagaaggaaaccgtacaacgccttctgttgtagctttcaaaaatgaagagcgtcaagttggggaagttgcaaagcgtcaagcaattacaaacccaaatacaatcatgtctgttaaacgtcatatgggtacagactacaaagtagaagttgaaggtaaagattatacaccacaagaaatttctgcaattattttacaaaacttaaaagcttctgctgaagcatacttaggtgaaacggtaacgaaagctgttattacagtacctgcatacttcaacgatgcagaacgtcaagcaacaaaagatgctggtcgtatcgctggtttagaagttgagcgtattatcaacgaaccaacagcagcagcgcttgcttacggtttagaaaaacaagatgaagagcaaaaaatcttagtatatgacttaggtggcggtacatttgacgtatctatccttgagttagcagatggaacattcgaagttatttcaactgctggtgacaaccgtcttggtggagatgactttgaccaagtgattattgaccacttagtggctgagttcaaaaaagaaaataacattgatttaagccaagataaaatggcacttcaacgtttgaaagatgcagctgaaaaagcgaaaaaagatctttctggcgtaacacaaacacaaatttcattaccattcattagtgctggagctgctggcccattacacttagaattaacattaacaagagcgaaattcgaagagctttcagcaggtcttgttgaaagaacattagagccaactcgtcgtgcattaaaagacgctggttttgctccaagcgaattagataaagttattcttgttggtggatctactcgtatcccagctgtacaagaagctattaaacgtgaaactggtaaagagccatataaaggtgtaaaccctgatgaagttgtagcattaggtgctgcagttcaaggtggcgtacttactggtgatgtagaaggcgtactattattagacgtaactccactttctttaggtattgaaactatgggtggcgtgttcacgaaattaatcgagcgtaacactacaattccaacaagtaagtcacaagtattctcaacagctgctgataatcaaccagcagtagacattcacgtattacaaggtgagcgtccaatgtcagctgacaacaaaacgttaggtcgtttccaattaactgaccttccaccagcaccacgtggtattccacaaatcgaagtaacattcgatattgatgcgaacggtatcgttaacgtacgtgcgaaagatttaggaacaagtaaagagcaagctattacaattcaatcttcttcaggtctttctgatgaagaagtagaacgtatggtacaagaagcggaagcgaatgctgacgctgaccaaaaacgtaaggaagaagttgaacttcgtaacgaagctgaccaacttgtattccaaacagataaagttgtaaaagatttagaaggtaaagtggatgcggctgaagttgcaaaagcaacagaagcgaaagaagcattacaagctgcgattgagaaaaacgagcttgaggaaattcgtgcgaaaaaagacgctttacaagaaatcgtacaacaattaactgttaaattatacgagcaagctcaagcagctgcagggcaagcagaaggtgcacaaggagcacaagatgctggcgcaaagaaagataatgtagtagacgctgaatttgaagaagtaaaagaagataagtaa

SEQ ID NO: 48733 - protein, 611 aa, Bacillus cereus
MSKIIGIDLGTTNSCVAVMEGGEPKVIPNPEGNRTTPSVVAFKNEERQVGEVAKRQAITNPNTIMSVKRHMGTDYKVEVEGKDYTPQEISAIILQNLKASAEAYLGETVTKAVITVPAYFNDAERQATKDAGRIAGLEVERIINEPTAAALAYGLEKQDEEQKILVYDLGGGTFDVSILELADGTFEVISTAGDNRLGGDDFDQVIIDHLVAEFKKENNIDLSQDKMALQRLKDAAEKAKKDLSGVTQTQISLPFISAGAAGPLHLELTLTRAKFEELSAGLVERTLEPTRRALKDAGFAPSELDKVILVGGSTRIPAVQEAIKRETGKEPYKGVNPDEVVALGAAVQGGVLTGDVEGVLLLDVTPLSLGIETMGGVFTKLIERNTTIPTSKSQVFSTAADNQPAVDIHVLQGERPMSADNKTLGRFQLTDLPPAPRGIPQIEVTFDIDANGIVNVRAKDLGTSKEQAITIQSSSGLSDEEVERMVQEAEANADADQKRKEEVELRNEADQLVFQTDKVVKDLEGKVDAAEVAKATEAKEALQAAIEKNELEEIRAKKDALQEIVQQLTVKLYEQAQAAAGQAEGAQGAQDAGAKKDNVVDAEFEEVKEDK

SEQ ID NO: 48734 - DNA, 1845 bp, Bacillus halodurans
  CDS (1)..(1845): transl_table=11
atgagcaaaatcattggtattgaccttggaacaacaaactcatgtgtagccgttatggagggtggcgaagcgacggttattccgaatccagaaggaaaccgtactaccccttctgttgtggcatttaaagatggggaacgccaagtaggggaagtggcaaagcgacaagcgatcacgaaccctaacaccgtgatttcaatcaagcgtcacatggggacgaaccacaaagaaaacattgaaggaaaagaatatacaccgcaagaaatctctgcgattattttgcaaaaattaaaatctgacgctgaagcctatctcggtgaagaagtaacgaaagcagttattacggttccagcttatttcaacgactcacagcgccaagcgacaaaggatgcagggaaaatcgctggattagaagtagagcggattgtcaacgagccaacagcagctgctcttgcctatggtcttgacaaagaagacgatcaaacgattcttgtctacgacctcggtggtggtacgtttgacgtttccattctcgaattaggtgatggattttttgaagtaaaggccacttcaggggacaataagcttggtggggatgactttgaccaagtgatcattgaccatttgatcgcagaatttaaaaaggaaaatggcattgatctatcacaggataaaatggcgatgcaacgtttaaaggatgctgctgagaaagcgaaaaaggatttatctggtgtgacgtcaacacaaatttcattgccgttcattacagcggatgcaacaggaccaaagcaccttgaactaacccttactcgcgcgaagtttgaagagctttcttcacacttagtagaaagaacgcttgggcctacacgtcaagcattacaagattcaggcctttctgcaagtgaaattgataaagttgttctcgttggaggatctacacgtattcctgccgttcaggaagcgattaagaaccttacaggaaaagaaccacataaaggggtaaatccagacgaagtcgttgccctcggtgcagcggttcaagcaggggttctaacaggagatgttaaagatgtcgtacttctcgacgtaaccccgctttcacttggaattgaaacaatgggaggcgtgtttacgaagcttattgagcgtaatacgacaatccctactagcaaatcgcaaatcttttcaacggctgccgacaaccagccttctgttgatatccacgttcttcaaggagagcgggaaatggctgccgacaacaagacgctcggtcgcttccaactaacagatattccgccggcaccacgtggggtaccgcaaatcgaagttacatttgatattgatgcgaacgggattgtaaacgttaaagcgaaagacctcggcacaaacaaagaacagtccattacgattacatcttcttccggtttaacagatgaagaaatcgatcagatggtcaaggacgcagaagcgaacgctgaggctgataagaaacgccgcgaagaagtagagctacggaatgaagcggatcagctcgtctttacaaccgagaaaacgttaaaagatctcggtgataatgtagatgaggctgagaagacgaaagccgaggaagcaaaagagaagctgaaaaaagcgatcgaagcgaacaatattgatgagattcgcacagcgaaagaagagcttcaacaagtcgttcaagcgttaacgacaaaactatatgagcaagcggctcaacaagcacagcaagcccaatcggctgaaggggatcaaggcacagctgaaaaagggcaggatgacaacgttgtggatgcagattatgaagaagtcaatgaggaagataaaaagtaa

SEQ ID NO: 48735 - protein, 614 aa, Bacillus halodurans
MSKIIGIDLGTTNSCVAVMEGGEATVIPNPEGNRTTPSVVAFKDGERQVGEVAKRQAITNPNTVISIKRHMGTNHKENIEGKEYTPQEISAIILQKLKSDAEAYLGEEVTKAVITVPAYFNDSQRQATKDAGKIAGLEVERIVNEPTAAALAYGLDKEDDQTILVYDLGGGTFDVSILELGDGFFEVKATSGDNKLGGDDFDQVIIDHLIAEFKKENGIDLSQDKMAMQRLKDAAEKAKKDLSGVTSTQISLPFITADATGPKHLELTLTRAKFEELSSHLVERTLGPTRQALQDSGLSASEIDKVVLVGGSTRIPAVQEAIKNLTGKEPHKGVNPDEVVALGAAVQAGVLTGDVKDVVLLDVTPLSLGIETMGGVFTKLIERNTTIPTSKSQIFSTAADNQPSVDIHVLQGEREMAADNKTLGRFQLTDIPPAPRGVPQIEVTFDIDANGIVNVKAKDLGTNKEQSITITSSSGLTDEEIDQMVKDAEANAEADKKRREEVELRNEADQLVFTTEKTLKDLGDNVDEAEKTKAEEAKEKLKKAIEANNIDEIRTAKEELQQVVQALTTKLYEQAAQQAQQAQSAEGDQGTAEKGQDDNVVDADYEEVNEEDKK

SEQ ID NO: 48736 - DNA, 1839 bp, Bacillus licheniformis
  CDS (1)..(1839): transl_table=11
atgagcaaagtaatcggaatcgacttgggaacaacgaactcatgcgttgcagtgcttgaaggcggagagccgaaagtcatcccaaatccagaaggagcccgcacgactccttcagttgtcgcatttaaaaacggagaacgccaggtgggtgaagtggcgaaacgccagtccatcacgaacccgaacacgatcatgtcgatcaagcgccacatgggcactgactatacagttgaaattgaaggcaaaaagtacacgccgcaagaagtgtctgccatcatccttcagcatttgaaatcatatgctgaaagctatttgggcgaaaccgtgtctaaagccgtgatcacagttcctgcatacttcaacgatgcagagcgtcaagcgactaaagatgccggtaaaatcgccggacttgaagttgagcggatcatcaacgagccgactgcagctgcgcttgcctacggtctggataaaacggaagaagatcagacgatcctcgtctacgaccttggcggcggtacattcgacgtttccatccttgaattgggagacggcgtattcgaagttcgctctacagcgggtgacaaccgccttggaggagacgactttgaccaagtgatcatcgatcatctcgtctcagaattcaaaaaagaaaacggcatcgacctttctaaagacaaaatggcgcttcagcgcttaaaagatgctgctgagaaagcgaaaaaagacctttccggcgtatcttctacgcaaatttccctgccgtttatcacagcgggtgaagcaggtccgctgcaccttgaattgacactgacccgcgcgaagtttgaagagctgtcttcacacttggtagagcgcacaatgggtcctgtacgccaggctcttcaagatgcgggactttctgcaagcgaaatcgacaaagtcatccttgtcggcggatcaacacgtattcctgccgttcaggaagcgatcaaaaaagaaactggaaaagaagcgcataaaggcgtcaaccctgacgaagtcgtagcccttggtgcagcaattcaaggcggcgtcatcacaggcgatgtcaaagatgttgtccttctggacgtaactccgctgtcacttggtatcgaaacgatgggcggcgtgttcacgaagctgattgagcgcaacacgacaatcccgacaagcaagtcccaagtgttctcaacagcggccgacaaccaaacagcggttgacatccacgtgctccaaggtgagcgcccaatggctgccgacaacaaaacgctcggacgcttccagcttacagatatcccgccggctcctcgcggcgtaccgcaaatcgaagtgtcatttgacattgataaaaacggtatcgtcaacgtcagcgcgaaagatctgggcactggcaaagagcaaaacatcacgatcaaatcttcttcaggcctttctgacgacgagatcgagcgtatggtgaaagaggctgaagaaaacgccgaagcagatgcgaagaaaaaagaagaaatcgagcttcgcaacgaagcggaccagcttgtcttcacaactgaaaaaacgctgaaagatcttgaaggcaaagccgatgaagcacaggtgaaaaaagcgaatgaagcaaaagacgcgctaaaagctgcgatcgagaaaaatgaccttgatgaaatcaaggcgaaaaaagatgagctgcaagcgatcgttcaagagctttcaatgaagctttacgaagaagccgcaaaacaggctcaggctcagcaagacggcggagctggcgctaaaaaagccgatgataatgtcgtggacgctgaatatgaagaagtaaacgacgacaaagatcaaaaataa

SEQ ID NO: 48737 - protein, 612 aa, Bacillus licheniformis
MSKVIGIDLGTTNSCVAVLEGGEPKVIPNPEGARTTPSVVAFKNGERQVGEVAKRQSITNPNTIMSIKRHMGTDYTVEIEGKKYTPQEVSAIILQHLKSYAESYLGETVSKAVITVPAYFNDAERQATKDAGKIAGLEVERIINEPTAAALAYGLDKTEEDQTILVYDLGGGTFDVSILELGDGVFEVRSTAGDNRLGGDDFDQVIIDHLVSEFKKENGIDLSKDKMALQRLKDAAEKAKKDLSGVSSTQISLPFITAGEAGPLHLELTLTRAKFEELSSHLVERTMGPVRQALQDAGLSASEIDKVILVGGSTRIPAVQEAIKKETGKEAHKGVNPDEVVALGAAIQGGVITGDVKDVVLLDVTPLSLGIETMGGVFTKLIERNTTIPTSKSQVFSTAADNQTAVDIHVLQGERPMAADNKTLGRFQLTDIPPAPRGVPQIEVSFDIDKNGIVNVSAKDLGTGKEQNITIKSSSGLSDDEIERMVKEAEENAEADAKKKEEIELRNEADQLVFTTEKTLKDLEGKADEAQVKKANEAKDALKAAIEKNDLDEIKAKKDELQAIVQELSMKLYEEAAKQAQAQQDGGAGAKKADDNVVDAEYEEVNDDKDQK

SEQ ID NO: 48738 - DNA, 1973 bp, Bacillus megaterium
  CDS (103)..(1920): transl_table=11
ttccggcttcaaaaaggttacaaattaaaagataaaatcatccgccctgcgatggttaaagtgaatcaataacactacatattatgaaggaggtcattgtcaatgagtaagatcattggtatcgatttaggtacaactaactcttgtgtcgctgtattagaaggcggcgaaccaaaagtaattccaaatccagaaggaaaccgtacaacgccatcagttgtggcattcaaaaacggtgagcgtcaagttggggaagtagcgaaacgtcaagctattacaaaccctaacacaattatttcagttaaacgtcatatgggtacagatcataaggttgaagctgaaggcaagcaatacacgcctcaagaaatgtcagctatcattcttcaacatttaaaaggttatgctgaagagtatttaggtgagcctgtaacaaaagctgttatcacagttcctgcttactttaatgatgctgagcgtcaagcaacaaaagatgctggtaaaattgctggtttagaagtagagcgtattattaacgagcctactgcagcagcacttgcatacgggttagaaaaaacagatgaagatcaaacagttttagtttatgaccttggtggcggtacgtttgacgtatctattctagaacttggcgacggcgtatttgaagttcgcgcaactgcaggtgacaaccgccttggtggtgacgactttgaccaagtaatcatcgactatttagtcgctgaattcaaaaaagaaaacggcgtggatttaagcaaagataaaatggcgcttcaacgtttaaaagatgcggctgaaaaagcgaaaaaagatttatcaggcgtaacatctacacaaatttctttaccatttatcactgctggagaagctggtcctcttcacttagaggtatctttatcacgtgctaaatttgacgagttatcagcaggccttgtagagcgtacaatggctcctgtgcgtcaagctttaaaagatgcaggcctttctgcaagcgaacttgataaagtaatcttagttggtggttcaactcgtatcccagcggtacaagatgcaatcaaaaaagaaactggtcaagatcctcacaaaggtgtaaaccctgatgaagtagttgcacttggtgcagcaattcaaggtggcgtattaactggtgatgtaaaagacgttgtattactagacgtaacgcctttatcactaggtatcgaaacaatgggtggcgtatttacaaagctaattgagcgtaatacgacgattccaacaagtaaatcacaagtattctcaacggctgcagatagccaaacagctgtagatattcatgttcttcaaggtgagcgtccaatgtctgcagacaacaaaacgctaggtcgtttccagttaactgatattccacctgcaccacgcggagtacctcaaatcgaagtgtcattcgatattgacaaaaatggtatcgtaaacgttcgtgcaaaagatttaggtacaaacaaagagcaagctattacaattaaatcttcaacaggtttatcagatgatgaaatcgatcgcatggtaaaagaagcggaagaaaacgcagatgctgataagcaacgtaaagaagaagtggaactacgcaatgaagcagatcaattagtgtttacaactgaaaaaacattaaaagatcttgaaggaaaagtagaagaagctgaagtaacaaaagctaacgaagcaaaagatgctttaaaagcagcgattgaaaagaatgaccttgaagaaatcaaagcgaaaaaagatgaacttcaagaaatcgttcaagcgttaactgtaaaattgtatgagcaagctcaacaagctcagcaagcaggtgaacaaggcgctcaaaatgatgatgttgtagatgcagagtttgaagaagtaaacgacgacaaaaaataatgcatcttgacgactaacgtgaatgacgccatggtgcgattcacatcttttca

SEQ ID NO: 48739 - protein, 605 aa, Bacillus megaterium
MSKIIGIDLGTTNSCVAVLEGGEPKVIPNPEGNRTTPSVVAFKNGERQVGEVAKRQAITNPNTIISVKRHMGTDHKVEAEGKQYTPQEMSAIILQHLKGYAEEYLGEPVTKAVITVPAYFNDAERQATKDAGKIAGLEVERIINEPTAAALAYGLEKTDEDQTVLVYDLGGGTFDVSILELGDGVFEVRATAGDNRLGGDDFDQVIIDYLVAEFKKENGVDLSKDKMALQRLKDAAEKAKKDLSGVTSTQISLPFITAGEAGPLHLEVSLSRAKFDELSAGLVERTMAPVRQALKDAGLSASELDKVILVGGSTRIPAVQDAIKKETGQDPHKGVNPDEVVALGAAIQGGVLTGDVKDVVLLDVTPLSLGIETMGGVFTKLIERNTTIPTSKSQVFSTAADSQTAVDIHVLQGERPMSADNKTLGRFQLTDIPPAPRGVPQIEVSFDIDKNGIVNVRAKDLGTNKEQAITIKSSTGLSDDEIDRMVKEAEENADADKQRKEEVELRNEADQLVFTTEKTLKDLEGKVEEAEVTKANEAKDALKAAIEKNDLEEIKAKKDELQEIVQALTVKLYEQAQQAQQAGEQGAQNDDVVDAEFEEVNDDKK

SEQ ID NO: 48740 - DNA, 1836 bp, Bacillus sphaericus
  CDS (1)..(1836): transl_table=11
atgagcaaaattattggtattgacttaggaacaacaaactcttgcgtttctgtacttgaaggtggcgaaccaaaagtaattccaaatccagaaggtaatcgtactacaccatctgttgttgcatttaaaaatggcgaacgtcaagttggtgaagtagcaaaacgtcaatcagtaacaaacccaaacacaatcatttctattaaatcaaaaatgggtacagctgaaaaagtgacggtggaagacaaagattacactccacaagaagtatcagctatgattcttcaatatttaaagggttatgcagaagattacctaggtgaaaaagtgacgaaagcagtaattacagttcctgcttactttaacgatgcacagcgccaagcaacaaaagatgctggtaaaatcgctggtctagaagtagagcgtatcatcaatgaaccaacggctgcagcgctacgttatggcttagataaacaagatcaagatcaaaaagtgttagtatttgaccttggtggtggtacgtttgacgtatcgatccttgagttaggtgatggtgtctttgaagtattagcaacagctggtgataacaaactaggtggggatgatttcgatgacgcgattatcgaatatctagtagcagaattcaaaaaagaaaatggcattgatttatcaaaagataaaatggcgatgcaacgtttaaaagatgctgctgaaaaagcgaaaaaagatttatctggtgtaacatccactcaaatctctttaccgttcattactgctggtgaagcaggtcctttacacttagaaatctctttaactcgtgcaaaatttgatgaaattacattaccattagtaaatcgtacagttggtccagtacgacaagcattatctgatgcaggtctttcaacttctgaaattgatcaagttattttagttggtggttctactcgtattcctgcagtacaagaagcagtacgtaaagaaactaacaaagaacctcaccgtggtgtaaacccagacgaggttgtagcaatgggtgctgcagtacaaggtggcgtattaacaggtgatgtgaaagacgttgtattacttgacgtaacaccactttcacttggtattgaaacaatgggtggcgtgttcacaaaattaattgaccgtaacacgacaatcccaacttctaaatcacaagtattctctacagcggctgacaaccaaccagcagtagatattcacgtacttcaaggtgaacgctcaatggcggcagacaacaaaacattaggtcgcttccaattagctgatattccaccagcaccacgtggtgtacctcaaatcgaagtaactttcgatattgataaaaatggtatcgtatcggtaaaagcgaaagacctaggtacaaacaaagaacaaacaattgtaattcaatctgattcaggtttatcagaggcagaaattgaacgtatggtaaaagacgcagaggctaatcgtgatgcagatgctaaacgtaaagaagaggcagatcttcgcaacgaagctgaccaattagtattccaagtggataaaacaattactgacctaggtgaacaaattacagaagacgagaaaaaatctgtagaagatgctcgtgatgaattgaaaaaggcacttgaagctggcgaattagaaggcattaaagcagctaaagaaaaattagaaggtgttttacagccattagttatgaaagtttatgaacaagcggcagcagctgctcaagcacgacaaggcggagaagcagacgctggtgctggtaaaaaagatgatggtgttgtagacgctgatttcgaagaagtaaaagacgataaataa

SEQ ID NO: 48741 - protein, 611 aa, Bacillus sphaericus
MSKIIGIDLGTTNSCVSVLEGGEPKVIPNPEGNRTTPSVVAFKNGERQVGEVAKRQSVTNPNTIISIKSKMGTAEKVTVEDKDYTPQEVSAMILQYLKGYAEDYLGEKVTKAVITVPAYFNDAQRQATKDAGKIAGLEVERIINEPTAAALRYGLDKQDQDQKVLVFDLGGGTFDVSILELGDGVFEVLATAGDNKLGGDDFDDAIIEYLVAEFKKENGIDLSKDKMAMQRLKDAAEKAKKDLSGVTSTQISLPFITAGEAGPLHLEISLTRAKFDEITLPLVNRTVGPVRQALSDAGLSTSEIDQVILVGGSTRIPAVQEAVRKETNKEPHRGVNPDEVVAMGAAVQGGVLTGDVKDVVLLDVTPLSLGIETMGGVFTKLIDRNTTIPTSKSQVFSTAADNQPAVDIHVLQGERSMAADNKTLGRFQLADIPPAPRGVPQIEVTFDIDKNGIVSVKAKDLGTNKEQTIVIQSDSGLSEAEIERMVKDAEANRDADAKRKEEADLRNEADQLVFQVDKTITDLGEQITEDEKKSVEDARDELKKALEAGELEGIKAAKEKLEGVLQPLVMKVYEQAAAAAQARQGGEADAGAGKKDDGVVDADFEEVKDDK

SEQ ID NO: 48742 - DNA, 1836 bp, Bacillus clausii
  CDS (1)..(1836): transl_table=11
atgagcaaaattattggtattgacttagggacaacaaactcttgtgtggccgtaatggagggcggcgaagccacggttatcccaaacccagaaggcaaccggacaacgccttctgtagtcgcttttaaagacggagagcgtctcgtgggcgaagtggcaaagcgccaagcgatcactaacccaaatacggtcatttccattaaacgtcatatgggtactgattacaaagtagacattgaagggaaaagttactcccctcaagaaatttcagcgattattttacaaaagttaaaagccgatgcagaagcataccttggcgagaaagttaccaaagcggtcattacggttccagcttattttaatgactcccaacgtcaagcgacaaaagacgcaggcaaaattgctggccttgaagtggaccgcatcgtcaatgagccgacagctgcagctcttgcatatggtcttgaaaaagaagatgaccaaacgattctggtttatgaccttggcggcggtacgttcgacgtttccatccttgaactaggcgacggcttcttcgaagtaaaagctacttctggtgacaacaaactaggcggcgatgattttgatgaagtgatcatggatcatcttgtagcagagtttaaaaaagaaaacggcatcgacttgtcgcaagataaaatggcgatgcaacgtctgaaagacgctgctgagaaagcgaagaaagatttatctggcgttacgcaaacgcaaatttcgctgccatttattactgccgatgccacaggtcctaagcacttagagttaacattgactcgtgcgaaattcgatgagttgtctgccgacctcgtagaacggacgcttggcccaacacgccgtgcgctctctgatgctggtctgtccgcatcagacatcgacaaagtcgtccttgttggtggatcgactcgtattccggctgtacaagaggcaattaaaaagctaacaggcaaagaccctcataaaggcgtcaaccctgacgaagtagtagcgcttggagctgcagtgcaagcaggtgtgttgactggtgatgttaaagacgttgtgcttcttgacgttacaccattgtctcttggaattgagacgatgggcggcgtattcaccaaactaattgaacgcaacacaacgattcctacatcaaaatcacaagtgttttcaacagctgctgacaatcagccttctgttgatattcatgtgcttcaaggggaacgggaaatggctgccgacaacaaaacgcttggccgtttccaattaacagacattccgccagcaccacggggagtgccgcaaattgaagtgacatttgatattgacgctaacggtattgtcaatgttaaggcgaaagatcttggaaccaacaaagaacaatcgattacaatcacgtcttcttcaggcctatcagaagaagaaattgataaaatggtacaagaagccgaagcaaatgcagaagcagacaaaaagcgtcgcgagcaagtagaactgcgtaacgaagcagaccagctcgtcttttcaactgaaaaaacgctaaaagatttaggcgacaatgttgatcaagcagaaaaagacaaagccgaagcagcaaaagacaagttgaaaaaagcacttgaagccgacaacacagacgacattaaagctgccaaggacgaacttcaagaaatcgtcactgctttgacgacaaagttgtatgagcaagcagcacaagcggcacaagctcaacaagacggcggcaatgaaagtgcggataagcaagacgacaacgttgttgacgcagattacgaagaagtgaacgacgacgacaaaaaataa

SEQ ID NO: 48743 - protein, 611 aa, Bacillus clausii
MSKIIGIDLGTTNSCVAVMEGGEATVIPNPEGNRTTPSVVAFKDGERLVGEVAKRQAITNPNTVISIKRHMGTDYKVDIEGKSYSPQEISAIILQKLKADAEAYLGEKVTKAVITVPAYFNDSQRQATKDAGKIAGLEVDRIVNEPTAAALAYGLEKEDDQTILVYDLGGGTFDVSILELGDGFFEVKATSGDNKLGGDDFDEVIMDHLVAEFKKENGIDLSQDKMAMQRLKDAAEKAKKDLSGVTQTQISLPFITADATGPKHLELTLTRAKFDELSADLVERTLGPTRRALSDAGLSASDIDKVVLVGGSTRIPAVQEAIKKLTGKDPHKGVNPDEVVALGAAVQAGVLTGDVKDVVLLDVTPLSLGIETMGGVFTKLIERNTTIPTSKSQVFSTAADNQPSVDIHVLQGEREMAADNKTLGRFQLTDIPPAPRGVPQIEVTFDIDANGIVNVKAKDLGTNKEQSITITSSSGLSEEEIDKMVQEAEANAEADKKRREQVELRNEADQLVFSTEKTLKDLGDNVDQAEKDKAEAAKDKLKKALEADNTDDIKAAKDELQEIVTALTTKLYEQAAQAAQAQQDGGNESADKQDDNVVDADYEEVNDDDKK

SEQ ID NO: 48744 - DNA, 1917 bp, Bacteroides thetaiotaomicron
  CDS (1)..(1917): transl_table=11
atgggaaaaattattggtattgacttaggaacaacaaactcttgtgttgccgtatttgagggcaacgaacctgtagtaattgcaaacagtgaaggtaagcgtacaactccttctgtggttgcatttgtagatggcggcgaacgtaaagtaggtgatcctgctaaacgtcaggctattactaacccgacacgtacgatcttctctatcaaacgttttatgggtgaaaactgggatcaggtgcagaaagaggttacacgtgttccttataaagtagtgaaaggtgacaacaacactccgcgtgtagatattgacggtcgtctgtacactccgcaagaaatatctgcaatgattcttcagaagatgaagaagactgctgaagattatctgggacaagaagttacagaagctgttatcaccgttcctgcatatttctccgactctcaacgtcaggctactaaagaagccggacagattgcaggtctggaagtaaaacgtattgttaacgaaccgacagctgcagctcttgcatacggtctggacaaggctcacaaagatatgaagattgctgtattcgaccttggtggtggtacttttgatatctctatcctcgaattcggtggtggtgtattcgaagttctttctactaacggtgatactcacttgggtggtgatgacttcgaccaggtaatcatcaactggctggtacaggaattcaaaaacgacgaaggtgctgatttgactcaggatccaatggctttgcaacgtctgaaagaagctgctgaaaaggctaagattgaactttcttcttcaacaagcacagaaatcaacttgccgtacattatgccggtaaacggtgtgcccaagcacttggtgaagactttgactcgtgcaaaattcgaatcattggctcacggattgattcaggcttgtctggaaccatgtaagaaagcaatgagcgacgctggtttgagcaactccgatattgatgaagtaatccttgtaggtggttcttcccgtatccctgccgtacagaaattggtagaagatttcttcggaaagactccttctaaaggcgtgaacccggatgaagtagtagctgttggtgctgctgtacagggtgctgttttgacagacgaaatcaaaggtgtggtattgttggatgttactccgttgtcaatgggtattgaaacactgggtggtgtgatgacgaaattgattgatgctaatacaacaattccggctcgtaagagtgagaccttctctactgctgccgataatcagagtgaagtgactattcatgtattgcagggagaacgtccgatggctgctcagaataagtcaattggtcagttcaacttgtcaggtatcgctccggctcgtcgtggtgtgcctcagattgaggttacattcgatatcgatgcaaacggtatcttgaaggtatctgctaaggataaggctacaggtaaagaacaggcaatccgtatcgaagcttccagcggtttgagcaaggaagaaatcgaaaagatgaaggctgaagctgaagctaatgcagaagcagacaagaaagaacgtgaaaagatcgataaactgaatcaggctgacagcgtgattttccagacagaaaatcagttgaaggaattgggtgataagttgcctgctgataagaaagctccgattgaagctgctttgcagaaactgaaagatgctcataagtctcaggatttagctgctattgatacagctatggcagaaatcaatactgttttccaaactgcaagtgctgaaatgtacgctcaaggcggagctcagggtggtgcacaggctggtcctgatatggatgcaggtcagaatgctggtcaggataatagcaagcatggtgacaatgttcaggatgcagattttgaggaagtgaaatga

SEQ ID NO: 48745 - protein, 638 aa, Bacteroides thetaiotaomicron
MGKIIGIDLGTTNSCVAVFEGNEPVVIANSEGKRTTPSVVAFVDGGERKVGDPAKRQAITNPTRTIFSIKRFMGENWDQVQKEVTRVPYKVVKGDNNTPRVDIDGRLYTPQEISAMILQKMKKTAEDYLGQEVTEAVITVPAYFSDSQRQATKEAGQIAGLEVKRIVNEPTAAALAYGLDKAHKDMKIAVFDLGGGTFDISILEFGGGVFEVLSTNGDTHLGGDDFDQVIINWLVQEFKNDEGADLTQDPMALQRLKEAAEKAKIELSSSTSTEINLPYIMPVNGVPKHLVKTLTRAKFESLAHGLIQACLEPCKKAMSDAGLSNSDIDEVILVGGSSRIPAVQKLVEDFFGKTPSKGVNPDEVVAVGAAVQGAVLTDEIKGVVLLDVTPLSMGIETLGGVMTKLIDANTTIPARKSETFSTAADNQSEVTIHVLQGERPMAAQNKSIGQFNLSGIAPARRGVPQIEVTFDIDANGILKVSAKDKATGKEQAIRIEASSGLSKEEIEKMKAEAEANAEADKKEREKIDKLNQADSVIFQTENQLKELGDKLPADKKAPIEAALQKLKDAHKSQDLAAIDTAMAEINTVFQTASAEMYAQGGAQGGAQAGPDMDAGQNAGQDNSKHGDNVQDADFEEVK

SEQ ID NO: 48746 - DNA, 1824 bp, Bacillus thermoglucosidasius
  CDS (1)..(1824): transl_table=11
atgagtaaaattatcgggattgacttaggaacaaccaactcatgcgtcgctgtccttgagggcggtgagccaaaagtaattccaaacccggaaggaagccggacaactccttctgttgtggcgtttaaaaacggggaacgtctagtcgcgaaacgccaagcaatcacaaacccaaacacgatcatttcgattaaacgccatatgggaacggactataaagtagagatcgaaggcaaaaaatatacgccgcaagaaatttctgcgattattttacaatacttaaaatcgtatgcggaagactatttgggcgagccggtgacaagagcggttattaccgttccagcttactttaatgatgcgcaacgtcaagcaacaaaagacgctggacgtatcgccggtttacaagtagagcgcatcattaacgagccgacagccgctgcgcttgcgtacggtttggataaagaagaagatcaaacgatcctcgtttatgacttgggaggcggtacgtttgacgtatcgattcttgagcttggcgacggcgtgtttgaagtaaaagcgacggccggcgataaccatcttggcggggatgacttcgaccaagtgattatcgactacttagtggaacaattcaaacaagaacacggcattgatttatccaaagacaaaatggcgctgcaacgtcttaaagacgctgcggaaaaggcgaaaaaagaactttctggcgtaacgcaaacgcaaatttcgctgccgtttatcagcgcgaacgaaacagggccgctgcacattgaaacaacattaacaagagcgaaatttgaagagctgtctgcccatcttgttgaacggacaatgggaccggtccgccaggcgttgcaagatgcgggcttgactcctgccgatatcgacaaagtgatccttgtcggcggttcgacacgcattccggctgtgcaggaagcgattaaacgtgagcttggaaaagagccgcataaaggggttaacccggatgaagttgtagcgattggcgcggcgatccaaggcggtgtgatcgctggagaagtgaaagatgttgttctgcttgacgtcactccgctgtcgcttggcattgaaacaatgggcggcgtgttcacaaaattaattgaacgcaacacgacgattccgacaagcaaatcgcaaattttcactaccgcggcggataaccagacgacggtcgatattcatgtactgcaaggcgaacgtccgatggcagccgacaacaaaacgctcggccgtttccaattaaccgatattccgccggcaccgcgcggcgtaccacaaatcgaagtaacatttgatatcgacgccaacggtattgttcatgtccgcgcaaaagatttagggacaaacaaagagcaatcgataacgataaaatcgtcatcaggtctttccgaagaagaaatccagcgcatgattaaagaagcggaagaaaatgccgaagcggacagaaaacggaaagaagcggcagaactccgcaatgaagcggatcacttagtgttcacaacggaaaaaacgttgaaagaagtggaaggaaaagtagacgaagcggaagtgaaaaaagcgcgcgaagcaaaagacgcgttaaaagcggcgcttgagaaaaacgacatcgatgacattcgcaaaaagaaagaagcgcttcaggaaatcgtgcagcagctttccgttaagctgtacgaacaagcagcaaaacaagcgcaagcccaacaacagacgggagccggcgacgctgcgaaaaaagacgataatgttgtcgatgcggaattcgaagaagtgaaagacgacaacaaataa

SEQ ID NO: 48747 - protein, 607 aa, Bacillus thermoglucosidasius
MSKIIGIDLGTTNSCVAVLEGGEPKVIPNPEGSRTTPSVVAFKNGERLVAKRQAITNPNTIISIKRHMGTDYKVEIEGKKYTPQEISAIILQYLKSYAEDYLGEPVTRAVITVPAYFNDAQRQATKDAGRIAGLQVERIINEPTAAALAYGLDKEEDQTILVYDLGGGTFDVSILELGDGVFEVKATAGDNHLGGDDFDQVIIDYLVEQFKQEHGIDLSKDKMALQRLKDAAEKAKKELSGVTQTQISLPFISANETGPLHIETTLTRAKFEELSAHLVERTMGPVRQALQDAGLTPADIDKVILVGGSTRIPAVQEAIKRELGKEPHKGVNPDEVVAIGAAIQGGVIAGEVKDVVLLDVTPLSLGIETMGGVFTKLIERNTTIPTSKSQIFTTAADNQTTVDIHVLQGERPMAADNKTLGRFQLTDIPPAPRGVPQIEVTFDIDANGIVHVRAKDLGTNKEQSITIKSSSGLSEEEIQRMIKEAEENAEADRKRKEAAELRNEADHLVFTTEKTLKEVEGKVDEAEVKKAREAKDALKAALEKNDIDDIRKKKEALQEIVQQLSVKLYEQAAKQAQAQQQTGAGDAAKKDDNVVDAEFEEVKDDNK

SEQ ID NO: 48748 - DNA, 1893 bp, Bartonella quintana
  CDS (1)..(1893): transl_table=11
atggcaaaagtaataggtattgatttgggaacgactaactcttgtgttgctgttatggatggcaaaaacgcaaaggttattgaaaattcagaaggagcgcggacaacaccttctgttgttgcctttactgatggaggggagcgacttgttgggcagcctgctaaacggcaggcagttacgaatcctgaagggacaatttttgcagttaaacgtttgattgggcgtcgttttgatgaccccatggttgaaaaagataaagcgcttgtaccttataaaattgttaagggtgacaatggtgatgcgtgggttgaagaagcgggtaagaaatattctccgtcacaaatttcagctatgattttgcaaaagatgaaagaaactgccgagtcttatcttggtgaaaaagttgagcaagcggttattactgttcctgcttattttaatgatgcacaacggcaggctaccaaagatgcgggtaaaattgcagggcttgaagttttacggattatcaatgagccaacagctgctgctttagcatatggtttggataaaaaagacggaaaaacgattgctgtttacgaccttggtggtggtacatttgatatttctgtccttgaaattggagatggcgtttttgaagttaaatcaactaatggagatacgtttttaggtggtgaagacttcgacatgcgtttggtcggttattttgcagacgaattcaagaaagaacaaggaattgatctaaaaaatgataaactggcgttgcagcgtttaaaagaggcggcagaaaaagcaaagattgaactttcttcttcacagcaaacagaaatcaatttgccgtttatcacagcagatcaatctggtcccaagcacttaacgatgaaattgactcgggcaaaatttgaatctctcgttgatgatttggttcagcgcactatcgagccttgtaaagccgcactgaaagatgcaggactgaaagctggtgagattgacgaagttgttttagtgggtggtatgacgcgtatgcccaagattcaggaagttgtacaaagcttcttcggcaaagatccacacaaaggtgttaatcctgatgaagttgtggcgatgggagctgccattcaagggggtgttttgcagggcgatgtaaaagatgttttgctgttggatgtcacacctttatctttgggtattgaaacgttgggcggggttttcacacgtcttattgaacgcaataccactatcccaactaaaaaatcacaagttttttcaacagctgatgataatcagaatgctgtgactattcgtgttttccaaggtgagcgcgaaatggctaatgataacaagttacttgctcaatttgatcttgtcggtattccaccagctccgcgtggcgtgcctcagattgaggttacttttgatattgatgcgaatggtattgtaaatgtttcggcaaaggataaaggaaccggtaaagagcatcaaattcgtattcaggcatcaggtggtttaagtgacgctgacatcgaaaaaatggtaaaggatgcagaagagcatgcagctgaagacaaaaaacgccgtgaaggtgtcgaagccagaaatcaagcagaagctcttattcattcaactgaaaagtcgcttacggaatatggcgataagatatcaactgaagagaaagaacagattgaaactgcaatatctgatttgaagtctgcacttgatggtaccgatcctgaagaagtaacagcgaaaatgcagaaattagcagaagtcagtatgaagcttgggcaggctatgtatgaagcttcacaagcagcaacagccaacactgaaacagatacaaaaagtgatgatgttgtcgatgctgattttgaagaaattagtgataagaagaaataa

SEQ ID NO: 48749 - protein, 630 aa, Bartonella quintana
MAKVIGIDLGTTNSCVAVMDGKNAKVIENSEGARTTPSVVAFTDGGERLVGQPAKRQAVTNPEGTIFAVKRLIGRRFDDPMVEKDKALVPYKIVKGDNGDAWVEEAGKKYSPSQISAMILQKMKETAESYLGEKVEQAVITVPAYFNDAQRQATKDAGKIAGLEVLRIINEPTAAALAYGLDKKDGKTIAVYDLGGGTFDISVLEIGDGVFEVKSTNGDTFLGGEDFDMRLVGYFADEFKKEQGIDLKNDKLALQRLKEAAEKAKIELSSSQQTEINLPFITADQSGPKHLTMKLTRAKFESLVDDLVQRTIEPCKAALKDAGLKAGEIDEVVLVGGMTRMPKIQEVVQSFFGKDPHKGVNPDEVVAMGAAIQGGVLQGDVKDVLLLDVTPLSLGIETLGGVFTRLIERNTTIPTKKSQVFSTADDNQNAVTIRVFQGEREMANDNKLLAQFDLVGIPPAPRGVPQIEVTFDIDANGIVNVSAKDKGTGKEHQIRIQASGGLSDADIEKMVKDAEEHAAEDKKRREGVEARNQAEALIHSTEKSLTEYGDKISTEEKEQIETAISDLKSALDGTDPEEVTAKMQKLAEVSMKLGQAMYEASQAATANTETDTKSDDVVDADFEEISDKKK

SEQ ID NO: 48750 - DNA, 1914 bp, Bdellovibrio bacteriovorus
  CDS (1)..(1914): transl_table=11
atgggtaaaattattggtatcgacttaggaacgacgaactcatgcgtcgcgattatggaaggcggcgagcctaaagttctcgtgaacgaagagggcgctcgtaccactccttcagttgtcgcttacaccaaagacggtgaccgcttggttggccaaattgccaaacgtcaggctgtaaccaatccagagaacacgatctattctgcgaaacgtttcatcggccgcagatttgaagagattcaagaagagatcaaattggttccttacactgttgttgccaaaggcaatgactgtgcgttcaaggttcagggcaaaaccgcttctcctgaagagatcggtgccgctgttcttgcgaaactgaaaaaagtggcagaagactatttgggtgaaccggttacagaagcggttgtcaccgttccagcttacttcaacgatgcgcaaagacaggcgacaaaagatgccggtcgtatcgcgggtctggaagtaaaacgtatcatcaatgagccgacagcggcggcattggcatacggtatggataaaaagaaagacgaaaaaatcgttatctacgatttcggtggtggtacgttcgacgtttccatccttgaagtgggtgacggtgttgttgaagttcgcgcaaccaatggtgacactcacctgggtggtgacaacttcgatacagtgatccttgagtggctgatcactgagttcaaaaaagatcaggctattgatcttaagaacgacaaaatggctttgcagcgtctgaaagaggcggctgaaaaagcgaagatcgaactttcttccgctcaggaaacagaaatcaatcttccgttcatcacggcggaccagtccggtcctaagcacttgcagactcgtctgtctcgcgcgaagtttgaccagatgactgaagatcttgtgaaacgctccatggagccttgccgtaaagctttggccgattccggtttgaaagcttctgaaatcgacgaggttgtcctggtgggtggttccactcgtatccctgcgatccagaaagccgttaaagacttcttcggtaaagagccaaaccgctctgtgaatccggatgaagttgtggcgatcggtgccgcagttcagggtggcgttcttgcgggtgacgtgaaagacgttcttctgctggacgtgactccactaagcctgggtattgaaaccctgggtggcgtgatgacgactttgatcgaaagaaacacggcgattccttccaagaaatcccaggtgttctcgacagctgctgacaatcaacctgctgtggacattcacgtccttcagggtgagcgtaaaatggctggcgacaacaaaactctgggccgtttcgaactggtaggcatcccaccagctccacgtggtgttccgcaagttgaagttaccttcgacatcgacgccaacggtatcctgcacgtatcagcgaaagacatgtcttccggcaagtctcagcagatcaagatcacggctcagtcaggtatgtctgaggacgagatcaaacgtgcggtcgcggacgctgaaggtcacgcagaggaagataaacgcaaagccgaggcggcaacacaaagaaacaacctcgacaacctggtttatcagactgaaaaactgatcaaggattccggtgctcagttgccagaatctgaagtgaagtctgcgaacgaagcggttgctgaagccaagaagatccttgaaaacaaatctgcctctggcgatgagttgaaaggggccttcgaaagacttcagaacctgacgcacaaactgacttccgagctttacaaaaagcaaggggctcagccaggtgctgaaggtcaacaagctgatgcggctgaaggcggcgaagcttctgcaaacaaaggcggcgacgacgtgatcgacgctgactacaaagacgtaaactaa

SEQ ID NO: 48751 - protein, 637 aa, Bdellovibrio bacteriovorus
MGKIIGIDLGTTNSCVAIMEGGEPKVLVNEEGARTTPSVVAYTKDGDRLVGQIAKRQAVTNPENTIYSAKRFIGRRFEEIQEEIKLVPYTVVAKGNDCAFKVQGKTASPEEIGAAVLAKLKKVAEDYLGEPVTEAVVTVPAYFNDAQRQATKDAGRIAGLEVKRIINEPTAAALAYGMDKKKDEKIVIYDFGGGTFDVSILEVGDGVVEVRATNGDTHLGGDNFDTVILEWLITEFKKDQAIDLKNDKMALQRLKEAAEKAKIELSSAQETEINLPFITADQSGPKHLQTRLSRAKFDQMTEDLVKRSMEPCRKALADSGLKASEIDEVVLVGGSTRIPAIQKAVKDFFGKEPNRSVNPDEVVAIGAAVQGGVLAGDVKDVLLLDVTPLSLGIETLGGVMTTLIERNTAIPSKKSQVFSTAADNQPAVDIHVLQGERKMAGDNKTLGRFELVGIPPAPRGVPQVEVTFDIDANGILHVSAKDMSSGKSQQIKITAQSGMSEDEIKRAVADAEGHAEEDKRKAEAATQRNNLDNLVYQTEKLIKDSGAQLPESEVKSANEAVAEAKKILENKSASGDELKGAFERLQNLTHKLTSELYKKQGAQPGAEGQQADAAEGGEASANKGGDDVIDADYKDVN

SEQ ID NO: 48752 - DNA, 1881 bp, Bifidobacterium longum
  CDS (1)..(1881): transl_table=11
atggcacgtgcagttggtatcgatctgggaaccacgaattcctgcatcgcaactcttgaaggtggcgagcccaccgttatcgtcaacgctgaaggcgcgcgcaccacgccgtctgtggtggccttctccaagtccggcgagatcctcgtcggcgaagtggccaagcgtcaggccgtgaccaacgttgaccgcactatttcttccgtcaagcgccacatgggctccgactggactgtcgacatcgacggcaagaagtggaccccgcaggagatttccgcgcagatcctgatgaagctgaagagggatgctgaggcctacctcggcgagcccgtcaccgacgccgtcatcacctgcccggcatacttcaacgatgcccagcgtcaggccaccaaggacgccggcaagatcgccggcctgaacgtcctgcgtatcatcaacgagccgaccgcagccgctctggcctacggccttgagaagggcaaggaagacgagcgcatcctggtcttcgacctcggcggcggcaccttcgatgtctccctgctggagatcggcaaggatgacgacggcttctccaccattcaggttcaggccaccaacggcgacaaccacctcggtggtgacgactgggatcagaagatcatcgattggctggtttccgaagtcaagaacaagtacggcgtcgacctgtccaaggacaagatcgcgctgcagcgtctgaaggaagccgctgagcaggcgaagaaggagctctcctcctccacctccaccagcatctccatgcagtacctggccatgacccctgacggcaccccggtgcacctggatgagactctgacccgtgcgcacttcgaggaaatgacctccgacctgctgggtcgctgccgcacgccgttcaacaacgtgctgcacgacgccggcatctccgtgagcgacatcgaccacgtggtgctcgtcggtggttccactcgtatgcccgccgtcaaggaactcgtcaaggagctcaccggtggtaaggaagcgaaccagtccgtgaacccggatgaggttgtggctgtcggtgccgccgtgcagtccggcgtcatcaagggcgaccgtaaggacgtcctgcttatcgacgtgaccccgctgtccctcggtatcgagaccaagggtggcatcatgaccaagctcatcgatcgcaacaccgccatcccgaccaagcgctccgaggtcttctccaccgctgaagataaccagccgtccgtgctgattcaggtctaccagggtgagcgtgagttcgctcgcgacaacaagccgctgggcaccttcgagctgaccggcatcgctccggctccgcgtggcgtcccgcagatcgaggtcaccttcgacatcgacgccaacggcatcgtgcacgtgtccgctaaggacaagggcaccggcaaggagcagtccatgaccatcaccggtggttccggcctgccgaaggacgagatcgaccgcatggtcaaggaagccgaagctcatgaggctgaggacaagaagcgcaaggaagacgccgagacccgcaaccaggccgaggccttcgcctactccaccgagaagctcgtcaacgacaacaaggacaagctctccgacgacatcgtcaaggaagtcaccgacaaggtcaacgctctgaaggaagccctgaagggtgacgacaccgagaaggtcaagaccgctcagaccgagctgatgaccgccgcccagaagatcggccaggtcctctacgcccagcagggtgccgagggtgctgccgctggtgctgacggtgccggcgcttccgctggctccgcctccggttccgacgacgacaccgtcgaggccgaggtcgtggacgacgatgacgacaaggacaacaagtga

SEQ ID NO: 48753 - protein, 626 aa, Bifidobacterium longum
MARAVGIDLGTTNSCIATLEGGEPTVIVNAEGARTTPSVVAFSKSGEILVGEVAKRQAVTNVDRTISSVKRHMGSDWTVDIDGKKWTPQEISAQILMKLKRDAEAYLGEPVTDAVITCPAYFNDAQRQATKDAGKIAGLNVLRIINEPTAAALAYGLEKGKEDERILVFDLGGGTFDVSLLEIGKDDDGFSTIQVQATNGDNHLGGDDWDQKIIDWLVSEVKNKYGVDLSKDKIALQRLKEAAEQAKKELSSSTSTSISMQYLAMTPDGTPVHLDETLTRAHFEEMTSDLLGRCRTPFNNVLHDAGISVSDIDHVVLVGGSTRMPAVKELVKELTGGKEANQSVNPDEVVAVGAAVQSGVIKGDRKDVLLIDVTPLSLGIETKGGIMTKLIDRNTAIPTKRSEVFSTAEDNQPSVLIQVYQGEREFARDNKPLGTFELTGIAPAPRGVPQIEVTFDIDANGIVHVSAKDKGTGKEQSMTITGGSGLPKDEIDRMVKEAEAHEAEDKKRKEDAETRNQAEAFAYSTEKLVNDNKDKLSDDIVKEVTDKVNALKEALKGDDTEKVKTAQTELMTAAQKIGQVLYAQQGAEGAAAGADGAGASAGSASGSDDDTVEAEVVDDDDDKDNK

SEQ ID NO: 48754 - DNA, 1908 bp, Borrelia garinii
  CDS (1)..(1908): transl_table=11
atgggcaaaataataggtattgacctaggaacaacaaactcatgcgtagctataatggagcatggaaaaccagttgtaatacaaaattcagagggtggaagaactactccatctattgttgcttacacaaataaaggcgaaaggcttgtggggcaagtcgcaaaaaaccaaatggttacaaaccctgaaaacacaatttattctattaaaagatttatgggaagaagatttgaagaggttgcaagcgaaataaaaatggttccttataaaatagaaaagggactaaatggcgatgcaagagtaaacatttccaatataaaaaagcaaatgtcaccgcctgaaatctcagcagcaacccttacaaaaatgaaagaaacagcagaagcttacttgggtgaaaaagttacagaagctgttattacagttcctgcgtattttaacgatgctcaaagacaagcgacaaaagatgctggtaaaatagccggccttgaagtaaaaagaattgttaacgaaccaactgccgctgctcttgcttatggaattgaaaaaaaacacgaagagattgttgctgtttacgatcttggtggaggaacatttgatatttcaatattggagcttggagatggtgtttttgaagtgaagtcaaccaatggagacacacatcttgggggagacaattttgacgatgagataataaagcatttaatttcagaatttaaaaaagaaagcgctattgatttgtcaaacgacaaaatggctcttcaaagactcaaagaagcagctgaaaaagctaaaatagaactttcaggcgctcaagaagcttcaataaatcttccatttattacagcagatgcaaacggcccaaaacacttgcaatatactctaacaagagcaaaattcgaacaaatggtagaccacttagttcaaaaaacaaaagaaccatgccttaaagctattaaagatgcagggcttaaagcctctgacattaacgaagtaatacttgtaggcggatcaacaagaattcctgctattcaaaaaattgtaaaagatatatttggacaagatcccaacaaaggagtaaatccagatgaagccgtagcaattggagctgctattcaaggtggtattttaaccggagaaaccaaagacatggtactccttgacgttactccactctcactaggaatagaaactctaggtggtgtaatgactaaacttattgaacgaaacactacaattcctacaaaaaaaagtcaagtattctcaacagctgctgataatcaaacctctgttgatattaaagtccttcaaggtgaacgtgaaatggcagcacaaaatagaatacttggtaactttatacttgatggaataccagcagcaccaagaggagtacctcaaattgaagtaagctttgacattgatgctaatggaatagttcacgtatccgcaaaagatatgggaacaggcaaagaacagaaaattagaattgaatcatcatcaggactctctgaatcagaaatagatcgaatggtaaaagatgcagaagctcatgcggaagaagataaaaaattaaaagaaaatattgaggcaaaaaatacagctaattctttaatttatcaaacagaaaaatcattaaaagaatattctgaaaaaatttcaagcgaagacaaagaagctattgaaaataaaataaaagaattaaaagaaagtcttgataaagaagacatttcacttataaaatctagaacagaagaacttcaaaaagcttcttacaagatagctgagatgatgtataaagattcttcacagcaaaatgcaagcaaccaacaagaaaatggtacccaaagcaatacaagcgaagaagggaaagaggctgattacgaagttgttgacgaggataaaaaatag

SEQ ID NO: 48755 - protein, 635 aa, Borrelia garinii
MGKIIGIDLGTTNSCVAIMEHGKPVVIQNSEGGRTTPSIVAYTNKGERLVGQVAKNQMVTNPENTIYSIKRFMGRRFEEVASEIKMVPYKIEKGLNGDARVNISNIKKQMSPPEISAATLTKMKETAEAYLGEKVTEAVITVPAYFNDAQRQATKDAGKIAGLEVKRIVNEPTAAALAYGIEKKHEEIVAVYDLGGGTFDISILELGDGVFEVKSTNGDTHLGGDNFDDEIIKHLISEFKKESAIDLSNDKMALQRLKEAAEKAKIELSGAQEASINLPFITADANGPKHLQYTLTRAKFEQMVDHLVQKTKEPCLKAIKDAGLKASDINEVILVGGSTRIPAIQKIVKDIFGQDPNKGVNPDEAVAIGAAIQGGILTGETKDMVLLDVTPLSLGIETLGGVMTKLIERNTTIPTKKSQVFSTAADNQTSVDIKVLQGEREMAAQNRILGNFILDGIPAAPRGVPQIEVSFDIDANGIVHVSAKDMGTGKEQKIRIESSSGLSESEIDRMVKDAEAHAEEDKKLKENIEAKNTANSLIYQTEKSLKEYSEKISSEDKEAIENKIKELKESLDKEDISLIKSRTEELQKASYKIAEMMYKDSSQQNASNQQENGTQSNTSEEGKEADYEVVDEDKK

SEQ ID NO: 48756 - DNA, 1926 bp, Bordetella pertussis
  CDS (1)..(1926): transl_table=11
atgagcaaaatcattggcatcgacctgggtacgaccaacagctgcgtggctgtcctggacggcggtcaggtcaagatcatcgagaacgccgaaggcgcccgtaccaccccctccatcgtcgcctacatggacgatggcgagacgctggtcggcgcgccggccaagcgccaggcggtcgccaaccccaagaacaccctgtacgcggtcaagcgcctgatcggccgcaagttcgacgagaaggcggtccagaaggacatcgacctgatgccgtactcgatcgtcaaggccgacaacggcgacgcgtgggtcgaagtgcgcggcaagaagctggcgccgccccaggtgtcggccgaagtgctgcgcaagatgaagaagaccgccgaggactacctgggcgaggaagtcaccgaggccgtgatcacggtgccggcgtacttcaacgacagccagcgccaggccaccaaggacgccggccgcatcgccggcctggaagtcaagcgcatcatcaacgagccgaccgcggccgcgctggccttcggcctggacaagaccgagaagggcgatcgcaagatcgtcgtctatgacctgggcggcggtacgttcgacgtctcgatcatcgagatcgccgacgtggacggcgaaatgcagttcgaggtgctgtcgaccaacggcgataccttcctgggcggcgaggatttcgaccagcgcatcatcgactacatcatctccgagttcaagaaggaacagggcgtcgacctgtccaaggacgtgctggccctgcagcgcctgaaagaggccgccgaaaaggccaagatcgagctgtcgtcgagccagcagaccgagatcaacctgccgtacatcacggccgatgcctccggtcccaagcacctgaacctcaagatcacgcgcgccaagctggaagcgctggtcgaggagctgatcgagcgcaccatcgagccgtgccgcgtggccatcaaggatgccggcgtcaaggtttccgacatcgacgacgtgatcctggtcggcggcatgacccgcatgcccaaggtgcaggacaaggtcaaggaattcttcggccgcgagccgcgcaaggacgtcaaccccgatgaggcggttgccgccggcgccgcgatccagggttccgtgctgtcgggcgagcgcaaggacgtgctgctgctggacgtgaccccgctgtcgctgggcatcgagaccctgggcggcgtgatgaccaagatgatccagaagaacaccacgatcccgacgcgctactcgcagacgttctcgaccgccgacgacaaccagccggcggtgacgatcaaggtgttccagggcgagcgcgaaatcgcggccggcaacaagggcctgggcgagttcaacctggaaggcatcccgccggcgccgcgcggcctgccgcagatcgaggtcacgttcgacatcgacgccaacggcattctgcacgtctcggccaaggacaagggcaccggcaaggaaaacaagatcaccatcaaggccaactcgggtctgtcggaagacgagatccagcgcatggtcaaggatgccgaggccaacgccgaggaagatcaccggctggccgagctggcgcaggcccgcaaccaggccgacgcgctggtgcatgccacccgcaagtcgctcacggagtacggcgagaagctggaagccgccgagaaggagtcgatcgaggctgccatcaaggacctcgaggacatcctcaagacgggtgacaaggccgagatcgacgccaaggtggaagccttgtcgacggcctcgcagaagctgggcgaaaagatgtacgccgacatgcaggcgcagcagcaggcccagcagcagcaggcggccgacaacgccaagccggtggacgacaatgtggtcgacgccgacttcaaggaagtcaagcgcgaccagtaa

SEQ ID NO: 48757 - protein, 641 aa, Bordetella pertussis
MSKIIGIDLGTTNSCVAVLDGGQVKIIENAEGARTTPSIVAYMDDGETLVGAPAKRQAVANPKNTLYAVKRLIGRKFDEKAVQKDIDLMPYSIVKADNGDAWVEVRGKKLAPPQVSAEVLRKMKKTAEDYLGEEVTEAVITVPAYFNDSQRQATKDAGRIAGLEVKRIINEPTAAALAFGLDKTEKGDRKIVVYDLGGGTFDVSIIEIADVDGEMQFEVLSTNGDTFLGGEDFDQRIIDYIISEFKKEQGVDLSKDVLALQRLKEAAEKAKIELSSSQQTEINLPYITADASGPKHLNLKITRAKLEALVEELIERTIEPCRVAIKDAGVKVSDIDDVILVGGMTRMPKVQDKVKEFFGREPRKDVNPDEAVAAGAAIQGSVLSGERKDVLLLDVTPLSLGIETLGGVMTKMIQKNTTIPTRYSQTFSTADDNQPAVTIKVFQGEREIAAGNKGLGEFNLEGIPPAPRGLPQIEVTFDIDANGILHVSAKDKGTGKENKITIKANSGLSEDEIQRMVKDAEANAEEDHRLAELAQARNQADALVHATRKSLTEYGEKLEAAEKESIEAAIKDLEDILKTGDKAEIDAKVEALSTASQKLGEKMYADMQAQQQAQQQQAADNAKPVDDNVVDADFKEVKRDQ

SEQ ID NO: 48758 - DNA, 1902 bp, Bradyrhizobium japonicum
  CDS (1)..(1902): transl_table=11
atgggaaaggtcattgggatcgacctcggcaccacgaactcgtgcgtcgccgtgatggatggcaagaacgccaaagtcatcgagaattccgagggcatgcgcacgacgccttcgatcgtcgccgtcaccgacgacggtgagcgcctcgtcggccagccggccaagcgccaggccgtcaccaatcccgagcgcaccttcttcgcagtgaagcgcctcatcggccgccgctacgacgacccgatggtcgagaaggacaagaagctcgttccgtacaagatcgtgaaggcttccaacggcgacgcctgggtcgaggccgacggccagacctactcgccctcgcaggtctcggcgttcatcctgcagaagatgaaggagaccgcggaggcccatctcggccagaaggtcgaccaggccgtcatcaccgttcccgcctacttcaacgacgcccagcgccaggcgaccaaggacgccggcaagatcgcgggccttgaagtgctgcgcatcatcaacgagccgaccgcggccgcgctcgcctatggtctggacaagaccaagaccggcacgatcgccgtgtacgatctcggcggcggcacgttcgatatctccattctcgaaatcggcgacggcgtgttcgaggtgaagtcgaccaacggcgacaccttcctcggcggcgaagacttcgacatgcgcctggtcggttatctcgccgacgagttccagaaggagcagggcatcaacctgcgcaacgacaagctcgcgttgcagcgcctgaaggaagccgctgaaaaggccaagatcgagctgtcgtcgacgacgcagaccgagatcaacctgcccttcatcaccgcggaccagaccggcccgaagcatctgacgatgaagctcacccgcgccaagttcgaggcgctggtcgacgacctcatccagaagaccgtcgagccctgccgcaaggcgctgaaggacgccggcgtcaccgccggtgagatcggcgaagtggttctggtcggcggcatgtcgcgcatgccgaaggtccaggaagtcgtgaagcagctgttcggcaaggagccgcacaagggcgtcaacccggacgaagtcgtggcgatcggtgccgcgatccaggccggcgtgctccagggcgacgtcaaggacgtgctgctgctcgacgtgaccccgctgtcgctgggcatcgagacgctgggcggcgtgttcacccgcatcatcgaccgcaacaccacgatcccgaccaagaagagccaggtgttctcgaccgccgaggacaaccagaacgcggtcaccatccgcgtcttccagggcgagcgtgaaatggcggccgacaacaagatgctcggccagttcgacctgatgggcattccgccggccccgcgcggcatgccgcagatcgaggtgaccttcgacatcgacgccaacggcatcgtcaacgtctcggcgaaggacaaggccaccggcaaggagcagcagatccgcatccaggcctccggcggtctgtcggaagccgacatcgagaagatggtcaaggacgccgaggccaatgccgaagcggacaagaagcgccgcgaggcggtgaccgccaagaacgaggcggacggtctggtgcattcgaccgagaaggcgctcgccgagcacggttcgaaggtcgccgagaccgagcgccgcgccatcgaggatgccgtcagcgacctcaaggaagcgctgaagggcgacgatgccgaggcgatcaaggccaagacccagacgctggcccaggcttcgatgaagctcggcgaggccatgtacaagcagcaggccgaggccgacgccaagaaggacgcggccaaggacgacgtcgtcgacgcggagttcaccgaagtcgacgacgacaagaacaacaagaagtccgcctga

SEQ ID NO: 48759 - protein, 633 aa, Bradyrhizobium japonicum
MGKVIGIDLGTTNSCVAVMDGKNAKVIENSEGMRTTPSIVAVTDDGERLVGQPAKRQAVTNPERTFFAVKRLIGRRYDDPMVEKDKKLVPYKIVKASNGDAWVEADGQTYSPSQVSAFILQKMKETAEAHLGQKVDQAVITVPAYFNDAQRQATKDAGKIAGLEVLRIINEPTAAALAYGLDKTKTGTIAVYDLGGGTFDISILEIGDGVFEVKSTNGDTFLGGEDFDMRLVGYLADEFQKEQGINLRNDKLALQRLKEAAEKAKIELSSTTQTEINLPFITADQTGPKHLTMKLTRAKFEALVDDLIQKTVEPCRKALKDAGVTAGEIGEVVLVGGMSRMPKVQEVVKQLFGKEPHKGVNPDEVVAIGAAIQAGVLQGDVKDVLLLDVTPLSLGIETLGGVFTRIIDRNTTIPTKKSQVFSTAEDNQNAVTIRVFQGEREMAADNKMLGQFDLMGIPPAPRGMPQIEVTFDIDANGIVNVSAKDKATGKEQQIRIQASGGLSEADIEKMVKDAEANAEADKKRREAVTAKNEADGLVHSTEKALAEHGSKVAETERRAIEDAVSDLKEALKGDDAEAIKAKTQTLAQASMKLGEAMYKQQAEADAKKDAAKDDVVDAEFTEVDDDKNNKKSA

SEQ ID NO: 48760 - DNA, 1833 bp, Brevibacillus choshinensis
  CDS (1)..(1833): transl_table=11
atgagtcgcgtaattggtattgaccttggaaccaccaactcttgtgtggcagtaatggaaggcggagagccagtcgtaatcgccaacccggaaggaaaccgcaccactccatccgttgttgcatttaaaaatggagagaaaatcgtaggggaagcagcaaaacgccaagcgatcacgaaccctgacaataccgtaatttccatcaagcgccacatgggtacttctcataaagaaaccctcgaaggcaatgagtatacccctcaacagatctctgcgatgatcctgcaaaagctgaaatccgatgcagaagcgtatctgggtgaatctgtgacgcaggcagttattacggtacctgcatacttcaacgacagccaacgtcaggcaaccaaagacgctggtaaaatcgcaggtctggaagttctgcgcatcgtcaatgaaccaacagcggcagctctcgcatacggcatggaaaagtcggaagatcaaaccgttctggtattcgaccttggcggcggtacgttcgacgtgtccatcctggaactctccgaaggcttctttgaagtaaaagcgacctccggtgacaacaagctgggtggggacgacttcgaccaagtagtcatggattacctggtgagcgagttcaaaaaagaacacggcatcgacctgtccaaagaccgcatggctcaacaacgtttgaaagacgctgcggaaaaagcgaaaaaggacctgtccggcgtactgaccacgaccatctcgctgcctttcatcacagcagatgcaaccggtccaaaacacttggagatgaacttgactcgcgcgaaattcgaagagctgtcttccaatctcgtagagcgcaccatgggacctactcgtcaagcgctgaatgacgcagggctcactccaaacgaaatcgataaagtaatcctcgtcggtggttccactcgaatcccggctgttcaagaagcgatcaaaaaattcactggcaaagaaccgcacaaaggcgtaaacccagacgaagtcgtagcgcttggtgctgctgtgcaagcaggcgtactgactggcgatgtgaaagacgtcgtactgctcgacgtaactcctctctctctgggcatcgagacattgggcggcgtattcaccaagctgatcgatcgcaatacaacgatcccaacaagcaaatcccaagtgttctctactgcagccgacaaccagccaggcgtggaaattcacgtgctgcaaggtgagcgtcaaatggcagcggacaacaaaacactgggtcgcttcaatctgaatgacattccgccagctccacgaggcgtaccgcaaatcgaagtatccttcgacatcgatgcgaacggtatcgtgaacgttcgtgcgaaagatctgggtacaggcaaagagcaacgcatcaccatcacagcgagctccggactttccgatgaagaaatcgatcgcatggtgaaagaagctgagctgaatgcagaagcggacaaacagcgcaaagagcaagtggaaatccgcaacgaagctgaccagctcgtgtttacaaccgagaaaaccttgaaagaggtagaaggcaaagtagaccaggcggagatcgaccgtgcgaacgctgcgaaagacaaagtgaaaaaagcgcttgaaggtggcagcatcgacgagatcaagtctgcaaaagacgaattgtccgagatcgttcagcaaatctctgtgaagctgtatgagcaagcagcccaagcggcgggggcagcccaaggtggagcagaaggcagtgcggaaccgaagaaagacaatgtggtagacgcagactatgaagtggtagacgataaaaagtaa

SEQ ID NO: 48761 - protein, 610 aa, Brevibacillus choshinensis
MSRVIGIDLGTTNSCVAVMEGGEPVVIANPEGNRTTPSVVAFKNGEKIVGEAAKRQAITNPDNTVISIKRHMGTSHKETLEGNEYTPQQISAMILQKLKSDAEAYLGESVTQAVITVPAYFNDSQRQATKDAGKIAGLEVLRIVNEPTAAALAYGMEKSEDQTVLVFDLGGGTFDVSILELSEGFFEVKATSGDNKLGGDDFDQVVMDYLVSEFKKEHGIDLSKDRMAQQRLKDAAEKAKKDLSGVLTTTISLPFITADATGPKHLEMNLTRAKFEELSSNLVERTMGPTRQALNDAGLTPNEIDKVILVGGSTRIPAVQEAIKKFTGKEPHKGVNPDEVVALGAAVQAGVLTGDVKDVVLLDVTPLSLGIETLGGVFTKLIDRNTTIPTSKSQVFSTAADNQPGVEIHVLQGERQMAADNKTLGRFNLNDIPPAPRGVPQIEVSFDIDANGIVNVRAKDLGTGKEQRITITASSGLSDEEIDRMVKEAELNAEADKQRKEQVEIRNEADQLVFTTEKTLKEVEGKVDQAEIDRANAAKDKVKKALEGGSIDEIKSAKDELSEIVQQISVKLYEQAAQAAGAAQGGAEGSAEPKKDNVVDADYEVVDDKK

SEQ ID NO: 48762 - DNA, 1914 bp, Brucella ovis
  CDS (1)..(1914): transl_table=11
atggctaaagttattggtatcgatctgggaacgaccaactcctgcgttgccgtcatggacggaaagaacgcgaaggtcattgaaaatgcagaaggtgcacgcaccaccccttcgatcatcgccttcacggatggtgacgaaggcgtcgctggtcagcctgcgaagcgtcaggccgtcaccaacccggaaggcaccctttttgccgtcaagcgcctgcttggccgtcgctatgacgatccgatggtcaccaaggacaaggatcttgttccttacaagatcgtcaagggcgacaatggcgatgcctgggtcgaggtgcacggcaagaaatattctccgtcgcagatctccgccatgatccttcagaagatgaaggaaacggctgaatcctaccttggcgaaaccgttacgcaggccgtcatcacggttccggcctacttcaacgacgcccagcgtcaggccaccaaggatgccggcaagatcgccggtctggaagttctgcgcatcatcaacgagccgaccgcggctgcgcttgcctatggtctcgacaagagcgaaggcaagaccatcgctgtctatgaccttggaggcggtactttcgacgtgtcggttctggaaatcggcgacggcgtttttgaagtgaagtccaccaatggcgacacgttccttggcggtgaagacttcgatattcgtctggtcgaatatctggttgccgagttcaagaaggaaagtggcatcgacctgaagaacgacaagcttgccctgcagcgcctcaaggacgctgccgaaaaggccaagaccgaactgtcgtcctcgcagcagaccgaaatcaacctgccgttcatcacggctgaccagactggcccgaagcatctggcgatcaagctgtcgcgcgccaatgttgaaagcctggtcgatgatgcggtgcatgccacggtcgagccgtgcaaggcggcgctcaaggatgccggcctcaaggctggcgaaattgacgaagtggttctggtcggcggcatgacccgcatgccggagattcagaagtgcgtgaaggccttcttcggcaaggaaccgcacaagggcgtgaacccggatgaagtcgtggccatgggcgcggcgatccagggcggcgttttgcagggcgacgtcaaggacgtgctgctgctcgacgtgaccccgctttcgctcggcattgaaacgctgggcggcgtgttcacccgcctgatcgaacgcaacaccactatcccgaccaagaagtcgcagaccttctccacggctgaggacaaccagtcggccgtgacgatccgcgtcttccaggcgagcgtgaaattggcagccgataacaagctgcttggacagttcgacctcgttggcattccgcccgcaccgcgcggtgtgcggcagatcgaagtgaccttcgacatcgacgccaacggcatcgtcaacgtttcggccaaggatggtggggtacctaaggagcaccagatccgcattcaggcttcgggcggcctgagcgatgccgacatcgaaaagatggttaaggacgccgaagccaatgccgaggccgacaagaagcgtcgtgagagcgtcgaagccaagaatcaggccgaaagcctggtccattcgaccgaaaagtcgctggccgaatatggcgacaaggtttcggccgatgacaagaaggcgattgaggatgcgatcgcagccctcaagacctcgcttgaaggtgaagacgccgaggatatcaaggcgaagacccaggcccttgccgaagtttccatgaagcttggtcaggccatgtacgaagcagcgcaggctgccgaaggtgcgggtgccgagggcggtgaacaggcctcttcgtccaaggacgatgtggtcgatgccgattacgaagaaatcgacgacaacaagaagtcgtcgtaa

SEQ ID NO: 48763 - protein, 637 aa, Brucella ovis
MAKVIGIDLGTTNSCVAVMDGKNAKVIENAEGARTTPSIIAFTDGDEGVAGQPAKRQAVTNPEGTLFAVKRLLGRRYDDPMVTKDKDLVPYKIVKGDNGDAWVEVHGKKYSPSQISAMILQKMKETAESYLGETVTQAVITVPAYFNDAQRQATKDAGKIAGLEVLRIINEPTAAALAYGLDKSEGKTIAVYDLGGGTFDVSVLEIGDGVFEVKSTNGDTFLGGEDFDIRLVEYLVAEFKKESGIDLKNDKLALQRLKDAAEKAKTELSSSQQTEINLPFITADQTGPKHLAIKLSRANVESLVDDAVHATVEPCKAALKDAGLKAGEIDEVVLVGGMTRMPEIQKCVKAFFGKEPHKGVNPDEVVAMGAAIQGGVLQGDVKDVLLLDVTPLSLGIETLGGVFTRLIERNTTIPTKKSQTFSTAEDNQSAVTIRVFQASVKLAADNKLLGQFDLVGIPPAPRGVRQIEVTFDIDANGIVNVSAKDGGVPKEHQIRIQASGGLSDADIEKMVKDAEANAEADKKRRESVEAKNQAESLVHSTEKSLAEYGDKVSADDKKAIEDAIAALKTSLEGEDAEDIKAKTQALAEVSMKLGQAMYEAAQAAEGAGAEGGEQASSSKDDVVDADYEEIDDNKKSS

SEQ ID NO: 48764 - DNA, 1914 bp, Brucella suis
  CDS (1)..(1914): transl_table=11
atggctaaagttattggtatcgatctgggaacgaccaactcctgcgttgccgtcatggacggaaagaacgcgaaggtcattgaaaatgcagaaggtgcacgcaccaccccttcgatcatcgccttcaccgatggtgacgaacgcctcgctggtcagcctgcgaagcgtcaggccgtcaccaacccggaaggcaccctttttgccgtcaagcgcctgattggccgtcgctatgacgatccgatggtcaccaaggacaaggatcttgttccttacaagatcgtcaagggcgacaatggcgatgcctgggtcgaggtgcacggcaagaaatattctccgtcgcagatctccgccatgatccttcagaagatgaaggaaacggctgaatcctaccttggcgaaaccgttacgcaggccgtcatcacggttccggcctacttcaacgacgcccagcgtcaggccaccaaggatgccggcaagatcgccggtctggaagttctgcgcatcatcaacgagccgaccgcggctgcgcttgcctatggtctcgacaagagcgaaggcaagaccatcgctgtctatgaccttggcggcggtactttcgacgtgtcggttctggaaatcggcgacggcgtttttgaagtgaagtccaccaatggcgacacgttccttggcggtgaagacttcgatattcgtctggtcgaatatctggttgccgagttcaagaaggaaagtggcatcgacctgaagaacgacaagcttgccctgcagcgcctcaaggaagctgccgaaaaggccaagatcgaactgtcgtcctcgcagcagaccgaaatcaacctgccgttcatcacggctgaccagactggcccgaagcatctggcgatcaagctgtcgcgcgccaagtttgaaagcctggtcgatgatctcgtgcagcgcacggtcgagccgtgcaaggcggcgctcaaggatgccggcctcaaggctggcgaaattgacgaagtggttctggttggcggcatgacccgcatgcccaagattcaggaagtcgtgaaggccttcttcggcaaggaaccgcacaagggcgtgaacccggatgaagtcgtggccatgggcgcggcgatccagggcggcgttttgcagggcgacgtcaaggacgtgctgctgctcgacgtgaccccgctttcgctcggcattgaaacgctgggcggcgtgttcacccgcctgatcgaacgcaacaccactatcccgaccaagaagtcgcagaccttctccacggctgaggacaaccagtcggccgtgacgatccgcgtcttccagggcgagcgtgaaatggcagccgataacaagctgcttggacagttcgacctcgttggcattccgcccgcaccgcgcggtgtgccgcagatcgaagtgaccttcgacatcgacgccaacggcatcgtcaacgtttcggccaaggataagggtaccggcaaggagcaccagatccgcattcaggcttcgggcggcctgaccgatgccgacatcgaaaagatggtcaaggacgccgaagccaatgccgaggccgacaagaagcgtcgtgagagcgtcgaagccaagaatcaggccgaaagcctggtccattcgaccgaaaagtcgctggccgaatatggcgacaaggtttcggccgatgacaagaaggccattgaggatgcgatcgcagccctcaagacctcgcttgaaggtgaagacgccgaggatatcaaggcgaagacccaggcccttgccgaagtttccatgaagcttggtcaggccatgtacgaagcagcgcaggctgccgaaggtgcgggtgccgagggcggtgaacaggcctcttcgtccaaggacgatgtggtcgatgccgactacgaagaaatcgacgacaacaagaagtcgtcgtaa

SEQ ID NO: 48765 - protein, 637 aa, Brucella suis
MAKVIGIDLGTTNSCVAVMDGKNAKVIENAEGARTTPSIIAFTDGDERLAGQPAKRQAVTNPEGTLFAVKRLIGRRYDDPMVTKDKDLVPYKIVKGDNGDAWVEVHGKKYSPSQISAMILQKMKETAESYLGETVTQAVITVPAYFNDAQRQATKDAGKIAGLEVLRIINEPTAAALAYGLDKSEGKTIAVYDLGGGTFDVSVLEIGDGVFEVKSTNGDTFLGGEDFDIRLVEYLVAEFKKESGIDLKNDKLALQRLKEAAEKAKIELSSSQQTEINLPFITADQTGPKHLAIKLSRAKFESLVDDLVQRTVEPCKAALKDAGLKAGEIDEVVLVGGMTRMPKIQEVVKAFFGKEPHKGVNPDEVVAMGAAIQGGVLQGDVKDVLLLDVTPLSLGIETLGGVFTRLIERNTTIPTKKSQTFSTAEDNQSAVTIRVFQGEREMAADNKLLGQFDLVGIPPAPRGVPQIEVTFDIDANGIVNVSAKDKGTGKEHQIRIQASGGLTDADIEKMVKDAEANAEADKKRRESVEAKNQAESLVHSTEKSLAEYGDKVSADDKKAIEDAIAALKTSLEGEDAEDIKAKTQALAEVSMKLGQAMYEAAQAAEGAGAEGGEQASSSKDDVVDADYEEIDDNKKSS

SEQ ID NO: 48766 - DNA, 2100 bp, Burkholderia cepacia
  CDS (70)..(2022): transl_table=11
tggcgcgcgaaaccgccccaaaacgcggggttttgcgcagcaaacaagcatttctggagattaggaaaaatgggaaagatcatcggtattgacctcggcaccacgaactcgtgcgttgccatcatggaaggcaaccaggtcaaggtcatcgagaactcggaaggcacgcgcaccacgccttcgatcatcgcctacatggacgacaacgaagtgctcgtcggcgcgccggccaagcgtcaatcggtgaccaacccgaagaacacgctgttcgcagtgaagcgtctgatcggccgccgcttcgaagagaaggaagtccagaaggacatcggcctgatgccttacagcatcatcaaggccgacaacggcgatgcatgggtcgaaggccacggcgaaaagctcatggcgccgccgcaggtttcggcggaagctgtgcgcaagatgaagaagacggccgaagactacctcggcgagccggtcacggaagccgtgatcacggtgccggcgtacttcaacgacagccagcgccaggcaacgaaggatgcgggccgcatcgcgggcctcgaagtcaagcggatcatcaacgagccgaccgcagccgcgctcgcgttcggcctcgacaaggccgagaagggcgaccgcaagatcgccgtgtatgacctcggcggcggtacgttcgacgtgtcgatcatcgaaatcgcggacgtcgacggcgaaatgcagttcgaagtgctgtcgaccaacggcgacacgttcctcggcggcgaagacttcgaccagcgcatcatcgattacatcatcggcgagttcaagaaggagcagggcgtcgacctgtcgaaggacgtgctcgcgttgcagcgcctgaaggaagccgctgaaaaggcgaagatcgagctgtcgtcgagccagcagaccgaaatcaacctgccgtacatcacggcggacgcgtcgggcccgaagcacttgaacctgaagatcacccgcgcgaagctggaagcgctggtggaagatctcgtcgagcgcacgatcgaaccgtgccgcatcgcgatcaaggacgcaggcgtcaaggtgtcggacatcgacgacgtgatcctggtcggcggccagacgcgcatgccgaaggtcatggagaaggtgaaggagttcttcggcaaggacccgcgccgtgacgtgaacccggacgaagccgtcgcggttggcgcggcgatccagggccaggtcctgtcgggcgaccgcaaggacgtgctgctgctcgacgtgaccctgtcgctcggtatcgagaccgtcggcggcgtgatgacgaagatgatcagcaagaacacgacgatcccgacgaagcacgcgcaagtgtattcgacggcggacgacaaccagggcgccgtgacgatcaaggtgttccagggcgaacgcgaaatggcagccggcaacaagctgctcggcgagttcaacctcgaaggcatcccgcccgcaccgcgcggcgtgccgcagatcgaagtgaccttcgacatcgacgcgaacggcatcctgcacgtcggcgcgaaggacaaggcgaccggcaaggaaaacaagatcacgatcaaggcgaactcgggtctgtccgaggctgaaatcgaccagatgatcaaggacgcggaagcgaacgcagcggaagatcacaacgtgcgcgagctggccgattcgcgcaaccagggcgatgcgctggtccacagcacgaagaaggcgctgaccgagtacggcgacaagctggacgcgggcgagaaggaagcgctcgaagcgtcgctgaagtcgctcgaggaagtgctgaaggacacgtcggccgacaaggctgcgatcgacgcgaaggtcgaggaactcggcaaggtttcgcagaagctcggcgaaaagatgtacgccgacatgcaggcccagcaagcgggtgcggccggcgcagcgggtgcagcggaaggtgcggcccacgcgggcggcgcgcaacaggctgccgacgatgtcgtcgacgccgagttcaaggaagtgaagaaggactaagcgggttgccccggtccggcaccgggcaacacggcggcgcggctgacgggctggctgacaacggtctgtctttccttc

SEQ ID NO: 48767 - protein, 650 aa, Burkholderia cepacia
MGKIIGIDLGTTNSCVAIMEGNQVKVIENSEGTRTTPSIIAYMDDNEVLVGAPAKRQSVTNPKNTLFAVKRLIGRRFEEKEVQKDIGLMPYSIIKADNGDAWVEGHGEKLMAPPQVSAEAVRKMKKTAEDYLGEPVTEAVITVPAYFNDSQRQATKDAGRIAGLEVKRIINEPTAAALAFGLDKAEKGDRKIAVYDLGGGTFDVSIIEIADVDGEMQFEVLSTNGDTFLGGEDFDQRIIDYIIGEFKKEQGVDLSKDVLALQRLKEAAEKAKIELSSSQQTEINLPYITADASGPKHLNLKITRAKLEALVEDLVERTIEPCRIAIKDAGVKVSDIDDVILVGGQTRMPKVMEKVKEFFGKDPRRDVNPDEAVAVGAAIQGQVLSGDRKDVLLLDVTLSLGIETVGGVMTKMISKNTTIPTKHAQVYSTADDNQGAVTIKVFQGEREMAAGNKLLGEFNLEGIPPAPRGVPQIEVTFDIDANGILHVGAKDKATGKENKITIKANSGLSEAEIDQMIKDAEANAAEDHNVRELADSRNQGDALVHSTKKALTEYGDKLDAGEKEALEASLKSLEEVLKDTSADKAAIDAKVEELGKVSQKLGEKMYADMQAQQAGAAGAAGAAEGAAHAGGAQQAADDVVDAEFKEVKKD

SEQ ID NO: 48768 - DNA, 1953 bp, Burkholderia mallei
  CDS (1)..(1953): transl_table=11
atgggaaagatcatcggtattgacctcggcaccacgaactcgtgcgtcgcgatcatggaaggcaaccaggtcaaggtcatcgagaattcggaaggcgcgcgcacgacgccgtcgatcatcgcgtacatggacgacaacgaagtgctcgtcggcgcgcccgccaagcgccaatcggtgacgaacccgaagaacacgctgttcgcggtcaagcgcctgatcggccgccgtttcgaagagaaggaagtccagaaggacatcggcctgatgccgtacgcgatcatcaaggcggacaacggcgacgcgtgggtcgaggcgcacggcgagaagctcgcgccgccgcaggtgtcggccgaagtgctgcgcaagatgaagaagacggccgaagactacctcggcgagccggtcacggaagccgtgatcacggtgccggcgtacttcaacgacagccagcgccaggcgacgaaggacgcggggcgcatcgcgggcctcgaagtcaagcggatcatcaacgagccgaccgcggccgcgctcgcgttcggcctcgacaaggccgagaagggcgatcgcaagatcgcggtgtatgacctcggcggcggcacgttcgacgtgtcgatcatcgagatcgcggacgtcgacggcgaaatgcagttcgaagtgctgtcgaccaacggcgacacgttcctcggcggcgaggacttcgaccagcgcatcatcgattacatcatcggcgaattcaagaaggagcagggcgtcgatctctcgaaggacgtgctcgcgctgcagcgcctgaaggaagcggccgagaaggcgaagatcgagctgtcgtcgagccagcagaccgaaatcaacctgccgtacatcacggccgacgcgtcgggcccgaagcacttgaacctgaaggtcacgcgcgcgaagctcgaggcgctcgtcgaggatctggtcgagcgcacgatcgagccgtgccgcaccgcgatcaaggacgcgggcgtcaaggtgtcggacatcgacgacgtgatcctcgtcggcggccagacccgcatgccgaaggtgcaggagaaggtgaaggaattcttcggcaaggagccgcgccgcgacgtgaacccggacgaagccgtcgcggtgggcgcggcgatccagggccaggtgctttcgggcgaccgcaaggacgtgctgctgctcgacgtgacgccgctgtcgctcggcatcgagacgctcggcggcgtgatgacgaagatgatcaacaagaacacgacgatcccgacgaagcacgctcaggtgtattcgacggcggacgacaaccagggcgccgtgacgatcaaggtgttccagggcgaacgcgagatggcggcgggcaacaagctgctcggcgagttcaacctcgagggcatcccgcccgcgccgcgcggcgtgccgcagatcgaagtgaccttcgacatcgacgcgaacggcatcctgcacgtcggcgcgaaggacaaggcgaccggcaaggaaaacaagatcacgatcaaggcgaactcgggcctgtccgaagccgagatcgagaagatggtgaaggacgcggaagcgaacgcggcggaagaccacaagctgcgtgagctcgccgaatcccgcaaccagggcgacgcgctcgtgcacagcacgaagaaggcgctcaccgagtacggcgacaagctggaggcgggcgagaaggagaagatcgaagcggcgctcaaggagctcgaggacgtgctgaagaacgcgtcgagcgacaaggcggcgatcgacgcgaaggtcgaagcggttgcgacggcgtcgcagaagctcggcgagaagatgtacgccgacatgcaggcgcagcaggcaggcgccgcgggcgcggccggggcggcagccgaaggtgcgtcggcgcagggcggcgcgcagccggccgacgacgtcgtcgacgccgacttcaaggaagtgaagaaggactga

SEQ ID NO: 48769 - protein, 650 aa, Burkholderia mallei
MGKIIGIDLGTTNSCVAIMEGNQVKVIENSEGARTTPSIIAYMDDNEVLVGAPAKRQSVTNPKNTLFAVKRLIGRRFEEKEVQKDIGLMPYAIIKADNGDAWVEAHGEKLAPPQVSAEVLRKMKKTAEDYLGEPVTEAVITVPAYFNDSQRQATKDAGRIAGLEVKRIINEPTAAALAFGLDKAEKGDRKIAVYDLGGGTFDVSIIEIADVDGEMQFEVLSTNGDTFLGGEDFDQRIIDYIIGEFKKEQGVDLSKDVLALQRLKEAAEKAKIELSSSQQTEINLPYITADASGPKHLNLKVTRAKLEALVEDLVERTIEPCRTAIKDAGVKVSDIDDVILVGGQTRMPKVQEKVKEFFGKEPRRDVNPDEAVAVGAAIQGQVLSGDRKDVLLLDVTPLSLGIETLGGVMTKMINKNTTIPTKHAQVYSTADDNQGAVTIKVFQGEREMAAGNKLLGEFNLEGIPPAPRGVPQIEVTFDIDANGILHVGAKDKATGKENKITIKANSGLSEAEIEKMVKDAEANAAEDHKLRELAESRNQGDALVHSTKKALTEYGDKLEAGEKEKIEAALKELEDVLKNASSDKAAIDAKVEAVATASQKLGEKMYADMQAQQAGAAGAAGAAAEGASAQGGAQPADDVVDADFKEVKKD

SEQ ID NO: 48770 - DNA, 1872 bp, Campylobacter jejuni
  CDS (1)..(1872): transl_table=11
atgagtaaagttataggtatagatttaggaacaaccaattcttgtgttgctgtatatgaacgcggcgagagcaaagtaatcccaaacaaagaaggaaaaaacacaactccttcagtggtagcttttacagataaaggtgaagttttagtaggcgatagtgcaaaacgccaagcggtaaccaaccctgaaaaaaccatttattctatcaaaagaattatgggtttaatgatcaatgaagatgcggctaaagaagctaaaaatagacttccttaccacatcaccgaaagaaatggtgcgtgcgcaatagaaatcgcaggtaaaatttacaccccacaagaaatttcagcaaaagttttgatgaaattaaaagaagatgcagaagcttttttgggtgaaagtgttgtagatgcggtgattactgtgcctgcttattttaacgatgcacaaagaaaagcgacaaaagaagcgggaacgatagcaggacttaatgtattaagaattatcaatgagcctacttcagcagctctagcttacggacttgataaaaaagatagtgaaaaaattgtggtttatgatctaggtgggggaacttttgacgttactgtgcttgaaactggcgataatgtagtagaagttttagcaacaggtggtaacgctttcttaggtggtgatgattttgataataaacttatagattttctagctaatgaatttaaagatgaaacaggcatagatcttaaaaatgatgttatggctttgcaacgcttgaaagaagcagcagaaaatgctaaaaaagaattaagctcagctaatgaaactgaaattaatttaccatttatcacagcagatgcaagtgggccaaaacatttggttaaaaaacttactagagctaaatttgaaggtatgattgattctttagtggctgaaaccatcactaaaatcaatgaagtagtaagcgatgcagggcttaaaaaagatgagatcaaagaaatcgttatggtagggggctctactcgtgttcctttagtgcaagaagaagtgaaaaaagcctttaataaagatcttaataagtctgtaaatcctgatgaagttgtggctatcggtgcggcgattcaaggtgcggttataaaaggtgatgtaaaagatgtgcttttacttgatgttactccgctctctttgggtatagaaactctaggcggggtaatgactaagattatcgaaaaaggtacaactattccaactaaaaaagagcaagttttctcaaccgctgaagataatcaaagtgctgtaactatcaatgttttacaaggggaaagagaatttagtcgtgataataaatctttaggaaattttaatcttgaaggaattccaccagcaccacgcggtatgccacaaatcgaagttacttttgatatcgatgcaaatggtattttaactgttagtgcaaaagataaagcaacaggtaaggctcaagagatcaaaatcacaggttcaagcggacttagcgaggaagagattaataacatggtaaaagatgctgaacttcacaaagaagaagacaaaaaacgcaaagaagctgtagatgctagaaatgcagctgatagcttggcgcatcaagtagaaaaatctttaagtgagttgggtgaaaaagttgccgctgctgataaagaaaatattcaaaaagctcttgatgatttgcgtgagactttgaaaaatcaaaatgcaagcaaagaagagattgaaagcaaaatgaaagctttaagtgaagtttctcacaaactagctgaaaatatgtataaaaaagatgagccaaacacagcaaatgataaaaagaaaaaagatgacgatgtaatcgacgctgaagttgagtaa

SEQ ID NO: 48771 - protein, 623 aa, Campylobacter jejuni
MSKVIGIDLGTTNSCVAVYERGESKVIPNKEGKNTTPSVVAFTDKGEVLVGDSAKRQAVTNPEKTIYSIKRIMGLMINEDAAKEAKNRLPYHITERNGACAIEIAGKIYTPQEISAKVLMKLKEDAEAFLGESVVDAVITVPAYFNDAQRKATKEAGTIAGLNVLRIINEPTSAALAYGLDKKDSEKIVVYDLGGGTFDVTVLETGDNVVEVLATGGNAFLGGDDFDNKLIDFLANEFKDETGIDLKNDVMALQRLKEAAENAKKELSSANETEINLPFITADASGPKHLVKKLTRAKFEGMIDSLVAETITKINEVVSDAGLKKDEIKEIVMVGGSTRVPLVQEEVKKAFNKDLNKSVNPDEVVAIGAAIQGAVIKGDVKDVLLLDVTPLSLGIETLGGVMTKIIEKGTTIPTKKEQVFSTAEDNQSAVTINVLQGEREFSRDNKSLGNFNLEGIPPAPRGMPQIEVTFDIDANGILTVSAKDKATGKAQEIKITGSSGLSEEEINNMVKDAELHKEEDKKRKEAVDARNAADSLAHQVEKSLSELGEKVAAADKENIQKALDDLRETLKNQNASKEEIESKMKALSEVSHKLAENMYKKDEPNTANDKKKKDDDVIDAEVE

SEQ ID NO: 48772 - DNA, 1815 bp, Carboxydothermus hydrogenoformans
  CDS (1)..(1815): transl_table=11
atgggtagaattgttggtattgaccttggaactacaaactcctgtattgcggtaatggaaggtggagaagtaatcgttattcccaatgctgaaggtggtcgcaccactccttcggtggtggcttttggcaaaaacggggagcggattgttggtcaggtagctaaacgccaggctattaccaatccggaacgcacggtaatttccattaagcggcatatggggaccaattaccgggtaaaaattgacgataaagaatatactccccaggaaatttccgcaatgattttgcaaaagttaaagcaggatgcggaggcttacctgggcgagaaaatcgagaaagccgtaataaccgtaccggcttactttaccgatgctcagcggcaagctactaaagatgccggaagaattgccggccttgaggtgctaagaatcattaacgagcctacggcagccgctttggcttacggccttgataaagaaggggaacaaactatcttagtttacgacctgggcggtggaacctttgacgtttccattttggaaattggtgatggcgtatttgaagttaaagccactgccggtaacaaccgcctcggtggggatgattttgaccagcgaattatcgattggctggtggaaaactttaaaaaagaacacggcattgatttaagaaacgataaaatggccatgcagcggctaaaagaagcggcggagaaagccaaaattgaattatcgggggtactggaaacccagattaatcttccgtttatcgccgctaaccaaaacggaccgttgcatattgatgttaccttaacccgggccaaatttaacgaattaaccgctgacctggtggaagctaccatgggtcccacccggcaggctttagccgatgccggccttaagcccgaagatatcgataaaatcctgttggtgggaggatccacccggataccggcggttcaagaagcaatccgcaagttctttaacaaagagccccataaagggattaaccccgatgaatgcgtagccattggggcggcaattcaagcggcagtactggcgggagaagttaaagacgtagttctattggacgtaacgcccctttccctggggattgaaaccctgggtggagtgtttaccaagttaattgaaagaaacaccacgataccaacttcgaagagccagatttttactactgccgccgacaaccagacttcggtggaaattcacgtcctgcagggcgaacggccgatggctgccgataacgtctctttgggtagatttaccttaaccggtattccaccggctccccgcggagtaccgcaaattgaagtccgctttgatatcgacgtaaacggtattgtccacgtttccgccaaagatctgggtaccggtcgggagcaaagtattaccataaccaataccagcaatctgtcggaagcggagattaagcggatggtggaagaagcggaacggtacgcggaagaagaccggaaacggaaagaagaggtcgaaacccgcaatcaagcggatagcttgatttatcaggcagaaaaaaccttaaaagactttaaggataaagctaatcctgatttagtggcaagagttgagaaagccattgccgagttgcgggaggcaatgaacagtaaagatgtacagctaatgagagcgaaaatggaagagttaaccaagccgctttatgagttaacttccagcatttatcagcagtccgcaaatcaaaatcaaactcaaactggaactaatacccaaggcaacgtgtatgatgccgattacaaggtaaatgacgataaataa

SEQ ID NO: 48773 - protein, 604 aa, Carboxydothermus hydrogenoformans
MGRIVGIDLGTTNSCIAVMEGGEVIVIPNAEGGRTTPSVVAFGKNGERIVGQVAKRQAITNPERTVISIKRHMGTNYRVKIDDKEYTPQEISAMILQKLKQDAEAYLGEKIEKAVITVPAYFTDAQRQATKDAGRIAGLEVLRIINEPTAAALAYGLDKEGEQTILVYDLGGGTFDVSILEIGDGVFEVKATAGNNRLGGDDFDQRIIDWLVENFKKEHGIDLRNDKMAMQRLKEAAEKAKIELSGVLETQINLPFIAANQNGPLHIDVTLTRAKFNELTADLVEATMGPTRQALADAGLKPEDIDKILLVGGSTRIPAVQEAIRKFFNKEPHKGINPDECVAIGAAIQAAVLAGEVKDVVLLDVTPLSLGIETLGGVFTKLIERNTTIPTSKSQIFTTAADNQTSVEIHVLQGERPMAADNVSLGRFTLTGIPPAPRGVPQIEVRFDIDVNGIVHVSAKDLGTGREQSITITNTSNLSEAEIKRMVEEAERYAEEDRKRKEEVETRNQADSLIYQAEKTLKDFKDKANPDLVARVEKAIAELREAMNSKDVQLMRAKMEELTKPLYELTSSIYQQSANQNQTQTGTNTQGNVYDADYKVNDDK

SEQ ID NO: 48774 - DNA, 1980 bp, Chlamydophila abortus
  CDS (1)..(1980): transl_table=11
atgagcgaacaaaaaaaatctagtaaaattatagggatagacttaggaaccacaaactcctgcgtatccgtaatggaaggtgggcaagcgaaagtcatcgtctcttcagaaggaacacgtacaacaccatcgatcgtggcattcaaaggaaacgaaaccttagtcggaattcctgcaaaaagacaagcagtcaccaatcctgccaaaaccctcgcttctacaaaacgtttcatcggaagaaaatattctgaagtggaatcagaaattaaaacagttccctaccaagtggcttcaggatctaatggtgatgttgtcttccctattgatgggaaacagttcacacccgaagaaatcggtgctcaagttcttataaaaatgaaagagaccgcagaagcttatctaggagagcctgtcacagaagcagtgattactgttcccgcctacttcaatgactcacaaagagcttctacaaaagatgctgggcgtatcgccggcctagatgtcaaacgtatcattcctgaacctacagctgcagctcttgcctacgggattgataaagccggggataaaaaaatcgccgttttcgatcttggaggaggaacttttgatatctctattttagaaattggcgatggcgtgttcgaagtgctctctacaaatggggatacccacctaggcggagacgactttgatgaagtcatcattaaatggatgatcgaagaattccaaaaacaagaaggcatcgatctcagcaaagacaacatggctcttcaaagactcaaagatgctgctgaaaaagcaaaaatcgaactttctggcatgtcttccacagaaattaaccaaccgttcatcactatggatgctaacggacctaaacacttaaccttaacactcacacgtgcccactttgaaaagctcgcatctaacctcattgaacgtacaaaagctccatgccaaaaagctttggcagacgctaaacttgccgcaagcgatatcgatgacgtattgctcgttggaggtatgtccagaatgcctgcagtacaagaagtggtaaaatctattttcggtaaagaaccaaataaaggagtcaaccctgatgaggttgttgctattggagcagcaattcaagggggtgtgctcggcggcgaagtgaaagacgttttactactcgacgtaattcctctttccttaggtatcgaaactctcggaggtgttatgactccccttgtagagagaaataccacgatccctacacagaaaaaacaaattttctccacagctgccgataaccaacccgcagtaactattgttgtcttacaaggggaacgtcctatggcaaaagacaacaaagaaattggaagatttgatcttacagatatcccacccgcacctcgaggacatcctcaaatcgaagtgacctttgatatcgatgcgaatggtattcttcacgtatctgcaaaagatgctgctagtggccgtgagcaaaaaattcgtatcgaagcaagctctggattaaaagaagatgaaatccaaagaatgatcaacgatgcggagaaaaataaagaagaagataaaaaacgccgcgaagcttctgacgtaagaaacgaagctgacagtatgatcttcagagcggaaaaagcgatcagcgattacaaagagaatatacccgaatctctaacaaaagaaatcgaagagcgcatagaaaaagtacgctcagctcttaaagaagatgcgcctacagagaaaatcaaagaagcttctgacgaactgagtcgtcatatgcaaaagatcggagaagctatgcagtcgcaatccgcatcagctgcagcaaacgctcaagatgggccaaacatcaatacagaagatctgaaaaaacatagtttcagtacgaaaccaccaacaggaaactcttcttcaagcgctaacaacgaaaacattgaagaggccgatgtggaaatcgtagataaacctaacgattaa

SEQ ID NO: 48775 - protein, 659 aa, Chlamydophila abortus
MSEQKKSSKIIGIDLGTTNSCVSVMEGGQAKVIVSSEGTRTTPSIVAFKGNETLVGIPAKRQAVTNPAKTLASTKRFIGRKYSEVESEIKTVPYQVASGSNGDVVFPIDGKQFTPEEIGAQVLIKMKETAEAYLGEPVTEAVITVPAYFNDSQRASTKDAGRIAGLDVKRIIPEPTAAALAYGIDKAGDKKIAVFDLGGGTFDISILEIGDGVFEVLSTNGDTHLGGDDFDEVIIKWMIEEFQKQEGIDLSKDNMALQRLKDAAEKAKIELSGMSSTEINQPFITMDANGPKHLTLTLTRAHFEKLASNLIERTKAPCQKALADAKLAASDIDDVLLVGGMSRMPAVQEVVKSIFGKEPNKGVNPDEVVAIGAAIQGGVLGGEVKDVLLLDVIPLSLGIETLGGVMTPLVERNTTIPTQKKQIFSTAADNQPAVTIVVLQGERPMAKDNKEIGRFDLTDIPPAPRGHPQIEVTFDIDANGILHVSAKDAASGREQKIRIEASSGLKEDEIQRMINDAEKNKEEDKKRREASDVRNEADSMIFRAEKAISDYKENIPESLTKEIEERIEKVRSALKEDAPTEKIKEASDELSRHMQKIGEAMQSQSASAAANAQDGPNINTEDLKKHSFSTKPPTGNSSSSANNENIEEADVEIVDKPND

SEQ ID NO: 48776 - DNA, 1983 bp, Chlamydia pneumoniae
  CDS (1)..(1983): transl_table=11
atgagtgaacacaaaaaatcaagcaaaattataggtatagacttaggcacaacaaactcctgcgtatctgttatggaaggaggacaagctaaagtaattacatcatccgaaggaacaagaaccacgccatcgatcgttgccttcaaaggtaatgagaaattagtggggattccagcaaaacgtcaagcagtgacaaatccagaaaaaactctcggctctacaaaacgctttattggccgtaagtactctgaagtagcttcggaaatccaaaccgttccttatacagtcacctccggatctaaaggtgatgccgttttcgaagttgatggcaaacaatacactccagaagaaattggcgcacaaatcttaatgaaaatgaaagagacagcagaagcttatctaggcgaaactgtcacagaagcagtgatcaccgtccccgcatacttcaatgattctcaacgagcatccacaaaagatgctggacgcattgcaggtctagatgtaaaacgtatcattccagaacctaccgcagcagctcttgcctacggaatcgataaagtcggtgataaaaaaatcgctgtcttcgaccttggtggaggaacttttgatatctccatcctagaaatcggtgatggcgtcttcgaagttctatctacaaatggagatactctcctcggtggagacgactttgatgaagtcattatcaaatggatgatcgaagaattcaaaaaacaagaaggcattgatcttagcaaagataatatggccttacaaagacttaaagatgctgctgagaaagcaaaaatagaactttcaggagtctcttccacagaaatcaatcagccattcatcacaatggatgcacaaggacctaaacaccttgcattgacactcacacgtgcgcaattcgagaaactcgcagcctctctaatcgaaagaacaaaatctccatgcatcaaagcactcagtgacgcaaaactttccgctaaggatatcgatgatgttctcttagttggaggtatgtcaagaatgcccgcagtgcaagaaactgtaaaagaactcttcggcaaagagcctaataaaggagtcaaccccgacgaagttgttgctattggagccgcaattcaaggtggtgttcttggcggagaagttaaggatgttctacttctagacgttatccccctatctctgggtatcgaaactctaggaggcgtcatgacgactctggtagagagaaatactacaatccctacacagaaaaaacaaatcttctccacagctgctgataaccagcctgcggttaccatcgtagttctccaaggagagcgtcccatggccaaagataacaaggaaatcggaagattcgatcttacagatatccctccggctcctcgaggccatcctcaaatcgaagtctccttcgatatcgatgcaaacggaattttccatgtctcagctaaagatgttgccagcggtaaagaacagaaaattcgtatcgaagcaagctcaggacttcaagaagatgaaatccaaagaatggttcgagatgccgaaattaataaggaagaagataaaaaacgtcgtgaagcttcagatgctaaaaatgaagccgatagcatgatcttcagagccgaaaaagctattaaagattataaggagcaaattcctgaaactttagttaaagaaatcgaagagcgaatcgaaaacgtgcgcaacgcactcaaagatgacgctcctattgaaaaaattaaagaggttactgaagacctaagcaagcatatgcaaaaaattggagagtctatgcaatcgcagtctgcatcagcagcagcatcatcggcagccaatgctaaaggtggacctaacatcaatacagaagatttgaaaaaacatagtttcagtacgaagcctccttcaaataacggttcttcagaagaccatatcgaagaagctgatgtagaaattattgataacgacgataagtaa

SEQ ID NO: 48777 - protein, 660 aa, Chlamydia pneumoniae
MSEHKKSSKIIGIDLGTTNSCVSVMEGGQAKVITSSEGTRTTPSIVAFKGNEKLVGIPAKRQAVTNPEKTLGSTKRFIGRKYSEVASEIQTVPYTVTSGSKGDAVFEVDGKQYTPEEIGAQILMKMKETAEAYLGETVTEAVITVPAYFNDSQRASTKDAGRIAGLDVKRIIPEPTAAALAYGIDKVGDKKIAVFDLGGGTFDISILEIGDGVFEVLSTNGDTLLGGDDFDEVIIKWMIEEFKKQEGIDLSKDNMALQRLKDAAEKAKIELSGVSSTEINQPFITMDAQGPKHLALTLTRAQFEKLAASLIERTKSPCIKALSDAKLSAKDIDDVLLVGGMSRMPAVQETVKELFGKEPNKGVNPDEVVAIGAAIQGGVLGGEVKDVLLLDVIPLSLGIETLGGVMTTLVERNTTIPTQKKQIFSTAADNQPAVTIVVLQGERPMAKDNKEIGRFDLTDIPPAPRGHPQIEVSFDIDANGIFHVSAKDVASGKEQKIRIEASSGLQEDEIQRMVRDAEINKEEDKKRREASDAKNEADSMIFRAEKAIKDYKEQIPETLVKEIEERIENVRNALKDDAPIEKIKEVTEDLSKHMQKIGESMQSQSASAAASSAANAKGGPNINTEDLKKHSFSTKPPSNNGSSEDHIEEADVEIIDNDDK

SEQ ID NO: 48778 - DNA, 1902 bp, Chlorobium tepidum
  CDS (1)..(1902): transl_table=11
atgggtaaaattatcggaatcgacctcggcaccaccaactcctgcgtagcggtcatgcagggtacccagccgacggtcatagaaaactctgaaggcagccgcacgactccgtcgatggtcgctttcaccaaaacgggcgaaaggctcgtgggccaagctgcaaagcgccaggccgttaccaacccgaaaaacaccattttttcgatcaagcgcttcatgggccgcaaatacgacgaagtgccgaacgagaaaaagcttgcctcgtacgacgtggtcaatgaaggtggctatgccaaggtgaagatcggcgacaaaacgtattctccacaggagatctcggccatgatcctgcagaagatgaagcagacggcagaagacttcctcggagaaaaggtcaccgaagctgttattaccgtaccggcatacttcaacgacgctcagcgtcaggccaccaaggacgcaggcaaaatcgcgggtctcgaagtcaagcgcatcatcaacgagccgaccgctgcagcgctggcttacggcctcgacaagaaaaaggaaaacgagaaagtggccgtcttcgaccttggcggcggtacgtttgacatctcgattctcgaactcggcggtggcgtgttcgaggtgaaatcgaccgatggtgacacccacctcggcggtgacgatttcgaccaggtgatcatcaactatctggccgacgagtttaagaaacaggaaggcatcgaccttcgcaaggacgctatcgccctccagcgcttgaaagaggctgccgaaaaggccaaaatcgaactgtcatcacgcaccgacaccgagatcaacctccccttcatcaccgcgacccaggaaggcccgaagcatctcgtaatcaaccttacccgcgccaagttcgaggcgatgagtgcggcgttgttcgacaagttgttcgaaccgtgccgccgcgccatcaaaaactcaaagttcgacataaaggagatcgacgaggtggtgctggttggcggctcgacacgcattccgaaggtacaggcgctcgtgaaggagttcttcggcaaggagcccaacaagagcgtgaaccccgacgaggtggttgccatcggtgcagcgattcagggtggcgtgcttcagggcgacgtcaccgacgtgctcctgctcgacgtcactccgctgtcgctcggtatcgaaaccctcggcggcgtcatgaccaagctgatcgaagccaacaccaccattccgacccgcaagcaggagatcttctccaccgctgcagacaaccagacttcggttgaggtgcacgtgctgcagggcgagcgcccgatggctagcgacaacaagaccctcggcaggttccacctcagcgacattccgccggcaccgcgcggcgttccgcagatcgaggtgaccttcgacatcgacgcaaacggcatcctgaacgtgtcggccaaggacaaggcgaccggcaaagagcaaagcatcaagatcgaggccagcggcaagctcaccgaggccgagatcgagaaaatgaaagaggacgcgaaagcccacgccgccgaagaccagaagcgcaaggaggagatcgagctgaagaactctgccgactcgctgatcttcagcaccgaaaagcagctcaccgagcttggagacaagcttcctgcggacaagaaggctgccatcgagagcgcgctcgaaaaactgaaagaggcgcacaagagcggcagagttgatgcgatcaaacccgcaatggacgagctgagcaaggtctggagcgatgctgcttcgaacctttacggccagcctggcgcggaaccgcagcccgaaaccaacggccacgccggaggcagcaaaggcggcgacggagcggtcaacgctgaatacgaagtgatcgacggcgacgacaagtaa

SEQ ID NO: 48779 - protein, 633 aa, Chlorobium tepidum
MGKIIGIDLGTTNSCVAVMQGTQPTVIENSEGSRTTPSMVAFTKTGERLVGQAAKRQAVTNPKNTIFSIKRFMGRKYDEVPNEKKLASYDVVNEGGYAKVKIGDKTYSPQEISAMILQKMKQTAEDFLGEKVTEAVITVPAYFNDAQRQATKDAGKIAGLEVKRIINEPTAAALAYGLDKKKENEKVAVFDLGGGTFDISILELGGGVFEVKSTDGDTHLGGDDFDQVIINYLADEFKKQEGIDLRKDAIALQRLKEAAEKAKIELSSRTDTEINLPFITATQEGPKHLVINLTRAKFEAMSAALFDKLFEPCRRAIKNSKFDIKEIDEVVLVGGSTRIPKVQALVKEFFGKEPNKSVNPDEVVAIGAAIQGGVLQGDVTDVLLLDVTPLSLGIETLGGVMTKLIEANTTIPTRKQEIFSTAADNQTSVEVHVLQGERPMASDNKTLGRFHLSDIPPAPRGVPQIEVTFDIDANGILNVSAKDKATGKEQSIKIEASGKLTEAEIEKMKEDAKAHAAEDQKRKEEIELKNSADSLIFSTEKQLTELGDKLPADKKAAIESALEKLKEAHKSGRVDAIKPAMDELSKVWSDAASNLYGQPGAEPQPETNGHAGGSKGGDGAVNAEYEVIDGDDK

SEQ ID NO: 48780 - DNA, 1929 bp, Chromobacterium violaceum
  CDS (1)..(1929): transl_table=11
atgggtaaaatcatcggtatcgacctgggcaccaccaactcctgcgtggcagtggtagagggcggcaacccgaaagtcatcgagaacgccgaaggcaaccgcaccaccccgtccatcatcgcctacgtcgaagacggcgagatcctggtgggcgcgccggccaagcgccaggccgtcaccaacccgaagaacaccatctacgccgccaagcgcctgatcggccgtcgcttcgaggacaaggaagtgcagaaggacatcgacctgatgcctttcgaaatcctgaaggccaagaacggcgacgcctgggtcaaggtgcgcgaccaggaactggctccgccgcaaatctccgcagaagtgctgcgcaagatgaaaaaggccgccgaagactacctgggcgaggaagtgaccgaagccgtgatcaccgtgccggcctacttcaacgacagccagcgccaggccaccaaggacgccggccgcatcgccggcctggaagtcaagcgcatcatcaacgagccgaccgcggccgcgctggctttcggcctggccaagcaggaaggcgaccgcaagatcgcggtgtacgacctgggcggcggcaccttcgacgtgtccatcattgaaatcgccgacgtggacggcgagcaccagttcgaagtgctgtcgaccaacggcgacaccttcctgggcggcgaagactttgaccagcgcctgatcgactacatcgtcaccgagttcaagaaagagcaaggcgtcgacctgaagcaggacgtgatggcactgcaacgtctgaaggaagccgctgaaaaggccaagatcgagctgtccagcgccacccagaccgaagtgaacctgccgtacatcaccatggacgccaccggtcccaagcacttggcgatgaagatcacccgcgccaagttcgaaagcctggtggatgacctgatcgcccgctctatcgagccgtgccgcgtggcgctgaaggacgcaggcgtgtcgctgtccgacatcaccgacgtgatcctggtcggcggccagacccgcatgccgaaagtgcaggacgcggtcaaggaattcttcggcaaggagccgcgcaaggatgtgaatccggacgaagccgtggccgtcggcgccgcgatccagggctccgtgctgtccggcgaccgcaaggacgtgctgctgctggacgtgaccccgctgtcgctgggcatcgaaaccctgggcggcgtgatgaccaagctgatccagaagaacacgacgatcccgaccaaggcgtcgcaaaccttctccaccgccgacgacaaccagaccgcggtgaccatccacgtgctgcagggcgagcgcgagaaggccgccgccaacaagtcgctgggccagttcaacctgggcgacatcccgccggcgccgcgcggcatcccgcagatcgaggtcgagttcaatatcgacgccaacggcattctgcacgtgtccgccaaggacaaggccaccggcaagcaggccaacatcaccatccaggcgtcttccggcctgtccgaggccgagatcgagcgcatggtgaaggatgccgaggccaacgccgaggaagacaagaagctgcatgagctggtgaccgcgcgcaaccacgccgaaggcctgatccacagcatcaagaaatcgctgggcgagcacggcgacaagatcggcgccgatgaaaaggccaagatcgagtccgcgctgaaggaagccgaggaagtggtgaagggcgacgacaaggaagccatcgaggccaaggccgaagaactggccaaggccagccagaaactgggcgagatcatgtacgcccaggctcaggcggaagccggcgcccaaggcggcgccgagcaggccgaagccggcaagaaggacgaaggcaacgtggtggacgccgagttcgaagaagtgaagaaagacaaggcctga

SEQ ID NO: 48781 - protein, 642 aa, Chromobacterium violaceum
MGKIIGIDLGTTNSCVAVVEGGNPKVIENAEGNRTTPSIIAYVEDGEILVGAPAKRQAVTNPKNTIYAAKRLIGRRFEDKEVQKDIDLMPFEILKAKNGDAWVKVRDQELAPPQISAEVLRKMKKAAEDYLGEEVTEAVITVPAYFNDSQRQATKDAGRIAGLEVKRIINEPTAAALAFGLAKQEGDRKIAVYDLGGGTFDVSIIEIADVDGEHQFEVLSTNGDTFLGGEDFDQRLIDYIVTEFKKEQGVDLKQDVMALQRLKEAAEKAKIELSSATQTEVNLPYITMDATGPKHLAMKITRAKFESLVDDLIARSIEPCRVALKDAGVSLSDITDVILVGGQTRMPKVQDAVKEFFGKEPRKDVNPDEAVAVGAAIQGSVLSGDRKDVLLLDVTPLSLGIETLGGVMTKLIQKNTTIPTKASQTFSTADDNQTAVTIHVLQGEREKAAANKSLGQFNLGDIPPAPRGIPQIEVEFNIDANGILHVSAKDKATGKQANITIQASSGLSEAEIERMVKDAEANAEEDKKLHELVTARNHAEGLIHSIKKSLGEHGDKIGADEKAKIESALKEAEEVVKGDDKEAIEAKAEELAKASQKLGEIMYAQAQAEAGAQGGAEQAEAGKKDEGNVVDAEFEEVKKDKA

SEQ ID NO: 48782 - DNA, 1848 bp, Clostridium acetobutylicum
  CDS (1)..(1848): transl_table=11
atgtcaaaagtaattggaattgatttaggaacaacaaattcatgtgtagctgttatggaaggtggagatccagcagttatagcaaattcagaaggtgcaagaacaactccttcagttgtatcttttcagaagaatggagaaagattagttggacaggttgcaaaaagacagtcaatcacaaatccagataaaactataatatcaataaaaagaaaaatgggaactgctgaaaaagtagccatagatgataaaaattatacaccacaagaaatttcagctatgattcttcaaaaattgaaggcagatgcagaagcttatcttggagaaactgttacacaagcggttataacagtaccagcttactttaatgatagccaaagacaggcaacaaaggatgcaggaaaaattgcgggacttgaggttcttagaataataaacgaacctacagcagcatcacttgcttatggtcttgataaaatggatactaatcaaaaaattcttgtttatgatttaggtggtggtacttttgatgtatcagtactagaacttggtgatggtgtttttgaagttaagtcaacaaacggaaacactcacttaggtggagacgattttgatgagaaaataatggattacattgcagaagaatttaaaaaagataatggaattgatttaagaaatgataagatggcacttcaaagattaaaagaagctgctgaaaaagcaaaaattgaattatcatcttcaactcagactaatataaatcttccatttataacagctgatgcaacaggtccaaagcatatagatatgaatcttacaagagcaaaatttaatgaattgacagaaggcttagttcaagatactatagagccaatgaaaaaagcacttagtgatgcaggactttcaataaatgatatagataaaatagttttagtaggtggttcaacaagaattcctgcagttcaagaagcagttaaaaactatacaggaaaagatccatcaaagggtgttaaccctgatgaatgtgttgctattggtgcagctattcaagcaggagttttaacaggagatgtaaaagacgtattacttcttgatgttagtccattaacacttggaattgagactttaggcggagttgctactcctctaatagaaagaaatactacaataccaactaggaagagtcaagtattctcaactgcagcagataatcaaccatcagttgaaataaatatagttcaaggtgaaagaaaaatggctgctgataataagagccttggaagatttactcttgatggtatagcaccagcaccaagaggagttccacaaatcgaagttacatttgatatagatgctaatggtatagtaaatgtatcagctaaagataagggaacaggaaaagaatctcatattacaataacagcttcaacaaacttaagtgatgaagaaatagataaggctgttaaagatgcagaaaagtttgcagaagaagataagaagaaaaaagaaaatattgaagttaaaaacaatgctgatcagatagtattccaaacagataaagctttaaaggatcttggagacaaagtatcagctgaagataagtcaaatatcgaagctaaaaaagaagcgctaagcaaggtaaaagatggagacgatatcgaagcgattaaaaaagcaacagaagatttaactcaagcgttatatgctataacaactaaaatgtatgagcaaagcggagctcaaggtgcaccaggagcagatccaaatgcaggagcttcacagaaaacaaatggcggcgctgatgataatgtagtagatgctgactttaaagtagataatgataaatag

SEQ ID NO: 48783 - protein, 615 aa, Clostridium acetobutylicum
MSKVIGIDLGTTNSCVAVMEGGDPAVIANSEGARTTPSVVSFQKNGERLVGQVAKRQSITNPDKTIISIKRKMGTAEKVAIDDKNYTPQEISAMILQKLKADAEAYLGETVTQAVITVPAYFNDSQRQATKDAGKIAGLEVLRIINEPTAASLAYGLDKMDTNQKILVYDLGGGTFDVSVLELGDGVFEVKSTNGNTHLGGDDFDEKIMDYIAEEFKKDNGIDLRNDKMALQRLKEAAEKAKIELSSSTQTNINLPFITADATGPKHIDMNLTRAKFNELTEGLVQDTIEPMKKALSDAGLSINDIDKIVLVGGSTRIPAVQEAVKNYTGKDPSKGVNPDECVAIGAAIQAGVLTGDVKDVLLLDVSPLTLGIETLGGVATPLIERNTTIPTRKSQVFSTAADNQPSVEINIVQGERKMAADNKSLGRFTLDGIAPAPRGVPQIEVTFDIDANGIVNVSAKDKGTGKESHITITASTNLSDEEIDKAVKDAEKFAEEDKKKKENIEVKNNADQIVFQTDKALKDLGDKVSAEDKSNIEAKKEALSKVKDGDDIEAIKKATEDLTQALYAITTKMYEQSGAQGAPGADPNAGASQKTNGGADDNVVDADFKVDNDK

SEQ ID NO: 48784 - DNA, 1860 bp, Clostridium perfringens
  CDS (1)..(1860): transl_table=11
atgagtaaaataatcggtatagatttaggaacaacaaattcatgcgtagctgttatggaaggtggagaaccagtagttatcactaactcagaaggtgctagaacaactccatcagtagtttcattccaagcaaacggagaaagattagtaggtcaagttgctaaaagacaagcaataacaaatcctgacaaaacaataatgtcaatcaaaagacacatgggaactgactataaagttaatatagatggaaaagattatacaccacaagaaatatcagcaatgatacttcaaaaattaaaagcagatgcagaagcttacttaggagaaaaagtaacagaagctgttatcacagttccagcttacttcaatgatgctgaaagacaagcaactaaggatgctggtagaatcgctggtttagatgttaagagaataataaacgaaccaacagctgcatcattagcttatggattagataaaatggatagtgctcacaaaatcttagtatatgacctaggtggtggtactttcgacgtatctatcttagacttaggagatggagtatttgaagttgtatcaacaaacggagatgctagattaggtggagatgacttcgaccaaagaattatagattatatagcagaagactttaaagctcaaaacggaattgatttaagacaagataaaatggctcttcaaagattaaaagaagctgctgaaaaagctaaaattgagttatcatcatcaactcaaacattaatcaacttaccatttataactgctgatgcaactggtccaaaacacatagatatgacattaacaagagctaaattcaatgaattaactcatgacttagttgaaagaacaatcaacataatgaaagaagccttaaaatcaggtaatgtttcattaaatgatatagataaagtaatcttagttggtggatcaacaagaataccagcagttcaagaagctgttaaaaacttcactggaaaagaaccttcaaaaggagttaacccagatgagtgcgtagcaatgggtgctgctatccaagctggtgtattaactggtgatgttaaagacgtattattattagatgttactccattaacattaggaatcgaaactttaggaggagttgcaactccattaatcgaaagaaatacaactatccctgcaagaaagagtcaaatattctcaactgcagcagataaccaaacttcagttgaaattcacgtagtacaaggtgaaagacaaatggcagctgataacaaaactttaggtagatttactctatcaggaattgctccagctccaagaggaatccctcaaatagaagttgctttcgatatagatgctaacggtatagttaaagtttcagcaactgataaagctactggaaaagaagctaacattacaatcacagcttcaactaacttaagcgatgctgaaatagataaggctgtaaaagaagcagaacaatttgctgaagaagataagaagagaaaagaagctatagaagttaaaaacaatgctgagcaaactgtttaccaaacagaaaaaactttaaatgaacttggagataaagtttcagctgaagaaaaatcagaaatagaagctaaaattgaagaagttaaaaaagttaaagatggtgacgatatagaagctatcaagaaagctatggaagatttaactcaagcattctacaaagtatcagaaaaattataccaacaaaatggtggagcacaaggtcaaggattcgatccaaacaacatgggtggagctaatgctggagcaggtgctacaaacaacaacgatgacaatgttgtagatgctgatttcgaagttcaagatgataaataa

SEQ ID NO: 48785 - protein, 619 aa, Clostridium perfringens
MSKIIGIDLGTTNSCVAVMEGGEPVVITNSEGARTTPSVVSFQANGERLVGQVAKRQAITNPDKTIMSIKRHMGTDYKVNIDGKDYTPQEISAMILQKLKADAEAYLGEKVTEAVITVPAYFNDAERQATKDAGRIAGLDVKRIINEPTAASLAYGLDKMDSAHKILVYDLGGGTFDVSILDLGDGVFEVVSTNGDARLGGDDFDQRIIDYIAEDFKAQNGIDLRQDKMALQRLKEAAEKAKIELSSSTQTLINLPFITADATGPKHIDMTLTRAKFNELTHDLVERTINIMKEALKSGNVSLNDIDKVILVGGSTRIPAVQEAVKNFTGKEPSKGVNPDECVAMGAAIQAGVLTGDVKDVLLLDVTPLTLGIETLGGVATPLIERNTTIPARKSQIFSTAADNQTSVEIHVVQGERQMAADNKTLGRFTLSGIAPAPRGIPQIEVAFDIDANGIVKVSATDKATGKEANITITASTNLSDAEIDKAVKEAEQFAEEDKKRKEAIEVKNNAEQTVYQTEKTLNELGDKVSAEEKSEIEAKIEEVKKVKDGDDIEAIKKAMEDLTQAFYKVSEKLYQQNGGAQGQGFDPNNMGGANAGAGATNNNDDNVVDADFEVQDDK

SEQ ID NO: 48786 - DNA, 1857 bp, Clostridium tetani
  CDS (1)..(1857): transl_table=11
atggcaaaagtaataggtatagacttaggtacaacaaattcatgtgtatcagttatggaaggtgggaatccagtagttataacaaactcagaaggtgcaagaactacaccatccgtagtgtcatttcaagataatggagaaagattggtgggacaaattgctaaaagacaggcaattacaaatccacataaaacaataatgtcaataaaaagatatatgggaacagaccataaagaaactatagatggaaaagagtatacaccacaagaactttcagctataatacttcaaaaactaaaagcagatgctgaagcttatcttggaggaacagttactcaagcagtaatcacagtaccagcatattttaatgatagccaaagacaagcgactaaagatgcaggaagaatagcaggattagaagttctaagaataataaatgaaccaactgcagcatccctagcatatggattagataaaatggatacaaatcaaaaaatattagtatatgacctaggtggaggtacttttgacgtatcaatacttgaattaggagatggagtatttgaagttaaatccacaaatggtaatacaaaacttggtggagacgattttgaccaaagaataatagatcatatagcagaaacatttaaaaaggattcaggaatagatttaagaactgacaaaatggctcttcaaagattaaaagaagcagcagaaaaagctaagatagagttatcttcatcaacacaaacaaatataaacttaccatttataacagcagatgctacaggaccaaaacatatagatatgaacttaacaagagctaaatttaacgaattaacacaggatttagttgaaggtacgctaactccaatgaagaaagctctacaagatgctgaaatgtcaataggtgaaatagataaggtaatattagttggaggttctacaagaataccagcagttcaagatgctgttaagaactttactggtaaagagccatcaaaggatgttaacccagatgaatgtgttgctatgggagcagctgttcaagcaggagtattaacaggagacgtaaaagatgtattacttctagatgtaacaccattaactcttggaattgaaacattaggaggagttgctactccattaatagaaagaaatacaactataccaactagaaaaagtcaagtattctcaacagcagcagatggtcagacatccgttgaaatacatgtagttcaaggtgaaagacaaatggctgcagataacaagactttgggaagatttactttatcaggaatagctccagctccaagaggaattccacaaatagaagtaacttttgatattgatgctaatggtatagtaaatgtatctgctaaagataagggaacaggaaaagaagctaacataactataacagcatcaactaatttatcagatgatgaagtagaaaaggctgttaatgatgctaagaaattcgaagaagaagacaagaagagaaaagaaagtgtagaagttaaaaataatgcagagcaaatattctaccaaacagaaaaaactttaaatgaattaggtgataaagtatctgcagaagataaggctactatagaagaaaaattaaatgcattaaaaggagttaaagatggagaagatatagaagcaataaagaaagctactgaagatttaactcaagcattctatcaaatttcatcaaaaatatatcaagatgcaggggcaccaggagcagaaggttttgattcaaatatggctggagaagctaatgcaggacaaaatgcaaataacgatgataacgtagttgatgcagattataaagtagaagatgacgaaaaataa

SEQ ID NO: 48787 - protein, 618 aa, Clostridium tetani
MAKVIGIDLGTTNSCVSVMEGGNPVVITNSEGARTTPSVVSFQDNGERLVGQIAKRQAITNPHKTIMSIKRYMGTDHKETIDGKEYTPQELSAIILQKLKADAEAYLGGTVTQAVITVPAYFNDSQRQATKDAGRIAGLEVLRIINEPTAASLAYGLDKMDTNQKILVYDLGGGTFDVSILELGDGVFEVKSTNGNTKLGGDDFDQRIIDHIAETFKKDSGIDLRTDKMALQRLKEAAEKAKIELSSSTQTNINLPFITADATGPKHIDMNLTRAKFNELTQDLVEGTLTPMKKALQDAEMSIGEIDKVILVGGSTRIPAVQDAVKNFTGKEPSKDVNPDECVAMGAAVQAGVLTGDVKDVLLLDVTPLTLGIETLGGVATPLIERNTTIPTRKSQVFSTAADGQTSVEIHVVQGERQMAADNKTLGRFTLSGIAPAPRGIPQIEVTFDIDANGIVNVSAKDKGTGKEANITITASTNLSDDEVEKAVNDAKKFEEEDKKRKESVEVKNNAEQIFYQTEKTLNELGDKVSAEDKATIEEKLNALKGVKDGEDIEAIKKATEDLTQAFYQISSKIYQDAGAPGAEGFDSNMAGEANAGQNANNDDNVVDADYKVEDDEK

SEQ ID NO: 48788 - DNA, 1836 bp, Corynebacterium diphtheriae
  CDS (1)..(1836): transl_table=11
atgggacgcgcagtaggaatcgacctcggtaccactaactcggtggtttccgtcctcgaaggtggagagccacaggttatcgctaactctgagggttcccgcaccaccccatcggttgttgctttcgctaagaacggcgaagttctcgtcggccagtctgctaagaaccaagctgttaccaacgttgatcgcaccattcgctccgtcaagcgccacgtaggtactgactggaccattgctatcgacgacaagaagtacacctctcaggagatttccgctcgtactttgatgaagctcaagcgcgacgctgaggcttacctaggcgaggacgttaccgacgcagttattactgttcctgcttatttctctgacgcacagcgccaggccaccaaggaagctggccagattgctggtttgaatgttctgcgtattgtgaacgagccaaccgcagctgctttggcttatggccttgaaaaaggcgagaaagagcagaccatcttggtcttcgacttgggtggcggtactttcgacgtctccttgctggagatcggcgatggcgttgttgaggttcgtgcaaccgctggcgataacgagctcggtggcgacgactgggatcagcgcatcgttgattggctggttgagaagttcaagaccgctcagggtgttgacctctccaaggacaagatggctatgcagcgtctgcgcgaggctgctgagaaggcaaagattgagctgtcttcttcccagtccgcaaacgtgaacctgccatacatcactgtcgacgctgataagaacccactgttcttggatgagacgctttctcgcaccgagttccagcgcattacccaggatctgctcgaccgcactaagaccccattcaaccaggtgatcaaggacgccggtgtgaccgtctctgagatcgaccacgtggttctcgttggtggttccactcgtatgcctgctgtttctgagctggttaaggagctgaccggtggccgcgagcctaacaagggcgttaaccctgatgaggttgttgctgtcggtgctgctttgcaagctggcgtgctgcgcggcgaggtcaaggacgtgctgcttctcgacgtcaccccactgtctcttggtatcgaaaccaagggcggcgtgatgaccaagctcatcgagcgcaacaccacgattccaaccaagcgttccgagacgttcaccactgcggacgacaaccagccttccgttcagatccaggtcttccaaggcgagcgcgagatcgctgcacacaacaagctgctcggttccttcgagttgggtggcattgctccagcacctcgtggcgttcctcagattgaggtcaccttcgacatcgacgcaaacggcattgtgcacgtaaccgcgaaagacaagggcaccggcaaggaaaacaccatcaagattcaggatggttccggtttgtctcaggaagagatcgatcgcatggtcaaggatgctgaagctcacgctgaggaagacaagaagcgccgtgaggagcaggagacccgtaactccgctgagtccatggcataccagactcgtaagttcctagacgagaacggcgagaaggtttccgaggagatcaagaccaaggtcaccgaggctgccgacgctgttgacgaggctcttaagggcgaggacatcgaggctattaagacggccgtcgagaagctctccaccgagtctcaggagatgggcaaggctatctacgaggctgaggccgctaacgctggcgctgctgatgccaccaacgttgatcctaacgtcgtcgacgctgaggtcgttgaggacgatgacaaggacggaaacaagtaa

SEQ ID NO: 48789 - protein, 611 aa, Corynebacterium diphtheriae
MGRAVGIDLGTTNSVVSVLEGGEPQVIANSEGSRTTPSVVAFAKNGEVLVGQSAKNQAVTNVDRTIRSVKRHVGTDWTIAIDDKKYTSQEISARTLMKLKRDAEAYLGEDVTDAVITVPAYFSDAQRQATKEAGQIAGLNVLRIVNEPTAAALAYGLEKGEKEQTILVFDLGGGTFDVSLLEIGDGVVEVRATAGDNELGGDDWDQRIVDWLVEKFKTAQGVDLSKDKMAMQRLREAAEKAKIELSSSQSANVNLPYITVDADKNPLFLDETLSRTEFQRITQDLLDRTKTPFNQVIKDAGVTVSEIDHVVLVGGSTRMPAVSELVKELTGGREPNKGVNPDEVVAVGAALQAGVLRGEVKDVLLLDVTPLSLGIETKGGVMTKLIERNTTIPTKRSETFTTADDNQPSVQIQVFQGEREIAAHNKLLGSFELGGIAPAPRGVPQIEVTFDIDANGIVHVTAKDKGTGKENTIKIQDGSGLSQEEIDRMVKDAEAHAEEDKKRREEQETRNSAESMAYQTRKFLDENGEKVSEEIKTKVTEAADAVDEALKGEDIEAIKTAVEKLSTESQEMGKAIYEAEAANAGAADATNVDPNVVDAEVVEDDDKDGNK

SEQ ID NO: 48790 - DNA, 1860 bp, Corynebacterium efficiens
  CDS (1)..(1860): transl_table=11
atgggacgtgcagtaggaattgacctgggtaccaccaactccgtggtatcagtacttgaaggtggcgagccggtagttatcgcaaactccgaaggctcccgcaccaccccgtcggtggtggcattcgccaagaacggtgaggtgctggttggccagtccgccaagaaccaggctgtcaccaacgtcgaccgcaccatccgctccgtcaagcgccacatcggcaccgactggtccgtggccatcgacgacaagaactacaccgcgcaggaaatctccgcgcgtatcctgatgaagctgaagcgcgacgctgaggcctacctgggcgaggaggtcaccgatgccgtgatcaccgttcccgcctacttcgaggactcccagcgccaggccaccaaggaggccggccagatcgcaggcctgaacgtcctgcgtatcgtcaacgagccgaccgccgcagccctggcctacggcctggagaagggtgagcaggagcagaccatcctggtcttcgacctcggtggtggtaccttcgacgtttccctcctcgagatcggtgacggtgtcgtcgaggtgcgtgccacctccggtgacaacgagctcggtggcgatgactgggatcagcgtattgttgactggctggtcgagaagttccagtcctcccacggcatcgacctgaccaaggacaagatggccctgcagcgtctgcgtgaggcagccgagaaggccaagatcgagctgtccgcttcccagaatgccaacatcaacctgccgtacatcaccgttgatgcggacaagaacccactgttcctggatgagaacctctcccgtgcggagtttcagcgcatcacccaggacctgctcgaccgcaccaagaccccgttcaaccaggtcatcaaggatgccggcatctccgtctccgagatcgaccacgttgtcctggtcggtggctccacccgtatgcctgccgtgaccgacctggtcaaggagctcaccggtggccgcgagccgaacaagggtgtcaacccggatgaggtcgtcgccgtcggcgccgccctgcaggccggtgtcctgcgcggtgaggtcaaggacgtgctgcttctcgacgtcaccccgctctccctcggcattgagaccaagggtggcgtgatgaccaagctcatcgagcgcaacaccaccatcccgaccaagcgttccgagaccttcaccaccgctgaggacaaccagccctccgtgcagatccaggtcttccagggtgagcgtgagatcgccagcgccaacaagctgctcggctccttcgagctcggcggcatcgcaccggcaccacgtggtgtgccacagatcgaggttaccttcgacatcgacgccaacggcatcgtccatgtcaccgccaaggacaagggcaccggcaaggagaacaccatcaccatccaggacggctccggcctgtcccaggaggagatcgaccgcatgatcaaggatgcggaggcccacgccgaggaggacaagaagcgtcgcgaggagcaggagatccgcaacaacgcggaatccctcgtctaccagacccacaagttcgtcgaggagaacgacggcaagatctccgaggagctcaagggcaaggtcgaggaggccgccaagggcgtggaggaaacactcaagggtgaggacatcgacgcgatcaagaccgccgtcgacaagctcaacaccgagtcccaggagatgggcagggccatctacgaggctgaggccgccgcaggtgccacccaggccgacgccggtgccgagggtgcagcagacgacaatgtcgtcgacgccgaggtcgtggacgaggatgtctccgaggagaagaaggacggcgacaagtaa

SEQ ID NO: 48791 - protein, 619 aa, Corynebacterium efficiens
MGRAVGIDLGTTNSVVSVLEGGEPVVIANSEGSRTTPSVVAFAKNGEVLVGQSAKNQAVTNVDRTIRSVKRHIGTDWSVAIDDKNYTAQEISARILMKLKRDAEAYLGEEVTDAVITVPAYFEDSQRQATKEAGQIAGLNVLRIVNEPTAAALAYGLEKGEQEQTILVFDLGGGTFDVSLLEIGDGVVEVRATSGDNELGGDDWDQRIVDWLVEKFQSSHGIDLTKDKMALQRLREAAEKAKIELSASQNANINLPYITVDADKNPLFLDENLSRAEFQRITQDLLDRTKTPFNQVIKDAGISVSEIDHVVLVGGSTRMPAVTDLVKELTGGREPNKGVNPDEVVAVGAALQAGVLRGEVKDVLLLDVTPLSLGIETKGGVMTKLIERNTTIPTKRSETFTTAEDNQPSVQIQVFQGEREIASANKLLGSFELGGIAPAPRGVPQIEVTFDIDANGIVHVTAKDKGTGKENTITIQDGSGLSQEEIDRMIKDAEAHAEEDKKRREEQEIRNNAESLVYQTHKFVEENDGKISEELKGKVEEAAKGVEETLKGEDIDAIKTAVDKLNTESQEMGRAIYEAEAAAGATQADAGAEGAADDNVVDAEVVDEDVSEEKKDGDK

SEQ ID NO: 48792 - DNA, 2098 bp, Coxiella burnetii
  CDS (70)..(2040): transl_table=11
gaattcgctttgctgtccccatgtaactatcagacgaatacgaacccagttttttgagaggaagagaacatggctgaaattattggtatcgatttaggcaccaccaactcctgcgttgccgttatggagggtggtaaggtgcgtgtgattgaaaacgccgaaggttcccgcacgacaccgtcgattgtggcttatacaaaagatggggaagtattggtcggtgcttccgccaagcgtcaagcggttactaatgcggacagaaccttgtacgccatcaagcgattaattgggcgtcgtttcgacgacaatgtggttcaaaaagacattaaaatggtgccttacaagattatcaaagcggataatggcgacgcgtgggtagaagtcaaagataaagagggtaaatctcaaaaattggcgccacctcaaatttccgcccaagtcttgataaaaatgaaaaagacggcggaagattatctgggccacgaagtgaaagacgccgtcattaccgttcccgcttatttcaacgattcccagcgtcaggcgaccaaggatgcaggtaaaatcgccggtcttaatgttaaacggatcatcaacgagcctaccgcggcagccttggcttacgggatggacaagaaaaaaggcgatcgtaaaattgctgtttatgacttaggtggcggtacgttcgatatttccatcatcgaaattgcggaagtggatggcgaacaccaatttgaagtattggcaacgaacggagacaccttcttaggcggtgaagattttgatcttcgcttaattgattatttggctggcgagtttaaaaaagacgaaggggtggacttgcacaacgatcccctggcgttacaacgattgaaagaagcggctgaaaaagcaaaaattgagctttcatcgagccagcaaacggacgtcaacttgccttatatcacggcagatgcctccggtcccaaacacttaaacattcgcctcacgcgcgcaaaattagaatcccttgtcgaggatttagtggagcgcaccattgaaccctgcaaagtggccattaaggatgctggtcttaaagtctctgaaatcgatgatgtgattttagtgggcggacaaacccggatgccaaaggtccaagaagcggtgaaaaatttctttggcaaagaagcacgtaaagatgtaaatcctgatgaagccgttgccatcggcgctgctattcaaggtgctgtattgtccggtgaggttaaggacgtgttgctgttggacgttactccgctttctttgggtattgagaccttgggcggcgtgatgacgaagctcattgagaaaaataccaccattccaactaaagcaaaccaagtattttcaactgcggacgacaatcaaacggcggtcaccgtgcatgtattgcaaggggaacgtgaaatggcttccgccaataaatcgttgggtcgttttgacctttccgatatcccgcctgcgccgcgcggtgtgccgcaaatcgaagttacttttgatatcgatgctaatggcattttgcacgtatcggcgaaagataaagccacaggcaaagaacaatccattgtaattaaagcgtccagcgggctttccgatgaggaagtggaaaaaatggtgaaagacgccgaagcgcaccgtgattccgatcggaagttccatgaattagtggatgcgcgaaaccaagcggacgcgatgattcacgctgctgaaaaatcggtgaaagacctcggtagtgaggtatcagccgacgaaaagagcgctattgagaaagcggtgaatgagttgaaggaagccatgaaaggaaatgataaagacgctattgaagctaaaacaaaagcgctaacggagcattcctcaaaactggctgagcgcgtgtatgctaaaaaaggcggcgctgccggcgctcctccgggaggcgaagctgagggtgagcctcaagcccaagccggcggtaaaaaagaagacgtcgtcgatgctgagtttgaagaagtcaaagacgaaaagaaaaaggacgaagataaatagactgacgaaggcaccgtacgggagtagcccgtctggagcgaagcgaaatacgggaatt

SEQ ID NO: 48793 - protein, 656 aa, Coxiella burnetii
MAEIIGIDLGTTNSCVAVMEGGKVRVIENAEGSRTTPSIVAYTKDGEVLVGASAKRQAVTNADRTLYAIKRLIGRRFDDNVVQKDIKMVPYKIIKADNGDAWVEVKDKEGKSQKLAPPQISAQVLIKMKKTAEDYLGHEVKDAVITVPAYFNDSQRQATKDAGKIAGLNVKRIINEPTAAALAYGMDKKKGDRKIAVYDLGGGTFDISIIEIAEVDGEHQFEVLATNGDTFLGGEDFDLRLIDYLAGEFKKDEGVDLHNDPLALQRLKEAAEKAKIELSSSQQTDVNLPYITADASGPKHLNIRLTRAKLESLVEDLVERTIEPCKVAIKDAGLKVSEIDDVILVGGQTRMPKVQEAVKNFFGKEARKDVNPDEAVAIGAAIQGAVLSGEVKDVLLLDVTPLSLGIETLGGVMTKLIEKNTTIPTKANQVFSTADDNQTAVTVHVLQGEREMASANKSLGRFDLSDIPPAPRGVPQIEVTFDIDANGILHVSAKDKATGKEQSIVIKASSGLSDEEVEKMVKDAEAHRDSDRKFHELVDARNQADAMIHAAEKSVKDLGSEVSADEKSAIEKAVNELKEAMKGNDKDAIEAKTKALTEHSSKLAERVYAKKGGAAGAPPGGEAEGEPQAQAGGKKEDVVDAEFEEVKDEKKKDEDK

SEQ ID NO: 48794 - DNA, 1938 bp, Dechloromonas aromatica
  CDS (1)..(1938): transl_table=11
atgggcaagatcatcggtattgacctcggcaccaccaactcctgcgtcgccatcatggaaggcggccagccgaaggttattgaaaacgcagaaggtgcgcgcaccacgccgtccatcatcggctataccgaagatggcgaaatcctgtgcggcgccccggccaagcgccaggccgtcaccaacccgaagaacacgctgtacgctgtcaagcgcctgatcggccgccgcttcgaagagaaggaagtacagaaggacatctccctgatgcccttcaagatcgtcaaggccgacaacggcgacgcctgggttgaagcccgcgacaagaagatcgctccgccgcaggtttcggccgaagtgctgcgcaagatgaagaagaccgcagaagactacctcggcgaagaagtcaccgaagccgtgatcaccgtgccggcctacttcaacgacagccagcgccaggccacgaaggacgccggccgcatcgccggtctggaagtcaagcgcatcatcaatgagccgaccgctgctgccctcgccttcggcatggacaagaccagcaagagcgaccgcaagatcgctgtgtatgaccttggcggcggcaccttcgatatctcgatcatcgaaatcgccaacgtcgacggcgaaacccaatttgaagtgctggccaccaacggcgacaccttcctcggcggcgaagacttcgaccagcgcctgatcgactacatcattgacgaattcaagaaggaatccggcgtcaacttgaaggccgacgtgctggccctgcagcgcctgaaagaagccgctgaaaaggccaagatcgagctgtcctccagccagcagaccgaagtcaatctgccctacatcactgccgacgcctccggtccgaagcacctggccctgaagatcacccgtgccaagttcgagtcgctggtcgacgaactgatcgagcgcaccatggccccttgcgtcactgcgctgaaggatgccggctgcaagatcagcgatatcgacgacatcattctggtcggcggccagtcgcgcatgcccaaggtgcaggagaaggttaaggaaatcttcggcaaggaaccgcgcaaggacgtcaatccggacgaagccgttgctgtcggtgcagccatccagggcggcgttctgcaaggcgaagtcaaggacgtgctgctgctcgacgtcaccccgctgtcgctcggtatcgaaaccctgggcggcatcatgaccaagctgatccagaagaacacgacgatcccgaccaaggcctcgcagaccttctcaaccgctgacgacaatcaggcagcagtgaccattcacgtgctgcagggcgaacgcgaagtggcttccggcaacaagagcctaggccagttcaacctggaaggcatcccgccggccccgcgtggcacgccgcagatcgaggtcatcttcgacatcgacgccaacggcatcatgcacgtgacggccaaggacaaggcgaccggcaaggaaaacaagatcaccatcaaggccaactccggcttgtccgaagctgaaatccaggccatggtcaaggatgccgagttgcacgccgaggaagacaagaaggcgcacgaactggccgatgcccgcaaccaggccgacggcatggtgcacatggtcaagaagtcgctgaccgaatacggtgacaagctcgacgcatccgaaaaggcagccatcgaagccgccatcaaggatgtcgaggacgtgctgcgcgacggcgacaaggaaaccatcaccgccaagaccgaagccctgtcggctgccgcccagaagttgggtgagaagatgtacgcccagcaacaggctgaaggtgcagcggccggcgccactggccaacaggccgaggccggtgaaaagaccgttgagggtgatgtcgtcgatgccgaattcaccgaagtgaacaaggacaagaagtaa

SEQ ID NO: 48795 - protein, 645 aa, Dechloromonas aromatica
MGKIIGIDLGTTNSCVAIMEGGQPKVIENAEGARTTPSIIGYTEDGEILCGAPAKRQAVTNPKNTLYAVKRLIGRRFEEKEVQKDISLMPFKIVKADNGDAWVEARDKKIAPPQVSAEVLRKMKKTAEDYLGEEVTEAVITVPAYFNDSQRQATKDAGRIAGLEVKRIINEPTAAALAFGMDKTSKSDRKIAVYDLGGGTFDISIIEIANVDGETQFEVLATNGDTFLGGEDFDQRLIDYIIDEFKKESGVNLKADVLALQRLKEAAEKAKIELSSSQQTEVNLPYITADASGPKHLALKITRAKFESLVDELIERTMAPCVTALKDAGCKISDIDDIILVGGQSRMPKVQEKVKEIFGKEPRKDVNPDEAVAVGAAIQGGVLQGEVKDVLLLDVTPLSLGIETLGGIMTKLIQKNTTIPTKASQTFSTADDNQAAVTIHVLQGEREVASGNKSLGQFNLEGIPPAPRGTPQIEVIFDIDANGIMHVTAKDKATGKENKITIKANSGLSEAEIQAMVKDAELHAEEDKKAHELADARNQADGMVHMVKKSLTEYGDKLDASEKAAIEAAIKDVEDVLRDGDKETITAKTEALSAAAQKLGEKMYAQQQAEGAAAGATGQQAEAGEKTVEGDVVDAEFTEVNKDKK

SEQ ID NO: 48796 - DNA, 1914 bp, Dehalococcoides ethenogenes
  CDS (1)..(1914): transl_table=11
atggctaaagtagttggtatagatcttggtactacaaacagtgaagttgccgtcatgcagggcggcgaaccggtagttattccctctgccgaaggcagcacccttattccttcggtagtggcagtaaacaaaaacggcgaacgcattgttggccgtcaggctaaaaatcaggctattttgaaccctgaaaacacggtttattccatcaagcgttttatgggacgcaaatggggcgaacccgccgggcgtgagctgccggttgaggcagatgccaaacgcaaaccttacaaggttattcagggtaacaataatgaagtccgggtggttatgggtgacaaggatttcagccctcccgaagtttccgccatgattttgcagaaacttaaatcagatgcggaagcctacctgggcgaaaaggtaaccgaagcggttattaccgtaccggcttattttaacgatgcccagcgccaggccaccaaagacgccggggctattgccgggctgaaagtcctgcggattatcaacgaacccaccgccgctgctctggcatacggtctggacaagaagaaagatgaaactatcgccgtttatgatttgggcggcggtacctttgatatttccatactggaactgggcgaaggcactttccaggtaaaatccaccgccggtgatacccatctgggcggtgatgattttgaccagaagattattgactggcttatagccgaatataagaaagaccagggcattgacctttctaaagataaaactgctttgcagcgtctgaaagaggcggctgaaaaggccaagatagagctttccactgttcagcaggcagagataaatttgccctttatcaccgcagatgcttcagggcccaagcacttaaatattatccttacccgtgccaaactggagcagatggtaatggaccttgtagacaagagccttgagccctgccgccaggctttgaaagattcgggcaagactgcttctgaaatcaacgaggttattctggtaggcggacagacccgtatgccgctggtacagcagaaggtcaaagagtttttcggcaaagaacctaacaagggtgtaaaccctgacgaggtggtagctatcggtgctgccattcaggccggcgtactcaagggtgaagtcagtgacgtactcctgctggatgttatccccctgactttgggtattgagacccttggcggtgtatctaccgctcttattacccgcaatactaccattcccacttccaagagccaggtattttccactgcggctgacaaccagcccagcgtagaaatccatgtcctgcagggcgaacgccccatggcggccgataaccgcactctgggccgctttatgctggacggcattttgcccgccccccgcggcgtcccccagatagaggttacctttgacattgatgccaacggtatactttccgtcaaagccaaggataaaggcaccgggcgtgaacagaagataactatcaccgcttcctccggcctttccaaggaagaggttgaaaagatgacccgtgaggcggaagcccatgccgctgaagatagcaaacgcaaggaagagatagaagcccggaatgtggcggataatctggcttacaatgccgaaaagaccctgcgtgacaataaggacaagataccggccgaactgaataccgaactggaaagtaagatagcggccgtccgcactgcccttcagggtactgatgtggacgctatcaagacaactactcaggaactttccaccgctcttcaaagcgtaggcagtgccgtttacggccagcagcaggagcagggcgctcccgctcaggaagaaccttcggcagaaggcaaaaagaatgacgacgaaggcacggtagagggagaattccgcgaagtttaa

SEQ ID NO: 48797 - protein, 637 aa, Dehalococcoides ethenogenes
MAKVVGIDLGTTNSEVAVMQGGEPVVIPSAEGSTLIPSVVAVNKNGERIVGRQAKNQAILNPENTVYSIKRFMGRKWGEPAGRELPVEADAKRKPYKVIQGNNNEVRVVMGDKDFSPPEVSAMILQKLKSDAEAYLGEKVTEAVITVPAYFNDAQRQATKDAGAIAGLKVLRIINEPTAAALAYGLDKKKDETIAVYDLGGGTFDISILELGEGTFQVKSTAGDTHLGGDDFDQKIIDWLIAEYKKDQGIDLSKDKTALQRLKEAAEKAKIELSTVQQAEINLPFITADASGPKHLNIILTRAKLEQMVMDLVDKSLEPCRQALKDSGKTASEINEVILVGGQTRMPLVQQKVKEFFGKEPNKGVNPDEVVAIGAAIQAGVLKGEVSDVLLLDVIPLTLGIETLGGVSTALITRNTTIPTSKSQVFSTAADNQPSVEIHVLQGERPMAADNRTLGRFMLDGILPAPRGVPQIEVTFDIDANGILSVKAKDKGTGREQKITITASSGLSKEEVEKMTREAEAHAAEDSKRKEEIEARNVADNLAYNAEKTLRDNKDKIPAELNTELESKIAAVRTALQGTDVDAIKTTTQELSTALQSVGSAVYGQQQEQGAPAQEEPSAEGKKNDDEGTVEGEFREV

SEQ ID NO: 48798 - DNA, 1887 bp, Deinococcus radiodurans
  CDS (1)..(1887): transl_table=11
atggctaaagctgtcggaatcgatttgggtaccaccaactccgtgatcgctgtgatggaaggcggtcgccccgaagtgatcgtcaacgccgaaggcggacgcaccaccccctcggtcgtcgcgtacaagggcgacgaaattctggtcgggcagattgcccgccgtcaggctgcgctcaaccccgccgccacgctgttcgaagtcaagcgcttcattggccgccgctgggacgaagtgaaggaagaagcggcccgtagcccctttaccgtcaaggaaggcccgagcggcagcgtccgtatcgaagtgaacggcaaggacctcgcccccgagcaggtcagcgccgaagtgctgcgcaagctggtgagcgacgcctccgccaagctgggcaacaagatcaccgacgccgtgatcaccgtgccggcctacttcgacaacagccagcgtgaagccacccgtcaggcgggcgaaatcgcgggtctgaacgtgctgcgcgtgatcaacgaacccaccgccgccgcgctggcctacggcctggagcgcaagggcaacgaaactgtgctggtcttcgacctggggggcggcaccttcgacgtaaccatcctcgaactgggcgacggcgtgttcgaagtgaaatccaccgccggtgacacccacctcggcggcgcggacttcgactaccgcatcgtggactggctggcgggcgagttccagaaggaacacaacttcgacctgcgtaaggacaagcaggccctgcaacgcctgatcgaagccgccgaaaaggccaagatcgacctgtcgaacgccagtgaaacgagcatctccctgcccttcatcaccttcgaccccgaaacccgcacccccatgcacctggaacgctcgctctcgcgggccaagttcgaggaactgaccgccgacctgctgcgccgcgtgcgccagcctgtcgaacaggccctgagcgacgccaagctgagcgccggtgatatcaacgaagtgattctggtcggtggctcgacccgtatccccgccgtcaagcgcatcgtgcaggacctggtgggcaagacccccaacgagtcggtcaaccccgacgaagccgtggccctcggcgccgccgtgcaggctgggattattcagggcgacagcagcctgggtgacatcgtcctcgtggacgtgaccccgctgacgctgggtgtggaagtcaagggcggcatgatcgccccgatgatcacccgcaacaccaccgtgcctgccaagaagaccgagatctacaccaccgccgagaacaaccagccgggcgtggaaatcaacgtgctgcaaggtgaacgccccatggctgccgacaacaagagcctgggccgcttcaagctcgaaggcattccgcccatgcccgccggacgcgcgcagatcgaagtgaccttcgacatcgacgccaacgggattctgcacgtcaccgccaaggaaaagaccagcggcaaggaatcgagcatcaccatcgaaaacaccacgaccctcgacaagaccgacgtggaacgcatggtgcaggaagccgagcagaacgccgccgccgacaagcagcgtaaggaaaaggtcgaaaagcgcaacaacctcgacagcctccgcgtgcaggccgtgcagcagctcgaagagcaggaaggcgccgctcaggacgccaaggatcgcctgaaggctgccgctgacgaagccgaagaagccgtccgcagcgaagacgacagcaagattgctgacgcccagaagaagctggaagaagaactccgctccttcatgaccgccaaccaggcgagcacgcagggccagccggaaggcacccaggcccaggcgaacaaagccgacgacgacgtaatcgacgccgactttaagcccgctgagtaa

SEQ ID NO: 48799 - protein, 628 aa, Deinococcus radiodurans
MAKAVGIDLGTTNSVIAVMEGGRPEVIVNAEGGRTTPSVVAYKGDEILVGQIARRQAALNPAATLFEVKRFIGRRWDEVKEEAARSPFTVKEGPSGSVRIEVNGKDLAPEQVSAEVLRKLVSDASAKLGNKITDAVITVPAYFDNSQREATRQAGEIAGLNVLRVINEPTAAALAYGLERKGNETVLVFDLGGGTFDVTILELGDGVFEVKSTAGDTHLGGADFDYRIVDWLAGEFQKEHNFDLRKDKQALQRLIEAAEKAKIDLSNASETSISLPFITFDPETRTPMHLERSLSRAKFEELTADLLRRVRQPVEQALSDAKLSAGDINEVILVGGSTRIPAVKRIVQDLVGKTPNESVNPDEAVALGAAVQAGIIQGDSSLGDIVLVDVTPLTLGVEVKGGMIAPMITRNTTVPAKKTEIYTTAENNQPGVEINVLQGERPMAADNKSLGRFKLEGIPPMPAGRAQIEVTFDIDANGILHVTAKEKTSGKESSITIENTTTLDKTDVERMVQEAEQNAAADKQRKEKVEKRNNLDSLRVQAVQQLEEQEGAAQDAKDRLKAAADEAEEAVRSEDDSKIADAQKKLEEELRSFMTANQASTQGQPEGTQAQANKADDDVIDADFKPAE

SEQ ID NO: 48800 - DNA, 1902 bp, Desulfotalea psychrophila
  CDS (1)..(1902): transl_table=11
atgggaaagattatcggaatcgatctgggaaccactaactcttgtgtttccgtaatggaaggtggcgagccgaaggttattgccaacgtagagggaaatagaacaactccttccgttgtcgcatttgcggataatgatgagcgtctggtaggtatgatcgctaagcgtcaggctgtaacaaatcctgagcgtaccgtctatgcagcaaaaagacttatcggtcgtaagttcaccgacgctgaagttcagcgctcccaagaggtaagcccttttgatatagtagaaggcatcagtggtagtgttgccatacaagttgagggtcataaatatcgcccagccgagatctcggccatggtacttggtaagatgaagcagaccgccgaggagtatcttggcgaagaggtaaccgaggctgttgttaccgtacctgcatatttcaatgattcacagcgtcaggcaaccaaggatgcaggtaagattgcagggcttgatgtaaaacgtattatcaacgagccaactgcggcttctcttgcctacggccttgataagaaggttgaagaaaagattgcggtattcgatcttggtggcggtacctttgatgtatccgttctcgaaatcggtgatggtgttttcgaagtaaaatcaaccaacggtgatactttccttggtggtgaagatttcgatatgcgtattgttcattggcttgccgacgagttcaaacgcgagcagggaattgatcttcgtagcgacaaaatggcccttcagcgtcttaaggaagaggctgagaaggcaaaaatggagctttctaccaccgtagagaccgacattaacctgccatttatcaccgctgatgcaagcggtcctaagcatttgaacattaagctgagccgttcaaaattcgaaacattggtagaagatcttgttgagcgtaccgtaggtccatgtaagaccgctcttaaagatgctggcctttctgcttctcaaatcgacgaggttatccttgttggtggtatgagccgtatgccaatggttcagaagaaggttgtggaaatttttggtaaagagccacacaagggagttaatcccgatgaggttgtagccattggtgctgcaattcagggtggagttcttcagggtgatgtaaaagacgttcttcttctcgatgtaacgcctctttctcttggtattgaaacccttggtggtgtaaccactaagcttatcgagaaaaacaccaccgttccaaccaagaagagccaggtattctctactgcagctgacaatcagccagcagtttctatccacgtgctccaaggtgagcgtgagatggcagagggtaataagaccattggtcgttttgagcttgccgatattccaacggcacctcgcggtgtacctcagatcgaggtgacctttgaccttgatgcaaacggtattctcaacgtatctgcaaaggatatgggaaccggcaaagagcagtctattaagattaccgcctcttccggacttaccgatgaagagatcgatcgtatgaccaaggacgccgagctccacgccgatgaagataagaagcgtaaagagttggttgaagctcgtaactctgcagatggtttgatccactccaccgagaagacccttaaggatcttggcgataaggtagatgctgaaaccaaagagaacgtagagaaagagattgcaaacgtaaagaccgcactcgaaggcgatgatgttgaggcaattaaggcagctattgaggcccttactgccgcttctcataagcttgccgagcttatgtatcagcaagcatctcaggaaacccctggtgatggcgatgctggtgctgctggtgcaaagaaaaaagatgatgatgacgttgttgatgcagactacgaagaagtgaagtaa

SEQ ID NO: 48801 - protein, 633 aa, Desulfotalea psychrophila
MGKIIGIDLGTTNSCVSVMEGGEPKVIANVEGNRTTPSVVAFADNDERLVGMIAKRQAVTNPERTVYAAKRLIGRKFTDAEVQRSQEVSPFDIVEGISGSVAIQVEGHKYRPAEISAMVLGKMKQTAEEYLGEEVTEAVVTVPAYFNDSQRQATKDAGKIAGLDVKRIINEPTAASLAYGLDKKVEEKIAVFDLGGGTFDVSVLEIGDGVFEVKSTNGDTFLGGEDFDMRIVHWLADEFKREQGIDLRSDKMALQRLKEEAEKAKMELSTTVETDINLPFITADASGPKHLNIKLSRSKFETLVEDLVERTVGPCKTALKDAGLSASQIDEVILVGGMSRMPMVQKKVVEIFGKEPHKGVNPDEVVAIGAAIQGGVLQGDVKDVLLLDVTPLSLGIETLGGVTTKLIEKNTTVPTKKSQVFSTAADNQPAVSIHVLQGEREMAEGNKTIGRFELADIPTAPRGVPQIEVTFDLDANGILNVSAKDMGTGKEQSIKITASSGLTDEEIDRMTKDAELHADEDKKRKELVEARNSADGLIHSTEKTLKDLGDKVDAETKENVEKEIANVKTALEGDDVEAIKAAIEALTAASHKLAELMYQQASQETPGDGDAGAAGAKKKDDDDVVDADYEEVK

SEQ ID NO: 48802 - DNA, 1911 bp, Desulfovibrio vulgaris
  CDS (1)..(1911): transl_table=11
atgggcaagatcatcggtatcgacctcgggaccaccaactcctgtgtatacgtgatggagggcaaggatcccaagtgcatcaccaaccccgagggcggtcgcaccacgccttccgtcgtggctttcaccgacaaggaacgcctcgtcggcgacatcgccaagcgtcaggctgtcaccaaccccgagcgcacggtctttgccgtgaagcgcctgatgggtcgccgtggcgacgcccccgaagtgggtcgctggaaggagcacagcccctaccgcatcgtcgccggtgccaatggtgacgcagccgtcgaagtacagggccgtccctacagcgcccccgaaatctcggccatgatcctcggcaagctcaaggcggacgcagaagcctaccttggcgagaccgtcaccgaggccgtcatcaccgtgcccgcctacttcaacgacgcacagcgtcaggcgaccaaggatgcaggccgcatcgccggtctcgacgtgaagcgcatcatcaacgagcccaccgcagcttcgcttgcctacggtttcgaccgcaaggccaacgaaaagatcgcggtgttcgacctcggcggcggcacgttcgacatctccatcctcgaagtgggtgacaacgtcgtcgaagtacgcgccaccaacggcgacaccttcctcggcggtgaagacttcgaccagcgcatcatctcctacctcgtcgacgagttccgtcgcgagaacggcggcatcgacctcgcgcgcgaccgcatggccctgcagcgcctcaaggaagccgcggagaaggccaagaaggacctctccacctccatggagaccgaggtcaacctgcccttcatcaccgccgaccagaccggccccaagcacctgatgatgaagctctcgcgcgccaagctcgagaagctcgtcgaagacctcgtcgagcgcaccgtcgagccctgccgcaaggcccttgccgacgccggcctcaccgccgcgcagatcgacgaagtggttctcgtgggtggcatgacccgtatgcctctggtgcagaagcgcgtgtccgagttcttcggcaaggagcccaaccgctcggtcaaccccgacgaagtggtcgccatgggtgcagccatccagggcggcatcctcgccggtgacgtgaaggacgtgctgctgctcgacgtcaccccgctctctctcggcatcgagaccctgggcggcgtgttcacccgtctcatcgagcgcaacaccaccatccccacccgcaagagccagacgttcaccactgcggccgacaaccagccctcggtgtccatccatgtcctgcagggtgaacgccccatggccagcgacaacatgacgctgggccgcttcgaactcaccggcattcccccggcgatgcgcggcgtgccgcagatcgaggtctccttcgacatcgacgccaacggcatcgtcaacgtcgccgccaaggaccttggcaccggcaaggagcagtccatccgcatcaccgcctcctccggcctctccgaggacgagattcagagactggtgaaggaagccgaggcccatgccgatgacgacaagaagaagcaggaactcatcgaagcccgtaatcaggccgacggcctcatctacggcaccgagaagtccatacgcgacctcggcgacaagctcgacgccgccctcaaggccgacatcgagaccaaggtgaccgccctgcgcggcctgctcgaaagcgaagacgtggacgccatcaagaaggcctccgacgaactcgcccaggcatcgcacaagctcgcggaacagctgtacaagcagcaggcgcaagccggtggccccgaagcgggtgcccagcccgagggcgatgctggcgcacgcaagcaggacgacgacgtggtcgacgccgactacaccgaagtgaagaagtag

SEQ ID NO: 48803 - protein, 636 aa, Desulfovibrio vulgaris
MGKIIGIDLGTTNSCVYVMEGKDPKCITNPEGGRTTPSVVAFTDKERLVGDIAKRQAVTNPERTVFAVKRLMGRRGDAPEVGRWKEHSPYRIVAGANGDAAVEVQGRPYSAPEISAMILGKLKADAEAYLGETVTEAVITVPAYFNDAQRQATKDAGRIAGLDVKRIINEPTAASLAYGFDRKANEKIAVFDLGGGTFDISILEVGDNVVEVRATNGDTFLGGEDFDQRIISYLVDEFRRENGGIDLARDRMALQRLKEAAEKAKKDLSTSMETEVNLPFITADQTGPKHLMMKLSRAKLEKLVEDLVERTVEPCRKALADAGLTAAQIDEVVLVGGMTRMPLVQKRVSEFFGKEPNRSVNPDEVVAMGAAIQGGILAGDVKDVLLLDVTPLSLGIETLGGVFTRLIERNTTIPTRKSQTFTTAADNQPSVSIHVLQGERPMASDNMTLGRFELTGIPPAMRGVPQIEVSFDIDANGIVNVAAKDLGTGKEQSIRITASSGLSEDEIQRLVKEAEAHADDDKKKQELIEARNQADGLIYGTEKSIRDLGDKLDAALKADIETKVTALRGLLESEDVDAIKKASDELAQASHKLAEQLYKQQAQAGGPEAGAQPEGDAGARKQDDDVVDADYTEVKK

SEQ ID NO: 48804 - DNA, 1830 bp, Enterococcus faecalis
  CDS (1)..(1830): transl_table=11
atgagtaaaattattggtattgacttaggaacaacaaactcagctgtcgcagtactagaaggcggcgaagcgaaaattattgcaaacccagaaggtaaccgcacaactccttcggtcgtttcattcaaaaacggtgaaattcaagtgggcgaagtagcaaaacgtcaagctgttacaaatcctaacacgatttcatctattaaacgtcacatgggtgaagctggctacaaagttgatgttgaaggaaaatcatatacaccacaagaagtttctgcaatgatcttacaatatttaaaaggttttgctgaagactatttaggtgaaaaagttgaaaaagcagttattacagttcctgcatatttcaacgatgcgcaacgtcaagcaacaaaagatgctggtaaaattgctggtttagaagtagaacggatcgttaacgaaccaacagcagcagctttagcttatggcttagataaaacagacaaagatgaaaaaattcttgtctttgaccttggtggtggtacattcgacgtgtcaatccttgaattaggcgatggcgttttcgatgtattatcaacagccggtgataacaacctaggtggggatgactttgataataagatcattgactacatggttgcagaatttaaaaaagaaaatggcattgacttagctaacgataaaatggcattacaacgtttgaaagatgctgctgaaaaagcgaaaaaagacttatcaggtgtaacaagcacacaaatcagcttgccatttattactgctggcgaagcaggaccattgcacttagaaatgaacttaactcgtgcaaaatttgatgaattaacaagtgatttagttgaacgtacaaaagtaccagtacgtcaagccttaaaagatgctggattaaatccttctgaaatcgacgaagttatcctagttggtggttcaacacgtattccagctgtagttgaagctgttcgcaaagaaacaaacaaagaaccaaacaaatcagttaaccctgacgaagtagtagcaatgggtgctgcaatccaaggtggtgtaatcactggtgatgttaaagacgttgtcttattagacgtaacaccgttgtcattagggattgaaacaatgggtggcgtatttacaaaattaattgatcgtaacactacgattccaacaagtaaatcacaagtattctcaactgctgctgacaatcaaccagctgttgatattcacgttttacaaggtgaacgtccaatggccgctgataataaaacattaggtcgtttccaattaacagatattcctgcagctcctcgtggtgtgccacaaattgaagtaagctttgacattgataaaaacgggattgtaaatgttcgtgcgaaagacttaggcactcaaaaagaacaaacaatcacgattaaatcttcttcaggtttatctgatgatgaaatcgaacgtatggtgaaagatgctgaagcaaacgctgaagcagataaacaacgtaaagaagaagttgacttacgtaacgatgcagatgctttattattcactgttgataaaacattgaaagaattagaaggcaaagtagatgctgaagaagtgaaaaaagcagaagatgcgcgtgatgaattaaaagcagccatcgaagcaaacgatatcgaacaaatgaaagcaaaacgtgattcattaaatgaaatcgtccaaaacttaacagtaaaactttacgaacaagctgcgcaacaacaagcacaagaaaatcctgaagctgctcaaggtggcgctgatgatgttgttgatgctgattttgaagaagtaaatggtgatgacaaataa

SEQ ID NO: 48805 - protein, 609 aa, Enterococcus faecalis
MSKIIGIDLGTTNSAVAVLEGGEAKIIANPEGNRTTPSVVSFKNGEIQVGEVAKRQAVTNPNTISSIKRHMGEAGYKVDVEGKSYTPQEVSAMILQYLKGFAEDYLGEKVEKAVITVPAYFNDAQRQATKDAGKIAGLEVERIVNEPTAAALAYGLDKTDKDEKILVFDLGGGTFDVSILELGDGVFDVLSTAGDNNLGGDDFDNKIIDYMVAEFKKENGIDLANDKMALQRLKDAAEKAKKDLSGVTSTQISLPFITAGEAGPLHLEMNLTRAKFDELTSDLVERTKVPVRQALKDAGLNPSEIDEVILVGGSTRIPAVVEAVRKETNKEPNKSVNPDEVVAMGAAIQGGVITGDVKDVVLLDVTPLSLGIETMGGVFTKLIDRNTTIPTSKSQVFSTAADNQPAVDIHVLQGERPMAADNKTLGRFQLTDIPAAPRGVPQIEVSFDIDKNGIVNVRAKDLGTQKEQTITIKSSSGLSDDEIERMVKDAEANAEADKQRKEEVDLRNDADALLFTVDKTLKELEGKVDAEEVKKAEDARDELKAAIEANDIEQMKAKRDSLNEIVQNLTVKLYEQAAQQQAQENPEAAQGGADDVVDADFEEVNGDDK

SEQ ID NO: 48806 - DNA, 2052 bp, Erysipelothrix rhusiopathiae
  CDS (83)..(1885): transl_table=11
gaattccaaaaaggatatatgttaaaagatcgcattctacgtgcgagtttagtaaaagtgagtcaataggaggatatatattatgagtaaagttattggtattgatttaggaacaacaaactcagctgtttccgtaatggacggtggagaagcaaaagtaattacaaacccagaaggaaatcgtacaacgccttctgttgtaagttttaaaaatggtgaacgtattgttggggatgctgcaaagcgtcaagttgttacaaaccctaactcagcagtatctgttaaacgtttaattggtacaggcgaaaaagttacacttgaaggcaaagattatacaccagaagaaatttcagcaatgatcttaggttatatgaagagctatgcagaagattacctcggtgaaaaagttacaaaagctgtaatcacagttcctgcatactttaatgatgcacaacgtcaagctacaaaagatgctggtaagattgctggattagaagtagaacgtattattaacgaaccaactgcagctgcgcttgcatttggaattgataagacagataaggaagaaaaagttcttgtatttgaccttggtggtggtacatttgacgtttcgattcttgaattagcagatggtacttttgaagtattatcaacagctggtgacaacaaattaggtggagatgattttgacaacatcgttgttgattatttagtagatattttcaaaaaagagaacggaattgatttatcatccgacaagatggcaatgcaacgtctaaaagaagcagcagaaaaagcgaaaaaagatttatcttcaactgtaaatgcttcaatttcattaccatttatctcagcaggtgaaaatggtccattacacttggaaacaacattatcacgtgctaaatttgaagaaatgacaaagagccttgttgaacgtacaatggttccagttcgtcaagcattaaaagatgctggacttacaaaaaatgatattcatcaagtattacttgttggtggatcaacacgtattcctgcagttgttgaagcagttaaaaatgatttaggaaaagaacctaataaatctgtaaaccctgatgaagttgttgcaatgggtgccgcaattcaaggtggtgttatttctggagatggtaaagatgtattgcttcttgacgttacaccattatcattaggtattgaaacaatgggtggtgtgatgacagttcttattgaacgtaatacaacaatcccaacatcaaaatcacaagtattctcaacagcagcagataatcaaccagctgtagatattaacgtattacaaggtgaacgtccaatggctaaagacaataaatcacttggtttatttaaattagatggtattgcacctgcaaaacgtggtattcctcaaattgaagttacattcgatattgatgtaaatggtatcgtaaacgtttcagcaatggataaaggaacaaacaaaaaacaatctattacaatttcaaacagttcaggattaagtgatgaagaaattgaacgtatggttcgtgaagcggaagaaaatgcttcagaagatttacgtttaaaagaagaagcagaacttaaaaaccgtgcagaacaattcatccatcaaatcgatgaatcattagcaagtgaagattcacctgtggatgatgctcaaaaagaagaagttacaaaattacgtgatgaattgcaagcagcaatggacaacaatgattttgaaacattaaaagaaaaacttgatcaattagaacaagcagctcaagcaatgtcacaagcaatgtatgaacaacaagcaggccaagctgaagtagatgcttcgtcaagtgatgaaacagttgttgacgctgaatttgaagaaaaaaactagtttaaaaactttcggaggtagatatggcagataaaagagatttttatgaaatacttggagtaagtaaatctgccacagatgcagaaattaagaaagcctatcgccagttagcgaagaagtaccatcctgatattaacaaagaggatggtgctgaagctaaatttaaa

SEQ ID NO: 48807 - protein, 600 aa, Erysipelothrix rhusiopathiae
MSKVIGIDLGTTNSAVSVMDGGEAKVITNPEGNRTTPSVVSFKNGERIVGDAAKRQVVTNPNSAVSVKRLIGTGEKVTLEGKDYTPEEISAMILGYMKSYAEDYLGEKVTKAVITVPAYFNDAQRQATKDAGKIAGLEVERIINEPTAAALAFGIDKTDKEEKVLVFDLGGGTFDVSILELADGTFEVLSTAGDNKLGGDDFDNIVVDYLVDIFKKENGIDLSSDKMAMQRLKEAAEKAKKDLSSTVNASISLPFISAGENGPLHLETTLSRAKFEEMTKSLVERTMVPVRQALKDAGLTKNDIHQVLLVGGSTRIPAVVEAVKNDLGKEPNKSVNPDEVVAMGAAIQGGVISGDGKDVLLLDVTPLSLGIETMGGVMTVLIERNTTIPTSKSQVFSTAADNQPAVDINVLQGERPMAKDNKSLGLFKLDGIAPAKRGIPQIEVTFDIDVNGIVNVSAMDKGTNKKQSITISNSSGLSDEEIERMVREAEENASEDLRLKEEAELKNRAEQFIHQIDESLASEDSPVDDAQKEEVTKLRDELQAAMDNNDFETLKEKLDQLEQAAQAMSQAMYEQQAGQAEVDASSSDETVVDAEFEEKN

SEQ ID NO: 48808 - DNA, 1929 bp, Francisella tularensis
  CDS (1)..(1929): transl_table=11
atgggaaaaataataggtatagatttaggtactactaactcttgtcttgctattatggatggcaagactgctaaagttattgagaatgctgaaggacatagaacaacaccttcagttgtggcatatactgatagcggtgaaatattagtaggtcaagctgctaaaagacaggctgtaactaaccctgataatacattctttgctatcaagagacttataggtcgtaagtacgatgataaagctgtacaagaagatattaaaaagaaagtaccttatgcggtaattaaagctgataatggtgatgcttgggttgctactaaagaaggcaaaaaaatggctccaccacaagtttctgcagaagttctaagaaaaatgaaaaaaactgcagaagactatctaggtgaaccagttacagaagctgttattacagtgccagcatactttaacgatagtcaaagacaagctacaaaagatgctggtaaaatagcaggtcttgaagttaaaagaattatcaacgagcctacagcagcagcgctggcatatggtgtagactctaagaaaggtgagcaaactgtagcggtgtatgacctaggtggtggtacattcgatatctcaattattgagatttctgatgttgatggcgataaccaaatcgaagtattatcaaccaatggtgatactttcttaggtggtgaagacttcgacttggctttaatgaactatctaattgacgagttcaaaaaagagcaaggtatagatcttcacaatgataagcttgctttacaaagagttagagaggctgctgagaaagctaaagtagaattatctccagcacaacaaactgatgttaacctaccttacatcacagcagatgctactggacctaagcacttaaatatcaaagtaactagagctaagtttgagtctttagtttctgatcttgtaatgagatcacttgagccttgtaagaaagctcttgaagatgctggtttaagtaagtctgatattacagaagtattactagtgggtggacaaactcgtatgcctctagtacaagagaaagtaaaagagttttttggtaaagagccacgtaaagatgtgaaccctgatgaagctgttgcagttggtgcggctattcaaggtggtgtattagcaggtgatgttaaagatgttcttttattggatgtaacaccgctttctctaggtattgagactatgggaggtgttatgactaagcttatcgagagaaatactacgattcctactaagaagtcgcaagtattctcaacagctgaagataaccagcctgcggtaactattcatgtacttcaaggtgagcgtgaaatggcttctgcaaacaaatctttaggtagatttgatctggcagatattccaccagcgccacgtggtatgccacaaattgaggttacttttgatatagatgctaacggtatattaaatgtgtctgctaaagataaagctactggtaaagagcaaaatattgtgattaagtcttcaagtggtttatctgaagaggatatcgaaaaaatggtacaagacgctgaagctaatgcagaagcagataaaaagttccatgatttagttactgctagaaatactgctgataacttaattcatagctcaagaaaagcaattcaagaactgggtgacaaagtaacagcagcagaaaaagaaaaaatcgaagaagcttgtaaagagcttgaagcagcaactaaaggtgatgataagcaagcgattgaagctaaaactaaggctctagaagaagcatttgcgccaatagctcaaaaagcttatgctgagcaagctcaagctgctggtgcccaaggtggtgctaaagctgaagaacctaagaaagaagaagatgttgttgatgctgactttgaggatgttgaagacgacaaaaaataa

SEQ ID NO: 48809 - protein, 642 aa, Francisella tularensis
MGKIIGIDLGTTNSCLAIMDGKTAKVIENAEGHRTTPSVVAYTDSGEILVGQAAKRQAVTNPDNTFFAIKRLIGRKYDDKAVQEDIKKKVPYAVIKADNGDAWVATKEGKKMAPPQVSAEVLRKMKKTAEDYLGEPVTEAVITVPAYFNDSQRQATKDAGKIAGLEVKRIINEPTAAALAYGVDSKKGEQTVAVYDLGGGTFDISIIEISDVDGDNQIEVLSTNGDTFLGGEDFDLALMNYLIDEFKKEQGIDLHNDKLALQRVREAAEKAKVELSPAQQTDVNLPYITADATGPKHLNIKVTRAKFESLVSDLVMRSLEPCKKALEDAGLSKSDITEVLLVGGQTRMPLVQEKVKEFFGKEPRKDVNPDEAVAVGAAIQGGVLAGDVKDVLLLDVTPLSLGIETMGGVMTKLIERNTTIPTKKSQVFSTAEDNQPAVTIHVLQGEREMASANKSLGRFDLADIPPAPRGMPQIEVTFDIDANGILNVSAKDKATGKEQNIVIKSSSGLSEEDIEKMVQDAEANAEADKKFHDLVTARNTADNLIHSSRKAIQELGDKVTAAEKEKIEEACKELEAATKGDDKQAIEAKTKALEEAFAPIAQKAYAEQAQAAGAQGGAKAEEPKKEEDVVDADFEDVEDDKK

SEQ ID NO: 48810 - DNA, 1824 bp, Geobacillus kaustophilus
  CDS (1)..(1824): transl_table=11
atgagcaaaattatcggcatcgacttaggaacgacgaactcttgcgtcgccgtgttagaaggcggcgaagtgaaagtcattccgaatccggaaggaaaccgcacgaccccgtcggtcgtcgcgtttaaaaacggcgaacgcctagtcggcgaagtcgccaaacggcaagcgatcacgaacccgaacacgatcatctcgatcaagcgccatatggggacggattacaaagtcgaaatcgaagggaagcaatatacgccgcaagaaatttcggcgatcattttgcaatacttgaagtcgtacgccgaagactatttgggcgagccggtgacgcgtgcggtcatcacggtgccggcgtatttcaacgacgcccagcgccaagcgacgaaagatgccggccgcatcgccggcctcgaagtcgagcgcatcatcaacgagccgacggccgcggcgcttgcttacggccttgataaagaagaagaccaaacgattctcgtctatgacttaggcggcgggacgtttgacgtctcgattttggagcttggcgacggcgtgtttgaagtgaaggcgacggccggcgacaaccatttgggcggcgacgacttcgaccaagtgatcatcgattatttggtcaatcagttcaagcaagagcacggcatcgatttgtcgaaagacaaaatggcgctccaacgcttgaaagatgccgcggaaaaagcgaaaaaagagctgtccggcgtcacgcagacacaaatttcgcttccgtttatcagcgccaatgaaaacggtccgctccatttggaaatgacgttgacaagagcgaaatttgaagagttgtccgcccacctcgtcgagcggacgatggggccggtccgccaggcgcttcaagacgccggcttgacgccagccgatattgataaagtcattttggtcggcggttcgacgcgcattccagctgtccaagaagcgatcaagcgcgagcttggcaaagagccgcacaaaggcgtcaacccggacgaagtcgttgccatcggtgcggcgatccagggcggggtgatcgctggcgaagtgaaagatgtcgtcctgcttgacgtgaccccgctttcgcttggcattgaaacgatgggcggcgtatttacgaaactgatcgaacggaacacgacgatcccgacaagtaaatcgcaagtgttcacaacggcggctgacaatcaaacgacggtcgacattcacgttttgcaaggagagcgcccgatggcggcggacaacaaatcgctcggccgctttcagctgaccggcattccgccggcgccgcgcggcgtgccgcaaattgaagtgacgtttgatattgacgccaacggcatcgttcacgtgcgcgccaaagatttaggaacgaacaaagagcagtcgattacgatcaaatcgtcgtccggcctgtcggaagaagaaattcagcgcatgattaaagaagcggaagaaaacgccgaagccgaccggaagcggaaagaagccgccgagttgcgcaacgaagccgaccagctcattttcatgaccgacaaaacgttaaaagaagtcgaaggaaaagtgagcgccgatgagatcaagaaggcgcaggatgcgaaagaggcgttgaaagcggcgctcgagaaaaacgacatcgacgacatccgcaagaaaaaagacgcgctgcaagaagcggtgcagcagctgtcgatcaagctgtatgaacaagcggcgaaacaggcgcaaagtgcaggatcgcaaggcggcgctgccaatcataaagacaacgtggtggacgccgagtttgaagaagtgaacgacgataaataa

SEQ ID NO: 48811 - protein, 607 aa, Geobacillus kaustophilus
MSKIIGIDLGTTNSCVAVLEGGEVKVIPNPEGNRTTPSVVAFKNGERLVGEVAKRQAITNPNTIISIKRHMGTDYKVEIEGKQYTPQEISAIILQYLKSYAEDYLGEPVTRAVITVPAYFNDAQRQATKDAGRIAGLEVERIINEPTAAALAYGLDKEEDQTILVYDLGGGTFDVSILELGDGVFEVKATAGDNHLGGDDFDQVIIDYLVNQFKQEHGIDLSKDKMALQRLKDAAEKAKKELSGVTQTQISLPFISANENGPLHLEMTLTRAKFEELSAHLVERTMGPVRQALQDAGLTPADIDKVILVGGSTRIPAVQEAIKRELGKEPHKGVNPDEVVAIGAAIQGGVIAGEVKDVVLLDVTPLSLGIETMGGVFTKLIERNTTIPTSKSQVFTTAADNQTTVDIHVLQGERPMAADNKSLGRFQLTGIPPAPRGVPQIEVTFDIDANGIVHVRAKDLGTNKEQSITIKSSSGLSEEEIQRMIKEAEENAEADRKRKEAAELRNEADQLIFMTDKTLKEVEGKVSADEIKKAQDAKEALKAALEKNDIDDIRKKKDALQEAVQQLSIKLYEQAAKQAQSAGSQGGAANHKDNVVDAEFEEVNDDK

SEQ ID NO: 48812 - DNA, 1911 bp, Geobacter sulfurreducens
  CDS (1)..(1911): transl_table=11
atgagcaaagtgatcggtatcgacctcggcaccaccaactcctgcgttgctgttatggaaggtggtgagccggttgtcatagccaacgccgaaggaagccgcaccaccccgtccatggtcgcattcgccgagagcggcgagcggctggtgggccagcaggccaagcgtcaggcggtgaccaatccggagaacaccctgttcgccatcaagcggctcatcggccgtaagtacgatacggaagaggtgcgcaaggacatctccatctcccccttcaagatcgtcaaggccgacaacggtgacgcctgggttgaggcccgcggcaagatgtactcggcccctgagatctcggccatggtgctccagaagatgaagcagacagccgaggactacctgggcgagaccgtgaccgacgcggtcatcaccgtgccggcctacttcaacgactcccagcgccaagccaccaaggacgccggcaagatcgccggcctgaacgtcctgcggatcatcaacgagccgaccgccgccgcattggcttatggcctcgacaagaagaaggacgagaagattgccgttttcgacctggggggcggaactttcgacatctccatcctggaactgggtgacggcgtcttcgaggtgaagtccaccaacggcgacaccttcctgggtggcgaagacttcgaccagcgggtcatcgactggatcgccgacgaattcaagaaggaccaggggatcgacctgcgcggcgacaagatggccctgcagcgcctcaaggaggccgccgagaaggccaagtgcgagctctccacctccatggagaccgatatcaaccttccctttatcaccgctgatgcaaccgggcccaagcacctcaccatgaagctgtcccgggctaagctggaggccctgtgcgccgacctgctcaacaagctggaggggccctgccgcaccgcgctcaaggatgccggtctgtctccctccgaggtggacgaagtgattctggtcggcggcatgacacggatgccggcggtccagaaaagggttcaggagatattcggcaaggttcccaacaagggggttaaccccgatgaggtggtcgccatcggcgccgccattcagggcggggtgctcaggggcgacgtgaaggacgtgctgttgctcgacgtgacccccctttcgctcggcatcgagaccctcggcagcgtcatgaccaagctcatcgagaagaacaccaccatcccgtgccgcaagagccaggtcttctccacggccagcgacaatcagccggcggtaaccatccacgtgctccagggagagcgggagatggcgatcgacaacaagacattggggaacttcgagctgaccggcatcccgccggcgccccgcggggtcccccagatcgaggtaaccttcgatatcgacgccaacggcatcgttcatgtttccgccaaggatttgggcaccggcaaggagcaatccatcaggatcactgcatcctccggcctctccaaggaagagatcgacaagatggtcaaggaggcagaagctcattcagccgaggacaagaagaagcgggagctggtggaagcccgcaatcacgctgataccctcagctactcaaccgagaagtctctcaaggaatacggggacaagatcggtgccgacgagaaagccaagatcgaggaatgcctggcaaacctcagaaaggccatggagggaagcgacgtagaggtcctcaagaaggccacggacgagctgacccaagcgtctcacaagctggcagaggcggtctacgccaaagcccaggccgaaggcgcccaaccaggcggggaagcggcgggtgaagcctctgccaaggatgagaaggttgtcgacgccgactttgaagaggtcaaggacgacaagaaataa

SEQ ID NO: 48813 - protein, 636 aa, Geobacter sulfurreducens
MSKVIGIDLGTTNSCVAVMEGGEPVVIANAEGSRTTPSMVAFAESGERLVGQQAKRQAVTNPENTLFAIKRLIGRKYDTEEVRKDISISPFKIVKADNGDAWVEARGKMYSAPEISAMVLQKMKQTAEDYLGETVTDAVITVPAYFNDSQRQATKDAGKIAGLNVLRIINEPTAAALAYGLDKKKDEKIAVFDLGGGTFDISILELGDGVFEVKSTNGDTFLGGEDFDQRVIDWIADEFKKDQGIDLRGDKMALQRLKEAAEKAKCELSTSMETDINLPFITADATGPKHLTMKLSRAKLEALCADLLNKLEGPCRTALKDAGLSPSEVDEVILVGGMTRMPAVQKRVQEIFGKVPNKGVNPDEVVAIGAAIQGGVLRGDVKDVLLLDVTPLSLGIETLGSVMTKLIEKNTTIPCRKSQVFSTASDNQPAVTIHVLQGEREMAIDNKTLGNFELTGIPPAPRGVPQIEVTFDIDANGIVHVSAKDLGTGKEQSIRITASSGLSKEEIDKMVKEAEAHSAEDKKKRELVEARNHADTLSYSTEKSLKEYGDKIGADEKAKIEECLANLRKAMEGSDVEVLKKATDELTQASHKLAEAVYAKAQAEGAQPGGEAAGEASAKDEKVVDADFEEVKDDKK

SEQ ID NO: 48814 - DNA, 1917 bp, Gloeobacter violaceus
  CDS (1)..(1917): transl_table=11
atgggaaaagttgtaggcattgacttgggcaccaccaactcggtggtggccgtcctcgagggggggcagcccaccgtgatcgccaacgcggaaggctcgcgcaccacgccgtcggtggtggccttcaccaagaaccacgaccggttggtcgggcagttggcccgccgtcaggccgttctcaaccccgagaacacgttctattcggtcaagcgcttcatcggccgcaagtacgacgagatcaccgatgaggccaagcaggtggcctaccgggtggtgcgcgacggcagcaacgtcaaactgcacagcaccaacgaagacaaagattttgcccccgaagaaatttcggccctcgtcctgcgcaaactggtcgacgatgcgagcaagtacctgggcgaaaagatcacccaggcggtgatcaccgttccggcgtacttcaacgactcccagcgccaggccaccaaggacgccggccgcatcgccggcatcgaggtgctgcgcatcatcaacgaaccgacggcagccgccctcgcctacggtctcgataaaaaagcgaacgagaccatcctggtcttcgacctgggcggcggcaccttcgatgtgtcgatcctcgaagtgggcgatggcgtcttcgaggtcaaatcgacctccggcgacacccacctgggcggcgacgacttcgacaggcggatcgtcgattatctggccgacgaattcaagaagctcgaaggggtggacctgcgcaccgaccgccaggccctccaacgcctcaccgaggcggcggaaaaggccaagatcgaactgtcgggcgtcacccagacccagatcaatctgcccttcatcaccgccggggccgacggggcgaagcacctcgacatgagcctcacccgcgccaagtttgagagcctgtgcgccgacttgctgcgccgggtcgagaagcccgtcgagcaggccctgcgcgacgccaaactcagcaaagagaacatcgacgaggtggtgctggtgggcggttccacccgcatcccggcggtgcaggaactggtcaagcgcatcatcggcaaagaccccaaccagagcgtcaacccggacgaggtggtggccgtcggggccgccatccaggcgggcgtgctgtccggtgaagtgcgcgacgtcgtgctgctcgatgtcaccccgctctcgctgggcgtcgagaccctgggtggtgtggcgacaccgatcatcccccgcaataccacgatcccgacgcgcaagtccgagaccttctcaactgccgccgacggccagacttccgtcgagatccacgtcatccagggcgagcgctcgatggccggcgacaacaagagcctcggccgcttccgcctcgacggcatcccgcccgcgccccggggcgttccccaagtcgaagtcaccttcgacatcgacgccaacggcatcttgagcgtcaccgccaaagacaaggcgagcggcaaagcccagaccatcagcatcaccggtgcttcgaccctttcaaaagacgacgtcgccaagatggtcaacgaggccgagtccttcgcaggcgaagacaagaagcgccgcgaagcggtcgacctcaaaaacgaggccgattcgctcgcctaccaggccgagcgccaactcaccgagttcggcgacaaagtcgacagcagtgacaagagcaagattgaagggctgatcaaggatctgcgcgaggcgctcagccgcgaggacatggacaaagtcgcaagcctcaaagccgacctgcagcaggccgtctacgacctgagcagcaagctctaccagcagtcggccccgagcggcgcggcggcgggtcctgacgaaggcgctccctccggcagcggcggcacctccggcacccgcggcggcgacgatgtgatcgacgccgaattcaccgagaccaagtaa

SEQ ID NO: 48815 - protein, 638 aa, Gloeobacter violaceus
MGKVVGIDLGTTNSVVAVLEGGQPTVIANAEGSRTTPSVVAFTKNHDRLVGQLARRQAVLNPENTFYSVKRFIGRKYDEITDEAKQVAYRVVRDGSNVKLHSTNEDKDFAPEEISALVLRKLVDDASKYLGEKITQAVITVPAYFNDSQRQATKDAGRIAGIEVLRIINEPTAAALAYGLDKKANETILVFDLGGGTFDVSILEVGDGVFEVKSTSGDTHLGGDDFDRRIVDYLADEFKKLEGVDLRTDRQALQRLTEAAEKAKIELSGVTQTQINLPFITAGADGAKHLDMSLTRAKFESLCADLLRRVEKPVEQALRDAKLSKENIDEVVLVGGSTRIPAVQELVKRIIGKDPNQSVNPDEVVAVGAAIQAGVLSGEVRDVVLLDVTPLSLGVETLGGVATPIIPRNTTIPTRKSETFSTAADGQTSVEIHVIQGERSMAGDNKSLGRFRLDGIPPAPRGVPQVEVTFDIDANGILSVTAKDKASGKAQTISITGASTLSKDDVAKMVNEAESFAGEDKKRREAVDLKNEADSLAYQAERQLTEFGDKVDSSDKSKIEGLIKDLREALSREDMDKVASLKADLQQAVYDLSSKLYQQSAPSGAAAGPDEGAPSGSGGTSGTRGGDDVIDAEFTETK

SEQ ID NO: 48816 - DNA, 1905 bp, Gluconobacter oxydans
  CDS (1)..(1905): transl_table=11
atgagcaaagtcattggcattgaccttggtaccaccaactcctgcgtcgcagtacgcgagggtgacgaaaccaaggtcatcgaaaacagcgaaggcgcccgcacgacgccgtccatggtcgccttcaccgacaacggtgagcgtctcgtcggacaggccgcgaagcgtcaggccgtcaccaacccggccaacaccctttatgccgtcaagcgtctgatcggccgtcgttacgacgatccgaccgttcagaaggacaaggagatggtgccgtatgccatcgtccgtggcgacaacggcgacgcatgggtcgaggcacgtggcgagaagtatgctccgtcgcagatcgcagcctatgttctgggtaagatgaaggaaaccgccgagagctatcttggcgagaccgtctctcaggctgtcatcacggttccggcctacttcaacgacgcccagcgtcaggcaacccgtgacgccggcaagatcgctggcctcgaagtcctgcgcatcatcaacgagccgaccgcagcagccctcgcctatggccttggcaagcgcgattcaggcacggtggccgtgtatgaccttggtggtggtacgttcgacgtctccatcctcgagatctccgacggcgtgatcgaagtgaagtccacgaacggtgacacgttcctgggcggtgaagacttcgacaaccgcatcatcgggttcctggctgacgagttcaagaaggaccagggcatcgacctgcgtggtgacaagctcgccctgcagcgcctgaaggaagcggccgagaaggccaagatcgagctgtcctcctccaaggagaccgagatcaacctgccgttcatcacggctgacgcttccggtccgaagcacctcgtcgtcaagctgtcccgcgccaagctggaaagcctggttgatgacctgatccagcgtacgctcggcccgtgccgtgcagccatcaaggacgcgtccgtctccgccaacgagatcgacgaagtcatcctggtcggcggcatgacccgtatgccgaaggtcattgagacggttaaggaattcttcggcaaggatccggcacgcaacgtcaaccctgacgaagtggtcgccatcggtgctgctgttcagggcgctgtcctgaagggtgacgtcaaggatgtcctgcttcttgacgtgacgccgctgtcgctgggtatcgagacgctgggtggcgtgttcacccgtctgatcgaccgcaacacgacgatcccgaccaagaagagccagaccttctccacggccgaagacaaccagaacgccgtgaccatcaaggtctatcagggcgagcgtgagatggcggctgacaacaagctgctgggcaacttcgacctgcagggcattgctccggcaccgcgtggcgtgccgcagatcgaagtcaccttcgacatcgacgccaacggcatcgtgaacgtgtccgccaaggacaaggccacgaacaaggaacagcagatcaagatccaggcttctggcggtctgtctgatgccgacatcgaccgcatggtcaaggacgccgaagccaacgcttctgccgataaggccaagcgtgaactggtcgagctgcgcaacagcacggaaagcctcatccaccagaccgagaagtccatcaccgaaggtggcgacaaggttccggcggctgacaagtccgaagctgaagcagccattgccgaagcccgcgaagctctgggtggcgaaaacctcgacaccctgaaggctgccagcgagaagctgacgcaggctgccatgaaggttggtcagggtgtgtaccaggctggtcagggcgctgaaggtggcgctgcaccggaaggcgagaagaaagacgaaaacgtcgttgatgccgacttcgaagacctcgaagacgacagcaagaagcactga

SEQ ID NO: 48817 - protein, 634 aa, Gluconobacter oxydans
MSKVIGIDLGTTNSCVAVREGDETKVIENSEGARTTPSMVAFTDNGERLVGQAAKRQAVTNPANTLYAVKRLIGRRYDDPTVQKDKEMVPYAIVRGDNGDAWVEARGEKYAPSQIAAYVLGKMKETAESYLGETVSQAVITVPAYFNDAQRQATRDAGKIAGLEVLRIINEPTAAALAYGLGKRDSGTVAVYDLGGGTFDVSILEISDGVIEVKSTNGDTFLGGEDFDNRIIGFLADEFKKDQGIDLRGDKLALQRLKEAAEKAKIELSSSKETEINLPFITADASGPKHLVVKLSRAKLESLVDDLIQRTLGPCRAAIKDASVSANEIDEVILVGGMTRMPKVIETVKEFFGKDPARNVNPDEVVAIGAAVQGAVLKGDVKDVLLLDVTPLSLGIETLGGVFTRLIDRNTTIPTKKSQTFSTAEDNQNAVTIKVYQGEREMAADNKLLGNFDLQGIAPAPRGVPQIEVTFDIDANGIVNVSAKDKATNKEQQIKIQASGGLSDADIDRMVKDAEANASADKAKRELVELRNSTESLIHQTEKSITEGGDKVPAADKSEAEAAIAEAREALGGENLDTLKAASEKLTQAAMKVGQGVYQAGQGAEGGAAPEGEKKDENVVDADFEDLEDDSKKH

SEQ ID NO: 48818 - DNA, 1905 bp, Haemophilus ducreyi
  CDS (1)..(1905): transl_table=11
atgggtaaaattatcggtattgacttaggtacaacaaactcgtgtgtagcagtaatggacggtgacaaacctcgcgtattagaaaatgccgaaggcgctcgtacaacaccatcaattattgcttatacagataaagaaactttagtcggtcaacctgcaaaacgtcaagcaattactaatccaaaaaacacattatttgctataaaacgtttaatcggtcgccgttttacagataatgaagttcaacgcgatattgaaattatgccatttgaaattgctaaagcagacaatggcgatgcttgggtaaatgttaaaggcgataaattagcgccaccacaaatttctgctgaagtcttgaaaaaaatgaaaaaaactgcagaagatttcctgggtgaacctgttactgaagcagttattacagtccctgcttactttaatgatgctcaacgtcaagcaactaaagatgcgggtagaattgcaggcttagaagtaaaacgtattatcaacgaaccaactgctgcggcacttgcttatggtttagattccaaaaaagaaaaccaaattatcgcagtatatgacttaggtggcggaacattcgatatttcaattatcgaaatagataatttcgatggcgaacaaacatttgaagttcgtgctacaaatggtgatacgcatttaggtggtgaagactttgataaccgtgtaatcaattacttagtggaagaattccaaaaagaacaaggcgttgatttacgtaacgatccaatggcaatgcaacgggtcaaagaagcggcagaaaaagcaaaaatcgaactttcttctgcacaagaaaccgaagtgaatttaccatacatcactgcagatgcaacgggtccaaaacacttaaatatcaaagtaacacgtgcaaaattagaagcattagttgaagatttagtcagtcgttcattagagccattaaaaactgctttagcagatgctggtttatctgtcagcgaaatcaacgacgtgatcctcgttggtggtcaaacacgtatgccattagtacagaaaaaagtggctgacttctttggcaaagagcctcgtaaagatgtcaaccctgatgaagctgtggctatcggtgcggctgtgcaaggtggtgtgttagcgggtgatgtaacagatgtacttttattagatgtaacaccattatcgttaggtattgaaacaatgggcggagtaatgacaagcctaattgaaaaaaataccactatcccaacgaaaaaatcgcaagtgttctcaacggcagaagataaccaatcagcagtaaccattcacgtgttacaaggtgaacgtaaacgtgctgcagacaataaatctttaggtcaatttaaccttgaaggtattaatcctgcacctcgtggtatgccacaaatcgaagtgacatttgatattgatgcaaatggtattatcaacgtatcagcaaaagataaaaatactggtaaagaacaacaaattaaaattcaagcatcttcaggcttaagcgatgaagaagtagaacaaatggttcgtgatgcagaagctaatgctgaatcagatcgtcaatttgaagaacttgttcaaacacgtaatcaagctgatagtattgcacacgctacacgtaaacaaatcagtgaagcaggtgatgcattaacggctgaagataaagcaaaaattgaaactgcgttagctgaattagaaaccgcagccaaaggtgaagataaagctgaaattgaagccaaaattgaagctgtaatcaaagcatcagaaccattaatgcaagctgctcaagctaaggcacaaaccaatcaagcaggtgaacaacaatcttcggcaaaagatgacagtgttgtagatgctgaatttgaagaagtgaaagagaataaataa

SEQ ID NO: 48819 - protein, 634 aa, Haemophilus ducreyi
MGKIIGIDLGTTNSCVAVMDGDKPRVLENAEGARTTPSIIAYTDKETLVGQPAKRQAITNPKNTLFAIKRLIGRRFTDNEVQRDIEIMPFEIAKADNGDAWVNVKGDKLAPPQISAEVLKKMKKTAEDFLGEPVTEAVITVPAYFNDAQRQATKDAGRIAGLEVKRIINEPTAAALAYGLDSKKENQIIAVYDLGGGTFDISIIEIDNFDGEQTFEVRATNGDTHLGGEDFDNRVINYLVEEFQKEQGVDLRNDPMAMQRVKEAAEKAKIELSSAQETEVNLPYITADATGPKHLNIKVTRAKLEALVEDLVSRSLEPLKTALADAGLSVSEINDVILVGGQTRMPLVQKKVADFFGKEPRKDVNPDEAVAIGAAVQGGVLAGDVTDVLLLDVTPLSLGIETMGGVMTSLIEKNTTIPTKKSQVFSTAEDNQSAVTIHVLQGERKRAADNKSLGQFNLEGINPAPRGMPQIEVTFDIDANGIINVSAKDKNTGKEQQIKIQASSGLSDEEVEQMVRDAEANAESDRQFEELVQTRNQADSIAHATRKQISEAGDALTAEDKAKIETALAELETAAKGEDKAEIEAKIEAVIKASEPLMQAAQAKAQTNQAGEQQSSAKDDSVVDAEFEEVKENK

SEQ ID NO: 48820 - DNA, 1878 bp, Helicobacter hepaticus
  CDS (1)..(1878): transl_table=11
atggcaaaagtaattggaatagacttaggaacaacaaactctgcaatggcagtgtatgaaggaaatgaggcaaaaattattgcaaataaagaaggtaaaaatactacgccatcaatcgtagcatttactgataagggtgagattctagtcggtgaacctgctaaaagacaagcagtgacaaatccaaaaaagacagtgtattctattaagcgcattatggggcttatgtttaatgaagacaaggcaaaagaagcagagaagagacttccttataatatcgtagatagaaatggtgcgtgtgcggtagaaattgctgataagatttatacacctcaagaaatttcggcaaagattcttatgaagcttaaagaagacgcgcaaagctatttgggagaagatgtaacagaagcagttatcactgttccagcgtattttaatgattctcaacgcaaggcaaccaaagaagcagggacaatagctggacttaatgtgcttagaatcattaatgagcctacttcagcagcattagcgtatggattagataaaaaggaagctgaaaagattatggtgtatgatttgggtggtgggacatttgatgttaccgttttagaaacaggcgataatgtcgtagaagtcctcgctactggtggagatgcgtttcttggaggtgatgattttgataatagaatcattgattgggcagcagaagaatttaaaagtgatgaagggattgatttaaaaaatgatgtaatggcattgcagcgactaaaagatgcggcagaaaatgctaaaaaagagttaagtagtgcgcaagagacagaaattaatctaccttttattacagctgatgcaagtggtccaaagcatttggtgaaaaaaatcactcgtgcgaagtttgagagtttgattgatgatttaattgaggatacgattaaaaaaattgaatttgtgattaaagatgcagggctttctcaaagtgatatttctgaagtggtgatggttggtggttctacgcggattccaaaagtgcaagagcgcgttaaagcatttattagtaaagatttaaataaatcagtcaatcctgatgaagttgtggctgtgggtgcagcaatacaaggtggcgtgctcaaaggagatgtaaaagatgtacttttacttgatgttacacctttgagtttaggtattgaaactgctggtggtatttcaacaaaagttgtagagagaggcgtaactatccctacgaaaaaaacacaaattttctctacctacgaagacaatcaacctgcagtgagcattaatgtattgcaaggagaaagggaattagcgcgtgataataaatcgcttgggcgctttgatttaagcggtattccggcagctcctcgtggtgtgccacaaattgaagtaacatttgatattgatgcaaatggaatcttaaccgtttcagcaaaggataaagccacaggaaaatctcaagagattaagattagcggttcaagtgggctttcagatgctgaaattgaaaaaatggtcaaagaagcagaattacacaaagaagaggatacgaagaaaaaagcaattattgaattgcgtaataatgcggattctctagtgtatcaaacaaaaaagagccttgaagaatttaaggataaaatagaatctgccgaagtagaaaagattcaaagcgcggttgctgcacttgaagagactttgaaaaatgaaaatgcttcaaaagaggagcttgaagagaaaattaaaaatctcacagaagtaagccataaacttgctgaagcagcgtatgccaaagagcaaggtggcacacaacaaggcacagatacaaagaaaaaagatgatgatgtcattgatgctgaagtagagtag

SEQ ID NO: 48821 - protein, 625 aa, Helicobacter hepaticus
MAKVIGIDLGTTNSAMAVYEGNEAKIIANKEGKNTTPSIVAFTDKGEILVGEPAKRQAVTNPKKTVYSIKRIMGLMFNEDKAKEAEKRLPYNIVDRNGACAVEIADKIYTPQEISAKILMKLKEDAQSYLGEDVTEAVITVPAYFNDSQRKATKEAGTIAGLNVLRIINEPTSAALAYGLDKKEAEKIMVYDLGGGTFDVTVLETGDNVVEVLATGGDAFLGGDDFDNRIIDWAAEEFKSDEGIDLKNDVMALQRLKDAAENAKKELSSAQETEINLPFITADASGPKHLVKKITRAKFESLIDDLIEDTIKKIEFVIKDAGLSQSDISEVVMVGGSTRIPKVQERVKAFISKDLNKSVNPDEVVAVGAAIQGGVLKGDVKDVLLLDVTPLSLGIETAGGISTKVVERGVTIPTKKTQIFSTYEDNQPAVSINVLQGERELARDNKSLGRFDLSGIPAAPRGVPQIEVTFDIDANGILTVSAKDKATGKSQEIKISGSSGLSDAEIEKMVKEAELHKEEDTKKKAIIELRNNADSLVYQTKKSLEEFKDKIESAEVEKIQSAVAALEETLKNENASKEELEEKIKNLTEVSHKLAEAAYAKEQGGTQQGTDTKKKDDDVIDAEVE

SEQ ID NO: 48822 - DNA, 1863 bp, Helicobacter pylori
  CDS (1)..(1863): transl_table=11
atgggaaaagttattggaattgatttagggacaaccaactccgcaatggcggtttatgaaggcaatgaagcaaagattattgcgaataaagagggtaaaaacaccactccttctattgtggcttttacagataagggcgagattttagtgggcgagagcgccaaaagacaagcggtaaccaacccagaaaaaaccatttattctattaaaagaatcatgggtttgatgtttaatgaagataaggctaaagaagccgaaaagcgcttgccttataagattgtggataggaatggggcttgcgcgattgagatttcgggtaaagtttatacccctcaagagatttcagccaaaattttaatgaagctcaaagaagacgctgaaagttatttgggcgagagcgttacggaagcggtgatcacggttccagcttattttaacgacagccaaaggaaagcgactaaagaagccggcacgattgcagggcttaatgttttaaggatcatcaatgagcctacaagtgcggcattagcttatggcttggataaaaaagagagcgaaaaaatcatggtttatgatttgggtggggggacttttgatgttaccgttttagaaacaggcgataatgtcgtggaagttttagccacagggggcgatgcgtttttagggggcgatgattttgacaatcgtgtgattgatttcttagcgagtgagtttaaaagcgaaacgggcattgaaattaaaaacgatgtgatggcgttgcaacgcctaaaagaagcggctgaaaacgctaaaaaagaactgagctctgcgatggagactgaaatcaatttgccctttatcaccgcggacgctaccgggcctaaacacttggttaaaaaactcactagggctaaatttgaaagcttgacagaagatctcatgaaagaaacgatttctaaaattgaaagcgtgatcaaagatgcggggctaaccaaaaatgagatttcagaagtggtgatggtgggaggctctactcgtatccctaaagtccaagaaagggtgaaagcgtttattaataaagatttgaataaaagcgtcaatcctgatgaggtcgtagcggtgggagcgagcattcaagggggcgtgttgaaaggcgatgtgaaagatgtgcttttattagacgttacgcctttaagccttgggattgaaactttagggggcgtgatgactaaagtgattgatagaggcacgactattccggcgaaaaaatctcaagtgttctcaaccgctgaagacaaccagcccgctgtgtccattatggttttacaaggcgagagagaattggcaagggataataaatctttgggtaaatttgatttgcaaggcatcgctccagctccaagaggcgtgccgcaaattgaagtaacctttgatattgacgctaacgggattttaaccgtttcagcgcaagataaaaataccggcaaaagccaagagattaaaatttctggttctagcgggttgtctgatagcgaaattgaaaaaatggtgaaagacgctgaattgcacaaagaagaagacgctaagaaaaaagaagtgattgaagcgagaaaccatgccgatagtttggcgcaccaaacccaaaagagccttgatgagcataaaacgaatttgaatgaaaacgacgctaacgagatccaaaacgccattaacgctcttaaagattgcgtcaaaaacgataacgctactaaagcggagcttgaagacaaaacgaaattattagcgcaagcggctcaaaaattaggcgaagccatggcgaataaaaacaacgccgagcagcccaagaaaaaagacgacgatgtgattgatgcggaagtggagtga

SEQ ID NO: 48823 - protein, 620 aa, Helicobacter pylori
MGKVIGIDLGTTNSAMAVYEGNEAKIIANKEGKNTTPSIVAFTDKGEILVGESAKRQAVTNPEKTIYSIKRIMGLMFNEDKAKEAEKRLPYKIVDRNGACAIEISGKVYTPQEISAKILMKLKEDAESYLGESVTEAVITVPAYFNDSQRKATKEAGTIAGLNVLRIINEPTSAALAYGLDKKESEKIMVYDLGGGTFDVTVLETGDNVVEVLATGGDAFLGGDDFDNRVIDFLASEFKSETGIEIKNDVMALQRLKEAAENAKKELSSAMETEINLPFITADATGPKHLVKKLTRAKFESLTEDLMKETISKIESVIKDAGLTKNEISEVVMVGGSTRIPKVQERVKAFINKDLNKSVNPDEVVAVGASIQGGVLKGDVKDVLLLDVTPLSLGIETLGGVMTKVIDRGTTIPAKKSQVFSTAEDNQPAVSIMVLQGERELARDNKSLGKFDLQGIAPAPRGVPQIEVTFDIDANGILTVSAQDKNTGKSQEIKISGSSGLSDSEIEKMVKDAELHKEEDAKKKEVIEARNHADSLAHQTQKSLDEHKTNLNENDANEIQNAINALKDCVKNDNATKAELEDKTKLLAQAAQKLGEAMANKNNAEQPKKKDDDVIDAEVE

SEQ ID NO: 48824 - DNA, 1929 bp, Idiomarina loihiensis
  CDS (1)..(1929): transl_table=11
atgggtaaaacgattggtatagatttaggtacaacaaactcttgcgttgctgtactggatggtggcaaagctcgcgttattgaaaatggcgaaggcgaccgtacaacgccgtcagtagttgcatttactgacgatggcgaaattttggtcggttcaccggcaaaacgccaggcagtaaccaacccaaataaaaccttatttgcgattaagcgcctaattggccgtcgctttcaggacgaagaagtacagcgtgatatcggtattatgccttacaaaattgttaaggctgacaacggtgacgcatgggtagaaattgatggtgacaaaaaagcgccaccacaaatttctgcggaagtcctgaaaaagatgaaaaagaccgccgaagaatttctgggcgagaaagtaacggatgcggtaattactgtaccggcatactttaacgatgcccagcgtcaggcaaccaaagacgccggtaaaatcgctggtcttaacgtaaaacgtattattaacgaaccaacagccgctgctttagcgtacggcatggacaagaagtccggcgacaacgtgattgcggtgtatgacttaggtggtggtacgttcgatatctctattattgagattgacgaagttgaaggtgagcataccttcgaagtactggcaactaacggtgatacacacttaggtggtgaagactttgataaccgtttaatcaactacttagttgagcagttccaaaaagaccagggcatggacttgcgtaaagatccattagctatgcagcgtcttaaagaagccgcagagaaagcgaaaattgaactgtcgtcagcgcagcagaccgaagtgaacttgccgtacattacggcagacaacgcaggtcctaagcacatggccattaaagtgacccgtgcgaagctggaatcactggttgaagatttaatcaagaagtcgcttgagccattgaaacaggctttagccgatgcggatctgtctgtcagcgacattcaggacattatcatggtcggtggtcagactcgtatgccgaaagtacaggctgcggtaacggacttcttcggtaaagaaccacgtcgcgatgtgaaccctgacgaagctgttgcagtgggtgctgcggttcaggctggcgtattgcaaggtgacgttaaagacgtattgttgctggatgtttgtcctctgtcgctgggtatcgaaaccatgggcggcgtaatgacgaaactgattgagaagaacactacgattccgactaaagaatcgcaaaccttctcaacggctgaagataatcagtccgcggtaaccattcatgttattcagggtgaacgtaaacgcgcaggggataacaaatctctggggcagtttaacctggaaggcattcgcgcagcagctcgtggtgtaccacaaatcgaagtcacttttgacattgatgcggacggcattctgcacgtatcagccaaagataaagacacgggtaaagagcagaagattactatcaaagcttcttctggcctggatgagtctgaagtcgataaaatggttaaagatgctgaagcccatgctgaagaagacaagaagtttgaagaaatggtgcaggcacgtaaccaggcagacggtttggttcacgcaacccgtaatcaactgaaagaagttggcgatgccttgtctcaggaagacaaagacgcgattgagaaagcttgtgaagaacttgagcaagcgtctaaagatggtgataaagaagccattgatgcgaaatctcaggcgttgatggaagcatcacagaaactgatggaagcagctcagcagcaacaggcacaacaaggtgctgaaggtgcagctggcggtgaacagcagtcttccaaagcggatgatgatgtcgttgatgctgaatttgaagaagtcaaagacgacgataagaagtaa

SEQ ID NO: 48825 - protein, 642 aa, Idiomarina loihiensis
MGKTIGIDLGTTNSCVAVLDGGKARVIENGEGDRTTPSVVAFTDDGEILVGSPAKRQAVTNPNKTLFAIKRLIGRRFQDEEVQRDIGIMPYKIVKADNGDAWVEIDGDKKAPPQISAEVLKKMKKTAEEFLGEKVTDAVITVPAYFNDAQRQATKDAGKIAGLNVKRIINEPTAAALAYGMDKKSGDNVIAVYDLGGGTFDISIIEIDEVEGEHTFEVLATNGDTHLGGEDFDNRLINYLVEQFQKDQGMDLRKDPLAMQRLKEAAEKAKIELSSAQQTEVNLPYITADNAGPKHMAIKVTRAKLESLVEDLIKKSLEPLKQALADADLSVSDIQDIIMVGGQTRMPKVQAAVTDFFGKEPRRDVNPDEAVAVGAAVQAGVLQGDVKDVLLLDVCPLSLGIETMGGVMTKLIEKNTTIPTKESQTFSTAEDNQSAVTIHVIQGERKRAGDNKSLGQFNLEGIRAAARGVPQIEVTFDIDADGILHVSAKDKDTGKEQKITIKASSGLDESEVDKMVKDAEAHAEEDKKFEEMVQARNQADGLVHATRNQLKEVGDALSQEDKDAIEKACEELEQASKDGDKEAIDAKSQALMEASQKLMEAAQQQQAQQGAEGAAGGEQQSSKADDDVVDAEFEEVKDDDKK

SEQ ID NO: 48826 - DNA, 1869 bp, Lactobacillus plantarum
  CDS (1)..(1869): transl_table=11
atggcaagtaataaaattatcgggattgacctcgggactactaactctgcggtagcggttcttgaaggtaatgaacctaagattatcaccactcctgaaggtggccggacggttccttcagttgtggcattcaaagatggcgaaactcaagttggtgaagttgccaagcggcaagcaatcactaacccgaatacggtagcttcaatcaagcgtcacatgggtgaagctggttacaaagttagcatcgaaggtaaggactacaccccacaacaaatctcagcaatgattttgcaatatatcaagggctttgctgaagattacttgggtgacacggttgaaaaggccgttgtgactgttccagcttactttaatgatgcccaacggcaagcaactaaagatgctggtaagattgccggcttaaacattgaacggattattaacgaaccaacggcggcagctttagcctatggtttggataagaccgacaaagatgaaaagattttagtctatgaccttggtggtgggacttttgatgtttccatcttggaattaggcgacggggtcttcgaagtattatccacaaatggtgatacccaccttggtggtgatgactttgaccaaaagattatcgactggttagttgatggctttaaagctgacaacggtgttgatttatcaaaagacaagatggccttacaacggttaaaggatgctgctgaaaaggctaagaaggacctttcaggtgtttctgaagctcaaattagtttgccatttatttccgctggtgctagtggcccattgcacttggaaaccacgttaacacgtgctaagttcaatgaattaactgctgacctagttgaaaagacgcgcattcctgttgaaaatgccttgaaggatgctgatttatcggctagtgacttagacgttgtcatcttgaatggtgggtcaactcggattccagctgttcaagaagctgttgaaaagtggactggcaaagaatctaaccattctatcaaccctgacgaagcggttgctttaggggccgctgttcaaggtggtgtgatcactggtgatgttaaagacgttgttttgctcgatgttacgccactttcacttggtattgaaaccatgggtggggtcttcactaagttgattgaccgtaacacgacgattccaaccagcaagtcgcaagtatttagtacggcggctgataaccaaccagctgttgacattcacgtgctccaaggtgaacggccaatggcagcggataacaagacgttaggtcgcttccaattaacggatattccggctgcacctcgtggtgttcctcaaatcgaagttaagtttgacatcgataagaacgggatcgttaacgtatctgctaaggatatgggaactaataaagaacaaaagattaccatcaagagttcatcgggtctttctgacgacgaaattgatcaaatggtcaaggaagccaaggaaaacgaagaagccgataagaaacgtaaagaagaagttgatttgaagaacgaagttgaccaattgatctttactaccgacaagactttgaaagatcttgaaggcaaggtttcagaagatgaagttaagaaagccaaagatgctcgtgatgctttgaagaaagctcaagatgataacaacattgacgaaatgaaggccaagaaggacgacttgaacaagatcgttcaggacttatcagttaagttgtatcaacaagctcaagaagctcagggtgcacaaggcggtgccgacagtaatgctgctggcaatgccaactcagccaagggcagtgatgacaacacggttgacggtgatttcgaagacttggataaagacaaggataagaagtag

SEQ ID NO: 48827 - protein, 622 aa, Lactobacillus plantarum
MASNKIIGIDLGTTNSAVAVLEGNEPKIITTPEGGRTVPSVVAFKDGETQVGEVAKRQAITNPNTVASIKRHMGEAGYKVSIEGKDYTPQQISAMILQYIKGFAEDYLGDTVEKAVVTVPAYFNDAQRQATKDAGKIAGLNIERIINEPTAAALAYGLDKTDKDEKILVYDLGGGTFDVSILELGDGVFEVLSTNGDTHLGGDDFDQKIIDWLVDGFKADNGVDLSKDKMALQRLKDAAEKAKKDLSGVSEAQISLPFISAGASGPLHLETTLTRAKFNELTADLVEKTRIPVENALKDADLSASDLDVVILNGGSTRIPAVQEAVEKWTGKESNHSINPDEAVALGAAVQGGVITGDVKDVVLLDVTPLSLGIETMGGVFTKLIDRNTTIPTSKSQVFSTAADNQPAVDIHVLQGERPMAADNKTLGRFQLTDIPAAPRGVPQIEVKFDIDKNGIVNVSAKDMGTNKEQKITIKSSSGLSDDEIDQMVKEAKENEEADKKRKEEVDLKNEVDQLIFTTDKTLKDLEGKVSEDEVKKAKDARDALKKAQDDNNIDEMKAKKDDLNKIVQDLSVKLYQQAQEAQGAQGGADSNAAGNANSAKGSDDNTVDGDFEDLDKDKDKK

SEQ ID NO: 48828 - DNA, 1842 bp, Lactobacillus sakei
  CDS (1)..(1842): transl_table=11
atgagtaaagtaatcggtattgatttaggaacaacaaactcagctgttgccgtattagaaggcggacaacccaaaattattacaaatccagaaggcgctcgtacaacaccatctgttgtatcattcaaaaatggtgaaatccaagttggtgaagttgctaaacgtcaagcaatcactaacccagatacaatcgcatcaatcaaacgtcacatcggcgaagcaggttacaaagtaactgttggcgacaaatcatatacaccacaagaagtttcagcaatgatcttacaatacattaagaaattcgctgaagattatcttggtgaagaagtcacagaagctgttatcacagtacctgcttacttcaacgattcacaacgtcaagctactaaagatgctggtaagattgccggcttagatgttaaacggattatcaacgaaccaacagcttcagctttagcttacggtttggacaagacagaaacagacgaaaaagtcttagtttatgaccttggtggtggtacttttgacgtttctgttcttgaattaggcgatggtgtcttccaagtattatcaacaaatggtgatacacgtttaggtggggacgattttgatgaagcaatcatgaactggttagttgaaaacttcaaatcagacaatggtatcgacttatcaaaagataagatggctatgcaacgtctaaaggatgctgctgaaaaagctaagaaagatttatcaggtgtatcaagcacacaaatcagcttgccatttatctcagctggcgaaaacggtcctttacatttagaaatgacattgtcacggactgaattcgatcgtttaacatcagacttagttgatcgtacaaaagcaccagttatgaatgctttgaaagatgctggcttagatgcaaacgaaatcgacaaagttatcttaaacggtggttcaacacggattcctgctgttcaagaagctgttaagaactggacaggcaaagaacctgatcactcaatcaaccctgacgaagctgttgcacttggtgctgctgttcaaggtggcgttatctcaggtgacgttaaagacgttgttttacttgatgttacaccattatcattagggattgaaacaatgggcggtgtcttcacgaagttaatcgaccggaatacaaccattcctacaagcaaggcccaaacattctcaactgctgctgacaaccaacctgccgtagacatccatgtcttacaaggtgaacgtccaatggctgctgacaacaagactttaggtcgtttccaattaacagatattcctgctgcacctcgtggtgtgccacaaatcgaagttaagtttgatattgataagaacggtattgttaacgtttctgctaaagatcttggcacaaacaaagaacaaaaaatcactatcaagagtaactctggtttatcagacgaagaaatcgatcgtatgatgaaagaagcacaagaaaacgaagaagcagatacaaaacgtaaagaagaagttgatttgaagaatgatgttgatcaattaatcttccaaacagataagactttgaaagaacttgaaggtaaagtttctgacgaagaattacaaaaagcaaaagatgctaaagaagaattagttaaagcacaacaagaaaacaaccttgaagacatgaagacaaaacgcgatgcgttaagtgaaattgttcaagaattgacagttaagttatatcaacaagcccaagaagcacaacaagctgctggtggtgctgaaggtaacgcaactgatgctaagactgatgacggtactgttgacggcgacttcgaagaagttaaagacgacaaagaataa

SEQ ID NO: 48829 - protein, 613 aa, Lactobacillus sakei
MSKVIGIDLGTTNSAVAVLEGGQPKIITNPEGARTTPSVVSFKNGEIQVGEVAKRQAITNPDTIASIKRHIGEAGYKVTVGDKSYTPQEVSAMILQYIKKFAEDYLGEEVTEAVITVPAYFNDSQRQATKDAGKIAGLDVKRIINEPTASALAYGLDKTETDEKVLVYDLGGGTFDVSVLELGDGVFQVLSTNGDTRLGGDDFDEAIMNWLVENFKSDNGIDLSKDKMAMQRLKDAAEKAKKDLSGVSSTQISLPFISAGENGPLHLEMTLSRTEFDRLTSDLVDRTKAPVMNALKDAGLDANEIDKVILNGGSTRIPAVQEAVKNWTGKEPDHSINPDEAVALGAAVQGGVISGDVKDVVLLDVTPLSLGIETMGGVFTKLIDRNTTIPTSKAQTFSTAADNQPAVDIHVLQGERPMAADNKTLGRFQLTDIPAAPRGVPQIEVKFDIDKNGIVNVSAKDLGTNKEQKITIKSNSGLSDEEIDRMMKEAQENEEADTKRKEEVDLKNDVDQLIFQTDKTLKELEGKVSDEELQKAKDAKEELVKAQQENNLEDMKTKRDALSEIVQELTVKLYQQAQEAQQAAGGAEGNATDAKTDDGTVDGDFEEVKDDKE

SEQ ID NO: 48830 - DNA, 2178 bp, Lactobacillus sanfranciscensis
  CDS (57)..(1901): transl_table=11
tagttataactattaattaattaaataaaaaaataaatttaaagaaggtatttaaaatggcaagtaataaagttattggtattgatttaggtactacaaactctgcagttgctgtaatggaaggtggaaaaccaaaaatcatcactaatcctgatggttcaagaaccactccttcagtagttgcttttaagaatggtgaaattcaagttggtgaagtggcaaaacgtcaagaaatcactaaccctaatactgttcgttcaattaagagtcacatgggtgaagaaggatacacagttgacattgatggtaaaaaatacacaccacaacaaatttctgcaatgattcttcaatacatcaaaggttatgctgaagattaccttggtgatacagttagtgaagcagttattacagttcctgcttactttaatgatgcccaacgtcaagctactaaagatgctggtaagattgctggattagacgttaaacggattattaacgaacctactgctgctgcattggcatacggtttggataaacaagataaagacgaaaaaattcttgtttatgatttaggtggaggtacttttgatgtatctgttcttgaattaggtgacggtgttttccaagttctttcaactaatggtgatactcatcttggtggggacgactttgaccaaagaatcattgattacttggttgctgaattcaagaaagaaaacggtgttgacttagctcaagataagatggctttacaacgtttgaaagatgctgctgaaaaagctaagaaagaactttcaggtgttaaccaaactgaaatcagtcttccatttatcgcatcaaacgataatggccctcttcatttacaaactacgcttactcgtgctaagttcaatgaattaactcatgacttagttgaaaaaactaagattccatttgaaaatgctttgaaagatgctggtttgagtactagtgatattgacgaagttatcttaaatggtggatcaactagaattcctgccgttcaagaagcagttaaggaatggtctggtaaagaacctaaccactcaattaaccctgatgaagcggttgctttaggtgctgctgttcaaggtggtgtgcttactggtgatgttaaagacgttgttttacttgacgttactccattgtcattaggtattgaaacaatgggtggtgtcatgactaagttaatcgaaaagaacacgactatcccaacttcaaaatcacaaactttctcaactgctgcagataaccaaactgctgtagatattcatgtcttacaaggtgaacgtccaatggctgcagataacaaatcattgggtcgtttccaattgactgacattcctgcagctcctcgaggaattccacaaatcgaagttacatttgatatcgataaaaatggtatcgtaaatgtatctgctaaagataaaggaactggtaaggaacaaaagattactatcaaggattcgaatggtctttctgatgaagaaatcgaaaagatgatgaatgaagccaaagctaacgaagaagcagataagaagaaaaaagaagaagttgacttaaacaatgaagttgaccaattgatcttccaaactgataaaactttgaaagacgttgaaggtaaagtttctgaagacgaaatcaaaggggttaaagacgctgaagaagaattaaagaaagctaaagctgatggtaaccttgatgatatgaaagctaagaaagatactttgaacgaaaaagttcaagctgttgccgttaagttatatcaacaacaacaatctcaaggtggagaagccggtgctgctaatggtgatgcatctaagaaagatgacaacactgttgatggtgacttccacgaagttcatgatgacgataaaaaataatctgattcaaaagtagtaaaaatttacaaaaagccaaagccacttcggttggctttggctttttgtaattaaattaaagtggaggttatcatggctgataaaaattattatgatattttaggaatttctaaagatgccaccgataaagatattagtcacgcatatcgacatctatcaaagaaatatcatccagatattaataaagaacctggagcagaagcaaaatttaaagaaattacagaagcttatgaagctttaagcgataaacaaaaacggg

SEQ ID NO: 48831 - protein, 614 aa, Lactobacillus sanfranciscensis
MASNKVIGIDLGTTNSAVAVMEGGKPKIITNPDGSRTTPSVVAFKNGEIQVGEVAKRQEITNPNTVRSIKSHMGEEGYTVDIDGKKYTPQQISAMILQYIKGYAEDYLGDTVSEAVITVPAYFNDAQRQATKDAGKIAGLDVKRIINEPTAAALAYGLDKQDKDEKILVYDLGGGTFDVSVLELGDGVFQVLSTNGDTHLGGDDFDQRIIDYLVAEFKKENGVDLAQDKMALQRLKDAAEKAKKELSGVNQTEISLPFIASNDNGPLHLQTTLTRAKFNELTHDLVEKTKIPFENALKDAGLSTSDIDEVILNGGSTRIPAVQEAVKEWSGKEPNHSINPDEAVALGAAVQGGVLTGDVKDVVLLDVTPLSLGIETMGGVMTKLIEKNTTIPTSKSQTFSTAADNQTAVDIHVLQGERPMAADNKSLGRFQLTDIPAAPRGIPQIEVTFDIDKNGIVNVSAKDKGTGKEQKITIKDSNGLSDEEIEKMMNEAKANEEADKKKKEEVDLNNEVDQLIFQTDKTLKDVEGKVSEDEIKGVKDAEEELKKAKADGNLDDMKAKKDTLNEKVQAVAVKLYQQQQSQGGEAGAANGDASKKDDNTVDGDFHEVHDDDKK

SEQ ID NO: 48832 - DNA, 1941 bp, Leptospira interrogans
  CDS (1)..(1941): transl_table=11
atgtccaaagaaaaaattataggtatcgatttaggaactactaactcggtcgtttccgtgatggaaggtggagacccggtcgttattcaaaactcagaaggagcaagaactactccttcgatcgtagcatttaccgcaaaaggagaaactctaatcggtcagttcgcaaaaaaccaagcgattacgaacgcggtaaatacgatccgttccgcaaaacgttttataggacgtagattgaacgaatgcgaatcggaaatgaaacacgtttcctacaaagtcattcgttccggaaacgaaggagttaaatttgaaacctccgcaggagaattcactccccaagaaatttccgctcgtgtactcatgaaaatgaaacaaaccgcggaagattatctcggtcaaaaagtgactaaagcggtaattaccgttccggcttatttcaatgacgaacaacgtcaagcaaccaaagacgcgggaagaattgctggtttggaagtggaaaggatcatcaacgaaccaaccgcagccgctcttgcttacggctttgataagaaaaatgtaaattctaaaattgcggtttatgacctcggaggtggaacgttcgacatttccattttggaactcgcggatggtgtttttgaagtaaaatccacaaacggagatactcatctcggaggagatgacttcgatatggcgatcatggaatggatgatttccgaatttaagaatcaaactggaatcgacatttccgctgataagaatacagttcaaaggttaaaagaagccgctgaaaaagcaaaaattgaactttccggaacgatgtccactcagatcaatcttccatttatcactgcggacgcttctggcccaaaacatttagacatgactcttactagagctaagttcgatcagcttacaaaatctcttgtggatcgtactcgtattccttgcgagaacgcacttcgtgacgcaggcctaaaagcttccgatattaatgaagtgattttagttggtggttcgatccggattcccgcagttcaagaattggttaaacaagtttttggtaaagagccaaataaatccgtaaacccagacgaagtagtagcaatcggagcagcaattcaaggtggggtcttagcgggagaagtttcagatgttcttcttttagacgtaacccctctttcacttggaatcgaaactcttggaggagtgatgaccaagttgattgaaagaaacactacaattcctacgaaaaaatcacaagtgttctctactgctgcggataaccaatccgcagtatcgatccacgttctacaaggtgaaagagaaatggcttctgcaaatagaacgctcggacgttttgatctgatcggaattccacccgcaccgagaggagttcctcaaatcgaagtgacctttgacatagatgcaaacggaatcgttcacgtatcggcaaaagatcttggaaccggtaaggaacaaaagatcagaatcgaatcttcctccggattatccgaagatgaaattcaaaagatggtcaaggacgcggaagcgcacgcagccgcagataaggcccaaagagaagtgatcgaagcaaagaacgaattagatacccttacgtattctcttgaaaaaaccgtaaacgaagcgggagataaaattggcgcgaatgaaaaacaactcgcaaccgacgaaatcaaacgcgcaagagaagcaattgaaagtaacgataaagcaagaatagaatccgcaaaggcttctatttctaaaatcgctaccgatattgcgagtaaagtctattcgcaaagtgccccgggagcagaacaagccgctgcaggaggccccaatggtagtgctggttcgaacgatcaaggcaactccacgaacaacggagaaaaggtcgtcgacgcagattataccgtagtagacgatgagaaaaaataa

SEQ ID NO: 48833 - protein, 646 aa, Leptospira interrogans
MSKEKIIGIDLGTTNSVVSVMEGGDPVVIQNSEGARTTPSIVAFTAKGETLIGQFAKNQAITNAVNTIRSAKRFIGRRLNECESEMKHVSYKVIRSGNEGVKFETSAGEFTPQEISARVLMKMKQTAEDYLGQKVTKAVITVPAYFNDEQRQATKDAGRIAGLEVERIINEPTAAALAYGFDKKNVNSKIAVYDLGGGTFDISILELADGVFEVKSTNGDTHLGGDDFDMAIMEWMISEFKNQTGIDISADKNTVQRLKEAAEKAKIELSGTMSTQINLPFITADASGPKHLDMTLTRAKFDQLTKSLVDRTRIPCENALRDAGLKASDINEVILVGGSIRIPAVQELVKQVFGKEPNKSVNPDEVVAIGAAIQGGVLAGEVSDVLLLDVTPLSLGIETLGGVMTKLIERNTTIPTKKSQVFSTAADNQSAVSIHVLQGEREMASANRTLGRFDLIGIPPAPRGVPQIEVTFDIDANGIVHVSAKDLGTGKEQKIRIESSSGLSEDEIQKMVKDAEAHAAADKAQREVIEAKNELDTLTYSLEKTVNEAGDKIGANEKQLATDEIKRAREAIESNDKARIESAKASISKIATDIASKVYSQSAPGAEQAAAGGPNGSAGSNDQGNSTNNGEKVVDADYTVVDDEKK

SEQ ID NO: 48834 - DNA, 1842 bp, Listeria monocytogenes
  CDS (1)..(1842): transl_table=11
atgagcaaaattatcggaattgacttaggaacaacaaactctgcagtagcagtattagaaggcggagaagctaaaattatccctaacccagaaggcgcacgtacaacaccttctgtagttggtttcaaaaatggcgaacgccaagtaggtgaagtagcgaaacgtgctgcaatcactaacccaaatacaattagttccattaaacgtcatatgggtactaactataaagaaacaatcgaaggaaaagattattctccacaagaaattagtgcaatcattttgcaatacctaaaaagttatgcagaagactaccttggcgaaactgtagataaagcagttatcacagtcccagcttacttcaatgatgcacaacgtcaagcaacaaaagacgctggtaaaatcgctggtcttgaagtagaacgtattattaacgaaccaactgcagcagcacttgcttacggtatggataaaacagaaacagaccaaacaattctagtatttgaccttggtggtggtacgtttgacgtatctatccttgaattaggtgacggcgtatttgaagtacactcaactgctggtgacaatgaattaggtggagatgacttcgataaaaaaatcatcgactatctagtagcagaattcaaaaaagacaatggtattgacttaagccaagataaaatggcacttcaacgtttgaaagatgcagctgaaaaagcgaaaaaagatctttctggtgtaacaagcacacaaatctccttaccatttatcacagctggagaagctggtccacttcacttagaagtaacccttactcgtgctaaatttgatgaactaacacatgacttagttgaacgtactattgcgccaactcgtcaagcattaaaagatgcaaacctatctgcaagcgatattgaccaagtaattctagttggtggatctactcgtattcctgcagttcaagaaacaatcaaaaaagaattaggcaaagaacctcataaaggtgtaaacccggatgaagttgtagcaatgggtgctgcaattcaaggtggcgtaatcactggtgatgtaaaagacgttgtactacttgacgtaactccattatcccttggtattgaaacaatgggtggcgttatgactacacttatcgaacgtaatacaactatcccaacatctaaatcacaaactttctctacagcagctgataaccaaccagccgtagatattcatgtacttcaaggtgaacgtccaatggcaaaagacaacaaaacattaggtcgtttccaattagcggatattccgccagcaccacgcgggatccctcaaatcgaagtatcatttgatatcgacaaaaatggtatcgtaacagttcgcgcgaaagaccttggaactggtaaagaacaaaacattgttattaaatcttcttcaggtttaacagacgaagaaattgaaaaaatggttcaagatgctgaagctaatgctgaagaagataaaaagaacaaagaaaacgctgaacttcgcaacaatgcagaccaattagtattcactgtagataaaactttgaaagaattagaaggcaaagtggaagaagaagaagtgaaaaaagcagaagcagctcgcgatgagctacaagaagcgcttaaaggtgaagatttcgatgctatcaaagaaaaaacagaaagcttaaacgaaatcgttcaaaatctatctgttaaattatacgaacaagctgcagcagaacaacaagcggcaggcggcgcagaaggtcaagaagctcctcaaaatgacgacgtagtagacgctgaatttgaagaagtaaatgacgacgacaaagaaaacaaataa

SEQ ID NO: 48835 - protein, 613 aa, Listeria monocytogenes
MSKIIGIDLGTTNSAVAVLEGGEAKIIPNPEGARTTPSVVGFKNGERQVGEVAKRAAITNPNTISSIKRHMGTNYKETIEGKDYSPQEISAIILQYLKSYAEDYLGETVDKAVITVPAYFNDAQRQATKDAGKIAGLEVERIINEPTAAALAYGMDKTETDQTILVFDLGGGTFDVSILELGDGVFEVHSTAGDNELGGDDFDKKIIDYLVAEFKKDNGIDLSQDKMALQRLKDAAEKAKKDLSGVTSTQISLPFITAGEAGPLHLEVTLTRAKFDELTHDLVERTIAPTRQALKDANLSASDIDQVILVGGSTRIPAVQETIKKELGKEPHKGVNPDEVVAMGAAIQGGVITGDVKDVVLLDVTPLSLGIETMGGVMTTLIERNTTIPTSKSQTFSTAADNQPAVDIHVLQGERPMAKDNKTLGRFQLADIPPAPRGIPQIEVSFDIDKNGIVTVRAKDLGTGKEQNIVIKSSSGLTDEEIEKMVQDAEANAEEDKKNKENAELRNNADQLVFTVDKTLKELEGKVEEEEVKKAEAARDELQEALKGEDFDAIKEKTESLNEIVQNLSVKLYEQAAAEQQAAGGAEGQEAPQNDDVVDAEFEEVNDDDKENK

SEQ ID NO: 48836 - DNA, 1854 bp, Methanosarcina acetivorans
  CDS (1)..(1854): transl_table=11
atggcaaagatactgggtatagatcttggtactactaattcgtgtatggcagtgatggaaggcggggacgctgtcgtgctcccgaatgccgaaggaagcagaacgactccttcagttgttggattctccaagaaaggggagaaacttgtgggccaggtcgcaaagcggcaggcaatttcaaaccctgagaacactgtttattccattaaaaggcacatgggagaagccaattacaaagtcactcttaacggaaaaacatacaccccgcaggaaatttctgcgatgatcctccaaaagctcaaaacggaagcagaggcttatctcggagagacaataaaacaagctgttattacagttcctgcttatttcaacgatgcgcagaggcaggctacaaaggatgcaggttcgattgcaggacttgaagtcctgagaatcataaatgaacccacagccgcatccctggcttacgggcttgacaaaggagatgtggaccagaagatccttgtctacgatctcggtggcgggacctttgacgtatccatccttgagctcgggggcggggtctttgaggtaaagtctacaagtggagacactcaccttggcggagatgacttcgaccagcgcgttatcgatcacctgctcgcagaatttaagaaaaccgaaggaattgacctttccaaagataaagctatcctccagcgcctgaaagacgctgctgaaaaagcaaagatcgagctttctggggtcaccgtaactaacatcaatctccccttccttacagtcggacctgacggggaaccaaaacacatggacatagacctgaccagagcccagttccagaagatgactgaggatctcctggaaaagaccctcgtatccatgcgccgcgccctcagcgattcaaagcttacgccaaatgaccttgacaaagtgatccttgtaggaggcgcgacaaggatgcctgccgtggtcgaacttgtggagaactttacaggcaagaagccctacaagaacatcaaccctgatgaggcagttgcaatcggtgcagccattcaggcaggagtgctgggcggagaagtaaaagatgtccttctgctcgacgttaccccccttaccctgggtatcgaaacccttggaggcattgcaaccccgcttatccagaggaacaccaccattccgaccaaaaagagccagatcttctcaaccgctgctgacaaccagccctcggtcgagatccatgtcctgcagggagagcgcggaattgcttctgaaaacaaaactcttggcaggttcacccttgacggtatacccccggctccgagaggcattcctcagatcgaggttgcctttgacattgatgcaaacgggattctgcacgtgaatgcaaaggacctgggcacaggaaaggaacagtccatttccatccagaaaccaggcggactttccgatgcagaaatcgagcgcatggttaaggacgcggaactccacgccgaagaagacaagaagcgcaaggaagaagtcgaaaccagaaacaacgccgaagccctgatcaatgccgcagaaaagactatcaaggaagccggcgatgtagctaccgaagaccagaagtcaaaagtcaatgctgcaatcgaagacctgaagaaagcccttgaaggcaaggacaccgaagaagtcaaggcaaagacagaagctcttcaggaagccgtatacccgatttcgacggccatgtaccagaaagcccagcaggaggctcaacaggcttcaggtgaagcgggcagcgctgatgcaaggggtcctgatgagaccgtcgttgacgccgactacgaagtagttgacgacgaaaagcgtaagtaa

SEQ ID NO: 48837 - protein, 617 aa, Methanosarcina acetivorans
MAKILGIDLGTTNSCMAVMEGGDAVVLPNAEGSRTTPSVVGFSKKGEKLVGQVAKRQAISNPENTVYSIKRHMGEANYKVTLNGKTYTPQEISAMILQKLKTEAEAYLGETIKQAVITVPAYFNDAQRQATKDAGSIAGLEVLRIINEPTAASLAYGLDKGDVDQKILVYDLGGGTFDVSILELGGGVFEVKSTSGDTHLGGDDFDQRVIDHLLAEFKKTEGIDLSKDKAILQRLKDAAEKAKIELSGVTVTNINLPFLTVGPDGEPKHMDIDLTRAQFQKMTEDLLEKTLVSMRRALSDSKLTPNDLDKVILVGGATRMPAVVELVENFTGKKPYKNINPDEAVAIGAAIQAGVLGGEVKDVLLLDVTPLTLGIETLGGIATPLIQRNTTIPTKKSQIFSTAADNQPSVEIHVLQGERGIASENKTLGRFTLDGIPPAPRGIPQIEVAFDIDANGILHVNAKDLGTGKEQSISIQKPGGLSDAEIERMVKDAELHAEEDKKRKEEVETRNNAEALINAAEKTIKEAGDVATEDQKSKVNAAIEDLKKALEGKDTEEVKAKTEALQEAVYPISTAMYQKAQQEAQQASGEAGSADARGPDETVVDADYEVVDDEKRK

SEQ ID NO: 48838 - DNA, 1863 bp, Methanosarcina barkeri
  CDS (1)..(1863): transl_table=11
atggcaaaaatacttggtattgaccttggtactacgaactcatgcatggcagtaatggaaggcggagaagctgtcgtgattccaaatgccgaaggcgccagaacaaccccatcagtggtcggattttccaaaaaaggagagaaacttgtaggacaggttgcaaagaggcaggccatttcgaatcctgaaaatactgtttattccattaaaaggcatatgggagatgccaattacacggtgactcttcagggaacacagtataagccgcaggaaatttctgcaatgattcttcagaagctcaagaccgatgcagaagcttatcttggagagactatcaaacaggctgttatcacggttcctgcttatttcaatgacgcccagagacaggctacaaaggacgcaggggcaattgcaggccttgatgtcctgagaattatcaatgaaccaacttccgcatccctggcttatggtctcgataagggagatatagaacaaaaaattcttgtttatgacctgggtggcggaacctttgatgtatctattctcgaactcggaggcggagtctttgaggtgaaatctacaagtggtgacactcgccttggaggagatgacttcgaccagcgtatagttaattacttacttgctgagttcaggaaaatcgagggaatcgacctctccaaagacaaggctgtactccagcgtttaactgatgctgcggaaaaagccaagatcgagctgtctggagttgcaagtacaaatatcaaccttcccttcctaacagttggtgcggacggagaaccaaagcaccttgatattgacctgacaagagctcagttccagaagatgactgaggacctccttgaaaagacccttgtatctatgcgccaggctctcagcgatgcaaagcttactccaaatgatcttgacaaagtgattctcgtcggaggtgccacaaggatgcctgcagtagtcgagcttgtggaaaactttacaggcaaaaagccctacaagaacatcaaccctgatgaagccgttgcaattggagcagccatccaggccggtgtgctcggtggcgaagtcaaagatgtcctgctgcttgatgtcactcctctgactctcggaatagaaacgctcggaggtatagcaaccccacttatcccgagaaacacgacaattcctaccaagaaaagtcaggttttctcaactgctgctgataaccagccttcagtagagattcatgtccttcagggagaaagaggagttgcttccgaaaacaagactctcggtcgctttactctggacggtataccaccagctccaagaggcatcccgcagattgaagttacatttgatatcgacgcaaacggaatcctgcatgtaggtgcaaaagacctcggaaccggtaaggaacagtccatttccatccagaagccgggtggtctctcggatgacgaaatcgatcgcatggtcaaagacgcggaattgcatgctgaagaagacaaaaagcgcaaagaagatgtcgaaaccaggaacaatgccgaagccctgatcaatgctgcggaaaagactttgaaggaagccggagatgcggcaaccgaagaccagaagtcaaaggtaactgccgcaatcgacgaccttaagaaagctcttgaaggtaaggacagcgaagatattaaatcaaaaaccgaagctcttcaggaagccgtatacccaatttccactgcaatgtaccagaaagcccagcagcaggctcagcaagcccagcaggctgaaggtgaagcaggaagccatgatgcacaaggtcctgatgagacagtcgttgatgccgattatgaggtagttgacgacgaaaagcgtaaataa

SEQ ID NO: 48839 - protein, 620 aa, Methanosarcina barkeri
MAKILGIDLGTTNSCMAVMEGGEAVVIPNAEGARTTPSVVGFSKKGEKLVGQVAKRQAISNPENTVYSIKRHMGDANYTVTLQGTQYKPQEISAMILQKLKTDAEAYLGETIKQAVITVPAYFNDAQRQATKDAGAIAGLDVLRIINEPTSASLAYGLDKGDIEQKILVYDLGGGTFDVSILELGGGVFEVKSTSGDTRLGGDDFDQRIVNYLLAEFRKIEGIDLSKDKAVLQRLTDAAEKAKIELSGVASTNINLPFLTVGADGEPKHLDIDLTRAQFQKMTEDLLEKTLVSMRQALSDAKLTPNDLDKVILVGGATRMPAVVELVENFTGKKPYKNINPDEAVAIGAAIQAGVLGGEVKDVLLLDVTPLTLGIETLGGIATPLIPRNTTIPTKKSQVFSTAADNQPSVEIHVLQGERGVASENKTLGRFTLDGIPPAPRGIPQIEVTFDIDANGILHVGAKDLGTGKEQSISIQKPGGLSDDEIDRMVKDAELHAEEDKKRKEDVETRNNAEALINAAEKTLKEAGDAATEDQKSKVTAAIDDLKKALEGKDSEDIKSKTEALQEAVYPISTAMYQKAQQQAQQAQQAEGEAGSHDAQGPDETVVDADYEVVDDEKRK

SEQ ID NO: 48840 - DNA, 1926 bp, Methylococcus capsulatus
  CDS (1)..(1926): transl_table=11
atggcaaagattatcgggatcgacctgggcaccaccaactcgtgtgtggccatcctcgagggcggcaagccccgcgtgatcgagaattccgaaggtgcacgcaccaccccctcgatcgtcgctttcactgcggacaacgaggtgttggtggggcagtccgccaagcggcaggccatcaccaatccgaagaacaccttgtttgcgataaagcggctgatcggtcgtcgctacaaggatgacgtcgtccagaaagacatcaagatggtgccttatacgatcgtcgaagcggagaacggcgacgcctgggtggaggtcggcggaaagaagatggcgccaccggagatttcggcgcgcgtgctgatgaagctcaagaaggacgcagaagcctatctgggtgaagaagtcaaggaagcggtcatcaccgtgccggcgtatttcaacgactctcagcgccaggccaccaaggacgccggccgtatcgccggtctggatgtcaagcgcatcatcaatgagccgaccgcggcagcgctggcctatggtatggacaagagccgcggcgaccagaagatcgcggtctacgacctgggtggcggcactttcgacatctccatcatcgagatcgccgaagtcgacggcgagcatcagttcgaggtgctgtcgaccaacggcgataccttcctcggcggcgaagacttcgatctgcgcatcatcgaatacatcgtagacgagttccgtaaggaacagggcatcgatctgcacaacgatccgctggcgctgcaacgcctgaaggagtctgccgaaaaggccaagatcgagctgtcgtccagccagcagaccgagatcaacctgccctacatcacggcggatgcgaccgggcccaaacacctcaacgtcaagctcacccgggccaagctggaggcgctggtggaggatctgatcctgcgcacccgcggtccttgtgaaaccgcgctgaaggatgccggtttgaagtcggccgacatcgatgaagtcatcctggtcggcggtcagacccggatgcccaaagtgcaggagttcgtcaaggaaatcttcggcagggagccgcgtaaggacgtcaatccggatgaggccgtggcggtcggcgccgccattcaggccggcgtgctcggtggccaggtgaaggatgtgctgttgctggatgtgacccccttgtccctgggtatcgagaccctgggcggcgtcatgaccaaattgatcgaaaagaacaccacgatcccgaccaaggccacacaggtgttttccaccgccgaggacaaccagacggccgtgaccatccatgtgttgcagggtgagcgtgaaatggcccgtgacaacaagtcgctggggcgtttcgacctgagcgacatcccgatggcaccgcgcggcgtgccgcagatcgaggtgactttcgacatcgatgccaacggcatcctgaacgtctcggccaaggacaaggcgacaggcaaacagcagtccatcgtcatccgcgcctccagcggcctgtccgaggacgagatcaagcggatggtgaaggatgccgaactgcacgcggaagaagaccgccgcatgcacgagctggtcagcgcgcgcaatcacgccgatgccgtggtccacgccaccaacaagacactcgccgaactgggcgacaaggtctccggcgaggagcgggcgaaaatcgaagcggccctgaacgacctgaaggatgccatgggcggtgacaacaaggatctgatcgagcagcggaccagcgcgttgaccgaactctccggcaagcttgccgaacggctctatacccagcagggcggcacggcaggcagtgaaacgcacagccacgaaaaggctggcgggtcgggcggcgatgacgtcgtcgacgccgagtttgaggaagtccgcgacgacaagcgttga

SEQ ID NO: 48841 - protein, 641 aa, Methylococcus capsulatus
MAKIIGIDLGTTNSCVAILEGGKPRVIENSEGARTTPSIVAFTADNEVLVGQSAKRQAITNPKNTLFAIKRLIGRRYKDDVVQKDIKMVPYTIVEAENGDAWVEVGGKKMAPPEISARVLMKLKKDAEAYLGEEVKEAVITVPAYFNDSQRQATKDAGRIAGLDVKRIINEPTAAALAYGMDKSRGDQKIAVYDLGGGTFDISIIEIAEVDGEHQFEVLSTNGDTFLGGEDFDLRIIEYIVDEFRKEQGIDLHNDPLALQRLKESAEKAKIELSSSQQTEINLPYITADATGPKHLNVKLTRAKLEALVEDLILRTRGPCETALKDAGLKSADIDEVILVGGQTRMPKVQEFVKEIFGREPRKDVNPDEAVAVGAAIQAGVLGGQVKDVLLLDVTPLSLGIETLGGVMTKLIEKNTTIPTKATQVFSTAEDNQTAVTIHVLQGEREMARDNKSLGRFDLSDIPMAPRGVPQIEVTFDIDANGILNVSAKDKATGKQQSIVIRASSGLSEDEIKRMVKDAELHAEEDRRMHELVSARNHADAVVHATNKTLAELGDKVSGEERAKIEAALNDLKDAMGGDNKDLIEQRTSALTELSGKLAERLYTQQGGTAGSETHSHEKAGGSGGDDVVDAEFEEVRDDKR

SEQ ID NO: 48842 - DNA, 3550 bp, Methanosarcina mazei
  CDS (301)..(2160): transl_table=11
accgaatcattactgaatttgttaaattaaccgaattaatggaaataaccggctaaaccaaagaattgatggaaataaccggctaaaccaaagaattgatggaaataaccggctaaaccaaagaattgatggaaataaccggctaaaccaaagaattaatggtctgcttaagtaaacctgtcaggtatctttaccgatcatctggctggaaattaaactttaattaatctataactacaatttacaaacctatcagataactaagtataatttaattgatattaactatgaggatataacatggcaaagatactgggtattgaccttggtactaccaactcatgtgtggcagtaatggaaggcggggaagctgtcgttatccctaatgccgaaggcagcaggacaactccttcagttgtggggttctccaagaaaggtgagaaacttgtgggtcaggtcgcaaagcggcaggccatttcgaacccggataatactgtatattccataaaaaggcacatgggagaagccaattacaaagtcacgcttaacggaaaagattataccccgcaggaaatttccgcgatgatcctccagaagctgaaagcagatgctgaagcttatctcggagagacaatcaaacaggctgtcattacggtccctgcttacttcaacgattctcagaggcaggctacaaaagacgcaggagcaattgcagggcttgaagtcctcagaattataaacgagcctacagctgcatctcttgcttacggcctcgataaaggagacatagaccagaagattcttgtctacgaccttggaggcggaaccttcgatgtatccatcctggaactgggaggcggggtctttgaggtgaagtccacaagtggagacacccacctcggaggagacgacttcgaccagcgcgttatcgattacctgcttgcagaatttaagaaatcggaaggaatcgacctctccaaagacaaggcagtactccagcgccttaaagatgctgctgaaaaagccaaaatcgagctttccggagtcgcaaacacaaacatcaacctccccttcctgacagttggcactgacggggaaccaaaacacatggacatcgaccttaccagagcccagttccagaaaatgactgaggacctcctggaaaagaccctcgtatccatgcgccgtgcactcagcgatgcaaagcttacaccaaacgaccttgacaaagtaatccttgtcggaggcgcaacaaggatgcctgcagtggtcgaacttgtggaaaacttcacaggaaagaagccctacaagaacatcaaccctgacgaggcagttgcaataggtgcagcaattcaggcaggagtcctgggcggagaggtaaaagatgtccttctgctcgatgtcactccccttaccctgggtatcgagacccttggaggcattgcaactccgttaatccagagaaacaccaccattccgaccaaaaagagccagattttctcaactgccgctgacaaccagccctcagtcgagatccacgtccttcagggagagcgtggaattgcttccgaaaacaagactcttggaaggtttattcttgacggcatacccccggctccaagaggtatcccgcagattgaggttactttcgatatcgacgcaaacggcattctgcacgtaagcgcaaaggacttaggcacaggcaagcagcagtccatctccatccagaaacccggcggactttccgatgacgaaatcgagcgcatggtcaaggacgcagaaatgcatgccgaagaagacaggaagcggaaagaggaagtcgagataaggaacaatgccgaggctcttatcaatgccgcagaaaaaactattaaggaagcaggagacctcgcaaccgaggaccagaagtcaaaagtcaatgccgcaattgaagacctgaagaaagcccttgaaggcaaggacgcagaagatattaaagcaaaaaccgaggcccttcaggaatccgtatacccgatctccacagccatgtaccagaaagcccagcaggcccagcaggctgcaggaggagaaggtggagcagccggcactgatgcaagaggcccggatgaaaccgttgttgacgctgactacgaagtagttgacgacgaaaagcgtaagtaattgaagaagaattagagtacagaaataaagcctgggaattctcaggcattgccggaaacctgttcacaggttccgtctcctttatttttttaaaacaacagggaatcctgatggctaccaaacgtgattattacgaaattctcggattatccaaagactcttcagtcgaagatataaagaaaacataccggaagcttgccctgcagtaccaccctgacaggaacaaagaacccggggctgaggagaaattcaaggaaatatctgaggcttacgccgttctttcagatgcagaaaaaagggctcagtacgaccgcttcggacatgcagggatagataaccagtacagtgcagaggacatcttccggggtgcggacttcggcgggttcggagacatttttgagatgtttttcggaggcggcagaaggggaggtcctatgggccccaggagaggttccgatcttcagtacgacctctatgtaacctttgaagaagctgcttttggagtgcgcaaggacatagatattccaaggacagaaaggtgttctacctgctcaggcacaggagcaaagccgggcacaagcccgaagcgctgccctaactgcggcggcacggggcaggtccgtacaacccgctcaaccctgggaatgcagtttgtaagcaccacgacgtgcagcgcctgtcacggcaggggtcaggtagttgaatctccatgccccacatgtagcggcgcgggcagggtcaggagcaggagaaagatgtcagtcaacgtacctgcaggagcagactctggtatgaccctcaggctcagcggggaaggagatgcaggagaaccgggagcgccttccggagacctttatattatcgtgcatgtgatggaacacaaatatttcaagcgggtcgattacgatgttatctccgaacttccaatatccttcacccaggctgcactcggagcagacattatggttgataccctttacggcaaggtcaaaatgaatattccatcagggacccagacacattccgtattcaggctcaaagataaaggcatacagcgcctgcaaggccacggcaagggtgaccagctcgtaagggtaataatcaggactccaacaaaactcactcaggaacaaaaagaccttcttcatcagttcgaatacctgagcaatgggaagaagcccgaagcagaggaaaggagcagatctgataagcagaaaagcgaaaaacccaggaaaagcaagggacttttcgaaaaggtaaaagatgcctttgaaagttgactataatacctctggctccaatattagccggttctccggtattttctcaggcttctattctttttcccttttcacctttttttgattataattcttcatacaggattctt

SEQ ID NO: 48843 - protein, 619 aa, Methanosarcina mazei
MAKILGIDLGTTNSCVAVMEGGEAVVIPNAEGSRTTPSVVGFSKKGEKLVGQVAKRQAISNPDNTVYSIKRHMGEANYKVTLNGKDYTPQEISAMILQKLKADAEAYLGETIKQAVITVPAYFNDSQRQATKDAGAIAGLEVLRIINEPTAASLAYGLDKGDIDQKILVYDLGGGTFDVSILELGGGVFEVKSTSGDTHLGGDDFDQRVIDYLLAEFKKSEGIDLSKDKAVLQRLKDAAEKAKIELSGVANTNINLPFLTVGTDGEPKHMDIDLTRAQFQKMTEDLLEKTLVSMRRALSDAKLTPNDLDKVILVGGATRMPAVVELVENFTGKKPYKNINPDEAVAIGAAIQAGVLGGEVKDVLLLDVTPLTLGIETLGGIATPLIQRNTTIPTKKSQIFSTAADNQPSVEIHVLQGERGIASENKTLGRFILDGIPPAPRGIPQIEVTFDIDANGILHVSAKDLGTGKQQSISIQKPGGLSDDEIERMVKDAEMHAEEDRKRKEEVEIRNNAEALINAAEKTIKEAGDLATEDQKSKVNAAIEDLKKALEGKDAEDIKAKTEALQESVYPISTAMYQKAQQAQQAAGGEGGAAGTDARGPDETVVDADYEVVDDEKRK

SEQ ID NO: 48844 - DNA, 2200 bp, Methanosarcina thermophila
  CDS (337)..(2169): transl_table=11
aattcgaccctcacaagcacgaagcagttcagcatgtcgaaacctctgaacttccggacaatactatagtagaggtttacaaagccggatacgctcttaactcgaaagttatcaggcctgctatagtctcagtggcaagaaacccaaatgagactaaggaataaaggagattcaggcataattttactcctgtaattctgttatgacctgattcttgaatttaatcgaataacttaccagttaacttaataaataaattaattcaatgacttgtctaagaacttttatctaaatcattaagtgaagaatttaatcaggatctagtgaggataaaacatgggaaaaatactgggtattgaccttggtactactaactcatgcatggcagtaatggaaggcggggaagctgtcgtgatccctaatgccgaaggcgccaggacaaccccgtcagtggttggattttccaaaaaaggggagaaacttgtaggtcaggtcgcaaagagacaggctatttcaaaccctgagaacactgtttactccattaagaggcatatgggagaacccaactacaaggtgacccttcagggaaagcataacacaccgcaggaaatctctgcaatgattctccagaaactcaaagccgatgcagaagcttatcttggagaagaaatcaaacaagctgttattacagttcctgcttatttcaatgacgcccagaggcaggctacaaaggatgcagggacaattgcaggtcttgaagtcctcagaattatcaatgaaccgactgctgcatcccttgcttatggacttgataaaggcgaagttgagcaaactattcttgtctacgaccttggaggcggaacctttgacgtatccattcttgagattggaggcggagtctttgaggtaaaagccacaagcggcgatacccatctcggaggagacgacttcgaccagcgcattgtcaactacttacttgccgaattcaaaaagactgagggaattgatctctcaaaggacagagctgtactccagcgcttaaccgatgctgcagagaaagccaaaatcgaactgtctggtgtcgcaagtaccaatatcaaccttccattccttacagttggtccagatggggaaccaaagcaccttgatattgacctgaccagagcccaattccagaagatgaccgaggaccttcttgagaaaactctcgtttccatgcgccaggctctcagcgatgcaaagcttacgccaaacgatatcgacaaagtaatccttatcggaggcgctacaaggatgcctgcggtagtggagcttgtagagaacttcacaggcaagaaaccctacaagaacattaaccctgacgaagccgttgcaatcggggcagccatccaggctggtgtgctcggaggcgaggtaaaagatatcctgctgcttgatgtcactccactcacccttggaattgagacacttggaggcatagcaactccattgatcccgagaaacacgacaattccgaccaggaagagccagatattctcaacggcagctgataatcagccctcggtagagattcatgtccttcagggagaaaggggaattgcttccgaaaacaaaacccttgggcgttttacccttgacggcatcccaccagctcctagaggcgtcccacagatcgaagttacctttgacattgacgcaaatggtatcctgcatgtgagtgcaaaagatcttggaaccggcagggaacagtctatatccatccagaaaccaggtggactcacagacgccgaaatcgagcgcatgatcaaagacgcagaattgcatgccgaagaagacagaaagcgcaaagaagaagtcgagaccaggaacaatgccgaaaccctgatcaatgctgccgaaaagactctgaaagaagccggagatgtggctacagaggatcagaagtcaaaggtaaacgccgcaattgacgaccttaaaaaagctcttgaaggtaaggacgccgaagagattaaggcaaaaaccgaagctcttcaggaagctatatatccgatctccactgcaatgtatcagaaagccgcccagcaggctcaacaggcagcaggtggagcagcaggacgcacagatgcaaaaggtcctgaagagacggtcgtcgacgcgattatgaggtagttgacgacgaaaagcgtaaataaagaaagag

SEQ ID NO: 48845 - protein, 610 aa, Methanosarcina thermophila
MGKILGIDLGTTNSCMAVMEGGEAVVIPNAEGARTTPSVVGFSKKGEKLVGQVAKRQAISNPENTVYSIKRHMGEPNYKVTLQGKHNTPQEISAMILQKLKADAEAYLGEEIKQAVITVPAYFNDAQRQATKDAGTIAGLEVLRIINEPTAASLAYGLDKGEVEQTILVYDLGGGTFDVSILEIGGGVFEVKATSGDTHLGGDDFDQRIVNYLLAEFKKTEGIDLSKDRAVLQRLTDAAEKAKIELSGVASTNINLPFLTVGPDGEPKHLDIDLTRAQFQKMTEDLLEKTLVSMRQALSDAKLTPNDIDKVILIGGATRMPAVVELVENFTGKKPYKNINPDEAVAIGAAIQAGVLGGEVKDILLLDVTPLTLGIETLGGIATPLIPRNTTIPTRKSQIFSTAADNQPSVEIHVLQGERGIASENKTLGRFTLDGIPPAPRGVPQIEVTFDIDANGILHVSAKDLGTGREQSISIQKPGGLTDAEIERMIKDAELHAEEDRKRKEEVETRNNAETLINAAEKTLKEAGDVATEDQKSKVNAAIDDLKKALEGKDAEEIKAKTEALQEAIYPISTAMYQKAAQQAQQAAGGAAGRTDAKGPEETVVDAIMR

SEQ ID NO: 48846 - DNA, 1878 bp, Mycobacterium bovis
  CDS (1)..(1878): transl_table=11
atggctcgtgcggtcgggatcgacctcgggaccaccaactccgtcgtctcggttctggaaggtggcgacccggtcgtcgtcgccaactccgagggctccaggaccaccccgtcaattgtcgcgttcgcccgcaacggtgaggtgctggtcggccagcccgccaagaaccaggcggtgaccaacgtcgatcgcaccgtgcgctcggtcaagcgacacatgggcagcgactggtccatagagattgacggcaagaaatacaccgcgccggagatcagcgcccgcattctgatgaagctgaagcgcgacgccgaggcctacctcggtgaggacattaccgacgcggttatcacgacgcccgcctacttcaatgacgcccagcgtcaggccaccaaggacgccggccagatcgccggcctcaacgtgctgcggatcgtcaacgagccgaccgcggccgcgctggcctacggcctcgacaagggcgagaaggagcagcgaatcctggtcttcgacttgggtggtggcactttcgacgtttccctgctggagatcggcgagggtgtggttgaggtccgtgccacttcgggtgacaaccacctcggcggcgacgactgggaccagcgggtcgtcgattggctggtggacaagttcaagggcaccagcggcatcgatctgaccaaggacaagatggcgatgcagcggctgcgggaagccgccgagaaggcaaagatcgagctgagttcgagtcagtccacctcgatcaacctgccctacatcaccgtcgacgccgacaagaacccgttgttcttagacgagcagctgacccgcgcggagttccaacggatcactcaggacctgctggaccgcactcgcaagccgttccagtcggtgatcgctgacaccggcatttcggtgtcggagatcgatcacgttgtgctcgtgggtggttcgacccggatgcccgcggtgaccgatctggtcaaggaactcaccggcggcaaggaacccaacaagggcgtcaaccccgatgaggttgtcgcggtgggagccgctctgcaggccggcgtcctcaagggcgaggtgaaagacgttctgctgcttgatgttaccccgctgagcctgggtatcgagaccaagggcggggtgatgaccaggctcatcgagcgcaacaccacgatccccaccaagcggtcggagactttcaccaccgccgacgacaaccaaccgtcggtgcagatccaggtctatcagggggagcgtgagatcgccgcgcacaacaagttgctcgggtccttcgagctgaccggcatcccgccggcgccgcgggggattccgcagatcgaggtcactttcgacatcgacgccaacggcattgtgcacgtcaccgccaaggacaagggcaccggcaaggagaacacgatccgaatccaggaaggctcgggcctgtccaaggaagacattgaccgcatgatcaaggacgccgaagcgcacgccgaggaggatcgcaagcgtcgcgaggaggccgatgttcgtaatcaagccgagacattggtctaccagacggagaagttcgtcaaagaacagcgtgaggccgagggtggttcgaaggtacctgaagacacgctgaacaaggttgatgccgcggtggcggaagcgaaggcggcacttggcggatcggatatttcggccatcaagtcggcgatggagaagctgggccaggagtcgcaggctctggggcaagcgatctacgaagcagctcaggctgcgtcacaggccactggcgctgcccaccccggcggcgagccgggcggtgcccaccccggctcggctgatgacgttgtggacgcggaggtggtcgacgacggccgggaggccaagtga

SEQ ID NO: 48847 - protein, 625 aa, Mycobacterium bovis
MARAVGIDLGTTNSVVSVLEGGDPVVVANSEGSRTTPSIVAFARNGEVLVGQPAKNQAVTNVDRTVRSVKRHMGSDWSIEIDGKKYTAPEISARILMKLKRDAEAYLGEDITDAVITTPAYFNDAQRQATKDAGQIAGLNVLRIVNEPTAAALAYGLDKGEKEQRILVFDLGGGTFDVSLLEIGEGVVEVRATSGDNHLGGDDWDQRVVDWLVDKFKGTSGIDLTKDKMAMQRLREAAEKAKIELSSSQSTSINLPYITVDADKNPLFLDEQLTRAEFQRITQDLLDRTRKPFQSVIADTGISVSEIDHVVLVGGSTRMPAVTDLVKELTGGKEPNKGVNPDEVVAVGAALQAGVLKGEVKDVLLLDVTPLSLGIETKGGVMTRLIERNTTIPTKRSETFTTADDNQPSVQIQVYQGEREIAAHNKLLGSFELTGIPPAPRGIPQIEVTFDIDANGIVHVTAKDKGTGKENTIRIQEGSGLSKEDIDRMIKDAEAHAEEDRKRREEADVRNQAETLVYQTEKFVKEQREAEGGSKVPEDTLNKVDAAVAEAKAALGGSDISAIKSAMEKLGQESQALGQAIYEAAQAASQATGAAHPGGEPGGAHPGSADDVVDAEVVDDGREAK

SEQ ID NO: 48848 - DNA, 1863 bp, Mycobacterium leprae
  CDS (1)..(1863): transl_table=11
atggctcgtgcggtcggcatcgacctcgggaccaccaactccgtcgtctccgttctggagggtggcgaccccgtcgtcgttgccaactccgaggggtcgaggaccactccgtcaactgtcgcgttcgcgcgtaacggcgaggttctcgtcggccaacccgccaaaaaccaggcggttactaacgtcgaccgcaccatccggtctgtcaaacggcacatgggcagtgactggtccatcgaaatcgacggcaaaaaatacaccgcgcaggagatcagcgcccgcgttctgatgaagctgaagagggacgctgaggcttacctcggtgaggacatcaccgatgcagtcatcaccacaccagcctactttaacgacgcccagcgtcaggctaccaaggaagccggccagatcgccggtttaaacgtactgcgtattgtcaacgagccgaccgccgccgctctggcctacggtctagacaagggtgagagagaacaaaccatcctggtgttcgatctgggtggcggcaccttcgatgtttcgttgctggaaatcggcgagggcgtggtcgaagtgcgtgccaccagcggtgacaatcacctcggtggcgacgattgggacgaccgtattgtcaactggctcgtcgacaagttcaagggcactagcggtatcgatctgaccaaggacaagatggctatgcagcggctacgtgaggctgccgagaaggccaagatcgagctcagctcgagccaaagcacctcggttaacttgccctacattaccgtcgattcagacaagaacccgctattccttgacgagcagcttattcgcgccgaattccaacgcatcacccaggatttgctggaccgcacccgtcagccgttccagtcggtggtcaaggacgccggtatttcggtttctgagatcgatcacgtcgtgctggtgggcggttcgacccggatgcctgcggtgaccgatcttgtcaaggaactcactggtggcaaggagcccaataagggtgtcaaccccgatgaggtcgttgctgttggtgctgcgttgcaggccggtgtcctcaagggtgaggtgaaagacgttcttttgcttgatgttacaccactgagcttgggtatcgagaccaagggtggcgtgatgaccaagctcatcgagcgcaataccacgatccccaccaagcgctcagagaccttcactactgccgacgacaatcagccgtcggtgcagatccaagtctaccagggtgagcgcgagatagcttcgcacaataagcttctcggctctttcgagctgaccggtattccaccggctccgcgcggtgtcccgcagatcgaggtcactttcgacatcgacgccaacggcatagttcacgtcactgccaaggacaagggcactggcaaggagaatacgatcaaaatccaggaaggctccgggctgtccaaggaagagatcgatcggatggtcaaggatgctgaggcgcacgctgaggaggaccgcaagcgtcgcgaggaggccgacgtccgcaaccaggctgagacgctcgtgtaccagacggagaaattcgtcaaggaacaacgggaaaccgagaatggttcgagggtgcctgaggataccctcaacaaggtggaagccgctgtggcagaagctaagacggcgcttggcggtaccgacatttccgcgataaagtcggcaatggagaagctgggtcaggactcccaggcactggggcaggcgatctatgaggccacccaggctgcgtcgaaggtgggcggcgaggcttccgcgcctggtggctcgaactctactgacgatgtggttgacgcggaggtggtcgacgacgaacgggagtccaagtga

SEQ ID NO: 48849 - protein, 620 aa, Mycobacterium leprae
MARAVGIDLGTTNSVVSVLEGGDPVVVANSEGSRTTPSTVAFARNGEVLVGQPAKNQAVTNVDRTIRSVKRHMGSDWSIEIDGKKYTAQEISARVLMKLKRDAEAYLGEDITDAVITTPAYFNDAQRQATKEAGQIAGLNVLRIVNEPTAAALAYGLDKGEREQTILVFDLGGGTFDVSLLEIGEGVVEVRATSGDNHLGGDDWDDRIVNWLVDKFKGTSGIDLTKDKMAMQRLREAAEKAKIELSSSQSTSVNLPYITVDSDKNPLFLDEQLIRAEFQRITQDLLDRTRQPFQSVVKDAGISVSEIDHVVLVGGSTRMPAVTDLVKELTGGKEPNKGVNPDEVVAVGAALQAGVLKGEVKDVLLLDVTPLSLGIETKGGVMTKLIERNTTIPTKRSETFTTADDNQPSVQIQVYQGEREIASHNKLLGSFELTGIPPAPRGVPQIEVTFDIDANGIVHVTAKDKGTGKENTIKIQEGSGLSKEEIDRMVKDAEAHAEEDRKRREEADVRNQAETLVYQTEKFVKEQRETENGSRVPEDTLNKVEAAVAEAKTALGGTDISAIKSAMEKLGQDSQALGQAIYEATQAASKVGGEASAPGGSNSTDDVVDAEVVDDERESK

SEQ ID NO: 48850 - DNA, 1884 bp, Mycobacterium paratuberculosis
  CDS (13)..(1884): transl_table=11
taaccaggagcaatggctcgtgcggtcggtatcgacctcgggaccaccaactccgtcgtcgcagtcctcgagggcggtgaccccgtcgtcgtcgccaactccgagggctcgcggaccaccccgtccatcgtcgcgttcgcccgcaacggcgaggtgctcgtcggccagcccgccaagaaccaggcggtgaccaacgtcgaccgcaccatccgttcggtcaagcggcacatgggcaccgactggtccatcgagatcgacggcaagaaatacaccgctcaggagatcagcgcccgcgtgctgatgaagctcaagcgcgacgccgaggcctatctgggtgaggacatcaccgacgcggtcatcaccgtaccggcgtacttcaacgacgcccagcgtcaggcgaccaaggaagccggccagatcgccggcctcaacgtgctgcgcatcgtcaacgagccgaccgcggccgcgctggcctacggcctggacaagggcgagaaggagcagaccatcctggtcttcgacctcggcggcggcacgttcgacgtttcgctgctcgagatcggcgagggtgtggtcgaggtccgcgccaccagcggtgacaaccaactcggtggcgacgactgggacgaccggatcgtcaactggctggtcgacaagttcaagggcaccagcggcatcgacctgaccaaggacaagatggccatgcagcggctgcgtgaggccgccgagaaggccaagatcgagttgtccagctcgcagagcacctcgatcaacctgccctacatcaccgtcgacgcggacaagaacccgctgttcctcgacgagcagctgacccgcgccgaattccagcgcatcacccaggatctgctggaccgcacccgtcagccgttcaagtcggtgatcgccgacgccggcatctcggtgtccgacatcgaccacgtggtgctggtgggtggttccacccggatgcccgcggtgaccgacctggtcaaggaactcaccggcggcaaggagcccaacaagggcgtcaaccccgacgaggttgtcgcggtgggtgccgccctgcaggccggtgtgcttaagggcgaggtgaaagacgttctgctgcttgacgttacgccgctgagcctgggtatcgagaccaagggtggcgtgatgaccaagctgatcgaacgcaacaccaccatcccgaccaagcggtccgagacgttcaccacggccgacgacaaccagccgtcggtgcagatccaggtgtatcagggtgagcgcgaaatcgccgcgcacaacaagctgctcggctccttcgagctgaccggaattccgccggcgccccgcggcgtgccgcagatcgaggtcaccttcgacatcgacgccaacggcatcgtgcacgtcaccgccaaggacaagggcaccggtaaggagaacacgatcaagatccaggagggctccggcctgtccaaggaggagatcgaccggatgatcaaggacgccgaggcgcacgccgaggaggaccgcaagaggcgcgaggaagccgacgtccgcaaccaagcggaatcgcttgtctaccagacggagaagttcgtcaaggaccagcgcgaggccgagggcggctcgaaggttcccgaggagacgctgtccaaggtcgacgccgcgatcgccgacgccaagacggccctgggcggcaccgacatcaccgcgatcaagtcggcgatggagaagctcggccaggagtcgcaagcgctgggacaggcaatctacgaggccacccaggccgagtccgcccaggctggcgggccggacggtgccgcggccggcggcgggtccggatccgccgacgatgttgtggacgcggaggtggtcgacgatgaccgggagtccaagtga

SEQ ID NO: 48851 - protein, 623 aa, Mycobacterium paratuberculosis
MARAVGIDLGTTNSVVAVLEGGDPVVVANSEGSRTTPSIVAFARNGEVLVGQPAKNQAVTNVDRTIRSVKRHMGTDWSIEIDGKKYTAQEISARVLMKLKRDAEAYLGEDITDAVITVPAYFNDAQRQATKEAGQIAGLNVLRIVNEPTAAALAYGLDKGEKEQTILVFDLGGGTFDVSLLEIGEGVVEVRATSGDNQLGGDDWDDRIVNWLVDKFKGTSGIDLTKDKMAMQRLREAAEKAKIELSSSQSTSINLPYITVDADKNPLFLDEQLTRAEFQRITQDLLDRTRQPFKSVIADAGISVSDIDHVVLVGGSTRMPAVTDLVKELTGGKEPNKGVNPDEVVAVGAALQAGVLKGEVKDVLLLDVTPLSLGIETKGGVMTKLIERNTTIPTKRSETFTTADDNQPSVQIQVYQGEREIAAHNKLLGSFELTGIPPAPRGVPQIEVTFDIDANGIVHVTAKDKGTGKENTIKIQEGSGLSKEEIDRMIKDAEAHAEEDRKRREEADVRNQAESLVYQTEKFVKDQREAEGGSKVPEETLSKVDAAIADAKTALGGTDITAIKSAMEKLGQESQALGQAIYEATQAESAQAGGPDGAAAGGGSGSADDVVDAEVVDDDRESK

SEQ ID NO: 48852 - DNA, 1929 bp, Neisseria meningitidis serogroup A
  CDS (1)..(1929): transl_table=11
atggcaaaagtaatcggtatcgacttaggtacaaccaactcttgtttggccatttccgaaaacggtcaaaccaaagtgatcgaaaacgcagaaggcgcacgcaccacgccgtccgttatcgcttatttggacggcggcgaaatcctcgtcggcgcgcctgccaaacgccaagcggtaaccaacgccaaaaacactatttacgccgccaaacgtttgatcggccacaaatttgaagacaaagaagtccaacgcgacatcgaatccatgccttttgaaatcatcaaagccaacaacggcgacgcgtgggtgaaagcgcaaggcaaagagctgtctcctcctcaaatttccgcagaagtcctgcgtaaaatgaaagaagccgccgaagcttacttgggcgaaaaagtaaccgaagccgtgattaccgttccggcctacttcaacgacagccaacgtcaagccaccaaagacgcaggccgtatcgccggtttggacgtaaaacgcatcatcaacgagccgaccgcagccgctttggcattcggtatggacaaaggcgacaacaaagaccgcaaagtagccgtatatgacttgggcggcggtactttcgatatttccatcatcgaaatcgccaacctcgacggcgacaaacaatttgaagtattggctaccaacggcgatactttcttgggcggtgaagacttcgaccaacgtctgatcgactacatcattgacgagttcaaaaaagaacaaggcattgatttgaaacaagacgtcatggctctgcaacgtctgaaagaagctgccgaaaaagccaaaatcgaattgtccagcggccagcaaaccgaaatcaacctgccgtacatcaccatggacgcaaccggcccgaaacacttggcaatgaaaattacccgcgccaaattcgaaagcctggttgaagacctgattgcccgctctatcgagccttgccgcaccgcattgaaagatgccggcttgagcaccggcgacatcgacgacgtaattttagtcggcgggcagtcccgtatgccgaaagtacaagaagccgtgagagacttcttcggcaaagaaccgcgcaaagacgtgaaccctgatgaagccgttgccgtaggcgcagcgatccaaggcgaagtattgagcggcggccgcagcgacgtattgctgctggacgtaacccctctgtccttgggtatcgaaaccatgggcggcgtgatgaccaagctgattcaaaagaacactactattccgactaaagcgtctcaagtgttctctactgccgaagacaaccaaagcgcagtaaccatccatgtactgcaaggcgaacgcgaacgcgcttctgccaacaaatctttgggtcagttcaacttgggcgacatcgcacccgcaccgcgcggtatgccgcaaatcgaagtcaccttcgatattgacgccaacggtatcctgcacgtttccgccaaagacaaaggcaccggtaaagcggccaacatcaccatccaaggttcttcaggtttgagcgaagaagaaatcgaacgcatggtgaaagatgccgaagccaatgccgaggaagataaaaaactgactgaattggtcgcttcccgtaaccaagccgaagccctgattcactccgtgaaaaaatctttggcggactacggcgacaaactcgatgcagccgagaaagaaaaaatcgaagccgcgttgaaagaagctgaagaagcagttaaaggcgacgacaaaaccgccatcgatgccaaagccgaagcactgggcacagccagccaaaaactgggcgaaatggtttacgcgcaggcgcaagccgaagcacaagcaggcgagggcgcacaagccgagtcttccgctaagaaagacgacgacatcgtagatgccgactttgaagaagtaaaagacgacaaaaaataa

SEQ ID NO: 48853 - protein, 642 aa, Neisseria meningitidis serogroup A
MAKVIGIDLGTTNSCLAISENGQTKVIENAEGARTTPSVIAYLDGGEILVGAPAKRQAVTNAKNTIYAAKRLIGHKFEDKEVQRDIESMPFEIIKANNGDAWVKAQGKELSPPQISAEVLRKMKEAAEAYLGEKVTEAVITVPAYFNDSQRQATKDAGRIAGLDVKRIINEPTAAALAFGMDKGDNKDRKVAVYDLGGGTFDISIIEIANLDGDKQFEVLATNGDTFLGGEDFDQRLIDYIIDEFKKEQGIDLKQDVMALQRLKEAAEKAKIELSSGQQTEINLPYITMDATGPKHLAMKITRAKFESLVEDLIARSIEPCRTALKDAGLSTGDIDDVILVGGQSRMPKVQEAVRDFFGKEPRKDVNPDEAVAVGAAIQGEVLSGGRSDVLLLDVTPLSLGIETMGGVMTKLIQKNTTIPTKASQVFSTAEDNQSAVTIHVLQGERERASANKSLGQFNLGDIAPAPRGMPQIEVTFDIDANGILHVSAKDKGTGKAANITIQGSSGLSEEEIERMVKDAEANAEEDKKLTELVASRNQAEALIHSVKKSLADYGDKLDAAEKEKIEAALKEAEEAVKGDDKTAIDAKAEALGTASQKLGEMVYAQAQAEAQAGEGAQAESSAKKDDDIVDADFEEVKDDKK

SEQ ID NO: 48854 - DNA, 1935 bp, Nitrosomonas europaea
  CDS (1)..(1935): transl_table=11
atggcaaaaataattggcatcgaccttgggactaccaactcatgcgttgccgtcatggaaggcaacaaacccaaggtcattgaaaatgctgaaggtgcaaggacgacgccgtcgattgtcgcctatgcggaagacaatgaaattctggtaggggcatcggccaagcgtcaggcagtcaccaatccggaaaataccctgtttgcgatcaaacggttgattggccgtcgtttcgatgaagaagtggtgcaaaaggatatcagtgtaacgccctacaaaatcgtgcgtgccgataacaacgatgcatggatagaagcacgcggaaggaaaatcgcaccgccggaggtttctgcacaggtgctgataaaaatgaaaaaaacggctgaagattatctgggtgagccggttacagaagccgtcatcaccgttccagcgtatttcaacgattctcagcgtcaggctaccaaggatgcaggccgtatcgcagggctggaagtcaaacgtatcatcaatgaaccaactgctgccgcacttgcattcggtttagataagaaggaaggtgatcgcaaaattgcggtatacgatctgggcggaggtacgtttgatatttcgatcatcgaaatcgcagaagtcgaaggcgaacaccagttcgaagtgctggcaaccaatggtgacactttcctcggcggtgaggatttcgactccagagtgatcgaatatctggtggatgaattcaggaaagagagtggtatcgatctgaaaaaagatatgctggcattgcaacggctcaaagatgcagcggaaaaagccaaaatcgagctgtcatccagccaacagaccgaagtgaatctaccctatatcacggcagatgcatcaggcccaaaacacctggctgtcaagatcacccgtgccaagctggagagtctggtcgaagaactgatcgagcgtactgcaggcccttgccggactgcgcttaaagatgcgggtttgtcggtttctgacatcaatgacgtcattctggtcggtggacagacccgtatgccgaaagtccaggagaaggtcaaggaaatcttcggcaaagagccgcgcaaagatgtcaatcctgacgaggcagttgccatcggtgctgcgatccagggcggggtgctgaaaggagatgtcaaggatgtgctgctgctggatgtgactccactgtcgttgggaatcgaaacactgggtggcgtcatgaccaagttgatccagaagaacaccaccattccgaccaaggcgcagcaggtgttctcgacagcggacgataaccagacagcggtgaccattcacgtattgcagggtgagcgggaagtggcctccggcaataaaagtctaggccagttcaacctgaccgatattccgtcagcaccccgcggaatgcctcagatcgaggtgattttcgatatcgatgccaacggtattctgcatgtttcagctaaagacaaggcaaccggcaaggaaaacaagatcaagatccaggcaagctccgggctgtctgaagatgaaatccagaaaatggtaaaagatgccgaagcgcatgcggaagaagacaaaaaagcactggatctggtcaacagtcgtaaccagtgtgacgccatgattcattcagtcagaaaatcactggctgaatacggtgacaaactggaaggggatgaaaaatccagaatcgaggcagcgttgaaagaggccgaggaagcactcaaatccggcgataaacagacgatcgatgccaaaacccaggcgttgaccgaagcttcgcataaactggctgagaagatgtacgcccaggagcaggcgcaggctggtcagcaggcaggtgccgggactgcatccgatcagtctcaggataagccggttgaaggcgaagtcgtcgatgccgaattcgaggaagtcaaagataaaaaatga

SEQ ID NO: 48855 - protein, 644 aa, Nitrosomonas europaea
MAKIIGIDLGTTNSCVAVMEGNKPKVIENAEGARTTPSIVAYAEDNEILVGASAKRQAVTNPENTLFAIKRLIGRRFDEEVVQKDISVTPYKIVRADNNDAWIEARGRKIAPPEVSAQVLIKMKKTAEDYLGEPVTEAVITVPAYFNDSQRQATKDAGRIAGLEVKRIINEPTAAALAFGLDKKEGDRKIAVYDLGGGTFDISIIEIAEVEGEHQFEVLATNGDTFLGGEDFDSRVIEYLVDEFRKESGIDLKKDMLALQRLKDAAEKAKIELSSSQQTEVNLPYITADASGPKHLAVKITRAKLESLVEELIERTAGPCRTALKDAGLSVSDINDVILVGGQTRMPKVQEKVKEIFGKEPRKDVNPDEAVAIGAAIQGGVLKGDVKDVLLLDVTPLSLGIETLGGVMTKLIQKNTTIPTKAQQVFSTADDNQTAVTIHVLQGEREVASGNKSLGQFNLTDIPSAPRGMPQIEVIFDIDANGILHVSAKDKATGKENKIKIQASSGLSEDEIQKMVKDAEAHAEEDKKALDLVNSRNQCDAMIHSVRKSLAEYGDKLEGDEKSRIEAALKEAEEALKSGDKQTIDAKTQALTEASHKLAEKMYAQEQAQAGQQAGAGTASDQSQDKPVEGEVVDAEFEEVKDKK

SEQ ID NO: 48856 - DNA, 1848 bp, Nocardia farcinica
  CDS (1)..(1848): transl_table=11
atggctcgtgcggtcggaatcgacctcgggaccacgaactcggtcgtcgccgttctcgaaggtggtgagccggtcgtcgtcgccaactccgaaggttcgcgtaccacgccctcgatcgtcgccttcgccaagaacggtgaagtcctggtcggccagcctgccaagaaccaggcggtcaccaacgtcgatcgcaccatccggtcggtcaagcgccacatcggcaccgactggaccgtcgagatcgacggcaagaagtacaccccccaggagatcagcgcgcgcacgctgatgaagctcaagcgcgacgcggaagcctacctcggtgaggagattaccgacgcggtgatcaccgttcccgcctacttcgaggacgcccagcgccaggccaccaaggaagccggccagatcgccggcctgaacgtgctgcgcatcgtcaacgagccgaccgcggccgcgctggcctacggcctggacaagggcgacaaggaacagaccatcctggtcttcgacctcggtggtggcaccttcgacgtctcgctgctcgagatcggcgagggcgtcgtcgaggtccgcgccacctccggtgacaaccacctcggtggtgacgactgggatcagcgcatcgtcaactggctggtcgacaagttcaaggccagctcgggcatcgacctgaccaaggacaagatggccatgcagcggctgcgggaagccgccgagaaggccaagatcgagctcagctcctcgcagagcacctcgatcaacctgccctacatcaccgtcgacgccgacaagaacccgctgttcctcgacgagcagctctcgcgcgcggagttccagaagatcacctccgatctgctcgaccgcacccgtgcgccgttccagcaggtcatcaaggacgcggggatcagcgtctccgacatcgaccacgtggtcctcgtcggtggctcgacccgtatgcccgccgtctccgacctggtgcgcgagctgaccggtggcaaggagcccaacaagggcgtgaacccggacgaggtcgtcgccgtcggcgccgccctgcaggccggtgtgctcaagggtgaggtcaaggacgtcctgctgctcgacgtgaccccgctgtcgctgggtatcgagaccaagggcggcgtgatgaccaagctcatcgagcgcaacaccacgatcccgaccaagcgttcggagaccttcaccaccgccgacgacaaccagccgtcggtgcagatccaggtcttccagggcgagcgcgagatcgccgcgcacaacaagctgctgggttccttcgagctcaccggcatcccgccggctccgcgcggcgtgccccagatcgaggtgaccttcgacatcgacgccaacggcatcgtgcacgtcaccgcgaaggacaagggcaccggcaaggagaacacgatcaagatccaggacggctccggcctgtccaaggaagagatcgaccggatgatcaaggacgccgagcagcacgcggccgaggacaaggcccggcgcgaggaggccgagacccgcaaccaggccgagaccctggtgcaccagaccgagaagttcatcaaggacaacgaggacaaggtgcccgcggacgtcaagtccaaggtcgaggccgccatcgccgaggcgaacgaggccctcgcgggcaccgacatcgccgcggtgaaggccgccgtggagaagctggccaccgagtcgcaggccctcggccaggcgatctacgaggcgcagggcgccgacgccgccgcgtccagcaacggtgccgcgagctccgcgaacgatgaccaggtcgtggatgccgaggtcgtggacgagccggtcgacacggagaagaagtga

SEQ ID NO: 48857 - protein, 615 aa, Nocardia farcinica
MARAVGIDLGTTNSVVAVLEGGEPVVVANSEGSRTTPSIVAFAKNGEVLVGQPAKNQAVTNVDRTIRSVKRHIGTDWTVEIDGKKYTPQEISARTLMKLKRDAEAYLGEEITDAVITVPAYFEDAQRQATKEAGQIAGLNVLRIVNEPTAAALAYGLDKGDKEQTILVFDLGGGTFDVSLLEIGEGVVEVRATSGDNHLGGDDWDQRIVNWLVDKFKASSGIDLTKDKMAMQRLREAAEKAKIELSSSQSTSINLPYITVDADKNPLFLDEQLSRAEFQKITSDLLDRTRAPFQQVIKDAGISVSDIDHVVLVGGSTRMPAVSDLVRELTGGKEPNKGVNPDEVVAVGAALQAGVLKGEVKDVLLLDVTPLSLGIETKGGVMTKLIERNTTIPTKRSETFTTADDNQPSVQIQVFQGEREIAAHNKLLGSFELTGIPPAPRGVPQIEVTFDIDANGIVHVTAKDKGTGKENTIKIQDGSGLSKEEIDRMIKDAEQHAAEDKARREEAETRNQAETLVHQTEKFIKDNEDKVPADVKSKVEAAIAEANEALAGTDIAAVKAAVEKLATESQALGQAIYEAQGADAAASSNGAASSANDDQVVDAEVVDEPVDTEKK

SEQ ID NO: 48858 - DNA, 1839 bp, Oceanobacillus iheyensis
  CDS (1)..(1839): transl_table=11
atgagtaaaattattggaattgacttaggaactacaaattcatgtgtatcagtaatggaaggcggcgaagctgttgttattccgaatccggaaggtaaccgtacgtcaccatccgtagtcgcttttaaaaatggtgaacgccaagttggtgaagtagctaaacgacaagcaattacaaatccaaataccattcaatctattaagcgtcatatgggaacagattataaagtgaaaattgaagaaaaagaatacactcctcaagaggtttctgcgattattcttcaatacattaagtcgtatgcagaggattacatcggcgaaaaagtagaaaaagctgtaatcacagtacctgcttactttaatgatgcagagcgtcaagctacaaaagatgcaggtaaaattgctggactagaagtagaacgtattattaacgaacctactgcagcagcactagcatatggtattgacaaagaagatcaagatcaaacaattcttgtttatgaccttggtggcggtacatttgacgtttctattcttgatattggcgatggtacgtttgaagtagtatctactgcaggtgataatcgtctaggtggagatgattttgaccaagtaatcatcgatcatatggtacaagaatttaagaaagaaaatgcaattgatctttctcaagataaaatggcaacacagcgcttgaaagatgctgcagaaaaagcgaagaaagatttatctggtgtgacacaaactcaaatctcattaccatttattacagcaggagatgctggtccattacacctagagatgacaatgtctcgcgcgaaatttgacgagctgtcttcagatttagttgagcgtacgatgcaaccaacgcgtaaagcattaagtgatgcaagcttatccaagagcgatattgataaagtaattcttgtcggtggttctactcgtatcccagctgtacaagaagcgattaaaaaagaattaggtcaagacccttcaaaaggtgtaaatccagatgaggttgtagcacttggggctgcaattcaaggtggagttcttcaaggagatgtaaaagatgttttactacttgatgtaacaccattatcattaggtatcgaaacaatgggagcagtaactactaagttaattgaacgtaatacaactattccaactagtgcgtctcaaactttctctactgcagctgataatcaaacagctgttgatattcacgtccttcaaggtgaacgtgaaatggcttcagacaataaaacgcttggacgtttccaattaactgatataccaccagcaccacgtggtatgccgcaaattgaagtaagctttgatattgatgctaatggtattgttaacgtgcgtgcaaaagatcttggtacgaataaagaacaatccattacaattaaatcttcttctggcctttctgatgatgaagtggaccgtatggtaaaagaagcagaagaaaatgcagatgcagataaacaacgtcgtgaagaagtagatttaagaaatgaagcagatcaacttatctttacaacagataaaacaatcaaagatttagatgataaagtatctgaagaagataaacaaaaagcagaatctgctaaagatgaattaaaacaagcgcttgagtctggtgatatggaacaagtgaaagcgaaaaaagatgctttagaagagcatgttcaacaattgtctgcaaagctttatgaacaagttcaacaagaagctcaacaagcttctggcgagcaaggtgaagaaagtggaaaccaggacgatgatgttgtagatgctgattattctgaagtagacgatgatgataaaaaataa

SEQ ID NO: 48859 - protein, 612 aa, Oceanobacillus iheyensis
MSKIIGIDLGTTNSCVSVMEGGEAVVIPNPEGNRTSPSVVAFKNGERQVGEVAKRQAITNPNTIQSIKRHMGTDYKVKIEEKEYTPQEVSAIILQYIKSYAEDYIGEKVEKAVITVPAYFNDAERQATKDAGKIAGLEVERIINEPTAAALAYGIDKEDQDQTILVYDLGGGTFDVSILDIGDGTFEVVSTAGDNRLGGDDFDQVIIDHMVQEFKKENAIDLSQDKMATQRLKDAAEKAKKDLSGVTQTQISLPFITAGDAGPLHLEMTMSRAKFDELSSDLVERTMQPTRKALSDASLSKSDIDKVILVGGSTRIPAVQEAIKKELGQDPSKGVNPDEVVALGAAIQGGVLQGDVKDVLLLDVTPLSLGIETMGAVTTKLIERNTTIPTSASQTFSTAADNQTAVDIHVLQGEREMASDNKTLGRFQLTDIPPAPRGMPQIEVSFDIDANGIVNVRAKDLGTNKEQSITIKSSSGLSDDEVDRMVKEAEENADADKQRREEVDLRNEADQLIFTTDKTIKDLDDKVSEEDKQKAESAKDELKQALESGDMEQVKAKKDALEEHVQQLSAKLYEQVQQEAQQASGEQGEESGNQDDDVVDADYSEVDDDDKK

SEQ ID NO: 48860 - DNA, 1896 bp, Pasteurella haemolytica
  CDS (1)..(1896): transl_table=11
atgggtaaaatcattggtattgacttaggtacaacaaattcttgtgttgcggtaatggacggcgacaaacctcgtgtaattgaaaatgcggaaggggcaagaacaacgccatctatcatcgcttacaccgataaagaaaccttagttggtcagccggcaaaacgtcaggcaattactaacccgaaaaatactttatttgcaatcaagcgtttaatcggccgtcgttttactgatgctgaagtgcaacgtgatattgaaattatgccgtttgaaatcagcaaagcagataacggcgatgcgtgggtaaccgtaaaaggcgataaattagcaccgccgcaaatctctgctgaaatcttgaaaaaaatgaagaaaaccgcagaagatttcttgggcgaaccggtaaccgaagcggttattactgtgcctgcatactttaacgatgcacaacgtcaggcaactaaagatgccggtcgtattgcaggtttagatgtaaaacgtatcatcaacgaaccaacagcggcagcgcttgcttatggtttagattctaagaaagagaaccaaacgattgctgtttacgacttaggtggtggtacattcgatatttcgattatcgaaattgataactttgacggcgagcaaacttttgaagtgcgtgcaaccaacggcgatactcacctaggtggagaagacttcgataaccgtgtaatcaactacttagtggaagaattcaaaaagcaaggcgttgatttacgcaacgacccaatggcaatgcaacgtgtgaaagaagcagcggaaaaagcgaaaatcgaactttcttctgcacaagaaactgaagtgaaccttccatacatcacggcagatgcaaccggcccgaaacacttaaacattaaagtaacccgtgcgaaattggaatctttagttgaagatttagtaaaccgttcgttagagccgttaaaaaccgctttagctgatgccggtttatcagtaggcgacatcaacgatgtgattttagtcggtggtcaaacccgtatgccgttagtacagaaaaaagtggcagacttctttggcaagacgcgtaaagacgttaacccggacgaagcggtaatggcaatcggtgcggcggttcaaggcggagtgttaagtggttcggtaacagacgtattgttattagacgttactccgctttcacttggtatcgaaacaatgggtggtgtaatgactaccttaattgagaaaaacactacgattccaaccaagaaatcacaagtgttctcaacagcggaagataaccaatctgcggtaactatccacgtgttacaaggtgagcgtaaacgtgcagcggataataaatctttaggtcaattcaaccttgaaggtattaaccctgctccacgcggtatgccacaaattgaagtaacctttgatattgatgctaacggtattatcaatgtctctgcaaaagataaaaacactggcaaagagcaacaaatcaaaattcaagcatcttcaggcttaagcgatgctgaagttgaacaaatggtgcgtgatgcagaagcgaatgcggaagcagacaaaaaatttgaagagttagttcaagtttgtaaccaagcagacggtattgctcacgcaacccgtaagcaaattaccgaagcaggcgatgcgttaaacgcagacgataaagcgaagatcgaagcggctatttctgagttagaaaccgcagctaaaggcgaagataaagccgagatcgaagcgaaaatcgaagcgttaatcaaagcttcagaaccgttaatgctagcagcacaagcaaaagcacaaggcggcgagcaaccacaacaatctcaaaaagatgacggcgtggtcgatgcggaatttgaagaagtgaaagataataaataa

SEQ ID NO: 48861 - protein, 631 aa, Pasteurella haemolytica
MGKIIGIDLGTTNSCVAVMDGDKPRVIENAEGARTTPSIIAYTDKETLVGQPAKRQAITNPKNTLFAIKRLIGRRFTDAEVQRDIEIMPFEISKADNGDAWVTVKGDKLAPPQISAEILKKMKKTAEDFLGEPVTEAVITVPAYFNDAQRQATKDAGRIAGLDVKRIINEPTAAALAYGLDSKKENQTIAVYDLGGGTFDISIIEIDNFDGEQTFEVRATNGDTHLGGEDFDNRVINYLVEEFKKQGVDLRNDPMAMQRVKEAAEKAKIELSSAQETEVNLPYITADATGPKHLNIKVTRAKLESLVEDLVNRSLEPLKTALADAGLSVGDINDVILVGGQTRMPLVQKKVADFFGKTRKDVNPDEAVMAIGAAVQGGVLSGSVTDVLLLDVTPLSLGIETMGGVMTTLIEKNTTIPTKKSQVFSTAEDNQSAVTIHVLQGERKRAADNKSLGQFNLEGINPAPRGMPQIEVTFDIDANGIINVSAKDKNTGKEQQIKIQASSGLSDAEVEQMVRDAEANAEADKKFEELVQVCNQADGIAHATRKQITEAGDALNADDKAKIEAAISELETAAKGEDKAEIEAKIEALIKASEPLMLAAQAKAQGGEQPQQSQKDDGVVDAEFEEVKDNK

SEQ ID NO: 48862 - DNA, 1905 bp, Pasteurella multocida
  CDS (1)..(1905): transl_table=11
atgggaaaaattattggtattgacttaggtacaactaactcttgtgttgcggtgatggatggcgataaaccacgtgtgattgaaaacgcagaaggtgatcgcacaactccatcaattattgcttatacgcaagataacgaaaccttagtcggtcaaccggcaaaacgtcaagccgtcacaaacccgaaaaatacgctatttgcgatcaaacgtttaattggtcgtcgtttccaagatgaagaagtgcaacgtgatgtaagcatcatgccatttgaaattgtcgcggcagataacggcgacgcatgggttggtgtgaagggtgaaaaaatggcaccaccacaaatctctgcggaagtattgaaaaaaatgaagaaaacggcagaagatttcttaggtgagcctgttactgaagcggttatcacggtacctgcttattttaacgatgcacaacgtcaagcgaccaaagatgccggtcgtatcgcaggattagaagttaaacgtattatcaacgaaccgactgcagcagcccttgcctatggtttagataaaggtcaaggtaacaaaactatcgcagtttatgacttagggggcggtacattcgacttatctatcattgagatcgatgaagtcggtggtgaaaaaacgttcgaagtattatctaccaacggggatacgcacttagggggtgaagacttcgataaccgtgtgatcaactacttagtcgatgagttcaaaaaagaacaaggtgtggacttacgtaacgatccattagcaatgcaacgtttgaaagaagcgggtgaaaaagccaaaattgaactgtcttctgcacaacaaaccgatgtcaatcttccatacatcaccgcagatgcgacgggaccaaaacacttaaacattaaattaacccgtgcaaaattagaatcattagttgaggatttagtgtctcgctcattagagccagtgaaaattgccttagctgatgctggtttaagcgtatcgcaaattgatgatgtgattcttgttggtggtcaaacccgtatgccacttgtacaacaaaaagtggaagctttctttggtaaagcgcctcgtaaagacgtgaaccctgatgaagcagtggcaattggtgctgcagtacaaggcggtgtgttagccggtgatgtcaaagatgtcttgttattagacgttaccccactttcattaggtatcgaaaccatgggtggcgtgatgacaaccttgattgagaaaaacactacgattccaacgaagaaatcacaagtgttctcaacggcagaagataaccaaagtgcggtaactatccacgtacttcaaggtgagcgtaaacgtgcggcagacaacaaatctttaggtcaattcaacctagaagggatcaacccagcaccacgcggtatgccacaaattgaagtgactttcgacatcgatgcggacggtatcatccacgtttctgcgaaagataaaggtacaaacaaagagcaaaaaatcacgattaaagcctcttcaggtttaaccgatgaagaaattcaacaaatggtccgtgatgctgaagcgaacgccgaagcagaccgtaaatttgaagaattagtgcaagcccgtaaccaagcggatcatttagttcacggcactcgcaaacaattaagcgaagtgggcgataaattatctgccgaagataaagcaccaatcgaaaaagcggttgcagatttagaagctgcagcgaaaggtgaagataaagcggaaatcgaaacgaaagtacaagcattaattcaagtatctgaaaaattaatgcaagctgcacaaccacaaccagaagcgcaagcacagcaagcgcaaagcggtaagtcaaatgatgatgtggtggatgcagaatttgaagaagtgaaagacaacaaataa

SEQ ID NO: 48863 - protein, 634 aa, Pasteurella multocida
MGKIIGIDLGTTNSCVAVMDGDKPRVIENAEGDRTTPSIIAYTQDNETLVGQPAKRQAVTNPKNTLFAIKRLIGRRFQDEEVQRDVSIMPFEIVAADNGDAWVGVKGEKMAPPQISAEVLKKMKKTAEDFLGEPVTEAVITVPAYFNDAQRQATKDAGRIAGLEVKRIINEPTAAALAYGLDKGQGNKTIAVYDLGGGTFDLSIIEIDEVGGEKTFEVLSTNGDTHLGGEDFDNRVINYLVDEFKKEQGVDLRNDPLAMQRLKEAGEKAKIELSSAQQTDVNLPYITADATGPKHLNIKLTRAKLESLVEDLVSRSLEPVKIALADAGLSVSQIDDVILVGGQTRMPLVQQKVEAFFGKAPRKDVNPDEAVAIGAAVQGGVLAGDVKDVLLLDVTPLSLGIETMGGVMTTLIEKNTTIPTKKSQVFSTAEDNQSAVTIHVLQGERKRAADNKSLGQFNLEGINPAPRGMPQIEVTFDIDADGIIHVSAKDKGTNKEQKITIKASSGLTDEEIQQMVRDAEANAEADRKFEELVQARNQADHLVHGTRKQLSEVGDKLSAEDKAPIEKAVADLEAAAKGEDKAEIETKVQALIQVSEKLMQAAQPQPEAQAQQAQSGKSNDDVVDAEFEEVKDNK

SEQ ID NO: 48864 - DNA, 1842 bp, Phaeodactylum tricornutum
  CDS (1)..(1842)
atgggaaaagtagtaggaattgatttaggcacgacaaattcagtagttgctgcaattgaaggtgggcaaccaagtgttatcataaatgcagaaggtttacgaacaacaccatctattgttgcttatacaaaaaaagaagaattattagtgggtcaaattgcaaaacgtcaagcagttattaatccagagaacactttcttttcagttaaaagatttattggttcaaaagaaggagaaatttcaaaagaagcaaaaaaattaccttataaggtaagtaatgatcaaaataataatattaaaataaagtgccccgcattaaatagggatttcagtccagaagaaatttcagctcaagttttaagaaaattaattaatgatgcaacagattatctaggacaagaggttactcaagctgttattacggttccagcttatttcaacgattctcaacgacaagcaactatggatgctggaaaaattgctggcgttgaagttttacgaatcattaatgaaccaactgctgcatcattagcatacggtttagataaaaaacaaaatgaaaccattttagtttttgatttaggtggcggtacctttgatgtttcaattttagaagtaggagacggaatttttgaagttctatcgacagcaggtgatacaaatttaggtggtgacgattttgataatgttttggttaattggttaattaatgattttaaagaaaaaaataatatagacttagggaatgatgttcaagctttacaaagattaacagaagcagcagaaaaagcaaaagttgagttatcaacagtcgaaaaaacaacaattcatttaccatttattactgctgacaaaactggcccaaaacatattgaacaagaattaacaagagatgtgtttgaaaatttatgtcaagctcttattaatcgttgccgaatcccagttgaaaaatcactaaatgatgcacgccttgataaagccgatattaatgaaattgttttagttggaggttcaactcgaataccagccgttcaaaatttggttgaatcattaacaggtaaaaaacctaatcaatcagtcaatccagatgaggtagttgctatcggtgcagcaattcaagctggcattttagctggggaaattaaagatattctattattagatgttacaccattatcattgggagtagaaacgcttggtggagtaatgacaaaaattattgctcgaaatacgacaattcctgtaaaaaaatcggaaatgttctcaacagcagtggataatcaaacaaatgtcgaaattcatatcttacaaggtgaacgtgaacttgtcgcagggaataagagtttaggtaattttagattagatggtattccagctgccgatcgcggtgctcctcaaattgaagtaacattcgatatagatgttgatgggatattatccgtaaaggcacgtgaaaaagaaacaggtgtagaacaagctgttacaattcaaggcgcgtcaaatttaaatgaaaaggaagtggaagaaatgctagttgaagcagaaaaatttgcctcagcggataaggtaaaacgtgaaaatattgatgtaaaaaatcaggcagaagcattatgttttgaagctgaaaaagaagtttcgtcatttaacgacactgttcctgaaaataaaaagcaaaatattaagacgttaattgaaaatattcgtcaagcagtccagactgacaattttgaaactttaaaagaacaaatggaggaattgaaaacagctatgaaagacatagttgcactgaaatcaactaatgatacagctacagatccaatgtcgaatttaaatgatttataa

SEQ ID NO: 48865 - protein, 613 aa, Phaeodactylum tricornutum
MGKVVGIDLGTTNSVVAAIEGGQPSVIINAEGLRTTPSIVAYTKKEELLVGQIAKRQAVINPENTFFSVKRFIGSKEGEISKEAKKLPYKVSNDQNNNIKIKCPALNRDFSPEEISAQVLRKLINDATDYLGQEVTQAVITVPAYFNDSQRQATMDAGKIAGVEVLRIINEPTAASLAYGLDKKQNETILVFDLGGGTFDVSILEVGDGIFEVLSTAGDTNLGGDDFDNVLVNWLINDFKEKNNIDLGNDVQALQRLTEAAEKAKVELSTVEKTTIHLPFITADKTGPKHIEQELTRDVFENLCQALINRCRIPVEKSLNDARLDKADINEIVLVGGSTRIPAVQNLVESLTGKKPNQSVNPDEVVAIGAAIQAGILAGEIKDILLLDVTPLSLGVETLGGVMTKIIARNTTIPVKKSEMFSTAVDNQTNVEIHILQGERELVAGNKSLGNFRLDGIPAADRGAPQIEVTFDIDVDGILSVKAREKETGVEQAVTIQGASNLNEKEVEEMLVEAEKFASADKVKRENIDVKNQAEALCFEAEKEVSSFNDTVPENKKQNIKTLIENIRQAVQTDNFETLKEQMEELKTAMKDIVALKSTNDTATDPMSNLNDL

SEQ ID NO: 48866 - DNA, 1842 bp, Picrophilus torridus
  CDS (1)..(1842): transl_table=11
atgagcaagataataggaattgatttgggaacaagcaactcagctgccgcggttgtaatatcaggaaagccaactgttattccggcagccgagggcgtttcacttggcggtaaggcatttccaagctatgttgcctttacaaaggatggtcagctgcttgttggtgaacctgcaagaaggcaggccctgttaaaccccgagggtacagtatatgccgcaaagaggaagatgggcacggattacaaatacaaaatctttggaaaggagtacacaccgcagcagatctcagcttttatactgcagaaaataaagcgtgatgcagaggcatttctcggggaaccagtaacagatgctgtgattacggtgcctgcatactttaacgacaaccagaggcaggcaacaaaggatgccggtgcaattgcaggcctcaatgtaagaagaatcattaatgagcccacagcggcatgccttgcctatggtattgacaaattaaaccagacattaaaaatcgttatatatgaccttggcggtggaacgcttgatgttaccataatggactttggtcagggcgttttccaggtgctttcaacatccggtgatacgcatctcggcggaacggatatggatgaggccattgtaaacttcctggcggataacttccagagggaaaacggcatagatctcaggaaggatcattccgcgtacatacgtttgagggatgctgcagagaaggcaaagatagagctttcaacagttcttgaaacagagataaacctgccatacataactgcaacacaggatggaccaaaacatcttcagtacacattaacaagggcaaagtttgaggagcttatagcgccaattgtcgatagatcaaaggtacctctggataccgcacttgagggcgcaaagctaaagaagggcgacatcgataagatcatattaataggcggtccaacaagaataccatatgtaagaaagtacgttgaggattactttggcagaaaggcagagggcggtgttgatccaatggaagcggtcgcaatgggtgctgccatccagggagcagttcttgcaggtgaggtaaaggatatcgttcttttagatgtaacaccattaacacttggcatagagaccctgggcggcgtcatgacaccgctgatacctgccaacacgacgatacccacgaaaaaatcacagatatttacaacagcagctgatatgcagaccactgttacaattcacgttgtacagggggaaagaccgcttgcaaaggatgatgtatcacttggcatgttcaatcttgatggaattccgcctgccccgaggggtgtgccgcagatagaggtaacattcgatatagatgcaaacggtatattaaacgtatccgcaaaggatcttggaacaggaaagcagcagagcatatcaataacggccacgaataaattatcaaaggacgagattgagaggatgaagaaggaggccgagcagtacgctgaacaggacaaaaaggcaaaggaggagatagaaacaataaacaacgccgagacacttgcatacacggcagagaaaacaataaatgatgccggggataaaatcgatgaatcatcaaaggaaagcgtcagatctattgtaaaggatcttagagatgcaatatcatcaaaggatataaataagataaaagaactctctgaaaaattaacaaaggagatacaggaaataggaacaaagatgtaccagagccaggcaacccagggcacatcccagaacagctcacagaataataactcacagaataataatggcgataccgttgatgcggatttcaaggaatcaaaatga

SEQ ID NO: 48867 - protein, 613 aa, Picrophilus torridus
MSKIIGIDLGTSNSAAAVVISGKPTVIPAAEGVSLGGKAFPSYVAFTKDGQLLVGEPARRQALLNPEGTVYAAKRKMGTDYKYKIFGKEYTPQQISAFILQKIKRDAEAFLGEPVTDAVITVPAYFNDNQRQATKDAGAIAGLNVRRIINEPTAACLAYGIDKLNQTLKIVIYDLGGGTLDVTIMDFGQGVFQVLSTSGDTHLGGTDMDEAIVNFLADNFQRENGIDLRKDHSAYIRLRDAAEKAKIELSTVLETEINLPYITATQDGPKHLQYTLTRAKFEELIAPIVDRSKVPLDTALEGAKLKKGDIDKIILIGGPTRIPYVRKYVEDYFGRKAEGGVDPMEAVAMGAAIQGAVLAGEVKDIVLLDVTPLTLGIETLGGVMTPLIPANTTIPTKKSQIFTTAADMQTTVTIHVVQGERPLAKDDVSLGMFNLDGIPPAPRGVPQIEVTFDIDANGILNVSAKDLGTGKQQSISITATNKLSKDEIERMKKEAEQYAEQDKKAKEEIETINNAETLAYTAEKTINDAGDKIDESSKESVRSIVKDLRDAISSKDINKIKELSEKLTKEIQEIGTKMYQSQATQGTSQNSSQNNNSQNNNGDTVDADFKESK

SEQ ID NO: 48868 - DNA, 1923 bp, Porphyromonas gingivalis
  CDS (1)..(1923): transl_table=11
atgggaaaaatcattggaattgacttaggcacaacgaactcttgtgtctctgtattggaaggtaacgaacctatcgttattacaaacagtgagggcaagcgcacaacgccctcggtagtggcttttgtggatggtggcgagcgtaaggtgggcgatccggccaagcgtcaggccatcaccaatccgaccaagacgatatactctatcaaacgcttcatgggcgaaacttacgatcaggtttccagagaagtggagagagtgccattcaaggtagtacgtggggacaataatactccgcgcgtagatatagacggtcgtctctatacgccgcaggaaatttcggccatgatccttcagaagatgaagaagacggccgaagactacctcggtcaggaagtaacggaggccgtgatcactgtgcccgcatacttcaacgacgctcaacgtcaggcaacgaaagaagcaggagagatcgccggcctgaaagttcgccgtattgtgaacgagcctacggcagcttctctggcctacggtctggacaagtccaataaggatatgaagatcgctgtcttcgacttgggtggcggtaccttcgatatctctatcttggaattgggcgacggcgttttcgaagtgaaatcgaccaacggtgatacgcacctcggaggagacgacttcgaccacgtgatcattgactggctggcagaagagttcaagtctcaggaaggtgtggatcttcgccaggatcctatggctatgcagcgtctgaaagaagctgccgaaaaagccaagatagagctctccagcacttcatctacggagatcaacctcccctatatcatgccggtgaacggcatccccaagcacttggtgatgacgcttacaagggctaagttcgagcagttggccgatcgtctgattcaggcatgtgtggcaccctgcgaaacggccttgaaagatgccggtatgtcacgtggcgatatcgatgaagtgattctcgtaggtggttccacacgtattcctgctattcaggagattgtggagaagatcttcggtaaggctccgtccaagggtgtgaatcccgacgaagtggtagctgtgggtgccgctattcaaggcggtgttctgaccggtgaggtaaaggatgtcttgctgttggacgttacccccttgtcgctcggtatcgagactatgggaggcgtgatgactcgcttgatcgatgccaataccactatcccgacgaagaagagcgaaatctttaccacagcagtggacaatcaaccttcggtagagattcatgtacttcagggtgagcgttctttggctaaggacaataagagcatcggccgtttcaacttggacggtattgctccggcgccccgtcagacaccgcagatcgaagtaacgtttgacatcgatgccaacggtatcctgaatgtaacggctcatgacaaagctaccggcaagaagcagaatatccgcatcgaagcctccagcggtttgtccgatgatgagatcaagcgcatgaaggaagaggcgcaggccaatgccgaagcagataagaaagagaaagaacgtatcgacaagatcaatcaggccgacagcatgatcttccagacggaaaagcagttgaaggagttgggagacaaattcccggccgacaagaaggctccgatcgataccgctctcgacaaactgaaagaagcacacaaagcacaggatgtagctgctatcgatacagccatggccgaactgcaaaccgctctttccgcagcgggcgaagagctttacaagaatgccggagcagcccaaggtggcgcacaacccggtccggacttcggcggtgctcaaggtccctctgccggtgatcagccctctgacgacaagaacgtcacagacgtagacttcgaggaagtgaagtaa

SEQ ID NO: 48869 - protein, 640 aa, Porphyromonas gingivalis
MGKIIGIDLGTTNSCVSVLEGNEPIVITNSEGKRTTPSVVAFVDGGERKVGDPAKRQAITNPTKTIYSIKRFMGETYDQVSREVERVPFKVVRGDNNTPRVDIDGRLYTPQEISAMILQKMKKTAEDYLGQEVTEAVITVPAYFNDAQRQATKEAGEIAGLKVRRIVNEPTAASLAYGLDKSNKDMKIAVFDLGGGTFDISILELGDGVFEVKSTNGDTHLGGDDFDHVIIDWLAEEFKSQEGVDLRQDPMAMQRLKEAAEKAKIELSSTSSTEINLPYIMPVNGIPKHLVMTLTRAKFEQLADRLIQACVAPCETALKDAGMSRGDIDEVILVGGSTRIPAIQEIVEKIFGKAPSKGVNPDEVVAVGAAIQGGVLTGEVKDVLLLDVTPLSLGIETMGGVMTRLIDANTTIPTKKSEIFTTAVDNQPSVEIHVLQGERSLAKDNKSIGRFNLDGIAPAPRQTPQIEVTFDIDANGILNVTAHDKATGKKQNIRIEASSGLSDDEIKRMKEEAQANAEADKKEKERIDKINQADSMIFQTEKQLKELGDKFPADKKAPIDTALDKLKEAHKAQDVAAIDTAMAELQTALSAAGEELYKNAGAAQGGAQPGPDFGGAQGPSAGDQPSDDKNVTDVDFEEVK

SEQ ID NO: 48870 - DNA, 1917 bp, Prevotella loescheii
  CDS (1)..(1917): transl_table=11
atgggaaaaattattggaatagacttaggaacaactaacagctgcgttgccgtttttgaaggcaacgagccagtagtaatcgccaatagcgaaggcaaacgcaccacaccttctgtggtaggcttcgttaaagacggcgaaagaaaggtgggcgaccccgccaaacgtcaggccatcaccaaccccaagaacaccgtttactcgattaaacgttttatgggagagacctacgagcagagccgcaaagaggctgaggccatgccttacaccgtaataaacgaaaacggactgcctcgtgttgacatcgaaggtcgcaaatatacaccgcaagaaatatcggcgatgatacttcaaaagatgaagaaaaccgccgaagactatctcggacaggaagtaaccgatgccgttattacggttcctgcatacttctccgactcgcaacgtcaagcaaccaaggaagccggacaaattgctggcctcaacgtacaacgtatcgttaacgagccaacagctgctgctctggcatacggtgtagacaagggcaacaaggacatgaagattgccgtgttcgaccttggtggcggtacgttcgatatatccatcctcgaatttggtggtggcgtattcgaagtgctttctaccaatggcgatacccacttgggtggcgacgacttcgaccaagtgataatcaaatggctggccgatggctttaaagccgacgagggaatcgacctaacgaaggaccccatggccatgcaacgtctgaaagaggctgccgaaaaagctaagattgagctgtcgagcaccacttcaaccgaaatcaacctgccttatatatcggcagagggtggcgtgcccaagcacttggtgaagaccttgacacgtgctcagttcgagcaattggcacacgacttgatacaggcttgtctcgtaccatgccaaaacgccataaaggatgccaagctgtctacctcggatatcgacgaagttatcctcgtaggaggctcgagccgtatccctgccgtgcagacattggtaaagaactacttcggcaaagagccttcgaagggcgttaaccccgacgaagtagtagccgtaggtgctgccattcaaggtgctatcctcaacaaggagagcggtgtgggcgacatcgtgttgctcgacgttacgcctctgacactgggtatcgagacaatgggtggcgtaatgaccaagcttatcgacgccaacaccaccattccgcacaagaagagcgaaacgttctctacagcagtagacaaccaaacggctgtcaccatccacgttttgcagggcgaacgtcctatggcatcgcaaaacaagagcatcggacagttcaacctcgaaggtatcgcacccgctcgtcgcggtgttccacagattgaagtaacgttcgacatcgacgccaacggcatccttaacgtgtctgccaaagataaggccacgggcaaggaacagaagatacgcatcgaggctagcagcggattgagcaaggaagagattgagcgcatgaaggctgaggctgaacaaaacgcagctgccgacaaggccgaacgtgagaaggtagacaagcttaaccaagccgactcgatgattttcaccaccgaaaacttcttgaaagataacggtgacaaaatccctgccgaccaaaagccaggtatcgaaagcgcactgcaacagcttaaagacgcccacaaggctgccgatgttgccgcaatagacgctgccatcaacaaccttaacagcgtgatgcaagctgctagcgcacagatgtatcaaggtgcaggcggtgctcaacccgatcccaacgccggtttccaaggtgcaggcggtgagcaagcacaaggcggtagcactggcgacaatgtgcaagacgcagattttgaggaagtgaagtaa

SEQ ID NO: 48871 - protein, 638 aa, Prevotella loescheii
MGKIIGIDLGTTNSCVAVFEGNEPVVIANSEGKRTTPSVVGFVKDGERKVGDPAKRQAITNPKNTVYSIKRFMGETYEQSRKEAEAMPYTVINENGLPRVDIEGRKYTPQEISAMILQKMKKTAEDYLGQEVTDAVITVPAYFSDSQRQATKEAGQIAGLNVQRIVNEPTAAALAYGVDKGNKDMKIAVFDLGGGTFDISILEFGGGVFEVLSTNGDTHLGGDDFDQVIIKWLADGFKADEGIDLTKDPMAMQRLKEAAEKAKIELSSTTSTEINLPYISAEGGVPKHLVKTLTRAQFEQLAHDLIQACLVPCQNAIKDAKLSTSDIDEVILVGGSSRIPAVQTLVKNYFGKEPSKGVNPDEVVAVGAAIQGAILNKESGVGDIVLLDVTPLTLGIETMGGVMTKLIDANTTIPHKKSETFSTAVDNQTAVTIHVLQGERPMASQNKSIGQFNLEGIAPARRGVPQIEVTFDIDANGILNVSAKDKATGKEQKIRIEASSGLSKEEIERMKAEAEQNAAADKAEREKVDKLNQADSMIFTTENFLKDNGDKIPADQKPGIESALQQLKDAHKAADVAAIDAAINNLNSVMQAASAQMYQGAGGAQPDPNAGFQGAGGEQAQGGSTGDNVQDADFEEVK

SEQ ID NO: 48872 - DNA, 2203 bp, Propionibacterium acnes
  CDS (278)..(2131): transl_table=11
atcccgtattttcactgacgtgaagtgcggaagctgccggacggttcgccgtccggcatttttcatggtcggaaggggtcgtctgaggatgtcttgacgagactttcggtgggtgggaatactcccgccggatcgtcggttgagtgtagcgaactcaacttcatgaaaaatcagccaacgtcaacttgagtgctcgtgactcagggtctagagttgagtcgaagtcgctcaaggggatgtagtcccagaacattcgtccatcaggaggaaaccaactatggcccgttcagtcggtatcgacctcggaaccaccaactcgtgcgtcgccgttcttgagggcggcgagcccactgtcatcccgaacgctgagggtgctcgtaccaccccgtcggtggtcgcattcactaactccggcgagaccctcgtcggcgaagtcgccaagcgccaggccgtcaccaacgttgaccgcactgtccgctccgtcaagcgccatatgggtgaagcgtggaccatgggtgttgacgacaagacttacaagcctcagcagatcagtgcgttcatcctgcagaaactcaagagggatgccgaggcttacctcggtgagccggtgacgaacgccgtcatcaccgtcccggcttacttctctgacgcccagcgtcaggccaccaaggaggccggtgagatcgccggtctggccgtcgaccgtatcgtcaacgagcccaccgcagccgccttggcatatggcctcgataagaccgacaaggaccagaccgtcctggtctttgacctcggtggtggcaccttcgacgtctccctgctcgacatctccgacggcgttttcgaggtgaaggccaccaacggcgataaccacctcggcggtgacgactgggaccagcgcatcgtcgactggctcgtcacccagttcaagaacgctaacggcatcgacctggctgccgacaagatggccaagcagcgtctgcaggaggccgccgagcgcgccaagattgagttgtcgcaggcttctgaaacccatatcaatctgccgtacatcaccgctggtgctgctgggcctctccaccttgacgagaagctgacccgcgctgagttccagcgcatgacctccgacctcctcgagcgctgccgcaccccgttcaacgccgtcatgaaggatgccggactcaacgtctcgcagatcgacgaggtcatcctcgttggtggttcgacccgtatgcccgctgtcgccgagctcgtcaaggaactcgctggtaaggatccgcacaagggcgtcaaccccgatgaggttgtggccctcggcgcctccctgcaagccggtgtgctgaagggtgaggtcaaagatgtactgctcctcgacgtcaccccgctgagcctcggcattgagaccaagggcggcgtgatgaccaagatcatcgagcgcaacaccaccatcccgaccaagcgttcggaggtgttcactactgctgaggacaatcagccgtcggtgatgatccaggtgttccagggtgagcgtgagttcgtccgcgataacaagtcgctgggcaactttgagctgactggtcttatgccggccccgcgcggcatcccgcagatcgaggtgtctttcgacatcgacgccaatggcatcgtccacgtccacgccaaggacatggccaccgggaaggagcagtccatgactgtcaccggcggatccgccctgggcaaggacgagatcgaccgcatggtcaaggaggctgaggccaacgccgaggctgacaagaagcgtcgcgaggccgttgagatgcgtaacgaggccgatgccctggcgttccgtaccgagaagctgctcgacgagaactccgacaagatccccgaggacaccaagactccggtgactgaggccatcgccacattgaaggagaccctgaagggcaccgacaacgacgacgaggttaaggccgccatggacgacctcaaccagaaggcgtccgccatgggtcaggcgatctacgctgccgctcagcaggctcaggccgagaacccgcagggccaggacgcagagtcggccagctcggagtctggtgatgacaccgtcgtggatgcggaaatcgtcgacgacgaggacgagaaaaagtgaccggggccacggcctgaccccagccccgccgccgggtcgccatcgcgatggcccggcggccggcactcacgt

SEQ ID NO: 48873 - protein, 617 aa, Propionibacterium acnes
MARSVGIDLGTTNSCVAVLEGGEPTVIPNAEGARTTPSVVAFTNSGETLVGEVAKRQAVTNVDRTVRSVKRHMGEAWTMGVDDKTYKPQQISAFILQKLKRDAEAYLGEPVTNAVITVPAYFSDAQRQATKEAGEIAGLAVDRIVNEPTAAALAYGLDKTDKDQTVLVFDLGGGTFDVSLLDISDGVFEVKATNGDNHLGGDDWDQRIVDWLVTQFKNANGIDLAADKMAKQRLQEAAERAKIELSQASETHINLPYITAGAAGPLHLDEKLTRAEFQRMTSDLLERCRTPFNAVMKDAGLNVSQIDEVILVGGSTRMPAVAELVKELAGKDPHKGVNPDEVVALGASLQAGVLKGEVKDVLLLDVTPLSLGIETKGGVMTKIIERNTTIPTKRSEVFTTAEDNQPSVMIQVFQGEREFVRDNKSLGNFELTGLMPAPRGIPQIEVSFDIDANGIVHVHAKDMATGKEQSMTVTGGSALGKDEIDRMVKEAEANAEADKKRREAVEMRNEADALAFRTEKLLDENSDKIPEDTKTPVTEAIATLKETLKGTDNDDEVKAAMDDLNQKASAMGQAIYAAAQQAQAENPQGQDAESASSESGDDTVVDAEIVDDEDEKK

SEQ ID NO: 48874 - DNA, 1914 bp, Pseudomonas aeruginosa
  CDS (1)..(1914): transl_table=11
atgggcaaaatcattggcatcgacctgggtaccaccaactcctgcgtggctatcctggagaacggtaacgtcaaggtcatcgagaacgccgagggcgcgcgtaccaccccctcgatcatcgcctacaccaacgatggcgaaaccctggtgggccagccggccaagcgccaggcggtcaccaacccgcagaacaccctgtatgcggtgaagcgcctgatcggccgtcgcttcgaagagaacgtggttcagaaagacatccagatggtgccgtacagcatcgtcaaggccgacaacggcgacgcctgggtggaagtgaagggccagaagatggcgcctccgcagatttccgccgaagtgctgaagaaaatgaagaagaccgccgaagactacctcggcgagccggtcaccgaagcggtgatcaccgttccggcctacttcaacgacagccagcgccaggccaccaaggacgccggccgcatcgccggcctcgacgtcaagcggatcatcaacgagccgaccgcggcggcgctggcctacggcctggacaaggccaagggcgaccacaccgtgatcgtctatgacctgggcggcggtaccttcgacgtgtcggtgatcgagatcgccgaagtcgacggcgagcaccagttcgaagtgctggccaccaacggcgacaccttcctcggcggcgaagacttcgacatccgcctgatcgactacctcgtcgacgagttcaagaaggaaagcggcatcaacctgaagggcgacccgctggccatgcagcgtctgaaggaagcggccgagaaagccaagatcgagctgtcctcgacccagcagaccgacgtcaacctgccgtacgtgactgccgacgcgagcggtccgaagcacctgaacgtcaaggtttcccgcgccaagctggagtccctggtcgaagacctggtgcagcgcaccatcgagccgtgccgcaccgcgctgaaggatgccggcctggatgtttccgatatccatgaagtgatcctggtcggcggccagacccgcatgccgctggtacagaagaccgttgccgagttcttcggcaaggaagcgcgcaaggacgtcaacccggacgaagccgtggctgtcggtgccgccatccagggcgcggtcctggccggcgacgtgaaggacgtgctgctgctcgacgtgaccccgctgaccctcggcatcgagaccctgggcggcgtgatgaccggtctgatcgagaagaacaccaccatcccgaccaagaagtcgcaggtgttctccaccgccgacgacaaccagggcgcggtgaccatccacgtgctgcagggcgagcgcaagcaggccgcgcagaacaagtcgctgggcaagttcgacctggccgacattccgccggctccgcgcggcgtgccgcagatcgaggtgaccttcgatatcgatgccaacggcatcctgcacgtctcggcgaaggacaaggccaccggcaagcagcagtccatcgtgatcaaggcatcctccggcctgtccgaggatgagatccagcagatggtccgcgatgccgaggcgaacgccgaggaggaccgcaagttcgaggaactggctgccgctcgcaaccagggcgacgcgctggtccacgcgacccgcaagatgatcaccgaggcgggcgacaaggccaccgccgaggacaaggcgaccatcgagaaggcgctgggcgagctggaagcggcggtgaagggcgacgacaaggccgagatcgaggccaagatgaacgctctgtcccaggcttccaccccgctggcgcagaagatgtacgccgaacaggcccagcagggcgaagacgctccccagggcgagcaggcgaaagccgctgacgacgtggtggacgccgagttcgaagaggtcaaggacaacaagtaa

SEQ ID NO: 48875 - protein, 637 aa, Pseudomonas aeruginosa
MGKIIGIDLGTTNSCVAILENGNVKVIENAEGARTTPSIIAYTNDGETLVGQPAKRQAVTNPQNTLYAVKRLIGRRFEENVVQKDIQMVPYSIVKADNGDAWVEVKGQKMAPPQISAEVLKKMKKTAEDYLGEPVTEAVITVPAYFNDSQRQATKDAGRIAGLDVKRIINEPTAAALAYGLDKAKGDHTVIVYDLGGGTFDVSVIEIAEVDGEHQFEVLATNGDTFLGGEDFDIRLIDYLVDEFKKESGINLKGDPLAMQRLKEAAEKAKIELSSTQQTDVNLPYVTADASGPKHLNVKVSRAKLESLVEDLVQRTIEPCRTALKDAGLDVSDIHEVILVGGQTRMPLVQKTVAEFFGKEARKDVNPDEAVAVGAAIQGAVLAGDVKDVLLLDVTPLTLGIETLGGVMTGLIEKNTTIPTKKSQVFSTADDNQGAVTIHVLQGERKQAAQNKSLGKFDLADIPPAPRGVPQIEVTFDIDANGILHVSAKDKATGKQQSIVIKASSGLSEDEIQQMVRDAEANAEEDRKFEELAAARNQGDALVHATRKMITEAGDKATAEDKATIEKALGELEAAVKGDDKAEIEAKMNALSQASTPLAQKMYAEQAQQGEDAPQGEQAKAADDVVDAEFEEVKDNK

SEQ ID NO: 48876 - DNA, 1917 bp, Pseudomonas fluorescens
  CDS (1)..(1917): transl_table=11
atgggcaagattatcggtattgacttggggaccaccaactcgtgcgtctccattcttgaaaacggcaacgtaaaagttatcgaaaacgctgaaggcgcgcgtaccacgccgtcgatcatcgcgtacgccaacgatggcgaaatcctggtaggtcagtcggccaagcgtcaggctgtcaccaacccgcacaacaccctgtacgcagtaaagcgtctgatcggtcgtcgcttcgacgaagaagttgtgcagaaagacatccagatggtcccttacaagatcgtcaaggctgacaacaacgacgcctgggttgaagtgaacggccagaaaatggctccgccacagatctcggctgaaatcctcaagaaaatgaagaagaccgccgaagactacctcggcgaagccgtgaccgaagcggtcatcactgttccggcctacttcaacgacagccagcgccaggcgaccaaagacgccggccgcatcgcaggcctggacgtcaaacgtatcatcaacgaaccaaccgcagccgctctggcctacggtatggacaaggccaagggcgatcacaccgtgatcgtttacgacctgggcggtggtactttcgacgtttcggtgatcgaaatcgctgaagtcgatggcgagcaccagttcgaagtgctggccaccaacggtgacaccttcctcggtggtgaagacttcgacatccgcttgatcgactacctggttgatgagttcaagaaagaaagcggcatgaacctcaagggtgacccgctggccatgcagcgcctgaaagaagctgccgagaaagccaagatcgagctgtcctcgagccagcagaccgacgtcaacctgccgtacatcactgcagatgccaccggtcctaagcacctgaacgtgaagatttcccgcgccaagctggagtcgctggttgaagacctggttcagcgcaccatcgagccttgccgtatcgcgctcaaagacgccggtatcgacgtgggttcgatcaacgatgtgatcctggtcggcggccagacccgtatgccgctggtacagaagaccgtaaccgacttcttcggtaaggaagcccgcaaggacgtcaacccggacgaagctgttgccatgggtgctgccatccagggtgcggtactggccggcgacgtgaaagacgtactgctgctggacgtcagcccgctgaccctgggtatcgaaaccatgggtggcgtgatgaccgcgctgatcgagaaaaacaccacgattcctaccaagaaatcccaagtgttctcgactgccgacgacaaccagggcgcagtgaccattcacgtactgcagggcgagcgcaagcaagccgcgcagaacaagtccctgggcaagttcgacctggccgacattccaccagctccacgtggcgtgccgcagatcgaagtgaccttcgacatcgacgccaacggcatcctgcacgtaggtgcgaaggacaaggctaccggcaagactcagtcgatcgtgatcaaggccaactcgggtctgtcggatgaagagatccagcagatgatccgtgacgcggaagccaactcggaagaggatcgcaagttcgaagagctggccaccgcccgtaaccagggtgatgcgctggtgcactcgactcgcaagatggtggctgacgccggtgacaaagtgaccgcggaagagaaaaccgcaatcgaagccgccgtggttgccctggaagctgccgtcaagggcgacgacaaggccgccatcgacgccaaggtcgaagagctgtcgaaagtctcggccccggttgcccagaagatgtacgccgaacaggcccagcctgcagaaggcgcggcaccgcacgccgagtccgctgaaaaagccgacgatgtcgtcgacgccgagttcgaagaagtaaaagaccacaagtaa

SEQ ID NO: 48877 - protein, 638 aa, Pseudomonas fluorescens
MGKIIGIDLGTTNSCVSILENGNVKVIENAEGARTTPSIIAYANDGEILVGQSAKRQAVTNPHNTLYAVKRLIGRRFDEEVVQKDIQMVPYKIVKADNNDAWVEVNGQKMAPPQISAEILKKMKKTAEDYLGEAVTEAVITVPAYFNDSQRQATKDAGRIAGLDVKRIINEPTAAALAYGMDKAKGDHTVIVYDLGGGTFDVSVIEIAEVDGEHQFEVLATNGDTFLGGEDFDIRLIDYLVDEFKKESGMNLKGDPLAMQRLKEAAEKAKIELSSSQQTDVNLPYITADATGPKHLNVKISRAKLESLVEDLVQRTIEPCRIALKDAGIDVGSINDVILVGGQTRMPLVQKTVTDFFGKEARKDVNPDEAVAMGAAIQGAVLAGDVKDVLLLDVSPLTLGIETMGGVMTALIEKNTTIPTKKSQVFSTADDNQGAVTIHVLQGERKQAAQNKSLGKFDLADIPPAPRGVPQIEVTFDIDANGILHVGAKDKATGKTQSIVIKANSGLSDEEIQQMIRDAEANSEEDRKFEELATARNQGDALVHSTRKMVADAGDKVTAEEKTAIEAAVVALEAAVKGDDKAAIDAKVEELSKVSAPVAQKMYAEQAQPAEGAAPHAESAEKADDVVDAEFEEVKDHK

SEQ ID NO: 48878 - DNA, 1917 bp, Pseudomonas fluorescens
  CDS (1)..(1917): transl_table=11
atgggcaaaattatcggtatcgacctggggactaccaactcctgcgtctccgtgctggaaaacggcaaagccaaagttattgagaacgctgaaggcgcgcgcaccacgccgtcgatcatcgcttacgccaacgatggcgaaatcctggtcggtcagtcggccaagcgtcaggctgtgaccaacccgcacaacacccttttcgcagtgaagcgtctgatcggtcgccgcttcgaagaagaagttgtacagaaagacatcaagctggtgccttacaagatcgtcaaggctaacaatggtgacgcttgggtcgaggcctccggcaagcagatggctccgccgcaaatcagcgccgaagtcctgaaaaagatgaagaagaccgccgaagactatctcggtgaggctgtgaccgaagcggtgatcaccgttccggcgtacttcaacgacagtcagcgtcaggcaactaaagatgctggccgcatcgccggtctggacgtaaaacgtatcatcaatgaaccgaccgctgctgctctggcttacggtatggacaaggccaagggcgatcacaccgtgatcgtttacgacctcggtggtggtactttcgacgtctccgtgatcgagatcgctgaagttgacggcgagcaccagttcgaagtgctggccaccaacggcgacaccttcctgggtggcgaagacttcgacatgcgcctgatcgactacctcgtcgacgagttcaagaaagagtccggcatggacctgaagaacgatcctctggccctgcagcgtctgaaagaagccgctgagaaagccaagatcgagctgtcttcctcgcagtcgaccgacgtcaacctgccgtacattactgcagacgcgaccggtccgaagcatctgaatgtgaagatctcccgtgccaagctcgaatcgctggttgaagatctggtgactcgtaccatcgagccatgccgcattgctctgaaagacgccggcatcgacgccagcaagattgacgacgtgatcctggtcggcggtcagacccgtatgccgatggtgcagaaagctgtttcggatttcttcggtaaagaagcacgtaaagacgtgaacccggacgaagctgttgccatgggtgctgcgatccagggcgccgttctggccggtgacgtgaaagacgttctgctgctcgacgtcagcccgctgaccctgggtatcgaaaccatgggtggcgtgatgaccgcgctgatcgagaaaaacaccacgattcctaccaagaaatcgcaagtgttctcgacggccgacgacaaccagggcgccgtgaccattcacgtcctgcaaggcgagcgcaagcaagccgcacagaacaagtccttgggcaagttcgacctggccgatattccacctgctccacgtggtgtgccgcagatcgaagtgaccttcgacatcgacgccaacggcatcctgcacgtaggtgcgaaggacaaggcgactggcaaagagcagaagatcaccatcaaggccaactctggtctgtcggatgaagaaatccagaagatggtgcgcgacgccgagctgaacgccgaggaagaccgcaagttcgaagagctggccgctgcccgtaaccagggtgatgcactggttcactcgactcgcaagatgatcgccgacgctggcgacaaagtgactgcagaagagaagactgcaatcgaagcggctgtggttgccctggaagctgccgtcaaaggcgacgacaaggctgccattgacgccaaggttgaagagctgtcgaaagtctctgcaccggttgctcagaagatgtacgccgaacaggctcagcctgctgaaggcgcagcaccgcacgacgagaaagctgaaaaggctgacgatgttgttgatgccgagttcgaagaagtcaaagaccacaagtaa

SEQ ID NO: 48879 - protein, 638 aa, Pseudomonas fluorescens
MGKIIGIDLGTTNSCVSVLENGKAKVIENAEGARTTPSIIAYANDGEILVGQSAKRQAVTNPHNTLFAVKRLIGRRFEEEVVQKDIKLVPYKIVKANNGDAWVEASGKQMAPPQISAEVLKKMKKTAEDYLGEAVTEAVITVPAYFNDSQRQATKDAGRIAGLDVKRIINEPTAAALAYGMDKAKGDHTVIVYDLGGGTFDVSVIEIAEVDGEHQFEVLATNGDTFLGGEDFDMRLIDYLVDEFKKESGMDLKNDPLALQRLKEAAEKAKIELSSSQSTDVNLPYITADATGPKHLNVKISRAKLESLVEDLVTRTIEPCRIALKDAGIDASKIDDVILVGGQTRMPMVQKAVSDFFGKEARKDVNPDEAVAMGAAIQGAVLAGDVKDVLLLDVSPLTLGIETMGGVMTALIEKNTTIPTKKSQVFSTADDNQGAVTIHVLQGERKQAAQNKSLGKFDLADIPPAPRGVPQIEVTFDIDANGILHVGAKDKATGKEQKITIKANSGLSDEEIQKMVRDAELNAEEDRKFEELAAARNQGDALVHSTRKMIADAGDKVTAEEKTAIEAAVVALEAAVKGDDKAAIDAKVEELSKVSAPVAQKMYAEQAQPAEGAAPHDEKAEKADDVVDAEFEEVKDHK

SEQ ID NO: 48880 - DNA, 1926 bp, Pseudomonas putida
  CDS (1)..(1926): transl_table=11
atgggtaaaatcatcggtatcgacctggggaccaccaactcgtgcgtctccattctggaaaacggtaacgtcaaagtcatcgaaaacgccgaaggtgcgcgtactaccccttcgatcgtggcctacgccaacgatggcgaaatcctggtcggccagtcggccaagcgccaggcagtcaccaacccgcacaacaccctgttcgcagtgaagcgcctgattggccgccgcttcgaagaagatgtcgtgcagaaagacatcaagctggtgccgtacaagatcgtcaaggcgaacaacggtgacgcctgggtcgaggctgctggcaaggaaatggctccgccgcagatcagtgccgaagtcctgaagaaaatgaagaagaccgccgaagactacctcggcgagccagtcaccgaagcggtcatcaccgttccggcctacttcaacgacagccagcgtcaggcgaccaaagacgccggccgcatcgctggcctggacgtaaaacgcatcatcaacgagccgactgccgctgcactggcttacggcatggacaaggccaagggcgaccacaccgtcatcgtttatgacctgggtggtggtaccttcgacgtttcggtcatcgaaatcgccgaagtcgacggtgagcaccagttcgaagtactggctaccaacggcgacaccttcctgggtggcgaagacttcgacatgcgcctgatcgactaccttgtcgacgagttcaagaaagagtcgggcatggacctgaagaacgatcctctggccctgcagcgtctgaaagaagccgcagaaaaagccaagatcgagctgtcgtccgctcagtcgaccgacgtcaacctgccgtacatcactgcagatgccaccggtcctaagcacctgaacgtgaagatctcccgcgccaagctggagtcgctggtcgaagacctggtcaagcgtaccatcgagccttgccgcatcgccctgaaagacgccggcatcgacgccagcaagatcgacgacgtgatcctggtcggtggtcagacccgcatgccgctggtgcagaaagaagtggccgacttcttcggtaaagaagcgcgcaaggacgtcaacccggacgaagccgttgccatgggtgctgccatccagggtgcggtactggccggtgacgtgaaagacgtcctgctgctggacgtcagcccgctgaccctgggtatcgaaaccatgggcggcgtgatgaccgcgctgatcgagaagaacaccaccatcccgaccaagaagtcgcaggtgttctcgactgccgacgacaaccagagcgccgtgaccattcacgtgctgcaaggtgagcgtaagcaggctgcgcagaacaagtcgctgggcaagttcgacctggctgacattccgccagcaccgcgcggcgtgccgcaaatcgaagtgaccttcgacatcgacgccaacggcatcctgcacgtaggtgcgaaagacaaggccaccggcaagactcagtcgatcgtgatcaaggccaactccggcctgtcggacgaagagatcgagcgtatggtgcgtgacgccgaggccaacgccgaggaagaccgcaagttcgaagagctggctgctgcccgtaaccagggtgacgcgctggtacactcgacccgcaagatggtcgctgacgcaggtgacaaggttaccgctgaagagaaaaccgccatcgaggccgccgttgttgccctggaagccgctgtcaaaggcgacgacaaggctgccatcgacgccaaggttgaagagctgtccaaggtctctgccccggttgcccagaagatgtacgccgagcagtcggctgaacagcctcagggtggcgcgcagcaggccgagccggaagccaagcacgatgacgtggttgacgccgagttcgaagaagtgaaagacaacaacaagcagtaa

SEQ ID NO: 48881 - protein, 641 aa, Pseudomonas putida
MGKIIGIDLGTTNSCVSILENGNVKVIENAEGARTTPSIVAYANDGEILVGQSAKRQAVTNPHNTLFAVKRLIGRRFEEDVVQKDIKLVPYKIVKANNGDAWVEAAGKEMAPPQISAEVLKKMKKTAEDYLGEPVTEAVITVPAYFNDSQRQATKDAGRIAGLDVKRIINEPTAAALAYGMDKAKGDHTVIVYDLGGGTFDVSVIEIAEVDGEHQFEVLATNGDTFLGGEDFDMRLIDYLVDEFKKESGMDLKNDPLALQRLKEAAEKAKIELSSAQSTDVNLPYITADATGPKHLNVKISRAKLESLVEDLVKRTIEPCRIALKDAGIDASKIDDVILVGGQTRMPLVQKEVADFFGKEARKDVNPDEAVAMGAAIQGAVLAGDVKDVLLLDVSPLTLGIETMGGVMTALIEKNTTIPTKKSQVFSTADDNQSAVTIHVLQGERKQAAQNKSLGKFDLADIPPAPRGVPQIEVTFDIDANGILHVGAKDKATGKTQSIVIKANSGLSDEEIERMVRDAEANAEEDRKFEELAAARNQGDALVHSTRKMVADAGDKVTAEEKTAIEAAVVALEAAVKGDDKAAIDAKVEELSKVSAPVAQKMYAEQSAEQPQGGAQQAEPEAKHDDVVDAEFEEVKDNNKQ

SEQ ID NO: 48882 - DNA, 1947 bp, Ralstonia metallidurans
  CDS (1)..(1947): transl_table=11
atgggtaagatcatcggtatcgacctcggtaccaccaacagctgcgtgtccattctggaaggcaacacgccgaaagtcatcgagaactccgaaggcgcacgcaccacgccgtcgatcatcgcctacatggaagatggcgagatcctggttggtgcgcctgccaagcgccaggccgtcaccaacccgcgtaacacgctgtacgcggtgaagcgcctgatcggccgcaagttcgaagagaaggaagtccagaaggacatcggcctgatgccgtacgcgatcgtcaaggccgacaacggcgacgcctgggttggcgtgcgcgaccagaagctggccccgccgcaggtttcggccgaagtgctgcgcaagatgaagaagaccgccgaggactacctgggcgagcccgtgaccgaagccgtgatcacggtgccggcgtacttcaacgactcgcagcgccaggcaaccaaggatgccggccgcatcgccgggctggacgtcaagcgcatcatcaacgaaccgaccgctgcagcgctggcgttcggcatggacaagaacgagaagggcgaccgcaagattgccgtgtatgacctcggcggcggcacgttcgacatctcgattatcgaaatcgccgacgtggatggcgaaaagcagttcgaagtgctgtcgaccaacggcgacacgttcctcggtggcgaggacttcgaccagcgcatcatcgactacatcatcggcgagttcaagaaggaacagggcgtcgatctgtcgaaggacgtgctggcgctgcaacgcctgaaggaagccgctgaaaaggccaagatcgaactgtcgagctcgcagcagaccgagatcaacctgccgtacatcacggccgatgcctcgggtccgaagcacttgaacctgaagatcacgcgcgccaagctcgaagcgctggtggaagaactgatcacccgcacgatcgaaccgtgccgtaccgcgatcaaggatgcaggcgtcaaggtcagcgacattgatgacgtgatcctggtcggcggcatgacccgtatgccgaaggtgcaggaacaggtgcgcgagttcttcggcaaggaagcccgcaaggacgtgaacccggacgaagccgtggccgtgggtgccgccatccagggttcggtgctgtcgggcgaccgtaccgacgtgctgctgctggacgtgacgccgctgtcgctgggcatcgaaacgctgggtggcgtgatgaccaagatgatcaacaagaacacgaccatcccgaccaagcacgcacaggttttctcgaccgctgacgacaatcagccggccgtgacgatcaaggtgtaccagggcgagcgcgagatggccaccggcaacaagatgctgggcgagttcaacctggaaggcattgcgccggcaccgcgtggcacgccgcagatcgaggtctcgttcgacatcgacgccaacggcattctgcatgtgggcgccaaggacaaggccaccggcaaggaaaaccgcatcacgatcaaggcgaactcgggtctgtcggaagacgagatccagcgcatggtgaaggatgccgaagccaatgccgaggaagacaagcgcgcccgtgagctggccgatgcccgcaaccaggccgacgcgctgatccactcgacgcgcaaggcgctgggcgagtacggcgagaagctcgaagctggcgagaaggaaaagatcgaagccgcgatcaaggacctggaagacgccgcccgcggcggtgacaaggccgagatcgatgccaaggtcaacgcgctgtccgaagccagccagaagctgggcgagaaggtctacgccgacatgcaggcccaggccggtgaaggtgcggcggcaggtgccggcgcagccggcggcgctcagcagcaggcccagccgcaggacgacaacgtcgtggatgccgagttcaaggaagtgaacgacaagaagtaa

SEQ ID NO: 48883 - protein, 648 aa, Ralstonia metallidurans
MGKIIGIDLGTTNSCVSILEGNTPKVIENSEGARTTPSIIAYMEDGEILVGAPAKRQAVTNPRNTLYAVKRLIGRKFEEKEVQKDIGLMPYAIVKADNGDAWVGVRDQKLAPPQVSAEVLRKMKKTAEDYLGEPVTEAVITVPAYFNDSQRQATKDAGRIAGLDVKRIINEPTAAALAFGMDKNEKGDRKIAVYDLGGGTFDISIIEIADVDGEKQFEVLSTNGDTFLGGEDFDQRIIDYIIGEFKKEQGVDLSKDVLALQRLKEAAEKAKIELSSSQQTEINLPYITADASGPKHLNLKITRAKLEALVEELITRTIEPCRTAIKDAGVKVSDIDDVILVGGMTRMPKVQEQVREFFGKEARKDVNPDEAVAVGAAIQGSVLSGDRTDVLLLDVTPLSLGIETLGGVMTKMINKNTTIPTKHAQVFSTADDNQPAVTIKVYQGEREMATGNKMLGEFNLEGIAPAPRGTPQIEVSFDIDANGILHVGAKDKATGKENRITIKANSGLSEDEIQRMVKDAEANAEEDKRARELADARNQADALIHSTRKALGEYGEKLEAGEKEKIEAAIKDLEDAARGGDKAEIDAKVNALSEASQKLGEKVYADMQAQAGEGAAAGAGAAGGAQQQAQPQDDNVVDAEFKEVNDKK

SEQ ID NO: 48884 - DNA, 2934 bp, Rhizobium leguminosarum
  CDS (230)..(2146): transl_table=11
gctttccggacatggggcgacctctttcccggctactgtaaaattgacgcaacacatcgtttgctggattccggggcatttctcgccttgcagtccagaaaaccgctccttatatacgccgcatcaccgcaatcacgattgcgtaatcgcaagtagacccatcccgtaaggggctgtcagggaaatgccttctcggggttccgacagcttgcttcaaggagagaatgacatggcaaaagttattggtatcgaccttggaacgacgaattcctgcgtcgcagtcatggacggcaaggacgcgaaggttatcgagaatgcggaaggtgcacgcacgaccccttccatggtggcattttccgatgatggcgaacgtctcgtcggccagccggccaagcgccaggcagtcaccaacccgacgaacacgctctttgcggtcaagcgcctgatcggccgccgctacgaagatccgaccgtcgagaaggacaagcacctcgttcccttcaccatcgtcaagggcgacaatggcgacgcctgggtcgaagccaatggcaagggctattcgcccgcacagatttccgcgatgatccttcagaagatgaaggaaaccgccgaatcctatctcggcgaaaaggtcgagaaggccgttatcaccgttcccgcctatttcaacgacgcgcgcccagggcaaccaaggatgccggccgcatcgctgggtcttgaagttctgcgcatcatcaacgagccgaccgctgcagccctcgcctacggcctcgacaagaaagaaggcaagacaattgccgtctacgaccttggcggcggcaccttcgatatttcgatcctcgagatcggcgacggcgtcttcgaagtgaagtccaccaacggcgatactttcctcggcggtgaagacttcgacatgcgtctcgtcgaatatctcgttgccgagttcaagagggacaacggcatcgacctgaagaacgacaagcttgccctgcagcgcctcaaggaagctgcggaaaaggcaaagatcgagctttcgtcctcgcagcagaccgaaatcaacctgccgttcatcacggccgacgcctccggcccgaagcatctgacgctgaagctgacccgcgccaagctcgagagcctggtcgacgatctcgtccagcgcacgatcgcgccgtgcaaggcagcgctcaaggatgccggtgtcaccgctgccgaaatcgacgaagtggttctcgtcggtgggatgagccgcatgccgaaagtacaggaagtcgtcaagcagctgttcggcaaggagccgcataagggcgtcaacccggatgaagtggtggcgcttggtgctgccatccaggccggcgttctgcagggcgacgtcaaggatgtcctgctcctcgacgtgacgccgctgtcgctcggcatcgagaccctaggtggtgtcttcacccgcctgatcgaacgcaacacgacgatcccgacgaagaagagccagaccttctcgaccgccgaagacaaccagcaggccgtgaccatccgcgtttcacagggcgagcgtgaaatggctgccgacaacaagctgctcggccagttcgacctcgtttgtctgccaccgtcgccgcgcggcatgccgcagatcgaagtcaccttcgacatcgacgccaacggcatcgtgcaggtttcggccaaggacaagggcaccggcaaggaacagcagatccgcatccaggcttccggcggtctttccgacgccgacatcgagaagatggtgaaggatgccgaagcccatgccaccgaagacaagaagcgccgcgaggccgtcgaagcccggaaccaggctgaaagcctgatccattcctcggaaaagtcgctgaaagattacggtgacaaggtttccgaggccgaccgcaccgcgatctcggatgcgatcgccgcgctgaagacggcgtcggaagcgtcggagcccgatgccgacgacatcaaggccaagacccagacgctgatggaagtgtcgatgaagctcggccaggcgatctatgaagcacagcaggccgaaagcggcgctgctggcatgcctccgccgaaggcgggcgacaatgtcgtcgatgccgactacgaggaaatcaaggacgacgaccgcaagaagtccgcgtaatccgcgacggcgtggttatgcttcaacacctgatccggctgctcaccatggcagccggaaaatccatttccggggtttaatccttaatggcaaaagcggacttttacgaaactctgggtgtagccaagtcggcggacgagaaagagctgaaaagcgccttccgcaaactggcgatgaaatttcatccggacaaaaacccggatgacaaggacgccgaacggaagttcaaggaaatcaacgaagcctacgagatgctcaaggacccgcagaagcgggcggcctatgatcgctatggccatgcggctttcgagcatggcggcatgggcggcggtggcggcggatttgccggcggcggtttctccgacatcttcgaggatatcttcggcgaaatgatgggtggtggggccgctcgccagcgctcgtcgggcggccgcgagcgtggtgccgatcttcgctacaacatggaaataacgctggaagaatctttctccggcaagacggcgcagatccgcgttcccacctcgatcacctgcgacgtctgtacgggttcgggcgccaagcccggcacgcagccaaagaactgcggcacctgccagggaacggggcgcgtgcgcgcggcacagggcttcttctcgatcgagcggacctgcccgacctgccatggccgcggccagatcattcccgatccctgcccgaagtgccacggccagggccgggtgacggaagagcgttcgctctcggtcaacatccctgccggcatcgaggacggcacgcgcatccggctgcag

SEQ ID NO: 48885 - protein, 638 aa, Rhizobium leguminosarum
MAKVIGIDLGTTNSCVAVMDGKDAKVIENAEGARTTPSMVAFSDDGERLVGQPAKRQAVTNPTNTLFAVKRLIGRRYEDPTVEKDKHLVPFTIVKGDNGDAWVEANGKGYSPAQISAMILQKMKETAESYLGEKVEKAVITVPAYFNDARPGQPRMPAASLGLEVLRIINEPTAAALAYGLDKKEGKTIAVYDLGGGTFDISILEIGDGVFEVKSTNGDTFLGGEDFDMRLVEYLVAEFKRDNGIDLKNDKLALQRLKEAAEKAKIELSSSQQTEINLPFITADASGPKHLTLKLTRAKLESLVDDLVQRTIAPCKAALKDAGVTAAEIDEVVLVGGMSRMPKVQEVVKQLFGKEPHKGVNPDEVVALGAAIQAGVLQGDVKDVLLLDVTPLSLGIETLGGVFTRLIERNTTIPTKKSQTFSTAEDNQQAVTIRVSQGEREMAADNKLLGQFDLVCLPPSPRGMPQIEVTFDIDANGIVQVSAKDKGTGKEQQIRIQASGGLSDADIEKMVKDAEAHATEDKKRREAVEARNQAESLIHSSEKSLKDYGDKVSEADRTAISDAIAALKTASEASEPDADDIKAKTQTLMEVSMKLGQAIYEAQQAESGAAGMPPPKAGDNVVDADYEEIKDDDRKKSA

SEQ ID NO: 48886 - DNA, 1917 bp, Rhizobium loti
  CDS (1)..(1917): transl_table=11
atggcaaaagtaatcggtatcgatctcggcaccaccaattcctgcatcgccatcatggatggcaaggagcccaaggtaatcgagaatgcggaaggcgcgcgcacgacgccttccatcgtcgccatctcgggcgacggcgaacgtctggtcggccagccggccaagcgccaggcggtcaccaatcctgaaaacaccatcttcgcggtcaagcgcctgatcggccgccgttatgacgatccggtgacggaaaaggacaagaagcttgtcccctacaagatcgtcaagggcgacaatggcgatgcctgggtcgaggccggcggcaagaagcagtcgcccagccagatctcggccatgatcctgcagaagatgaaggaaacggcggaagcctatctcggcgagaaggtcgagaaggcggtcatcaccgttccggcctatttcaacgacgcccagcgccaggccaccaaggacgccggcaagatcgccggcctcgaagtgctgcgcatcatcaacgagcctacggctgccgcactcgcctacggcctcgacaagaaggatggcaagaccattgccgtctatgaccttggcggcggcacgttcgacatttcggtgctcgaaatcggcgacggcgtgttcgaggtgaagtcgaccaatggcgacaccttcctcggcggcgaggatttcgacatgcgcctggtcgaatatctggcggccgagttcaagaaggaacagggcatcgacctgaagaacgacaagcttgccttgcagcgcctcaaggaggcggctgaaaaggccaagatcgagctgtcgtccaccacgcagaccgaaatcaacctgcccttcatcaccgccgacgcgaccggcccgaagcacctgacgctgaagctgacgcgcgccaagttcgaaagcctggtcgaagacctcgtccagcgcaccatcgacccgtgcaaggcggcgctcaaggatgccgggctgaaggctggcgagatcgacgaagtggtcctggtcggcggcatgacccgcatgcccaagatccaggagatcgtgaagcagttcttcggcaaggagccgcacaagggcgtcaacccggatgaggtcgtcgctctcggcgccgccatccaggccggcgtgctgcagggcgacgtcaaggacgtgctgttgctcgacgtgacgccgctgtcgctcggcattgagacgctgggcggcgtgttcacccggctgatcgagcgcaacacgacgatcccgaccaagaagagccaggtgttctcgaccgccgaggattcgcagtcggccgtgaccatccgcgtcttccagggtgagcgtgaaatggccgccgacaacaaggcgctcggccagttcgacctggtcggcattccgccggcgccgcgcggcgtgccgcagatcgaggtcaccttcgacatcgacgccaacggcatcgtcaacgtttcggccaaggacaagggcaccggcaaggagcatcagatccgcatccaggcctcgggtggtctttcggacgccgacatcgagaagatggtcaaggacgccgaagccaatgccgagaccgacaagaagcggcgcgccgtggtcgaggcccgcaaccaggccgaggcgctggtgcattcgtccgagaagtcgctgaaggaatatggcgacaaggtctcggaagccgagcgcacggcgatttccgatgccatcgcggcgttgaagaccgccgccgagggcgacgacgcggccgacatcgaggccaagagccaggcgctcgccgaagcttcgatgaagctcggccaggccatgtacgaggcctcgcagaaggaagcggcggaagccgacgccaaggcggatgccgccaaggactccgacgtggtcgatgccgatttcgaggaaatcgacgaggacgacgacaagaagaagtcggcctga

SEQ ID NO: 48887 - protein, 638 aa, Rhizobium loti
MAKVIGIDLGTTNSCIAIMDGKEPKVIENAEGARTTPSIVAISGDGERLVGQPAKRQAVTNPENTIFAVKRLIGRRYDDPVTEKDKKLVPYKIVKGDNGDAWVEAGGKKQSPSQISAMILQKMKETAEAYLGEKVEKAVITVPAYFNDAQRQATKDAGKIAGLEVLRIINEPTAAALAYGLDKKDGKTIAVYDLGGGTFDISVLEIGDGVFEVKSTNGDTFLGGEDFDMRLVEYLAAEFKKEQGIDLKNDKLALQRLKEAAEKAKIELSSTTQTEINLPFITADATGPKHLTLKLTRAKFESLVEDLVQRTIDPCKAALKDAGLKAGEIDEVVLVGGMTRMPKIQEIVKQFFGKEPHKGVNPDEVVALGAAIQAGVLQGDVKDVLLLDVTPLSLGIETLGGVFTRLIERNTTIPTKKSQVFSTAEDSQSAVTIRVFQGEREMAADNKALGQFDLVGIPPAPRGVPQIEVTFDIDANGIVNVSAKDKGTGKEHQIRIQASGGLSDADIEKMVKDAEANAETDKKRRAVVEARNQAEALVHSSEKSLKEYGDKVSEAERTAISDAIAALKTAAEGDDAADIEAKSQALAEASMKLGQAMYEASQKEAAEADAKADAAKDSDVVDADFEEIDEDDDKKKSA

SEQ ID NO: 48888 - DNA, 1926 bp, Rhizobium meliloti
  CDS (1)..(1926): transl_table=11
atggctaaagttattggtattgacctgggaacgaccaactcctgcgtctccgtcatggacggcaaggacgcgaaggtgatcgagaacgcggagggcgcgcgcacgaccccctccatggtggcattcaccgaagacggcgaacgtctcgtcggccagccggccaagcgccaggcggtgaccaatccagaaaacacgctttttgcgatcaagcgcctgatcggccgcaccttcgaggatcccacgacccagaaggacaaggggatggtcccctacaagatcgtcaaggccgacaatggcgacgcctgggtcgaagcccacggcaccagctactctccgtcgcagatctccgcgatgatccttcagaagatgaaggaaacggccgagtcctatctcggtgaaaaggtcgaaaaggccgtcatcaccgttccggcctacttcaacgacgcacagcgccaggccacgaaggatgccggcaagatcgccggtctcgacgtgctgcgcatcatcaacgagccgaccgcagcggcacttgcctacggcctcgacaagaaggaaggcaagacgatcgccgtctacgatcttggcggcggcacgttcgacatctcggttctggaaatcggcgacggcgtcttcgaagtgaagtcgaccaacggcgacaccttccttggcggtgaagacttcgacatgcgcctcgtcgaatatcttgcctccgagttcaagaaggagcagggcatcgacctcaagaacgacaagctcgcgctgcagcgcctgaaggaagctgccgaaaaggcgaagatcgagctctcgtcctcgcagcagaccgaaatcaacctgccgttcatcacggcggacgcttccggtccgaagcacctgacgatgaagctgtcccgcgccaaattcgagagcctggtcgaagacctgatccagaagaccatcgcgccctgcaaagccgcgctcaaggatgccggcgtttcggctgccgagatcgacgaagtcgttctcgtcggcggcatgacccgcatgccgaaggttcaggagacggtgaagcagctcttcggcaaggagccgcacaagggtgtcaacccggatgaagtggttgccatgggcgccgcgatccaggccggcgttctgcagggcgacgtcaaggacgtgttgctgctggacgtcaccccgctatcgctcggcatcgaaacgcttggcggcgtcttcacccgcctgatcgagcgcaacaccacgatcccgacgaagaagagccaggtcttctcgacggccgacgacaaccagtccgccgtgacgatccgcgtctcgcagggcgagcgtgaaatggcggccgacaacaagctgctcggccagttcgatctcgtcggcattccgccggcaccgcgcggcgtgccgcagatcgaggtcacgttcgacatcgatgcgaacggcatcgtgcaggtgtccgccaaggacaagggcacaggcaaggagcaccagatccgcatccaggcctccggtggtctttccgacgccgagatcgagaagatggtcaaggatgccgaagccaatgcggaagccgacaagaagcgccgcgaaggcgtagaggccaagaaccaggccgaaagcctggtccattcttcggagaagtcgctccaggaacatggcgacaaggtttccgagacggaccgtaaggcgatcgaggatgcaatcgcagcgctcaagagcgccgtcgaagtttccgagccggacgccgaggacatcaaggccaagaccaataccctcatggaagtctccatgaagctcggtcaggcgatctatgaggctcagcagacggacgccgcccatgcggatgccgccgccgacgccaagcgctccggcgatgacgtggtcgacgccgactacgaggaagtcaaggacgaagacgaccgtaagcggtcggcctga

SEQ ID NO: 48889 - protein, 641 aa, Rhizobium meliloti
MAKVIGIDLGTTNSCVSVMDGKDAKVIENAEGARTTPSMVAFTEDGERLVGQPAKRQAVTNPENTLFAIKRLIGRTFEDPTTQKDKGMVPYKIVKADNGDAWVEAHGTSYSPSQISAMILQKMKETAESYLGEKVEKAVITVPAYFNDAQRQATKDAGKIAGLDVLRIINEPTAAALAYGLDKKEGKTIAVYDLGGGTFDISVLEIGDGVFEVKSTNGDTFLGGEDFDMRLVEYLASEFKKEQGIDLKNDKLALQRLKEAAEKAKIELSSSQQTEINLPFITADASGPKHLTMKLSRAKFESLVEDLIQKTIAPCKAALKDAGVSAAEIDEVVLVGGMTRMPKVQETVKQLFGKEPHKGVNPDEVVAMGAAIQAGVLQGDVKDVLLLDVTPLSLGIETLGGVFTRLIERNTTIPTKKSQVFSTADDNQSAVTIRVSQGEREMAADNKLLGQFDLVGIPPAPRGVPQIEVTFDIDANGIVQVSAKDKGTGKEHQIRIQASGGLSDAEIEKMVKDAEANAEADKKRREGVEAKNQAESLVHSSEKSLQEHGDKVSETDRKAIEDAIAALKSAVEVSEPDAEDIKAKTNTLMEVSMKLGQAIYEAQQTDAAHADAAADAKRSGDDVVDADYEEVKDEDDRKRSA

SEQ ID NO: 48890 - DNA, 1938 bp, Rhodopirellula baltica
  CDS (1)..(1938): transl_table=11
atggcacaaggcgaaaaaatcatcggtatcgacctcgggaccaccaacagcgtggtcgcgatcatggaaggtagcgagcccaaagttatcccaaaccctgaaggcaaccggctgactcccagcgtggtcgctttcactgacaagcaagaaaccatcgtcggcgaacccgctcgacgtcaagccgtcaccaacccgaagcgtaccgtttactcggcaaagcgtttcatgggacgtcgtcacaacgaagttcaatcggaagagaaaatggtgccctatggcatcaccggtggacctggcgattacgtcaagattcaggttggcgacagcgagtacacgccacaagaaatctccgccaaggttcttcgcaagttgaaggagtcggctgagtcgtacttggggcataaagtcaacaaagcggtcatcaccgttcctgcttacttcaatgacgcacagcgacaagcaaccaaagacgcaggccagatcgccggattggaagttgctcggatcatcaacgaaccaaccgccgccgcactggcttacgggttggataagaagaaggacgagagcatcatcgtcttcgacttgggtggtggtacgtttgacgtctcggttctggaagtcgctgacagcggcgatgaagaacaggaaagccgcgtgttccaagttgttagcacctcgggtgacactcacctcggtggcgatgacttcgatgaagcgttgatcaactacgttgccagcgaattccaaaaggataacggcatcgatctgcgcaacgacgcgatggcgttgcaacgtttgcaagaagcttgcgagaaggcaaagaaagaactcagtactttgccagaaaccgacatcaacttgccctttatcacgatggatgcttcgggaccgaagcacctgacgatgaagatcactcgatcaaagttcgaagaattgatcgatgcgttggtggagcgttgccgtgggccagttctgcaagcgttgaaagatgctggcatggatcccaaagacatcgacgaagtcgtcttggtcggtggtagcacacgggtgccaaaggtacgcgaagttgtcaaaagcatcttcggcaaagaccctcaccaaggtgtgaaccctgacgaagtggttgcagttggtgccgcgattcaaggcagtgtcttggccggtgaccgcaacgacgtgttgctgctcgacgtgactccattgacgctcgggattgaaaccgaaggtggcgtgatgaccgcactggtcgaacgcaacacgacgattccggccgagaagaagaatgtcttcagcaccgccgcggacaaccaaaccgctgtgaccgttcgagtgttccaaggggaacgcaagatggccaacgcgaaccgattgctcgccgaattcaacctggaagacatccccgccgcaccacgtggtgtgcctcaaatcgaggtcaagtttgacatcgaccaaaacggcatcctgagtgtctcggcgaaggaactgaaaaccgggaaagaagccaacgtcgagatcaaagacagcggcgcgctttccgatagtgatatcgagcaaatgcagaaggacgcggaagccaacgcggaagaagacaagcgacaatttgaattggtcgaggctcgcaacaaggtcaaccaacaggtttaccaacttgaaaagttgatgggcgagaacgacgacaagttgtccgatgacgacaaggctccgatgaacgctgcgattgaaaaggtcaagaaagccgctgaaggcgatgacttggctgagatcaaagccgcgtcggacgaattggaagccgcctcgcaggcgttcagcaaggttttgtacgagaagaccgatgcggcaggcgaagccggtgccgatgcggcgggtgccgctggtgcaaccgcgggcggtggagacgacgacgacgcgatcgacgcggagttcgaagtcaaagagtga

SEQ ID NO: 48891 - protein, 645 aa, Rhodopirellula baltica
MAQGEKIIGIDLGTTNSVVAIMEGSEPKVIPNPEGNRLTPSVVAFTDKQETIVGEPARRQAVTNPKRTVYSAKRFMGRRHNEVQSEEKMVPYGITGGPGDYVKIQVGDSEYTPQEISAKVLRKLKESAESYLGHKVNKAVITVPAYFNDAQRQATKDAGQIAGLEVARIINEPTAAALAYGLDKKKDESIIVFDLGGGTFDVSVLEVADSGDEEQESRVFQVVSTSGDTHLGGDDFDEALINYVASEFQKDNGIDLRNDAMALQRLQEACEKAKKELSTLPETDINLPFITMDASGPKHLTMKITRSKFEELIDALVERCRGPVLQALKDAGMDPKDIDEVVLVGGSTRVPKVREVVKSIFGKDPHQGVNPDEVVAVGAAIQGSVLAGDRNDVLLLDVTPLTLGIETEGGVMTALVERNTTIPAEKKNVFSTAADNQTAVTVRVFQGERKMANANRLLAEFNLEDIPAAPRGVPQIEVKFDIDQNGILSVSAKELKTGKEANVEIKDSGALSDSDIEQMQKDAEANAEEDKRQFELVEARNKVNQQVYQLEKLMGENDDKLSDDDKAPMNAAIEKVKKAAEGDDLAEIKAASDELEAASQAFSKVLYEKTDAAGEAGADAAGAAGATAGGGDDDDAIDAEFEVKE

SEQ ID NO: 48892 - DNA, 3551 bp, Rhodobacter capsulatus
  CDS (211)..(2124): transl_table=11
ggatccgggcgtttttgcaccgatttggcggattgtggcatttgtcgcaaactcccgcgcgtcagttcttgcagggctattttcccctccttatatacgccgggaagccggagcaggccacctgcgccggaccgtctggaaaccttgggataggggccgggggcctgatgggacccgcccccacctgtcgccgaaagaagaggtattgaaatggccaaagtcatcgggatcgaccttgggacgaccaactcctgcgtcgccatcatggacggctcgcaaccccgcgtgatcgagaattcggaaggggcgcgcaccaccccctcgatcgtcgcctacaccgacaacgagcgtctggtcggccagcccgccaagcggcaagccgtgaccaaccccacgaacaccgtctttgcggtcaagcgcctgatcggccgccgcaccaccgatgccgaggtggaaaaggacaagaaactggttccctacaacatcgtcgacggcggcaacggtgacgcctgggtggaagtgcgcggcgagaaattcagcccggcgcaggtttcggccgtgatcctgcaaaagatgaaggaaaccgccgagagctatctgggcgagaccgtgacccaggccgtgatcaccgttccggcctatttcaacgacgcccagcgtcaggccaccaaggacgcgggcaagatcgcgggccttgaagtgctgcgcatcatcaacgaaccgacggcggcggcgctggcttacggcctcgacaagaaggacagcaagacgattgccgtctatgaccttggcggcggcaccttcgacatcagcgtcctggaaatcgacgacggtctgttcgaggtgaaatcgaccaacggggacacgttcctgggcggcgaagacttcgacatgcggatcgtcaattaccttgccgacgagttcaagaaagaacacggcgtcgatctgaccaaggacaagatggcgctgcagcggctgaaggaagcggctgaaaaggcgaagatcgaactgtcctcggccagccagaccgaaatcaaccagccgttcatctcgatgaacgcggcgaccggcgtgccgctgcacatggtgatgaagctgacccgcgcgaagctggaaagcctggtcgatgacctgatcaaggcctcgctgaagccctgcgccgcggcgctgaaagatgcgggcgtcagcaaggacgagatcgacgaggtcgttctggtgggcggcatgacccggatgccgcgcgtcgtcgaggaagtgacgaagttcttcggaaaggaaccgcacaagggcgtgaacccggatgaagtcgtggcccttggcgccgcgattcaggcgggcgtgctgcagggcgacgtgaaggacgtggtgctgctcgacgtcacccccctcagcctcggcatcgagacgctgggcggtgtcttcacccgtctgatcgatcgcaacaccacgatcccgacgaagaagagccagatcttctcgaccgccgaggacaatcagaacgcggtgacgatccgcgtcttccagggcgagcgggaaatggccgccgacaacaagatgctgggcatgttcaacctcgagaacatccccccggcgccgcgcggcgtgccgcagatcgaagtcaccttcgacatcgacgcgaacggcatcgtttcggtcaaggccaaggacaagggcaccggcaaggaacagcagatcaccatccaagcctcgggcggtctgtcggacgacgacatcgaaaagatgatcaaggacgccgaagccaatgccgaagccgacaagaagcgcaaggagctggtcgaggcgaagaacaccggcgaaagcctgctgcattcgacccgcaaatcgctggaagagcatggcgacaaggtcgatggctcgaccgtcgagatgatcgaactggcctgcaacgcgctggaagaatcgctgaagtcggaagacccgggcaagatcaagggcgcggtgcagaacctgaccgatgccgcgatgaagctgggtgaggcgatctacaaggcgcaagcctccgaagccggcccggcctcggatgacgaagacggcccgcggtcggtcgatgatgacatcgtcgacgccgacttcgaggacatgggtgaaaacaagcgcaagtaagcgccggaacctgaggagcgggccccgtcatggggctcgcttccgtgttctcgcagtggggctttccaatggcgaaggtggatttctacgaggttctgggggtgtccaagggcgcctcggccgaggagatcaagaaggcctatcgcagcaaggcgaaggaactgcaccccgaccgcaatcagggacaatccgcagccgaggcccagttcaaggaagtgaacggagcctatgacgtgctgaaggatggcgacaagaaggccgcctatgaccgctacggtcacgcggctttcgagggcggcatgggcggcggcggtccgcgcggaccctatggtcagggcgcggatttctcctcggctttctcggatgtgttcgaggatctgttcggcgatttcatgggcgggcgcggcggtccgggcggcggtggccgtcgcgtgcgacgccgcggctcggacctgcgctacaacatgcgggtgacgctggaagaggcgttcaagggcgcgcaaaaaacgatcaccgttcccggctcggccgcttgcggctcgtgcaacggcaccggggccgagggcggcgcggaaccgcaaacctgtccgacctgttcgggtctgggcaaggtgcgggcgcagaacggctttttcaccgtcgaacgcacctgccccacctgtggcgggcagggtcaggtggtgaaaaacccctgccgcgtctgtcatggttcgggccggatcgagaaggaacggacgctgtcggtgaacatccccgcgggggtggagaccggcacccggatccgtctggcgggcgagggcgaggccgggatgcgcggcgggccttcgggcgacctttatatcttcatcgaggtccgcgaacatgcgatcttccagcgcgacggggtgaacctgttctgccgggtgccggtcagcatggtctcggcggcccttggtggcgaggtcgaggtgccgacgatcgatggcggccggtccaaggtcaaggtgccggtgggcagccaatccggtcggcagatgcgtctgcgcggcaagggcatgcctgccctgcgcggtggcggcatcggcgacatggtgatcgaactggccgtcgaaaccccggtgaacctgaccgcgcggcaaaaggagctgctggatgaattccagcgcatccaggccgagaacaacccggaaggggcgtctttcttccagaaggtgaaaagcttctgggacgggatgaagggctgagtgcctgaaaacgaagaagggggcgcctgcgggcgttttgcgtctttgagccaagaagaaacgttaaccatttatttaccgtgacggcgcaagctggggggatgaagccccgaacctccagctttgccgaaggccgacgcttttcggagatcttgacgaggcgcagccggttgccgtctcttccgaccggctgccctcttacat

SEQ ID NO: 48893 - protein, 637 aa, Rhodobacter capsulatus
MAKVIGIDLGTTNSCVAIMDGSQPRVIENSEGARTTPSIVAYTDNERLVGQPAKRQAVTNPTNTVFAVKRLIGRRTTDAEVEKDKKLVPYNIVDGGNGDAWVEVRGEKFSPAQVSAVILQKMKETAESYLGETVTQAVITVPAYFNDAQRQATKDAGKIAGLEVLRIINEPTAAALAYGLDKKDSKTIAVYDLGGGTFDISVLEIDDGLFEVKSTNGDTFLGGEDFDMRIVNYLADEFKKEHGVDLTKDKMALQRLKEAAEKAKIELSSASQTEINQPFISMNAATGVPLHMVMKLTRAKLESLVDDLIKASLKPCAAALKDAGVSKDEIDEVVLVGGMTRMPRVVEEVTKFFGKEPHKGVNPDEVVALGAAIQAGVLQGDVKDVVLLDVTPLSLGIETLGGVFTRLIDRNTTIPTKKSQIFSTAEDNQNAVTIRVFQGEREMAADNKMLGMFNLENIPPAPRGVPQIEVTFDIDANGIVSVKAKDKGTGKEQQITIQASGGLSDDDIEKMIKDAEANAEADKKRKELVEAKNTGESLLHSTRKSLEEHGDKVDGSTVEMIELACNALEESLKSEDPGKIKGAVQNLTDAAMKLGEAIYKAQASEAGPASDDEDGPRSVDDDIVDADFEDMGENKRK

SEQ ID NO: 48894 - DNA, 3046 bp, Rhodothermus marinus
  CDS (517)..(2439): transl_table=11
taatcccgacggccaccagggcacctgttcgggcagcagaatggccagacaaacaaacgtgcccagcacgagcaccttgtcggcaaaaggatccaggaactggcccagccgcgagcgcgcccggaagctgcgggccagcttgccgtccaggtagtccgaaatggcggcggccacaaaaagccccagcgcggccagctggccggtaaaggtcccgccgagcagcagcaccagcaggaccggcgtcagcgcaatgcgggcaatggtcagggcatttggcagatggcgcataatgacagcgaatcccgatctctgctcgccttaagatacaaacccgacgcgaaaatcggttcgtgcacgaacgttcaccccggcctcaggttcatgcagctttaccgaagacacgcgcctggctgacattctgacgcacccggtggcccggcactgttcttgagcaaaggccggcacggcatctgagtggtgcaatttgtcggacctttaaaaccagagcagcgaacgatgggcaagattatcggcatcgacctgggcacgacgaactcggtggtggccgtcatggaaggcggcgagcccaaggtgatcatcaacccggagggctcgcgggtgaccccctcggtggtggccttcacagcggacggcgagccgctcgtcggcgccccggccaagcgacaggccattacgaacccgaaaaacacgatcttctcgatcaagcgcttcatggggcgcttctacgacgaggtgaccgaggaaatctcgatggtgccctacaaggtcgttcggggtgagaacaacacggtccgcgtcgaggtcgaggtcggcggcgaaaagcgcctctacacgccgcaggagatctcggccatgattctgcagaagctgaaacagacggccgaggaatacctgggcgtgccggtgaccgaggcggtcatcacggtgccggcttacttcaacgacgcgcagcggaaggccacgaaggaagccggtgagatcgccggcctgaaggtgcgtcggattctcaacgagccgaccgctgcggccctggcctacgggctggacaagaaggacaaagaactcaagatcgccgtctacgacctcggtggcgggacctatgatatttcgatcctggagctgggcgatggcgtctttgaggtgaaggccacgaacggcgacacacacctgggcggggacaacttcgaccagcggctcattgactacatcgccgacgaattccagaagcaggaaggcatcgacctgcggaaagaccccatggcgctgcagcggctcaaggaagcggccgaaaaggccaagatcgagctgtccagcgccatgaagaccacggtcaacctgccgttcatcacggcgacggccgaagggcccaagcacctggtcatggagatcacgcgcgccaagttcgagcagttgatcgaagatctggtggcgcgcacgatcccgcccatggagcaggccctcaaggacgccaagctccgcaaagaggacattgacgaggtcatcctcgtcggtggttcgacgcggattccgctggtgcagcggaccgtcgaagagttcttcggcaagaaggccaacaagtcggtcaaccccgacgaggtggtggccatcggtgcggccatccaggccggcgtcctctcgggcgaagtgcaggatgtgctcctgctggacgtgacgccgctgaacctgggtatcgagacgctcggcggcgtgatgaccgtgctgattcctgccaacacgacgattccgacgcgcaagagcgagatcttcacgaccgcgtcggacaaccagacctcggtcgagatccacgtcctgcagggcaaccgcgagatggcggccgacaaccggagcctcgggcggttcatcctcgacggtatcccgcccgctccgcgcggcgtgccgcagatcgaagtgactttcgacatcgacgccaacggcatcctgcacgtgtcggcgcgcgacaaggccaccggcaaggagcagtcgatccgcatcgaagcctccagcgggctgacgccggaggagatcgagcggatgcgtgaagaggcgcgccggcatgcggccgaggaccggaagcggcgcgaacagatcgagaagctcaaccaggccgactcgctcatctacatgaccgaaaagaacctgcgcgagtacggcgacaagctgccggccgacaagcgggcgaagatcgagtcggcgctcgagcgcttgaaggaggtgcacaaggcgcgcaacttcgacgaactcgactcggcgatcgcccagctcaaccaggcctggaacgaagccagccaggacctctaccgggcgcagcaggcggccggtgcgcagacgtccgacggtgcctcggcgcaggccgactccggtggcgtccgcgaggccgactacgaggtgatcgacgaggacgacaaagacaagcagtaagcgcgcgttcgtgcgggctgaccgccgcgcgcttactttgacatagatgaagtgtgcaggccccggtggtgcaggccaccgcggttttgttttccgtctcatataggctcgctgatttacccgtgcatgaggtgtcccgccccgtgtggcggacgtgatccggcggttatgatagggcggacacaatggtccgccctacgggataggggaaaacgtcaatgatctggtaggagcgcaccgccgtgtgtgcccgtgctttctcatatgctccatgatatttgagaaatcgtctcagtccgctggcagccggaaaagccgccgggcattttccgtggtaacccgcgccacctcttccagcggcaccgccttgacttcggccagcttctcggccacgtggcgcacataggccggctcgttgcgcctgccgcgatgccgaccggcgccagaaacggggcatccgtttcgagcaccatctgctccagcggtagcgtgcgcaccagctcggccagcccgctttttttgaaggtcagaatcccgccgatgcccagcagaaaacccagctcggcggccgctcagccacccaggccggtccggtaaagcagtaaaa

SEQ ID NO: 48895 - protein, 640 aa, Rhodothermus marinus
MGKIIGIDLGTTNSVVAVMEGGEPKVIINPEGSRVTPSVVAFTADGEPLVGAPAKRQAITNPKNTIFSIKRFMGRFYDEVTEEISMVPYKVVRGENNTVRVEVEVGGEKRLYTPQEISAMILQKLKQTAEEYLGVPVTEAVITVPAYFNDAQRKATKEAGEIAGLKVRRILNEPTAAALAYGLDKKDKELKIAVYDLGGGTYDISILELGDGVFEVKATNGDTHLGGDNFDQRLIDYIADEFQKQEGIDLRKDPMALQRLKEAAEKAKIELSSAMKTTVNLPFITATAEGPKHLVMEITRAKFEQLIEDLVARTIPPMEQALKDAKLRKEDIDEVILVGGSTRIPLVQRTVEEFFGKKANKSVNPDEVVAIGAAIQAGVLSGEVQDVLLLDVTPLNLGIETLGGVMTVLIPANTTIPTRKSEIFTTASDNQTSVEIHVLQGNREMAADNRSLGRFILDGIPPAPRGVPQIEVTFDIDANGILHVSARDKATGKEQSIRIEASSGLTPEEIERMREEARRHAAEDRKRREQIEKLNQADSLIYMTEKNLREYGDKLPADKRAKIESALERLKEVHKARNFDELDSAIAQLNQAWNEASQDLYRAQQAAGAQTSDGASAQADSGGVREADYEVIDEDDKDKQ

SEQ ID NO: 48896 - DNA, 1896 bp, Rhodopseudomonas palustris
  CDS (1)..(1896): transl_table=11
atgggaaaggtcattggtatcgacctcggcaccacgaattcgtgcgtcgccgtaatggatggtaagtctgccaaagtcatcgagaacgccgagggtatgcgcacgaccccgtcgatcgtcgcgataaccgacgacggcgagcgtctggtcggccagccggcgaagcgtcaggctgtcaccaatcccgagcgcaccttctttgcagtcaagcgcctgatcggccgccgctacgacgacccgatggtcgagaaggacaagggtctcgtcccctataagatcgtcaaggcttccaacggcgatgcctgggtcgaagccgacggcaagacctattcgccctcgcaggtctcggccttcattctgcagaagatgaaggagaccgcggaagcgcatctcggccagaaggtcgatcaggccgtcatcaccgttccggcgtacttcaacgacgcccagcgccaggccaccaaggacgccggcaagatcgccggtctcgaagtgctgcgcatcatcaacgagccgaccgcggccgcgctggcctacggtctcgataaggccaagaccggcaccatcgcggtgtacgacctcggcggcggcaccttcgacgtctcgatcctggagatcggcgacggcgtgttcgaggtgaagtcgaccaacggtgacaccttcctcggcggtgaagacttcgacatgcgtctggtcaactacctcgccgacgaattccagaaggagcagggtatcgatctgcgcaaggacaagcttgcgctgcagcgcctgaaggaagccgccgaaaaggccaagatcgagctgtcgtcgacgacgcagaccgagatcaacctgccgttcatcaccgcggaccagtccggtccgaagcatctgaccatgaagctgacccgcgccaagttcgaagcgctggtcgacgacctggtgcagaagaccatcgagccgtgccgcaaggccctgaaggatgccggcctcaccgccggtgagatcagcgaagtggtgctggtcggcggcatgacccgcatgccgaaggtccaggaagtggtgaagcagctgttcggcaaggagccgcacaagggcgtcaacccggacgaagtcgtggcgatcggcgcggcgatccaggccggcgtgctgcagggcgacgtcaaggacgtgctgctgctcgacgtgactccgctgtcgctgggcatcgagacgctgggtggcgtgttcacccgcatcatcgatcgcaacaccacgatcccgaccaagaagagccaggtgttctcgaccgccgaagacaatcagaacgcggtcaccatccgggtcttccagggcgaacgcgaaatggcggccgacaacaagatgctcggtcagttcgacctgatgggcattccgccggccccgcgcggcatgccgcagatcgaagtgaccttcgacatcgacgccaacggcatcgtcaacgtctcggccaaggacaaggcgaccggcaaggagcagcaaatccgcatccaggcttctggtggtctgtccgactccgagatcgacaagatggtcaaggacgccgaagccaacgcggccgaagacaagaagcgccgcgaggcggtcgacgccaagaaccacgccgacgcgctggtgcattccaccgagaaggcgctggccgagcacggttcgaaggtcgacgaaagcgagcgccgcagcatcgaagacgcgctgagcgatctgcgcgaagcgctgaagggcgacgacgccgaggcgatcaaggccaagagcaacacgctggcgcaggcttcgatgaagctcggcgaagcgatgtacaagcaggccgaagccgccggcggtgcgcagcaggccggtaaggacgacgtggtcgacgcagagttcactgaagtcgacgacgacaagaagaagtcggcgtaa

SEQ ID NO: 48897 - protein, 631 aa, Rhodopseudomonas palustris
MGKVIGIDLGTTNSCVAVMDGKSAKVIENAEGMRTTPSIVAITDDGERLVGQPAKRQAVTNPERTFFAVKRLIGRRYDDPMVEKDKGLVPYKIVKASNGDAWVEADGKTYSPSQVSAFILQKMKETAEAHLGQKVDQAVITVPAYFNDAQRQATKDAGKIAGLEVLRIINEPTAAALAYGLDKAKTGTIAVYDLGGGTFDVSILEIGDGVFEVKSTNGDTFLGGEDFDMRLVNYLADEFQKEQGIDLRKDKLALQRLKEAAEKAKIELSSTTQTEINLPFITADQSGPKHLTMKLTRAKFEALVDDLVQKTIEPCRKALKDAGLTAGEISEVVLVGGMTRMPKVQEVVKQLFGKEPHKGVNPDEVVAIGAAIQAGVLQGDVKDVLLLDVTPLSLGIETLGGVFTRIIDRNTTIPTKKSQVFSTAEDNQNAVTIRVFQGEREMAADNKMLGQFDLMGIPPAPRGMPQIEVTFDIDANGIVNVSAKDKATGKEQQIRIQASGGLSDSEIDKMVKDAEANAAEDKKRREAVDAKNHADALVHSTEKALAEHGSKVDESERRSIEDALSDLREALKGDDAEAIKAKSNTLAQASMKLGEAMYKQAEAAGGAQQAGKDDVVDAEFTEVDDDKKKSA

SEQ ID NO: 48898 - DNA, 1911 bp, Rhodobacter sphaeroides
  CDS (1)..(1911): transl_table=11
atggccaaagtcatcgggatcgacctcgggacgaccaactcctgcgtcgccatcatggacggcgcgcaaccccgcgtgatcgagaactccgaaggggcgcggacgacgccctccatcgtcggtttcaccgacagcgaacgcctcgtgggccagccggccaagcgtcaggcggtcacgaacccctcgaacaccgtcttcgccgtcaagcggttgatcggccgccgcgtgggcgacgccgaggtggaaaaggacaagaagctcgttccctattccatcgtgaacggcggcaacggcgacgcctgggtcgaggtgcgtggcgagaaatattcgcccagccagatctccgccttcatcctgcagaagatgaaggaaaccgccgaggcctatctcggcgagtcggtgacgcaggccgtcatcacggtgcctgcctacttcaacgacgcccagcgtcaggcgaccaaggacgccggcaagatcgcgggcctcgaggtgctgcgcatcatcaacgagccgacggccgcggcgctcgcctacggtctcgacaagaaggacaccaagacgatcgcggtctatgacctcggcggcggcaccttcgacatcaccatcctcgagatcgacgacggcctgttcgaagtgaaatcgaccaacggggacacgttcctcggcggcgaggacttcgacatgcggatcgtcaactacctcgcggacgagttcaagaaagagcacggggtcgacctgacgctcgacaagatggcgctgcagcggctgaaggaagccgccgagaaggccaagatcgagctcagctccagccagcagaccgagatcaaccagcccttcatcagcatggaccggaacaccgggcagccgctgcacatggtgatgaagctgacccgcgcgaagctggaaagcctcgtgggcgatctcatcaagaagtcgctgaagccctgtgaagccgcgctgaaggatgcgggcgtctcgaagtcggacatcgacgaggtcgttctcgtcggcggcatgacccggatgccgcgggtggtcgaagaggtcaccaagttcttcggcaaggagccacacaagggcgtgaaccccgatgaggtcgtggcgctcggcgcggcgatccaggcgggcgtgctgcagggcgacgtgaaggacgtcgtgctgctcgacgtgaccccgctctcgctcggcatcgagacgctgggcggcgtgttcacccgcctgatcgaccgcaacaccacgatcccgaccaagaagagccaggtcttctcgaccgccgaggacaaccagaacgcggtgacgatccgcgtcttccagggcgaacgcgagatggcggccgacaacaagctgctcggccagttcaacctcgaagatatcccgccggccccgcgcgggatgccgcagatcgaggtgaccttcgacatcgacgccaacggcatcgtgtcggtcagcgccaaggacaagggcaccggcaagtcgcagaacatcacgatccaggcctcgggcggtctctccgacgaggatatcgagaagatggtgcgcgacgccgaggccaatgccgaggccgacaagaagcgtcgcgagctggtcgagaccaagaaccagggcgaaagcctgctgcactcgacccgcaagtcgatcgaggagcacggcgacaaggtggacccgtccaccgtcgaggcgatcgagctggccatgggcgcgctcgaagaggccctcaagtccgaggacgccggcaagatcaagggcggcatccagaacctgaccgaggccgcgatgcgtctcggcgaggcgatctacaaggccagccaggccgagggaggcgccacgccggacgaggaggggccccggtcggtggatgacgacatcgtcgacgccgacttcgaggatctcggcgagaacaagcggaagtaa

SEQ ID NO: 48899 - protein, 636 aa, Rhodobacter sphaeroides
MAKVIGIDLGTTNSCVAIMDGAQPRVIENSEGARTTPSIVGFTDSERLVGQPAKRQAVTNPSNTVFAVKRLIGRRVGDAEVEKDKKLVPYSIVNGGNGDAWVEVRGEKYSPSQISAFILQKMKETAEAYLGESVTQAVITVPAYFNDAQRQATKDAGKIAGLEVLRIINEPTAAALAYGLDKKDTKTIAVYDLGGGTFDITILEIDDGLFEVKSTNGDTFLGGEDFDMRIVNYLADEFKKEHGVDLTLDKMALQRLKEAAEKAKIELSSSQQTEINQPFISMDRNTGQPLHMVMKLTRAKLESLVGDLIKKSLKPCEAALKDAGVSKSDIDEVVLVGGMTRMPRVVEEVTKFFGKEPHKGVNPDEVVALGAAIQAGVLQGDVKDVVLLDVTPLSLGIETLGGVFTRLIDRNTTIPTKKSQVFSTAEDNQNAVTIRVFQGEREMAADNKLLGQFNLEDIPPAPRGMPQIEVTFDIDANGIVSVSAKDKGTGKSQNITIQASGGLSDEDIEKMVRDAEANAEADKKRRELVETKNQGESLLHSTRKSIEEHGDKVDPSTVEAIELAMGALEEALKSEDAGKIKGGIQNLTEAAMRLGEAIYKASQAEGGATPDEEGPRSVDDDIVDADFEDLGENKRK

SEQ ID NO: 48900 - DNA, 1920 bp, Shewanella oneidensis
  CDS (1)..(1920): transl_table=11
atgggtaaaattattggtatcgacttaggcacaacaaactcttgtgtagctgtcctcgatggtggcaaagcacgcgtattagaaaatgctgaaggcgatcgcacaaccccgtctatcatcgcttacacagatgatgagaccattgtgggccaaccagcaaaacgccaagctgtaacaaacccaaataacacattcttcgcgatcaagcgtttgatcggtcgtcgctttaaagatgacgaagttcaacgtgacgtgaacatcatgccattcaaaatcattgcagccgacaacggtgatgcttgggttgagtcacgtggcaacaaaatggctccaccacaggtttctgctgaaatcttgaaaaagatgaagaaaacggcagaagactttttaggtgaagaagtcacagaagcggttattactgttcctgcatactttaacgattcacaacgtcaagccactaaagatgcgggtcgcatcgcgggccttgaagtgaagcgtattatcaacgaaccaacggccgcagcactggcctacggtatcgacaagaagcaaggcgacaatatcgttgcagtgtacgacttaggtggtggtacgttcgatatctcgatcatcgaaatcgacagcaacgacggcgaccaaaccttcgaagtattagcgacaaacggtgacacccacttaggtggtgaagactttgacaaccgtttaatcaactacttagctgacgaattcaagaaagagcaaggcttagatctgcgtaaagatccattagcaatgcaacgtctgaaagaagcggctgaaaaggcgaagattgagctttcaagcaccaaccaaactgaagtgaacctgccatacatcactgccgatgcaacaggtcctaagcacttagtggtaaaaatcacccgtgctaagttagagtcactggttgaagacttaatcattcgtactttagagccattaaaagtggcactggctgacgctgacctatcagtatcagacattaacgaagtgattttagtgggcggtcaaacccgtatgcctaaggttcaagaagcagtgactaacttcttcggtaaagaacctcgtaaagacgtaaacccagacgaagcggtagccgtaggtgctgcgattcaagcgggcgtactgtcaggcgacgtgaaagacgttctgctgttagacgtaacaccactgtctctgggtatcgaaaccatgggcagcgtaatgaccaagctgattgagaaaaacacgactattccgactaaggcacagcaagtgttctcaacagccgatgacaaccaaagtgcagtaactattcacgtactgcaaggtgagcgtaagcaagcgagcgcgaacaagtcattaggtcaatttaacttagacggtattgagcctgcaccacgtggcatgccacaaattgaagtgatgttcgatatcgacgctgacggtattctgcatgtttctgccaccgataagaaaaccggtaagaaacaaaacatcaccatcaaagcttcttctggcttaagcgaagaagaagtggcgcaaatggtacgtgacgctgaagcccacgctgaagaagacaaaaagtttgaagagctagtgcaatctcgcaaccaagctgacggcttagttcacgcaactaagaaacaagttgaagaggcgggcgatgcactgccaagcgaagacaaagcgaagattgaagcggcaatgagcgcggttgaaactgctgtaaaaggcaatgacaaagaagccattgaaaaagcgactcaagcgcttatcgaagcctcagcaaagctgatggaaatcgctcaggctaaagctcaaactcaaggcggcgcacaagaaggtgcagctaaacagtctaacgcgactgccgatgacgttgtcgatgctgaatttgaagaagtgaaagacgacaagaaataa

SEQ ID NO: 48901 - protein, 639 aa, Shewanella oneidensis
MGKIIGIDLGTTNSCVAVLDGGKARVLENAEGDRTTPSIIAYTDDETIVGQPAKRQAVTNPNNTFFAIKRLIGRRFKDDEVQRDVNIMPFKIIAADNGDAWVESRGNKMAPPQVSAEILKKMKKTAEDFLGEEVTEAVITVPAYFNDSQRQATKDAGRIAGLEVKRIINEPTAAALAYGIDKKQGDNIVAVYDLGGGTFDISIIEIDSNDGDQTFEVLATNGDTHLGGEDFDNRLINYLADEFKKEQGLDLRKDPLAMQRLKEAAEKAKIELSSTNQTEVNLPYITADATGPKHLVVKITRAKLESLVEDLIIRTLEPLKVALADADLSVSDINEVILVGGQTRMPKVQEAVTNFFGKEPRKDVNPDEAVAVGAAIQAGVLSGDVKDVLLLDVTPLSLGIETMGSVMTKLIEKNTTIPTKAQQVFSTADDNQSAVTIHVLQGERKQASANKSLGQFNLDGIEPAPRGMPQIEVMFDIDADGILHVSATDKKTGKKQNITIKASSGLSEEEVAQMVRDAEAHAEEDKKFEELVQSRNQADGLVHATKKQVEEAGDALPSEDKAKIEAAMSAVETAVKGNDKEAIEKATQALIEASAKLMEIAQAKAQTQGGAQEGAAKQSNATADDVVDAEFEEVKDDKK

SEQ ID NO: 48902 - DNA, 1917 bp, Shigella flexneri
  CDS (1)..(1917): transl_table=11
atgggtaaaataattggtatcgacctgggtactaccaactcttgtgtagcgattatggatggcaccattcctcgcgtgctggagaacgccgaaggcgatcgcaccacgccttctatcattgcctatacccaggatggtgaaactctggttggtcagccggctaaacgtcaggcagtgacgaacccgcaaaacaccctgtttgcgattaaacgcctgattggccgccgcttccaggacgaagaagtacagcgtgatgtttccatcatgccgttcaaaattattgctgctgataacggcgacgcatgggtcgaagttaaaggccagaaaatggcaccgccgcagatttctgctgaagtgctgaaaaaaatgaagaaaaccgctgaagattacctgggtgaaccggtaactgaagctgttatcaccgtaccggcatactttaacgatgctcagcgtcaggcaaccaaagacgcaggccgtatcgctggtctggaagtaaaacgtatcatcaacgaaccgaccgcagctgcgctggcttacggtctggacaaaggcactggcaaccgtactatcgcggtttatgacctggggggtggtactttcgatatttctattatcgaaatcgacgaagttgacggcgaaaaaaccttcgaagttctggcaaccaacggtgatacccacctgggtggtgaagacttcgacagccgtctgatcaactatctggttgaagaattcaagaaagatcagggcattgacctgcgcaacgatccgctggcaatgcagcgcctgaaagaagcggcagaaaaagcgaaaatcgaactgtcttccgctcagcagaccgacgttaacctgccatacatcactgcagacgcgaccggtccgaaacacatgaacatcaaagtgactcgtgcgaaactggaaagcctggttgaagatctggtaaaccgttccattgagccgctgaaagttgcactgcaggatgctggcctgtccgtatctgatatcgacgacgttatcctcgttggtggtcagactcgtatgccaatggttcagaagaaagttgctgagttctttggtaaagagccgcgtaaagacgttaacccggacgaagctgtagcaatcggtgctgctgttcagggtggtgttctgactggtgacgtaaaagacgtactgctgctggacgttaccccgctgtctctgggtatcgaaaccatgggcggtgtgatgacgacgctgatcgcgaaaaacaccactatcccgaccaagcacagccaggtgttctctaccgctgaagacaaccagtctgcggtaaccatccatgtgctgcagggtgaacgtaaacgtgcggctgataacaaatctctgggtcagttcaacctagatggtatcaacccggcaccgcgcggcatgccgcagatcgaagttaccttcgatatcgatgctgacggtatcctgcacgtttccgcgaaagataaaaacagcggtaaagagcagaagatcaccatcaaggcttcttctggtctgaacgaagatgaaatccagaaaatggtacgcgacgcagaagctaacgccgaagctgaccgtaagtttgaagagctggtacagactcgcaaccagggcgaccatctgctgcacagcacccgtaagcaggttgaagaagcaggcgacaaactgccggctgacgacaaaactgctatcgagtctgcgctgactgcactggaaactgctctgaaaggtgaagacaaagccgctatcgaagcgaaaatgcaggaactggcacaggtttcccagaaactgatggaaatcgcccagcagcaacatgcccagcagcagactgccggtgctgatgcttctgcaaacaacgcgaaagatgacgatgttgtcgacgctgaatttgaagaagtcaaagacaaaaaataa

SEQ ID NO: 48903 - protein, 638 aa, Shigella flexneri
MGKIIGIDLGTTNSCVAIMDGTIPRVLENAEGDRTTPSIIAYTQDGETLVGQPAKRQAVTNPQNTLFAIKRLIGRRFQDEEVQRDVSIMPFKIIAADNGDAWVEVKGQKMAPPQISAEVLKKMKKTAEDYLGEPVTEAVITVPAYFNDAQRQATKDAGRIAGLEVKRIINEPTAAALAYGLDKGTGNRTIAVYDLGGGTFDISIIEIDEVDGEKTFEVLATNGDTHLGGEDFDSRLINYLVEEFKKDQGIDLRNDPLAMQRLKEAAEKAKIELSSAQQTDVNLPYITADATGPKHMNIKVTRAKLESLVEDLVNRSIEPLKVALQDAGLSVSDIDDVILVGGQTRMPMVQKKVAEFFGKEPRKDVNPDEAVAIGAAVQGGVLTGDVKDVLLLDVTPLSLGIETMGGVMTTLIAKNTTIPTKHSQVFSTAEDNQSAVTIHVLQGERKRAADNKSLGQFNLDGINPAPRGMPQIEVTFDIDADGILHVSAKDKNSGKEQKITIKASSGLNEDEIQKMVRDAEANAEADRKFEELVQTRNQGDHLLHSTRKQVEEAGDKLPADDKTAIESALTALETALKGEDKAAIEAKMQELAQVSQKLMEIAQQQHAQQQTAGADASANNAKDDDVVDAEFEEVKDKK

SEQ ID NO: 48904 - DNA, 1914 bp, Silicibacter pomeroyi
  CDS (1)..(1914): transl_table=11
atgggtaaagttatcggtatcgacctgggcaccaccaactcgtgtgttgccatcatggacggcgcccagccgaaagtcatcgaaaactcggaaggggcgcggaccacgccctcgatcgtcgccttcaccgatgaagagcgtctggtcggtcagccggcaaaacgccaggcggtcaccaacccctcgaacaccatttttggcgtcaagcgcctgatcggccgccgggtcgacgatgccgaggtcaccaaggacaagaaaatggtgccgttcaccatcgtcaacggtggcaatggcgacgcatgggtcgaggccaagggcgagaaatactcgccgtcgcaaatttctgccgtcatcctcggcaagatgaaggaaaccgcagaatcctatctgggcgaggaagtgacccaggcagtgatcacggtgcccgcctatttcaacgatgcccagcgtcaggccaccaaggacgccggcaagatcgccggtctggaagtgctgcgcatcatcaacgagccgaccgcggctgcgttggcttatggcctggacaagaagaacagccagaccatcgccgtctatgaccttggcggcggtactttcgacgtgaccatcctggaaatcgacgacggcctgttcgaggtcaagtcgaccaatggcgacaccttcctgggtggcgaagatttcgacatgcggatcgtcaactatctggcggacgagttcaagaaagagcacggtgtcgacctgtccggcgacaagatggcgctgcagcgcctgaaggaagccgccgaaaaggccaagatcgagctgagctcgaccacccagaccgaaatcaaccagccgttcatctcgatgggcgccaatggtcagccgctgcatctggtgatgaagctgacccgcgccaagctggaaagcctggttggcgatctgatcaagaagtcgatggacccgtgcaaggccgctctcaaggatgccggcatttcgccgtcggacgtggacgaggtggttctggtcggcggcatgacccgcatgcccaaggttttcgaggaagtgaccaagttcttcggcaaggagccgcacaagggcgtgaaccccgatgaggtggttgccatgggcgccgccattcaggccggtgttctgcaaggcgacgtcaaggatgttgtcctgctcgacgtgaccccgctgtcgcttggcatcgagaccctgggcggcgtgttcacccgtctgatcgaccgcaacaccacgatcccgaccaagaaaagccaggtcttctcgaccgccgaggacaaccagaacgcggtgaccatccgcgtgttccagggcgagcgcgagatggcggccgacaacaagatcctcggccagttcaatctggaggacatcccgccggcaccgcgcggcatgccccagatcgaggtgacattcgacatcgacgccaacggcatcgtgtcggtctcggccaaggacaagggcaccggcaaggaacacaagatcaccatccaggcctcgggcggtctctcggacgaagacatcgaaaagatggtcaaggatgccgaggaaaacgccgaagccgacaaggcccgcaaagagctggtcgaggcgcgcaaccaggccgaaagcctgatccattcgaccgagaagtcggtcgaagagcatggcgacaaggtcgacccgaccaccgtcgaggccatcgaactggccattgccgcgctgaaggacgatctggacaaggacggcgtgagcgccgagaagatcaaatcgggcctgcagaacgtgaccgaagcggccatgaagctgggcgaggcgatctataaggcgcagagcgaaggcggcgatgacgagcccgcagcggcggatgcacgtccgtcggacgacgacatcgtcgatgccgagttcgaggatctcggcgaagacaagcgaaagtaa

SEQ ID NO: 48905 - protein, 637 aa, Silicibacter pomeroyi
MGKVIGIDLGTTNSCVAIMDGAQPKVIENSEGARTTPSIVAFTDEERLVGQPAKRQAVTNPSNTIFGVKRLIGRRVDDAEVTKDKKMVPFTIVNGGNGDAWVEAKGEKYSPSQISAVILGKMKETAESYLGEEVTQAVITVPAYFNDAQRQATKDAGKIAGLEVLRIINEPTAAALAYGLDKKNSQTIAVYDLGGGTFDVTILEIDDGLFEVKSTNGDTFLGGEDFDMRIVNYLADEFKKEHGVDLSGDKMALQRLKEAAEKAKIELSSTTQTEINQPFISMGANGQPLHLVMKLTRAKLESLVGDLIKKSMDPCKAALKDAGISPSDVDEVVLVGGMTRMPKVFEEVTKFFGKEPHKGVNPDEVVAMGAAIQAGVLQGDVKDVVLLDVTPLSLGIETLGGVFTRLIDRNTTIPTKKSQVFSTAEDNQNAVTIRVFQGEREMAADNKILGQFNLEDIPPAPRGMPQIEVTFDIDANGIVSVSAKDKGTGKEHKITIQASGGLSDEDIEKMVKDAEENAEADKARKELVEARNQAESLIHSTEKSVEEHGDKVDPTTVEAIELAIAALKDDLDKDGVSAEKIKSGLQNVTEAAMKLGEAIYKAQSEGGDDEPAAADARPSDDDIVDAEFEDLGEDKRK

SEQ ID NO: 48906 - DNA, 1833 bp, Staphylococcus aureus
  CDS (1)..(1833): transl_table=11
atgagtaaaattattggtatagacttaggtacaacaaattcatgtgtaacagtattagaaggcgatgagccaaaagtaattcaaaaccctgaaggttcacgtacaacaccatctgttgtagctttcaaaaatggagaaactcaagttggtgaagtagctaaacgtcaagctattacaaaccccaacactgttcaatctattaaacgtcatatgggtactgattataaggtagatattgaaggtaaatcatacacaccacaagaaatctcagctatgattttacaaaacttaaaaaatacagctgaaagctatttaggtgagaaagttgacaaagctgtaattacagtacctgcatactttaacgacgctgaacgtcaagcaactaaagatgctggtaaaattgctggtttagaagttgagcgtatcattaatgaaccaacagctgcagcattagcatatggtttagataaaactgataaagatgaaaaagttcttgtttttgacttaggtggcggtacatttgacgtatctatcctagaattaggtgacggtgtattcgaagtactatcaacagccggtgacaacaaacttggcggtgatgattttgaccaagtaattattgactacctagttgcagaattcaaaaaagaaaatggcgtagacttatctcaagataaaatggcattacaacgtttgaaagatgctgctgaaaaagctaaaaaagacttatcaggtgtatcacaaactcaaatctcattaccatttatctcagctggtgaaaacggtccattacacttagaagtaaacttaactcgttctaaatttgaagaattatcagattcattaattagaagaacaatggaacctacacgccaagcaatgaaagacgctggcttaacaaactcagatatcgatgaagttatcttagttggtggatcaactcgtattccagcagtacaagaagctgtcaaaaaagaaatcggtaaagaacctaacaaaggtgtaaacccggacgaggtggtggcaatgggagctgcaatccaaggtggcgttatcacaggtgacgttaaagacgtagtattattagacgtaacaccactatctttaggtattgaaattttaggtggacgtatgaatacgttaattgaacgtaacactacgattcctacatctaaatctcaaatctattcaacagcagtagataatcaaccatcagtagatgtacacgtattacaaggtgaacgtccaatggctgcggataataaaacacttggtagattccaattgactgatattccaccagctgaacgtggtaaacctcaaattgaagtaacgtttgatatcgataaaaacggtattgtaaatgtaactgcaaaagacttaggtacaaataaagaacaaagaattacaattcaatcaagttcttcattatcagacgaagaaatcgaccgtatggtaaaagatgctgaagttaacgctgaagcagataaaaaacgtcgtgaagaagtagacttaagaaacgaagctgacagtctagtattccaagttgaaaaaactttaactgatttaggcgaaaatattggtgaagaagataaaaaatctgctgaagagaaaaaagacgctcttaaaactgctttagaaggtcaagatatagaagatattaaatctaaaaaagaagaacttgaaaaagtgattcaagaattatcagccaaagtatatgagcaagcggctcaacagcaacaacaagcacaaggtgcaaatgctggtcaaaacaacgatagtactgtagaagatgctgaatttaacgaagtaaaagacgacgacaaaaaataa

SEQ ID NO: 48907 - protein, 610 aa, Staphylococcus aureus
MSKIIGIDLGTTNSCVTVLEGDEPKVIQNPEGSRTTPSVVAFKNGETQVGEVAKRQAITNPNTVQSIKRHMGTDYKVDIEGKSYTPQEISAMILQNLKNTAESYLGEKVDKAVITVPAYFNDAERQATKDAGKIAGLEVERIINEPTAAALAYGLDKTDKDEKVLVFDLGGGTFDVSILELGDGVFEVLSTAGDNKLGGDDFDQVIIDYLVAEFKKENGVDLSQDKMALQRLKDAAEKAKKDLSGVSQTQISLPFISAGENGPLHLEVNLTRSKFEELSDSLIRRTMEPTRQAMKDAGLTNSDIDEVILVGGSTRIPAVQEAVKKEIGKEPNKGVNPDEVVAMGAAIQGGVITGDVKDVVLLDVTPLSLGIEILGGRMNTLIERNTTIPTSKSQIYSTAVDNQPSVDVHVLQGERPMAADNKTLGRFQLTDIPPAERGKPQIEVTFDIDKNGIVNVTAKDLGTNKEQRITIQSSSSLSDEEIDRMVKDAEVNAEADKKRREEVDLRNEADSLVFQVEKTLTDLGENIGEEDKKSAEEKKDALKTALEGQDIEDIKSKKEELEKVIQELSAKVYEQAAQQQQQAQGANAGQNNDSTVEDAEFNEVKDDDKK

SEQ ID NO: 48908 - DNA, 1830 bp, Staphylococcus epidermidis
  CDS (1)..(1830): transl_table=11
atgggtaaagtaattggaattgatttaggtacaactaactcttgtgtttctatcttagaaggagatgaaccaaaagtaattcaaaacccagaaggtgcacgtactacaccatcagtggttgcatttaaaaatggtgaaactcaagtgggtgaagtagcaaaacgacaagctatcacaaaccctaacactgtacaatctattaaacgtcatatgggtacagattataaagtagatattgaaggtaaatcatatacaccacaagaactttcagcaatgattttacaaaatttaaaaagcactgcagaaaactatttaggggatacagtagacaaagctgttatcactgtccctgcttatttcaatgatggtgaacgtcaagcaactaaagatgctggtaaaattgcaggcttagaagttgaacgtattatcaacgaacctacagctgctgcacttgcttatggtttagataaaactgaaacagatcaaaaggttctcgtatttgacttaggtgggggaacatttgacgtatctattctagagttaggcgacggcgtatttgaagtattatcaactgccggagataataaacttggtggcgatgacttcgaccaagtgattattgattatcttgtttcagaattcaaaaaagagaatggtgtagatttatcacaagataaaatggcattacaaagattaaaagatgctgccgaaaaagctaaaaaagatttatcaggtgtttctcaaactcaaatttcattaccattcatttctgctggagaaaatggcccattacacttagaaattagtttaactcgttctaaatttgaggaattagctgattcattaatcaaaaaaactatggaaccgactcgtcaagcattaaaagatgctggtttatctacttcagaaatagatgaagttattttagttggtggttcaacacgtattccggccgttcaagaagctgttaaaaaagaaattgggaaagaaccacataaaggtgttaacccagatgaagttgtagcaatgggtgctgctattcaagctggtgtaatcacaggtgatgttaaagatgtagtattacttgatgttacgccattatctttaggtatcgaaattatgggtggacgtatgaacacattaattgaacgtaatactactattccaacctccaaatcacaagtttattctacagcagctgacaatcaaccagcagtagatattcatgtattacaaggtgaacgtccaatggcatctgacaacaaaactttaggaagattccaattaactgacattccacctgcaccacgtggtgtacctcaaatcgaagtaacatttgatatcgataaaaacggtattgttaacgttacagctaaagatttaggtactaataaagaacaaaacattacaatacaatcaagctcatctctatctgatgaagaaatcgatcgcatggtgaaagatgctgaagaaaatgctgaagcagataaaaaacgtcgtgaagaagtagacttgcgaaacgaagcagatagtctagtattccaagttgaaaaaacagttaaagatctaggcgaaaatattagtgatgaagataagaaaaatgctgaagagaaaaaagatgcacttaaaacagcattagaaggtgaagacatcgacgatattaaagctaaaaaagaagaacttgaaaaagtaattcaagaattatctgcaaaagtttatgaacaagctcaacaagcacaacaacaagctcaagaagaacaaggttctcaagatagtactgttgaagatgcagactttaaagaagttaaagatgacgaagataaaaaataa

SEQ ID NO: 48909 - protein, 609 aa, Staphylococcus epidermidis
MGKVIGIDLGTTNSCVSILEGDEPKVIQNPEGARTTPSVVAFKNGETQVGEVAKRQAITNPNTVQSIKRHMGTDYKVDIEGKSYTPQELSAMILQNLKSTAENYLGDTVDKAVITVPAYFNDGERQATKDAGKIAGLEVERIINEPTAAALAYGLDKTETDQKVLVFDLGGGTFDVSILELGDGVFEVLSTAGDNKLGGDDFDQVIIDYLVSEFKKENGVDLSQDKMALQRLKDAAEKAKKDLSGVSQTQISLPFISAGENGPLHLEISLTRSKFEELADSLIKKTMEPTRQALKDAGLSTSEIDEVILVGGSTRIPAVQEAVKKEIGKEPHKGVNPDEVVAMGAAIQAGVITGDVKDVVLLDVTPLSLGIEIMGGRMNTLIERNTTIPTSKSQVYSTAADNQPAVDIHVLQGERPMASDNKTLGRFQLTDIPPAPRGVPQIEVTFDIDKNGIVNVTAKDLGTNKEQNITIQSSSSLSDEEIDRMVKDAEENAEADKKRREEVDLRNEADSLVFQVEKTVKDLGENISDEDKKNAEEKKDALKTALEGEDIDDIKAKKEELEKVIQELSAKVYEQAQQAQQQAQEEQGSQDSTVEDADFKEVKDDEDKK

SEQ ID NO: 48910 - DNA, 1857 bp, Streptomyces coelicolor
  CDS (1)..(1857): transl_table=11
atggcacgtgcggtcggcatcgacctgggcacgactaactccgtcgtcagcgttctggagggcggcgagcccaccgtcatcaccaacgccgagggcgccaggaccacgccgtccgtcgtcgccttcgccaagaacggcgaggtgctcgtcggcgaggtggccaagcgccaggcggtcacgaacgtcgacaggaccatccgctcggtcaagcgccacatgggcaccgactggaaggtcaacctggacggcaaggacttcaacccgcagcagatcagcgccttcgtgctgcagaagctgaagcgggacgccgagtcctacctgggcgagaaggtgaccgacgcggtcatcaccgtcccggcgtacttcaacgacgccgagcgccaggccaccaaggaggccggtgagatcgcgggcctcaacgtcctgcgcatcgtcaacgagccgaccgccgccgcgctggcgtacggcctcgacaaggacgagcaggtcatcctggtcttcgacctcggtggcggtacgttcgacgtctcgctgctggagatcggcgacggcgtcgtcgaggtgaaggccaccaacggtgacaacaacctcggtggtgacgactgggaccagcgcgtcgtcgactacctggtcaagcagttccagtccggccacggcgtggacctggccaaggacaagatggcgctccagcgcctgcgcgaggcggccgagaaggccaagatcgagctgtcctcgtccaccgagaccacgatcaacctcccctacatcacggcctccgccgagggcccgctgcacctggacgagaagctcacccgcgcccagttccagcagctgacctccgacctgctggagcgctgcaagacgccgttccacaacgtcatcaaggacgccggcatccagctgtccgagatcgaccacgtcgtcctcgtcggcggctccacccgtatgcccgccgtcgccgagctggtcaaggagctgaccggcggcaaggacgccaacaagggcgtcaacccggacgaggtcgtcgccatcggcgccgccctgcaggccggtgtcctcaagggcgaggtcaaggacgtcctgctgctcgacgtcaccccgctgtccctcggcatcgagaccaagggcggcatcatgaccaagctgatcgagcggaacacgacgatcccgaccaagcgctcggagatcttcaccaccgccgaggacaaccagccctccgtgcagatccaggtctaccagggcgagcgcgagatcgcggcgtacaacaagaagctcgggatgttcgagctgaccggtctgccgccggcgccccgcggcgtcccgcagatcgaggtcgccttcgacatcgacgccaacggcatcatgcacgtgaccgcgaaggacctgggcacgggcaaggagcagaagatgaccgtcaccggcggctcctcgctgccgaaggacgaggtcgaccggatgcgccaggaggccgagaagtacgcggaggaggaccacgcccgccgcgaggccgccgagtcccgcaaccagggcgagcagctcgtctaccagacggagaagttcctcaaggacaacgaggacaaggtccccggtgaggtcaagaccgaggtggagtccgccgtcgccgagctgaaggagaagctcaagggcgaggacaccgccgagatccgcaccgccacggagaaggtcgccgccgtctcgcagaagctgggccaggccatgtacgccgacgcccaggccgcgcaggccgccggcggcgaggccccgggcgccgacgccggtgccgagggcaagggtgccgacgacgacgtcgtcgacgccgagatcgtggacgacgagcgcaaggacggtgccgcgtga

SEQ ID NO: 48911 - protein, 618 aa, Streptomyces coelicolor
MARAVGIDLGTTNSVVSVLEGGEPTVITNAEGARTTPSVVAFAKNGEVLVGEVAKRQAVTNVDRTIRSVKRHMGTDWKVNLDGKDFNPQQISAFVLQKLKRDAESYLGEKVTDAVITVPAYFNDAERQATKEAGEIAGLNVLRIVNEPTAAALAYGLDKDEQVILVFDLGGGTFDVSLLEIGDGVVEVKATNGDNNLGGDDWDQRVVDYLVKQFQSGHGVDLAKDKMALQRLREAAEKAKIELSSSTETTINLPYITASAEGPLHLDEKLTRAQFQQLTSDLLERCKTPFHNVIKDAGIQLSEIDHVVLVGGSTRMPAVAELVKELTGGKDANKGVNPDEVVAIGAALQAGVLKGEVKDVLLLDVTPLSLGIETKGGIMTKLIERNTTIPTKRSEIFTTAEDNQPSVQIQVYQGEREIAAYNKKLGMFELTGLPPAPRGVPQIEVAFDIDANGIMHVTAKDLGTGKEQKMTVTGGSSLPKDEVDRMRQEAEKYAEEDHARREAAESRNQGEQLVYQTEKFLKDNEDKVPGEVKTEVESAVAELKEKLKGEDTAEIRTATEKVAAVSQKLGQAMYADAQAAQAAGGEAPGADAGAEGKGADDDVVDAEIVDDERKDGAA

SEQ ID NO: 48912 - DNA, 2113 bp, Streptomyces griseus
  CDS (123)..(1979): transl_table=11
cccgggtgtgctccgcgtaggcacttaagttgagcgtaagggactcaggtctgttgactccggcgtcggcgtcatgcattcttgagtcagatccactcaagtagtcagttggaggaattgaaatggcacgtgcggtcggcatcgacctgggcacgactaactccgtcgtcagcgttctcgaaggcggcgagcccaccgtcatcaccaacgcagagggcgccaggaccacgccgtccgtcgtcgccttcgccaagaacggcgaggtgctcgtcggcgaggtcgcgaagcgccaggcggtcaccaacgtcgacaggaccatccgctcggtcaagcgccacatgggcactgactggaagatcgacctggacggcaagagcttcaacccgcagcagatgagcgccttcatcctgcagaagctgaagcgcgacgccgagtcctacctgggcgaaaaggtgaccgacgcggtcatcaccgtcccggcgtacttcaacgactccgagcgtcaggcgacgaaggaggccggcgagatcgcgggcctgaacgtcctgcgcatcgtcaacgagccgaccgccgccgcgctggcgtacggcctcgacaaggacgaccagacgatcctcgtcttcgacctcggtggcggcaccttcgacgtgtccctcctggagatcggcgacggcgtcgtcgaggtcaaggccaccaacggtgacaaccacctcggtggtgacgactgggaccagcgcgtcgtcgactacctggtgaagcagttcgccaacgggcacggcgtggacctgtccaaggacaagatggctctccagcgtctccgcgaggccgccgagaaggcgaagatcgagctctcgtcctcgaccgagaccacgatcaacctgccctacatcacggcgtccgccgagggcccgctgcacctggacgagaagctcacgcgctcgcagttccagcagctgaccgcggacctcctggaccgctgcaagaccccgttccacaacgtcatcaaggacgcgggcatccagctctccgagatcgaccacgtcgttctcgtcggtggctccacccgtatgcccgccgtcgccgagctcgtcaaggagctgaccggcggccaggaggccaacaagggtgtgaacccggacgaggtcgtcgccatcggcgcctcgctccaggccggtgtcctcaagggcgaggtcaaggacgtcctgctcctcgacgtcaccccgctgtccctcggcatcgagaccaagggagggatcatgaccaagctcatcgagcgcaacaccacgatcccgaccaagcgttccgagatcttcacgacggccgaggacaaccagccgtccgtgcagatccaggtctaccagggcgagcgcgagatcgcggcgtacaacaagaagctcgggatgttcgagctgaccggtctgccgccggccccgcgcggtgtgccgcagatcgaggtcgccttcgacatcgacgccaacggcatcatgcacgtcgccgccaaggacctcggcaccggcaaggagcagaagatgaccgtcaccggcggctcctcgctgccgaaggacgaggtcaaccggatgcgtgaagaggccgagaagtacgcggaggaggaccacgcccgccgcgaggccgccgagtcgcgcaaccagggcgagcagctcgtctaccagacggagaagttcctcaaggacaacgaggacaaggtcccggcggacgtgaagacggaggtggagaccgctgtcggcgagctgaaggagaagctcaagggcgaggactccgccgagatccgcacggccaccgagaaggttcgcggccgtcttcccagaatctgggccaggcgatgtaccgccaacgcccaggccgagggcgcggcccccggcgccgacgccccgggcgacgcccaggcgaaggccgatgacgacgtcgtcgacgccgagatcgtggacgacgagaaggacaccaagggcggtgcggcgtgaccgaggagactccgggcttcgaggagaagcgcacgtcccctccggcgccacccctgatgacgccgagccgaagccgactcctccgaggaggagacggctgccccggccggggacctcgacccgaccgtctgacc

SEQ ID NO: 48913 - protein, 618 aa, Streptomyces griseus
MARAVGIDLGTTNSVVSVLEGGEPTVITNAEGARTTPSVVAFAKNGEVLVGEVAKRQAVTNVDRTIRSVKRHMGTDWKIDLDGKSFNPQQMSAFILQKLKRDAESYLGEKVTDAVITVPAYFNDSERQATKEAGEIAGLNVLRIVNEPTAAALAYGLDKDDQTILVFDLGGGTFDVSLLEIGDGVVEVKATNGDNHLGGDDWDQRVVDYLVKQFANGHGVDLSKDKMALQRLREAAEKAKIELSSSTETTINLPYITASAEGPLHLDEKLTRSQFQQLTADLLDRCKTPFHNVIKDAGIQLSEIDHVVLVGGSTRMPAVAELVKELTGGQEANKGVNPDEVVAIGASLQAGVLKGEVKDVLLLDVTPLSLGIETKGGIMTKLIERNTTIPTKRSEIFTTAEDNQPSVQIQVYQGEREIAAYNKKLGMFELTGLPPAPRGVPQIEVAFDIDANGIMHVAAKDLGTGKEQKMTVTGGSSLPKDEVNRMREEAEKYAEEDHARREAAESRNQGEQLVYQTEKFLKDNEDKVPADVKTEVETAVGELKEKLKGEDSAEIRTATEKVRGRLPRIWARRCTANAQAEGAAPGADAPGDAQAKADDDVVDAEIVDDEKDTKGGAA

SEQ ID NO: 48914 - DNA, 1839 bp, Streptococcus mutans
  CDS (1)..(1839): transl_table=11
atgtctaaaattattggtattgatttaggtacaacaaactcagcagttgcagttcttgaaggaactgaaagcaaaattatcgctaatcccgaaggaaaccgtacaactccttctgtagtttcatttaaaaatggtgaaatcatcgttggtgatgctgctaaacgtcaagcagtgactaatccagaaacaattctttccatcaaatctaagatggggacttctgaaaaagtttcagctaatggcaaagagtatacgccacaagaaatctcagctatgattctgcaatatttgaaaggttatgcggaagattaccttggtgaaaaagtcgaaaaagccgttattacagttcctgcttactttaacgatgcacaacgtcaagcaactaaagatgctggtaaaatcgctggtcttgaagtagaacgtattgtcaacgaaccaacagctgcagcacttgcttatggccttgacaaaacagataaggatgagaaaattttagtcttcgaccttggtggtggtacttttgacgtatcaatccttgaattaggtgacggtgtctttgacgttttggcaactgctggagataataaacttggtggtgataactttgaccaaaaagtcattgattggttggttgaagaattcaagaaagaaaatggtattgatttatcaactgataagatggctcttcaacgcttgaaagatgctgctgaaaaagctaagaaagatctttcaggtgtaacatcaacacaaatcagtttacctttcattaccgctggtgaagcaggaccccttcatttagaaacgagcctttctcgtgctaagtttgatgatttaacacgcgatctagttgaacgtactaaaactcctgttcgtcaagccctttcagatgctggtttgtcattgtcagaaattgatgaagttatcttagtcggcggttcaacacgtattccagctgttgtagatgctgttaaagctgaaactggcaaagaaccaaataaatcagtgaatccagatgaagttgttgctatgggggctgccattcaaggtggtgttatcactggtgatgtcaaagatgtcgttcttcttgacgtaacgccattgtcacttggtatcgaaacaatgggtggtgtctttactaaactcattgatcgcaatacaacaatcccaacttctaaatcacaagtcttctcaacagctgcagataaccaaccagccgttgatatccatgttctccaaggggaacgcccaatggcagcggacaataaaacacttggccgtttccaattgacagatattccagctgcgcctcgtggtgtgccacaaatcgaagtaacattcgatattgataagaacggtatcgtgtctgttaaggctaaagaccttggaactcaaaaagaacaaacaatcgtcattcaatctaactcaggtcttactgatgaagaaattgataaaatgatgaaagatgctgaagcaaatgctgaagctgatgctaagcgtaaagaagaagttgatcttaagaacgaggttgatcaagctatctttacaaccgaaaaaactatcaaagagactgaaggaaaaggtttcgatactgaacgtgatgccgctcaggccgctcttgatgacttgaagaaagcccaagaatcaggtaaccttgacgatatgaaggctaaacttgaagcacttaatgaaaaagctcaagctcttgccatgaaactttatgaacaagctgctgccgcccaacaagcacaagcaggtcaagagggagctcaatcatctgattctgattcatcagacaagggcggcgacgatgttgtagatggagagtttacggagaaataa

SEQ ID NO: 48915 - protein, 612 aa, Streptococcus mutans
MSKIIGIDLGTTNSAVAVLEGTESKIIANPEGNRTTPSVVSFKNGEIIVGDAAKRQAVTNPETILSIKSKMGTSEKVSANGKEYTPQEISAMILQYLKGYAEDYLGEKVEKAVITVPAYFNDAQRQATKDAGKIAGLEVERIVNEPTAAALAYGLDKTDKDEKILVFDLGGGTFDVSILELGDGVFDVLATAGDNKLGGDNFDQKVIDWLVEEFKKENGIDLSTDKMALQRLKDAAEKAKKDLSGVTSTQISLPFITAGEAGPLHLETSLSRAKFDDLTRDLVERTKTPVRQALSDAGLSLSEIDEVILVGGSTRIPAVVDAVKAETGKEPNKSVNPDEVVAMGAAIQGGVITGDVKDVVLLDVTPLSLGIETMGGVFTKLIDRNTTIPTSKSQVFSTAADNQPAVDIHVLQGERPMAADNKTLGRFQLTDIPAAPRGVPQIEVTFDIDKNGIVSVKAKDLGTQKEQTIVIQSNSGLTDEEIDKMMKDAEANAEADAKRKEEVDLKNEVDQAIFTTEKTIKETEGKGFDTERDAAQAALDDLKKAQESGNLDDMKAKLEALNEKAQALAMKLYEQAAAAQQAQAGQEGAQSSDSDSSDKGGDDVVDGEFTEK

SEQ ID NO: 48916 - DNA, 1824 bp, Streptococcus pneumoniae
  CDS (1)..(1824): transl_table=11
atgtctaaaattatcggtattgacttaggtacaacaaactcagcagttgcagttcttgaaggaactgaaagcaaaatcatcgcaaacccagaagggaaccgcacaactccatctgtagtctcattcaaaaacggagaaatcatcgttggtgatgctgcaaaacgtcaagcagtcacaaacccagatacagttatctctatcaaatctaagatgggaacttctgaaaaagtttctgcaaatggaaaagaatacactccacaagaaatctcagctatgatccttcaatacttgaaaggctacgctgaagactaccttggtgagaaagtaaccaaagctgttatcacagttccagcttacttcaacgacgctcaacgtcaagcaacaaaagacgctggtaaaattgctggtcttgaagtagaacgtattgttaacgaaccaactgcagcagctcttgcttatggtttggacaagactgacaaagaagaaaaaatcttggtatttgaccttggtggtggtacattcgacgtctctatccttgaattgggtgacggtgtcttcgacgtattgtcaactgcaggggacaacaaacttggtggtgacgactttgaccaaaaaatcattgaccacttggtagcagaattcaagaaagaaaacggtatcgacttgtctactgacaagatggcaatgcaacgtttgaaagatgcggctgaaaaagcgaagaaagacctttctggtgtaacttcaacacaaatcagcttgccatttatcactgcaggtgaggctggacctcttcacttggaaatgactttgactcgtgcgaaatttgacgatttgactcgtgaccttgttgaacgtacaaaagttccagttcgtcaagccctttcggatgcaggtttgagcttgtcagaaatcgacgaagttatccttgttggtggttcaactcgtatccctgccgttgttgaagctgttaaagctgaaactggtaaagaaccaaacaaatcagtaaaccctgatgaagtagttgctatgggtgcggctatccaaggtggtgtgattactggtgatgtcaaggacgttgtccttcttgatgtaacgccattgtcacttggtatcgaaacaatgggtggagtatttacaaaacttatcgatcgcaacactacaatcccaacatctaaatcacaagtcttctcaacagcagcagacaaccaaccagccgttgatatccacgttcttcaaggtgaacgcccaatggcagcagataacaagactcttggacgcttccaattgactgatatcccagctgcacctcgtggaattcctcaaatcgaagtaacatttgacatcgacaagaacggtatcgtgtctgttaaggccaaagaccttggaactcaaaaagaacaaactattgtcatccaatcgaactcaggtttgactgacgaagaaatcgaccgcatgatgaaagatgcagaagcaaacgctgaagccgataagaaacgtaaagaagaagtagaccttcgtaatgaagtagaccaagcaatctttgcgactgaaaagacaatcaaggaaactgaaggtaaaggcttcgacgcagaacgtgacgctgcccaagctgcccttgatgaccttaagaaagctcaagaagacaacaacttggacgacatgaaagcaaaacttgaagcattgaacgaaaaagctcaaggacttgctgttaaactctacgaacaagccgcagcagcgcaacaagctcaagaaggagcagaaggcgcacaagcaacaggaaacgcaggcgatgacgtcgtagacggagagtttacggaaaagtaa

SEQ ID NO: 48917 - protein, 607 aa, Streptococcus pneumoniae
MSKIIGIDLGTTNSAVAVLEGTESKIIANPEGNRTTPSVVSFKNGEIIVGDAAKRQAVTNPDTVISIKSKMGTSEKVSANGKEYTPQEISAMILQYLKGYAEDYLGEKVTKAVITVPAYFNDAQRQATKDAGKIAGLEVERIVNEPTAAALAYGLDKTDKEEKILVFDLGGGTFDVSILELGDGVFDVLSTAGDNKLGGDDFDQKIIDHLVAEFKKENGIDLSTDKMAMQRLKDAAEKAKKDLSGVTSTQISLPFITAGEAGPLHLEMTLTRAKFDDLTRDLVERTKVPVRQALSDAGLSLSEIDEVILVGGSTRIPAVVEAVKAETGKEPNKSVNPDEVVAMGAAIQGGVITGDVKDVVLLDVTPLSLGIETMGGVFTKLIDRNTTIPTSKSQVFSTAADNQPAVDIHVLQGERPMAADNKTLGRFQLTDIPAAPRGIPQIEVTFDIDKNGIVSVKAKDLGTQKEQTIVIQSNSGLTDEEIDRMMKDAEANAEADKKRKEEVDLRNEVDQAIFATEKTIKETEGKGFDAERDAAQAALDDLKKAQEDNNLDDMKAKLEALNEKAQGLAVKLYEQAAAAQQAQEGAEGAQATGNAGDDVVDGEFTEK

SEQ ID NO: 48918 - DNA, 1839 bp, Symbiobacterium thermophilum
  CDS (1)..(1839): transl_table=11
atggccaaggtaattggcatcgacctcggcaccaccaactcggtggtggccgtgatggatggcagcgaaccgacggtgctggagaaccgggagggcgaccggaccaccccgtccgtcgtcgctttcaccaagaccggcgagcggctggtgggcaaggtggccaagcggcaggccatcaccaacccggaccgcacgatcatctcgatcaagcgccacatgggcagcgactacaaggtccggatcgacgacaaggcgtacacgccgcaggagatctccgcgatgatcctctccaagctgaaggcggacgcggaggagaaactgggcgagaagatcacccaggccgtcatcacggtgcccgcttacttcaccgacgcccagcgacaggcgaccaaggacgccggcaccatcgccggcctggaggtcctgcggatcatcaacgagccgacggccgccgcgctggcctacggcctcgacaagggcgaggaccagcggattctcgtcttcgacctgggcggcggcacgttcgacgtctcgatcctggagctgggcggcggcaccttccaggtgatcgccaccgccggcaacaacaagctcggcggcgacgacttcgacgagcgcatcgtgaactacctggccgaccgcttccagcgggagcacggcatcgacctgcgcaaggataagcaggccctgcagcggctgcgggaggccgccgagaaggccaagatcgagctctcctcggtcaccacgaccaacatcaacctgcccttcatctccatgaccgcggacggcccggtgcacatggacgagacgctgacccgggccaagttcgaggagctcaccgccgacctggtggaggcgaccatggggccgacccggcaggcgctgcaggacgcgggcctggagccgggcgagatcgacaaggtgctgctggtgggcggctccacccgcatccctgcggtgcaggaggcggtgcgccgcttcttcggcaaggagccctacaagggcatcaaccccgatgaggtcgtcgccatgggcgcggccatccaggccgccgtcatcaagggcgacgtcaaggacgtgcttctcctggacgtcaccccgctgtcgctgggcattgagaccctgggcggcgtgttcaccaagctgatcgagcgcaacaccaccattccgacccgcaagagccagatcttctcgacggctgccgacggccagacccaggtggagatccacgtgctccagggcgagcgggagatggcggcgtacaacaagaccctcggccggttcatcctcgacggcatcccgccggcgccgcggggcgtgcccaagatcgaagtcaccttcgacatcgacgtcaacggcatcgtccacgtctcggccaaggacctcggcaccggcaaggagcagaagatcaccatccagtcccagacctccatgtccaaggaggagatcgagcgggccatcaaggaagcggaggccatggcggcggaggacaagaagcgccgcgaggaggccgagatccgcaacaatgccgatgccgccgtgtacaatgcggagaagctgatcaaggagtccgagggcaagggcatcgacccgtcgctcatcgacgcggtgaagggcgcgatcgagccggtgaaggaggccctgaagggcaccgacgtgaacgccgtcaagcaggcgaccgagaagctgaccgaggcggtctacaagctctcgtcggccatctacgaaaagaccggctcggccggcacgggcgccggttcccaggcgggcagcgccgccggttccggcgacggccagtccatggacgccgagttcaaggtcaaggacgaagacaagtag

SEQ ID NO: 48919 - protein, 612 aa, Symbiobacterium thermophilum
MAKVIGIDLGTTNSVVAVMDGSEPTVLENREGDRTTPSVVAFTKTGERLVGKVAKRQAITNPDRTIISIKRHMGSDYKVRIDDKAYTPQEISAMILSKLKADAEEKLGEKITQAVITVPAYFTDAQRQATKDAGTIAGLEVLRIINEPTAAALAYGLDKGEDQRILVFDLGGGTFDVSILELGGGTFQVIATAGNNKLGGDDFDERIVNYLADRFQREHGIDLRKDKQALQRLREAAEKAKIELSSVTTTNINLPFISMTADGPVHMDETLTRAKFEELTADLVEATMGPTRQALQDAGLEPGEIDKVLLVGGSTRIPAVQEAVRRFFGKEPYKGINPDEVVAMGAAIQAAVIKGDVKDVLLLDVTPLSLGIETLGGVFTKLIERNTTIPTRKSQIFSTAADGQTQVEIHVLQGEREMAAYNKTLGRFILDGIPPAPRGVPKIEVTFDIDVNGIVHVSAKDLGTGKEQKITIQSQTSMSKEEIERAIKEAEAMAAEDKKRREEAEIRNNADAAVYNAEKLIKESEGKGIDPSLIDAVKGAIEPVKEALKGTDVNAVKQATEKLTEAVYKLSSAIYEKTGSAGTGAGSQAGSAAGSGDGQSMDAEFKVKDEDK

SEQ ID NO: 48920 - DNA, 1857 bp, Tetragenococcus halophilus
  CDS (1)..(1857): transl_table=11
atgagtaagataattggtattgacttaggtacaacaaattcagccgtttcagttttagaaggcggcgaatcgcaaattattacaaatccagaaggaaatcgtacaacaccttctgctgtagcatttaaaaatggcgaaattcaagtaggtgaagtagcaaaaagacaagcagttacaaactcagatactgttacttctattaagcgtcatattggtgaagatggttataaggtagaagcgaacaataaatcttatacaccacaagaaatttcagcaatgattttgcaacacattaaaagcttttcagaagattatctaggcgaagaagttgaaaaagctgttattacagttcctgcttatttcaatgactcacaacgtcaagcaactaaagatgctggtaagatcgctggattagaagttgaacgtattgtaaatgaaccaactgcagctgctttagcttacggtttagataaaactgaacaagatgaaaaaatcttagtatttgaccttggtggcggtacttttgacgtttccatcttagaattaggtgacggtgtatttgatgtgttatctactgccggtgacaacaagctaggtggagatgactttgacgaaaaaatcattgattacatggtgagtgaattcaaaaaagaaaatggcattgatttaagtaaagacaaaatggctttacaacgtctaaaggacgctgctgaaaaagcgaagaaagacttatcaggcgtttcaagtacacaaatcagtttaccatttattacagctggtgaagatggccctcttcatctagaaatgaatatgactcgtgcaaaattcgatgaattaacaagtagtttagttgatcgtacaaaagaacctgtacgccaagctttgaaagatgctgatttatctcaatctgatattgatcaagtcatcttggttggtggttcgactcgtattccatctgttgttgaatcagtacgtaaagaaacaggtaaagaaccaaataaatcagtgaacccggacgaagtagttgctatgggtgctgctatccaagctggtgttattagtggtgatgttaaagacgttgtattacttgatgtaacacctctatctctaggaattgaaactatgggtggtgtatttacgaagttgatcgatcgtaatactacgattccaacaagtaaatctcaagtattctctacagcagctgataatcaaccagccgtagatattcacgtattgcaaggtgaacgtccaatggcagctgataacaagacattaggtcgtttccaattaacagatatcccagcagctccacgtggtgtaccacaaattgaagttagctttgatatcgacaaaaacggtattgtaaatgtttcagctaaagatttgggtacacaaaaaaggacaaaaattaccattcaatcttcttccggtttatcagatgacgaaattgataaaatggttaaagatgctgaagcaaacgctgaagccgatgaaaaacgtaaagaagaagttgatctacgtaacgaagtagatacactgttatttacggtagataagacattgagtgaccttgatggtaaagtggacgaagaagaagtcaaaaaagctgaaaatgcacgtgatgaattaaaagctgcagtagaagctgacgacatcgaagacatgaaaactaaacgcgatgcattgaatgaaatcgtacaaaacttgagtgttaagatgtacgaacaagcgtcacaagaacaacaaggcgatcaagcagcccaaggttcagatgatgcttctaacgcttctggtgacgatgatgtagtggatgcagattttgaagaagtagatgacgatgataacgataatcaataa

SEQ ID NO: 48921 - protein, 618 aa, Tetragenococcus halophilus
MSKIIGIDLGTTNSAVSVLEGGESQIITNPEGNRTTPSAVAFKNGEIQVGEVAKRQAVTNSDTVTSIKRHIGEDGYKVEANNKSYTPQEISAMILQHIKSFSEDYLGEEVEKAVITVPAYFNDSQRQATKDAGKIAGLEVERIVNEPTAAALAYGLDKTEQDEKILVFDLGGGTFDVSILELGDGVFDVLSTAGDNKLGGDDFDEKIIDYMVSEFKKENGIDLSKDKMALQRLKDAAEKAKKDLSGVSSTQISLPFITAGEDGPLHLEMNMTRAKFDELTSSLVDRTKEPVRQALKDADLSQSDIDQVILVGGSTRIPSVVESVRKETGKEPNKSVNPDEVVAMGAAIQAGVISGDVKDVVLLDVTPLSLGIETMGGVFTKLIDRNTTIPTSKSQVFSTAADNQPAVDIHVLQGERPMAADNKTLGRFQLTDIPAAPRGVPQIEVSFDIDKNGIVNVSAKDLGTQKRTKITIQSSSGLSDDEIDKMVKDAEANAEADEKRKEEVDLRNEVDTLLFTVDKTLSDLDGKVDEEEVKKAENARDELKAAVEADDIEDMKTKRDALNEIVQNLSVKMYEQASQEQQGDQAAQGSDDASNASGDDDVVDADFEEVDDDDNDNQ

SEQ ID NO: 48922 - DNA, 1842 bp, Thermobifida fusca
  CDS (1)..(1842): transl_table=11
atggcacgtgcggtcggcatcgaccttggtacgacaaactctgtcgtcgcggtcctggaaggcggcgaacccacggttatcgccaacgccgaaggagctcggaccactccgtccgtcgtcgccttcgcgaagaacggtgaggtgctcgtcggtgagatcgccaagcgccaggcggtcaccaacgtcgagcggaccatccgctcggtcaagcgccacatgggcaccgactggaagacccacatcgacggcaaggacttcaccccgcagcagatcagcgccttcgtgctgcagaagctgaagagggacgcggaggcctacctcggcgaggaagtcaccgacgccgtcatcaccgtcccggcctacttcagcgacgctgagcggcaggccaccaaggacgcagggaagatcgccggcctcaacgtcctgcgcatcatcaacgagcccacgtccgctgcgctcgcctaccacctggagaaagagggcgaggccaccatcctggtcttcgacctcggcggtggtaccttcgacgtctcgctgctggacgtcggcgacggcgtggtcgaggtgaaggccacccacggtgacaaccacctcggtggtgacgactgggaccaggccgtcgtggactggctggtcgagcggttcaagagcagcaacggcatcgacctgtccaaggacaagatggcgatgcagcggctccgcgaggccgcggagaaggccaagatcgagctgtccagctccacggagacctcgatcaacctgccctacatcaccgcctccgccgagggtccgctgcacctggacgagaagctcacccgcgccgagttccagcggctcacgtcgcacctgctcgagcgcaccaagggcccgttcttccaggtcatcaaggacgctgggatcagcgtcgaccagattgaccacgtggtcctggtgggtggctccacccggatgcccgccgtggtcgacctggtgcgcgagctgaccggcggcaaggagcccaacaagggcgtcaacccggacgaggtcgtcgcggtcggcgcggccctgcaggccggtgtgctcaagggtgacgtcaaggacgtgctgctgctcgacgtgaccccgctgtcgctgggcatcgagaccaagggcggtgtcttcaccaagctcatcgagcgcaacacggccatcccgaccaagcgctcggagatcttcaccacggccgaggacaaccagccgtcggtgcagatccaggtctaccagggtgagcgggagatcgctaagtacaacaagaagctcggcgtcttcgacctgaccggcatcccgccggcgccgcgcggtgtgccgcagatcgaggtcaccttcgacatcgacgccaacggcatcgtcaacgtcaccgcgaaggacctcggcaccggcaaggagcagtcggtcaccatcaccggtggctccgcgctgccgaaggaagacatcgagcggatgatccgcgaggcggaggagtacgccgagcaggaccgcaagcgccgcgaggaagcggagacccgcaacaacgccgagtcgctggtctaccagaccgagaaggtcatctccgagaacgaggacaagatccccgaggacgtcaagaacgagaccaaggaggcgctggacgggctgaagaaggcgctcgaaggcagcgacatcgaggcgatccgcagcgccagcgagaaggttgccctggccagccagaagatcggctccgccatctacagccagagccagcaggcctccggcgcagcggcgggcggccagcagaacgccgaggacgcggaggtcgtggacgcggagatcgtcgacgaggagcccaagcgcgaaggcaactcgtga

SEQ ID NO: 48923 - protein, 613 aa, Thermobifida fusca
MARAVGIDLGTTNSVVAVLEGGEPTVIANAEGARTTPSVVAFAKNGEVLVGEIAKRQAVTNVERTIRSVKRHMGTDWKTHIDGKDFTPQQISAFVLQKLKRDAEAYLGEEVTDAVITVPAYFSDAERQATKDAGKIAGLNVLRIINEPTSAALAYHLEKEGEATILVFDLGGGTFDVSLLDVGDGVVEVKATHGDNHLGGDDWDQAVVDWLVERFKSSNGIDLSKDKMAMQRLREAAEKAKIELSSSTETSINLPYITASAEGPLHLDEKLTRAEFQRLTSHLLERTKGPFFQVIKDAGISVDQIDHVVLVGGSTRMPAVVDLVRELTGGKEPNKGVNPDEVVAVGAALQAGVLKGDVKDVLLLDVTPLSLGIETKGGVFTKLIERNTAIPTKRSEIFTTAEDNQPSVQIQVYQGEREIAKYNKKLGVFDLTGIPPAPRGVPQIEVTFDIDANGIVNVTAKDLGTGKEQSVTITGGSALPKEDIERMIREAEEYAEQDRKRREEAETRNNAESLVYQTEKVISENEDKIPEDVKNETKEALDGLKKALEGSDIEAIRSASEKVALASQKIGSAIYSQSQQASGAAAGGQQNAEDAEVVDAEIVDEEPKREGNS

SEQ ID NO: 48924 - DNA, 1848 bp, Thermus thermophilus
  CDS (1)..(1848): transl_table=11
atggccaaggcagtgggcattgacctgggcaccaccaacagcgtgatcgccgtcctggagggcggcaagcccgtggtgctggaaaacgcggaaggggaaagggtcaccccgagcgtggtggccttccgcgacggggagaccctggtgggccgcatggccaagcgccaggcggtcctgaaccccgaggggacgatctttgagatcaagcgcttcatcggccgccgctttgaggaggtccaggaggaggccaagcgggtcccctacaaggtggtccccgggccggacgggggcgtgcgggtggaggtcaagggcaagctctacacccccgaggagatcagcgccatgatcctccgcaagctggtggaggacgcctccaagaagctcggggaaaagatcaccaaggcggtgatcaccgtgcccgcctacttcaacaacgcccagcgggaggccacggccaacgccggcaggatcgcggggcttgaggtcttgcgcatcatcaacgagcccaccgccgccgctttggcctacggcctggacaagaaggggaacgagaccgtcctcgtctttgacctgggaggcgggacctttgacgtcaccgtcctggagatcggcgagggggtctttgaggtgaaggccacctccggggacacccacctgggcgggtcggacatggaccacgccatcgtcaactggctcgccgaggagttcaagaaggagcacggcgtggacctcaaggccgaccgccaggccctgcaacggctcattgaggcggcggagaaggccaagattgagctctccagcaccctggagaccaccatcagcctgcccttcatcgccttggaccccgcgagcaagacccccctccacctggagaagaagctcacccgggccaagtttgaggagctgatccagcccctcctcaagcgcctcaggggccccgtggagcaggccttgaaggacgcgggcctcacccccgcccagattgacgaggtgatcctcgtgggcggggccacccgggtgcccgcggtgcagcaggtggtgagggagcttctgggcaaggagcccaaccgctccgtgaaccccgacgaggtggtggccatgggggccgccatccaggccggggtgctcatgggcgaggtccgggacgtggtccttctggacgtcacccccctctccttgggcgtggagaccaagggcggggtgatgaccgtcctcatcccccggaacaccaccatccccacccgcaagtgcgagatcttcaccaccgccgagcacaaccagaccgccgtggagatccacgtcctccagggcgagcgccccatggcccaggacaacaagagcctgggccgcttccgcctggagggcatcccccccatgcccgcgggcgtcccccagattgaggtctgctttgacattgacgccaacggcatcctccacgtgaccgccaaggagaggtccaccgggcgcgaggcctccatcaccatccagaacaccaccaccctctccgaggaggagatccagcggatcattgaggaggcgaagcgccacgccgaggaggaccgccgccgcagggagcacgccgagctcaagaacgccctggactcggcccgcgtccaggcggaaagggtcctgcaggagaggcagggggccccggaggccagggcccgcctcgaggccgccatagggaaggccaaggagctcgtggagcgggacgcccccgaccccgagctcaaggcggccacggaggagctccttaaggcggtggaggagtacgagaagggcgcccaggcggcttcgggcaaggggccggacgacgtgattgacgccgactacaagcccgcggactga

SEQ ID NO: 48925 - protein, 615 aa, Thermus thermophilus
MAKAVGIDLGTTNSVIAVLEGGKPVVLENAEGERVTPSVVAFRDGETLVGRMAKRQAVLNPEGTIFEIKRFIGRRFEEVQEEAKRVPYKVVPGPDGGVRVEVKGKLYTPEEISAMILRKLVEDASKKLGEKITKAVITVPAYFNNAQREATANAGRIAGLEVLRIINEPTAAALAYGLDKKGNETVLVFDLGGGTFDVTVLEIGEGVFEVKATSGDTHLGGSDMDHAIVNWLAEEFKKEHGVDLKADRQALQRLIEAAEKAKIELSSTLETTISLPFIALDPASKTPLHLEKKLTRAKFEELIQPLLKRLRGPVEQALKDAGLTPAQIDEVILVGGATRVPAVQQVVRELLGKEPNRSVNPDEVVAMGAAIQAGVLMGEVRDVVLLDVTPLSLGVETKGGVMTVLIPRNTTIPTRKCEIFTTAEHNQTAVEIHVLQGERPMAQDNKSLGRFRLEGIPPMPAGVPQIEVCFDIDANGILHVTAKERSTGREASITIQNTTTLSEEEIQRIIEEAKRHAEEDRRRREHAELKNALDSARVQAERVLQERQGAPEARARLEAAIGKAKELVERDAPDPELKAATEELLKAVEEYEKGAQAASGKGPDDVIDADYKPAD

SEQ ID NO: 48926 - DNA, 1821 bp, Thermoanaerobacter tengcongensis
  CDS (1)..(1821): transl_table=11
atggggaaagtgattgggattgaccttggaacaactttttcatgtgtagctgtgatggaaggcggtcagcccgtagtaatacctaattctgaaggaactcgtaccactccttctgtagtagcttttactaaagaaggagaaaggcttgtagggcatccggctagaaggcaggctataataaaccctgagaggaccataatgtccataaagaggcatatgggtacagactataaagttaaaatagacgacaaagaatacactccgcaggaaatttctgcaatgattttgcagaaattaaaggcagatgctgaggcttacctcggagaaaaagtcactcaagcggtcataacagtacctgcatactttaatgacagtcaaagacaggctacaaaagatgctggaaggatagcagggcttgaagttttgagaataataaatgagcctacggcagcagctttggcttatggtcttgacaaagaaggaaaccagaaagtaatggtatacgacttgggcggcggtacttttgacgtttccatacttgagattggcgacggagtctttgaagttttggccacaagcggtaacaaccacttaggtggagatgactttgaccagaggataatagactggttggcagataatttccaaaaagagcatggaattgacttgagaaaagacaggatggctttgcagaggttgaaagaggctgcggaaagggctaagattgaactttcttctgctatggtgacaaatataaaccttcctttcataacagcagatgcttcaggacctaagcatatagacgtaaacttgacgagagcaaaatttgaagaattgatttcagatttagtcgagtctacagttgggcctgttaagcaagctttgagcgacgcaggattaaagcctgaagatatagacaaggtccttttggtgggaggttctacaagaatacctcttgttcaggaaacggtcaagaagataatgggcaaagaacctcataaaggaatcaacccagatgaagctgttgcaataggagctgctatacaggctgctgtgctcgcaggtgagatcaaggacatactgcttctcgatgttactccgctttcccttggaatagagactctgggaggagttttcacaaaaattatagaaagaaacactactattcctgtaagaaagagccagattttcactacagccgcagataaccagacttctgtggaaattcacgtactacagggagagaggcctttagctaaggacaacaagagtttaggtcgcttcatactctctggtattccaccggcgccgagaggagtgcctcagattgaggttacttttgacatagatgcgaatggaattgtacatgtttctgcaaaggaccttgccacaggaaaatcccagcagataaccataacaggtagcaccaacctgtccgaagaagagatacagaggatgataaacgaagctaagcagtacgaagagcaggacagaaagaaaagagaagaaattgaaataagaaacagagctgactctctgatatatcaggcagagaaaactatgaaagatttaggagataagatgactcaggcagagaaggatgaaattaataaggagatagaaaatgtaagaaaagcccttgaaggcactgatgttgaggctataaaggcagcttctgaaaagctttctgaggctttctacaaagtctcaacaagactttaccagcaggcggcaggcagtgcaaatcctggtggcagccagggcacatctcaagggaatgtctatgaagcggattataaagtggaggacgataataaataa

SEQ ID NO: 48927 - protein, 606 aa, Thermoanaerobacter tengcongensis
MGKVIGIDLGTTFSCVAVMEGGQPVVIPNSEGTRTTPSVVAFTKEGERLVGHPARRQAIINPERTIMSIKRHMGTDYKVKIDDKEYTPQEISAMILQKLKADAEAYLGEKVTQAVITVPAYFNDSQRQATKDAGRIAGLEVLRIINEPTAAALAYGLDKEGNQKVMVYDLGGGTFDVSILEIGDGVFEVLATSGNNHLGGDDFDQRIIDWLADNFQKEHGIDLRKDRMALQRLKEAAERAKIELSSAMVTNINLPFITADASGPKHIDVNLTRAKFEELISDLVESTVGPVKQALSDAGLKPEDIDKVLLVGGSTRIPLVQETVKKIMGKEPHKGINPDEAVAIGAAIQAAVLAGEIKDILLLDVTPLSLGIETLGGVFTKIIERNTTIPVRKSQIFTTAADNQTSVEIHVLQGERPLAKDNKSLGRFILSGIPPAPRGVPQIEVTFDIDANGIVHVSAKDLATGKSQQITITGSTNLSEEEIQRMINEAKQYEEQDRKKREEIEIRNRADSLIYQAEKTMKDLGDKMTQAEKDEINKEIENVRKALEGTDVEAIKAASEKLSEAFYKVSTRLYQQAAGSANPGGSQGTSQGNVYEADYKVEDDNK

SEQ ID NO: 48928 - DNA, 1920 bp, Thiobacillus denitrificans
  CDS (1)..(1920): transl_table=11
atgggacgcatcattggtattgacctcggcaccaccaactcctgcgtggcggtcatggaaaacggctcgccgaaggtgatcgagaacgccgaaggcgcgcgcacgaccccgtcgatcgtggcctacgccgaggacggcgaaatcctggtcggcgcgccagccaaacgccaggccgtcaccaaccccaagaacacgatcttcgcggtcaagcgtctgatcggccgccgcttcgaagagaaagaagtgcagaaggacatcggcctgatgccctacaagatcgtcaaggccgacaacggcgacgcctgggtcgaggtgcgcgacaagaaaatggctgcccagcaggtgtcggcagagatcctgcgcaagatgaagaagacggccgaggattacctcggcgaggaagtcacagaagccgtgatcacggtgccggcctacttcaacgacagccagcgccaggcgaccaaggacgcgggccgcatcgccgggctcgaggtcaagcgcatcatcaacgagccgaccgcggccgcgctcgccttcggcatggacaagaaggaaggcgaccgcaagatcgcggtgtacgacctcggcggcggcaccttcgacatctcgatcatcgagatcgcggaaatggatggcgagcaccagttcgaggtgctctccacgaacggcgacaccttcctcggcggcgaggacttcgaccagcgcctgatcgactacatcgcggaagaattcaagaaggagcagggcgtcgacctgaagaaggacgtgctcgcgctgcagcgcctcaaggaagccgcggaaaaagccaagatcgagctctcgtcgggccagcagaccgaagtcaacctgccctacatcacggcggacgcgtcggggcccaagcacctcgcggtaaagatcacgcgcgccaagttcgagagcctggtcgaggaactgatcacgcgcacgatcgagccgtgcaagctggcgctcaaggacgccgggctcacgacttcgcagatcgacgacgtcatcctggtcggcggccagacccgcatgcccaaggtgatggacgcggtcaaggatttcttcggcaaggagccgcgtcgtgacgtcaacccggacgaggccgtcgccgtcggcgccgcgattcagggcggcgtgctgcagggcgaggtcaaggacgtgctgctgctcgacgtgaccccgctgtcgctcggcatcgaaaccctcggcggcgtgatgaccaagctgatcccgaagaacacgacgatcccgaccaaggcttcgcaggtgttctcgaccgccgacgacaaccagagcgcggtgaccgtgcacgtgctgcagggcgagcgcgagatggcgtcaggcaacaagagcctcggccagttcaacctgtccgacattccgcccgcgccgcgcggcatgccgcagatcgaggtcaccttcgacatcgacgccaacggcatcttgcacgtctcggccaaggacaaggcgaccggcaaggagaacaagatccgcatccaggcgagctcgggcctctccgaggaggagatccagcgcatggtcaaggacgccgaggccaacgccgccgaggaccacaaggccttcgaactggcgggcgcgcgcaacgcggccgacgcgatgatccattcagtgaagaagtcgctcgccgagtacggcgacaaggtatcggccgacgagaaggcgacgatcgagtctgccctcaaggaagccgaggacgcggtgcgcgaaggcgacaaggaaacgatcgaaaccaagaccaacgcgctcgcgaccgcaagccacaagctcgccgaacagatgtatcaggccgaacaggccaaggcgcagccggccggtgagacgggcaaccagagcaccggtcccggtaacgacgacgtcgtcgacgccgagttcgaagaggtgaaggacaagtaa

SEQ ID NO: 48929 - protein, 639 aa, Thiobacillus denitrificans
MGRIIGIDLGTTNSCVAVMENGSPKVIENAEGARTTPSIVAYAEDGEILVGAPAKRQAVTNPKNTIFAVKRLIGRRFEEKEVQKDIGLMPYKIVKADNGDAWVEVRDKKMAAQQVSAEILRKMKKTAEDYLGEEVTEAVITVPAYFNDSQRQATKDAGRIAGLEVKRIINEPTAAALAFGMDKKEGDRKIAVYDLGGGTFDISIIEIAEMDGEHQFEVLSTNGDTFLGGEDFDQRLIDYIAEEFKKEQGVDLKKDVLALQRLKEAAEKAKIELSSGQQTEVNLPYITADASGPKHLAVKITRAKFESLVEELITRTIEPCKLALKDAGLTTSQIDDVILVGGQTRMPKVMDAVKDFFGKEPRRDVNPDEAVAVGAAIQGGVLQGEVKDVLLLDVTPLSLGIETLGGVMTKLIPKNTTIPTKASQVFSTADDNQSAVTVHVLQGEREMASGNKSLGQFNLSDIPPAPRGMPQIEVTFDIDANGILHVSAKDKATGKENKIRIQASSGLSEEEIQRMVKDAEANAAEDHKAFELAGARNAADAMIHSVKKSLAEYGDKVSADEKATIESALKEAEDAVREGDKETIETKTNALATASHKLAEQMYQAEQAKAQPAGETGNQSTGPGNDDVVDAEFEEVKDK

SEQ ID NO: 48930 - DNA, 1941 bp, Treponema denticola
  CDS (1)..(1941): transl_table=11
atgggaaagattattggaattgacttaggaacaacaaactcttgtgtatcggtaatggaaggcggtgaacccgtcgttataccgaactctgaaggcggaagaacgactccgtccattgtaggctttacctctaaagatgaaagggttgtaggccagcctgcaaaaaaccaaatgattaccaaccctgaaagaaccgtttattcggtaaagcgctttatcgggcatcgatacagcgagctcacagacgaattaaaacgcgttccctacaaaatcgtacctcagggagaagatgtacgaatcgacattgacggaaaactttattccacacaggaaatttccgcctttattctacaaaaaatgaaaaaaacagccgaggactatctgggcgaaaccgtaaccgaggccgttataacggttccggcttattttaatgatgcgcaaagacaggcaacaaaggatgccggaaagattgccggcttggaagtaaagcgaatcataaacgagccgacagccgcttccttggccttcggttttaacaaggattctaaaaaagaaaaaacaatcgccgtatatgaccttggaggaggaaccttcgatatttctattcttgaattgggtgacggcgtttttgaagtaaaatccacaaatggagatacccacctcggcggtgatgattttgataacagaatagtaaactggcttgttgacgagtttaaaaaagatacgggcattgacctatctaaagacagaatggccttacaacgtttacgcgaagccgctgaaaaggcaaagattgaactttcttcggttgcaaatacggaggtaaacttaccctttattacagccgatgcaaacgggcctaagcacttacaaaagagcttatccagggcaaagtttgagcaaatgacggaagatctctttgaaagaacaaaggagccttgccgaaaagccttaaaagatgcgggtatcactcccgataaaattgatgatattcttttggtaggcggttctacgcgaatgcctaaagttttacagattataaaagaaattttcggcaaagaaggttctaagagcgtaaaccccgatgaagccgtagcaatgggtgccgctattcagggcggtatcttgggcggagatgttaaagatgttcttcttttggacgttactcctctttctttgggtatcgaaacgatgggaggcgtatttacaccccttatcaaccgaaatactacgattccgacaaggaagagtcaggtcttctcgacagctgccgacggacagactgccgtttctatccatgtattgcagggagaacgcggtatggccagccaaaacagaacgctcggtaattttgacctcgtaggtattcctcccgcaccgcgcggagttccgcagattgaagttaccttcgatattgacgccaacggtatcgttcatgtttcggcaaaagacctcggaaccggaaaagaacagcatatccgaatcgaaagctcaagcggtttaagcgagagcgaaatcgatagaatggtaaaagaagctgaagccaatgccgaaaacgataagcttgaaaaagaaaaggttgaagcaaaaaataatgccgattctcttatttatcaaacggaaaaaactctcaaagaaatgggagataagatcggtgctgccgataagcaaaaaattgaagctgcaatagccgatttaagacaggctcttaattcagataatacggctgacattaaggcaaagaccgaaaacctccagcaggcagcctataagattgcagaagaaatgtacaagcagcagggcgctcaagcaggagccgatcctaatgccggcagttctcagggtgctcaagcgggaaccgattacggtacttcaggtcccaaaaccggcacagccgatgatgttgactatgaagtcgtaaatgatgataatgataaataa

SEQ ID NO: 48931 - protein, 646 aa, Treponema denticola
MGKIIGIDLGTTNSCVSVMEGGEPVVIPNSEGGRTTPSIVGFTSKDERVVGQPAKNQMITNPERTVYSVKRFIGHRYSELTDELKRVPYKIVPQGEDVRIDIDGKLYSTQEISAFILQKMKKTAEDYLGETVTEAVITVPAYFNDAQRQATKDAGKIAGLEVKRIINEPTAASLAFGFNKDSKKEKTIAVYDLGGGTFDISILELGDGVFEVKSTNGDTHLGGDDFDNRIVNWLVDEFKKDTGIDLSKDRMALQRLREAAEKAKIELSSVANTEVNLPFITADANGPKHLQKSLSRAKFEQMTEDLFERTKEPCRKALKDAGITPDKIDDILLVGGSTRMPKVLQIIKEIFGKEGSKSVNPDEAVAMGAAIQGGILGGDVKDVLLLDVTPLSLGIETMGGVFTPLINRNTTIPTRKSQVFSTAADGQTAVSIHVLQGERGMASQNRTLGNFDLVGIPPAPRGVPQIEVTFDIDANGIVHVSAKDLGTGKEQHIRIESSSGLSESEIDRMVKEAEANAENDKLEKEKVEAKNNADSLIYQTEKTLKEMGDKIGAADKQKIEAAIADLRQALNSDNTADIKAKTENLQQAAYKIAEEMYKQQGAQAGADPNAGSSQGAQAGTDYGTSGPKTGTADDVDYEVVNDDNDK

SEQ ID NO: 48932 - DNA, 1908 bp, Treponema pallidum
  CDS (1)..(1908): transl_table=11
atggggaagattattggcattgacttgggaacgacaaattcatgtgttgcgatcatggaggggggggagcccgttgtcattcaaaatgccgaagggggaaggactacgccctccattatcggtttcacctctgatggtggacgcgtcgtcggtcagccagcaaaaaaccaaatggttactaatccggaacatactatctattcgataaagcgctttatcggcagtcgtttcaatgaactgaccggtgaagcaaaaaaggtgccctacaaaattgttccacagggagacgacgtgcgcgttgaggtggagggtaagctttactctacgcaggagatctccgcgttcattttgcaaaaaatgaagaagacagctgaggattatttgggcgaggcagtcacagaggcagtcattaccgttccggcttactttaacgatgcacagcgtcaggcaaccaaggatgcggggaagatagcagggctcgatgtgaagcgtattattaatgagccgactgctgcgtcgcttgcctttggttttaacaaagactctaagagagagaagattattgctgtgtatgatcttggggggggtacctttgacatatccatcttggaactcggtgacggtgtttttgaagtcaagtcaacgaatggggacactcacctggggggcgatgactttgatgcacgtatcgtgcaatggctggagcagggcttcaagagtgacacgggtatcgacttgggcaacgaccgcatggcgttgcagcggctgagagaagcggcggagaaagcaaagatagcgctttcttcctctgcgagtaccgagattaatttgcccttcattactgcagatgccaatgggccaaagcatctccagaggactctctctcgatctgagtttgagaagatgactgatgatctttttgagcggaccaaagagccttgccgcaaggcgctcaaagacgccggaattagtgcggacaggatcgatgagattctcttagttggtggttccacgcgcatgcccaaagtagcgcacgtgatcaaagatgtctttgggaaagaaggatcgaagggagtcaatcctgacgaggctgtcgcaattggcgctgcaattcaaggaggtatcctcgggggggacgtgaaggatgtacttctcttagacgttacgcctctttctctaggaattgaaacaatgggcggggtgttcactccgcttatcagtcgtaataccaccatccccacgcgcaagagtcaggtgttttccaccgcagctgatgggcagacggcagtttccattcacgtgctgcagggggagcgtggcatggcgaaccaaaaccggacgctcggtaattttgatctagtaggaattccccctgctccgcggggagtgccgcaaattgaagtgacgtttgacattgatgcgaatggtatcgtgcacgtttctgccaaagacctagggacgggaaaagagcagcacatccgcattgaaagttcgagtggtctgagcgaaagtgaaatcgaccgcatggtaaaggaagccgaagcgaatgcagaaagtgataagcgtgagcgggagaaaatcgaagcacgtaacgtggctgactccctaatctatcagacggaaaagacgctcaaggaggcgggagacggggtgaacgctgcggaccgcgcgcgcatagacgaggcgatcgcagagttgaagacggtgctctcaggcgacgacgtcgcatcgatcaaagcgaagactgagatcttgcagcaagcttcctacaaaattgcggaggaaatgtataaacgtcaagcagcagcgggtgccgctgcaggtaagaagagtgatgcaccctctggcaatgaggcagaaggtggtgacgttgattacgaggtagtgaaggacgaagattcaaagtag

SEQ ID NO: 48933 - protein, 635 aa, Treponema pallidum
MGKIIGIDLGTTNSCVAIMEGGEPVVIQNAEGGRTTPSIIGFTSDGGRVVGQPAKNQMVTNPEHTIYSIKRFIGSRFNELTGEAKKVPYKIVPQGDDVRVEVEGKLYSTQEISAFILQKMKKTAEDYLGEAVTEAVITVPAYFNDAQRQATKDAGKIAGLDVKRIINEPTAASLAFGFNKDSKREKIIAVYDLGGGTFDISILELGDGVFEVKSTNGDTHLGGDDFDARIVQWLEQGFKSDTGIDLGNDRMALQRLREAAEKAKIALSSSASTEINLPFITADANGPKHLQRTLSRSEFEKMTDDLFERTKEPCRKALKDAGISADRIDEILLVGGSTRMPKVAHVIKDVFGKEGSKGVNPDEAVAIGAAIQGGILGGDVKDVLLLDVTPLSLGIETMGGVFTPLISRNTTIPTRKSQVFSTAADGQTAVSIHVLQGERGMANQNRTLGNFDLVGIPPAPRGVPQIEVTFDIDANGIVHVSAKDLGTGKEQHIRIESSSGLSESEIDRMVKEAEANAESDKREREKIEARNVADSLIYQTEKTLKEAGDGVNAADRARIDEAIAELKTVLSGDDVASIKAKTEILQQASYKIAEEMYKRQAAAGAAAGKKSDAPSGNEAEGGDVDYEVVKDEDSK

SEQ ID NO: 48934 - DNA, 1908 bp, Vibrio cholerae
  CDS (1)..(1908): transl_table=11
atgggtaaaatcattggtattgacttaggtactacaaactcatgtgttgctgtgctggacggcgacaagcctcgcgtaattgaaaacgcagagggtgagcgtactactccttctgtaattgcatacacagacggtgaaactctggtgggtcaacctgcgaaacgtcaagcagtcactaacccacaaaacacgctatttgcaatcaagcgtctgatcggtcgtcgttttgaagacgaagaagttcagcgcgatatcaaaatcatgccttacaaaattgttaaggctgacaacggtgatgcttgggttgaagcgaaaggccaaaaaatggccgctcctcaagtgtctgctgaagtgctgaagaaaatgaagaaaaccgcggaagatttcctcggcgaacccgttactgcagcagttatcactgtacctgcttactttaacgatgctcagcgtcaagcaaccaaagatgctggccgtatcgcaggtctagaagtgaaacgtatcatcaacgagccaaccgcagcagctctggcttatggcctagacaagcaaggcggtgatcgcactatcgcggtgtatgaccttggtggtggtacattcgatatctctatcattgagatcgatgaagttgaaggcgagaaaaccttcgaagttctgtctaccaacggtgacactcacctaggtggtgaagattttgacaaccgcatgatcaactacctagttgacgagttcaagaaagaccaaggcatcgacctgcgtaacgacccgctggcaatgcaacgtctgaaagaagcggctgagaaagcgaaaatcgaactttcttctgcgcagcaaactgacgttaacctgccatacatcaccgcagatgcgaccggtcctaagcacatgaacatcaaagtgactcgtgcgaaactggaagcgctggttgaagatctggttcaacgttctctggaaccactgaaagttgctctggcggatgctgatctgtctgtgaacgacattactgacgttatcctagtcggtggtcaaactcgtatgccaatggttcagaagaaagtagctgaattctttggtaaagagccacgtaaagacgtgaacccagacgaagcggtagcggtaggtgctgcggttcaaggcggtgttctagcgggtgaagtaaaagacgttctgctgctagacgtaacgcctctgtctctgggtattgaaaccatgggcggtgtgatgactaaactcatcgagaaaaacaccactatcccaaccaaagcgaaccaagtgttctctacggcggaagataaccaaagcgcagtaaccatccacgtactgcaaggtgagcgtaagcaagcgatgtacaacaaatctctgggtcaatttaacctagagggcatcaaccctgcgccacgtggtatgccacaaatcgaagttatctttgacttggatgcagacggtatcctgcacgtttcagccaaagacaaacagactggtaaagagcagaagatcactatccaagcttctggcggtctgagcgatgctgaaatcgaaaaaatggttcaagaagctgaagcgaacaaagaagcggacaaaaagttcgaagagttagcgactgcgcgtaaccaagcagaccagatgatccacgcaactcgcaaacaaatcacagaagcaggcgaagcactgccagcggatgagaaagcgaagatcgaaacggcgatcaacgagctagaaacagcgaaaaaaggcgaagacaaagcggaaatcgatgccaaagtgcaagcactgatggcggcggcacagaagctgatggaaatcgcacagcaacaagctcaagcacaaggtgcaaacgcgggtcaatcttcagctaaagaagatgacgtagtggacgctgagtttgaagaagttaacgacgataagaagtaa

SEQ ID NO: 48935 - protein, 635 aa, Vibrio cholerae
MGKIIGIDLGTTNSCVAVLDGDKPRVIENAEGERTTPSVIAYTDGETLVGQPAKRQAVTNPQNTLFAIKRLIGRRFEDEEVQRDIKIMPYKIVKADNGDAWVEAKGQKMAAPQVSAEVLKKMKKTAEDFLGEPVTAAVITVPAYFNDAQRQATKDAGRIAGLEVKRIINEPTAAALAYGLDKQGGDRTIAVYDLGGGTFDISIIEIDEVEGEKTFEVLSTNGDTHLGGEDFDNRMINYLVDEFKKDQGIDLRNDPLAMQRLKEAAEKAKIELSSAQQTDVNLPYITADATGPKHMNIKVTRAKLEALVEDLVQRSLEPLKVALADADLSVNDITDVILVGGQTRMPMVQKKVAEFFGKEPRKDVNPDEAVAVGAAVQGGVLAGEVKDVLLLDVTPLSLGIETMGGVMTKLIEKNTTIPTKANQVFSTAEDNQSAVTIHVLQGERKQAMYNKSLGQFNLEGINPAPRGMPQIEVIFDLDADGILHVSAKDKQTGKEQKITIQASGGLSDAEIEKMVQEAEANKEADKKFEELATARNQADQMIHATRKQITEAGEALPADEKAKIETAINELETAKKGEDKAEIDAKVQALMAAAQKLMEIAQQQAQAQGANAGQSSAKEDDVVDAEFEEVNDDKK

SEQ ID NO: 48936 - DNA, 1914 bp, Vibrio parahaemolyticus
  CDS (1)..(1914): transl_table=11
atgggtaaaatcattggtattgacttaggtactactaactcatgtgttgctgtactagacggcgacaaaccacgtgtaattgaaaacgcagagggtgaacgtactactgcatcggttattgcttacactgacggtgagacgctagtaggtcaacctgcgaaacgtcaagcagtaactaacccaactaacacgctatttgcaattaagcgtctaattggtcgtcgttttgaagacgaagaagttcagcgtgacatcgaaatcatgccttacaaaatcgttaaggctgacaacggtgacgcttgggtagaagcgaaaggccaaaaaatggcagctcctcaggtttctgctgaagttcttaagaaaatgaagaaaactgctgaagacttcctaggtgaggaagtaactggcgcagttatcacagtacctgcttactttaacgatgcacagcgtcaagcaacgaaagatgctggccgtatcgcaggtctagaagttaaacgtatcatcaacgaaccaacagcagctgcgctagcttacggcctagacaagaaaggcggtgaccgcactatcgctgtatacgaccttggtggtggtacattcgatatttcaatcatcgaaatcgatgaagttgaaggcgaaaaaacattcgaagttctagcaactaatggtgacactcacctaggtggtgaagactttgataaccgtctaatcaactacttagtagacgagtttaagaaagagcaaggtatcgatcttaaaaacgatccactagcaatgcagcgtgttaaagaagcagcagaaaaagcgaaaattgagctttcttctacttctcaaacagacgtaaacctaccttacgttactgctgatgcaactggtcctaagcacatgaacatcaaagtgactcgtgcgaaactagaatctctagttgaagacctagtacaacgctctcttgagccactaaaagtagctctagctgacgctgacctatcagtaaacgatatcactgacgtaatcctagttggtggtcagactcgtatgccaatggttcaagcgaaagttgctgagttcttcggtaaagaagcgcgtcgtgacgtgaaccctgacgaagcagtagcaatgggtgctgcagttcaaggtggtgtacttgctggtgaagttaaagatgttctactactagacgtaactccactgtctctaggtatcgagactatgggtggcgtaatgactaagctagttgagaagaacacaactatcccaactaaagcgaaccaagttttctctactgcagaagacaaccagagcgcggtaactatccacgttctacaaggtgagcgtaagcaagcgatgtacaacaagtctctaggtcaatttaacctagagggcatccagcctgcaccacgtggcatgccacaaatcgaagtaactttcgaccttgatgcggatggtattctacacgtatcagcgaaagacaagcagactggtaaagagcagaagatcacaatccaagcttctggcggtctaagcgacgacgaaatcgagaaaatggttcaagaagcagaagctaacaaagaagcggacaaaaagttcgaagagctagcaactgcacgtaaccaagcagaccaaatgattcacggtactcgtaagcaaatggaagaagcgggtgacgcacttccagctgaagagaaagagaagattgaaactgctatctctgagctagaagaagcacgtaaaggcgaagacaaagaagcaattgacgcgaaagttcaagctcttatgactgctgctcaaaaactaatggaaatcgctcaacaacaagctcaagcgcaacaagcacaaggtgctgacgctggcgcacagtcaaaagatgacgacgttgtagatgcggagttcgaagaagttaaagacgacaagaaataa

SEQ ID NO: 48937 - protein, 637 aa, Vibrio parahaemolyticus
MGKIIGIDLGTTNSCVAVLDGDKPRVIENAEGERTTASVIAYTDGETLVGQPAKRQAVTNPTNTLFAIKRLIGRRFEDEEVQRDIEIMPYKIVKADNGDAWVEAKGQKMAAPQVSAEVLKKMKKTAEDFLGEEVTGAVITVPAYFNDAQRQATKDAGRIAGLEVKRIINEPTAAALAYGLDKKGGDRTIAVYDLGGGTFDISIIEIDEVEGEKTFEVLATNGDTHLGGEDFDNRLINYLVDEFKKEQGIDLKNDPLAMQRVKEAAEKAKIELSSTSQTDVNLPYVTADATGPKHMNIKVTRAKLESLVEDLVQRSLEPLKVALADADLSVNDITDVILVGGQTRMPMVQAKVAEFFGKEARRDVNPDEAVAMGAAVQGGVLAGEVKDVLLLDVTPLSLGIETMGGVMTKLVEKNTTIPTKANQVFSTAEDNQSAVTIHVLQGERKQAMYNKSLGQFNLEGIQPAPRGMPQIEVTFDLDADGILHVSAKDKQTGKEQKITIQASGGLSDDEIEKMVQEAEANKEADKKFEELATARNQADQMIHGTRKQMEEAGDALPAEEKEKIETAISELEEARKGEDKEAIDAKVQALMTAAQKLMEIAQQQAQAQQAQGADAGAQSKDDDVVDAEFEEVKDDKK

SEQ ID NO: 48938 - DNA, 1911 bp, Vibrio vulnificus
  CDS (1)..(1911): transl_table=11
atgggtaaaatcattggtattgacttaggtactactaactcttgtgttgctgtactagacggcgacaaaccacgtgtaatcgaaaatgcggagggtgagcgcacaactccttcagttatcgcttataccgatggtgagactcttgttggtcaacctgcaaaacgtcaagcggtaacaaacccagaaaacacgctatttgcaatcaagcgtttgattggtcgtcgttttgaagatgaagaagttcagcgcgacatcgaaatcatgccatacaaaattgtgaaggcagacaacggtgatgcttgggttgaagcgaaaggccagaaaatggcagctcctcaggtttctgctgaagttcttaagaaaatgaagaaaacagcagaagacttcctaggtgaagaagtaacaggtgcagtaatcacagttcctgcatactttaacgatgctcagcgccaagcaacaaaagacgctggccgtatcgcgggtctagaagttaagcgtattatcaacgaaccaactgcggcagcgctagcatacggcctagacaagcaaggtggtgatcgcactatcgcagtatacgacctcggtggtggtacatttgatatctctatcatcgaaatcgatgaagttgaaggcgagaaaacctttgaagtactagcaaccaatggtgatactcaccttggtggtgaagactttgacaaccgtctaatcaactacctagtagcagaattcaagaaagatcaaggtatcgatctgaagaacgatccactagcaatgcagcgcgttaaagaagcggcagaaaaagcgaagatcgaactgtcttctactaaccagactgacgtaaacctgccatacatcacggcagatgcaacgggtcctaagcacatgaacatcaaagtgacacgtgcgaagctagaatcactggttgaagacctagttcaacgttcactagagccgctaaaagttgcgcttgcggatgcagatctttctgtaggtgacatcactgacgttatcctagtgggtggtcagactcgtatgcctatggttcaagcgaaagtaacagagttctttggtaaagaaccacgtcgtgatgtaaacccagacgaagcagtagcggtaggtgcggctgttcaaggtggtgtactagcaggtgatgttaaagacgttcttctactagacgtaacaccgctgtctctaggcatcgagacaatgggcggagtaatgacgaagttggttgagaagaacactactatcccaaccaaagcgaaccaagtgttctcgacagcagaagataaccagagtgcggtaacgattcacgtgctacaaggtgagcgtaaacaagcgatgtacaacaagtcgctaggtcagttcaaccttgaaggtatcaaccctgcaccacgtggtatgccacagatcgaagtgactttcgaccttgatgcggatggtatcctacacgtatctgcgaaagataagcagactggtaaagagcagaagatcactatccaagcttctggcggtttaagcgacgctgagattgagaaaatggtacaagaagcagaagcaaacaaagaagcggacaaaaagttcgaagagttagcaactgcacgtaaccaagctgaccaaatcatccacggtacacgcaagcaagtagaagaagcgggcgaagcgctaccagcagatgagaaggcgaagatcgaaacagcaatcagcgaacttgaagaagctcgtaaaggcgaagacaaagaagcgatcgaagcgaaaatccaagcgctaatggctgcagctcagaagctaatggaaatcgctcagcaacaagctcaagcacaacaaggttcagcggaagctggtgctcagtctcaagaagacgatgtagttgatgcagagtttgaagaagtgaaagacgacaagaaataa

SEQ ID NO: 48939 - protein, 636 aa, Vibrio vulnificus
MGKIIGIDLGTTNSCVAVLDGDKPRVIENAEGERTTPSVIAYTDGETLVGQPAKRQAVTNPENTLFAIKRLIGRRFEDEEVQRDIEIMPYKIVKADNGDAWVEAKGQKMAAPQVSAEVLKKMKKTAEDFLGEEVTGAVITVPAYFNDAQRQATKDAGRIAGLEVKRIINEPTAAALAYGLDKQGGDRTIAVYDLGGGTFDISIIEIDEVEGEKTFEVLATNGDTHLGGEDFDNRLINYLVAEFKKDQGIDLKNDPLAMQRVKEAAEKAKIELSSTNQTDVNLPYITADATGPKHMNIKVTRAKLESLVEDLVQRSLEPLKVALADADLSVGDITDVILVGGQTRMPMVQAKVTEFFGKEPRRDVNPDEAVAVGAAVQGGVLAGDVKDVLLLDVTPLSLGIETMGGVMTKLVEKNTTIPTKANQVFSTAEDNQSAVTIHVLQGERKQAMYNKSLGQFNLEGINPAPRGMPQIEVTFDLDADGILHVSAKDKQTGKEQKITIQASGGLSDAEIEKMVQEAEANKEADKKFEELATARNQADQIIHGTRKQVEEAGEALPADEKAKIETAISELEEARKGEDKEAIEAKIQALMAAAQKLMEIAQQQAQAQQGSAEAGAQSQEDDVVDAEFEEVKDDKK

SEQ ID NO: 48940 - DNA, 1923 bp, Wolbachia pipientis wMel
  CDS (1)..(1923): transl_table=11
atgggaagagcaataggcatagatctcggaacaacaaattcttgtgttgcaataatgcagggcaaggatacaaaggtaatagaaaataaagaaggggcaagaactactccatctatagttgcattgacttcttcaggagaaaggttgattggtgctccagcaaaaaggcaagcaaccaccaatgcaagtaataccttttttgctactaagagattaataggccgtcaatatagtgatcctgagatgaaaaatctaagtgtaccatacaaagtatttgcagcaaaaagtggtgatgcatgggttaaaacaactgataataaagaatattctcctagtcaaattggtgcatttatactacaaaacatgaaagaggcagcagaagcttatcttggagaggaagtaaaagatgctgtgataacagtgccagcatatttcaacgactctcaacgtcaagcaacaaaagatgcaggaaaaattgccggattaaatgtactcagaatagtaaatgaaccgactgctgcagcacttgcttatggtcttgataagaaacatgggcacacaatagtagtatatgaccttggtggtggtacatttgacgtttcaatacttgaaataggtgatggagttttcgaagtgaaagcaacaaacggtgatacccatcttggaggtgaagactttgataatggagtagtgagttatttactagatgaattcaagaaaagtaatggcattgatttgaaaaatgatccaatggctatgcaaagaatcaaagaagctgctgaaaaagcgaaaattgaattatcaagtgcaatggaaacggaaataaatctaccgtttattacagctgatgcaagtggtccaaaacacttaaatatgaaattaacgagagcaaaacttgaaagcttagtgaatgatttaatcgaaagaactatggctccttgtaaaaaagctcttgaggatgctggtttatctgctagtcaaattggcgaagtggttcttgttggtggcatgactcgtatgccaaaagtcatagagaaagttaaagaattctttggcaaagatccacatagaggagttaaccctgatgaagttgtagcaattggagctgcaatacaggcggggatcattcaaggtgatgtaagagatgtgttactacttgatgtaaccccactttctcttggtattgaaactctaggaggagtattcactccacttattgagcgtaatactacaattcctactaaaaaatctcaggtgttttcaactgcagaagataaccaaacagctgttacaattaaggtgcatcagggtgaaagaaaactggcagttgataataagctactcggtcagtttagtttggaagggatacctcctgctccgcgcggaaggccacaaattgaagtgacatttgatatagatgcaaatggaatagcacacgtttctgcaaaagataaagctactggaaaagagcaaaaaatacgcattcaatcttcaggtggtttatctgataatgaaataaatcgcatggtaaaagaagctgaagaaaaagcgcaagaagatgaaaagcgcaaaaagtttattgaagtgaagaatcaagcggatagcttagtccattctacagaaaagtctctgacagagtatggtgataaagtttcaccagaagatagatctgctattgaaaatgcagttaacgaattaaaagaagttagtaaatctgataacattgatgacgctgattcaatacagcagaaagttactaatctttctcaattatctatgaaacttggagaagctatgtatcaaacatctcaacaaaatagtgctgaaaatggcttttcatcagaaggaaatccaaatgataaagaggaaaaagtagtagattctgattatcaagacatagataataaagaagagaataaataa

SEQ ID NO: 48941 - protein, 640 aa, Wolbachia pipientis wMel
MGRAIGIDLGTTNSCVAIMQGKDTKVIENKEGARTTPSIVALTSSGERLIGAPAKRQATTNASNTFFATKRLIGRQYSDPEMKNLSVPYKVFAAKSGDAWVKTTDNKEYSPSQIGAFILQNMKEAAEAYLGEEVKDAVITVPAYFNDSQRQATKDAGKIAGLNVLRIVNEPTAAALAYGLDKKHGHTIVVYDLGGGTFDVSILEIGDGVFEVKATNGDTHLGGEDFDNGVVSYLLDEFKKSNGIDLKNDPMAMQRIKEAAEKAKIELSSAMETEINLPFITADASGPKHLNMKLTRAKLESLVNDLIERTMAPCKKALEDAGLSASQIGEVVLVGGMTRMPKVIEKVKEFFGKDPHRGVNPDEVVAIGAAIQAGIIQGDVRDVLLLDVTPLSLGIETLGGVFTPLIERNTTIPTKKSQVFSTAEDNQTAVTIKVHQGERKLAVDNKLLGQFSLEGIPPAPRGRPQIEVTFDIDANGIAHVSAKDKATGKEQKIRIQSSGGLSDNEINRMVKEAEEKAQEDEKRKKFIEVKNQADSLVHSTEKSLTEYGDKVSPEDRSAIENAVNELKEVSKSDNIDDADSIQQKVTNLSQLSMKLGEAMYQTSQQNSAENGFSSEGNPNDKEEKVVDSDYQDIDNKEENK

SEQ ID NO: 48942 - DNA, 1896 bp, Wolinella succinogenes
  CDS (1)..(1896): transl_table=11
atgggaaaagttctaggaatcgaccttggcaccaccaactctgccatggctgtttttgaaggaaatgaaggaaaaattatcgccaacaaagagggtcgtaataccaccccttccgtggttgcattcaccgataagggcgaaattttagtgggcgatcccgccaagcgccaagcgatcaccaatccccaaaaaaccatctactccatcaagcgaatcatgggcttgatgatgagcgaagataaggccaaagaggctcaaaaacgcctcccttacaaagtggttgatcgaaatggcgcgtgcgcggtggagatcgctgataaggtctacactcctcaagagattagtgcgaaaattctcatgaaactcaaagaggatgccgaagcctatcttggcgaagaggtgagcgaggcggttatcactgtccctgcctacttcaatgacgctcaacgaaaggcgaccaaagaggcgggcaccatcgctggactcaatgttttgcgaatcatcaacgagcctacctctgccgctcttgcttatggcttggacaaaaaacacgccgaaaagatcgtggtctatgacctcgggggcggaacctttgatgtcactgttttggaaacgggtgacaatgtcgttgaggttttggccacgggcggagacgccttcttgggcggagatgactttgacaaccgaatcatcgactgggcggccaaggagtttgaagcggagaatggaatcgatctcaaaaaagatgtgatggcgctccaacgactcaaagacgccgctgaaaacgccaaaaaagagttgagctctgccaacgagaccgagatcaacctccccttcatcaccgccgatgctacaggtcctaagcacttggtgaagaagatttcacgagccaaatttgagagtctcattgatgaccttatcgagcagacgatccaaaagatcgacttcgtcattaaagacgcgggtcttgcaaagtctgatatcgccgaagtggtgatggtgggcggctcgactcgtatccccaaagtccaacaacgcgtcaaagattttatcggcaaagagctcaacaaatcagtcaaccccgatgaggtggttgcccttggtgcagctattcaagggggcgtgctcaagggggatgtcaaagatgttctcctcctagacgtcacccccctctctcttggaatcgagacccttggaggcgtaatgaccaagattatcgatcgtggcaccaccatccctgtgaagaaatctcaagtcttctccacggctgaggacaatcaacccgccgtcaccatccaagtgcttcagggtgagcgtgagctcgctagagacaataaatctttgggtatgtttgagctcagcggaattcctgccgctcctaggggtgtgccccaaatcgaggtcacttttgacattgatgccaacgggattctcaccgtctccgccaaagataaagccacaggcaaatctcaagagatcaaaatcacaggttctagcggcctaagcgattcagagatcgaaaaaatggtcaaagacgctgagctccacaaagaagaagattccaaacgaaagtcaatgatcgaagccaaaaaccaagccgattcactcctctatcagaccgaaaagagcctaggcgagtttaaagatcagctcgaagagagtgagcgcaccaagattgagagcgccattaacgacctcaaagagacgctcaaaaaagagaatctcactaaagaggagatcgatgagaaggtgaaagccctcaccgaagtgagccataaactagccgaagcgatgtataaaaaagagaatccccaagcagccgatgcccaacaaggaaacacagccaacgcgggcaagaaaaaagatgacgatgtaatcgacgcggaggtggagtag

SEQ ID NO: 48943 - protein, 631 aa, Wolinella succinogenes
MGKVLGIDLGTTNSAMAVFEGNEGKIIANKEGRNTTPSVVAFTDKGEILVGDPAKRQAITNPQKTIYSIKRIMGLMMSEDKAKEAQKRLPYKVVDRNGACAVEIADKVYTPQEISAKILMKLKEDAEAYLGEEVSEAVITVPAYFNDAQRKATKEAGTIAGLNVLRIINEPTSAALAYGLDKKHAEKIVVYDLGGGTFDVTVLETGDNVVEVLATGGDAFLGGDDFDNRIIDWAAKEFEAENGIDLKKDVMALQRLKDAAENAKKELSSANETEINLPFITADATGPKHLVKKISRAKFESLIDDLIEQTIQKIDFVIKDAGLAKSDIAEVVMVGGSTRIPKVQQRVKDFIGKELNKSVNPDEVVALGAAIQGGVLKGDVKDVLLLDVTPLSLGIETLGGVMTKIIDRGTTIPVKKSQVFSTAEDNQPAVTIQVLQGERELARDNKSLGMFELSGIPAAPRGVPQIEVTFDIDANGILTVSAKDKATGKSQEIKITGSSGLSDSEIEKMVKDAELHKEEDSKRKSMIEAKNQADSLLYQTEKSLGEFKDQLEESERTKIESAINDLKETLKKENLTKEEIDEKVKALTEVSHKLAEAMYKKENPQAADAQQGNTANAGKKKDDDVIDAEVE

SEQ ID NO: 48944 - DNA, 1917 bp, Xylella fastidiosa
  CDS (1)..(1917): transl_table=11
atgggcaaaatcattggtatcgacctcggcaccacaaattcgtgcttagcgattattgaaggcggtaaagggcgtgtcatcgaaaactcggagggtgatcggaccactccttccattgttgcttacaccaaggatggtgaagtgcttgttggtgctgcagccaagcgccaagcggtcacaaatccgaaaaacaccttttatgcggttaagcgtttgattggacgtaagttcggtgatgcagaggtccaaaaggaccttgatttggtgccgtataagattactcagcatgacaatggggatgcctgggtggccactgctgatgctaagaagctggcgccgcaggaaatctctgccaaggtgctagagaaaatgaagaagaccgccgaggatttcctgggcgagaaagtcaccgaagcggtgattaccgtgccggcgtattttaatgacagtcagcgtcaggcgacgaaagatgctggtcggatcgctggcctggatgtcaaacgtattatcaacgagccgaccgctgcggcattggcttacggtttggacaagaagggcggagatcgcaagatcgctgtatatgatcttggcggcggtacctttgacgtctcgatcattgaaattgctgaagtggatggtgagaagcagttcgaggtattggcgaccaatggtgataccttcttgggaggtgaagatttcgacaagcgtgttatcgattatctggttgatgaattcaataaggatcaggggatcgatttgcgcaaggatccgctggcgttacaacgtttaaaggatgctgctgagcgcgctaaaatcgaattgtcttcctcccagcaaaccgaagttaacctgccatacattacggcggatgcatcgggtccgaagcacctgaatatcaaactgactcgtgccaagcttgaagccttggtagacgatttggtccgtaagtcaattgagccatgccgcattgcgttgaacgacgctggtttgcgtaccagtgatgttcaagaagtgattttggttggtggccagacccgtatgccgaaggtccagcaagcggttgccgacttctttggtaaagagccgcgtaaggacgttaatccggacgaagcggttgcattgggtgctgcgattcagggtggggtgctggctggtgacgtgaaggatgtgttactgctggatgtgaccccgttatcccttggtattgaaacgatgggtggggtgtttacaaagattatcgagaagaacacgaccattccgaccaaagcgtctcaggtgttttctactgccgaggatggtcagtccgcagtgactgtccatgtgttgcaaggtgaacgtgagcaggcgcgtttcaataaatcgcttgctaaattcgatttggcgggtatcgaacctgcgccgcgtggccagccgcagattgaggtgtcttttgatatcgatgccaacggtattttgcatgtctctgccaaggacaagaaaaccaataaggagcagaaggtcgaggttaaagctggttctggactttcggatagtgagattcaacagatggttgccgatgctgaggcacatcgtgaggaagacaaaaagttccaagagttggtgcaggcaaggaaccatgctgacggtttgatccattcaacccgttcggccattaaggagcatggtagtaaggttgggggtgaggtgattgggcgtgtcgaagcctcccttgcagagcttgaggctgccgtcaaaggtgatgataaaaaccagattgaggcgaaatctaaaactcttgaggaagttgcacagtcgttgcacatggcagcaacagcagagcagcaatcaggaagcacgggggctggtgcaggctcttcagccaaggttgacgatgtggttgatgctgaattcacagaagtcaagggcgacaaaaaataa

SEQ ID NO: 48945 - protein, 638 aa, Xylella fastidiosa
MGKIIGIDLGTTNSCLAIIEGGKGRVIENSEGDRTTPSIVAYTKDGEVLVGAAAKRQAVTNPKNTFYAVKRLIGRKFGDAEVQKDLDLVPYKITQHDNGDAWVATADAKKLAPQEISAKVLEKMKKTAEDFLGEKVTEAVITVPAYFNDSQRQATKDAGRIAGLDVKRIINEPTAAALAYGLDKKGGDRKIAVYDLGGGTFDVSIIEIAEVDGEKQFEVLATNGDTFLGGEDFDKRVIDYLVDEFNKDQGIDLRKDPLALQRLKDAAERAKIELSSSQQTEVNLPYITADASGPKHLNIKLTRAKLEALVDDLVRKSIEPCRIALNDAGLRTSDVQEVILVGGQTRMPKVQQAVADFFGKEPRKDVNPDEAVALGAAIQGGVLAGDVKDVLLLDVTPLSLGIETMGGVFTKIIEKNTTIPTKASQVFSTAEDGQSAVTVHVLQGEREQARFNKSLAKFDLAGIEPAPRGQPQIEVSFDIDANGILHVSAKDKKTNKEQKVEVKAGSGLSDSEIQQMVADAEAHREEDKKFQELVQARNHADGLIHSTRSAIKEHGSKVGGEVIGRVEASLAELEAAVKGDDKNQIEAKSKTLEEVAQSLHMAATAEQQSGSTGAGAGSSAKVDDVVDAEFTEVKGDKK

SEQ ID NO: 48946 - DNA, 1911 bp, Yersinia pestis
  CDS (1)..(1911): transl_table=11
atgggtaaaattattggtatcgacttgggtactaccaactcttgtgtagcaattatggatggtactaaagcacgtgtgctggaaaacagcgaaggtgatcgcacaacgccttctatcatcgcttatacccaagatggtgaaactctggttggtcaaccggctaagcgtcaggctgtcactaaccctcaaaatacactgtttgccatcaagcgtttgattggccgtcgtttccaagacgaagaagcacagcgtgataaagacatcatgccgtacaaaattattgctgcagataatggtgacgcttggctggaagttaaaggccaaaaaatggcaccgccgcagatctctgctgaagtgctgaagaaaatgaagaaaacggctgaagattatctgggtgaaccagtaactgaagcggttattaccgtaccggcttactttaacgatgcacaacgtcaggcaactaaagatgcgggccgtatcgccggtctggaagtaaaacgtatcatcaacgaaccaaccgcagccgcactggcttacggtctggataaagaagtgggtaaccgtactatcgcggtctatgacctcggtggtggtactttcgatatctcaattatcgaaatcgacgaagttgatggcgaaaagaccttcgaagtattggcaaccaacggtgatacccacttgggtggtgaagacttcgatagccgtttgatcaactatctggttgaagaattcaagaaagaccagggtatggatctgcgtaccgatccactggcaatgcagcgtttgaaagaagccgctgaaaaagcaaaaatcgagctgtcttctgcgcagcagaccgatgttaacctgccgtacatcacggctgatggcagcggtccaaaacacatgaacattaaagtgacccgcgctaaattggagtcactggtagaagatttggtaaaccgctctattgaaccactgaaagtggctctgcaagatgctggtttgtctgtttccgacattcaggacgttatcctggtgggtggtcagactcgtatgccaatggttcagaagaaagtggctgacttcttcggtaaagaaccacgtaaagatgtgaacccagatgaggcggtagccattggtgccgctgtgcagggtggggttctgtctggtgaagtgaaagacgttctgttgctggacgttactccactgtcactgggtatcgaaaccatgggtggtgtgatgactccgcttatcactaaaaacaccactatcccgaccaagcacagtcaggtgttctctactgctgaagacaaccagtctgcggtaactatccacgtgctgcagggtgagcgtaaacgtgctcaggataataaatctctgggtcagttcaatctggatggtattcagcctgcacctcgcggcatggcgcaaatcgaagtcaccttcgatatcgacgccgacggtattttgcatgtgtctgctaaagacaagaataccggccgtgagcagaagatcaccattaaggcctcttctggtttgaacgaggaagagattcaaaaaatggtacgtgatgctgaagcaaacgcagaagctgaccgtaagtttgaagaactggttcagacccgtaaccaggctgaccatctgatccacgggactcgtaagcagttggaagaagccggtgataaattaccagcagaagacaaaaccgctatcgaagaagcaatgaaaggcttggaagctgcactgaaaggtgaagataaagctgaaatcgaagcgaaaactcaggctctggtacaggtttccgggaaattgctggaaatggctcaacagcaacaagctgccgcaggcggtgatgctggcgataccagtgccaagaaagaagacgacgttgtagacgccgaattcgaagaagtaaaagacaaaaaataa

SEQ ID NO: 48947 - protein, 636 aa, Yersinia pestis
MGKIIGIDLGTTNSCVAIMDGTKARVLENSEGDRTTPSIIAYTQDGETLVGQPAKRQAVTNPQNTLFAIKRLIGRRFQDEEAQRDKDIMPYKIIAADNGDAWLEVKGQKMAPPQISAEVLKKMKKTAEDYLGEPVTEAVITVPAYFNDAQRQATKDAGRIAGLEVKRIINEPTAAALAYGLDKEVGNRTIAVYDLGGGTFDISIIEIDEVDGEKTFEVLATNGDTHLGGEDFDSRLINYLVEEFKKDQGMDLRTDPLAMQRLKEAAEKAKIELSSAQQTDVNLPYITADGSGPKHMNIKVTRAKLESLVEDLVNRSIEPLKVALQDAGLSVSDIQDVILVGGQTRMPMVQKKVADFFGKEPRKDVNPDEAVAIGAAVQGGVLSGEVKDVLLLDVTPLSLGIETMGGVMTPLITKNTTIPTKHSQVFSTAEDNQSAVTIHVLQGERKRAQDNKSLGQFNLDGIQPAPRGMAQIEVTFDIDADGILHVSAKDKNTGREQKITIKASSGLNEEEIQKMVRDAEANAEADRKFEELVQTRNQADHLIHGTRKQLEEAGDKLPAEDKTAIEEAMKGLEAALKGEDKAEIEAKTQALVQVSGKLLEMAQQQQAAAGGDAGDTSAKKEDDVVDAEFEEVKDKK

SEQ ID NO: 48948 - DNA, 1908 bp, Zymomonas mobilis
  CDS (1)..(1908): transl_table=11
atgggtaaagttataggtattgacttaggtacgaccaacagctgcgttgctgttatggaaggtggtcagcctaaggttattgaaaacgcagaaggtgcccgcacgacgccgtctattgttgctttcaccaaagacagtgagcgtttgatcggtcagcccgcaaaacgtcaggctgttaccaattctgaaaacacgattttcgctgttaaacgtttgatcggtcgccgttttgatgatccggtaaccaagcgtgataccgaattagtcccttatcatattgttcgcggtagcaatggtgatgcttgggttaaagcgggtggtcaggattattcaccttcccagatttcggctttcatccttcagaaaatgaaagaaaccgcagaatcgtatctcggtgaaaccgttgatcaggcggttattacggttccggcttacttcaacgatgctcagcgtcaggcaaccaaagatgccggtaagatcgctggtcttgaagtactccgtatcatcaacgaaccgacagccgctgctttggcttatggtctcgacaagaatgatggtaagacgattgctgtttatgacttgggtggtggtacctttgatatctccattctggaaatcggcgatggcgtttttgaagtgaaggccaccaatggtgacaccttcctcggtggtgaagatttcgacaccaaaatcgttagctatcttgctgaagaattcaaaaaagccgaaggcattgatctgactaaagatcgcctggctcttcagcgtttgaaagaagctgctgaaaaagccaagatcgaattgtcttctgctcagacgaccgaagtcaatctgccctttattaccgcagatgccacgggcccgaagcatttggtcaaaacaatttctcgcgccgaactggaacgcttggttgctgatctgattgatcgcactttggaacccgtgaaaaaagctttggctgatgcaggtgttaaagcctctgacattgacgatgtcgtcatggtcggtggtatgacccgtatgccgaaggttcgtcaggttgttaaagaattctttggcaaagaaccgcataccggcgtgaacccggatgaagtcgttgctatgggtgcggccattcaggcgggcgtgcttcagggtgatgttaaagacgttctgttgcttgacgtgacgccgctctcccttggtattgaaaccttgggtggtgtgttcacccgtatgattgaccgtaacacgacgattccaacgaagaagtcgcaggtctattcaacggctgaagataaccagaatgctgtgactattcgcgttttccaaggcgaacgtgaaatggcagccgacaacaagctgttaggtcagtttgaccttgttggtattccgcctgcgccgcgtggtgttccgcagatcgaagtaaccttcgatattgacgctaacggtatcgttaatgtgtctgctaaggacaaaggcacaggtaaagaacagcagatccgtattcaggcatcgggtggcttatctgaaggcgacatcgataagatggtcaaagatgcagaaaaatttgctgctgatgacaagcatcgccgtgaactggcagaagccaaaaataatggtgacagcctcgttcatacgaccgaacgtcagttaacggaattgggtgacaaggttgatgccgctctgaaaaccgaagtcgaagctgctgttgctgcagtaaagacggctttggaaggcgaagacgttgcccagattaacgaaaaaacccaggctttaggccaggttgctatgaaattaggtcaggctctttatgagcaggatcaggcaaataatgaacggcatgatacacctgaaacggaaaaagccgaaggtgacaatgttgttgatgccgaatttcaggaaatagatgaccaagataagaaataa

SEQ ID NO: 48949 - protein, 635 aa, Zymomonas mobilis
MGKVIGIDLGTTNSCVAVMEGGQPKVIENAEGARTTPSIVAFTKDSERLIGQPAKRQAVTNSENTIFAVKRLIGRRFDDPVTKRDTELVPYHIVRGSNGDAWVKAGGQDYSPSQISAFILQKMKETAESYLGETVDQAVITVPAYFNDAQRQATKDAGKIAGLEVLRIINEPTAAALAYGLDKNDGKTIAVYDLGGGTFDISILEIGDGVFEVKATNGDTFLGGEDFDTKIVSYLAEEFKKAEGIDLTKDRLALQRLKEAAEKAKIELSSAQTTEVNLPFITADATGPKHLVKTISRAELERLVADLIDRTLEPVKKALADAGVKASDIDDVVMVGGMTRMPKVRQVVKEFFGKEPHTGVNPDEVVAMGAAIQAGVLQGDVKDVLLLDVTPLSLGIETLGGVFTRMIDRNTTIPTKKSQVYSTAEDNQNAVTIRVFQGEREMAADNKLLGQFDLVGIPPAPRGVPQIEVTFDIDANGIVNVSAKDKGTGKEQQIRIQASGGLSEGDIDKMVKDAEKFAADDKHRRELAEAKNNGDSLVHTTERQLTELGDKVDAALKTEVEAAVAAVKTALEGEDVAQINEKTQALGQVAMKLGQALYEQDQANNERHDTPETEKAEGDNVVDAEFQEIDDQDKK

SEQ ID NO: 48950 - DNA, 2004 bp, Aplysia californica
  CDS (1)..(2004)
atggatcggttcacacccttctttttgcttgtcatactgttcagctcaaaccttttggtacgggcagatggtgatgaagaagatgaaggagataaaaagaagtcagaagttggcactgtaattggcattgatcttggaacaacatactcttgtgttggtgttttcaaaaatggcagagttgacatcattgcaaacgaccagggaaatcgtatcacaccatcgtatgttgcctttaccgctgatggtgaacgtctgatcggagacgctgccaagaatcagttgacatccaatcctgagaacacaatttttgatgtgaaacgtttgattgggcgcacttttgatgacaagtctgttcagcatgatatcaagttttaccctttcaaggtcactaatgcaaacaacaaacctcacattcaagcagctactggtgagggtgatagatcttttgccccagaggaaatttcggctatggtcctttccaaaatgagagatattgctgaggagtacttgggaaaaaagattaccaacgctgttgtcactgtcccagcctacttcaacgatgctcagcgtcaggctaccaaggatgccggaacaattgctggtctcaatgtgatgagaatcatcaatgagccaactgctgctgccattgcctatggtttggacaagaaagagggagaaaagaacatcttggtgtttgaccttggtggtggaacttttgatgtgtctctgctcaccattgacaatggtgtgtttgaggtggtttctacaaacggtgacactcacttgggtggtgaggactttgatcagcgtgtcatggaacacttcatcaagctgtacaagaaaaagaagggcaaggacatcaggaaggacaaccgtgctgtgcagaaactgcgtcgtgaggttgagaaggcaaagcgtgctctctcttctgcccatcaagtccgtctggagattgagtctttcttcgatggcgaggacttctctgaatctcttacccgtgccaaatttgaggaattgaacatggatctgttccgttctaccatgaagccagtgaaacaggtgttggaagatgctgacttgaagactgatgacattgatgaaattgtgttggttggtggttctactcgtatccctaaggtccaacagcttgtgaaggagtacttcaatggcaaggagccaagccgaggcatcaaccccgacgaagctgtggcttacggagctgccgtgcaggctggcgtgctgagtggtgaggaggacactggcgatcttgtgttgttggacgtcaaccctctgaccatgggtattgagactgttggaggcgtcatgaccaagctcattcccaggaacactgtcatccccaccaagaagtcccagatcttctccacggctgctgacaaccagcccactgtcaccattcaggtttacgagggagaacgttccatgacaaaggataaccatctccttggaaagtttgatctgaccggaatccccccagctcctcgtggtgtgccccagattgaggtcactttcgaaattgacgtcaacggtatcctcaaggtgacagcagaagacaaaggcactggcagcaagaaccaaattgtcatccaaaatgaccagaacagattgtcgccagaggacattgagcgtatgatcaacgatgctgaaaagtatgctgatgaggataagaaagttaaggagaaggtggatgccaagaacgagttggaaagctatgcctattctttgaagaaccagatcggagataaggaaaaattgggagccaagttgagcgacgaggacaaggaaaaaatcacagaggctgtcgatgaggccattaagtggttggagagcaacgcagaggcagaatctgaggctttcaatgagaagaaaacagaattggaaggtattgtgcagcctatcatgacaaaactgtatgaacagtccggcggtgccccaccaccatcaggagaagaggaatcggaggaagccgagaaggacgagttatga

SEQ ID NO: 48951 - protein, 667 aa, Aplysia californica
MDRFTPFFLLVILFSSNLLVRADGDEEDEGDKKKSEVGTVIGIDLGTTYSCVGVFKNGRVDIIANDQGNRITPSYVAFTADGERLIGDAAKNQLTSNPENTIFDVKRLIGRTFDDKSVQHDIKFYPFKVTNANNKPHIQAATGEGDRSFAPEEISAMVLSKMRDIAEEYLGKKITNAVVTVPAYFNDAQRQATKDAGTIAGLNVMRIINEPTAAAIAYGLDKKEGEKNILVFDLGGGTFDVSLLTIDNGVFEVVSTNGDTHLGGEDFDQRVMEHFIKLYKKKKGKDIRKDNRAVQKLRREVEKAKRALSSAHQVRLEIESFFDGEDFSESLTRAKFEELNMDLFRSTMKPVKQVLEDADLKTDDIDEIVLVGGSTRIPKVQQLVKEYFNGKEPSRGINPDEAVAYGAAVQAGVLSGEEDTGDLVLLDVNPLTMGIETVGGVMTKLIPRNTVIPTKKSQIFSTAADNQPTVTIQVYEGERSMTKDNHLLGKFDLTGIPPAPRGVPQIEVTFEIDVNGILKVTAEDKGTGSKNQIVIQNDQNRLSPEDIERMINDAEKYADEDKKVKEKVDAKNELESYAYSLKNQIGDKEKLGAKLSDEDKEKITEAVDEAIKWLESNAEAESEAFNEKKTELEGIVQPIMTKLYEQSGGAPPPSGEEESEEAEKDEL

SEQ ID NO: 48952 - DNA, 2025 bp, Ashbya gossypii
  CDS (1)..(2025)
atggcgtttggcaaagtatcaaactgggcggtgccgctgacggcgctgatgtatgcaatggcgctagtgtgcttgccgatgtttgcaggcgggtcgcggggattggtgtacgcggcagacacggacgcggagaactatggaacggtgatcggtattgacttgggtacgacctactcgtgtgtggcgctaatgcggaacgggaagacagagattcttgcgaacgagcaggggaaccggatcacgccgtcgtacgtggccttcacggacgacgagcggctaatcggtgacgcggcgaagaaccaggtggcaaacaaccccaagaacacgattttcgacatcaagcggttgatcgggttgaagtacaacgacaagactgtgcagcgtgagatcaagcacctgccatttgaggtggtggacaagaacggcatgcctgctgtggcagtgactgtcaagggcgagcgcaagttgttcaccccagaggagatctccggtatggtgttgggcaagatgaagcagattgcagaggaatacctcggcaagaaggtgacccacgccgtcgttaccgtgcctgcgtacttcaacgatgcgcagaggcaggcgacgaaggacgcgggtgccatcgcgggcttgaacatcttgcgtattgttaacgagccaaccgcagctgcgattgcatacgggttggacaagaccgaggacgagcaccggattgtcgtctacgacttgggtggtggtaccttcgatgtctccttgttgagcattgaaaacggtgtcttcgaggtccaggcaactgccggtgacacccacttgggtggtgaggactttgactacaagttggtgcgccacttcctcaaggttttcaagaagaagcacggcgtcgatgtttccagcaacgcgaaggccatggccaagttgaagcgtgaggctgagaaggctaagcgtgcgctttcgagccagatgtccacccgtgtggagatcgactcttttgtggacggtattgatttctctgagaccttgaccagagccaagtttgaggaaatgaaccttgacctattcaagaggactttgaagcctgttgagaaggtcttgcaggatgctggtttgaagaaggaggacattgatgacattgttcttgtcggtggttccaccagaatccctaaggtgcaagagttgttggagaactttttcaacaagaaggcgtccaagggcattaacccagatgaggctgttgcatacggtgcagctgtccaagctggtgttttgtctggcgaggaaggtgttgaggacattgttttgctagatgttaaccctctaaccttgggtattgaagttaccggtggtatcatgactcctttgatcaagagaaacacccctatcccaaccaagaagtcccagattttctccaccgcagtcgacaaccagaagactgtgatgatccaagtctacgagggtgagagagctatggccaaggacaacaaccacttgggtaagtttgaactaagtggtatcccaccagccccaagaggtattccacagatcgaggtcacttttgctcttgacgccaacggaattttgaaggtttctgccactgacaagggcactggtaagtctgagtctgtcactataacgaacgaaaaaggtagattgtccaaggatgacatcgagagaatggtcgccgaggctgagaactaccagaaggaggacgaagagatcagggcgaaggtcgaggctcgtcataaattggagaactacgcccactcgttgaagaaccaggtcaacggcgacctaggtgacaagctagaggaggatgacaaggagaccttattggaggctgcgaatgacgttcttgaatggctagaggataattcagactcagctaccaaggaagaatttaacgagaagttcgagtctttgtctcaaactgcttatccaattacttctaagctttacggtgcaggcgctagcgatgctactgatgacgaggatgacgagtctgatgactactttgaccacgacgaattgtga

SEQ ID NO: 48953 - protein, 674 aa, Ashbya gossypii
MAFGKVSNWAVPLTALMYAMALVCLPMFAGGSRGLVYAADTDAENYGTVIGIDLGTTYSCVALMRNGKTEILANEQGNRITPSYVAFTDDERLIGDAAKNQVANNPKNTIFDIKRLIGLKYNDKTVQREIKHLPFEVVDKNGMPAVAVTVKGERKLFTPEEISGMVLGKMKQIAEEYLGKKVTHAVVTVPAYFNDAQRQATKDAGAIAGLNILRIVNEPTAAAIAYGLDKTEDEHRIVVYDLGGGTFDVSLLSIENGVFEVQATAGDTHLGGEDFDYKLVRHFLKVFKKKHGVDVSSNAKAMAKLKREAEKAKRALSSQMSTRVEIDSFVDGIDFSETLTRAKFEEMNLDLFKRTLKPVEKVLQDAGLKKEDIDDIVLVGGSTRIPKVQELLENFFNKKASKGINPDEAVAYGAAVQAGVLSGEEGVEDIVLLDVNPLTLGIEVTGGIMTPLIKRNTPIPTKKSQIFSTAVDNQKTVMIQVYEGERAMAKDNNHLGKFELSGIPPAPRGIPQIEVTFALDANGILKVSATDKGTGKSESVTITNEKGRLSKDDIERMVAEAENYQKEDEEIRAKVEARHKLENYAHSLKNQVNGDLGDKLEEDDKETLLEAANDVLEWLEDNSDSATKEEFNEKFESLSQTAYPITSKLYGAGASDATDDEDDESDDYFDHDEL

SEQ ID NO: 48954 - DNA, 2019 bp, Aspergillus awamori
  CDS (1)..(2019)
atggcgcgcatctcgcatcagggtgcggccaagcccttcacggcttggaccaccatcttctacttgctgcttgttttcattgcccccctcgccttcttcggcactgcacacgctcaggatgagacttcgcctcaggagagctacggaactgtcattggtattgatctgggaaccacctactcttgtgtcggtgttatgcagaatggaaaggtcgaaattctcgtcaacgaccaaggaaaccgtatcaccccttcatacgtcgctttcaccgatgaggaacgcctggtcggtgacgccgctaagaatcaatacgccgccaaccccagacggaccatctttgatatcaagcgcctgatcggtcgcaagttcgatgacaaggatgtccagaaggacgccaagcacttcccctacaaggtcgtcaacaaggacggcaagccccacgtcaaggttgatgtcaaccagacccccaagaccctgacccccgaggaggtctccgccatggttcttggtaagatgaaggagatcgccgagggctaccttggaaagaaggtcacccacgccgtcgtcaccgtccccgcctacttcaacgacgcccagagacaggccaccaaggacgctggtaccattgccggcctgaacgttctccgtgtcgtcaacgagcccaccgccgccgctatcgcctacggattggacaagactggtgatgagcgccaggtcatcgtctacgatcttggtggtggtactttcgatgtctccctcctgtccatcgacaacggtgtcttcgaggtcttggctaccgctggtgacactcacttgggtggtgaggactttgaccagcgtgtcatggatcacttcgtcaagctctacaacaagaagaacaacgttgatgtcaccaaggatctcaaggccatgggtaagctgaagcgcgaggttgagaaggccaagcgtactctgtcttcccagatgtccacccgtattgagattgaggccttccacaacggcgaggacttctccgagacccttacccgcgccaagttcgaggagctgaacatggatctgttcaagaagaccctgaagcctgtcgagcaggttctcaaggatgccaaggttaagaagtccgaggttgacgacattgtcctcgtcggtggttctacccgtatccccaaggtccaggctcttctcgaggagttcttcggtggcaagaaggccagcaagggtatcaaccctgatgaggctgttgctttcggtgctgccgtccagggtggtgtcctgtccggtgaggagggtaccggcgacgttgttctgatggatgtcaaccccctgactctgggtattgagaccactggtggtgtcatgaccaagctcatcccccgtaacactgtcatccccacccgcaagtcccagatcttctctaccgccgctgataaccagcccaccgtcctcatccaagtttacgagggtgagcgttccctgaccaaggacaacaacctgctcggcaagttcgagctcaccggcattcccccggctccccgtggtgttcctcagattgaggtctccttcgacctggatgccaacggtatcctgaaggttcacgccagcgacaagggcaccggcaaggccgagtccatcaccattaccaacgacaagggtcgtctgtcccaggaggagattgaccgcatggtcgccgaggctgaggagttcgccgaggaggacaaggccatcaaggccaagatcgaggcccgtaacaccctggagaactacgcgttcagcctgaagaaccaggtcaacgacgagaacggcctgggtggccagatcgacgaggacgacaagcagaccatcctggacgccgtcaaggaggtgactgagtggcttgaggacaacgctgccactgccaccaccgaggacttcgaggagcagaaggagcagctctcgaacgtggcgtacccgatcaccagcaagctgtatggctctgcgccggcggacgaggatgacgagcccagcgggcatgatgaattgtaa

SEQ ID NO: 48955 - protein, 672 aa, Aspergillus awamori
MARISHQGAAKPFTAWTTIFYLLLVFIAPLAFFGTAHAQDETSPQESYGTVIGIDLGTTYSCVGVMQNGKVEILVNDQGNRITPSYVAFTDEERLVGDAAKNQYAANPRRTIFDIKRLIGRKFDDKDVQKDAKHFPYKVVNKDGKPHVKVDVNQTPKTLTPEEVSAMVLGKMKEIAEGYLGKKVTHAVVTVPAYFNDAQRQATKDAGTIAGLNVLRVVNEPTAAAIAYGLDKTGDERQVIVYDLGGGTFDVSLLSIDNGVFEVLATAGDTHLGGEDFDQRVMDHFVKLYNKKNNVDVTKDLKAMGKLKREVEKAKRTLSSQMSTRIEIEAFHNGEDFSETLTRAKFEELNMDLFKKTLKPVEQVLKDAKVKKSEVDDIVLVGGSTRIPKVQALLEEFFGGKKASKGINPDEAVAFGAAVQGGVLSGEEGTGDVVLMDVNPLTLGIETTGGVMTKLIPRNTVIPTRKSQIFSTAADNQPTVLIQVYEGERSLTKDNNLLGKFELTGIPPAPRGVPQIEVSFDLDANGILKVHASDKGTGKAESITITNDKGRLSQEEIDRMVAEAEEFAEEDKAIKAKIEARNTLENYAFSLKNQVNDENGLGGQIDEDDKQTILDAVKEVTEWLEDNAATATTEDFEEQKEQLSNVAYPITSKLYGSAPADEDDEPSGHDEL

SEQ ID NO: 48956 - DNA, 2004 bp, Candida glabrata
  CDS (1)..(2004)
atgaatgcaattaagcgcttgttgccggtgtcgttgtttctgtacgctttgttcgtggttctgctgccattccaggccagggccaaggacgatgtggagaactacggcactgtgatcggtatcgatctgggtactacgtactcgtgtgtcgcggttatgaagaacggtaagactgagattcttgcgaatgagcaaggtaacagaatcacgccttcctacgtggcgttcacggacgacgagaggttgattggtgacgccgcaaagaaccagattgctgccaaccctaccaacaccatcttcgacatcaagagactgattggtttgaagttcaacgacagatctgtgcagagagacatcaagcacttgccattcaaggtcgtcgacaaggacggcaagcctgtggtccaagtcaaagtgaaaggtgaggacagggtgttcacccctgaggagatctccggtatgattttgggtaagatgaagcagatcgctgaggactacctgggcaagaaggtcacgcacgccgtggtcactgtcccagcttacttcaacgacgcgcagagacaggccaccaaggacgccggtaccatcgctggtctgaacgtcttgagaattgtcaacgagcctaccgccgccgccatcgcttacggtctggacaagtccgacaaggaacaccagattatcgtctacgacttgggtggtggtactttcgacgtctccctattgtccattgaaaacggtgtcttcgaagtccaggccacctccggtgacactcacttgggtggtgaggatttcgactacaagatcgtccgccaattgatcaagactttcaagaagaagcacggtattgatgtctctgacaacgaaaaggccttggccaagttgaagagagaggccgaaaaggccaagcgtgctttgtccagccaaatgtccacccgtatcgaaatcgactccttcgttgatggtatcgacttgagtgaaactttgaccagagctaagttcgaggaattgaacttggacctgttcaagaagactttgaagccagttgaaaaagtcctagaagatgccggcttggagaagaaggacatcgatgacttcgttctagttggtggttccaccagaattccaaaggttcagcaattgttggaatctttcttcaacggtaagaaggcttccaagggtatcaacccagatgaggccgtcgcctacggtgccgctgtccaagctggtgttttgtccggtgaagaaggtgtcgaagacattgtcttgctagatgttaacgctttgaccctgggtattgaaaccactggtggtgtcatgaccccactgatcaagagaaacactgctatcccaaccaagaagtctcaaatcttctccactgctgtcgacaaccaaccaactgtccaaatcaaggtctacgaaggtgaaagagccatgtccaaggacaacaacttgttgggtaagttcgaactgactggtatcccaccagctccaagaggtatcccacaaattgaagtcaccttcgctctagacgctaacggtatcttgaaggtgtctgccaccgacaagggtaccggtaagtccgaatctatcaccatcaccaacgataagggtagattgacccaggatgaaatcgacagaatggttgaagaagctgaaaagttcgcttccgaagacgccgttctaagaacaaagatcgaagctagaaacaagctggaaaactacgctcactccatcaagaaccaagtcgaaggtgatttggctgaaaagttggaagaagaagacaaggaaaccttgttggacgctgctaacgacaccttggagtggctagaagacaacttcgattctgctactactgaagaatttgaagagaagttcgaagctttgtccaagaccgcatacccaatcacttctaagctatacggtggcgcagatggctctgctcctgtatatgatgatgatgaagatgaagatgatgatactgactacttcgacgacgaattgtaa

SEQ ID NO: 48957 - protein, 667 aa, Candida glabrata
MNAIKRLLPVSLFLYALFVVLLPFQARAKDDVENYGTVIGIDLGTTYSCVAVMKNGKTEILANEQGNRITPSYVAFTDDERLIGDAAKNQIAANPTNTIFDIKRLIGLKFNDRSVQRDIKHLPFKVVDKDGKPVVQVKVKGEDRVFTPEEISGMILGKMKQIAEDYLGKKVTHAVVTVPAYFNDAQRQATKDAGTIAGLNVLRIVNEPTAAAIAYGLDKSDKEHQIIVYDLGGGTFDVSLLSIENGVFEVQATSGDTHLGGEDFDYKIVRQLIKTFKKKHGIDVSDNEKALAKLKREAEKAKRALSSQMSTRIEIDSFVDGIDLSETLTRAKFEELNLDLFKKTLKPVEKVLEDAGLEKKDIDDFVLVGGSTRIPKVQQLLESFFNGKKASKGINPDEAVAYGAAVQAGVLSGEEGVEDIVLLDVNALTLGIETTGGVMTPLIKRNTAIPTKKSQIFSTAVDNQPTVQIKVYEGERAMSKDNNLLGKFELTGIPPAPRGIPQIEVTFALDANGILKVSATDKGTGKSESITITNDKGRLTQDEIDRMVEEAEKFASEDAVLRTKIEARNKLENYAHSIKNQVEGDLAEKLEEEDKETLLDAANDTLEWLEDNFDSATTEEFEEKFEALSKTAYPITSKLYGGADGSAPVYDDDEDEDDDTDYFDDEL

SEQ ID NO: 48958 - DNA, 2788 bp, Kluyveromyces lactis
  CDS (438)..(2477)
aggcgggtataatggacacatcaccgttaggaacaaacatatctcattctgtgcggacattgtctgtctaagatctcaaaagaaaaaaaaaagaaataaatggtttacgtgtcaaaatgacttttcttcttgttcttctcttccgtgaattttcatcgattttcgaggaaaatcttggtggaaatatgaagaaacacgtatatatcacagttacgtatatatataaaggacaggtataatttccaaaacctataataattcttctcgtttatttaagtatagacacataagtattcattttatttcttgttcgttcaaattttgaaggttgataaaactatcagtgttttactcagaaagcaaaatcaatcaatccaagtctggttcagtttttactagtttcaagttagtaatagtaagatcaaccaaagatcattatgttttctgccaggaaaagttcagttggatggctagtgtcgtcactagccgtgttttatgtgcttttggccgttataatgccaattgccctaacgggctctcagtcctcgcgagttgtagctcgtgctgctgaagatcacgaagattatggtaccgttattggtatcgatttgggtaccacatattcttgtgttgctgtgatgaaaaatggtaaaactgaaatcctagccaatgagcaaggtaacagaattactccatcttacgtttcattcactgacgatgaaagattgatcggtgatgctgctaagaaccaagctgcatctaatccaaagaacaccatttttgatatcaagagattgattggtctacaatacaacgatccaacggttcaaagagatatcaagcatttgccatatactgtggttaacaagggcaataagccatatgttgaagttactgtgaagggtgaaaagaaagaattcactccagaagaagtctctggtatgattttgggtaagatgaagcaaatcgctgaagactacttgggtaagaaagttactcatgcggttgtcactgtacctgcttactttaacgatgctcaaagacaagccactaaggacgcaggtgccattgctggtttgaacattttgagaatcgttaacgaacctaccgctgcagccattgcttatggtttagataagacagaagacgaacaccaaattattgtctatgatttgggtggtggtaccttcgatgtatctttgttgtctattgaaaatggtgtctttgaagttcaagctaccgctggtgacactcatttaggtggtgaagatttcgactacaaattagtccgtcactttgctcagctgttccaaaagaagcatgacttggacgtcaccaagaatgataaagccatggctaagttaaaaagagaagctgaaaaagccaagcgttctttgtctagtcaaacttctacccgtattgaaatagactctttcttcaacggtattgatttctctgaaacattgactagggctaaattcgaagaattaaacttggctctattcaagaagactttgaagccagtagaaaaggttttgaaggattctggtctacaaaaggaagatatcgatgacatcgtcttagtcggtggttctacaagaattccaaaggttcaacaactattggagaagttctttaacggtaagaaggcttccaagggtatcaacccagatgaagccgttgcatacggtgctgctgtacaagctggtgttttatctggtgaagaaggtgtcgaagatatcgtcttgttagacgttaatgccttgactttgggtattgaaaccactggtggtgtcatgactccattgatcaagagaaacactgcaattccaaccaaaaaatctcaaattttctctactgcagttgacaaccaaaaggctgttagaattcaagtttacgaaggtgaaagagctatggttaaggataacaacttattgggtaatttcgagctaagtgatattagagcagccccaagaggtgttccacaaattgaggtcacatttgctttggatgctaatggtatcctaaccgtttctgccaccgataaagacactggtaagtccgaatctattaccattgccaatgacaagggtagattgtctcaggatgatatcgacagaatggtcgaagaagctgaaaagtatgcagctgaagatgccaaattcaaggctaagagcgaagctcgtaacacatttgaaaactttgttcactacgtgaagaattctgttaacggtgaattggccgaaatcatggatgaagatgacaaggaaaccgttttagacaatgtcaatgaatccttagaatggttggaagacaactctgatgtcgctgaagctgaagatttcgaagaaaagatggcttcattcaaggaatccgtggaaccaattttggctaaggcttctgcatctcaaggctctacttcaggagagggattcgaagatgaagatgacgacgactattttgatgacgaattataatcaccttcaatactccgaaaacaatgggagactataaactcaactgaaagaaaaaaaaataacgaattcaacaatgcttgttttcttccgtcctgcgaatgaagtcacatccgaaagcaaaactttagtttactttgcaatctttcaatttccaaatctgtattgtcttgcgcatgtcatttctatatttgacaagctctgatgctgacccgtatgtctggaacaacacaactgcggaaagttccattgacttgtacgcaacgagaagaataaagcagcaaaaaaaaaaaaaagaaaaagttcttgtttaa

SEQ ID NO: 48959 - protein, 679 aa, Kluyveromyces lactis
MFSARKSSVGWLVSSLAVFYVLLAVIMPIALTGSQSSRVVARAAEDHEDYGTVIGIDLGTTYSCVAVMKNGKTEILANEQGNRITPSYVSFTDDERLIGDAAKNQAASNPKNTIFDIKRLIGLQYNDPTVQRDIKHLPYTVVNKGNKPYVEVTVKGEKKEFTPEEVSGMILGKMKQIAEDYLGKKVTHAVVTVPAYFNDAQRQATKDAGAIAGLNILRIVNEPTAAAIAYGLDKTEDEHQIIVYDLGGGTFDVSLLSIENGVFEVQATAGDTHLGGEDFDYKLVRHFAQLFQKKHDLDVTKNDKAMAKLKREAEKAKRSLSSQTSTRIEIDSFFNGIDFSETLTRAKFEELNLALFKKTLKPVEKVLKDSGLQKEDIDDIVLVGGSTRIPKVQQLLEKFFNGKKASKGINPDEAVAYGAAVQAGVLSGEEGVEDIVLLDVNALTLGIETTGGVMTPLIKRNTAIPTKKSQIFSTAVDNQKAVRIQVYEGERAMVKDNNLLGNFELSDIRAAPRGVPQIEVTFALDANGILTVSATDKDTGKSESITIANDKGRLSQDDIDRMVEEAEKYAAEDAKFKAKSEARNTFENFVHYVKNSVNGELAEIMDEDDKETVLDNVNESLEWLEDNSDVAEAEDFEEKMASFKESVEPILAKASASQGSTSGEGFEDEDDDDYFDDEL

SEQ ID NO: 48960 - DNA, 2871 bp, Pichia angusta
  CDS (464)..(2461)
tctagaatcttccatcaaccaagttacaaacaaaagatgattcttcacaactcatctctcggaggtcagatgagccaaatgttagaggtttgcgagtggcgtatataaaaaatattgccaccaataatttaaacttgttttttacagttcactgcgggcgcaaaagatttttccaaaatttttgcacaataacgccagcgtgtcacattttcataatgtaaacttctatttcctgaaaattcgacacgtaacatatttgcagatatataaagctcttgtaactctgtataatacaatcttccaaggctctgagaaagataagcggtttacgtttttcagtgttcggaatttgaaatcaccagagcggttcccgtgttattacgctatacgacgatcaattagaaaggttcagttgcattaaattctttgttctctaaaattgatctgcccttaaacgacgagaatgttaactttcaataagtcggtagtctcgtgtgctgcaatcatctatgctctgttgctagtggttctcccactaacaacacagcagtttgtcaaggcagagtcaaatgaaaattacggaaccgtgattggcatagatcttggtaccacatattcatgtgttggtgttatgaaggctggaagagttgaaatcattcctaatgaccaaggtaatagaataacaccatcttatgttgcatttaccgaggatgaaaggttagtgggggatgccgccaagaatcaaattgcgtcaaacccgaccaatactatttttgacatcaaaagattgattgggcaccggtttgatgacaaagtaattcagaaagagatcaaacatttgccatacaaggttaaggatcaagatggtagaccggttgtggaggcaaaggttaacggggaactcaagaccttcaccgcggaagaaatttctgccatgattttgggcaaaatgaaacagattgcagaagactacctaggaaagaaagtgacccacgctgtcgttactgtcccagcatacttcaatgatgcgcaaagacaagcaactaaggatgcaggaacgattgctggtttggaggttctgagaattgttaacgagccaaccgcagcagctattgcatatggtttggataagacagacgaggaaaaacatattatagtctatgatttgggtggaggtacttttgatgtttctctcctcaccattgctggaggagcatttgaagtcttggctactgcgggtgatactcatttgggtggagaggactttgactatagagttgttagacatttcatcaaagttttcaagaagaagcatggaattgatattagtgacaactcaaaagcattagcaaaattaaagagagaggttgagaaagcgaagagaacactgtcctctcaaatgtcgactcgcatagagattgactctttcgtggacggaattgatttttcagaatctctatcaagagcaaagtttgaggagctgaatatggatttgttcaaaaaaactttgaaaccagtgcagcaggttcttgatgacgctaaaatgaagccagatgaaatagatgatgtggttttcgtcggtggatctactcgaattccaaaagttcaagagttaatcgagaatttcttcaatggaaaaaagatttctaaaggcatcaatccagacgaggctgtggcgttcggtgctgctgttcagggaggtgtgctttcaggcgaggagggagttgaagacatagtgttgatcgatgtcaacccactcactcttggtattgagacttccggaggtgtcatgaccacattgatcaaaaggaacactcctattcctacacaaaagtcccagatattttccactgccgctgataaccagccggttgtcttgatccaagtctatgaaggtgaaagagcgatggccaaagataataatctgttaggaaagtttgagttaacaggtataccacctgcgccaagaggcgtccctcaaatcgaggtcacgtttactcttgactctaacggtattttgaaagtttctgctactgataaaggaacaggaaagtccaattctataacaattaccaatgataagggtcgcctttcgaaggaggaaatcgaaaagaaaatcgaggaagcagagaagtttgcgcaacaagataaggagctgagagagaaggtagaaagcagaaacgcacttgaaaactacgcccattccctcaaaaatcaagccaatgatgagaatggttttggagctaagcttgaagaagatgataaagaaactcttttggatgctattaacgaggctctggagtttttggaagacaattttgatacagcaactaaagatgaatttgatgaacagaaggaaaagctgagtaaggttgcataccctatcacctctaaattgtatgacgcgcctccaacgagtgacgaagaagatgaggatgattgggatcacgacgaactgtgaatgactcatgtaatatactgataataatgagaatttgctttttatcgataaaaggtttttctaagttttcgaggtttgcgacgctagcttcttgagtacatacgtacatagattggttgaaaaaggataaatcgtacttttttttgttaattacagtatctttttacagtatctttttatcgttatacgaggagctttttttcgaggcaaagcgtcataacacgcttcagttgctgaaatctaatcctgttttatcaatggacataaagctcaagccccaggtacccacatttgtggaatcggatgagccagctaaagaaactgagcccccaaatgtgaaccgttcatcaaatacatataacgagcccaatagcaaaaccgggaatgaaacctactcgatacaagatatc

SEQ ID NO: 48961 - protein, 665 aa, Pichia angusta
MLTFNKSVVSCAAIIYALLLVVLPLTTQQFVKAESNENYGTVIGIDLGTTYSCVGVMKAGRVEIIPNDQGNRITPSYVAFTEDERLVGDAAKNQIASNPTNTIFDIKRLIGHRFDDKVIQKEIKHLPYKVKDQDGRPVVEAKVNGELKTFTAEEISAMILGKMKQIAEDYLGKKVTHAVVTVPAYFNDAQRQATKDAGTIAGLEVLRIVNEPTAAAIAYGLDKTDEEKHIIVYDLGGGTFDVSLLTIAGGAFEVLATAGDTHLGGEDFDYRVVRHFIKVFKKKHGIDISDNSKALAKLKREVEKAKRTLSSQMSTRIEIDSFVDGIDFSESLSRAKFEELNMDLFKKTLKPVQQVLDDAKMKPDEIDDVVFVGGSTRIPKVQELIENFFNGKKISKGINPDEAVAFGAAVQGGVLSGEEGVEDIVLIDVNPLTLGIETSGGVMTTLIKRNTPIPTQKSQIFSTAADNQPVVLIQVYEGERAMAKDNNLLGKFELTGIPPAPRGVPQIEVTFTLDSNGILKVSATDKGTGKSNSITITNDKGRLSKEEIEKKIEEAEKFAQQDKELREKVESRNALENYAHSLKNQANDENGFGAKLEEDDKETLLDAINEALEFLEDNFDTATKDEFDEQKEKLSKVAYPITSKLYDAPPTSDEEDEDDWDHDEL

SEQ ID NO: 48962 - DNA, 1992 bp, Schizosaccharomyces pombe
  CDS (1)..(1992)
atgaagaagttccagctatttagcattttaagctactttgtagctttattcctcctacctatggcttttgctagtggtgatgataactctacagaatcatatggaacagttattggtattgatcttggtacaacatactcttgcgttgccgttatgaaaaatggtcgtgtagaaattattgccaacgatcagggtaatcgtattacaccctcatatgtggcctttactgaagacgaacgtttggttggtgaggccgctaagaaccaagctccttccaatcctgaaaacaccatttttgacatcaagcgtcttattggacgtaagtttgacgaaaagacaatggccaaggatattaaatcttttcctttccatattgtaaatgacaagaaccgtcctttggttgaggttaatgtaggtggtaagaagaaaaagtttacccctgaagaaatttcagccatgattcttagtaaaatgaagcaaactgctgaagcttacctcggaaagcctgtcactcacgctgttgttactgtccccgcctacttcaatgacgctcagcgtcaggctaccaaggatgctggtactattgccggcttgaatgttattcgtatcgtcaatgagcctactgcggctgctattgcctacggattagacaaaactgatacagagaagcatattgttgtttatgatttaggtggtggtacttttgacgtttctcttttgtctattgacaatggtgttttcgaagttttggctacttcaggtgatacccatctcggtggtgaggactttgacaaccgtgttatcaactacttagcccgtacttacaaccgcaagaacaatgtcgatgttactaaggatcttaaggctatgggaaaactcaagcgtgaagttgaaaaagccaagcgtactttgtcctcccaaaagtctgttcgtatcgagattgaatctttctttaacggtcaagacttttctgaaactttatcccgtgctaagttcgaggagattaacatggatctcttcaagaagactttgaagcctgttgagcaagtattaaaggactccaacctcaagaaatccgagattgatgatatcgttcttgtcggtggttctactcgtatccctaaggttcaagaacttttggagagcttctttggtaagaaggcttctaagggtatcaatcccgatgaggctgttgcctatggtgctgctgttcaagccggcgttttatctggcgaggaaggaagtgataacattgtcctcttggacgttatccctcttactttaggtattgagactaccggtggtgttatgactaaacttatcggtcgtaacactcctattcctactcgtaagtcgcaaattttctctactgcggttgacaatcaaaatactgttttaattcaagtctatgaaggtgaacgtactcttactaaggacaacaaccttcttggaaaatttgaccttcgtggtattcctcctgcccctcgtggtgttccccaaattgaagtcacgtttgaagtcgatgccaatggtgttttgactgtttcagccgtcgacaagtctggtaagggtaagcctgagaagcttgttatcaagaatgacaaaggtcgtttgtctgaggaagatatcgagcgcatggttaaggaggccgaagaattcgctgaagaagataagattttgaaggagcgtattgaagctcgtaatactcttgaaaactacgcctattctttgaaaggtcaatttgacgatgatgagcaattaggtggtaaggttgatcccgaagataagcaagctgttttggacgctgtcgaagatgttgctgaatggcttgaaatccacggagaagatgccagcaaggaagaatttgaagatcagcgtcaaaaactcgatgccgttgttcatcctattacccaaaagttgtattccgaaggagctggtgatgctgatgaagaggatgatgattacttcgatgatgaggccgatgaactttaa

SEQ ID NO: 48963 - protein, 663 aa, Schizosaccharomyces pombe
MKKFQLFSILSYFVALFLLPMAFASGDDNSTESYGTVIGIDLGTTYSCVAVMKNGRVEIIANDQGNRITPSYVAFTEDERLVGEAAKNQAPSNPENTIFDIKRLIGRKFDEKTMAKDIKSFPFHIVNDKNRPLVEVNVGGKKKKFTPEEISAMILSKMKQTAEAYLGKPVTHAVVTVPAYFNDAQRQATKDAGTIAGLNVIRIVNEPTAAAIAYGLDKTDTEKHIVVYDLGGGTFDVSLLSIDNGVFEVLATSGDTHLGGEDFDNRVINYLARTYNRKNNVDVTKDLKAMGKLKREVEKAKRTLSSQKSVRIEIESFFNGQDFSETLSRAKFEEINMDLFKKTLKPVEQVLKDSNLKKSEIDDIVLVGGSTRIPKVQELLESFFGKKASKGINPDEAVAYGAAVQAGVLSGEEGSDNIVLLDVIPLTLGIETTGGVMTKLIGRNTPIPTRKSQIFSTAVDNQNTVLIQVYEGERTLTKDNNLLGKFDLRGIPPAPRGVPQIEVTFEVDANGVLTVSAVDKSGKGKPEKLVIKNDKGRLSEEDIERMVKEAEEFAEEDKILKERIEARNTLENYAYSLKGQFDDDEQLGGKVDPEDKQAVLDAVEDVAEWLEIHGEDASKEEFEDQRQKLDAVVHPITQKLYSEGAGDADEEDDDYFDDEADEL

SEQ ID NO: 48964 - DNA, 2013 bp, Yarrowia lipolytica
  CDS (1)..(2013)
atgaagttctctatgccttcgtggggcgtcgttttttacgccctcctggtatgccttctgcctttcctttccaaggccggcgttcaggctgatgacgtggactcttatggcaccgtcattggtatcgatctgggtaccacctactcctgtgttggtgtcatgaagggtggccgagtcgagattctggccaacgaccagggttctcgaatcaccccctcctacgtggccttcaccgaggacgagcgactcgttggagacgctgccaagaaccaggctgccaacaaccctttcaacaccattttcgacattaagcgactcattggtcttaagtacaaggacgagtccgtccagcgagacatcaagcacttcccctacaaggtcaagaacaaggacggcaagcccgttgttgttgtcgagaccaagggcgagaagaagacctacacccccgaggagatctccgccatgattcttaccaagatgaaggacattgcccaggactaccttggcaagaaggtcacccacgctgtcgtcaccgtccctgcctacttcaacgatgcccagcgacaggccaccaaggatgccggtatcattgctggtctcaacgttctgcgaattgttaacgagcccaccgctgccgccattgcctacggcctggaccacaccgatgacgagaagcagattgttgtctacgatcttggtggaggaaccttcgatgtttctcttctgtctatcgagtctggtgtctttgaggttcttgccactgctggtgacacccatcttggtggtgaggatttcgactaccgagtcatcaagcactttgtcaagcagtacaacaagaagcacgacgtcgacattaccaagaacgctaagaccattggtaagctcaaacgagaggttgagaaggccaagcgaactctgtcttcccagatgtccactcgaatcgagattgagtccttcttcgatggagaggacttctcggagaccctgacccgagccaagttcgaggagctcaacattgatctgttcaagcgaaccctcaagcccgttgagcaggttctcaaggactctggcgtcaagaaggaggatgtccacgacattgttcttgttggtggttccacccgaatccccaaggtccaggagctgctggagaagttctttgacggcaagaaggcctccaagggtatcaaccccgatgaggctgttgcttacggagctgctgtccaggctggtgttctttccggcgaggacggtgttgaggacattgtcctgctcgatgttaaccccctgactcttggtattgagaccactggtggtgtcatgaccaagctcatcaaccgaaacaccaacatccccaccaagaagtcccagattttctccaccgctgttgacaaccagtctaccgtgctgattcaggtctttgagggagagcgaaccatgtccaaggacaacaacctgcttggtaagttcgagctcaagggtattccccctgctccccgaggtgtcccccagattgaggtcaccttcgagcttgacgctaacggaattctgcgagtcaccgcccacgataagggcaccggcaagtccgagaccattaccatcaccaacgacaagggccgtctctccaaggacgagattgagcgaatggttgaggaggctgagcgatttgccgaggaggatgctctcatccgagagaccattgaggctaagaactctctcgagaactacgcccactctctccgaaaccaggttgctgacaagtctggtctcggtggcaagatttctgccgacgacaaggaggctctcaacgacgctgtcaccgagactctcgagtggctggaggccaactccgtgtctgccaccaaggaggactttgaggagaagaaggaggctctgtctgccattgcctaccccatcacctccaagatctacgagggtggagaaggtggagacgagtccaacgacggtggattctacgctgatgatgatgaggctcctttccacgatgagctttaa

SEQ ID NO: 48965 - protein, 670 aa, Yarrowia lipolytica
MKFSMPSWGVVFYALLVCLLPFLSKAGVQADDVDSYGTVIGIDLGTTYSCVGVMKGGRVEILANDQGSRITPSYVAFTEDERLVGDAAKNQAANNPFNTIFDIKRLIGLKYKDESVQRDIKHFPYKVKNKDGKPVVVVETKGEKKTYTPEEISAMILTKMKDIAQDYLGKKVTHAVVTVPAYFNDAQRQATKDAGIIAGLNVLRIVNEPTAAAIAYGLDHTDDEKQIVVYDLGGGTFDVSLLSIESGVFEVLATAGDTHLGGEDFDYRVIKHFVKQYNKKHDVDITKNAKTIGKLKREVEKAKRTLSSQMSTRIEIESFFDGEDFSETLTRAKFEELNIDLFKRTLKPVEQVLKDSGVKKEDVHDIVLVGGSTRIPKVQELLEKFFDGKKASKGINPDEAVAYGAAVQAGVLSGEDGVEDIVLLDVNPLTLGIETTGGVMTKLINRNTNIPTKKSQIFSTAVDNQSTVLIQVFEGERTMSKDNNLLGKFELKGIPPAPRGVPQIEVTFELDANGILRVTAHDKGTGKSETITITNDKGRLSKDEIERMVEEAERFAEEDALIRETIEAKNSLENYAHSLRNQVADKSGLGGKISADDKEALNDAVTETLEWLEANSVSATKEDFEEKKEALSAIAYPITSKIYEGGEGGDESNDGGFYADDDEAPFHDEL

SEQ ID NO: 48966 - DNA, 2049 bp, Saccharomyces cerevisiae
  CDS (1)..(2049)
atgtttttcaacagactaagcgctggcaagctgctggtaccactctccgtggtcctgtacgcccttttcgtggtaatattacctttacagaattctttccactcctccaatgttttagttagaggtgccgatgatgtagaaaactacggaactgttatcggtattgacttaggtactacttattcctgtgttgctgtgatgaaaaatggtaagactgaaattcttgctaatgagcaaggtaacagaatcaccccatcttacgtggcattcaccgatgatgaaagattgattggtgatgctgcaaagaaccaagttgctgccaatcctcaaaacaccatcttcgacattaagagattgatcggtttgaaatataacgacagatctgttcagaaggatatcaagcacttgccatttaatgtggttaataaagatgggaagcccgctgtagaagtaagtgtcaaaggagaaaagaaggtttttactccagaagaaatttctggtatgatcttgggtaagatgaaacaaattgccgaagattatttaggcactaaggttacccatgctgtcgttactgttcctgcttatttcaatgacgcgcaaagacaagccaccaaggatgctggtaccatcgctggtttgaacgttttgagaattgttaatgaaccaaccgcagccgccattgcctacggtttggataaatctgataaggaacatcaaattattgtttatgatttgggtggtggtactttcgatgtctctctattgtctattgaaaacggtgttttcgaagtccaagccacttctggtgatactcatttaggtggtgaagattttgactataagatcgttcgtcaattgataaaagctttcaagaagaagcatggtattgatgtgtctgacaacaacaaggccctagctaaattgaagagagaagctgaaaaggctaaacgtgccttgtccagccaaatgtccacccgtattgaaattgactccttcgttgatggtatcgacttaagtgaaaccttgaccagagctaagtttgaggaattaaacctagatctattcaagaagaccttgaagcctgtcgagaaggttttgcaagattctggtttggaaaagaaggatgttgatgatatcgttttggttggtggttctactagaattccaaaggtccaacaattgttagaatcatactttgatggtaagaaggcctccaagggtattaacccagatgaagctgttgcatacggtgcagccgttcaagctggtgtcttatccggtgaagaaggtgtcgaagatattgttttattggatgtcaacgctttgactcttggtattgaaaccactggtggtgtcatgactccattaattaagagaaatactgctattcctacaaagaaatcccaaattttctctactgccgttgacaaccaaccaaccgttatgatcaaggtatacgagggtgaaagagccatgtctaaggacaacaatctattaggtaagtttgaattaaccggcattccaccagcaccaagaggtgtacctcaaattgaagtcacatttgcacttgacgctaatggtattctgaaggtgtctgccacagataagggaactggtaaatccgaatctatcaccatcactaacgataaaggtagattaacccaagaagagattgatagaatggttgaagaggctgaaaaattcgcttctgaagacgcttctatcaaggccaaggttgaatctagaaacaaattagaaaactacgctcactctttgaaaaaccaagttaatggtgacctaggtgaaaaattggaagaagaagacaaggaaaccttattagatgctgctaacgatgttttagaatggttagatgataactttgaaaccgccattgctgaagactttgatgaaaagttcgaatctttgtccaaggtcgcttatccaattacttctaagttgtacggaggtgctgatggttctggtgccgctgattatgacgacgaagatgaagatgacgatggtgattatttcgaacacgacgaattgtag

SEQ ID NO: 48967 - protein, 682 aa, Saccharomyces cerevisiae
MFFNRLSAGKLLVPLSVVLYALFVVILPLQNSFHSSNVLVRGADDVENYGTVIGIDLGTTYSCVAVMKNGKTEILANEQGNRITPSYVAFTDDERLIGDAAKNQVAANPQNTIFDIKRLIGLKYNDRSVQKDIKHLPFNVVNKDGKPAVEVSVKGEKKVFTPEEISGMILGKMKQIAEDYLGTKVTHAVVTVPAYFNDAQRQATKDAGTIAGLNVLRIVNEPTAAAIAYGLDKSDKEHQIIVYDLGGGTFDVSLLSIENGVFEVQATSGDTHLGGEDFDYKIVRQLIKAFKKKHGIDVSDNNKALAKLKREAEKAKRALSSQMSTRIEIDSFVDGIDLSETLTRAKFEELNLDLFKKTLKPVEKVLQDSGLEKKDVDDIVLVGGSTRIPKVQQLLESYFDGKKASKGINPDEAVAYGAAVQAGVLSGEEGVEDIVLLDVNALTLGIETTGGVMTPLIKRNTAIPTKKSQIFSTAVDNQPTVMIKVYEGERAMSKDNNLLGKFELTGIPPAPRGVPQIEVTFALDANGILKVSATDKGTGKSESITITNDKGRLTQEEIDRMVEEAEKFASEDASIKAKVESRNKLENYAHSLKNQVNGDLGEKLEEEDKETLLDAANDVLEWLDDNFETAIAEDFDEKFESLSKVAYPITSKLYGGADGSGAADYDDEDEDDDGDYFEHDEL

SEQ ID NO: 48968 - DNA, 1863 bp, Pseudomonas putida
  CDS (1)..(1863): transl_table=11
atggccctactgcagattgccgaacccggtcaaagccctcagccgcaccagcgccgcctggcggttggaatcgacctgggtaccaccaactcaatggtcgctgcactgcgcagcggccgtagcgagcccctgcccgacgcgcagggtaacgtcattctgccgtccgcggtgcgctacctcgaagggcgcaacgaagtggggcaggccgcgcgtgatgctgcctccagcgacccgttgaacaccgtgctgtcggtcaagcgcctgatggggcgcggcctggccgacgtcaagcagctgggcgagcaactgccataccgctttgtgggtggtgaatcgcacatgccgttcatcgacaccgtgcaggggccgaaaagccctgtggaagtgtctgccgacatcctgaaggtgttgcgcgaacgggccgaagccaccttgggtggcgagctggtaggcgcggtgatcaccgtgcctgcctatttcgatgacgcccaacgtcaggctaccaaagacgcagcgcgtctggccggcctgaacgtgctgcgcctgctcaacgaaccgactgcggccgccgtagcctacggcctggaccagaacgccgaaggcgtggtggccatctatgatctgggcggcggtactttcgatatttccatcctgcgcctgaccgctggcgtattcgaagtgctggccaccggcggtgataccgccttgggtggtgacgacttcgaccatgctattgccggctggatcatcgagcaggctggcctgtcgtccgatctggacccggctacccagcgcgcgctgctgcaaaccgcctgcgccgccaaggaagccctgaccgacgctgacgtggtcagtgtcagccacggtgcctggcacggcgagctgacccgtaatgccttcgaagccatgatcgagccactggttgcccgcagcctgaaggcctgccgccgcgccgtgcgcgacagtggcgttgaactggaagaagtcagcgccgtggtcatggtcggtggttcgacccgcgtgccgcgtgtgcgtgaggccgtgggcgcgctgttcgggcgcaccccgctgacctcgatcgacccagaccaggtggtggcgattggtgccgccatccaggccgacaccctggccggcaaccgccgcgaaggtggcgagctgctgctgctcgatgtcatcccgctgtcgcttggtcttgagaccatgggcgggctgatggagaaggtgatcccgcgtaacaccaccattccggtggcccgcgctcaggagttcaccacgtacaaagatggccagtcggccatgatgatccacgtactgcagggcgagcgcgagctgatcagtgactgccgttcgctggcccgcttcgagctgcgcggcatcccggccatggttgccggtgctgcaaaaatccgcgtcaccttccaggtggatgccgatggcctgctcagcgtcgctgcccgcgagctgggttcgggcgtggaagccagcattcaggtcaagccgtcctacggcctgaccgacggcgaaatcgcccgcatgctcaaggactccttcgaacacgccggttccgacaagcatgcccgccagctgcgagagcatcaggtagatggcgagcggctgctcgaggcggtacagggcgccctggacgccgacggcgatcgcctgctcagcagtgacgagcgcgacgccatcgaattccagatgcaagaactacgtgatttgctggccggcaccgatggcgcagccatcgagcaacagaccaagcgtctgtcgcaggtgaccgatgcatttgccgcccgtcgccttgattcgacggtcaaagccgcactggccgggcgcaacctgaatgagatcgaggagtaa

SEQ ID NO: 48969 - protein, 620 aa, Pseudomonas putida
MALLQIAEPGQSPQPHQRRLAVGIDLGTTNSMVAALRSGRSEPLPDAQGNVILPSAVRYLEGRNEVGQAARDAASSDPLNTVLSVKRLMGRGLADVKQLGEQLPYRFVGGESHMPFIDTVQGPKSPVEVSADILKVLRERAEATLGGELVGAVITVPAYFDDAQRQATKDAARLAGLNVLRLLNEPTAAAVAYGLDQNAEGVVAIYDLGGGTFDISILRLTAGVFEVLATGGDTALGGDDFDHAIAGWIIEQAGLSSDLDPATQRALLQTACAAKEALTDADVVSVSHGAWHGELTRNAFEAMIEPLVARSLKACRRAVRDSGVELEEVSAVVMVGGSTRVPRVREAVGALFGRTPLTSIDPDQVVAIGAAIQADTLAGNRREGGELLLLDVIPLSLGLETMGGLMEKVIPRNTTIPVARAQEFTTYKDGQSAMMIHVLQGERELISDCRSLARFELRGIPAMVAGAAKIRVTFQVDADGLLSVAARELGSGVEASIQVKPSYGLTDGEIARMLKDSFEHAGSDKHARQLREHQVDGERLLEAVQGALDADGDRLLSSDERDAIEFQMQELRDLLAGTDGAAIEQQTKRLSQVTDAFAARRLDSTVKAALAGRNLNEIEE

SEQ ID NO: 48970 - DNA, 1851 bp, Salmonella typhimurium
  CDS (1)..(1851): transl_table=11
atggccttattacaaattagtgagcctggtctgagcgccgcgccgcatcagcgtcgtctggcggcgggcatcgacttaggcactaccaactctctggttgcgacggttcgcagcggccaggcggaaactctgcctgaccacgaagggcgccacctgttgccttcagtggttcactatcagcagcagggccatacggtcggttacgctgcgcgtgacaatgccgcgcaggatacggccaacactatcagctctgtgaaacgcatgatgggacgctcgctggcggatatccagacgcgctatccgcatctgccttaccggtttaaggcaagcgttaatgggctgccgatgattgacacggcggctggattgctcaatccggtgcgcgtatcggctgatattctcaaagcgctggccgcgcgggctagcgaatcgctctccggcgagctggatggcgtggtgattaccgttcccgcctatttcgatgatgcccaacgtcagggaacgaaagacgccgcgcggctggcaggcctgcatgtgctgcgcctgctcaacgaaccgacggcggcggcgattgcctacggtctggactcaggcaaagaaggcgttattgctgtttacgatctcggcggcggtaccttcgatatctctattttacgcctgagccgcggggtgtttgaagtgctggcgacgggcggtgattctgcgctcggcggcgacgactttgaccatctgctggcggactatattcgtgagcaggcgggaattgccgatcgtagcgacaatcgcgttcagcgcgaactgctggatgccgcgattgcggcgaaaatcgccttaagcgatgccgataccgttcgcgttaacgttgcgggctggcagggggagatcactcgcgagcagtttaacgatctcatttccgcgctggttaagcgcacgctattggcctgccgtcgcgcattgaaagatgccggcgttgagccccaggacgttctggaagtggtcatggtcggcggttcgacccgtgtaccgctggtgcgtgagcgggtgggcgaattttttggccgcacgccgttaaccgctattgacccggataaagtggtcgctattggcgcagcgattcaggccgatattctggtcggcaacaagccggacagcgaaatgctgctgctggacgtgattccactctctcttgggctggaaacgatgggcggcctggtggaaaaagtcattccgcgcaacaccactatcccggtggcgcgcgcgcaggatttcaccaccttcaaagacggccagaccgcgatgtctatccatgtgatgcagggcgaacgcgaactggtgcaggactgccgctcgctggcgcgctttgcgctgcgcgggattccgccgctgccggcgggcggggcgcatattcgcgtgaccttccaggtagacgccgatggcctgttgagcgtcaccgcaatggaaaaatccaccggcgtcgaggcctccattcaggtcaaaccttcctatggcctgaccgatggcgaaatcgcctcgatgatcaaggattccatgagttttgccgagcaggacgtgaaagcgcgtatgctggcggagcaaaaagtcgaagccgcgcgcgtgctggaaagtttgaccggcgcgctaactgccgacgccgcgctgttaagcgccgcagaacgtcaatgcattgatgatgccgccgcacatttaagcgcggtcgcacaaggcgatgatgttgacgccatagaacaagccattaaaaacgtagataaacaaacccaggaatttgccgctcgccgcatggaccagtcggttcgtcgcgcgttgaaaggccattccgtagacgaggtttaa

SEQ ID NO: 48971 - protein, 616 aa, Salmonella typhimurium
MALLQISEPGLSAAPHQRRLAAGIDLGTTNSLVATVRSGQAETLPDHEGRHLLPSVVHYQQQGHTVGYAARDNAAQDTANTISSVKRMMGRSLADIQTRYPHLPYRFKASVNGLPMIDTAAGLLNPVRVSADILKALAARASESLSGELDGVVITVPAYFDDAQRQGTKDAARLAGLHVLRLLNEPTAAAIAYGLDSGKEGVIAVYDLGGGTFDISILRLSRGVFEVLATGGDSALGGDDFDHLLADYIREQAGIADRSDNRVQRELLDAAIAAKIALSDADTVRVNVAGWQGEITREQFNDLISALVKRTLLACRRALKDAGVEPQDVLEVVMVGGSTRVPLVRERVGEFFGRTPLTAIDPDKVVAIGAAIQADILVGNKPDSEMLLLDVIPLSLGLETMGGLVEKVIPRNTTIPVARAQDFTTFKDGQTAMSIHVMQGERELVQDCRSLARFALRGIPPLPAGGAHIRVTFQVDADGLLSVTAMEKSTGVEASIQVKPSYGLTDGEIASMIKDSMSFAEQDVKARMLAEQKVEAARVLESLTGALTADAALLSAAERQCIDDAAAHLSAVAQGDDVDAIEQAIKNVDKQTQEFAARRMDQSVRRALKGHSVDEV

SEQ ID NO: 48972 - DNA, 1908 bp, Drosophila melanogaster
  CDS (1)..(1908)
atgccagccattggaatcgatttgggcaccacatactcctgcgtgggagtcttccagtacggaaaagtggagatcattgccaacgaccagggtaaccgtaccacaccatcgtacgtggccttcaccgactcggaacgccttattggagatgccgccaagaaccaggtggccatgaaccccaagaactctgtgttcgatgccaagcgcctgattgggcgtcgtttcgacgattccaagatccaggaggacattaagcactggccgttcaaagtgatcaacgacaacggcaaaccaaagataagcgtggagttcaagggcgcgaataagtgcttctctcccgaggagattagctcgatggtactcaccaaaatgaaggagactgcagaagcctacctaggcactacagtgaaggacgctgtcatcacagtgccggcctactttaacgactcccagcgccaggcaacaaaggatgccggtgccatcgctggcatcaatgtgctccgcatcatcaacgagccaacagcggcggctctggcctacggcctggacaagaatctgaagggagagcgcaatgtgcttattttcgatttgggcggtggtacttttgacgtctccatcttgaccattgacgagggatccctgtttgaggtgcgctcgactgcgggagacacacatctgggtggcgaggactttgacaatcgattggttaaccactttgccgaggagtttaagcgcaagtacaaaaaggatctgcgctccaacccacgcgcactgcgtcgtcttcgcacggcagccgagcgcgcaaagcgcaccctttcctccagcacggaggcttctttggagattgacgccctgtacgagggacacgacttctactcgaaggtgagccgcgccagattcgaggaactttgcggtgacctcttccgcaacacactggagccagttgagaaggcactcaaggacgctaaaatggacaagagccagatccatgacatagtcctggttggaggctccactcgtattcccaaggttcagaacctgctgcagaacttcttcggcggaaagaccctgaacttgtcaatcaatccggacgaggcggtggcctacggagcagccatccaggcagccattctgtcgggcgacaagagcagcgagatcaaggatgtcctactggtcgatgttgccccactctcgttgggcatagaaaccgccggcggggtgatgaccaagctgattgagcgcaacagccgcattccatgcaagcagtccaagaccttcaccacctatgccgacaaccagccggcggtgaccattcaagtgtttgagggcgagagggctctgaccaaggacaacaatgtattgggcacattcgatctcactggcgttccacccgcaccccgtggagtgcccaagatcgacgttactttcgatttggacgcaaacggtatcctgaatgtgaccgccaaggagcagggcactggcaacgccaagaacattaccatcaagaacgacaagggtcggctgtcgcaggcggacatcgaccgcatgctcagtgaggcggagaagtacgccgaggaggacgagcgccatcgccagcggatcgccgcccgcaatcaactggagacctatttgtttggtgtaaaggaggcggccgagaatggtggcgatcgcatcagtgcagccgacaagagcagtattgtggagcgttgcagcgaggcgatgaagtggttggacagcaacaccaccgccgagaaggaggagtacgagtacaaactgaaggaactggaacagttctgcagccccatcatgaccaagatgcacaagggaggtggagatggccagcaggctccaaactttggacagcaagctggcggttataagggtcccaccgtcgaggaggtggactaa

SEQ ID NO: 48973 - protein, 635 aa, Drosophila melanogaster
MPAIGIDLGTTYSCVGVFQYGKVEIIANDQGNRTTPSYVAFTDSERLIGDAAKNQVAMNPKNSVFDAKRLIGRRFDDSKIQEDIKHWPFKVINDNGKPKISVEFKGANKCFSPEEISSMVLTKMKETAEAYLGTTVKDAVITVPAYFNDSQRQATKDAGAIAGINVLRIINEPTAAALAYGLDKNLKGERNVLIFDLGGGTFDVSILTIDEGSLFEVRSTAGDTHLGGEDFDNRLVNHFAEEFKRKYKKDLRSNPRALRRLRTAAERAKRTLSSSTEASLEIDALYEGHDFYSKVSRARFEELCGDLFRNTLEPVEKALKDAKMDKSQIHDIVLVGGSTRIPKVQNLLQNFFGGKTLNLSINPDEAVAYGAAIQAAILSGDKSSEIKDVLLVDVAPLSLGIETAGGVMTKLIERNSRIPCKQSKTFTTYADNQPAVTIQVFEGERALTKDNNVLGTFDLTGVPPAPRGVPKIDVTFDLDANGILNVTAKEQGTGNAKNITIKNDKGRLSQADIDRMLSEAEKYAEEDERHRQRIAARNQLETYLFGVKEAAENGGDRISAADKSSIVERCSEAMKWLDSNTTAEKEEYEYKLKELEQFCSPIMTKMHKGGGDGQQAPNFGQQAGGYKGPTVEEVD

SEQ ID NO: 48974 - DNA, 1917 bp, Ceratitis capitata
  CDS (1)..(1917)
atggtagcaatcggtattgatttgggaacaacatactcctgttttggtgtcttccaacatggcaaagtggagattatcgccaacgaccaaggcaaccgcacaacacccagctatgttgccttcacagactccgagcgtctcattggcgacgcagccaagaaccaggtggcgatgaatccaaagaacacagtattcgatgccaagcgattgattgggcgcaagtatgatgacccgaagatcatggaggacgtgaagcactggccattcaaggtggtaagcgatggtggaaagccgaaaatcagcgtggagtacaaagaagaaaacaaacagttcgcaccagaggaaatcagttccatggtgttgaccaagatgaaggagaccgcagaggttatcttgggcacaacagtaacagacgccgtcatcacagtgcctgcttatttcaatgactcacagcgacaggctacaaaggatgctggtcgaattgctggtttgaatgtgttacgaatcatcaacgaacccactgccgcagctttagcttacggtttggacaagaatctaaaaggtgaaaggaatgtgttgatcttcgacttgggcggtggtaccttcgatgtttccatcttaaccattgatgaaggttcgctgttcgaagtacgtgccaccgcaggcgatacacatcttggtgaagacttcgacaaccggctggtgagccacttggcagaggagttcaagcgcaaatataagaaagatctgcgttcgaatccaagagcactgcgtcgtctacgtacagccgctgaacgtgccaaacgtactctctcatccagcacagaggccacaattgaaattgatgcgctgttcgagggaattgacttgtacacaaaagtatcgcgagcacgcttcgaggaactgtgtgctgatttgttccgtcaaaccttggaaccagtcgagaaggctctgaatgatgcgaagatggacaagaaccagatacatgtatacgtcttggttggtggttccacacgtataccaaaggtgcaacgtctactgcagtcgttcttctgcggcaagagcttgaacctctctatcaaccccgacgaggcggtggcatatggtgcagcagtccaagcagctattctcagtggcgacaagagcactgaaattcaggacgtgctattggtcgatgtagcaccactgtccctgggtatcgagacggctggtggtgtaatggcgaagatcattgaaagaaattgtcgcattccatgcaaacaaactcaaacattttcaacatactcggacaaccaacctggtgttaacattcaggtgtatgaaggtgaacgtgtgatgaccaaagacaacaaccgtttgggcaccttcgacctttccggcattccacctgcaccacgtggagtaccacagatagaggttaccttcgacgtggacgcaaatggtaataacttgaatgtgtcggcgaaggaaatgagttcgggcaatgccaaaaacataaccatcaagaacgacaaaggacgtctatcacaagccgaaatcgatcgtatggtgaacgaggcgggacgctatgctgaagaagatgagcgccaacgcaataaaatcgcagccagaaataatttggagagttatgtgttggcggtgaagcaggcctggacaacgctggtggacaaactgagtgagcgggagaagagcgaagtgacgaaggcttgtgatgacacaatcaaatggctcgatgctacacgtttggccgacaaagaagagtacgaagacaagatgaacacactgaccaaactgtgcacccccatcatgacgaaattgcacagtggtggtggcgcgggtcagggagcgtcctgcggtcaacaggctggcggattcaatggtggtcacactggacctaccgtggaggaagtagattaa

SEQ ID NO: 48975 - protein, 638 aa, Ceratitis capitata
MVAIGIDLGTTYSCFGVFQHGKVEIIANDQGNRTTPSYVAFTDSERLIGDAAKNQVAMNPKNTVFDAKRLIGRKYDDPKIMEDVKHWPFKVVSDGGKPKISVEYKEENKQFAPEEISSMVLTKMKETAEVILGTTVTDAVITVPAYFNDSQRQATKDAGRIAGLNVLRIINEPTAAALAYGLDKNLKGERNVLIFDLGGGTFDVSILTIDEGSLFEVRATAGDTHLGEDFDNRLVSHLAEEFKRKYKKDLRSNPRALRRLRTAAERAKRTLSSSTEATIEIDALFEGIDLYTKVSRARFEELCADLFRQTLEPVEKALNDAKMDKNQIHVYVLVGGSTRIPKVQRLLQSFFCGKSLNLSINPDEAVAYGAAVQAAILSGDKSTEIQDVLLVDVAPLSLGIETAGGVMAKIIERNCRIPCKQTQTFSTYSDNQPGVNIQVYEGERVMTKDNNRLGTFDLSGIPPAPRGVPQIEVTFDVDANGNNLNVSAKEMSSGNAKNITIKNDKGRLSQAEIDRMVNEAGRYAEEDERQRNKIAARNNLESYVLAVKQAWTTLVDKLSEREKSEVTKACDDTIKWLDATRLADKEEYEDKMNTLTKLCTPIMTKLHSGGGAGQGASCGQQAGGFNGGHTGPTVEEVD

SEQ ID NO: 48976 - DNA, 1953 bp, Chlamydomonas reinhardtii
  CDS (1)..(1953)
atgggcaaggaggcccccgctatcggtattgacctgggcaccacgtacagctgcgtgggtgtctggcagaatgaccgcgtggagattattgccaacgatcagggcaaccgcaccactccctcgtacgtggccttcacggacactgagcgtctgattggtgatgccgccaagaaccaggtcgctatgaacccgcgccacacggtgttcgacgccaagcgcctgattggccgcaagttctcggaccccattgtccaggcggacattaagctgtggcctttccaggttcgcgccggcgcgcacgatgtgcccgagatcgttgtctcctacaagaacgaggagaaggtcttcaaggctgaggagatctcctcgatggtgcttatcaagatgaaggagaccgctcaggcttccctgggcgctgaccgcgaggtcaagaaggccgtggtgaccgtgcccgcctacttcaacgactcccagcgccaggccaccaaggatgccggtatgattgccggcctggaggtgctgcgcatcatcaacgagcccaccgccgccgccatttcctacggcctggacaagaaggacagcggcctgggcgagcgcaacgtgctcatcttcgacctgggcggcggcaccttcgatgtgtcgctgctgaccattgaggagggcatcttcgaggtcaaggccactgccggtgacacccatctgggcggtgaggacttcgacgagcgcctggtcaaccacttcgccaacgagttccagcgcaagtacaagaaggacctgaagacctcgccccgtgctctgcgccgcctgcgcaccgcctgcgagcgcgctaagcgcacgctgtctagcgccgcgcagaccaccatcgagctggactccctgttcgagggcgtggacttcgccacctccatcacccgcgcccgctttgaggagctgtgcatggacctgttccgcaagtgcatggaccccgtggagaagtgcctgcacgacgccaagatggacaagatgactgtgcacgacgtggtgctggtgggcggctccacccgtatccccaaggtgcagcagctgctgcaggacttcttcaacggcaaggagctgaacaagtcgatcaaccccgacgaggccgtggcctacggcgccgccgtgcaggccgccattctgaccggcgagggcggcgagaaggtgcaggacctgctgctgctggacgtgacgcccctgtcgctgggtctggagaccgccggcggcgtcatgacggtgctcatcccccgcaacaccaccatccccaccaagaaggagcaggtgttctcgacctactccgacaaccagcccggcgtgctgatccaggtctacgagggcgagcgcgcgcgcaccaaggacaacaacctgctgggcaagttcgagctgaccggcatcccgccggcgcctcgcggtgtgccccagatcaacgtgatcttcgacattgacgccaacggtatcctgaacgtgtctgccgaggacaagaccaccggcaacaagaacaagatcacgatcaccaacgacaagggccgcctgtccaaggacgagatcgagcgcatggtgcaggaggcggagaagtacaaggctgacgacgagcagctgaagaaggtggaggccaagaactcgctggagaactacgcctacaacatgcgcaacaccatccgcgaggacaaggtggccagccagctgtccgcctcggacaaggagtcgatggagaaggcgctgaccgccgccatggactggctggaggccaaccagatggccgaggtggaggagttcgagcaccacctcaaggagctggaggggctgtgcaaccccatcatcacccgcctctaccagggcggcgccggcgcgggcggcatgcccggcggcggcgccggcgccggcgctgccccctcgggcggctcgggtgccggccccaagatcgaggaggtcgactaa

SEQ ID NO: 48977 - protein, 650 aa, Chlamydomonas reinhardtii
MGKEAPAIGIDLGTTYSCVGVWQNDRVEIIANDQGNRTTPSYVAFTDTERLIGDAAKNQVAMNPRHTVFDAKRLIGRKFSDPIVQADIKLWPFQVRAGAHDVPEIVVSYKNEEKVFKAEEISSMVLIKMKETAQASLGADREVKKAVVTVPAYFNDSQRQATKDAGMIAGLEVLRIINEPTAAAISYGLDKKDSGLGERNVLIFDLGGGTFDVSLLTIEEGIFEVKATAGDTHLGGEDFDERLVNHFANEFQRKYKKDLKTSPRALRRLRTACERAKRTLSSAAQTTIELDSLFEGVDFATSITRARFEELCMDLFRKCMDPVEKCLHDAKMDKMTVHDVVLVGGSTRIPKVQQLLQDFFNGKELNKSINPDEAVAYGAAVQAAILTGEGGEKVQDLLLLDVTPLSLGLETAGGVMTVLIPRNTTIPTKKEQVFSTYSDNQPGVLIQVYEGERARTKDNNLLGKFELTGIPPAPRGVPQINVIFDIDANGILNVSAEDKTTGNKNKITITNDKGRLSKDEIERMVQEAEKYKADDEQLKKVEAKNSLENYAYNMRNTIREDKVASQLSASDKESMEKALTAAMDWLEANQMAEVEEFEHHLKELEGLCNPIITRLYQGGAGAGGMPGGGAGAGAAPSGGSGAGPKIEEVD

SEQ ID NO: 48978 - DNA, 2203 bp, Cladosporium herbarum
  CDS (49)..(1980)
aacagcttcacgacaaatcttccacaacctcacacacacatcacaatcatggctcccgctatcggtatcgatcttggtactacctactcttgcgtgggtatctaccgcgatgaccgcattgagattatcgccaacgaccagggtaaccgcaccaccccctcgttcgttgccttcaccgacaccgagcgcctcatcggtgactccgccaagaaccaggtcgccataaaccctcacaacaccgtcttcgacgccaagcgcctcattggccgcaagttccaggacgccgaggtccaggccgacatgaagcacttccccttcaaggtcatcgagaaggccggcaagcccgttacccaggtcgagttcaagggcgagaccaaggacttcacccccgaggagatctcctccatgatcctcaccaagatgcgcgagaccgccgagtcctacctcggtggcaccgttaacaacgctgtcatcaccgttcccgcatacttcaacgactctcagcgccaggccaccaaggacgctggtctgatcgccggcctcaacgttctccgtatcatcaacgagcccactgccgctgccattgcctacggtcttgacaagaagcaggagggtgagaagaacgtcctcatttttgatctcgggggtggcaccttcgatgtgtctttcctcaccattgaggagggtatcttcgaggtcaagtccactgccggtgacactcaccttggtggtgaggacttcgacaaccgtctcgtcaaccacttcagtaacgagttcaagcgcaagcacaagaaggacctcagcgacaacgcccgcgccctccgtcgtctccgcactgcttgcgagcgcgccaagcgcactctctcttcttccgcccagacctccattgagatcgactctctcttcgagggtatcgacttcttcacctccaacactcgtgcccgtttcgaggaggtcggacaggacctcttccgcgggaacatggagcccggcgagcgcactctccgtgacgacaagatcgacaagtcctctgtccacgagatcgtcctcggcggtggttccactcgtatccccaaggtccagaagctcgtctccgacttcttcaacgggaaggagccctgcaagtccatcaaccccgatgaggctgttgcctacggtgctgccgtccaggccgctatcctctctggtgacacttcttccaagtccaccaaagagatccttcttctcgacgtcgcgcctctctccctcggcattgagaccgctggtggtgtcatgaccgccctcatcaagcgcaacaccaccatccccaccaagaagtccgagaccttctccaccttctccgacaaccagcctggtgtcctcatccaggtcttcgaaggcgagcgcgctcgcacgaaggacatcaaccttatgggcaagttcgagctctccggcatccggcctgcgccccgtggtgttcctcagatcgaggtcaccttcgaccttgacgccaacggaatcatgaacgtctccgcccttgagaagggtaccggcaagaccaacaagattgtcatcaccaacgacaagggccgcctttccaaggaggagatcgagcgcatgcttgctgacgccgagaagtacaaggaggaggatgaggccgaggctggccgcatccaggccaagaacggcctcgagtcctacgcctactctctcaagaacaccgtctccgaccccaaggttgaggagaagctgtccgctgaggacaaggagaccctcactggcgccatcgacaagactgtcgcctggatcgacgagaaccagaccgccaccaaggaggagtacgaggctgagcagaagcagctcgagagcgttgccaaccccgtcatgatgaagatctacggcgctgagggtggtgctcccggtggcatgcccggccagggtgccggcgctcccccgcccggtgctggcgatgacggccccaccgtcgaggaggtcgactaagcgtctcgcccctctacgatacccaacctgcatcgacaacatggcgttaacgattagaaggtcttttctgctttgctttgctttggtttcaaacttgatgatacaacgacttggtggacacaaaaagcatccccctgtaatgtagcttgcctccttttgaggctttttccaaattaaaactttctgtttaactttgaaaaaaaaaaaaaaaaaaaaaaaaaaa

SEQ ID NO: 48979 - protein, 643 aa, Cladosporium herbarum
MAPAIGIDLGTTYSCVGIYRDDRIEIIANDQGNRTTPSFVAFTDTERLIGDSAKNQVAINPHNTVFDAKRLIGRKFQDAEVQADMKHFPFKVIEKAGKPVTQVEFKGETKDFTPEEISSMILTKMRETAESYLGGTVNNAVITVPAYFNDSQRQATKDAGLIAGLNVLRIINEPTAAAIAYGLDKKQEGEKNVLIFDLGGGTFDVSFLTIEEGIFEVKSTAGDTHLGGEDFDNRLVNHFSNEFKRKHKKDLSDNARALRRLRTACERAKRTLSSSAQTSIEIDSLFEGIDFFTSNTRARFEEVGQDLFRGNMEPGERTLRDDKIDKSSVHEIVLGGGSTRIPKVQKLVSDFFNGKEPCKSINPDEAVAYGAAVQAAILSGDTSSKSTKEILLLDVAPLSLGIETAGGVMTALIKRNTTIPTKKSETFSTFSDNQPGVLIQVFEGERARTKDINLMGKFELSGIRPAPRGVPQIEVTFDLDANGIMNVSALEKGTGKTNKIVITNDKGRLSKEEIERMLADAEKYKEEDEAEAGRIQAKNGLESYAYSLKNTVSDPKVEEKLSAEDKETLTGAIDKTVAWIDENQTATKEEYEAEQKQLESVANPVMMKIYGAEGGAPGGMPGQGAGAPPPGAGDDGPTVEEVD

SEQ ID NO: 48980 - DNA, 2372 bp, Daucus carota
  CDS (284)..(2251)
ggccagaactaacagaacaatctcgacctctctctctccacaagaccacaagcactcgagccggttttagtaaagctgaacccggaactccagagctctagaaccctcgagcttcatctcaactcctctcagctcctctgtttctccgatcttctcgtttcttctctccgaaactcactcctataaaacccatcccacacatcaatctcactccacactgaaaaacaaacataacaaacaaacaaacacaagaacaaaagctttctgtaagtaactgatcacgatggctagcaaaggtggcaaggcgattggaatagatctgggcaccacatacagctgcgtcggcgtctggcaaaacgaccgtgtggagatcatcgccaacgaccaaggcaaccgcaccaccccctcctacttcgccttcaccgacacgagtcgcctcatcggcgacgccaagaaccaagtcgccatgaacccatccaacaccgtcttcgacgccaagcgcctcatcggccggagattcaaccatccttctgtccagtcagacatgaagctctggccccttcaagtcatccccggccccggcgagaagccgatgatcgtcgtcaactataaaggcgagtcgaagcaattcgcggcggaggagatttcgtcgatggtgttaatcaagatgctcgagatagccgaggcgtttctagggcacagtgtgaacgatgctgttgtaacggttcctgcttattttaatgattcgcagaggcaggctacgaaggatacgggggtgatcgcggggctgaatgtcatgaggataatcaacgaaccaaactgcgcccagattgcttatgggctcgataagaagtcgagcaatccccctgagcagaacgtgctaatttttgatcttgggggtggaacttttgatgtttcgttgttgacgattgaagaggggatatacgaagttaaggcccccaagagtgatactcatttgggaggggaggattttgataatcggcttgtgaatcgttttgtcacggagtttctgactaacaataagaaggatattaggtgggaatgcgaggcgttgaggcggttgaggacggcgtgtgagagggcgaagaggactctgtcgtcgtcgacggctcagacgacgatagagattgattcgttgtatgagggggtggatttttatacgacgattacgagggcgaggttcgaggagttgaatatggacttgtttaagaagtgtatggatccggtggagaagtgcttgagggattccaagattgataaggctcaggttcatgaggtggttttggtgggagggtctacgaggattccgaaagttcagcagctcttgcaggacttttttaatgggaaggagctttgcaagagtattaatcctgatgaggctgtggcgtatggagcggcggttcaggccgcaattttgtcgggggagggcaatgagaggtcagacttgttgttgcttgatgtgactccgttgagtcttggtcttgagacggctgggggtgttatgactgttttgattccgaggaatactacgattcctactaagaaggagcagatcttttcgacgtactcggataatcagccgggagttttgatccaggtttatgagggtgagcgtgcgaggactagggataataaactgctggggaaactgctggggaagtttgagctcacgggaattcctcctgccccgagaggtgtgcctcagatcaatgttgtgttcgacattgatgcgaatggaattctgaatgtttttgctgaggacaagactgctggtgtgaagaacaagattacgattactaatgacaacgggaggttgagcaaggatgagattgagaagctggtgaaggaagctgagaagtacaaggcagaggacgaggaggtgaagaagaaagtggaggccaagaatgcattggagaattacgcgtataatatgaggaacactataaaggatgacaagattcctgggaaattggatgcaggggacaaggaaaagatcgagactgctgtgaatgaggctatagagtggctggagaagaatcagttggctgaagttgatgagcttgaagacaagctgaaggaacttgaaggactctgcaatccgatcatcgcgaggctgtaccagggccgcggtgatgttccgatcgggggtcctggcgatatgcctggtggtggctatggtggttctcgtggctcttctggtgctgggccaaagattgaggaagttgactaagtggattgaagagagtcttgagcaattaggaaaaccctttgtgttatgaatgagttcttattactatgttctgtcttttgagtcagttgtagagtgtagaacttagtgctagtcaatgtaa

SEQ ID NO: 48981 - protein, 655 aa, Daucus carota
MASKGGKAIGIDLGTTYSCVGVWQNDRVEIIANDQGNRTTPSYFAFTDTSRLIGDAKNQVAMNPSNTVFDAKRLIGRRFNHPSVQSDMKLWPLQVIPGPGEKPMIVVNYKGESKQFAAEEISSMVLIKMLEIAEAFLGHSVNDAVVTVPAYFNDSQRQATKDTGVIAGLNVMRIINEPNCAQIAYGLDKKSSNPPEQNVLIFDLGGGTFDVSLLTIEEGIYEVKAPKSDTHLGGEDFDNRLVNRFVTEFLTNNKKDIRWECEALRRLRTACERAKRTLSSSTAQTTIEIDSLYEGVDFYTTITRARFEELNMDLFKKCMDPVEKCLRDSKIDKAQVHEVVLVGGSTRIPKVQQLLQDFFNGKELCKSINPDEAVAYGAAVQAAILSGEGNERSDLLLLDVTPLSLGLETAGGVMTVLIPRNTTIPTKKEQIFSTYSDNQPGVLIQVYEGERARTRDNKLLGKLLGKFELTGIPPAPRGVPQINVVFDIDANGILNVFAEDKTAGVKNKITITNDNGRLSKDEIEKLVKEAEKYKAEDEEVKKKVEAKNALENYAYNMRNTIKDDKIPGKLDAGDKEKIETAVNEAIEWLEKNQLAEVDELEDKLKELEGLCNPIIARLYQGRGDVPIGGPGDMPGGGYGGSRGSSGAGPKIEEVD

SEQ ID NO: 48982 - DNA, 1929 bp, Drosophila melanogaster
  CDS (1)..(1929)
atgcctgctattggaatcgatctgggcaccacctactcctgcgtgggtgtctaccaacatggcaaggtggagattatcgccaacgaccagggcaaccgcaccacgccgtcctacgtggctttcacagattcggaacgcctcatcggcgatccggctaagaaccaggtggccatgaaccccagaaacacagtgtttgacgccaagcgactgatcggccgaaaatacgacgaccccaagatcgcagaggacatgaagcactggcctttcaaggttgtaagcgacggcggaaagcccaagatcggggtggagtataagggtgagtccaagagatttgcccccgaggagatcagctcgatggtactgaccaagatgaaggagacggcggaggcatatctgggcgagagcatcacagacgcagtcatcacagttccagcctacttcaacgactcccagcgccaggctaccaaagacgccggtcacatcgccggcctgaatgtgctccgcatcatcaatgagcccacggcggcagcactggcctacggactggacaagaacctcaagggtgagcgcaatgtgcttatcttcgacttgggcggcggcaccttcgatgtctccatcctgaccatcgacgagggatcactgttcgaggtgcgctccaccgccggagacacacacttgggcggcgaggactttgacaaccggctagtcactcatctggcggacgagttcaagcgcaagtacaagaaggatctgcgctccaaccctcgcgccctacgacgcctcagaacagcagctgaacgggccaagcgcacactctcctccagcacggaggccaccatcgagattgacgcactgtttgagggccaagacttctacaccaaagtgagccgcgccaggtttgaggagctgtgcgcggacctcttccgcaacaccctgcagcctgtggagaaggccctcaacgatgccaagatggataagggtcagatccacgacatcgtgctcgtcggcggatccactcgcattcccaaggtgcaaagtctgctgcaggacttcttccacggcaagaacctcaacctatccatcaacccagacgaggcagttgcatacggagctgctgtgcaggccgctatcctcagcggagaccagagcggcaagatccaggacgtgctgctggtggacgtggccccactttcattgggaattgagaccgctggaggtgtaatgaccaagctgatcgagcgcaactgccgcattccgtgcaagcagactaagacgttctccacatacgcggacaaccagcccggagtctccattcaggtgtatgagggcgaacgtgcgatgacgaaggacaacaatgcattgggcaccttcgatctgtccggcattccacctgcaccaaggggtgtgccccagatagaagttaccttcgacttggacgccaatggaatcctgaacgtcagcgccaaggagatgagcacgggcaaggccaagaacatcacgatcaagaacgacaagggacggctctcgcaggccgagattgatcgcatggtgaacgaggctgaaaagtacgccgacgaggacgagaagcatcgccagcgaataacctctagaaatgccctggagagctacgtcttcaatgtgaagcaggccgtggaacaggcacctgctggcaaattggacgaggctgacaagaactccgtcttggacaagtgcaacgacactatccggtggctggacagcaacaccactgccgagaaggaggagttcgaccacaagctggaggagctcacccgccactgctcccccatcatgaccaagatgcatcagcagggtgcgggagctggagctggtggtccgggagcaaactgcggccagcaggcgggaggatttggaggctactctggacccacggtcgaggaggtcgactaa

SEQ ID NO: 48983 - protein, 642 aa, Drosophila melanogaster
MPAIGIDLGTTYSCVGVYQHGKVEIIANDQGNRTTPSYVAFTDSERLIGDPAKNQVAMNPRNTVFDAKRLIGRKYDDPKIAEDMKHWPFKVVSDGGKPKIGVEYKGESKRFAPEEISSMVLTKMKETAEAYLGESITDAVITVPAYFNDSQRQATKDAGHIAGLNVLRIINEPTAAALAYGLDKNLKGERNVLIFDLGGGTFDVSILTIDEGSLFEVRSTAGDTHLGGEDFDNRLVTHLADEFKRKYKKDLRSNPRALRRLRTAAERAKRTLSSSTEATIEIDALFEGQDFYTKVSRARFEELCADLFRNTLQPVEKALNDAKMDKGQIHDIVLVGGSTRIPKVQSLLQDFFHGKNLNLSINPDEAVAYGAAVQAAILSGDQSGKIQDVLLVDVAPLSLGIETAGGVMTKLIERNCRIPCKQTKTFSTYADNQPGVSIQVYEGERAMTKDNNALGTFDLSGIPPAPRGVPQIEVTFDLDANGILNVSAKEMSTGKAKNITIKNDKGRLSQAEIDRMVNEAEKYADEDEKHRQRITSRNALESYVFNVKQAVEQAPAGKLDEADKNSVLDKCNDTIRWLDSNTTAEKEEFDHKLEELTRHCSPIMTKMHQQGAGAGAGGPGANCGQQAGGFGGYSGPTVEEVD

SEQ ID NO: 48984 - DNA, 3272 bp, Glycine max
  CDS (771)..(2708)
ttacatcagttccactatcaatttttttaccccaaacatcaacacaagtgattgaaaattgaaaacatagcatataatgggacaagatttatgcctaatcttaatatgtatgtttttttagttatagattttttaaaaaaaaatgtcagtagttagtttgtatgacctgtccttttttaaaatatcatttactccatagatcaattttatatcaatagaagtttatttagttgatgtctactaaaaagaaaaatatatgatctgtatacaaattttacaatttttttcatgtaaaatttaactataaatttccattctcaaaactactatacttttaaattattatatttatttttttagtattataaattttatgaaaatttaattaaaagttttagcgcacaattttacactgataaaatgcactaaaactttactaaataatagtaaaattatattaataaaataaagtcaacttcaactaaactgctaaagtgaatatttctcgatttctctcttattctgttttctttctggaacatgatcaaacactcgagaactctctagccagctctgctactttcttcctaatctcgtatattctcgaactcactctaatttctaacgcggactataaattgcggtttgggttctctctctctcctcactcacaacaatatctgcacataaaaaaccactctacaaaactctccagtaattctgaaaattttattttcttttggtgaaattaacagctctgtgattgatcaatggcgacaaaggaaggcaaagccataggcatcgatctcggcacgacctacagctgcgtgggcgtgtggcaaaacgaccgcgtcgagatcatccccaacgaccaaggcaaccgaaccactccctcttatgtagccttcaccgacaccgagaggctcatcggagacgcggcgaagaaccaagtcgccatgaacccgcagaacaccgtcttcgacgccaagcgtttaatcggtcgcagattctcagactcttcagttcaaaacgacatgaagctgtggccgtttaaggtcggtggctcgccctgcgacaagcccatgatcgtggtcaattacaaaggcgaggagaagaaattctccgccgaagagatatcttccatggtgttggtcaagatgagggaagtggcagaggcgtttctcggacacgccgtgaagaacgctgttgtcactgtccctgcgtacttcaacgactcgcagaggcaggctacgaaggacgcaggggcaatttcgggtttgaatgtgttgaggattatcaatgaacccaccgctgctgccattgcgtatgggttggataaaaaagcttcgagaaaaggtgaacagaacgtgcttatctttgaccttggtggtggtacttttgatgtttcgatattgaccatcgaggaagggattttcgaagtgaaggccactgctggtgatactcatctcggaggtgaagattttgataacagaatggtgaatcactttgtttctgaattcaaaaggaagaacaagaaggatattagtgggaatgccagagcgttgaggaggttgaggacagcgtgtgagagagccaagagaacgctctcttccacagcgcagacaactattgaaatcgattcactatacgaagggattgatttctatgctacaattacgagagctaggtttgaggagatgaacatggatttgttcaggaagtgcatggagccggtggagaagtgtttgcgtgacgccaagatagacaagagtcaggttcatgaggttgtgcttgttggaggttccactaggatccccaaggttcatcaactcttgcaggatttcttcaacgggaaagagctttgcaagagtattaaccccgatgaagctgtggcgtacggtgctgctgttcaggccgcgatcttgagcggtcaaggagacgagaaggttcaggatttattgctgctggatgttacaccactcagtctcggtcttgaaactgctggtggtgtcatgactgtgctgattccgcggaacacaactattcccacgaagaaggagcagattttctcaacctattctgataaccagcccggggtgttgatccaagtgtttgaaggagaacgggctagaacaaaggacaacaatcttctcgggaagttcgagcttacagggatccctccagcaccaagaggagtgcctcaggtcaatgtctgcttcgacatcgacgctaacgggattctgaatgtctctgcagaggataagactgctggtgtgaagaacaagatcacgatcacaaacgacaagggtaggttgagcaaggaggagattgagaagatggtgaaggatgcagagaggtacaaggcagaggatgaagaggtgaagaaaaaagtggaggctaaaaattcgcttgagaattacgcgtataacatgaggaacacgataaaggatgagaagataggagggaagctgagcccggatgagaagcagaagattgagaaggctgtggaggatgcgatacagtggttggagggaaaccagatggcggaagtggacgagtttgaggacaagcagaaggagttggaagggatctgcaaccccatcattgctaagatgtaccagggtgctgctggacctggtggagatgttcctatgggtgctgacatgcctgctgctggtgctggacctaaaattgaagaagttgactaagcttgtggaatatcactaacttcaactttgggttgcttctttcttattaggtgactctgccagagatgtaagctttaataatgtaagttttagtgatgtaaggtttcatgaatcgtgaataaggtctttttagtttcatgtgaatttcagagatgatggagcttgagattaatgtaatttttatactgtttggctttttaatgtaatgtgatttaaaaaaaaacgtttgtcctgtctgctttatcaatccccggagaaaattatgacgctttcttttcatgcatccaacacctaacacctgtgcttatgttgcctatatttttcaataacatttgaattagcaaaatcacgataaagtatttgtcattcaaaactaggttggcattttcgcattgctcataagttcagctatcccagtgtcagtagccaagataactcaaccacttgcatatgccactatgttatggctcatgttaaacagtgaatgaaaaggagaattcatcttgaaagtctataaagtgaatattttaaaattgatgtgttggatttactttcattgaattg

SEQ ID NO: 48985 - protein, 645 aa, Glycine max
MATKEGKAIGIDLGTTYSCVGVWQNDRVEIIPNDQGNRTTPSYVAFTDTERLIGDAAKNQVAMNPQNTVFDAKRLIGRRFSDSSVQNDMKLWPFKVGGSPCDKPMIVVNYKGEEKKFSAEEISSMVLVKMREVAEAFLGHAVKNAVVTVPAYFNDSQRQATKDAGAISGLNVLRIINEPTAAAIAYGLDKKASRKGEQNVLIFDLGGGTFDVSILTIEEGIFEVKATAGDTHLGGEDFDNRMVNHFVSEFKRKNKKDISGNARALRRLRTACERAKRTLSSTAQTTIEIDSLYEGIDFYATITRARFEEMNMDLFRKCMEPVEKCLRDAKIDKSQVHEVVLVGGSTRIPKVHQLLQDFFNGKELCKSINPDEAVAYGAAVQAAILSGQGDEKVQDLLLLDVTPLSLGLETAGGVMTVLIPRNTTIPTKKEQIFSTYSDNQPGVLIQVFEGERARTKDNNLLGKFELTGIPPAPRGVPQVNVCFDIDANGILNVSAEDKTAGVKNKITITNDKGRLSKEEIEKMVKDAERYKAEDEEVKKKVEAKNSLENYAYNMRNTIKDEKIGGKLSPDEKQKIEKAVEDAIQWLEGNQMAEVDEFEDKQKELEGICNPIIAKMYQGAAGPGGDVPMGADMPAAGAGPKIEEVD

SEQ ID NO: 48986 - DNA, 2458 bp, Trichophyton rubrum
  CDS (176)..(2140)
ggcacgagctcactctcgcaagaaacatcttcttgatcagcatttgatcagagttagcagcttcacacactcgagaagcgtcttaaaaaaaaaacccccccttcaccctctcgcttgtacactaccttgtttgtcacacccaccttcgtacacacagaaacacacaacatccaaaatggctcccgcagttggtatcgatttgggtaccacgtactcctgcgtgggtatcttccgtgatgaccgcattgaaatcatcgccaacgatcagggaaaccgcaccactccctccttcgttgccttcacagacaccgagcgtctcattggagatgccgcaaagaaccaggtcgccatgaaccctatcaacaccgtcttcgatgctaagcgtctcattggacgcaagttcaacgacgccgaggtccaggccgacatgaagcacttccccttcaaggttgtcgagaagagcggcaagcccatcgtccaggtcgagttcaagggcgaggagaagcagttcacccctgaggaaatctcctccatggtcctcaccaagatgcgtgagaccgccgaggcctatctcggtggcaccgtcaacaacgctgtcatcactgtccctgcctacttcaacgactcccagcgtcaagctactaaggacgccggtctcattgccggtctcaacgtcctccgtatcatcaacgagcccactgctggtggtattgcctacggtctcgacaagaaggccgacggtgagcgcaacgttctcattttcgatttcggtggtggtaccttcgatgtctccctcctgaccatcgaagagggtattttcgaagtcaagtccactgccggtgacactcaattgggtggtgaggaatttgacaaccgtctcgtcaaccacttcgtcaacgaattcaagcgcaagaacaagaaggatctctccaccaatgctcgtgctctccgccgtctccgcactgcctgcgagcgtgctaagcgtactctctcttctgctgcccagacctccattgagattgattctctctatgagggtgttgacttctacacctccatcacccgtgctcgtttcgaggagctctgccaggacctcttccgctccactatggagcctgtcgagcgagtcctccgtgacgccaagatcgacaagtcctccgtccacgagattgtcctcgtcggtggttctactcgtatccccaagatccagaagatggtctccgacttcttcaacggcaaggagccaaacaagtccatcaaccccgatgaaggcgttgcctacggtgctgccgtccaggccgccattctctccggtgacacctcctccaagtccaccaacgagatcctcctgctcgatgtcgctcccctctctctcggtatcgagactgctggcggtgtcatgactcctctcatcaagcgcaacaccaccatccctaccaagaagtctgagactttctccaccttctctgacaaccagcctggtgtcttgatccaggtcttcgagggtgagcgtgcccgcaccaaggacaacaacttgctcggcaagttcgagctcactggtatcccacctgccccccgtggtgttcctcagatcgaagtcaccttcgatgttgatgccaacggtattatgaacgtctctgctctcgagaagggcactggaaagaccaacaagattgtcatcaccaacgacaagggccgcctgtccaaggaggagatcgagcgtatgcttgctgaggccgagaagtacaaggccgaggacgaggctgagactgcccgtatcggtgctaagaacggtctcgagtcctatgcttactccctcaagaacaccttgagcgactccaaggtcgacgagaagctcgacgctgccgacaaggagaaactcaagtccgagatcgacaaggttgttgcttggctcgatgacaaccagaccgccaccaaggaggaatatgagtcccagcagaaggagcttgaaggtgttgccaaccccatcatgatgaagttctacggtgctggcggtgagggtggtgctccaggtggcttcccaggtgctggtgctggcggccctggcggtttccccggtgccggtgctggtggcgctgctgcccacgacgacggcccaaccgtcgaggaagtcgattaaatgtctcgctcacaccagtcaaaagagacatccttgttcccaccttaacgggaaaaaaataccaataattccttccaaaaaaaacatacatcatcataccaaggggcgccgggttcatcaatcatgtcatgtcttttccttttctaatgagtgcataccatgtgtcttttttaatgtccctttttcctatgtcctttgatgaccattttcttttctttccaccttcgaacgaaccgagggaaaaaaaaaacacatacacaggatagggcggagggtcggttactgaaatcattcctttcgaaaaaaaaaaaaaaaaaa

SEQ ID NO: 48987 - protein, 654 aa, Trichophyton rubrum
MAPAVGIDLGTTYSCVGIFRDDRIEIIANDQGNRTTPSFVAFTDTERLIGDAAKNQVAMNPINTVFDAKRLIGRKFNDAEVQADMKHFPFKVVEKSGKPIVQVEFKGEEKQFTPEEISSMVLTKMRETAEAYLGGTVNNAVITVPAYFNDSQRQATKDAGLIAGLNVLRIINEPTAGGIAYGLDKKADGERNVLIFDFGGGTFDVSLLTIEEGIFEVKSTAGDTQLGGEEFDNRLVNHFVNEFKRKNKKDLSTNARALRRLRTACERAKRTLSSAAQTSIEIDSLYEGVDFYTSITRARFEELCQDLFRSTMEPVERVLRDAKIDKSSVHEIVLVGGSTRIPKIQKMVSDFFNGKEPNKSINPDEGVAYGAAVQAAILSGDTSSKSTNEILLLDVAPLSLGIETAGGVMTPLIKRNTTIPTKKSETFSTFSDNQPGVLIQVFEGERARTKDNNLLGKFELTGIPPAPRGVPQIEVTFDVDANGIMNVSALEKGTGKTNKIVITNDKGRLSKEEIERMLAEAEKYKAEDEAETARIGAKNGLESYAYSLKNTLSDSKVDEKLDAADKEKLKSEIDKVVAWLDDNQTATKEEYESQQKELEGVANPIMMKFYGAGGEGGAPGGFPGAGAGGPGGFPGAGAGGAAAHDDGPTVEEVD

SEQ ID NO: 48988 - DNA, 1987 bp, Arabidopsis thaliana
  CDS (1)..(1956)
atgtcgggtaaaggagaaggaccagctatcggtatcgatcttggtaccacttactcttgcgtcggagtatggcaacacgaccgtgttgagatcattgctaatgatcaaggaaacagaaccacgccatcttacgttgctttcaccgactccgagaggttgatcggtgacgcagctaagaatcaggtcgccatgaaccccgttaacaccgttttcgacgctaagaggttgatcggtcgtcgtttctctgacagctctgttcagagtgacatgaaattgtggccattcaagattcaagccggacctgccgataagccaatgatctacgtcgaatacaagggtgaagagaaagagttcgcagctgaggagatttcttccatggttcttattaagatgcgtgagattgctgaggcttaccttggtgtcacaatcaagaacgccgttgttaccgttccagcttacttcaacgactctcagcgtcaggctacaaaggatgctggtgtcatcgctggtttgaacgttatgcgaatcatcaacgagcctacagccgccgctattgcctacggtcttgacaaaaaggctaccagcgttggagagaagaatgttcttatcttcgatcttggtggtggcacttttgatgtctctcttcttaccattgaagagggtatctttgaggtgaaggcaactgctggtgacacccatcttggtggggaagattttgacaacagaatggttaaccactttgtccaagagttcaagaggaagagtaagaaggatatcaccggtaacccaagagctcttaggaggttgagaacttcctgtgagagagcgaagaggactctttcttccactgctcagaccaccatcgagattgactctctatacgagggtatcgacttctactccaccatcacccgtgctagatttgaggagctcaacatggatctcttcaggaagtgtatggagccagttgagaagtgtcttcgtgatgctaagatggacaagagcactgttcatgatgttgtccttgttggtggttctacccgtatccctaaggttcagcaattgctccaggacttcttcaacggcaaagagctttgcaagtctattaaccctgatgaggctgttgcctacggtgctgctgtccagggagctattctcagcggtgaaggaaacgagaaggttcaagatcttctattgctcgatgtcactcctctctcccttggtttggaaactgccggtggtgtcatgaccactttgatcccaaggaacacaaccatcccaaccaagaaggaacaagtcttctccacctactcagacaaccaacccggtgtgttgatccaggtgtacgaaggagagagagccagaaccaaggacaacaaccttcttggtaaatttgagctctccggaattcctccagctcctcgtggtgtcccccagatcacagtctgctttgacattgatgccaatggtatcctcaatgtctctgctgaggacaagaccaccggacagaagaacaagatcaccatcaccaatgacaagggtcgtctctccaaggatgagattgagaagatggttcaagaggctgagaagtacaagtccgaagacgaggagcacaagaagaaggttgaagccaagaacgctctcgagaactacgcttacaacatgaggaacaccatccaagacgagaagattggtgagaagctcccggctgcagacaagaagaagatcgaggattctattgagcaggcgattcaatggctcgagggtaaccagttggctgaggctgatgagttcgaagacaagatgaaggaattggagagcatctgcaacccaatcattgccaagatgtaccaaggagctggtggtgaagccggtggtccaggtgcctctggtatggacgatgatgctccccctgcttcaggcggtgctggacctaagatcgaggaggtcgactaatttgttggacattgacctctctctttctcct

SEQ ID NO: 48989 - protein, 651 aa, Arabidopsis thaliana
MSGKGEGPAIGIDLGTTYSCVGVWQHDRVEIIANDQGNRTTPSYVAFTDSERLIGDAAKNQVAMNPVNTVFDAKRLIGRRFSDSSVQSDMKLWPFKIQAGPADKPMIYVEYKGEEKEFAAEEISSMVLIKMREIAEAYLGVTIKNAVVTVPAYFNDSQRQATKDAGVIAGLNVMRIINEPTAAAIAYGLDKKATSVGEKNVLIFDLGGGTFDVSLLTIEEGIFEVKATAGDTHLGGEDFDNRMVNHFVQEFKRKSKKDITGNPRALRRLRTSCERAKRTLSSTAQTTIEIDSLYEGIDFYSTITRARFEELNMDLFRKCMEPVEKCLRDAKMDKSTVHDVVLVGGSTRIPKVQQLLQDFFNGKELCKSINPDEAVAYGAAVQGAILSGEGNEKVQDLLLLDVTPLSLGLETAGGVMTTLIPRNTTIPTKKEQVFSTYSDNQPGVLIQVYEGERARTKDNNLLGKFELSGIPPAPRGVPQITVCFDIDANGILNVSAEDKTTGQKNKITITNDKGRLSKDEIEKMVQEAEKYKSEDEEHKKKVEAKNALENYAYNMRNTIQDEKIGEKLPAADKKKIEDSIEQAIQWLEGNQLAEADEFEDKMKELESICNPIIAKMYQGAGGEAGGPGASGMDDDAPPASGGAGPKIEEVD

SEQ ID NO: 48990 - DNA, 1935 bp, Drosophila simulans
  CDS (1)..(1935)
atgcctgctattggaatcgatctgggcaccacctactcctgcgtgggtgtctaccaacatggcgaggtggagattatcgccaacgaccagggcaaccgcaccacgccgtcctacgtggctttcacagattcggaacgcctgatcggcgatccggccaagaaccaggtggccatgaaccccagaaacacagtgttcgacgccaagcgactcatcggccgaaaatacgacgaccccaagatcgcagaggacattaagcactggcctttcaaggtggtaagcgacggcggaaagcccaagatcggggtggagtataagggtgagtccaagagatttgcccccgaagaaatcagttcaatggtgctggtaaagatgaaggagacggcggaggcgtatctgggtgagagcatcacagatgcagtcatcacagttccagcctacttcaacgactcccagcgccaggctaccaaagacgctggtcacatcgccggcctgaatgtgctccgcatcatcaatgagcccacggcggcagcactggcctacggactggacaagaacctcaagggtgagcgcaatgtgcttatcttcgacttgggcggcggcaccttcgatgtctccatcctgaccatcgacgagggatcactgttcgaggtgcgctccacagccggagacacacacttgggcggcgaggactttgacaaccggctagttacccacctggcggaggagttcaagcgcaagtacaagaaggatctgcgctccaaccctcgcgccctacgacgcctcagaacagcagctgaacgggccaagcgtacactctcctccagcacggaggccaccatcgagatcgacgcattgtttgagggtcaggacttctacaccaaagtgagccgcgccaggtttgaggagctgtgcgcggacctcttccgcaacaccctgcagcctgtggagaaggccctcaacgatgctaagatggacaagggtcagatccacgacatcgtgctcgtcggcggatccactcgcattcccaaggtacaaagtctgctgcaggagttcttccacggcaagaacctcaacctatccatcaacccagacgaggcagtggcatacggagctgctgtgcaggccgctatcctcagcggagaccagaccggcaagatccaggatgtgctgctagtggacgtggccccactttcattgggaattgagaccgctggaggtgtaatgaccaagctgatcgagcgcaactgccgcattccgtgcaagcagactaagacgttctccacatattcggacaaccagcccggagtctccatccaggtgtatgagggcgaacgtgcgatgacgaaggacaacaatgcattgggcaccttcgatctgtccggcattccgcctgcaccaaggggtgtgccccagatagaagttaccttcgatttggacgccaatggaatcctgaacgtcagcgccaaggagatgagcacgggcaaggccaagaacatcacgatcaagaacgacaagggacgcctctcgcaggccgagattgatcgcatggtgaacgaggctgagaagtacgccgacgaggacgagaagcagcgccagcgcattacctctcggaatgccctggaaagctacgtcttcaatgtgaagcaggccgtggatcaggcacctgctggcaaactggacgaggccgacaagaactcagtcctggacaagtgcaacgacactatccggtggcttgacagcaacaccaccgccgagaaggaggagttcgaccacaagctggaggagctcacccgccactgctcccccatcatgaccaagatgcatcagcagggtgcgggagcgggagccggagctggtggtccgggagcaaactgcggccagcaggcgggaggatttggaggctactctggacccacggtcgaggaggtcgactaa

SEQ ID NO: 48991 - protein, 644 aa, Drosophila simulans
MPAIGIDLGTTYSCVGVYQHGEVEIIANDQGNRTTPSYVAFTDSERLIGDPAKNQVAMNPRNTVFDAKRLIGRKYDDPKIAEDIKHWPFKVVSDGGKPKIGVEYKGESKRFAPEEISSMVLVKMKETAEAYLGESITDAVITVPAYFNDSQRQATKDAGHIAGLNVLRIINEPTAAALAYGLDKNLKGERNVLIFDLGGGTFDVSILTIDEGSLFEVRSTAGDTHLGGEDFDNRLVTHLAEEFKRKYKKDLRSNPRALRRLRTAAERAKRTLSSSTEATIEIDALFEGQDFYTKVSRARFEELCADLFRNTLQPVEKALNDAKMDKGQIHDIVLVGGSTRIPKVQSLLQEFFHGKNLNLSINPDEAVAYGAAVQAAILSGDQTGKIQDVLLVDVAPLSLGIETAGGVMTKLIERNCRIPCKQTKTFSTYSDNQPGVSIQVYEGERAMTKDNNALGTFDLSGIPPAPRGVPQIEVTFDLDANGILNVSAKEMSTGKAKNITIKNDKGRLSQAEIDRMVNEAEKYADEDEKQRQRITSRNALESYVFNVKQAVDQAPAGKLDEADKNSVLDKCNDTIRWLDSNTTAEKEEFDHKLEELTRHCSPIMTKMHQQGAGAGAGAGGPGANCGQQAGGFGGYSGPTVEEVD

SEQ ID NO: 48992 - DNA, 2120 bp, Solanum lycopersicum
  CDS (38)..(1990)
ttctttttttctctgataaccgtcgcagtgtaaagcaatggccggaaaaggtgaaggaccggcgatcggaattgatttggggactacgtattcttgtgtcggcgtttggcaacatgatcgtgtggagatcatcgctaatgatcaaggaaacagaactacaccgtcttatgtcggattcactgacactgaacgtctcattggtgatgctgctaagaatcaggtcgccctgaatccaattaacaccgttttcgatgcaaagcggcttattggtaggaggttcagtgatgcgtctgtacaagaggacatgaaattgtggcctttcaaggttattcctggccctggtgataagccaatgattgttgttacctataagggtgaagaaaaggaatttgctgctgaagaaatctcttctatggtcctgacaaagatgaaggaaatcgcagaggccttccttggatctactgtgaaaaatgctgtggtgactgtgccagcctacttcaatgactcacaacgccaggctacaaaggatgcaggagttatttctggactaaatgtcatgcgtattattaatgaacctacagctgctgccattgcctatggattggacaaaaaggctactagtgcaggggagaagaacgtgcttatattcgatcttggtggtggtacttttgatgtatccctcctcactattgaagagggtatctttgaggtgaaggcaacagcaggagacactcaccttggaggtgaggattttgataacagaatggtgaaccattttgtccacgaattcaagagaaagcacaagaaggatatcactggtaacccaagagctctaagaagattaaggacagcttgtgagagggctaagagaactctctcttccactgctcaaacaacaattgaaattgattccctgtatgagggagttgatttctattctaccattacccgtgccagattcgaggagttgaacatggatctcttcaggaagtgtatggaaccagttgagaaatgtttaagggatgccaagatggacaagagcaccgttcatgatgttgttcttgtcggtggatccactagaattcccaaggtgcagcaggttgccatgacgaacttcttcaacggcaaggaactctgcaagagcatcaacccagatgaggctgttgcctatggtgctgcagtgcaagctgccattctcagtggagaaggtaatgagaaggtccaagacttgctgcttttggacgtgacaccactttctcttgggttagaaacggcaggtggtgtgatgactgtcttgattccaaggaacaccacaattcctaccaagaaagagcaggtattttccacttactctgataaccaacccggagtattgattcaggtgtttgaaggtgagagacgagcaagaaccagagacaacaatctgttgggtaaatttgagctctctgttattccccctgctcctagggttgtgcctcagatcacggtctgtttcgacattgatgcaaatggtatcttgaatgtctctgctgaggacaagactactggacagaagaacaagatcacaattaccaatgacaagggtaggttgtcaaaggaagaaattgagaagatggtccaggaagctgaaaagtacaaggcagaagatgaagaactcaagaagaaggtggaggctaaaaattcattggagaactacgcttataacatgagaaacacagtgaaggatgagaaaattggttctaagcttagctcggacgacaagaaaaagattgaggatgccgtcgatcaggcaatttcatggcttgagagcaaccagcttgcagaagttgatgagtttgaggacaagatgaaggagctcgagggcatctgtaatcccatcattgcaaagatgtaccagggtgctggtggtgacgcaggtgttcctatggatgatgatgctccaccatctggtggtagcagtgcaggacctaagattgaggaggttgattaagcggttgataaagatactagttggtttcattttcattagtatagtttagtagattactttgaattggctcttgtttcaagtttggtgttgtaatttcttactgatgtttttaaatagcgatactgagtgc

SEQ ID NO: 48993 - protein, 650 aa, Solanum lycopersicum
MAGKGEGPAIGIDLGTTYSCVGVWQHDRVEIIANDQGNRTTPSYVGFTDTERLIGDAAKNQVALNPINTVFDAKRLIGRRFSDASVQEDMKLWPFKVIPGPGDKPMIVVTYKGEEKEFAAEEISSMVLTKMKEIAEAFLGSTVKNAVVTVPAYFNDSQRQATKDAGVISGLNVMRIINEPTAAAIAYGLDKKATSAGEKNVLIFDLGGGTFDVSLLTIEEGIFEVKATAGDTHLGGEDFDNRMVNHFVHEFKRKHKKDITGNPRALRRLRTACERAKRTLSSTAQTTIEIDSLYEGVDFYSTITRARFEELNMDLFRKCMEPVEKCLRDAKMDKSTVHDVVLVGGSTRIPKVQQVAMTNFFNGKELCKSINPDEAVAYGAAVQAAILSGEGNEKVQDLLLLDVTPLSLGLETAGGVMTVLIPRNTTIPTKKEQVFSTYSDNQPGVLIQVFEGERRARTRDNNLLGKFELSVIPPAPRVVPQITVCFDIDANGILNVSAEDKTTGQKNKITITNDKGRLSKEEIEKMVQEAEKYKAEDEELKKKVEAKNSLENYAYNMRNTVKDEKIGSKLSSDDKKKIEDAVDQAISWLESNQLAEVDEFEDKMKELEGICNPIIAKMYQGAGGDAGVPMDDDAPPSGGSSAGPKIEEVD

SEQ ID NO: 48994 - DNA, 3335 bp, Saccharomyces cerevisiae
  CDS (568)..(2496)
gtcgacaaattgttacgttgtgctttgatttctaaagcgcttcttcacctgcaggttctgagccctaagaaaaaaaatttccttggttgaaaatggcggaaaaaaaaaattcagaaaaagaaataaagcacgtgtgcgcggtgtgtggatgatggtttcatcattgtcaacggcattttcgttcttgtggattgttgtaaactttccagaacattctagaaagaaagcacacggaacgtttagaagctgtcatttgcgttttttctccagattttagttgagaaagtaattaaattattcttctttttccagaacgttccatcggcggcaaaagggagagaaagaacccaaaaagaaggggggccatttagattagctgatcgtttcgaggacttcaaggttatataaggggtggattgatgtatcttcgagaagggattgagttgtagtttcgtttcccaattcttacttaagttgttttattttctctatttgtaagataagcacatcaaaagaaaagtaatcaagtattacaagaaacaaaaattcaagtaaataacagataatatgtcaaaagctgtcggtattgatttaggtacaacatactcgtgtgttgctcactttgctaatgatcgtgtggacattattgccaacgatcaaggtaacagaaccactccatcttttgtcgctttcactgacactgaaagattgattggtgatgctgctaagaatcaagctgctatgaatccttcgaataccgttttcgacgctaagcgtttgatcggtagaaacttcaacgacccagaagtgcaggctgacatgaagcacttcccattcaagttgatcgatgttgacggtaagcctcaaattcaagttgaatttaagggtgaaaccaagaactttaccccagaacaaatctcctccatggtcttgggtaagatgaaggaaactgccgaatcttacttgggagccaaggtcaatgacgctgtcgtcactgtcccagcttacttcaacgattctcaaagacaagctaccaaggatgctggtaccattgctggtttgaatgtcttgcgtattattaacgaacctaccgccgctgccattgcttacggtttggacaagaagggtaaggaagaacacgtcttgattttcgacttgggtggtggtactttcgatgtctctttgttgtccattgaagacggtatctttgaagttaaggccaccgctggtgacacccatttgggtggtgaagattttgacaacagattggtcaaccacttcatccaagaattcaagagaaagaacaagaaggacttgtctaccaaccaaagagctttgagaagattaagaaccgcttgtgaaagagccaagagaactttgtcttcctccgctcaaacttccgttgaaattgactctttgttcgaaggtatcgatttctacacttccatcaccagagccagattcgaagaattgtgtgctgacttgttcagatctactttggacccagttgaaaaggtcttgagagatgctaaattggacaaatctcaagtcgatgaaattgtcttggtcggtggttctaccagaattccaaaggtccaaaaattggtcactgactacttcaacggtaaggaaccaaacagatctatcaacccagatgaagctgttgcttacggtgctgctgttcaagctgctattttgactggtgacgaatcttccaagactcaagatctattgttgttggatgtcgctccattatccttgggtattgaaactgctggtggtgtcatgaccaagttgattccaagaaactctaccattccaacaaagaagtccgagatcttttccacttatgctgataaccaaccaggtgtcttgattcaagtctttgaaggtgaaagagccaagactaaggacaacaacttgttgggtaagttcgaattgagtggtattccaccagctccaagaggtgtcccacaaattgaagtcactttcgatgtcgactctaacggtattttgaatgtttccgccgtcgaaaagggtactggtaagtctaacaagatcactattaccaacgacaagggtagattgtccaaggaagatatcgaaaagatggttgctgaagccgaaaaattcaaggaagaagatgaaaaggaatctcaaagaattgcttccaagaaccaattggaatccattgcttactctttgaagaacaccatttctgaagctggtgacaaattggaacaagctgacaaggacaccgtcaccaagaaggctgaagagactatttcttggttagacagcaacaccactgccagcaaggaagaattcgatgacaagttgaaggagttgcaagacattgccaacccaatcatgtctaagttgtaccaagctggtggtgctccaggtggcgctgcaggtggtgctccaggcggtttcccaggtggtgctcctccagctccagaggctgaaggtccaaccgttgaagaagttgattaagccaattggtgcggcaattgataataacgaaaatgtcttttaatgatctgggtataatgaggaattttccgaacgtttttactttatatatatatatacatgtaacatatattctatacgctatagagaaaggaaatttttcaattaaaaaaaaaatagagaaagagtttcacttcttgattatcgctaacactaatggttgaagtactgctactttaattttatagataggcaaaaaaaaattattcggggcgagctgggaattgaacccagggcctctcgcatgctttgtcttcctgtttaatcaggaagtcgcccaaagcgagaatcataccactagaccacacgcccgtactaattgatgtcttccttttcggatagatgtatatatatacaaattggtcagattgcttttggctccctttcgtacgtaactcatttagactacggatcactagcactatctcaccaagtttttaaaagatccactgtgatcattaaagattctatttcaaataaaaatcaattatcatctatcgactagttttcatggtactagtatattatcatgtacagtgtgagggctcgacatgaagattgagaagacagtcatcgttttcaatggaagctgaaatacaagcactgaataaaaagagataacaatattttaatgtcgtgatattggttcccttctgctggtcttcgaggaaaatttctggtatgttttgtgtatctaatattatataagccttaaatcactacctatttttcagatccgccaaggaagccactctgtgaactttaaataatattacaaattgctacagcatctcgaattc

SEQ ID NO: 48995 - protein, 642 aa, Saccharomyces cerevisiae [sequence omitted]

SEQ ID NO: 48996 - DNA, 1923 bp, Anopheles albimanus
  CDS (1)..(1923)
atgccgtctgcaatcggaattgacctgggaaccacgtactcgtgcgtgggtgtgttccagcatggaaaggtggagatcatcgcaaacgaccagggcaaccgaacaacgccgagctacgttgccttttcggacacggagcgcctcatcggagatgcagccaagaaccaggtggccatgaatccgaccaacacggtgtttgatgccaagcggctgattggacgaaaattcgatgatccgaagatccaggccgatatgaagcactggccattcacggtggtgaacgattgcggcaaacccaagatccgcgtcgagttcaagggcgagcgcaaaacctttgcccccgaggaaatcagttcaatggtcctgacgaagatgaaggaaaccgccgaagcctacttgggacagtcagtgaaaaatgcagtcatcacagtaccagcctacttcaacgacagtcagcgacaggccacaaaggatgctggagccatcgctggcttgaatgtgatgcgcatcatcaacgaaccgacggcggcagctctggcgtacggcttggataagaacctgaagggagaacggaacgtgctgatcttcgatctgggtggcggaaccttcgacgtttccatcctgacgatcgacgagggatcgctgttcgaagtgcgtgctactgctggagacactcatctaggaggcgaagactttgacaaccggatggtggctcacttcgtggaggaattcaaacggaaattcaagaaggatctgtcgaagaatgcccgagccctgcggcgtttgagaacggcatgtgaacgggcaaagcgcacgttgtcctcgagcacggaagcaacgatcgagattgacgccctgatggatggcatcgattattacacgaagatcagccgggcacgattcgaggagctatgctcggacctgttccgttcgacgttgcagccggtggagaaggctctgtccgatgcgaagatggataagagctccattcacgatatcgtcctggtaggaggctcaactcgcataccgaaggtgcagtccctgttgcagaacttcttcgctggaaagtcgttgaacctttcgatcaacccggacgaagcggtagcatacggtgctgcggtgcaagcggccatccttagcggcgacaaggatgacaagattcaggacgtgctgctggtggatgtcgctccattgtcgcttggaatcgagacggccggaggtgtgatgacaaagctgattgaacgcaactcgcgcattccttgcaaacagacgaagatcttctcgacatacgccgacaaccagcccggagtctcgatccaggtgttcgaaggagagcgagccatgaccaaggacaacaatcttttgggacagttcgacctctcgggcattccgccggccccacgtggtgtaccgcagatcgaggtaactttcgatctggacgcaaacggaatcctgaacgtggcagccaaggataagagcagcggaaaggagaagaacatcacgatcaaaaacgataaaggtcgcctatcgcaggccgacatcgatcgaatggtatcggaggccgaaaagtaccgcgaggaggatgagaagcagcgagaggccattgccgcacgcaatcagctcgaggcatactgcttcaacctgaaacaatccctggacggagaaggatcgagcaaactcagcgatgccgatcgcagaacggttcaagatcgatgcgacgagactctgcggtggatcgatggcaacactatggcggagaaggaagagtacgagcaccaaatgcaagagttgtcgcgggtctgcagtcccatcatgaccaaactgcatcagcaagcggctggtggtccgcaaccaaccagctgtggacagcaagctggaggattcggcggaaggacgggaccgacggtggaagaggtggattaa

SEQ ID NO: 48997 - protein, 640 aa, Anopheles albimanus
MPSAIGIDLGTTYSCVGVFQHGKVEIIANDQGNRTTPSYVAFSDTERLIGDAAKNQVAMNPTNTVFDAKRLIGRKFDDPKIQADMKHWPFTVVNDCGKPKIRVEFKGERKTFAPEEISSMVLTKMKETAEAYLGQSVKNAVITVPAYFNDSQRQATKDAGAIAGLNVMRIINEPTAAALAYGLDKNLKGERNVLIFDLGGGTFDVSILTIDEGSLFEVRATAGDTHLGGEDFDNRMVAHFVEEFKRKFKKDLSKNARALRRLRTACERAKRTLSSSTEATIEIDALMDGIDYYTKISRARFEELCSDLFRSTLQPVEKALSDAKMDKSSIHDIVLVGGSTRIPKVQSLLQNFFAGKSLNLSINPDEAVAYGAAVQAAILSGDKDDKIQDVLLVDVAPLSLGIETAGGVMTKLIERNSRIPCKQTKIFSTYADNQPGVSIQVFEGERAMTKDNNLLGQFDLSGIPPAPRGVPQIEVTFDLDANGILNVAAKDKSSGKEKNITIKNDKGRLSQADIDRMVSEAEKYREEDEKQREAIAARNQLEAYCFNLKQSLDGEGSSKLSDADRRTVQDRCDETLRWIDGNTMAEKEEYEHQMQELSRVCSPIMTKLHQQAAGGPQPTSCGQQAGGFGGRTGPTVEEVD

SEQ ID NO: 48998 - DNA, 1962 bp, Arabidopsis thaliana
  CDS (1)..(1962)
atggctggtaaaggagaaggtcctgcgatcggtatcgatcttggtacgacgtactcttgcgtcggagtgtggcaacacgaccgtgttgagatcatcgctaatgatcaaggaaacagaaccactccctcgtacgttgctttcactgactccgagaggttgatcggtgatgctgctaagaaccaagtcgccatgaaccctgttaacactgttttcgatgcaaagaggttgattggtcgtagattcagtgacgcatctgtccaaagtgacagacagttatggcctttcactatcatctccggaactgcagagaaaccaatgattgtcgtcgaatacaagggagaagagaaacagttcgctgctgaagagatctcttccatggttcttattaagatgcgtgagatcgctgaggctttccttggcactacggtcaagaacgctgtcgtcactgttcctgcttacttcaatgactctcaacgtcaggctacaaaggatgctggtgtcatcgctggtttgaatgttttgcgtatcatcaacgagcccactgctgcagccattgcttatggtcttgacaagaaggccacaagtgttggagagaagaatgttttgatctttgatcttggtggtggtacttttgatgtctctcttcttacaatcgaagagggtatctttgaggtgaaggcaacagctggtgatactcatcttggtggggaagattttgacaacagaatggttaaccattttgttcaagagtttaagagaaagaacaagcaggatatcaccggtcaaccgagagccctcaggagattgagaacagcttgtgagagagcaaagaggactctttcttccaccgctcaaacgaccatcgagattgactctttatatggtggagctgacttctattctccaatcacccgtgctagattcgaagagatgaacatggatctctttaggaagtgtatggagcctgttgagaagtgtctccgtgatgctaagatggacaagagcactgttcacgagattgtccttgttggtggatccacccgtatccctaaggttcagcaattgcttcaggacttcttcaacggcaaagagctttgcaagtctatcaaccctgatgaggctgtagcttatggtgcagctgttcaggctgcgatcctaagcggtgaaggaaacgaaaaggtccaagaccttctcttgcttgatgtcacacctctctcccttggtcttgaaactgctggtggtgtcatgaccactttgattcaaagaaacacaaccattccaaccaagaaggaacaggtcttctcaacttattcggacaaccagcctggagtgttgatccaagtttttgaaggtgagagggctaggaccaaggacaacaacctcctcggtaaatttgagctttctggaattccccctgctccacgaggtgtccctcaaatcactgtctgcttcgacattgacgccaatggtatcctcaacgtctctgctgaggacaagaccactggaaagaagaacaagatcacaatcactaatgacaagggtcgtttgtctaaagaggatattgagaagatggttcaagaagcggagaagtacaagtctgaggatgaggagcacaagaagaaggtcgaggccaagaacgctcttgagaactacgcttacaacatgaggaacaccatccgtgatgagaagatcggtgagaagcttccagctgcagacaagaagaaggttgaggactctattgaggaagcaatccaatggctagatggtaaccaattgggtgaagctgacgagtttgaagacaagatgaaggagttggagagtgtttgcaatccgatcatcgctaagatgtaccaaggaggagctggtggtgaagctggtggtcctggagcttctggaatggacgaggatgaagctcctcctgcatcaggtggtgctggtcccaagatcgaggaagtcgactaa

SEQ ID NO: 48999 - protein, 653 aa, Arabidopsis thaliana
MAGKGEGPAIGIDLGTTYSCVGVWQHDRVEIIANDQGNRTTPSYVAFTDSERLIGDAAKNQVAMNPVNTVFDAKRLIGRRFSDASVQSDRQLWPFTIISGTAEKPMIVVEYKGEEKQFAAEEISSMVLIKMREIAEAFLGTTVKNAVVTVPAYFNDSQRQATKDAGVIAGLNVLRIINEPTAAAIAYGLDKKATSVGEKNVLIFDLGGGTFDVSLLTIEEGIFEVKATAGDTHLGGEDFDNRMVNHFVQEFKRKNKQDITGQPRALRRLRTACERAKRTLSSTAQTTIEIDSLYGGADFYSPITRARFEEMNMDLFRKCMEPVEKCLRDAKMDKSTVHEIVLVGGSTRIPKVQQLLQDFFNGKELCKSINPDEAVAYGAAVQAAILSGEGNEKVQDLLLLDVTPLSLGLETAGGVMTTLIQRNTTIPTKKEQVFSTYSDNQPGVLIQVFEGERARTKDNNLLGKFELSGIPPAPRGVPQITVCFDIDANGILNVSAEDKTTGKKNKITITNDKGRLSKEDIEKMVQEAEKYKSEDEEHKKKVEAKNALENYAYNMRNTIRDEKIGEKLPAADKKKVEDSIEEAIQWLDGNQLGEADEFEDKMKELESVCNPIIAKMYQGGAGGEAGGPGASGMDEDEAPPASGGAGPKIEEVD

SEQ ID NO: 49000 - DNA, 1926 bp, Drosophila melanogaster
  CDS (1)..(1926)
atgcctgctattggaatcgatctgggcaccacctactcctgcgtgggtgtctaccagcatggcaaggttgagattatcgccaatgaccagggcaaccgcaccacgccgtcctacgtggctttcacagactcggaacgcctcattggtgatccggccaagaaccaggtggccatgaaccccagaaacacagtgtttgacgccaagcgactcatcggccgaaaatacgacgatcccaaaatcgcagaggacatgaagcactggcctttcaaagttgtaagcgacggcggaaagcccaagatcggggtggagtataagggtgagtccaagagatttgctcccgaggagatcagttcgatggtgctgaccaagatgaaggagacggcggaggcgtatctgggcgagagcatcacggatgcagtcatcacagttccagcttacttcaacgactctcagcgccaggctaccaaagacgccggtcacatcgccggcctgaatgtgctccgcatcatcaatgagcccacggcggcagcattggcctacggactggacaagaacctcaagggtgagcgcaatgtgcttatcttcgacttgggcggcggcaccttcgatgtctccatcctgaccatcgacgagggatctctgttcgaggtgcgctccacagccggagacacacacttgggcggcgaggactttgacaaccggctagtcacccacctggcggaggagttcaagcgcaagtacaagaaggatctgcgctccaaccctcgcgccctacgacgcctcagaacagcagctgaacgggccaagcgcacactctcctctagcacggaggccaccatcgagatcgacgcattgtttgagggccaagacttctacaccaaagtaagccgtgccaggtttgaggagctgtgcgcggacctcttccgcaacaccctgcagcctgtggagaaggccctcaacgatgccaagatggacaagggtcagatccacgacatcgtactcgtcggcggatccactcgcattcccaaggtgcaaagtctgctgcaggagttcttccacggcaagaacctcaacctatccatcaacccagacgaggcagtggcatacggagctgctgtgcaggccgctatcctcagcggagaccagagcggcaagatccaggacgtgctgctggtggacgtggccccactttcattgggaattgagaccgctggaggtgtaatgaccaagctgatcgagcgcaactgtcgcattccgtgcaagcagactaagacgttctccacgtactcggacaaccagcccggagtctccatccaggtgtatgagggcgaacgtgcgatgacgaaggacaacaatgcattgggcaccttcgatctgtccggcattccacctgcaccaaggggtgtgccccagatagaagtaaccttcgacttggacgccaatggaatcctgaacgtcagcgccaaggagatgagcacgggcaaggccaagaacatcacgatcaagaacgacaagggacgcctctcgcaggccgagattgatcgcatggtgaacgaggctgagaagtacgccgacgaggacgaaaagcatcgccagcgcataacctctagaaatgctctggagagctacgtgttcaacgtaaagcagtccgtggagcaggcgcccgctggcaaactggacgaggccgacaagaactccgtcctggacaagtgcaacgaaactattcgatggctggacagcaacaccaccgccgagaaggaggagttcgaccacaagatggaggagctcactcgccactgctcccctatcatgaccaagatgcatcagcagggagcgggagcagctgggggtccgggagccaactgtggccaacaggccggaggatttggcggctactctggacccacagtcgaggaggtcgactaa

SEQ ID NO: 49001 - protein, 641 aa, Drosophila melanogaster
MPAIGIDLGTTYSCVGVYQHGKVEIIANDQGNRTTPSYVAFTDSERLIGDPAKNQVAMNPRNTVFDAKRLIGRKYDDPKIAEDMKHWPFKVVSDGGKPKIGVEYKGESKRFAPEEISSMVLTKMKETAEAYLGESITDAVITVPAYFNDSQRQATKDAGHIAGLNVLRIINEPTAAALAYGLDKNLKGERNVLIFDLGGGTFDVSILTIDEGSLFEVRSTAGDTHLGGEDFDNRLVTHLAEEFKRKYKKDLRSNPRALRRLRTAAERAKRTLSSSTEATIEIDALFEGQDFYTKVSRARFEELCADLFRNTLQPVEKALNDAKMDKGQIHDIVLVGGSTRIPKVQSLLQEFFHGKNLNLSINPDEAVAYGAAVQAAILSGDQSGKIQDVLLVDVAPLSLGIETAGGVMTKLIERNCRIPCKQTKTFSTYSDNQPGVSIQVYEGERAMTKDNNALGTFDLSGIPPAPRGVPQIEVTFDLDANGILNVSAKEMSTGKAKNITIKNDKGRLSQAEIDRMVNEAEKYADEDEKHRQRITSRNALESYVFNVKQSVEQAPAGKLDEADKNSVLDKCNETIRWLDSNTTAEKEEFDHKMEELTRHCSPIMTKMHQQGAGAAGGPGANCGQQAGGFGGYSGPTVEEVD

SEQ ID NO: 49002 - DNA, 2267 bp, Pichia angusta
  CDS (296)..(2227)
agatctgagctgtaggatgcgtcctgtttaagctcggagattgcgtgatcgataaccagggcttattcagaatccaattgagccagatatggcgagttgagtcgggatggaaatttctagaaggatttaagtcgtgcaacaagttaaaaactcgtcgaaatcaattttttgaagctgtaggtcgttctagtacgatcaatggcaatactatatatatgcattgtggtccaactggccaaatcttttcatagaattgttttctaccatttcttagaatagaattatagaaattaatatgtctaaagcagtcggtattgacggaggtactacctattcgtgtgttgcgcactttgccaacgacagagtcgagattatcgccaatgaccaaggtaacagaactactccatcgttcgttgccttcaccgacactgagagattgagcggtgacgccgctaagaaccaggctgccatgaacccagccaacactgtgttcgacgccaagagactgatcggcagaaagtttgacgacccagaggttcagggtgatatcaagcacttcccattcaaggttgtcgacaagagcggcaagccacagatccaggtcgaattcaagggtgagaccaaggtgtttactccagaagaaatctcgtctatggtgttgaccaagatgaaggagaccgccgagtctttcctcggaaccaccgttaaggacgctgttattactgttccagcttacttcaacgattcccaaagacaagccaccaaggatgccggtttgattgctggtcttaatgtcatgagaatcattaacgagcctactgctgccgctattgcctacggtctggacaagaagagccagggtgaacagaacgttttgattttcgatcttggtggaggaaccttcgatgtttcgcttctgtccattgaggacggtattttcgaggtcaaggctactgccggtgatacccacttgggaggtgaagacttcgacaacagactggtgaatcacttcatcaacgaattcaagagaaagaacaagaaggacatttgtggcaaccagagagctttgagaagactcagaaccgcctgtgagagggccaagacaactctttcctcttccgctcagacgtctctggagatcgactcgctgtacgagggtattgacttctacacctcgatcaccagagccagattcgaagagctctgtcaggacctgttcagatctaccttggaccctgtcgagaaggtgctgaaggatgccaagcttgacaagtctcaagtcaacgagattgtgcttgttggtggttccaccagaattccaaaggtccaaaagctcgtttctgacttcttcaacggcaaggagccaaacaagtccatcaacccagatgaggctgttgcctacggtgctgctgtgcaggctgctatcttgaccggtgacacttcctccaagacccaggacctgttgctgttggacgttgctccactctctctcggtatcgagaccgctggtggtgtcatgaccaagctgatcccaagaaacaccaccattccaaccaagaagtctgagatcttctctacgtactccgacaaccaaccaggtgtgttgattcaagtttacgagggtgagagagccagaacaaaggacaacaacttgcttggtaagttcgagctctctggtattccaccagctccaagaggtgttcctcaaattgaggttactttcgatatcgacgccaacggaattttgaatgtgtccgctgttgaaaagggtaccggaaagtctgagaagatcaccatcaccaacgacaagggtagattgtcgcaagaggagatcgagagaatggtctctgaggccgagaagtacaaggaggaggacgagaaggaagctaagagaattgcagctaagaatggtcttgagtcctacgcttactcattgaagcaaaccacttccgagaagcaatttgaagagaaggtggaagcttccaagagagaggctttcaccaaggcttgcgatgacaccattgcttggttggacgagaaccagaccgctactgctgaggagtacgacgacaagagaaaggagttggagcaagctggtaacgaggttctgaaagacttgtatgctgagggcggtgtgccaggcggtgctccaggtggattcccaggtgccggtggcgccccatccactgaggagactcaaggtccaactgttgaggaggttgattagatatagagtaagctaatgtgatctgttatttgtgataggg

SEQ ID NO: 49003 - protein, 643 aa, Pichia angusta
MSKAVGIDGGTTYSCVAHFANDRVEIIANDQGNRTTPSFVAFTDTERLSGDAAKNQAAMNPANTVFDAKRLIGRKFDDPEVQGDIKHFPFKVVDKSGKPQIQVEFKGETKVFTPEEISSMVLTKMKETAESFLGTTVKDAVITVPAYFNDSQRQATKDAGLIAGLNVMRIINEPTAAAIAYGLDKKSQGEQNVLIFDLGGGTFDVSLLSIEDGIFEVKATAGDTHLGGEDFDNRLVNHFINEFKRKNKKDICGNQRALRRLRTACERAKTTLSSSAQTSLEIDSLYEGIDFYTSITRARFEELCQDLFRSTLDPVEKVLKDAKLDKSQVNEIVLVGGSTRIPKVQKLVSDFFNGKEPNKSINPDEAVAYGAAVQAAILTGDTSSKTQDLLLLDVAPLSLGIETAGGVMTKLIPRNTTIPTKKSEIFSTYSDNQPGVLIQVYEGERARTKDNNLLGKFELSGIPPAPRGVPQIEVTFDIDANGILNVSAVEKGTGKSEKITITNDKGRLSQEEIERMVSEAEKYKEEDEKEAKRIAAKNGLESYAYSLKQTTSEKQFEEKVEASKREAFTKACDDTIAWLDENQTATAEEYDDKRKELEQAGNEVLKDLYAEGGVPGGAPGGFPGAGGAPSTEETQGPTVEEVD

SEQ ID NO: 49004 - DNA, 1944 bp, Schizosaccharomyces pombe
  CDS (1)..(1944)
atgagcaaatcaatcggaattgatttgggtactacctactcttgtgttggacacttttccaacaaccgtgtcgaaattatcgccaacgatcaaggtaaccgcactaccccttcttatgttgcctttaccgataccgagcgtctcattggtgacgctgctaagaaccaagtcgccatgaacccccacaacaccatctttgatgccaagcgtttgatcggccgtaaatttgatgatcctgaggttcagtctgacatgaagcactggcccttcaaggtcatctccaaggatggcaagcctgttttgcaggttgagtacaagggtgagaccaagacctttacccccgaggaaatctcatccatggttttgatgaagatgcgtgagactgctgaggcctaccttggtggtaaggtcactgacgccgtcgtcactgtccccgcctatttcaacgactctcaacgtcaagccaccaaggatgctggtcttattgccggtttgaacgttctccgtattatcaacgaacccactgccgccgctattgcctatggtttagaccgtagcaaccaaggcgaatccaatgtcctcattttcgatcttggtggtggtacttttgatgtttctcttcttaccatcgaagagggtatctttgaagttaaggccactgctggtgacactcacttgggtggtgaggactttgactcccgtcttgtaaaccactttatccaagaattcaagcgcaagaacaagaaggatatcaccggtaacgctcgtgctgtccgtcgtcttcgtaccgcttgtgagcgtgctaagcgtactctttcttcttctgctcaagctagcattgagattgactctttgttcgagggtattgacttctacacctccattactcgtgcccgttttgaggagctttgcgccgatctcttccgtaaaaccatggagcccgtcgagcgtgttctccgtgactccaaggtcgacaaggcctccgtcaacgagattgttttagtcggtggttccacccgtattccccgtgttcaaaagcttgtctctgacttcttcaacggtaaggagccttgcaagtccatcaaccctgatgaagctgttgcctatggtgctgccgtccaagctgctgtcttgactggtgacacttctgagaagactcaagatcttttgttgcttgatgttgctcccctttccatgggtatcgagactgctggtggtgtcatgactccccttatcaagcgtaacactaccatccctaccaagaagtccgagatcttttccacttactctgataaccaacccggtgtgttgattcaagtgtttgaaggtgagcgtgctcgtaccaaggactgtaacttgcttggtaagtttgagctttccggtatcccccctgcacctcgtggcgttcctcaaattgaagtcacttttgatgttgatgctaacggtattttgaatgtctctgctctcgagaagggtactggtaagactcagaagattaccatcaccaatgacaagggtcgtctttccaaggaggaaattgaccgtatggttgccgaagctgagaagtacaaggctgaggatgaggccgagtccggtcgtatccaagccaagaaccacttggagtcttatgcttactctcttcgtaactctttggatgatcctaaccttaaggacaaggttgatgcttccgacaaggagaccgttgacaaggctgtcaaagagaccattgaatggctcgacagtaacactactgctgccaaggatgagttcgaggccaagcaaaaggagcttgaaagtgttgctaaccccatcatggctaagatctaccaagctggtggtgctcccggtggcatgcctggcgccgctcctggtgctgctcctggtgctgctcctggtgctgcccctggtggtgacaatggtcctgaggttgaggaggttgattaa

SEQ ID NO: 49005 - protein, 647 aa, Schizosaccharomyces pombe
MSKSIGIDLGTTYSCVGHFSNNRVEIIANDQGNRTTPSYVAFTDTERLIGDAAKNQVAMNPHNTIFDAKRLIGRKFDDPEVQSDMKHWPFKVISKDGKPVLQVEYKGETKTFTPEEISSMVLMKMRETAEAYLGGKVTDAVVTVPAYFNDSQRQATKDAGLIAGLNVLRIINEPTAAAIAYGLDRSNQGESNVLIFDLGGGTFDVSLLTIEEGIFEVKATAGDTHLGGEDFDSRLVNHFIQEFKRKNKKDITGNARAVRRLRTACERAKRTLSSSAQASIEIDSLFEGIDFYTSITRARFEELCADLFRKTMEPVERVLRDSKVDKASVNEIVLVGGSTRIPRVQKLVSDFFNGKEPCKSINPDEAVAYGAAVQAAVLTGDTSEKTQDLLLLDVAPLSMGIETAGGVMTPLIKRNTTIPTKKSEIFSTYSDNQPGVLIQVFEGERARTKDCNLLGKFELSGIPPAPRGVPQIEVTFDVDANGILNVSALEKGTGKTQKITITNDKGRLSKEEIDRMVAEAEKYKAEDEAESGRIQAKNHLESYAYSLRNSLDDPNLKDKVDASDKETVDKAVKETIEWLDSNTTAAKDEFEAKQKELESVANPIMAKIYQAGGAPGGMPGAAPGAAPGAAPGAAPGGDNGPEVEEVD

SEQ ID NO: 49006 - DNA, 2117 bp, Solanum lycopersicum
  CDS (73)..(2007)
ccttcttcaaagctttcattcagatttcagctcctctttcctcagtaactagccgactctaaaagaaaagatatggccggcaagggagaaggaccggcgatcggaattgatctcggtactacatactcatgcgtcggtgtatggcaacacgatcgtgttgaaatcattgccaatgatcaaggtaacagaacgacgccgtcctacgttggtttcactgattctgagcgtctcattggtgatgctgccaaaaatcaagtcgccatgaatcctatcaacacggtttttgatgctaaaaggttgattggtaggaggtttagtgatgcttctgtgcagagtgacatgaagttatggccattcaaggttattcctggtcctggcgataagccaatgattgttgtcaactacaagggtgaggagaagcagttttctgcggaggagatctcatctatggtgctcattaagatgaaagaaatcgctgaagctttccttggaacaactgttaagaatgctgtggttactgttccagcctactctaatgactctcaacgtcaggccaccaaggatgctggtgttatttctggcctaaatgtgatgcgtattatcaatgaaccaacggcagctgctattgcttatggtcttgataagaaggcaaccagtgttggtgagaagaacgtgctcatctttgatcttggtggtggtacatttgatgtctctctactcacaattgaggaaggtatctttgaggtgaaggctactgctggagatactcatcttggaggtgaggactttgacaacaggatggtaaatcattttgttcaggaatttaaaaggaagaacaaaaaggatatcactggtaatcctagggcactgaggaggttgagaactgcatgtgagagggcaaagaggacactttcatccactgctcagaccaccattgagatcgactctctgtatgagggtattgatttttactccaccatcacacgtgctagatttgaagagcttaacatggatctgtttaggaagtgtatggaaccagttgagaagtgtttgagggatgccaagatggacaagagcacagttcatgatgtcgttttggttggtggctccactagaatcccaaaagttcaacaacttttgcaggacttcttcaacgggaaggagctctgcaagagcatcaaccctgatgaggctgttgcttatggtgctgcagtgcaagctgcaattttgagtggcgagggtaatgagaaggtgcaggaccttttgctgttggatgttacccctctttcccttggtctggagacagctggtggtgtcatgactgtgttgattcccagaaacacgactatcccaaccaagaaggagcaggtcttctcaacctactctgacaaccagcctggtgtgttgattcaagtgtatgaaggtgagagaacaaggaccagggacaacaacttgcttggcaaatttgagctttccggtatccctcctgcccccaggggagttcctcaaatcacagtgtgcttcgacattgatgcgaatggtaccttaaatgtctctgctgaggataagaccaccggacagaagaacaagataaccatcactaatgacaagggcagactctcaaaggaggagattgagaagatggttcaggaagcagagaaatacaaatctgaggatgaggagcacaagaagaaggttgaggcaaagaatgctttggagaactacgcgtacaatatgaggaacacaataaaggatgagaagattgcatccaaactgtccgctgatgacaggactaagattgaagatgctattgagcaagccatccagtggcttgatggtaaccagctcgctgaggctgaagagtttgaggacaagatgaaggagctagagagtctttgcaaccctatcattgcaaaaatgtaccaaggagcaggtggtgacatggatgacgaaggtcctgctcctagtggtggtggtgctggtcctaagattgaggaggtggactaagtttgtggttcctatattgttttttattagatacctgtcatttttgtctcagagaactctatgaatatctttttctttcttcaatgaaatacaatgttatatgttgtagt

SEQ ID NO: 49007 - protein, 644 aa, Solanum lycopersicum
MAGKGEGPAIGIDLGTTYSCVGVWQHDRVEIIANDQGNRTTPSYVGFTDSERLIGDAAKNQVAMNPINTVFDAKRLIGRRFSDASVQSDMKLWPFKVIPGPGDKPMIVVNYKGEEKQFSAEEISSMVLIKMKEIAEAFLGTTVKNAVVTVPAYSNDSQRQATKDAGVISGLNVMRIINEPTAAAIAYGLDKKATSVGEKNVLIFDLGGGTFDVSLLTIEEGIFEVKATAGDTHLGGEDFDNRMVNHFVQEFKRKNKKDITGNPRALRRLRTACERAKRTLSSTAQTTIEIDSLYEGIDFYSTITRARFEELNMDLFRKCMEPVEKCLRDAKMDKSTVHDVVLVGGSTRIPKVQQLLQDFFNGKELCKSINPDEAVAYGAAVQAAILSGEGNEKVQDLLLLDVTPLSLGLETAGGVMTVLIPRNTTIPTKKEQVFSTYSDNQPGVLIQVYEGERTRTRDNNLLGKFELSGIPPAPRGVPQITVCFDIDANGTLNVSAEDKTTGQKNKITITNDKGRLSKEEIEKMVQEAEKYKSEDEEHKKKVEAKNALENYAYNMRNTIKDEKIASKLSADDRTKIEDAIEQAIQWLDGNQLAEAEEFEDKMKELESLCNPIIAKMYQGAGGDMDDEGPAPSGGGAGPKIEEVD

SEQ ID NO: 49008 - DNA, 1938 bp, Ustilago maydis
  CDS (1)..(1938)
atgaccaaggccatcggtatcgatcttggtactacctactcctgtgtcgccgtctggcaaaatgaccgtgtcgaggtcattgccaacgaccagggtaaccgcactaccccctcatatgtcgccttcaccgactcggagcgtctcattggagatgccgccaagaaccaggtcgccatgaaccctcacaacaccgtcttcgacgccaagcgtttgatcggccgcaagttcgacgacgctgaggtccagtctgacatgaagcactggcctttcgaggttacctcggtcggtggcaagccccagattcgcattgaatacaagggtgagaagaagactttcactcccgaagagatctcatccatggttctcctcaagatgcgcgagactgccgaggcttacctcggtggtaccgtcaaggatgctgtcgtcactgttcccgcttacttcaacgactcgcagcgacaggccaccaaggatgctggtatcatttcgggccttaacgtgatgcgtatcatcaacgagcccactgctgccgccatcgcttacggtctcgacaagaagaccgagggtgagaagaatgttctcattttcgatctcggtggaggtaccttcgatgtatcgctccttaccattgaggagggtatcttcgaggtcaaggccaccgctggtgacacccatcttggtggtgaggactttgacaaccgtctcgtcaaccactttgtccaggagttcaagcgcaagaacaagaaggacttgaccaccaacgctcgtgcccttcgtcgtcttcgcactgcttgtgagcgtgccaagcgtactctctcgtcggctgctcagacgaccatcgagatcgactcgctctttgagggtatcgacttctacacctcgatcacccgtgcccgtttcgaggagctctgtggtgacctcttctcgcacaccattgagcctgtcgagaaggttctccgcgactccaagattgacaagggctctgttcacgagatcgtccttgtcggtggttctactcgtatccccaaggtgcagaagctgctcaccgacttcttcaacggtcgtgagcttaacaagtcgatcaaccccgatgaggctgttgcctacggtgccgctgtccaggccgccattctttcgggtgacacttcagagaagactcaggacctgctccttctcgatgttgctcctctctcgatgggtatcgagaccgctggtggtgtcttcacacctctcatcaagaggaacaccactgtgcccaccaagaagtcggagatcttctcgacttatgccgacaaccagcccggtgtattgatccaggtgttcgagggcgagcgtgcccgcaccaaagacaacaacttgctcggcaagttcgagctctcgggtatcccccctgctccccgtggtgttcctcagatcgaggtcactttcgacgtcgacgccaacgccattcttaacgtctctgccgccgagaagggcactggcaagtcggagaagatcactatccgcaacgacaagggccgtctgtcatcggagcagatcgaggagatgctcaagcaggccgaacagttcgccgaggaggacaagcaggccctcgagcgcacccaggccaagaacggtctcgagtcgtacatctacaatgtgcgcaacaccacgaacgagccccagctcaaggacaagctcgaggccgctgacaaggaggccctcgagaagattgtcaaggagggtatcgagtggctggacagcaacaccaccgcctcgaccgacgagctcaaggacaagcagaaggagatcgaggagcaggtcaaccccattatgaccaagatctactcggctgctggtggtgcccccggtggcatgcccggtggtgctcctggtgccgctcccggcggtgctgctcccggtggcgacgacggccccactgtcgaggagctcgactaa

SEQ ID NO: 49009 - protein, 645 aa, Ustilago maydis
MTKAIGIDLGTTYSCVAVWQNDRVEVIANDQGNRTTPSYVAFTDSERLIGDAAKNQVAMNPHNTVFDAKRLIGRKFDDAEVQSDMKHWPFEVTSVGGKPQIRIEYKGEKKTFTPEEISSMVLLKMRETAEAYLGGTVKDAVVTVPAYFNDSQRQATKDAGIISGLNVMRIINEPTAAAIAYGLDKKTEGEKNVLIFDLGGGTFDVSLLTIEEGIFEVKATAGDTHLGGEDFDNRLVNHFVQEFKRKNKKDLTTNARALRRLRTACERAKRTLSSAAQTTIEIDSLFEGIDFYTSITRARFEELCGDLFSHTIEPVEKVLRDSKIDKGSVHEIVLVGGSTRIPKVQKLLTDFFNGRELNKSINPDEAVAYGAAVQAAILSGDTSEKTQDLLLLDVAPLSMGIETAGGVFTPLIKRNTTVPTKKSEIFSTYADNQPGVLIQVFEGERARTKDNNLLGKFELSGIPPAPRGVPQIEVTFDVDANAILNVSAAEKGTGKSEKITIRNDKGRLSSEQIEEMLKQAEQFAEEDKQALERTQAKNGLESYIYNVRNTTNEPQLKDKLEAADKEALEKIVKEGIEWLDSNTTASTDELKDKQKEIEEQVNPIMTKIYSAAGGAPGGMPGGAPGAAPGGAAPGGDDGPTVEELD

SEQ ID NO: 49010 - DNA, 1920 bp, Saccharomyces cerevisiae
  CDS (1)..(1920)
atgtctaaagctgtcggtattgatttaggtactacctactcctgtgttgctcacttctctaatgatcgtgttgacattattgccaacgaccaaggtaacagaaccactccatctttcgttggtttcactgatactgaaagattgattggtgacgctgctaagaaccaagctgctatgaacccagctaacactgttttcgacgctaagcgtttgatcggtagaaacttcaatgacccagaagtccaaggtgatatgaagcacttcccattcaagttgatcgatgttgacggtaagccacaaattcaagttgaatttaagggtgaaaccaagaactttaccccagaacaaatctcctccatggtcttgggtaagatgaaggaaactgccgaatcttacttgggtgccaaggtcaatgacgctgtcgtcactgtcccagcttacttcaacgattctcaaagacaagctaccaaggatgctggtaccattgctggtttgaatgtcttgcgtattattaacgaacctaccgccgctgccattgcttacggtttggacaagaagggtaaggaagaacacgtcttgattttcgacttgggtggtggtactttcgatgtctctttgttgtccattgaagacggtatctttgaagttaaggccaccgctggtgacacccatttgggtggtgaagattttgacaacagattggtcaaccacttcatccaagaattcaagagaaagaacaagaaggacttgtctaccaaccaaagagctttgagaagattaagaactgcttgtgaaagagccaagagaactttgtcttcctccgctcaaacttccgttgaaattgactctttgttcgaaggtatcgatttctacacttccatcaccagagccagattcgaagaattgtgtgctgacttgttcagatctactttggacccagttgaaaaggtcttgagagatgctaaattggataaatctcaagtcgatgaaattgtcttggtcggtggttctaccagaattccaaaggtccaaaaattggtcactgactacttcaacggtaaggaaccaaacagatctatcaacccagatgaagctgttgcttacggtgctgctgttcaagctgctattttgactggtgacgaatcttccaagactcaagatctattgttgttggatgtcgctccattatccttgggtattgaaactgctggtggtgtcatgaccaagttgattccaagaaactctaccattccaactaagaaatccgaagttttctctacttatgctgacaaccaaccaggtgtcttgattcaagtctttgaaggtgaaagagccaagactaaggacaacaacttgttgggtaagttcgaattgagtggtattccaccagctccaagaggtgtcccacaaattgaagtcactttcgatgtcgactctaacggtattttgaatgtttccgccgtcgaaaagggtactggtaagtctaacaagatcactattaccaacgacaagggtagattgtccaaggaagatatcgaaaagatggttgctgaagccgaaaaattcaaggaagaagatgaaaaggaatctcaaagaattgcttccaagaaccaattggaatccattgcttactctttgaagaacaccatttctgaagctggtgacaagctagagcaagctgacaaggacgctgtcactaagaaggctgaagaaactattgcttggttagacagcaacaccactgctaccaaggaagaattcgatgaccaattgaaggaattgcaagaggttgccaacccaatcatgtctaaattgtaccaagctggtggtgctccagaaggcgcagctccaggtggtttcccaggtggtgctcctccagctccagaagctgaaggtccaactgtcgaagaagttgattaa

SEQ ID NO: 49011 - protein, 639 aa, Saccharomyces cerevisiae
MSKAVGIDLGTTYSCVAHFSNDRVDIIANDQGNRTTPSFVGFTDTERLIGDAAKNQAAMNPANTVFDAKRLIGRNFNDPEVQGDMKHFPFKLIDVDGKPQIQVEFKGETKNFTPEQISSMVLGKMKETAESYLGAKVNDAVVTVPAYFNDSQRQATKDAGTIAGLNVLRIINEPTAAAIAYGLDKKGKEEHVLIFDLGGGTFDVSLLSIEDGIFEVKATAGDTHLGGEDFDNRLVNHFIQEFKRKNKKDLSTNQRALRRLRTACERAKRTLSSSAQTSVEIDSLFEGIDFYTSITRARFEELCADLFRSTLDPVEKVLRDAKLDKSQVDEIVLVGGSTRIPKVQKLVTDYFNGKEPNRSINPDEAVAYGAAVQAAILTGDESSKTQDLLLLDVAPLSLGIETAGGVMTKLIPRNSTIPTKKSEVFSTYADNQPGVLIQVFEGERAKTKDNNLLGKFELSGIPPAPRGVPQIEVTFDVDSNGILNVSAVEKGTGKSNKITITNDKGRLSKEDIEKMVAEAEKFKEEDEKESQRIASKNQLESIAYSLKNTISEAGDKLEQADKDAVTKKAEETIAWLDSNTTATKEEFDDQLKELQEVANPIMSKLYQAGGAPEGAAPGGFPGGAPPAPEAEGPTVEEVD

SEQ ID NO: 49012 - DNA, 1950 bp, Arabidopsis thaliana
  CDS (1)..(1950)
atggctggtaaaggagaaggtccagcgattggtatcgatctcggtaccacttactcttgcgttggagtttggcaacacgaccgtgttgagatcattgctaatgatcaaggtaacagaaccacaccgtcttacgtcgccttcactgatagcgaacggttgattggtgacgccgcaaagaatcaggtcgccatgaacccgattaacactgttttcgatgcgaagaggttgattggtcgaagatttactgatagctctgttcaaagtgacatcaaattgtggcccttcacgctcaaatctggacctgctgaaaaaccaatgatcgtcgttaactacaagggagaagataaagagttttctgctgaagaaatctcttctatgattctcatcaagatgcgtgagattgctgaagcttaccttggtacaacgatcaagaacgctgttgttactgttccagcttacttcaatgactctcagcgtcaggctactaaggatgctggtgttattgctggtttgaatgttatgcgtatcatcaacgagcctactgcagctgctattgcttacggtcttgacaagaaggctacaagtgttggtgagaagaacgttttgatctttgaccttggtggtggtacattcgatgtctctcttttgaccattgaggaaggtatatttgaagtgaaggcgactgcaggagacactcatcttggtggtgaggatttcgacaacagaatggtgaatcactttgttcaagagttcaagaggaagaacaagaaggacattagtggaaacccgagagctctaaggaggttgagaaccgcctgtgagagagcgaagaggactttgtcatctacggctcagaccaccatcgaaatcgactctctgttcgatggtattgacttctacgctcctatcacccgtgccagattcgaggagcttaacatagatctcttcagaaagtgtatggagcctgttgagaagtgtcttcgtgatgctaagatggacaagaactcaatcgatgatgttgtccttgttggtggctcaacccgtatccccaaggtccagcaattgctcgttgacttcttcaacggcaaggagctttgcaaatctatcaaccccgatgaggctgttgcatatggtgctgctgtccaggcagctattctcagtggtgagggtaatgagaaggttcaagatctcctcttgcttgatgtcacaccactatctcttggtcttgaaaccgctggaggagtcatgactgtcttgatccagaggaatacaaccatccccacaaagaaggagcaagtcttctcaacttattcagacaaccaacccggtgttttgatccaagtctatgaaggcgagagagcaagaaccaaggacaacaacctgttgggtaaattcgagctttctggtatccctccagcaccaagaggtgttcctcaaatcactgtctgttttgacattgatgcaaacggtatcctcaacgtctcggctgaggacaagacaacggggcagaagaacaagatcacaatcaccaacgacaagggaagattgtcaaaggacgagattgagaaaatggttcaagaggcagagaagtacaagtcggaggatgaggagcacaagaagaaggtggacgccaagaatgctcttgagaattacgcatacaacatgaggaacacaatccgtgatgagaagattggcgagaagcttgctggagatgacaagaagaagattgaagactcaattgaagcagccattgaatggctagaagcgaatcagctagcagagtgtgatgaatttgaggacaagatgaaagagctcgagagtatttgcaacccgatcatagcaaagatgtaccaaggcggtgaagctggtggtccagctgcaggaggaatggacgaggatgttcctccttctgccggaggtgcaggtcccaagattgaggaagtcgactaa

SEQ ID NO: 49013 - protein, 649 aa, Arabidopsis thaliana
MAGKGEGPAIGIDLGTTYSCVGVWQHDRVEIIANDQGNRTTPSYVAFTDSERLIGDAAKNQVAMNPINTVFDAKRLIGRRFTDSSVQSDIKLWPFTLKSGPAEKPMIVVNYKGEDKEFSAEEISSMILIKMREIAEAYLGTTIKNAVVTVPAYFNDSQRQATKDAGVIAGLNVMRIINEPTAAAIAYGLDKKATSVGEKNVLIFDLGGGTFDVSLLTIEEGIFEVKATAGDTHLGGEDFDNRMVNHFVQEFKRKNKKDISGNPRALRRLRTACERAKRTLSSTAQTTIEIDSLFDGIDFYAPITRARFEELNIDLFRKCMEPVEKCLRDAKMDKNSIDDVVLVGGSTRIPKVQQLLVDFFNGKELCKSINPDEAVAYGAAVQAAILSGEGNEKVQDLLLLDVTPLSLGLETAGGVMTVLIQRNTTIPTKKEQVFSTYSDNQPGVLIQVYEGERARTKDNNLLGKFELSGIPPAPRGVPQITVCFDIDANGILNVSAEDKTTGQKNKITITNDKGRLSKDEIEKMVQEAEKYKSEDEEHKKKVDAKNALENYAYNMRNTIRDEKIGEKLAGDDKKKIEDSIEAAIEWLEANQLAECDEFEDKMKELESICNPIIAKMYQGGEAGGPAAGGMDEDVPPSAGGAGPKIEEVD

SEQ ID NO: 49014 - DNA, 1923 bp, Anopheles albimanus
  CDS (1)..(1923)
  misc_feature (714)..(714): n is a, g, c or t
atgccttcggcaatcggaatcgatctgggcaccacgtactcctgcgttggtgtgttccagcatggaaaggtggagatcatcgcaaacgaccagggcaaccgaacgacaccgagctacgttgcgttctcggacactgagcgactcatcggagatgcagccaagaaccaagtggccatgaatccgactaacacggtgttcgatgccaagcgactgattggacgcaaattcgacgatccgaagatccaagccgatatgaagcactggccattcacggtggtaaatgacggtggtaagcccaagatccgcgtcgagttcaagggcgagcgcaaaacctttgccccggaggaaatcagttcgatggtgctgacgaagatgaaggaaaccgccgaagcctacctgggccagtcagtaaaaaatgcagtcatcacagtaccagcctacttcaacgacagccagcgacaggccacaaaggatgctggagccatcgctggactgaatgtgatgcgcatcatcaacgaaccgacggcagcagctctggcgtatggcttggataagaacctaaagggagaacgcaatgttctgatcttcgatctgggaggcggcaccttcgacgtgtccattctgacgatcgacgagggatcactgtttgaggtacgatccacggccggagatactcatttgggaggcgaagacttcgataaccgaatggtgggncacttcgtggaagaattcaaacgaaagcacaagaaggatctgtcgaagaacgctcgcgctctgcgtcgtttgagaacggcatgcgagagggcgaagcgcacactgtcctcgagcacggaggcaacgatcgaaattgacgccctgatggatggcatcgattattacacgaagatcagccgggcacgattcgaggagctgtgttctgacttgttccgttcgacgctgcagccagtggaaaaggctctgtccgatgcgaagatggataagagctccattcacgatatcgtcctggtaggagggtccacacgcatcccgaaggtgcagtccttgctgcagaactttttcgctggaaagtctctgaacctttcgatcaatccggatgaggccgtggcttacggtgcagcggtacaggcggccatcctcagcggagacaaggacgataagattcaagacgtactgctagtggatgtcgctccattgtcgcttggaattgagacggccggaggtgtgatgacgaagctgattgagcgcaactcgcgcattccgtgcaaacagacgcagatcttctcgacatacgccgacaaccagcccggcgtttcgatccaggtgttcgagggagaacgagccatgaccaaggacaacaatcttctgggacagtttgacctctcgggcattcccccggctccacgtggtgtgccacagatcgaggtgaccttcgatctggatgccaacggaatcctgaacgtggcagctaaggagaagagcaccggaaaggagaagaatatcacgatcaagaacgacaagggtcgcctatcgcaggccgatatcgatcgaatggtgtcggaagctgagaagttccgcgaggaggatgagaagcaacgcgaacgcatctctgcccgcaatcagctcgaggcttactgcttcaacctgaaacagtcgctggacggcgaaggagcgagtaaactcagcgatgccgatcgcaagacagtgcaggatcgatgcgaagagactctgcgatggatcgacggcaacacaatggccgataaggaggagttcgagcacaagatgcaagagctaacgaaggcatgcagccccatcatgacgaaactgcaccagcaggcagctggcgggccctcgccaagcagttgcgcacagcaagctggaggatttggaggaaggacgggtccgacagtggaagaagtggattaa

SEQ ID NO: 49015 - protein, 640 aa, Anopheles albimanus
MPSAIGIDLGTTYSCVGVFQHGKVEIIANDQGNRTTPSYVAFSDTERLIGDAAKNQVAMNPTNTVFDAKRLIGRKFDDPKIQADMKHWPFTVVNDGGKPKIRVEFKGERKTFAPEEISSMVLTKMKETAEAYLGQSVKNAVITVPAYFNDSQRQATKDAGAIAGLNVMRIINEPTAAALAYGLDKNLKGERNVLIFDLGGGTFDVSILTIDEGSLFEVRSTAGDTHLGGEDFDNRMVGHFVEEFKRKHKKDLSKNARALRRLRTACERAKRTLSSSTEATIEIDALMDGIDYYTKISRARFEELCSDLFRSTLQPVEKALSDAKMDKSSIHDIVLVGGSTRIPKVQSLLQNFFAGKSLNLSINPDEAVAYGAAVQAAILSGDKDDKIQDVLLVDVAPLSLGIETAGGVMTKLIERNSRIPCKQTQIFSTYADNQPGVSIQVFEGERAMTKDNNLLGQFDLSGIPPAPRGVPQIEVTFDLDANGILNVAAKEKSTGKEKNITIKNDKGRLSQADIDRMVSEAEKFREEDEKQRERISARNQLEAYCFNLKQSLDGEGASKLSDADRKTVQDRCEETLRWIDGNTMADKEEFEHKMQELTKACSPIMTKLHQQAAGGPSPSSCAQQAGGFGGRTGPTVEEVD

SEQ ID NO: 49016 - DNA, 1926 bp, Drosophila melanogaster
  CDS (1)..(1926)
atgcctgctattggaatcgatctgggcaccacctactcctgcgtgggtgtctaccagcatggcaaggttgagattatcgccaatgaccagggcaaccgcaccacgccgtcctacgtggctttcacagactcggaacgcctcattggtgatccggccaagaaccaggtggccatgaaccccagaaacacagtgtttgacgccaagcgactcatcggccgaaaatacgacgatcccaaaatcgcagaggacatgaagcactggcctttcaaagttgtaagcgacggcggaaagcccaagatcggggtggagtataagggtgagtccaagagatttgctcccgaggagatcagttcgatggtgctgaccaagatgaaggagacggcggaggcgtatctgggcgagagcatcacggatgcagtcatcacagttccagcttacttcaacgactctcagcgccaggctaccaaagacgccggtcacatcgccggcctgaatgtgctccgcatcatcaatgagcccacggcggcagcattggcctacggactggacaagaatctcaaggatgagcgcaatgtgcttatcttcgacttgggcggcggcaccttcgatgtctccatcctgaccatcgacgagggatctctgttcgaggtgcgctccacagccggagacacacacttgggcggcgaggactttgacaaccggctagtcacccacctggcggaggagttcaagcgcaagtacaagaaggatctgcgctccaaccctcgcgccctacgacgcctcagaacagcagctgaacgggccaagcgcacactctcctctagcacggaggccaccatcgagatcgacgcattgtttgagggccaagacttctacaccaaagtaagccgtgccaggtttgaggagctgtgcgcggacctcttccgcaacaccctgcagcctgtggagaaggccctcaacgatgccaagatggacaagggtcagatccacgacatcgtgctcgtcggcggatccactcgcattcccaaggtgcaaagtctgctgcaggagttcttccacggcaagaacctcaacctatccatcaacccagacgaggcagtggcatacggagctgctgtgcaggccgctatcctcagcggagaccagagcggcaagatccaggacgtgctgctggtggacgtggccccactttcattgggaattgagaccgctggaggtgtaatgaccaagctgatcgagcgcaactgtcgcattccgtgcaagcagactaagacgttctccacgtactcggacaaccagcccggagtctccatccaggtgtatgagggcgaacgtgcgatgacgaaggacaacaatgcattgggcaccttcgatctgtccggcattccacctgcaccaaggggtgtgccccagatagaagtaaccttcgacttggacgccaatggaatcctgaacgtcagcgccaaggagatgagcacgggcaaggccaagaacatcacgatcaagaacgacaagggacgcctctcgcaggccgagattgatcgcatggtgaacgaggctgagaagtacgccgacgaggacgaaaagcatcgccagcgcataacctctagaaatgctctggagagctacgtattcaacgtaaagcagtccgtggagcaggcgcccgctggcaaactggacgaggccgacaagaactccgtcctggacaagtgcaacgaaactattcgatggctggacagcaacaccaccgccgagaaggaggagttcgaccacaagatggaggagctcactcgccactgctcccctatcatgaccaagatgcatcagcagggagcgggagcagctgggggtccgggagccaactgtggccaacaggccggaggatttggcggctactctggacccacagtcgaggaggtcgactaa

SEQ ID NO: 49017 - protein, 641 aa, Drosophila melanogaster
MPAIGIDLGTTYSCVGVYQHGKVEIIANDQGNRTTPSYVAFTDSERLIGDPAKNQVAMNPRNTVFDAKRLIGRKYDDPKIAEDMKHWPFKVVSDGGKPKIGVEYKGESKRFAPEEISSMVLTKMKETAEAYLGESITDAVITVPAYFNDSQRQATKDAGHIAGLNVLRIINEPTAAALAYGLDKNLKDERNVLIFDLGGGTFDVSILTIDEGSLFEVRSTAGDTHLGGEDFDNRLVTHLAEEFKRKYKKDLRSNPRALRRLRTAAERAKRTLSSSTEATIEIDALFEGQDFYTKVSRARFEELCADLFRNTLQPVEKALNDAKMDKGQIHDIVLVGGSTRIPKVQSLLQEFFHGKNLNLSINPDEAVAYGAAVQAAILSGDQSGKIQDVLLVDVAPLSLGIETAGGVMTKLIERNCRIPCKQTKTFSTYSDNQPGVSIQVYEGERAMTKDNNALGTFDLSGIPPAPRGVPQIEVTFDLDANGILNVSAKEMSTGKAKNITIKNDKGRLSQAEIDRMVNEAEKYADEDEKHRQRITSRNALESYVFNVKQSVEQAPAGKLDEADKNSVLDKCNETIRWLDSNTTAEKEEFDHKMEELTRHCSPIMTKMHQQGAGAAGGPGANCGQQAGGFGGYSGPTVEEVD

SEQ ID NO: 49018 - DNA, 1920 bp, Paracentrotus lividus
  CDS (1)..(1920)
atggaatcaggtccagcaattggaattgatttgggtacgacctattcctgtgttggggtttttcagaacggaaaagttgagatcatagcgaatgatcagggaaacagaaccacgcccagctatgttgctttcacagatagtgagagactgattggagatgctgctaagaatcaagtggcaatgaatccaaccaatacaatctttgatgccaagcgtcttattggtcgtcggttcaacgatagtagcatccaagctgacatgaaacactggcctttccgcgtcatcaacaaagacggcaaaccaatgctacaggcagagtatatgggagaaaccaagacactctctccagaagaagtcagctccatggttctgacaaagatgaaggagacagcagaggcttatcttggtaaaaaggtcaccagtgctgtcatcactgtaccagcttacttcaacgatgcacagcgccaggctacgaaagacgcaggtgtgatcgctggaatcaacgtcctcaggatcatcaacgaacccacccgtgccgcccttgcttatggactcgacaagaagttgacaggtgaaaagcacgtcctgatcttcgaccttgggggtggtacattcgatgtctcgctcctggccattgatgatggagtgttcgaggtcctaacgacagctggcgatacccatctgggaggtgaagactttgacaacagactcgtcaaccacacctcgttagaattcaagcgcaagtataagaaggatatgaggaccaacccaagggccattcgtcgtcttcgcactgcagcagaacgagcaaagagaacactctccagcagcgcccaagccaacatcgaagttgactcactctttgaaggtattgacttctacaccagtatcagcagagcccgattcgaggatctgtgctccgacctcttcaggaaatgtctggaaccagtcgaaagggcaatccttgatgcaaagattgacaagaagaagattgacaccgttgtcctagtcggagggtcaacacgaatccccaagatccagaagcttctgcaggagttcttaaacggcaaggaattgaacaagtctatcaatcctgatgaagcagtcgcctatggtgccgctgttcaagcagctatcttgtccggtgacaagagtgatgaaataaaagatgttctcctcgtcgacgttgctccactctctcttggtatcgagacggctggtggtgtgatgtcaaagatcattgaaaggaataccagagtcccgaccaaggcatcacaaaccttcacaacatattcagacaaccagccaggtgtctccattcaggtgtttgaaggtgagagagctatgaccaaagacaacaatcgccttggccagtttgagttgtccggcattcctcctgcaccgagggggcgtccaaagatcgaggtctcttttgacattgacgctaatggtatcatgcatgtcaccgccaaggatgagagctcgggccgtagtaacaagatcaccatcacaaacgacagcgatagactatccaaagacgacatcgaccgcatgatcaatgatgctgagagattcaaggccgaggatgatgctcagcgtgaacgtatcaatgccaagaaccaactcgaagggtatgctttcaatctcaagtccgctgttgatgatgccgcagcgcagagcaagcttagtcctggagataaagagaccgtcacaaaggctgtcaatgacgtcctgcaatggttggacagcaactcgttggctgacaaggaggagttcacttacaagttggaagaactgcagaagacctgttccccgattatggctaagatgcatgcaggcactgggggacctcgaggaggcggaccacagggcttcccatctggaggagcaggaggacctaccgttgaagaggtagattaa

SEQ ID NO: 49019 - protein, 639 aa, Paracentrotus lividus
MESGPAIGIDLGTTYSCVGVFQNGKVEIIANDQGNRTTPSYVAFTDSERLIGDAAKNQVAMNPTNTIFDAKRLIGRRFNDSSIQADMKHWPFRVINKDGKPMLQAEYMGETKTLSPEEVSSMVLTKMKETAEAYLGKKVTSAVITVPAYFNDAQRQATKDAGVIAGINVLRIINEPTRAALAYGLDKKLTGEKHVLIFDLGGGTFDVSLLAIDDGVFEVLTTAGDTHLGGEDFDNRLVNHTSLEFKRKYKKDMRTNPRAIRRLRTAAERAKRTLSSSAQANIEVDSLFEGIDFYTSISRARFEDLCSDLFRKCLEPVERAILDAKIDKKKIDTVVLVGGSTRIPKIQKLLQEFLNGKELNKSINPDEAVAYGAAVQAAILSGDKSDEIKDVLLVDVAPLSLGIETAGGVMSKIIERNTRVPTKASQTFTTYSDNQPGVSIQVFEGERAMTKDNNRLGQFELSGIPPAPRGRPKIEVSFDIDANGIMHVTAKDESSGRSNKITITNDSDRLSKDDIDRMINDAERFKAEDDAQRERINAKNQLEGYAFNLKSAVDDAAAQSKLSPGDKETVTKAVNDVLQWLDSNSLADKEEFTYKLEELQKTCSPIMAKMHAGTGGPRGGGPQGFPSGGAGGPTVEEVD

SEQ ID NO: 49020 - DNA, 1929 bp, Saccharomyces cerevisiae
  CDS (1)..(1929)
atgtcaaaagctgttggtattgatttaggtacaacctattcatgtgttgctcattttgcaaacgatagggttgaaattatcgctaacgatcaaggtaatagaacgacgccttcttatgtggcttttactgacacagaaaggctaattggtgacgctgcgaagaatcaagctgcgatgaacccacataatacagtattcgatgctaagcgtctgatcggacgtaaattcgatgatccagaagtgacgaacgatgctaagcattacccattcaaagtgattgacaagggaggtaaaccggtagtgcaagtggaatataaaggcgagacaaagacatttactccagaagaaatttcctcaatgatcttgacaaagatgaaggagactgctgagaactttttaggaacagaagtgaaagatgctgtagtaacggttccagcctatttcaacgattcacaaaggcaagcaacaaaagatgccggtacaatcgcgggcttgaacgttcttcgtatcattaatgaacctacagctgccgctattgcgtatgggctggacaagaaatcgcagaaggagcacaacgtcttgatctttgatttaggtggtggtacttttgatgtctctctgctatccatagatgaaggtgtctttgaggttaaggctactgctggtgacactcacttgggtggtgaagatttcgatagtaggctggttaactttctagccgaggagttcaaaagaaaaaataaaaaggatctaacaactaaccaaaggtccctaaggaggttaaggaccgccgctgaaagggccaagagaactctgtcttcgtctgctcagacatctatagaaatagattcattatttgagggtatcgatttctatacttccattacaagggcaagatttgaagaattatgtgctgatttgtttagatctacattggagccagtggaaaaagttttggctgattcaaaattagataagtcacaaattgatgaaattgtacttgttggtggttcaacaagaattccaaaagtacaaaaactggtttctgattttttcaatggtaaagaaccaaaccgttcgattaaccctgatgaggccgtcgcttatggtgctgccgtacaggctgccatcttaacgggtgaccagtcgtcgacgacccaagatttactgttgctggatgttgcaccattatctctaggtattgaaactgcaggtggtattatgacaaagttgatcccaagaaattcgactatcccaacaaaaaaatcggaagtgttttccacctacgctgacaaccaacctggtgtgttgatacaagtttttgagggtgaaaggacaaggacaaaagacaacaatctactgggtaaatttgagttgagcggtattccacccgctccaagaggcgtaccacaaattgaagttacatttgatatcgatgcaaatggtattctgaacgtatctgccgttgaaaaaggtactggtaaatctaacaagattacaattactaacgataagggaagattatcgaaggaagatatcgataaaatggttgctgaggcagaaaagttcaaggccgaagatgaacaagaagctcaacgtgttcaagctaagaatcagctagaatcgtacgcgtttactttgaaaaattctgtgagcgaaaataacttcaaggagaaggtgggtgaagaggatgccaggaaattggaagccgccgcccaagatgctataaattggttagatgcttcgcaagcggcctccaccgaggaatacaaggaaaggcaaaaggaactagaaggtgttgcaaaccccattatgagtaaattttacggagctgcaggtggtgccccaggagcaggcccagttccgggtgctggagcaggccccactggagcaccagacaacggcccaacggttgaagaggttgattag

SEQ ID NO: 49021 - protein, 642 aa, Saccharomyces cerevisiae
MSKAVGIDLGTTYSCVAHFANDRVEIIANDQGNRTTPSYVAFTDTERLIGDAAKNQAAMNPHNTVFDAKRLIGRKFDDPEVTNDAKHYPFKVIDKGGKPVVQVEYKGETKTFTPEEISSMILTKMKETAENFLGTEVKDAVVTVPAYFNDSQRQATKDAGTIAGLNVLRIINEPTAAAIAYGLDKKSQKEHNVLIFDLGGGTFDVSLLSIDEGVFEVKATAGDTHLGGEDFDSRLVNFLAEEFKRKNKKDLTTNQRSLRRLRTAAERAKRTLSSSAQTSIEIDSLFEGIDFYTSITRARFEELCADLFRSTLEPVEKVLADSKLDKSQIDEIVLVGGSTRIPKVQKLVSDFFNGKEPNRSINPDEAVAYGAAVQAAILTGDQSSTTQDLLLLDVAPLSLGIETAGGIMTKLIPRNSTIPTKKSEVFSTYADNQPGVLIQVFEGERTRTKDNNLLGKFELSGIPPAPRGVPQIEVTFDIDANGILNVSAVEKGTGKSNKITITNDKGRLSKEDIDKMVAEAEKFKAEDEQEAQRVQAKNQLESYAFTLKNSVSENNFKEKVGEEDARKLEAAAQDAINWLDASQAASTEEYKERQKELEGVANPIMSKFYGAAGGAPGAGPVPGAGAGPTGAPDNGPTVEEVD

SEQ ID NO: 49022 - DNA, 2708 bp, Candida albicans
  CDS (680)..(2521): transl_table=12
caagacttcatctcaaaattcatgaattgtacaataaacgagcaactcagtatctcaccgcttgactcactcaaccacttagaaatatgcaagaaaacaaacctcgaaagtaacttatctaaacacaaatctattacattggtgtacaatgagactcaagttatcgggcattttaaggaaaggaggtcataaacttaattctatcagattccaatcaaaatgctggatatatgtgctacctgttctgtggttttaacaaacccagaactcaagaaattcaaatatcaggcactgttgacaacattggaatagcagtgtatgagattaataagatagtttctggaagtaacaaatagagtgggtttttttttttgtttagggtgcaactacatctaagtaaaaagagatttgggtgccgggtgaacagtgtcctgcacacaggtggtcatcgcactcttgttctttttttttcccaccactataatggtgctcattatagtttgagtggctttctttttctctttctttgggttaattttccactctggcactaaaaaaaaatttcaccatcttcttacaaaattttcttcctcccctttttttcttccttcctttctttctttctttctttttcctctttcccttcaattaacctacacttatacataatcttaataaaatggctgacggtgttttccaaggtgctattggtatcgatttaggtactacttactcatgtgttgctacttatgattctgctgttgaaatcattgccaacgaacaaggtaacagagtcactccatcttttgtcgctttcactagtgaagaaagattgattggtgatgctgctaaaaatcaagctgctttgaacccaaagaacactgttttcgatgctaagcgtttgattggtagagctttcgacgatgaatctgtccaaaaagatatcaagtcatggccattcaaagttgttgaatccaacggtcaaccattgattgaagttgaatacttggacgaaaccaaaactttctccccacaagaaatttcctccatggtcttgaccaagatgaaggaaattgctgaagccaagatcggtaaaaaagttgaaaaagctgttgtcactgttccagcttatttcaatgatgctcaaagacaagccaccaaagatgctggtgccattgccggtttaaacgttttgagaatcattaacgaaccaactgctgccgccattgcttacggtttaggtgccggtaaatctgaaaaagaaagacacgtcttgatcttcgatttgggtggtggtactttcgatgtttccttattgaacattactggtggtgttttcactgttaaagccactgctggtgacactcacttgggtggtcaagatttcgataccaacttgttggaacacttcaagaaggaattccaaaagaagaccggtaacgatatttctagcgatgctagagctttaagaagattgagaactgcttgtgaaagagctaagagatctttgtcttctggtacccaaaccactgttgaaatcgactccttgtttgatggtgaagatttctctgccaacattaccagagccagattcgaagacatcaactctgctttgttcaaatctactttagaaccagttgaacaagttttggaagatgctaaaatcagcaaatcccaagttgacgaagttgtcttggttggtggttccaccagaattccaaaagtccaaaaattgttgtctgacttctttgacggtaaacaattggaaaaatctattaacccagatgaagctgttgcttacggtgctgctgttcaaggtgctatcttgaccggtcaatccactaacgatgacaccaaagacttgttattgttggatgtcattccattgtctctcggtgttgctatgcaaggtaacgttttggccccagttgtcccaagaaacaccactgttccaaccatcaagagaagaactttcaccactgttgctgaccaccaaaccactgttcaattcccagtttaccaaggtgaacgtgtcaactgttctgaaaacaccttgttgggtgaatttgacttgaaaaacatcccaccaatgcaagccggtgaaccagttttggaagccatttttgaagttgatgctaacggtatcttgaaggtcactgctgttgaaaaatccactggtagatctgctaacatcaccatctccaactccattggtagattgtcaactgaagaaatcgaaaaaatgatctctgatgctgaaaaattcaaatcatccgatgatgctttcgccaagagacacgaacaaaaacaaaaattagaagcttacgttgcttccgttgaatctactgtcactgacccagtcttgtctgctaaattgaagaaatctgccaaggacaagatcgaagctgctttgtctgatgctttgcaaactttggaaattgaagaatcttctgctgacgactacagaaaagctgaattagctttgaagagagctgtcaccaaaggtatggctacccgttaagtaaactagatgttgaatgtcatttgttttacgccatattttttttttccctttaacatcattcacccctcccccttactatgtgtgtatatttagtatagtcatccactaatacagaaagtaaaaataaatttgattaaaaaaaaaaaaagaatgctttacaatataatttgtatatttctattca

SEQ ID NO: 49023 - protein, 613 aa, Candida albicans
MADGVFQGAIGIDLGTTYSCVATYDSAVEIIANEQGNRVTPSFVAFTSEERLIGDAAKNQAALNPKNTVFDAKRLIGRAFDDESVQKDIKSWPFKVVESNGQPLIEVEYLDETKTFSPQEISSMVLTKMKEIAEAKIGKKVEKAVVTVPAYFNDAQRQATKDAGAIAGLNVLRIINEPTAAAIAYGLGAGKSEKERHVLIFDLGGGTFDVSLLNITGGVFTVKATAGDTHLGGQDFDTNLLEHFKKEFQKKTGNDISSDARALRRLRTACERAKRSLSSGTQTTVEIDSLFDGEDFSANITRARFEDINSALFKSTLEPVEQVLEDAKISKSQVDEVVLVGGSTRIPKVQKLLSDFFDGKQLEKSINPDEAVAYGAAVQGAILTGQSTNDDTKDLLLLDVIPLSLGVAMQGNVLAPVVPRNTTVPTIKRRTFTTVADHQTTVQFPVYQGERVNCSENTLLGEFDLKNIPPMQAGEPVLEAIFEVDANGILKVTAVEKSTGRSANITISNSIGRLSTEEIEKMISDAEKFKSSDDAFAKRHEQKQKLEAYVASVESTVTDPVLSAKLKKSAKDKIEAALSDALQTLEIEESSADDYRKAELALKRAVTKGMATR

SEQ ID NO: 49024 - DNA, 1842 bp, Schizosaccharomyces pombe
  CDS (1)..(1842)
atgagtgaagtttatgaaggtgctattggtatcgacttgggtactacctactcttgcgttgctgtatgggaaaccgccaatgttgagattatccccaatgaccaaggtgcacgtaccactccctcatttgtcgctttcaccgaaactgagcgtttagtcggtgatgccgccaagaaccaggctgctatgaaccctcgtaacaccgtttttgacgccaagcgtcttattggtcgtcgttacgaagaccctgagactcaaaaggatattaagcactggccctttaaggttattgacaacaatggtatccctaccattgaggttaactatttgggcgagaaaaagcaatttactgctcaagaaatttccgctatggttttgactaagatgaaggagatttccgaagctaagttgaacaagcgtgtcgagaaggctgtcattaccgtccccgcctacttctctgactctcaacgtgctgctactaaggatgctggtgccatcgctggccttaacgttcttcgtatcatcaacgagcccaccgctgctgctattgcttacggtcttgatgccaagtccgacaagcccaaaaacgtcttgattttcgatcttggtggtggtacttttgatgtttctcttttgaagattcaaggtggtgtctttgaagttttggctaccgctggtgacactcacttgggtggtgaagattttgataacgctttggtcgagcactttattcaagaattcaagcgcaagcaaaagattgacatctctgacgatcctcgtgctcttcgtcgtcttcgctctgcttgtgagcgtgctaagcgtgccttgtcttctgttactcaaaccaccgttgaggtcgactctctttccaacggtatcgacttctcttctagcattacccgtgctcgtttcgaggacatcaacgctaccacattcaaggctaccattgatccagtcgctaaggtcttgaaggactccaaggtccctaaggctgatgttcacgacattgtccttgtcggtggttccacccgtattcccaaggttcaaagactcgtttctgatttctttgatggccgtgctttgaacaagtctatcaaccccgatgaggctgtcgcctacggtgctgctgttcaagccgctgtcctcaccaacaaggctgactctgacaaaactcaagatttgcttttgttggatgttgtccccctttccttgggtgttgccatggaaggtaatgttttcggtgttgtttgccctcgcaatactcccattcctaccatcaagaagcgtactttcaccactgttgctgacaaccaaaccaccgttactttccctgtttaccaaggtgaacgtgtcaactgtgctgaaaacgaacctcttggtgagttccaacttactggtatccctcctatgccccgtggtcaagctgagttggaagctactttcgagttggatgccaatggtatcttgaaggttaccgctgttgaaaagaccactggtcgctctgctcacattgaaatcaccaactctgttggtcatctttcttccactaagattcaagagatgattgaaaacgctgacaagttcaagcaacaagacaaggatttcgccaagaaattagaggctaagagccaactcgaatcttacatttctaacattgagactaccatctctgagcccaatgtcatgatgaaattgaagcgtggtgacaagtctaagattgaagcccaattggctgagtgcatgtctcaattagaacttgaggacactaacactgatgctctccgtaaggctgagcttcgtcttaagcgtaccgttcaaaaggcctttgcatcccttcgttag

SEQ ID NO: 49025 - protein, 613 aa, Schizosaccharomyces pombe
MSEVYEGAIGIDLGTTYSCVAVWETANVEIIPNDQGARTTPSFVAFTETERLVGDAAKNQAAMNPRNTVFDAKRLIGRRYEDPETQKDIKHWPFKVIDNNGIPTIEVNYLGEKKQFTAQEISAMVLTKMKEISEAKLNKRVEKAVITVPAYFSDSQRAATKDAGAIAGLNVLRIINEPTAAAIAYGLDAKSDKPKNVLIFDLGGGTFDVSLLKIQGGVFEVLATAGDTHLGGEDFDNALVEHFIQEFKRKQKIDISDDPRALRRLRSACERAKRALSSVTQTTVEVDSLSNGIDFSSSITRARFEDINATTFKATIDPVAKVLKDSKVPKADVHDIVLVGGSTRIPKVQRLVSDFFDGRALNKSINPDEAVAYGAAVQAAVLTNKADSDKTQDLLLLDVVPLSLGVAMEGNVFGVVCPRNTPIPTIKKRTFTTVADNQTTVTFPVYQGERVNCAENEPLGEFQLTGIPPMPRGQAELEATFELDANGILKVTAVEKTTGRSAHIEITNSVGHLSSTKIQEMIENADKFKQQDKDFAKKLEAKSQLESYISNIETTISEPNVMMKLKRGDKSKIEAQLAECMSQLELEDTNTDALRKAELRLKRTVQKAFASLR

SEQ ID NO: 49026 - DNA, 1842 bp, Saccharomyces cerevisiae
  CDS (1)..(1842)
atggctgaaggtgttttccaaggtgctatcggtatcgatttaggtacaacatactcttgtgttgctacttatgaatcttccgttgaaattattgccaacgaacaaggtaacagagttactccatctttcgttgccttcaccccacaggaaagattgatcggtgatgctgccaagaaccaagctgctttgaacccaagaaacactgtttttgatgctaagcgtttgattggtagaagattcgacgacgagtctgtccaaaaggacatgaagacctggcctttcaaggttatcgacgtcgatggtaacccagtcattgaagtccaatacttggaagaaaccaagactttctccccacaagaaatttccgctatggtcttgaccaagatgaaggaaattgctgaagctaagattggtaagaaggttgaaaaggctgtcattactgtcccagcttactttaacgatgcccaaagacaagctaccaaggatgccggtgccatttctggtttgaacgttttgcgtatcatcaacgaacctactgccgctgctattgcttacggtctaggtgctggtaagtccgaaaaggaaagacatgttttgattttcgatttgggtggtggtactttcgatgtttccttgttgcacattgctggtggtgtttacactgttaaatctacttccggtaacactcacttgggtggtcaagatttcgacaccaacttgttggaacacttcaaggctgaattcaagaagaagactggtttggacatctccgacgatgccagagctttgagaagattgagaactgctgctgaaagagctaagagaaccttatcttctgtcactcaaactaccgttgaagttgactctttgtttgacggtgaagatttcgaatcctctttgactagagctagatttgaagacttgaacgccgcattgttcaagtctactttggaacctgttgaacaagttttgaaggatgctaagatctctaagtctcaaatcgacgaagttgtcttggttggtggttctaccagaattccaaaggtccaaaagttgttgtctgacttctttgacggtaagcaattggaaaaatctattaacccagatgaagctgttgcttacggtgctgctgttcaaggtgctatcttgactggccaatccacatctgacgaaaccaaggacttgttgttgttagatgttgctccattatctctaggtgttggtatgcaaggtgacattttcggtattgttgtcccaagaaacacaactgttccaaccatcaagagaagaaccttcacaactgtcagtgacaaccaaaccaccgttcaattcccagtctaccaaggtgaacgtgtcaactgtaaagaaaacactttgttgggtgaattcgacttgaagaacatcccaatgatgccagctggtgaaccagtcttggaagctatcttcgaagttgatgctaacggtatcttgaaggttactgccgtcgaaaagtctaccggtaagtcttctaacatcactatctccaacgctgtcggtagattgtcttctgaagaaattgaaaagatggttaaccaagccgaagagttcaaggctgctgatgaagcttttgctaagaagcacgaagctagacaaagactagaatcctacgtcgcttccatcgaacaaaccgtcactgacccagtcttgtcttctaaattgaagagaggttccaagtccaagatcgaagctgctttgtccgatgctttggctgctttgcaaatcgaagacccatccgctgatgagttgagaaaggcagaagttggtttgaagagagttgtcaccaaggccatgtcttctcgttaa

SEQ ID NO: 49027 - protein, 613 aa, Saccharomyces cerevisiae
MAEGVFQGAIGIDLGTTYSCVATYESSVEIIANEQGNRVTPSFVAFTPQERLIGDAAKNQAALNPRNTVFDAKRLIGRRFDDESVQKDMKTWPFKVIDVDGNPVIEVQYLEETKTFSPQEISAMVLTKMKEIAEAKIGKKVEKAVITVPAYFNDAQRQATKDAGAISGLNVLRIINEPTAAAIAYGLGAGKSEKERHVLIFDLGGGTFDVSLLHIAGGVYTVKSTSGNTHLGGQDFDTNLLEHFKAEFKKKTGLDISDDARALRRLRTAAERAKRTLSSVTQTTVEVDSLFDGEDFESSLTRARFEDLNAALFKSTLEPVEQVLKDAKISKSQIDEVVLVGGSTRIPKVQKLLSDFFDGKQLEKSINPDEAVAYGAAVQGAILTGQSTSDETKDLLLLDVAPLSLGVGMQGDIFGIVVPRNTTVPTIKRRTFTTVSDNQTTVQFPVYQGERVNCKENTLLGEFDLKNIPMMPAGEPVLEAIFEVDANGILKVTAVEKSTGKSSNITISNAVGRLSSEEIEKMVNQAEEFKAADEAFAKKHEARQRLESYVASIEQTVTDPVLSSKLKRGSKSKIEAALSDALAALQIEDPSADELRKAEVGLKRVVTKAMSSR

SEQ ID NO: 49028 - DNA, 1926 bp, Drosophila melanogaster
  CDS (1)..(1926)
atgcccaaattaccagcggttggcattgatcttggtaccacgtactcgtgtgtcggtgtctttcagcatggcaaggtggagatcatcgccaacgaccagggcaatcgaaccacgcccagctatgtggctttcacggagtcggagcgtctgatcggcgatgcggccaagaaccaggtggccatgaatcccaacaacacgatctttgatgccaagcggctgattggccgccgtttcgacgacgccaccgtccagtcggacatgaagcattggcccttcgaggtgttcgccgagaacggaaagccacgcatccgtgtggagtacaagggcgaacggaagagcttctatccggaggaggtgtcctcgatggtgctgacgaaaatgcgagagaccgcggaggcctacctgggcggcacggtgacagatgcggtggtcaccgttccggcgtacttcaacgactcccagcgccaggccaccaaggatgcgggtgccattgcaggattgaatgtccttcgcattatcaacgaaccaacggcggcggccatagcctacggcttggataagcagggcaccagcgaacgaaatgtcctgatcttcgaccttggtggtggcaccttcgacgtatccgtgctgaccatcgaggatggcatcttcgaggtgaaggcaaccgctggcgacacccatctcggcggcgaggacttcgataaccggctggtgaaccacttcgtacaggagtttcagcgcaaacataagaaggatctgggccagaacaagcgggctttgaggcgcctccgaaccgcgtgtgaaagggcaaaacgcaccctctcctcatccacacaggccagcatcgagatcgattccctctttgagggcgtcgacttctacacctcggtgacacgggcccgcttcgaagagttgaatggcgatctgttccgaggtaccatggaaccagtggccaaggcgctgcgtgatgccaagatggacaagggccagatacatgacatcgtccttgtgggtggctccaccaggattcccaaagtgcaacgcctgctgcaggactttttcaacggcaaggaactaaacaagtccatcaatcccgacgaggcggtggcctatggtgctgcagtgcaggcggccatcctccatggcgataaatcggaggcagtgcaggatctgctcctgctggatgtcactcctctgtctctgggtattgagactgctggcggagtgatgaccacgctgattaagaggaacaccaccatacccaccaagcaaacgcaaatctttaccacttatgcggacaaccagccaggtgtgcttatccaggtgttcgagggcgagcgggcgatgacgcgagataacaacagcctgggtaagtttgaactctcggcaattccaccggctccacgcggagtgccccaggtggaggtaacgtttgacatcgatgccaatggaatactcaatgtgacggcactggagaagtcgacgggaaaggagaaccgtatcactatcaccaatgacaagggccgtctctccaaggaggacatcgagcgaatggtcaatgatgcggaggcttatcgccaggcggatgagcagcaacgcgaccgcatcaatgccaagaatcagctggagtcgtattgtttccagctgcgctccactctggacgatgagcatctgagcagccgttttagccccgcggatcgggagaccatccagcagcggtccagtgaaacaattgcctggctggatgccaatcaactggccgaacggcaggagttcgagcacaagcagcaggaactggagagaatctgcagtccgatcatcacgaggttgtaccagggcgctggaatggcaccacctccaacagccggaggctccaatccaggagcaactggcggctcgggtccaaccattgaggaggttgattag

SEQ ID NO: 49029 - protein, 641 aa, Drosophila melanogaster
MPKLPAVGIDLGTTYSCVGVFQHGKVEIIANDQGNRTTPSYVAFTESERLIGDAAKNQVAMNPNNTIFDAKRLIGRRFDDATVQSDMKHWPFEVFAENGKPRIRVEYKGERKSFYPEEVSSMVLTKMRETAEAYLGGTVTDAVVTVPAYFNDSQRQATKDAGAIAGLNVLRIINEPTAAAIAYGLDKQGTSERNVLIFDLGGGTFDVSVLTIEDGIFEVKATAGDTHLGGEDFDNRLVNHFVQEFQRKHKKDLGQNKRALRRLRTACERAKRTLSSSTQASIEIDSLFEGVDFYTSVTRARFEELNGDLFRGTMEPVAKALRDAKMDKGQIHDIVLVGGSTRIPKVQRLLQDFFNGKELNKSINPDEAVAYGAAVQAAILHGDKSEAVQDLLLLDVTPLSLGIETAGGVMTTLIKRNTTIPTKQTQIFTTYADNQPGVLIQVFEGERAMTRDNNSLGKFELSAIPPAPRGVPQVEVTFDIDANGILNVTALEKSTGKENRITITNDKGRLSKEDIERMVNDAEAYRQADEQQRDRINAKNQLESYCFQLRSTLDDEHLSSRFSPADRETIQQRSSETIAWLDANQLAERQEFEHKQQELERICSPIITRLYQGAGMAPPPTAGGSNPGATGGSGPTIEEVD

SEQ ID NO: 49030 - DNA, 1902 bp, Drosophila melanogaster
  CDS (1)..(1902)
atgggtaaaattccggccatcggcatcgacttgggcaccacctactcctgtgtgggagtttggcagaacagcaaggtggagatcatcgccaacgatcagggaaaccgcaccacgccctcctatgtggcattcaacgagacggagcgcttgattggcgatccggccaagaaccaggtggccatgaatgccaagaacacggttttcgatgccaagcgattgattggacggaagttcgacgacaagaagatacaggaggacctgaagctctggcccttcaaggtcatcaatgagaagggaaagccgaagatcgaggtggagttcaagggcgaacggaagcgatttgcccccgaggagatcagttcgatggtgctgaccaagatgcgcgaaatcgccgaggtctatctgggtggcaaggtgaaggacgcggtggtcacagtgccggcctacttcaatgatagccagcgtcaggcgaccaaggatgcgggctccattgctggactgaatgtgctgaggatcatcaatgagcccactgcggcagctctggcctatgggctggataagaatcttaagggagagcgtaatgtgctcatcttcgacttgggcggcggcaccttcgacgtctccgtactgagcatcgatgagggttccctgttcgaggtgaaggccacggccggcgatacccatttgggtggtgaggatttcgacaaccggttggtaaatcattttgccgaggaattcaagcggaagcacaagtcggacatcaagggaaatgccagagcgctgagacgcctgagaacggcttgtgaacgggcgaagaggacgttgtcctccagcacggaggcatccttggagattgatgccctgcacgagggcattgacttttactcgaaaatttcgagagcgcgtttcgaggagctgaacatggacctcttccggtccaccatgcagcccgtggagcgggcactgagcgatgccaagatggacaagaaggccattcatgatgtggtcctggtgggcggctccacgcgtattcccaagattcagaaactactgcaagatctgtttggtggcaagcagctaaatctttcaatcaatcccgatgaggcggtggcttatggagccgccgtacaggctgccattctcaccggcgtgggcagctcacagatccaggacctgctcctcgtggacgtggctcccctttcgctgggcatcgagaccgctggcggcgtgatgaccaacttggtggagcgcaatgcccgcattccctgcaagcagcagcagatcttcaccacctacagtgacaaccagaatgcggtgaccattcaggtgtacgagggcgagcgggccatgaccaaggataacaatctactgggcacctttaacctcaccggcattccgccagctcctcggggagtgccccagatcgaggtggccttcgacttgaatgcggatggcatcctgaatgtgaatgccaaggacaacagcaccgggaagagcgaaaagatcaccatttccaacgacaagggcagactttccaaggcggaaatcgatcgcatgctctcggaggcggagaagtacaaggtcgaggacgatcgtcagagggagcgggttcagtccaagaacaatctcgaggcatacatatacgcatgtcgccaggccgtcgatgacgctccatccggcgttctttccgaaaccgaacgttccaaggtgcgcgacaagtgctcctccgaggcatcctggctggacaagaactcgctggccgagaaggaggagttcgaaagtcacctgaaagagtgccagcgcatctgtactccgataatgtcgaaaatccatggcggcaaaaagggcaaatcatcgatgggcaagggttcccatcccactgtggaggaggtggatggatag

SEQ ID NO: 49031 - protein, 633 aa, Drosophila melanogaster
MGKIPAIGIDLGTTYSCVGVWQNSKVEIIANDQGNRTTPSYVAFNETERLIGDPAKNQVAMNAKNTVFDAKRLIGRKFDDKKIQEDLKLWPFKVINEKGKPKIEVEFKGERKRFAPEEISSMVLTKMREIAEVYLGGKVKDAVVTVPAYFNDSQRQATKDAGSIAGLNVLRIINEPTAAALAYGLDKNLKGERNVLIFDLGGGTFDVSVLSIDEGSLFEVKATAGDTHLGGEDFDNRLVNHFAEEFKRKHKSDIKGNARALRRLRTACERAKRTLSSSTEASLEIDALHEGIDFYSKISRARFEELNMDLFRSTMQPVERALSDAKMDKKAIHDVVLVGGSTRIPKIQKLLQDLFGGKQLNLSINPDEAVAYGAAVQAAILTGVGSSQIQDLLLVDVAPLSLGIETAGGVMTNLVERNARIPCKQQQIFTTYSDNQNAVTIQVYEGERAMTKDNNLLGTFNLTGIPPAPRGVPQIEVAFDLNADGILNVNAKDNSTGKSEKITISNDKGRLSKAEIDRMLSEAEKYKVEDDRQRERVQSKNNLEAYIYACRQAVDDAPSGVLSETERSKVRDKCSSEASWLDKNSLAEKEEFESHLKECQRICTPIMSKIHGGKKGKSSMGKGSHPTVEEVDG

SEQ ID NO: 49032 - DNA, 1971 bp, Drosophila melanogaster
  CDS (1)..(1971)
atgaagttatgcatattactggccgtcgtggccttcgttggcctctcgctgggcgaggagaagaaggaaaaggacaaggagctgggcacagtgatcggcattgatttgggcaccacgtattcctgcgttggtgtgtacaagaacggacgcgttgagatcatcgccaacgatcagggtaaccgcatcactccctcctacgtcgctttcaccgctgacggtgagcgtctcattggagatgccgccaagaatcagttgaccaccaatcccgagaacacggtcttcgatgccaagcgtctgatcggtcgcgaatggtccgacaccaatgtgcaacacgacatcaagttcttcccattcaaggttgtcgagaagaactcgaagccccacatcagcgtggacacgtcacagggcgccaaggtgttcgcacccgaggagatctccgccatggttctgggcaagatgaaggaaaccgctgaagcttatctgggcaagaaggtcacccatgccgtcgttaccgtgccagcctacttcaacgatgcccagcgtcaggccaccaaggatgctggtgttattgccggtctgcaggtgatgcgcatcatcaacgaacccactgctgcggctattgcctacggtctggacaagaaggagggggagaagaacgtgcttgtgttcgatttgggcggcggcaccttcgatgtctccctgctgaccatcgataacggagtgttcgaggtggtggccaccaacggtgatactcatttgggaggtgaggacttcgatcagcgtgtgatggatcacttcatcaagctgtacaagaagaagaagggcaaggacattcgcaaggacaaccgcgctgttcagaagctgcgtcgtgaggttgagaaggccaagcgtgccctgtctggttcccaccaggtgcgcatcgaaattgaatccttcttcgagggcgatgacttctccgagaccctgacccgtgccaagttcgaggagctcaacctggatctattccgttccaccctgaagccagtgcagaaggtgctcgaggatgctgacatgaacaagaaggacgtgcacgagattgtgctggtcggtggctccactcgtatccccaaggtgcagcagctggtcaaggacttcttcggcggcaaggaaccatcccgaggcatcaatcccgatgaggctgtggcctacggtgctgctgtgcaggctggcgtgctctctggcgaacaagataccgatgctattgtcctgctcgatgtgaacccactgaccatgggtattgagaccgtcggcggtgtgatgaccaagctgattccccgcaacaccgtcatccccaccaagaagtcgcaggtgttctccactgcctccgataaccagcacaccgtcaccatccaggtgtacgagggcgagcgtcccatgaccaaggacaaccatctgttgggcaagttcgatctgactggcatcccaccagcaccccgtggcattccccagattgaggtttcgttcgagatcgacgccaacggcatcctgcaggtcagtgccgaggacaagggtaccggtaacaaggaaaagatcgtcatcaccaacgaccagaaccgcctgacgcccgaggatatcgatcgcatgatccgcgatgccgagaaattcgccgatgaggacaagaagctgaaggagcgtgtggagtcccgcaacgaactggaatcgtatgcctacagcctgaagaaccagatcggtgacaaggacaagctgggtgccaagctgagcgacgatgagaagaacaagctggagtcggccatcgatgagtcgatcaagtggctggaacagaatcccgatgccgatcccgaggagtacaagaagcagaagaaggatctggaggccatcgttcagcccgtgattgctaagctgtaccagggtgctggcggtgctcctcctccagagggcggcgatgatgccgatctcaaggacgagctgtaa

SEQ ID NO: 49033 - protein, 656 aa, Drosophila melanogaster
MKLCILLAVVAFVGLSLGEEKKEKDKELGTVIGIDLGTTYSCVGVYKNGRVEIIANDQGNRITPSYVAFTADGERLIGDAAKNQLTTNPENTVFDAKRLIGREWSDTNVQHDIKFFPFKVVEKNSKPHISVDTSQGAKVFAPEEISAMVLGKMKETAEAYLGKKVTHAVVTVPAYFNDAQRQATKDAGVIAGLQVMRIINEPTAAAIAYGLDKKEGEKNVLVFDLGGGTFDVSLLTIDNGVFEVVATNGDTHLGGEDFDQRVMDHFIKLYKKKKGKDIRKDNRAVQKLRREVEKAKRALSGSHQVRIEIESFFEGDDFSETLTRAKFEELNLDLFRSTLKPVQKVLEDADMNKKDVHEIVLVGGSTRIPKVQQLVKDFFGGKEPSRGINPDEAVAYGAAVQAGVLSGEQDTDAIVLLDVNPLTMGIETVGGVMTKLIPRNTVIPTKKSQVFSTASDNQHTVTIQVYEGERPMTKDNHLLGKFDLTGIPPAPRGIPQIEVSFEIDANGILQVSAEDKGTGNKEKIVITNDQNRLTPEDIDRMIRDAEKFADEDKKLKERVESRNELESYAYSLKNQIGDKDKLGAKLSDDEKNKLESAIDESIKWLEQNPDADPEEYKKQKKDLEAIVQPVIAKLYQGAGGAPPPEGGDDADLKDEL

SEQ ID NO: 49034 - DNA, 1956 bp, Petunia hybrida
  CDS (1)..(1956)
atggctggaaaaggtgaaggaccagcaattggaattgacttgggtacaacatactcatgtgtgggtgtatggcaacatgatcgtgtggagattattgctaatgatcaagggaataggacaacaccgtcttatgttggttttactgatactgaacgtttgattggtgatgctgctaagaatcaagttgctatgaatcccattaacacagtcttcgatgctaagcgtttgattgggaggagattcagcgacccttctgtacagagtgacatcaaattgtggccctttaaggttattcctggacctggtgacaagccaatgattgttgttacatacaagggtgaagagaagcagtttgctgctgaggaaatctcttccatggtgctcaccaagatgaaggaaattgctgaggcttatcttgggacgacaatcaagaatgcagttgtcactgtccctgcttacttcaacgattcgcagagacaggcgactaaagatgctggtgtcattgctggtctaaatgtgatgcgtataatcaatgaacctactgcagctgcaattgcttatggacttgacaagaaagctagcagtgctggggaaaagaatgtgctaatttttgatcttggaggtggtacttttgatgtgtcactgcttaccattgaagagggtatttttgaggttaaggccactgctggtgatacccatttgggaggtgaagattttgataatagaatggtgaaccattttgttcaggagtttaagaggaagaacaagaaggatattagtggaaacccgagggcgttgaggaggttaaggactgcttgtgagagggcaaagaggactctgtcatccactgcacagacaacaattgaaattgattcgttgtatgaagggattgatttttactcaacgattactagggcaagattcgaggagctgaacatggatttgtttagaaagtgtatggagcctgttgagaagtgtttgagagatgctaagatggataaaagcagtgttcatgatgtggtgcttgttggtggatcaactaggattcccaaagttcaacaattgcttcaagacttcttcaatggaaaagagctctgcaaaagcatcaacccagacgaagcagttgcttatggtgcagctgtgcaagctgcaattttgagcggcgaaggcaacgagaaggttcaagatttgttgctgttggatgtcactcctctgtctcttggtttggagactgctggaggtggtatgactgttttgattccaagaaacacaacaattcccaccaagaaagagcaagtgttctctacatattcggacaatcaacctggtgttttgatccaggtgtacgagggagaacgagcaaggaccaaggacaacaacctgttaggcaaatttgaactctctggcattccacctgctccaaggggtgttcctcaaatcactgtctgctttgacattgatgccaatggcatccttaatgtttctgctgaggacaaaactacaggacagaagaacaagataaccatcaccaacgacaagggccgactctccaaggaggaaatcgaaagaatggtgcaagaggctgagaagtacaagtctgaagatgaggagctgaagaagaaggtggaagctaagaatgcattggagaattatgcttacaacatgaggaatacaatcaaagatgacaaaattaactctcaactttcagctgctgataagaagaggattgaggatgcaattgatgaagctatcaagtggctagacaataaccaacttgcagaggctgatgaatttgaagacaagatgaaggagttggaaagcatctgtaatccgattattgctaagatgtatcaaggtggtgctggtggagcaactatggatgaggatggtccttctgttggtggcagtgctggaagtcaaaccggtgctggaccaaagattgaagaagttgattaa

SEQ ID NO: 49035 - protein, 651 aa, Petunia hybrida
MAGKGEGPAIGIDLGTTYSCVGVWQHDRVEIIANDQGNRTTPSYVGFTDTERLIGDAAKNQVAMNPINTVFDAKRLIGRRFSDPSVQSDIKLWPFKVIPGPGDKPMIVVTYKGEEKQFAAEEISSMVLTKMKEIAEAYLGTTIKNAVVTVPAYFNDSQRQATKDAGVIAGLNVMRIINEPTAAAIAYGLDKKASSAGEKNVLIFDLGGGTFDVSLLTIEEGIFEVKATAGDTHLGGEDFDNRMVNHFVQEFKRKNKKDISGNPRALRRLRTACERAKRTLSSTAQTTIEIDSLYEGIDFYSTITRARFEELNMDLFRKCMEPVEKCLRDAKMDKSSVHDVVLVGGSTRIPKVQQLLQDFFNGKELCKSINPDEAVAYGAAVQAAILSGEGNEKVQDLLLLDVTPLSLGLETAGGGMTVLIPRNTTIPTKKEQVFSTYSDNQPGVLIQVYEGERARTKDNNLLGKFELSGIPPAPRGVPQITVCFDIDANGILNVSAEDKTTGQKNKITITNDKGRLSKEEIERMVQEAEKYKSEDEELKKKVEAKNALENYAYNMRNTIKDDKINSQLSAADKKRIEDAIDEAIKWLDNNQLAEADEFEDKMKELESICNPIIAKMYQGGAGGATMDEDGPSVGGSAGSQTGAGPKIEEVD

SEQ ID NO: 49036 - DNA, 1956 bp, Drosophila melanogaster
  CDS (1)..(1956)
atgtctaaagctcctgctgttggtattgatttgggcaccacctactcgtgcgtgggcgtgttccagcatggcaaggtcgagatcatcgccaacgaccagggtaatcgtaccactccatcctatgttgccttcaccgatacggagcgtctgatcggagatgccgccaagaaccaggtggcgatgaacccgacccagacgatcttcgacgccaagcgcttgattggtcgcaagttcgatgatgccgccgtgcagtctgacatgaagcactggcccttcgaggtggtcagcgccgatggcaagcccaagatcgaggtgacctacaaggacgagaagaagaccttcttccccgaggagatctcttcgatggtgcttaccaagatgaaggagaccgccgaggcctatctgggcaagactgtgaccaacgcggtcatcaccgtgccggcctacttcaacgactctcagcgtcaggcgaccaaggacgccggcaccatcgccggtctgaacgtgctgcgtatcatcaacgagcccactgccgctgctatcgcttacggtctggacaagaaggctgttggagagcgcaacgtgctcatcttcgatctgggcggcggcaccttcgatgtgtccatcctgtcgatcgatgacggtatctttgaggtcaagtccacggccggagatacgcatctgggtggtgaggacttcgacaaccgtctggtcacccacttcgtgcaggagttcaagcgcaagcacaagaaggatctgaccaccaacaagcgtgctctgcgtcgtctgcgcaccgcttgcgagcgtgcaaagcgtaccctgtcgtcctccacccaggccagcattgagatcgactctctgttcgagggtaccgacttctacacctcgattactcgtgcccgtttcgaggagttgaacgctgatctgttccgcagcaccatggaccccgtggagaaggctctgcgtgacgccaagctggacaagtcggtcatccacgacattgtgctggtcggtggctccacccgtatccccaaggtgcagcgcctgctgcaggatctgttcaatggcaaggagctgaacaagtcgatcaatcccgatgaggctgtggcctacggtgctgccgtccaggcggccattctgcacggcgacaagtcgcaggaggtgcaggatctgctgctgctcgatgtgactcctctgtccctgggtatcgaaaccgctggcggtgtgatgagcgtgttgatcaagcgcaacaccaccatcccgaccaagcagacccagaccttcaccacctactcggacaaccagcccggtgtgctgatccaggtgtacgagggagagcgtgccatgaccaaggacaacaacctgctcggcaagttcgagctgtcgggcatcccccccgcaccacgtggtgtgccccagatcgaggtcaccttcgatatcgatgccaacggtatcctcaacgtgactgccctggagcgttcgaccaacaaggagaacaagatcaccattaccaacgacaagggtcgtctctccaaggaggacatcgagcgcatggtcaacgaggccgagaagtaccgcaacgaggatgagaagcagaaggagaccattgccgccaagaacggcctcgagtcgtactgcttcaacatgaaggccaccctcgacgaggataacctgaagaccaagatctcggactctgaccgcaccacaatcctggacaagtgcaacgagaccatcaagtggctggatgccaaccagctggctgacaaggaggagtacgagcaccgccagaaggaactggagggtgtgtgcaacccgatcattaccaagctataccagggcgccggtttcccacccggtggcatgcccggcggtcccggaggtatgcccggagcggctggtgccgctggcgctgccggagccggcggtgctggccccaccatcgaggaggtcgactaa

SEQ ID NO: 49037 - protein, 651 aa, Drosophila melanogaster
MSKAPAVGIDLGTTYSCVGVFQHGKVEIIANDQGNRTTPSYVAFTDTERLIGDAAKNQVAMNPTQTIFDAKRLIGRKFDDAAVQSDMKHWPFEVVSADGKPKIEVTYKDEKKTFFPEEISSMVLTKMKETAEAYLGKTVTNAVITVPAYFNDSQRQATKDAGTIAGLNVLRIINEPTAAAIAYGLDKKAVGERNVLIFDLGGGTFDVSILSIDDGIFEVKSTAGDTHLGGEDFDNRLVTHFVQEFKRKHKKDLTTNKRALRRLRTACERAKRTLSSSTQASIEIDSLFEGTDFYTSITRARFEELNADLFRSTMDPVEKALRDAKLDKSVIHDIVLVGGSTRIPKVQRLLQDLFNGKELNKSINPDEAVAYGAAVQAAILHGDKSQEVQDLLLLDVTPLSLGIETAGGVMSVLIKRNTTIPTKQTQTFTTYSDNQPGVLIQVYEGERAMTKDNNLLGKFELSGIPPAPRGVPQIEVTFDIDANGILNVTALERSTNKENKITITNDKGRLSKEDIERMVNEAEKYRNEDEKQKETIAAKNGLESYCFNMKATLDEDNLKTKISDSDRTTILDKCNETIKWLDANQLADKEEYEHRQKELEGVCNPIITKLYQGAGFPPGGMPGGPGGMPGAAGAAGAAGAGGAGPTIEEVD

SEQ ID NO: 49038 - DNA, 1959 bp, Manduca sexta
  CDS (1)..(1959)
atggcgaaggcaccagcagtgggtattgatttgggcaccacatactcgtgcgtgggcgtgttccagcacggtaaggtggagatcatcgccaacgaccagggcaacaggacaacgccgtcttatgttgccttcacggacaccgatcgcctcatcggtgatgccgccaagaaccaggtggcgatgaaccctaacaacactattttcgatgcaaaacgtcttatcggacgtaaattcgaagatgccacggtacaagccgacatgaaacactggcctttcgaggttgtcagtgatggaggtaaacctaaaattaaggtggcatacaagggtgaagacaaaacattcttccctgaggaagtcagctccatggtgctcacaaaaatgaaggaaaccgccgaagcctacctcggcaaaacggtgcagaatgcagtaatcacggttccagcgtacttcaacgactcacagagacaggccaccaaagatgccggtaccatctccggcctgaatgttctccgtatcatcaacgaaccgaccgctgctgcgattgcgtacggccttgacaagaagggtagtggagaacgaaacgtattgatttttgaccttggtggtggtaccttcgatgtgtccatcctgaccatcgaggatggtatcttcgaagtgaaatccaccgccggtgacacccacttgggaggtgaagacttcgacaaccgtatggtcaaccacttcgtacaggaattcaagaggaaatacaagaaggacctcaccaccaacaagagggcgctcaggcgtcttcgcaccgcctgcgagagggcgaagaggaccctgtcctcttccacacaggcgagcattgaaatcgactccctgttcgaaggtattgacttctacacctcgatcacccgtgctcgtttcgaggagctgaacgccgatctgttcaggtccacgatggagcccgtagagaagtctctccgtgatgcaaagatggacaagtcccaaatccacgacatcgtacttgtgggcggttccactcgtatccccaaggtgcagaagctcctgcaagacttcttcaatggaaaggagcttaacaaatccatcaaccccgacgaggccgtcgcctatggtgcggctgtccaggctgccattctgcacggtgacaagtctgaggaggtgcaggacttgctcctgctcgatgtgaccccgttgtcgctcggtatcgagaccgctggcggtgtcatgaccaccctcattaagcgtaacactaccatcccgacgaagcagacgcagaccttcaccacctactcggacaaccagcccggtgtgctcatccaagtattcgagggtgagcgcgccatgaccaaggacaacaacttgctcggcaaattcgaacttaccggcatcccaccggcgccccgtggcgtgccccagatcgaggtgacgttcgacatcgacgctaacggtatccttaacgtgtccgctgtcgagaaatctaccaacaaggagaacaagatcaccatcaccaacgacaagggccgtctctccaaggaggagatcgagcgcatggtcaatgaggctgagaaatacaggaacgaggacgagaagcagaaggagaccatccaggccaagaacgctctggaatcgtactgcttcaacatgaagtccaccatggaagatgagaagctcaaggacaagatctcggactccgacaagcaaactatcctagataagtgcaacgacacgatcaagtggctagactcgaaccagctcgccgacaaggaggagtatgaacacaagcagaaggagctcgaaggcatctgcaacccgatcatcaccaagctgtaccagggtgcaggaggcatgcctggcggtatgcccggaggcatgccaggcttccccggcggagctcccggagccggaggcgcggctcccggcggcggcgccggacccaccatcgaggaggtcgactaa

SEQ ID NO: 49039 - protein, 652 aa, Manduca sexta
MAKAPAVGIDLGTTYSCVGVFQHGKVEIIANDQGNRTTPSYVAFTDTDRLIGDAAKNQVAMNPNNTIFDAKRLIGRKFEDATVQADMKHWPFEVVSDGGKPKIKVAYKGEDKTFFPEEVSSMVLTKMKETAEAYLGKTVQNAVITVPAYFNDSQRQATKDAGTISGLNVLRIINEPTAAAIAYGLDKKGSGERNVLIFDLGGGTFDVSILTIEDGIFEVKSTAGDTHLGGEDFDNRMVNHFVQEFKRKYKKDLTTNKRALRRLRTACERAKRTLSSSTQASIEIDSLFEGIDFYTSITRARFEELNADLFRSTMEPVEKSLRDAKMDKSQIHDIVLVGGSTRIPKVQKLLQDFFNGKELNKSINPDEAVAYGAAVQAAILHGDKSEEVQDLLLLDVTPLSLGIETAGGVMTTLIKRNTTIPTKQTQTFTTYSDNQPGVLIQVFEGERAMTKDNNLLGKFELTGIPPAPRGVPQIEVTFDIDANGILNVSAVEKSTNKENKITITNDKGRLSKEEIERMVNEAEKYRNEDEKQKETIQAKNALESYCFNMKSTMEDEKLKDKISDSDKQTILDKCNDTIKWLDSNQLADKEEYEHKQKELEGICNPIITKLYQGAGGMPGGMPGGMPGFPGGAPGAGGAAPGGGAGPTIEEVD

SEQ ID NO: 49040 - DNA, 2061 bp, Drosophila melanogaster
  CDS (1)..(2061)
atgctgcgcgtacccaagtttctgccccgtctcgcccgccaggccggcgtggtaccctcccatatgtccggagcttctagcatgttccgcaatctgccaggtgctagcaatggaatatcgtcccagctgcgttacaagtccggtgaggtcaaaggtgctgttattggaatcgatctgggaacaaccaactcctgcctggccgtcatggagggcaagcaggccaaggtgattgaaaacgccgagggagcccggaccacaccctcccacgtcgcctttaccaaggacggtgagcggctggtcggcatgcccgccaagcgccaggcagtgacaaactcggccaacaccttctatgccaccaagcgactgattggcagacgttttgatgatcccgaggttaagaaagacatcactaacctgtcctacaaggtggtcaaggcttcaaatggcgatgcctgggtctcttccaccgacggcaaggtgtactctccatcccaaatcggtgctttcatcctgatgaagatgaaggaaaccgctgaggcatacctgaacactcccgtgaagaacgccgtggtcaccgtgcccgcctacttcaacgactcccaacgccaggccaccaaggatgctggtcaaatcgctggtcttaatgtgctgcgcgtgatcaacgagcccactgctgccgcgttggcctatggaatggacaaaacggaggacaaaatcattgccgtttacgatttgggtggcggcaccttcgatatttcgattttggagatccagaagggagtgttcgaagtcaagtccaccaatggtgataccctcctcggtggtgaggactttgacaaccatatcgtcaacttcctggtggccgaattcaagaaggatagtggaattgatatccgcaaggacaacattgccatgcagcgactgaaggaggcggccgagaaggccaagtgcgagctgtcctcctcccaacagactgacatcaatctgccttatctgaccatggatgccgccggtccccagcacatgaacctgaagctgacacgctccaagctggaaagcctagtgggtgatctgatcaagcgtactatccagccctgccagaaggctctgtccgatgccgaggtttccaagtccgagatcggcgaggtgctgctggttggcggtatgacccgtatgcccaaggtgcagtccaccgtgcaggaactgtttggacgccagccgtcgcgttctgtgaatcccgatgaggctgtggccgttggtgccgctgttcagggtggtgtgttggccggagatgtcaccgatgtgcttctgctcgacgttactcccctctcgctgggtattgagaccctgggtggagttttcacccgcttgatctcccgcaacaccactattcccaccaagaagtcgcaagtcttctcgacggccagcgatggtcagacccaggtggagatcaaggtgcaccagggcgagcgtgagatggctaacgacaataagcttctcggctcctttacactggtcggaattccccctgcacctcgtggcgtgccccagatcgaggttgttttcgatattgatgcaaacggtattgtgcacgtgtctgcaaaggacaagggcactggcaaggaacagcagatcgttattcagtccagcggtggtctgagcaaggacgaaatcgagaacatgatcaaaaaggccgaggaatacgcaacggctgacaagcaaaagcgtgagcttatcgagatcgtcaaccagggcgagagcatagtccacgatactgagaccaagatggaggagttcaagagccagctgcccgctgaggagtgcgagaagctaaagaaggaaattgccgatctgcgcacgctgctggctaacaaggagactgccgaccttgaggaggtcaggaaagccacttcctccctgcagcagtcctctctgaagctgttcgagctggcctacaagaagatgtccgctgagcgcgagagcaacgcaggagccggctcctccgacagcagcagttcgagcgacacttccggcgaagccaagaaggaagagaagaactaa

SEQ ID NO: 49041 - protein, 686 aa, Drosophila melanogaster
MLRVPKFLPRLARQAGVVPSHMSGASSMFRNLPGASNGISSQLRYKSGEVKGAVIGIDLGTTNSCLAVMEGKQAKVIENAEGARTTPSHVAFTKDGERLVGMPAKRQAVTNSANTFYATKRLIGRRFDDPEVKKDITNLSYKVVKASNGDAWVSSTDGKVYSPSQIGAFILMKMKETAEAYLNTPVKNAVVTVPAYFNDSQRQATKDAGQIAGLNVLRVINEPTAAALAYGMDKTEDKIIAVYDLGGGTFDISILEIQKGVFEVKSTNGDTLLGGEDFDNHIVNFLVAEFKKDSGIDIRKDNIAMQRLKEAAEKAKCELSSSQQTDINLPYLTMDAAGPQHMNLKLTRSKLESLVGDLIKRTIQPCQKALSDAEVSKSEIGEVLLVGGMTRMPKVQSTVQELFGRQPSRSVNPDEAVAVGAAVQGGVLAGDVTDVLLLDVTPLSLGIETLGGVFTRLISRNTTIPTKKSQVFSTASDGQTQVEIKVHQGEREMANDNKLLGSFTLVGIPPAPRGVPQIEVVFDIDANGIVHVSAKDKGTGKEQQIVIQSSGGLSKDEIENMIKKAEEYATADKQKRELIEIVNQGESIVHDTETKMEEFKSQLPAEECEKLKKEIADLRTLLANKETADLEEVRKATSSLQQSSLKLFELAYKKMSAERESNAGAGSSDSSSSSDTSGEAKKEEKN

SEQ ID NO: 49042 - DNA, 2535 bp, Spinacia oleracea
  CDS (378)..(2339)
agaagcatagaaatttcattctgtgattaaatcatcaaacaacacacaccattgaagataaaatattccttccatatttccggcccagttacatcaaattgaatgggcaaactccttcaaccaaagctaatactaataaatctatactcttaacttagtagtcaactacaattcccttaagtcataactaccacacttgatctcaaaccacccacccgaatttgataccaactgcaaacggtttagagatctggagcaatccatgctctctctctcagccgctgcgtactgcgtaccacattcaagcactctctctgacattctctctcgtcttttttctcccattctcttcttccgtcgttcctaggaagattataatggccggtaaaggagaaggtccagctatcggtattgatctcggtaccacctactctcgtgttggagtatggcaacacgaccgtgttgagatcattgctaatgatcagggtaacagaactactccatcttatgttgctttcaccgattctgaaaggttgattggtgatgccgctaagaatcaggtcgccatgaaccccattaacaccgtttttgatgccaagaggttgatcggaaggagatttagtgatgcatccgttcaggctgacatgaagcatcggccattcaaggttgtttctggacccggtgagaagcccatgattggtgttaactacaagggtgaagagaagcagtttgctgctgaagaaatctcctccatggttcttaccaagatgaaggagattgctgaggcttaccttggctcaactgtgaagaacgccgtcgtaacagttcctgcctacttcaatgactctcagcgtcaggcaacaaaggatgccggagttatttctggtttgaacgttatgcgtattattaacgagccaaccgcagctgctattgcctacggtcttgacaaaaaggccaccagtgttggtgagaagaatgttctcatctttgatcttggaggtggaacttttgatgtttctcttcttaccattgaagagggtatctttgaagtcaaggccactgctggagacacccatcttggaggtgaggactttgacaacagaatggtgaaccattcgttgcaggagttcaagagaaagaacaagaaggatatcatggaaaccccagggcacattagaaggttgagaactgcttgtgaaagagcaaagaggaccctttcatccactgctcaaaccaccatcgaaatcgattctctctacgagggtgttgacttctactctcccatcacccgtgcccgttttgaagagttgaacatcgatctgttcaggaagtgtatggagcctgttgagaagtgtttgagggatgctaagatggacaagagcactgtccacgatgttgttcttgttggtggatccactagaattcccaaggtccagcagttgttgcaagatttcttcaatggcaaagagctttgcaagagcatcaaccctgatgaggctgttgcctatggtgctgccgtccaagccgctatcttgagtggtgaaggtaatgagaaggttcaagacctattgcttcttgatgtcactcccctctctcttggtcttgagactgctggaggtgtcatgactgttcttatcccaaggaacaccaccatccccaccaagaaggaacaagtattctccacttactccgacaaccagcccggtgtgttgatccaggtttatgaaggagaaagaaccagaaccagggacaacaacttgttgggtaagtttgagctttctggcattcccccaggacccaggggtgttcctcagattaatgtctgcttcgacattgatgccaatggtatcttgaacgtctctgccgaggacaagacaaccggacagaagaacaagatcagaatcaccaacgacaagggtaggttgtccaaggaagagatcgagaagatggttcaagaggctgagaagtacaagtctgaggatgaggaacacaagaagaaggttgagtccaagaatgcattggagaactacgcttacaacatgaggaacattgtcaaggatgagaaaatcggagccaagctttctgaggctgacaagaagaagatcgaagaagccatcgatgcttccattcaatggcttgacggtaaccagcttgctgaggctgatgagttcgatgacaagatgaaggagttggagagcatctgcaacccaatcattgccaagatgtaccaaggtgctggtggtgacatgggtggaggcatggaagatgaaggtcctacttccggtggcggtgctggtcccaagattgaggaatgtcgactaagttgtcacttcttttaattagttttattatgcagttcttttaatttcagctttaaacaatggattgatttggaaaatggttgtatcaacagcaagttaacttgctgttattttgggttttatacagctatattttgctgtaggacaagctactttaggttcatttgccttctcttttgaaatagaagcacacattttcccccggctaaaaaaa

SEQ ID NO: 49043 - protein, 653 aa, Spinacia oleracea
MAGKGEGPAIGIDLGTTYSRVGVWQHDRVEIIANDQGNRTTPSYVAFTDSERLIGDAAKNQVAMNPINTVFDAKRLIGRRFSDASVQADMKHRPFKVVSGPGEKPMIGVNYKGEEKQFAAEEISSMVLTKMKEIAEAYLGSTVKNAVVTVPAYFNDSQRQATKDAGVISGLNVMRIINEPTAAAIAYGLDKKATSVGEKNVLIFDLGGGTFDVSLLTIEEGIFEVKATAGDTHLGGEDFDNRMVNHSLQEFKRKNKKDIMETPGHIRRLRTACERAKRTLSSTAQTTIEIDSLYEGVDFYSPITRARFEELNIDLFRKCMEPVEKCLRDAKMDKSTVHDVVLVGGSTRIPKVQQLLQDFFNGKELCKSINPDEAVAYGAAVQAAILSGEGNEKVQDLLLLDVTPLSLGLETAGGVMTVLIPRNTTIPTKKEQVFSTYSDNQPGVLIQVYEGERTRTRDNNLLGKFELSGIPPGPRGVPQINVCFDIDANGILNVSAEDKTTGQKNKIRITNDKGRLSKEEIEKMVQEAEKYKSEDEEHKKKVESKNALENYAYNMRNIVKDEKIGAKLSEADKKKIEEAIDASIQWLDGNQLAEADEFDDKMKELESICNPIIAKMYQGAGGDMGGGMEDEGPTSGGGAGPKIEECRLSCHFF

SEQ ID NO: 49044 - DNA, 1935 bp, Saccharomyces cerevisiae
  CDS (1)..(1935)
atgttaccatcatggaaagcctttaaagcacataatatacttcgtattctgacccgtttccagtcaaccaaaattccagatgcagttatcggtattgatttaggtactaccaattctgcggtagctattatggaaggtaaagttccgagaattatcgaaaatgcagaaggctcaagaactactccgtctgtagtggctttcactaaagacggagaacgtttagttggtgagccagccaaacgacaatccgtcataaactcagaaaacactttgtttgctactaagcgtttaatcggccgccgtttcgaggacgctgaagtccaaagagatattaatcaggttcctttcaaaatcgtcaagcattctaatggagatgcctgggtagaggctagaaacagaacgtactcccccgcccaaataggaggttttatcttaaataaaatgaaggaaacagcggaggcttacttagcgaagagcgtcaaaaatgctgttgtcaccgttcctgcttacttcaatgatgcccaaagacaagctactaaagacgcaggacaaattattgggcttaatgtattacgtgttgtcaacgaaccaacagctgctgccctagcttacggtctagataaatcagagccaaaagtcattgctgttttcgacttgggcggtggtactttcgatatttcaatcctggacatcgataacggtatctttgaggttaaatctaccaatggtgacacccatttgggtggcgaagattttgacatttatttgttgcaagaaattatttctcatttcaagaaagaaaccggtatcgatttgagtaatgaccgtatggctgtccaaagaataagagaagccgctgaaaaggctaaaatcgaactgtcttctacactctctacagaaataaacttgcctttcataactgctgatgctgcaggcccaaagcatattcgtatgcccttttctagggttcagcttgagaatataaccgccccattgattgatagaacggttgatcctgtcaaaaaagcactgaaagacgcaagaattaccgcctcagatatatcggatgttttattagttggtggtatgtcaaggatgcccaaggttgcagatactgtaaagaaattattcggtaaggatgcatcaaaagctgttaaccctgatgaagcagtcgctttaggggccgctatacaggctgcggtcttgtctggtgaagttaccgatgttttgttgctagatgtcactcccctatcattgggtattgaaactttaggaggagtttttacaaaattaatcccaagaaattctacaattcccaataagaaatctcaaattttttcaactgcggcatcaggtcaaacatcggtggaagttaaagttttccaaggtgagagggagttagtcaaggataacaaattaataggtaattttactcttgcgggcattcctccagctccaaaaggtaccccacaaattgaagtcacttttgatatcgatgcgaacggcatcatcaacgtttcagcaaaagatctcgccagccacaaagactcttccatcactgttgccggagcgtctgggctatctgatacggagattgatcgaatggttaatgaagcggaaagatataaaaatcaggatagagccagaaggaatgccatcgaaaccgctaacaaagctgaccagctagctaatgacacagaaaattccattaaggaattcgaaggtaagctagataaaactgattctcaaagactaaaagatcaaatttcatccttaagggaattggtttctcggagtcaagctggagatgaggttaatgatgacgatgttggaacaaaaattgacaatttgcgaacttcatcgatgaaactttttgaacagttatacaagaacagtgacaatcctgaaactaagaacgggagagaaaataaataa

SEQ ID NO: 49045 - protein, 644 aa, Saccharomyces cerevisiae
MLPSWKAFKAHNILRILTRFQSTKIPDAVIGIDLGTTNSAVAIMEGKVPRIIENAEGSRTTPSVVAFTKDGERLVGEPAKRQSVINSENTLFATKRLIGRRFEDAEVQRDINQVPFKIVKHSNGDAWVEARNRTYSPAQIGGFILNKMKETAEAYLAKSVKNAVVTVPAYFNDAQRQATKDAGQIIGLNVLRVVNEPTAAALAYGLDKSEPKVIAVFDLGGGTFDISILDIDNGIFEVKSTNGDTHLGGEDFDIYLLQEIISHFKKETGIDLSNDRMAVQRIREAAEKAKIELSSTLSTEINLPFITADAAGPKHIRMPFSRVQLENITAPLIDRTVDPVKKALKDARITASDISDVLLVGGMSRMPKVADTVKKLFGKDASKAVNPDEAVALGAAIQAAVLSGEVTDVLLLDVTPLSLGIETLGGVFTKLIPRNSTIPNKKSQIFSTAASGQTSVEVKVFQGERELVKDNKLIGNFTLAGIPPAPKGTPQIEVTFDIDANGIINVSAKDLASHKDSSITVAGASGLSDTEIDRMVNEAERYKNQDRARRNAIETANKADQLANDTENSIKEFEGKLDKTDSQRLKDQISSLRELVSRSQAGDEVNDDDVGTKIDNLRTSSMKLFEQLYKNSDNPETKNGRENK

SEQ ID NO: 49046 - DNA, 2314 bp, Pisum sativum
  CDS (27)..(2054)
gaattccctcgattcttcgatccaccatggccgccaccttgctccgttctctccaacgccgcaacctctcttcttcctctgtctccgcctttcgatcgttaacaggcagcaccaagacatcatatgcaactcacaagttggcaagtttgactcgacctttcagttcaagacccgctggtaatgatgtcattggaattgatttgggtactaccaattcatgtgtttcggtcatggagggaaagaatcccaaagttattgagaactctgaaggagctcgaacaacaccatctgtggttgctttcaaccagaaatcagagcttcttgttggtacaccagccaagcgtcaggctgtgactaacccaactaataccctttttggtaccaaacgtttgattggtagacgctttgatgatgctcaaacacaaaaggagatgaaaatggtaccctacaagattgttagggcacccaatggagacgcatgggttgaagccaacgggcagcaatattctcccagccaaattggtgcttttgttcttaccaagatcaaggaaactgctgaagcataccttggaaagactatttcaaaagctgtagttactgttccagcgtacttcaatgatgctcagaggcaggcaacaaaagatgctggtagaattgccggtcttgatgtccagagaattatcaatgaacccactgcagctgcactttcatatggcatgaacaacaaggagggtctcattgcagtttttgatcttggaggtggaacatttgatgtgtccattttagaaatttctaatggtgtttttgaggtgaaagcaacaaatggtgacactttcttgggaggagaagattttgataatgcgttgttggactttctagtgagcgaattcaaaagaactgagagtatagaccttgcaaaggataaacttgctttgcagaggcttcgagaagctgctgagaaagcaaaaattgagctttcttcaacttcacaaactgaaataaatctccctttcatcagtgccgatgcatctggtgcaaagcatttgaacatcacattgactagatccaagtttgaggctctggtaaacaacctgattgaaaggacgaaggcaccatgtaagagctgcttgaaggatgctaacatatctatcaaggatgttgacgaggttcttcttgttggagggatgactcgtgtaccaaaagttcagcaggtggtttcggagatctttggaaagagtcctagcaaaggagtaaatccagatgaggctgttgccatgggagcagctcttcaaggtggtatccttcgaggagatgttaaagagctactactcctcgacgtaactcctctatctctgggtattgagactttgggaggtatctttacaagattgatctcccgcaacactacaattcctaccaaaaagagtcaggtgttttcaacagcagctgacaatcagactcaagtgggtatcaaggtgcttcaaggtgagcgggaaatggccgcagacaacaaaagtcttggagaatttgaccttgttggcattcctccagcaccaagaggtttgcctcaaattgaagtcacatttgacatagatgccaatgggattgtcaccgtttctgccaaagacaagtccacaggaaaagaacagcaaatcaccattcgctcatcaggaggactctcggatgatgagattgataagatggttaaagaagctgagttgcacgcacaaagagaccaagaaagaaaggctctcattgacattagaaacagcgcagatacaagcatatatagtatcgagaagagtttggcagagtacagagagaagattccagccgaagttgccaaagagattgaagatgcagtctcagatttgagaacggcaatggcaggggaaaatgccgatgatatcaaggcaaaacttgatgcagcaaacaaagccgtgtccaagattggacagcatatgtcaggtggttcaagtggcggtccctctgaagggggttcacagggtggtgaacaggctcccgaagcagagtatgaagaggtcaagaagtgaggaggcaacttaggcggggctctgtagcagttttttttcctcttattaaacatcacataattgctggaatcatacaaggttgcttattttttgtatttaatgtttaaagccattttttactagaaggcttcttattttgtagtgcttatggagtactgaacacggctgtctgaataacatgattgaaatttattcataagttatctacctttgaatggtggttaatattattttgcaaaaaaaaaaaaaaaaaaaaaaaa

SEQ ID NO: 49047 - protein, 675 aa, Pisum sativum
MAATLLRSLQRRNLSSSSVSAFRSLTGSTKTSYATHKLASLTRPFSSRPAGNDVIGIDLGTTNSCVSVMEGKNPKVIENSEGARTTPSVVAFNQKSELLVGTPAKRQAVTNPTNTLFGTKRLIGRRFDDAQTQKEMKMVPYKIVRAPNGDAWVEANGQQYSPSQIGAFVLTKIKETAEAYLGKTISKAVVTVPAYFNDAQRQATKDAGRIAGLDVQRIINEPTAAALSYGMNNKEGLIAVFDLGGGTFDVSILEISNGVFEVKATNGDTFLGGEDFDNALLDFLVSEFKRTESIDLAKDKLALQRLREAAEKAKIELSSTSQTEINLPFISADASGAKHLNITLTRSKFEALVNNLIERTKAPCKSCLKDANISIKDVDEVLLVGGMTRVPKVQQVVSEIFGKSPSKGVNPDEAVAMGAALQGGILRGDVKELLLLDVTPLSLGIETLGGIFTRLISRNTTIPTKKSQVFSTAADNQTQVGIKVLQGEREMAADNKSLGEFDLVGIPPAPRGLPQIEVTFDIDANGIVTVSAKDKSTGKEQQITIRSSGGLSDDEIDKMVKEAELHAQRDQERKALIDIRNSADTSIYSIEKSLAEYREKIPAEVAKEIEDAVSDLRTAMAGENADDIKAKLDAANKAVSKIGQHMSGGSSGGPSEGGSQGGEQAPEAEYEEVKK

SEQ ID NO: 49048 - DNA, 2405 bp, Phaseolus vulgaris
  CDS (131)..(2158)
gaattccttttttttttttgccattacaaggaccaaaaccctaaacccttctcttctcagagatataaaatcccatctcaccaccttctcgtctcttcatttcccttctgatcaatcttccatcccggctatggctgccgtgctccgctctctccgccgccgcgatgtcgcctccgccaccttctctgcctaccgctcgttgacgggaagcactaagccagcatatgtagctcaaaagtggtcttgtttggctcgaccattcagttcgagacctgctggaaatgatgtcattggtattgatttaggtacaaccaattcatgtgtttccgtcatggaaggaaagaaccccaaagttatcgagaattcggagggtgctagaacaacaccatctgtggttgcttttaaccagaaaggggagctgcttgttggtaccccagccaaacgtcaagccgtaactaacccgacaaacactgtctttggtaccaagcgtctgatcggtagacgctttgatgatcctcaaacacaaaaagagatgaaaatggttccgttcaagattgttaaggctccaaatggtgatgcgtgggttgaggctaatggacaacagtattctcctagccaaattggtgcctttgttctcaccaagatgaaggaaactgctgaagcttatcttggaaagtcagtttcgaaggcggtaattactgtaccggcctacttcaatgatgcccagaggcaggcaacaaaagatgctggtagaattgcaggtcttgatgtgcagcgaattatcaatgaacccactgctgctgcactttcatacgggatgaacaacaaggaaggtctcattgctgtttttgaccttggaggtggaacatttgatgtatccatcttagaaatttcgaatggtgtgtttgaggtgaaagcaacaaatggtgacactttcttgggaggagaggattttgacaatgccttgttggattttctggtgaacgaatttaaaagaaccgagagtattgacctttcaaaggacaggcttgcacttcagaggcttcgtgaagctgctgagaaagctaagatagagctgtcttcaacatctcaaactgagatcaacctgcctttcattactgctgatgcttctggtgctaagcatctgaacataacattgactagatctaagtttgaggctttggtaaatcacttgattgaaaggaccaaggcaccctgcaaaagctgcttgaaggatgctaacgtctctatcaaggatgttgatgaggttcttcttgttggagggatgactagggtacctaaagtccaagaggtggttttaaatatctttggaaaatctcccagtaaaggagtaaaccctgatgaggcagttgccatgggggcggcaatccaaggtggtatcctacgtggagatgttaaagagctactactcctggatgtaacaccgctttctctgggtattgagactttgggtggtatctttactaggttgatcaaccgcaacactactattcccactaagaagagtcaggtcttttcaactgcagctgacaatcaaactcaggtaggtatcaaggtgctacaaggtgagcgggaaatggcttcagacaacaaaatgcttggagaatttgaccttgttggtatccctcctgctcccagaggtcttcctcagattgaggtcacgtttgacattgatgccaatggaattgttaccgtctctgccaaagataagtctactgggaaagaacaacaaatcaccattcggtcatctggcggactctcggaagatgagattgaaaagatggtgaaagaagcagagttgcatgcccagaaagaccaagagagaaaaactctcattgacattagaaatagtgctgacacaactatttatagcatcgaaaagagtttaggtgaatacagagagaagattcccagtgaaacggccaaagaaattgaggatgcagtttcggatttgagaaaggcgatgtcaggggataatgttgatgaaattaaatcaaagcttgacgctgcaaacaaagctgtatccaaaattggggagcacatgtcgggtggttctagtggtggttcctcagccggtggttcacagggtggtggtgaccaggctccagaggcagaatatgaggaggtcaagaagtgaggcgagtaagggtttgcatcccacttattcttctgatgtattgtctagatcataaattagagagatcaatcatcttttttttttttcatttagcatatgatataaggttacttatttttgtactaaaggttggagttgatttttttaccttgaggcctttccaatatgtagtagtattatgctatttgaatgacgatattcgaagttttggcttaaaaaaaaaaaaaaaaaaaaaaaaaaggaattc

SEQ ID NO: 49049 - protein, 675 aa, Phaseolus vulgaris
MAAVLRSLRRRDVASATFSAYRSLTGSTKPAYVAQKWSCLARPFSSRPAGNDVIGIDLGTTNSCVSVMEGKNPKVIENSEGARTTPSVVAFNQKGELLVGTPAKRQAVTNPTNTVFGTKRLIGRRFDDPQTQKEMKMVPFKIVKAPNGDAWVEANGQQYSPSQIGAFVLTKMKETAEAYLGKSVSKAVITVPAYFNDAQRQATKDAGRIAGLDVQRIINEPTAAALSYGMNNKEGLIAVFDLGGGTFDVSILEISNGVFEVKATNGDTFLGGEDFDNALLDFLVNEFKRTESIDLSKDRLALQRLREAAEKAKIELSSTSQTEINLPFITADASGAKHLNITLTRSKFEALVNHLIERTKAPCKSCLKDANVSIKDVDEVLLVGGMTRVPKVQEVVLNIFGKSPSKGVNPDEAVAMGAAIQGGILRGDVKELLLLDVTPLSLGIETLGGIFTRLINRNTTIPTKKSQVFSTAADNQTQVGIKVLQGEREMASDNKMLGEFDLVGIPPAPRGLPQIEVTFDIDANGIVTVSAKDKSTGKEQQITIRSSGGLSEDEIEKMVKEAELHAQKDQERKTLIDIRNSADTTIYSIEKSLGEYREKIPSETAKEIEDAVSDLRKAMSGDNVDEIKSKLDAANKAVSKIGEHMSGGSSGGSSAGGSQGGGDQAPEAEYEEVKK

SEQ ID NO: 49050 - DNA, 2025 bp, Schizosaccharomyces pombe
  CDS (1)..(2025)
atgatctcgtcgagattcactaatgtagtccgtagcggattgcgtttccaaagcaagggagcatcgttcaagattggcgcttccttgcatggaagtcgcatgaccgcccgctggaattctaatgcaagtggtaatgaaaaagttaagggtcccgtaatcggtattgacttgggtaccaccacctcatgtttagcaatcatggagggtcaaacccctaaggttattgcaaatgccgagggtacccgtaccacaccatctgtcgtcgcatttaccaaagatggcgagcgtttggtgggtgttagcgctaaacgccaagccgtcattaacccggaaaacacattttttgctactaagcgtttaatcggtcgtagatttaaagagcctgaagtccaacgtgatattaaggaagttccttacaaaattgtcgagcactcaaatggagatgcttggttggaggctcgtggtaagacctactctccatctcaaatcggtggtttcatccttagtaagatgagggaaactgccagcacctaccttggaaaagatgtaaagaatgccgttgttactgttcctgcttacttcaatgactctcagcgtcaagctaccaaggctgctggtgccattgctggtttgaatgttttgcgtgtcgtcaacgagcctactgccgccgctttggcttatggtttggacaagaagaatgatgccatcgtcgcagttttcgatttgggtggtggtacttttgatatttctattttggagttaaacaatggtgtttttgaggttagaagtaccaacggtgacactcatttgggtggtgaggactttgatgttgctcttgttcgtcacattgtcgagacctttaagaagaatgagggtttggacttgagcaaggaccgtctcgccgttcaacgtattcgtgaggctgctgaaaaagctaagtgcgaactttcctctctttccaagactgatatcagtcttcctttcattactgcggatgctactggccctaagcatattaacatggaaatctctcgtgctcaatttgagaaacttgttgatcctctcgttcgtcgtaccatcgatccttgcaagcgtgcccttaaggatgctaacttgcaaacctctgaaatcaatgaagttatccttgtcggtggtatgactcgtatgcctcgtgttgtcgaaactgtcaagagtatcttcaagcgtgaacccgctaagtccgtcaaccctgatgaagctgttgccattggtgctgctattcaaggtggtgtcttgtctggccatgttaaggaccttgttcttttggatgtcacccccttgtccctcggtatcgagactttgggcggtgttttcactcgtttgatcaaccgtaacactaccattcctactcgcaagtctcaagttttctccactgctgctgatggtcaaactgccgttgaaatccgtgtcttccagggtgaacgtgagcttgttcgtgacaacaaattaattggcaacttccaacttactggcattgctcctgcacctaagggtcaacctcagattgaggtttcttttgatgttgatgccgatggcattatcaatgtctctgcccgtgacaaggctaccaacaaggattcttccatcactgttgctggatcttccggtttaactgattctgagattgaggctatggttgccgatgctgagaagtatcgtgccagtgacatggctcgcaaggaggctattgagaacggaaacagagctgaaagcgtctgcaccgatattgaaagcaaccttgacattcacaaagacaaattggaccaacaagctgttgaagacttgcgctccaagatcaccgatctccgtgaaactgttgccaaggtcaacgctggtgacgaaggtattactagtgaagatatgaagaagaagattgatgaaattcaacaactctctttgaaggttttcgagtctgtctacaagaaccaaaatcaaggtaatgaatcttctggtgataactctgctcctgagggtgacaagaagtag

SEQ ID NO: 49051 - protein, 674 aa, Schizosaccharomyces pombe
MISSRFTNVVRSGLRFQSKGASFKIGASLHGSRMTARWNSNASGNEKVKGPVIGIDLGTTTSCLAIMEGQTPKVIANAEGTRTTPSVVAFTKDGERLVGVSAKRQAVINPENTFFATKRLIGRRFKEPEVQRDIKEVPYKIVEHSNGDAWLEARGKTYSPSQIGGFILSKMRETASTYLGKDVKNAVVTVPAYFNDSQRQATKAAGAIAGLNVLRVVNEPTAAALAYGLDKKNDAIVAVFDLGGGTFDISILELNNGVFEVRSTNGDTHLGGEDFDVALVRHIVETFKKNEGLDLSKDRLAVQRIREAAEKAKCELSSLSKTDISLPFITADATGPKHINMEISRAQFEKLVDPLVRRTIDPCKRALKDANLQTSEINEVILVGGMTRMPRVVETVKSIFKREPAKSVNPDEAVAIGAAIQGGVLSGHVKDLVLLDVTPLSLGIETLGGVFTRLINRNTTIPTRKSQVFSTAADGQTAVEIRVFQGERELVRDNKLIGNFQLTGIAPAPKGQPQIEVSFDVDADGIINVSARDKATNKDSSITVAGSSGLTDSEIEAMVADAEKYRASDMARKEAIENGNRAESVCTDIESNLDIHKDKLDQQAVEDLRSKITDLRETVAKVNAGDEGITSEDMKKKIDEIQQLSLKVFESVYKNQNQGNESSGDNSAPEGDKK

SEQ ID NO: 49052 - DNA, 2418 bp, Solanum tuberosum
  CDS (99)..(2147)
ggccgcttcttcgcctccttccctaaaaccctccaaaaccctaacactcaacaactccctcaacaattacgaattagttttcttcctttgtttctccgatggcgaccgccgccttgctcagatctctccgtcgacgtgaattcgctacttcttctatctctgcgtatagaactcttgcttccaacaccaagccttcgtggtgtccatcacttgttggtgctaaatgggctggtctggctcgaccatttagctccaaacctgctggaaacgaaattattgggatagacttgggaaccaccaactcttgtgttgcagtgatggaggggaagaatcccaaggtcattgagaattctgaaggggccagaacaactccttctgtggttgcatttaaccagaagggagaacttcttgttggtactccagccaaacgtcaggcagttaccaatcctacaaacactctttctgggaccaagcgtctaattggcagacgctttgatgatcctcaaacacaaaaggagatgaagatggttccttacaagattgtgagaggctcaaatggagatgcttgggttgaagcaaatggccagcaatattctccaactcaaattggagcatttattctaacaaagatgaaggaaaccgcagaggcctaccttgggaaatctattaataaagctgtgatcactgttccagcttatttcaatgatgctcagaggcaggcaataaaggacgctggggcaattgcaggtcttgatgtgcaaaggattattaatgaacctactgcagctgcgctgtcttatggtatgaatagcaaagaaggccttgtcgctgtttttgatcttggcggtggaacatttgatgtttcaatcctggagatatcaaatggtgtttttgaggtcaaggcaactaatggtgacacctttttaggaggagaggattttgacaatgcgttgttagaatttttagtgagcgagtttaagaggactgagggaattgacctatcaaaagacaagcttgccctacaaagacttcgagaggcagctgagaaagctaagatagagctttcatcaacatctcaaactgatattaacttgccgttcatcacagctgatgcatcaggggctaaacatcttaatatcacactgacaagatcaaaatttgagacattggtgaaccacttaattgagaggacaaggaatccttgcaagaattgtttgaaggatgctggagtatctttaaaagatgtggatgaagtcctccttgttggaggtatgacacgggttcctaaggtgcaggaaatagtttctgagatatttggtaaaagccccagcaaaggtgtcaatccagatgaggcagttgccatgggagctgcacttcaaggtggtattctccgtggtgatgtcaaagagttgcttcttttggatgtaactccactagcgcgcggtattgagacattgggaggtatcttcactaggttaataaacaggaatactaccattcccacaaagaaaagccaggtgttttctactgctgcagacaaccaaacacaagttggcatcaaggtattacaaggtgaacgtgaaatggcatctgataataagcttctgggtgaatttgatcttgtaggtattcctccggcgcccaaggggtattgccctcagattgaggtcatctttgacatagatgcaaatggaatggtcaccgtgtctgccaaagacaaggctactagcaaagagcagcagattaccattcggtcatctggtggtctatcagaagatgagatagacaaaatggtcagggaagcagagatgcatgcccaaaggatcaagaacgcaaggcacttattgatatcaggaatagtgcagagcactaccatatatagtatcgagaagagcttgagtgagtacaaggagaaggtccccaaggaagtggttacagaaatcgagacggctatttctgatttgagagcagcaatggggactgagaacattgatgatatcaaggcgaaacttgatgcagcaaacaaagctgtctcaaagattggagagcacatggctggtggcagttctggtggtgcatctggaggtggtggtgcacaaggaggagatcaaccaccagaggcagaatacgaggaagtaaagaaatagatgattattctaggcataattgaatagtgcatgagaaaaacagagagagagagatgttatagatgtactttccttctaaaaatgagtttattttttccatcacttcccccccccctccctggaagtattttatgctcaagctcaaaactggttgtatcaatggtcttgagttgtgaatttcttagcgtctagactgttcagtagaacaggtgagtatgatttttgacagcccttcaatgttgaacaatcctttgtttccacaataatatga

SEQ ID NO: 49053 - protein, 682 aa, Solanum tuberosum
MATAALLRSLRRREFATSSISAYRTLASNTKPSWCPSLVGAKWAGLARPFSSKPAGNEIIGIDLGTTNSCVAVMEGKNPKVIENSEGARTTPSVVAFNQKGELLVGTPAKRQAVTNPTNTLSGTKRLIGRRFDDPQTQKEMKMVPYKIVRGSNGDAWVEANGQQYSPTQIGAFILTKMKETAEAYLGKSINKAVITVPAYFNDAQRQAIKDAGAIAGLDVQRIINEPTAAALSYGMNSKEGLVAVFDLGGGTFDVSILEISNGVFEVKATNGDTFLGGEDFDNALLEFLVSEFKRTEGIDLSKDKLALQRLREAAEKAKIELSSTSQTDINLPFITADASGAKHLNITLTRSKFETLVNHLIERTRNPCKNCLKDAGVSLKDVDEVLLVGGMTRVPKVQEIVSEIFGKSPSKGVNPDEAVAMGAALQGGILRGDVKELLLLDVTPLARGIETLGGIFTRLINRNTTIPTKKSQVFSTAADNQTQVGIKVLQGEREMASDNKLLGEFDLVGIPPAPKGYCPQIEVIFDIDANGMVTVSAKDKATSKEQQITIRSSGGLSEDEIDKMVREAEMHAQRIKNARHLLISGIVQSTTIYSIEKSLSEYKEKVPKEVVTEIETAISDLRAAMGTENIDDIKAKLDAANKAVSKIGEHMAGGSSGGASGGGGAQGGDQPPEAEYEEVKK

SEQ ID NO: 49054 - DNA, 1974 bp, Saccharomyces cerevisiae
  CDS (1)..(1974)
atgcttaaatctggtagactcaactttctcaagttgaatatcaattcacgattactatactcaacgaaccctcaactgactaagaaggtcattggtatcgacctgggtaccacgaatagtgctgttgcatatatccgtgattctaacgacaaaaaatcagctacaatcatagaaaatgatgaaggacaacgaaccacaccatctatagttgcctttgatgtcaaaagctcgccacagaataaagatcaaatgaaaactcttgtagggatggcagctaaaaggcaaaatgctattaattctgaaaacactttctttgctacaaagagacttattggccgtgcattcaacgacaaggaagttcagcgagatatggctgttatgccatataagattgtcaaatgtgagtcaaatgggcaagcctatctcagcacgtctaatggtctcattcaatcaccaagccagatagcatctatattactgaaatacctgaaacaaacttcagaagaatacttaggcgaaaaggttaatttggcagttattacagttccagcatattttaatgattctcaaaggcaagccacaaaagatgccggcaagttagctggcctaaatgttttgagagttattaacgaaccaactgcggccgccttaagctttggaattgatgataagaggaataatggattaattgcagtttacgatttgggtggtggtacatttgacatatccatcttggacattgaagatggcgtgtttgaggttcgtgctactaatggtgacacgcatttaggtggagaagattttgacaacgtcattgtaaactatattatagataccttcattcatgaaaaccctgaaattacacgggaagaaattacgaagaacagggagacaatgcaaaggttaaaagatgtttctgaaagagctaagatagatttatcccatgtgaagaaaacttttatcgaacttccatttgtatacaaaagcaaacatctacgagtgccaatgacagaggaagagctggataatatgactttgtcattaatcaacaggactatcccacctgtgaagcaagcattgaaagatgccgatatcgaaccggaggatatagatgaagtaatccttgttggtggtatgacccgtatgccaaagattagatctgttgtaaaagatctttttggtaagtctccaaattctagtgttaacccagatgaaacagttgctttaggagcagctattcaaggtggtattctatccggtgaaataaagaatgtcttacttttggatgtgacaccattgacattagggattgaaacatttggaggagcgttctcacccttgatacctagaaatacgacagttccagtaaaaaaaacagagatatttagtactggtgttgatgggcaagcgggtgttgatatcaaagtttttcagggtgaaagagggttagtgcgtaacaacaagttgattggtgatttgaaacttacaggaatcacccctttgcctaaaggcattccccaaatatatgttacttttgatatcgatgcggatggtatcatcaacgtatctgccgctgagaaaagtagtgggaaacaacaatccattactgtaataccaaattctgggttaagcgaagaggaaattgcaaaacttattgaagaagcaaatgcaaatagggcacaagataacttgatcaggcaaaggttagagcttatctctaaggctgacattatgataagtgatactgagaatttatttaaaagatatgaaaaactgatttctagcgaaaaagagtattctaatatcgtagaggacatcaaagctctgagacaagctataaagaattttaaggctaacgaaaatgacatgtcaattgatgtaaacggaataaaaaaagctacggatgcgctacagggtagggcattaaaattattccaaagcgcaacaaaaaaccagcagaatcaaggtaaataa

SEQ ID NO: 49055 - protein, 657 aa, Saccharomyces cerevisiae
MLKSGRLNFLKLNINSRLLYSTNPQLTKKVIGIDLGTTNSAVAYIRDSNDKKSATIIENDEGQRTTPSIVAFDVKSSPQNKDQMKTLVGMAAKRQNAINSENTFFATKRLIGRAFNDKEVQRDMAVMPYKIVKCESNGQAYLSTSNGLIQSPSQIASILLKYLKQTSEEYLGEKVNLAVITVPAYFNDSQRQATKDAGKLAGLNVLRVINEPTAAALSFGIDDKRNNGLIAVYDLGGGTFDISILDIEDGVFEVRATNGDTHLGGEDFDNVIVNYIIDTFIHENPEITREEITKNRETMQRLKDVSERAKIDLSHVKKTFIELPFVYKSKHLRVPMTEEELDNMTLSLINRTIPPVKQALKDADIEPEDIDEVILVGGMTRMPKIRSVVKDLFGKSPNSSVNPDETVALGAAIQGGILSGEIKNVLLLDVTPLTLGIETFGGAFSPLIPRNTTVPVKKTEIFSTGVDGQAGVDIKVFQGERGLVRNNKLIGDLKLTGITPLPKGIPQIYVTFDIDADGIINVSAAEKSSGKQQSITVIPNSGLSEEEIAKLIEEANANRAQDNLIRQRLELISKADIMISDTENLFKRYEKLISSEKEYSNIVEDIKALRQAIKNFKANENDMSIDVNGIKKATDALQGRALKLFQSATKNQQNQGK

SEQ ID NO: 49056 - DNA, 2474 bp, Pisum sativum
  CDS (46)..(2166)
ccaaattagggttagggtttcatcttatctcttcactcttcactcatggcttcttctgctcaaatacacggtctcggaaccgcttctttctcttccctcaaaaaaccctcttccatttccggtaattccaaaacccttttcttcggtcagcgactcaattccaaccactctcccttcacccgcgccgcattccctaagttaagtagcaaaacctttaagaagggtttcactttgagagttgtcagtgagaaagtcgttggtatcgatttgggaaccaccaattccgccgtcgccgccatggaaggtggaaaacctactataattaccaacgctgaaggtcagagaaccacgccatctgtggtggcgtacaccaagaacggtgataggttggtcggtcaaattgccaagcggcaggcggttgtgaatcccgagaacacgtttttctccgtcaagaggtttattggacggaagatgtctgaggttgacgaagagtcaaagcaggtctcttacagagttatcagagacgataacggcaacgttaaactcgattgtcctgctatcggtaaatcttttgcagctgaagaaatttctgctcaggttttaaggaagcttgttgatgatgcttcaaaatttttgaatgataaagtaaccaaggctgtggttactgtgcctgcttacttcaatgattcacaaaggactgctacaaaggatgctggaagaatagctggtcttgaagttcttagaatcatcaatgaaccaactgccgcatccttggcttatggttttgaaaggaaaaacaatgaaactattttggtatttgaccttggaggtggtacttttgatgtctcagtgctcgaggttggtgacggagtctttgaggtgctgtctacttctggtgacacacacttgggtggtgatgattttgataagagagttgttgattggctggctggtgacttcaagagagatgaaggtatagaccttttgaaagacaaacaagctcttcaacgtcttactgagacagctgagaaggcaaaaatggagctttcatcattgtctcagacaaacatcagtttgccattcataactgccacagcagatggccccaaacatattgagaccactcttacaagggctaaattcgaagagctgtgttcagatctccttgacagacttaggacaccagtggaaaattcattgagggatgcaaagctttcaattaaggatattgatgaggtgattcttgttggtggatcaacacgtattcctgctgttcaggagcttgtaaagaagctgattgggaaggatccaaatgtcactgttaatccagatgaggtggttgcccttggagctgctgttcaggctggtgttttggctggagatgttagtgacattgtgctgttggatgtttctccactgtcattggggttggaaactcttggtggtgtgatgaccaagattattccaagaaacactacccttcccacttcaaaatcagaggttttctctactgctgctgatgggcagacaagtgtagaaatcaatgtccttcaaggcgagagagaatttgttagggacaataaatctcttggtagcttccgtttagacggtatccctcccgctcctcgtggggttcctcaaatcgaggtgaaatttgacattgatgcaaatggtattctatcggttgctgccatagacaagggcacaggaaagaaacaagatattaccattactggtgccagcactttgcctggtgatgaggttgagagaatggtgagcgaggcagagagattttcaaaagaggacaaagaaaagagggaagcaatcgacaccaagaaccaggcagactctgttgtctaccagactgagaagcaattgaaagagctaggagagaaagttcccgcccctgttaaagagaaggtggaagctaaactgggagaacttaaagaagctattaccggtggttcgactcaaactattaaagatgccttggctgccctcaaccaggaagttatgcagcttggtcagtctctatataaccaacctggagctgcaggacaagcaggacctacaccacctggtagtgagtctggcccctcagaatcgtcaggcaaggagggacctgaaggagatgtgattgatgctgattttacagactctaaatgagttaatagagattattgaatagggattatttttattttatgcttctcctgtgctaaattcttagggatttttgtcaattgagtgcgagcgatcttctcttaatataattagactttatttgtttattataggtgctcattgacgcacacgtttctgtatcttttggaaattttgtctgaattacatgtattgtggatggagtttacaggccgaaaatgttgtaatttgatataagaaaaataagataaatttgcctgaaaaaaaaaaaaaaaaaaaaaaaaaaaaaaaaaaaaaaaaaaaaaaaaaaa

SEQ ID NO: 49057 - protein, 706 aa, Pisum sativum
MASSAQIHGLGTASFSSLKKPSSISGNSKTLFFGQRLNSNHSPFTRAAFPKLSSKTFKKGFTLRVVSEKVVGIDLGTTNSAVAAMEGGKPTIITNAEGQRTTPSVVAYTKNGDRLVGQIAKRQAVVNPENTFFSVKRFIGRKMSEVDEESKQVSYRVIRDDNGNVKLDCPAIGKSFAAEEISAQVLRKLVDDASKFLNDKVTKAVVTVPAYFNDSQRTATKDAGRIAGLEVLRIINEPTAASLAYGFERKNNETILVFDLGGGTFDVSVLEVGDGVFEVLSTSGDTHLGGDDFDKRVVDWLAGDFKRDEGIDLLKDKQALQRLTETAEKAKMELSSLSQTNISLPFITATADGPKHIETTLTRAKFEELCSDLLDRLRTPVENSLRDAKLSIKDIDEVILVGGSTRIPAVQELVKKLIGKDPNVTVNPDEVVALGAAVQAGVLAGDVSDIVLLDVSPLSLGLETLGGVMTKIIPRNTTLPTSKSEVFSTAADGQTSVEINVLQGEREFVRDNKSLGSFRLDGIPPAPRGVPQIEVKFDIDANGILSVAAIDKGTGKKQDITITGASTLPGDEVERMVSEAERFSKEDKEKREAIDTKNQADSVVYQTEKQLKELGEKVPAPVKEKVEAKLGELKEAITGGSTQTIKDALAALNQEVMQLGQSLYNQPGAAGQAGPTPPGSESGPSESSGKEGPEGDVIDADFTDSK

SEQ ID NO: 49058 - DNA, 2070 bp, Oryza sativa
  CDS (1)..(2070)
atggcgaccacgaccttccccacctcgacccccttcttcgcccaccatggcaggcggcggccgtccccgtccgtctccgtccgcaccgccgccgcggtgtacgggcgcggcgggggccggaggtggcggccgctgcgggtggcgtgcgagaaggtggtcgggatcgacctcgggaccaccaactccgcggtggcggccatggagggcggcaagccgacgatcgtcaccaacgccgagggcgcccgcaccacgccgtcggtcgtcgcctacaccaagtccggtgaccggctggtggggcagatcgccaagcgacaggcggtcgtcaacccggagaacaccttcttctccgtcaagcgcttcatcggccgcaagatgaacgaagtcgacgaggagtccaagcaggtctcctaccgcgtcatcagggacgacaacggcaacgtcaagctcgactgtcccgccattggcaagcagttcgccgccgaggagatctccgcccaggtgcttagaaagctggtggatgatgcatcaaagttcttgaacgataaagtcacaaaggcagtgatcacagtcccagcatatttcaatgactcacaaaggacagcaacaaaagatgctggccggattgctgggttggaagttctccgcatcataaacgagcctactgcagcatctttggcatatgggtttgaaaagaagaacaatgagaccattcttgtttttgacctgggaggaggcacatttgatgtttcagttcttgaagttggtgatggtgtttttgaggtgctgtctacatctggtgacactcaccttggtggtgatgactttgacaagagggttgttgattggctggcggggaacttcaagaatgatgaaggtattgacctactaaaagacaagcaggccttgcaacgtcttacagaagcagctgagaaggcaaagatggagctatcatccttgacccaaacaaatatcagtttacccttcattacagctactgctgatgggcccaagcatatcgagacaactcttaccagggctaaatttgaggagctatgttcagatcttcttgacaggttgaggacccctgtggacaatgccctcagagatgcaaagttgtcatttaaagacatagatgaggtgatccttgtcggtggctccaccagaattccagctgtgcaggatcttgtgaagaaaatgactggaaaggaccccaatgtgactgtcaaccctgatgaggttgttgcacttggagcagctgttcaggcaggagtgttgtctggtgatgtgagcgacattgttcttcttgatgtaacaccactttctctgggtttggagacactgggtggtgtgatgaccaagattatcccaaggaacacaactttgcccacctccaagtcagaggtcttctcaaccgctgctgatggccagactagcgtggagatcaatgtcctccaaggagagagagagtttgtcagggacaacaaatctcttggtagctttcggcttgatggaattcctcctgccccacggggtgttccacaaatcgaagttaagtttgacatcgatgccaatggcatcctttctgtcagcgccgtagacaagggtactggaaagaagcaggacattacgataactggtgccagcacattgccgaaggatgaggtggagaagatggttgaagaagcagagaagtttgccaaggaggacaaagagaagagggacgcaatcgacaccaagaaccaggcagagtctgtcatctaccagactgagaaacaattgaaggagctcggtgacaaggtcccaggcgatgtgaagggtaaggttgaggcgaagctgacggagctcaaggacgctgttgcaggtggctcgacacagacgatgaaggatgctctcgctgctctgaaccaggaagtgatgcagctggggcaggccctctacagccagcagggtgccccaggagcaggacctaccccaggagctgatgctgccgctggctctgctggcccatccgagaagccaggaggcgaggaaggtgatgtcatcgatgctgattttacagacagccaatga

SEQ ID NO: 49059 - protein, 689 aa, Oryza sativa
MATTTFPTSTPFFAHHGRRRPSPSVSVRTAAAVYGRGGGRRWRPLRVACEKVVGIDLGTTNSAVAAMEGGKPTIVTNAEGARTTPSVVAYTKSGDRLVGQIAKRQAVVNPENTFFSVKRFIGRKMNEVDEESKQVSYRVIRDDNGNVKLDCPAIGKQFAAEEISAQVLRKLVDDASKFLNDKVTKAVITVPAYFNDSQRTATKDAGRIAGLEVLRIINEPTAASLAYGFEKKNNETILVFDLGGGTFDVSVLEVGDGVFEVLSTSGDTHLGGDDFDKRVVDWLAGNFKNDEGIDLLKDKQALQRLTEAAEKAKMELSSLTQTNISLPFITATADGPKHIETTLTRAKFEELCSDLLDRLRTPVDNALRDAKLSFKDIDEVILVGGSTRIPAVQDLVKKMTGKDPNVTVNPDEVVALGAAVQAGVLSGDVSDIVLLDVTPLSLGLETLGGVMTKIIPRNTTLPTSKSEVFSTAADGQTSVEINVLQGEREFVRDNKSLGSFRLDGIPPAPRGVPQIEVKFDIDANGILSVSAVDKGTGKKQDITITGASTLPKDEVEKMVEEAEKFAKEDKEKRDAIDTKNQAESVIYQTEKQLKELGDKVPGDVKGKVEAKLTELKDAVAGGSTQTMKDALAALNQEVMQLGQALYSQQGAPGAGPTPGADAAAGSAGPSEKPGGEEGDVIDADFTDSQ

SEQ ID NO: 49060 - DNA, 2055 bp, Oryza sativa
  CDS (1)..(2055)
atggccatcggatctctcatcgcgtcgaggctggccaggtccaccggccacgccctcgcctccgccgcctctcaggctccgatggcccgtcacgcggcggcgtctcctctgttgtccaggcttggatcagtggctcgtgcgttcagctcaaagcctgccgccgcggatgttattgggatcgatttgggaacgaccaactcgtgtgtctccgttatggaagggaagacaccacgagtgattgagaatgcggaaggcgcaaggacgacaccctccattgttgccaagaaccagaatggtgatcttttggttggcataaccgcgagtcggcaggcagtgaccaatgcccagaacacggtccgtgggtctaagcgcttgattggtagaacttttgatgacccacagactcagaaggaaatgaagatggtgccttacaagattgtcaggggacctaatggtgatgcttgggtggagatgggtgggcagcagtactccccaagccagattggtgcatttgttctcaccaagatgaaggaaactgcagaggctttccttggcaaaactgtctccaaggctgttatcactgtcccagcttatttcaatgatgctcagcgccaggctaccaaggatgctggtaggattgccgggctagaggtgatgaggattatcaatgaacccactgccgcagctctgtcatatgggatgaacaacaaggagggtctgattgctgtatttgacttgggtggtggcacatttgatgtatcaatccttgagatctccaatggagtttttgaggtcaaggcaaccaatggagatactttccttggtggtgaggactttgatggtgcattgcttgactacctggttagtgagtttaagaagtctgacaacattgatctgagcaaggataagttggccttgcaaaggctcagggaagctgcagagaaggccaaggtcgagctttcctcaaccatgcagactgaaatcaacctcccctttattactgctgatgccactggtgcaaaacacttcaatattaccttgaccagatcaaagttcgagtctcttgtgcagtctctcattgagagaactcgcatcccctgtgtgaactgcctgaaggatgcaggcgtatctgcaaaagacattgatgaggttctactggttggtggtatgacgagggtgccaaaggttcaggatattgtttctcagatattcaacaagacaccaagcaagggtgtcaatcctgatgaggctgttgccatgggagctgccattcagggtggcatcttgaggggtgatgtgaaggagctccttttgctggatgtcactcccctctcccttggtattgagactcttggaggcatcttcacaaggctaattaatcggaacacaaccattccaaccaagaagagtcaggtcttctccactgctgcagacaaccagacccaggttggaatcaaggtgctccagggtgagagggagatggccacagacaacaagcttcttggtgagttccagcttgaaggtattccaccagccccaagaggtatgcctcagattgaggtcacattcgacatcgatgccaatggtattgtcaaggtgtcagccaaggacaagtccactggcaaagagcaagaaatcactataaagtcttcaggcggtttgtctgaaagtgatatcgagaagatggtgagggaggctgagctacattctcagaaggatcaggaaaggaaatcattgattgatctgaagaactctgcagacaccacgatctacagcattgagaagagtgtcagtgagtacaaggacaaggttcctgctgaagtcaccaatgagattcagtctgctgtatctgatctaagagcagcaatggctgaggatgatttggagaagatcaagcagaagcttgaggctgcaaacaaggcagtttcaaagattggagagcacatgcaacaaggtggcggtggcggcagtggcggcggcagcagcagcagcagtggtggtgaccagactcctgaggctgaataccaggatgctgctaaggaagctaagatgtag

SEQ ID NO: 49061 - protein, 684 aa, Oryza sativa
MAIGSLIASRLARSTGHALASAASQAPMARHAAASPLLSRLGSVARAFSSKPAAADVIGIDLGTTNSCVSVMEGKTPRVIENAEGARTTPSIVAKNQNGDLLVGITASRQAVTNAQNTVRGSKRLIGRTFDDPQTQKEMKMVPYKIVRGPNGDAWVEMGGQQYSPSQIGAFVLTKMKETAEAFLGKTVSKAVITVPAYFNDAQRQATKDAGRIAGLEVMRIINEPTAAALSYGMNNKEGLIAVFDLGGGTFDVSILEISNGVFEVKATNGDTFLGGEDFDGALLDYLVSEFKKSDNIDLSKDKLALQRLREAAEKAKVELSSTMQTEINLPFITADATGAKHFNITLTRSKFESLVQSLIERTRIPCVNCLKDAGVSAKDIDEVLLVGGMTRVPKVQDIVSQIFNKTPSKGVNPDEAVAMGAAIQGGILRGDVKELLLLDVTPLSLGIETLGGIFTRLINRNTTIPTKKSQVFSTAADNQTQVGIKVLQGEREMATDNKLLGEFQLEGIPPAPRGMPQIEVTFDIDANGIVKVSAKDKSTGKEQEITIKSSGGLSESDIEKMVREAELHSQKDQERKSLIDLKNSADTTIYSIEKSVSEYKDKVPAEVTNEIQSAVSDLRAAMAEDDLEKIKQKLEAANKAVSKIGEHMQQGGGGGSGGGSSSSSGGDQTPEAEYQDAAKEAKM

SEQ ID NO: 49062 - DNA, 1956 bp, Triticum aestivum
  CDS (1)..(1956)
atggccggaaaaggagacgggccggcgatcggcatcgatctcggcaccacctactcctgcgtcggcgtctggcagcatgaccgggtggagatcatcgccaacgaccagggcaaccgcaccacgccgtcctatgtcgccttcaccgacaccgagcggctcatcggcgacgccgcgaagaaccaggtcgccatgaacccgatcaacaccgtcttcgatgcgaagcggctcatcggtcggcgtttctcggacgcgtcggtgcagagcgacgccaagctgtggccgttcaaggtgatcccaggccccgctgacaagccgatgatcggggtacagtacagaggcgaggacaagcagttctcggccgaggagatctcctccatggtgctcaacaagatgaaggagacggccgaggcctacctcggcacaaccatcaagaacgcagtcgtcaccgtccccgcctacttcaacgactcccagcgccaggccaccaaggatgcaggcgtcatctctggcctcaacgtcatgcggatcatcaacgagcctaccgccgccgccatcgcctacggtctcgacaagaagtccaccagcgtcggcgagaagaacgtgctcatctttgatctcggcggcggtaccttcgatgtctcgctcctcaccattgaggagggtatcttcgaggtcaaggccactgccggagacacccacctgggaggcgaggacttcgacaaccggatggtcaaccacttcgtgcaggaattcaagagaaagaacaagaaggacatcagcggcaacccgagggcgctccggcggctcaggacagcgtgcgagagggcgaagaggacactctcctccaccgcccagaccaccatcgagatcgattccctcttcgagggcatcgacttctacactaccatcacccgcgcccggttcgaggagctcaacatggacctcttccgcaagtgcatggagcccgttgagaagtgcctccgggacgccaagatggacaagagcaccgtgcacgatgttgtcctcgtcggaggatccacacgtatcccccgtgtgcagcagctcctccaggacttctttaacgggaaggagctctgcaagagcatcaaccctgacgaggccgtcgcgtatggagccgccgttcaggctgccatcctcactggcgagggcaacgagaaggtgcaggacttgctcctgcttgacgtcacaccgctctcgcagggcctggagacggccggaggtgtcatgaccgtgctgatcccaaggaacacgacaatccccaccaagaaggagcaggtcttctccacctactctgacaaccagcccggcgtgctcatccaggtgtatgagggcgagagggcgaggaccaaggacaacaacctgctcggcaagttcgagctctccgggatcccaccggcgcccaggggtgtcccccagatcaccgtgtgctttgacattgatgccaacggtatcctgaatgtctcggcggaggacaagaccaccggacagaagaacaagatcacaattaccaacgacaaggggcggctgagcaaggaggacatcgagaagatggtgcaggaggccgagaagtacaaggctgaggacgaggagcacaagaagaaggtggactccaagaacgccctggagaactacgcttacaacatgcgtaacaccatcaaggatgacaagatcgcctccaagctcccagaggccgacaagaagaagatcgaggatgctatcgatggtgccatcacctggctcgacaacaaccagctcgccgaggctgaagagtttgatgacaagaggaaagagctggagggcatttgcaaccccatcatcgccaagatgtaccagggtgccggcgctgaaatgcctggtggcatggatgaggatgctccggccagtgccgcaggcggcagcagcggcccagggcccaagattgaggaggtcgactaa

SEQ ID NO: 49063 - protein, 651 aa, Triticum aestivum
MAGKGDGPAIGIDLGTTYSCVGVWQHDRVEIIANDQGNRTTPSYVAFTDTERLIGDAAKNQVAMNPINTVFDAKRLIGRRFSDASVQSDAKLWPFKVIPGPADKPMIGVQYRGEDKQFSAEEISSMVLNKMKETAEAYLGTTIKNAVVTVPAYFNDSQRQATKDAGVISGLNVMRIINEPTAAAIAYGLDKKSTSVGEKNVLIFDLGGGTFDVSLLTIEEGIFEVKATAGDTHLGGEDFDNRMVNHFVQEFKRKNKKDISGNPRALRRLRTACERAKRTLSSTAQTTIEIDSLFEGIDFYTTITRARFEELNMDLFRKCMEPVEKCLRDAKMDKSTVHDVVLVGGSTRIPRVQQLLQDFFNGKELCKSINPDEAVAYGAAVQAAILTGEGNEKVQDLLLLDVTPLSQGLETAGGVMTVLIPRNTTIPTKKEQVFSTYSDNQPGVLIQVYEGERARTKDNNLLGKFELSGIPPAPRGVPQITVCFDIDANGILNVSAEDKTTGQKNKITITNDKGRLSKEDIEKMVQEAEKYKAEDEEHKKKVDSKNALENYAYNMRNTIKDDKIASKLPEADKKKIEDAIDGAITWLDNNQLAEAEEFDDKRKELEGICNPIIAKMYQGAGAEMPGGMDEDAPASAAGGSSGPGPKIEEVD

SEQ ID NO: 49064 - DNA, 1992 bp, Zea mays
  CDS (1)..(1992)
atggatcgggttcgtggatccgcgttcctgctcggcgtcctgctcgcaggatccctgttcgcgttttcagttgctaaggaggagaccaagaagctcggcaccgtgatcggtatcgatctcggaaccacctactcctgtgtgggtgtgtacaagaacggacatgtcgagatcatcgccaatgaccagggtaaccgtatcacaccctcatgggttgccttcaccgatagcgagaggctcatcggtgaggctgccaagaaccaggcagctgtcaaccctgagaggaccatctttgacgtcaagcgtctcatcggaagaaagtttcaggataaggaagtccagagggacatgaaacttgtcccctacaagattattaacaaggatggcaagccatacattcaggtcaagatcaaggatggggagaacaaggtcttcagccctgaggagatcagtgccatgattcttggcaagatgaaggatactgctgaggcgtaccttggcaagaagatcaacgatgctgtcgtcactgtccctgcatacttcaatgatgcgcagaggcaggcaaccaaggatgctggtgtcattgccggcctcaatgttgctaggatcatcaatgagccaactgctgctgctattgcctatggtttggacaagaagggtggcgagaagaacatccttgtctttgaccttggtggtggtacttttgatgtcagtatcttgaccattgataacggtgtgtttgaggtgctggccaccaatggtgacacccatcttggaggtgaggattttgaccagaggatcatggaatacttcatcaagttgatcaagaagaagtacagcaaggacatcggcaaggacaaccgtgctcttggaaagctgaggagggaagctgagcgtgccaagagagcccttagcaaccagcaccaggtccgagttgagatcgagtccctctttgacgggaccgacttctcggagccgctgacccgtgccaggtttgaggagctgaacaacgatctgttccgcaagactatgggccctgtcaagaaggccatggaggacgctggccttgagaagagccagatccacgagatcgtcctggttggtggaagcaccaggattcccaaggtccagcagctcctgaaggactacttcaatggcaaggagcccaacaagggtgtgaaccctgatgaggctgttgcctttggtgccgcggtgcagggaagcatcttgagcggcgagggtggtgacgagacaaaagatatcctcctccttgatgtggctcctctcaccctgggtattgagaccgtcggtggagtcatgaccaagttgatcccgaggaacactgtcatcccgaccaagaagtcgcaggtgttcaccacctaccaggaccagcagaccactgtctccatccaggtctttgagggtgagcgcagcatgaccaaggactgccgtcttctgggcaagttcgacctcaatggcattccgtcagctccgaggggcacaccccagatcgaggtgaccttcgaggtggacgccaacggtatcctgaacgtgaaggcggaggacaagggcacgggcaagtcggagaagatcacgatcacgaacgagaaggggcggctgagccaggaggagatcgaccgcatggtgcgggaggcggaggagttcgcggaggaggacaagaaggtgaaggagcggatcgacgcccgcaaccagctggagacgtacgtgtacaacatgaagaacacggtgggcgacaaggacaagctcgcggacaagctggaggcggaggagaaggagaaggtggaggaggccctcaaggaggcgctcgagtggctggacgacaaccagtccgccgagaaggaggactacgaggagaagctcaaggaggtggaggccgtgtgcaaccccatcgtgtcggccgtataccagcggtcgggcggcgcccccggtggtgatgccgacggcggcgtcgacgacgaccacgacgagctgtag

SEQ ID NO: 49065 - protein, 663 aa, Zea mays
MDRVRGSAFLLGVLLAGSLFAFSVAKEETKKLGTVIGIDLGTTYSCVGVYKNGHVEIIANDQGNRITPSWVAFTDSERLIGEAAKNQAAVNPERTIFDVKRLIGRKFQDKEVQRDMKLVPYKIINKDGKPYIQVKIKDGENKVFSPEEISAMILGKMKDTAEAYLGKKINDAVVTVPAYFNDAQRQATKDAGVIAGLNVARIINEPTAAAIAYGLDKKGGEKNILVFDLGGGTFDVSILTIDNGVFEVLATNGDTHLGGEDFDQRIMEYFIKLIKKKYSKDIGKDNRALGKLRREAERAKRALSNQHQVRVEIESLFDGTDFSEPLTRARFEELNNDLFRKTMGPVKKAMEDAGLEKSQIHEIVLVGGSTRIPKVQQLLKDYFNGKEPNKGVNPDEAVAFGAAVQGSILSGEGGDETKDILLLDVAPLTLGIETVGGVMTKLIPRNTVIPTKKSQVFTTYQDQQTTVSIQVFEGERSMTKDCRLLGKFDLNGIPSAPRGTPQIEVTFEVDANGILNVKAEDKGTGKSEKITITNEKGRLSQEEIDRMVREAEEFAEEDKKVKERIDARNQLETYVYNMKNTVGDKDKLADKLEAEEKEKVEEALKEALEWLDDNQSAEKEDYEEKLKEVEAVCNPIVSAVYQRSGGAPGGDADGGVDDDHDEL

SEQ ID NO: 49066 - DNA, 2037 bp, Zea mays
  CDS (1)..(2037)
atggcggcgtcgctgctcctccgcgctgtgcgccgaagggagctcgcgtcccctctcggatccctgggtgccaacttacagtcaacatgtgctgccaacatatgctcaaaatggggaaattttgcaagaccttttagtgcaaaagctgctggaaatgaggttattgggattgatttggggacaactaactcttgtgttgctgttatggaaggaaagaacccaaaagttattgagaatgctgaaggtgcgagaacaacaccatctgttgtcgcatttactcagaagggtgaaagacttgttggtactccagccaagcgccaggcagtaaccaatccccagaatactttctttggaacaaagaggatgattgggcgacgctttgatgatccacagacacagaaagagatgaagatggtgccatacaaaatcgtgaaggctccaaatggtgatgcttgggttgaaacaacagatggcaagcagtactcaccgagtcaggtcggtgcatttgtgctgaccaagatgaaggagacagctgaatcttaccttggcaaatctgtctcaaaggcagtgattactgttccagcttatttcaatgatgctcagcgtcaggccacaaaggatgctggtcgcattgctggccttgaggttgaaaggatcatcaatgaacctacagcagctgctctgtcttatggaatgaacaacaaggaaggcttgatagcggtatttgatcttggaggaggaacttttgatatctctatcctggagatctcaaatggagtttttgaggtgaaagcaacaaatggtgatactttcttgggtggtgaagattttgataacacgctactagagttcttggtgagtgatttcaagaaaaccgagggcattgatctgtcaaaggatagattggccctgcaaaggcttcgtgaagctgctgaaaaggcaaaggttgaactttcatcgacttctcagacagaaatcaatctgccattcataacagctgatgcttcaggggcaaaacatttgaacattacactgacaaggtcgaaatttgaatctcttgtacacaatctgattgaacggactagagatccatgcaagaactgcttgaaggatgccggaatatctactaaagaggtggatgaagtacttcttgttggtggaatgactagggttccaaaggtgcaggaggtagtctctgaaatcttcggaaagagcccaagcaaaggagtgaacccagatgaagctgtggccatgggtgctgccattcagggtggcattctccgtggagatgttaaggagcttcttcttcttgatgttactcccctgtcactaggtattgagacactcggtggtatcttcaccagattgatcaacagaaacactacaatccctacaaagaaaagtcaggtgttctcaactgctgctgacaatcagacccaagtgggtatccgtgtgttgcaaggtgagcgtgaaatggcagcagacaacaagcttcttggtgaatctgacctcgtgggcattccacctgctccaagaggcttgcctcagattgaggttacattcgacatcgatgccaatggaatcgtgactgttgctgccaaagacaaggctactgggaaggagcagaacatcaccatccgatcctcaggtgggctgtctgaggctgacatccagaagatggtgcaagaagccgagctgcatgcccagaaggatcaggaacggaaagccctcattgacatcaggaacactgcggacaccactatctacagcatcgagaagagtctgggggagtacagggacaagatcccggcagaggttgcatccgagatcgaggcagccatcgctgacctccgtcaggagatggcctcggatgacatcgagaagatcaaggccaagcttgaggctgccaacaaggctgtctcgaagattggtcagcacatgtcaggtggtggctctggcgactcacagtcgggatctggacctcagggtggcggtgaccaggcgccggaggcagagtatgaagaggttaaaaagtga

SEQ ID NO: 49067 - protein, 678 aa, Zea mays
MAASLLLRAVRRRELASPLGSLGANLQSTCAANICSKWGNFARPFSAKAAGNEVIGIDLGTTNSCVAVMEGKNPKVIENAEGARTTPSVVAFTQKGERLVGTPAKRQAVTNPQNTFFGTKRMIGRRFDDPQTQKEMKMVPYKIVKAPNGDAWVETTDGKQYSPSQVGAFVLTKMKETAESYLGKSVSKAVITVPAYFNDAQRQATKDAGRIAGLEVERIINEPTAAALSYGMNNKEGLIAVFDLGGGTFDISILEISNGVFEVKATNGDTFLGGEDFDNTLLEFLVSDFKKTEGIDLSKDRLALQRLREAAEKAKVELSSTSQTEINLPFITADASGAKHLNITLTRSKFESLVHNLIERTRDPCKNCLKDAGISTKEVDEVLLVGGMTRVPKVQEVVSEIFGKSPSKGVNPDEAVAMGAAIQGGILRGDVKELLLLDVTPLSLGIETLGGIFTRLINRNTTIPTKKSQVFSTAADNQTQVGIRVLQGEREMAADNKLLGESDLVGIPPAPRGLPQIEVTFDIDANGIVTVAAKDKATGKEQNITIRSSGGLSEADIQKMVQEAELHAQKDQERKALIDIRNTADTTIYSIEKSLGEYRDKIPAEVASEIEAAIADLRQEMASDDIEKIKAKLEAANKAVSKIGQHMSGGGSGDSQSGSGPQGGGDQAPEAEYEEVKK

SEQ ID NO: 49068 - DNA, 2127 bp, Brassica napus
  CDS (1)..(2127)
atggcttcctccaccgctcagattcacgtcctcggcggaattggattcgccgcttcttccaagaagaatctcaatgccaaagctaacctcaagccgagaagcgccttcttcggcaccaggaccggtcctttctcagcccagacctccgacttcctgaaaatgaacaccaggaaaggctccagatacgccgtaggtccggtccgcgtggcgaacgagaaggtcgtcgggatcgatttgggaacgacgaactccgccgtagctgccatggaaggaggaaagccgacgattgtgacgaacgccgaaggtcagaggacgacgccgtctgtggtggcgtacacgaagagcggtgacaggctcgtggggcagattgcgaagaggcaggcggttgttaatccggagaacacgttcttctcggtgaagaggtttatcggtaggaggatgaacgaggttgatgaggaggctaagcaggtgtcttacagagttgtgaaggatgataacgggaacgttaagctcgagtgtccagcgattgggaaacagtttgctgctgaggagatttcagctcaggttttgaggaagcttgtggatgatgcgtcgaggttcttgaatgagaaagttaccaaggctgttgttactgtgcctgcttactttaatgactcgcagaggacggctactaaagatgctggtcgcattgctgggttggaagttcttcgtattatcaatgaacccacggctgcttctttggcttatggttttgagaggaaaagcaatgagacaattctagtctttgatcttggtggtggtacctttgatgtctcagtgcttgaggttggtgatggtgtgtttgaagtgctttccacttctggtgacacacatttgggtggtgatgactttgacaagagagttgttgattggcttgcttcaaatttcaagaaagatgaaggcattgatcttctgaaagacaagcaagcacttcagaggctgacagaagcagcagaaaaagctaaaatcgagctttcctcgctgactcagacaaatatgagtttgccatttatcacagccacagctgatgggcctaaacacatagaaacaaccctcacacgtgccaagtttgaagaattgtgttcagatttacttgacaggtgtaagactcccgttgagaattcactgagagatgcaaagctcagcttcaatgatattgatgaagtgatccttgttggtggatccacacgtagtcctgctgttcaggaagtcgccaggaagctgactgggaaagaacccaatgtcacagtaaaccctgatgaggttgtagctctaggtgctgcggtccaggctggggttctggctggagatgtgagcgacattgtccttctcgacgtgacaccgctttccattggtttagaaacacttggtggtgttatgaccaagattattccaaggaactcaactctgcctacctctaagtcagaagtcttctcgactgctgctgatggacagacaagtgttgagattaatgtgctccaaggggagagagagtttgtccgggataacaagtctcttggcagcttccgtctagatggtatcccaccagcaccacgtggagttccacaaatcgaagtcaaatttgacattgatgccaatggtattctatccgtcagtgctagtgacaaaggcaccggaaagaaacaagacatcaccattactggtgccagtacattgcccaaggacgaggtagaccaaatggtccaagaagcagaaaggtttgcaaaggatgacaaggagaagagagaagcaattgacacaaagaaccaagcagactcagtggtgtaccagacagagaagcaacttaaagaactcggagagaagataccaggtgaagtgaaagagaaggtggaggccaagctacaagagctgaaggacaagcttgcaagtggaaccactcaagaaatcaaggacacaatggctgctcttaaccaagaagtgatgcagattggtcagtcgatgtacaaccagcctggagctggagcagcaggtgcaggtccttcccctggaggtgaagatgcttcatcagcagactcaacaagtaaaggtggagatgatgtgattgatgctgacttcacagacacatga

SEQ ID NO: 49069 - protein, 708 aa, Brassica napus
MASSTAQIHVLGGIGFAASSKKNLNAKANLKPRSAFFGTRTGPFSAQTSDFLKMNTRKGSRYAVGPVRVANEKVVGIDLGTTNSAVAAMEGGKPTIVTNAEGQRTTPSVVAYTKSGDRLVGQIAKRQAVVNPENTFFSVKRFIGRRMNEVDEEAKQVSYRVVKDDNGNVKLECPAIGKQFAAEEISAQVLRKLVDDASRFLNEKVTKAVVTVPAYFNDSQRTATKDAGRIAGLEVLRIINEPTAASLAYGFERKSNETILVFDLGGGTFDVSVLEVGDGVFEVLSTSGDTHLGGDDFDKRVVDWLASNFKKDEGIDLLKDKQALQRLTEAAEKAKIELSSLTQTNMSLPFITATADGPKHIETTLTRAKFEELCSDLLDRCKTPVENSLRDAKLSFNDIDEVILVGGSTRSPAVQEVARKLTGKEPNVTVNPDEVVALGAAVQAGVLAGDVSDIVLLDVTPLSIGLETLGGVMTKIIPRNSTLPTSKSEVFSTAADGQTSVEINVLQGEREFVRDNKSLGSFRLDGIPPAPRGVPQIEVKFDIDANGILSVSASDKGTGKKQDITITGASTLPKDEVDQMVQEAERFAKDDKEKREAIDTKNQADSVVYQTEKQLKELGEKIPGEVKEKVEAKLQELKDKLASGTTQEIKDTMAALNQEVMQIGQSMYNQPGAGAAGAGPSPGGEDASSADSTSKGGDDVIDADFTDT

SEQ ID NO: 49070 - DNA, 1953 bp, Brassica napus
  CDS (1)..(1953)
atgtctggtaaaggagaaggtccagcgatcggtatcgatctcggtacgacgtactcttgcgtcggagtgtggcaacacgaccgcgttgagatcatcgctaatgatcaaggtaacaggaccacgccgtcttacgtcgctttcactgactccgagaggctcatcggtgatgccgctaagaaccaggtcgccatgaaccctatcaacaccgtcttcgatgctaagaggttgatcggtcgtcgtttcagcgacagctctgtacagagcgacatgaagttgtggccattcaagatcatcgccggacctgccgagaagccaatgatcgtcgtcaactacaagggcgaggagaagcagttcgccgccgaggagatttcctccatggttctcattaagatgcgtgagattgctgaggcttacctcggcgtcaccatcaagaacgccgtcgtcactgtccctgcctacttcaacgactctcagcgtcaggctactaaggacgctggtgtgattgccggtttgaacgttatgcgtatcatcaacgagcccaccgctgctgctattgcctacggtcttgacaagaaggcgaccagcgttggagagaagaacgtgttgatctttgatcttggtggtggtacttttgatgtctcccttctcactattgaggaaggtatctttgaggttaaggccactgctggagacacacatcttggtggtgaggacttcgacaacagaatggtgaaccactttgttcaggagtttaagaggaagagcaagaaggacattaccggaaacccgagagctcttaggaggttgaggacggcctgtgagagagcaaagaggactctttcctccactgctcagaccaccatcgagattgactctctctttgaggggatcgacttctactctgcactcacccgtgctaggttcgaggagctcaacatggatctctttaggaagtgtatggagccagtggagaagtgtctccgtgatgctaagatggacaagagcaccgtccacgatgttgttcttgtcggtggctccacccgtattcccaaggttcagcaattgcttcaggacttcttcaacggcaaggagctgtgcaagtctatcaaccccgacgaggccgttgcttacggtgctgccgtccagggagctattctcagtggtgaaggaaacgagaaggtccaagatcttctcttgctcgatgtcactcctctctcactcggtcttgagaccgccggtggtgtcatgaccactttgatcgcaagaaacacaaccattccgaccaagaaggagcaagtgttctcgacctactccgacaaccaacctggtgtgttgatccaggtgtttgaaggggagagagccaggaccaaggacaacaacctcctcggaaagtttgagctctccggaatccctccagctccacgtggtgtcccccaaatcactgtctgcttcgacattgacgccaacggtatcctcaacgtctctgctgaggacaagaccaccggacagaagaacaagatcaccatcaccaacgacaagggtcgcttgtctaaggacgagatagagaagatggtgcaagaggctgagaagtacaagtctgaggatgaggagcacaagaagaaggttgaagccaagaatgcgctcgagaactacgcttacaacatgaggaacacgatccgtgatgacaagattggtgagaagcttcctgctgcggacaagaagaagattgaggattctgttgaggaggcgatccagtggctcgatgggaaccagacggctgaagctgacgagtttgaagacaagatgaaggagttggagagcgtatgcaatccgattattgctaagatgtatcaaggagctggtggtgaagcaggtggccccgctgggatggatgatgatgaagctcctccttccgctggaggtgctggccccaagattgaggaagtcgactaa

SEQ ID NO: 49071 - protein, 650 aa, Brassica napus
MSGKGEGPAIGIDLGTTYSCVGVWQHDRVEIIANDQGNRTTPSYVAFTDSERLIGDAAKNQVAMNPINTVFDAKRLIGRRFSDSSVQSDMKLWPFKIIAGPAEKPMIVVNYKGEEKQFAAEEISSMVLIKMREIAEAYLGVTIKNAVVTVPAYFNDSQRQATKDAGVIAGLNVMRIINEPTAAAIAYGLDKKATSVGEKNVLIFDLGGGTFDVSLLTIEEGIFEVKATAGDTHLGGEDFDNRMVNHFVQEFKRKSKKDITGNPRALRRLRTACERAKRTLSSTAQTTIEIDSLFEGIDFYSALTRARFEELNMDLFRKCMEPVEKCLRDAKMDKSTVHDVVLVGGSTRIPKVQQLLQDFFNGKELCKSINPDEAVAYGAAVQGAILSGEGNEKVQDLLLLDVTPLSLGLETAGGVMTTLIARNTTIPTKKEQVFSTYSDNQPGVLIQVFEGERARTKDNNLLGKFELSGIPPAPRGVPQITVCFDIDANGILNVSAEDKTTGQKNKITITNDKGRLSKDEIEKMVQEAEKYKSEDEEHKKKVEAKNALENYAYNMRNTIRDDKIGEKLPAADKKKIEDSVEEAIQWLDGNQTAEADEFEDKMKELESVCNPIIAKMYQGAGGEAGGPAGMDDDEAPPSAGGAGPKIEEVD

SEQ ID NO: 49072 - DNA, 2010 bp, Brassica napus
  CDS (1)..(2010)
atggctcgctcatttggagcaaacggcacggttgtgctcgcgatcatcttcttcggaagtttatttgcgttttcaacggctaaagaagaggccacgaagttgggaacagtgatagggatagatcttggtaccacctactcttgcgttggtgtttacaagaacggtcatgttgaaatcattgccaatgaccaaggcaaccgtattactccttcctgggttgctttcaccgactccgagaggctcattggtgaggctgctaagaaccaagctcctcttaatcctgagagaaccgtatttgacgtcaagagattgatcggcagaaaattcgaggacaaagaggttcagaaggacaggaagcttgtgccttaccagattgtgaacaaggatgggaagccgtacattcaagtgaagatcaaggatggtgagaccaaggttttctctcctgaggaggtcagtgccatgatcttgactaagatgaaggagactgctgaagcttaccttggcaagaaaatcaaggacgctgttgtcactgttccagcttacttcaacgatgcccagaggcaggctacaaaggacgctggtgttattgctggtctcaatgttgccagaatcatcaacgagcccactgctgctgctattgcctacggtcttgacaagaagggtggtgagaagaacatccttgtctttgaccttggtggtggtacctttgatgtcagtgttttgaccattgacaacggagtgttcgaggttctctccacaaatggtgacactcacttgggaggtgaggactttgaccacaggatcatggattactttatcaagttgatcaagaagaagcaccaaaaggacatcagcaaggacaacaaggctcttggaaagctccgcagggaatgtgagagggccaagagagctcttagtagccagcaccaagtccgtgttgagattgagtccctctttgatggtcttgatttctcggagcctctcaccagagctcgtttcgaggagcttaacaatgacttattcaggaagacaatgggaccagtgaagaaggccatggatgatgctggtctacagaagagtcagatcgatgagattgtccttgttggtggaagcaccaggatcccaaaggttcagcagctgttgaaggacttcttcgaaggaaaagagccgaacaagggtgtgaaccccgacgaagctgttgcttatggtgcggctgtccagggtggtattttgagcggagaaggcggtgacgagaccaaagatatccttcttcttgacgttgcgccactcactttgggtattgagaccgtgggaggagtgatgacaaaacttatcccgagaaacacagttattccaaccaagaagtctcaggttttcacgacataccaagaccaacagaccactgtctcaattcaggtctttgaaggtgagcgaagtctcaccaaggactgcaggctgctcgggaacttcgaccttaccggaattccaccagccccaagaggaacacctcaaatcgaggtcacgtttgaagtggacgccaacggtatcctgaacgtgaaagcagaggacaaggcaagtggtaaatcagagaagatcacaatcacaaacgagaagggacgtctgagccaagaagagattgaccggatggtgaaggaggcagaggagtttgcagaggaagacaagaaggtgaaggagagaatcgacgccaggaacagcctcgagacatacgtgtacaacatgaagaaccaaataaacgacaaggacaagctcgcggacaaacttgagggtgacgagaaggagaagattgaagcagcgaccaaagaagcattggagtggcttgacgagaaccaaaactcagagaaggaagagtatgatgagaagttgaaggaagtagaggcagtgtgtaacccaatcatcacggccgtttatcagaggtcaggtggtgcaccaggtggtgcgggtggagaaggagcgaccgaggaggaggatgagtctcacgatgaactctaa

SEQ ID NO: 49073 - protein, 669 aa, Brassica napus
MARSFGANGTVVLAIIFFGSLFAFSTAKEEATKLGTVIGIDLGTTYSCVGVYKNGHVEIIANDQGNRITPSWVAFTDSERLIGEAAKNQAPLNPERTVFDVKRLIGRKFEDKEVQKDRKLVPYQIVNKDGKPYIQVKIKDGETKVFSPEEVSAMILTKMKETAEAYLGKKIKDAVVTVPAYFNDAQRQATKDAGVIAGLNVARIINEPTAAAIAYGLDKKGGEKNILVFDLGGGTFDVSVLTIDNGVFEVLSTNGDTHLGGEDFDHRIMDYFIKLIKKKHQKDISKDNKALGKLRRECERAKRALSSQHQVRVEIESLFDGLDFSEPLTRARFEELNNDLFRKTMGPVKKAMDDAGLQKSQIDEIVLVGGSTRIPKVQQLLKDFFEGKEPNKGVNPDEAVAYGAAVQGGILSGEGGDETKDILLLDVAPLTLGIETVGGVMTKLIPRNTVIPTKKSQVFTTYQDQQTTVSIQVFEGERSLTKDCRLLGNFDLTGIPPAPRGTPQIEVTFEVDANGILNVKAEDKASGKSEKITITNEKGRLSQEEIDRMVKEAEEFAEEDKKVKERIDARNSLETYVYNMKNQINDKDKLADKLEGDEKEKIEAATKEALEWLDENQNSEKEEYDEKLKEVEAVCNPIITAVYQRSGGAPGGAGGEGATEEEDESHDEL

SEQ ID NO: 49074 - DNA, 2043 bp, Brassica napus
  CDS (1)..(2043)
atggctaccgccgctctcctccgctcgattcgacgccgcgaagtcgcttccactcctttctcagctttcaaatgcctttcgcgcagcgcgaagacgtcatcgaacagctcttatcatgctcagaactggagaagcttctcaagggcatttagctcgaagcctgctgggaatgacgtcatcggtattgacttgggtactactaactcatgtgttgcagtcatggaaggcaagaatccgaaagtgattgaaaacgctgaaggtgctcgaaccacaccatcagttgtagctttcaaccccaaaggagagcttctcgtggggacaccagccaagcgccaagctgtgaccaatcctacaaacacactctttggaacaaagcgtttgatcgggaggaagttcgacgatccgcaaacgcagaaggagatgaaaatggtgccttacaagatcgtgcgtgcgcctaacggcgacgcgtgggttgaagccaacggccagcagtattctcctagtcaggttggagcgtttgtgctgacgaagatgaaagagacggccgaggcttacttggggaagtctgtgaagaaagctgttgtgacggttccggcttactttaatgatgctcagaggcaagctactaaagatgctggtaggatcgctggtttggatgtggagaggattatcaatgagccgacggctgctgctctttcttatgggatgacgaataaggagggtttgattgctgtgtttgatcttggtggtgggacgttcgatgtgtcgattttggagatttcgaatggggttttcgaggtgaaagctactaatggtgataccttcttgggaggagaggattttgataatgctctgctagacttcttggtgaatgagttcaagaccagtgaggggatagacctggcgaaagatagacttgctctccagaggcttcgaaaagctgctgagaaggccaagatcgaactatcatcaacctctcaaactgacattaacctgccgttcatcacagctgatgcatctggagcgaagcatttcaatatcaccctgacgaggtctaagtttgaagctctggtgaacggtttgatcgagaggacccgtgatccttgcaagaactgtctcaaggatgctggtataagtgctaaggaagttgatgaggttcttcttgttggaggaatgacacgtgttcctaaggtacagagtgttgttgcggagatctttgggaagactcctagcaaaggtgttaaccctgatgaggctgttgctatgggagctgcgcttcaaggtggtatcctccgtggtgatgttaaagagttgctgcttctagatgtcacgcctctgtcgcttggtattgaaacacttggtggtgtctttacaagattgattacacgaaacacaaccatccccacgaagaagagtcaggtgttctcaactgcagcagacaatcagacacaagttgggatcaaagtgcttcaaggagagcgtgagatggcatcagacaacaagctattaggagaattcgatctagtaggcattccaccgtctccaagaggcatccctcagatcgaagtaacattcgacatcgatgcgaacggcattgtcactgtttccgccaaggacaagactactggcaaagagcaacagatcacaatccgatcatctggtggactctcagaggatgacatccagaagatggtgagagacgcagagttgcacgctcagaaagacaaagaaagaaaggacttgatcgataccaagaacacagcggacacaacgatttacagcatagagaagagtcttggtgagtacagagagaagatccctagtgaagtcgccaaggagattgaagatgctgtggcggatctaaggagcgcttcggctggagatgatgtcaatgagattaaggctaagatcgatgctgcgaacaaagctgtttcgaagataggagagcacatgtctggtggaggttctgcaccaggaggaggaactcagggaggagggagtgatcaaactccggaggctgattacgaggaagtgaagaaatga

SEQ ID NO: 49075 - protein, 680 aa, Brassica napus
MATAALLRSIRRREVASTPFSAFKCLSRSAKTSSNSSYHAQNWRSFSRAFSSKPAGNDVIGIDLGTTNSCVAVMEGKNPKVIENAEGARTTPSVVAFNPKGELLVGTPAKRQAVTNPTNTLFGTKRLIGRKFDDPQTQKEMKMVPYKIVRAPNGDAWVEANGQQYSPSQVGAFVLTKMKETAEAYLGKSVKKAVVTVPAYFNDAQRQATKDAGRIAGLDVERIINEPTAAALSYGMTNKEGLIAVFDLGGGTFDVSILEISNGVFEVKATNGDTFLGGEDFDNALLDFLVNEFKTSEGIDLAKDRLALQRLRKAAEKAKIELSSTSQTDINLPFITADASGAKHFNITLTRSKFEALVNGLIERTRDPCKNCLKDAGISAKEVDEVLLVGGMTRVPKVQSVVAEIFGKTPSKGVNPDEAVAMGAALQGGILRGDVKELLLLDVTPLSLGIETLGGVFTRLITRNTTIPTKKSQVFSTAADNQTQVGIKVLQGEREMASDNKLLGEFDLVGIPPSPRGIPQIEVTFDIDANGIVTVSAKDKTTGKEQQITIRSSGGLSEDDIQKMVRDAELHAQKDKERKDLIDTKNTADTTIYSIEKSLGEYREKIPSEVAKEIEDAVADLRSASAGDDVNEIKAKIDAANKAVSKIGEHMSGGGSAPGGGTQGGGSDQTPEADYEEVKK

SEQ ID NO: 49076 - DNA, 1944 bp, Brassica napus
  CDS (1)..(1944)
atggcgactaaatcggataaagctatcggaatcgacctcggcaccacatacagctgcgtcggagtgtggatcaacgaccgcgtggagatcatccccaacgaccaaggcaaccgcacgactccttcctacgtcgccttcaccgacacggagcggttgatcggcgacgcggcgaagaaccaagtcgcgctgaaccctcacaacaccgtcttcgacgcgaagcgtctcatcgggaggagattcaccgatccgtctgttcagagcgatatgaggcactggccgttcaaggttgtctccggtcccggagacaagccgatgatcgtagtctcgtacaagaacgaagagaagcagttctctcccgaggagatatcttcaatggtgttggttaagatgaaggaagtcgcagagtcctttttgggtcacactgtcaaaaacgctgtcgttacggtccctgcgtactttaatgactctcagagacaggccacgaaggacgcgggttcgatctccgggcttaatgttttgagaatcatcaacgagcccactgctgcagctattgcctacgggttagacaagaaagggaccaagactggtgagaggaacgttttgattttcgatcttggaggtggaacgtttgatgtttcgttgttgacgattgaagaaggtgtgttcgaggtgaaagctacggctggtgatactcacctcggtggtgaagactttgacaacaggcttgtgaaccatttcgttgcggagttcaagaggaagcataagaaggatatcagcgggaacgcgagggcgttgaggaggctgagaacggcttgtgagagagcgaagagaacgctttcctccacggctcagacgaccatagagatagattccttgcacgagggggttgacttctacgcgacgatatcacgcgcgaggtttgaggagatgaacatggatctcttcaggaaatgtatggatcctgtggagaaagttctaagagatgcaaagattgacaagaaccgtgtccatgaagtggttcttgtgggaggatcgactaggattccgaagattcagcagcttttgcaagatttttttaatgggaaggagctttgtaagagtattaaccctgatgaagctgttgcttacggagctgccgtgcaggctgcgattctgactggtgaagggagtgataaggtgcaagatctgttacttcttgacgtggcgccgttgagtcttggactagagacggcgggtggggtgatgactgtgttgatcccgaggaacacgactgttccttgtaagaaggagcaggtgttctccacttattcggataatcagcctggtgttttgattcaagtgtatgaaggggagcgtgcgaggacaagagacaacaaccttcttggcacctttgagctaaaggggatccctcctgcgccacgtggagttcctcagatcaatgtgtgttttgacatagacgccaacgggatcttgaacgtgtcggcggaggataaaaccgcgggcgtgaagaaccagatcacgatcacgaacgacaaagggaggttgagcaaagaggagatagagaagatggtgcaagatgctgagaagtacaaggcggaggatgagcaggtgaagaagagagtggaggccaagaactcgctggagaactatgcttacaacatgagaaacacggtcagggatgagaaactggcgcagaagctggatcaagaaggtaagcagaagatcgagaaggcgattgatgagacaattgagtggattgaagggaaccagctggcggaagttgatgagtttgagtataagttgaaagagctggagggtatctgtaacccaatcatctccaagatgtatcaggctggtgctggtgccggatatcccgatggtggtatgcccgcaagcggtggctccggtggtgctggaggtccgaagatagaagaggttgattaa

SEQ ID NO: 49077 - protein, 647 aa, Brassica napus
MATKSDKAIGIDLGTTYSCVGVWINDRVEIIPNDQGNRTTPSYVAFTDTERLIGDAAKNQVALNPHNTVFDAKRLIGRRFTDPSVQSDMRHWPFKVVSGPGDKPMIVVSYKNEEKQFSPEEISSMVLVKMKEVAESFLGHTVKNAVVTVPAYFNDSQRQATKDAGSISGLNVLRIINEPTAAAIAYGLDKKGTKTGERNVLIFDLGGGTFDVSLLTIEEGVFEVKATAGDTHLGGEDFDNRLVNHFVAEFKRKHKKDISGNARALRRLRTACERAKRTLSSTAQTTIEIDSLHEGVDFYATISRARFEEMNMDLFRKCMDPVEKVLRDAKIDKNRVHEVVLVGGSTRIPKIQQLLQDFFNGKELCKSINPDEAVAYGAAVQAAILTGEGSDKVQDLLLLDVAPLSLGLETAGGVMTVLIPRNTTVPCKKEQVFSTYSDNQPGVLIQVYEGERARTRDNNLLGTFELKGIPPAPRGVPQINVCFDIDANGILNVSAEDKTAGVKNQITITNDKGRLSKEEIEKMVQDAEKYKAEDEQVKKRVEAKNSLENYAYNMRNTVRDEKLAQKLDQEGKQKIEKAIDETIEWIEGNQLAEVDEFEYKLKELEGICNPIISKMYQAGAGAGYPDGGMPASGGSGGAGGPKIEEVD

SEQ ID NO: 49078 - DNA, 1953 bp, Brassica napus
  CDS (1)..(1953)
atggcgggtaaaggcgaaggtccagcaataggtatcgatctcggtactacctactcctgcgtcggcgtgtggcagcatgaccgcgtcgagatcatcgccaacgatcaaggcaaccgcacaactccttcctacgtggctttcaccgacagcgagcgtctcataggagatgctgcgaagaatcaagtcgctatgaaccctaccaacaccgtctttgatgctaagcgtcttattggcagaagattcagcgacccctctgtgcaagcagacatgagacactggccattcaaggtcatctccggtccagccgagaagccaatgatcagcgtcaactacaagggagaagagaaacagttctccgcagaagaaatctcctccatggtcctcaccaaaatgcgcgagatagcagaagcatacctcggcacatccatcaaaaacgccgtcgtcacggtccccgcctacttcaacgactctcagcgtcaagccacaaaggacgctggagtcatctccggcctcaacgtgatgcgtatcatcaacgaacctacagctgctgctattgcctacggtctcgacaagaaggcgtcgagcgttggtgagaagaacgtgcttatattcgacttgggaggtgggactttcgatgtctctcttctcacgattgaggaagggatcttcgaagtgaaggcgacggctggtgacactcacctcggaggtgaggacttcgacaacagaatggttaaccacttcgtccaagagtttaagaggaagcacaagaaggacatcacgggtaacccgagagctctccgcaggctgagaacagcctgcgagagagcaaagaggactctctcgtccaccgcgcagacgacgatagagattgactctctctacgaagggatcgacttctacacgaccattacgcgcgcgaggttcgaggagctcaacatggatctcttcagaaaatgtatggagccggtggagaagtgtctgagagacgctaagatggataagagcaacgtccacgacgtggtactcgtcggcgggtccaccaggatccctaaagtgcagcagcttctccaagactttttcaacgggaaggagctttgtaagagtattaaccccgacgaggccgtcgcttacggcgcggcggtccaggctgcgatcttgaccggtgaagggaacgagaaggttcaagatttactgcttcttgacgtcactcctttgtcgttgggcttggagactgccggtggggttatgacggttttgatcccgaggaacacgacgattccgacaaagaaggagcagatcttctctacttactcggacaaccagcctggtgtgttgatccaagtctacgaaggagagagagcgaggacaaaagacaacaatcttttagggaagttcgagctcagcggcatccctcctgcgccgcgtggtgtccctcagatcaccgtctgtttcgacatcgacgctaacggcatcctcaacgtctcggcggaggataagactactggacagaagaacaagattaccatcactaacgataaagggaggctgtcaaaggaggagattgagaagatggtgcaagaagcggagaagtataaagctgaggatgaggagcataagaagaaggttgatgccaagaatgcgttggagaactatgcgtacaatatgaggaacacgatcaaggatgagaagattgcgtctaagcttgaggcggcggataagaagaagattgaggatgcgattgatcaggcgattgaatggttggatgggaaccagttggctgaggcggatgagtttgaggataagatgaaggagctggagtcgctttgtaatccgattattgcgaggatgtatcaaggtggtgctggtggcgatatgggtgctggagggatggatgatgatgttcctgctggtggaagtggtggtgctggacctaagattgaagaagttgattaa

SEQ ID NO: 49079 - protein, 650 aa, Brassica napus
MAGKGEGPAIGIDLGTTYSCVGVWQHDRVEIIANDQGNRTTPSYVAFTDSERLIGDAAKNQVAMNPTNTVFDAKRLIGRRFSDPSVQADMRHWPFKVISGPAEKPMISVNYKGEEKQFSAEEISSMVLTKMREIAEAYLGTSIKNAVVTVPAYFNDSQRQATKDAGVISGLNVMRIINEPTAAAIAYGLDKKASSVGEKNVLIFDLGGGTFDVSLLTIEEGIFEVKATAGDTHLGGEDFDNRMVNHFVQEFKRKHKKDITGNPRALRRLRTACERAKRTLSSTAQTTIEIDSLYEGIDFYTTITRARFEELNMDLFRKCMEPVEKCLRDAKMDKSNVHDVVLVGGSTRIPKVQQLLQDFFNGKELCKSINPDEAVAYGAAVQAAILTGEGNEKVQDLLLLDVTPLSLGLETAGGVMTVLIPRNTTIPTKKEQIFSTYSDNQPGVLIQVYEGERARTKDNNLLGKFELSGIPPAPRGVPQITVCFDIDANGILNVSAEDKTTGQKNKITITNDKGRLSKEEIEKMVQEAEKYKAEDEEHKKKVDAKNALENYAYNMRNTIKDEKIASKLEAADKKKIEDAIDQAIEWLDGNQLAEADEFEDKMKELESLCNPIIARMYQGGAGGDMGAGGMDDDVPAGGSGGAGPKIEEVD

SEQ ID NO: 49080 - DNA, 2046 bp, Brassica napus
  CDS (1)..(2046)
atggcctccgtcgcgattctacgcgctttccgtcgccgcgaagtccaaacggcgtcagtctccgcgtttagatccattgcttcaaatgggaagacgaatttgattgggaagttaggtcacttggcgaggcctttctgctcgaggcctattgggaatgatgttatcggtattgatttgggaaccaccaattcttgtgtagcagtgatggaaggaaagactcctagggttattgagaacgcggaaggaacaagaaccacaccatcagtgtttgctattaaccaaaagggtgagcttctcgtcggaacaccagctaaacgtcagggtgttaccaacccaacaggcacgatttccgggagcaagcgtttgatcgggagaggttatggtgatccccagacgcagaaggagatgaagatggttccttacaagattgtcaaggcgccgaacggtgacgcttgggttgaagccaacgggcagaagttttctcccagccagattggagctaacatcctcaccaaaatgaaggagaccgctgagtcttacctcgggaagaccatcaccaaggctgttgttactgtccctgcttacttcaacgatgcgcagaggcaagcgacaaaggatgctgggaaaatcgcgggtcttgatgtccagagaatcatcaacgagccgacggctgctgcgttgtcgtatgggatgaacaacaaggagggtgtgattgctgtcttcgatcttggaggtggaacttttgatgtttctatccttgaaatctcaagcggtgtttttgaggtgaaagcgacaaatggagatacctttttgggaggagaagacttcgacaacactttgttggagtatttggtttctgagttcaggagatcagacaacattgatctgaccaaggacaagctcgccctccagaggctgagagaagctgcagagaaggccaagatcgagctttcttccacgtctcagaccgagatcaacctgcctttcatcaccgctgatgcttctggagcgaagcacttgaacataaccttgactaggtccaagtttgaaggtttggtgggccagttgattgagaggacaagaagcccgtgccagaactgtctgaaggatgctggagtctcgattaaggaaatcgacgaggttcttcttgttggtggaatgacacgtgttcccaaagtgcaagatatagtctctgagatctttggaaagagcccttgcaaaggtgttaaccccgatgaagcggttgccatgggagctgctattcaaggtggtatcctccgtggtgatgtcaaggagttgcttcttttggatgtgactcctctctcactaggtatcgaaacacttggaggtatcttcactaggttgatcaaccgaaacaccaccatccccacaaagaagtctcaggttttctccacagctgcagacaaccaaatgcaagtgggaatcaaagttcttcagggagagcgtgagatggcagcagacaacaaaagtctaggagaatttgatctcgttgggatcccacctgcgccaagaggaatgccacagatcgaagtcaccttcgacattgacgcaaacggtatcgtgacggtctcagccaaagacaaagcaacaaacaaagagcaacagatcacaatcagatcctcaggcggtctctcagacgatgagatcaacagaatggtgaaagaagctgagctcaactcgcacaaggatcaagagaagaagcagcttattgacttgaggaacacagctgataccacaatctacagcgttgagaagagcttgagcgagtacagggagaagattcccgctgagattgcctctgagatcgagactgcagtgtctgatctcaggacagcaatggctggtgaagagattgaggatatcaaggctaagcttgaagcagcgaacaaggcggtgtcgaagattggagaacacatgtctaagggatcagggtcgtctgggagctctggcggtgaaggttcaagcgggactgaccagcagacccctgaagctgaatttgaagaggccagcggttcaaagaagtga

SEQ ID NO: 49081 - protein, 681 aa, Brassica napus
MASVAILRAFRRREVQTASVSAFRSIASNGKTNLIGKLGHLARPFCSRPIGNDVIGIDLGTTNSCVAVMEGKTPRVIENAEGTRTTPSVFAINQKGELLVGTPAKRQGVTNPTGTISGSKRLIGRGYGDPQTQKEMKMVPYKIVKAPNGDAWVEANGQKFSPSQIGANILTKMKETAESYLGKTITKAVVTVPAYFNDAQRQATKDAGKIAGLDVQRIINEPTAAALSYGMNNKEGVIAVFDLGGGTFDVSILEISSGVFEVKATNGDTFLGGEDFDNTLLEYLVSEFRRSDNIDLTKDKLALQRLREAAEKAKIELSSTSQTEINLPFITADASGAKHLNITLTRSKFEGLVGQLIERTRSPCQNCLKDAGVSIKEIDEVLLVGGMTRVPKVQDIVSEIFGKSPCKGVNPDEAVAMGAAIQGGILRGDVKELLLLDVTPLSLGIETLGGIFTRLINRNTTIPTKKSQVFSTAADNQMQVGIKVLQGEREMAADNKSLGEFDLVGIPPAPRGMPQIEVTFDIDANGIVTVSAKDKATNKEQQITIRSSGGLSDDEINRMVKEAELNSHKDQEKKQLIDLRNTADTTIYSVEKSLSEYREKIPAEIASEIETAVSDLRTAMAGEEIEDIKAKLEAANKAVSKIGEHMSKGSGSSGSSGGEGSSGTDQQTPEAEFEEASGSKK

SEQ ID NO: 49082 - DNA, 1941 bp, Brassica napus
  CDS (1)..(1941)
atgtctggtaaaggagaaggtccagcgatcggaatcgatctcggtacgacgtactcttgcgtcggagtatggcaacacgaccgtgttgagatcatcgctaatgatcaaggtaacaggaccacgccgtcttacgtcgctttcaccgactccgagaggctcatcggtgatgccgctaagaaccaggtcgccatgaaccctatcaacaccgtcttcgatgcgaagaggctgatcggtcgtcgtttcagcgacagctctgtacagagcgacatgaagttgtggccattcaagatcatcgcaggacctgcggagaagcctatgatcgtcgtcaactacaaaggcgaggagaaacagttcgctgcggaggagatttcctccatggttctcattaagatgcgtgagattgcagaggcttacctcggtgtcaccatcaagaacgcagttgtcactgtccctgcctacttcaacgactctcagcgtcaggctacaaaggacgctggtgtgattgctggtttgaacgttatgcgtatcatcaacgagcccacagccgctgctattgcttacggtcttgacaaaaaggcaaccagcgttggagagaaaaacgtgttgatctttgatcttggtggtggtacttttgatgtctcccttctcactattgaggaaggtatctttgaggttaaggcgactgctggagatactcatcttggtggtgaggacttcgacaacagaatggtgaaccactttgttcaggagtttaagaggaagagcaagaaggacattaccggaaacccaagagctcttaggaggttgaggacggcctgtgagagagcaaagaggactctttcctccactgctcaaaccaccatcgagattgactctctctttgagggcattgatttctactctgcgctcacccgtgctagattcgaggagctcaacatggatctctttaggaagtgtatggagccagtcgagaagtgtctccgtgatgctaagatggacaagagcaccgtccacgatgttgtccttgtcggtggctccacccgtattcccaaggttcagcaattgcttcaggacttcttcaacggcaaagagctttgcaagtctatcaaccccgacgaggccgttgcttacggtgctgccgtccagggagctattctcagcggtgaaggaaacgagaaggtccaggatcttctcttgctcgatgtcacccctctctcactcggtcttgagaccgccggtggtgtcatgaccactttgatcgcaagaaacacgaccataccaaccaagaaggagcaagtgttctcgacctactctgacaaccaaccaggtgtgttgatccaggtgttcgaaggggagagagccagaaccaaggacaacaacctcctcggtaagtttgagctctctggaatccctccggctccacgtggtgtcccccagatcactgtctgcttcgacattgatgccaacggtatcctcaacgtctctgctgaggacaagaccaccggacagaagaacaagatcaccatcaccaacgacaagggtcgtttgtccaaggacgatatcgagaagatggttcaagaggctgagaagtacaagtctgaggatgaggagcacaagaagaaggtggaagccaagaacgctctcgagaactacgcttacaacatgaggaacaccatccaggacgagaagattggtgagaagctaccggctgcagacaagaagaagatcgaggacgctattgagcaggcgattcagtggctggagaacaatcagttgggtgaggctgatgagttcgaggacaagatgaaggagttggagagcatctgcaacccaatcattgccaagatgtaccaaggagctggtggtgaagccgcagggatggacgatgatgctcctcctgcctcaggcggtgctggccctaagatcgaagaggtcgactaa

SEQ ID NO: 49083 - protein, 646 aa, Brassica napus
MSGKGEGPAIGIDLGTTYSCVGVWQHDRVEIIANDQGNRTTPSYVAFTDSERLIGDAAKNQVAMNPINTVFDAKRLIGRRFSDSSVQSDMKLWPFKIIAGPAEKPMIVVNYKGEEKQFAAEEISSMVLIKMREIAEAYLGVTIKNAVVTVPAYFNDSQRQATKDAGVIAGLNVMRIINEPTAAAIAYGLDKKATSVGEKNVLIFDLGGGTFDVSLLTIEEGIFEVKATAGDTHLGGEDFDNRMVNHFVQEFKRKSKKDITGNPRALRRLRTACERAKRTLSSTAQTTIEIDSLFEGIDFYSALTRARFEELNMDLFRKCMEPVEKCLRDAKMDKSTVHDVVLVGGSTRIPKVQQLLQDFFNGKELCKSINPDEAVAYGAAVQGAILSGEGNEKVQDLLLLDVTPLSLGLETAGGVMTTLIARNTTIPTKKEQVFSTYSDNQPGVLIQVFEGERARTKDNNLLGKFELSGIPPAPRGVPQITVCFDIDANGILNVSAEDKTTGQKNKITITNDKGRLSKDDIEKMVQEAEKYKSEDEEHKKKVEAKNALENYAYNMRNTIQDEKIGEKLPAADKKKIEDAIEQAIQWLENNQLGEADEFEDKMKELESICNPIIAKMYQGAGGEAAGMDDDAPPASGGAGPKIEEVD

SEQ ID NO: 49084 - DNA, 2154 bp, Brassica napus
  CDS (1)..(2154)
atggcttcatccgccgcccagattcacgtcctcggcggaatcggattcgccaccacatcctccaagagaaacctcaacagtaaaaccacttcaatccccagaagcgccttcttcggcacaagaaccggtcccttctccactcttaactccgccttcctcagaataaacactagaaactcccccggcgcctccagatacgcggcaggtccggtgcgtgtagttaacgagaaagtcgtcggaatcgatttgggaacaactaactccgccgtagccgccatggaaggaggcaagccgacgattgtcaccaacgccgaaggccagaggacgactccctcagtcgtggcctacaccaagagcggtgaccgcctcgtcgggcagatcgcgaagaggcaggcggtggttaaccccgagaacacgttcttctctgtgaagaggtttatcgggaggaggatgaacgaggttgatgaggaggcgaagcaggtttcgtatagagttgtgaaggatgagaatgggaatgttaagcttgagtgtcctgctattggtaaacagtttgctgctgaggagatttcagctcaggttttgaggaagcttgtggatgatgcgtcgaggttcttgaacgagaaggttaccaaggctgttgttactgtgcctgcttactttaatgattcgcagaggacggctactaaagatgctggtcgtattgctgggttggaggttcttcgtattatcaatgagcccacggctgcttcgttggcttatgggtttgagaggaaaagcaacgagacgattctggtctttgatcttggaggtggtacctttgatgtctcagtgcttgaggttggtgatggagtgtttgaagtgctttccacttctggtgacactcatttgggtggtgatgactttgacaagagagttgttgattcgcttgcttcaaatttcaagaaagatgaaggcattgatcttctgaaagacaagcaagcacttcagagactgacagaagcagcagaaaaagctaaaatcgagctttcctcgctgactcagacaaatatgagtttgccatttatcacagccacagctgatgggcctaaacacatagaaacaaccctcacacgtgccaagtttgaagaattgtgttcagatttacttgacaggtgtaagactcccgttgagaattcactgagagatgcaaagctcagcttcaatgatattgatgaagtgatccttgttggtggatccacacgtattcctgctgttcaggaagttgtcaggaagctgactgggaaagaacccaatgtcacagtaaaccctgatgaggttgtagctctaggtgctgcggtccaggctggggttctggctggagatgtgagcgacattgtccttcttgacgtgacaccgctttccattggtttggaaacacttggtggtgttatgaccaagattattccaaggaactcaactctgcctacttctaagtcagaagtcttctcgactgctgctgatggacagacaagtgttgagattaatgtgctgcaaggtgagagagagtttgtccgggataacaagtctcttggcagcttccgtctggatggtatcccaccagcaccacgtggagttccacaaatcgaagtcaaatttgacattgatgccaatggtatcctctccgtcagtgctagtgacaaaggcaccggaaagaaacaagacattaccattactggtgccagtacattgcccaaggatgaggtagaccaaatggtccaggaggcagaaaggtttgcaaaggatgacaaggagaagagagacgcaattgacacaaagaaccaagcagattcagttgtgtaccagacagagaagcaacttaaagaactcggagagaagataccaggtgaagtgaaagagaaggtggaggccaagctacaagagctgaaggacaagcttgcaagtggaaccactcaagaaatcaaggacacaatggctgctcttaaccaagaagtgatgcagattggtcagtcgatgtacaaccagcctggagctggagctggagctggagcagcaggtgcaggtccttcccccggaggtgaagatgcttcatcagcagcttcagcaagtaaaggtggagatgatgtgattgatgctgacttcacggacagcaaatga

SEQ ID NO: 49085 - protein, 717 aa, Brassica napus
MASSAAQIHVLGGIGFATTSSKRNLNSKTTSIPRSAFFGTRTGPFSTLNSAFLRINTRNSPGASRYAAGPVRVVNEKVVGIDLGTTNSAVAAMEGGKPTIVTNAEGQRTTPSVVAYTKSGDRLVGQIAKRQAVVNPENTFFSVKRFIGRRMNEVDEEAKQVSYRVVKDENGNVKLECPAIGKQFAAEEISAQVLRKLVDDASRFLNEKVTKAVVTVPAYFNDSQRTATKDAGRIAGLEVLRIINEPTAASLAYGFERKSNETILVFDLGGGTFDVSVLEVGDGVFEVLSTSGDTHLGGDDFDKRVVDSLASNFKKDEGIDLLKDKQALQRLTEAAEKAKIELSSLTQTNMSLPFITATADGPKHIETTLTRAKFEELCSDLLDRCKTPVENSLRDAKLSFNDIDEVILVGGSTRIPAVQEVVRKLTGKEPNVTVNPDEVVALGAAVQAGVLAGDVSDIVLLDVTPLSIGLETLGGVMTKIIPRNSTLPTSKSEVFSTAADGQTSVEINVLQGEREFVRDNKSLGSFRLDGIPPAPRGVPQIEVKFDIDANGILSVSASDKGTGKKQDITITGASTLPKDEVDQMVQEAERFAKDDKEKRDAIDTKNQADSVVYQTEKQLKELGEKIPGEVKEKVEAKLQELKDKLASGTTQEIKDTMAALNQEVMQIGQSMYNQPGAGAGAGAAGAGPSPGGEDASSAASASKGGDDVIDADFTDSK

SEQ ID NO: 49086 - DNA, 2013 bp, Glycine max
  CDS (1)..(2013)
atgataatggctcgctcgttttcacgcgggtctctgcttcctctcgccatcgtttccttagtatgtctatttgtgatttccattgcaaaggaggaagccaccaagttggggacggtcattgggattgatcttggaacaacctattcatgtgttggtgtttacaagaacggccatgttgaaatcatagccaatgatcaaggtaaccgtatcaccccatcgtgggttgctttcaccgacagtgagagactaattggagaggctgccaagaatctggcagctgtcaatccagaaaggaccatctttgatgtcaagagacttattggaagaaagtttgaagataaggaagttcaaagagatatgaagcttgttccttataagattgtcaacaaggatggaaaaccttacatacaggtgaaaattaaggatggtgagaccaaggtgttcagccctgaggaaatcagtgccatgattctgactaagatgaaggaaactgcggaagcattccttgggaagaaaattaatgatgctgtggtcactgtcccagcttacttcaatgatgctcagaggcaggccaccaaggatgctggtgtcattgctggtctcaatgttgctagaattatcaatgaacccactgctgctgccattgcctatggattggacaagaaaggtggcgagaagaacattctagtctttgatcttggtggtgggacctttgatgtcagtatcttgacaattgataatggtgtttttgaagttcttgccacaaatggagatactcatcttggaggtgaggactttgatcagagaataatggagtacttcattaaattgatcaagaaaaagcatggaaaggatattagcaaggacaacagagcacttggcaagctgaggagagaggctgagcgtgcaaagagggctctcagcagccagcaccaggtccgcgtggaaattgaatcactttttgatggtgttgatttttctgagccactcactcgagctcgttttgaggagttgaacaatgatttgttccggaagaccatgggaccagtgaagaaggctatggaagatgctggattacagaagaatcaaattgacgagattgttcttgtcggtggaagcacaaggattccaaaggtacaacagcttttgaaggactactttgatggaaaggagccaaacaagggtgtcaaccctgatgaagcagttgcctatggtgctgcagtgcaaggaagcattttgagtggagagggtggtgaagaaaccaaagatatccttctcctggatgtggctcccctcactctcggaattgaaactgttggtggagtcatgacaaagttgattcccagaaacactgttatcccgaccaagaaatctcaagtgttcaccacctaccaggaccagcagactaccgtctccattcaggttttcgaaggtgagaggagtctcacaaaggattgtcgccttcttgggaaatttgatctgtctggaattcctccagctccaaggggtacccctcaaattgaagtgaccttcgaagttgatgccaacggcattctaaatgtgaaggcagaagacaagggcactggtaaatcagaaaagatcaccattacaaacgaaaagggacgtcttagccaggaagaaatagatagaatggttcgtgaagcagaggagtttgcagaggaagacaagaaggtgaaggagaggatcgatgctcgcaacagtcttgaaacctatgtatacaacatgaagaaccagatcagtgacaaggacaagctcgctgacaagttggagtctgatgaaaaggagaaaattgagactgctgtgaaagaagcactggaatggctggatgacaaccagagtatggagaaagaagattatgaagagaagctgaaggaggttgaagccgtttgcaacccaatcattagtgctgtgtatcagagatctggaggagccccaggcggtggtggtgcatcaggcgaagaagacgaggacgattctcacgatgagctctag

SEQ ID NO: 49087 - protein, 670 aa, Glycine max
MIMARSFSRGSLLPLAIVSLVCLFVISIAKEEATKLGTVIGIDLGTTYSCVGVYKNGHVEIIANDQGNRITPSWVAFTDSERLIGEAAKNLAAVNPERTIFDVKRLIGRKFEDKEVQRDMKLVPYKIVNKDGKPYIQVKIKDGETKVFSPEEISAMILTKMKETAEAFLGKKINDAVVTVPAYFNDAQRQATKDAGVIAGLNVARIINEPTAAAIAYGLDKKGGEKNILVFDLGGGTFDVSILTIDNGVFEVLATNGDTHLGGEDFDQRIMEYFIKLIKKKHGKDISKDNRALGKLRREAERAKRALSSQHQVRVEIESLFDGVDFSEPLTRARFEELNNDLFRKTMGPVKKAMEDAGLQKNQIDEIVLVGGSTRIPKVQQLLKDYFDGKEPNKGVNPDEAVAYGAAVQGSILSGEGGEETKDILLLDVAPLTLGIETVGGVMTKLIPRNTVIPTKKSQVFTTYQDQQTTVSIQVFEGERSLTKDCRLLGKFDLSGIPPAPRGTPQIEVTFEVDANGILNVKAEDKGTGKSEKITITNEKGRLSQEEIDRMVREAEEFAEEDKKVKERIDARNSLETYVYNMKNQISDKDKLADKLESDEKEKIETAVKEALEWLDDNQSMEKEDYEEKLKEVEAVCNPIISAVYQRSGGAPGGGGASGEEDEDDSHDEL

SEQ ID NO: 49088 - DNA, 1950 bp, Glycine max
  CDS (1)..(1950)
atggccggaaaaggagatggtcctgctatcggaatcgatctcggcaccacctactcctgcgtcggagtgtggcagcacgaccgtgtcgaaatcatcgccaatgaccagggtaacagaaccacgccgtcttacgtcgctttcactgattccgagcgtttgatcggtgacgccgccaagaaccaggtcgccatgaaccccgtcaacaccgtcttcgatgctaagcgtttgattggaaggagattttctgatgcctccgttcagagtgacatgaagctatggccatttaaggtcatccctggtcctgctgacaaacctatgattgtggtcaactacaagggtgaggacaagcagttctccgctgaggaaatttcttccatggttctcatgaagatgcgtgagattgccgaggcttatctcggttccacagtgaagaatgccgtggtcactgttcccgcttacttcaatgactcccagcgtcaggccacgaaggatgctggagtcattgcgggtctcaatgtcatgcgtatcatcaatgaacccaccgctgctgccattgcttacggtcttgacaagaaggccaccagtgtgggtgagaagaacgtgttgatttttgacttgggtggcggtacctttgatgtctctcttctcaccattgaggagggtatttttgaggtcaaggccactgccggagatactcatcttggaggagaagattttgataacaggatggttaaccattttgttcaggaattcaagaggaagcacaagaaggacatcaatggaaaccctagggctcttaggaggttgaggactgcctgtgaaagggcgaagaggaccctatcatctactgcacaaaccacaattgagatagattctctttatgagggtgttgacttctacaccacaatcacccgtgccaggtttgaggagctcaacatggatctcttcaggaagtgtatggagcccgttgagaagtgtttgagggatgctaagatggacaagagcactgtccatgacgttgtccttgttggtggatccactagaattcctaaagtgcagcaattgttgcaggatttcttcaatggcaaggagctttgcaagagcattaaccccgatgaggccgttgcttatggagcagctgtacaggctgctattttgagtggtgagggcaacgagaaggtgcaggatttgctgttgttggatgttacacccctttctcttggtttggaaactgccggcggcgtcatgactgttctcattcccaggaacacgactattcccaccaagaaggagcaagtgttctctacttactcagacaaccaacctggtgtcttgattcaggtgtatgagggagagagagctagaaccagggacaacaacttgttgggtaaatttgagctttctggcattcccccagcacccaggggtgttcctcagattactgtctgctttgatatcgatgccaatggtatcttgaatgtctctgccgaggacaagaccacagggcagaagaacaagatcaccatcaccaacgacaagggtagactatcgaaggatgagattgagaagatggtccaagaggcggagaagtacaaggccgaggatgaggagcacaagaagaaggtcgacgcaaagaatgctttggagaactatgcctacaacatgaggaacaccattaaggatgagaagattgcatcaaagctttctgatgacgacaagaagaaaatcgaagatgccatcgagagtgctattcagtggttggatggaaaccagctagcggaggctgacgagttcgaagacaagatgaaggagcttgagagcatttgcaacccaatcattgccaaaatgtaccagggtgcaggtgctcccgacatggctggaggcatggatgaagatgttcctccatctggatccggtggtgctggccccaagatcgaggaagttgattaa

SEQ ID NO: 49089 - protein, 649 aa, Glycine max
MAGKGDGPAIGIDLGTTYSCVGVWQHDRVEIIANDQGNRTTPSYVAFTDSERLIGDAAKNQVAMNPVNTVFDAKRLIGRRFSDASVQSDMKLWPFKVIPGPADKPMIVVNYKGEDKQFSAEEISSMVLMKMREIAEAYLGSTVKNAVVTVPAYFNDSQRQATKDAGVIAGLNVMRIINEPTAAAIAYGLDKKATSVGEKNVLIFDLGGGTFDVSLLTIEEGIFEVKATAGDTHLGGEDFDNRMVNHFVQEFKRKHKKDINGNPRALRRLRTACERAKRTLSSTAQTTIEIDSLYEGVDFYTTITRARFEELNMDLFRKCMEPVEKCLRDAKMDKSTVHDVVLVGGSTRIPKVQQLLQDFFNGKELCKSINPDEAVAYGAAVQAAILSGEGNEKVQDLLLLDVTPLSLGLETAGGVMTVLIPRNTTIPTKKEQVFSTYSDNQPGVLIQVYEGERARTRDNNLLGKFELSGIPPAPRGVPQITVCFDIDANGILNVSAEDKTTGQKNKITITNDKGRLSKDEIEKMVQEAEKYKAEDEEHKKKVDAKNALENYAYNMRNTIKDEKIASKLSDDDKKKIEDAIESAIQWLDGNQLAEADEFEDKMKELESICNPIIAKMYQGAGAPDMAGGMDEDVPPSGSGGAGPKIEEVD

SEQ ID NO: 49090 - DNA, 1947 bp, Glycine max
  CDS (1)..(1947)
atggctggaaaaggcgagggtcctgctatcggaatcgatttgggaacgacgtactcttgcgtcggcgtgtggcaacacgatcgtgttgaaatcatagccaacgatcagggtaatagaactaccccatcctacgtggctttcaccgatacagaacggttgatcggcgatgcggcgaagaaccaggtcgctatgaacccaatcaacactgtttttgatgctaagcgtttgattggaagacgtttttctgatgcatcggtacaaagtgacatgaaactgtggccgttcaaggttattcctggccctgctgacaagcctatgattgtggtgaattacaagggggatgagaagcagttttcggcggaagagatatcttccatggttcttataaagatgaaggagatcgcggaggcgtatctaggatcgacgataaagaatgcagttgtcaccgtccctgcttacttcaacgactcacagcgtcaagctacaaaggacgctggtgtcatttccgggctcaacgtgatgcgaattatcaacgagcctacagcggccattgcttatggactcgacaagaaggccactagctctggggagaagaatgttctcatcttcgacctcggtggtgggacttttgatgtctcccttctcaccattgaggagggtattttcgaagtgaaagccactgctggtgatactcacttgggaggtgaagattttgataacagaatggtgaaccattttgttcaggaattcaagaggaagaacaagaaggatattagtggaaatgccagagcattgaggaggttgagaacagcatgtgagagggccaagaggactctctcttccactgctcaaaccaccattgagattgattccttgtatgagggtattgacttctacacaaccatcacccgtgcccgtttcgaagagcttaacatggacctattcaggaagtgcatggagcccgtggagaagtgtttgcgggatgctaagatggacaagagcaccgtccatgatgttgttcttgtcggtggttctactaggattcccaaggttcaacagttgttgcaggacttcttcaacggaaaggagctttgcaagagcattaacccagatgaagctgttgcctatggtgcagcagtgcaggctgccattctcagtggcgagggtaatgagaaagtgcaggatcttctgttgttggatgttactcctctctcccttgggttggagaccgcgggaggagtcatgactgtgttgattcccagaaacacaaccattcccaccaagaaggagcaggtattttcgacctattccgacaaccagcctggtgtgttgattcaggtctatgaaggtgaacgtacgaggactcgtgataacaatttgcttggcaaatttgagttatctggaattcctcctgctccgagaggtgttcctcagatcaccgtttgctttgacattgacgccaacggtatattgaacgtgtctgcggaggacaaaaccactggacagaagaacaagattacaattaccaacgacaaaggaaggctttctaaggaggagattgagaagatggtgcaggaagctgagaagtacaaggctgaggatgaggagcataagaagaaagtggaggccaaaaatacattggagaattacgcctataacatgaggaacacaattaaagatgataagattgcttccaagctgtctgctgatgataagaagaaaattgaggatgcaattgagcaggctatccaatggctcgatggaaaccaacttgctgaagctgacgaattcgaggacaagatgaaggagttggagagcatttgtaaccccatcatagcaaagatgtaccaaggagctggtggtgatgcgggtggagccatggatgaggatggtcctgctgctggcagtggaagcggtgctggacccaaaattgaggaagtcgattaa

SEQ ID NO: 49091 - protein, 648 aa, Glycine max
MAGKGEGPAIGIDLGTTYSCVGVWQHDRVEIIANDQGNRTTPSYVAFTDTERLIGDAAKNQVAMNPINTVFDAKRLIGRRFSDASVQSDMKLWPFKVIPGPADKPMIVVNYKGDEKQFSAEEISSMVLIKMKEIAEAYLGSTIKNAVVTVPAYFNDSQRQATKDAGVISGLNVMRIINEPTAAIAYGLDKKATSSGEKNVLIFDLGGGTFDVSLLTIEEGIFEVKATAGDTHLGGEDFDNRMVNHFVQEFKRKNKKDISGNARALRRLRTACERAKRTLSSTAQTTIEIDSLYEGIDFYTTITRARFEELNMDLFRKCMEPVEKCLRDAKMDKSTVHDVVLVGGSTRIPKVQQLLQDFFNGKELCKSINPDEAVAYGAAVQAAILSGEGNEKVQDLLLLDVTPLSLGLETAGGVMTVLIPRNTTIPTKKEQVFSTYSDNQPGVLIQVYEGERTRTRDNNLLGKFELSGIPPAPRGVPQITVCFDIDANGILNVSAEDKTTGQKNKITITNDKGRLSKEEIEKMVQEAEKYKAEDEEHKKKVEAKNTLENYAYNMRNTIKDDKIASKLSADDKKKIEDAIEQAIQWLDGNQLAEADEFEDKMKELESICNPIIAKMYQGAGGDAGGAMDEDGPAAGSGSGAGPKIEEVD

SEQ ID NO: 49092 - DNA, 2034 bp, Glycine max
  CDS (1)..(2034)
atggccgccgccactgcattgctccgctctctccgccgccgcgaccttccctcgtcttctctctccgcctttcgttcgttgacgagtggcacaaagacatcatatgtagggaacaagtgggcaagtttgtctcgaccgttcagttcaaagcctgctggtaatgatgtcattggaattgatctgggtactaccaattcatgtgtctctgttatggagggaaagaatcccaaagttattgagaattctgaaggagctcgaacaacaccatcagtggttgccttcaaccagaaagcggagcttcttgttggtacaccagccaagcgtcaggctgtgacaaacccaacaaacactctttttggaaccaagcgtttgataggtaggcgttttgatgattctcaaactcagaaggagatgaaaatggttccatacaagattgttaaggctcccaatggagatgcttgggttgaagccaatgggcagcagtattctcccagccaagttggtgcttttgttctcaccaagatgaaggaaactgctgagtcatatcttggaaagtcagtttcaaaagctgtaattactgtaccagcttacttcaatgatgctcagaggcaggcaacaaaagatgctggtagaattgcaggtcttgacgtgcagagaatcatcaatgagcccactgctgctgcactttcatatgggatgaacaacaaggagggtctcattgccgtttttgaccttggtggtggaacatttgatgtgtccatcttagaaatttctaatggtgtttttgaggtgaaagcaacaaatggtgacactttcttgggaggagaggattttgataatgctttattggattttctagtgaacgaattcaaaagaactgagaatattgatctttcaaaggataaacttgcattgcagaggcttcgagaagctgctgagaaagcaaaaatagaactgtcttcaacatctcaaacagaaatcaatcttcctttcatcactgctgatgcatctggtgcaaagcatctgaacatcacattgactagatctaagtttgaggctttggtaaaccacttgattgaaaggacaaaggcaccgtgtaagagctgtttgaaggatgctaacatatctatcaaggaagttgatgaggttcttcttgttggaggaatgactcgtgtgcctaaagtccaggaggtggtttcagcgatctttggaaagagtcctagcaaaggagtaaatcctgatgaggcagttgccatgggagcagctattcagggtggtatcctacgtggagatgttaaagagctactactcctagatgtcactccactttctctgggtattgagactttgggtggtatctttaccaggttgattaaccgcaacaccacaattcctacaaaaaagagtcaggtgttttcaacagcagctgacaatcagactcaggttggtatcaaggtgctacaaggtgagagggaaatggctgtagacaacaaatcgcttggagaatttgagcttgttggcattcctcctgccccaagaggcatgcctcagattgaagtcacatttgacatagatgccaatgggattgttactgtctctgccaaagacaagtctactgggaaagaacaacaaatcaccatccgttcatctggaggactctcagaagatgagattgataagatggtcaaagaagcagagttgcacgctcagaaagaccaggaaagaaaggctctcattgacatcagaaacagtgcagatacaagcatctacagcattgagaagagtttaggtgagtacagagataagatccccagtgaagtggccaaagagattgaagatgcagtatcggatttgagaacagcaatggcaggagacaatgctgacgaaattaaggcaaagcttgacgctgcaaacaaagctgtctccaagattggagagcacatgtcaggtggttctagtggcagttcctcagctggaggttctcagggtggtgaacaggctcccgaggcagagtatgaggaagtcaagaaatga

SEQ ID NO: 49093 - protein, 677 aa, Glycine max
MAAATALLRSLRRRDLPSSSLSAFRSLTSGTKTSYVGNKWASLSRPFSSKPAGNDVIGIDLGTTNSCVSVMEGKNPKVIENSEGARTTPSVVAFNQKAELLVGTPAKRQAVTNPTNTLFGTKRLIGRRFDDSQTQKEMKMVPYKIVKAPNGDAWVEANGQQYSPSQVGAFVLTKMKETAESYLGKSVSKAVITVPAYFNDAQRQATKDAGRIAGLDVQRIINEPTAAALSYGMNNKEGLIAVFDLGGGTFDVSILEISNGVFEVKATNGDTFLGGEDFDNALLDFLVNEFKRTENIDLSKDKLALQRLREAAEKAKIELSSTSQTEINLPFITADASGAKHLNITLTRSKFEALVNHLIERTKAPCKSCLKDANISIKEVDEVLLVGGMTRVPKVQEVVSAIFGKSPSKGVNPDEAVAMGAAIQGGILRGDVKELLLLDVTPLSLGIETLGGIFTRLINRNTTIPTKKSQVFSTAADNQTQVGIKVLQGEREMAVDNKSLGEFELVGIPPAPRGMPQIEVTFDIDANGIVTVSAKDKSTGKEQQITIRSSGGLSEDEIDKMVKEAELHAQKDQERKALIDIRNSADTSIYSIEKSLGEYRDKIPSEVAKEIEDAVSDLRTAMAGDNADEIKAKLDAANKAVSKIGEHMSGGSSGSSSAGGSQGGEQAPEAEYEEVKK

SEQ ID NO: 49094 - DNA, 2007 bp, Glycine max
  CDS (1)..(2007)
atggctggctcgtgggcacgccgttctctgattgttctggctatcatttccttcggatgtttatttgcaatttccattgctaaggaggaagccacaaaattggggacggtcatcgggattgatcttggaacgacctattcatgtgttggtgtttacaagaacggccatgttgaaatcatagccaatgatcaaggtaaccgtatcaccccatcgtgggttgctttcaccgacagtgagagactaattggagaggctgccaagaatctggcagctgtcaacccagaaaggaccatctttgatgtcaagagacttattggaagaaagttcgaagataaggaagttcaaagagatatgaagcttgttccttataagattgtcaacaaggatggaaaaccttacatacaagtgaaaattaaggatggtgagaccaaggtgttcagccctgaggaaatcagtgccatgattctgactaagatgaaggaaactgcggaagcattccttggaaagaaaattaatgatgccgtggtcactgtcccagcttacttcaatgatgctcagaggcaggccaccaaggatgctggtgtcattgctggtctcaatgttgctagaattatcaatgaacccactgctgctgccattgcctatggattggacaagaaaggtggcgagaagaacattctagtctttgatcttggtggtgggacctttgatgtcagtatcttgacaattgataatggtgtttttgaagttcttgccacaaatggagatactcatcttggaggtgaggactttgatcagagaataatggagtacttcattaaattgatcaagaaaaagcatggaaaggatattagcaaggacaacagagcacttggcaagctgaggagagaggctgagcgtgcaaagagggctctcagcagccagcaccaggtccgcgtggaaattgaatcactttttgatggtgttgatttttctgagccactcacccgagctcgttttgaggagttgaacaatgatttgttccggaagaccatggggccagtgaagaaggctatggaagatgcaggattacagaagagtcagattgatgagattgttcttgttggtggaagcacaaggattccaaaggtacaacagcttttgaaggactactttgatggaaaggagccaaacaagggtgtcaaccctgatgaagcagttgcctatggtgctgcagtgcaaggaagcattttgagtggagagggtggtgaagaaaccaaagacatccttctcctggatgtggctcccctcactctcggaattgaaactgttggtggagtcatgacaaagttgattcccagaaacactgttatcccaaccaagaaatctcaggtgttcaccacctatcaggaccagcagactacagtctccattcaggttttcgaaggcgagaggagtctcacaaaggattgccgccttcttgggaaatttgatctgtctggaattcctccagccccaaggggtacgcctcaaattgaagtgaccttcgaagttgatgccaacggcattctaaatgtgaaggcagaagacaagggcactggtaaatcagaaaagatcaccattacaaacgaaaagggacgtcttagccaggaagaaattgagagaatggttcgcgaagcagaggagtttgcagaggaagacaagaaggtgaaggagaggatcgatgctcgcaacagtcttgaaacctatgtatacaacatgaagaaccagatcagtgacaaggacaagctcgctgacaagttggagtctgatgaaaaggagaaaattgagactgctgtgaaagaagcactggaatggctggatgacaaccagagtatggagaaagaagattatgaagagaagctgaaggaggttgaagccgtttgcaacccaatcattagtgctgtgtatcagagatctggaggagccccaggcggtggtggtgcatcaggcgaagaagacgaggacgattctcacgatgagctctag

SEQ ID NO: 49095 - protein, 668 aa, Glycine max
MAGSWARRSLIVLAIISFGCLFAISIAKEEATKLGTVIGIDLGTTYSCVGVYKNGHVEIIANDQGNRITPSWVAFTDSERLIGEAAKNLAAVNPERTIFDVKRLIGRKFEDKEVQRDMKLVPYKIVNKDGKPYIQVKIKDGETKVFSPEEISAMILTKMKETAEAFLGKKINDAVVTVPAYFNDAQRQATKDAGVIAGLNVARIINEPTAAAIAYGLDKKGGEKNILVFDLGGGTFDVSILTIDNGVFEVLATNGDTHLGGEDFDQRIMEYFIKLIKKKHGKDISKDNRALGKLRREAERAKRALSSQHQVRVEIESLFDGVDFSEPLTRARFEELNNDLFRKTMGPVKKAMEDAGLQKSQIDEIVLVGGSTRIPKVQQLLKDYFDGKEPNKGVNPDEAVAYGAAVQGSILSGEGGEETKDILLLDVAPLTLGIETVGGVMTKLIPRNTVIPTKKSQVFTTYQDQQTTVSIQVFEGERSLTKDCRLLGKFDLSGIPPAPRGTPQIEVTFEVDANGILNVKAEDKGTGKSEKITITNEKGRLSQEEIERMVREAEEFAEEDKKVKERIDARNSLETYVYNMKNQISDKDKLADKLESDEKEKIETAVKEALEWLDDNQSMEKEDYEEKLKEVEAVCNPIISAVYQRSGGAPGGGGASGEEDEDDSHDEL

SEQ ID NO: 49096 - DNA, 1968 bp, Glycine max
  CDS (1)..(1968)
atggccggaaaaggagagggtcctgctatcggaatcgatctcggaaccacctactcttgcgtcggtgtgtggcaacatgaccgcgttgaaatcatcgccaacgaccaagggaacagaaccacgccgtcttacgtcggattcactgacaccgagcgtctcatcggtgatgcggccaagaatcaagtcgccatgaaccccatcaacaccgtcttcgatgccaagaggttgattggtcgtagattcagtgattcctctgttcagagtgatatcaaattgtggcctttcaaggtcattcctggtgctgctgacaagccaatgatcgtggttaactacaagggtgaagagaagcaatttgccgcagaagaaatctcttccatggtgctcatcaagatgcgtgagattgctgaggcttacctaggctccacagtgaagaatgctgttgtcaccgtccctgcttacttcaatgattctcagcgtcaagctaccaaagacgctggtgtcattgctggtctaaatgtgatgcgaattatcaatgagcctactgcagctgccattgcatatggtcttgataagaaggccacgagtgttggtgagaagaatgtgttgatttttgaccttggtggtgggacatttgatgtgtctttactcaccattgaggagggtatctttgaggtgaaagccactgctggtgacacccatcttggaggtgaagattttgataacaggatggtgaaccactttgttcaagagttcaagagaaagaacaagaaggacataagtggaaaccccagagcacttagaaggttgaggactgcttgtgagagggccaagagaacactttcatcgactgctcagaccaccattgaaattgattctctatacgagggaattgatttctactccactgttactcgtgccagatttgaggagctcaacatggatctcttcaggaaatgtatggagccggtggagaaatgtttgagggatgctaagatggacaaaagaagtgttgatgatgttgtccttgttggtggttctaccagaattcccaaggttcaacaactgctgcaggacttctttaatggaaaagagctttgcaagagcattaatcccgatgaggctgttgcatatggtgcggctgttcaggctgcaatcttaagtggtgagggcaatgagaaggttcaggatcttctcctcctggatgtcacccctctgtctcttggtttggagactgccggtggtgtgatgactgtcctgatccctaggaacactacaattccaacaaagaaggaacaagttttctcaacatactctgacaaccagcctggtgtgcttatccaggtctttgagggtgaaagagcaaggaccagagataacaatttgttgggcaaatttgagctatctggcattcctcctgcacccaggggtgttcctcagattacagtgtgctttgacattgatgccaatggtatcttgaatgtctctgccgaagataaaaccactggccagaaaaataagatcactatcaccaatgacaagggtagattgtcaaaggaagatattgagaagatggttcaagaggctgagaagtacaagtctgaggatgaagagcacaagaagaaggttgaggccaaaaacgctttggaaaactatgcatacaacatgaggaacaccgtgaaggatgacaagattggtgagaaacttgacccggctgacaagaagaagattgaggatgcaattgagcaagcaatccagtggttagacagcaaccagcttgcagaagcagatgagtttgaggacaaaataaaggaattggaaagcatctgcaatccaatcattgccaagatgtaccaaggtggtgctggtccagacgtgggtggtgctggtgctggggcagccgaggatgattatgctcctcctccttctggtggaagtggtgctggccccaagattgaggaagtggactaa

SEQ ID NO: 49097 - protein, 655 aa, Glycine max
MAGKGEGPAIGIDLGTTYSCVGVWQHDRVEIIANDQGNRTTPSYVGFTDTERLIGDAAKNQVAMNPINTVFDAKRLIGRRFSDSSVQSDIKLWPFKVIPGAADKPMIVVNYKGEEKQFAAEEISSMVLIKMREIAEAYLGSTVKNAVVTVPAYFNDSQRQATKDAGVIAGLNVMRIINEPTAAAIAYGLDKKATSVGEKNVLIFDLGGGTFDVSLLTIEEGIFEVKATAGDTHLGGEDFDNRMVNHFVQEFKRKNKKDISGNPRALRRLRTACERAKRTLSSTAQTTIEIDSLYEGIDFYSTVTRARFEELNMDLFRKCMEPVEKCLRDAKMDKRSVDDVVLVGGSTRIPKVQQLLQDFFNGKELCKSINPDEAVAYGAAVQAAILSGEGNEKVQDLLLLDVTPLSLGLETAGGVMTVLIPRNTTIPTKKEQVFSTYSDNQPGVLIQVFEGERARTRDNNLLGKFELSGIPPAPRGVPQITVCFDIDANGILNVSAEDKTTGQKNKITITNDKGRLSKEDIEKMVQEAEKYKSEDEEHKKKVEAKNALENYAYNMRNTVKDDKIGEKLDPADKKKIEDAIEQAIQWLDSNQLAEADEFEDKIKELESICNPIIAKMYQGGAGPDVGGAGAGAAEDDYAPPPSGGSGAGPKIEEVD

SEQ ID NO: 49098 - DNA, 2010 bp, Glycine max
  CDS (1)..(2010)
atggctggctcgtgggcacgccgttctctgattgttctagccatcatttccttcggatgtctatttgcgatttccattgctaaggaggaagccaccaagttagggacggtcatcggcattgatcttggaacaacctattcatgtgtcggtgtttacaagaatggccatgttgaaatcatagccaacgaccaaggtaaccgtatcaccccatcgtgggttgctttcaccgacagtgagagactcattggggaggctgccaagaatcaggcagctgtcaacccagaaaggaccatctttgatgtcaagagacttatcggaagaaagttcgaagataaggaagttcaaaaagacatgaagcttgttccttataagattgtcaacaaggatggaaaaccttacattcaggtgaaaattaaggatggtgagaccaaggtgttcagccctgaggaaatcagtgccatggttctgatcaagatgaaggaaactgcggaagcattcctcgggaagaaaattaatgatgctgtggtcactgtcccagcttacttcaatgatgctcagaggcaggccaccaaggatgctggtgtcattgctggtctcaatgttgctagaattatcaacgaacccactgccgctgccaatgccttaggattggacaagaacaagggtggacgcgggaagaacattctagtctttgatcttggtggtgggacctttgatgtcagtatcttgacaattgataacggtgtttttgaagttcttgctacaatcggagatactcatcttggaggtgaggattttgatcaaagaataatggagtacttcattaaattgatcaagaaaaagcatggaaaggatattagcaaggacaacagagcacttggaaagctgaggagagaggctgagcgtgcaaagagggctctcagcagccagcaccaggtccccctggaaattgaatcactttttgatggtgttgatttttctgagccactcactcgagctaggtttgaggagttgaacaatgacttgttccggaagaccatgggtccagtgaagaaggctatggaagatgctggattacagaagagtcagattgatgagattgttcttgttggtggaagcacaaggattccaaaggtacaacagcttttgaaggactactttgatggaaaggagccaaacaagggggtcaaccctgatgaagcagttgcctatggtgctgcagtgcaaggaagcattttgagtggagagggtggtgaagaaaccaaagatatccttctcctggatgtggctcccctcactctcggaattgaaactgttggtggagtcatgacaaagttgattcccagaaacactgttatcccgaccaagaaatctcaagtgttcaccacctaccaggaccagcagactaccgtctccattcaggttttcgaaggtgagaggagtctcacaaaggattgtcgccttcttgggaaatttgatctgtctggaattccaccagctccaaggggcacccctcaaattgaagtgaccttcgaagttgatgccaacggcattctaaatgtgaaggcagaagacaagggaactggtaaatcagaaaagatcaccattacaaacgaaaagggacgtcttagccaggaagaaatagatagaatggttcgtgaagcagaagagtttgccgaggaagacaagaaggtgaaggagaggatcgatgctcgcaacagtcttgaaacctacgtatacaacatgaagaatcaggtcagtgacaaggacaagctcgcggacaagttggagtcagatgaaaaggagaaaattgagactgcagtgaaagaagcattggaatggctggatgacaaccagagtgtggagaaagaagattatgaagagaagctgaaggaggttgaagccgtttgcaacccaatcatcagtgctgtgtatcagagatcaggaggagccccaggtggtgcaggtggcgaaggcgaagacgaggatgattctcacgatgagctctag

SEQ ID NO: 49099 - protein, 669 aa, Glycine max
MAGSWARRSLIVLAIISFGCLFAISIAKEEATKLGTVIGIDLGTTYSCVGVYKNGHVEIIANDQGNRITPSWVAFTDSERLIGEAAKNQAAVNPERTIFDVKRLIGRKFEDKEVQKDMKLVPYKIVNKDGKPYIQVKIKDGETKVFSPEEISAMVLIKMKETAEAFLGKKINDAVVTVPAYFNDAQRQATKDAGVIAGLNVARIINEPTAAANALGLDKNKGGRGKNILVFDLGGGTFDVSILTIDNGVFEVLATIGDTHLGGEDFDQRIMEYFIKLIKKKHGKDISKDNRALGKLRREAERAKRALSSQHQVPLEIESLFDGVDFSEPLTRARFEELNNDLFRKTMGPVKKAMEDAGLQKSQIDEIVLVGGSTRIPKVQQLLKDYFDGKEPNKGVNPDEAVAYGAAVQGSILSGEGGEETKDILLLDVAPLTLGIETVGGVMTKLIPRNTVIPTKKSQVFTTYQDQQTTVSIQVFEGERSLTKDCRLLGKFDLSGIPPAPRGTPQIEVTFEVDANGILNVKAEDKGTGKSEKITITNEKGRLSQEEIDRMVREAEEFAEEDKKVKERIDARNSLETYVYNMKNQVSDKDKLADKLESDEKEKIETAVKEALEWLDDNQSVEKEDYEEKLKEVEAVCNPIISAVYQRSGGAPGGAGGEGEDEDDSHDEL

SEQ ID NO: 49100 - DNA, 2112 bp, Zea mays
  CDS (1)..(2112)
atggcctccttcacctgctcccaggtcggcgctgcggcagcgggcggaacctcgcccttcctcggctaccggcggcggagcggccccgggggcgccatcccgtcgagctccctcttcgtgggccggcggttggcggcggtgcggatgcgcgcgccctctcgcggggtccgcgggggctccgcgctgcgggtcacgtgcgagaaggtggtggggatcgacctaggcaccaccaactccgcggtcgccgccatggagggcggcaagccgaccgtcgtcaccaacgccgagggcgcgcgcacaactccctccgtagtggcgtacaccaagacaggggagcgcctggtggggcagatcgctaagcgccaggcggtcgtgaaccccgagaacaccttcttctctgtcaagcgcttcatcggccgcaagatgtctgaggtcgacgacgaggccaagcaggtctcgtacggcgttgtcaaagacgagaacggcaacgtcaaactcgactgccccgctattggcaaacagtttgctgccgaggagatctctgcgcaggttttgaggaagttggtggatgatgcatctaagtttcttaatgagaaaattacaaaagcagtggttacagtaccagcatacttcaatgattcacaaaggacagcaactaaagatgctggccgcattgcaggactggaagttctccgaattataaatgaaccaactgctgcatcattggcctatgggttcgagaagaaaaataatgaaacaattctagtgtttgatttgggaggtggtacctttgatgtctctgtattggaagttggagatggtgtgtttgaggtgctttccacatcaggtgatacacaccttggtggtgatgactttgataagagaatagtagattggcttgctagcaacttcaagaaagatgaaggtattgatcttctgaaggataaacaagcccttcagaggcttactgaggcatcagagaaagctaagatggaactgtcaacgctgacacaggcaaatattagcctgccattcattactgctactgctgatgggccaaaacacattgaggcaaccctctcgagagccaaatttgaggaactatgttcagaccttatagacaggcttaaaactcctgttaataatgccttaagagatgccaagttgtctgtcagtgatctagatgaagttattcttgtgggtggatccacccgaatccctgcagttcaagaacttgtgaggaagcttactgacaaagatcccaatgttacggtcaaccctgatgaggttgtttctcttggggcagctgtgcagggtggggttttggcaggagacgtgaaagatgtagttcttctggatgttactccattatctcttggtttggagacattgggaggagtgatgacaaagattatccccaggaataccacactgccaacctcaaaatcggaggtattctcaacagctgcagatggacagacgagcgttgagattaatgttctccagggagaaagagagtttgtcagggacaacaagtccgttggaagcttccggttggatgggatccctcctgcacctcgtggtgtcccacaaattgaagtgaagtttgatattgatgcaaatgggatactctcagttgctgccattgataagggcactggaaagaaacaggacatcaccatcactggtgctagtacgttacctaaggatgaggttgagagaatggtagaagaagccgataagtttgccaaggaggacaaagagaagagagatgcaattgacacaaaaaatcaggccgattctgtggtctaccagactgagaagcaactgaaggagcttggcgataaagtccccgctcccgtgaaagagaaggtggatgtgaagctccaggagctcaaagaggcaatatctggtggatcaacacagagtatgaaggatgccatgtctgctttgaaccaggaggtgatgcagattggccaggcaatgtataaccagtctggtgccagtgctgctgggtctactcctggtgctgaggctgggcctacccctggtaccggaccagcgcagaatgatggggatgtcattgatgcggacttcacagatagcaattga

SEQ ID NO: 49101 - protein, 703 aa, Zea mays
MASFTCSQVGAAAAGGTSPFLGYRRRSGPGGAIPSSSLFVGRRLAAVRMRAPSRGVRGGSALRVTCEKVVGIDLGTTNSAVAAMEGGKPTVVTNAEGARTTPSVVAYTKTGERLVGQIAKRQAVVNPENTFFSVKRFIGRKMSEVDDEAKQVSYGVVKDENGNVKLDCPAIGKQFAAEEISAQVLRKLVDDASKFLNEKITKAVVTVPAYFNDSQRTATKDAGRIAGLEVLRIINEPTAASLAYGFEKKNNETILVFDLGGGTFDVSVLEVGDGVFEVLSTSGDTHLGGDDFDKRIVDWLASNFKKDEGIDLLKDKQALQRLTEASEKAKMELSTLTQANISLPFITATADGPKHIEATLSRAKFEELCSDLIDRLKTPVNNALRDAKLSVSDLDEVILVGGSTRIPAVQELVRKLTDKDPNVTVNPDEVVSLGAAVQGGVLAGDVKDVVLLDVTPLSLGLETLGGVMTKIIPRNTTLPTSKSEVFSTAADGQTSVEINVLQGEREFVRDNKSVGSFRLDGIPPAPRGVPQIEVKFDIDANGILSVAAIDKGTGKKQDITITGASTLPKDEVERMVEEADKFAKEDKEKRDAIDTKNQADSVVYQTEKQLKELGDKVPAPVKEKVDVKLQELKEAISGGSTQSMKDAMSALNQEVMQIGQAMYNQSGASAAGSTPGAEAGPTPGTGPAQNDGDVIDADFTDSN

SEQ ID NO: 49102 - DNA, 1974 bp, Zea mays
  CDS (1)..(1974)
atggccggcaagggagaggggccggcgatcggcatcgatctcggcacgacctactcctgcgtcggggtctggcagcatgaccgtgtggagattatcgccaacgaccagggcaaccgcaccacgccgtcgtatgtggcgttcaccgacaccgagcggctcatcggcgacgccgcgaagaaccaggtcgccatgaatccgatcaacaccgtcttcgatgcgaagcggctcatcggccggcgtttctcggactcgtcggtgcagggggacatgaagatgtggccattcaaggtcgtcccaggccccgccgacaagccaatgatcgtggtgacctacaagggcgaggagaagaagttctcggccgaggagatctcctccatggtgctcaccaagatgaaggagatcgccgaggcctacctcagcaccaccatcaagaacgccgtcattaccgtgccggcctacttcaatgactcgcagcgccaggccaccaaggacgccggcgtcattgccggcctcaacgtcacgcgcatcatcaacgagcccacggccgccgccatcgcctacggactcgacaagaaggccaccagcactggcgagaagaacgtgctcatcttcgaccttggcggtggcacctttgatgtgtccctcctcaccattgaggagggtatcttcgaggtcaaggccactgctggtgacacccacctgggaggcgaggacttcgacaaccgcctggtgaaccacttcgtgatggggttcaagaggaaacacaagaaggacatcagcggcaacccgagggcgctccggcggctgcgtaccgcgtgcgagagggcgaagaggacgctctcctccaccgcccagaccaccattgagatcgactcgctctacgagggcatcgacttctacgcgaccatcacccgggccaggttcgaggagcttaacatggacctcttcaggaagtgcatggagcccgtggagaagtgcctccgcgacgccaagatggacaagtcacagatccacgacgtcgtgctcgtcggaggttccacccgtatccccaaggtgcagcagctgctccaggacttcttcaacggcaaggagttgtgcaagagcatcaaccctgacgaggccgtcgcgtacggcgccgctgtccaggccgccatcctcagcggcgagggcaaccagaaggtgcaggacctgctccttctcgatgtcacgccgctctcgctcgggctggagactgcaggcggtgtcatgaccgtgctgatcccgaggaacaccaccatccccaccaagaaggagcaggtgttctccacctactccgacaaccagcccggcgtgctgatccaggtgtacgagggtgagaggacgaggaccaaggacaacaacctgctcggcaagttcgagctgaccggcatcccgccggcgccacggggcgtgccccagatcaacgtgaccttcgacatcgacgcgaacggcatcctgaacgtgtcggcggaggacaagacgacggggaagaagaacaagatcaccatcaccaacgacaagggccggctgagcaaggaagagatcgagcgcatggtgcaggaggcggagaagtacaagaccgaggacgaggaggtgaagcgcaaggtggaggcccgcaacgcgctggagaactacgcgtataacatgcgcaacacggtgcgggacgagaagatcgcgtcgaagctgcccgccgatgacaagaagaagatcgaggacacgatcgaggatgccatcaagtggctcgacggcaaccagctcgcggaggccgaggagttcgaggacaagatgaaggagctggagagcatctgcaaccccatcatctcgcagatgtaccagggcggcgcgggcgctgcgggcatggacgaggatgtgcccggcggtggcgccggcaacggaggtggcagcggcgccgggcccaagattgaggaggtcgacttagcgacccatgggcggtga

SEQ ID NO: 49103 - protein, 657 aa, Zea mays
MAGKGEGPAIGIDLGTTYSCVGVWQHDRVEIIANDQGNRTTPSYVAFTDTERLIGDAAKNQVAMNPINTVFDAKRLIGRRFSDSSVQGDMKMWPFKVVPGPADKPMIVVTYKGEEKKFSAEEISSMVLTKMKEIAEAYLSTTIKNAVITVPAYFNDSQRQATKDAGVIAGLNVTRIINEPTAAAIAYGLDKKATSTGEKNVLIFDLGGGTFDVSLLTIEEGIFEVKATAGDTHLGGEDFDNRLVNHFVMGFKRKHKKDISGNPRALRRLRTACERAKRTLSSTAQTTIEIDSLYEGIDFYATITRARFEELNMDLFRKCMEPVEKCLRDAKMDKSQIHDVVLVGGSTRIPKVQQLLQDFFNGKELCKSINPDEAVAYGAAVQAAILSGEGNQKVQDLLLLDVTPLSLGLETAGGVMTVLIPRNTTIPTKKEQVFSTYSDNQPGVLIQVYEGERTRTKDNNLLGKFELTGIPPAPRGVPQINVTFDIDANGILNVSAEDKTTGKKNKITITNDKGRLSKEEIERMVQEAEKYKTEDEEVKRKVEARNALENYAYNMRNTVRDEKIASKLPADDKKKIEDTIEDAIKWLDGNQLAEAEEFEDKMKELESICNPIISQMYQGGAGAAGMDEDVPGGGAGNGGGSGAGPKIEEVDLATHGR

SEQ ID NO: 49104 - DNA, 2037 bp, Zea mays
  CDS (1)..(2037)
atggcggcgtccctgctcctccgcgccgtgcgccgaagggagcttgcgtcccctctcggatccctgggtgccagcatacagtcaacatgtgttgccaacatatgctcaaaatggggaaggtttgcaagacctttcagtgcaaaagctgctggaaatgaggttattgggattgatttggggacaacgaactcatgtgtttctgttatggagggaaagaacccaaaagttattgagaatgctgaaggtgcgagaacaacaccatctgttgtcgcatttactcagaagggtgaaagacttgttggaactccagccaagcgccaggcagtaaccaacccccagaatactttctttggaacaaagaggttaattgggcgacgctttgatgatccacagacacagaaagagatgaagatggtgccatacacaatcgtgaaggctccaaatggtgatgcttgggttcaaacaacagatggcaagcagtactcaccaagtcaggtcggtgcatttgtgctgaccaagatgaaggagacagctgaatcttaccttggcaagtctatctcaaaggcagtgattactgttccagcttatttcaatgacgctcagcgtcaggccacaaaggatgcaggccgcattgctggccttgatgttgaaaggatcatcaatgaacctacagcagccgctctgtcttatggaatgaacaacaaggaaggcttgatagcggtatttgatcttggaggaggaacttttgatatctctatcctggagatctcaaatggagtttttgaggtgaaagcaacaaatggtgatactttcttgggtggtgaagattttgataacacactactagagttcttggtgagtgatttcaagaaaaccgagggcattgatctgtcaaaggatagattggccctgcaaaggcttcgtgaagctgctgaaaaggcaaaggttgaactttcatcgacttctcagacagaaatcaatctgccattcataacagctgatgcttcaggggcaaaacatttgaacattacactgacaaggtcgaaatttgaatctcttgtacacaatctgattgaacggactagagatccatgcaagaactgcttgaaggatgccggaatatctactaaagaggtggacgaagtacttcttgttggtggaatgactagggttccaaaggtgcaggaggtagtctctgaaatcttcggaaagagcccaagcaaaggagtgaacccagatgaagctgtggccatgggtgctgccattcagggtggcattctccgtggagatgttaaggagcttcttcttcttgatgttactcccctgtcactaggtattgagacactcggtggtatcttcaccagattgatcaacagaaacactacaatccctacaaagaaaagtcaggtgttctcaactgctgctgacaatcagacccaagtgggtatccgtgtgttgcaaggtgagcgtgaaatggcagcagacaacaagcttcttggtgaatttgaccttgtgggcattccacctgccccaagaggcttgcctcagattgaggttgcattcgacatcgatgccaatggaatcgtgactgttgctgccaaagacaaggctactgggaaggagcagaacatcaccatccgatcctcgggtgggctgtctgaggctgacatccagaagatggtgcaagaagccgagctgcatgcccagaaggatcaggaacggaaagccctcattgacatcaggaacactgcggacaccactatctacagcatcgagaagagtcttggagagtacagggacaagatcccggcagaggttgcatctgagatcgaggcagccatcgctgacctccgccaggagatggcctcggatgacatcgagaagatcaaggccaagcttgaggctgccaacaaggctgtctcgaagattggtcagcacatgtcaggtggtggctctggcgactcacagtcgggatctggacctcagggtggcggtgaccaggcgccggaggcagagtatgaagaggttaaaaagtga

SEQ ID NO: 49105 - protein, 678 aa, Zea mays
MAASLLLRAVRRRELASPLGSLGASIQSTCVANICSKWGRFARPFSAKAAGNEVIGIDLGTTNSCVSVMEGKNPKVIENAEGARTTPSVVAFTQKGERLVGTPAKRQAVTNPQNTFFGTKRLIGRRFDDPQTQKEMKMVPYTIVKAPNGDAWVQTTDGKQYSPSQVGAFVLTKMKETAESYLGKSISKAVITVPAYFNDAQRQATKDAGRIAGLDVERIINEPTAAALSYGMNNKEGLIAVFDLGGGTFDISILEISNGVFEVKATNGDTFLGGEDFDNTLLEFLVSDFKKTEGIDLSKDRLALQRLREAAEKAKVELSSTSQTEINLPFITADASGAKHLNITLTRSKFESLVHNLIERTRDPCKNCLKDAGISTKEVDEVLLVGGMTRVPKVQEVVSEIFGKSPSKGVNPDEAVAMGAAIQGGILRGDVKELLLLDVTPLSLGIETLGGIFTRLINRNTTIPTKKSQVFSTAADNQTQVGIRVLQGEREMAADNKLLGEFDLVGIPPAPRGLPQIEVAFDIDANGIVTVAAKDKATGKEQNITIRSSGGLSEADIQKMVQEAELHAQKDQERKALIDIRNTADTTIYSIEKSLGEYRDKIPAEVASEIEAAIADLRQEMASDDIEKIKAKLEAANKAVSKIGQHMSGGGSGDSQSGSGPQGGGDQAPEAEYEEVKK

SEQ ID NO: 49106 - DNA, 1947 bp, Zea mays
  CDS (1)..(1947)
atggcgaagagcgagggtccggcgatcgggatcgacctcggcaccacctactcgtgcgtcggcgtgtggcagcacgaccgggtggagatcatcgccaacgaccaggggaaccgcaccacgccgtcctatgtcggcttcaccgacaccgagcggctcatcggcgacgctgccaagaaccaggtcgccatgaaccccaccaacaccgtcttcgatgccaagcggttgatcggcaggaggttctctgatccgtcagtgcagagtgacatgaagctatggccgttcaaggtcatcccagggcctggtgacaagcccatgattgtagtcaactacaagggcgaggagaagcagttcgctgctgaggagatctcctccatggtcctcatcaagatgaaggagattgctgaagcctaccttggttccaccatcaagaacgcagtggtgacagtgccggcctacttcaacgactcgcagaggcaggccaccaaggacgccggtgtcattgcgggcctcaatgtgatgcgtatcatcaacgagcccactgctgctgctattgcctacggtcttgacaagaaggccaccagctccggcgagaagaacgtgctcatcttcgaccttggtggtggcacgtttgatgtgtcgctcctcaccatcgaggagggcatcttcgaggtgaaggccactgcgggcgacactcaccttggcggcgaggacttcgacaatcgcatggtgaaccacttcgtccaagagttcaagcgcaagaataagaaggacataagcggcaacccccgtgcactgcgccggctgcgcacggcgtgcgagcgcgccaagcgcacgctgtcatcgactgcccagacgaccattgagatcgactccctgttcgagggcatcgatttctactccacgatcaccagggctcgcttcgaggagctcaatatggatttgttccggaagtgcatggaacctgtggagaagtgcttgcgcgacgccaagatggacaagagcagcgtgcacgacgtcgtgctcgtcggtggctccacccgcatccccaaggtgcagcagctgctgcaggacttcttcaacggaaaggaattgtgcaagagcatcaaccccgacgaggctgtggcgtacggcgccgctgtccaggctgccatcctcagcggcgagggcaacgaaaaggtacaagatctgctcctgctcgacgtcacgccactgtctctcggcctggagactgcaggtggcgtcatgacggtgctgatcccgaggaacaccaccatcccgaccaagaaggagcaggtcttctccacgtactccgacaaccagccgggcgtcctgatccaggtgtacgagggtgagcgcgcgaggaccaaggacaacaacctcctcggcaagttcgaactctccggcatccctcctgctccccgcggcgtgccccagatcacggttaccttcgacatcgatgccaacggcatcctcaacgtctctgccgaggacaagaccaccggccagaagaacaagatcacgatcaccaacgacaagggccggcttagcaaggaggagatcgagaagatggtgcaggaggctgagaagtacaaggcagaggacgaggaggtcaagaagaaggtggacgccaagaacgcgctcgagaattatgcctacaacatgaggaacaccatcaaggacgacaagatcgcctccaagctccccgctgaggacaagaagaagatcgaagatgccgttgacggcgccatcagctggctggacagcaaccagctggctgaggtggaggagttcgaagacaagatgaaggagcttgaggggatctgcaaccccatcatcgcgaagatgtaccagggcgagggcgcgggcatgggcgctgctgctggcatggatgaggatgccccgtctggtgggagcggtgctggtcccaagatcgaggaggtggattaa

SEQ ID NO: 49107 - protein, 648 aa, Zea mays
MAKSEGPAIGIDLGTTYSCVGVWQHDRVEIIANDQGNRTTPSYVGFTDTERLIGDAAKNQVAMNPTNTVFDAKRLIGRRFSDPSVQSDMKLWPFKVIPGPGDKPMIVVNYKGEEKQFAAEEISSMVLIKMKEIAEAYLGSTIKNAVVTVPAYFNDSQRQATKDAGVIAGLNVMRIINEPTAAAIAYGLDKKATSSGEKNVLIFDLGGGTFDVSLLTIEEGIFEVKATAGDTHLGGEDFDNRMVNHFVQEFKRKNKKDISGNPRALRRLRTACERAKRTLSSTAQTTIEIDSLFEGIDFYSTITRARFEELNMDLFRKCMEPVEKCLRDAKMDKSSVHDVVLVGGSTRIPKVQQLLQDFFNGKELCKSINPDEAVAYGAAVQAAILSGEGNEKVQDLLLLDVTPLSLGLETAGGVMTVLIPRNTTIPTKKEQVFSTYSDNQPGVLIQVYEGERARTKDNNLLGKFELSGIPPAPRGVPQITVTFDIDANGILNVSAEDKTTGQKNKITITNDKGRLSKEEIEKMVQEAEKYKAEDEEVKKKVDAKNALENYAYNMRNTIKDDKIASKLPAEDKKKIEDAVDGAISWLDSNQLAEVEEFEDKMKELEGICNPIIAKMYQGEGAGMGAAAGMDEDAPSGGSGAGPKIEEVD

SEQ ID NO: 49108 - DNA, 2052 bp, Zea mays
  CDS (1)..(2052)
atggcgaccacgaccttccccacctcgaccccattcttcgcggcccaccacggtccccgccggagccgaccctccatctccgccgcggtctacgcccggggccgccggtggcgcccgctgcgggtggcgtgcgagaaggtggtaggcatcgacctgggcaccaccaactccgcggtggccgctatggagggcggcaagcccacgattgttaccaacgcagagggggcgcggaccacgccctcggtggtggcgtacaccaagtccggcgaccgcctcgttggccagatcgccaagcgccaggccgtggtcaacccggagaacaccttcttctccgtcaagcgcttcatcggccgcaagatgaacgaggtcgacgaggagtccaagcaggtctcgtatctcgtcatcagggacgacaacggcaacgtcaagctcgattgcccggcgattggcaagcagttcgcagctgaggagatctccgcacaggtgctgagaaagctggtggatgatgcatcaaagtttttgaatgacaaggtcacaaaggcagtgatcacagtccctgcttacttcaatgattcacaaaggacagcgaccaaagatgctggccgcattgctgggctggaggttctgcgtattataaatgagcctaccgcagcatcactagcatatggttttgagaaaaagaacaatgaaacaattctggtttttgacctcggaggtggcacctttgatgtttcagttcttgaagtcggtgatggtgttttcgaggtgctgtctacatcaggtgacactcaccttggtggtgatgactttgacaagagaattgtagattggctcgctgggaacttcaagaatgatgagggtattgatttgctaaaagataagcaagctctgcagcgattgacagaagcagctgagaaggcaaagatggaactgtcatctttgacccaaacaaacataagcttgccttttattacagctactgcagatggtcccaagcatattgagactactcttaccagggctaaatttgaagagctatgctcagatctccttgacaggctgaggacccctgtggacaatgcccttagagatgcaaagttgcaattcaaagatattgatgaggttattcttgttggtggctcaactagaataccagctgttcaggagcttgtcaagaaaatgacaggaaaggaccccaatgtgacagtcaaccctgatgaggttgttgcacttggagcagctgtgcaggctggagttctgtctggtgatgttacggccgaggtacttcttgatgtgacccccttgtccctaggtttggagacactgggtggtgtcatgaccaagattatcccacggaatacaaccttgcctacctcaaagtcggaagttttctcaacagcagctgatggccagactagtgtggagatcaatgttctccaaggagaaagagagtttgtgagagacaacaagtctattggtagcttccggcttgatggaatccctcctgccccacgtggtgttccacagatcgaagtcaagtttgatattgatgctaacggtatcctctctgtcagtgctgtggacaagggtacagggaagaagcaggatatcacaattactggtgctagcactctgccaaaggacgaggtggagaggatggttggcgaagctgagaagtttgcaaaggaggacaaggagaagcgagacgccattgacaccaagaaccaagccgagtcggtcatctaccagaccgagaagcaactgaaggaactaggggacaaggtcccaggtgacgtcaaggggaaagtcgagtcgaagctgcaagagctcaaggatgctgttgctggtggctccacgcagacaatgaaggacgccataagtgcgttgaaccaggaagtcatgcagatcgggcaggccctctacagccagcagggtgccccaggcgcaggacctggtgcagctgatgcttcttctgctggttcagcgggcacttctgagaagccaggtgacggaggtgatgtgattgacgcagattttactgacagcaaatga

SEQ ID NO: 49109 - protein, 683 aa, Zea mays
MATTTFPTSTPFFAAHHGPRRSRPSISAAVYARGRRWRPLRVACEKVVGIDLGTTNSAVAAMEGGKPTIVTNAEGARTTPSVVAYTKSGDRLVGQIAKRQAVVNPENTFFSVKRFIGRKMNEVDEESKQVSYLVIRDDNGNVKLDCPAIGKQFAAEEISAQVLRKLVDDASKFLNDKVTKAVITVPAYFNDSQRTATKDAGRIAGLEVLRIINEPTAASLAYGFEKKNNETILVFDLGGGTFDVSVLEVGDGVFEVLSTSGDTHLGGDDFDKRIVDWLAGNFKNDEGIDLLKDKQALQRLTEAAEKAKMELSSLTQTNISLPFITATADGPKHIETTLTRAKFEELCSDLLDRLRTPVDNALRDAKLQFKDIDEVILVGGSTRIPAVQELVKKMTGKDPNVTVNPDEVVALGAAVQAGVLSGDVTAEVLLDVTPLSLGLETLGGVMTKIIPRNTTLPTSKSEVFSTAADGQTSVEINVLQGEREFVRDNKSIGSFRLDGIPPAPRGVPQIEVKFDIDANGILSVSAVDKGTGKKQDITITGASTLPKDEVERMVGEAEKFAKEDKEKRDAIDTKNQAESVIYQTEKQLKELGDKVPGDVKGKVESKLQELKDAVAGGSTQTMKDAISALNQEVMQIGQALYSQQGAPGAGPGAADASSAGSAGTSEKPGDGGDVIDADFTDSK

SEQ ID NO: 49110 - DNA, 1947 bp, Zea mays
  CDS (1)..(1947)
atggcgaagggcgagggtccggcgatcgggatcgatctcggcaccacctactcgtgcgtcggcgtgtggcagcacgaccgggtggagatcatcgccaacgaccagggcaaccgcaccacgccgtcctatgtcgccttcaccgacaccgagcggctcatcggtgacgccgccaagaaccaggtggccatgaaccccaccaacaccgtcttcgatgccaagcggttgatcggcaggaggttctctgacccgtcagtgcagagtgacatgaagctatggccgttcaaggtcatccctggccctggtgacaagcccatgattgtagtctcctacaagggtgaggagaagcagttcgctgctgaagagatctcctccatggtgctcatcaagatgaaggagattgctgaagcctacctcggctctactatcaagaatgcagtggtgacagtgccggcctatttcaacgactcgcagaggcaagccaccaaggacgccggtgtcattgcgggcctcaatgtgatgcgtatcatcaacgagcccactgctgctgctattgcctacggtcttgacaagaaggcgagcagctctggcgagaagaacgtgctcatctttgaccttggtggtggcacgtttgatgtgtccctcctcaccatcgaggagggcatcttcgaggtgaaggccaccgcgggtgatactcaccttggaggcgaggatttcgacaatcgaatggtgaaccacttcgtccaggagttcaagcgcaagcataagaaggacatcagcggcaaccctcgtgcactgcgccggctgcgcacggcgtgcgagcgcgccaagcgcacgctgtcatcgaccgcccagacgaccattgagatcgactccttgttcgagggcatcgacttctactctacaatcaccagggctcgctttgaggagctcaacatggacttgttccgcaagtgcatggaacctgtggagaagtgcctgcgcgacgccaagatggacaagagcagcgtgcacgacgtcgtgctcgtcggtggctccacccgcattcccaaagtgcagcagctgctgcaggatttcttcaacggcaaagaactctgcaagagcatcaaccccgacgaggctgtggcgtacggcgcggctgtacaggccgccatcctcagtggcgagggcaacgagaaggtgcaggacctgctcctactcgacgtcacgccactgtctctcggcctggagactgcaggtggcgtcatgacggtgcttatcccgaggaacaccacaatcccgaccaagaaggagcaggtcttctcgacgtactccgacaatcagccgggcgtcctgatacaggtgtacgagggtgagcgcgcgaggaccaaggacaacaacctcctcggcaagttcgagctctcgggcatccctcctgctccccccggcgtgccccagatcaccgtcaccttcgacatcgaccccaagggcatcctcaacgtctctgctgaggacaagaccaccggccagaagaacaagatcacgatcactaacgacaagggccggcttagcaaggaggagattgagaagatggtgcaggaggctgagaagtacaaggccgaggacgaggaggtcaagaagaaggtggacgctaagaacacgctcgagaactatgcctataacatgaggaacaccatcaaggatgacaagatcgcctccaagctctcggcagatgacaagaaaaagatcgaggacgccgtcgatagcgccaccagctggctggacagcaaccagctagctgaggtggacgagttcgaagacaagatgaaggagctcgagggcatctgcaaccccatcatcgccaagatgtaccaaggcgctggcgcgggcatgggcgatgcggctggcatggacgaggatgccccgtctggtgggagcggtgctggtcccaagatcgaagaggtcgattaa

SEQ ID NO: 49111 - protein, 648 aa, Zea mays
MAKGEGPAIGIDLGTTYSCVGVWQHDRVEIIANDQGNRTTPSYVAFTDTERLIGDAAKNQVAMNPTNTVFDAKRLIGRRFSDPSVQSDMKLWPFKVIPGPGDKPMIVVSYKGEEKQFAAEEISSMVLIKMKEIAEAYLGSTIKNAVVTVPAYFNDSQRQATKDAGVIAGLNVMRIINEPTAAAIAYGLDKKASSSGEKNVLIFDLGGGTFDVSLLTIEEGIFEVKATAGDTHLGGEDFDNRMVNHFVQEFKRKHKKDISGNPRALRRLRTACERAKRTLSSTAQTTIEIDSLFEGIDFYSTITRARFEELNMDLFRKCMEPVEKCLRDAKMDKSSVHDVVLVGGSTRIPKVQQLLQDFFNGKELCKSINPDEAVAYGAAVQAAILSGEGNEKVQDLLLLDVTPLSLGLETAGGVMTVLIPRNTTIPTKKEQVFSTYSDNQPGVLIQVYEGERARTKDNNLLGKFELSGIPPAPPGVPQITVTFDIDPKGILNVSAEDKTTGQKNKITITNDKGRLSKEEIEKMVQEAEKYKAEDEEVKKKVDAKNTLENYAYNMRNTIKDDKIASKLSADDKKKIEDAVDSATSWLDSNQLAEVDEFEDKMKELEGICNPIIAKMYQGAGAGMGDAAGMDEDAPSGGSGAGPKIEEVD

SEQ ID NO: 49112 - DNA, 2040 bp, Zea mays
  CDS (1)..(2040)
atggccttcggagctctcgtcacgtcgaggctggtcaggtccggccacacccttgcatctgccgttgcccagggtcccgttgcccagcggatagcacctcctctgctctccaggcttggagcagtagctcgtcttctcagcacaaagccagccgcaacagatgtcatcggtatcgatctaggcacaacgaattcctgcgtctccgtcatggaaggaaagacaccacgggtgattgaaaatgcagaaggcgcgaggacgacaccctccattgttgccaagaatcagaatggtgacctgttgattggtatcacagcgagccggcaggcagtaaccaatgcccagaacacaatccgtgggtcaaagcgtctgatcggtaggacttttgatgacccacagacccagaaggagatgaagatggtgccttacaagattgtcaaggcgccgaatggtgatgcctgggtcgagatgggtggccagcagtactcccctagtcagattggtgcatttgttctcactaagatgaaggaaactgcagaggcttaccttggcaagacagtctctaaggctgttattactgtcccagcttattttaatgatgctcaacgccaggctaccaaggatgctggtaggattgctggactggaagttatgaggattatcaatgagcccactgctgcagctttgtcttatggaatgaacaacaaggagggccttattgcagtgtttgacctgggtggtggcacatttgatgtgtcaatccttgagatatcaaatggggttttcgaggtcaaggcaaccaatggtgatactttccttggtggtgaggattttgatggtgcactgcttgagtatctggttagcgagttcaagaagtcagacaacattgatctgagcaaggacaagttagcactgcaaaggctcagggaagctgctgagaaggccaaggttgagctttcgtccactatgcagactgaaatcaacctcccatttatcactgctgatgcatctggtgcaaagcacttcaacattaccttgaccagatctaagtttgagtctcttgtgagcaatctcattgagaggactcgcatcccttgtgtgaactgcctcaaggatgctggcatctctgctaaggagattgatgaggtcctactggttggtggtatgactagagtaccaaaggtccaggaggttgtttctcagatattcaacaagccaccaagcaagggtgtcaatcctgatgaggctgttgccatgggagctgcaatccagggtggcattttgaggggtgatgtgaaggagctccttttgctggatgtcacacctctctcccttggtattgagacccttggtggcatcttcacaaggctaattaacaggaacaccacaattccaaccaagaagagccaggtcttctctaccgctgcagataaccagacacaggttggagttaaggtgcttcagggtgagagggagatggctacagataacaagctccttggcgaattccagcttgaaggcattccaccagccccaagaggcatgccccagatcgaggttacctttgacattgatgccaatggcattgtaaaggtgtcagctagggacaaagccacaggcaaagaacaagaaatcaccatcaagtcttctggtggtttgtcagaggtcgaaattgagaagatggtgaaggaggcagagctacattctcagaaggaccaggaaaggaagtctcttattgatctcaagaactctgcagataccacgatctacagcattgagaagagtgtcagcgagtacaaggacaaggtccctgctgaagtcaccaaggagatcgagtctgctgtctctgatctgagggcagctatggctgaggacgatctggacaagatcaagcagaagctggaagcagcaaacaaggctgtttcaaagattggagagcacatgcaacaaggtggtggtggcggcagcgctggcggcagcggcagtggaggagaccagactccagaagctgagtaccaggacgcaaaggaagccaagatgtag

SEQ ID NO: 49113 - protein, 679 aa, Zea mays
MAFGALVTSRLVRSGHTLASAVAQGPVAQRIAPPLLSRLGAVARLLSTKPAATDVIGIDLGTTNSCVSVMEGKTPRVIENAEGARTTPSIVAKNQNGDLLIGITASRQAVTNAQNTIRGSKRLIGRTFDDPQTQKEMKMVPYKIVKAPNGDAWVEMGGQQYSPSQIGAFVLTKMKETAEAYLGKTVSKAVITVPAYFNDAQRQATKDAGRIAGLEVMRIINEPTAAALSYGMNNKEGLIAVFDLGGGTFDVSILEISNGVFEVKATNGDTFLGGEDFDGALLEYLVSEFKKSDNIDLSKDKLALQRLREAAEKAKVELSSTMQTEINLPFITADASGAKHFNITLTRSKFESLVSNLIERTRIPCVNCLKDAGISAKEIDEVLLVGGMTRVPKVQEVVSQIFNKPPSKGVNPDEAVAMGAAIQGGILRGDVKELLLLDVTPLSLGIETLGGIFTRLINRNTTIPTKKSQVFSTAADNQTQVGVKVLQGEREMATDNKLLGEFQLEGIPPAPRGMPQIEVTFDIDANGIVKVSARDKATGKEQEITIKSSGGLSEVEIEKMVKEAELHSQKDQERKSLIDLKNSADTTIYSIEKSVSEYKDKVPAEVTKEIESAVSDLRAAMAEDDLDKIKQKLEAANKAVSKIGEHMQQGGGGGSAGGSGSGGDQTPEAEYQDAKEAKM

SEQ ID NO: 49114 - DNA, 1950 bp, Zea mays
  CDS (1)..(1950)
atggccggcaagggcgatggcccggctatcggcatcgatctcggcacgacgtactcttgcgtcggcgtgtggcagcacgaccgcgtcgagatcattgccaacgaccagggtaaccgcaccacgccctcgtacgtcgccttcaccgactccgagcgcctcatcggagatgcggccaagaaccaggtcgccatgaaccccatcaacaccgtctttgatgccaagcgtctcatcggcaggaggttcagtgatgcgtctgtccagagtgatatcaagttgtggcccttcaaggtcatttctgggcctggtgagaagccaatgattgttgtccagcacaagggtgaggagaagcagtttgcagctgaagagatctcctctatggttcttatcaagatgcgtgagattgctgaagcttaccttggtagcacgatcaagaatgctgtggtcacagtccctgcctacttcaatgactcacagaggcaggccacaaaggatgctggggtgattgctggccttaatgtgctgcgtatcatcaacgagccaacagctgcagctatcgcctatggtcttgacaagaaggctaccagtgtcggtgagaagaatgtcctcatctttgatcttggaggtggtacctttgatgtctccctcctcaccattgaggaaggaatctttgaggtcaaggccacagctggtgacacccatcttggtggtgaggactttgacaacaggatggtcaaccacttcgtccaggagttcaagaggaagaacaagaaggatatcactggcaaccccagggctctccggaggctgaggaccgcttgtgagagggcgaagaggactctgtcttccactgcccagaccacgattgagattgactcgctgtatgagggcatcgacttctactccaccatcacccgtgccaggtttgaggagctcaacatggacctgttcaggaagtgcatggagcctgttgagaagtgcctgagggatgccaagatggacaagagcaccgtccatgacgttgtacttgttggtggctccactaggatccccagggtgcagcaactgctccaggacttcttcaacggcaaggagctgtgcaagaacatcaaccccgatgaggctgtcgcctatggtgctgctgtccaggctgccatcctgagcggtgagggcaatgagaaggtgcaggacctgcttctgctggacgtcacccctctgtccctgggtctggagactgctggaggagttatgacagtgctgatcccgaggaacaccaccatccccaccaagaaggagcaggtattctccacctactcggacaaccagcccggtgtcctgatccaggtctacgagggtgagaggacccggacacgcgacaacaacctgctgggcaagttcgagctctccggcatcccccctgcaccccgtggtgtgccacagatcaccgtgtgctttgacatcgacgccaacggcatcctgaacgtgtctgccgaggacaagacaacggggcagaagaacaagatcacaatcaccaacgacaagggccgtctctccaaggaggagatcgagaagatggttcaggacgctgagaagtacaagtctgaggatgaggagcacaagaagaaggtggaggccaagaactcgctggagaactactcctacaacatgcgcaacacgatcaaggacgagaagattgcgtccaagctgccggccgatgacaagaagaagatcgaggacgccatcgacgcggccatcagctggctggacgccaaccagctcgccgaggcggacgagttcgaggacaagatgaaggagctggagagcctctgcaaccccatcatcgccaagatgtaccagggcgcgggtgaagacatgggcggcgctggcggcatggacgaggacgcccctgccggcagcggcggccctggccccaagatcgaggaggtggactaa

SEQ ID NO: 49115 - protein, 649 aa, Zea mays
MAGKGDGPAIGIDLGTTYSCVGVWQHDRVEIIANDQGNRTTPSYVAFTDSERLIGDAAKNQVAMNPINTVFDAKRLIGRRFSDASVQSDIKLWPFKVISGPGEKPMIVVQHKGEEKQFAAEEISSMVLIKMREIAEAYLGSTIKNAVVTVPAYFNDSQRQATKDAGVIAGLNVLRIINEPTAAAIAYGLDKKATSVGEKNVLIFDLGGGTFDVSLLTIEEGIFEVKATAGDTHLGGEDFDNRMVNHFVQEFKRKNKKDITGNPRALRRLRTACERAKRTLSSTAQTTIEIDSLYEGIDFYSTITRARFEELNMDLFRKCMEPVEKCLRDAKMDKSTVHDVVLVGGSTRIPRVQQLLQDFFNGKELCKNINPDEAVAYGAAVQAAILSGEGNEKVQDLLLLDVTPLSLGLETAGGVMTVLIPRNTTIPTKKEQVFSTYSDNQPGVLIQVYEGERTRTRDNNLLGKFELSGIPPAPRGVPQITVCFDIDANGILNVSAEDKTTGQKNKITITNDKGRLSKEEIEKMVQDAEKYKSEDEEHKKKVEAKNSLENYSYNMRNTIKDEKIASKLPADDKKKIEDAIDAAISWLDANQLAEADEFEDKMKELESLCNPIIAKMYQGAGEDMGGAGGMDEDAPAGSGGPGPKIEEVD

SEQ ID NO: 49116 - DNA, 2037 bp, Zea mays
  CDS (1)..(2037)
atggcggcgtccctgctcctccgcgccgtgcgccgaagggagcttgcgtcccctctcggatccctgggtgccagcatacagtcaacatgtgttgccaacatatgctcaaaatggggaaggtttgcaagacctttcagtgcaaaagctgctggaaatgaggttattgggattgatttggggacaacgaactcatgtgtttcggttatggaaggaaagaacccaaaagttattgagaatgctgaaggtgcgagaacaacaccatctgttgtcgcatttactcagaagggtgaaagacttgttggaactccagccaagcgccaggcagtaaccaacccccagaatactttctttggaacaaagaggttaattgggcgacgctttgatgatccacagacacagaaagagatgaagatggtgccatacacaatcgtgaaggctccaaatggtgatgcttgggttcaaacaacagatggcaagcagtactcaccaagtcaggtcggtgcatttgtgctgaccaagatgaaggagacagctgaatcttaccttggcaagtctatctcaaaggcagtgattactgttccagcttatttcaatgatgctcagcgtcaggccacaaaggatgcaggccgcattgctggccttgatgttgaaaggatcatcaatgaacctacagcagccgctctgtcttatggaatgaacaacaaggaaggcttgatagcggtatttgatcttggaggaggaacttttgatatctctattctggagatctcaaatggagtttttgaggtcaaagcaacaaatggtgatactttcttgggtggtgaagattttgataatacactattggagttcttggtgagtgatttcaagaaaactgagggcatagatctgtcgaaagatagattggccctgcaaaggcttcgtgaagctgctgagaaggcaaaggttgaactttcgtcgacttctcagacagaaatcaatctgccattcataacagctgatgcttcaggggcaaaacatttgaacatcacactgacaaggtcaaaatttgaatctcttgtacacaatctgattgagagaactagagatccatgcaagaactgtttgaaggatgccggaatatctactaaagaggtggatgaagtacttcttgttggtggaatgactagggttccaaaggtgcaggaggtagtctctgaaatctttgggaagaacccaagcaaaggagtcaatccagatgaagctgtggccatgggtgctgcacttcagggtggcattctccgtggagatgttaaggagcttcttcttcttgatgttactcccctgtcactaggtattgagacgctcggtggtatcttcaccagattgatcaacagaaacactacaatccccacaaagaaaagtcaggtgttctcaactgctgctgacaaccagacccaagtgggtatccgggtgttgcaaggtgagcgtgaaatggctacagacaacaagctccttggtgaatttgacctcgtgggcattccacctgccccaagaggcttgcctcagattgaggttacattcgacatcgatgccaatggaatcgtgactgtctcagccaaagataaggctaccgggaaggagcagaacatcaccatacgatcctcgggtgggctgtcggaggctgacatccagaagatggtgcaagaagctgagctgcatgcccagaaggaccaggagcggaaagccctcattgacatcaggaacaatgccgacaccaccatctacagcatcgagaagagtcttggagagtacagggacaagatcccggcagaggttgcatctgagatcgaggctgccatcgctgacctccgccaggagatggcctcggatgacatcgagaagatcaaggccaagcttgaggctgccaacaaggctgtctcgaagattggacagcacatgtctggtggtggctctggcggctcgcagtcaggatctggacctcagggtggcggcgaccaggcgccggaggcagagtatgaggaggttaagaagtga

SEQ ID NO: 49117 - protein, 678 aa, Zea mays
MAASLLLRAVRRRELASPLGSLGASIQSTCVANICSKWGRFARPFSAKAAGNEVIGIDLGTTNSCVSVMEGKNPKVIENAEGARTTPSVVAFTQKGERLVGTPAKRQAVTNPQNTFFGTKRLIGRRFDDPQTQKEMKMVPYTIVKAPNGDAWVQTTDGKQYSPSQVGAFVLTKMKETAESYLGKSISKAVITVPAYFNDAQRQATKDAGRIAGLDVERIINEPTAAALSYGMNNKEGLIAVFDLGGGTFDISILEISNGVFEVKATNGDTFLGGEDFDNTLLEFLVSDFKKTEGIDLSKDRLALQRLREAAEKAKVELSSTSQTEINLPFITADASGAKHLNITLTRSKFESLVHNLIERTRDPCKNCLKDAGISTKEVDEVLLVGGMTRVPKVQEVVSEIFGKNPSKGVNPDEAVAMGAALQGGILRGDVKELLLLDVTPLSLGIETLGGIFTRLINRNTTIPTKKSQVFSTAADNQTQVGIRVLQGEREMATDNKLLGEFDLVGIPPAPRGLPQIEVTFDIDANGIVTVSAKDKATGKEQNITIRSSGGLSEADIQKMVQEAELHAQKDQERKALIDIRNNADTTIYSIEKSLGEYRDKIPAEVASEIEAAIADLRQEMASDDIEKIKAKLEAANKAVSKIGQHMSGGGSGGSQSGSGPQGGGDQAPEAEYEEVKK

SEQ ID NO: 49118 - DNA, 2112 bp, Zea mays
  CDS (1)..(2112)
atggtctccttcacctgttcccaggtcggcgcgacggcagcgggcggagcctcgcccttcctcggctaccggtggcggagcggccccgggggagccaccccgtcgagctccctcttcgttggccggcggctggcggcggtgcagatgcgcgcgccctctcgcggggcccgcgggggctccgcgctgcgggtcacgtgcgagaaggtggtggggatcgacctaggcaccaccaactccgcggtcgccgccatggagggcggcaagccgaccgtcgtcaccaacgccgagggcgcgcgcacaactccctccgtagtggcgtacaccaagacaggggagcgcctggtggggcagatcgctaagcgccaggcggtcgtgaaccccgagaacaccttcttctctgtcaagcgcttcatcggccgcaagatgtctgaggtcgacgacgaggccaagcaggtctcgtacggcgttgtcaaagacgagaacggcaacgtcaaactcgactgccccgctatcggcaaacagttcgctgccgaggagatctccgcgcaggttttgaggaagttggtggatgatgcatctaagtttcttaatgagaaaatcacaaaagcagtggttacagtaccagcatacttcaatgattcacaaaggacagcaactaaagatgctggccgcattgcaggactggaagttctccgtattataaatgaaccaactgctgcatcattggcctatgggttcgagaagaaaaataatgaaacaattctagtgtttgatttgggaggcggtacctttgatgtctctgtattggaagttggagatggtgtgtttgaggtgctttccacatcaggtgacacacaccttggtggtgatgactttgataagagaatagtagattggcttgctagcaacttcaagaaagatgaaggtattgatcttctgaaggataaacaagcccttcagaggcttactgaggcatcagagaaagctaagatggaactgtcaacgctgacacaggcaaatattagcctgccattcattactgctactgctgatgggccaaaacacattgaggcaaccctctcgagagccaaattcgaggaactatgttcagaccttatagacaggcttaaaactcctgttaataatgccttaagagatgccaagttgtctgtcagtgatctagatgaagttattcttgtgggtggatccacccgaatccctgcagttcaagaacttgtgaggaagcttactgacaaagatcccaatgttacggtcaaccctgatgaggttgtttctcttggggcagctgtgcagggtggggttttggcaggagacgtgaaagatgtagttcttctggatgttactccattatctcttggtttggagacattgggaggagtgatgacaaagattatccccaggaataccacactgccaacctcaaaatcggaggtattctcaacagctgcagatggacagacgagcgttgagattaatgttctccagggagaaagagagtttgtcagggacaacaagtcccttggaagcttccggttggacggaatccctcctgcacctcgtggtgtcccacaaattgaagtgaagtttgatattgatgcaaatgggatactctcagttgctgccattgataagggcactggaaagaaacaggacatcaccatcactggtgctagtacgctacctaaggatgaggttgagagaatggtagaagaagccgataagtttgccaaggaggacaaagagaagagagatgcaatcgacacaaaaaaccaggccgactcagtggtctaccagactgagaagcaactgaaggagcttggcgacaaagtccccgctcccgtgaaagagaaggtggatgtgaagctccaggagctcaaagacgcaatatctggtggatcaacacagagtatgaaagatgccatggctgctctgaaccaggaggtgatgcagattggccaggcaatgtataaccagcctggtgccagtgctgctgggcctactcctggtgctgaggccggacctacccctggtaccggaccaacgcagaatgatggggatgtcattgacgcagacttcacagatagcaattga

SEQ ID NO: 49119 - protein, 703 aa, Zea mays
MVSFTCSQVGATAAGGASPFLGYRWRSGPGGATPSSSLFVGRRLAAVQMRAPSRGARGGSALRVTCEKVVGIDLGTTNSAVAAMEGGKPTVVTNAEGARTTPSVVAYTKTGERLVGQIAKRQAVVNPENTFFSVKRFIGRKMSEVDDEAKQVSYGVVKDENGNVKLDCPAIGKQFAAEEISAQVLRKLVDDASKFLNEKITKAVVTVPAYFNDSQRTATKDAGRIAGLEVLRIINEPTAASLAYGFEKKNNETILVFDLGGGTFDVSVLEVGDGVFEVLSTSGDTHLGGDDFDKRIVDWLASNFKKDEGIDLLKDKQALQRLTEASEKAKMELSTLTQANISLPFITATADGPKHIEATLSRAKFEELCSDLIDRLKTPVNNALRDAKLSVSDLDEVILVGGSTRIPAVQELVRKLTDKDPNVTVNPDEVVSLGAAVQGGVLAGDVKDVVLLDVTPLSLGLETLGGVMTKIIPRNTTLPTSKSEVFSTAADGQTSVEINVLQGEREFVRDNKSLGSFRLDGIPPAPRGVPQIEVKFDIDANGILSVAAIDKGTGKKQDITITGASTLPKDEVERMVEEADKFAKEDKEKRDAIDTKNQADSVVYQTEKQLKELGDKVPAPVKEKVDVKLQELKDAISGGSTQSMKDAMAALNQEVMQIGQAMYNQPGASAAGPTPGAEAGPTPGTGPTQNDGDVIDADFTDSN

SEQ ID NO: 49120 - DNA, 1947 bp, Zea mays
  CDS (1)..(1947)
atggcgaagggcgagggtccggcgatcgggatcgatctcggcaccacctactcgtgcgtcggcgtgtggcagcacgaccgggtggagatcatcgccaacgaccagggcaaccgcaccacgccgtcctatgtcgccttcaccgacaccgagcggctcatcggtgacgccgccaagaaccaggtggccatgaaccccaccaacaccgtcttcgatgccaagcggttgatcggcaggaggttctctgacccgtcagtgcagagtgacatgaagctatggccgttcaaggtcatccctggccctggtgacaagcccatgattgtagtctcctacaagggtgaggagaagcagttcgctgctgaagagatctcctccatggtgctcatcaagatgaaggagattgctgaagcctacctcggctctactatcaagaatgcagtggtgacagtgccggcctatttcaacgactcgcagaggcaagccaccaaggacgccggtgtcattgcgggcctcaatgtgatgcgtatcatcaacgagcccactgctgctgctattgcctacggtcttgacaagaaggcgagcagctctggcgagaagaacgtgctcatctttgaccttggtggtggcacgtttgatgtgtccctcctcaccatcgaggagggcatcttcgaggtgaaggccaccgcgggtgatactcaccttggaggcgaggatttcgacaatcgaatggtgaaccacttcgtccaggagttcaagcgcaagcataagaaggacatcagcggcaaccctcgtgcactgcgccggctgcgcacggcgtgcgagcgcgccaagcgcacgctgtcatcgaccgcccagacgaccattgagatcgactccttgttcgagggcatcgacttctactctacaatcaccagggctcgctttgaggagctcaacatggacttgttccgcaagtgcatggaacctgtggagaagtgcctgcgcgacgccaagatggacaagagcagcgtgcacgacgtcgtgctcgtcggtggctccacccgcattcccaaggtgcagcagctgctgcaggatttcttcaacggcaaagaactctgcaagagcatcaaccccgacgaggctgtggcgtacggcgcggctgtacaggccgccatcctcagtggcgagggcaacgagaaggtgcaggacctgctcctactcgacgtcacgccactgtctctcggcctggagactgcaggtggcgtcatgacggtgcttatcccgaggaacaccacaatcccgaccaagaaggagcaggtcttctcgacgtactccgacaatcagccgggcgtcctgatacaggtgtacgagggtgagcgcgcgaggaccaaggacaacaacctcctcggcaagttcgagctctcgggcatccctcctgctccccgcggcgtgccccagatcaccgtcaccttcgacatcgacgccaatggcatcctcaacgtctctgctgaggacaagaccaccggccagaagaacaagatcacgatcactaacgacaagggccggcttagcaaggaggagattgagaagatggtgcaggaggctgagaagtacaaggccgaggacgaggaggtcaagaagaaggtggacgctaagaacacgctcgagaactatgcctataacatgaggaacaccatcaaggatgacaagatcgcctccaagctctcggcagatgacaagaaaaagatcgaggacgccgtcgatagcgccaccagctggctggacagcaaccagctagctgaggtggacgagttcgaagacaagatgaaggagctcgagggcatctgcaaccccatcatcgccaagatgtaccaaggcgctggcgcgggcatgggcgatgcggctggcatggacgaggatgccccgtctggtgggagcggtgctggtcccaagatcgaagaggtcgattaa

SEQ ID NO: 49121 - protein, 648 aa, Zea mays
MAKGEGPAIGIDLGTTYSCVGVWQHDRVEIIANDQGNRTTPSYVAFTDTERLIGDAAKNQVAMNPTNTVFDAKRLIGRRFSDPSVQSDMKLWPFKVIPGPGDKPMIVVSYKGEEKQFAAEEISSMVLIKMKEIAEAYLGSTIKNAVVTVPAYFNDSQRQATKDAGVIAGLNVMRIINEPTAAAIAYGLDKKASSSGEKNVLIFDLGGGTFDVSLLTIEEGIFEVKATAGDTHLGGEDFDNRMVNHFVQEFKRKHKKDISGNPRALRRLRTACERAKRTLSSTAQTTIEIDSLFEGIDFYSTITRARFEELNMDLFRKCMEPVEKCLRDAKMDKSSVHDVVLVGGSTRIPKVQQLLQDFFNGKELCKSINPDEAVAYGAAVQAAILSGEGNEKVQDLLLLDVTPLSLGLETAGGVMTVLIPRNTTIPTKKEQVFSTYSDNQPGVLIQVYEGERARTKDNNLLGKFELSGIPPAPRGVPQITVTFDIDANGILNVSAEDKTTGQKNKITITNDKGRLSKEEIEKMVQEAEKYKAEDEEVKKKVDAKNTLENYAYNMRNTIKDDKIASKLSADDKKKIEDAVDSATSWLDSNQLAEVDEFEDKMKELEGICNPIIAKMYQGAGAGMGDAAGMDEDAPSGGSGAGPKIEEVD

SEQ ID NO: 49122 - DNA, 2052 bp, Zea mays
  CDS (1)..(2052)
atggcgaccacgaccttccccacctcgaccccattctttgcggcccatcacggcccccgccggagccgaccctccatctccgccgcggtctacagccgcagccgccggtggcgcccgctgcgggtggcgtgcgagaaggtggtaggcatcgacctggggaccacaaattccgcggtggcagctatggagggcggcaagcccacgatcgttaccaacgccgagggggcgcggaccacgccctcggtggtggcgtacaccaagtccggcgaccgcctcgttggccagatcgccaagcgccaggccgtcgtcaacccggagaacaccttcttctccgtgaagcgcttcatcggccgcaagatgaacgaggtagacgaggagtccaagcaggtctcgtatcgcgtcatcagggatgacaacggcaacgtcaagctcgattgcccggcgattggcaagcagttcgcagctgaggagatttccgcacaggtgctgagaaagctggtggatgatgcatcaaagtttttgaatgataaagtcacaaaggcagtgatcacagtccctgcttacttcaacgattcacaaaggacagcgaccaaagatgctggccgcattgctgggctggaggttctgcgtattataaatgagcctactgctgcatcactagcatatggttttgagaaaaagaacaatgaaacaattctggtttttgacctcggaggtggcacctttgatgtttcagttcttgaagtcggtgatggtgttttcgaggtgctgtctacatcaggtgacactcaccttggtggtgatgactttgacaagagaattgtagattggctcgctgggaacttcaagaatgatgagggtattgatttgctaaaagataagcaagctctgcagcgattgacagaagcagctgagaaggcaaagatggaactgtcatctttgacccaaacaaacatgagcttgccttttattacagctactgcagatggtcccaagcatattgagactactcttaccagggctaaatttgaagagctatgctcagatctccttgacaggctgaggacccctgtggacaatgcccttagagatgcaaagttgcaattcaaagatattgatgaggttattcttgttggtggctcaactagaataccagctgttcaggagcttgtcaagaaaatgacaggaaaggaccccaatgtgacagtcaaccctgatgaggttgttgcacttggagcagctgtgcaggctggagttctgtctggcgatgttagcgacattgtacttcttgatgtgacccccttgtccctagggttggagacactgggtggtgtcatgaccaagattatcccacggaatacaaccttgcctacctcaaagtcggaagttttctcaacagcagctgatggccagactagtgtggagatcaatgttctccaaggagaaagagagttcgtgagagacaacaagtctattggtagcttccggcttgatggaatccctcctgccccacgtggtgttccacagatcgaagtcaagtttgatattgatgctaacggtatcctctctgtcagtgctgtggacaagggtacagggaagaagcaggatatcacaattactggtgctagcactctgccaaaggacgaggtggagaggatggttggcgaagctgagaagtttgcaaaggaggacaaggagaagcgagacgccattgacaccaagaaccaagccgagtcggtcatctaccagaccgagaagcaactgaaggaactaggggacaaggtcccaggtgacgtcaaggggaaagtcgagtcgaagctgcaagagctcaaggatgctgttgctggtggctccacgcagacgatgaaggacgccatgagtgcgttgaaccaggaagtcatgcagatcgggcaggccctctacagccagcagggtgccccaggcgctggacctggtgcagctgatgcttcttctgctggttcagcgggcacttctgagaagccaggtgacggaggcgatgtgattgacgcagattttactgacagcaaatga

SEQ ID NO: 49123 - protein, 683 aa, Zea mays
MATTTFPTSTPFFAAHHGPRRSRPSISAAVYSRSRRWRPLRVACEKVVGIDLGTTNSAVAAMEGGKPTIVTNAEGARTTPSVVAYTKSGDRLVGQIAKRQAVVNPENTFFSVKRFIGRKMNEVDEESKQVSYRVIRDDNGNVKLDCPAIGKQFAAEEISAQVLRKLVDDASKFLNDKVTKAVITVPAYFNDSQRTATKDAGRIAGLEVLRIINEPTAASLAYGFEKKNNETILVFDLGGGTFDVSVLEVGDGVFEVLSTSGDTHLGGDDFDKRIVDWLAGNFKNDEGIDLLKDKQALQRLTEAAEKAKMELSSLTQTNMSLPFITATADGPKHIETTLTRAKFEELCSDLLDRLRTPVDNALRDAKLQFKDIDEVILVGGSTRIPAVQELVKKMTGKDPNVTVNPDEVVALGAAVQAGVLSGDVSDIVLLDVTPLSLGLETLGGVMTKIIPRNTTLPTSKSEVFSTAADGQTSVEINVLQGEREFVRDNKSIGSFRLDGIPPAPRGVPQIEVKFDIDANGILSVSAVDKGTGKKQDITITGASTLPKDEVERMVGEAEKFAKEDKEKRDAIDTKNQAESVIYQTEKQLKELGDKVPGDVKGKVESKLQELKDAVAGGSTQTMKDAMSALNQEVMQIGQALYSQQGAPGAGPGAADASSAGSAGTSEKPGDGGDVIDADFTDSK

SEQ ID NO: 49124 - DNA, 2082 bp, Zea mays
  CDS (1)..(2082)
atgcaaataagctgtccgcccattcctccgttcttccttaattcctcatttcctccacgtacgcgggcatactctgcgagtcctggagatttttttccccttcttcacgatactctcgacgagagcgtctccatggccggaaaaggagacgggccggcgatcggcatcgacctcggtacgacctactcgtgcgtcggggtgtggcagcatgaccgagtcgagatcatcgccaacgaccagggcaaccgtacaacgccgtcttatgtcgcgttcaccgattcggagaggctcgtcggcgacgccgccaagaaccaggtcgccatgaaccccatcaacaccgtcttcgacgcgaagcggctcatcggccggcgcttctctgacgcgtcggtgcagagtgacgccaagctatggcctttcaaggtgatcccgggctccggcgacaagcccatgatcggggtgcagttcaggggcgaggagaaacagttctcggccgaggagatcagctccatgatcctgaacaagatgaaggagacggccgaggcttacctcggcaccaccatcaagaacgctgtcgtcaccgtcccggcctacttcaacgactcccagcgccaggccaccaaggacgccggcgtcatctccggcctcaacgtcatgcgcatcatcaacgagcccaccgccgcggccatcgcatacgggctcgacaagaagtcgagcagcgacggcgagaagaacgtcctcatcttcgacctcggcggcggtacctttgacgtctcgctcctcaccatcgaggagggcatctttgaggtcaaggccaccgccggcgatacccacctgggaggcgaggacttcgacaaccggctcgtgaaccacttcgtccaggagttcaagaggaagaacaagaaggacatcactggcaaccccagggcgctccggcggctgaggaccgcctgcgagagggctaagaggacgctctcctccaccgcccaaaccaccatcgagatcgactcgctctatgagggcatcgacttctacacgaccatcacccgtgcccggttcgaggagctcaacatggacctcttccgcaagtgcatggagcccgtggagaagtgcctccgcgacgccaagatggacaagagcagcgtgcacgacgtcgttctcgtgggcggctccactcgcatcccccgcgtgcagcagctgctccaggacttcttcaacggcaaggagttgtgcaagagcatcaacccagacgaggctgtcgcgtacggagcggccgtccaggccgccatcctcactggcgagggcaatgagaaggttcaggatctgctcctgctcgacgtctcgccgctctcgctcggcctggagacggccggaggcgtcatgactgtgctcatccccaggaacaccaccatcccgacaaagaaggagcaggtcttctccacttactccgacaaccagcccggcgtgctcatccaggtgtacgaaggtgagagggccaggaccaaagacaacaatctgctcggcaagttcgagctctctggcatccctccggcgcccaggggcgtcccccagatcaccgtgtgtttcgacatggacgcgaacggcatcctcaacgtgtcagcggaggacaagaccaccggacagaagaataagatcacgatcaccaacgataagggacggctaagtaaggaggagatcgagaagatggtgcaggaggcagagaagtacaaagccgaggacgaggaacaccagaagaaggtgaacgccaagaacacgctcgagaactatgcctacaatatgcgcaacaccatcagagacgacaagatcgcctccaagctaccggaggacgacaagaaaaagatcgatgacgccgtcgagggggccatcaattggctcgacaacaaccagctcgccgaggttgatgagtttgaggacaagatgaaggagctggagggcatctgcaaccccatcatcgcgaagatgtatcagggcgccgctggtcctgacatggccggtggcatggatcaggatgcttcgccggctggtggcagcggtgctggacccaagatcgaagaagtcgactaa

SEQ ID NO: 49125 - protein, 693 aa, Zea mays
MQISCPPIPPFFLNSSFPPRTRAYSASPGDFFPLLHDTLDESVSMAGKGDGPAIGIDLGTTYSCVGVWQHDRVEIIANDQGNRTTPSYVAFTDSERLVGDAAKNQVAMNPINTVFDAKRLIGRRFSDASVQSDAKLWPFKVIPGSGDKPMIGVQFRGEEKQFSAEEISSMILNKMKETAEAYLGTTIKNAVVTVPAYFNDSQRQATKDAGVISGLNVMRIINEPTAAAIAYGLDKKSSSDGEKNVLIFDLGGGTFDVSLLTIEEGIFEVKATAGDTHLGGEDFDNRLVNHFVQEFKRKNKKDITGNPRALRRLRTACERAKRTLSSTAQTTIEIDSLYEGIDFYTTITRARFEELNMDLFRKCMEPVEKCLRDAKMDKSSVHDVVLVGGSTRIPRVQQLLQDFFNGKELCKSINPDEAVAYGAAVQAAILTGEGNEKVQDLLLLDVSPLSLGLETAGGVMTVLIPRNTTIPTKKEQVFSTYSDNQPGVLIQVYEGERARTKDNNLLGKFELSGIPPAPRGVPQITVCFDMDANGILNVSAEDKTTGQKNKITITNDKGRLSKEEIEKMVQEAEKYKAEDEEHQKKVNAKNTLENYAYNMRNTIRDDKIASKLPEDDKKKIDDAVEGAINWLDNNQLAEVDEFEDKMKELEGICNPIIAKMYQGAAGPDMAGGMDQDASPAGGSGAGPKIEEVD

SEQ ID NO: 49126 - DNA, 1950 bp, Zea mays
  CDS (1)..(1950)
atggcaaagggggaggggccggcgatcgggatcgacctgggaacgacgtactcgtgtgtcggcgtgtggcagcacgaccgcgtcgagatcatcgccaacgaccaggggaaccgcaccacgccgtcctacgtcgccttcaccgacaccgagcggctcatcggcgatgccgccaagaaccaggtcgccatgaaccccaccaacaccgtatttgacgcaaagcggttgattggtaggaggttctcggacccttccgttcagagtgatatgaagctatggccattcaaggtcgtggcgggccctggcgacaagccgatgatcgtggttagctacaagggtgaggataagcagttctctgccgaggagatctcctctatggtgctgaccaagatgaaggagatcgctgaggcctacctcggctccaccatcaagaatgccgtggtcaccgtgcctgcctatttcaacgactcgcagaggcaggccaccaaggatgccggcgtcatctccgggctcaacgtgatgcgtatcatcaacgagcccaccgccgcggccattgcctacgggctcgacaaaaaggccaccagcagcggcgagaagaacgtgctcatcttcgacctcggtggtggcaccttcgatgtgtcgctcttgaccatcgaggagggcatcttcgaggtgaaggccaccgccggtgatacccatctgggtggggaggacttcgacaaccgcatggtcaaccacttcgtccaggagttcaagcgcaagcacaagaaggacatcagcggcatcccgcgcgcgctgcggcgtctgcggacggcctgcgagcgggccaagcgcacgctgtcgtccaccgcgcagaccaccatcgagatcgactcgctgtacgagggcatcgacttctacaccaccatcacccgcgcccggttcgaggagctgaacatggacctcttccgcaagtgcatggagcccgtggagaaatgcctccgcgatgccaagatggacaagagcaccgtgcacgacgtggtgctcgtgggcggctccacgcgcatccccaaggtgcagcagctgctccaggacttcttcaacggcaaggagctctgcaagagcatcaaccctgacgaggccgtggcgtacggtgctgctgtccaggccgccatcctgagcggcgagggcaacgagaaggtgcaggacctgctccttctggacgtcaccccgctgtccctgggcctggagactgccggcggcgtgatgaccgtgctgatccctcgcaacaccaccataccaacgaagaaggagcaggtgttctccacctactccgacaaccagccgggggtgctgatccaggtgtacgagggagagcgcgccaggaccaaggacaacaacctccttggcaagttcgagctgtccggcatcccgccggcgcctcgcggcgtgccccagatcaccgtgtgcttcgacatcgacgccaacggcattctgaacgtatcagcggaggacaagactacaggacagaaaaacaagatcaccatcaccaacgacaaggggcggctgagcaaggaggagatcgagaagatggtgaaggaggcggagaagtacaaggcggaggacgaggagcataagaagaaggtggacgccaagaactcgctggagaactacgcgtacaacatgcgcaacaccatcaaggacgacaagatcgcctccaagctaggtgcggatgacaagaagcgcatcgagaacgccgtggacggtgccatcagctggctggacagcaaccagctcgcggaggtggacgagttcgaggacaagatgaaggagctggagggcatctgcaaccccatcatcgccaagatgtaccagggcgctggcgcggacatgggtgctgctgccggcatggacgaggacgcaccggccgccggcggcagcgccgctggccccaagatcgaggaggtcgactaa

SEQ ID NO: 49127 - protein, 649 aa, Zea mays
MAKGEGPAIGIDLGTTYSCVGVWQHDRVEIIANDQGNRTTPSYVAFTDTERLIGDAAKNQVAMNPTNTVFDAKRLIGRRFSDPSVQSDMKLWPFKVVAGPGDKPMIVVSYKGEDKQFSAEEISSMVLTKMKEIAEAYLGSTIKNAVVTVPAYFNDSQRQATKDAGVISGLNVMRIINEPTAAAIAYGLDKKATSSGEKNVLIFDLGGGTFDVSLLTIEEGIFEVKATAGDTHLGGEDFDNRMVNHFVQEFKRKHKKDISGIPRALRRLRTACERAKRTLSSTAQTTIEIDSLYEGIDFYTTITRARFEELNMDLFRKCMEPVEKCLRDAKMDKSTVHDVVLVGGSTRIPKVQQLLQDFFNGKELCKSINPDEAVAYGAAVQAAILSGEGNEKVQDLLLLDVTPLSLGLETAGGVMTVLIPRNTTIPTKKEQVFSTYSDNQPGVLIQVYEGERARTKDNNLLGKFELSGIPPAPRGVPQITVCFDIDANGILNVSAEDKTTGQKNKITITNDKGRLSKEEIEKMVKEAEKYKAEDEEHKKKVDAKNSLENYAYNMRNTIKDDKIASKLGADDKKRIENAVDGAISWLDSNQLAEVDEFEDKMKELEGICNPIIAKMYQGAGADMGAAAGMDEDAPAAGGSAAGPKIEEVD

SEQ ID NO: 49128 - DNA, 22 bp, Artificial sequence
  primer
atgggaaaagttgttgggattg

SEQ ID NO: 49129 - DNA, 24 bp, Artificial sequence
  primer
ttatttctccggctcagagaattc

SEQ ID NO: 49130 - protein, 678 aa, Artificial sequence
  consensus sequence
  Variant (8)..(8): Xaa in position 8 is any amino acid
  Variant (12)..(17): Xaa in position 12 to 17 is any amino acid
  Variant (18)..(25): Xaa in position 18 to 25 is any or no amino acid
  Variant (27)..(27): Xaa in position 27 is any amino acid
  Variant (29)..(30): Xaa in position 29 to 30 is any amino acid
  Variant (31)..(34): Xaa in position 31 to 34 is any or no amino acid
  Variant (36)..(36): Xaa in position 36 is any amino acid
  Variant (42)..(42): Xaa in position 42 is any amino acid
  Variant (45)..(48): Xaa in position 45 to 48 is any amino acid
  Variant (49)..(57): Xaa in position 49 to 57 is any or no amino acid
  Variant (59)..(59): Xaa in position 59 is any amino acid
  Variant (61)..(61): Xaa in position 61 is any amino acid
  Variant (63)..(63): Xaa in position 63 is any amino acid
  Variant (64)..(64): Xaa in position 64 is any or no amino acid
  Variant (67)..(67): Xaa in position 67 is any amino acid
  Variant (69)..(71): Xaa in position 69 to 71 is any amino acid
  Variant (74)..(74): Xaa in position 74 is any amino acid
  Variant (75)..(75): Xaa in position 75 is any or no amino acid
  Variant (77)..(80): Xaa in position 77 to 80 is any amino acid
  Variant (83)..(83): Xaa in position 83 is any amino acid
  Variant (87)..(98): Xaa in position 87 to 98 is any amino acid
  Variant (99)..(127): Xaa in position 99 to 127 is any or no amino acid
  Variant (129)..(131): Xaa in position 129 to 131 is any amino acid
  Variant (133)..(135): Xaa in position 133 to 135 is any amino acid
  Variant (137)..(137): Xaa in position 137 is any amino acid
  Variant (139)..(139): Xaa in position 139 is any amino acid
  Variant (141)..(142): Xaa in position 141 to 142 is any amino acid
  Variant (145)..(146): Xaa in position 145 to 146 is any amino acid
  Variant (149)..(152): Xaa in position 149 to 152 is any amino acid
  Variant (153)..(155): Xaa in position 153 to 155 is any or no amino acid
  Variant (158)..(158): Xaa in position 158 is any amino acid
  Variant (167)..(167): Xaa in position 167 is any amino acid
  Variant (177)..(177): Xaa in position 177 is any amino acid
  Variant (182)..(182): Xaa in position 182 is any amino acid
  Variant (184)..(184): Xaa in position 184 is any amino acid
  Variant (195)..(195): Xaa in position 195 is any amino acid
  Variant (199)..(199): Xaa in position 199 is any amino acid
  Variant (202)..(209): Xaa in position 202 to 209 is any amino acid
  Variant (210)..(220): Xaa in position 210 to 220 is any or no amino acid
  Variant (229)..(229): Xaa in position 229 is any amino acid
  Variant (231)..(231): Xaa in position 231 is any amino acid
  Variant (233)..(238): Xaa in position 233 to 238 is any amino acid
  Variant (239)..(246): Xaa in position 239 to 246 is any or no amino acid
  Variant (250)..(251): Xaa in position 250 to 251 is any amino acid
  Variant (253)..(253): Xaa in position 253 is any amino acid
  Variant (257)..(257): Xaa in position 257 is any amino acid
  Variant (261)..(261): Xaa in position 261 is any amino acid
  Variant (265)..(274): Xaa in position 265 to 274 is any amino acid
  Variant (277)..(279): Xaa in position 277 to 279 is any amino acid
  Variant (280)..(303): Xaa in position 280 to 303 is any or no amino acid
  Variant (305)..(309): Xaa in position 305 to 309 is any amino acid
  Variant (310)..(312): Xaa in position 310 to 312 is any or no amino acid
  Variant (314)..(315): Xaa in position 314 to 315 is any amino acid
  Variant (318)..(319): Xaa in position 318 to 319 is any amino acid
  Variant (321)..(321): Xaa in position 321 is any amino acid
  Variant (323)..(323): Xaa in position 323 is any amino acid
  Variant (326)..(327): Xaa in position 326 to 327 is any amino acid
  Variant (330)..(346): Xaa in position 330 to 346 is any amino acid
  Variant (347)..(360): Xaa in position 347 to 360 is any or no amino acid
  Variant (363)..(363): Xaa in position 363 is any amino acid
  Variant (366)..(366): Xaa in position 366 is any amino acid
  Variant (368)..(370): Xaa in position 368 to 370 is any amino acid
  Variant (372)..(377): Xaa in position 372 to 377 is any amino acid
  Variant (379)..(382): Xaa in position 379 to 382 is any amino acid
  Variant (384)..(384): Xaa in position 384 is any amino acid
  Variant (387)..(396): Xaa in position 387 to 396 is any amino acid
  Variant (397)..(398): Xaa in position 397 to 398 is any or no amino acid
  Variant (403)..(403): Xaa in position 403 is any amino acid
  Variant (406)..(406): Xaa in position 406 is any amino acid
  Variant (408)..(408): Xaa in position 408 is any amino acid
  Variant (411)..(417): Xaa in position 411 to 417 is any amino acid
  Variant (418)..(419): Xaa in position 418 to 419 is any or no amino acid
  Variant (422)..(426): Xaa in position 422 to 426 is any amino acid
  Variant (427)..(427): Xaa in position 427 is any or no amino acid
  Variant (432)..(432): Xaa in position 432 is any amino acid
  Variant (434)..(434): Xaa in position 434 is any amino acid
  Variant (436)..(436): Xaa in position 436 is any amino acid
  Variant (440)..(440): Xaa in position 440 is any amino acid
  Variant (442)..(444): Xaa in position 442 to 444 is any amino acid
  Variant (446)..(446): Xaa in position 446 is any amino acid
  Variant (448)..(450): Xaa in position 448 to 450 is any amino acid
  Variant (451)..(456): Xaa in position 451 to 456 is any or no amino acid
  Variant (458)..(458): Xaa in position 458 is any amino acid
  Variant (464)..(464): Xaa in position 464 is any amino acid
  Variant (470)..(470): Xaa in position 470 is any amino acid
  Variant (473)..(473): Xaa in position 473 is any amino acid
  Variant (477)..(477): Xaa in position 477 is any amino acid
  Variant (479)..(479): Xaa in position 479 is any amino acid
  Variant (482)..(482): Xaa in position 482 is any amino acid
  Variant (490)..(494): Xaa in position 490 to 494 is any amino acid
  Variant (496)..(496): Xaa in position 496 is any amino acid
  Variant (498)..(499): Xaa in position 498 to 499 is any amino acid
  Variant (501)..(501): Xaa in position 501 is any amino acid
  Variant (503)..(504): Xaa in position 503 to 504 is any amino acid
  Variant (506)..(506): Xaa in position 506 is any amino acid
  Variant (508)..(508): Xaa in position 508 is any amino acid
  Variant (510)..(511): Xaa in position 510 to 511 is any amino acid
  Variant (515)..(518): Xaa in position 515 to 518 is any amino acid
  Variant (519)..(519): Xaa in position 519 is any or no amino acid
  Variant (522)..(523): Xaa in position 522 to 523 is any amino acid
  Variant (524)..(527): Xaa in position 524 to 527 is any or no amino acid
  Variant (530)..(530): Xaa in position 530 is any amino acid
  Variant (532)..(532): Xaa in position 532 is any amino acid
  Variant (534)..(534): Xaa in position 534 is any amino acid
  Variant (543)..(543): Xaa in position 543 is any amino acid
  Variant (544)..(544): Xaa in position 544 is any or no amino acid
  Variant (550)..(550): Xaa in position 550 is any amino acid
  Variant (553)..(553): Xaa in position 553 is any amino acid
  Variant (558)..(558): Xaa in position 558 is any amino acid
  Variant (560)..(561): Xaa in position 560 to 561 is any amino acid
  Variant (563)..(563): Xaa in position 563 is any amino acid
  Variant (565)..(565): Xaa in position 565 is any amino acid
  Variant (566)..(566): Xaa in position 566 is any or no amino acid
  Variant (568)..(568): Xaa in position 568 is any amino acid
  Variant (569)..(569): Xaa in position 569 is any or no amino acid
  Variant (573)..(575): Xaa in position 573 to 575 is any amino acid
  Variant (577)..(577): Xaa in position 577 is any amino acid
  Variant (579)..(580): Xaa in position 579 to 580 is any amino acid
  Variant (581)..(582): Xaa in position 581 to 582 is any or no amino acid
  Variant (584)..(584): Xaa in position 584 is any amino acid
  Variant (587)..(589): Xaa in position 587 to 589 is any amino acid
  Variant (591)..(592): Xaa in position 591 to 592 is any amino acid
  Variant (594)..(596): Xaa in position 594 to 596 is any amino acid
  Variant (599)..(603): Xaa in position 599 to 603 is any amino acid
  Variant (605)..(613): Xaa in position 605 to 613 is any amino acid
  Variant (614)..(614): Xaa in position 614 is any or no amino acid
  Variant (616)..(660): Xaa in position 616 to 660 is any amino acid
  Variant (661)..(677): Xaa in position 661 to 677 is any or no amino acid
GIDLGTTXSCVXXXXXXXXXXXXXXIXNXXXXXXGXRTTPSXVAXXXXXXXXXXXXXEXLXGXXAKXQXXXNPXXTXXXXKRXIGRXXXXXXXXXXXXXXXXXXXXXXXXXXXXXXXXXXXXXXXXXPXXXSXXXLXKXKXXAEXXLGXXXXXXXAVXTVPAYFNDXQRQATKDAGXIAGLXVXRIINEPTAAAXAYGXDKXXXXXXXXXXXXXXXXXXXDLGGGTFDXSXLXXXXXXXXXXXXXXFEVXXTXGDTXLGGXDFDXXXXXXXXXXFKXXXXXXXXXXXXXXXXXXXXXXXXXXXDXXXXXXXXAXXRLXXAXEXAKXXLSXXXXXXXXXXXXXXXXXXXXXXXXXXXXXXXRAXFEXLXXXLXXXXXXPXXXXLXDAXXXXXXXXXXXXLVGGXTRXPXVQXXXXXXXXXGKXXXXXXNPDEXVXAXGAAXQXXXLXGXXXXXXXXXDXLLLDVXPLSLGXETXGGVXTXLIXRNTTIPTXXXXXFXTXXDXQXXVXIXVXXGERXXXXXDNXXXXXXLGXFXLXGIPPAPRGXXPQIEVXFDXDANGXIXXVXAXXDXXTGKXXXIXIXXXXGXLSXXXIXXMXXXAEXXXXXDXXXXXXXXXXNXXXXXXXXXXXXXXXXXXXXXXXXXXXXXXXXXXXXXXXXXXXXXXXXXXXXXXXXXXXXXXL

SEQ ID NO: 49131 - protein, 21 aa, Artificial sequence
  protein pattern
  Variant (3)..(3): Xaa in position 3 is Ile or Val
  Variant (12)..(12): Xaa in position 12 is Ala, Asn or Ser
  Variant (15)..(15): Xaa in position 15 is any amino acid
AVXTVPAYFNDXQRXATKDAG

SEQ ID NO: 49132 - protein, 19 aa, Artificial sequence
  protein pattern
  Variant (2)..(3): Xaa in position 2 to 3 is any amino acid
  Variant (4)..(4): Xaa in position 4 is any or no amino acid
  Variant (6)..(6): Xaa in position 6 is any amino acid
  Variant (8)..(8): Xaa in position 8 is any amino acid
  Variant (10)..(10): Xaa in position 10 is any amino acid
  Variant (11)..(11): Xaa in position 11 is Asp, Gly, Asn or Ser
  Variant (13)..(13): Xaa in position 13 is any or no amino acid
  Variant (15)..(15): Xaa in position 15 is any or no amino acid
  Variant (17)..(17): Xaa in position 17 is any amino acid
NXXXGXFXLXXIXPXAXRG

SEQ ID NO: 49133 - protein, 13 aa, Artificial sequence
  protein pattern
  Variant (4)..(4): Xaa in position 4 is any amino acid
  Variant (5)..(5): Xaa in position 5 is Ala or Ser
  Variant (7)..(7): Xaa in position 7 is Ala, Asp, Gly, Asn or Ser
  Variant (11)..(11): Xaa in position 11 is any amino acid
FEVXXTXGDTXLG

SEQ ID NO: 49134 - protein, 10 aa, Artificial sequence
  protein pattern
  Variant (2)..(2): Xaa in position 2 is Ala, Asp, Pro or Ser
  Variant (3)..(3): Xaa in position 3 is Glu or Gln
  Variant (5)..(5): Xaa in position 5 is any amino acid
NXXGXRTTPS

SEQ ID NO: 49135 - protein, 11 aa, Artificial sequence
  protein pattern
  Variant (8)..(8): Xaa in position 8 is any amino acid
  Variant (11)..(11): Xaa in position 11 is Ile, Leu or Val
GIDLGTTXSCX

SEQ ID NO: 49136 - protein, 12 aa, Artificial sequence
  protein pattern
  Variant (9)..(9): Xaa in position 9 is Ile or Val
  Variant (11)..(11): Xaa in position 11 is Ile, Leu or Val
DLGGGTFDXSXL

SEQ ID NO: 49137 - protein, 11 aa, Artificial sequence
  protein pattern
  Variant (2)..(2): Xaa in position 2 is any amino acid
  Variant (4)..(4): Xaa in position 4 is Ala, Asp or Glu
  Variant (5)..(5): Xaa in position 5 is Ile, Leu, Met or Val
  Variant (11)..(11): Xaa in position 11 is Phe, Ile, Leu, Met or Val
VXFXXDANGIX

SEQ ID NO: 49138 - protein, 14 aa, Artificial sequence
  protein pattern
  Variant (5)..(5): Xaa in position 5 is Ala or Val
  Variant (8)..(8): Xaa in position 8 is any amino acid
  Variant (12)..(12): Xaa in position 12 is Ile or Val
  Variant (14)..(14): Xaa in position 14 is Ala or Gly
NPDEXVAXGAAXQX

SEQ ID NO: 49139 - protein, 13 aa, Artificial sequence
  protein pattern
  Variant (2)..(2): Xaa in position 2 is any or no amino acid
  Variant (7)..(7): Xaa in position 7 is any amino acid
  Variant (10)..(10): Xaa in position 10 is Ile, Met or Val
  Variant (12)..(12): Xaa in position 12 is any amino acid
  Variant (13)..(13): Xaa in position 13 is Ile or Val
VXLVGGXTRXPXX

SEQ ID NO: 49140 - protein, 13 aa, Artificial sequence
  protein pattern
  Variant (2)..(2): Xaa in position 2 is Ile or Val
  Variant (4)..(5): Xaa in position 4 to 5 is any amino acid
  Variant (8)..(8): Xaa in position 8 is Asn or Arg
  Variant (10)..(10): Xaa in position 10 is any amino acid
  Variant (11)..(11): Xaa in position 11 is Ala, Ile, Pro or Val
  Variant (12)..(12): Xaa in position 12 is any amino acid
LXGXXAKXQXXXN

SEQ ID NO: 49141 - protein, 14 aa, Artificial sequence
  protein pattern
  Variant (3)..(3): Xaa in position 3 is any amino acid
  Variant (4)..(4): Xaa in position 4 is Asp, Glu or Thr
  Variant (5)..(5): Xaa in position 5 is Ala or Ser
  Variant (6)..(6): Xaa in position 6 is Ala, Cys, Gly or Ser
  Variant (8)..(8): Xaa in position 8 is any amino acid
  Variant (11)..(11): Xaa in position 11 is any amino acid
  Variant (12)..(12): Xaa in position 12 is Ala, Asp, Glu, Ser or Thr
RLXXXXEXAKXXLS

SEQ ID NO: 49142 - protein, 23 aa, Artificial sequence
  protein pattern
  Variant (2)..(4): Xaa in position 2 to 4 is any amino acid
  Variant (5)..(7): Xaa in position 5 to 7 is any or no amino acid
  Variant (9)..(9): Xaa in position 9 is any amino acid
  Variant (11)..(11): Xaa in position 11 is Leu or Met
  Variant (12)..(14): Xaa in position 12 to 14 is any amino acid
  Variant (16)..(16): Xaa in position 16 is Glu, Gly or Ser
  Variant (17)..(18): Xaa in position 17 to 18 is any amino acid
  Variant (21)..(22): Xaa in position 21 to 22 is any amino acid
  Variant (23)..(23): Xaa in position 23 is Ala, Ile or Val
SXXXXXXLXKXXXXAXXXLGXXX

SEQ ID NO: 49143 - DNA, 513 bp, Synechocystis sp.
  CDS (1)..(513): transl_table=11
atgacaaaaattggacttttttacggtactcaaaccggcaacactgaaaccattgctgaactgattcaaaaagaaatgggcggcgatagtgtggtcgatatgatggatatatcccaggctgatgttgatgattttaggcaatatagttgcctgattatcggttgtcccacctggaatgtgggggaactccagagtgattgggaaggcttttatgaccaattagacgaaattgattttaatggcaaaaaagtagcctattttggtgctggcgatcaggttggttatgcagataattttcaagacgccatgggcattttagaagaaaaaatcagtggattaggcggtaaaacagtggggttttggcccaccgctggctatgattttgacgaatcaaaagcggtgaaaaatgggaaatttgttggtttagctttggacgaagataatcagccagagttaacagaattaagagtaaagacatgggtaagtgaaattaaaccaattttgcaatcctaa

SEQ ID NO: 49144 - protein, 170 aa, Synechocystis sp.
MTKIGLFYGTQTGNTETIAELIQKEMGGDSVVDMMDISQADVDDFRQYSCLIIGCPTWNVGELQSDWEGFYDQLDEIDFNGKKVAYFGAGDQVGYADNFQDAMGILEEKISGLGGKTVGFWPTAGYDFDESKAVKNGKFVGLALDEDNQPELTELRVKTWVSEIKPILQS

SEQ ID NO: 49145 - DNA, 525 bp, Prochlorococcus marinus str. MIT 9301
  CDS (1)..(525): transl_table=11
atgactgtaggaatttattacgcaactacaaccggaaaaacagaagatgtggctgatcgtcttcacaactttatctcttcagctgaagcacctaaagatgtatctgatgtggatgatctttcagaatttgagggtcttgatggaattatctgcgggatacccacttggaatactggtgccgatgaagaaaggtcgggaactgcatgggattcaatcttagaggatattggtgaactaagtttatcaggaaaaaaagttgcaatttttggtttaggagattcttctacatatacagaaaactattgtgatgcaatggaagaacttcatagctacttcacaaaagcaggcgccgaaatggtcggttacgtagataaatcttcttatacatttgatgaatccaaaagtgttatgggggacagattttgtggattacctcttgatgaggatagtgaatctgatttgaccgattcgcgtcttgagacatgggcttctcagcttaagggtgaaatcccctcattggcatag

SEQ ID NO: 49146 - protein, 174 aa, Prochlorococcus marinus str. MIT 9301
MTVGIYYATTTGKTEDVADRLHNFISSAEAPKDVSDVDDLSEFEGLDGIICGIPTWNTGADEERSGTAWDSILEDIGELSLSGKKVAIFGLGDSSTYTENYCDAMEELHSYFTKAGAEMVGYVDKSSYTFDESKSVMGDRFCGLPLDEDSESDLTDSRLETWASQLKGEIPSLA

SEQ ID NO: 49147 - DNA, 528 bp, Vibrio cholerae O1 biovar eltor str. N16961
  CDS (1)..(528): transl_table=11
atggcaagtgtaggtatcttctttggcagcgacaccggcaacaccgaagctattgcaaagatgattcaaaaacaactcggtaaaaaactggttcacgtacaagatattgccaaaagcagcaaagaagacatcaataacttcgacctgctgttgctgggtatcccgacttggtactacggtgaagcacagtgcgactgggacgactttttccctgagctagaagccattgatttttcaactaagcttgttgccatttttggttgtggtgaccaagaagattacgcagagtacttctgcgatgcgatgggcaccgtacgtgacatcattcaagcgaaaggcgcaaccattgtcggccactggccaacggaaggttacgaatttgaagcttctaaagccctagtggatgaaaatcacttcgtcggtctgtgtatcgatgaagatcgccagccagagctaactgagcaacgcgtgaccaaatgggttaaccaagtttatgaagagatgtgtctcgctgaacttgaagactaa

SEQ ID NO: 49148 - protein, 175 aa, Vibrio cholerae O1 biovar eltor str. N16961
MASVGIFFGSDTGNTEAIAKMIQKQLGKKLVHVQDIAKSSKEDINNFDLLLLGIPTWYYGEAQCDWDDFFPELEAIDFSTKLVAIFGCGDQEDYAEYFCDAMGTVRDIIQAKGATIVGHWPTEGYEFEASKALVDENHFVGLCIDEDRQPELTEQRVTKWVNQVYEEMCLAELED

SEQ ID NO: 49149 - DNA, 597 bp, Vibrio cholerae O1 biovar eltor str. N16961
  CDS (1)..(597): transl_table=11
atgcaggatattggctgcattccgatcatttttatggttagaatttgccattccttcgcagacagatacaaattattgatgaagattggtctattttatggctcaagcacctgttacaccgaaatgaccgcggagaaaattcgcgccatactgggtgaagaactggtggatatccacaacgtaaaagaatcgcctctcactttaatgagtgattacgatcttttactgctgggcatttcaacatgggattttggtgaaatccaagaggactggagtgcggtatgggatcacatcggtggcgtgtcgctaaaaaacaagtacgtcgcgttgttcggcttaggcgatcaagaaggctatggcgaatggtatctggatgcgatggggctgctgcacgaccagatcaagaagagcggagctaacctgcttggctactggccgaatcaaggctaccactttgaagcctccaaggctttgactgaagatggcagccattttgtcggcctcgcgctcgatgaagattcacaatatgacttgagcgacgaacgcatcgcgacttgggtcgagcaagtgctgaccgagtatcacgatgcgatttaa

SEQ ID NO: 49150 - protein, 198 aa, Vibrio cholerae O1 biovar eltor str. N16961
MQDIGCIPIIFMVRICHSFADRYKLLMKIGLFYGSSTCYTEMTAEKIRAILGEELVDIHNVKESPLTLMSDYDLLLLGISTWDFGEIQEDWSAVWDHIGGVSLKNKYVALFGLGDQEGYGEWYLDAMGLLHDQIKKSGANLLGYWPNQGYHFEASKALTEDGSHFVGLALDEDSQYDLSDERIATWVEQVLTEYHDAI

SEQ ID NO: 49151 - DNA, 525 bp, Pasteurella multocida subsp. multocida str. Pm70
  CDS (1)..(525): transl_table=11
atggctgttgttggtttattttatggcagtgatacaggcaataccgaaaatattgccaaaatgattcaaaaacaactcggtagtgacttagttgatgtacgcgatattgcaaaaagtacaaaagaagatattgaagcttatgattttctcatgattgggattccaacctggtattacggtgaagcccaatgtgactgggatgattttttcccaaccttagaagaaattgattttaccgataaattggttgctatttttggctgtggagatcaagaagattacgcagaatatttctgtgatgctatgggaaccgtgcgtaacattattgaacctaaaggcgccatcattgttggtcactggccaacggatggctatcactttgaagtttcgcaagcattagtcgatgaaaatacttttgtaggattatgtattgatgaagatcgtcaacctgaattaactgctgaacgtgttgaaaaatgggtgaagcaagtgtttgacgaaatgtgtttagcagaacttgcttaa

SEQ ID NO: 49152 - protein, 174 aa, Pasteurella multocida subsp. multocida str. Pm70
MAVVGLFYGSDTGNTENIAKMIQKQLGSDLVDVRDIAKSTKEDIEAYDFLMIGIPTWYYGEAQCDWDDFFPTLEEIDFTDKLVAIFGCGDQEDYAEYFCDAMGTVRNIIEPKGAIIVGHWPTDGYHFEVSQALVDENTFVGLCIDEDRQPELTAERVEKWVKQVFDEMCLAELA

SEQ ID NO: 49153 - DNA, 492 bp, Campylobacter jejuni subsp. jejuni NCTC 11168
  CDS (1)..(492): transl_table=11
atgtcagtagcagtaatctatggtagtgctatgggaaatacagaaggagcggctaatacaattgcttcaaaacttggaattagtgatgtttttaatatctcagatattgatgcagctaaaatgaattcttacgataaattaatttgtggaacttcaacttggggaagtggtgatttacaagatgattgggatggttttgatttttcagggcttagtcttggtggaaaaactgtagctgtatttggtatgggtgatagtgaaagttattctgacactttttgtggcggcatgggtaaattagctcaaaatttaaaagatgcaggtgcaaatttggtaggagaagtttcaactgatggttatacatttgaagcaagcgatgcggttgtagatggtaaatttgttggacttgctcttgacaatgataatcaagaagatcaaactgaatcaagaattgatgcttgggtagaacaaatcaaaccttattttgcttaa

SEQ ID NO: 49154 - protein, 163 aa, Campylobacter jejuni subsp. jejuni NCTC 11168
MSVAVIYGSAMGNTEGAANTIASKLGISDVFNISDIDAAKMNSYDKLICGTSTWGSGDLQDDWDGFDFSGLSLGGKTVAVFGMGDSESYSDTFCGGMGKLAQNLKDAGANLVGEVSTDGYTFEASDAVVDGKFVGLALDNDNQEDQTESRIDAWVEQIKPYFA

SEQ ID NO: 49155 - DNA, 519 bp, Yersinia pestis CO92
  CDS (1)..(519): transl_table=11
atgaagattggtctcttttacggctccagcacctgctataccgaaatggtggcagaaaaaatccgtgatatcctcggtgaagatctggttgatttacataacctaaaagaggttagcccccgcctgatggaagagtattccattctgattctaggtatacccacctgggatttcggtgaattacaggaagactgggaagcgatttggccgcagttaacacaactcaatctcaagggaaaaattgtcgctatgtatggcatgggcgatcaatttggttatagcgaatggttccttgatgcccttggcatgttgcacgaccatattgcgccgctgggtgtgaaatttatcggtttttggccaacagatgggtttgagtttactagcccaaaaccactcagtgccgatggtaaacagtttgtggggttggcgttagacgaggtcaatcaatacgatttaagcgaggaacgtattgagcagtggtgtgagcaaatcttgttggagatggaggcgttactttga

SEQ ID NO: 49156 - protein, 172 aa, Yersinia pestis CO92
MKIGLFYGSSTCYTEMVAEKIRDILGEDLVDLHNLKEVSPRLMEEYSILILGIPTWDFGELQEDWEAIWPQLTQLNLKGKIVAMYGMGDQFGYSEWFLDALGMLHDHIAPLGVKFIGFWPTDGFEFTSPKPLSADGKQFVGLALDEVNQYDLSEERIEQWCEQILLEMEALL

SEQ ID NO: 49157 - DNA, 504 bp, Fusobacterium nucleatum subsp. nucleatum ATCC 25586
  CDS (1)..(504): transl_table=11
atgaaaacagttggtatattttttggaactacaggaggaaaaactcaagaagttgtggacattattgctgctcaattaggagatgcacaagtatttgatgttgctaatggtgttgctgaaatggaagtttttgataacattataatggcttctccaacttatggaatgggagaattacaagatgattgggcttctgttattgatgaagttgctgatatggatttctctggaaaagttgttgcatttgttggtgtaggagatgctgcaatatttggtggaaactatgttgaagctatgaaacacttctatgatgcagttcaacctaaaggagctaaaatagttggatttacttctactgatggatatgattttgaagcttctgaagcagttattgatggagataaatttatgggacttgcaatagatgcttcattcgatactgatgaaatcacttcaaaagttgaagattggttagaaaacaaagttaaagatgaattattataa

SEQ ID NO: 49158 - protein, 167 aa, Fusobacterium nucleatum subsp. nucleatum ATCC 25586
MKTVGIFFGTTGGKTQEVVDIIAAQLGDAQVFDVANGVAEMEVFDNIIMASPTYGMGELQDDWASVIDEVADMDFSGKVVAFVGVGDAAIFGGNYVEAMKHFYDAVQPKGAKIVGFTSTDGYDFEASEAVIDGDKFMGLAIDASFDTDEITSKVEDWLENKVKDELL

SEQ ID NO: 49159 - DNA, 504 bp, Fusobacterium nucleatum subsp. nucleatum ATCC 25586
  CDS (1)..(504): transl_table=11
atgaagactattggtattttttatgcaactcttacaaaaacaacagtaggaattgttgatgaaattgaattctttttaaagaaagatgattttaaaacttttaatgtaaaaaatggagttaaagaaatagagaattttgaaaatcttattttagttacacccacttatcaagttggtgaggctcatgcagcttggatgaataatttaaaaaaattagaagaaattgattttactggtaaggttgttgggcttgttggacttggaaatcaatttgcttttggagaatctttctgtggtggaataagatatctatatgatattgtggttaaaaaaggtggaaaagtagttggatttacaagtactgatggttatcactatgaagaaacaagcattatagaaaatggtaaatttataggtcttgctcttgatgaagaaaatcaacctaacctaactccaaaaagaattggagattggataacagaaataaaaaaagaattcaaataa

SEQ ID NO: 49160 - protein, 167 aa, Fusobacterium nucleatum subsp. nucleatum ATCC 25586
MKTIGIFYATLTKTTVGIVDEIEFFLKKDDFKTFNVKNGVKEIENFENLILVTPTYQVGEAHAAWMNNLKKLEEIDFTGKVVGLVGLGNQFAFGESFCGGIRYLYDIVVKKGGKVVGFTSTDGYHYEETSIIENGKFIGLALDEENQPNLTPKRIGDWITEIKKEFK

SEQ ID NO: 49161 - DNA, 507 bp, Chlorobium tepidum TLS
  CDS (1)..(507): transl_table=11
atgaaaaaaacagccgtggtctgggcgtcgcagaccggaaataccaaagaggccgccgagctgatcgccactgaaatcgggcgccccgatgtcgatctgttcgaggtgagccgcgaagagctgcttcgtttgaccgaatacgatatgctgatcatcggaacctcgacctggggcgcgggcgagcttccgcatgggtggcgggaagctgtttccgcccttgaccagctcgatctgacgggcaagactgtcgcttttttcgggcttggcgaccagctcgtttatggcgattggtatgtcgatgcgatggggattctgcatgaccgcttcgtttcgcgtggcgcgaaggtggttggcgcttggcccagcgacacctacgagttctcctcctcgaaagccttgcgcgacgggatgttcgtcggcctcgcgctcgatgcggacaatcaggagcatttgacgcgggagcggattcggcgctgggtgtgctcaatcagaccgtatctgtcatga

SEQ ID NO: 49162 - protein, 168 aa, Chlorobium tepidum TLS
MKKTAVVWASQTGNTKEAAELIATEIGRPDVDLFEVSREELLRLTEYDMLIIGTSTWGAGELPHGWREAVSALDQLDLTGKTVAFFGLGDQLVYGDWYVDAMGILHDRFVSRGAKVVGAWPSDTYEFSSSKALRDGMFVGLALDADNQEHLTRERIRRWVCSIRPYLS

SEQ ID NO: 49163 - DNA, 528 bp, Shewanella oneidensis MR-1
  CDS (1)..(528): transl_table=11
atggcaactgtaggtctttttttcggtagcgacacaggcaacaccgaagctgtcgccaagatgatccagaaaaaactgggtaagaaaatggttgaggtgaaagatatcgccaaaagcaccaaagaacagatcgcagaatatgacctgctgctgttcgggatcccaacctggtattacggtgaagcacagtgcgactgggatgactttttccctgagttagaacagattgattttacagacaaactggttgctatctttggttgtggagaccaagaagactacgcagaatatttccttgatgccatgggcatgattggcgatatcgtacaagctcgtggtggtattatcattggacattggccaactgcgagttacaacttcgaagcgtctaaaggtttagtggatgatgaccactttatcggtttagggattgacgaagaccgtcaacctgaattgaccgaagaacgtgttgatgcatgggttaagcaaatctacgaagaaatgtgtttagcagaactcgaagactaa

SEQ ID NO: 49164 - protein, 175 aa, Shewanella oneidensis MR-1
MATVGLFFGSDTGNTEAVAKMIQKKLGKKMVEVKDIAKSTKEQIAEYDLLLFGIPTWYYGEAQCDWDDFFPELEQIDFTDKLVAIFGCGDQEDYAEYFLDAMGMIGDIVQARGGIIIGHWPTASYNFEASKGLVDDDHFIGLGIDEDRQPELTEERVDAWVKQIYEEMCLAELED

SEQ ID NO: 49165 - DNA, 498 bp, Mycoplasma penetrans HF-2
  CDS (1)..(498): transl_table=4
atgaaaatagctattatatatggatcaactttagggaacactgaaagagctgctaatagtattgctcaagaatttaacttacctaatatagatattttgaatgttgctgaaacaaaagcagaacaattaaatcaatatgacaaaattatttttggatcatctacttgaggtcttggtgatttacaggatgattgagatgaatttgattttgaaaatttaaaagtagaaaacaagactgtagcaatttttggtatgggagatagtgaggtttatgcatttacatactgtgactctatttctaaaatacataaaattttaaaatcaaagaatgctaatattgttggttatgtttcagataaagactataaatatacaaaatctgaatctgttgaaaatggtatgtttttaggtttggcattagatgatgataattatgaggatttaactgaatctagaattaaaaaatgagttaatgatattagaaaacattttgaataa

SEQ ID NO: 49166 - protein, 165 aa, Mycoplasma penetrans HF-2
MKIAIIYGSTLGNTERAANSIAQEFNLPNIDILNVAETKAEQLNQYDKIIFGSSTWGLGDLQDDWDEFDFENLKVENKTVAIFGMGDSEVYAFTYCDSISKIHKILKSKNANIVGYVSDKDYKYTKSESVENGMFLGLALDDDNYEDLTESRIKKWVNDIRKHFE

SEQ ID NO: 49167 - DNA, 534 bp, Vibrio vulnificus CMCP6
  CDS (1)..(534): transl_table=11
atggcaagtgtaggtatcttcttcggcagcgacacaggcaacaccgaagccgttgctaagatgattcaaaagcaactaggtaaaaaactcgttcacgtacaagacatcgcaaaaagtagtaaagaagatatcgacaacttcgacctactgcttttaggcatcccaacttggtactacggtgaagctcagtgtgattgggatgactttttcccagagttagagaaaatcgatttctcgacgaaactagtggccatttttggttgtggcgaccaagaggactacgcagaatatttctgtgacgcaatgggcaccgttcgcgatatcgtagaagcaaaaggcggcactatcctaggccacacttcaactgagagctatgagttcgaagcatcaaaagccttagttgctggtgatgaccgcctattcgtcggtttatgcattgatgaagatcgccaaccagaactcaccgaagaacgtgtgaaaaactgggttgaacagatctacgaagaaatgtgccttgcagagcttgaagactaa

SEQ ID NO: 49168 - protein, 177 aa, Vibrio vulnificus CMCP6
MASVGIFFGSDTGNTEAVAKMIQKQLGKKLVHVQDIAKSSKEDIDNFDLLLLGIPTWYYGEAQCDWDDFFPELEKIDFSTKLVAIFGCGDQEDYAEYFCDAMGTVRDIVEAKGGTILGHTSTESYEFEASKALVAGDDRLFVGLCIDEDRQPELTEERVKNWVEQIYEEMCLAELED

SEQ ID NO: 49169 - DNA, 519 bp, Vibrio parahaemolyticus RIMD 2210633
  CDS (1)..(519): transl_table=11
atgaaaatcggactcttttacggctcaacaacctgctacaccgagatggcagcagagaaaattcgcaacattattggtgcagaccttgtcgatattcacaatgtgaaagagacgccgctatcgctgatggctgagtatgatttattgcttctaggcatctcgacttgggactttggtgagatccaagaagattggagcgctatttggcaagacatcgcgtctacgcccttgaaaggcaaagttgtggcgctatttggtcttggcgaccaagaaggctacggtgaatggtaccttgatgccatgggcctactgcacgacgagttaaaagcaaccggcgcccagtttatcggttattggccaaacgaaggctatgagtttgaagcctcgaaagcgctaacggaagatggcagtcaatttgttggcctagcactagatgaagactctcaatacgacttgagtgacgagcgaatcgaaaagtggtgtgaacaagtacttgtggagttccacgatacgctttaa

SEQ ID NO: 49170 - protein, 172 aa, Vibrio parahaemolyticus RIMD 2210633
MKIGLFYGSTTCYTEMAAEKIRNIIGADLVDIHNVKETPLSLMAEYDLLLLGISTWDFGEIQEDWSAIWQDIASTPLKGKVVALFGLGDQEGYGEWYLDAMGLLHDELKATGAQFIGYWPNEGYEFEASKALTEDGSQFVGLALDEDSQYDLSDERIEKWCEQVLVEFHDTL

SEQ ID NO: 49171 - DNA, 534 bp, Vibrio parahaemolyticus RIMD 2210633
  CDS (1)..(534): transl_table=11
atggcaagtgtaggtatcttcttcggtagcgacacaggtaatactgaagccgttgcaaagatgattcaaaagcaactaggcaaacatctagttcacgttcaagacatcgcgaaaagcagcaaagaagacattgataactttgatcttcttcttctaggtatccctacttggtactacggtgaagcacaatgtgattgggatgatttcttccctgaacttgagcagatcgatttctctactaagctagtggctatcttcggctgtggcgaccaagaagactacgcagaatacttctgcgatgcgatgggtacagtgcgtgacatcgttgagtctaaaggcggcacaattcttggtcatacttcaactgaaggctacgagtttgaagcttcaaaagcacttgttgaaggcgacgacagccaattcgtaggtctatgtattgatgaagaccgtcaacctgagttgactgaccaacgcgtcgaaaactgggttaagcagatttacgaagaaatgtgcctagctgagctagaaggctaa

SEQ ID NO: 49172 - protein, 177 aa, Vibrio parahaemolyticus RIMD 2210633
MASVGIFFGSDTGNTEAVAKMIQKQLGKHLVHVQDIAKSSKEDIDNFDLLLLGIPTWYYGEAQCDWDDFFPELEQIDFSTKLVAIFGCGDQEDYAEYFCDAMGTVRDIVESKGGTILGHTSTEGYEFEASKALVEGDDSQFVGLCIDEDRQPELTDQRVENWVKQIYEEMCLAELEG

SEQ ID NO: 49173 - DNA, 531 bp, Salmonella enterica subsp. enterica serovar Typhi Ty2
  CDS (1)..(531): transl_table=11
atggcaatcactggcatctttttcggcagcgacaccggtaataccgaaaatatcgcaaaaatgattcaaaaacagcttggtaaagacgttgccgatgtgcatgacattgcaaaaagcagtaaagaagacctagaagggtatgacattctgctgctgggcatcccaacctggtactatggcgaagcgcaatgtgactgggatgacttcttcccgactctcgaagagattgactttaacggtaagctggtggcgctgtttggctgtggcgatcaggaagactacgcggaatacttctgtgatgcgctgggcacgattcgcgacattattgagccgcgcggcgccacgattgtgggtcactggccaaccgcaggctatcattttgaagcctctaaaggtctggctgacgacgatcattttgtcggcctggcgattgacgaagaccgtcagcctgaactgaccgccgagcgtgttgaaaaatgggttaagcaagtttcggctgaattgcacctcggcgacatcctcaacgcctaa

SEQ ID NO: 49174 - protein, 176 aa, Salmonella enterica subsp. enterica serovar Typhi Ty2
MAITGIFFGSDTGNTENIAKMIQKQLGKDVADVHDIAKSSKEDLEGYDILLLGIPTWYYGEAQCDWDDFFPTLEEIDFNGKLVALFGCGDQEDYAEYFCDALGTIRDIIEPRGATIVGHWPTAGYHFEASKGLADDDHFVGLAIDEDRQPELTAERVEKWVKQVSAELHLGDILNA

SEQ ID NO: 49175 - DNA, 516 bp, Bacteroides thetaiotaomicron VPI-5482
  CDS (1)..(516): transl_table=11
atgaagaagattggtttgttttatgccaccaaagctgataagactacttgggtggcagagaaaattcagaaagaatttggaaaagataggatagaagtggtgcctattgagcaggcatggcaaaatgattttgcagcttacgattgtttaatagtaggtgcttcgacctggtttgacggagaacttcctacctattgggatgagttattgccggaacttcgtacattggacttgaaagggaaaaaagtagctgtcttcgggttaggagatcagatacgttatcccgaaaactttgctgacggaatcggactgcttgccgaggtatttgaaggagacggggccacactggtcggttttacttcttccgaaagatacactttcgaacgttccagagcgttgcgtggtgatcggtggtgcggtttggtcgtcgatttggataatcaatccgagcaagcggaaaagagaatcagggaatggtgcgaacaggtaaagaatgagtttgattcaaaaccttaa

SEQ ID NO: 49176 - protein, 171 aa, Bacteroides thetaiotaomicron VPI-5482
MKKIGLFYATKADKTTWVAEKIQKEFGKDRIEVVPIEQAWQNDFAAYDCLIVGASTWFDGELPTYWDELLPELRTLDLKGKKVAVFGLGDQIRYPENFADGIGLLAEVFEGDGATLVGFTSSERYTFERSRALRGDRWCGLVVDLDNQSEQAEKRIREWCEQVKNEFDSKP

SEQ ID NO: 49177 - DNA, 507 bp, Bacteroides thetaiotaomicron VPI-5482
  CDS (1)..(507): transl_table=11
atgaataaaattggagtattttatggttccactaccggaacaacagaagaccttgcccgtcggattgcagagaaactagatgttccttccgcacatatttatgatgtatccaaactcactgaagctttggtcggtgaatatgatgtactggtactgggcagttccacatggggagccggtgaattgcaggatgactggtacgacggtattaaagttttaaagaaatgcgatctgtctcacaaatatgtagccttgttcggttgtggtgattccgattcttacagcgatacgttctgtgatgctatcggtattctttatgaagaactgaaagatacccgctgcaaattctgtggagcggtggacacagccggttatacattcgattcttctatcgctgtcgttaatggcaagttcgtaggtcttccactcgacgaagtcaatgaagacggtcagacagatgaacgtatcagcgcatgggttgaacaagtaaaacaagaaatcagctaa

SEQ ID NO: 49178 - protein, 168 aa, Bacteroides thetaiotaomicron VPI-5482
MNKIGVFYGSTTGTTEDLARRIAEKLDVPSAHIYDVSKLTEALVGEYDVLVLGSSTWGAGELQDDWYDGIKVLKKCDLSHKYVALFGCGDSDSYSDTFCDAIGILYEELKDTRCKFCGAVDTAGYTFDSSIAVVNGKFVGLPLDEVNEDGQTDERISAWVEQVKQEIS

SEQ ID NO: 49179 - DNA, 498 bp, Helicobacter hepaticus ATCC 51449
  CDS (1)..(498): transl_table=11
atgaaaaaaattggtttattttatggaagcgatggtggcactacgcaagaagttgctcaaaaaattgctgataaattaggcgattgtcaaatatttgatgttgcttcaagtaaagctgatgatttaagtgcatttgagaatcttatttttgctacacctacttatggttcaggtgatttacaagatgattgggatagttttctttctagtattgatgaagctgctttttcaggtaaaactatcgctcttgtagggcttggcgaccaagaaatttatagcgaaactttttgtaatggtattgcacatatttatgaaaaagtatcaaaacaaggaaaaattattggacaaacaagcacagatggctacacttttgatgagagtttggcagttgtaaatggaaagtttgtaggcttagtcattgatgaggttaatcaagaagatatgacagatagcagaattcaagcgtgggtaaagacacttaaaggtgcttttgcttaa

SEQ ID NO: 49180 - protein, 165 aa, Helicobacter hepaticus ATCC 51449
MKKIGLFYGSDGGTTQEVAQKIADKLGDCQIFDVASSKADDLSAFENLIFATPTYGSGDLQDDWDSFLSSIDEAAFSGKTIALVGLGDQEIYSETFCNGIAHIYEKVSKQGKIIGQTSTDGYTFDESLAVVNGKFVGLVIDEVNQEDMTDSRIQAWVKTLKGAFA

SEQ ID NO: 49181 - DNA, 513 bp, Wigglesworthia glossinidia endosymbiont of Glossina brevipalpis
  CDS (1)..(513): transl_table=11
atgaaatctataggaatgttttttggaagcgatactggaaatacagaaagaatagcaaaaaaaatacaaaaaaagattggaattaataatatagatatttttgatatttcaaattcttctaaagaagaaatggaaaaatataaaaaattaatatttggtatacctacatggtattacggagaactgcaatgtgattgggatgattttttgatatatctaaaagaaattaattttgaaaataaattagtagcaatttttggatgtggagatcaagaagattattcagaatatttttgtgatgcaatgggtattgtaaaagaaataatttcttacaaaggcgctaaagtaattggaaaatattcaactttaggatataaatttgaaaaatctaaagctttgttaaataaagattattttataggattagctatagatgaagatagacaaccagaattaacagaaaaaagaatatgtaattgggtaaaaacaataaaaaaagaaatggaaatttaa

SEQ ID NO: 49182 - protein, 170 aa, Wigglesworthia glossinidia endosymbiont of Glossina brevipalpis
MKSIGMFFGSDTGNTERIAKKIQKKIGINNIDIFDISNSSKEEMEKYKKLIFGIPTWYYGELQCDWDDFLIYLKEINFENKLVAIFGCGDQEDYSEYFCDAMGIVKEIISYKGAKVIGKYSTLGYKFEKSKALLNKDYFIGLAIDEDRQPELTEKRICNWVKTIKKEMEI

SEQ ID NO: 49183 - DNA, 525 bp, Haemophilus ducreyi 35000HP
  CDS (1)..(525): transl_table=11
atggcagtagtaggtttattctacggtagtgatactgggaacactgaaaatatttcaaaaatgatccaaaaagaaatcggtgcgaatctgattgatgttcgtgatatcgctaagagttctaaagaagatattgaagggtatgatttcttactattaggtattccaacttggtattatggtgaatctcaagcagattgggatgactttatgccgaccttaaaacaaattgacttcggtggtaaagtcgtgggtatttttggttgtggagaccaagaagactacgccgaatatttctgtgatgcaatgggaacgattcgtgatgtagtcgagcagaatggtggtgtaattgtaggtcattggtcaacagagggctataactttgaagtttctcaagcgcttgttgatgaacatacctttgttggtttatgtattgacgaagaccgtcaaccagagttaacaagcgagcgtgtcagccgttggtctaagcaaatctttgaagaaatgtgcttagatcagctagcataa

SEQ ID NO: 49184 - protein, 174 aa, Haemophilus ducreyi 35000HP
MAVVGLFYGSDTGNTENISKMIQKEIGANLIDVRDIAKSSKEDIEGYDFLLLGIPTWYYGESQADWDDFMPTLKQIDFGGKVVGIFGCGDQEDYAEYFCDAMGTIRDVVEQNGGVIVGHWSTEGYNFEVSQALVDEHTFVGLCIDEDRQPELTSERVSRWSKQIFEEMCLDQLA

SEQ ID NO: 49185 - DNA, 522 bp, Prochlorococcus marinus subsp. marinus str. CCMP1375
  CDS (1)..(522): transl_table=11
atgacagtagggatttatttcgcaacaactacagggaaaactgaggacatagcagaaagaattcatggattattggatggtgctgagtcacctaaagatatgtccgatgttgatgacctcagtgagctttctaatcatgatggcattatatgtggcattcctacctggaatactggcgcagattcagaaaggtctggcacagcttgggacactatccttgatgagataggggagctaaatttaactggcaaaaaagttgcaatatttggcttaggagattcatcaacttatacagaaaactattgcgatgctatggaagaattgcacagatactttcaacaagcaggagcgacaatggttggttatgtaagcactaatgattacacttttgatgaatcaaaaagtgttgtaggctctacattttgtggacttcctttagatgaggatagtgaatcagatatgacagatgcaagaatatcccaatgggctacacagcttaaaggtgaaatgcctggtttataa

SEQ ID NO: 49186 - protein, 173 aa, Prochlorococcus marinus subsp. marinus str. CCMP1375
MTVGIYFATTTGKTEDIAERIHGLLDGAESPKDMSDVDDLSELSNHDGIICGIPTWNTGADSERSGTAWDTILDEIGELNLTGKKVAIFGLGDSSTYTENYCDAMEELHRYFQQAGATMVGYVSTNDYTFDESKSVVGSTFCGLPLDEDSESDMTDARISQWATQLKGEMPGL

SEQ ID NO: 49187 - DNA, 528 bp, Candidatus Blochmannia floridanus
  CDS (1)..(528): transl_table=11
atgaaaaaagcatcagtaggtattttttttggtagtgatactgggaatactgaaaaacttgctaatataattcaattaagaataggaaaagatttatcagatatttttgatatttctaattcttgtaaagaagatatagaaaattatgatcgactaatatttggaattcctacgtggtattatggagaacctcaatgtgattgggattcatttttgcctatatttagaaagattaattttttaggaaaaaaaatagcaatttttggttgtggagatcaagaagattattcagaatatttttgtgatgctatgagtattttatataatattgttataaataaaggagcaattgtggtaggtttatggcctacatcgggatattattttgatatgtcaaaaagcattatagatggaaataaatttattgggttagctatagatgaggatcgtcaaccagatatgactgaaaccagagtaaaaacttgggttaaacaaatttttctagaaatgaatctcaatttgatatag

SEQ ID NO: 49188 - protein, 175 aa, Candidatus Blochmannia floridanus
MKKASVGIFFGSDTGNTEKLANIIQLRIGKDLSDIFDISNSCKEDIENYDRLIFGIPTWYYGEPQCDWDSFLPIFRKINFLGKKIAIFGCGDQEDYSEYFCDAMSILYNIVINKGAIVVGLWPTSGYYFDMSKSIIDGNKFIGLAIDEDRQPDMTETRVKTWVKQIFLEMNLNLI

SEQ ID NO: 49189 - DNA, 525 bp, Prochlorococcus marinus subsp. pastoris str. CCMP1986
  CDS (1)..(525): transl_table=11
atgaccgtaggaatttattacgcaactacaaccggaaaaactgaagacgtagctgatcgtcttcacaactttatttcttcagcagaatcacctaaggatgtttccgatgttgatgatctttcggaattcgaaggccttgatggaataatttgtggtattcctacatggaatactggagcagatgaggaaaggtctggaactgcttgggactcaatattagaggatattggggaacttagtttgtcaggaaaaaaagtagccatttttggtttaggggattcatctacctatacagaaaactattgcgatgcaatggaagaattacatagttatttcaaaaaagcaggtgctgaaatggttggctatgttaacaaatcttcttatacgtttgatgagtcaaagagtgtaatgggtgaaagcttttgtgggttaccacttgatgaagatagtgaatctgatttaacagactctcgtctagaaacatgggcttctcaattaaagggcgaaattccttcattgggataa

SEQ ID NO: 49190 - protein, 174 aa, Prochlorococcus marinus subsp. pastoris str. CCMP1986
MTVGIYYATTTGKTEDVADRLHNFISSAESPKDVSDVDDLSEFEGLDGIICGIPTWNTGADEERSGTAWDSILEDIGELSLSGKKVAIFGLGDSSTYTENYCDAMEELHSYFKKAGAEMVGYVNKSSYTFDESKSVMGESFCGLPLDEDSESDLTDSRLETWASQLKGEIPSLG

SEQ ID NO: 49191 - DNA, 498 bp, Porphyromonas gingivalis W83
  CDS (1)..(498): transl_table=11
atgaaatcaatcggaatcttctacggttcttctaccggaacgacgagcgatctggctcaaaaaattgcttctgcattaggcgttgactccgctaatgtaatggacgtggcaaatgccgacgctgccgctgcagcgaaatacgatgtactgcttctcggctcttccacatggggattgggcgacttgcaggacgactgggaatcattcctgccgaaactgaaaggcgaaaacctgagtggcaagaaggtaggtctcttcggctgtggcgatgcttcttcttatagcgatactttctgcgcagctctcggtacgatcaaagccgaattggctaatacgggctgtactttcatcggtgcttatcctgctgaaggctatagctacgacgagacgactgccgaagaaaatggccaactcatcggcttgtgcgtggacgacgctaacgaatccgaccagaccgaagctcgtatggagcgttggatcgctgccatgggcttgtaa

SEQ ID NO: 49192 - protein, 165 aa, Porphyromonas gingivalis W83
MKSIGIFYGSSTGTTSDLAQKIASALGVDSANVMDVANADAAAAAKYDVLLLGSSTWGLGDLQDDWESFLPKLKGENLSGKKVGLFGCGDASSYSDTFCAALGTIKAELANTGCTFIGAYPAEGYSYDETTAEENGQLIGLCVDDANESDQTEARMERWIAAMGL

SEQ ID NO: 49193 - DNA, 516 bp, Wolinella succinogenes DSM 1740
  CDS (1)..(516): transl_table=11
atgaataagacagcgattttttatggtagcacaggcggcaacactaaagaggcggcgaccctcattcatcgtgaacttggaggggaagcagtcgcagacattttcgatgtctctaagctcaaagatgcttcagcgtttgctccctatgagaatctaattcttggaacctccacatggggcgatggggacttgcaggatgattggtatgattttctcaaagagtttgagaaggccgaccttggctctaaaaaggtagctctttttggtcttggggatcaagagggatttggacatgcctatctcaatggaatgaagacgcttcatgacagcgctaaaaaacttggagcgactatcgttggggcatgggaagatgaaggttatagctacgatagcagtgaggcggttgtgaatgggaagtttgttggattggctttggatgcggacaaccaagatgaactcacccctgagcgcgtgaagaattggtgcgctgagctaaaaaaagcgctctctatttaa

SEQ ID NO: 49194 - protein, 171 aa, Wolinella succinogenes DSM 1740
MNKTAIFYGSTGGNTKEAATLIHRELGGEAVADIFDVSKLKDASAFAPYENLILGTSTWGDGDLQDDWYDFLKEFEKADLGSKKVALFGLGDQEGFGHAYLNGMKTLHDSAKKLGATIVGAWEDEGYSYDSSEAVVNGKFVGLALDADNQDELTPERVKNWCAELKKALSI

SEQ ID NO: 49195 - DNA, 513 bp, Gloeobacter violaceus PCC 7421
  CDS (1)..(513): transl_table=11
atgccagaaaaaattcgtctgttttacggcacgaccaccggtaagaccctcgatgccgcctcgatgatcaaagacgccttcggcggggacaccgtgacgctctacgacatttcggagaccgacaaggaggatttgaccggcgccgctctgctgattatcggttgcccgacctgggacatcgggcagttgcagagcgattgggatgccttcttcccggtcctgggcgatatcgactttacaggcaaaaaaattgcctacttcggcaccggcgatcaggtgggctattcggaaaattttcaagatgcgatgggcattctggaggcaaaaatttccgagcgcgggggcactaccttaggccgctggccggcggacggctacgacttcaacgcctcgctcgcggtcaaaaatggcaagtttgtaggtctggctcttgacgacgacaaccaatcgaggctgaccgacaaacgcatcaaagactgggtggcacagctcaaaaaagaatttggtgtttga

SEQ ID NO: 49196 - protein, 170 aa, Gloeobacter violaceus PCC 7421
MPEKIRLFYGTTTGKTLDAASMIKDAFGGDTVTLYDISETDKEDLTGAALLIIGCPTWDIGQLQSDWDAFFPVLGDIDFTGKKIAYFGTGDQVGYSENFQDAMGILEAKISERGGTTLGRWPADGYDFNASLAVKNGKFVGLALDDDNQSRLTDKRIKDWVAQLKKEFGV

SEQ ID NO: 49197 - DNA, 513 bp, Gloeobacter violaceus PCC 7421
  CDS (1)..(513): transl_table=11
atgccagccaagatcggtttgtttttcggcaccaccaccggcaagaccggggatgccgccgaggtcatccagcaggaattgggtaaaacccaggtggatctgcgcgacatcggccgggcgtccaaggcggacctgaccgcctacgagtacctcatcatcggttgtcccacctggaatatcggcgatttgcaggacgactgggattcgttctatccggatctcgaccagatcaatttcgccggcaagaaggtggcctacttcggcaccggcgaccagcgcggctacggcgacaacttccaggacgccatgggcatcttggaagaaaagatctcccagcgcggcggtaccaccgtcggctattggccggcggacaattacgatttcaacgcctcaaaagcctacaaaaacggcaagttcgtgggtctggccctcgacgacgacaaccaaccggaacagaccgagcggcgtatcaagcagtgggtggcgcagttgaagcgcgagttcggcatctag

SEQ ID NO: 49198 - protein, 170 aa, Gloeobacter violaceus PCC 7421
MPAKIGLFFGTTTGKTGDAAEVIQQELGKTQVDLRDIGRASKADLTAYEYLIIGCPTWNIGDLQDDWDSFYPDLDQINFAGKKVAYFGTGDQRGYGDNFQDAMGILEEKISQRGGTTVGYWPADNYDFNASKAYKNGKFVGLALDDDNQPEQTERRIKQWVAQLKREFGI

SEQ ID NO: 49199 - DNA, 531 bp, Photorhabdus luminescens subsp. laumondii TTO1
  CDS (1)..(531): transl_table=11
atggcaattataggtatattttttggcagcgataccggcaacacggaaaatattgccaaaaagatccaaaaaattctgggttccgacattgcagaagttcatgatattgccaagagcagcaaagaagatatcgaacagttcgatattctattgctcggcatccccacctggtactacggtgaagcacagtgtgactgggatgatttcttccctactctggaagagatcgattttgaagggaagttggtcgctctttttggttgtggtgatcaggaagattacgcggaatatttctgcgatgctatgggaaccatccgtgacattattgaaccccgcggtgccattattgttggtcattggccaaccgagggctatcacttcgaagaatcaaaaggtctggctgatgatagccactttattgggcttgctattgatgaagaccgccaaccagaattaacagaagagcgtgttaatgcctggactaaacagatctacgaagagctgagtttgtcagaaattcttgcaggatag

SEQ ID NO: 49200 - protein, 176 aa, Photorhabdus luminescens subsp. laumondii TTO1
MAIIGIFFGSDTGNTENIAKKIQKILGSDIAEVHDIAKSSKEDIEQFDILLLGIPTWYYGEAQCDWDDFFPTLEEIDFEGKLVALFGCGDQEDYAEYFCDAMGTIRDIIEPRGAIIVGHWPTEGYHFEESKGLADDSHFIGLAIDEDRQPELTEERVNAWTKQIYEELSLSEILAG

SEQ ID NO: 49201 - DNA, 522 bp, Photorhabdus luminescens subsp. laumondii TTO1
  CDS (1)..(522): transl_table=11
atgatgaagattggtcttttttacggctcaagcacctgctacaccgagatggtagcagagaaaatccgcgatatccttggcgaagatttaattgatcttcacaatatcaaagagacagcacctaaattaatggaaacgtattctgtcctgattctcggcatcccaacatgggattttggcgaattgcaggaagattggctggttatttgggatcaaatcccttccctcaatttacaagggaaaattgtcgccatgtatggtatgggggatcaaattgattacagcgattggttcctcgacgctctcggtatgctatatcaccatttacgcccttcaggcgtgcattttattggcttctggccaactgaaagctatgagtttaccagcccgaaaccattaacggataatggctcacaatttgtcgggctggctttagatgacgtaaaccagtatgaacaaactgatgatcgtttatcgcaatggtgtatgcaaatcctgcaagaaatggagcctctactttaa

SEQ ID NO: 49202 - protein, 173 aa, Photorhabdus luminescens subsp. laumondii TTO1
MMKIGLFYGSSTCYTEMVAEKIRDILGEDLIDLHNIKETAPKLMETYSVLILGIPTWDFGELQEDWLVIWDQIPSLNLQGKIVAMYGMGDQIDYSDWFLDALGMLYHHLRPSGVHFIGFWPTESYEFTSPKPLTDNGSQFVGLALDDVNQYEQTDDRLSQWCMQILQEMEPLL

SEQ ID NO: 49203 - DNA, 519 bp, Vibrio vulnificus YJ016
  CDS (1)..(519): transl_table=11
atgaaaatcggacttttttacggctcaaccacctgttacaccgaaatggcggcagaaaaaatgcgtaccattttgggggatgacttggttgagatccataatgtcaaagagtgcgacctcgcacaaatggcagactatgacctgctgcttcttggcatttccacttgggattttggcgaaattcaagaagattgggctgccatttggcacgatctcacctcctcaccagtgcaaggtaaaaccatcgcacttttcggtcttggtgaccaagaaggttatggtgaatggtatctcgacgcgatgggattgctgcacgatgagcttaaagcggtaggtgcggagttcatcggctattggccaaatcaaggctaccagtttgaagcctccaaagccctcactgaagatggcagccactttgttggcttggcgctcgatgaagactcccaatacgaattgagcgacgagcgcatcgaaacttggattgagcaagttctaacggaatttcacgacaagctgtaa

SEQ ID NO: 49204 - protein, 172 aa, Vibrio vulnificus YJ016
MKIGLFYGSTTCYTEMAAEKMRTILGDDLVEIHNVKECDLAQMADYDLLLLGISTWDFGEIQEDWAAIWHDLTSSPVQGKTIALFGLGDQEGYGEWYLDAMGLLHDELKAVGAEFIGYWPNQGYQFEASKALTEDGSHFVGLALDEDSQYELSDERIETWIEQVLTEFHDKL

SEQ ID NO: 49205 - DNA, 483 bp, Rhodopseudomonas palustris CGA009
  CDS (1)..(483): transl_table=11
atgagcgtcaatgtgattttcggatccgatgccggtgcgacccgggcggtcgcctcgcggatcgccaagcggctgcagggccgcgccgtcgatatcaaatcagccaccaccaccgatttcgaggcctgcagcctgttgatcctcggcgcgccgacttacggcttcggcgacctgcagaccgactgggaaacgaacatcgacaagctcacctcagccaatctggcgggcaagaaggtggcgctgttcggcaccggcgaccagaccaactatccggatagtttcgtcgacgccatgggactgctgtacgaccacgtggtcgagcgcggcgccgacgtcgtcggattcaccgagactgcgggctacgactacaccgcctccaaagcggaacgcgacggccgcttcgtcggcctcgcgctcgacgaggacggccaatcatccaagaccgaaaagaggatcaccgaatggatcagtcgtctcacatga

SEQ ID NO: 49206 - protein, 160 aa, Rhodopseudomonas palustris CGA009
MSVNVIFGSDAGATRAVASRIAKRLQGRAVDIKSATTTDFEACSLLILGAPTYGFGDLQTDWETNIDKLTSANLAGKKVALFGTGDQTNYPDSFVDAMGLLYDHVVERGADVVGFTETAGYDYTASKAERDGRFVGLALDEDGQSSKTEKRITEWISRLT

SEQ ID NO: 49207 - DNA, 525 bp, Prochlorococcus marinus str. MIT 9515
  CDS (1)..(525): transl_table=11
atgactgtaggaatttattacgcaactacaactggaaaaacagaagacgtagctgatcgtcttcacaactttatttcttcagcagaatcacctaaggatgtatctgatgttgatgacctttcagaatttgaagggcttgatgggatcatttgcggtatccctacatggaataccggagccgatgaggaaagatccggaactgcttgggattcaatacttgaggatattggagagctaagtttgtctggtaagaaagtagctatttttggcttaggagattcatctacctacactgaaaactattgcgatgcaatggaagaacttcatagctatttcacaaaagcaggtgctgatatggttggctacgttgacaagtcttcctatacatttgatgagtcaaagagtgtaataggtgaaagcttttgtggcttgccacttgacgaagatagtgaatctgatttaacagattctcgcctagaaacatgggcttctcaattaaaaggtgaaatcccttctctggggtaa

SEQ ID NO: 49208 - protein, 174 aa, Prochlorococcus marinus str. MIT 9515
MTVGIYYATTTGKTEDVADRLHNFISSAESPKDVSDVDDLSEFEGLDGIICGIPTWNTGADEERSGTAWDSILEDIGELSLSGKKVAIFGLGDSSTYTENYCDAMEELHSYFTKAGADMVGYVDKSSYTFDESKSVIGESFCGLPLDEDSESDLTDSRLETWASQLKGEIPSLG

SEQ ID NO: 49209 - DNA, 621 bp, Prochlorococcus marinus str. NATL1A
  CDS (1)..(621): transl_table=11
atgtatcaaaaatcaatattgaatagacaagaaaatttaaaaaaaaccaaattcactctaaatgtgcaaagctgctttaaaatattcttgattttaaattgctccatgactgtaggaatctacttcgctacaacaacaggtaaaaccgaagatatagctgaacggctgcacggattacttgactctgctgaaggtccaaaggatatttcagacgtcgatgaccttagtgaattagctggacatgatggggttatttgtggcatccccacatggaacaccggtgctgactctgagagatcaggaactgcttgggactcaatccttgaagacattggggagctagatctcagtggtaagaaagttgcaatttttggtttaggagattcttctacttacaccgaaaactattgcgatgcaatggaagagcttcatagatacttccagcaagcaggtgcttcaatggttggatacactgcaaagactgattacacttttgacgagtcaaaaagtgtagttggagaagaattctgtgggttacctcttgacgaagacagtgaatcagacatgactgacgaaaggctttctggatgggctgaaaaactaaaaggcgaaatgttctaa

SEQ ID NO: 49210 - protein, 206 aa, Prochlorococcus marinus str. NATL1A
MYQKSILNRQENLKKTKFTLNVQSCFKIFLILNCSMTVGIYFATTTGKTEDIAERLHGLLDSAEGPKDISDVDDLSELAGHDGVICGIPTWNTGADSERSGTAWDSILEDIGELDLSGKKVAIFGLGDSSTYTENYCDAMEELHRYFQQAGASMVGYTAKTDYTFDESKSVVGEEFCGLPLDEDSESDMTDERLSGWAEKLKGEMF

SEQ ID NO: 49211 - DNA, 525 bp, Prochlorococcus marinus str. MIT 9303
  CDS (1)..(525): transl_table=11
atggctgtcggcatctactttgcaacaacaacaggtaaaactgaggatatcgctgatcggcttcatcctctcctcaatggcagtaatacacctcaggatttagctgatctacaggacttaagcccgctaaacgatttagatgcgattatctgcggtattccaacatggaacacgggtgcagatagtgaacggtctggtacagcttgggattcaatgctcgaagacatctccaagctaagcctaactggtaaacaggtagctatctatgggctcggagactcatcaacttataccgaaaacttctgtgatgctattgaagaacttcatcagtgcttcaaagatgcaggagctacaatggtgggatatgtctcaaaagacggttatacatttgaagattcaaagagtttaataggtgacaagttctgtggtctacccctcgatgaagacagcgaatcagacatgacggatgatcggctgatgtcatgggcaattcagcttaagcaagagatacctgcattgaattaa

SEQ ID NO: 49212 - protein, 174 aa, Prochlorococcus marinus str. MIT 9303
MAVGIYFATTTGKTEDIADRLHPLLNGSNTPQDLADLQDLSPLNDLDAIICGIPTWNTGADSERSGTAWDSMLEDISKLSLTGKQVAIYGLGDSSTYTENFCDAIEELHQCFKDAGATMVGYVSKDGYTFEDSKSLIGDKFCGLPLDEDSESDMTDDRLMSWAIQLKQEIPALN

SEQ ID NO: 49213 - DNA, 519 bp, Erwinia carotovora subsp. atroseptica SCRI1043
  CDS (1)..(519): transl_table=11
atgaaaatcggtctgttttacggctcaagcacctgttacaccgagatggcagcggaaaaaattcgcgacatgttgggcgaagaactggtggatctgcacaacgttaaggatgtcgaacctcaacgtatggaagactacagtacgctgattctcggcatcccgacctgggatttcggtgagattcaggaagactgggagaacatctggggccaattggcgacgctgaacctcaaaggaaaagtggtcgcgctttacggtatgggcgaccaacttggctatagcgaatggttccttgatgcgctgggcatgctgcatgaacaactgctgccgttaggtgtcacattcattgggtattggccaatcgatggctacgagttcaccagtccaaaaccgctgaccactgacggaaaacattttgtcgggctggcgctggacgaagtgaatcaatacgatctcagcgatgaacggctggaacagtggtgcgaacagattctgcaagagatggcgtcactgctgtaa

SEQ ID NO: 49214 - protein, 172 aa, Erwinia carotovora subsp. atroseptica SCRI1043
MKIGLFYGSSTCYTEMAAEKIRDMLGEELVDLHNVKDVEPQRMEDYSTLILGIPTWDFGEIQEDWENIWGQLATLNLKGKVVALYGMGDQLGYSEWFLDALGMLHEQLLPLGVTFIGYWPIDGYEFTSPKPLTTDGKHFVGLALDEVNQYDLSDERLEQWCEQILQEMASLL

SEQ ID NO: 49215 - DNA, 528 bp, Erwinia carotovora subsp. atroseptica SCRI1043
  CDS (1)..(528): transl_table=11
atggcactcatcggaatattctttggcagcgatacaggcaacactgaaaacattgccaaaacgatccaacagcagttaggcaccggcgttgcggatgttcatgacatcgctaaaagcagcaaagaagacctcgaaggtttcgatattctgctgttgggtattccaacctggtattacggtgaagctcaatgtgattgggatgactttttcccgtcactggaagaagttgatttcacaggaaaattggttgctctgtttggttgcggcgatcaggaagactatgcggaatacttctgtgatgccatgggcaccattcgtgacattattgagcctcgcggcgcgacgattgtcggccactggccaactgaaggctattactttgaagcctctaaagggctcgccgacgacaatcacttcattggtttagctatcgatgaagaccgtcagcctgaactcaccaacgaacgtgtaacgacgtgggtgaagcagatcagcgatgaactgaatctgaaagagctggttggctaa

SEQ ID NO: 49216 - protein, 175 aa, Erwinia carotovora subsp. atroseptica SCRI1043
MALIGIFFGSDTGNTENIAKTIQQQLGTGVADVHDIAKSSKEDLEGFDILLLGIPTWYYGEAQCDWDDFFPSLEEVDFTGKLVALFGCGDQEDYAEYFCDAMGTIRDIIEPRGATIVGHWPTEGYYFEASKGLADDNHFIGLAIDEDRQPELTNERVTTWVKQISDELNLKELVG

SEQ ID NO: 49217 - DNA, 531 bp, Erwinia carotovora subsp. atroseptica SCRI1043
  CDS (1)..(531): transl_table=11
atggcgaacattggtattttctttggcaccgatacgggaaaaacccgcaagatcgccaaaatgatccatcaaaaattgggcgacacggcggattcgccggtcaatatcaaccgcacttctctggacagttttctctcttattcggttctgctgctcggcacgccgacgctgggtgaaggccagttaccggggatgaatgcgggatgtgagaacgagtcatggcaagagtttatcgctgaattgcctgatgaagcgctggctgacaagacggtcgccttgttcggattaggcgatcagcaaggctatcctgataattttgtcagcgggatgaaaaccttatatgacgtggttaccgcctgcggtgccaaggtcatcggtgcctggccgaatgctggttatgatttcaacacttcagccgccttggtggatgaccagtttgtcggattggtactggatcaggataaccagtacgatctcacggatgagcgcctcgatagctggttggaaacactcaagcccgctatcggctga

SEQ ID NO: 49218 - protein, 176 aa, Erwinia carotovora subsp. atroseptica SCRI1043
MANIGIFFGTDTGKTRKIAKMIHQKLGDTADSPVNINRTSLDSFLSYSVLLLGTPTLGEGQLPGMNAGCENESWQEFIAELPDEALADKTVALFGLGDQQGYPDNFVSGMKTLYDVVTACGAKVIGAWPNAGYDFNTSAALVDDQFVGLVLDQDNQYDLTDERLDSWLETLKPAIG

SEQ ID NO: 49219 - DNA, 528 bp, Yersinia pseudotuberculosis IP 32953
  CDS (1)..(528): transl_table=11
atggcaactgtaggcattttctttggcagcgatactggcaataccgaaaatattgccaagatgatccaaaagcaactgggcaaagaggttgctgaggttcatgacattgccaaaagcagtaaagaagatttagaaagcttcgatattctgctgttcggtattccaacgtggtattacggcgaagcacagtgtgactgggatgatttcttcccaacactggaagagatcgatttcaacggcaaattagttgctttgtttggttgcggcgatcaggaagactacgctgagtatttctgtgatgcgatggggacgatacgcgatatcattgaaccacgcggcgctgcgattgtcggccactggccaaccgcgggctatcactttgaagcctccaaagggttggccgatgatgaccactttattggtctggccattgatgaagaccgccaacctgaactgacgaatgaacgtgttgaggcgtgggttaaacaaatcagtgaagagctgaacttgtcagagattatcggttaa

SEQ ID NO: 49220 - protein, 175 aa, Yersinia pseudotuberculosis IP 32953
MATVGIFFGSDTGNTENIAKMIQKQLGKEVAEVHDIAKSSKEDLESFDILLFGIPTWYYGEAQCDWDDFFPTLEEIDFNGKLVALFGCGDQEDYAEYFCDAMGTIRDIIEPRGAAIVGHWPTAGYHFEASKGLADDDHFIGLAIDEDRQPELTNERVEAWVKQISEELNLSEIIG

SEQ ID NO: 49221 - DNA, 519 bp, Yersinia pseudotuberculosis IP 32953
  CDS (1)..(519): transl_table=11
atgaagattggtctcttttacggctccagcacctgctataccgaaatggtggcagaaaaaatccgtgatatcctcggtgaagatctggttgatttacataacctaaaagaggttagcccccgcctgatggaagagtattccattctgattctaggtatacccacctgggatttcggtgaattacaggaagactgggaagcgatttggccgcagttaacacaactcaatctcaagggaaaaattgtcgctatgtatggcatgggcgatcaatttggttatagcgaatggttccttgatgcccttggcatgttgcacgaccatattgcgccgctgggtgtgaaatttatcggtttttggccaacagatgggtttgagtttactagcccaaaaccactcagtgccaatggtaaacagtttgtggggttggcgttagacgaggtcaatcaatacgatttaagcgaggaacgtattgagcagtggtgtgagcaaatcttgttggagatggaggcgttactttga

SEQ ID NO: 49222 - protein, 172 aa, Yersinia pseudotuberculosis IP 32953
MKIGLFYGSSTCYTEMVAEKIRDILGEDLVDLHNLKEVSPRLMEEYSILILGIPTWDFGELQEDWEAIWPQLTQLNLKGKIVAMYGMGDQFGYSEWFLDALGMLHDHIAPLGVKFIGFWPTDGFEFTSPKPLSANGKQFVGLALDEVNQYDLSEERIEQWCEQILLEMEALL

SEQ ID NO: 49223 - DNA, 525 bp, Mannheimia succiniciproducens MBEL55E
  CDS (1)..(525): transl_table=11
atggcaattgttggtttattttatggtagtgacacaggcaatacggaaaatgttgctaaaatgatccaaaaacaattaggaaatgaattagttgatattcgtgatatagccaagagcacaaaagaagacattgaagcctacgacttcttaatgttcggtattccgacctggtactacggcgaagcgcaatgcgattgggacgatttttttccgacgttagaacaaattgattttaccgataaattagtggcgatttttggttgcggcgaccaggaagattatgcggattatttctgcgacgcgatgggaaccgtgcgcgaaatcgtagaacagcgcggcgcaattattgtcggtaactggccaacggaaggctattctttcgaatcttcccgtgctctaattaataacgatacctttgtaggtttatgtattgacgaagaccgccaaccggaattaacggccgagcgtgtcaatacttgggttaaacaggtttatgatgaaatgtgtttagcggaattagcctaa

SEQ ID NO: 49224 - protein, 174 aa, Mannheimia succiniciproducens MBEL55E
MAIVGLFYGSDTGNTENVAKMIQKQLGNELVDIRDIAKSTKEDIEAYDFLMFGIPTWYYGEAQCDWDDFFPTLEQIDFTDKLVAIFGCGDQEDYADYFCDAMGTVREIVEQRGAIIVGNWPTEGYSFESSRALINNDTFVGLCIDEDRQPELTAERVNTWVKQVYDEMCLAELA

SEQ ID NO: 49225 - DNA, 537 bp, Methylococcus capsulatus str. Bath
  CDS (1)..(537): transl_table=11
atggggaagatagggatctttttcggctccgataccggcaatacccgccgcgtcgccaagcagcttgccaagaaactgggtgaggacgcggatgctccggtcgacgtcaaaaaggccgacatcgacgatgtgctcaaatacgatgcactgattcttggtacaccgaccctgggggatggggaactgccgggcctggattccggtgcttcggaggagagctggctcgagttcctgccgaagttcaagggcaaggacatgtcggggaaaaccgtggcgctgttcggtctgggcgatcagcaggggtatggccatgaattcgtcgacgccctgcgcgaaatctacgatcaggtggtcgagtgcggggcgcgggtggtcggcgcatggcctacggacacctatgagttcgaaaagtccaaggcggtggtggacggcaagttcgtcggcctggtgatcgaccacgaaaaccagagcgaaatgacggacgaacgcctcgacgaatggctggagatcgtcaggccggccctcgtcggcgcctga

SEQ ID NO: 49226 - protein, 178 aa, Methylococcus capsulatus str. Bath
MGKIGIFFGSDTGNTRRVAKQLAKKLGEDADAPVDVKKADIDDVLKYDALILGTPTLGDGELPGLDSGASEESWLEFLPKFKGKDMSGKTVALFGLGDQQGYGHEFVDALREIYDQVVECGARVVGAWPTDTYEFEKSKAVVDGKFVGLVIDHENQSEMTDERLDEWLEIVRPALVGA

SEQ ID NO: 49227 - DNA, 507 bp, Bacteroides fragilis NCTC 9343
  CDS (1)..(507): transl_table=11
atgaaaaagataggaatattctatgctgccaaagccgataaaacctcttgggtggctgaaaagattcaaaaagaatttggtacttctgccgagtctgtagccatcgaaaatgcctggcagaatgattttgaagcctatgataatttcatagtcggtgcttccacctggttcgatggcgaactgcctacttattgggacgagcttctgcccgaactccgcaccttgcagttgaaagggaagaaagtggctatcttcgggcttggcgatcaggtgaagtatcccgagaactttgccgatggtgtcggactgcttgccgaagtctttgagaatgatggagctacgcttgttggttttacttctatagacggatatagtttcgagcgttcccgggctctgaaaggtgataaatggtgtggattggtcattgacatcgaaaatcagtcggaaatgactgataagcgaataaaagactggtgtaggcaggtgaaaaaggaatttgaagtttga

SEQ ID NO: 49228 - protein, 168 aa, Bacteroides fragilis NCTC 9343
MKKIGIFYAAKADKTSWVAEKIQKEFGTSAESVAIENAWQNDFEAYDNFIVGASTWFDGELPTYWDELLPELRTLQLKGKKVAIFGLGDQVKYPENFADGVGLLAEVFENDGATLVGFTSIDGYSFERSRALKGDKWCGLVIDIENQSEMTDKRIKDWCRQVKKEFEV

SEQ ID NO: 49229 - DNA, 510 bp, Bacteroides fragilis NCTC 9343
  CDS (1)..(510): transl_table=11
atgaataagattggagtattttacggttccacaacggggactaccgaagatgtagcccaccggattgcagaaaaactgaacgttcccaatggtgacatccacgatgcatcaaaactgaacgacgagttagtgaaagaatatgatgtattagtactgggcacctctacgtggggagcaggcgagcttcaggatgactggtacgacggtatcaaagtgctgaagaaggctgacttgtctcacaaattcgtagccctcttcggctgtggcgattcagactcttacagtgacaccttctgcgacggtatcggcatcttatacgaagaacttaaagacacccactgcaccttctgcggggcaaccgatccgtcgggctacacattcgactcttctgttgcggtaatcaacggcaagtttgtaggacttcctttagatgaagtgaacgaagatggcaaaaccgacgagcgtatcgctcaatggactgaagccttgaaaaaagaatgtatcaactaa

SEQ ID NO: 49230 - protein, 169 aa, Bacteroides fragilis NCTC 9343
MNKIGVFYGSTTGTTEDVAHRIAEKLNVPNGDIHDASKLNDELVKEYDVLVLGTSTWGAGELQDDWYDGIKVLKKADLSHKFVALFGCGDSDSYSDTFCDGIGILYEELKDTHCTFCGATDPSGYTFDSSVAVINGKFVGLPLDEVNEDGKTDERIAQWTEALKKECIN

SEQ ID NO: 49231 - DNA, 525 bp, Colwellia psychrerythraea 34H
  CDS (1)..(525): transl_table=11
atggcaatcgtaggtttattctttggcagtgatacaggtaacactgaagcaattggtaaaatgatccagaaaaaattaggtaagcaaatggttgacgtcaaagacatcgccaagagcactaaagaggaaatcgcagagttcgatttgcttattttaggtattcctacctggtattatggtgaaaaccaatgtgattgggatgattttttacctgatttagaagcaatagattttactgataaattagtagctatctttggcttaggcgaccaagaagattacgccgaatacttttgtgatgctatggagcctttacgagatatcgttgagagtaaaggtgctatcgttgttggtaactggtcaaccgacggttacgaatttgaagcgtcaaaagctcttgttgatgaaaacacttttattggcttatgtattgatgaagacagacaaagtgaattaactgaagcacgtgttgataaatggcttgctcaattaaacgatgaaatgtgtttagccgaattcgcttaa

SEQ ID NO: 49232 - protein, 174 aa, Colwellia psychrerythraea 34H
MAIVGLFFGSDTGNTEAIGKMIQKKLGKQMVDVKDIAKSTKEEIAEFDLLILGIPTWYYGENQCDWDDFLPDLEAIDFTDKLVAIFGLGDQEDYAEYFCDAMEPLRDIVESKGAIVVGNWSTDGYEFEASKALVDENTFIGLCIDEDRQSELTEARVDKWLAQLNDEMCLAEFA

SEQ ID NO: 49233 - DNA, 561 bp, Dechloromonas aromatica RCB
  CDS (1)..(561): transl_table=11
atgagcaagatcggaatgttcttcggcaccgagaccggaacgacccggctggtggccaagaagatgcagaaaaagctgggtgacgagatttgcgacaagccgatcaacgtcaaccgcattaccccggccgacatgatgaaatacgacgccttgattctcggtacgccgagctatggcatcggcgagattcccggccatggtgcttccggctgcttcgaaccgaactgggcggagttcttcgaccagatgccggccacccccgatttcaccggcaagcgcatcgccttcttcggccttggcgcccaggagcgttacgccgaccggttctgcagttcgctgttcgctctggttgaaaagttcaaggccttgggcgccgagatcgtcggtgactggcccatcgatggctacacctacgagcagtcggctgccgaggttgatggtcgcttcatcggtctgatcatcgaccagcgcacgcagggcatgttcaccgacgagcgcatcgacgcctggctggcccaggtcgtgccgctgctctccgagaagctgacggaaacggtctga

SEQ ID NO: 49234 - protein, 186 aa, Dechloromonas aromatica RCB
MSKIGMFFGTETGTTRLVAKKMQKKLGDEICDKPINVNRITPADMMKYDALILGTPSYGIGEIPGHGASGCFEPNWAEFFDQMPATPDFTGKRIAFFGLGAQERYADRFCSSLFALVEKFKALGAEIVGDWPIDGYTYEQSAAEVDGRFIGLIIDQRTQGMFTDERIDAWLAQVVPLLSEKLTETV

SEQ ID NO: 49235 - DNA, 534 bp, Dechloromonas aromatica RCB
  CDS (1)..(534): transl_table=11
atggccaaaatcgggatttttttcggcaccgacaccgggcggacccggctgatcgccaagcagattgcaaagaagctgggtgacgctgccgacgtgccggtcaatatcggccgggtcaccctggccgactttctcgcctacgacgcgctgatcgtcggtagcccgacgctgggcgacggggaattgcccggccagtcggtcggcctcaaccagccgagctgggaggaattcctgccgcaactggccgacgccgatctgaccggcaagactgtggccatcttcggcctcggcgaccagaagaaatacgccgaagaatttgtcgacgccatccgcctgctccacgatgccttcgccgatgcaggagcccgcatggtcgggcgctggccaaccgagggttacgaattcaaggcatcgcaggccgtcgatggcgacgaattcgtcggcctcgcgctcgaccagcaccaccagccggtactgaccgaagagcgcatcgatcgctggctggcccagatcactccggagttgctgccatga

SEQ ID NO: 49236 - protein, 177 aa, Dechloromonas aromatica RCB
MAKIGIFFGTDTGRTRLIAKQIAKKLGDAADVPVNIGRVTLADFLAYDALIVGSPTLGDGELPGQSVGLNQPSWEEFLPQLADADLTGKTVAIFGLGDQKKYAEEFVDAIRLLHDAFADAGARMVGRWPTEGYEFKASQAVDGDEFVGLALDQHHQPVLTEERIDRWLAQITPELLP

SEQ ID NO: 49237 - DNA, 516 bp, Prochlorococcus marinus str. NATL2A
  CDS (1)..(516): transl_table=11
atgactgtaggaatctacttcgctacaacaacaggtaaaaccgaagatatagctgaacggctgcacggattacttgactctgctgaaggtccaaaggatatttcagacgtcgatgaccttagtgaattagctggacatgatggggttatttgtggcatccccacatggaacaccggtgctgactctgagagatcaggaactgcttgggactcaatccttgaagacattggggagctagatctcagtggtaagaaagttgcaatttttggtttaggagattcttctacttacaccgaaaactattgcgatgcaatggaagagcttcatagatacttccagcaagcaggtgcttcaatggttggatacactgcaaagactgattacacttttgacgagtcaaaaagtgtagttggagaagaattctgtgggttacctcttgacgaagacagtgaatcagacatgactgacgaaaggctttctggatgggctgaaaaactaaaaggcgaaatgttctaa

SEQ ID NO: 49238 - protein, 171 aa, Prochlorococcus marinus str. NATL2A
MTVGIYFATTTGKTEDIAERLHGLLDSAEGPKDISDVDDLSELAGHDGVICGIPTWNTGADSERSGTAWDSILEDIGELDLSGKKVAIFGLGDSSTYTENYCDAMEELHRYFQQAGASMVGYTAKTDYTFDESKSVVGEEFCGLPLDEDSESDMTDERLSGWAEKLKGEMF

SEQ ID NO: 49239 - DNA, 513 bp, Anabaena variabilis ATCC 29413
  CDS (1)..(513): transl_table=11
atgtctaatattggtttattttttggtactcaaacaggcaatacccaaactgaatcagaaataattcagaaggagtttggtggtgatagcgttgtaacgttaaatgatgtttcacaagctgaaccaagtgattttaataactacgactatatcatttttggttgtcctacttggaatgttggagaattgcaaagtgattgggaagatttttatgatgagttagataacattgacttcacgggcaaaaaagttgcttattttggtcctggagaccaggttggttatccagatacatttcaagatgcactcggtattctagaggaaaaaatttcagaaaatggtgctgaaacagttggctattggcctacagaaggttatgaattcagcgagtctaaagctgttcgtgatggtaaatttgtaggtcttgcccttgatgaagataatcaatccgatttaacagaggaaagaatcaaagcttgggttacacaattgaagctagagtttggtttgtaa

SEQ ID NO: 49240 - protein, 170 aa, Anabaena variabilis ATCC 29413
MSNIGLFFGTQTGNTQTESEIIQKEFGGDSVVTLNDVSQAEPSDFNNYDYIIFGCPTWNVGELQSDWEDFYDELDNIDFTGKKVAYFGPGDQVGYPDTFQDALGILEEKISENGAETVGYWPTEGYEFSESKAVRDGKFVGLALDEDNQSDLTEERIKAWVTQLKLEFGL

SEQ ID NO: 49241 - DNA, 510 bp, Synechococcus sp. CC9605
  CDS (1)..(510): transl_table=11
atgactttcactattttctttgccacatctactggtaaaactgaggatgtggctgatcgactcaaggagcttcttcctggaacagaagcgaaggatgttgacaacatcgattcaattgatgagttggttgcagctgagtcgttaatttgttgtgttccaacctggaatacaggcgctgatgaagcacggtcaggaacagcctgggatgatctggttcaggaaattcctgacaaggattttgccggtaaatcagtcgcaatcgtaggtcttggtgactcctccggttattcggattttttctgtgatgccatggaggaactgtatacggcttttcttcaatctggtgccaagttgattggtaaggtttccacagaagggtatacctatgatgactcaaagagcattattgatggtaagttctgcggacttgcaatcgatgaagacaatgagtcggaattgacagatcatcgtttgcaggcctgggttcagcaaataaacgctgaggcctga

SEQ ID NO: 49242 - protein, 169 aa, Synechococcus sp. CC9605
MTFTIFFATSTGKTEDVADRLKELLPGTEAKDVDNIDSIDELVAAESLICCVPTWNTGADEARSGTAWDDLVQEIPDKDFAGKSVAIVGLGDSSGYSDFFCDAMEELYTAFLQSGAKLIGKVSTEGYTYDDSKSIIDGKFCGLAIDEDNESELTDHRLQAWVQQINAEA

SEQ ID NO: 49243 - DNA, 525 bp, Prochlorococcus marinus str. MIT 9312
  CDS (1)..(525): transl_table=11
atgactgtaggaatttattacgcaactacaactggaaaaactgaagacgtagctgatcgtcttcataactttatttcttcggcagaagcacctaaagatgtatctgatgttgatgatctttcagaattcgaaggtcttgatggaattatctgcgggatacctacttggaacactggggctgatgaagaaagatcaggaactgcatgggattcaattctggaggatattggtgaactaagtttatcaggaaaaaaggttgcaatttttggtttaggagattcttctacctacacagaaaactattgtgatgccatggaagaacttcacagctacttcgctaaagcaggtgccgaaatggtcggttacgtagataaatcttcttatacgtttgatgaatctaaaagtatcattggagaaagcttttgtggattacctcttgatgaggatagtgaatctgatttaaccgatacacgtcttgaaacatgggcttctcagcttaaggacgaaatcccttcattggcgtaa

SEQ ID NO: 49244 - protein, 174 aa, Prochlorococcus marinus str. MIT 9312
MTVGIYYATTTGKTEDVADRLHNFISSAEAPKDVSDVDDLSEFEGLDGIICGIPTWNTGADEERSGTAWDSILEDIGELSLSGKKVAIFGLGDSSTYTENYCDAMEELHSYFAKAGAEMVGYVDKSSYTFDESKSIIGESFCGLPLDEDSESDLTDTRLETWASQLKDEIPSLA

SEQ ID NO: 49245 - DNA, 483 bp, Rhodospirillum rubrum ATCC 11170
  CDS (1)..(483): transl_table=11
atgggcactacggtcatttacggttcggatggcggcaccacccagggcgtggccaaacgcatcgccagtccgttgcaggccaaggtggtcgatatcaaggtggcgaccaccgatgatctggaaggctgtgatctgctgatcctgggcgccccgacctatggcctgggcgatctgcaatgcgattgggagagcaggattggcgtgctggactcggccaagctgactggcaaaagggtggccttgtttggcaccggcgatcagatcggctatcccgacagctttgtcgatgccatggggatcctttatgatcgggtggtcgccctgggggcgacggtggtcggcttcaccgccacccagggctatgactatagctactcgctggccgagcgcgacggccaattcgttggtttggcccttgacgaggacaaccagtcctcgttgacgggcaaacgcatcgccgcctgggtggaccacctgaaataa

SEQ ID NO: 49246 - protein, 160 aa, Rhodospirillum rubrum ATCC 11170
MGTTVIYGSDGGTTQGVAKRIASPLQAKVVDIKVATTDDLEGCDLLILGAPTYGLGDLQCDWESRIGVLDSAKLTGKRVALFGTGDQIGYPDSFVDAMGILYDRVVALGATVVGFTATQGYDYSYSLAERDGQFVGLALDEDNQSSLTGKRIAAWVDHLK

SEQ ID NO: 49247 - DNA, 531 bp, Saccharophagus degradans 2-40
  CDS (1)..(531): transl_table=11
atgtctgattcaaaccgcgcacttattggccttttttatggcagctccacctgttacacagaaatggccagcgaaaaaattgccacccagttaggcgagtcactaatagaccgctttaacattgccgacacccccattgtaaacgcccaattctatgattttattattatgggcatccccacgtgggattacggcgagctacaagaagactgggaagaaatttggcctgagctcgacgacctagaccttacaggcaaaaaagtagcgctttttggcttgggcgatcaaataggctacccagagtggtttctcgatgccatgggctacctgcacgacaaactagcctctcgcggggccacgatggtgggctatgtaagcaccgaagggtttgaatttgagggctctaaagcacttacccccgacgagagccaatttgttggtctagccctagacgaagaaaatgagtttgataaaacagaagcccgaattgccgcttggtgcgaacaaatcacccaagaatttggcatttaa

SEQ ID NO: 49248 - protein, 176 aa, Saccharophagus degradans 2-40
MSDSNRALIGLFYGSSTCYTEMASEKIATQLGESLIDRFNIADTPIVNAQFYDFIIMGIPTWDYGELQEDWEEIWPELDDLDLTGKKVALFGLGDQIGYPEWFLDAMGYLHDKLASRGATMVGYVSTEGFEFEGSKALTPDESQFVGLALDEENEFDKTEARIAAWCEQITQEFGI

SEQ ID NO: 49249 - DNA, 585 bp, Saccharophagus degradans 2-40
  CDS (1)..(585): transl_table=11
atggcaataacagcgtttggttctataggcgaggcagcagtggcagcaaaaattgggttgatctatggcagtgacgacggcaacacagaaacaattgcgtttcgaattcaggcgcgcttaggcgaagagaatgtagatgtgttggacgtaagcgacgtaacgcaaatggattttgccagttatgacaagctcatactgggcataccaacttgggatttcggtcaaatccaatccgactgggaagatttctgggacgatgtgaaagaggtagggtttgaagggaaaaccgtggcgttattcggcttgggggatcagtttggttatggggatttcttccttgatgccatgggcatgctgcatgacgtgatagttgaaaatggcgccaaaattgtggggcactggcccgttgaaggttatgagtttgatgcatctaaggcattaatagagggtgagggcctgtttgttggccttggtatagatgaagatcaacagccagagctaagtgcatcgcgtctaaataagtgggtgtcgcaaattagtcatgaatttaacctaggatacgagccaatagaattggatgattag

SEQ ID NO: 49250 - protein, 194 aa, Saccharophagus degradans 2-40
MAITAFGSIGEAAVAAKIGLIYGSDDGNTETIAFRIQARLGEENVDVLDVSDVTQMDFASYDKLILGIPTWDFGQIQSDWEDFWDDVKEVGFEGKTVALFGLGDQFGYGDFFLDAMGMLHDVIVENGAKIVGHWPVEGYEFDASKALIEGEGLFVGLGIDEDQQPELSASRLNKWVSQISHEFNLGYEPIELDD

SEQ ID NO: 49251 - DNA, 525 bp, Haemophilus somnus 129PT
  CDS (1)..(525): transl_table=11
atggctattgtcggtttattttatggtagtgatacgggtaatactgaaaatatcgctaaaatgatacaaaaacaattaggttcagaactcattgatattcgtgatattgctaaaagtagtaaagaagacattgaaagctatgattttttaatgatcggtatcccaacttggtattatggagaagcccaatgtgactgggacgatttctttccaaccttagaagaaattgattttaccgataaattagtcgctatttttggttgtggggatcaagaagactatgcagagtatttctgtgatgcgatgggtacggtacgcaatattatcgagcccaaaggtgcaattatcgttgggcattggccgaccgaaggttatacttttgaggtctcgcaagccttagttgatgacaatacattcgtaggtttatgtattgatgaagatcgtcaaccagaactcaccgcagaacgtgtagaaaaatgggttaaacaagtgtatgacgaaatgtgtttagctgaactggcataa

SEQ ID NO: 49252 - protein, 174 aa, Haemophilus somnus 129PT
MAIVGLFYGSDTGNTENIAKMIQKQLGSELIDIRDIAKSSKEDIESYDFLMIGIPTWYYGEAQCDWDDFFPTLEEIDFTDKLVAIFGCGDQEDYAEYFCDAMGTVRNIIEPKGAIIVGHWPTEGYTFEVSQALVDDNTFVGLCIDEDRQPELTAERVEKWVKQVYDEMCLAELA

SEQ ID NO: 49253 - DNA, 510 bp, Synechococcus sp. CC9311
  CDS (1)..(510): transl_table=11
atggcctacacaatctttttcgcaacttccacaggaaagactgaagatgttgccgacaagctcaaagatctattaccaggtacagaaagcaaagatgtagacagcatcggatctgcagcagagctagctgaagcagaggcactcatatgctgtgttcctacatggaatacaggcgcagatgaaggtcgttctggaacagcttgggatacttatgctgaagaaataccaagtatggatttcagtggaaaatcagttgcaatagtaggacttggtgattcatcatcctattctgactatttctgcgatgcaatggaagagttatacacagcattcgtacaagcaggtgcaaacctaatcggaaaagtacccacagacgggtacactttcgcagaatcaaaaagtgtcattgatggaaagttctgtggtttggctattgacgaagacaatgagtcagatctaacagatcaacgactcagcgactgggtcaaacaaatcaattcagaagcttaa

SEQ ID NO: 49254 - protein, 169 aa, Synechococcus sp. CC9311
MAYTIFFATSTGKTEDVADKLKDLLPGTESKDVDSIGSAAELAEAEALICCVPTWNTGADEGRSGTAWDTYAEEIPSMDFSGKSVAIVGLGDSSSYSDYFCDAMEELYTAFVQAGANLIGKVPTDGYTFAESKSVIDGKFCGLAIDEDNESDLTDQRLSDWVKQINSEA

SEQ ID NO: 49255 - DNA, 528 bp, Shewanella sp. MR-4
  CDS (1)..(528): transl_table=11
atggcaactgtaggtctttttttcggtagcgacacaggcaacaccgaagctgtcgccaagatgatccagaagaaactgggtaagaaaatggttgaggtgaaagatatcgccaagagcaccaaagaacagatcgcagaatacgacctgctgctgttcggcatcccaacctggtattacggtgaagcacagtgcgactgggatgactttttccctgaattagaacagattgattttacagacaaactggttgctatcttcggttgtggtgaccaagaagactacgcagaatacttcctcgatgccatgggtatggtgggcgatatcgttcaagctcgtggcggtatcatcatcggtcactggccaacggctggttataacttcgaagcgtcaaaaggcttagtcgatgatgaccacttcatcggtttagggattgacgaagaccgtcaaccagagctgactgaagagcgtgtggatgcttgggttaagcaaatctacgaagaaatgtgcttagccgagttcgaagactaa

SEQ ID NO: 49256 - protein, 175 aa, Shewanella sp. MR-4
MATVGLFFGSDTGNTEAVAKMIQKKLGKKMVEVKDIAKSTKEQIAEYDLLLFGIPTWYYGEAQCDWDDFFPELEQIDFTDKLVAIFGCGDQEDYAEYFLDAMGMVGDIVQARGGIIIGHWPTAGYNFEASKGLVDDDHFIGLGIDEDRQPELTEERVDAWVKQIYEEMCLAEFED

SEQ ID NO: 49257 - DNA, 558 bp, Azoarcus sp. BH72
  CDS (1)..(558): transl_table=11
atgaacaagatcggcatgtttttcggcaccgaaaccggtaccacccgcctcatcgcgaagaagatccacaagaagctgggcgacgagatcgccgacaagccggtgaatgtgaaccgcatcgaaccggcggacatgctgaagtacgacgtgctgatcctcggcacgccgagctacggcatcgaggaagtgccgggcctcagcgccggctgcctggagccgaactgggcggaattcctggtgaagatggacaagccggacttcagcggcaagcgcatcgcgctgttcgggctgggcgcgcaggagcgttattcggagcgcttctgcagctctctgatgcgcatctacgaaatcttcaagggctacggcgccgagatcgtcggcgacgactggcccaccgacggctacaccttccagcagtccgccgcggtgaaggacggccgcttcgtcgggctggtgatcgacgagcgtacccaggggatgtacaccaacgagcgcatcgacacctgggtggcaaaggtgaagccgctgctgctggagaagctcggggtcgaggcctaa

SEQ ID NO: 49258 - protein, 185 aa, Azoarcus sp. BH72
MNKIGMFFGTETGTTRLIAKKIHKKLGDEIADKPVNVNRIEPADMLKYDVLILGTPSYGIEEVPGLSAGCLEPNWAEFLVKMDKPDFSGKRIALFGLGAQERYSERFCSSLMRIYEIFKGYGAEIVGDDWPTDGYTFQQSAAVKDGRFVGLVIDERTQGMYTNERIDTWVAKVKPLLLEKLGVEA

SEQ ID NO: 49259 - DNA, 534 bp, Azoarcus sp. BH72
  CDS (1)..(534): transl_table=11
atgtcccgcatcggtatcttctacggcagcagctccggcgtaaccaaggcggcagccgaaaagctggccggattcctcggcgaagaccgttgtgacctctacagcatggaagaggacttcgtcgacttcgacgagatgctcgactacgacttcctgctgttcggctgctccacctggggctcgggcgaggtgcagaacgactggcgcgatccgctgctggacctcgacaacgacaagccggacttctccggcaagaccatcgccgtgttcggcgccggcgactatgtgtcgcatggcgaacagtttgtcagtgcgcttggtattctttacgacaaattcaaggcccgcggcgcgaccctggtcggcagcttccccaccgagggctacacctacaagtactccttcgcggaacgcgacggtcagttcgtgggtctgccgttcgacgacatcaacgaagccgacaagaccgaagcgcgcctgcaagcctgggtcgaggtcctgcaagcctacctgccggaagccgaagaggcctga

SEQ ID NO: 49260 - protein, 177 aa, Azoarcus sp. BH72
MSRIGIFYGSSSGVTKAAAEKLAGFLGEDRCDLYSMEEDFVDFDEMLDYDFLLFGCSTWGSGEVQNDWRDPLLDLDNDKPDFSGKTIAVFGAGDYVSHGEQFVSALGILYDKFKARGATLVGSFPTEGYTYKYSFAERDGQFVGLPFDDINEADKTEARLQAWVEVLQAYLPEAEEA

SEQ ID NO: 49261 - DNA, 537 bp, Azoarcus sp. BH72
  CDS (1)..(537): transl_table=11
atggcaaaaatcggcattttcttcggcagcgacaccggccgcacgcgcaaggtcgccaagtacatcgccaagaagctcggcgaagtggcggcggacccggtcaacgtcaacaaggccacggtcgaggacttcctcgcctacgacgccctgatcatcggcagcccgacgctgggcgacggtcagttgccggggctggaatcgggcgcgcagaacgagagctgggccgaattcctgccccagctcgacggcgccgacatgagtggcaaggtggtggcgatctacggcctgggcgaccaggacaagtacgccaacgagttctgcgacgcgatcggcctgctctacgacgcggtcaccacctgcggcgccaccgtggtggggccgtggccgaccgagggctacagtttcaagagctcgcaggcggtcatcgacggccagttctgcggccttgcgctggacaacgacaaccaggccggcctcaccgacgagcgcgtcgacacctggctggagcaggtcaagccggcactgctcggcgcctga

SEQ ID NO: 49262 - protein, 178 aa, Azoarcus sp. BH72
MAKIGIFFGSDTGRTRKVAKYIAKKLGEVAADPVNVNKATVEDFLAYDALIIGSPTLGDGQLPGLESGAQNESWAEFLPQLDGADMSGKVVAIYGLGDQDKYANEFCDAIGLLYDAVTTCGATVVGPWPTEGYSFKSSQAVIDGQFCGLALDNDNQAGLTDERVDTWLEQVKPALLGA

SEQ ID NO: 49263 - DNA, 513 bp, Nostoc punctiforme PCC 73102
  CDS (1)..(513): transl_table=11
atgtctaatattggtttattttttggtactcaaacaggcaatacccaaactgaatcagaaataattcagaaggagtttggtggtgatagtgttgtaactttatatgatatttcacaagctgaaccaagtgatttcaataactacgattatatcgttgttggttgtcctacctggaatgttggagaattgcaaagtgattgggaaaatttttatgatgagttagataacattgacttcatcggcaaaaaagttgcttattttgctcctggagaccaggttggttatcctgatacatttcaagatgccctcggtattctagaggaaaaaatttcagaaaatggtggtgaaacagttggctattggcctacagaaggttatgaattcagtgagtctaaagctgttcgtgatggtaaatttgtaggtcttgcccttgatgaagataatcaatccgatttaacagaggaaagaatcaaagcttgggttacacaattgaagccagagtttggtttgtaa

SEQ ID NO: 49264 - protein, 170 aa, Nostoc punctiforme PCC 73102
MSNIGLFFGTQTGNTQTESEIIQKEFGGDSVVTLYDISQAEPSDFNNYDYIVVGCPTWNVGELQSDWENFYDELDNIDFIGKKVAYFAPGDQVGYPDTFQDALGILEEKISENGGETVGYWPTEGYEFSESKAVRDGKFVGLALDEDNQSDLTEERIKAWVTQLKPEFGL

SEQ ID NO: 49265 - DNA, 513 bp, Nostoc punctiforme PCC 73102
  CDS (1)..(513): transl_table=11
atgtcgaaaaaaatcggtctgttttatggtactcaaactggcaacactgaatctgatgctgaaaaaattcgggatgagtttggtggtgatgttgtaacattacatcccatttatgaggcggatactaccacttttgatgagtatgaattactgattattggctctccaacttgggatattggtcaacttcagagcgattgggaaagctttttctccgatctcgatgaaataggttttagcggtaagttagttgcctattttggtgatggagatcaatatggctatgctgataactttcaggatgcaatgggaattctggaagaaaaaatttcccagcgcggcggtaaaactgttggctactggtcaacagagggttatgaatttgagaattctagagccttgaaaaatggcaagtttgttggtttggcacttgatgaaggtagtcaatccgatctcacagatgagcgaattaaaacttgggttgctcagttgaaaacagaatttggtttgtag

SEQ ID NO: 49266 - protein, 170 aa, Nostoc punctiforme PCC 73102
MSKKIGLFYGTQTGNTESDAEKIRDEFGGDVVTLHPIYEADTTTFDEYELLIIGSPTWDIGQLQSDWESFFSDLDEIGFSGKLVAYFGDGDQYGYADNFQDAMGILEEKISQRGGKTVGYWSTEGYEFENSRALKNGKFVGLALDEGSQSDLTDERIKTWVAQLKTEFGL

SEQ ID NO: 49267 - DNA, 525 bp, Actinobacillus pleuropneumoniae serovar 1 str. 4074
  CDS (1)..(525): transl_table=11
atggcagtagtaggtttattctacggtagcgatactggtaatacagaaaacattgcaaaaatgattcaaaaagaaatcggtgcgaatttaatcgatgtacgcgatatcgcaaaaagtgctaaagaagatattgaagcgtacgattttttacttttaggtattccgacatggtattacggcgaatctcaagcggattgggatgattttatgccgacgctaaaagaaatcgattttagcggtaaagtcatcggtatcttcggttgcggtgaccaagaagattatgcggaatatttctgtgatgcgatgggaaccattcgcgatgtcgttgagcaaaacggcggtgtgattgtcggacattggccgacggaaggttatagctttgaagtatcgcaagcgttagtggacgaaaatacatttgtcggtttatgtattgatgaagatcgccaaccggaattaaccggtgaacgtgtaaaccgttggtgtaaacagatctttgatgagatgtgcttagatcagttagcataa

SEQ ID NO: 49268 - protein, 174 aa, Actinobacillus pleuropneumoniae serovar 1 str. 4074
MAVVGLFYGSDTGNTENIAKMIQKEIGANLIDVRDIAKSAKEDIEAYDFLLLGIPTWYYGESQADWDDFMPTLKEIDFSGKVIGIFGCGDQEDYAEYFCDAMGTIRDVVEQNGGVIVGHWPTEGYSFEVSQALVDENTFVGLCIDEDRQPELTGERVNRWCKQIFDEMCLDQLA

SEQ ID NO: 49269 - DNA, 504 bp, Fusobacterium nucleatum subsp. vincentii ATCC 49256
  CDS (1)..(504): transl_table=11
atgaaaacagttggtatattttttggaactacaggaggaaaaactcaagaagttgctgatatcatagctgctaaattaggagatgctcaagtatttgatgttgctaatggtgttgctgaaatggaagtttttgataacattataatggcttctccaacttatggtgcaggagaattacaagatgattgggcttctgctattgatgaagttgcagatatggacttctctggaaaagttgttgcattagttggtgtaggagatgctgcaatatttggtggaaactatgttgaagctttgaaacatttatacgatgctgttcaacctaagggagctaaaatagttggatttacttctactgatggatatgactttgaagcttctgaagcagttattgatggagataaatttatgggacttgcaatagatgcttcatatgatactgatgaaatcacttcaaaagttgaagattggatagaaaacaaagttaaagatgaattattataa

SEQ ID NO: 49270 - protein, 167 aa, Fusobacterium nucleatum subsp. vincentii ATCC 49256
MKTVGIFFGTTGGKTQEVADIIAAKLGDAQVFDVANGVAEMEVFDNIIMASPTYGAGELQDDWASAIDEVADMDFSGKVVALVGVGDAAIFGGNYVEALKHLYDAVQPKGAKIVGFTSTDGYDFEASEAVIDGDKFMGLAIDASYDTDEITSKVEDWIENKVKDELL

SEQ ID NO: 49271 - DNA, 525 bp, Crocosphaera watsonii WH 8501
  CDS (1)..(525): transl_table=11
atggctaaaattggcattttttacggaagtacctcgggaatcaccgaagaaattgctaccaccatacgggaaaaattaggggaagaggaatgcgatctctatagcatggaagacgattttgacgaatacgatcaacttctagaatatgattacctattattgggttgttccacctggggagcaggagacgtacaaaacgattggcgtgatcccctatttgaaatggaattggaaaaacctgattttagcggtaaaaccatcgctttgtttggtgccggggatcaagtggatcatggaaccgaatttgtcagcgcattgggtaaaatgtataaccacttcaaaaccttgggagctaccctagtaggagaattccccaatgaaggctattcatttgagtattcctcagccctagttgatgataaatttgtgggacttcccatcgatgaaatcaaccaaagtgacaaaaccgaagagagaattgaccaatgggtggaatccatacgtcctatctttttggatgactag

SEQ ID NO: 49272 - protein, 174 aa, Crocosphaera watsonii WH 8501
MAKIGIFYGSTSGITEEIATTIREKLGEEECDLYSMEDDFDEYDQLLEYDYLLLGCSTWGAGDVQNDWRDPLFEMELEKPDFSGKTIALFGAGDQVDHGTEFVSALGKMYNHFKTLGATLVGEFPNEGYSFEYSSALVDDKFVGLPIDEINQSDKTEERIDQWVESIRPIFLDD

SEQ ID NO: 49273 - DNA, 507 bp, Prosthecochloris aestuarii DSM 271
  CDS (1)..(507): transl_table=11
atgaaaaagatcggccttttctacggctcaacaaccggaaacaccgaaactgctgccacagccattgcagctgctctcggcattggcaatgtgacactgcacgacattgcagaaactccacctgaaacattgagctcctatgacaatatcatcctgggaacatcaacatggggattcggagaactgcaggacgactggcaaaatgctctatcagaaattgaaaaccttgattttacaggaaaaaccgtcgcattttttggtctcggcaaccagtacagctacagcgatgtctttcaggatgccatggggatcttatatgaaacagtgcataaaaaaggagctgacattgtaggagcatggccgacagccggatatgaatttgacgaatcaagggcggtagtcaacgacaactttatcggactcgcccttgataacgacaatcagccggaccgcacgccccaacgaatcgagcagtgggccggtcaacttaaaaaccttttccaataa

SEQ ID NO: 49274 - protein, 168 aa, Prosthecochloris aestuarii DSM 271
MKKIGLFYGSTTGNTETAATAIAAALGIGNVTLHDIAETPPETLSSYDNIILGTSTWGFGELQDDWQNALSEIENLDFTGKTVAFFGLGNQYSYSDVFQDAMGILYETVHKKGADIVGAWPTAGYEFDESRAVVNDNFIGLALDNDNQPDRTPQRIEQWAGQLKNLFQ

SEQ ID NO: 49275 - DNA, 528 bp, Pseudoalteromonas tunicata D2
  CDS (1)..(528): transl_table=11
atggcaagcgtaggcatattttttggaagtgataccggtaataccgagcatgtagctaaacaaatccaaaaagaactgggtaaaaaattagttgatgtatttgatatcgctaaaagtagtaaagagcaaatcgctgaatttgatttattgttattcggtattccaacttggtattacggtgaagcccaatgtgattgggatgatttttttcctgaacttgaagaaatcgactttgatggcaagttagctgctatttttggttgtggtgatcaagaagattattcagaatatttccttgatgctatgggtatggttcgtgacatcgttgagaaaaaaggcggcgtgatcattggtaactggccaacagccagctataactttgaagcatcaaaagcacttgttgataatgaccactttgttggtttagggatagatgaagatcgtcaacctgagcttactgagcagcgaattaaacaatggtgtaagcaagtttacgaagaaatgtgtcttgcagagttggaagattaa

SEQ ID NO: 49276 - protein, 175 aa, Pseudoalteromonas tunicata D2
MASVGIFFGSDTGNTEHVAKQIQKELGKKLVDVFDIAKSSKEQIAEFDLLLFGIPTWYYGEAQCDWDDFFPELEEIDFDGKLAAIFGCGDQEDYSEYFLDAMGMVRDIVEKKGGVIIGNWPTASYNFEASKALVDNDHFVGLGIDEDRQPELTEQRIKQWCKQVYEEMCLAELED

SEQ ID NO: 49277 - DNA, 522 bp, Pseudoalteromonas tunicata D2
  CDS (1)..(522): transl_table=11
atgaaaattggtttgttttatggctcaactacctgctacaccgaaatggccgctgaaaaaatgcgcgatatcctaggcgatgacatcctagagttacacaatattaaagacgctgcattaaaaaacgctgagcagtacgattttgtgatctttggcatttccacatgggactttggcgagttacaagaagattgggagtcaaagtgggatgatattaacaacgttaatttagccggtaaaaccatcgccttatttggcatgggcgaccaacaaggttacggccaatggtttcaagatgcccttggcatgttacatgaccaaatagcaccacaaggtgtgaattttattgggtattggccaaatagcagcgattacgaatttgaaaagtccaaagcccttacgccagatggcagccaatttgtcggtttagcacttgacgaagacagtcaatacgaactcagtgatgagcgcatcgccacctggatagaacaagttttagagcagtatcaagcaagcctctaa

SEQ ID NO: 49278 - protein, 173 aa, Pseudoalteromonas tunicata D2
MKIGLFYGSTTCYTEMAAEKMRDILGDDILELHNIKDAALKNAEQYDFVIFGISTWDFGELQEDWESKWDDINNVNLAGKTIALFGMGDQQGYGQWFQDALGMLHDQIAPQGVNFIGYWPNSSDYEFEKSKALTPDGSQFVGLALDEDSQYELSDERIATWIEQVLEQYQASL

SEQ ID NO: 49279 - DNA, 522 bp, Photobacterium sp. SKA34
  CDS (1)..(522): transl_table=11
atgaaaatcggtttgttttatggctcaaccacctgctataccgaaatggcagcagaaaagatccgtgattgtattggtactgaactgattgaactgcataatattaaagaatcagatatcaatgagatgaaccagtttgatatgcttattttaggtatctcaacctgggactttggtgaactgcaagaagattgggaagccgtgtggcagcagcttgatggattacgtctaaccaataaaaccattgcattgtttggcttgggcgatcaagaaggttacaccgagtggttccttgatgcgatgggaatgctgcatgacaaactattagaagcaaatgttcaatttattggctattggcctaatgatgatagttaccaatttgaagcatcaaaagccctcactgacgataagcaattttttgttggtttagcgttagatgaagatggtcaatatgaactttctgaccagcgaatcacccaatggtgtgagcaaattatgcttgagtacgccgagaccttatga

SEQ ID NO: 49280 - protein, 173 aa, Photobacterium sp. SKA34
MKIGLFYGSTTCYTEMAAEKIRDCIGTELIELHNIKESDINEMNQFDMLILGISTWDFGELQEDWEAVWQQLDGLRLTNKTIALFGLGDQEGYTEWFLDAMGMLHDKLLEANVQFIGYWPNDDSYQFEASKALTDDKQFFVGLALDEDGQYELSDQRITQWCEQIMLEYAETL

SEQ ID NO: 49281 - DNA, 528 bp, Photobacterium sp. SKA34
  CDS (1)..(528): transl_table=11
atggcaagcgttggactcttctttggtagcgacacaggtaataccgaagctgtcgctaaaatgattcaaaagcaacttggtgacaagctagttgaagtaaaagatatcgcaaaaagcagcaaagaagatatcgacaattttgatctattgctacttggtattcctacttggtactacggtgaaccacagtgtgattgggatgactttttcccagagcttgagcaagttgatttttcaactaagcttgttgctatattcggttgtggtgaccaagaggattacgcagaatatttctgtgattcgatgggcacagtacgtgacatcgttgaaggtcgcggtgcaactgttgtgggtaatttctcaacagaaggctttgagtttgaagcttcaaaagcgctagttgatgacaaccacttcgtcggtttatgtattgatgaagatcgccaaccagagcttaccgcacagcgtgttaagcaatgggtggagcaaatttatgatgaaatgtgcttagcagaacttgctgattaa

SEQ ID NO: 49282 - protein, 175 aa, Photobacterium sp. SKA34
MASVGLFFGSDTGNTEAVAKMIQKQLGDKLVEVKDIAKSSKEDIDNFDLLLLGIPTWYYGEPQCDWDDFFPELEQVDFSTKLVAIFGCGDQEDYAEYFCDSMGTVRDIVEGRGATVVGNFSTEGFEFEASKALVDDNHFVGLCIDEDRQPELTAQRVKQWVEQIYDEMCLAELAD

SEQ ID NO: 49283 - DNA, 519 bp, Oceanospirillum sp. MED92
  CDS (1)..(519): transl_table=11
atgactaaaccaatcggccttttttatgggtctaccacgggcaatactgagaccgttgcagagcagattattgaacagatcggtagtgataaaattcatcacatcgatatcgctgctgatggtctggatgggttgagtgagtatgagcacctgattcttggtatcccaacctgggattttggcgagttacaggaagactgggctgacctatgggatgtgcttgatgccgttcatgttgagggaaaaacctgtgcagtctttggtctgggtgatcagattggttatgctgaatggtttctcgatgcgatgggcttgttgcacgataaaatgcaggagcgtggtgcggttatggttggttactggtctgcagacggttatgacttcgaagcatccaaagcgcttactgaagatcaaagtcagtttgtaggtctggccatagatgaagattgccagcgcagtgaaactgaagagcgtgtcgctcgctggagccagcaagtcgttaaagggtttggcctgtaa

SEQ ID NO: 49284 - protein, 172 aa, Oceanospirillum sp. MED92
MTKPIGLFYGSTTGNTETVAEQIIEQIGSDKIHHIDIAADGLDGLSEYEHLILGIPTWDFGELQEDWADLWDVLDAVHVEGKTCAVFGLGDQIGYAEWFLDAMGLLHDKMQERGAVMVGYWSADGYDFEASKALTEDQSQFVGLAIDEDCQRSETEERVARWSQQVVKGFGL

SEQ ID NO: 49285 - DNA, 516 bp, Oceanospirillum sp. MED92
  CDS (1)..(516): transl_table=11
gtgaaagctgcgcttttttatggcacaaccaccggcaatacgggtgatattgcggaaaaaattaaagatgaatgggatgcaggtgaaatcgatctgttcgatgttgccgacagttccatcggggcggttatggattatgagctgctaatctttgcaattccaacctgggattatggcgaagttcaggaagattggctggatatctgggacgaagtcgattccattgattttaccggcaaacaaactgcctttatcggtctgggtgatcagtttggctatccggaatggtttgtcgatgcaatgggtatgctccatgacaaaatcgtggctaaaggtggcgaggttgtgggtcactggtcaattgaagggtatgaatttgacgagtctaaagcgctgacaaaagataagaagcactttatcggactggcgttagacgaagactggcagcgtgaacagactcccgagcggctcactaattggttagatcaggtaaaactagagttaggcttgttctga

SEQ ID NO: 49286 - protein, 171 aa, Oceanospirillum sp. MED92
MKAALFYGTTTGNTGDIAEKIKDEWDAGEIDLFDVADSSIGAVMDYELLIFAIPTWDYGEVQEDWLDIWDEVDSIDFTGKQTAFIGLGDQFGYPEWFVDAMGMLHDKIVAKGGEVVGHWSIEGYEFDESKALTKDKKHFIGLALDEDWQREQTPERLTNWLDQVKLELGLF

SEQ ID NO: 49287 - DNA, 483 bp, Xanthobacter autotrophicus Py2
  CDS (1)..(483): transl_table=11
atgattgtcacggtgatcttcggctccgatggcggagccacgaaaggggtcgcgtccaagatttcaaagaaatgccagggccgttcggtggacatcaaagccgcgaccaaggccgatttcgagaatagcgatcttctcatcctcggctcgcccacctatggcgacggaacattgcagaccgactgggaagagaacatcgacaagctgcgcagcgccaacctgaagggccggaaggtggcgctgttcggcacgggggaccaggagagctatcccacctcctttgtcgatgccatcggcatcctctatgacgaggtgacggatctcggcgcggtggtggtcggcttcaccgacaccgccggctacgactatgtgggctccacggccgaacgggacggccagttcgtcggcctcgccctcgacctcgacacgcaatccggtctgaccgacaagcgggtgacggcatggctcagcaagctgctttag

SEQ ID NO: 49288 - protein, 160 aa, Xanthobacter autotrophicus Py2
MIVTVIFGSDGGATKGVASKISKKCQGRSVDIKAATKADFENSDLLILGSPTYGDGTLQTDWEENIDKLRSANLKGRKVALFGTGDQESYPTSFVDAIGILYDEVTDLGAVVVGFTDTAGYDYVGSTAERDGQFVGLALDLDTQSGLTDKRVTAWLSKLL

SEQ ID NO: 49289 - DNA, 606 bp, marine gamma proteobacterium HTCC2207
  CDS (1)..(606): transl_table=11
atgatcccctcggatcgctcatataacgatcttgttagagcaaattcctactcccagcttgagaaaaaatcaatgagttcagcaatcggcctattttacggcagctcaacctgctacacagaaatggccggggaaaaaatctgtgcccagatcaatagccaacacagcgacagcgtcagcttgcacaatatcgccgatcaacccctcagcctaatggctgattatgatttgctaatactcggcatccccacctgggactacggcgaacttcaagaggactgggagagtcactgggacgaactagagcaaatcgacttcgctggaaaacaggtcgcggtctacggtctcggcgatcagataggttatccggaatggtttcaggatgccctcggctatctctgggccaaggtgaaaaatcgtggtgcaactatggtcggcgaatggcccaacaaaggttatgagttcgacgagtccaaggcgctcaccgataataaggcgcattttgtcggcttagcactagatgacgagaaccagctagatctcagtgatgactatattagccgctggtgtgagcaaatttgcactgagtttggcctcgggaaatga

SEQ ID NO: 49290 - protein, 201 aa, marine gamma proteobacterium HTCC2207
MIPSDRSYNDLVRANSYSQLEKKSMSSAIGLFYGSSTCYTEMAGEKICAQINSQHSDSVSLHNIADQPLSLMADYDLLILGIPTWDYGELQEDWESHWDELEQIDFAGKQVAVYGLGDQIGYPEWFQDALGYLWAKVKNRGATMVGEWPNKGYEFDESKALTDNKAHFVGLALDDENQLDLSDDYISRWCEQICTEFGLGK

SEQ ID NO: 49291 - DNA, 519 bp, Vibrio sp. Ex25
  CDS (1)..(519): transl_table=11
atgaaaatcggactcttttacggctcaacgacctgctacaccgaaatggcagcagagaaaattcgtaccattattggtgaagaccttgtcgacattcacaatgtgaaagagacaccgttatcactaatggcggactacgacttattactccttggcatctcaacttgggactttggtgaaattcaagaagattggaacgcgatttggcaagacatcgccacaacaccattaaaaggtaaagttgtcgcgctgtttggtctgggtgaccaagaaggctacggtgagtggtatttggacgcgatgggcttacttcacgatgaattacaagcaaccggcgcaacctttatcggttactggccaaatgaaggctacgaatttgaagcatcgaaagcactgattgaagatggcagcaagtttgttggactagcgttagatgaagactcgcagtacgaactgagtgatgagcgcatcgaaaaatggtgtgaacaagttcttgtggagttccacgacacactttaa

SEQ ID NO: 49292 - protein, 172 aa, Vibrio sp. Ex25
MKIGLFYGSTTCYTEMAAEKIRTIIGEDLVDIHNVKETPLSLMADYDLLLLGISTWDFGEIQEDWNAIWQDIATTPLKGKVVALFGLGDQEGYGEWYLDAMGLLHDELQATGATFIGYWPNEGYEFEASKALIEDGSKFVGLALDEDSQYELSDERIEKWCEQVLVEFHDTL

SEQ ID NO: 49293 - DNA, 522 bp, Alteromonadales bacterium TW-7
  CDS (1)..(522): transl_table=11
atgcaaattggtttattttttggctctactacgtgctacaccgaaatggcagcagaaaaaatacgtgaccttattggtgacgatatagttagccttcacaatattaaagacgaaccactaaaaaatgcagagcagtacgactttatcatctttggtatttcaacatgggactttggcgaaatacaagaagactgggagtctaaatgggacgacataaaagacgtaaacctaaatggtaaaaccattgctttatttggcatgggcgaccaacaaggttacggacagtggtttcaagacgctctaggtatgctgcacgacgaaataaacacacaaacatttacacaacttggcttttggccgaacgacagcagctacgagtttgaagcctcaaaggcactcacccccgacggcaaacagtttgtagggctcgcccttgacgaagacagccagtacgagctgagcgatgagcgcatagccagctgggttgagcaagtaatgaccgagtacggtgaaacgctttaa

SEQ ID NO: 49294 - protein, 173 aa, Alteromonadales bacterium TW-7
MQIGLFFGSTTCYTEMAAEKIRDLIGDDIVSLHNIKDEPLKNAEQYDFIIFGISTWDFGEIQEDWESKWDDIKDVNLNGKTIALFGMGDQQGYGQWFQDALGMLHDEINTQTFTQLGFWPNDSSYEFEASKALTPDGKQFVGLALDEDSQYELSDERIASWVEQVMTEYGETL

SEQ ID NO: 49295 - DNA, 692 bp, Haemophilus parasuis
  CDS (111)..(635): transl_table=11
tggaacaagaagcagcggtaaaaggactgtctagagggcagttaattgaactcattttaaacgattatctcaatggggattccattgaattaagtaaataggtatttcaaatggcagttgtcggtttattttacggtagtgatactggaaacacagaaaatatttctaaaatgattcaaaaacaactaggtgcaaacctagtggatattcgtgatattgcaaaaagcacgaaagaagatattgaagcctacgatttcttattaattggtattccaacgtggtattacggtgaatctcaagcagattgggacgattttatgccgacgttaaaagaaattgattttacaggaaaaatcgtgggtatctttggttgtggtgaccaagaagactatgcagaatatttctgcgatgcaatgggaactgtgcgtgatgttattgaacctaacggtgggactattgtcggtcattggtcaacggaaggttatacttttgagccttcacaagcattagttgatgatgaaacctttgttggcttatgtattgatgaagatcgccagccagaactcaccgaagaacgtgtaaaccgttggtgtaaacaaatttttgatgaaatgtatttagcggaattagcttaatatatctattggaggatatatgtctgaagaaaatgtgaaactgttgaaaaaagtggg

SEQ ID NO: 49296 - protein, 174 aa, Haemophilus parasuis
MAVVGLFYGSDTGNTENISKMIQKQLGANLVDIRDIAKSTKEDIEAYDFLLIGIPTWYYGESQADWDDFMPTLKEIDFTGKIVGIFGCGDQEDYAEYFCDAMGTVRDVIEPNGGTIVGHWSTEGYTFEPSQALVDDETFVGLCIDEDRQPELTEERVNRWCKQIFDEMYLAELA

SEQ ID NO: 49297 - DNA, 528 bp, Edwardsiella tarda
  CDS (1)..(528): transl_table=11
atggcaatcgtaggtattttctttggcagcgacaccggcaacacggaaaacattgctaagatgatccagaagcaactgggtaaagacgttgctgaagttcatgacattgccaagagcagcaaggaagaccttgaggcgtttgatattcttctgctgggtatccccacctggtactacggcgaagcgcagtgcgactgggatgacttcttcccctccctggaggagatcgacttctccggtaagctggtagcgctgttcggctgcggcgatcaggaagactatgccgagtacttctgcgatgcaatgggcaccatccgcgagctggttgaagcgcgcggcgcgaccatcgtcggccactggccgaccgccggataccactttgaagcctccaaggcgctggtcgacagcaacaccttcgtcggcctggccatcgatgaggatcgccagccagagctgaccgccgagcgcgtagacgcctgggtcaagcagctcagcgcagagatgcatctggccgatatcctgggctaa

SEQ ID NO: 49298 - protein, 175 aa, Edwardsiella tarda
MAIVGIFFGSDTGNTENIAKMIQKQLGKDVAEVHDIAKSSKEDLEAFDILLLGIPTWYYGEAQCDWDDFFPSLEEIDFSGKLVALFGCGDQEDYAEYFCDAMGTIRELVEARGATIVGHWPTAGYHFEASKALVDSNTFVGLAIDEDRQPELTAERVDAWVKQLSAEMHLADILG

SEQ ID NO: 49299 - DNA, 534 bp, Vibrio harveyi
  CDS (1)..(534): transl_table=11
atggcaagagtaggtatcttcttcggtagcgacacaggtaatactgaagccgttgcaaagatgattcaaaagcaactaggtaaacgactagttcacgttcaagacatcgcaaaaagcagcaaagaagacattgataactttgatcttctgcttctaggtatcccgacttggtactatggcgaagcacaatgtgactgggatgacttcttccctgaacttgagcaaatcgacttctcgacaaagctagttgctatcttcggttgtggtgaccaagaagattacgcagagtacttctgtgatgcaatgggtacagtacgtgatatcgttgaagcgaaaggtggcactattctaggtcacacttcaactgaaggttacgagttcgaagcatctaaagcacttgtagaaggtgatgatagccagtttgtaggtctatgtatcgatgaagaccgtcaaccagaacttactgatgaacgtgttgaaaactgggttaagcaaatctacgaagagatgtgcctagctgagcttgaaggctaa

SEQ ID NO: 49300 - protein, 177 aa, Vibrio harveyi
MARVGIFFGSDTGNTEAVAKMIQKQLGKRLVHVQDIAKSSKEDIDNFDLLLLGIPTWYYGEAQCDWDDFFPELEQIDFSTKLVAIFGCGDQEDYAEYFCDAMGTVRDIVEAKGGTILGHTSTEGYEFEASKALVEGDDSQFVGLCIDEDRQPELTDERVENWVKQIYEEMCLAELEG

SEQ ID NO: 49301 - DNA, 1004 bp, Helicobacter pylori
  CDS (278)..(796): transl_table=11
atgttttttccagttttttgtgggcgttaatcgtggggagcgtttcttttcaagcgagcgagtgggtgaaaacgctgtatgaaaggctttctcattacacttcgttttttgtgataagttttgctcttatagcgcttttaatatggtttttattgaaacgatattcgcgcaaaatgggtttttaagcaagatttttaattaaatgcgctagactacgcccacaagcattcgcatgaaagcgggtgcgttaatatcttaaaaataagggattgagaacatgggaaaaattggtatcttttttgggacagacagcgggaacgctgaagctatcgctgaaaaaatcagcaaggctattggtaatgccgaagtggttgatgtggctaaggcttctaaagcatcaatttatagctttacaaaggttattctagttgctccaacagccggtgcgggcgatttgcaaacagattgggaagactttttaggcacgctagaagcgagcgactttgcgaataaaaccattgggcttgtaggcttaggcgatcaagacacttacagcgaaactttcgccgaaggcattttccacatttatgaaaaagctaaagccggcaaagtggtagggcaaactcccactgatggttatcattttgaagcttctaaagcggtagaaggcggtaaattcgtgggtcttgtgattgatgaagacaatcaagacgatctcactgatgagaggatttcaaaatgggttagaacaagtttaaaggttctttcgcttgatcttttaagccctaagttttaaggctttttttttttaaacttcttttttatatttttgatgctagaaatagacaacccaaccccgctagaatcacactttccttattagaaaaaatccccaaatttttacccccccctccaatccttgaacttgttttagtgaacgaaaaaacccctgccaaaaatcccccggggatttagggggttgccaattacttttccccattttt

SEQ ID NO: 49302 - protein, 172 aa, Helicobacter pylori
MGKIGIFFGTDSGNAEAIAEKISKAIGNAEVVDVAKASKASIYSFTKVILVAPTAGAGDLQTDWEDFLGTLEASDFANKTIGLVGLGDQDTYSETFAEGIFHIYEKAKAGKVVGQTPTDGYHFEASKAVEGGKFVGLVIDEDNQDDLTDERISKWVRTSLKVLSLDLLSPKF

SEQ ID NO: 49303 - DNA, 525 bp, Pasteurella haemolytica
  CDS (1)..(525): transl_table=11
atggcagttgtaggtttattttacggtagcgatacaggcaatacagaaaatatttcaaaaatgattcagaaaaaattaggggctgaattaattgatattcgagacattgccaaaagcacaaaagaagatattgaagcatacgattttctgatgtttgggatcccaacttggtattatggtgaatcgcaagccgattgggacgattttatgcctaccctaaaagagattgattttaacggcaaagtcgttgcaatttttggttgcggtgatcaggaagattatgcagaatatttctgtgatgcaatgggtactgtgcgtgatgtggtagagccaaatggtggtgtgattgttggtcattggccaactgccggttacactttcgaggtttctcaggccttagttgatgatgatacttttgtcggcttatgtattgatgaagatcgtcagcctgaattaaccactgaacgtgttaataaatggtgcgagcagttgaaagaagaaatgtgcttagaccaactcgcataa

SEQ ID NO: 49304 - protein, 174 aa, Pasteurella haemolytica
MAVVGLFYGSDTGNTENISKMIQKKLGAELIDIRDIAKSTKEDIEAYDFLMFGIPTWYYGESQADWDDFMPTLKEIDFNGKVVAIFGCGDQEDYAEYFCDAMGTVRDVVEPNGGVIVGHWPTAGYTFEVSQALVDDDTFVGLCIDEDRQPELTTERVNKWCEQLKEEMCLDQLA

SEQ ID NO: 49305 - DNA, 525 bp, Actinobacillus actinomycetemcomitans
  CDS (1)..(525): transl_table=11
atggctgttgtcggcttattttatggtagtgacacaggcaatacggaaaatattgccaaaatgattcaaaaacaattaggtagtgaattagtcgatattcgcgacatcgcaaaaagcagcaaagaagatattgaagcttacgactttctgctattcggtatcccgacttggtattatggtgaagcgcaatgcgactgggatgatttcttcccgacattggaacaaattgattttacggataaactcgtagcaattttcggttgtggcgaccaagaggattacgcagattatttctgtgatgccatgggaacagtgcgcaacattattgaaccgcacggcgccattatcgtaggcaactggtcaaccgaaggctatagttttgaatcttcacaagcattaatcgacaatgatacctttgtcggcttgtgcattgatgaagatcgccagcctgaattaacatccgaacgtgtaaataaatgggttaaacaagtctatgaagagatgtgcttagccgaattagcttaa

SEQ ID NO: 49306 - protein, 174 aa, Actinobacillus actinomycetemcomitans
MAVVGLFYGSDTGNTENIAKMIQKQLGSELVDIRDIAKSSKEDIEAYDFLLFGIPTWYYGEAQCDWDDFFPTLEQIDFTDKLVAIFGCGDQEDYADYFCDAMGTVRNIIEPHGAIIVGNWSTEGYSFESSQALIDNDTFVGLCIDEDRQPELTSERVNKWVKQVYEEMCLAELA

SEQ ID NO: 49307 - DNA, 1009 bp, Vibrio fischeri
  CDS (311)..(829): transl_table=11
gtcccaatcggctgaaatagaagcacatttatagtgattatcttctaaccactgcaacaacttcactaaatcgtttcgatatgaagctaacgtattttcagacaggccacgctccatccacatggtatctaaaaaacgctccattaatgccatatcattattcatctacttaccacttaacgtatattccagaaaatactggttagaattacagtattaaacaattttacccactttaaatgcaagtttaattttaataatcatttacggtaaactaacgttatatttattcatcgttaaggtaatgaaaatgaaaatcggtcttttttatggttcttcaacttgttataccgaaatggcatctgaaaaaatcagagcttttatcggagaggatcttgttgatgtctttaatattaaagagacaccagtgaccacaatgaatgattacgatcttttattacttgggatttctacatgggattttggtgagatccaagaagattggcagaatgtttgggatgagttagatggcttatctctagatggaaaaaccattgcgttatttggtcttggtgatcaagaaggttatggtgaatggttcttagatgctatgggtttactgcatgacgaattaaaagcaacgaatgctaaattcattggctattggaaaaatgaaggctaccaattcgacgcatcaaaagcattaactgaagatgaatctcactttgttggtttagcactagatgaagacagtcagtatgataaaagtgatgagcgtattgagcagtggtgtgagcaggttttagtagaatatcacgagtcactttagaactagaaacgatacgctttgctagctagagcactgcgttactataaaagaaaagagcgagtgaacttaaacagttatactcgctcttatagtctctaatttctagtccctagtccctagaattatgcattttcagccactaattcgtcttctttcttaccgacaaaacgaacaatgatc

SEQ ID NO: 49308 - protein, 172 aa, Vibrio fischeri
MKIGLFYGSSTCYTEMASEKIRAFIGEDLVDVFNIKETPVTTMNDYDLLLLGISTWDFGEIQEDWQNVWDELDGLSLDGKTIALFGLGDQEGYGEWFLDAMGLLHDELKATNAKFIGYWKNEGYQFDASKALTEDESHFVGLALDEDSQYDKSDERIEQWCEQVLVEYHESL

SEQ ID NO: 49309 - DNA, 525 bp, Aeromonas hydrophila
  CDS (1)..(525): transl_table=11
atggctagtgtaggtctgtttttcggcagcgataccggtaataccgaagctgtcgccaagatgatccagaaagaactgggcaaacaactgattgaagtccgtgacattgccaagagcagcaaggccgacatcgacagcttcgatctgctgatgttcggtatcccgacttggtactatggcgaagcccaggccgactgggacgacttcttccccgagctggaagagatcgacttcaccaacaagctggtcgccatcttcggatgcggcgatcaggaagattatgccgagtacttcctcgacgccatgggcaccctgcgtgacatcgtcgaagccaaaggcgccatcgtcatcggccactggccgaccgccggttacgagttcgaagcctccaaggcgctggtggacgacaagcacttcgtgggtctgggcatcgacgaagatcgccaacccgagatgactgccgagcgcgtcaagggctggtgcaaacagctgcatgaagagatgtgcctggccgagctggagtga

SEQ ID NO: 49310 - protein, 174 aa, Aeromonas hydrophila
MASVGLFFGSDTGNTEAVAKMIQKELGKQLIEVRDIAKSSKADIDSFDLLMFGIPTWYYGEAQADWDDFFPELEEIDFTNKLVAIFGCGDQEDYAEYFLDAMGTLRDIVEAKGAIVIGHWPTAGYEFEASKALVDDKHFVGLGIDEDRQPEMTAERVKGWCKQLHEEMCLAELE

SEQ ID NO: 49311 - DNA, 495 bp, Helicobacter pylori
  CDS (1)..(495): transl_table=11
atgggaaaaattggtatcttttttgggacagacagcgggaacgctgaagctatcgctgaaaaaatcagcaaggctattggtaatgcggaagtgattgatgtggctaaggcttctaaagatcaatttaatagctttacaaaggttattctagtcgctccaacagcgggtgctggcgatttgcaaacggattgggaagactttttaggcacgctagaagcgagcgactttgcgaataaaaccattgggcttgtgggattaggcgatcaagacacttacagcgaaactttcgcagaaggcattttccacatttatgaaaaagctaaagccggtaaagtggtagggcaaactcccactgatggttaccattttgaagcttctaaagcggtagaaggcggtaaattcgtgggtctagtgattgatgaagacaatcaagacgatttgacagacggaagaatttcaaaatgggtagaacaaattaaaggttctttcgcttaa

SEQ ID NO: 49312 - protein, 164 aa, Helicobacter pylori
MGKIGIFFGTDSGNAEAIAEKISKAIGNAEVIDVAKASKDQFNSFTKVILVAPTAGAGDLQTDWEDFLGTLEASDFANKTIGLVGLGDQDTYSETFAEGIFHIYEKAKAGKVVGQTPTDGYHFEASKAVEGGKFVGLVIDEDNQDDLTDGRISKWVEQIKGSFA

SEQ ID NO: 49313 - DNA, 589 bp, Azotobacter chroococcum mcd 1
  CDS (23)..(565): transl_table=11
cacgcagccagaggtttaagttatggccaagattggactcttcttcggtagcaacaccggtaaaacccgcaaggtcgccaagtcgatcaagaagcgtttcgacgacgaaaccatgtccgatgcagtgaacgtcaaccgcgtttccgcggaagacttcgcccagtaccagttcctgatcctgggtaccccgacccttggcgaaggcgaactcccgggcctctcctccgactgcgagaacgagagctgggaagagttcctgccgaaaatcgaaggcctggacttcagcggcaagaccgtggctctgttcggtctgggcgaccaggtcggctatcccgagaacttcctcgatgccatgggcgaactgcattccttcttcaccgagcgcggtgccaaggtcgtaggcgcctggtcgaccgacggctacgagttcgaaggctccaccgcagtggttgacggcaagttcgtcggcctggcgctggatctggacaaccagagcggcaagaccgacgagcgcgtcgctgcctggctggcacagatcgctcccgagttcggcctgtccctgtaagggtcgatccggtcatgcagcttt

SEQ ID NO: 49314 - protein, 180 aa, Azotobacter chroococcum mcd 1
MAKIGLFFGSNTGKTRKVAKSIKKRFDDETMSDAVNVNRVSAEDFAQYQFLILGTPTLGEGELPGLSSDCENESWEEFLPKIEGLDFSGKTVALFGLGDQVGYPENFLDAMGELHSFFTERGAKVVGAWSTDGYEFEGSTAVVDGKFVGLALDLDNQSGKTDERVAAWLAQIAPEFGLSL

SEQ ID NO: 49315 - DNA, 860 bp, Azotobacter vinelandii
  CDS (241)..(783): transl_table=11
gtcgtaaagaactgttgtaaaaacgacaaggcctgcctgcccgccccattcttatcgtcgcatttgcgacaggattttttactgccataaaaaatgcttttaaatcaataagttggtaaatgtgttcggggtttggggagtggtctgcttcttgctgttactcaccggccagccaggtgtacaagcccggagactggcgctccgaccacgaatctcatgcatgcagccagaggttaagttatggccaagattggactcttcttcggtagcaacaccggtaaaacccgcaaggtcgccaagtcgatcaagaagcgtttcgacgacgaaaccatgtccgatgcgctgaacgtcaaccgtgtttccgcggaagacttcgcccagtaccagttcctgattctgggtactccgacccttggcgaaggcgaactccccggtctgtcctccgactgcgaaaacgaaagctgggaagaattcctgccgaagatcgagggcctggatttcagcggcaagaccgtggcgctgttcggcctgggcgatcaggttggctatcccgagaattacctggatgccctgggcgaactgtattccttcttcaaggaccgtggcgccaagatcgtaggctcctggtcgaccgacggctacgagttcgaaagctccgaggccgtggttgacggcaagttcgtcggcctggcgctggatctggacaatcagagcggcaagaccgacgagcgcgttgctgcctggctggcacagatcgctcccgagttcgggctgtccctgtaaaagtcgatccccggtcatgcggtctccgtgcatggccgggtgacttggcatgttttcttttcgtttctctgcggatc

SEQ ID NO: 49316 - protein, 180 aa, Azotobacter vinelandii
MAKIGLFFGSNTGKTRKVAKSIKKRFDDETMSDALNVNRVSAEDFAQYQFLILGTPTLGEGELPGLSSDCENESWEEFLPKIEGLDFSGKTVALFGLGDQVGYPENYLDALGELYSFFKDRGAKIVGSWSTDGYEFESSEAVVDGKFVGLALDLDNQSGKTDERVAAWLAQIAPEFGLSL

SEQ ID NO: 49317 - DNA, 534 bp, Enterobacter agglomerans
  CDS (1)..(534): transl_table=11
atggctaccatcggtattttttttgggtctgataccggacaaacaagaaaagttgcgaagcttatccaccagaaactggacgggattgccgacgcgcccctggatgtccggcgcgcaacccgcgaacagtttttatcctacccggtcctgctgttaggtacgccaacgctgggcgatggtgagctacctggtgtggaggcaggcagtcagtacgactcctggcaggagttcaccaacacgctgtctgaagctgatctgaccggtaagacggtggcattatttgggctaggcgatcagcttaactattccaaaaattttgttagcgcaatgcggatcctgtatgacctcgtcattgcgcgtggcgcctgtgttgtcggtaactggccgcgtgaaggctataaattctcgttttccgctgcactgctggaaaacaatgagtttgtcggcctgccactggatcaggaaaatcaatacgacctgacagaagagcgtattgacagctggctggagaagcttaaaccagcagtgctttga

SEQ ID NO: 49318 - protein, 177 aa, Enterobacter agglomerans
MATIGIFFGSDTGQTRKVAKLIHQKLDGIADAPLDVRRATREQFLSYPVLLLGTPTLGDGELPGVEAGSQYDSWQEFTNTLSEADLTGKTVALFGLGDQLNYSKNFVSAMRILYDLVIARGACVVGNWPREGYKFSFSAALLENNEFVGLPLDQENQYDLTEERIDSWLEKLKPAVL

SEQ ID NO: 49319 - DNA, 495 bp, Helicobacter pylori J99
  CDS (1)..(495): transl_table=11
atgggaaaaattggtatcttttttgggacagacagcgggaacgctgaagctatcgctgaaaaaatcagcaaggctattggtaatgctgaagtgattgatgtggctaaagcttctaaagagcaatttaatggctttacaaaggttattttagtcgctccaacagccggtgcgggcgatttgcaaacagattgggaagactttttaggcacactagaagcgagcgactttgcgaataaaaccattgggcttgtaggcttgggcgatcaagacacttacagcgaaactttcgcggaaggcattttccacatttatgaaaaagctaaagccggcaaagtggtaggacaaactcccactgatggttatcattttgaagcttctaaagcggtagaaggcggtaaattcgtgggtctagtgattgatgaagacaatcaagacgatttgacagatgaaagaattgcaaaatgggtagaacaagttaaaggttctttcgcttaa

SEQ ID NO: 49320 - protein, 164 aa, Helicobacter pylori J99
MGKIGIFFGTDSGNAEAIAEKISKAIGNAEVIDVAKASKEQFNGFTKVILVAPTAGAGDLQTDWEDFLGTLEASDFANKTIGLVGLGDQDTYSETFAEGIFHIYEKAKAGKVVGQTPTDGYHFEASKAVEGGKFVGLVIDEDNQDDLTDERIAKWVEQVKGSFA

SEQ ID NO: 49321 - DNA, 495 bp, Helicobacter pylori
  CDS (1)..(495): transl_table=11
atgggaaaaattggtatcttttttgggacagacagcgggaacgctgaagctatcgctgaaaaaatcagcaaggctattggtaatgccgaagtggttgatgtggctaaggcttctaaagagcaatttaatagctttacaaaggttattttagtcgctccaacagctggtgcgggtgatttgcaaacagattgggaagactttttaggcacactagaagcgagcgattttgcgactaaaaccattgggcttgtaggcttgggcgatcaagacacttacagcgaaacttttgcggaaggcattttccacatttatgaaaaagctaaagccggcaaagtggtagggcaaactcccactgatggttatcattttgaagcttctaaagcggtagaaggcggtaaattcgtgggtcttgtgattgatgaagacaatcaagacgatctcactgatgagaggatttcaaaatgggtagaacaagttaaaggttctttcgcttaa

SEQ ID NO: 49322 - protein, 164 aa, Helicobacter pylori
MGKIGIFFGTDSGNAEAIAEKISKAIGNAEVVDVAKASKEQFNSFTKVILVAPTAGAGDLQTDWEDFLGTLEASDFATKTIGLVGLGDQDTYSETFAEGIFHIYEKAKAGKVVGQTPTDGYHFEASKAVEGGKFVGLVIDEDNQDDLTDERISKWVEQVKGSFA

SEQ ID NO: 49323 - DNA, 780 bp, Klebsiella pneumoniae
  CDS (181)..(711): transl_table=11
ccgccctgcgcagccagggaaaagtctaactttccgcgaaaaacccgcattcatgtagcagagtgtgcagtcgggcgtgattgctgtttccgcgcccttgcctgttctgctatgattgccgttatctatgggcattgcgtccctaccacatcatttaagtttcaagaggttattttactcatggcaatcatcggcatcttttttggcagcgacaccggcaacaccgaaaatattgcaaaaatgattcaaaagcagcttggtaaagatgttgctgatgttcacgacattgcaaaaagcagcaaagaagacctggaagcccacgacatcctgctgctcggtatcccgacctggtactacggtgaagcgcagtgtgactgggatgacttcttcccgacgctggaagagatcgacttcaatggcaaactggtggcgctgttcggctgcggcgaccaggaagattacgcagaatacttctgcgacgcgctgggcaccatccgcgacatcattgagccgcgcggcgcgaccatcgtcggtcactggccaacggcggggtatcattttgaggcttccaaaggcctggcggatgacgaccacttcgtcggcctcgccatcgatgaagaccgccagccggagctgaccaacgagcgcgttgagaaatgggtgaagcaggttgccgaagagctgcacctcgaagaaatcaaaaacgcctgatgattaacggcgcaatcattgagttgcgccgcattaatagacaaaagcaatcaaactaatagctacaag

SEQ ID NO: 49324 - protein, 176 aa, Klebsiella pneumoniae
MAIIGIFFGSDTGNTENIAKMIQKQLGKDVADVHDIAKSSKEDLEAHDILLLGIPTWYYGEAQCDWDDFFPTLEEIDFNGKLVALFGCGDQEDYAEYFCDALGTIRDIIEPRGATIVGHWPTAGYHFEASKGLADDDHFVGLAIDEDRQPELTNERVEKWVKQVAEELHLEEIKNA

SEQ ID NO: 49325 - DNA, 777 bp, Rhodobacter capsulatus
  CDS (141)..(689): transl_table=11
cattgttgagtaatcactttcttttgttagattcctgacaattttgcccgacaatgggcttcgaaaccgcgcgcaaagcctggcacgaagcttgcgaagcaactgcggggcatcaggcccgtcagccaaaaggggacatcatggcgaagatcggactcttcttcggatcggacaccggaaccacgcgcaagattgccaagcagatcaaggacatgttcgacgatgaggtgatggccaagccgctcaacgtcaaccgcgctgatgtggccgatttcatggcttatgactttctgatccttggcacgccgacgctgggcgacggacaattgccggggctgagcgccaatgccgcctcggaaagctgggaggaattcctgcccaggatcgccgatcaggatttcagcggcaagacgatcgcgctgttcgggctgggcgatcaggtcacctatccgctggaattcgtcaatgccttgttcttcctgcatgaattcttctcggatcggggggcgaacgtggtcgggcgctggcctgccaaggggtatgggttcgaagactcgctcgccgtggtggagggcgaattcctgggccttgccctggatcaggacaatcaggcggcgctgacgcccgagcggctcaagggctggctgtcgctgatcgcggccgatttcggccttgtcctgcctgcatgatcgcttgccccggaaaggccccccccatgaaagacctgcccatgaaagacctgcccctgtcgccccgcgaccgatgccccgcgtcccg

SEQ ID NO: 49326 - protein, 182 aa, Rhodobacter capsulatus
MAKIGLFFGSDTGTTRKIAKQIKDMFDDEVMAKPLNVNRADVADFMAYDFLILGTPTLGDGQLPGLSANAASESWEEFLPRIADQDFSGKTIALFGLGDQVTYPLEFVNALFFLHEFFSDRGANVVGRWPAKGYGFEDSLAVVEGEFLGLALDQDNQAALTPERLKGWLSLIAADFGLVLPA

SEQ ID NO: 49327 - DNA, 531 bp, Salmonella typhimurium
  CDS (1)..(531): transl_table=11
atggcaatcactggcatctttttcggcagcgacaccggtaataccgaaaatatcgcaaaaatgattcaaaaacagcttggtaaagacgttgccgatgtgcatgacattgcaaaaagcagtaaagaagacctggaagggtatgacattctgctgctgggcatcccaacctggtattatggcgaagcgcaatgtgactgggatgacttcttcccgactctcgaagagattgactttaacggtaagctggtggcgctgtttggctgtggcgatcaggaagactacgcggaatacttctgtgatgcgctgggcacgattcgcgacattattgagccgcgcggcgccacgattgtgggtcactggccaaccgcaggctatcattttgaagcctctaaaggtctggctgacgacgatcattttgtcggtctggcgattgacgaagaccgtcagcctgaactgaccgccgagcgtgttgaaaaatgggttaagcaagtttcggctgaattgcacctcgacgacatcctcaacgcctaa

SEQ ID NO: 49328 - protein, 176 aa, Salmonella typhimurium
MAITGIFFGSDTGNTENIAKMIQKQLGKDVADVHDIAKSSKEDLEGYDILLLGIPTWYYGEAQCDWDDFFPTLEEIDFNGKLVALFGCGDQEDYAEYFCDALGTIRDIIEPRGATIVGHWPTAGYHFEASKGLADDDHFVGLAIDEDRQPELTAERVEKWVKQVSAELHLDDILNA

SEQ ID NO: 49329 - DNA, 531 bp, Shigella flexneri
  CDS (1)..(531): transl_table=11
atggctatccatggcatctttttcggcagcgacaccggtaataccgaaaatatcgcaaaaatgattcaaaaacagcttggtaaagacgttgccgatgtccatgacattgcaaaaagcagcaaagaagatctggaagcttacgacattctgctgctgggcatcccaacctggtattacggcgaagcgcagtgtgactgggatgacttcttcccgactctcgaagagattgatttcaatggtaaactggttgcgctgtttggttgtggtgaccaggaagattacgccgaatatttctgcgacgcattgggcaccatccgcgacatcattgaaccgcgcggcgcaaccatcgatgctgactggccaactgcgggctatcatttccaagcatcaaaaggtctggcggatgacgaccactttgtcggtctggctatcgacgaagaccgtcacccggaactgaccgctgatcgtgtagaaaaatgggttaaacagatttctgaagagttgcatctcgacgaaattcttaatgcctga

SEQ ID NO: 49330 - protein, 176 aa, Shigella flexneri
MAIHGIFFGSDTGNTENIAKMIQKQLGKDVADVHDIAKSSKEDLEAYDILLLGIPTWYYGEAQCDWDDFFPTLEEIDFNGKLVALFGCGDQEDYAEYFCDALGTIRDIIEPRGATIDADWPTAGYHFQASKGLADDDHFVGLAIDEDRHPELTADRVEKWVKQISEELHLDEILNA

SEQ ID NO: 49331 - DNA, 516 bp, Trichodesmium erythraeum
  CDS (1)..(516): transl_table=11
atgtcaaaaattggtctttttgtcggtaccacaacaggtaaaactgaagaagctgcagaaaagattaaggaggaatttggtggtgacgatgtagttactatccatgacatatccgaggcaagtcccgaagattttgatggttatcaaaatgtaattattggttgtcctacttgggatgttggtgaactacaaagtgactggagtggtttctatagtgaagaactagataatgtaaaattcaccggcaaaaaagtggcctattttggtacaggtgatcaaataggatatgctgataattttcaggatgccatgggtattttggaggaaaaaatcactgggcttggaggtactactattgggtcttggtctacagagggttatgatcatgaagattccaaagcagtcaaaaatggcaagtttgtaggtttagctctagatgatgataatcaagccgatttaacagatgaacggatcaaagaatgggtaaagcaactgaaaacagaatttggggtttag

SEQ ID NO: 49332 - protein, 171 aa, Trichodesmium erythraeum
MSKIGLFVGTTTGKTEEAAEKIKEEFGGDDVVTIHDISEASPEDFDGYQNVIIGCPTWDVGELQSDWSGFYSEELDNVKFTGKKVAYFGTGDQIGYADNFQDAMGILEEKITGLGGTTIGSWSTEGYDHEDSKAVKNGKFVGLALDDDNQADLTDERIKEWVKQLKTEFGV

SEQ ID NO: 49333 - DNA, 534 bp, Enterobacter agglomerans
  CDS (1)..(534): transl_table=11
atggctaccatcggtattttttttgggtctgataccggacaaacaagaaaagttgcgaagcttatccaccagaaactggacgggattgccgacgcgcccctggatgtccggcgcgcaacccgcgaacagtttttatcctacccggtcttactgttaggtacgccaacactgggcgatggggagctacctggtgtggatgcaggcagtcagtacgactcctggcaggagttcaccaacacgctgtctgaagctgatctgagcggtaagacggtggcattgtttgggctgggcgatcagcttaactattccaaaaattttgttagcgcaatgcggatcctctatgacctcgtcattgcgcgtggcgcctgtgttgtcggtaactggccgcgtgaaggctataaattctcgttttccgctgcactgctggaaaacaatgagtttgtcggcctgccactggatcaggaaaatcaatacgacctgacagaagagcgtattgacacctggctggataagcttaaacaagcagtgctttga

SEQ ID NO: 49334 - protein, 177 aa, Enterobacter agglomerans
MATIGIFFGSDTGQTRKVAKLIHQKLDGIADAPLDVRRATREQFLSYPVLLLGTPTLGDGELPGVDAGSQYDSWQEFTNTLSEADLSGKTVALFGLGDQLNYSKNFVSAMRILYDLVIARGACVVGNWPREGYKFSFSAALLENNEFVGLPLDQENQYDLTEERIDTWLDKLKQAVL

SEQ ID NO: 49335 - DNA, 629 bp, Klebsiella pneumoniae
  CDS (91)..(621): transl_table=11
ccgcggtagtgcaaagcaacctggcacagccttcgcaatacccctgcgagaacgcgtattttcaacccccttttccgacaggagcgcaacatggcgaacattggtattttctttggcaccgataccggtaaaacccgcaaaatcgcgaaaatgatccataagcaactgggcgagctggcggatgccccggtcaacattaaccgcacgacgctggacgactttatggcctatccggtgctgctgctgggcacgccgacgctcggcgacggccagctgccggggctggaggccggatgcgaaagcgagtcatggagcgaatttatcagcggcctcgacgacgccagcctgaaagggaaaaccgtggcgctgttcggcctcggcgatcagagaggctatccggacaacttcgtcagcgggatgcgcccgctgttcgacgccctgagcgcgcgcggcgcgcagatgattggcagctggccaaatgagggttatgaattcagcgcgtcctcggcgctggaaggcgaccgctttgttgggctggtgctggatcaggataaccagttcgaccagaccgaagcgcgtctggcgagctggcttgaggagattaaacgcaccgtgctgtaggcgttaac

SEQ ID NO: 49336 - protein, 176 aa, Klebsiella pneumoniae
MANIGIFFGTDTGKTRKIAKMIHKQLGELADAPVNINRTTLDDFMAYPVLLLGTPTLGDGQLPGLEAGCESESWSEFISGLDDASLKGKTVALFGLGDQRGYPDNFVSGMRPLFDALSARGAQMIGSWPNEGYEFSASSALEGDRFVGLVLDQDNQFDQTEARLASWLEEIKRTVL

SEQ ID NO: 49337 - DNA, 24 bp, Artificial sequence
  primer
atgacaaaaattggacttttttac

SEQ ID NO: 49338 - DNA, 27 bp, Artificial sequence
  primer
ttaggattgcaaaattggtttaatttc

SEQ ID NO: 49339 - protein, 173 aa, Artificial sequence
  consensus sequence
  Variant (2)..(2): Xaa in position 2 is any amino acid
  Variant (4)..(4): Xaa in position 4 is any amino acid
  Variant (6)..(7): Xaa in position 6 to 7 is any amino acid
  Variant (10)..(10): Xaa in position 10 is any amino acid
  Variant (12)..(14): Xaa in position 12 to 14 is any amino acid
  Variant (16)..(17): Xaa in position 16 to 17 is any amino acid
  Variant (19)..(45): Xaa in position 19 to 45 is any amino acid
  Variant (46)..(51): Xaa in position 46 to 51 is any or no amino acid
  Variant (53)..(54): Xaa in position 53 to 54 is any amino acid
  Variant (56)..(58): Xaa in position 56 to 58 is any amino acid
  Variant (60)..(64): Xaa in position 60 to 64 is any amino acid
  Variant (65)..(73): Xaa in position 65 to 73 is any or no amino acid
  Variant (75)..(86): Xaa in position 75 to 86 is any amino acid
  Variant (87)..(90): Xaa in position 87 to 90 is any or no amino acid
  Variant (92)..(93): Xaa in position 92 to 93 is any amino acid
  Variant (95)..(95): Xaa in position 95 is any amino acid
  Variant (98)..(98): Xaa in position 98 is any amino acid
  Variant (102)..(103): Xaa in position 102 to 103 is any amino acid
  Variant (105)..(107): Xaa in position 105 to 107 is any amino acid
  Variant (109)..(110): Xaa in position 109 to 110 is any amino acid
  Variant (112)..(120): Xaa in position 112 to 120 is any amino acid
  Variant (121)..(122): Xaa in position 121 to 122 is any or no amino acid
  Variant (124)..(127): Xaa in position 124 to 127 is any amino acid
  Variant (129)..(133): Xaa in position 129 to 133 is any amino acid
  Variant (134)..(134): Xaa in position 134 is any or no amino acid
  Variant (137)..(137): Xaa in position 137 is any amino acid
  Variant (139)..(140): Xaa in position 139 to 140 is any amino acid
  Variant (142)..(148): Xaa in position 142 to 148 is any amino acid
  Variant (149)..(151): Xaa in position 149 to 151 is any or no amino acid
  Variant (153)..(153): Xaa in position 153 is any amino acid
  Variant (156)..(157): Xaa in position 156 to 157 is any amino acid
  Variant (159)..(161): Xaa in position 159 to 161 is any amino acid
  Variant (163)..(165): Xaa in position 163 to 165 is any amino acid
  Variant (167)..(168): Xaa in position 167 to 168 is any amino acid
  Variant (170)..(172): Xaa in position 170 to 172 is any amino acid
GXFXGXXTGXTXXXAXXIXXXXXXXXXXXXXXXXXXXXXXXXXXXXXXXXXGXXTXXXGXXXXXXXXXXXXXXWXXXXXXXXXXXXXXXXKXXAXFGXGDQXXYXXXFXXAXXXXXXXXXXXGXXXXGXXXXXXGYXFXXSXXXXXXXXXXFXGLXXDXXXQXXXTXXRXXXW

SEQ ID NO: 49340 - protein, 22 aa, Artificial sequence
  protein pattern
  Variant (2)..(3): Xaa in position 2 to 3 is any amino acid
  Variant (5)..(5): Xaa in position 5 is any amino acid
  Variant (8)..(8): Xaa in position 8 is Gln or Ser
  Variant (9)..(10): Xaa in position 9 to 10 is any amino acid
  Variant (12)..(12): Xaa in position 12 is Ala, Gly, Pro, Ser or Thr
  Variant (13)..(14): Xaa in position 13 to 14 is any amino acid
  Variant (15)..(15): Xaa in position 15 is Phe or Tyr
  Variant (16)..(16): Xaa in position 16 is any amino acid
  Variant (17)..(17): Xaa in position 17 is Asp, Asn or Ser
  Variant (18)..(18): Xaa in position 18 is Ala, Gly or Ser
  Variant (19)..(19): Xaa in position 19 is Ile, Leu, Met or Val
  Variant (20)..(21): Xaa in position 20 to 21 is any amino acid
  Variant (22)..(22): Xaa in position 22 is Ile, Leu or Val
AXXGXGDXXXYXXXXXXXXXXX

SEQ ID NO: 49341 - protein, 20 aa, Artificial sequence
  protein pattern
  Variant (3)..(3): Xaa in position 3 is Ala, Cys, Gly, Pro or Val
  Variant (4)..(4): Xaa in position 4 is Ile or Leu
  Variant (6)..(12): Xaa in position 6 to 12 is any amino acid
  Variant (14)..(15): Xaa in position 14 to 15 is any amino acid
  Variant (17)..(17): Xaa in position 17 is Ile, Leu or Val
  Variant (18)..(19): Xaa in position 18 to 19 is any amino acid
GLXXDXXXXXXXTXXRXXXW

SEQ ID NO: 49342 - DNA, 1209 bp, Synechocystis sp.
  CDS (1)..(1209): transl_table=11
atggtaaaggggaaacgcatcctaatcggggtgggtggcggcattgcggcctataaaatctgtgaggtggtgtcccaactattccagcaaggggcggaggtgcgggtaatcctcactgccgaagccgaaaaatttgttactcccttgacctttaccaccctggctcgccatcccgcttacggcgacgcagatttttggcagcccatacatcaccgtcccctccatattgacctgggggaatgggcggatattttcctgattgctcccctcacggcccacactttggcgaaactaggccatggttttgccgatgatctactcagcaatacggtgttagcctccagttgtccgatccttttagcccccgccatgaatacggatatgtgggagcaggaagcggtgcaaaggaatttacaacaattgctgggcgatcgccgttatcatctgttagcccccaatgggggactgttggcctgtgaccggcggggagtggggcgtttggcggaaccggcgcaaattatgcatcgactgcaagcactgctgttcaccggaggtcaggaagatttacggggtaaaaggattcttatcaccgctgggggcacccaggaatatctcgatgcagtgcggtttattggtaatccgtccaccggaaaaatgggtttagctctggcccagtcggccggcgatcggggggcaagggtgactctcatccatggccccataggggatttgcccatacccatgggagtaatcagtatggcggtggtcaacgccgagcaaatggagcaagccttggcccaacaagctcccttggcggattggattgtgatggccgccgctgtggccgatgttaaaccggctcaaacatggacaggcaaaatagctaaacaggatttacccgacagtttgccgttggctccggtaccggatttaattgcccaggtgagcaaacaaaaacggccccatcaattgctagtaggttttgctgcccaagcgggagatattgttaccccagccaaagaaaagttgcagaggaaaaatctagatgtaattgttgccaatcccattgatcagccccaatcaggctttggcaccgacagtaatcaagcggtaattattgaccgccacggttcccaaacggcgatcgccccttgttcaaagctggccatggcccaccgcatttggcaatatctgttggaacggatttaa

SEQ ID NO: 49343 - protein, 402 aa, Synechocystis sp.
MVKGKRILIGVGGGIAAYKICEVVSQLFQQGAEVRVILTAEAEKFVTPLTFTTLARHPAYGDADFWQPIHHRPLHIDLGEWADIFLIAPLTAHTLAKLGHGFADDLLSNTVLASSCPILLAPAMNTDMWEQEAVQRNLQQLLGDRRYHLLAPNGGLLACDRRGVGRLAEPAQIMHRLQALLFTGGQEDLRGKRILITAGGTQEYLDAVRFIGNPSTGKMGLALAQSAGDRGARVTLIHGPIGDLPIPMGVISMAVVNAEQMEQALAQQAPLADWIVMAAAVADVKPAQTWTGKIAKQDLPDSLPLAPVPDLIAQVSKQKRPHQLLVGFAAQAGDIVTPAKEKLQRKNLDVIVANPIDQPQSGFGTDSNQAVIIDRHGSQTAIAPCSKLAMAHRIWQYLLERI

SEQ ID NO: 49344 - DNA, 1215 bp, Archaeoglobus fulgidus DSM 4304
  CDS (1)..(1215): transl_table=11
gtgttaagcgtgcacttggagaggataagggggaggagaagcagaaagcttgagaggaaaaagatagtactcggtgttacgggcagcattgcggcagttgagacggttaagcttgcaagggagcttgttaggagaggggctgacgttacagcggtgatgagcagggctgcaaggaaaattattcatccctacgctctcgagtttgccacggggaagagagtggtcacggagataacggggagcatagagcacgtcaacctcctcggggagtacggggatgcggacctgtttctgattgcaccctgcacggccaacaccatctccaagattgctcagggaattgacgacacacccgtcacgaccttcgcaacaacagctttgggctcagggaagccgataataatcgtccctgcgatgcacgaggccatgatgagaaacaaggcagttctggagaacattcagaggctaattgacatgggcatcgagttcgtccagccaaggatagaggaggggaaggcaaagttcccaagcactgaaacgatctgtctgcacgtggagagggagctttatccgaaggaaatgaaggggaagagggttgttgtaacttccggtccaacttacgagcagatcgacccgataaggttcatcagcaacaaaagctcgggcagaatggggcttgagatagcccttgaattctggaggagaggggcggatgttgtacacgtaacctcaaagccctccggcatgagcctgccgaattacaaggagataagggtgtggtcggtagaggacatgatgaaggcggttctttacgaaatcggaaagggatgcgacctgtttgtatcctccgccgctgcggcagacttcatcgttgacgcggaagcgaagaagatcaagacagctcctgagctggttttaaagctgaaggagtctccgaaaatcattaaggaagtaaggaagatttacagcgggcacatcatcggcttcaaggccgaaacgggcatgagtgatgatgagctcttgaaggtggcatcagagaagatggccgacgacaacctgaacatggttgttgcgaacgacgttcttgagagggggatggggacggaagacactagagtgctcattttaactccgaaaaggcaggagtgggttgaggggcttaagcagcacgttgcagagagaattgttgaggcttaccttgaagattgcctatga

SEQ ID NO: 49345 - protein, 404 aa, Archaeoglobus fulgidus DSM 4304
MLSVHLERIRGRRSRKLERKKIVLGVTGSIAAVETVKLARELVRRGADVTAVMSRAARKIIHPYALEFATGKRVVTEITGSIEHVNLLGEYGDADLFLIAPCTANTISKIAQGIDDTPVTTFATTALGSGKPIIIVPAMHEAMMRNKAVLENIQRLIDMGIEFVQPRIEEGKAKFPSTETICLHVERELYPKEMKGKRVVVTSGPTYEQIDPIRFISNKSSGRMGLEIALEFWRRGADVVHVTSKPSGMSLPNYKEIRVWSVEDMMKAVLYEIGKGCDLFVSSAAAADFIVDAEAKKIKTAPELVLKLKESPKIIKEVRKIYSGHIIGFKAETGMSDDELLKVASEKMADDNLNMVVANDVLERGMGTEDTRVLILTPKRQEWVEGLKQHVAERIVEAYLEDCL

SEQ ID NO: 49346 - DNA, 1305 bp, Mesorhizobium loti MAFF303099
  CDS (1)..(1305): transl_table=11
ttgcgcgaactgaccagcacgcacaatgcggcgaccccggttgcgacccctgcaggcaggacccttccgcagggtacgctttccggcaagcgcatcctgctcatcatcggcggcggcatcgccgcctacaaggcgctcgacctgatccgccggttgcgcgagcgcggtgcggcggtgcgggtggtgatgacagcggctgcacgggaattcgtcaccaccctgtcggtaggcgcgctgtcgaccgaccacgtcttcaccgaactgttcgaccgcaatgacgagcatgatgtcggccatatcaggctgtcgcgcgaggctgatcttctggtcgtggcgcccgccaccgccgatctgatggccaagctcgccaacggccatgccaacgatctcgcctccaccgtgctgctggccaccgacaagccggtgctgatggcgccggcgatgaatccgaaaatgtggtcgcatgccgcgacccgccgcaaccgtgcgaccttgggcaaggacggcgtcactttcgtcggcccggccaggggcgagatggccgaaagcaatgaggcaggcgaaggccgcatggccgaaccgctggagatcgtcgccgcggtcgaggcgcggctcgatgccggccccaggccgttggcagggcgcaagatcatcgtcacctccggcccgacgcacgaaccgatcgacccggtgcgctatatcgccaaccgttcctccggcaagcagggccatgccatcgccgcggcgttggcgaggcttggcgccgatgtgcacctcgtctccggtcctgtaagcatcgccgacccagccggtgtgaagaccattcatgtcgagcgcgcgcaagagatgcgcgatgcggttgaacagcttctgcccgccgacgccgcggtgttcgtcgccgccgtcgccgactggcgcagcgagaattcggccgacgagaagatcaagaaggtggcgggtgaaggaccgccagtgctgcgcatgatcgagaaccccgacatccttgccggcgtcggccatcacagccagcggcccggcttggtcgtcggcttcgccgccgagacgcaggatcttttgcgcaacgcccaggccaagctcgcgaagaaaggcgccgacctgatcgtcgccaacgatgtgtcgcacgaaagcggcatcggcccttcaggcgtcatgggcggcgatcgcaaccgggtgcggatcgtgtcgaaggccggcgtcgaggaatggcctgagatgaccaaggacgaggtggcggcgcggctcgccaccttcattgccgagcggctgaaaacgatcgtcgtttga

SEQ ID NO: 49347 - protein, 434 aa, Mesorhizobium loti MAFF303099
MRELTSTHNAATPVATPAGRTLPQGTLSGKRILLIIGGGIAAYKALDLIRRLRERGAAVRVVMTAAAREFVTTLSVGALSTDHVFTELFDRNDEHDVGHIRLSREADLLVVAPATADLMAKLANGHANDLASTVLLATDKPVLMAPAMNPKMWSHAATRRNRATLGKDGVTFVGPARGEMAESNEAGEGRMAEPLEIVAAVEARLDAGPRPLAGRKIIVTSGPTHEPIDPVRYIANRSSGKQGHAIAAALARLGADVHLVSGPVSIADPAGVKTIHVERAQEMRDAVEQLLPADAAVFVAAVADWRSENSADEKIKKVAGEGPPVLRMIENPDILAGVGHHSQRPGLVVGFAAETQDLLRNAQAKLAKKGADLIVANDVSHESGIGPSGVMGGDRNRVRIVSKAGVEEWPEMTKDEVAARLATFIAERLKTIVV

SEQ ID NO: 49348 - DNA, 1206 bp, Pyrococcus abyssi GE5
  CDS (1)..(1206): transl_table=11
atgctcagccacattaagcttatctacgctacaaagagcaggaaacttgttggcaaaaaaatagttcttgcaatcccaggaagcatagcggctgtggagtgcgtaaagcttgctagagaactgataaggcacggagctgaggttcatgcagtaatgagccccagcgcgacgaagataattcatccttatgcaatggaatttgccactgggaatccagttataactgagataacaggatccatagagcacgttgaattagctggagagcatgagaataaagccgatttaatcttggtttgtccagctaccgctaacacgatatcgaagatagcctgcgggatagacgataccccagtaactacggtagtcactaccgccttcccacacatcccaataatgatagctccagcgatgcacgagagcatgtacaagcatccgatagttagggagaacatagagaagctaaagaagcttggggttgagttcataggccccaggatagaggagggtaaagcgaaagtagctacaatagatgagattgtctacagggtcattaagaagcttcatcccaagaccttggaagggaagagggttctaattaccgcgggagccaccagggagtatatagatcccataaggttcataacgaatgccagtagcggcaaaatgggtgttgcactagccgaggaagccgaatttaggggagcggaggttacgctgataagaactaggggtagcgttaaaagtttcgttgagaatcaaatcgaggttgaaactgtagaagagatgctcggggcaatagaggaagagctcaccaagaagaagtatgacgttgtgataatggcggcagctgtcagcgattttaagccaaagattaaggcgaaagagaagataaagagtgacaagtcaataacactagaactagttccgaatccaaagataataaggaaaattaaggagattcaaagcgacgtattcctggtgggatttaaggctgaaacatccatggagaaacttatcagcgaggctaagaagcaaatagagagcgcgggaagtgatctagtgattggcaataccctcgaagcatttggaagtgaggaaagtaaggtggttatagtagggaaggacttcgtgaaagagctacccaggatgaaaaagagggaacttgctgagagaatttgggatgaaatagaaaagaaaatttaa

SEQ ID NO: 49349 - protein, 401 aa, Pyrococcus abyssi GE5
MLSHIKLIYATKSRKLVGKKIVLAIPGSIAAVECVKLARELIRHGAEVHAVMSPSATKIIHPYAMEFATGNPVITEITGSIEHVELAGEHENKADLILVCPATANTISKIACGIDDTPVTTVVTTAFPHIPIMIAPAMHESMYKHPIVRENIEKLKKLGVEFIGPRIEEGKAKVATIDEIVYRVIKKLHPKTLEGKRVLITAGATREYIDPIRFITNASSGKMGVALAEEAEFRGAEVTLIRTRGSVKSFVENQIEVETVEEMLGAIEEELTKKKYDVVIMAAAVSDFKPKIKAKEKIKSDKSITLELVPNPKIIRKIKEIQSDVFLVGFKAETSMEKLISEAKKQIESAGSDLVIGNTLEAFGSEESKVVIVGKDFVKELPRMKKRELAERIWDEIEKKI

SEQ ID NO: 49350 - DNA, 1206 bp, Pyrococcus horikoshii OT3
  CDS (1)..(1206): transl_table=11
atgcttaaccatgttaagcggatctatgccaaaaagagtagaaaacttgttggtaaaaagatagtccttgcaattccaggaagtatagcagctgtagaatgcgtaaagttggcaagagaactgatacggcatggagctgaggttcacgctgtcatgacgcctagtgcgactaagataattcatccttatgcaatggagtttgcaactggtaatcccgttataacggaaattactgggtttatagaacacgtcgaacttgcgggggagcatgaaaacaaggccgatcttatactagtttgcccggcaaccgcaaacacgatatcaaagatagcttgcggaatagatgataccccagtaacaacggttgttactacggcttttccacacattccaataatgatagctcctgcaatgcacgagagtatgtacaagcatcccatagtaagggagaacatagagaaattgaagaagctgggagttgagtttatagggcctagaattgaagaaggaaaagccaaggttgcaagcatagatgagatagtttacagggttataaggaaacttcatcctaaaactctaaagggaaaaagagttctcgtaacggccggagctactagggaatacatagatccaataaggttcataacgaatgcaagcagtggaaagatgggggtagcattagctgaagaagccgagtttagaggagctgaagttactttaataaaaactaaaggaagcgtgaatagctttgttgaaaatcaaattcaagttgaaaccgttgaggaaatgctcgcggcaatagagaaggagttaaccgaaaagaagtatgatgtagttataatggcagctgcagtaagtgactttaagcccaaaataaaggcagaggataagataaagagtaataagtcgataactatagaactcgttcctaatcctaagataatagataggattaaagagctacagcccgatgtgttcctagtaggttttaaggctgaaaccacaatggaaaaacttattcaggaggccaagaagcaaatagagagagctaaaagtgatatagtcattggaaatacgttggaagcctttggaagtgacgagagtaaggttatcatcattggaagaaactttgagaaagaacttccaaaaatgaataagagggagttagctgagagaatatgggatgaaatagaaaaaagactttaa

SEQ ID NO: 49351 - protein, 401 aa, Pyrococcus horikoshii OT3
MLNHVKRIYAKKSRKLVGKKIVLAIPGSIAAVECVKLARELIRHGAEVHAVMTPSATKIIHPYAMEFATGNPVITEITGFIEHVELAGEHENKADLILVCPATANTISKIACGIDDTPVTTVVTTAFPHIPIMIAPAMHESMYKHPIVRENIEKLKKLGVEFIGPRIEEGKAKVASIDEIVYRVIRKLHPKTLKGKRVLVTAGATREYIDPIRFITNASSGKMGVALAEEAEFRGAEVTLIKTKGSVNSFVENQIQVETVEEMLAAIEKELTEKKYDVVIMAAAVSDFKPKIKAEDKIKSNKSITIELVPNPKIIDRIKELQPDVFLVGFKAETTMEKLIQEAKKQIERAKSDIVIGNTLEAFGSDESKVIIIGRNFEKELPKMNKRELAERIWDEIEKRL

SEQ ID NO: 49352 - DNA, 1239 bp, Aeropyrum pernix K1
  CDS (1)..(1239): transl_table=11
ttgagcgactatgttacacatccttccatggacatcctgtcggaggtcaacaactatattgaaggaaagacgatagtcctgggtgtgacggctagcgtcgccctctaccgctcgctagacctggctcgctggctgctgagaaggggtgctagggtaataactgttatgacgccggaggccgctaagctagtatcgccggagatgttccattgggcttctggcgggcctgtatacaccgggttcaccgggggggtcgagcacatatcaatagccagagccgcctccgccatggttgtggctccggctacactctccaccctggctaagatcgcgcatggggtagttgataatcctgtggctctagctgccgtgtcgataatggggtatggtaagcctgttattgctgtcccggcgatgcatggcaacatgtatgagagcccccaggctagggaagttgtagataggctcagaagccagggagtgctagttgttgaccccaagattgaggggggagtggcgaagtatcctgatactcatgctgtgggaaggataacagctgctcaggctaggaagggcctccgcgacctcgaaggcattagggcgctcgtgactctcggctccacgagagagtggattgacagggtccggtttatatccaatcccagtagcggagtcatgggtcttgaggcggctcttgaactctatgccaggggcgccgaggtcgatgtggtggcagggtatacaagtgttgagatacctcacctgtttaacactgtgaagacggagactaccgaagatatggcggctgcggttgaggagctgacaagcaagagggagtatgacgctgtggttgcagcggctgccccggtagacttcaggccagccggggctttcgagggcaagataaggagcggccagcggctggttctcgagcttgagccgacacccaaggtcttagagggtatagctaggaggccgaaggttctggtggcatttgcagcagagtatgtggataatttggacagcctgcgggaccctgctttggagaagatggagaagtatgatgcagacctggtggtggctaacagagtgggtgtcgaaggtgtagggttcgccagccctcttctagacgttcttatgcttgataagagtggggaggctgtgttaaagggctccttccacaaggagattgtcgccgcagttatagcggatgagatagcaaagctgctatcgagatag

SEQ ID NO: 49353 - protein, 412 aa, Aeropyrum pernix K1
MSDYVTHPSMDILSEVNNYIEGKTIVLGVTASVALYRSLDLARWLLRRGARVITVMTPEAAKLVSPEMFHWASGGPVYTGFTGGVEHISIARAASAMVVAPATLSTLAKIAHGVVDNPVALAAVSIMGYGKPVIAVPAMHGNMYESPQAREVVDRLRSQGVLVVDPKIEGGVAKYPDTHAVGRITAAQARKGLRDLEGIRALVTLGSTREWIDRVRFISNPSSGVMGLEAALELYARGAEVDVVAGYTSVEIPHLFNTVKTETTEDMAAAVEELTSKREYDAVVAAAAPVDFRPAGAFEGKIRSGQRLVLELEPTPKVLEGIARRPKVLVAFAAEYVDNLDSLRDPALEKMEKYDADLVVANRVGVEGVGFASPLLDVLMLDKSGEAVLKGSFHKEIVAAVIADEIAKLLSR

SEQ ID NO: 49354 - DNA, 1167 bp, Aquifex aeolicus VF5
  CDS (1)..(1167): transl_table=11
atgaatatcctcataggagtttgcggaggaatagcctcctacaaagtttgtgaactcgtaagggaattaaaaaggaaagggcacagcgtaaaaactatacttaccccctttgcagaaaagttcatgtctccactaacttttcaaaccttgagcgggaataaagcgtatacggataaggactgggaagaagaaccccttgcccatataaacttagcgaggtgggcagacgtttttttaatagcaccggccacggcaaacacgatagcaaaaatagcaaacggtatatcagacaacctcctcactaccacgattctcgcctacggaaagcctctgcttgtagcccccgctatgaacaccgttatgtataaatctccttccactcaggaaaatctgaaaaaattaaaagagtggggacacgtaataatagaaccggagttcggagttctcgcctgcaaagaggttggggaggggaaactggcgagcattgacagattgatagactggatttattacgtatccgaagaaaaacccttaaagggaaagaaggttttaattacctgcggtgcgacaaaggagtttatagaccccgtaagatttatatcaaattactcaagcggtgagatgggcttttcacttgcccgtatcttcaggtggaagggagcagaagtgaaagtaattgcgggaactactacggcaaaagaacctcctgaagtggagataataagagttcaaaccacagaggagatgagagaaaaggttctagagcactacgactgggcggatatagtggtcatgaacgcagctgttgcagacttcaagccttcaaaggttagtaaagaaaagataaagaaaagggataaaatccttttagaactcgtgaagaatccagacattctggaagaactcggaaggaagaagggatataaaattctggtgggatttgcactggagagtgacaaccttcttgagtacgcaagggaaaaacttgagaggaagaatcttgatttaatcgttgcaaatcctgtaaaagttatgggaaagaaggaacacgaagggtatttgataacaaaggaccagatagttgaacttccgaaaggttctaagttggaaaatgccagatttatcgtagaatttattattggaaatgttttaagaggaggagaataa

SEQ ID NO: 49355 - protein, 388 aa, Aquifex aeolicus VF5
MNILIGVCGGIASYKVCELVRELKRKGHSVKTILTPFAEKFMSPLTFQTLSGNKAYTDKDWEEEPLAHINLARWADVFLIAPATANTIAKIANGISDNLLTTTILAYGKPLLVAPAMNTVMYKSPSTQENLKKLKEWGHVIIEPEFGVLACKEVGEGKLASIDRLIDWIYYVSEEKPLKGKKVLITCGATKEFIDPVRFISNYSSGEMGFSLARIFRWKGAEVKVIAGTTTAKEPPEVEIIRVQTTEEMREKVLEHYDWADIVVMNAAVADFKPSKVSKEKIKKRDKILLELVKNPDILEELGRKKGYKILVGFALESDNLLEYAREKLERKNLDLIVANPVKVMGKKEHEGYLITKDQIVELPKGSKLENARFIVEFIIGNVLRGGE

SEQ ID NO: 49356 - DNA, 1278 bp, Helicobacter pylori J99
  CDS (1)..(1278): transl_table=11
atgaattttttagaagatttattttaccccttaagattgttagaaaacaagcgcgttttattgctcgtgagcggatctattgcggcgtataaatccctagaattagtgcgcttgttgtttaaaagcggggctagtatccaagtggtgatgagtaagggcgcgcaaaaattcatcaagcccttaagctttgaagctttgagccaccataaagtcctgcatgatcgtaatgaaaaatggtattacaaccaccaaaacaaattgcaccacaaccacatcgcatgcgctgctagtgctgatttactcatctttgcccctttaagcgctaacagcttgtctaaaatcgctcacgctttagcggataataccatcagcgcgacttttttagcttgcgcttcccctaaaatcctagccccaagcatgaacactaacatgctcaattcccctatcattcaaagtaatttaaaacgcttgaaagattccaatcacatcattttagacacccaaaacgcccttttggcatgcaacactaaaggcgacggggcgatggctgagcctttagaaatcctttttaaagccacccaaacgctcttaaaagacgcttattttgaaaacagagaagtcatagtcatgggcggcgcgagcgtggaaaagattgacagcgttagagttattagcaatctttctagcgggattcaagcgagcgctttggctctagcgttatattttaagggagcgaaagtgactttgattgcgtccaacttccctacccctttgcctaaagaaatcgcaagcgttttagttagcgacaccgcttcttatgaaaacgccttgaatgaagccgctaaaaacttgcaaaaacatgccttaaaacccctactcttcaatttagccgccattagcgattatttgcctaaaacttctttcaaccataagcttaaaaaaagcgaactgggcgaaaccctaaacgttgaatgcgttcaaaataaggatttactggcttctgtcaatcctaatcaattcgttaaaatcggttttaaagctgaagatgatcaacaaaacgccattaaaaacgctcaaaatcttttaaaaccttctcaagataacggcaaggattgctccgtggccgctttgaatctcattaaagattcacgcccttttggctcattagacaatgaattgtggctttttagccataaaaaaacccaaaaaatcccttccatgaacaaattagaagcgagctttaaaatccttgattttatcaaagacaacgccctttaa

SEQ ID NO: 49357 - protein, 425 aa, Helicobacter pylori J99
MNFLEDLFYPLRLLENKRVLLLVSGSIAAYKSLELVRLLFKSGASIQVVMSKGAQKFIKPLSFEALSHHKVLHDRNEKWYYNHQNKLHHNHIACAASADLLIFAPLSANSLSKIAHALADNTISATFLACASPKILAPSMNTNMLNSPIIQSNLKRLKDSNHIILDTQNALLACNTKGDGAMAEPLEILFKATQTLLKDAYFENREVIVMGGASVEKIDSVRVISNLSSGIQASALALALYFKGAKVTLIASNFPTPLPKEIASVLVSDTASYENALNEAAKNLQKHALKPLLFNLAAISDYLPKTSFNHKLKKSELGETLNVECVQNKDLLASVNPNQFVKIGFKAEDDQQNAIKNAQNLLKPSQDNGKDCSVAALNLIKDSRPFGSLDNELWLFSHKKTQKIPSMNKLEASFKILDFIKDNAL

SEQ ID NO: 49358 - DNA, 1185 bp, Thermotoga maritima MSB8
  CDS (1)..(1185): transl_table=11
atgaggatagtactcggtgtcagcagcggcatagcgatatacaaagccgtggacctggcaagtaagttgagaaaagaaggtcacgaacttcacgtggtgatgacaccggacgccaccagaatgatttctccggtggtgttttcagctgttggaaactgttccgtgtaccacgactggatggatgtcaggaatggctggatcccgcacaccgaaatttccagaacggcagacgtgctcgttgttgcccccgcaaccgcgaacaccatttcaaagatcgcaaacggaatagcggacaatcttctcacactcgtcgctctcgcttttgataaagacgcgaagattctcgttcccacgatgaattaccgtatgtacagcaacaaactgtttcaagagaatcttgaaaagctaaaaaacaacggctggttcgttgtggaacccgaagaaggccatctcgcgtgcggtgaggtcggaaagggaagatatccggagaacgaaaagatagtcgaagcggtacaccttttgacttttccaaagaagctcgccggaaaaaaggttcttatcaccgcgggaccaacaagagagcgtatagacgctgtgaggttcatcactaacgcgagttcaggaaagatgggatacgcgctggcaactgtcgcaaagaggatgggagctcgtgtttctcttgtatccggcccaacgtctttgaaaccaccttactatgtggatgaatttgtgaaagtagaaagtgctgaagagatgtacgaagaggtgatgaagagattcgaagatacagacatcgtgataatgaacgccgccgtgggagattacaggccgaaaaaggtctttgaaggaaagctgaagaaaacagagaacgatctcgttctccatctcgaaagaacaaaagatattctcaaagaactcggacagagaaagtcaaatcagattcttgtgggattcgcggctgaggtggaaaatttcgaggagaacgctgtgaaaaagctgagagagaagaatctggatttgctcgtgctgaacgatgcccggaaagcgttctcttccgacagagtggaggtctacatatacggaagagacggtttcatcaaaaggattgatgaagatgacaagattcgtgtggcttgcggtattcttgatgttgtttcaaaccttgctggcggatcaccttcttga

SEQ ID NO: 49359 - protein, 394 aa, Thermotoga maritima MSB8
MRIVLGVSSGIAIYKAVDLASKLRKEGHELHVVMTPDATRMISPVVFSAVGNCSVYHDWMDVRNGWIPHTEISRTADVLVVAPATANTISKIANGIADNLLTLVALAFDKDAKILVPTMNYRMYSNKLFQENLEKLKNNGWFVVEPEEGHLACGEVGKGRYPENEKIVEAVHLLTFPKKLAGKKVLITAGPTRERIDAVRFITNASSGKMGYALATVAKRMGARVSLVSGPTSLKPPYYVDEFVKVESAEEMYEEVMKRFEDTDIVIMNAAVGDYRPKKVFEGKLKKTENDLVLHLERTKDILKELGQRKSNQILVGFAAEVENFEENAVKKLREKNLDLLVLNDARKAFSSDRVEVYIYGRDGFIKRIDEDDKIRVACGILDVVSNLAGGSPS

SEQ ID NO: 49360 - DNA, 1215 bp, Bacillus halodurans C-125
  CDS (1)..(1215): transl_table=11
atgctacaagggaaacgcgtcgttttaggtgtatcaggagggattgccgcgtttaaatcagccgctttcgcgagtaagctcgtccaagcaggtgctgaagtgaaggttgtcatgacagagggggcgaaaaaatttgtcactccgctcacgttccaagcattgacccggcatccggtctacgatgacacattttcagaaccagatccgagcgaaattgctcatattcagcttgccgattgggcagacgtgatcatcattgcgccagcgacggccaacttgatcggtaaattagccaacggggttgcagatgacatgctctcaacgatgttattggcaacgaaagcacccatttatctcgcaccagcgatgaatgtcaacatgtatgaacaccctgccgtgcagcgaaatatgcagcagctcgcgaaggatggctatcggctgctggagccgggtgctggttatttagcttgtggctggatcggaaaagggcgtatgcctgaaccggaagatttgttgaagacaatcgaagtccactttaccccaccatcgtcaagcttagcggggaaaaagatcgtgatcactgctgggccgacgcaggaaacaattgatcctatccgtttttttacgaatcgctcgtcaggaaaaatggggtatgcgttaacgaaagcagcgcgagactttggtggaaacgtaacgctcatttctggaccaacttcactagaaaagcccgatggggttagcgtcgtgaatgtcaaatctgcacaagacatgtatgaagcggtcttggctgaattctccgatgccgatgtcgtaatcaaaacagcagccgtggctgattatcgcccgagggtagtccatgagcagaaagtgaaaaagaaggacggcgactgggtgattgaacttgaacgaacggttgacattttaaagacgttaggcgaaaagaaagaaagccaattcctcgttggttttgcagcagaatcgcaagaagtagaaacatacgcacaaaaaaaactaaaagaaaaaaacgcagatatgattgtggcgaacaatgtaaccgaggaaggagcagggtttcaaaccgatacgaaccgagtgacggtttattttaagcaaggagacgtgaagcctttgccattgatgacaaaagacgaagtggcacaccgtctgatcatgatgattagcgaacaattggaaaaaggaagagagaaccaatga

SEQ ID NO: 49361 - protein, 404 aa, Bacillus halodurans C-125
MLQGKRVVLGVSGGIAAFKSAAFASKLVQAGAEVKVVMTEGAKKFVTPLTFQALTRHPVYDDTFSEPDPSEIAHIQLADWADVIIIAPATANLIGKLANGVADDMLSTMLLATKAPIYLAPAMNVNMYEHPAVQRNMQQLAKDGYRLLEPGAGYLACGWIGKGRMPEPEDLLKTIEVHFTPPSSSLAGKKIVITAGPTQETIDPIRFFTNRSSGKMGYALTKAARDFGGNVTLISGPTSLEKPDGVSVVNVKSAQDMYEAVLAEFSDADVVIKTAAVADYRPRVVHEQKVKKKDGDWVIELERTVDILKTLGEKKESQFLVGFAAESQEVETYAQKKLKEKNADMIVANNVTEEGAGFQTDTNRVTVYFKQGDVKPLPLMTKDEVAHRLIMMISEQLEKGRENQ

SEQ ID NO: 49362 - DNA, 1203 bp, Pasteurella multocida subsp. multocida str. Pm70
  CDS (1)..(1203): transl_table=11
atgcacccccttcaatcaaaacgtatcgttgtcggtattactggtggcattgctgcttataaatccatcgaattaatccgcttattacgcaaaaatcaggctgatgtacgcgtagtgctcactccggctgctgcagaattcgttactcctttaacgttacaagccatctcaggcaatgccgtggctcagtctctcttggatccccaagctgaattagcgatgggacacattgaattagccaaatgggcagaagccattgtgattgcaccagcaagtgcagattttctcgcccgtttaaccgttggtatggcaaatgatctgctttctactctttgtttagcaaccaaagccccccttttactcgctccggcgatgaatcagcaaatgtttgctcaagcgataacgcagaaaaatctgagtgctctagttcaacgtggttaccatgttgtcggtcctaatgcaggtgagcaagcttgtggggatgttggtttaggacgtatgtctgaaccttctgaaatttataccgcactttgtgagttattccatactcaacaagatttagtgggattaaaagtggctattaccgcaggtccaacgcaagaagccattgatccagttcgttatattagtaatcacagttctggaaaaatgggctttgcgattgccgaagcctttgctgaacgtggagcaacagtcacgttaatctcaggtccagtcaatttagcaacacccgagaaagtccagcgcatcaatgtcatctctgcccaagacatgcatcaacaagcgctcaaaagtgcggtcgaaaatcagatatttattggctgtgctgccgtagcagattatcgtgttgctgaaatcgcgacgcaaaaaatcaaaaaagcaggagatgaaatcaacctgacgttagttaaaaatcctgacattattgcagatgttgggcatttagcggtacaacgtccatttacggtaggtttcgcagcggaaactcaacatgttgagcagtacgcacaagacaaactacaacgtaaaaagctggatatgatttgtgcgaatgatgtatcaggtggacaagtcttcgggcaagaccaaaatagcctacatctcttttggcacaatggcagcacaaaattagcattagagagtaaaaaaacattagccaaacaattagttaatcaaattattgcgcgttaccgccaatcttaa

SEQ ID NO: 49363 - protein, 400 aa, Pasteurella multocida subsp. multocida str. Pm70
MHPLQSKRIVVGITGGIAAYKSIELIRLLRKNQADVRVVLTPAAAEFVTPLTLQAISGNAVAQSLLDPQAELAMGHIELAKWAEAIVIAPASADFLARLTVGMANDLLSTLCLATKAPLLLAPAMNQQMFAQAITQKNLSALVQRGYHVVGPNAGEQACGDVGLGRMSEPSEIYTALCELFHTQQDLVGLKVAITAGPTQEAIDPVRYISNHSSGKMGFAIAEAFAERGATVTLISGPVNLATPEKVQRINVISAQDMHQQALKSAVENQIFIGCAAVADYRVAEIATQKIKKAGDEINLTLVKNPDIIADVGHLAVQRPFTVGFAAETQHVEQYAQDKLQRKKLDMICANDVSGGQVFGQDQNSLHLFWHNGSTKLALESKKTLAKQLVNQIIARYRQS

SEQ ID NO: 49364 - DNA, 1209 bp, Pseudomonas aeruginosa PAO1
  CDS (1)..(1209): transl_table=11
atgcagcggctctatcggaaacgcatcgtcctcggcgtgggcggcggcattgccgcctacaagagcgccgaactggtccgccgcctgcgcgaccagggcgctgaagtccgagtggtgatgacccagggcggccgcgagttcatcacgcccctgaccctccaggcgttgtccggccatccggtgcataccgatctgctggacccggcggcggaagccgcgatgggccacatcgaactggcccgctgggccgatctggtgctgatcgcaccggctaccgccgacctcatggcgcgcctggtccagggcgtggccaacgacctgctgaccaccctggtgctggccaccgacgcgcaaatcgccctggcaccggcgatgaaccaggccatgtggcgcgacaccgcgacccaggccaacgccgagctgctgcgccagcgcggcttccacctgttcggtccggcagcgggcagccaggcctgcggcgacgtcggcctcggacgcatgctcgaagccgaggaactggcgcagcgcgccgccgactgcttccagcgccaggcgctgaccggcgtgcatgtgctgatcaccgccggcccgacccaggaaaacatcgacccggtgcgctacatcaccaaccacagttccggaaagatgggcttcgccctcgccgaggcggcggtggaagccggcgcacgggtgaccctggtcaccggcccggtgcacctgcccacgcccgaccgggtgcagcgcgtcgacgtggtcagcgcccgcgacatgctggccgcctgcgaggcggcgatgccctgcgacctgctgatcgcctccgcggcggtcgccgactaccgcccggaagtggtcgccgcgcacaaactgaagaaagaccctaccagcggcgagggcttgctcttgcagctggtgcgcaatcccgacattctcgccaccctcgcacagcgcgaggatcgtcccttcagcgtgggcttcgccgcagaaaccgaaaacctgctggactatgctgcacgcaagctcaaggacaagaacctcgacctgatcgtcgccaacgacgtggccaacccctcgatcggcttcaacagcgacgagaacgcgatcacggtgatcgaccgcgacctgcatccgagcaccttcgcccagaccagcaagggcaagatcgctcgccagctggtcgccttcatcgccgaccgcctcaaccagcaatga

SEQ ID NO: 49365 - protein, 402 aa, Pseudomonas aeruginosa PAO1
MQRLYRKRIVLGVGGGIAAYKSAELVRRLRDQGAEVRVVMTQGGREFITPLTLQALSGHPVHTDLLDPAAEAAMGHIELARWADLVLIAPATADLMARLVQGVANDLLTTLVLATDAQIALAPAMNQAMWRDTATQANAELLRQRGFHLFGPAAGSQACGDVGLGRMLEAEELAQRAADCFQRQALTGVHVLITAGPTQENIDPVRYITNHSSGKMGFALAEAAVEAGARVTLVTGPVHLPTPDRVQRVDVVSARDMLAACEAAMPCDLLIASAAVADYRPEVVAAHKLKKDPTSGEGLLLQLVRNPDILATLAQREDRPFSVGFAAETENLLDYAARKLKDKNLDLIVANDVANPSIGFNSDENAITVIDRDLHPSTFAQTSKGKIARQLVAFIADRLNQQ

SEQ ID NO: 49366 - DNA, 1185 bp, Neisseria meningitidis MC58
  CDS (1)..(1185): transl_table=11
atgggcaaacatattcttttaggtgtaacgggcagtattgcggcgtataagtcttgcgagttggtgcgactgctgaaaaaacaggggcattcggttacggtggttatgagccgctcggcaactgaatttgtttctccgctgacttttcaggctttaagcggcaatcctgtcctgaccgacacgcacggcggcaacggttcaaacggtatggaacatatcaacctgacccggaatgcggatgtttttctgattgcgccggcaagtatgaataccgtggcaaaaatctgtaacggcgtggcagataacctactgaccagtctggcagccgcacggaaatgtccgcttgccatcgcgcccgcgatgaatgtggaaatgtggctcaaccctgccaaccaacggaatatcgcacaactggtttcagacggcattactgtctatatgccgggcttgggcgaacaggcttgcggagaaaatggtatgggaaggatgccggaacctgccgaattgctggatctgcttccggatttatggacaccgaaaattttaaagggcaaaaaagtcttgattaccgcaggtgcgacatttgaagccattgaccctgtccgaggcatcacaaatatctccagcgggaaaatgggcgtggctttggcgcgggcgtgccgtgccgccggtgcagaagtcagcctgattcacggacagcttcaaaccgcgctgcctttcggcatatccgatacggttcaagccgtcagtgccgaaaatatgcatcgcgcagtgcatcgtttaatcgacaaacaagatgcttttatttctgttgccgccgtctcagactatagggttaagaataggagtactcaaaaattcaaaaaagataaaaatgccaaaccgttatccatcgaattggatgagaaccccgatattttggcttctattgcctcattaccgaacccgccgttctgcatcggttttgccgctgaaacggagaatgtaatgacatatgcgcgggaaaaacgtattaagaaaaagctaccgatgatcgttgccaatgatgtttcaatcgcaatgggcaaaccgaccaaccggattaccattatcggggacgacggggaactgtcttttcccgaaacaagtaaagatgaagcggcaatgcggattgttgaaaggcttgccgtatatttgagcaaataa

SEQ ID NO: 49367 - protein, 394 aa, Neisseria meningitidis MC58
MGKHILLGVTGSIAAYKSCELVRLLKKQGHSVTVVMSRSATEFVSPLTFQALSGNPVLTDTHGGNGSNGMEHINLTRNADVFLIAPASMNTVAKICNGVADNLLTSLAAARKCPLAIAPAMNVEMWLNPANQRNIAQLVSDGITVYMPGLGEQACGENGMGRMPEPAELLDLLPDLWTPKILKGKKVLITAGATFEAIDPVRGITNISSGKMGVALARACRAAGAEVSLIHGQLQTALPFGISDTVQAVSAENMHRAVHRLIDKQDAFISVAAVSDYRVKNRSTQKFKKDKNAKPLSIELDENPDILASIASLPNPPFCIGFAAETENVMTYAREKRIKKKLPMIVANDVSIAMGKPTNRITIIGDDGELSFPETSKDEAAMRIVERLAVYLSK

SEQ ID NO: 49368 - DNA, 1161 bp, Methanothermobacter thermautotrophicus str. Delta H
  CDS (1)..(1161): transl_table=11
atggagatcatactgtgcgtcacagggagtgttgcagccatcgaggcggtgaagcttgcaagggagcttgggaggcagggagccgaggttaagtgcttcatgagcgaggacgcctgcaggataatacacccctatgcaatggaatttgcaaccggaagcaaacctgtactggaacttacaggggaaattgagcacgttaaatacgcaggcgctgacctgatccttgtggcgccggcaacagccaacatcataggtaaactggcatacaggctggctgataaccccatatcatccctcctcctcacagcatcaggcatgggcaccccaattgtcatggtgccatcaatgcatgaggccatgtatgccgccgcagccgagaatatcatgaggctgaaggaagagggagttatctttattgagccccgcatggatgagggaaaggccaagttcccagacattgacaccatagtactcgaggcaatgagacagacctccagccagagactgcagggtaaaagggtccttgtgagtcttggggggacctatgaacccatagaccccgtcagagggattacaaacaggagttcagggaagatgggtctcgccatagccaggagggcctacatagagggcgctgatgtcacggttgtggccggcaccgtatctgtggagatacccccacagttaagatccttccgggcagagacagcagaggaaatggccgaaagggtcagggaactcgttgctgatcatgatgtattcatatctgcggctgcagtggctgacttcaagccggtctacactgagagaaagatatcatcctcagaggagttttcagttgaactcagacccaaccccaaggtaatagggatcgcaagggagattaatcctgaagcgttcatcgttggattcaaggcagagtatgatgtggacaatgaggcactggtggaatctgcaaggaaacagataagggaatcaggtgttgatatggtggttgccaacgacgtgtccgttgagggttttggctcagacaggaaccgggccatcattgtctcagacatggtaaccgagcttccccttatggaaaaggaggaacttgcgtccatcataattgatgaagtgataaggaaggttggagacagcctggaccagttattatag

SEQ ID NO: 49369 - protein, 386 aa, Methanothermobacter thermautotrophicus str. Delta H
MEIILCVTGSVAAIEAVKLARELGRQGAEVKCFMSEDACRIIHPYAMEFATGSKPVLELTGEIEHVKYAGADLILVAPATANIIGKLAYRLADNPISSLLLTASGMGTPIVMVPSMHEAMYAAAAENIMRLKEEGVIFIEPRMDEGKAKFPDIDTIVLEAMRQTSSQRLQGKRVLVSLGGTYEPIDPVRGITNRSSGKMGLAIARRAYIEGADVTVVAGTVSVEIPPQLRSFRAETAEEMAERVRELVADHDVFISAAAVADFKPVYTERKISSSEEFSVELRPNPKVIGIAREINPEAFIVGFKAEYDVDNEALVESARKQIRESGVDMVVANDVSVEGFGSDRNRAIIVSDMVTELPLMEKEELASIIIDEVIRKVGDSLDQLL

SEQ ID NO: 49370 - DNA, 1179 bp, Halobacterium sp. NRC-1
  CDS (1)..(1179): transl_table=11
atgctctccggagtgaacgtcgcggtgggtgtgaccggcagtattgcggcggtgaaagtcgtggagttcgtccacgagcttcgccggcgcggcgcgtgcgtccgcgcggtgatgactgagagcgcgcaggggatcatccacccgtgggcggtggagttcgctaccgagaacccggtcgtgacggagatcacgggcacggttccgcacgtcgagctgtgcggccgggacggatgggcggacgtgttcgtggttgcaccggcgacggcgaacacagtggggaagatcgcggcggcggtcgacgactcgccggtgacgacgtgtgtgacgactgcggtgggcgctgacgtgccggtggtggttgtgccggcgatgcacgagccgatgtacgaccaccccggcgttcgtgacgcgatcgatcgcgtgtcttcgtggggggtgtcggtcgtcgatccgcgcatcgaggaggggaaagcgaagctcccccgtgagtccacgatcgtccacgagacggcacgcgcggccggcgagcagccgcttgcgggcacgcacgtggtcgtgacgtcgggcgcgacgagcgaggcgatcgacccggtgcgggtgttgaccaaccgggcgtccgggcggacggggcgggcggtcgccgcggcgtgttacgtccgcggcgcgcgggtcacgctcgtccacgacgcgagcgacggcggggcagtgccgtacgcggacgtgcgtgacgtgtcgtcggccgccgaaatgacagcggccacgctgacggcctgtgcggacgccgacgcgctggtgtcggcggcggcgatcagcgattataccgtcgaggcggccgacgagaagctgcggtcgggccgcgaggacgtggcgctgtcgttggagccgacgcggaagctggtgggggcggttcgggacgacaaccccgacctcccgatcgtcgggttcaaggccgaaacgccggccgacgacgggacggcaggcgacgacagcatggtggccgcggcgcgctcgctcctccagcgggacgggctggcgttcgtggttgccaacgacgccggcgtgatgggcaacgacgaaacccgcgcactgttcgtcaccgcggactccgtcagcgagtacgccggccacaagcgcggcctcggtgcgcggatcgcggagcgcctggctgtgttcgcgtag

SEQ ID NO: 49371 - protein, 392 aa, Halobacterium sp. NRC-1
MLSGVNVAVGVTGSIAAVKVVEFVHELRRRGACVRAVMTESAQGIIHPWAVEFATENPVVTEITGTVPHVELCGRDGWADVFVVAPATANTVGKIAAAVDDSPVTTCVTTAVGADVPVVVVPAMHEPMYDHPGVRDAIDRVSSWGVSVVDPRIEEGKAKLPRESTIVHETARAAGEQPLAGTHVVVTSGATSEAIDPVRVLTNRASGRTGRAVAAACYVRGARVTLVHDASDGGAVPYADVRDVSSAAEMTAATLTACADADALVSAAAISDYTVEAADEKLRSGREDVALSLEPTRKLVGAVRDDNPDLPIVGFKAETPADDGTAGDDSMVAAARSLLQRDGLAFVVANDAGVMGNDETRALFVTADSVSEYAGHKRGLGARIAERLAVFA

SEQ ID NO: 49372 - DNA, 1155 bp, Campylobacter jejuni subsp. jejuni NCTC 11168
  CDS (1)..(1155): transl_table=11
atgaaaaccatacttttagccattagcggtagtatagctttttataaatcttatgagcttatttctttgtttaaaaaagaaggctttagggtaaaagttttgctttctaatggtttgttaaaatttgctagcaaaatgagttttgaagccttggttgatgaagttttatgtgaggaaaatgaaagttggcaaaattcaaacaatcacatagcttttagcaaggatgtagaccttgttttgtttacccctgcaagtgttaattctatcaataaacttgcttttggtatagcggataatctttttatccaaactttaattgcagcaaataaacctcttatcatagctcctgcggcaaatacaaatatgtttcatcattttagcacgcaaaattctttaaagatacttaaagaaaataaagctttgattatagagcctatttgtaaagttttagcttgtaaagatgaaggcgtaggagccttagctgaagttaaggatatttttaatatcaccaaaagagagcttttaaaagaaaagttttggtgcaataaaagcgtagttatcacaggtggcggcacaagggaaagaatcgatgatgtgcgttgtgtgagtaatttttcaagtggaaaaatggcaaaagccatagctgatgctttttattttttaggagctagggtaaaacttttaagctctgtggaatttgatacgccttatgagctttgcaaatttgaaagttctaaggatctaaaggagcttttggataaaaatttaagtcatgactttttgattatgacggctgcagtgagtgattttatccctcaaagtgtaaaagggaaaattaaaaaaaatgagcatttacagggtttaaatttgcatctatctttaaatgaagatttgcttaaaacttgcaaatttcaaggcaaaaagataggttttaagatggaatttgattctcaaaatgccttagaaaatgcgaaaaaatctctaaaagataaacaacttgatatggtttgccttaatatcattgatcaaaaaaattattttggaagtgatcaaaatgaactttattttatcactttaaacaatgaaaataaaagcactttgcaaagcaaagaaaaattggcatttgaattagtaaaatggtgtgaaaaattatga

SEQ ID NO: 49373 - protein, 384 aa, Campylobacter jejuni subsp. jejuni NCTC 11168
MKTILLAISGSIAFYKSYELISLFKKEGFRVKVLLSNGLLKFASKMSFEALVDEVLCEENESWQNSNNHIAFSKDVDLVLFTPASVNSINKLAFGIADNLFIQTLIAANKPLIIAPAANTNMFHHFSTQNSLKILKENKALIIEPICKVLACKDEGVGALAEVKDIFNITKRELLKEKFWCNKSVVITGGGTRERIDDVRCVSNFSSGKMAKAIADAFYFLGARVKLLSSVEFDTPYELCKFESSKDLKELLDKNLSHDFLIMTAAVSDFIPQSVKGKIKKNEHLQGLNLHLSLNEDLLKTCKFQGKKIGFKMEFDSQNALENAKKSLKDKQLDMVCLNIIDQKNYFGSDQNELYFITLNNENKSTLQSKEKLAFELVKWCEKL

SEQ ID NO: 49374 - DNA, 1185 bp, Neisseria meningitidis Z2491
  CDS (1)..(1185): transl_table=11
atgggtaaacatattcttttaggtgtaacgggcagtattgcggcgtataagtcttgcgagttggtgcgactgctgaaaaaacaggggcattcggttacggtggttatgagccgctcggcaactgaatttgtttctccgctgacttttcaggctttgagcggcaatcccgttctgaccgacacgcacggcagcaacggttcaaacggcatggaacatatcaacctgacccggaatgcggatgtttttctgattgcgccggcaagtatgaataccgtggcaaaaatctgtaacggcgtggcagataatctactgaccaatctggcagccgcacggaaatgtcctcttgccatcgctcccgcgatgaatgtggaaatgtggctcaaccctgccaaccaacggaatatcgcacaactggtttcagacggcattactgtctatatgccgggcttgggcgaacaggcttgcggagaaaatggcatgggaaggatgccggaacctgccgaattgctggatttgcttccggacttgtggacaccgaaaattttaaggggcaagaaaatcttgattaccgcaggtgcgacatttgaagccattgaccctgtcaggggcatcacaaatacctccagcggaaaaatgggggtagctttggcgcgggcgtgccgtgccgccggtgcggaagtcagcctgattcacggacagcttcaaaccgaactgcctttcggcatatccgatacggttcaagccgtcagcgctgaagatatgcatcgcgcagtgcatcgtttgattgaaaaacaagatgcttttatttctgttgccgccgtctcagactataaggttaaaaacaggagtacgcaaaaattcaaaaaagataaaaatgccaaaccgttatccatcgaattggatgagaaccccgatattttggcttctattgcctcattgccgaacccgccgttctgcatcggttttgccgctgaaacggagaatgtaatggcatatgcacgagaaaaacgtattaagaaaaaaataccggtaatagttgccaatgatgtttcaatcgcgatgggcaaaccgaccaaccggattaccattatcggggacgacggggaactgtcttttcccgaaacaagtaaagatgaagcggcgatgcagattgttgaaaggcttgccggatatttgaacaaataa

SEQ ID NO: 49375 - protein, 394 aa, Neisseria meningitidis Z2491
MGKHILLGVTGSIAAYKSCELVRLLKKQGHSVTVVMSRSATEFVSPLTFQALSGNPVLTDTHGSNGSNGMEHINLTRNADVFLIAPASMNTVAKICNGVADNLLTNLAAARKCPLAIAPAMNVEMWLNPANQRNIAQLVSDGITVYMPGLGEQACGENGMGRMPEPAELLDLLPDLWTPKILRGKKILITAGATFEAIDPVRGITNTSSGKMGVALARACRAAGAEVSLIHGQLQTELPFGISDTVQAVSAEDMHRAVHRLIEKQDAFISVAAVSDYKVKNRSTQKFKKDKNAKPLSIELDENPDILASIASLPNPPFCIGFAAETENVMAYAREKRIKKKIPVIVANDVSIAMGKPTNRITIIGDDGELSFPETSKDEAAMQIVERLAGYLNK

SEQ ID NO: 49376 - DNA, 1269 bp, Deinococcus radiodurans R1
  CDS (1)..(1269): transl_table=11
atgaaccgcacgcccaccctgcgcgcccctgaccttgctggcgttcctgactgtctcgtcatcgtggggggcagcatggccgccgtcaaagcgcccacggccctgcgccggctgcgcgagggaggcgcgagcaccgccgttatcgccacccgcgcggcgctcgcgttcatcacgccgctgagcctcgccaccgccggcaactgcgaggttgccaccgacgagacgtggttcgcgccgcagcccatagcgcagcacctgtcgctcgcccgcgcccgagtgacggtggtgctgggcgcctccgccgaactgctcgccgccgccgctcacgggcacgcggacacgctggccaccgccacgctgctgagcgccgaagggcaagtgctgtgggtgcccgccatgaacgagcggatgtggctgcaccccgccgtgcaagccaacgccgagcggctgcgcggctggggccacctgtttctcgggccggagacgggcgctttcggcacgccgggcgaggggtcgggcacggggcgaatggccgaacccgaagccatcgcggcgcgggcgctggccttgctgaatgaacaagacgcagaagcggaggccgcgccgcaagacctcgccgggttgaaggtcgtcgtctccgccgggccgacgcgcgagtatctggacccggtgcgcttcatctccaaccccagcagcggcaagatgggcttcgcggtggccgaggaagcccgcacgcgtggcgccgaggtcgtgctggtgacgggaccggtgaacctgccggacctgagcggcgtgcagaccgtccgcatcgagacggcgctggagatgcaggcggccatcatggaagctgccggagacgccgacatggtggtgatgaccgccgccatcgccgattaccgcgccgccgcgcctaagagcgagaaggaggccaagacgccgggcgacgtgaccattcacctcacgcccaaccccgacattctggccggactcggcgccgagcaggccgcgcatccgggccgggtgctggtcggctttgcgatggagacgcacgccggagtcgagcgggccgccctgaaagcgcagcgcaagaacgccgattttatcctgctcaactaccccacccgcgagggcaccgcgttcggtggcgacgacaatcaggtcactctggtccgcgccgatggtacgcacgccgactggccgcgcatcagcaagcgcgaggtggcgcggcggctgctggacgaagcgcggcaaatacgggaacggcgctga

SEQ ID NO: 49377 - protein, 422 aa, Deinococcus radiodurans R1
MNRTPTLRAPDLAGVPDCLVIVGGSMAAVKAPTALRRLREGGASTAVIATRAALAFITPLSLATAGNCEVATDETWFAPQPIAQHLSLARARVTVVLGASAELLAAAAHGHADTLATATLLSAEGQVLWVPAMNERMWLHPAVQANAERLRGWGHLFLGPETGAFGTPGEGSGTGRMAEPEAIAARALALLNEQDAEAEAAPQDLAGLKVVVSAGPTREYLDPVRFISNPSSGKMGFAVAEEARTRGAEVVLVTGPVNLPDLSGVQTVRIETALEMQAAIMEAAGDADMVVMTAAIADYRAAAPKSEKEAKTPGDVTIHLTPNPDILAGLGAEQAAHPGRVLVGFAMETHAGVERAALKAQRKNADFILLNYPTREGTAFGGDDNQVTLVRADGTHADWPRISKREVARRLLDEARQIRERR

SEQ ID NO: 49378 - DNA, 1230 bp, Xylella fastidiosa 9a5c
  CDS (1)..(1230): transl_table=11
gtgactggatctcatcagccacggtcattgaacggacagcgtttgctgttgtgtgtcagtggtggtattgctgcttataaatcgcttgagcttgtgcgccgcctttgtggtgcgggtgttcaggtccaggttgcgatgactgctagtgcgcagcagtttgtcacgccgcttagtttccaggcattgtctggccaatcgacccgtaccacgctgtgggatggtaacgctgaacaggcgatggggcatattgagttggcgcgttgggccgagtgtgttttgattgctcctgctagcgctgatgtgatcgcgcggttggcgcatggtttggcggatgatttggtgacgactctgtgtttggcgacaacggcgctgctgatcatatgcccagcgatgaaccacaatatgtggctgcatccagcgactcaggcgaatgttgcgatgttggtggggcgtggtgtgcaggtcatcggaccagaggatggtccgttggcagaaggtgtgtctgggttgggccgtatgagcgaaccagaggcgattgttgctgcgttggttcagggggtgtctccagctccagttcacggtggtttgttccatgggcagcgcattgtgattagtgctggacccacattcgaagatttggatccggtgcgttaccttggcaatcgcagcagtggcaagatgggttttgctttggctagtgcggcggtgtcccatggggctgaggtggtgttggtggctggtccggtgtatcagccaactccacctggggtgactcgggtggatgtacgttcggcggcacagatgcgtgatgcagtcctcagcgcgttccccgcggatgtttacatcggtgcagctgcggtggccgattacgcacctaaatctgtgttgccacaaaagatcaagaagtccggccagacgctgaccctggagttggtgcgtacccaagacatcttgtcagaggtggcagcgcagacggctaacctgaaatttgtggttggtttcgctgcagagacgcatgatgttgagcgctacgcacgcggtaaattggctgccaagcacttggatttgattatcgccaaccaggttggcattgttggaaacggttttgaaagtgatgacaatgctgtcactgtgtattggcagggtggcgagcgcgttttcgccagttgcagcaaggtggagttggctgagcgcctgctggcactgattgctgaaaggatgcagacatga

SEQ ID NO: 49379 - protein, 409 aa, Xylella fastidiosa 9a5c
MTGSHQPRSLNGQRLLLCVSGGIAAYKSLELVRRLCGAGVQVQVAMTASAQQFVTPLSFQALSGQSTRTTLWDGNAEQAMGHIELARWAECVLIAPASADVIARLAHGLADDLVTTLCLATTALLIICPAMNHNMWLHPATQANVAMLVGRGVQVIGPEDGPLAEGVSGLGRMSEPEAIVAALVQGVSPAPVHGGLFHGQRIVISAGPTFEDLDPVRYLGNRSSGKMGFALASAAVSHGAEVVLVAGPVYQPTPPGVTRVDVRSAAQMRDAVLSAFPADVYIGAAAVADYAPKSVLPQKIKKSGQTLTLELVRTQDILSEVAAQTANLKFVVGFAAETHDVERYARGKLAAKHLDLIIANQVGIVGNGFESDDNAVTVYWQGGERVFASCSKVELAERLLALIAERMQT

SEQ ID NO: 49380 - DNA, 1260 bp, Mycobacterium leprae TN
  CDS (1)..(1260): transl_table=11
atggactgcaagcgggtcgttgtcggcgtctccgggggtatcgccgcgtataaggcgtgtaccgtggttcgtcagctcattgacgccggtcacgaggtgcgggtcatcccaactgagtcggcgttgcgcttcgtcggaactgccaccttcgaggcactctccggccaaccggtgtacaccgacgtgttcgacgatattccggcagtgtcgcatgtgtacctcggcaagcaggccgacttggtggtagtggcgccggccaccgccgacctattggcccgcgcagtgcacggccgagccgacgatctgttaaccgcgaccctgctcaccgcacggtgtccgatcatgttcgcgccggcgatgcacaccgagatgtggttgcatccggctaccgtcgacaacgtggccacgttgcgtcgccgcggcgcgattgttctggaacccgcgtccgggcgcctcaccggtaccgatagcggagcgggacgcctgcccgaggcggaagagatcacaacccttgcccagttactgctggagcggcacgacgctttaccctatgacctaacgggcagaaaacttctggtgacctccggtggtacccgcgagtcgatcgatccggtgcgcttcattgggaaccgcagctccggtaagcagggctatgctgtcgcgcgggtcgctgttcagcgcggcgccgaagtcacgttgatcgctgggcacaccgcggggctgaccaaccctgctggggtcgatgtggtgcatgttggctcggcgcagcaactcggagacgccgtttccaagcacgctcccgactttgacgtgttggtgatggcagcggccgtggctgatttccggcccgcccaagttgctaccgccaagatcaaaaaaggccccgatgaccaggacgagccgctgatcgagttggtgtacaacgaagacgtgttggctgccgcggtgcgggcccgtacgcatgggcagttgcccaacatgcgggccattgtgggattcgccgcagaaaccggggatgccagcggcgatgtgttgtttcatgctcgcgctaagctgcggcgcaagggctgtgaccttttagtcgtgaatgctgtgggtgacggcagggcctttgaggtggacaacaacgacggctggctgctggcgtccgacggtaccgagttggcgctacagcacggctccaagatgctcatggccagtcgtatcgttgatgggattgtcacgtttctgcatggccttcccgatctgcgaggcgggtga

SEQ ID NO: 49381 - protein, 419 aa, Mycobacterium leprae TN
MDCKRVVVGVSGGIAAYKACTVVRQLIDAGHEVRVIPTESALRFVGTATFEALSGQPVYTDVFDDIPAVSHVYLGKQADLVVVAPATADLLARAVHGRADDLLTATLLTARCPIMFAPAMHTEMWLHPATVDNVATLRRRGAIVLEPASGRLTGTDSGAGRLPEAEEITTLAQLLLERHDALPYDLTGRKLLVTSGGTRESIDPVRFIGNRSSGKQGYAVARVAVQRGAEVTLIAGHTAGLTNPAGVDVVHVGSAQQLGDAVSKHAPDFDVLVMAAAVADFRPAQVATAKIKKGPDDQDEPLIELVYNEDVLAAAVRARTHGQLPNMRAIVGFAAETGDASGDVLFHARAKLRRKGCDLLVVNAVGDGRAFEVDNNDGWLLASDGTELALQHGSKMLMASRIVDGIVTFLHGLPDLRGG

SEQ ID NO: 49382 - DNA, 1242 bp, Sulfolobus solfataricus P2
  CDS (1)..(1242): transl_table=11
atgcacacatacatgacgcatccttcaaagaagataattgggagcataagtaatgaactagctgataagaagatactattagcagtaactgggagcgtcgcaatatataagtcattagatttagccagaagtttaatgaggaacggtgcagaagtgagtgtcattataagtaaagacgctgccaagctaatttccccagagatgtttaagtgggctactggaaataatgtagttactaagcttactggtgacttagagcatgtttcattggcagaagacaatgacgtaatgatcgtagctccatctactgcaaatactatggtaaagatagcttatggaatagctgatacaccaataacggctactgcgctgaatttcgttgggatgaaaaagcccttaattatagttccttcaatgcatttacaaatgtatatttcacctcaagttgcagatgcagcagataggttaaaaaggataggagtagaggtaatagaaccagagatagttggagatttagcacactatcctaagttagaatacttaaccagtagaataacctcatatgttttaagagggaaagacttatctgggtttaatatattagctactgctgggcctacacgtgagtatttagattctgttagatttatttcaaatccaagtagcggaactatgggtatatctattgcgaatgaggcgtatttcagaggagctaaagttagagttatttgtggacctataagttctaagatagaaccttatgttaaggatatagtgtatgtagagacaactgaggagatgctaaatgaagttgtaaaaagtatagaaaatggtaagtttaatgttgtaattttagctggagcgcctgctgattacaagtttaaaaataaatctgacactaaaatagacagtcatacagaaatacctaaagttgaattagaaagaacaccgaaaatttctgaatacattaggaagtataatgtattgctagtaggtttttccgcagagactgtaaattctgatgaagagctgattgagaaagctaaaatcaaaatgaggagacacgggtttgatttaatcgtagctaataatgtgagaagaaaggatataggattttcgtctgaatataatgaggttatagttatagataagaatggtgatgtaaggaaaataccaaagaattttaagacggtaatagcgagaaagatattggatatagtaaaggagcaattaagaagatga

SEQ ID NO: 49383 - protein, 413 aa, Sulfolobus solfataricus P2
MHTYMTHPSKKIIGSISNELADKKILLAVTGSVAIYKSLDLARSLMRNGAEVSVIISKDAAKLISPEMFKWATGNNVVTKLTGDLEHVSLAEDNDVMIVAPSTANTMVKIAYGIADTPITATALNFVGMKKPLIIVPSMHLQMYISPQVADAADRLKRIGVEVIEPEIVGDLAHYPKLEYLTSRITSYVLRGKDLSGFNILATAGPTREYLDSVRFISNPSSGTMGISIANEAYFRGAKVRVICGPISSKIEPYVKDIVYVETTEEMLNEVVKSIENGKFNVVILAGAPADYKFKNKSDTKIDSHTEIPKVELERTPKISEYIRKYNVLLVGFSAETVNSDEELIEKAKIKMRRHGFDLIVANNVRRKDIGFSSEYNEVIVIDKNGDVRKIPKNFKTVIARKILDIVKEQLRR

SEQ ID NO: 49384 - DNA, 1197 bp, Clostridium acetobutylicum ATCC 824
  CDS (1)..(1197): transl_table=11
atggaagttaagaatgtagtcattggtgtaagcggaggaatagcagtatataaagcacttgatgttataagccgtttaaaaaaagcagactttggagtagatgttataatgacgaattcagcttctaagtttgtaacaccattaagttttcaaagtttaagtggaaataaagttataaatgatatgttcgaagaaccaaaatcatgggaaattcagcacatatctttggcaaagaaagctgatatattagttgtggtaccagctacagcaaatataataggcaaggttgcaaatggaatagctgatgacatgctttctacaactataatggcagcatatggtagatgccctattgtatttgctcctgcaatgaataccaatatgtataaaaatcctattgttcaaaataacataaaaaaattaaaggattatgggtatatttttatagaacctgaaaagggaagattggcatgcggggatgttggagaaggaaagcttgctgatacagaacttatttatgaaaatatcaaaagtcttttatataataaaagggatttagctggcaaaaaagttatggttacagcaggtcctactatagcgccaattgatcctgtacgatttataaccaatcattctacaggtaaaatgggatatgctattgctgaagaagcaagagatagaggtgctgaggttacacttataagtggagaaacaagcctaaaacctccttttggtgttgattttattaaagtgtccaccaattctgagatgatggagaaggttttagaaaaatttagcggcagcgatatagtcataaaatcagcagcagtagctgattataaagctaaaaattacagtgaattaaaaattaaaaaagccagtgataatttaaatatagaatttgtaaaagacaatgatatactaaaaaaattaggtgagattaaaaaacaccagattttagttggttttgcagcagaaagcaatgatttaattgaaaatgcttatggcaaattaactagaaaaaatttagattacatagtagcaaatgatattttatcgaaggatgcaggatttgctagtgatgaaaatagagttgtcatattgggcagtgatggaagcaaacttgagctagataaaatgtccaaaagaaaagttgcagagaatttgtttgatttattaagtaaaaagcgcagttag

SEQ ID NO: 49385 - protein, 398 aa, Clostridium acetobutylicum ATCC 824
MEVKNVVIGVSGGIAVYKALDVISRLKKADFGVDVIMTNSASKFVTPLSFQSLSGNKVINDMFEEPKSWEIQHISLAKKADILVVVPATANIIGKVANGIADDMLSTTIMAAYGRCPIVFAPAMNTNMYKNPIVQNNIKKLKDYGYIFIEPEKGRLACGDVGEGKLADTELIYENIKSLLYNKRDLAGKKVMVTAGPTIAPIDPVRFITNHSTGKMGYAIAEEARDRGAEVTLISGETSLKPPFGVDFIKVSTNSEMMEKVLEKFSGSDIVIKSAAVADYKAKNYSELKIKKASDNLNIEFVKDNDILKKLGEIKKHQILVGFAAESNDLIENAYGKLTRKNLDYIVANDILSKDAGFASDENRVVILGSDGSKLELDKMSKRKVAENLFDLLSKKRS

SEQ ID NO: 49386 - DNA, 1239 bp, Sulfolobus tokodaii str. 7
  CDS (1)..(1239): transl_table=11
atggttattcatccctcgaagaaaattataggcgagatctcatcagaacttttgaataagaaaattttagtaggagtcacaggtagtgtatccatttataagactattgacttagtgagaagcttaatgaggttaggtgcagaagtccaagttattatgagtaaagacgcttcaaaattagtctctcctacaatgtttgaatgggcaactggtaatccagtgataacaaaaatttctggcgggatagaacatgttacattagctgaagattatgacgcatatgttgtagcaccagctacagcaaatactataagcaaaattgttaatggaattgcagatactccaataacagttactgctcttaattttattggtctaaaaaaacctctaatcttagttccagcgatgcatttaccaatgtattttacacctcaaatgataaataatataaataaactaaatgagataggagtaattgttgtagaaccttttcttgtaagagatgttgctcattatccagatatagaatatttatcaaattatatttcaaccttacttcttaggggtaaggatttagaaggattgaaaattgtcgttacagctggccctacaagagagcatttagacccagtgagatttatttcaaatcctagtagtgggactatgggagttgcaatagcaaacgaggcatattttagaggtgctgatgttgttttagttcatggtcctttaagtactcatataaagccttatgttaaaaagaaagttcaggtagaaacaactgatgaaatggctaatgaagtgaagaaatttgtagaaactggatataatattgtgattttagctggagcaccagcagattataagtttaaaaacattgcttcttcaaagattgatagtcatacagaaactcctacagtagaacttgaaaaaacagtaaagatctcaagtataataaggaaatataatgttttcttagtaggttttgctgcagagactgtaaaagatgacaatgaattaatagaaaaaggtaaaataaagaaggagaggcatggctttgatttgctaatagcgaataatgcttctagaaaagatatagcattttcatcagattttaatgaagttatagtaatcggaaacaattttataaagaaaataaataaaaattataaaacagttatagctagagaaatacttgacatagttaagcaagagtataaggttcaaaaacatgggtaa

SEQ ID NO: 49387 - protein, 412 aa, Sulfolobus tokodaii str. 7
MVIHPSKKIIGEISSELLNKKILVGVTGSVSIYKTIDLVRSLMRLGAEVQVIMSKDASKLVSPTMFEWATGNPVITKISGGIEHVTLAEDYDAYVVAPATANTISKIVNGIADTPITVTALNFIGLKKPLILVPAMHLPMYFTPQMINNINKLNEIGVIVVEPFLVRDVAHYPDIEYLSNYISTLLLRGKDLEGLKIVVTAGPTREHLDPVRFISNPSSGTMGVAIANEAYFRGADVVLVHGPLSTHIKPYVKKKVQVETTDEMANEVKKFVETGYNIVILAGAPADYKFKNIASSKIDSHTETPTVELEKTVKISSIIRKYNVFLVGFAAETVKDDNELIEKGKIKKERHGFDLLIANNASRKDIAFSSDFNEVIVIGNNFIKKINKNYKTVIAREILDIVKQEYKVQKHG

SEQ ID NO: 49388 - DNA, 1206 bp, Sinorhizobium meliloti 1021
  CDS (1)..(1206): transl_table=11
atgacactgtcgggcaagcgcattcttctcatcatctccggcggcatcgcggcctataagagcctcgatctgatccgccgcctgcgcgagcgcggcgccgacgtgcgcccggtgatgacggcggcggcgcagcgtttcgtgacgccgctgaccgtcggcgcgatctcggcctcccacgttttcacggagcttttcgcgcgcgaggacgagcaggatgtcggtcacatccggctggcgcggcattgcgatctcgtggtcgtggcgccggcaacggccgacctgatggcaaagatggcgcacggtcacgccgacgacctcgcctcgacggtgctcctggcgaccgaccggccggtgctgctcgcgccggcgatgaacccgaggatgtggtcgcaccctgccacgctccgcaaccgcgcgacgctcgccggcgacggcgtccgcttcgtcggacctgccaccggcgaaatggccgagagcggcgaggcaggggaaggccgcatggccgaacctctggagatcgtcgcggcggtcgaggaattgttcagcgaggcaaggccgctcgccgggcgcaaggccatcgtcacatccggaccgacgcacgagccgatcgatccggtgcgctacatcgccaaccgctcgtccgggaagcagggccacgcgatcgccgcagcactggcacggctcggcgccgaggtcacgctcgtttccgggccggtgacgatcgcggaccccgccggcgtccgcgtcgtccgggtcgagcgcgccgaggagatgcgtgatgcggtgttggccgcgctgccggccgatgtggccgtcatggtggcggccgttgccgactggcgcgtcgcatcgacagccggcaacaagatcaagaagcggccgggagaagcccctcctccgctgcagcttgccgagaatcccgatatcctgaagaccgtcggccactacgcatcgcggccgaggctcgtgatcggctttgccgccgagaccgagaacgtcgccgagaacggccgcgccaagctccagaagaagggcgccgattacattctggccaacgacgtttcgcccgcaaccggcatcatgggcggcgaccgcaatcgcgtgaagcttatcggccgtgacggcaccgaggaatggccggaaatgggcaaggacgatgtcgcggcgaagctcgcagcgctgatcgtggcgaagctttcatcctga

SEQ ID NO: 49389 - protein, 401 aa, Sinorhizobium meliloti 1021
MTLSGKRILLIISGGIAAYKSLDLIRRLRERGADVRPVMTAAAQRFVTPLTVGAISASHVFTELFAREDEQDVGHIRLARHCDLVVVAPATADLMAKMAHGHADDLASTVLLATDRPVLLAPAMNPRMWSHPATLRNRATLAGDGVRFVGPATGEMAESGEAGEGRMAEPLEIVAAVEELFSEARPLAGRKAIVTSGPTHEPIDPVRYIANRSSGKQGHAIAAALARLGAEVTLVSGPVTIADPAGVRVVRVERAEEMRDAVLAALPADVAVMVAAVADWRVASTAGNKIKKRPGEAPPPLQLAENPDILKTVGHYASRPRLVIGFAAETENVAENGRAKLQKKGADYILANDVSPATGIMGGDRNRVKLIGRDGTEEWPEMGKDDVAAKLAALIVAKLSS

SEQ ID NO: 49390 - DNA, 1221 bp, Bacillus subtilis subsp. subtilis str. 168
  CDS (1)..(1221): transl_table=11
ttgcttaacaatcgaaatgtgttactttgcgtgagtggaggcatcgctgtttataaagcctgtgcgttaacgagcaagctggttcaggcaggagcaaatgtcaaagtgattatgactgaatccgcttgccgattcgtttcaccgctgacatttcaggcattgagccgccacgaagtctatacagatacatttaaagaacaaaatccaagcgtcatttctcatattgatgccgcagactgggccgacttgattatcgtagcgccggctacggctaatgtgattggaaaactggcaaacggcatcgctgatgatatgctgacgacaacattgttggcagcaacggctcccgtttggatcgcgccggcaatgaacgttcatatgtatgaccacccggcagtcaaacgaaacatttctgttctttatcaggacggttattgttttattgagccaagtgagggctatttagcatgcggttacgtaggaaaaggcagattggaagagccggaaaacatcgtaaagctggccgaaaaacattttgctgaagaaacatccgctcctttagaaggcaagcatgtggtcattacagccggcccaacgcgggaagcgattgatcctgtccggttttttaccaataaatcgacgggcaaaatgggctacgcactggcggaggctgctgttcagctcggcgcacgggtaatcttaatttctgggcctgtttcacttgatcagcctaaaggccttgctgagtttatccctgttcaatcggctgcggatatgcgcgaagctgtgctctctgtgtatgacgcaagcgatatagtcattaaaacagctgcggtagccgattttacgccgaaaacagtatttgaccataaaatgaaaaaacaagacggcggcatgaccttagaactgaaaagaacagtcgatattttgaaagaattgggcgagaaaaagaaagagcagattttggtcggatttgccgccgaaacacaagacattgaacactatgcacgtaaaaagctcgccgctaaaaaccttgatttgattgtggcaaatgatgtgaaagcaaatggggccggttttggtgctgatacgaatatcgtgacaatctttttcaaagacgggcataaacgcgaactcccgattatgtctaagctcgatgtttcttttgaaatccttcaggagatcgcagccctctcaaaacaaaccggagagcgctcatga

SEQ ID NO: 49391 - protein, 406 aa, Bacillus subtilis subsp. subtilis str. 168
MLNNRNVLLCVSGGIAVYKACALTSKLVQAGANVKVIMTESACRFVSPLTFQALSRHEVYTDTFKEQNPSVISHIDAADWADLIIVAPATANVIGKLANGIADDMLTTTLLAATAPVWIAPAMNVHMYDHPAVKRNISVLYQDGYCFIEPSEGYLACGYVGKGRLEEPENIVKLAEKHFAEETSAPLEGKHVVITAGPTREAIDPVRFFTNKSTGKMGYALAEAAVQLGARVILISGPVSLDQPKGLAEFIPVQSAADMREAVLSVYDASDIVIKTAAVADFTPKTVFDHKMKKQDGGMTLELKRTVDILKELGEKKKEQILVGFAAETQDIEHYARKKLAAKNLDLIVANDVKANGAGFGADTNIVTIFFKDGHKRELPIMSKLDVSFEILQEIAALSKQTGERS

SEQ ID NO: 49392 - DNA, 1218 bp, Yersinia pestis CO92
  CDS (1)..(1218): transl_table=11
atgatgacgggactttccggcaagcatattgtgctcgggataagcggaggcattgccgcatataaatctcctgagctcgtacgccgtttgcgcgacaaaggtgcagatgtgcgtgtagtgatgacccacgccgctaaagcgttcatagcaccactcacgctacaggcagtctcgggctatcccgtttctgatgatttgctcgatcctgcggcagaagccgctatggggcatattgaactgggcaaatgggctgacttagtcattattgcccccgctacggcggatttactggccagaatggcagccggaatggccaatgacctactgaccaccgtttgtctggcaaccgctgcgcctattgccgcagtaccggccatgaatcagcaaatgtaccgtgcgccagccacacaggagaatttacaaaccttgtctaaatggggtgtcttgctgtgggggccagatagcggtagccaggcttgtggcgatatcggccctggtagaatgttagacccacaagaaatcgtggctttagcgtacaatcatttctctgcaaagcaagatctgcaacatttgagtgtcatgattaccgccgggccaacacgcgaaccacttgatcctgtacgctttatcagcaatcaaagttcgggcaagatgggcttcgcgattgcccaagcattggctgcaagaggatctaacgtcacgctaatcgctggccccgtgaatttatcgacacctgaaggtgtaaaacgtattgatgtgattacagctcttgagatgcagcaggctgttcaaaaaatagcacagcagcagaacatttttatttcttgtgccgcagtagcggattaccgcgcggaacacgtttctgacgagaaaataaaaaaacaaggtgacgaaatcacacttaagttggtgaaaaatcccgatattgttgctggtgtggcttcaatggctaaaaatcgtccatttgttgttggatttgcggctgaaacccagaatgtggaagaatacgcgcgacaaaagttggcacgaaaaaatttagatctgatttgcgctaatgatgtatcactcgcagagcatggttttaacagtgataccaatgccttgcaccttttttggtcgactggagagaaacgtttaccactcagtgataaatatcttctcagtcaacgtttaatagacgagattgtcagccgttatgatgaaaaaaatcgacattaa

SEQ ID NO: 49393 - protein, 405 aa, Yersinia pestis CO92
MMTGLSGKHIVLGISGGIAAYKSPELVRRLRDKGADVRVVMTHAAKAFIAPLTLQAVSGYPVSDDLLDPAAEAAMGHIELGKWADLVIIAPATADLLARMAAGMANDLLTTVCLATAAPIAAVPAMNQQMYRAPATQENLQTLSKWGVLLWGPDSGSQACGDIGPGRMLDPQEIVALAYNHFSAKQDLQHLSVMITAGPTREPLDPVRFISNQSSGKMGFAIAQALAARGSNVTLIAGPVNLSTPEGVKRIDVITALEMQQAVQKIAQQQNIFISCAAVADYRAEHVSDEKIKKQGDEITLKLVKNPDIVAGVASMAKNRPFVVGFAAETQNVEEYARQKLARKNLDLICANDVSLAEHGFNSDTNALHLFWSTGEKRLPLSDKYLLSQRLIDEIVSRYDEKNRH

SEQ ID NO: 49394 - DNA, 1239 bp, Caulobacter crescentus CB15
  CDS (1)..(1239): transl_table=11
atgggcatgtgctgggggaacgaccggagcgtggagcgggacgtgggcgagaagcgggttcttctgatcgtcggcggcggtgtggcggcctacaaggcgctgctgctgacgcgccttctaagaaaggccggcgtggccgtgcgaccgatcctgaccaaggccggcgccgcgttcgtcacgcctttgtctctggccgcgctggccgaggacaaggtctacgaggatctcttctcgctgaccgacgagcatgagatgggccatatcgagctgtcgcgctcggctgatctcgtggtggtggcgccggcgaccgctgacctgatcgccaaggcggcccagggtctggccggagacctggcctccactacgctgctggccaccgacaagcctgtcctgatggccccagccatgaacgtgcgcatgtggctgcatccagcaacccaacgcaacatcgcgactctcgaggccgacggcgtgcgcttcgtcggccctgaggagggcgccatggcatgcggtgaattcggccccggtcgtctggccgaacccgaggcgatcttcgccgcgatcatggcggcgctggaaggtcccgccgcccgaccgctggagggcaagcgggcgctggtcaccgctggacccacgttcgaacccatcgatcccgtgcgcggcattacaaaccggtccagcggcaaacagggcttcgctatcgctgaggccctggccaagctcggcgcagaggtgaccttgatcgctggccccgtcgcgcttccgaccccacccggcgtccgccggatcgatgtcgagaccgcccgacagatgctggcggccagccaggccgctctgcccgccgacgtcggcgtctttgtcgcggctgtggccgactggcgggtcgacgaggcgtttggcagcaagctgaagaaggagaagggcggaccgccggccctgaccttcgtcgagaatcccgacatcctggcgaccttgtcggccagcggaccccatcgcccgcgccttgtcgtcggtttcgcggcggagaccgaccatgtcgaggagcacgcccgcgccaagctggcgcgcaagggttgcgactggatcatcgccaacgatgtcaccgagcccggcgtcatgggcggcggcgagaacgccgtgctgctggtgaccaaaaccggaaccgagcgctgggaccgcgccgccaaggatcgggtcgccgctcagatcgcccaacggatcgcagaggccttgggttag

SEQ ID NO: 49395 - protein, 412 aa, Caulobacter crescentus CB15
MGMCWGNDRSVERDVGEKRVLLIVGGGVAAYKALLLTRLLRKAGVAVRPILTKAGAAFVTPLSLAALAEDKVYEDLFSLTDEHEMGHIELSRSADLVVVAPATADLIAKAAQGLAGDLASTTLLATDKPVLMAPAMNVRMWLHPATQRNIATLEADGVRFVGPEEGAMACGEFGPGRLAEPEAIFAAIMAALEGPAARPLEGKRALVTAGPTFEPIDPVRGITNRSSGKQGFAIAEALAKLGAEVTLIAGPVALPTPPGVRRIDVETARQMLAASQAALPADVGVFVAAVADWRVDEAFGSKLKKEKGGPPALTFVENPDILATLSASGPHRPRLVVGFAAETDHVEEHARAKLARKGCDWIIANDVTEPGVMGGGENAVLLVTKTGTERWDRAAKDRVAAQIAQRIAEALG

SEQ ID NO: 49396 - DNA, 1224 bp, Salmonella typhimurium LT2
  CDS (1)..(1224): transl_table=11
atgatgagcctggccggtaaaaaaattgttctcggcgttagcggcggtatcgctgcgtataaaacgccggagctggtgcgccgtttacgtgagcacggcgctgacgtgcgcgtggcaatgaccgaggcggcaaaagcctttattacccccctgagcttacaggcagtgtcgggctatcccgtatccgacagtctgcttgaccctgccgctgaagccgcgatggggcatatcgagttggggaaatgggccgacctggtgattcttgcccccgcgaccgccgacctgatcgcccgtgtagcatcgggtatggctaatgatttagtctccaccatttgcctggcgacgccagccccggtggccgtgcttccggccatgaaccaacagatgtaccgcgctgccgccacgcaacataatctggaggtgctcgcctctcgcggcctgttcatttgggggccggatagcggcagtcaggcgtgcggcgacgtaggcccaggccgaatgctggacccattagttatcgttgataaggccgccgcgcatttcgctgccgtcaacgatttgcgacatcttaatatcatgattacggcaggtccgacgcgcgaaccgctcgacccggtgcgttatatttccaaccacagctccggtaaaatgggcttcgctattgcggcggccgcagcgcgtcgcggcgcaaatgtcacgctggtctccggtcccgtttcgttaccgacgccgccttttgtaaaacgggttgatgtcataaccgcgctggacatggaagccgctgttcaggccgccgttcaacagcagcacattttcattagctgcgccgccgtggctgactatcgcgcagagactatcgccagtgaaaaaatcaaaaaacaggcggcgcaaggtgatgaattactaataaaaatggtcaaaaacccggacattgtcgccggggtggccgcactcagtgacaatcgaccctacgttgttgggtttgccgcggaaacgaataatgtggaagaatacgcccggcaaaaacgtatccgtaagaaccttgacctgatttgtgcaaatgatgtttctctttcaaatcagggatttaatagcgataaaaacgctttacaccttttctggcaggatggagataaagtcttaccgcttgagcggaaagaactcctgggccaattattactcgacgagatcgtgacccgttatgatgaaaaaaatcgacgttaa

SEQ ID NO: 49397 - protein, 407 aa, Salmonella typhimurium LT2
MMSLAGKKIVLGVSGGIAAYKTPELVRRLREHGADVRVAMTEAAKAFITPLSLQAVSGYPVSDSLLDPAAEAAMGHIELGKWADLVILAPATADLIARVASGMANDLVSTICLATPAPVAVLPAMNQQMYRAAATQHNLEVLASRGLFIWGPDSGSQACGDVGPGRMLDPLVIVDKAAAHFAAVNDLRHLNIMITAGPTREPLDPVRYISNHSSGKMGFAIAAAAARRGANVTLVSGPVSLPTPPFVKRVDVITALDMEAAVQAAVQQQHIFISCAAVADYRAETIASEKIKKQAAQGDELLIKMVKNPDIVAGVAALSDNRPYVVGFAAETNNVEEYARQKRIRKNLDLICANDVSLSNQGFNSDKNALHLFWQDGDKVLPLERKELLGQLLLDEIVTRYDEKNRR

SEQ ID NO: 49398 - DNA, 1200 bp, Listeria innocua Clip11262
  CDS (1)..(1200): transl_table=11
atgcaaggaaaaaatattttactcgcagtgtcaggtggcattgctgtctataaagcagtcgcacttacaagtaaattaacgcaagcaggtgcaaacgttaaagtcatgatgaccgagcacgcacaagaatttgttccaccgctttcgtttcaagtattatccaaaaatgatgtatataccgacacctttgacgaaaaaaaatctagtgtggttgcacatattgatttagctgactgggctgatttagtaattgtcgcaccagcaacagcaaatctgattggtaaaatggcaaatggtattgctgatgatatggtaacaacgactattctagctacagaagcgccagtttgggttgcaccagcaatgaacgtccatatgattcaacatccagcagttattcgaaacattaacagactatatgcagatggcgtccgttttattgaaccagaagaaggttacttggcatgtggctatgttggccgaggtcgcctcgaagaacccgaaaaaatcgttctccgtattgcggaattttttcaagaagataaagacctacttcaaggcaaaaaagtactcgtaacagctggcgcgactcgcgaaaaattagatccagtacgatactttacaaatcattctacagggaaaatgggctttagtatagctgagtcagcagcacgtcacggtgcaaatgtaacgcttattacgacaagcaaaacactacccgtaccgccaggcgtagaagcggtatatgttgaatcggcggatgagatgtatcaagctgttttagaacgtaaagccgaacagcatattttcgtgatgacagcagccgtagcagattacacgccagcaaatgtttcagagcaaaaaatcaaaaaacaaccaggcgattttacaattgaaatgaaacgaacaaaagacattttacttgaaatcggacaaaataaaacagctgaccaagtagtaattggctttgctgctgaaacagaaaacctagaaacaaatgcacttaaaaaactcacgtccaaaaatgccgatatgattgtcgcaaataatattagcgaagcaggcgcaggtttttcaggagatacaaatattgtcactttataccgaaaagatggatctaatgaggcattaccgttactagacaaaaaagaagttgcagaacatatcatcgaagaagccgctaactttttaaggaagtga

SEQ ID NO: 49399 - protein, 399 aa, Listeria innocua Clip11262
MQGKNILLAVSGGIAVYKAVALTSKLTQAGANVKVMMTEHAQEFVPPLSFQVLSKNDVYTDTFDEKKSSVVAHIDLADWADLVIVAPATANLIGKMANGIADDMVTTTILATEAPVWVAPAMNVHMIQHPAVIRNINRLYADGVRFIEPEEGYLACGYVGRGRLEEPEKIVLRIAEFFQEDKDLLQGKKVLVTAGATREKLDPVRYFTNHSTGKMGFSIAESAARHGANVTLITTSKTLPVPPGVEAVYVESADEMYQAVLERKAEQHIFVMTAAVADYTPANVSEQKIKKQPGDFTIEMKRTKDILLEIGQNKTADQVVIGFAAETENLETNALKKLTSKNADMIVANNISEAGAGFSGDTNIVTLYRKDGSNEALPLLDKKEVAEHIIEEAANFLRK

SEQ ID NO: 49400 - DNA, 1233 bp, Nostoc sp. PCC 7120
  CDS (1)..(1233): transl_table=11
atggctcatcctcaaccgcaagctgaaaatcgcaaaagtagggttcttgttgctgtgggtggcggtatcgctgcttataaggtttgtgaggtcgtttcgaatttgtttaagtcgggggtggaagttcgagtcattcttacccgttccgcacaagaatttataacgcctttaactttatcaaccctctcccgtcaccctgcttatacagatgatgatttttggcaatctactcactctcgtccgttgcatatcgagttgggtgagtgggcggatttgttggtgattgctcccctcaccgctaataccttagctaaactcacttacgggatggctgataatttactcaccaatacagtgttagcttccaattgtcccgcattgttagcgccggcgatgaatactgatatgtgggaacaactcactgtgcagcgtaattggcagcagttgttaacagatagcagatatcatggtattggcacagcatcgggattattggcgtgcgatcgcgtcggtgctggtagaatggcggaacctccagagattttggcttacactcaatctctattacatactcaaggtaagcgagatttagccgggaagcgagttttaattagtgcgggaggtacaagggagtatcttgacccggtgcgatttattggtaatccttctactggtaaaatgggactggctttagcccaagctgctttacaccgtggggcaaaggtgacattggtgcatggggtggcgagttgggttgtacctttgggtgtgcaagcaattcccattatcaatgccgaagaaatgcagcaggtaatgttggaatatttacccaatgcagatatcatcgttatgtctgcggctgtggctgatgtcaaacctcaagattatagtacagaaaaattacccaagcgatcgctcccccagtctttacctttggaaccagtacccgatatcgttgctcaattaggtaaactcaaacaaccccatcagcgtttaattggttttgctgctcagacaggggatatagttacaccagctaaagagaaattatatagtaagaaattagatgcgatcgttgcaaaccccatcgacaaagcagatagtggttttggtagcgataataatcaagctatcttcttagataaccaagatagacaagtgacaatcccaccttgttctaaattgcaactagctcaccatctcttcgattttgtcagcaacctgacactatga

SEQ ID NO: 49401 - protein, 410 aa, Nostoc sp. PCC 7120
MAHPQPQAENRKSRVLVAVGGGIAAYKVCEVVSNLFKSGVEVRVILTRSAQEFITPLTLSTLSRHPAYTDDDFWQSTHSRPLHIELGEWADLLVIAPLTANTLAKLTYGMADNLLTNTVLASNCPALLAPAMNTDMWEQLTVQRNWQQLLTDSRYHGIGTASGLLACDRVGAGRMAEPPEILAYTQSLLHTQGKRDLAGKRVLISAGGTREYLDPVRFIGNPSTGKMGLALAQAALHRGAKVTLVHGVASWVVPLGVQAIPIINAEEMQQVMLEYLPNADIIVMSAAVADVKPQDYSTEKLPKRSLPQSLPLEPVPDIVAQLGKLKQPHQRLIGFAAQTGDIVTPAKEKLYSKKLDAIVANPIDKADSGFGSDNNQAIFLDNQDRQVTIPPCSKLQLAHHLFDFVSNLTL

SEQ ID NO: 49402 - DNA, 1206 bp, Ralstonia solanacearum GMI1000
  CDS (1)..(1206): transl_table=11
atggaactgcaaggcaaacatttcgtgctcggcctgaccggcggcatcgcatgctacaagtcggccgagctggtgcggctgctgaccaaggccggcgccaccgtgcaggtggtgatgaccgacgcggccacgcatttcatcacgccggtgacgatgcaggcgctgtccgggcggacggtgttcacgtcgcagtgggacgaccgcgtcggcaacaacatggcgcacatcgacctgtcgcgcgaggcggacgccattgtcgttgcgccggcctccacggatttcctcgccaagctcgcgcacggcctggccgacgacctgctctccacgctgtgcatcgcgcgcgactgcccgctgctggtggcgcccgccatgaaccgccagatgtgggccgcgcccgccacccggcgcaacgccgcccagctgcgcgccgacgatgtcaccctgctcggcccggacgccggcgaccaggcctgcggtgaggtcggcgacggccgcatgctggagccggaggccattgtcgaggcgctcatcggcttcttccagcccaagctgctgcgcggacgccgcgtgctgctgaccgccggcccgaccttcgagccgatcgacccggtgcgcggcatcaccaacctctccagcggcaagatgggcttcgcgctggcgcgcgccgccgcgcaggccggcgcggacgtggcgctggtcgccggcccctgtcaccaggacacgcccgccggcgtgctgcgcatcgacgtgcagaccgcccagcagatgcacgacgcggtgatgcgcgagctggacaccgcccgcaccgacgtcttcatcgcggtcgccgccgtggccgactggcgcgtcgcccaggccgccgacaacaagctcaagaagcagagcgacaccgatgtgcccgcactgtcgctcacgcaaaaccccgacatcctcgccactgtcgcgcgccgcgccgatgcgccgttctgcgtcggcttcgcggccgagaccgaacggctcgaagaattcggcgaagccaagcgccggaagaagggcatcccgctgctggtcggcaatctcggccacaagaccttcggccgcgacgacaacgaagtcgccctcttcgaccccgccggcatcacccgcctgccgcgcgccgacaagctgacgctggcgcgccagatcgtcgccgccatcgccgagcgcgtgcagggcgcacggccatga

SEQ ID NO: 49403 - protein, 401 aa, Ralstonia solanacearum GMI1000
MELQGKHFVLGLTGGIACYKSAELVRLLTKAGATVQVVMTDAATHFITPVTMQALSGRTVFTSQWDDRVGNNMAHIDLSREADAIVVAPASTDFLAKLAHGLADDLLSTLCIARDCPLLVAPAMNRQMWAAPATRRNAAQLRADDVTLLGPDAGDQACGEVGDGRMLEPEAIVEALIGFFQPKLLRGRRVLLTAGPTFEPIDPVRGITNLSSGKMGFALARAAAQAGADVALVAGPCHQDTPAGVLRIDVQTAQQMHDAVMRELDTARTDVFIAVAAVADWRVAQAADNKLKKQSDTDVPALSLTQNPDILATVARRADAPFCVGFAAETERLEEFGEAKRRKKGIPLLVGNLGHKTFGRDDNEVALFDPAGITRLPRADKLTLARQIVAAIAERVQGARP

SEQ ID NO: 49404 - DNA, 1206 bp, Agrobacterium tumefaciens str. C58
  CDS (1)..(1206): transl_table=11
atgacgctttcaggcaaacatattctcctcatcatctccggcggcatcgcagcctataagagcctcgatctcatccgccgcctgaaagagcgcggcgcgaaggtgacacctgtcatgaccaagggtgctcaggaattcgtcactccgcttgccgtcggcgcgctttcagccagcaatgtcttcaccgagattttttccaggcaggacgagcaggatgtcggccatatcaggctggcgcgcgactgcgatctcgtgctggtggcgcccgccaccgccgatctgatggcgaagatggcgaatggcttggctgacgatcttgcctccgcagtccttctcgcgacggatcgcaaggtgcttgttgcaccggccatgaatccgaaaatgtggtcggcaaagccaacgatgcgcaatgtcgaaacgctgaagagggatggcgtgtttttcatcgggcccatggccggcgagatggcggagacgggcgaggctggccttggccgcatggcggagcctttgcagatcgtcgaagccgtcttatcgctgctggatggcagctcgaagccgctcaaaggcaaaacggcgatcgtcacttccgggcctacgcatgagccgatcgatccggtgcggtatattgccaaccgctcttccggcaagcagggtcatgccatcgcagcggctctcgcggcactgggcgcggaggtcacgctggtttccggccccgtcaccatcgccgatcccgccggggtgacaacgatccatgtcgagcgcgcagaagagatgcgcgatgcggtgatctctaggcttcctgcggatatcgccgtcatggtcgccgcggttgccgactggcgggtgacaggttcctcggaacaaaagatcaagaagcagccgggcgatgcgccgccggcgctgcagctgacggagaatccggatattctcaagaccgtcggccaccatgaaaagcgccccagggtggtggtgggtttcgccgccgaaacgcaggatgtggagaaaaacggccgcgccaagctggagcgtaagggtgcggattatatcatcgccaacgatgtatcggcagaaaccggcatcatgggcggagaccgcaacagcgtgaagatcatttcggccgatggtgtcgaggcctggccggatctcgacaaggcggaagtcgcaaaacgtctggcagcccttatcgcggagaaactcgcatga

SEQ ID NO: 49405 - protein, 401 aa, Agrobacterium tumefaciens str. C58
MTLSGKHILLIISGGIAAYKSLDLIRRLKERGAKVTPVMTKGAQEFVTPLAVGALSASNVFTEIFSRQDEQDVGHIRLARDCDLVLVAPATADLMAKMANGLADDLASAVLLATDRKVLVAPAMNPKMWSAKPTMRNVETLKRDGVFFIGPMAGEMAETGEAGLGRMAEPLQIVEAVLSLLDGSSKPLKGKTAIVTSGPTHEPIDPVRYIANRSSGKQGHAIAAALAALGAEVTLVSGPVTIADPAGVTTIHVERAEEMRDAVISRLPADIAVMVAAVADWRVTGSSEQKIKKQPGDAPPALQLTENPDILKTVGHHEKRPRVVVGFAAETQDVEKNGRAKLERKGADYIIANDVSAETGIMGGDRNSVKIISADGVEAWPDLDKAEVAKRLAALIAEKLA

SEQ ID NO: 49406 - DNA, 1215 bp, Brucella melitensis 16M
  CDS (1)..(1215): transl_table=11
ttgctggacggtaagcgcatcctcctcatcattggcggtggcattgccgcctataagacgccggatctcattcgccgcctgcgtgagcgcggtgcgcatgtgcgcccattgatgacggctgcggcacagcaattcgtaacgccgctgaccattggcgcggtttccgccgatcatgtcttcaccgatctgttctcgcgtgaggatgagcaggatgtgggccatatccggcttgcccgcgaggctgatctgattgtggtcgcacccgcaacggctgacctgatggcgaagatggccaacgggcttgcggatgatctggcgagtgcggtgctgttggcccgcaaggttccgctgctgatcgcgcccgccatgaacccggccatgtgggacaatcccgcgacaaggcgcaaccgtttgacgcttgaaaaggatggcgtgcgcttcatcgggccggaaaagggcgagatggccgaaagcggggaggctggaactggccgcatgagcgagccgctggcaattgtcgcggccattgaaaatctgctctcaccgcaggcaaaaccgcttgccggcaaaacaatcgtcatgacttccggccccacatatgagccgatcgatccggtgcgttatatcgccaatcgttcgtcgggcaagcaggggcatgccattgcggcagcactcgcgcggcttggtgcgacggtgcatctcgtctccggcccggtcaatattcccgatcccgaaggtgttgacgttatccatgtcgagacggcgcgtgaaatgcaggcggctgtggaacggcatcttcccgccgatgcggcagtaatggtggccgcggttgccgactggcgcagcgccaatgaggccgggcagaagatcaagaagaagcccggcgaaggtgcgcccgtgcttgccatggtcgagaacccggacattctggcaggcatcggccatagcaaaaagcggcccggactggttgtcggctttgcagcggaaacgcaggacgtggccgaaaatgcgagagccaagcttgagaaaaaaggtgcggactggatcgtcgccaatgatgtttcgcatgggccgggtaaggacggcgtgatgggcggcgaccgcaaccgggtgcgtatcttgagccattccggcattgaggaatggccggaaatgagcaaggaagacgtcgctgaaagactggcggaaaaaatcgccgccagccttcttggttaa

SEQ ID NO: 49407 - protein, 404 aa, Brucella melitensis 16M
MLDGKRILLIIGGGIAAYKTPDLIRRLRERGAHVRPLMTAAAQQFVTPLTIGAVSADHVFTDLFSREDEQDVGHIRLAREADLIVVAPATADLMAKMANGLADDLASAVLLARKVPLLIAPAMNPAMWDNPATRRNRLTLEKDGVRFIGPEKGEMAESGEAGTGRMSEPLAIVAAIENLLSPQAKPLAGKTIVMTSGPTYEPIDPVRYIANRSSGKQGHAIAAALARLGATVHLVSGPVNIPDPEGVDVIHVETAREMQAAVERHLPADAAVMVAAVADWRSANEAGQKIKKKPGEGAPVLAMVENPDILAGIGHSKKRPGLVVGFAAETQDVAENARAKLEKKGADWIVANDVSHGPGKDGVMGGDRNRVRILSHSGIEEWPEMSKEDVAERLAEKIAASLLG

SEQ ID NO: 49408 - DNA, 1212 bp, Pyrobaculum aerophilum str. IM2
  CDS (1)..(1212): transl_table=11
gtgtctgaggtagaggcaattaggggcacgtacagcaatttgctgagagagaagaggatagtactacttgtctcctcgggcatttcgctttataaatctatagatacggcgcggttattaatcagacacggcgccgaagtttatgccttcatgactccaaaagcggcgcggttagtctcgtcggatctcttctggtgggccacggggaggaggcccgtggtaaggctgacgggcaaggcggagcacatagagatatgcgccaaagccgacgtagttttagtcgcccctgccaccgcaaatactcttgtgaagctgtcgctgggaattgccgacaacgcagccctcacctgcgccttggccgctgcgaacgccaagctggtagtggcgcctgcgatgaacttagccatgtggaacacagagcctgtgagaaacgccttagagaggcttgaaaaacgcggctacatagtgccgcccattattgaagaggggaaggcgaaataccccccgcctgaggagatagcggagtacgtaatcgacgccacagcgcctagggactacgcgggagtgcgggcgttggtcaccgccggaccaacccacgagcacattgacgacgttaagtatatcacaacgcccagtagcgggctcaccgggtattactttgccagagaggcggcggcgaggggggcaagggttacgctagtgacggggccgactaatttaaagccgccgcccaacgtggaggtagtaaaggtgacctctgtgcttgagatgtacaaggcggtagtggaaagggcctcggagaacgacctctttattttctccgcagcccctctggacttttacgtggagggcagaatcgccggcaaacttgacagcttcctatctcaataccagctgacgcttaggcaagcccccaaggcggcgcaagaagtaaagaggctaaaccccggggctgttgtcatcggctttaaggcagaatacggcgtctcagaggaggaattaatagaaagggcaaagaggaggatggaaagcggagagtgggatttcgccttggcacacgacgtgtctaaaatggggttcggaactttaaaagaccaatacctcctaatccacagggacggaaagactacgcggctcgggcccgcgcataaaagagagctggcgcgcttagtgcttaccttggcgcgcggccagttgaagagttctgattag

SEQ ID NO: 49409 - protein, 403 aa, Pyrobaculum aerophilum str. IM2
MSEVEAIRGTYSNLLREKRIVLLVSSGISLYKSIDTARLLIRHGAEVYAFMTPKAARLVSSDLFWWATGRRPVVRLTGKAEHIEICAKADVVLVAPATANTLVKLSLGIADNAALTCALAAANAKLVVAPAMNLAMWNTEPVRNALERLEKRGYIVPPIIEEGKAKYPPPEEIAEYVIDATAPRDYAGVRALVTAGPTHEHIDDVKYITTPSSGLTGYYFAREAAARGARVTLVTGPTNLKPPPNVEVVKVTSVLEMYKAVVERASENDLFIFSAAPLDFYVEGRIAGKLDSFLSQYQLTLRQAPKAAQEVKRLNPGAVVIGFKAEYGVSEEELIERAKRRMESGEWDFALAHDVSKMGFGTLKDQYLLIHRDGKTTRLGPAHKRELARLVLTLARGQLKSSD

SEQ ID NO: 49410 - DNA, 1188 bp, Clostridium perfringens str. 13
  CDS (1)..(1188): transl_table=11
atgaaagataagaaatgtgttgttgtaggagtaagtggaggagtagctgtttataaagccttagacgttataagcagactaagaaaaaaagatgtagaagtacatgtaataatgactaaatccgctactgagtttgtaacaccattatcttttcaatcattaagccaaaacatggttataacagatatgtttgctgaaccaaaggcttgggaaatacagcatatatcactagcaaagaaagcagatttaatgcttattgtaccagctacagcaaacattataggaaaggttgcaaatggcatagctgacgatatgttatcaacaactataatggcaacaaaggcgccagttgttttttgccctgcaatgaatacaaacatgtatgaaaatcctatagttcaaaggaacataagtcttctaaaggagcttggttatgaatttatagagccagctagtggaagattagcatgtggtgatgaggggaaaggtaaacttcaagataccgaaattattgcagaagaaacattgagaaggttacattctactaaggatttacttggtaagaaggttgttgttactgcaggacctactatagtgccaatagatccagtaagaattttaacaaatagatcttcaggtaaaatgggatactcaatagcagaggaagcgagagataggggagcagaagttgttcttatatcaggacctacttctttaagaaaacctaatggaattaaagttattgatataaagacaaatgaagatatgtttaatgctataaaaaatgaatttaaagatgctgatatagttattaagtcagcagctgtggctgattataaagctaaaaattatagcaatgaaaagattaaaaaaacaggtgatgatttaaatttaatttttgagagagatagagatattctaaaaactcttggagatatgaaagaaaatcaaattctagtaggctttgcagcagaaagtagcaacttaaaagaaaacgctaaaggtaaactggataggaaaaatctagattatattgttgcaaatgacataagtaagtcagaaacaggttttgcaagtgatgaaaataaagttactataataagcaaatctggtgaagaggtatctttagaaaagatgtctaaaagagaagttgcaaagaatatatttgacattataaaagggcgctaa

SEQ ID NO: 49411 - protein, 395 aa, Clostridium perfringens str. 13
MKDKKCVVVGVSGGVAVYKALDVISRLRKKDVEVHVIMTKSATEFVTPLSFQSLSQNMVITDMFAEPKAWEIQHISLAKKADLMLIVPATANIIGKVANGIADDMLSTTIMATKAPVVFCPAMNTNMYENPIVQRNISLLKELGYEFIEPASGRLACGDEGKGKLQDTEIIAEETLRRLHSTKDLLGKKVVVTAGPTIVPIDPVRILTNRSSGKMGYSIAEEARDRGAEVVLISGPTSLRKPNGIKVIDIKTNEDMFNAIKNEFKDADIVIKSAAVADYKAKNYSNEKIKKTGDDLNLIFERDRDILKTLGDMKENQILVGFAAESSNLKENAKGKLDRKNLDYIVANDISKSETGFASDENKVTIISKSGEEVSLEKMSKREVAKNIFDIIKGR

SEQ ID NO: 49412 - DNA, 1209 bp, Pyrococcus furiosus DSM 3638
  CDS (1)..(1209): transl_table=11
atgcttcaccacgtcaagctaatctacgccacaaaaagtcgaaagctagttggaaaaaagatagttctcgcaatcccagggagtattgcagctgtggaatgtgtaaagcttgctagggaactaattaggcatggggccgaagttcatgcagtgatgagtgaggcagccaccaagataattcatccttatgcaatggaatttgccacgggaaatccagtcataactgagatcactggatttatcgagcatgttgagttagcaggggaacatgagaataaagcagatttaattttggtttgtcctgccactgccaacacaattagtaagattgcatgtggaatagatgatactccagtaactacagtcgtgaccacagcatttccccacattccaattatgatagccccagcaatgcatgagacaatgtacaggcatcccatagtaagggagaacattgaaaggttaaagaagcttggcgttgagtttataggaccaagaattgaggagggaaaggcaaaagttgcaagcattgatgaaatagtttacagagttattaaaaagctccacaaaaaaacattggaagggaagagagtcctagtaacggcgggagcaacaagagagtacatagatccaataagattcataacaaatgccagcagtggaaaaatgggagtagcgttggctgaagaagcagattttagaggagctgaggttaccctcataagaacaaagggaagtgtaaagagctttgtagaaaatcaaattgaagttgagacagtggaagaaatgctttcagcgattgaaaatgagttgaggagtaaaaagtatgacgtagttattatggcagctgctgtaagcgattttaggccaaaaattaaagcagagggaaaaattaaaagcgatagatcaataacgatagagctcgttccaaatcccaaaatcattgatagaataaaggaaattcaaccaaatgtctttcttgttggatttaaagcagaaacttcaaaagaaaagcttatagaagaaggtaaaaggcagattgagagggccaaggctgacttagtcgttggtaacacattggaagcctttggaagcgaggaaaaccaagtagtattaattggcagagatttcacaaaagaacttccaaaaatgaaaaagagagagttagcagagagaatttgggatgagatagagaaattactgtcctga

SEQ ID NO: 49413 - protein, 402 aa, Pyrococcus furiosus DSM 3638
MLHHVKLIYATKSRKLVGKKIVLAIPGSIAAVECVKLARELIRHGAEVHAVMSEAATKIIHPYAMEFATGNPVITEITGFIEHVELAGEHENKADLILVCPATANTISKIACGIDDTPVTTVVTTAFPHIPIMIAPAMHETMYRHPIVRENIERLKKLGVEFIGPRIEEGKAKVASIDEIVYRVIKKLHKKTLEGKRVLVTAGATREYIDPIRFITNASSGKMGVALAEEADFRGAEVTLIRTKGSVKSFVENQIEVETVEEMLSAIENELRSKKYDVVIMAAAVSDFRPKIKAEGKIKSDRSITIELVPNPKIIDRIKEIQPNVFLVGFKAETSKEKLIEEGKRQIERAKADLVVGNTLEAFGSEENQVVLIGRDFTKELPKMKKRELAERIWDEIEKLLS

SEQ ID NO: 49414 - DNA, 1263 bp, Corynebacterium glutamicum ATCC 13032
  CDS (1)..(1263): transl_table=11
atgactcatgtttcaagcccctccgcaccccgcaacgtggttgttggtgttgccggcggaatcgcagcgtacaaggcgtgtcacatcgtgcgcgcgtttaaagaagcgggcgataatgtgcgggtggttcctacggaatccgcgttgaagtttgtggggaaggcgacgtttgaagcgttgtctggcaatccggtgtctacaacggtgtttgatgcggtggattcggtgcagcatgtgaaagttggccaggaggctgatttgatcgtgattgcgccggcgacagccgatttgatggcgcgtgtggtggcaggtcgcggtgacgatctgttggcggcgacgctgctggtggcaacgtgccccgtggttattgcgccggccatgcatacggagatgtggtttaatccggctaccgtagccaatgtggcaacgctgaggcagcgggggattaccgtgattgagcctgcgcatggtcgactcaccggtaaagatacaggccctggccggctgccggatccagagcagattgttgatttagccaatgcggtgcacgccggggcgaggttgcctcaggatttggcgggcaagaaagtgctgatcactgctggtggcacgcatgagcatattgatcctgtgcgctttattggcaatagttcctcgggccgtcaaggttttgcgttgggtgaaatcgcagcacagcgaggtgctcatgtcagcatcgtggcgggaaatgctgcggagctgcccactccggcaggcgcagagatcgtgccggtggtgtccacacaagacatgtttgatgcagtccaggaacgagctggccaatctgatttcatcgtcatggcggcagcggtagctgatttcacgcccgcatcgcaggcgacatcgaagttgaagaagggctcagattctgatgaagacgcattgagcaccatctcgttggtggaaaacccggatattttggctaccacggtgaagcgtcgtgaagcaggagagctggacagtaatcctgtcatcgtgggttttgctgcggaaactggagacgagcacaccaccgccttggagtatgcgcgcaagaaactgcagaagaagggctgcgacctcctcatgtgtaatgaggtgggcatgggcaaagtgtttgggcaaaagcacaatgagggctggattttggatgctcacggtggggtagtcgatgtggagcacggcagcaaaatcgaggttgctgcgcaaatttgggacgcggcactggcgtatcgcgaagtctag

SEQ ID NO: 49415 - protein, 420 aa, Corynebacterium glutamicum ATCC 13032
MTHVSSPSAPRNVVVGVAGGIAAYKACHIVRAFKEAGDNVRVVPTESALKFVGKATFEALSGNPVSTTVFDAVDSVQHVKVGQEADLIVIAPATADLMARVVAGRGDDLLAATLLVATCPVVIAPAMHTEMWFNPATVANVATLRQRGITVIEPAHGRLTGKDTGPGRLPDPEQIVDLANAVHAGARLPQDLAGKKVLITAGGTHEHIDPVRFIGNSSSGRQGFALGEIAAQRGAHVSIVAGNAAELPTPAGAEIVPVVSTQDMFDAVQERAGQSDFIVMAAAVADFTPASQATSKLKKGSDSDEDALSTISLVENPDILATTVKRREAGELDSNPVIVGFAAETGDEHTTALEYARKKLQKKGCDLLMCNEVGMGKVFGQKHNEGWILDAHGGVVDVEHGSKIEVAAQIWDAALAYREV

SEQ ID NO: 49416 - DNA, 1215 bp, Fusobacterium nucleatum subsp. nucleatum ATCC 25586
  CDS (1)..(1215): transl_table=11
atgaaaaatattttattaggagttacaggaggtattgcagcatttaagtcagcaagtattgtgtcacttcttaaaaagaaaggttacaatgttaaagttgtaatgacaaagaatgctacaaatataatagggcctttaaccttggaaactctttcaagaaatagaatatatgttgatatgtgggatactaatccacattatgaagttgaacatatttcactagcagattgggcagatatggttttaattgctcctgccacttataacattattggtaaggtagcaaatggaatagcagatgatatgcttacaacaatcctttctgctatttcagtaagaaaaccagtgttttttgctcttgcaatgaatgtaaatatgtatgaaaacccaatccttaaagaaaatgttgataagttaaaatcttatggttacagatttattgaagcagaagaaggtttacttgcttgtaactatgttgcaaagggtagaatgagtgagcctaaagatattgttgaagaaatagaaagatataatatttattcaaagatagaaaattgtgatactacattgaaaggtaaaaaacttcttataacaagtggtagaacaaaagaaaatatagaccctattagatatttatcaaataattcaagtggtaaaatggggtattgtcttgtacaggcagctgttgatttaggtgcagaagtaactttaatcagtggacctacaaatttagatataccaaaaggacttaaaaattttatttctgtggagtcggctattcaaatgtatgaaaaagtagatgaatattttaaggacacagatatttttatagcttgtgcagctgttgcagattatagaccaaaagaatataaaaaagaaaagataaaaaaatcagattcagatttgactatagagttggttagaaaccctgatattttagcagaaatgggtaagaaaaaagataagcaactattagttggttttgcagcagaaactaatgatataaaaaaaaatgctttaaaaaaattagaaaagaaaaatttagatattatagtggcaaataatgcttctacaatgggtacagatagcaatacaattgaagttataaagagagataaaagttcagttgaaataaaacaaaaaaataaaatagaattagcttatgatattttattagaagttattttagagttaaaaaaggataaaaatgaatag

SEQ ID NO: 49417 - protein, 404 aa, Fusobacterium nucleatum subsp. nucleatum ATCC 25586
MKNILLGVTGGIAAFKSASIVSLLKKKGYNVKVVMTKNATNIIGPLTLETLSRNRIYVDMWDTNPHYEVEHISLADWADMVLIAPATYNIIGKVANGIADDMLTTILSAISVRKPVFFALAMNVNMYENPILKENVDKLKSYGYRFIEAEEGLLACNYVAKGRMSEPKDIVEEIERYNIYSKIENCDTTLKGKKLLITSGRTKENIDPIRYLSNNSSGKMGYCLVQAAVDLGAEVTLISGPTNLDIPKGLKNFISVESAIQMYEKVDEYFKDTDIFIACAAVADYRPKEYKKEKIKKSDSDLTIELVRNPDILAEMGKKKDKQLLVGFAAETNDIKKNALKKLEKKNLDIIVANNASTMGTDSNTIEVIKRDKSSVEIKQKNKIELAYDILLEVILELKKDKNE

SEQ ID NO: 49418 - DNA, 1131 bp, Methanopyrus kandleri AV19
  CDS (1)..(1131): transl_table=11
ttggttaacgtggtcgtatgcgtgacgggtagcgtagccgcgtatcgcgccccggacgtttgccgggaactggtacgtcggggtcatcgcgtccgggtcgtcgcatcggaggaggccctgaggttcgtaggtaaggacgcactggggttcgcggccgaggaggtcatcttccggctcacatcacgggcggagcacgtagagctggccgagtgggccgacgtggtggcggtagtaccggccacgctgaacaccctcgccaagatcgcgcgcggggtagctgacgcccccgtccccctcacggccgtgacatcgttaggggccggaaaacgattagtcgtcgcccccgcgatgtccctgcacatgtaccggtcgccaccggctcgggagatcctacgccagctggaggatatgggcgtcaccgtcgtgggacctgtaatcgaggaagggaaggccaaactggcctcgatagaggaaatagtagaggccgtggagggagagctgtcgggctttagggtcctggtcaccggcgggccgacgatggagcccttggacgatgtccgggtgatcaccaaccggagctcgggacggacggcgtgtgagatctgccgcgagctccgtgcgcgtggggccgaggtcgtgttcgtccatgggccgctccgagtggacccgcccccgatggacgagcgtgtggaggtggaaaccacccgcgaaatgctcgaggaggtcgtgaagaggatcgacgacgtggacgctatcgtgatggcggcggcaccgtcggacttccgaccggcggagcgtgccgacgggaagctggactcgcgacgtgagcacgagatccgtctgatccctaccgagaagatagtacgggaagtgtttccggatttcgacggagttagggtggcattcaagctagatcccgagccggtggaaggggcccgacggcttctggacgaagtcccgtgtgagctcgtcgtcgccaatcctccggagaccgccggtgccgagggatcggagtggtggatattggacggagacggcgaggtcatcgagcgggtgaaaggggacaagcgggagctggccaggaagttggtagacgctctctcgaaactgctccggggtgaccgcgggtga

SEQ ID NO: 49419 - protein, 376 aa, Methanopyrus kandleri AV19
MVNVVVCVTGSVAAYRAPDVCRELVRRGHRVRVVASEEALRFVGKDALGFAAEEVIFRLTSRAEHVELAEWADVVAVVPATLNTLAKIARGVADAPVPLTAVTSLGAGKRLVVAPAMSLHMYRSPPAREILRQLEDMGVTVVGPVIEEGKAKLASIEEIVEAVEGELSGFRVLVTGGPTMEPLDDVRVITNRSSGRTACEICRELRARGAEVVFVHGPLRVDPPPMDERVEVETTREMLEEVVKRIDDVDAIVMAAAPSDFRPAERADGKLDSRREHEIRLIPTEKIVREVFPDFDGVRVAFKLDPEPVEGARRLLDEVPCELVVANPPETAGAEGSEWWILDGDGEVIERVKGDKRELARKLVDALSKLLRGDRG

SEQ ID NO: 49420 - DNA, 1296 bp, Methanosarcina acetivorans C2A
  CDS (1)..(1296): transl_table=11
ttgaaagagtctcagaagcaggaggatcggatgaagcctgaccagaaaaatccttcccggacgaaagctgaaaaaactcaccctaccctctggatccagggacagaagagttcttccctttccggaaaaacgattgtcctgggcgttaccgggagtataggagcggtcagggtagttgaacttgcaagggaactgatccggaacggggcggaagtccatgcagtcatgaccggggctgcaaagcgtatcctgcaccccgatgctctgcaatacgccaccggaaaccctgtgattacggaactcggcggcagggtggagcacgtggagttctgcgggttcaaaggcagggcagaccttctcctgatagccccggcaacggcgaacaccattggaaaaatagcatgcggaatagacgataccacggttacctcttttgcaacaacagcccttggctccggcgttcctctcatggttgtccccgcaatgcatgagtccatgtacaggcacccggctgtggttgaaaatgtggcaaagttgaaaggctggggaatttccatggtgggcccgaagttcgcagaaggcattgcaaagatcgcctcaaacgaagaaatcgtgcttgaggtggaaagggctcttgggaaccggagcctggaaaaacggaaggtgctcataacgagtggctccactgccgaaaaccttgaccccatccgtatcctcaccaaccgggcttccggaaagaccggcagggaacttgcccttgaagcttaccgcagcggagctgatgtaacccttgtgcacagggacaggctcgggcttgcagggattaaagaggtctttgccgaaagcgctgcggaaatgaccgaagccgtgctctcggaactggaaaaaggatatgatgccctgatcagttctgcggcaattgcggattatacggccgagccttctcctgagaagatcaaatcgggaggagaatttgtgctcaaactgaaacccactcgaaaactgataaaggagtgcagggaaaaataccctgacctggtgatcataggttttaaggccgaaacaggagtcgggagagacgaactccttaaaagggcagctgcaaccctaaaaggaacaaaactcgatctgattgcagcaaacgatgtaggaaaaggtggaatgggtacggaagaaaatgagctttacctgcttggaaaaggcgaacccaggcatgtaagcggaaacaagcgcaaacttgcagcctgtatccttgaagagcttaccggaattttaaactcacgagaggggctctga

SEQ ID NO: 49421 - protein, 431 aa, Methanosarcina acetivorans C2A
MKESQKQEDRMKPDQKNPSRTKAEKTHPTLWIQGQKSSSLSGKTIVLGVTGSIGAVRVVELARELIRNGAEVHAVMTGAAKRILHPDALQYATGNPVITELGGRVEHVEFCGFKGRADLLLIAPATANTIGKIACGIDDTTVTSFATTALGSGVPLMVVPAMHESMYRHPAVVENVAKLKGWGISMVGPKFAEGIAKIASNEEIVLEVERALGNRSLEKRKVLITSGSTAENLDPIRILTNRASGKTGRELALEAYRSGADVTLVHRDRLGLAGIKEVFAESAAEMTEAVLSELEKGYDALISSAAIADYTAEPSPEKIKSGGEFVLKLKPTRKLIKECREKYPDLVIIGFKAETGVGRDELLKRAAATLKGTKLDLIAANDVGKGGMGTEENELYLLGKGEPRHVSGNKRKLAACILEELTGILNSREGL

SEQ ID NO: 49422 - DNA, 1197 bp, Thermoanaerobacter tengcongensis MB4
  CDS (1)..(1197): transl_table=11
atgaataacaagaaaaatgtggtgctaggtgttacaggaggtatagcagcatataaagctgcggacctcacctcgaggcttgtaaaaaaggatataaatgtagatgtcattatgactaaagaagctacaaattttataaatcctttgacttttgaagccttaacccacaataaagtaactgtagatatgtttacagataggaagtattgggagattgagcatatctctcttgcagaaaaagcggaccttttcgctatagttccagcaactgctaatataattgcaaagattgctcatggaattgcagatgacatgctgaccaccactttacttgcaacaaaaagcccagttctaattgctccggctatgaataccaacatgtacacaaatcctttaactcaaaggaatattaagactttaaaagagatcgggtttatttttgttgaaccagcagcaggcagacttgcctgtgggacatacggggcagggaaactggctgatgtggaagaaattgaaaaagccatactagaccttttgtacagagaaaaagagaaagactttgaaggtaagaaagttttgataacagcgggtcctacgagagagcccctcgatccggttagatacattacaaaccgctcctcggggaaaatggggtatgagattgccaaggcttttgtggaaagaggagctcgtgtagtgctcgtgtctggacctactcacatagatattcctaagggagttacatttattcctgttgaaacagctgctgatatgtacaacgctgtgatgatgcaccttgaggaagctgacataatagttggagcagctgctgttgctgactataggcctaaagaggtaaaaaaggaaaaaataaaaaaagatgaagaaactatggtgattgagcttgtaaaaaatccagacataatgtatgaagtaggacaaaagaagggaaataaaatttcagtcggctttgcagctgaaactgaaaatctgatagactatgctaagaagaagttaaaagagaaaaatatggatttaatagtggcaaatgacgtttctcaagaaggagcaggctttgaagtggacacgaacataataaaagttatcaacaaagaccttgaagtgaaggagtatccgatgatgacgaaaagggaagcagctcatgtcattttagatgagatagcaaagttgttgtga

SEQ ID NO: 49423 - protein, 398 aa, Thermoanaerobacter tengcongensis MB4
MNNKKNVVLGVTGGIAAYKAADLTSRLVKKDINVDVIMTKEATNFINPLTFEALTHNKVTVDMFTDRKYWEIEHISLAEKADLFAIVPATANIIAKIAHGIADDMLTTTLLATKSPVLIAPAMNTNMYTNPLTQRNIKTLKEIGFIFVEPAAGRLACGTYGAGKLADVEEIEKAILDLLYREKEKDFEGKKVLITAGPTREPLDPVRYITNRSSGKMGYEIAKAFVERGARVVLVSGPTHIDIPKGVTFIPVETAADMYNAVMMHLEEADIIVGAAAVADYRPKEVKKEKIKKDEETMVIELVKNPDIMYEVGQKKGNKISVGFAAETENLIDYAKKKLKEKNMDLIVANDVSQEGAGFEVDTNIIKVINKDLEVKEYPMMTKREAAHVILDEIAKLL

SEQ ID NO: 49424 - DNA, 1260 bp, Xanthomonas campestris pv. campestris str. ATCC 33913
  CDS (1)..(1260): transl_table=11
gtgaccggctccactcaggcccgccccctggacggacagcgcttgctgctgtgcgtcggcggaggcattgccgcctacaaatcgctcgaactggtccgtcgcctgcgcgacgccggtgcgcaggtgcaggtcgccatgaccagcggcgcgcagcaattcgtcaccccgctcagcttccaggcgctgtctggccagcccacccgcaccaccttgtgggacagcgctgccgagcaggccatgggccatatcgaactggcacgttgggccgaccgcgtgatcgtcgcgccggccaccgccgatctgctggcgcgcctggcgcacggcttggccgatgacctggtcaccaccctgtgcctggccaccactgcgccactgaccgtggcgccggcgatgaatcaccgcatgtggctgcacccggccacccaggccaatatcgccaccttgcgcgcgcgcggcgtggcggtggtcggcccggatgacggcccgttggccgagggcgaatccggtcccggccgcttggccgagccggccgcgatcatcgcggcgctggccggtgacggtctgcgtcaagacgccgccgccgcgtcgcccccggtgttcgttcccagcagtgctcaactcgaaggcctgcgcatcgtgatcagcgccggccctaccttcgaggacctggacccggtgcgctacgtcggcaaccgcagcagcggcaagatgggctacgcgctggcagcggcggccgcacgccagggcgccgatgtggtgctgatcagcgggccggtgcaccagaccacgcccgagggcgtgcagcgcctggatgtgcgctcggccgcgcagatgcgcgatgcggtgctgggcgcgtttccggccgacatctacattggcgcagccgcggtggccgactacacgcccaagcgggtggtgtcgcagaagatcaagaagaccggcgagacgctcacgctggaactggtgcgcacgccggacatcttgtccgaggtcgccgcgcagaccggcgcgctgaaactggtggtcggttttgctgccgaaacgcacgacgtggagcattacgcccgtggcaagctggcggccaagcggctggacctgatcatcgccaatcaggtggggatcgccggcggtggctttgaaagcgacaacaatgccgccaccgcctattggcagggcggcgagcgtgcgtttcccagcagcagcaagacggacctggccgagcaattgctggccctgatcgcggagagattgcaggcatga

SEQ ID NO: 49425 - protein, 419 aa, Xanthomonas campestris pv. campestris str. ATCC 33913
MTGSTQARPLDGQRLLLCVGGGIAAYKSLELVRRLRDAGAQVQVAMTSGAQQFVTPLSFQALSGQPTRTTLWDSAAEQAMGHIELARWADRVIVAPATADLLARLAHGLADDLVTTLCLATTAPLTVAPAMNHRMWLHPATQANIATLRARGVAVVGPDDGPLAEGESGPGRLAEPAAIIAALAGDGLRQDAAAASPPVFVPSSAQLEGLRIVISAGPTFEDLDPVRYVGNRSSGKMGYALAAAAARQGADVVLISGPVHQTTPEGVQRLDVRSAAQMRDAVLGAFPADIYIGAAAVADYTPKRVVSQKIKKTGETLTLELVRTPDILSEVAAQTGALKLVVGFAAETHDVEHYARGKLAAKRLDLIIANQVGIAGGGFESDNNAATAYWQGGERAFPSSSKTDLAEQLLALIAERLQA

SEQ ID NO: 49426 - DNA, 1275 bp, Xanthomonas axonopodis pv. citri str. 306
  CDS (1)..(1275): transl_table=11
gtgatcggctccactcaggcccgccccctggacggacagcgtttgctgctgtgcgtcggcggaggcatcgccgcttacaaatcgctcgaactggtccgtcgcctgcgcgacgccggtgcgcaggtgcaggtcgccatgaccggcggtgcgcagcaattcatcaccccgctcagcttccaggcattgtccgggcagcccacccgcaccacgctgtgggacagcgccgccgagcaggcgatgggccacatcgaactggcgcgctgggccgatcgggtgatcgtcgccccggcgaccgccgacctgctggcgcggctggcgcatggtctggccgacgatctggtcaccacgctgtgcctggccacgaccgcgccgctgaccgtggcgccggccatgaaccaccgcatgtggctgcatcctgccacccaggccaacatcgccaccctgcgcgcgcgcggggtgacggtggtgggccctgacgacggcccgctggccgagggcgaatccggccccgggcggctggccgaaccggcggcgatcattgctgcgctggccggtggcgcggcggccgccagcactgccccggagggcgccaggagcgtcgtcgcgcccgtcttcatccccagcagcgcgcagttggagggcctgcgcatcgtgatcagcgccggccccaccttcgaagacctggacccggtgcgctacgtcggcaaccgcagcagcggcaagatgggctatgccctggccgccgcagctgccaggcaaggcgctgatgtggtgctggtcagcgggccggtgcatcaaaccaccccggatggcgtgcagcgcatcgacgtgcgctcggccgcgcagatgcgcgacgcggtgctgggtgcattcccggccgacatctacatcggcgctgccgccgtggccgactacacccccaagcgggtggtgtcgcagaagatcaagaagaccggcgaaacgttgaccctggaactggtgcggaccccggacatcctgtccgaggtcgccgcgcagaccggcgcgctgaaactggtggtcggttttgctgccgaaacgcacgatgtggagcattacgcccgtggcaagctggcggccaagcgcctggacctgatcatcgccaaccaggtagggatcgaaggcggcggattcgaaagcgacaacaacgcagccacggcctattggcagggcggcgagcgcgtgtttcccagcagcagcaagaccgaattggccgaccaactgctggccctgatcgcggagagattgcaggcatga

SEQ ID NO: 49427 - protein, 424 aa, Xanthomonas axonopodis pv. citri str. 306
MIGSTQARPLDGQRLLLCVGGGIAAYKSLELVRRLRDAGAQVQVAMTGGAQQFITPLSFQALSGQPTRTTLWDSAAEQAMGHIELARWADRVIVAPATADLLARLAHGLADDLVTTLCLATTAPLTVAPAMNHRMWLHPATQANIATLRARGVTVVGPDDGPLAEGESGPGRLAEPAAIIAALAGGAAAASTAPEGARSVVAPVFIPSSAQLEGLRIVISAGPTFEDLDPVRYVGNRSSGKMGYALAAAAARQGADVVLVSGPVHQTTPDGVQRIDVRSAAQMRDAVLGAFPADIYIGAAAVADYTPKRVVSQKIKKTGETLTLELVRTPDILSEVAAQTGALKLVVGFAAETHDVEHYARGKLAAKRLDLIIANQVGIEGGGFESDNNAATAYWQGGERVFPSSSKTELADQLLALIAERLQA

SEQ ID NO: 49428 - DNA, 1221 bp, Chlorobium tepidum TLS
  CDS (1)..(1221): transl_table=11
gtgctgactggcagaaacattcttctcggcatctccggcggcatcgctgcctacaaaacgccgcaactggtcaggcttctgaaaaagtcgggagccggcgtgcaggtgctggccaccgcgtcggcgctgaagtttgtcagcgaactgtcgcttgctacggtctcgaaccatccagtgctcacaggcattttcccaagccatgaggcacgggaagacgaatacacccgccacattgcgctcggcgagtgggccgacgcgttcgtcatcgcacccgccaccgccaacaccctcgctcgcctcgccaccgggctctgcgacgacatgctctcgctctgttttctcaccctccgccccggcaagccggtgctcatcgttccggcgatggacggccatatgtacgactccccctcggtgcagcgcaacctcgcgacgctcagggcgcaggggtgccgcttgatggaacccgaaagcggctcgctcgcctcgggccagtgcggcctggggcgaatgcccgaaccggagacgatcttcgaggcgctcacaggaatgctcgccgcgccggaagcgtccgcgctttgcggcaaatcggtggtcgtgaccgccgggccaacgcgggagaaaatcgatggtgtgcgctttctctcgaactactcctccggcaagatgggcttcgccatcgccgccaacgcagcgcggcgcggcgcaagggttcaccttgtaacggggccagtcaatctgccgacgccgtcgggcgtggagcgaatcgacgtcgagagcgcggtcgaaatgctggaagcggcacaaccattgttcggcgaatgcgatctcttcatcggcgcagcggcggtggccgactaccgccccgaagcgccggtcgagggcaagatcaagaagaacgaagcggagatggagattcgtcttgtcaggaatccggacattctcgccgaattcgcgacgaaccgaaagctaggccagctcgccgtcggcttcgcgctggagacggccggcggcatcgattacgcacggaaaaaactggcagacaaaaagctcgacctggtcgccttcaacgtgtacgatggccgcacttcgggcttcgaagtcgataccaacgcactgacgctcctcgctcgcgacggcggcgtcaccgaactgccgctactcccgaaggaagaggccgcagccagactgctcgacgcggtcgaatcgcttctgccccgttaa

SEQ ID NO: 49429 - protein, 406 aa, Chlorobium tepidum TLS
MLTGRNILLGISGGIAAYKTPQLVRLLKKSGAGVQVLATASALKFVSELSLATVSNHPVLTGIFPSHEAREDEYTRHIALGEWADAFVIAPATANTLARLATGLCDDMLSLCFLTLRPGKPVLIVPAMDGHMYDSPSVQRNLATLRAQGCRLMEPESGSLASGQCGLGRMPEPETIFEALTGMLAAPEASALCGKSVVVTAGPTREKIDGVRFLSNYSSGKMGFAIAANAARRGARVHLVTGPVNLPTPSGVERIDVESAVEMLEAAQPLFGECDLFIGAAAVADYRPEAPVEGKIKKNEAEMEIRLVRNPDILAEFATNRKLGQLAVGFALETAGGIDYARKKLADKKLDLVAFNVYDGRTSGFEVDTNALTLLARDGGVTELPLLPKEEAAARLLDAVESLLPR

SEQ ID NO: 49430 - DNA, 1332 bp, Yersinia pestis KIM
  CDS (1)..(1332): transl_table=11
atgcgtgacgtctcgcaaattttacgattggtcgcttcagagagtgccctgatagctaatctgttcaatggttatgctaaaatatcgcctcttacagctttcattcggacaatcatgatgacgggactttccggcaagcatattgtgctcgggataagcggaggcattgccgcatataaatctcctgagctcgtacgccgtttgcgcgacaaaggtgcagatgtgcgtgtagtgatgacccacgccgctaaagcgttcatagcaccactcacgctacaggcagtctcgggctatcccgtttctgatgatttgctcgatcctgcggcagaagccgctatggggcatattgaactgggcaaatgggctgacttagtcattattgcccccgctacggcggatttactggccagaatggcagccggaatggccaatgacctactgaccaccgtttgtctggcaaccgctgcgcctattgccgcagtaccggccatgaatcagcaaatgtaccgtgcgccagccacacaggagaatttacaaaccttgtctaaatggggtgtcttgctgtgggggccagatagcggtagccaggcttgtggcgatatcggccctggtagaatgttagacccacaagaaatcgtggctttagcgtacaatcatttctctgcaaagcaagatctgcaacatttgagtgtcatgattaccgccgggccaacacgcgaaccacttgatcctgtacgctttatcagcaatcaaagttcgggcaagatgggcttcgcgattgcccaagcattggctgcaagaggatctaacgtcacgctaatcgctggccccgtgaatttatcgacacctgaaggtgtaaaacgtattgatgtgattacagctcttgagatgcagcaggctgttcaaaaaatagcacagcagcagaacatttttatttcttgtgccgcagtagcggattaccgcgcggaacacgtttctgacgagaaaataaaaaaacaaggtgacgaaatcacacttaagttggtgaaaaatcccgatattgttgctggtgtggcttcaatggctaaaaatcgtccatttgttgttggatttgcggctgaaacccagaatgtggaagaatacgcgcgacaaaagttggcacgaaaaaatttagatctgatttgcgctaatgatgtatcactcgcagagcatggttttaacagtgataccaatgccttgcaccttttttggtcgactggagagaaacgtttaccactcagtgataaatatcttctcagtcaacgtttaatagacgagattgtcagccgttatgatgaaaaaaatcgacattaa

SEQ ID NO: 49431 - protein, 443 aa, Yersinia pestis KIM
MRDVSQILRLVASESALIANLFNGYAKISPLTAFIRTIMMTGLSGKHIVLGISGGIAAYKSPELVRRLRDKGADVRVVMTHAAKAFIAPLTLQAVSGYPVSDDLLDPAAEAAMGHIELGKWADLVIIAPATADLLARMAAGMANDLLTTVCLATAAPIAAVPAMNQQMYRAPATQENLQTLSKWGVLLWGPDSGSQACGDIGPGRMLDPQEIVALAYNHFSAKQDLQHLSVMITAGPTREPLDPVRFISNQSSGKMGFAIAQALAARGSNVTLIAGPVNLSTPEGVKRIDVITALEMQQAVQKIAQQQNIFISCAAVADYRAEHVSDEKIKKQGDEITLKLVKNPDIVAGVASMAKNRPFVVGFAAETQNVEEYARQKLARKNLDLICANDVSLAEHGFNSDTNALHLFWSTGEKRLPLSDKYLLSQRLIDEIVSRYDEKNRH

SEQ ID NO: 49432 - DNA, 1185 bp, Thermosynechococcus elongatus BP-1
  CDS (1)..(1185): transl_table=11
gtgggggtggggggtggcattgctgcctataaaatctgcgatgtgatctccacgcaggtgaaagcggggtggcaggtttctgccatcctttcggagactgcttcgcagttcattacccctttgaccctttcaaccctgtgccggcgatcggtactcacggatgcggatttttggcatccccaagcgccacgcccactgcatattgagctggcggaaacggcaaccctgatgttaattgctccgctgacagctaatacattggcaaaattggtgttgggtttggcggacaacctactgaccagtaccgtgctggcctcccaaatgccgatcttggtggcaccggccatgaacaccaccatgtgggagcaaccgacggtgcaagcccattggcaacaactgcaacaacagccccggtatcattccttaccccccgcctatggccacttggcctgtgacactgtcggtgtggggcgaatggcacaaacgcaggaaatcattgcctatttagattctttggcctacacccacggcaagcgagacttagctgggaagcatctgctgattaccgccgggggcacccgtgaatattgggatgcggtgcgctttatcggtaatccggcaacgggaaaaatggggatcgctctggcaagggcagccctgcaccgcggggcaaaggtgacgttgattcatggggcgatcgccgagccaatcccagcacaggtacgcgctattgaagcaatgagtggcgaagcaatgttcaaggccgtcttagaggtgtggccagaggcagattggctggtgatggctgccgccgttggcgatgttcgcccggctcagcagtggtcgggaaagctgcccaaatcggcgttgcctacggccttacccctgagtccagtgcccgatattttgcaagcggcggctcaaatgcgtcggccccaccaacgtctgattggttttgccgcccaaacgggggacgttgtcgcccctgcccaggaaaagctcaaacgcaagggcttggatttgattgttgccaacgcagtagatcaagcggattgtggttttggcaccactgaaaacgccgcggtcgtcctggattgtcaggggcgatcgcgccatttggccaaggtacccaagttaattctggcccaccaaatttttgacattgtccaagaatggctgccatga

SEQ ID NO: 49433 - protein, 394 aa, Thermosynechococcus elongatus BP-1
MGVGGGIAAYKICDVISTQVKAGWQVSAILSETASQFITPLTLSTLCRRSVLTDADFWHPQAPRPLHIELAETATLMLIAPLTANTLAKLVLGLADNLLTSTVLASQMPILVAPAMNTTMWEQPTVQAHWQQLQQQPRYHSLPPAYGHLACDTVGVGRMAQTQEIIAYLDSLAYTHGKRDLAGKHLLITAGGTREYWDAVRFIGNPATGKMGIALARAALHRGAKVTLIHGAIAEPIPAQVRAIEAMSGEAMFKAVLEVWPEADWLVMAAAVGDVRPAQQWSGKLPKSALPTALPLSPVPDILQAAAQMRRPHQRLIGFAAQTGDVVAPAQEKLKRKGLDLIVANAVDQADCGFGTTENAAVVLDCQGRSRHLAKVPKLILAHQIFDIVQEWLP

SEQ ID NO: 49434 - DNA, 1209 bp, Oceanobacillus iheyensis HTE831
  CDS (1)..(1209): transl_table=11
atgctacaaaacaagaaaattttacttggtgtctccggtgggatagctgtatataaggcttgtggtctggcaagtaaactaactcaagcaggtgcagaagtcagagtgataatgacagaaagcgcacaagaatttgtttcaccgctaacttttcaagcattgactagaaatccagtgtatacagacacatttgatgaaaaaaatccgaaaaaaatagcacatattgatatagctgattgggcggatattgccattattgctccagctacagcaaatattattagcaaactggctagtggacaagcagacgatatgctctcaactactatgttagcgacacaggcagaagtctatatagcgcctgcaatgaatgtacatatgtatgctcatccagccgtcatgaataatatgaaacaacttgaatcttggggatatcactttattgaaccgggtgcaggttatttagcatgtggttatgttggtaaagggagactagaagaacctgaagagattgtatctgttatccaaagacatgtatcaaaacaacaatatttacatgggaagaaaatccttatttctgcaggtcctacacgagaaaccgtagatcctgtccgttttttctccaatcgttcatcggggaaaatgggatttgccttggcagaagcagccgcaaatctaggggctgaagttacacttgtttcaggtccggtaagtttacaaactaatcatcctaatattaatcgaatcgatataacctctgctcaagagatgtacgatgagattacaagtcggtttgaccatcaagatatagtaattaaatcagcagcggttgctgattatcgtcctaaattcatgcatcaaggaaagatgaagaaaaaggatagagattatacaattgaaatggaaagaacaaaagatatattagcaacactaggtgagcagaagagacatcaatttttagtagggtttgctgctgaaacagatacaccgattgaatacggattaggaaagctagatcgtaaaaatttagatgcaattgtagtaaacgatattagttcagatggtgcaggttttgagggagacacgaatattgttacgtatattaataagaaaaaacagcaaaaatcaattcatcaagcaacaaaatcagatatagcttatcaattatttgaattaatttcccaagacttaaaggatgatgaccgttga

SEQ ID NO: 49435 - protein, 402 aa, Oceanobacillus iheyensis HTE831
MLQNKKILLGVSGGIAVYKACGLASKLTQAGAEVRVIMTESAQEFVSPLTFQALTRNPVYTDTFDEKNPKKIAHIDIADWADIAIIAPATANIISKLASGQADDMLSTTMLATQAEVYIAPAMNVHMYAHPAVMNNMKQLESWGYHFIEPGAGYLACGYVGKGRLEEPEEIVSVIQRHVSKQQYLHGKKILISAGPTRETVDPVRFFSNRSSGKMGFALAEAAANLGAEVTLVSGPVSLQTNHPNINRIDITSAQEMYDEITSRFDHQDIVIKSAAVADYRPKFMHQGKMKKKDRDYTIEMERTKDILATLGEQKRHQFLVGFAAETDTPIEYGLGKLDRKNLDAIVVNDISSDGAGFEGDTNIVTYINKKKQQKSIHQATKSDIAYQLFELISQDLKDDDR

SEQ ID NO: 49436 - DNA, 1221 bp, Brucella suis 1330
  CDS (1)..(1221): transl_table=11
atggcattgctggacggtaagcgcatcctcctcatcattggcggtggcattgccgcctataagacgccggatctcattcgccgcctgcgtgagcgcggtgcgcatgtgcgcccattgatgacggctgcggcacagcaattcgtaacgccgctgaccattggcgcggtttccgccgatcatgtcttcaccgatctgttctcgcgtgaggatgagcaggatgtgggccatatccggcttgcccgcgaggctgatctgattgtggtcgcacccgcaacggctgacctgatggcgaagatggccaacgggcttgcggatgatctggcgagtgcggtgctgttggcccgcaaggttccgctgctgatcgcgcccgccatgaacccggccatgtgggacaatcccgcgacaaggcgcaaccgtttgacgcttgaaaaggatggcgtgcgcttcatcgggccggaaaagggcgagatggccgaaagcggggaggctggaactggccgcatgagcgagccgctggcaattgtcgcggccattgaaaatctgctctcaccgcaggcaaaaccgcttgccggcaaaacaatcgtcatgacttccggccccacatatgagccgatcgatccggtgcgttatatcgccaatcgttcgtcgggcaagcaggggcatgccattgcggcagcactcgcgcggcttggtgcgacggtgcatctcgtctccggcccggtcaatattcccgatcccgaaggtgttgacgttatccatgtcgagacggcgcgtgaaatgcaggcggctgtggaacggcatcttcccgccgatgcggcagtaatggtggccgcggttgccgactggcgcagcgccaatgaggccgggcagaagatcaagaagaagcccggcaaaggtgcgcccgtgcttgccatggtcgagaacccggacattctggcaggcatcggccatagcaaaaagcggcccggactggttgtcggctttgcagcggaaacgcaggacgtggccgaaaatgcgagagccaagcttgagaaaaaaggtgcggactggatcgtcgccaatgatgtttcgcatgggccgggtaaggacggcgtgatgggcggcgaccgcaaccgggtgcgtatcttgagccattccggcattgaggaatggccggaaatgagcaaggaagacgtcgctgaaagactggcggaaaaaatcgccgccagccttcttggttaa

SEQ ID NO: 49437 - protein, 406 aa, Brucella suis 1330
MALLDGKRILLIIGGGIAAYKTPDLIRRLRERGAHVRPLMTAAAQQFVTPLTIGAVSADHVFTDLFSREDEQDVGHIRLAREADLIVVAPATADLMAKMANGLADDLASAVLLARKVPLLIAPAMNPAMWDNPATRRNRLTLEKDGVRFIGPEKGEMAESGEAGTGRMSEPLAIVAAIENLLSPQAKPLAGKTIVMTSGPTYEPIDPVRYIANRSSGKQGHAIAAALARLGATVHLVSGPVNIPDPEGVDVIHVETAREMQAAVERHLPADAAVMVAAVADWRSANEAGQKIKKKPGKGAPVLAMVENPDILAGIGHSKKRPGLVVGFAAETQDVAENARAKLEKKGADWIVANDVSHGPGKDGVMGGDRNRVRILSHSGIEEWPEMSKEDVAERLAEKIAASLLG

SEQ ID NO: 49438 - DNA, 1293 bp, Shigella flexneri 2a str. 301
  CDS (1)..(1293): transl_table=11
gtgaaggcacgacaacaaaagtattgtgataaaatcgccaacttctggtgtcacccaacaggaaaaatcatcatgagcctggccggtaaaaaaatcgttctcggcgttagcggcggtattgctgcctataaaacccctgaactggtgcgtcgtttgcgcgatcgcggggccgacgtccgcgtagccatgaccgaagcggcaaaagcctttatcaccccacttagcttgcaggcggtttctggttatcccgtttccgacagtctgcttgacccggcagccgaagccgctatgggccatattgagctgggtaaatgggctgatttagtgattctcgcccctgccacggcagatttgattgcccgtgttgctgccggaatggcgaatgacctggtatcgacgatttgtctggctacacctgcgcctgtagccgtgctccccgccatgaaccagcagatgtaccgtgccgctgccacgcagcataatttagaggtgcttgcttcccgtggtttgctcatctgggggccagacagtggcagtcaggcttgtggtgatatcggtcctggacgaatgctcgatccgttaaccattgtggatatggcggtggcgcatttttcgcccgtcaacgacctgaaacatctgaacattatgattaccgccggtccgacgcgtgaaccgctcgatccggtgcgttatatctctaatcacagctccggcaagatgggttttgctatcgccgccgctgctgcccgtcgtggcgcgaacgtcacgctggtatcaggtccagtttcactaccgacgccaccgtttgttaaacgtgttgatgtgatgaccgcgctggcaatggaagccgccgtgaatgcttctgtacagcagcaaaatatttttatcggttgcgccgccgtggcggattatcgcgcagctaccgtggccccagaaaaaatcaaaaagcaggccacgcagggtgatgaattaacaataaaaatggttaaaaaccccgatatcgtcgcaggcgttgccgcactaaaagaccatcgaccctacgtcgttggatttgccgccgaaacaaataatgtggaagaatacgcccggcaaaaacgtatccgtaaaaaccttgatctgatctgcgcgaacgatgtttcccagccaactcaaggatttaacagcgacaacaacgcattacaccttttctggcaggacggagataaagtcttaccgcttgagcgcaaagagctccttggccaattattactcgacgagatcgtgacccgttatgatgaaaaaaatcgacgttaa

SEQ ID NO: 49439 - protein, 430 aa, Shigella flexneri 2a str. 301
MKARQQKYCDKIANFWCHPTGKIIMSLAGKKIVLGVSGGIAAYKTPELVRRLRDRGADVRVAMTEAAKAFITPLSLQAVSGYPVSDSLLDPAAEAAMGHIELGKWADLVILAPATADLIARVAAGMANDLVSTICLATPAPVAVLPAMNQQMYRAAATQHNLEVLASRGLLIWGPDSGSQACGDIGPGRMLDPLTIVDMAVAHFSPVNDLKHLNIMITAGPTREPLDPVRYISNHSSGKMGFAIAAAAARRGANVTLVSGPVSLPTPPFVKRVDVMTALAMEAAVNASVQQQNIFIGCAAVADYRAATVAPEKIKKQATQGDELTIKMVKNPDIVAGVAALKDHRPYVVGFAAETNNVEEYARQKRIRKNLDLICANDVSQPTQGFNSDNNALHLFWQDGDKVLPLERKELLGQLLLDEIVTRYDEKNRR

SEQ ID NO: 49440 - DNA, 1227 bp, Shewanella oneidensis MR-1
  CDS (1)..(1227): transl_table=11
atgtctgtgagcctgataacgaaaaacgtcctactgggtattggtggcggcattgcggcctacaaaagtgcggatttagtgcgccgcttaaaagaacgcggctttgatgtacgtgtggtgatgagccaaagtgcgatggaatttattaccccactcacactgcaagccttatcagggcatccggtatcatcaagcttactcgatcccgccgccgaagcagcgatgggccatattgaactggcgcgctgggccgatttagtcattatcgcccccgcgacggcaaatctgctcgcccgcatcaatgcaggcatggcagatgaattaatcactaccacttgtcttgccactgaagcgccaattgcactctgtcccgcgatgaaccagcagatgtatcgcaatctcgccactcaagccaatttagccagtttacaaagccgtggttataccctgtggggtccagcaagtggcagccaagcctgcggtgaagtgggccctggccgcatgctcgaaccactcgaaattgccgaactcgcgagtcgcttttttgcaacaaaagatgtctatgctgaacaggaatcacaaccgctagcaggccagtcggtgctgatcactgcaggcccaacccgcgaagccatcgatcctgtacgttatatctctaatcacagctctggcaaaatgggctttgcattagcgaaggcagcggccgacatgggcgcggctgtgaccttggtcgcaggaccagtaaatttagccacgcctgaaggggtgacgcgaatcgatgtcgaatcggcgcaaaacatgctcgatgccgttatggataatgttgataaaaaagatatttttatcggttgcgccgctgttgccgactatcgcgtcaacgatattgccgcctgtaagatcaaaaagtcagcggaagaaatgcaacttgcgctagtgaggaatcctgatatcttagcgacggtcgcaagcttagcaaaccgtccttttgtggtgggatttgccgcagagacccacgatgtagaaacctacgcccgcgataaacttaaacgtaaaaatttgaatatgatcgccgcaaacgatgtatccgttgctggccaaggctttaacgccgatgccaatgccctgcgcgtattctggccacagggtagtcaagatttgcctgctaccgataaactcacgttggcacggcaattactttcgttgatagtgaaagaaaaaacaaaatag

SEQ ID NO: 49441 - protein, 408 aa, Shewanella oneidensis MR-1
MSVSLITKNVLLGIGGGIAAYKSADLVRRLKERGFDVRVVMSQSAMEFITPLTLQALSGHPVSSSLLDPAAEAAMGHIELARWADLVIIAPATANLLARINAGMADELITTTCLATEAPIALCPAMNQQMYRNLATQANLASLQSRGYTLWGPASGSQACGEVGPGRMLEPLEIAELASRFFATKDVYAEQESQPLAGQSVLITAGPTREAIDPVRYISNHSSGKMGFALAKAAADMGAAVTLVAGPVNLATPEGVTRIDVESAQNMLDAVMDNVDKKDIFIGCAAVADYRVNDIAACKIKKSAEEMQLALVRNPDILATVASLANRPFVVGFAAETHDVETYARDKLKRKNLNMIAANDVSVAGQGFNADANALRVFWPQGSQDLPATDKLTLARQLLSLIVKEKTK

SEQ ID NO: 49442 - DNA, 1284 bp, Streptomyces coelicolor A3(2)
  CDS (1)..(1284): transl_table=11
atgggtcgtacacgcagtccgaacggcgcgcagtccgaacggggcgtggtccgagcgcgttatccgagccggggagagacggtggacaagcccaaggtcgttctgggggtcagcggcggcatcgccgcgtacaaggcctgtgagctgctgcgcagactcaccgagtccggacacgaggtccgggtcgtccccaccgcctccgcgctgcacttcgtcggcgccgccacctggtccgccctgtccggcaaccccgtgtcgaccgaggtctgggacgacgtccacgaggtcccgcacgtgcgcatcggccagcacgccgacctggtcgtcgtcgccccggccaccgccgacatgctcgccaaggccgcccacggactggccgacgacctgctcaccaacaccctgctcaccgcccgctgcccggtcgtcttcgcgcccgcgatgcacaccgagatgtgggagcacccggccacccaggagaacgtggcggcactgcgccgccgcggcgccgtagtgatcgagcccgccgtcggccgcctcaccggcgtcgacaccggcaagggccggctgcccgacccgggcgagatcttcgaggtctgccgccgggtgctcgcccgcggggtgcgcgagcccgacctcgccggacggcacgtcgtggtcagcgccggcggcacccgggagcccctcgacccggtccgcttcctcggcaaccgctcctccggcaagcagggctacgccctcgcccgcaccgcggccgcccgcggtgcccgcgtcacgctcgtcgcggcgaacgcctcgatgccggacccggccggcgtcgacgtggtgcccgtcggcacggcggtggagctgcgcgaggcggtgctgcgcgccgcggccgacgccgacgccgtcgtcatggccgcggcggtggcggacttccggcccgcgacgtacgccaccgggaagatcaagaagaaggacgaccaggaaccggcgccgatcaccctggtgcgtaatccggacatcctcgcggagatctcccagacccgggcccgctccggacaggtggtcgtcggcttcgccgccgagaccgacgacgtcctggccaacggccgggtcaagctgaaacgcaagggctgcgacctcctcgtggtgaacgaggtgggggagcgcaagaccttcggctccgaggagaacgaggcggtggtcctgggcgccgacggcagcgagacaccggtcgcccacggccccaaggaagccctggccgacacggtctgggacctcgtcgcccggcggctggaatga

SEQ ID NO: 49443 - protein, 427 aa, Streptomyces coelicolor A3(2)
MGRTRSPNGAQSERGVVRARYPSRGETVDKPKVVLGVSGGIAAYKACELLRRLTESGHEVRVVPTASALHFVGAATWSALSGNPVSTEVWDDVHEVPHVRIGQHADLVVVAPATADMLAKAAHGLADDLLTNTLLTARCPVVFAPAMHTEMWEHPATQENVAALRRRGAVVIEPAVGRLTGVDTGKGRLPDPGEIFEVCRRVLARGVREPDLAGRHVVVSAGGTREPLDPVRFLGNRSSGKQGYALARTAAARGARVTLVAANASMPDPAGVDVVPVGTAVELREAVLRAAADADAVVMAAAVADFRPATYATGKIKKKDDQEPAPITLVRNPDILAEISQTRARSGQVVVGFAAETDDVLANGRVKLKRKGCDLLVVNEVGERKTFGSEENEAVVLGADGSETPVAHGPKEALADTVWDLVARRLE

SEQ ID NO: 49444 - DNA, 1371 bp, Corynebacterium efficiens YS-314
  CDS (1)..(1371): transl_table=11
gtggtcactgggtgttttaagcatgcccggatcatgcttccggctagagtgtgggaagaaaaccaatccccagccagccgaaggaaaacaacaggcatgacgcagcagcgtgtgagtgaacaggtccagtcaatccccgagtcgacacgccgggtggtcgtcggtgtcgccggtggcatcgcagcctacaaggcctgtcacatcatccgcgccttcaaggaggcgggggatgatgtccgggtggtccccaccgaggccgccctgagtttcgtcggtagggcgaccttcgaggcattgtctggtaatcccgtctccaccacggtgttcgacgatgtggatcaggtgcagcacgtccgtgtcggccaggaggccgatctgattgtcatcgcccccgccacggctgacctgatggcccgtctcgcgatgggccgtgcggatgatctgttgactgccactgtgctggtggccacctgcccggtggttctcgccccggccatgcacacggagatgtggttcaacccggccaccgtggccaatgttgccacccttcgggaacggaatatcaccgtcatcgaacccgcccatggccgtttgaccggaaaggacaccggtccgggacgtctgccggatccggaacagatcgtggagatcgcgaatgcagccgccggtggggtcaccttcaaccaggatctggcgggtaaacgggttctcatcaccgccggtggcacccaggagcatatcgacccggtgcgctatatcggcaacagctcctccggcaggcaggggtacgcgctcggggaggtggctgcccagcggggtgcacgggtgaccatcatcgccggcaatacggtggaactgccgaccccggcgggggcggagatcgtggacgtcacctccaccggggatatgttcactgaggtgcaggaacgggcaggggagtccgacatcatcatcatggcggccgccgtggcggatttccgcccggatacccaggctgattccaaactgaagaagggcgctgatgagggggcgttgaccaccgtgcacctggtggagaacctggacattctgaaaaccacggtccgtcgcagggaagaaggtgagctcgcctctgatcccgtgatcgtcgggttcgccgccgagaccggtgatgcagagaccagtgcgttggattacgcgcgcgccaaacttgagcgcaagggctgtgacctgctgatgtgtaatgaggtcgggcatgggaaagtcttcgggcagacgcggaacgaggggtggatcctgaccgcggacggtggtgtgaccgaggttccccaaggcaccaagttggaggtggccgcgcgcatcctggatgccgctgtggcagtggaacgctga

SEQ ID NO: 49445 - protein, 456 aa, Corynebacterium efficiens YS-314
MVTGCFKHARIMLPARVWEENQSPASRRKTTGMTQQRVSEQVQSIPESTRRVVVGVAGGIAAYKACHIIRAFKEAGDDVRVVPTEAALSFVGRATFEALSGNPVSTTVFDDVDQVQHVRVGQEADLIVIAPATADLMARLAMGRADDLLTATVLVATCPVVLAPAMHTEMWFNPATVANVATLRERNITVIEPAHGRLTGKDTGPGRLPDPEQIVEIANAAAGGVTFNQDLAGKRVLITAGGTQEHIDPVRYIGNSSSGRQGYALGEVAAQRGARVTIIAGNTVELPTPAGAEIVDVTSTGDMFTEVQERAGESDIIIMAAAVADFRPDTQADSKLKKGADEGALTTVHLVENLDILKTTVRRREEGELASDPVIVGFAAETGDAETSALDYARAKLERKGCDLLMCNEVGHGKVFGQTRNEGWILTADGGVTEVPQGTKLEVAARILDAAVAVER

SEQ ID NO: 49446 - DNA, 1212 bp, Pseudomonas putida KT2440
  CDS (1)..(1212): transl_table=11
atgcagcggctgtatcgcaagcgcatcgttctcggcgtgggtggcggcattgccgcctacaaaagcgccgagctgattcgccgtctcctggagcacggcgcgcaggtgcgcgtcgtcatgacccggggtggtgcagaattcatcaccccgctgaccctgcaggcgctgtcgggccaccccgtacacatggacctgctcgacccggccgccgaagctgccatgggccatatcgagctggccaagtgggcggacctggtgctgatcgccccagccaccgccgacctcatggcacgcatggcccagggcatggcagacgacctgctgaccacgctggtgctggccactgacgccaccgtcgccgtggcgccggcgatgaaccaggccatgtggcgtgacccggccacccaagccaacctcgagctgctcaagagccgtggcattcaggtgttcggcccggcatccggcagccaggcctgtggcgacgtcggcctggggcgcatgctcgaagccaccgacctggcctggtgcgccgcggaaagcttcaagcgccaggcactgaccggcaagcacgtgctgatcaccgccgggccgacccaggaaaacatcgacccggtgcgctacatcaccaatcatagctccggcaagatgggcttcgccctggccgaagcggccgccgaagcaggggctcgggtgaccctcgtcactggccctgtgcacttgccaacccctgaccgggtcagccgcatcgacgtcgtcagcgcgcgggacatgctcgcggcctgtgaagcggccaagccgtgcgacctgttcatcgcctcggcagcggttgcggactaccgtcccgaagtggttgccacacaaaaactgaagaaagatcctacgaccggcgacggcatgctgctgcagatggtgcgtaatcccgatatccttgccaccattgctggccgcgccgaccgcccgttcagcgtcggctttgccgccgaaaccgagcacctgctcgattacgccacgcgcaagctcaaggacaagaacctcgacctgatcgtcgccaatgatgtggccaaccccagcatcggcttcaacagcgaagaaaacgccttgaccgtgatcgaccgccagcagcaccagaccctcttcgcgcagaccagcaagggcaagatcgcccggcaactggtcgccttcatcgccgaacggctcaaccaggttcaataa

SEQ ID NO: 49447 - protein, 403 aa, Pseudomonas putida KT2440
MQRLYRKRIVLGVGGGIAAYKSAELIRRLLEHGAQVRVVMTRGGAEFITPLTLQALSGHPVHMDLLDPAAEAAMGHIELAKWADLVLIAPATADLMARMAQGMADDLLTTLVLATDATVAVAPAMNQAMWRDPATQANLELLKSRGIQVFGPASGSQACGDVGLGRMLEATDLAWCAAESFKRQALTGKHVLITAGPTQENIDPVRYITNHSSGKMGFALAEAAAEAGARVTLVTGPVHLPTPDRVSRIDVVSARDMLAACEAAKPCDLFIASAAVADYRPEVVATQKLKKDPTTGDGMLLQMVRNPDILATIAGRADRPFSVGFAAETEHLLDYATRKLKDKNLDLIVANDVANPSIGFNSEENALTVIDRQQHQTLFAQTSKGKIARQLVAFIAERLNQVQ

SEQ ID NO: 49448 - DNA, 1200 bp, Staphylococcus epidermidis ATCC 12228
  CDS (1)..(1200): transl_table=11
atgaaacatattttattagctgttacaggcggtatcgcagcatataaagcaattgatttaacaagtaaattaatacaatccggctatgatgtaagagttatgctatctgatcatgctcaagagtttgttactccgctagcttttcaagcaatcagtagaaatcctgtttacacaaatacatttaaagaagaaaatcctgaagagattcaacatgtatcattaggagactgggcagatgcgattatagtcgcgccagcaactgctaatactatcgcaaaattaagtgttggaattgctgatgatttaattacttctacattacttgctacaacaacaccaaaattcgttgcacccgcaatgaatgtaaatatgtataacaatccacgtactaaacataatatgaaagtgctaagtcaagacggatattattttattgaacctggtagtggctatttagcatgtggttatgtagcaaaagggcgaatggaagaacccatgcaaatcctatctgttattaataaattttttactcaacagaagaatgttgtcaaaagctctttttctggaaagcgcgcattagttacagctgggcctacagttgaagttattgatcctgttcgatacgtatcaaatcgttcatcaggaaaaatgggatatgctatagctgaagcattacgagataagggagcaatcgtaactttaattagtggtcccacccacttatctctacctgaagggattaatgtagtaaaagttgagagtgcagatgatatgtttcaagctgtaaccgaacgctttgcgaaacaagatatagtgattaaagcagcggcggtgtctgattatacaccaatggacatacttgaacataaattaaaaaaacaagaaggaggattatctgttcaatttaagcgtacaaaggatattttaaaatacttaggagaaaataaaacgcaccaatatcttgttggttttgctgctgaaacacaaaatattgaacagtatgctctagacaaactcaaaagaaaaaatgcagatgttatcatttcgaacaatgtaggtgatacatccataggctttagttcagatgacaatgaattaactatgcattttaaaaataatgaaaaagtaaatattaagaaaggaaaaaaatcagctttagcacatcaaattatagaaattttagaaactaggtggcagtaa

SEQ ID NO: 49449 - protein, 399 aa, Staphylococcus epidermidis ATCC 12228
MKHILLAVTGGIAAYKAIDLTSKLIQSGYDVRVMLSDHAQEFVTPLAFQAISRNPVYTNTFKEENPEEIQHVSLGDWADAIIVAPATANTIAKLSVGIADDLITSTLLATTTPKFVAPAMNVNMYNNPRTKHNMKVLSQDGYYFIEPGSGYLACGYVAKGRMEEPMQILSVINKFFTQQKNVVKSSFSGKRALVTAGPTVEVIDPVRYVSNRSSGKMGYAIAEALRDKGAIVTLISGPTHLSLPEGINVVKVESADDMFQAVTERFAKQDIVIKAAAVSDYTPMDILEHKLKKQEGGLSVQFKRTKDILKYLGENKTHQYLVGFAAETQNIEQYALDKLKRKNADVIISNNVGDTSIGFSSDDNELTMHFKNNEKVNIKKGKKSALAHQIIEILETRWQ

SEQ ID NO: 49450 - DNA, 1467 bp, Bradyrhizobium japonicum USDA 110
  CDS (1)..(1467): transl_table=11
gtgccggagggcgtcatggcgagcctaaccatccgcaagctcgacgaacacgtcaaaacctatctgcggctgcgttcggccaagaatcacaggtcccttgaggaagaggtccgggtcatcctgcgggagctgatcgagggccgtgaggagccgttgacgccctttgcggtgccgcctacggcatccaccgctccgacgcctcagcgcaccggcgcccttgccgaggccagcgtcactctgatcatcggcggcgggatcgcggcctttaaatcgctcgacctgatccgaaggctgaaggagcggcgcatcgaggtccgctgcgtgctgaccaacgcggcccagcagttcgtcacgccgctctcggtcagcgccctttcgcatgagcgcgtctataccgacctgttcgatccccagagcgagttcgacgccggccatatccgcctggcccgtgactgcgacttgatcgtggtggcccccgccacggccgacctgatggccaagatggcgaacggccatgccgacgacctcgccagcgccattctgctcgcgaccaaccgcaaggtgctgctggcgccggcgatgaatccgctgatgtggaacaacgcggcgacccgacgcaacgtcgcgcagcttcagcgcgacggcgtcgtgctgatcgggccgaattccggagagatggccgaggcgggtgaagccggtatcggccgcatgtccgaggcgttggagatcgccgccgccgccgagcgcctgctgcggccgccggtgccgcgcccgctcgccggcaagcgcgtgctgatcaccgcgggcccgacccacgagccgatcgacccggtgcgctacatcgccaaccgctcctccggcaagcagggttttgccatcgccgccgccgcgcaggccgccggcgccgaggtgatcttggtgagcggcccggtcgatctcggcgatccccagggcgtgacggtgaagcatgtggaatcggcgcggcagatgctggagcaggtgcaggcggcccttcccgccgacatcgcgatcttcgccgccgcggtcgccgactggcgcgtcgccaatgagggcgagcagaagctgaagaagacctcggccggcatgccgccgctccagctggtcgagaaccccgacatcctcgccacgatcgcgaagctgaccgacaagcgcccgccgctggtgatcggcttcgccgccgagaccgagcacctcatcgacaacgccaagacaaaacttgcccgcaagggctgcgactggatcgtcgccaacgacgtctcgccggcgaccggcgtgatgggcggcgaccgcaacactgtccacctcatcagccgcaagaatggtgagaagaacggcgagatcgcggttgattcctggcccgcgatgaccaaggaacaggtcgccaccgagctgatcgcgcatatcgtcaagagtgtgatcggcaaatccctggagcccgcatcttga

SEQ ID NO: 49451 - protein, 488 aa, Bradyrhizobium japonicum USDA 110
MPEGVMASLTIRKLDEHVKTYLRLRSAKNHRSLEEEVRVILRELIEGREEPLTPFAVPPTASTAPTPQRTGALAEASVTLIIGGGIAAFKSLDLIRRLKERRIEVRCVLTNAAQQFVTPLSVSALSHERVYTDLFDPQSEFDAGHIRLARDCDLIVVAPATADLMAKMANGHADDLASAILLATNRKVLLAPAMNPLMWNNAATRRNVAQLQRDGVVLIGPNSGEMAEAGEAGIGRMSEALEIAAAAERLLRPPVPRPLAGKRVLITAGPTHEPIDPVRYIANRSSGKQGFAIAAAAQAAGAEVILVSGPVDLGDPQGVTVKHVESARQMLEQVQAALPADIAIFAAAVADWRVANEGEQKLKKTSAGMPPLQLVENPDILATIAKLTDKRPPLVIGFAAETEHLIDNAKTKLARKGCDWIVANDVSPATGVMGGDRNTVHLISRKNGEKNGEIAVDSWPAMTKEQVATELIAHIVKSVIGKSLEPAS

SEQ ID NO: 49452 - DNA, 1230 bp, Xylella fastidiosa Temecula1
  CDS (1)..(1230): transl_table=11
gtgactggatctcatcagccacggtcattgaacggacagcgtttgctgttgtgtgtcagtggtggtattgctgcttataaatcgcttgagcttgtgcgccgcctttgtggtgcgggtgctcaggtccaggttgcgatgactgctagtgcgcagcagtttgtcacgccacttagtttccaggcattgtctggccaatcgacccgtaccacgctgtgggatggtaacgctgaacaggcgatggggcatattgagttggcgcgttgggccgagcgtgttttgattgctcctgctagtgctgatgtgatcgcgcggttggcgcatggtttggcggatgatttggtgacgactctgtgtttggcgacaacggcgccgctgatcatatgcccagcgatgaaccacaatatgtggctgcatccagcgactcaggcgaatgttgcgatgttgttggggcgtggtgtgcaggtcatcggaccagaggatggtccgttggcagaaggtgtgtctgggttgggccgtatgagcgaaccagaggcgattgttgttgcgttggttcagggggtgtctccagctccagttcacggtggtttgttccatgggcagcgcattgtgattagtgctggacccacattcgaagatttggatccggtgcgttaccttggcaatcgcagcagtggcaagatgggttttgctttggctagtgcggcggtgtcccatggggctgaggtggtgttggtggctggtccggtgtatcagccaactccacctggggtgattcgggtggatgtacgttcggcggcacagatgcgcgatgcagtcctcagcgcgttccccgcggatgtttacatcggtgcagctgcggtggctgattacgcacctaaatcggtgttgccacaaaagatcaagaagtctggccagacgctgatcctggagttggtgcgtacccaagacatcttgtcagaggtggcagcgcagacggctaacctgaaatttgtggttggtttcgctgcagagacgcatgatgttgcgtgctacgcacgcggtaaattggctgccaagcacttggatttgattatcgccaaccaggttgggattgttggaaacggttttgaaagtgatgacaatgctgtcactgcgtattggcagggtggcgaacgcgttttcgctagttgcagtaaggtggagttggctgagcgcctgctggcactgattgctgaaaggatgcagacatga

SEQ ID NO: 49453 - protein, 409 aa, Xylella fastidiosa Temecula1
MTGSHQPRSLNGQRLLLCVSGGIAAYKSLELVRRLCGAGAQVQVAMTASAQQFVTPLSFQALSGQSTRTTLWDGNAEQAMGHIELARWAERVLIAPASADVIARLAHGLADDLVTTLCLATTAPLIICPAMNHNMWLHPATQANVAMLLGRGVQVIGPEDGPLAEGVSGLGRMSEPEAIVVALVQGVSPAPVHGGLFHGQRIVISAGPTFEDLDPVRYLGNRSSGKMGFALASAAVSHGAEVVLVAGPVYQPTPPGVIRVDVRSAAQMRDAVLSAFPADVYIGAAAVADYAPKSVLPQKIKKSGQTLILELVRTQDILSEVAAQTANLKFVVGFAAETHDVACYARGKLAAKHLDLIIANQVGIVGNGFESDDNAVTAYWQGGERVFASCSKVELAERLLALIAERMQT

SEQ ID NO: 49454 - DNA, 1194 bp, Clostridium tetani E88
  CDS (1)..(1194): transl_table=11
atgaataaaaaaaacatagttataggtgttacaggaggaatagcagtatataaggctttagaagtaataagcaagctaaagaaaaagaattttaatatagatgttattatgacaaaatccgcctgtgaatttgtaactcctttaagctttcaaagcttaagtcaaaatatggttgttacagatatgtttgatgaaccaaaacattgggaaattcagcacatatcactggcaaaaaaagcagatcttatacttatagtgccagctacagcgaatataataggaaaagttgccaatggaatagcagatgatatgctatctactactataatggcaactagagcaccagtggtttttgctagtgccatgaatacaaatatgtataccaatccaatagtgcaacaaaatatagaaaaattaaaatcctttggatatagttttatagaaccaacatcaggtatgttagcctgtggtgatagtggtaaaggaaaattggctgatacagaacttatagcaaatatagcagaaagtatgctttatccaaaaaaagatttaataggaaagaaggttctagtaacagcaggacctacaaaagctccaattgatcccgttagatatgttacaaacaaatcaactgggaaaatgggttatgaaatagctaaagaagccagagataggggagcagatgtaactttaatatctggaacttcaaatttgcaagatccttttggaattaataccattcatattaatacaaatgaagaaatgctaaaagaagtattagataattttcaaaaacaagatattgtaataaaggcagcagccgttgcagactataaacctaagaccttttctgataagaaaataaaaaagaaagatggagaaggtttaaacttagaaatggaaaaggatacagatatattaagagaacttggcagtataaagaaaaatcaagtactagttggatttgcggcagaaagtaatgatttaattgaaaacgccacagaaaagcttaagaagaaaaatttagattatatagttgcaaatgatataacaggtcatggaattggatttgcgtctgatgataataaagtaaatatactgtgtagaaatggaaacaatatttcattagacaaaatgagtaaaaaagaagtagcaagagaaatttttgatttaatattaaaagagaaattctaa

SEQ ID NO: 49455 - protein, 397 aa, Clostridium tetani E88
MNKKNIVIGVTGGIAVYKALEVISKLKKKNFNIDVIMTKSACEFVTPLSFQSLSQNMVVTDMFDEPKHWEIQHISLAKKADLILIVPATANIIGKVANGIADDMLSTTIMATRAPVVFASAMNTNMYTNPIVQQNIEKLKSFGYSFIEPTSGMLACGDSGKGKLADTELIANIAESMLYPKKDLIGKKVLVTAGPTKAPIDPVRYVTNKSTGKMGYEIAKEARDRGADVTLISGTSNLQDPFGINTIHINTNEEMLKEVLDNFQKQDIVIKAAAVADYKPKTFSDKKIKKKDGEGLNLEMEKDTDILRELGSIKKNQVLVGFAAESNDLIENATEKLKKKNLDYIVANDITGHGIGFASDDNKVNILCRNGNNISLDKMSKKEVAREIFDLILKEKF

SEQ ID NO: 49456 - DNA, 1254 bp, Tropheryma whipplei str. Twist
  CDS (1)..(1254): transl_table=11
gtgatgcaaaatgcgatcgggcgcattttcttgggcgtatgtgggtccatctcggcatacaagtctgtttatcttgccagattattcgtaaaagagggctacgatgttagggttggcttcaccaatggggcttcccagtttgtggcaggcgaaccttttcgtgtttttaccgggcatcacgttctgaattttccctgcgatgaccagagtcatattgatatttctcagagtcatattgatatttctcggtgggcagacgccattgtggttgcaccggcaactgcaaatattcttgctgccgcccgggcgggtttggcaagcgatatagtcactcagaccattctctcctctcatgctcccgtattgttcgtcccctctatgcatactgccatgtgggagaatcccgcaactcgtgataacgtcaattgtttgctagagcgtggttatcatgttcttggtccggttactggtgatcttagcagtggtgactggggtattgggcgaatggtggatccctgcgaaattgtgcagtatgtttcacgcagccttttaaaccaccagactggtaagctgtcgggtaaaaagtttctaataaccgccgggggaacaaggcagccaatagatccggttcgttatatcgggaatcgttcgagtggaaagcaagcaattgccatagctaaagaagcgcagaagaggtctgctgaggtgattcttatagcagcaaatgtcgaggcggttactttgccaaccggtatgagagttattaccgtcgtaacagctgaagagatgcggaaggccttgtccgataacattgatacgagcgatgttgtcataatggctgcagcagtttctgattttcaaccaagagaggttgcgtcacagaaaataaagagtaatgatggctggactttgcagcttatctcgaccgatgaccttcttcgtgagcttgccagcaataaatcccgccccagagtgcttgtagggttttctgctgaaacagaggaatctgccaatttccgtatagatatcgctcgacaaaagctccttagcaagggctgtgactacatggttgtaaatcaagttggttttgatgttggttttgatgtttccgataatgaggtcagtttaatagatgataagcaggtctttttcacggcaaggggtagtaaggattacattgcaaagcgtatccttgatttcctctccgagagagtgatcgttacatatattgaccctctcgacaggtcgctttaa

SEQ ID NO: 49457 - protein, 417 aa, Tropheryma whipplei str. Twist
MMQNAIGRIFLGVCGSISAYKSVYLARLFVKEGYDVRVGFTNGASQFVAGEPFRVFTGHHVLNFPCDDQSHIDISQSHIDISRWADAIVVAPATANILAAARAGLASDIVTQTILSSHAPVLFVPSMHTAMWENPATRDNVNCLLERGYHVLGPVTGDLSSGDWGIGRMVDPCEIVQYVSRSLLNHQTGKLSGKKFLITAGGTRQPIDPVRYIGNRSSGKQAIAIAKEAQKRSAEVILIAANVEAVTLPTGMRVITVVTAEEMRKALSDNIDTSDVVIMAAAVSDFQPREVASQKIKSNDGWTLQLISTDDLLRELASNKSRPRVLVGFSAETEESANFRIDIARQKLLSKGCDYMVVNQVGFDVGFDVSDNEVSLIDDKQVFFTARGSKDYIAKRILDFLSERVIVTYIDPLDRSL

SEQ ID NO: 49458 - DNA, 1233 bp, Tropheryma whipplei TW08/27
  CDS (1)..(1233): transl_table=11
gtgatgcaaaatgcgatcgggcgcattttcttgggcgtatgtgggtccatctcagcatacaagtctgtttatcttgccagattattcgtaaaagagggctacgatgttagggttggcttcaccaatggggcttcccagtttgtgacaggcgagccttttcgtgtttttaccgggcatcacgttctgaattttccctgcgatgaccagagtcatattgatatttctcggtgggcagacgccattgtggttgcaccggcaactgcaaatattcttgctgccgcccgggcgggtttggcaagcgatatagtcactcagaccattctctcctctcgttctcccgtattgttcgtcccctctatgcatactgccatgtgggagaatcccgcaactcgtgataacgtcaattgtttgctggagcgtggttatcatgttcttggtccggttactggtgatcttagcagcggtgactggggtattgggcgaatggtggatccctgcgaaattgtgcagtatgtttcacgcagccttttaaaccatcagactggtaagctgtcgggtaaaaagtttctaataaccgccgggggaacaaggcagccaatagatccggttcgttatatcgggaatcgttcgagtggaaagcaagcaattgccatagctaaagaagcgcagaagaggtctgctgaggtgattcttatagcagcaaatgtcgaggcggttactttgccaaccggtatgagagttattaccgtcgcaacagctgaagagatgcggaaggccctgtccgataacattgatacgagcgatgttgtcataatggctgcagcagtttctgattttcaaccaagagaggttgcgtcacagaaaataaagagtaatgatggctggactttgcagcttatctcgaccgatgatcttcttcgtgagcttgccagcaataaatcccgccccagagtgcttgtggggttttctgctgaaacagaggaatctgccaattgccgtatagatatcgctcgacaaaagctccttagcaagggctgtgactacatggttgtaaatcaagttggttttgatgttggttttgatgtttccgatactgaggtcagtttaatagatgataagcaggtctttttcacggcaaggggtagtaaggattacatcgcaaagcgtatccttgatttcctctccgagagagtgatcgttacatatattgaccctctcgacaggtcgctttaa

SEQ ID NO: 49459 - protein, 410 aa, Tropheryma whipplei TW08/27
MMQNAIGRIFLGVCGSISAYKSVYLARLFVKEGYDVRVGFTNGASQFVTGEPFRVFTGHHVLNFPCDDQSHIDISRWADAIVVAPATANILAAARAGLASDIVTQTILSSRSPVLFVPSMHTAMWENPATRDNVNCLLERGYHVLGPVTGDLSSGDWGIGRMVDPCEIVQYVSRSLLNHQTGKLSGKKFLITAGGTRQPIDPVRYIGNRSSGKQAIAIAKEAQKRSAEVILIAANVEAVTLPTGMRVITVATAEEMRKALSDNIDTSDVVIMAAAVSDFQPREVASQKIKSNDGWTLQLISTDDLLRELASNKSRPRVLVGFSAETEESANCRIDIARQKLLSKGCDYMVVNQVGFDVGFDVSDTEVSLIDDKQVFFTARGSKDYIAKRILDFLSERVIVTYIDPLDRSL

SEQ ID NO: 49460 - DNA, 1248 bp, Pseudomonas syringae pv. tomato str. DC3000
  CDS (1)..(1248): transl_table=11
atggccgtcgcgtattcactcgaccaaaaaggcaggtctatgcagcggctgtatcgaaaacgcatcgttctgggcgtcggcggcggcatcgcggcctacaagagcgctgagctggtccgccgattgcgcgaccagggcgctgaagtgcgtgtggtcatgaccaagggcggcgcagagttcattacgccgctgaccatgcaggctctttccgggcaccctgtgcacctggaccttctcgatccggccgccgaggccgcgatggggcacatcgagctggccaagtgggccgacctgatcctcatcgcaccggccactgccgacctgatcgcgcgtctggctcaaggcatcgccaacgacctgctgaccaccattgtgctggccaccgacgcaaccgtcgccattgctccggcgatgaaccaggcaatgtggcgtgatgcttccgtgcaggccaacacccgcttgcttgaacagcgcgacttccgtgtattcgggcctgcttccggcagtcaggcgtgtggcgatgtcggcttcgggcgcatgctggaggccgacgatctggcccggtgcgcggccgattgtttccagcgcctgaccctgaccggcaggcatgtgctgatcaccgcaggccctacccaggaaaacatcgatccggtgcgctatatcaccaaccacagctccggcaaaatgggctttgccctggccgaagcggcggtggaagccggcgctcgcgttacgctgatcacaggtcccgtcaacctgccaacgccggatcgcgtctcgcgcatcgacgtggtcagtgcccgcgacatgctggcggcgtgtgaggctgccatcccgtgtgatctgttcatcgcgtcggcagcggtggcggactaccgaccggaagtcattgcccctcacaaactcaagaaagatccttcaaacggtgacggcttgctgctgcagatggtccgtaatccagatattctggcgaccattgcaacccgcccggatcgtccgttcagtgtcggcttcgctgccgagaccgagcacctgctcgactacgctgcccgaaagctcaaagacaaaaatcttgaccttattgtcgccaacgatgtggccaaccccagcatcggcttcaacagtgaggagaacgcttgcagcgtgattgaccgggcgttgcacgcaacgctttttgcccagaccagcaaggccaagattgcccgccagctgatcacttttatcgccgaccgcatgaatcaggtttaa

SEQ ID NO: 49461 - protein, 415 aa, Pseudomonas syringae pv. tomato str. DC3000
MAVAYSLDQKGRSMQRLYRKRIVLGVGGGIAAYKSAELVRRLRDQGAEVRVVMTKGGAEFITPLTMQALSGHPVHLDLLDPAAEAAMGHIELAKWADLILIAPATADLIARLAQGIANDLLTTIVLATDATVAIAPAMNQAMWRDASVQANTRLLEQRDFRVFGPASGSQACGDVGFGRMLEADDLARCAADCFQRLTLTGRHVLITAGPTQENIDPVRYITNHSSGKMGFALAEAAVEAGARVTLITGPVNLPTPDRVSRIDVVSARDMLAACEAAIPCDLFIASAAVADYRPEVIAPHKLKKDPSNGDGLLLQMVRNPDILATIATRPDRPFSVGFAAETEHLLDYAARKLKDKNLDLIVANDVANPSIGFNSEENACSVIDRALHATLFAQTSKAKIARQLITFIADRMNQV

SEQ ID NO: 49462 - DNA, 1224 bp, Salmonella enterica subsp. enterica serovar Typhi Ty2
  CDS (1)..(1224): transl_table=11
atgatgagcctggccggtaaaaaaattgttctcggcgttagcggcggtatcgctgcgtataaaacgccggagctggtgcgccgtttacgtgagcgcggcgctgacgtgcgcgtggcaatgaccgaggcggcaaaagcctttattacccccctgagcttacaggccgtgtcgggctatcccgtatccgacagtctgcttgaccctgccgccgaagctgcgatggggcatatcgagttggggaaatgggccgacctggtgattcttgcccccgcgaccgccgatctgatcgcccgtgtagcatcgggtatggctaatgatttagtctccaccatctgcctggcgacgccagccccggtggccgttcttccggccatgaaccaacagatgtaccgcgctgccgccacgcaacataatctggaggtgctcgcctctcgcggcctgttcatttgggggccggatagcggcagtcaggcgtgcggcgatgtaggcccaggccgaatgctggacccattagctatcgttgataaggccgccgcgcatttcgctgccgtcaacgatctgcgacatcttaatatcatgattacggcaggcccgacgcgcgaaccgctcgacccggtgcgttatatttccaactacagctccggtaaaatgggcttcgctattgcggcggccgcagcgcgtcgcggcgcaaatgtcacgctggtctccggtcccgtttcgttaccgatgccgccttttgtaaaacgggttgatgtcataaccgcgctggacatggaagccgctgttcaggccgccgttcaacagcagcatattttcattagctgcgccgccgtggctgactatcgcgcagagactattgccagtgaaaaaatcaaaaaacaggcggcgcaaagtgatgaattaataataaaaatggtcaaaaacccggacattgtcgccggggtggccgcactcagtgacaatcgcccctacgttgttgggtttgccgcggaaacgaataatgtggaagaatacgcccggcaaaaacgtacccgtaagaaccttgacctgatttgtgcaaatgatgtttctctttcaaatcagggatttaatagcgataaaaacgctttacaccttttctggcaggatggagataaagtcttaccgcttgagcgaaaagaactcctgggccaattattactcgacgagatcgtgacccgttatgatgaaaaaaatcgacgttaa

SEQ ID NO: 49463 - protein, 407 aa, Salmonella enterica subsp. enterica serovar Typhi Ty2
MMSLAGKKIVLGVSGGIAAYKTPELVRRLRERGADVRVAMTEAAKAFITPLSLQAVSGYPVSDSLLDPAAEAAMGHIELGKWADLVILAPATADLIARVASGMANDLVSTICLATPAPVAVLPAMNQQMYRAAATQHNLEVLASRGLFIWGPDSGSQACGDVGPGRMLDPLAIVDKAAAHFAAVNDLRHLNIMITAGPTREPLDPVRYISNYSSGKMGFAIAAAAARRGANVTLVSGPVSLPMPPFVKRVDVITALDMEAAVQAAVQQQHIFISCAAVADYRAETIASEKIKKQAAQSDELIIKMVKNPDIVAGVAALSDNRPYVVGFAAETNNVEEYARQKRTRKNLDLICANDVSLSNQGFNSDKNALHLFWQDGDKVLPLERKELLGQLLLDEIVTRYDEKNRR

SEQ ID NO: 49464 - DNA, 1203 bp, Bacteroides thetaiotaomicron VPI-5482
  CDS (1)..(1203): transl_table=11
atgctaaaaggaaaaaagataattcttggaataaccggtagcatcgctgcttataaggcttgttacattatccgcggactgataaagcagggagcggaagtgcaggtggtcattactccggcgggaaaagaatttattactcccatcactctttcggctttgaccagtaagccggtcatcagcgagttttttgcccaacgggacggtacgtggaacagccatgtggacttgggtctgtgggcggatgccatgctgatcgcacccgctaccgcctccaccatcggaaagatggcgaacgggatagcagacaatatgctgataaccacttatctttcggccaaagctccggtattcattgcaccggctatggacctcgatatgtatgcacatccttctacacagaagaatctggatatattgcgttcctatggcaaccgcatcattgagcccgcaacgggtgaacttgccagccatctggtcggtaaagggcgtatggaagaaccggaaaacattatccgagtgctggacgagtttttctctgcgagtgccgaacttcagggaaggaaaattatgataactgccggaccgacttacgaaaagatcgatccggtccgttttatcggcaattattcttccggtaagatgggatttgctttggcggaagaatgtgcccgtcgtggggcagaggtgacattgatcaccggaccggtgcaactgaaaacgcagcattcgcgtatccaccggatagatgtggaatctgctcaggaaatgtatgaggcagcgcaaacctgtttcccgacttccgacgtggggattctttgtgcggcagtcgccgatttccgcccggaaacggtggccggcaaaaagatcaaacgggagaaggaagaagaactgaccttgcatcttcaggctacgcaggacattgctgcaagtctgggaaagatcaaagaagacaatcaactgttagtggggtttgccctcgaaacaaataacgaacagcagaatgccgaaggaaagctcgaacgtaaaaactttgactttatcgtcctcaactctctgaatgatgcgggagccggcttccgtcacgatacaaacaagattagcattattgatcgcaaaggtcgcgaggattatcctctgaagcccaaacaggaagtagcgcaagacatcatcaaccatctggttgccgttttgactcactga

SEQ ID NO: 49465 - protein, 400 aa, Bacteroides thetaiotaomicron VPI-5482
MLKGKKIILGITGSIAAYKACYIIRGLIKQGAEVQVVITPAGKEFITPITLSALTSKPVISEFFAQRDGTWNSHVDLGLWADAMLIAPATASTIGKMANGIADNMLITTYLSAKAPVFIAPAMDLDMYAHPSTQKNLDILRSYGNRIIEPATGELASHLVGKGRMEEPENIIRVLDEFFSASAELQGRKIMITAGPTYEKIDPVRFIGNYSSGKMGFALAEECARRGAEVTLITGPVQLKTQHSRIHRIDVESAQEMYEAAQTCFPTSDVGILCAAVADFRPETVAGKKIKREKEEELTLHLQATQDIAASLGKIKEDNQLLVGFALETNNEQQNAEGKLERKNFDFIVLNSLNDAGAGFRHDTNKISIIDRKGREDYPLKPKQEVAQDIINHLVAVLTH

SEQ ID NO: 49466 - DNA, 1176 bp, Coxiella burnetii RSA 493
  CDS (1)..(1176): transl_table=11
atgttttctaatcaaaaattactaatcggcgttaccggcgctattgccgcttataaaagcgtagagttagtgcgacgtttgcgagaaaaaggcgctttagttcgggtggtgatgacgtcagcggcgcaggcatttatcacgcccctaacttttcaagctgtatccggacatccagttgcagtggatttattttcgtcggacagctcgatgggaatggagcatattgatttagcgcggtgggctgatttcgtgttgatcgccccagcgagcgctgacttcattgcgcggctggctcatgggcgggcggatgatttgctcacaaccatttgcttagccacgcaagcaccgatcgccgtagcaccgtcgatgaaccaacaaatgtggcgcaataaaattacccaaacaaatgtggatcgcttacgcgattatggaattcacctttttgggcctgcaacgggggagcaagcgtgcggtgattatggaccaggtcgattgctggagcccgaggaattaattaatcaattggcaattcatagcgtggaaaaggtgttatcggggaaacaggtgttaataaccgcaggaccaacgcaagaagccatcgatcctgtgcgctatttaaccaatggcagttcggggaaaatggggttcgctttggcggaagctgcgttagccatgggcgctaatgtcactttagtgagtggcccgactcctttgaaagtgtctcaaaaaatcaatcgaattgatgttactaccgctacccagatgtttgaaaccgttataaaacatgcggtagaatgcgatgtgtttattggtgctgcggcggtgagcgattatcgtccaaaaaatttctctcctcaaaaatttaaaaaatccgatgcgaattgggcgcttaatttagtgcgaaatcctgatatcatttcagaaatagggagattaccgaataaacctttcgtggtaggatttgcattagaaaccgataatccccttgacaatgcgaaattaaaattgcagaaaaagaacatgaatgtgattgtggtcaatgaggcgtcggcgctttgcagcgatgaaaatgcagtcacccttatgacgcgctcaggtaaaaccaaaaaattgccgatgacgacaaaaaagactttagcacttcaattaatggagtttgttagcaaagaaatgtga

SEQ ID NO: 49467 - protein, 391 aa, Coxiella burnetii RSA 493
MFSNQKLLIGVTGAIAAYKSVELVRRLREKGALVRVVMTSAAQAFITPLTFQAVSGHPVAVDLFSSDSSMGMEHIDLARWADFVLIAPASADFIARLAHGRADDLLTTICLATQAPIAVAPSMNQQMWRNKITQTNVDRLRDYGIHLFGPATGEQACGDYGPGRLLEPEELINQLAIHSVEKVLSGKQVLITAGPTQEAIDPVRYLTNGSSGKMGFALAEAALAMGANVTLVSGPTPLKVSQKINRIDVTTATQMFETVIKHAVECDVFIGAAAVSDYRPKNFSPQKFKKSDANWALNLVRNPDIISEIGRLPNKPFVVGFALETDNPLDNAKLKLQKKNMNVIVVNEASALCSDENAVTLMTRSGKTKKLPMTTKKTLALQLMEFVSKEM

SEQ ID NO: 49468 - DNA, 1218 bp, Streptomyces avermitilis MA-4680
  CDS (1)..(1218): transl_table=11
gtgtggggagacccggtggacaagccgaaggtcgtgctgggagtcagtggcggcatcgccgcctacaaggcctgtgagctgctgcggaggctgacggagtcgggacacgacgtccgcgtcgtgcccaccggctcggcgctgcacttcgtcggcgccgccacctggtccgcgctctccggcaacccggtctccaccgaggtctgggacgacgtccacgaggtgccgcacgtccgcatcggccagcacgccgacctggtcgtcgtcgcccccgccaccgccgacatgctcgccaaggcggcccacggcctcgccgacgacctgctcacgaacacgctgctgaccgcacgctgtccggtcgtcttcgcacccgccatgcacaccgagatgtgggaacacccggccacccaggagaacgtcgcgacgctgcgccgccgcggcgccctcgtcatcgagcccgcggtgggccggctgaccggcgtcgacaccggcaagggccgcctgcccgaccccacggagatcttcgaggtctgccgccgggtgctcgcgcgcggcgccgcacggccggacctcgccggccggcacgtggtcgtcagcgccggcggtacgcgcgagccgctcgacccggtccgcttcctcggcaaccgctcctccggcaagcaggggtacgccctcgcccgcaccgccgccgcgcgcggcgcccgggtcaccctggtcgccgcgaacaccgggctgcccgacctggcgggtgtcgacgtcgtccaggtcgggacggccgtgcaactgcgcgaggcggtgctgaaggcggcctcggacgccgacgccgtggtgatggcggcggccgtggcggacttccgtccggcgacgtacgcgaccggaaagatcaagaagaaggacggccaggagccggaagcgatcgttctggtccgtaatccggacattctcgcggagatctcggccgaccggccgcgccccggtcaggtggtcgtcggcttcgccgccgagacggacgacgtcctggccaacggccgtacgaagctggcacgcaagggctgcgacctcctcgtggtgaacgaggtgggggagcgcaggacgttcggctcggaggagaacgaggccgtggtgctcggcgcggacggaagcgagatcccggtgccgtacgggcccaaggaggccttggccgagaccgtgtgggatctggtcgtgccccggctcgggtga

SEQ ID NO: 49469 - protein, 405 aa, Streptomyces avermitilis MA-4680
MWGDPVDKPKVVLGVSGGIAAYKACELLRRLTESGHDVRVVPTGSALHFVGAATWSALSGNPVSTEVWDDVHEVPHVRIGQHADLVVVAPATADMLAKAAHGLADDLLTNTLLTARCPVVFAPAMHTEMWEHPATQENVATLRRRGALVIEPAVGRLTGVDTGKGRLPDPTEIFEVCRRVLARGAARPDLAGRHVVVSAGGTREPLDPVRFLGNRSSGKQGYALARTAAARGARVTLVAANTGLPDLAGVDVVQVGTAVQLREAVLKAASDADAVVMAAAVADFRPATYATGKIKKKDGQEPEAIVLVRNPDILAEISADRPRPGQVVVGFAAETDDVLANGRTKLARKGCDLLVVNEVGERRTFGSEENEAVVLGADGSEIPVPYGPKEALAETVWDLVVPRLG

SEQ ID NO: 49470 - DNA, 1206 bp, Bacillus cereus ATCC 14579
  CDS (1)..(1206): transl_table=11
atgctaaaagggaaaaagatacttttatgtgtaacaggaggcattgcggtttttaaagcagctgcgttaacgagtaaattaacacaatctggcgcgagtgtcaaagtaatgatgagtgagtcggcaatgaagtttgttacgcctcttacattccaagcgctttctcgccatgatgtatatacggatacattcgatgagaaagactcagctgttattgctcatattgatttagcagattgggcggatgttgtacttgtcgcacctgctactgccaattgtattggaaagttagctggtggtattgcagatgatatgattacaactactttgttagctactacagctccggtatggattgcgcctgctatgaatgtgcatatgtatgaaaataaaatagttcaaaaaaatatgatgacattgaaaacgctaggatatacatttattgagcctggggaaggctttttagcatgtggatatgtagcgaagggacgactagaagaacctgaagcaattattgcacggttagaggaagctttctcagaacacaaaccattgcagggaaaaagaatattaataactgctggcccaacacgtgaaaaggttgatccagttcgttttatgacgaatttttcttctgggaaaatggggtatgcgattgcggaagtggcagcgaatttaggcgctgatgttatactcgtttcaggaccgacagcattaaatccaccgttacatgtaacgacagtgcaagtggaatctgcacaagatatgttagaagcagttcttcaacattatcaaaacgtagacgttgtcattaaaacagcagcagttgcagattatcgtccgaaatatgtgcatgagaataaaatgaaaaagcaaaatggtgatgctgtcattgaacttgaaagaacggtggatattttaaaaacattaggtcagaaaaaggataaacagttacttatcggttttgctgctgaaacgacaaatgtagaggaatatgcaacgaaaaaactacgtgagaaaaatgcagatatgattgtcgcgaatgacgtaaaagcgcaaggagctggatttggcacggatacgaatattgtaacaatgtatagaaaagatggaaaagttattgagttgccacttttaatgaaaaaagaggtagctcgtgaaatattgaagcaaattgaaatgatgttagaagatgatcgtttatga

SEQ ID NO: 49471 - protein, 401 aa, Bacillus cereus ATCC 14579
MLKGKKILLCVTGGIAVFKAAALTSKLTQSGASVKVMMSESAMKFVTPLTFQALSRHDVYTDTFDEKDSAVIAHIDLADWADVVLVAPATANCIGKLAGGIADDMITTTLLATTAPVWIAPAMNVHMYENKIVQKNMMTLKTLGYTFIEPGEGFLACGYVAKGRLEEPEAIIARLEEAFSEHKPLQGKRILITAGPTREKVDPVRFMTNFSSGKMGYAIAEVAANLGADVILVSGPTALNPPLHVTTVQVESAQDMLEAVLQHYQNVDVVIKTAAVADYRPKYVHENKMKKQNGDAVIELERTVDILKTLGQKKDKQLLIGFAAETTNVEEYATKKLREKNADMIVANDVKAQGAGFGTDTNIVTMYRKDGKVIELPLLMKKEVAREILKQIEMMLEDDRL

SEQ ID NO: 49472 - DNA, 1293 bp, Shigella flexneri 2a str. 2457T
  CDS (1)..(1293): transl_table=11
gtgaaggcacgacaacaaaagtattgtgataaaatcgccaacttctggtgtcacccaacaggaaaaatcatcatgagcctggccggtaaaaaaatcgttctcggcgttagcggcggtattgctgcctataaaacccctgaactggtgcgtcgtttgcgcgatcgcggggccgacgtccgcgtagccatgaccgaagcggcaaaagcctttatcaccccacttagcttgcaggcggtttctggttatcccgtttccgacagtctgcttgacccggcagccgaagccgctatgggccatattgagctgggtaaatgggctgatttagtgattctcgcccctgccacggcagatttgattgcccgtgttgctgccggaatggcgaatgacctggtatcgacgatttgtctggctacacctgcgcctgtagccgtgctccccgccatgaaccagcagatgtaccgtgccgctgccacgcagcataatttagaggtgcttgcttcccgtggtttgctcatctgggggccagacagtggcagtcaggcttgtggtgatatcggtcctggacgaatgctcgatccgttaaccattgtggatatggcggtggcgcatttttcgcccgtcaacgacctgaaacatctgaacattatgattaccgccggtccgacgcgtgaaccgctcgatccggtgcgttatatctctaatcacagctccggcaagatgggttttgctatcgccgccgctgctgcccgtcgtggcgcgaacgtcacgctggtatcaggtccagtttcactaccgacgccaccgtttgttaaacgtgttgatgtgatgaccgcgctggaaatggaagccgccgtgaatgcttctgtacagcagcaaaatatttttatcggttgcgccgccgtggcggattatcgcgcagctaccgtggccccagaaaaaatcaaaaagcaggccacgcagggtgatgaattaacaataaaaatggttaaaaaccccgatatcgtcgcaggcgttgccgcactaaaagaccatcgaccctacgtcgttggatttgccgccgaaacaaataatgtggaagaatacgcccggcaaaaacgtatccgtaaaaaccttgatctgatctgcgcgaacgatgtttcccagccaactcaaggatttaacagcgacaacaacgcattacaccttttctggcaggacggagataaagtcttaccgcttgagcgcaaagagctccttggccaattattactcgacgagatcgtgacccgttatgatgaaaaaaatcgacgttaa

SEQ ID NO: 49473 - protein, 430 aa, Shigella flexneri 2a str. 2457T
MKARQQKYCDKIANFWCHPTGKIIMSLAGKKIVLGVSGGIAAYKTPELVRRLRDRGADVRVAMTEAAKAFITPLSLQAVSGYPVSDSLLDPAAEAAMGHIELGKWADLVILAPATADLIARVAAGMANDLVSTICLATPAPVAVLPAMNQQMYRAAATQHNLEVLASRGLLIWGPDSGSQACGDIGPGRMLDPLTIVDMAVAHFSPVNDLKHLNIMITAGPTREPLDPVRYISNHSSGKMGFAIAAAAARRGANVTLVSGPVSLPTPPFVKRVDVMTALEMEAAVNASVQQQNIFIGCAAVADYRAATVAPEKIKKQATQGDELTIKMVKNPDIVAGVAALKDHRPYVVGFAAETNNVEEYARQKRIRKNLDLICANDVSQPTQGFNSDNNALHLFWQDGDKVLPLERKELLGQLLLDEIVTRYDEKNRR

SEQ ID NO: 49474 - DNA, 1230 bp, Nitrosomonas europaea ATCC 19718
  CDS (1)..(1230): transl_table=11
atgattctggttgatgcgcttgcaggaaaacgtctgttgctgggtataacgggcggtattgctgcctacaaagcagcggagctggtccggctcctgatgcaggaaggggttgaagtacaggttgtgatgactgaatctgcctgccggttcgtcggtacggctacgttgcaggggcttacgggcagacaggtatttactgaactttgggataccggtatgttgaacggcatggcgcatatcaatctttcccgggaggtggatgcgcttctgattgcaccggcaagtgccgactttattgccaagatcgcgcatggtctggcagatgacttgctgtctgcgctttgtctggcacgagattgtccattgctgatagcacctgccatgaatgtacagatgtgggaaaatgctgccacccggcgcaatctcgctactttacggcaggatggcgttacggtgctcggacctggcagtggctaccaggcctgtggagaaatcggagaggggcgcatgctcgaaccggaagatttactggataaggttcgctgcttttttcagcctaaatatctttcaggtaagcgggtactggttacagcgggcccgactttcgaagcattggatgcagtcagggggcttaccaacctgagttccgggaaaaccggtatagcaattgcacaggcagcacttgaggccggtgcacaggtgaccctggtatgcggtccggtttgtcctccctttccggcagtcgataagctgacccacattgtcagtgccagtgaaatgttctctgccgtaaaagcagaagtggagggtcatgatatttttatcagcgttgcagctgttgccgattatcgtccggctgaatgccacccttccaaactcaaaaaaacggtagcagatattacgctgactttggtacccaacccggacattctgcagtatgtcgccaatctgcctaaccctccgttttgtgtggggtttgcggcggaaacggaggcgatcgaacaatatgcagcagaaaaaaggaaaaggaagaaattgccgctgatcgttgccaataatgctgttgaaactattggttcaaacgaaagctccctgattctgctggatgacgaagggacgcactatctgccaaaggccaacaaaaatatacaagcccggttggtcatggcgcatatcgcccatctctatgataaacgtaagggatatacccatcataatgaaacaagttga

SEQ ID NO: 49475 - protein, 409 aa, Nitrosomonas europaea ATCC 19718
MILVDALAGKRLLLGITGGIAAYKAAELVRLLMQEGVEVQVVMTESACRFVGTATLQGLTGRQVFTELWDTGMLNGMAHINLSREVDALLIAPASADFIAKIAHGLADDLLSALCLARDCPLLIAPAMNVQMWENAATRRNLATLRQDGVTVLGPGSGYQACGEIGEGRMLEPEDLLDKVRCFFQPKYLSGKRVLVTAGPTFEALDAVRGLTNLSSGKTGIAIAQAALEAGAQVTLVCGPVCPPFPAVDKLTHIVSASEMFSAVKAEVEGHDIFISVAAVADYRPAECHPSKLKKTVADITLTLVPNPDILQYVANLPNPPFCVGFAAETEAIEQYAAEKRKRKKLPLIVANNAVETIGSNESSLILLDDEGTHYLPKANKNIQARLVMAHIAHLYDKRKGYTHHNETS

SEQ ID NO: 49476 - DNA, 1242 bp, Helicobacter hepaticus ATCC 51449
  CDS (1)..(1242): transl_table=11
atgcatcacatatttgttaataaaaaaattcttattcttgtgagtggctctattgccgtttataaaatgcttgattgtatctcacagctgacaaaatatggtgcagatgtaagagttgttatgagtagggaatctcgcgcatttattgctccactaagttttgaggctatgagccataatattgttttgcacgatgacaatcaatcttggcatacaactttacaagaagtaagcccaaatcatattttttacgcaaaatgggcagatattgtgcttgttgctccagcaacagcaaatactatcgcaaaaattgcttgtggcatcgccgataatgttttgctctctacgcttttagccacccgtgctcctaaacttgtagctcctgcaatgaatacagctatgcttaatgcttctcaaaccaagcataatctttctatgcttgcagatatgggctatgaaatcattgttccacgttcaagtatccttatgtgtggagatgagggagaaggggctcttgctcaggtagaagagattatttataggcttggcagagagattttgagggatacattttggagtaagcaacgtgttattgtcagtggtggtggttcaaaagaaagcatagatgaggtgcgctatatttctaatcgaagcagtggcaaacaggcaagttatcttgctttagctctatatatgcttggcgcggaggtaacttttatctcaagctcattcccgcttgtgttgcccttggacataaaatgtgtgagtgtggagagtgtggtaacatttgaaaaggcaattcataaaacgtttaatagtttagattctatagaatctaaacctattatttttatggcagcagctcttgcagattatgcgccaaaacctcaaagtggcaaactcaaaaaagagcaaattggagagaatctctctcttttgtgttccaaaacaaatgatattttgtcatctatttcatcgcaaaaagcctataaagtaggctttaaggctgaaattgatgatgtaaatgccttatattatgctcaaaatatgctaaaggcaaaagagtgtgaaatggtgtgccttaatgttgtgggttctcaaaacccttttggtggagaaacaaatagaatcaaaataattacacataaggacatacaagaggtaagtggttcaaagcttgaagttgcttttggtattgctagtgcattttcacaactacaatctcttaaaggtgatgaatga

SEQ ID NO: 49477 - protein, 413 aa, Helicobacter hepaticus ATCC 51449
MHHIFVNKKILILVSGSIAVYKMLDCISQLTKYGADVRVVMSRESRAFIAPLSFEAMSHNIVLHDDNQSWHTTLQEVSPNHIFYAKWADIVLVAPATANTIAKIACGIADNVLLSTLLATRAPKLVAPAMNTAMLNASQTKHNLSMLADMGYEIIVPRSSILMCGDEGEGALAQVEEIIYRLGREILRDTFWSKQRVIVSGGGSKESIDEVRYISNRSSGKQASYLALALYMLGAEVTFISSSFPLVLPLDIKCVSVESVVTFEKAIHKTFNSLDSIESKPIIFMAAALADYAPKPQSGKLKKEQIGENLSLLCSKTNDILSSISSQKAYKVGFKAEIDDVNALYYAQNMLKAKECEMVCLNVVGSQNPFGGETNRIKIITHKDIQEVSGSKLEVAFGIASAFSQLQSLKGDE

SEQ ID NO: 49478 - DNA, 1215 bp, Wigglesworthia glossinidia endosymbiont of Glossina brevipalpis
  CDS (1)..(1215): transl_table=11
atgaaagaactatttaataaaaatattcttttagggattagcggaagcattgctgcgtataagtcattagagttaatacaacaactgaaaaaaaaaggagcaatagtacgtgttgttatgactaaatctgcacaagcgttcgttacccctttgagtttaaaaataatatctggacatcaagtatttattgattctgattttttatataacaaaatgattgatcatattaaaatttctaaatggccagatataatagttttagctccagcaactgcaaatttattagcaaaattatcttctggaattactaatgatttattaagcgctatttgtttagcaacatcgtctcctatagctatatctccagtgatgaataaaaatatgtatttagcaccgtctactcaggataacttaaaaaaactaaataatagaggtgttatattttggggtccagattatggaaatcaaatatgtggagacaaaggctttgggagaatgattaaaataagtaaattagttaaacttataacaaattattttaaatcaggttttaataatgttaaaaatttaaaaatcatggttacagcaggaccaactatagaattaatagatccagttagatttattagtaattatagttcagggaaaatgggatttgctatagttaaagctgcaatagatgtaggatatcaagttacattaatatctggcccagttaaaatatctactccagatggaatttttaaaaaaatcaatataaaaagtgcaatagaaatgaaagatgcagtaatgtcgttagtaaaaaatcaagatatttttatttgttgtgcagcaattactgattatagattagaaaaaatatctagaaagaaaattaaaaaacaaaaaaataacaaattatgcttaaaattagtaaaaaatcctgatattatatccgaagtagcttctttaaaaaagaataggccatatatagtgggtttttctgctgatacggaaaagataggaaaatatgctaaagaaaaaaggataaaaaagaatatagatctgatttgtgctaatgatgtgtcaaaaccaaatcaaggatttaatagcaactataacgctcttcatttattttggaaaacaggaagtatgatgttgtctataaataacaagttatctcttgcaaaaaaattattacatcaaattattattttttatgaaaaaaaaagttaa

SEQ ID NO: 49479 - protein, 404 aa, Wigglesworthia glossinidia endosymbiont of Glossina brevipalpis
MKELFNKNILLGISGSIAAYKSLELIQQLKKKGAIVRVVMTKSAQAFVTPLSLKIISGHQVFIDSDFLYNKMIDHIKISKWPDIIVLAPATANLLAKLSSGITNDLLSAICLATSSPIAISPVMNKNMYLAPSTQDNLKKLNNRGVIFWGPDYGNQICGDKGFGRMIKISKLVKLITNYFKSGFNNVKNLKIMVTAGPTIELIDPVRFISNYSSGKMGFAIVKAAIDVGYQVTLISGPVKISTPDGIFKKINIKSAIEMKDAVMSLVKNQDIFICCAAITDYRLEKISRKKIKKQKNNKLCLKLVKNPDIISEVASLKKNRPYIVGFSADTEKIGKYAKEKRIKKNIDLICANDVSKPNQGFNSNYNALHLFWKTGSMMLSINNKLSLAKKLLHQIIIFYEKKS

SEQ ID NO: 49480 - DNA, 1245 bp, Haemophilus ducreyi 35000HP
  CDS (1)..(1245): transl_table=11
atgctcactaataaaaacattttagttggtattaccggcggtattgctgcttataaaacgattgatttaattcggcttttgaaaaaagcaaatgctaatgttcgagtagtattaacgcctgctgcagaagcttttgtgactccattaacgttgcaagctatttcggctaatcctgtttcaaatagtttgcttgacccacacgctgaattagcaatgggacatattcagttagctaaatgggctgatttagttttaattgcgcccgcttccgcagattttattgcgcgtttgcgagcgggtatggcgaatgatttacttaccacgctttgtttagcgacggtggcgcctatttttattgctcctgcaatgaatcaacatatgtttcatcaaaaggtaacacaacaaaatctggctgaattagtcgatagagcggtaaaagtgattgggccaaatagtggtctgcaagcctgtggtgatgttggtgcagggcgaatgtctgagccaaatgagttattacaagctatttgtgatcatttccaagttaatcaggatttacagaatatggtagttactgttactgcggggcctacgcgtgagcctattgatcctgtgcgttatcttagtaatcatagttcaggcaaaatgggctttgcgattgcagctgcttttgcgaaacgtggagctactgtcaatttaattgctgggccggtaaatctagccacgccaattaatgtacatcgtattaatgtgcaatcagcggttgaaatggcaggaaaagcggttgaattagctcaaaaatccgctatttttattgggtgtgcggcagttgcagattatcgtgttgcggaggttgctcagcaaaaaattaagaaaaatgatgataatgaatcgttgacactaaaattagtcagaaaccccgatattattgcctctgttgctcaattagcagaacgccgccctttcactgttggttttgctgcggaaacgcaaaatgttgaacattatgcaaaacagaaattggtgcgcaaaaagttagatttaatttgtgcaaataatgttgcaaatggtcaagtgtttggacaagatcaaaatgctttgcaccttttttggcgaactgaagggagacaagaacatcaaaaaatattaccgcttgccaataaaagcgatttagcggtcagtttagtcgaagaaatcgttaacttatttaaaatcactcagcttaggaaaaatgatgaaacacattga

SEQ ID NO: 49481 - protein, 414 aa, Haemophilus ducreyi 35000HP
MLTNKNILVGITGGIAAYKTIDLIRLLKKANANVRVVLTPAAEAFVTPLTLQAISANPVSNSLLDPHAELAMGHIQLAKWADLVLIAPASADFIARLRAGMANDLLTTLCLATVAPIFIAPAMNQHMFHQKVTQQNLAELVDRAVKVIGPNSGLQACGDVGAGRMSEPNELLQAICDHFQVNQDLQNMVVTVTAGPTREPIDPVRYLSNHSSGKMGFAIAAAFAKRGATVNLIAGPVNLATPINVHRINVQSAVEMAGKAVELAQKSAIFIGCAAVADYRVAEVAQQKIKKNDDNESLTLKLVRNPDIIASVAQLAERRPFTVGFAAETQNVEHYAKQKLVRKKLDLICANNVANGQVFGQDQNALHLFWRTEGRQEHQKILPLANKSDLAVSLVEEIVNLFKITQLRKNDETH

SEQ ID NO: 49482 - DNA, 1287 bp, Prochlorococcus marinus subsp. marinus str. CCMP1375
  CDS (1)..(1287): transl_table=11
atgaagactaaagtgaataacaacttaaatggaaaaaaaatccttgtaattactactggaagcattgcggcagtgaagatcccacttctagtaagtaatttaattaaaaccggcgcagaggtgcgttgcgttgtatcaccaagtgcttcaaagttagtcagtcctctgtctttatcaactcttagtagaaacgcttgctaccaagacgaagatcaatggaatagaagagaaccaagaccattacatatctcactttcagaatgggcagatctaatagcagtcgcccctttaagtgcatcgtccctatccagatgggtacatggtcttagcgaaggcttggctgcaagtatacttttagcttcagaaaaacctgtaattgcagccgcagcaatgaatacggcgatgtggaacaattcatcaattaaaaataattgggaaaccctaaaaaatttcccaaacgtaattcctttaactcccgcagaaggcctccttgcttgcgatcgaattggggatggtcgaatggcagatcctttattgatccagctagcaattgaaagtgcaattattcaatttagagcaaattcagccctccacaaggactggagcaacctcaaacttttagtaactgcaggtccaacaattgaagatattgatagagctaggtatctaacaaatcgcagtactggaaaaatgggagttctcattggccaggcagcaaggtttcgtggtgcaacagttgatttaatccatggcccaatccaagtagaagcagcacttcttgagggcttacagacctttgcagttagaaactccaatgaaatgtactcaatattggaagatcttcaaagctcagcagatgccattgccatgacagcggcaatagctgatttaaaacctttagttaataccaaaaacattaaactcagcaaagaagagctatttaaatcaatgaaagataggtttgagattgttccagacctactttcaaaattaattgccaatagaaaaaacaatcaggttttcctagggttcacagcattaacaggcaatgatgaaaaaattaaagagctggcaatgctcaaaaaaaagcaaaagaagtgcgatttattaatggctaatcctattgacagaagcaatcaagggttcgaatccgattcgaacggtgggtggttactaggccctgaagaagcaatcaatgaaatcaaaattggctccaaattatccgtagcgcaccaattattagatgaattaaaaagtgttttaataaacaaattaaaaaacaaatag

SEQ ID NO: 49483 - protein, 428 aa, Prochlorococcus marinus subsp. marinus str. CCMP1375
MKTKVNNNLNGKKILVITTGSIAAVKIPLLVSNLIKTGAEVRCVVSPSASKLVSPLSLSTLSRNACYQDEDQWNRREPRPLHISLSEWADLIAVAPLSASSLSRWVHGLSEGLAASILLASEKPVIAAAAMNTAMWNNSSIKNNWETLKNFPNVIPLTPAEGLLACDRIGDGRMADPLLIQLAIESAIIQFRANSALHKDWSNLKLLVTAGPTIEDIDRARYLTNRSTGKMGVLIGQAARFRGATVDLIHGPIQVEAALLEGLQTFAVRNSNEMYSILEDLQSSADAIAMTAAIADLKPLVNTKNIKLSKEELFKSMKDRFEIVPDLLSKLIANRKNNQVFLGFTALTGNDEKIKELAMLKKKQKKCDLLMANPIDRSNQGFESDSNGGWLLGPEEAINEIKIGSKLSVAHQLLDELKSVLINKLKNK

SEQ ID NO: 49484 - DNA, 1209 bp, Bordetella pertussis Tohama I
  CDS (1)..(1209): transl_table=11
atgctcgatctcgcccgcaaacgcattgtcctcggcctgaccggcggcatcgcctgctacaaaatcgccgaactggtgcgccgcatgaccgaacagggtgcggtcgtcgatgtcgtcatgaccgaggccgccacgcacttcattacgccggtcaccatgcaggcgctatccggccggccggttttcgtcgacgcctgggatgcccgcgtcgacaacaacatggcgcacatcgacctgacgcgcggcgccgacgccgtgctgatcgcccccgccagcgccgacttcatggccaagctggcgcacggcctggccgacgacctgctctcgacgctgtgcctggcgcgcgcctgccccttgctggtggcgcccgccatgaaccgtgaaatgtgggccaacccggctacccagcgcaatgcggcgcagttgcgcgccgacggcattaccgtgctgggcccggccgccggcgaacaggcctgtggcgaaaccggcaccggccgcatgctggaagcccacgaactgctcgccgacctgatcgcttcgttccagcccaaggtgctggcggaccgccacatgctgctgacggccggccccacctccgaacccgtcgatccggtgcgcgtgctgagcaaccgctcgtccggcaagaccggctacgccctggcgcgcgccgcccacgaagcgggggcccgggtcaccttgatcaccggcgccaccgcgctggccattccgcgcggcgtcacggcgctgcacgtgaccacggcgcggcagatgcacgacgcggtcatggccaacgccaacgacgccgacatcttcgtcgccgtggcggccgtggccgactggcgcgtcaagaacgtcagcgagcagaagctgaagaagaccaccgaaggcggcggcgcgccggcgctggaattcgaacccaacccggacatcctggccgaggtcgccaagctggcgagcgggccctggtgcgtgggttttgcggccgaaaccgaaaagctggccgagcatgcggaagccaagcgcctgcgcaagggcattccgctcttggtgggcaacctggcgcacaaggtcatggacgccgacaccaccgagctggtgctgttcgacgagcacggggtgcaccccctgcccgccgcggccaagctggatgcggcgcggcgcctgatcgccgagatcgccgcgcgcctgcccgccccggccaggccctga

SEQ ID NO: 49485 - protein, 402 aa, Bordetella pertussis Tohama I
MLDLARKRIVLGLTGGIACYKIAELVRRMTEQGAVVDVVMTEAATHFITPVTMQALSGRPVFVDAWDARVDNNMAHIDLTRGADAVLIAPASADFMAKLAHGLADDLLSTLCLARACPLLVAPAMNREMWANPATQRNAAQLRADGITVLGPAAGEQACGETGTGRMLEAHELLADLIASFQPKVLADRHMLLTAGPTSEPVDPVRVLSNRSSGKTGYALARAAHEAGARVTLITGATALAIPRGVTALHVTTARQMHDAVMANANDADIFVAVAAVADWRVKNVSEQKLKKTTEGGGAPALEFEPNPDILAEVAKLASGPWCVGFAAETEKLAEHAEAKRLRKGIPLLVGNLAHKVMDADTTELVLFDEHGVHPLPAAAKLDAARRLIAEIAARLPAPARP

SEQ ID NO: 49486 - DNA, 1209 bp, Bordetella parapertussis 12822
  CDS (1)..(1209): transl_table=11
atgctcgatctcgcccgcaaacgcattgtcctcggcctgaccggcggcatcgcctgctacaaaatcgccgaactggtgcgccgcatgaccgaacagggtgcggtcgtcgatgtcgtcatgaccgaggccgccacgcacttcattacgccggtcaccatgcaggcgctgtcgggccggccggttttcgtcgacgcctgggatgcccgcgtcgacaacaacatggcgcacatcgacctgacgcgcggcgccgacgccgtgctgatcgcccccgccagcgccgacttcatggccaagctggcgcacggcctggccgacgacctgctctcgacgctgtgcctggcgcgcgcctgccccttgctggtggcgcccgccatgaaccgtgaaatgtgggccaacccggctacccagcgcaatgtggcgcagttgcgcgccgacggcattgccgtgctgggcccggccgccggcgaacaggcctgtggcgaaaccggcaccggccgcatgctggaagcccacgaactgctcgccgacctgatcgcctcgttccagcccaaggtgctggcgggccgccacgtgctgctgacggccggccccacctccgaacccgtcgatccggtgcgcgtgctgagcaaccgctcgtccggcaagaccggctacgccctggcgcgcgccgcccacgaagcgggggccagggtcaccttgatcaccggcgccaccgcgctggccattccgcgcggcgtcacggcgctgcacgtgaccacggcgcggcaaatgcacgacgcggtcatggccaacgccaacgacgccgacatcttcgtcgccgtggcggccgtggccgactggcgcgtcaagaacgtcagcgagcagaagctgaagaagaccaccgaaggcggcggcgcgccggcgctggaattcgaacccaacccggacatcctggccgaggtcgccaagctggcgagcgggccctggtgcgtgggtttcgcggccgaaaccgaaaagctggccgagcatgcggaagccaagcgcctgcgcaagggcattccgctcttggtgggcaacctggcgcacaaggtcatggatgccgacaccaccgagctggtgctgttcgacgagcacggggtgcaccccctgcccgccgcggccaagctggatgcggcgcggcgcctgatcgccgagatcgctgcgcgcctgcccgccccggccaggccctga

SEQ ID NO: 49487 - protein, 402 aa, Bordetella parapertussis 12822
MLDLARKRIVLGLTGGIACYKIAELVRRMTEQGAVVDVVMTEAATHFITPVTMQALSGRPVFVDAWDARVDNNMAHIDLTRGADAVLIAPASADFMAKLAHGLADDLLSTLCLARACPLLVAPAMNREMWANPATQRNVAQLRADGIAVLGPAAGEQACGETGTGRMLEAHELLADLIASFQPKVLAGRHVLLTAGPTSEPVDPVRVLSNRSSGKTGYALARAAHEAGARVTLITGATALAIPRGVTALHVTTARQMHDAVMANANDADIFVAVAAVADWRVKNVSEQKLKKTTEGGGAPALEFEPNPDILAEVAKLASGPWCVGFAAETEKLAEHAEAKRLRKGIPLLVGNLAHKVMDADTTELVLFDEHGVHPLPAAAKLDAARRLIAEIAARLPAPARP

SEQ ID NO: 49488 - DNA, 1209 bp, Bordetella bronchiseptica RB50
  CDS (1)..(1209): transl_table=11
atgctcgatctcgcccgcaaacgcattgtcctcggcctgaccggcggcatcgcctgctacaaaatcgccgaactggtgcgccgcatgaccgaacagggtgcggtcgtcgatgtcgtcatgaccgaggccgccacgcacttcattacgccggtcaccatgcaggcgctgtccggccggccggttttcgtcgacgcctgggatgcccgcgtcgacaacaacatggcgcacatcgacctgacgcgcggcgccgacgccgtgctgatcgcccccgccagcgccgacttcatggccaagctggcgcacggcctggccgacgacctgctctcgacgctgtgcctggcgcgcgcctgccccttgctggtggcgcccgccatgaaccgtgaaatgtgggccaacccggctacccagcgcaatgtggcgcagttgcgcgccgacggcattaccgtgctgggcccggccgccggcgaacaggcctgtggcgaaaccggcaccggccgcatgctggaagcccacgaactgctcgccgacctgatcgcctcgttccagcccaaggtgctggcgggccgccacgtgctgctgacggccggccccacctccgaacccgtcgatccggtgcgcgtgctgagcaaccgctcgtccggcaagaccggctacgccctggcgcgcgccgcccacgaagcgggggccagggtcaccttgatcaccggcgccaccgcgctggccattccgcgcggcgtcacggcgctgcacgtgaccacggcgcggcaaatgcacgacgcggtcatggccaacgccaacgacgccgacatcttcgtcgccgtggcggccgtggccgactggcgcgtcaagaacgtcagcgagcagaagctgaagaagaccaccgaaggcggcggcgcgccggcgctggaattcgaacccaacccggacatcctggccgaggtcgccaagctggcgagcgggccctggtgcgtgggtttcgcggccgaaaccgaaaagctggccgagcatgcggaagccaagcgcctgcgcaagggcattccgctcttggtgggcaacctggcgcacaaggtcatggatgccgacaccaccgagctggtgctgttcgacgagcacggggtgcaccccctgcccgccgcggccaagctggatgcggcgcggcgcctgatcgccgagatcgctgcgcgcctgcccgccccggccaggccctga

SEQ ID NO: 49489 - protein, 402 aa, Bordetella bronchiseptica RB50
MLDLARKRIVLGLTGGIACYKIAELVRRMTEQGAVVDVVMTEAATHFITPVTMQALSGRPVFVDAWDARVDNNMAHIDLTRGADAVLIAPASADFMAKLAHGLADDLLSTLCLARACPLLVAPAMNREMWANPATQRNVAQLRADGITVLGPAAGEQACGETGTGRMLEAHELLADLIASFQPKVLAGRHVLLTAGPTSEPVDPVRVLSNRSSGKTGYALARAAHEAGARVTLITGATALAIPRGVTALHVTTARQMHDAVMANANDADIFVAVAAVADWRVKNVSEQKLKKTTEGGGAPALEFEPNPDILAEVAKLASGPWCVGFAAETEKLAEHAEAKRLRKGIPLLVGNLAHKVMDADTTELVLFDEHGVHPLPAAAKLDAARRLIAEIAARLPAPARP

SEQ ID NO: 49490 - DNA, 1257 bp, Prochlorococcus marinus subsp. pastoris str. CCMP1986
  CDS (1)..(1257): transl_table=11
atgaacgttaaatctaaagaattaaaagttaaggttcttttattaattactggaagtattgctgcagtaaggatccccttactagtaagtcaattagttaaagataattatgagataaagtgcgttgtttctgaaaatgctgaaaaactaattcagccactttcactttctatcttaagtaggaataattgcatattagataaggaccaatggtcatatcttcattcaagacctctacatatagatttatgcgaatgggctgatgttttgataattgctcctttgactgcaacaacactttcgaagtgggttacaggtaatgctgatggattgatatcaagtattttaattgcgaataataagcctattattgttgctccagcaatgaattctaagatgtggagtaataaagctgttcaaagaaattatgtatatttgaaagattatccaaatgttttaatccttaagccaagcaaagggatcctagcttgtgacgaaattggagttggtaaaatacccccaaatgatttaatacaactagctcttaagtttttactccttcaaaataaaaagccctattacagagacttattaaataaagagtttttaattacaggaggttgtacttcagaaaacatagatgcagcaagaaagataactaacaatagttcgggaactatgggattaatgcttgctcaagtagcaagatttaggggtgcaaaagtcaaatatatacatggtcctttaaaaaataaactagatataacagaaggaattaatacgtatgaaatagataatagtaatgatttaattcaggaaattgaaaaagaaatttcgaaatgtgattatttcattatgaatgctgcagtagcagatttcaaaatatcaggagatacttcaaaaaaaattccaaaaagcaaatttgaggattttttaaataaaaatatagaatatgttccagatattttaaaagagataagtaaagtaaaaaaagaaaatcaaatttttgttggattttgtgcatttacaggttcttttaaaagtgcaaaaaagagcattaaagaaaaaataatgcttaagggttgtgatttactatttgcaaatcctatagatatcgaagaccaaggatttggctcacttgcaaaaaatgaaggatggctttttgataaaaaaaatatggaaaattatctagaaaaaacatcaaagattgagttagctaataatttaatagatgaaattatttcaactaaaaaatga

SEQ ID NO: 49491 - protein, 418 aa, Prochlorococcus marinus subsp. pastoris str. CCMP1986
MNVKSKELKVKVLLLITGSIAAVRIPLLVSQLVKDNYEIKCVVSENAEKLIQPLSLSILSRNNCILDKDQWSYLHSRPLHIDLCEWADVLIIAPLTATTLSKWVTGNADGLISSILIANNKPIIVAPAMNSKMWSNKAVQRNYVYLKDYPNVLILKPSKGILACDEIGVGKIPPNDLIQLALKFLLLQNKKPYYRDLLNKEFLITGGCTSENIDAARKITNNSSGTMGLMLAQVARFRGAKVKYIHGPLKNKLDITEGINTYEIDNSNDLIQEIEKEISKCDYFIMNAAVADFKISGDTSKKIPKSKFEDFLNKNIEYVPDILKEISKVKKENQIFVGFCAFTGSFKSAKKSIKEKIMLKGCDLLFANPIDIEDQGFGSLAKNEGWLFDKKNMENYLEKTSKIELANNLIDEIISTKK

SEQ ID NO: 49492 - DNA, 1287 bp, Prochlorococcus marinus str. MIT 9313
  CDS (1)..(1287): transl_table=11
atgaagattgaggcggcacgccctcttatgggtcgccgtctgcttgtagcagtcactggcagtatcgcggctgttaaaacaccattgctggtgagtgctctgatcaaggccggcgctgaggtgcgctgtcttgtgacgcctagtgctgctcgtctagtcagccctgttgctcttgccagtcttagtaggcatcgctgctaccaggatgaggatcaatggaattcgagcgagcctcgtcctttacatgtggccctggctgaatgggctgagcttgtcattgtcgctcctttaagtgcaacgagtcttgcccgttggtcacatgggcttgcagaggggcttctggcaagtttgttgctggcctgtgaacggccggtgcttgcagcggcagcaatgaacactgccatgtggtccaaccctgccgtgaggaggaactggcaagagttgcagactgatcgaagagtgctgccattggcccctgaatctgggctgctggcctgtgatcggatcggggatggccgcatggtcgatccgaagttgattgagctggctgttgttagtgggcttttgcaggctgatgagacaggcaggctgcaacgcgattggcaagggcgaaggttgttggtgaccgctggatcgacagtggaggttttggatccagccaggctgttgatcaatcgcagcagcggccgcatgggggtgttgctggcgcaggcagctcggctacgcggagcacaggttgatttggtgcatggtcctttgaaattacctgttgcttggttggaggggttggcggcctatccagtgaccagcgcagatgagatgcagaacatgctggcgcagctgcagtccaaagcagatgcagtggcgatggcggcggcggttgcggacgttcgtcgggttaaccctgctcagactgagaaactttcgaaggattgcttgcttcagtctttttctcagggctgggagcaagtccctgaccttctcgctgagctcgttttaaggcgaccagttggtcaggttctgcttggttttgctgcactaactggtaatgaagctcagattcagcagcttggtgaggaaaagcgtcttcgcaaaggctgtgatctgctgatggcgaatccgattgatcgcccaggtcagggttttgaggaggatttcaatggtggttggttgcttgctgccgatggcagcatccgttctttacctgttacgtccaagctggcattggcgcatcagttgcttgatgccattttggaggttcaggtcgtgatttcggcgccatcttga

SEQ ID NO: 49493 - protein, 428 aa, Prochlorococcus marinus str. MIT 9313
MKIEAARPLMGRRLLVAVTGSIAAVKTPLLVSALIKAGAEVRCLVTPSAARLVSPVALASLSRHRCYQDEDQWNSSEPRPLHVALAEWAELVIVAPLSATSLARWSHGLAEGLLASLLLACERPVLAAAAMNTAMWSNPAVRRNWQELQTDRRVLPLAPESGLLACDRIGDGRMVDPKLIELAVVSGLLQADETGRLQRDWQGRRLLVTAGSTVEVLDPARLLINRSSGRMGVLLAQAARLRGAQVDLVHGPLKLPVAWLEGLAAYPVTSADEMQNMLAQLQSKADAVAMAAAVADVRRVNPAQTEKLSKDCLLQSFSQGWEQVPDLLAELVLRRPVGQVLLGFAALTGNEAQIQQLGEEKRLRKGCDLLMANPIDRPGQGFEEDFNGGWLLAADGSIRSLPVTSKLALAHQLLDAILEVQVVISAPS

SEQ ID NO: 49494 - DNA, 1308 bp, Synechococcus sp. WH 8102
  CDS (1)..(1308): transl_table=11
atgaggactgaggtctccacacctctgaaggggcgccgtcttttggttgccgtcagcggcagcatcgctgctgtgaaaacaccgttgttggtcagtgccctggtgaaggcaggagctgaggtgcgctgtttggtcacgcccagtgcggcaaagctggtcagtccgcttgctctggcgaccctgagtcgccatcgctgctacaccgagaacgttgaatgggactcctcttgcagtcggccgctgcacattgagctggcggagtgggcggaactcgtgctgctggctcccctcagtgccacgagcctcagtcgctggagccaggggtctgccgatggccttctcgccagcgtcttacttgcttgcgaatgtcctgtgctgccagccatcgccatgaacacggcgatgtggagtcatcccgccgtccagcgcaactggcagatcgtgcagaccttcccaggtgtggttcccctgatgccccagccaggtctcctggcctgcgatcgcctcggtgaagggcgaatggcggatccgatgctgatcgagctggcggccagcagcctgttcagccgctgcgatgccgggcccgttgcaacgcaggactggagcggacgccgactcctggtgtcggctgggccgaccgttgagcccatcgatcaggcacgtctgatcaccaaccgcagcagtggtgccatgggcgtgttgctggcccaagctgcgcgtttgcgaggggcagaggtggtgttggtccacggccctctgcaggtgccggagccctggttggaatcccttcactgccatccggtcagcagcgctgcggagatgcaggcggtgctggagcagcagcagcccggtgtggatgcgatcgctatggcggcagcgatcgcagatctccgccgcgatgcaaccgccaacggctctgcagatggaaaggtatccaaggcgaacctggcggttcagctcaccgatggttgggagttagtgcccgatctgttgcagggtttggctgcccggcgtccagccgggcaattgatccttggttttgctgccttgaccggtgatgacaacgtcttgcgccgtatcggagaggagaagcgacttcgtaagggatgtgatctgttgctggtcaatcccattgaccggccgggccagggattttccatgccctacaacggcggctggctgttgggggatggatggaccaagcagcttccggtgaccggaaagttgcagctggcccatcagctgctggatactcttcttgacgtcagccagcaagtcccgtcgagtcctgtcccagcaggtcaatga

SEQ ID NO: 49495 - protein, 435 aa, Synechococcus sp. WH 8102
MRTEVSTPLKGRRLLVAVSGSIAAVKTPLLVSALVKAGAEVRCLVTPSAAKLVSPLALATLSRHRCYTENVEWDSSCSRPLHIELAEWAELVLLAPLSATSLSRWSQGSADGLLASVLLACECPVLPAIAMNTAMWSHPAVQRNWQIVQTFPGVVPLMPQPGLLACDRLGEGRMADPMLIELAASSLFSRCDAGPVATQDWSGRRLLVSAGPTVEPIDQARLITNRSSGAMGVLLAQAARLRGAEVVLVHGPLQVPEPWLESLHCHPVSSAAEMQAVLEQQQPGVDAIAMAAAIADLRRDATANGSADGKVSKANLAVQLTDGWELVPDLLQGLAARRPAGQLILGFAALTGDDNVLRRIGEEKRLRKGCDLLLVNPIDRPGQGFSMPYNGGWLLGDGWTKQLPVTGKLQLAHQLLDTLLDVSQQVPSSPVPAGQ

SEQ ID NO: 49496 - DNA, 1182 bp, Chromobacterium violaceum ATCC 12472
  CDS (1)..(1182): transl_table=11
atgactgccaaacgcatcctcctcggcgtcggcggcggcatcgccgcctacaaatccgccgagctgacccgccagctgatcaaggccgggcaccaagtggaagtggtgatgaccgaatcggccacccgtttcgtcgcgcccgccaccttccaggcgctgtcgggccacaccgtctacaccgacctgtgggacccccgccccagcaacgcgatggcccatatcgagctgtcgcgccgcgccgacgcgttcctgatcgcgccggccaccgccaacctgctgttcaagctggcccacggcgcctgcgacgacctggtctcgacgctggccgccgcccgcgcctgcccgctgatcgtcgctccggcgatgaatctgcagatgtggcagaacccgcccaaccagcgcaacatcgcccagctggaggcggacggcgtgaccgtgttcggccccggcaacggcttccaggcctgcggcgagaccggcgacggccgcatgctggagccgcatgaaatcgtcgagctgctgcacggcttcttcgccgacaagcggctggccggcaagaaagtgctgctgaccgccggccccacttacgaagcgatagacgcggtgcgcggcatcaccaacatcagctcgggcaagatgggctacgcgctggcgcgcgcctgccgcgacgccggcgccgaagtgaccctggtctccggccccaccggcatggaggcgccgatgaatgtgcgccgcctggacgtccagagcgccgccgagatgcagcaggcggtgctggccgaagtgggccgcagcgacgtgttcatctcggtggcggcggtggccgactaccgggtgaagaaccgcagcgagcacaagatcaagaaaggcgccgccgcgccgaccatcgagctggaggagaatccggacatcctggccaccgtcgccagcctgcccgccgcgccgttctgcgtcggcttcgccgccgaaagccagaacctgctggaattcgccgaagccaagcgcaagcgcaagaaactgccgatgctggtggccaatctcgcccagcaggcgatgggcgcagacgacaaccaggtcgtgctgctggacgacgcgggccaacatcccttgccgcaaatgcccaaggacgaagtggcctcggccatcgtccgccacctggccgccctgctggccaaacgctga

SEQ ID NO: 49497 - protein, 393 aa, Chromobacterium violaceum ATCC 12472
MTAKRILLGVGGGIAAYKSAELTRQLIKAGHQVEVVMTESATRFVAPATFQALSGHTVYTDLWDPRPSNAMAHIELSRRADAFLIAPATANLLFKLAHGACDDLVSTLAAARACPLIVAPAMNLQMWQNPPNQRNIAQLEADGVTVFGPGNGFQACGETGDGRMLEPHEIVELLHGFFADKRLAGKKVLLTAGPTYEAIDAVRGITNISSGKMGYALARACRDAGAEVTLVSGPTGMEAPMNVRRLDVQSAAEMQQAVLAEVGRSDVFISVAAVADYRVKNRSEHKIKKGAAAPTIELEENPDILATVASLPAAPFCVGFAAESQNLLEFAEAKRKRKKLPMLVANLAQQAMGADDNQVVLLDDAGQHPLPQMPKDEVASAIVRHLAALLAKR

SEQ ID NO: 49498 - DNA, 1215 bp, Porphyromonas gingivalis W83
  CDS (1)..(1215): transl_table=11
atgaaatcatctttggccggtaagcacatcgtcctcggtgtcacggggagtatcgcagcctacaaggctgccgttttgacccgcctgctcatcaaaaaggaggctgaagtgcaaatagtcattactcctgccggcaaggagttcattactcccatcaccctctcggctctgacttccaagcctgtcatcagcgaatttttctccggacgggatggtacatggaacagccatgtggatctcagtctctgggcggatgctatgctgatagctccggccacagcctctacgataggcaagatggcacatggcatagccgacaatatgttggtaaccacttacctttccgccaaggctcccgtattcgtggctccggctatggatttggacatgttccgacatccgagtacgcagcacaatatggagatactacgctcttatggcaatcatatcatagagccgggtgaaggcgaattggccagtcatttggtaggaaaggggcggatggaagagccggagtgcattgtggagatattggaggcttttttcaaggagaacgattgtaagcccctccttgggaagagagcattggttacagccggccctacatacgagaaactcgatcctgtacgttttctcggcaactactcttccggaaggatgggcttctgcatagcagaacgtttggccgaattgggggcttcggttacgcttgtcaccggccctaccactatgcagacaactgtcgaagggatagaccgtatcgatgtggaaagtgccgtagagatgctcgaagcctgtcggaaaccttttgaaaaggccgacataaccgtcttgtccgcagccgtggctgactatcgtccggcagagcaggcagagaaaaagatgaaacgagagaccaagggcgacttcgatcttcgcttgactgctaatccggatatagcggctacgctcggagcactcaaacgtgcaggacagcggttggtgggttttgccttggagacggacagtggggagcaagaggctatgcgcaagatgaaagccaagcacttggatgcgatagtactgaattcgctttccgatgcgggagccggatttggagtaggtacgaataagatcaccatattcgacagtgaaggccgaccgtcggactatccgctcaaaagcaaggtcgaggtggccgaagatattgtggactatataatcggattgggatga

SEQ ID NO: 49499 - protein, 404 aa, Porphyromonas gingivalis W83
MKSSLAGKHIVLGVTGSIAAYKAAVLTRLLIKKEAEVQIVITPAGKEFITPITLSALTSKPVISEFFSGRDGTWNSHVDLSLWADAMLIAPATASTIGKMAHGIADNMLVTTYLSAKAPVFVAPAMDLDMFRHPSTQHNMEILRSYGNHIIEPGEGELASHLVGKGRMEEPECIVEILEAFFKENDCKPLLGKRALVTAGPTYEKLDPVRFLGNYSSGRMGFCIAERLAELGASVTLVTGPTTMQTTVEGIDRIDVESAVEMLEACRKPFEKADITVLSAAVADYRPAEQAEKKMKRETKGDFDLRLTANPDIAATLGALKRAGQRLVGFALETDSGEQEAMRKMKAKHLDAIVLNSLSDAGAGFGVGTNKITIFDSEGRPSDYPLKSKVEVAEDIVDYIIGLG

SEQ ID NO: 49500 - DNA, 1212 bp, Wolinella succinogenes DSM 1740
  CDS (1)..(1212): transl_table=11
atgctccccctgctttttggtaaaaagattgccctaggggtgagctctagcatctctgtctataaagcgcctgagattgtgcgcctgctccaaaagcgcggtgcgagcgtgaaggtcgtgatgagcgaagaggctaagcgcttcatctctcctttggtctttgaggcgctcaccaaagagagcgtgctccacgctcaaagcgagtcttggtcaagcggcattaatcatatcgcgattgcctcgtgggctgatctctatctcatcgctcctgccaccgccaacacgatcaacaagatcgccgcgggaatcgctgataatcttctcctctctagcttccttgcctttgatggacccaagatgattgcgcctgcagccaacaccaaaatgatcgaaaatcctctcacccaagaatcgctccgcaagctagaaaagcttcgcatggaggttattgagccctccactaaagagctggcgtgcggcgatgtgggcaagggagcgcttgaagagcctcaagagattgtggagcaggtgacgcgccatcttcttaaagagcctttttgggagaatcggagcgtggcggtgagtggcggagggagcatggaggcgctggatgaggttcgattcctcaccaatcgctctagcggcaagatggccgaagctctctctcgcgcactcttttatcgcggagccaatgtgacgctcttctcttcgctcgcccccccttctctccccaaggccatcgggcatattggagcaaggagcgctcaggactattttgatcacctccatcagtggcaaaaggctcatcaagggcaaaagagtaccccttttctctttatggctgccgcgattggggattatagggtggctacacccgctaaaggaaaactcaaaaaagaggcgctaggcgagcgcttctccttggagctggtgcagaatatcgatgtcctccaaagcctcatcaaaaaaggattcaaaacgattggattcaaactagaagaggagggggaaacagcctttataaacgccaaaaaagcgctggagcgcaaaggagtggaggcgatctgcctcaatctcatcgcccaagagagtcctcttgaatcggagcaaaatgagatttggctcctcactcctcaaaaagagatcaagattccaagagatgaaaaattgggcgtggccttagccctcttagatgaggtcaaatccctgtga

SEQ ID NO: 49501 - protein, 403 aa, Wolinella succinogenes DSM 1740
MLPLLFGKKIALGVSSSISVYKAPEIVRLLQKRGASVKVVMSEEAKRFISPLVFEALTKESVLHAQSESWSSGINHIAIASWADLYLIAPATANTINKIAAGIADNLLLSSFLAFDGPKMIAPAANTKMIENPLTQESLRKLEKLRMEVIEPSTKELACGDVGKGALEEPQEIVEQVTRHLLKEPFWENRSVAVSGGGSMEALDEVRFLTNRSSGKMAEALSRALFYRGANVTLFSSLAPPSLPKAIGHIGARSAQDYFDHLHQWQKAHQGQKSTPFLFMAAAIGDYRVATPAKGKLKKEALGERFSLELVQNIDVLQSLIKKGFKTIGFKLEEEGETAFINAKKALERKGVEAICLNLIAQESPLESEQNEIWLLTPQKEIKIPRDEKLGVALALLDEVKSL

SEQ ID NO: 49502 - DNA, 1209 bp, Gloeobacter violaceus PCC 7421
  CDS (1)..(1209): transl_table=11
atgttcgcgggtcggcgcgtcctggtggccgtcaccggcggcatcgccgcctacaaagtctgcgaggtggtctccaccctcgcccaggcgggcgcctccgtgcgcgtgctgctcacggaggcggccgaacggtttgtaagcgccctcaccttcgccaccctggcgcgggcgcgcgcttacaccgacgccgacttttggtcggcggagcacggcgcgcccctgcacatcgccctgggccagtgggccgaggtgatcttgatcgcacccgtcaccgcccacaccctggcgcgactggccctggggctcgccgacgacctgctcaccaacacggtgctcgcttcgagcgccccgattttgcttgccccggcgatgaacacccagatgtgggaacaggagccggtcgcagcgcatgcgcagacgctgattacccggccgcgctaccacctgagcggtcctggccgggggcggcttgcctgcgacgcggtgggagccgggcgcctcagcgaaccggcggtgcttttgcgccacctcggttcgcttctttggagcggcggcaaacaggatctggcgggcaaaaccgtgctggtcaccggcggcggcacccgcgagtttctcgacccggtgcgttttatcggcaaccccagcagcggccggatgggtattgagctggccgccgcctgcgcccaccgcggcgggacggtgcacttggtgctgggtccgacgcacctggaggcccccccggaggtcgattgccacccggtggtcggcgccgcccagatggcccaggccacttttgcgctgttcgagcgggcacatttgacattcatggccgcggcggtggccgatgtacgcccaagccaaatccacatcgacaaaattcccaaaaaccagctgggcaataggctcaccctggagccggtcgaggatattttgctcgaactttctcgccgtaagcaaccctggcaaacactggtcggttttgccgcccagaccggcgaggactggttggttcccgcggcggccaagctcaaagccaaacacctcgattggctggtggccaaccgcgtcgacctccaagagcagggcttcggcggtgacaacaatcaggctatgctcttaagcagccgcggggatatgcatgcgattcccctgatgagcaaactggagatggcccaccgcctgctggatcgaatggagactcccgcgtga

SEQ ID NO: 49503 - protein, 402 aa, Gloeobacter violaceus PCC 7421
MFAGRRVLVAVTGGIAAYKVCEVVSTLAQAGASVRVLLTEAAERFVSALTFATLARARAYTDADFWSAEHGAPLHIALGQWAEVILIAPVTAHTLARLALGLADDLLTNTVLASSAPILLAPAMNTQMWEQEPVAAHAQTLITRPRYHLSGPGRGRLACDAVGAGRLSEPAVLLRHLGSLLWSGGKQDLAGKTVLVTGGGTREFLDPVRFIGNPSSGRMGIELAAACAHRGGTVHLVLGPTHLEAPPEVDCHPVVGAAQMAQATFALFERAHLTFMAAAVADVRPSQIHIDKIPKNQLGNRLTLEPVEDILLELSRRKQPWQTLVGFAAQTGEDWLVPAAAKLKAKHLDWLVANRVDLQEQGFGGDNNQAMLLSSRGDMHAIPLMSKLEMAHRLLDRMETPA

SEQ ID NO: 49504 - DNA, 1218 bp, Photorhabdus luminescens subsp. laumondii TTO1
  CDS (1)..(1218): transl_table=11
atgatggcaggactttccggcaaacagattgtgctcggtatcagcggaggaatagccgcttacaaaactcccgagctagtacgtcgcctgcgtgatcgcggcgcacaagtacgtgtagtgatgacaccagcagcagaatcgtttattacaccaatgacgttgcaggcggtttctggttatcccgtttccgatgacttgttagatccagcagcagaagctgctatggggcatattgaacttggtaaatgggctgatctgattattctcgccccggctactgctgatttactggcacgcctggtcgtcggtatggcaaatgatctcgtaacaactctttgtttggcctccccagccccaattgccgccgtacccgcaatgaatcaacaaatgtttcgagctcaagcaacgcaacataatctcaagcatcttgaagaacgaggcgttctcctgtggggaccggacaacggcagccaagcttgtggtgacgttggtcccggcaggatgctaaatcccatggcgattgtcgaactcgctgaacaacattttcaagcaagccaagacttagctcacctaaaacttgctattaccgccggaccaacccgtgaagcattggacccagtccgctttatcagcaatcacagctccggcaaaatggggtttgctatcgcccaggctgcggcaacacgtggtgcagaagtcaccctgatcactggccccgttaatttaccgacaccaccgggagtcaaacgaatcaacgtcaccagcgctctggaaatgaatgaacaagcacaggcagtagcgggttcacagaatatcttcattggttgtgctgcggttgcagactatcgcgctaaacagattgccgaagaaaaaattaaaaaacagggtgatgagatcacttttaccctgatcaaaaacccggatattgttgccaatgtagcagcaatgcaagaaaaccgcccctttgtggttggatttgcggctgaaacccagaatgtggaagaatacgcacgaaaaaaactgaaccaaaaacatttggatctgatttgtgcaaatgatgtatcccttactggccacggctttaacagtgatactaatgcattacatttgttctggcatgagggagaaatccgcttacctcatagtaataagttattacttagccaccatttattagacgagatagtcagacgctatgatgaaaaaaatcgacgttaa

SEQ ID NO: 49505 - protein, 405 aa, Photorhabdus luminescens subsp. laumondii TTO1
MMAGLSGKQIVLGISGGIAAYKTPELVRRLRDRGAQVRVVMTPAAESFITPMTLQAVSGYPVSDDLLDPAAEAAMGHIELGKWADLIILAPATADLLARLVVGMANDLVTTLCLASPAPIAAVPAMNQQMFRAQATQHNLKHLEERGVLLWGPDNGSQACGDVGPGRMLNPMAIVELAEQHFQASQDLAHLKLAITAGPTREALDPVRFISNHSSGKMGFAIAQAAATRGAEVTLITGPVNLPTPPGVKRINVTSALEMNEQAQAVAGSQNIFIGCAAVADYRAKQIAEEKIKKQGDEITFTLIKNPDIVANVAAMQENRPFVVGFAAETQNVEEYARKKLNQKHLDLICANDVSLTGHGFNSDTNALHLFWHEGEIRLPHSNKLLLSHHLLDEIVRRYDEKNRR

SEQ ID NO: 49506 - DNA, 1245 bp, Vibrio vulnificus YJ016
  CDS (1)..(1245): transl_table=11
gtgttaggatcggcaacagttattttggagagtaatcaaatgcaaacattggcaggaaagaagattctactgggtatcagtggtggtattgcggcctacaaatgtgcagacctcacccgacgtcttaaagaaagaggcgcagaggtgcaagtggtgatgactaaagccgcgaaagaatttattaccccgctcacgatgcaggcagtctctggccgaccagtctcggatagcttgcttgatcccgccgccgaagcctcaatgggccacatcgagctggcgaagtgggccgatttaattttgcttgctcctgccactgccgatctgattgctcgcatggccgctggcatgggcaacgacctacttaccaccttagtgttggccactgacgcccctgtcgcagtctctccagcgatgaatcaacagatgtatcgcaacgtcgcgacccaagagaacattgcgactctgagccgacgcggtatggaaatctggggcccagcggctggcgaacaagcgtgtggcgatgtgggcccaggccgtatgttagagccgatgcagttggttgcgttgtgcgaacaattcttccagccaaaaccgctgcaagacaaatcgattttgatcactgcgggtccaactcgcgaagccattgaccctgtgcgctacattaccaaccacagctcaggcaaaatgggttatgcgctggcgcaagccgcaatgcaattgggtgcgaatgtgacacttgtcagcggcccggtttctctgccaacccccgtcaatgtcaaccgcatcaacgtcgacagtgcccaagaaatgtatgacgccgtgatggctcaggcatctgatcacgatatcttcatcagttgcgcggccgtggcagattaccgcccagctacaattgctgagcaaaaactgaagaaaactgacgacagtgatgaaatgaccatcactatggtgaagaatcccgatatcgtcgcgtctgtctccgccatgacagagaatcgtccttttacggtcggctttgcggcagaaaccaacgacgttgaagtgtacgctcgccgtaaactggaaaagaaaaagctcgatctgctctgcgcgaacgacgtgtccgtggaagggcaaggcttcaacagcagcgacaatgcgattacgctttactggccacagggagagaaagcgctgccactcaacagcaaagcggcattaagtatggagatcttgaaacagatccaaaccctgatgggtcactaa

SEQ ID NO: 49507 - protein, 414 aa, Vibrio vulnificus YJ016
MLGSATVILESNQMQTLAGKKILLGISGGIAAYKCADLTRRLKERGAEVQVVMTKAAKEFITPLTMQAVSGRPVSDSLLDPAAEASMGHIELAKWADLILLAPATADLIARMAAGMGNDLLTTLVLATDAPVAVSPAMNQQMYRNVATQENIATLSRRGMEIWGPAAGEQACGDVGPGRMLEPMQLVALCEQFFQPKPLQDKSILITAGPTREAIDPVRYITNHSSGKMGYALAQAAMQLGANVTLVSGPVSLPTPVNVNRINVDSAQEMYDAVMAQASDHDIFISCAAVADYRPATIAEQKLKKTDDSDEMTITMVKNPDIVASVSAMTENRPFTVGFAAETNDVEVYARRKLEKKKLDLLCANDVSVEGQGFNSSDNAITLYWPQGEKALPLNSKAALSMEILKQIQTLMGH

SEQ ID NO: 49508 - DNA, 1245 bp, Corynebacterium diphtheriae NCTC 13129
  CDS (1)..(1245): transl_table=11
atgacgaatacttcatttgataacagcacaattgtagtaggtgttgccggcggtattgctgcctacaaatcctgccatgtagtgagaggatttaaagaggatggtgcgaacgttgttgttgtaccaacttctgcagcattgaattttgttggtaaggcaacttttgaagctctttctggaaatccagtttctactaccgtttttgatgctgtcgatgaggtccgccatgtcaatgttgggcagcacgctgatctgatcgtcgtggctcccgccacagctgacctgattgctcgagtggctatggggcgagcagatgacctattgactgcaactttacttgtagctacttgcccaattgttttggtgccagcaatgcatgcagagatgtggagtaacgccgctacccgtgaaaacgttgctacgctgcgtcgccggggtatcatcgttatggatccagctcacggtcgtctcacaggcgcagatactggcccagggcgtttgcctgattccgatcaaattatcgattttgctaaaactgtggcacgcacgaaagtcatgcctcgcgatcttgtgggtaagaaagtgctaatttcggcaggaggcactcaagagaacattgatcctgtgcgttatgtaggcaatagatcgtcaggtaggcaaggattcgcgttagcagagatcgcatcacagcgtggggccgaagttaccgtcgttgccggtgcgacagataagcttccggttccttgtggtgcacgagtagtgaatgttacatcggcggtggaaatgcagcgggaatgtatgcgggaagcacgtaacagtgatgttgtgattatggctgctgcggtagcggattttcgtccgcgtgaaattgcctctgcaaagatgaagaagggtaccgctgactcttcgcttcaggtgatttcgatggtggaaaatcctgatattttgcgaggacttgtcgaacaacgacaaggtgaaaaacctgtcatcgttggatttgcagctgagactggggatgcgaatcatacgcccttggagtttgctcgacagaagttgaacagaaaaaagtgcgatcttttgatgtgtaatgaagtcggcgtcgacaaagtattcggtaaggcggataacagtggatatctattgtctcgtcaaggaaacgttgaggaaatctcgcaggggtcgaaacactggattgcttttaatattttaaatcacgtcgtgaggttgctagaagccgagatgtga

SEQ ID NO: 49509 - protein, 414 aa, Corynebacterium diphtheriae NCTC 13129
MTNTSFDNSTIVVGVAGGIAAYKSCHVVRGFKEDGANVVVVPTSAALNFVGKATFEALSGNPVSTTVFDAVDEVRHVNVGQHADLIVVAPATADLIARVAMGRADDLLTATLLVATCPIVLVPAMHAEMWSNAATRENVATLRRRGIIVMDPAHGRLTGADTGPGRLPDSDQIIDFAKTVARTKVMPRDLVGKKVLISAGGTQENIDPVRYVGNRSSGRQGFALAEIASQRGAEVTVVAGATDKLPVPCGARVVNVTSAVEMQRECMREARNSDVVIMAAAVADFRPREIASAKMKKGTADSSLQVISMVENPDILRGLVEQRQGEKPVIVGFAAETGDANHTPLEFARQKLNRKKCDLLMCNEVGVDKVFGKADNSGYLLSRQGNVEEISQGSKHWIAFNILNHVVRLLEAEM

SEQ ID NO: 49510 - DNA, 1347 bp, Rhodopseudomonas palustris CGA009
  CDS (1)..(1347): transl_table=11
gtgatccttcgcgacgcctgccacaagcggctcggcttcgcggagcccgcctcggctggcttgtccgtgccagcacctcccgcagccgatgagccggtggacgggccgcgtgcccagccacaggccggcaccgtgcgggtgacgctgatcgtcggcggaggcattgcggcctacaaggcgatggacctgatccgccggctcaaggagcgcggcgccgacgtccgtgtggtgctgaccaaggcggcccagcaattcgtcacgccgctgaccgcgagcgcgctgtcgcatcagcgctgctacactgacctgttcgatccctcgagcgagttcgatgccgggcacatccgcctcgcgcgcgactgtgacctgatcgtcgtcgcgcccgcgaccgccgacctgatggccaagatcgccggcggccatgccgacgatctggcgaccgcgatcctgctcgccaccaatcgccagatcctgttggcgccggcgatgaacccgctgatgtggaacaacgccgcgacccggcgcaacgtcgcgcagctcaagcaggacggcgtcgcaatggtcggccccaatgccggcgagatggccgagcgcggcgaggccggcgttggccggatggcggagccgaccgagattgcggtcgcggccgaagcgctgtggcggccgcagccgccgaagccgctgctcggcaagcgcgtgctgatcactgcaggccccacccatgagccgatcgatccggtgcgctacatcgccaaccgctcgtccggcaaacaaggctacgcaatcgcggcggccgcagccgccgccggcgccgaggtggcgctgatttccggtccggtcgagctgcgcgcgccggcgggggtcgattgcatccgcgtggagtcggcccgcgagatgctcgccgccgtgcaatccgcgctgccggcggatgtggcgatcttcgccgccgcggtggcggactggcgggttgctgccgaagggatgcagaagctcaagaagggcgccggcggaccgccaccgctgcagctcaccgaaaaccccgacatcctcgcgacgatctcgaagctgaccgaaggccggccgccgctggtgatcggctttgcggccgagaccgagaatctgatcgacaacgcgaccgccaagctcgcccgcaagggctgcgactggatcgtcgccaatgacgtctcgccggccaccggcgtgatggggggcgaccgcaacaccgtgcatctgctgatgcgccacgatgccgccaccgatctcgaatcgtggccgttgatgaccaaggacgaagtcgcgaccgcgctggtggcgcggatcgcccaagcaatggcagttcacgcatga

SEQ ID NO: 49511 - protein, 448 aa, Rhodopseudomonas palustris CGA009
MILRDACHKRLGFAEPASAGLSVPAPPAADEPVDGPRAQPQAGTVRVTLIVGGGIAAYKAMDLIRRLKERGADVRVVLTKAAQQFVTPLTASALSHQRCYTDLFDPSSEFDAGHIRLARDCDLIVVAPATADLMAKIAGGHADDLATAILLATNRQILLAPAMNPLMWNNAATRRNVAQLKQDGVAMVGPNAGEMAERGEAGVGRMAEPTEIAVAAEALWRPQPPKPLLGKRVLITAGPTHEPIDPVRYIANRSSGKQGYAIAAAAAAAGAEVALISGPVELRAPAGVDCIRVESAREMLAAVQSALPADVAIFAAAVADWRVAAEGMQKLKKGAGGPPPLQLTENPDILATISKLTEGRPPLVIGFAAETENLIDNATAKLARKGCDWIVANDVSPATGVMGGDRNTVHLLMRHDAATDLESWPLMTKDEVATALVARIAQAMAVHA

SEQ ID NO: 49512 - DNA, 1200 bp, Geobacter sulfurreducens PCA
  CDS (1)..(1200): transl_table=11
atgctcaagggaaaagagatcgttctcggtatttgcggcggcatcgcagtctacaaagccgttgaactcgtacggctgctcacgggggcaggagcgaacgtccatgtcatcatgacgcgagcggccacggagttcgtggctccgctcacgttccagaccctaacctccaaccccgtgcactcggaactcttcaatctcatcgctgaacgggaaatcggccacatttcgctggcggaccgggccgatctcttcatcatcgcgccggccacggccaacgtgatcggcaagatcgcccacggtatcgccgacgacatgctcaccaccacggtcatggccaccagggcaccggttctgatcgctcccgccatgaactgcaacatgtaccgcaatcccctctaccaggaaaacgaggcgcgactgaggcgccacgggtacctgttcgcggatccggtgcggggaatgctcgcctgcggctgggagggtgaaggaaagctccagtcccccgagatcatcttcgaggaggcggtcaccgcccttacgccgaaggaccttgccggcgagcacctgctggtgacggccgggccgacccaggaggagatcgatccggtccgcttcgtgagcaaccactcgtcggggaagatggggtatgccatcgcccgggccgcccggcgccgcggggcggaggtgacactggtctcaggccccacctgcctcgatgccccctggggggtggaaacggtgcgggttgcgtcggccgtggagatgcgcgctgccgtcatggctgccctgccggcggccacggttgtgatcaaggccgcagccgtggccgattatcgtcctgtagtgcgcgcgacgggaaagatcaagaaaaatgccgactcgctggtgatcgagttggagaagaaccccgacatacttgccgaacttggaggaatcaagggggagcgcctgctggtgggcttcgccgccgagactgccgatctgcttgaaaacgcccggaaaaaactggtcgccaagaatgttgacatgatggtcgccaatgacgtgagcctggaaggcgccggattccacggcgacaccaatattgcccgccttctctatcgtgacgggaccagtgaggagctgccgctcatgaccaagaacgaaatggcggccctcattcttgaccgggtggcggaattgaggaaaaaggcggggtaa

SEQ ID NO: 49513 - protein, 399 aa, Geobacter sulfurreducens PCA
MLKGKEIVLGICGGIAVYKAVELVRLLTGAGANVHVIMTRAATEFVAPLTFQTLTSNPVHSELFNLIAEREIGHISLADRADLFIIAPATANVIGKIAHGIADDMLTTTVMATRAPVLIAPAMNCNMYRNPLYQENEARLRRHGYLFADPVRGMLACGWEGEGKLQSPEIIFEEAVTALTPKDLAGEHLLVTAGPTQEEIDPVRFVSNHSSGKMGYAIARAARRRGAEVTLVSGPTCLDAPWGVETVRVASAVEMRAAVMAALPAATVVIKAAAVADYRPVVRATGKIKKNADSLVIELEKNPDILAELGGIKGERLLVGFAAETADLLENARKKLVAKNVDMMVANDVSLEGAGFHGDTNIARLLYRDGTSEELPLMTKNEMAALILDRVAELRKKAG

SEQ ID NO: 49514 - DNA, 1209 bp, Lactobacillus johnsonii NCC 533
  CDS (1)..(1209): transl_table=11
atgaaagctacaatatatatcacgggtagtattgctgcatataaggcaattagtgttgtacgtgattttcaaaaagaaggacatgaagtaagagtagcgatgaccgaagaggcagttcatttgattggaacacaaactttagctgctttaacgaagcatccagtattaactgatctctggaaggagaatagagctgataagatccagcatattgaattggccgactggactgatattgcggttgtagttccggcaacagctaactttattgcaaaaatagccaatgggatagcagatgatgctgcaagtacaacgtttttagcaactgctgcacctaaatatgttattccggcaatgaatagccatatgtggagtaatcctgcatttcaaagaaacttacagcaattaaagcaagatggaatctttgtaatggatcctgatactggccgtttagctgaaggatataatggtaagggaagaatgcctgaaccagcagcaatcatgaactgggtaaactcatctcttcaagtaaatgatgaattagctggtaaaaaagttgtaattactgctggcggaactgtctccccacttgatcctgttcgttatttagggaatcgctctagtggaaagatgggactggccttagcaaatgcagctcttagggctggtgcagaagttgttttgattgtaggacatgtttcagttcctgttcctgagtcatcaaaaatgacggttattcatgtagagacgactgaagaaatgcttgcagctgtgaagaaagctttttctactgcggatgctttaattatggcggctgctgtagcggattatgagccagtgaactacatagatcataaaattaaaaagcaagatcaaggagataaactaaaaatttatttaaaagaaactcctgatatcttaaaaacaatggggagtttaaagcaagaacagcaagttgtggttggttttgcagctgaaacaaatgatttactcgaaaatgcgactaaaaagttgaaaaataaaaatgcagatatgattgtagccaataatgttagtcagggagtatttggaagcgatagggataaggttacggtattaagaaaagataaagcaaatgaaaatatcgcagagacaactaaagtagaaatagctaagaaaataattactttagttgctgaagagcttgaaagtaggaaagttataaaatga

SEQ ID NO: 49515 - protein, 402 aa, Lactobacillus johnsonii NCC 533
MKATIYITGSIAAYKAISVVRDFQKEGHEVRVAMTEEAVHLIGTQTLAALTKHPVLTDLWKENRADKIQHIELADWTDIAVVVPATANFIAKIANGIADDAASTTFLATAAPKYVIPAMNSHMWSNPAFQRNLQQLKQDGIFVMDPDTGRLAEGYNGKGRMPEPAAIMNWVNSSLQVNDELAGKKVVITAGGTVSPLDPVRYLGNRSSGKMGLALANAALRAGAEVVLIVGHVSVPVPESSKMTVIHVETTEEMLAAVKKAFSTADALIMAAAVADYEPVNYIDHKIKKQDQGDKLKIYLKETPDILKTMGSLKQEQQVVVGFAAETNDLLENATKKLKNKNADMIVANNVSQGVFGSDRDKVTVLRKDKANENIAETTKVEIAKKIITLVAEELESRKVIK

SEQ ID NO: 49516 - DNA, 1191 bp, Methanococcus maripaludis S2
  CDS (1)..(1191): transl_table=11
atgcaccctacaaaaacacttcacggagcaaaatcaaaattactggatggtaaaaaactcgttgtagcagttacttcatcgattgcagcaattgaagcgccaagattgatgagagaattaatcagacacggtgctgaagtttactgcataatgacggaagaaacaaaagatatcgttgggaaatactcgcttgaatttggatgcggaaacgaagtaatggataaaattactggaaaaattgaacatgtcgatttatacaataaatgcgatggaatgatagtttttccagcaactgcaaacataatatccaaaatttcgctgaatattgcagataacattgtaaacacgactgcaatgatgtttttagaaaaaaaaccaatcataattgctccatcaatgcaccagaacatgctcgataccgttagggatcacataaaaaacctttctgaaaaaaataacgtctttgtaatgggttcaaaaatggaagaagaaaaagcaaaagcaatttcaattgatgaagtttcaaagcttgcgattgatgtgttttccgatagaaaagaagaaagaaaaaaagtgcttatattatcaggcggaactgctgaaccaattgataaagtcagagtaattacaaatctttcttctggaaaaaccggtgtttcacttgcagaagaattttgtaggcagaattatgatgttgatgtgataaaaggacttggaaaagatgttccatattatataaactcggaaaacgtgatcacatcacaagaaatgcttaaaaaagctcttgaacttggggaatctgcagatataataatttcgtgcgctgcaatttcagattatgctcctgaaacgaattttgaaggaaaattaagttcagatatcaaaacacaagttataaaattaaaacaaactccgaaagttttggaagaattaaggaaaaaattccctaaaaaaattattgtaggatacaaggcagaatacggaataaatttagatgaattaaaagaaaaggcaatttcaagacttgaaaaatataatttagatgtaataattgcaaatgatctttcgaaacactattttggtgatgatttaaacgaagttttgattatcgataaagaaaaggctttgaaagtttcgggaagtaaagatgaaatatctaaaaaaattgttgaaattgtaaataatctctaa

SEQ ID NO: 49517 - protein, 396 aa, Methanococcus maripaludis S2
MHPTKTLHGAKSKLLDGKKLVVAVTSSIAAIEAPRLMRELIRHGAEVYCIMTEETKDIVGKYSLEFGCGNEVMDKITGKIEHVDLYNKCDGMIVFPATANIISKISLNIADNIVNTTAMMFLEKKPIIIAPSMHQNMLDTVRDHIKNLSEKNNVFVMGSKMEEEKAKAISIDEVSKLAIDVFSDRKEERKKVLILSGGTAEPIDKVRVITNLSSGKTGVSLAEEFCRQNYDVDVIKGLGKDVPYYINSENVITSQEMLKKALELGESADIIISCAAISDYAPETNFEGKLSSDIKTQVIKLKQTPKVLEELRKKFPKKIIVGYKAEYGINLDELKEKAISRLEKYNLDVIIANDLSKHYFGDDLNEVLIIDKEKALKVSGSKDEISKKIVEIVNNL

SEQ ID NO: 49518 - DNA, 1257 bp, Prochlorococcus marinus str. AS9601
  CDS (1)..(1257): transl_table=11
atgaaaactaaaagtaaggactcaaaaataaaggttcttttattaataactggaagtattgcagctgtaagaattccattattagttagccaattagcgaaagaaaattatgaaataaaatgcgttttatcaaaaaatgcagaaaaattaataaagccgctttctctttctattttaagtagaaacccgtgcattttagaaaatgatcaatggtctgattgtcaatcaacacctcttcacatagaactaagtaattgggctgatattttaatcatcgcccctttaacagccacaacattagcaaaatgggtaactggaaatgcagagggattgatcccaagcatattaatagcaaatattaagcccattattgttgcaccagcaatgaatacacaaatgtggctaaataaagctgtccaaaaaaattatgagaatttacagaattatgaaaatgttttgtctttgcaaccaagtgaaggcctcttggcatgtgatgctcttggcatcggtaagatacctccaaatgatctaatccaattagctcttgaatttatagcttcacataagcaaaatgaatatcgcaaagatttacttaataaagaaattttaataactggagggtgtacctcagagaaaattgacgcggcaagacatattactaacaaaagttctggagctatgggcctacttctctctcaagtagcgaggttcaggggagcacaagtaaaatatgttcatggtcctcttaaaatcgataagaatcttactgatggaataaaaagatatgaaattgaaactagtgttgatttaattaggacacttaataatgaaatatcaaattgcgattattttttcatgaatgcagcagtatctgatttcaaaataacctctgatacttcagctaaaattccaaaaaatcaaattaatgctcatttgaataaaaactttgaactagtcccagatattttaaaaacaattagtaaatcaaaaaaagataaccaagtttttgtaggcttttgtgcttttacaggatctatagaagaagcacgaatgacaattaaaaaaaagattatccaaaagggttgtgattatctattcgcaaatccaattgatcttgaaggccaaggatttggctttttagcacaaaatgaaggttggttattcgatactaataatatggagcactacattaacaaaacatcaaaaattgatttagcaaataaattaataacccaaattatttcattaaaaaaataa

SEQ ID NO: 49519 - protein, 418 aa, Prochlorococcus marinus str. AS9601
MKTKSKDSKIKVLLLITGSIAAVRIPLLVSQLAKENYEIKCVLSKNAEKLIKPLSLSILSRNPCILENDQWSDCQSTPLHIELSNWADILIIAPLTATTLAKWVTGNAEGLIPSILIANIKPIIVAPAMNTQMWLNKAVQKNYENLQNYENVLSLQPSEGLLACDALGIGKIPPNDLIQLALEFIASHKQNEYRKDLLNKEILITGGCTSEKIDAARHITNKSSGAMGLLLSQVARFRGAQVKYVHGPLKIDKNLTDGIKRYEIETSVDLIRTLNNEISNCDYFFMNAAVSDFKITSDTSAKIPKNQINAHLNKNFELVPDILKTISKSKKDNQVFVGFCAFTGSIEEARMTIKKKIIQKGCDYLFANPIDLEGQGFGFLAQNEGWLFDTNNMEHYINKTSKIDLANKLITQIISLKK

SEQ ID NO: 49520 - DNA, 1257 bp, Prochlorococcus marinus str. NATL1A
  CDS (1)..(1257): transl_table=11
atgattaattcgactgctttatctgggaaaaaaatattagttgctgttacggggagtattgcagctgttaaagctcctattttagttagccgcctaattaaagctggggcagaggtcaagtgcgtcataacgcaaagcgccactaatttagttagtcccttatctttgtctactttaagcagaaataaatgttaccaagataaagatcaatgggctgactctcaaacaaagccattgcacattgctttggctgagtgggcagaactaattattgttgcaccattgagcgccacatccttatccaaatttactagtggaagtgctgatggacttttagccagcattcttttagctagtcaatctcaaatagttatggctgctgccatgaatacttcaatgtgggaaaatcaatcagtaaaaaagaattggaattacgtaaaaactattgaccaagttattactctcgaacctagcgcaggacttttagcttgcgacagagttggtgatgggaaaatggtcaatttagatattattgaaatggcctctgaaagtgcatttattttccatgcagaaaataaatttctcactaaagatttaaaagacataaggtttctcatatcggctggtcccaccgtcgaagctcttgatgccgcaagacaattaactaatcgaagcagtggaaagatgggggttttgatagctcaagcagcaaagttaagaggtgcagaggtcgatttagttcatggcccagtaagcgttcaacaagatctgcttgagggactgaatacttatccagttagaagctcaaatgaaatgggagaaaaaattgatgatttacaaccatctgctcaggtcatcgttatggctgcagcagtatcagatttcaaaaataatagtcccagtgaacaaaaaatctctaaagaattttttttaaagtccattttcgatgacctagaaatgacatcagacctaatcaaaaatcaaacgaaaaaaaaattagaacatcaaatttttcttggttttgctgctgagacaggaagtgataatgaaatcattgaaaagggaaagaagaaaatggtttcaaaaggttgtgaccttctcatggccaatcccattgatagagccgggcaaggatttgatgaaaacttcaacagtggttttttgttaggtccaaaaaatatggtcaaaaaattatctttttcaacaaaacttgcaatatcccatgaacttttagatgaaattagaaatttaaaatag

SEQ ID NO: 49521 - protein, 418 aa, Prochlorococcus marinus str. NATL1A
MINSTALSGKKILVAVTGSIAAVKAPILVSRLIKAGAEVKCVITQSATNLVSPLSLSTLSRNKCYQDKDQWADSQTKPLHIALAEWAELIIVAPLSATSLSKFTSGSADGLLASILLASQSQIVMAAAMNTSMWENQSVKKNWNYVKTIDQVITLEPSAGLLACDRVGDGKMVNLDIIEMASESAFIFHAENKFLTKDLKDIRFLISAGPTVEALDAARQLTNRSSGKMGVLIAQAAKLRGAEVDLVHGPVSVQQDLLEGLNTYPVRSSNEMGEKIDDLQPSAQVIVMAAAVSDFKNNSPSEQKISKEFFLKSIFDDLEMTSDLIKNQTKKKLEHQIFLGFAAETGSDNEIIEKGKKKMVSKGCDLLMANPIDRAGQGFDENFNSGFLLGPKNMVKKLSFSTKLAISHELLDEIRNLK

SEQ ID NO: 49522 - DNA, 1197 bp, Clostridium thermocellum ATCC 27405
  CDS (1)..(1197): transl_table=11
ttgctgaaaggaaaaaccgtggtagtgggtgtttgcggaggaatagccgcttacaaggctgtggagcttgtcagcagattaaaaaagcttgatgctgatgtgcatgtcattatgactgccaatgccgtaaagtttgttgcgcctctcaccttccgctccatatgtcacaatcctgtaataaccgacatgtttgaggagccaaagatatgggacatacagcatgtttccctggcgcagaaagccgaccttattgttgtggcaccggcgacagccaatatcataggaaaagttgccgggggtattgcggatgacatgctttcgacaactattatggcagcaaattctcccgttttgtttgtgcctgccatgaacgacaagatgtatgaaaatcccatagttcaggaaaacatcaaaaaacttgcgtcgctgggctatctctttatggagccggatacggggcatatggcctgcggtaccagcggaaagggacggttcccgtctccggagagaattgtggactttgtaaagggaattttaaataaaagcaacgactatgaaggcttaaaggttcttgtgactgcagggcctaccagggagccgattgatcctgtaagatatatttcgaaccattcatcggggaagatgggatatgcggttgcaaaagccgccttggagagaggggcttgtgtgaagcttgtgaccggccctgtaaacattgctccgcctccgggggcggaggttgtttgtgtgaccaccgccgtggagatgcacaatgaggtaatgaaatcctacggggattttgacattatagttatggtggcggctgttgcggattacagatgtgcatcggttgccgaaagaaaaataaaaaaatcaggggaaaaacttacccttgaattggtaaagaaccctgacatagcggcagaactcggaaaggtaaaaggatccagaattttagtgggatttagcgctgagacggataatcttcttgaaaatgcggctttaaagcttgcttccaaaaatatggacatgatagtggcaaatgatgtgactatggagggcgcaggctttggggttgatacgaatattgtaaagcttataaaaagagacggaagcagaatcgatttgcctgtaatgagcaaagagggcgtggctcaccggatcttggacgaggttttgtcaattaaaaacggttaa

SEQ ID NO: 49523 - protein, 398 aa, Clostridium thermocellum ATCC 27405
MLKGKTVVVGVCGGIAAYKAVELVSRLKKLDADVHVIMTANAVKFVAPLTFRSICHNPVITDMFEEPKIWDIQHVSLAQKADLIVVAPATANIIGKVAGGIADDMLSTTIMAANSPVLFVPAMNDKMYENPIVQENIKKLASLGYLFMEPDTGHMACGTSGKGRFPSPERIVDFVKGILNKSNDYEGLKVLVTAGPTREPIDPVRYISNHSSGKMGYAVAKAALERGACVKLVTGPVNIAPPPGAEVVCVTTAVEMHNEVMKSYGDFDIIVMVAAVADYRCASVAERKIKKSGEKLTLELVKNPDIAAELGKVKGSRILVGFSAETDNLLENAALKLASKNMDMIVANDVTMEGAGFGVDTNIVKLIKRDGSRIDLPVMSKEGVAHRILDEVLSIKNG

SEQ ID NO: 49524 - DNA, 1251 bp, Mycobacterium sp. JLS
  CDS (1)..(1251): transl_table=11
gtggaccgcaagcggatcatcgtcggcgtcgccggaggcatcgccgcctacaaggcgtgcacgctggtccgtcagctgaccgaagccggacacgacgtccgcgtgctgcccaccgagtcggcgctgcgcttcgtcggcgccgcgacgttcgaggccctgtccggccaccccgtccacaccggggtctgggatgacgtccacgaggtgccgcacgtgcgcatcgggcaggacgccgatctggtggtcgtggcgccggccaccgccgacctgctggcccgtgcggtcgccggccgcgccgacgatctgctgaccgccacgctgctgaccgcccggtgcccggtgctgttcgccccggcgatgcacaccgagatgtggttccaccccgcgaccgtggacaacgtcgcgaccttgcgccgccgtggcgcggtcgtcctcgaacccgcctccgggcggctcaccggcgccgacagcggtgccggccggctgcccgaggccgaggagatcgccaccctggcccaactgctgctggtgcgcggtgacgcgctgccctacgacctggccggggtgaaggccctggtgaccgccggcggcacccgcgaaccgatcgaccccgtccggttcatcggcaaccgcagttccggtaagcagggctacgcgatggcgcgggtgttggcccagcgcggcgccgacgtcacgttgatcgccgggaacaccgcgggtctggtcgacccggccggtgtcgaggtggtgcacatcgggtccgcggcccaactgcgcgatgcggtgtccaaacacgcccccgccgcgcacgtgctggtgatggcggccgcggtcgccgacttccggcccgtccacgccgcgaccagcaagatcaagaagtccagcgatcccggcgaggacgcgccgacgatcgacctgacccgcaccgacgacatcctcgccggggcggtccgggcgcgcgccgacggacagctgcccaacatgcgggcgatcgtgggtttcgccgccgagaccggcgacgcgaacggtgacgtgctgttccacgcccgcgccaagttcaagcgcaagggctcggaccttctggtcgtcaacgcggtgggcgataaccgcgcgttcgaggtcgacaacaacgacggttggctgctggccgccgacggaaccgagaccgcgctggagcacggttcgaaaactctgatggccagccgtatcgtggacgcgatcgtcgcctttctgcagaacagcaacgggtga

SEQ ID NO: 49525 - protein, 416 aa, Mycobacterium sp. JLS
MDRKRIIVGVAGGIAAYKACTLVRQLTEAGHDVRVLPTESALRFVGAATFEALSGHPVHTGVWDDVHEVPHVRIGQDADLVVVAPATADLLARAVAGRADDLLTATLLTARCPVLFAPAMHTEMWFHPATVDNVATLRRRGAVVLEPASGRLTGADSGAGRLPEAEEIATLAQLLLVRGDALPYDLAGVKALVTAGGTREPIDPVRFIGNRSSGKQGYAMARVLAQRGADVTLIAGNTAGLVDPAGVEVVHIGSAAQLRDAVSKHAPAAHVLVMAAAVADFRPVHAATSKIKKSSDPGEDAPTIDLTRTDDILAGAVRARADGQLPNMRAIVGFAAETGDANGDVLFHARAKFKRKGSDLLVVNAVGDNRAFEVDNNDGWLLAADGTETALEHGSKTLMASRIVDAIVAFLQNSNG

SEQ ID NO: 49526 - DNA, 1200 bp, Clostridium difficile 630
  CDS (1)..(1200): transl_table=11
atgctaaaagataaaactgttgtaattggcataagtggcggtatagctgcatataaggcttgtgatgttgtaagtaagttaaaaaaactaaatgcaaatatccatgttataatgacaaaatcagcaacagaatttgttaaaccacttacatttcaatcgctgagtcaaaattatgtagtagaagatatgtttgaagaaccaaaaacttgggaagttgaacatatatcattagcaaaaaaagcagatttattcttaatagtgccagcaagtgcaaatgttataggcaagattgcaaatggtatagctgacgatatgttgacaactactgttatggcaacaaaagcacaggttcttatagcaccagctatgaatactaatatgtatgaaaatccaattgttcaaaaaaatatacaaactttaaagagctttggatataaatttattgaaccggaaagtggaaggcttgcatgtggagatattggaacaggtaaactagctaatccagatataatagtagaggaagttttgactaatcttactaaagagcaagatttaaaaggtcaaagtatgatagttacagctggtccaactgtagagagtatagacccagtgagatatttaactaataggtcttctggtaaaatgggatattctatagcaagagaagctatagctagaggtgctgatgtaacattaatatcaggtcctacaaatctttttattccacaaaatcttaaaaaatttgttcaaatagagtcagcacaagatttgtatgaagcagtagtatcaaatttaagtgaaaataaaatagtaattcaaagtgcagcagttgcagattataaaccaaaaacttattctgacaaaaaaattaaaaagaagaatgatgatttatcaatagaactaagtagaaattatgatattgcttatgaaataggaaaaataaaagaagataagatactaattggatttgcagctgaaactaatgaccttatagaacatgccaaaggaaaaataaaaaagaaaaatttagattttattgtggcaaatgatttaactaaagaaggtgctggttttagagctgatactaatattgtaaaaataatagatgtagagggaaatattactgagtatcctaagatgaaaaaagaagaagtagccaatgttattttagataaagttaaagcgttgcttgagaaataa

SEQ ID NO: 49527 - protein, 399 aa, Clostridium difficile 630
MLKDKTVVIGISGGIAAYKACDVVSKLKKLNANIHVIMTKSATEFVKPLTFQSLSQNYVVEDMFEEPKTWEVEHISLAKKADLFLIVPASANVIGKIANGIADDMLTTTVMATKAQVLIAPAMNTNMYENPIVQKNIQTLKSFGYKFIEPESGRLACGDIGTGKLANPDIIVEEVLTNLTKEQDLKGQSMIVTAGPTVESIDPVRYLTNRSSGKMGYSIAREAIARGADVTLISGPTNLFIPQNLKKFVQIESAQDLYEAVVSNLSENKIVIQSAAVADYKPKTYSDKKIKKKNDDLSIELSRNYDIAYEIGKIKEDKILIGFAAETNDLIEHAKGKIKKKNLDFIVANDLTKEGAGFRADTNIVKIIDVEGNITEYPKMKKEEVANVILDKVKALLEK

SEQ ID NO: 49528 - DNA, 1257 bp, Prochlorococcus marinus str. MIT 9301
  CDS (1)..(1257): transl_table=11
atgaaaactaaaagtaatgactccaaaataaaggttcttttattaataacgggtagtattgcagctgtaagaattccattattagtaagccaattagcgaaagaaaattatgaaataagatgcgttttatctaaaaatgcagaaaaattaataaagccgctttctctctctatcttgagtagaaacccttgcattttagaagatgatcaatggtcaaatagtcaatcaacacctcttcacatagaactcagtaattgggctgatattttaatcattgcgcctttaacagcaacaacattagcaaaatgggtaactgggaatgcagagggacttatcccaagcatcttaatagcaaatataaagccaattattgttgcaccagcaatgaatacacaaatgtggctaaataaagctgtccaagaaaattataagaatttaaaaaattacgaaaatgttttgtctttgcaaccaagtgaaggcctcttagcatgtgatgctattggcatcggtaagattcctccaaataatctaattcaattagctcttgaatttatagctttacacaaacaaaatgagtatcgcaaagatttacttaataaagaaattctaataactggagggtgcacctcagagaaaattgatgcggcaagacatattaccaacagaagttctggagctatgggcctacttctttctcaagtagcgaggttcagaggagcacaagtaaaatatgtccatgggccattgaaaatcgataagaatcttactgatggaataaaaagatatgaaattgaaaccagtgttgatttaattagggctcttgataatgaaatatcaaattgcgattattttttcatgaatgcagcagtctctgattttaagataacctcagatacttcagctaaaattccaaaaaataaaattaatgaacatttgaatcaaaactttgagctagtcccagatattttaaaaacaattagtaaatcaaaaaaagataaccaagtttttgtaggcttttgtgcttttacaggatctatcgaagaagcacgaataactattaaagaaaagattatccaaaagggttgtgattttctattcgcaaatccaatagatcttgaaggccaaggatttggctttttggcacaaaatgaaggttggctattcgatacgaacaatttggaacactatattaaaaaaacatcaaaaattgatttagcaaataaattaataacccaaattatttcattaaaaaaataa

SEQ ID NO: 49529 - protein, 418 aa, Prochlorococcus marinus str. MIT 9301
MKTKSNDSKIKVLLLITGSIAAVRIPLLVSQLAKENYEIRCVLSKNAEKLIKPLSLSILSRNPCILEDDQWSNSQSTPLHIELSNWADILIIAPLTATTLAKWVTGNAEGLIPSILIANIKPIIVAPAMNTQMWLNKAVQENYKNLKNYENVLSLQPSEGLLACDAIGIGKIPPNNLIQLALEFIALHKQNEYRKDLLNKEILITGGCTSEKIDAARHITNRSSGAMGLLLSQVARFRGAQVKYVHGPLKIDKNLTDGIKRYEIETSVDLIRALDNEISNCDYFFMNAAVSDFKITSDTSAKIPKNKINEHLNQNFELVPDILKTISKSKKDNQVFVGFCAFTGSIEEARITIKEKIIQKGCDFLFANPIDLEGQGFGFLAQNEGWLFDTNNLEHYIKKTSKIDLANKLITQIISLKK

SEQ ID NO: 49530 - DNA, 1191 bp, Herminiimonas arsenicoxydans
  CDS (1)..(1191): transl_table=11
atggatcttgctggtaaaaaaatcatactgggattgaccggcggcgtcgcctgctacaaggcagcggaattgacgcgcgccctgagcaaggcaggcgccacggtacagatcgtgatgacggatgcagctacgcacttcatcacgccggtcaccatgcaggccttgtcgggcaatccggtcgtcaccgatcaatgggatgcgcgtgttgccaacaatatgccgcacatcgatctgacgcgcgatgccgatgccatcgtgatcgcaccctgctccgccgatttcattttcaagcttgcgcacggcgcttgcgacgatctgctgtccaccctgtgcgtggcacggcccgacaccttgccgctgatgatcgcgccagccatgaatgtagagatgtggcaaaacccggccaccaaacgcaacgtcgcacaagtgcgggcagaccgcattgccgtgttcggcccggatgccggcgaacaggcctgcggtgaaaccggtatgggccgcatgctggagccggaacagttgctggaagaaatcatcgccagcttccagccgaatctgctggtcggcaaaagcgtgatggtgaccgccggcccgaccttcgagcctatcgatccggtgcgcggcattaccaacctttcatccggaaaaatgggctatgcgattgcacgcgccgcacgcgaagccggcgccgaggtcacgctgatttccggcccgactgcattggctgcaccgtacggtgtgcattgcatcaacgtgcaaactgctgcacaaatgcacgatgccgtgatgtcgcgcatcagttcgcagcatgtattcattgcagtggcggcagtcgccgactggcgcgtcaaaaatcagagcgcgcagaaattgaagaaagacgcagccggacatgcgccggcactggaattcgagcaaaacaccgatattctggccgccgtcgccgcactggagaaacgtccgtattgcgtgggctttgccgcagagtcggaaaatctgcaggagtacggcgaagccaaacgcaagaaaaagaacattccgctgctggtcggtaatatcggccatcaaacttttggccaggatcagaacgaactgatgctgttcgacgatcagggccatacgctgttcccattggccgacaagcaaaaactggcgcgtcagctggtaggcgaaatcgcccgtcgtctgtaa

SEQ ID NO: 49531 - protein, 396 aa, Herminiimonas arsenicoxydans
MDLAGKKIILGLTGGVACYKAAELTRALSKAGATVQIVMTDAATHFITPVTMQALSGNPVVTDQWDARVANNMPHIDLTRDADAIVIAPCSADFIFKLAHGACDDLLSTLCVARPDTLPLMIAPAMNVEMWQNPATKRNVAQVRADRIAVFGPDAGEQACGETGMGRMLEPEQLLEEIIASFQPNLLVGKSVMVTAGPTFEPIDPVRGITNLSSGKMGYAIARAAREAGAEVTLISGPTALAAPYGVHCINVQTAAQMHDAVMSRISSQHVFIAVAAVADWRVKNQSAQKLKKDAAGHAPALEFEQNTDILAAVAALEKRPYCVGFAAESENLQEYGEAKRKKKNIPLLVGNIGHQTFGQDQNELMLFDDQGHTLFPLADKQKLARQLVGEIARRL

SEQ ID NO: 49532 - DNA, 1428 bp, Bradyrhizobium sp. ORS278
  CDS (1)..(1428): transl_table=11
atggccagcctgaccatccgcaagctcgacgactcgctgaagacttatctccggctgcgctcggcgcagaacggccgctccgtcgaggaggaggtccgggtcattctccgggcgctgatcgagccggtcgacccatccgagccgccggcggcagcgccatctccggccgctctgccggatcccggcctgccccagcccggcctcgcccgcgaggcacgcgtcaccctgatcatcggcggcggcattgccgcttacaagtcgctcgacctgatccggcgactccgggagcgctatatccaggtccgctgcgtcatgacgagagcggcgacgcagttcgtcaccgagctcgccgcgtcggcgctgtccggcgaccgcgtcttcaccgacctgttcgacgcgcgcagtgagttcgacgtcggccatatccggctggcgcgcgactgcgatctcatcgtcgtcgcgccggcgaccgccgacctgatgtccaagatggcgcaaggtgccgccgacgatctcgccagcgccatcctgctcgccgccagccggccgatcctgctggcgccggcgatgaatccgatgatgtggagcaatccggcgacccgccggaacgccgcgaccctgcagcgcgacggcatccacatgatcgggccgaacgccggcgagatggctgagaagggcgaggcgggtgtcggccgcatggccgagccgaccgagatcgccgacgccgtggtcgcgatgctgaagcccccggcgccgcgcccgctcgccggccgccgcgtgctgatcaccgcggggccgacgcacgagccgatcgaccccgtccgctatatcgccaaccgctcctccggcaaacagggctttgcgattgccgccgcagcccaggccgccggcgcagacgtcaggctgatcgcgggaccggtcgagctcgccgatcccaagggcgtcaaggtcacgcatgtcgagtcggcgcggcagatgctcgaggctgtcgaagccgagctgccggccgacgtcgcgatcttcgccgcagcggtggcggattggcgcgtcgccagtgaaggcggccagaagctgaagaaaaccgatcaggcaatcccgccgctgcagctggtcgagaaccctgacatcctcgcgaccatctccaagctgaaagagaagcgccccggcctggtcatcggcttcgccgccgagacggaacatctgatcgacaacgccaaagccaagttcgcgcgcaagggctgcgactggatcgtcgccaacgacgtctcgcccgccaccggcgtgatgggcggcgaccgcaacacggtgcatctcttgacgaaggacgccgacggcgtccatgtcgcgtcgtggccgatcatgaccaaggacgaggtggcgaacgcgctcgtcgccgagatcgcccgaaccgtaggacaatcagcgtga

SEQ ID NO: 49533 - protein, 475 aa, Bradyrhizobium sp. ORS278
MASLTIRKLDDSLKTYLRLRSAQNGRSVEEEVRVILRALIEPVDPSEPPAAAPSPAALPDPGLPQPGLAREARVTLIIGGGIAAYKSLDLIRRLRERYIQVRCVMTRAATQFVTELAASALSGDRVFTDLFDARSEFDVGHIRLARDCDLIVVAPATADLMSKMAQGAADDLASAILLAASRPILLAPAMNPMMWSNPATRRNAATLQRDGIHMIGPNAGEMAEKGEAGVGRMAEPTEIADAVVAMLKPPAPRPLAGRRVLITAGPTHEPIDPVRYIANRSSGKQGFAIAAAAQAAGADVRLIAGPVELADPKGVKVTHVESARQMLEAVEAELPADVAIFAAAVADWRVASEGGQKLKKTDQAIPPLQLVENPDILATISKLKEKRPGLVIGFAAETEHLIDNAKAKFARKGCDWIVANDVSPATGVMGGDRNTVHLLTKDADGVHVASWPIMTKDEVANALVAEIARTVGQSA

SEQ ID NO: 49534 - DNA, 1197 bp, Dichelobacter nodosus VCS1703A
  CDS (1)..(1197): transl_table=11
atgagccaaatcatactcggcatttgtggcggcattgctgcttataaatcaattttactcgctcgagaactgaataaacaaaaccaccgcgttcagtgcgttttaaccgaatccgcgcgcacattcgttaccgaagaaactctacaagcgataacgggacttgcaccgcgccacgatttattcgatgccaatgcagaagcggcgatgagccatatcgaactcgctcgctgggcagatattttgttgattgcgccggcaacggcaaataccatcgccaaactcgcgcacggcatcgctgatgatttattaacaacgctttatcttgcaaccgatgcagaaatcgtcatcgcgccggcaatgaatcatatgatgtggcatcaccccgcaactcaggaaaatattgccattttgagtcgtcatcccaaacatcacgtattacccgttgcttacggcgaacaagcctgtggcgaaagcggtttgggcagaatgttagaacccgaagaaattattgccgctttacctcatttaaccgcgcaagattggcaaaacattcgtttgacgattaccgccggcgccacgcgcgaacccatcgatcccgtgcgttatatttctaatcatagttcggggaaaatgggctacgaattagccaaaaacgccctcgcccgcggtgcaaaagtaacgttaatcagcggcatcagcaatgtagcgccgcccaaacaatgccgattgattaccgtaaacaccgcgctggaaatgtatgacgcggtgcattctgttttagcggatacggatatttttatcggcgcggcagccgttgccgattatcgtgttgcgcagccggcagcggaaaaaatcaagaaaagtgtacacggtcttgcgccgctgactttaattgaaaatccggacattattgccagcgttgccgctgccgcaaatcgtccttttaccgttggttttgccgcagaaacggagcatttactcgattatgcgcgcgccaaaaaacaacgtaaaaatttagatatgattattgccaatgatgttcgtcaacacgtttttggaagcgataccaacagcgtaacgatgattggcgccggcggcgaaataacgctgcccactcaatctaaagcattaattgcgcaacaaattttagattatattttaacgtgttaccaaaaaaatgattgcagttccctataa

SEQ ID NO: 49535 - protein, 398 aa, Dichelobacter nodosus VCS1703A
MSQIILGICGGIAAYKSILLARELNKQNHRVQCVLTESARTFVTEETLQAITGLAPRHDLFDANAEAAMSHIELARWADILLIAPATANTIAKLAHGIADDLLTTLYLATDAEIVIAPAMNHMMWHHPATQENIAILSRHPKHHVLPVAYGEQACGESGLGRMLEPEEIIAALPHLTAQDWQNIRLTITAGATREPIDPVRYISNHSSGKMGYELAKNALARGAKVTLISGISNVAPPKQCRLITVNTALEMYDAVHSVLADTDIFIGAAAVADYRVAQPAAEKIKKSVHGLAPLTLIENPDIIASVAAAANRPFTVGFAAETEHLLDYARAKKQRKNLDMIIANDVRQHVFGSDTNSVTMIGAGGEITLPTQSKALIAQQILDYILTCYQKNDCSSL

SEQ ID NO: 49536 - DNA, 1257 bp, Synechococcus sp. WH 7803
  CDS (1)..(1257): transl_table=11
atggccgggctgctgcaaggacagcgggtgattgttgcggcctgcggaagcattgcggctgtgaagactccactgttggtcagcgcgctgatcaaggagggggcgcaggtccgctgtgtggtcaccagcagcggttctcaactggtgagtcctgtcgcactggcgtgtctcagtcgcaatccctgccttcaggacgctgaccaatgggatccctctcgcccacggcctctgcacatcgagctcgcggaatgggcagacctgctgattgtggcgcccctcagcgcaagctctctggcgcgatgggtgcacggtgatggccagggactgctggccagccttctgttggcctgcgagtgcccggttctggccgcaagcgccatgaacacggccatgtggcaacacccggccgttcagcgcaattggagcaggctccacgacgatccccgggtgctgcctctggctccgcaggctggactgctggcctgtgaccgcgtcggcaccggccggatggcggatccggagtgcatcgtgctggctgcagccagcacgatgctgcaggctgacagcgaggggaagctgcgttccgattggcgcggcaagcgcgtgctggtcagcgctgggcccacccgggaaccgttggattcagtgcgtctgatcagcaaccgcagcagcgggcgcatgggcgttcttctcgcccaggcggcacgcttccgcggtgcggacgtggatctggtgcatggtccgctgactgttccagacgcctggttggagggcttgcactgtctgccggcgttcagtagcgccgccatggaggtctgcctgttggagcgtcaatcccgcgctgatgctgtgttgatgtgcgcagccgttgcggatgtgcggcgcgagcgctcagacaactcctccaagcttcccaagggcgaactcatggagacgatggcccagggctgggagcaggtgccggatctgctgcagtcgctgggggcgcgacgttcttcccagcagcatttgcttggtttcgctgccttggcgggagacgatgaaacgctgctccggcgcggtcgtgagaagctccaggccaaaggctgtgacctgttgatggtcaatccggtagatcgccccgatcagggccttgacagcgacctgaacggtggatggcttctcggtccaggtgaacgcgaggaggccattcccgctgtgcacaagctcgctctggcgcacgatctgttggatcggctcagccagcttggcgattaa

SEQ ID NO: 49537 - protein, 418 aa, Synechococcus sp. WH 7803
MAGLLQGQRVIVAACGSIAAVKTPLLVSALIKEGAQVRCVVTSSGSQLVSPVALACLSRNPCLQDADQWDPSRPRPLHIELAEWADLLIVAPLSASSLARWVHGDGQGLLASLLLACECPVLAASAMNTAMWQHPAVQRNWSRLHDDPRVLPLAPQAGLLACDRVGTGRMADPECIVLAAASTMLQADSEGKLRSDWRGKRVLVSAGPTREPLDSVRLISNRSSGRMGVLLAQAARFRGADVDLVHGPLTVPDAWLEGLHCLPAFSSAAMEVCLLERQSRADAVLMCAAVADVRRERSDNSSKLPKGELMETMAQGWEQVPDLLQSLGARRSSQQHLLGFAALAGDDETLLRRGREKLQAKGCDLLMVNPVDRPDQGLDSDLNGGWLLGPGEREEAIPAVHKLALAHDLLDRLSQLGD

SEQ ID NO: 49538 - DNA, 1191 bp, Thermus thermophilus HB27
  CDS (1)..(1191): transl_table=11
gtggcccgggtcctggtggcggtgacggggggggtggccgcggtgaaggccccccacctcctccgcctcctgcgccgggaggggcacgaggtgcgggccctcgccacccccagggccctggagttcgtcaccctcctctccctggccgtggcctccgggggcgaggtggccacggaggaggcctggttccggcccgacgggagggccctccacattgagctcgcccgctgggccgaggtggtcctggtggcccccgccaccgccgacgccctggccaaggccgctttggggctcgccgatgacctcctctccgccaccctcctcgccggggccaaacgggtggcctgggccccggccatgaacgaggccatgtggctcgccccccagacccaggcccacgtcaggcggctggaggagctggggcacgccttcttcggcccggcctacggccccttggccgccgtgggggagggggagggatgggggcggatgctggagcccgaggagcttgtggagcggttacgggctttcctcgcgcccaaggacctctcgggcctccgcctcctcgtctccgccgggcccacccgggagtacctagacccggtgcgcttcctctccaatccctcctcgggccggatgggctacgccgtggccgaggccgcccgggaccggggggcggaggtggtcctggtctccgggcccaccgcgcttcccgacccctggggcgtggaggtggtccgggtggagagcgccctggagatgcgaaaggccctcctggaccgctacccctgggcccaggcggtggtcatggccgccgcggtggcggactaccggcccgccgagaccctaaaggacaaggagcccaaggccgaggcggaaaagctcctccgcctcgtgcccaaccccgacatcctccgcgagctcggggagaggaaggaggggcgggtgctcgtgggcttcgccatggagacccgggagggcctggagcgggcccgggggaagctcgcccgcaagaacctggacctgatcgccttgaactacgtggggcgggagggggtgggcttcgggagccccgagaacgaggtgaccctgatcctgcgagacggccgggtggtggagcttccccggctttccaagcgggaggtggcccaccgtatactggatttcgtcaaggagctctggaagcgatag

SEQ ID NO: 49539 - protein, 396 aa, Thermus thermophilus HB27
MARVLVAVTGGVAAVKAPHLLRLLRREGHEVRALATPRALEFVTLLSLAVASGGEVATEEAWFRPDGRALHIELARWAEVVLVAPATADALAKAALGLADDLLSATLLAGAKRVAWAPAMNEAMWLAPQTQAHVRRLEELGHAFFGPAYGPLAAVGEGEGWGRMLEPEELVERLRAFLAPKDLSGLRLLVSAGPTREYLDPVRFLSNPSSGRMGYAVAEAARDRGAEVVLVSGPTALPDPWGVEVVRVESALEMRKALLDRYPWAQAVVMAAAVADYRPAETLKDKEPKAEAEKLLRLVPNPDILRELGERKEGRVLVGFAMETREGLERARGKLARKNLDLIALNYVGREGVGFGSPENEVTLILRDGRVVELPRLSKREVAHRILDFVKELWKR

SEQ ID NO: 49540 - DNA, 1215 bp, Desulfovibrio vulgaris subsp. vulgaris str. Hildenborough
  CDS (1)..(1215): transl_table=11
gtggacgcacatctcgccttcacgttcgccaagggccgcagactccatctcggggtctgcggttccgtagcggcctaccgcgcgcccgacctcgtgcgccagtggcaggacgccggtctctctgtgggcgttacgctcaccgaggcggctaagcgcttcatcacgcccctcaccttcgaggcccttggcgcggcccccgtctatggcgacatcttcgacggcggcgacgggcccttcgggcacctcgaaccggggcaatgctgccataccttcgtcatcgcccctgccagtgcagccacattggcacgtcttgccacgggcatggccgacgacatgctggcctgtcaggccctcgccttcgacggccccctcgtggtcgcccccgccatgaacccgcgcatgtgggcacatcctgccacccgcgccaacatcgagacactgcgtcagcgcggtgtcacggtggtcgaaccggggtgcgggcgcaccgcctgcatggaggaagggcagggcaggctggccgaccttcgcgccatacaccttgccgcattgcgtgccctcgccccgcaggacatgagcggcacccgcgtcatggtcacccttggccccacccgcgagaaatgggacggcgtccgctactggacgaacccgtcatccggggtgatgggcgcttcgctggctatggccgcatggctgcgcggtgcacgtgtggatgccgtgtgcggccccggcgcgccatggctgccttcagacatcgtgcggcatgacgtgggttcggctgacgagatgttcgaagtggcgcacgacctctggcctgacgtggacacgggtatcttcacggctgccgtggccgacttcaagccagtgccctacggggccgaaaaattcaagaaggccgatgcggccgacggcttcgacatccgcttcgcccccaaccgtgacatcatcgccaccctcggggcactgcgtaagcccggccagagggtcgtgggctttgccgccgagacgtccaacctcatcgaagccatgcgcggcaagctcaagcgcaagaatgccgacatgatcgtcggcaatctcgtgggcagcagcgatgccggtttcggtgccgccaccaaccgtgtacgcatcctcgacgccacagggcgcgacgaggaactccctctcttgtccaagcccgatgtcgcatggagcatccttgaatggctgcgctccctctag

SEQ ID NO: 49541 - protein, 404 aa, Desulfovibrio vulgaris subsp. vulgaris str. Hildenborough
MDAHLAFTFAKGRRLHLGVCGSVAAYRAPDLVRQWQDAGLSVGVTLTEAAKRFITPLTFEALGAAPVYGDIFDGGDGPFGHLEPGQCCHTFVIAPASAATLARLATGMADDMLACQALAFDGPLVVAPAMNPRMWAHPATRANIETLRQRGVTVVEPGCGRTACMEEGQGRLADLRAIHLAALRALAPQDMSGTRVMVTLGPTREKWDGVRYWTNPSSGVMGASLAMAAWLRGARVDAVCGPGAPWLPSDIVRHDVGSADEMFEVAHDLWPDVDTGIFTAAVADFKPVPYGAEKFKKADAADGFDIRFAPNRDIIATLGALRKPGQRVVGFAAETSNLIEAMRGKLKRKNADMIVGNLVGSSDAGFGAATNRVRILDATGRDEELPLLSKPDVAWSILEWLRSL

SEQ ID NO: 49542 - DNA, 1200 bp, Picrophilus torridus DSM 9790
  CDS (1)..(1200): transl_table=11
atgttgaccggagagaaaacaagatttgcaggcatgcttaagggcagaaaaattgttgtggcaacatcggcaagcatatcaatatacagggtgcctgaccttgtaagggatttaagaagggagggggccgatgtaaaggttgcaatgagcgatgcatcgcaaaagatggtgagtccggaggttatgaaatgggcctcaggtcatgatgttgtaacagatattaccggaaatatagagcatattacactctttgatagcgatacattattacttcttgcaccggcaacttacgatacaataggtaagatggcatctggcatagcagataacataccatcactcttcttttcatacgcattaaaggccaccgggcatatagtcatagttccggcaatgcacagaaacatgatggaaaacagaataaatctggaaaatattgaaaagcttaaaaacctcggctgtttaattgttgaacccgagtacgatgaggaaaaggcaaagattgcagacaatgacaggatcattgattatgtatgccgctcattctatggggaaaaattaaaaaataaaaatatactaataataggtggaagatcagagctttcaatagacccggttagatttatatcgaacagatcaaccggatacacaggatactggcttgccagaatgtcattccggcttggggcggatcaaatagtctatgtcggcaactccaattacagaatgccgaactatgttaactttatacaaagaacgaatctaagggagatcattattgaggttaataccgttataaacgtttacaaatttgatataattgtaatgtgcatggccgtacttgactttgatataaaggaggaaaaggaaaagataacaagcagtgaaaaacatgtaatagagcttgagcccaggaacaagctaaggaacagaataaggcagatgtcgccgtcatccattcttgtgctctttgaacttgagggcgatcttaaatacaatgatgaaaaatttaaggattcaaggcctgatatggtgatagtgaattcatataaaaacagcgcctttggtgagtcatcccaggaatatataatagtttcaggtaataataaggaaaatataaatgctgaaaagagcgttttatcaagaataatacttgaaagggcatcatcaattaacaaaagttccgattttattctataa

SEQ ID NO: 49543 - protein, 399 aa, Picrophilus torridus DSM 9790
MLTGEKTRFAGMLKGRKIVVATSASISIYRVPDLVRDLRREGADVKVAMSDASQKMVSPEVMKWASGHDVVTDITGNIEHITLFDSDTLLLLAPATYDTIGKMASGIADNIPSLFFSYALKATGHIVIVPAMHRNMMENRINLENIEKLKNLGCLIVEPEYDEEKAKIADNDRIIDYVCRSFYGEKLKNKNILIIGGRSELSIDPVRFISNRSTGYTGYWLARMSFRLGADQIVYVGNSNYRMPNYVNFIQRTNLREIIIEVNTVINVYKFDIIVMCMAVLDFDIKEEKEKITSSEKHVIELEPRNKLRNRIRQMSPSSILVLFELEGDLKYNDEKFKDSRPDMVIVNSYKNSAFGESSQEYIIVSGNNKENINAEKSVLSRIILERASSINKSSDFIL

SEQ ID NO: 49544 - DNA, 1383 bp, Bartonella quintana str. Toulouse
  CDS (1)..(1383): transl_table=11
atggctagtcttaccattcgtaatctgtctcctgaagttaaagaagctttgcgcatacgtgctgcgcaaaatggtgtttctatggaagaagaagcacgtcgccttttaagcaatttcacaactccaaccatatcatctcaagcaagtactgtagaaatgcaatcattgaaatcaaaatccatccttcttattattggtgggagtattgcagcctataaaatgcttgatctgattcgccgtttacaagaacgtggagcacgcttgaacattattatgacaaaagcagcacaaaaatttattactcctttagcagctgaagcgctgagtggttgtactgtgcatagtgatctattttcacgtgaagaagaacatgacattggccatatccggctagcacgttgtgctgatttgattattttagcaccagctacagctaaccgtattgcaaaaatagctaccggcataggagaggatctggcggattgtgtccttttagcagcacgttgcccactcttgcttgcaccggctatgaatccagccatgtggacacatccaacaactgttcgcaatcttgcacaactgtgtgcagatggtgttcatataataggaccagaaataggcaaaatggctgagcgcgatgagacaggtccgggacgcttgagtgaacccttaactattgtggctgcagcagaagctcttttgcgtgtacaagaaaaaccactttctggacgccatttcattgttacttctggccctacccatgaacccattgatccagtgcgttatcttgctaatcgctcttcgggcaaacaaggccacgccattgcaacagctttagcccacttgggcgcaaaagtaacacttatttgcggaccagttgatcttgccgatccgcaagaagtgaaaaccattcatgttgaaacagcatgtcagatgttacaagctgttcaagcagcattgcctgctgatggggcactttttgttgccgccgtctgtgattggcgcagccaaacgcaatctctacacaaaatcaaaaagagtgccaataaaacgccactatccttacctatgctcgaaaaccctgacattttggcaacaattggtcatgcttcaaatcgccctccacttgtaattggtttcgctgctgaaacatgtgacttcattgcaaatgcgcaaaaaaaatgtgccgaaaaaggagctaattttattcttgctaataatatttcgctccctgatggtacaaacgttatgggtgctgatacaaatcaagtttggcttgtcagtaaggaaaatgttgaacaatggccgcatatgagcaaacagcaaatagctgaaaaattggcgaacattgttgtttcatttttctgctcttcttctaattaa

SEQ ID NO: 49545 - protein, 460 aa, Bartonella quintana str. Toulouse
MASLTIRNLSPEVKEALRIRAAQNGVSMEEEARRLLSNFTTPTISSQASTVEMQSLKSKSILLIIGGSIAAYKMLDLIRRLQERGARLNIIMTKAAQKFITPLAAEALSGCTVHSDLFSREEEHDIGHIRLARCADLIILAPATANRIAKIATGIGEDLADCVLLAARCPLLLAPAMNPAMWTHPTTVRNLAQLCADGVHIIGPEIGKMAERDETGPGRLSEPLTIVAAAEALLRVQEKPLSGRHFIVTSGPTHEPIDPVRYLANRSSGKQGHAIATALAHLGAKVTLICGPVDLADPQEVKTIHVETACQMLQAVQAALPADGALFVAAVCDWRSQTQSLHKIKKSANKTPLSLPMLENPDILATIGHASNRPPLVIGFAAETCDFIANAQKKCAEKGANFILANNISLPDGTNVMGADTNQVWLVSKENVEQWPHMSKQQIAEKLANIVVSFFCSSSN

SEQ ID NO: 49546 - DNA, 1413 bp, Bartonella henselae str. Houston-1
  CDS (1)..(1413): transl_table=11
atggccagtcttaccatccgcaatcttccagctaaagttaaagaaattttgcgtatacgcgctgcgcaaaatggtgtttctatggaagaagaagcgcgccgtcttttaagtaatttcacaaccccaacgatatcatcatctcaagcaagccccgtagaaatgcaatcactgcaatcaaaatccatcctccttattattggtgggagtattgctgcctataaagcgcttgatttgattcgccgtttgcaagaacggggagcacgcttaaatattattatgacaaaagcagcacaaaaatttattacccctttagcagctgaagcgctgagtggtcgtactgtgtatagcgatttattttcacgcgaagaagaacatgatattggacatatccgactagcacgggatgctgatttgattattttagcaccagccactgccaatcgtattgcaaaaatagcaaccggtagaggagaagatctagctgattgtgtactgttagcggcacgttgtccactcttgattgcaccggctatgaatccagccatgtggacacatccaacaactgttcgcaatgtcgcacaactatgcgcagatggcgttcatatagtcggaccagaaatcggcaaaatggctgagcgcaatgaatcaggtctagggcgcctgagcgaacccttaaccattatagctgcagcagaagcccttttgaatataacagaaagaccactttctggtcgccatttcattgttacctctggccctactcatgaacccattgatcccgtgcgttatcttgctaatcgctcttcgggtaaacaaggccacgctattgcaaaggctttagctaacttgggcgccaaaataacgcttatttgtggaccagtagatcttgcagatccaccacaagtgaaaactattcatgttgaaacagcatgtcagatgttacaaactgtgcaagcaacattgcccgctgatggagcaatttttgttgccgccgtttgtgactggcgcagccaaacaccatctctccaaaaaatcaaaaagagtgctcataaaacccccccatccttacagatggtcaaaaaccctgatattttagcaacaattggtcatgcttcaaaccgccctccacttgtcattggtttcgcggctgaaacctgtgatctcattgctaatgcgcaaaagaaatgtgttgaaaaaggagccaattttattcttgcgaataacattactctccctgatggtaaaaatgttatgggagcagacacaaatcaagtttaccttgttagcagagaaaacatcgaacagtggccgcatatgagtaaacaacaaatagcacaaaaattagcaagccttgttgtctcatttttctgtccttcttctgctgctcattcaaatgaacaaagaactctttaa

SEQ ID NO: 49547 - protein, 470 aa, Bartonella henselae str. Houston-1
MASLTIRNLPAKVKEILRIRAAQNGVSMEEEARRLLSNFTTPTISSSQASPVEMQSLQSKSILLIIGGSIAAYKALDLIRRLQERGARLNIIMTKAAQKFITPLAAEALSGRTVYSDLFSREEEHDIGHIRLARDADLIILAPATANRIAKIATGRGEDLADCVLLAARCPLLIAPAMNPAMWTHPTTVRNVAQLCADGVHIVGPEIGKMAERNESGLGRLSEPLTIIAAAEALLNITERPLSGRHFIVTSGPTHEPIDPVRYLANRSSGKQGHAIAKALANLGAKITLICGPVDLADPPQVKTIHVETACQMLQTVQATLPADGAIFVAAVCDWRSQTPSLQKIKKSAHKTPPSLQMVKNPDILATIGHASNRPPLVIGFAAETCDLIANAQKKCVEKGANFILANNITLPDGKNVMGADTNQVYLVSRENIEQWPHMSKQQIAQKLASLVVSFFCPSSAAHSNEQRTL

SEQ ID NO: 49548 - DNA, 1206 bp, Bacillus thuringiensis serovar konkukian str. 97-27
  CDS (1)..(1206): transl_table=11
atgctaaaagggaaaaagatacttttatgtgtaacaggaggcattgcggtctttaaagcggctgcgttaacgagtaaattgacacaagctggtgctattgtaaaagtaatgatgagtgagtcagcagtgaagtttgttacacctcttacattccaggcactttctcgtcatgatgtatatacggatacattcgatgagaaagattcagctgttattgctcatatcgatttagcagattgggcagatgttgtacttgttgcacctgctacagccaattgtattggaaagctagctaacggcattgcagatgatatgattacaactactttgttagctactacagccccagtgtggattgcacctgctatgaatgtgcatatgtatgaaaataaaattgttcaaaaaaatatgatgacgttaaaaacgttaggatatacatttattgagcctggagaaggttttttagcgtgtggttatgtagcgaagggaagattagaagaacctgaagcgattattgcacggttagaagaggctttttcagaacaaaaaccattgcaaggaaaaaggatattaataactgctggtccaactcgtgaaaagattgacccagtccgttttatgactaatttttcttctggaaaaatgggatatgcgattgcggaagtggcagcgaacttaggcgctgaagtcatactcgtttctggaccgacagcattaaatccaccattacatgtaactacagtgcaagtggaatctgcacaagatatgttagaggcagtcattcaacattatcaaaacgtagatgttgtcattaaaacagcagcagttgcagattatcgtccgaaatatgtacatgataataaaatgaaaaagaaaaatggcgatgctgtaattgaactcgagagaacagtagatattttaaaaacgttaggtgagatgaaggacaaacagttacttatcggttttgcggctgaaacgacaaacgtagaggaatatgcaacgaaaaaattacgtgagaaaaatgcgaatatgattgttgcaaacgacgtaaaggcgcaaggagctggatttggtacagacacgaacattgtaacaatgtatagaaaagatggagaagttatagagttgccacttttaacgaagaaagaggttgctcgtgaaatattaaagcaaattgaaatgatgttagaagatgatcgtctatga

SEQ ID NO: 49549 - protein, 401 aa, Bacillus thuringiensis serovar konkukian str. 97-27
MLKGKKILLCVTGGIAVFKAAALTSKLTQAGAIVKVMMSESAVKFVTPLTFQALSRHDVYTDTFDEKDSAVIAHIDLADWADVVLVAPATANCIGKLANGIADDMITTTLLATTAPVWIAPAMNVHMYENKIVQKNMMTLKTLGYTFIEPGEGFLACGYVAKGRLEEPEAIIARLEEAFSEQKPLQGKRILITAGPTREKIDPVRFMTNFSSGKMGYAIAEVAANLGAEVILVSGPTALNPPLHVTTVQVESAQDMLEAVIQHYQNVDVVIKTAAVADYRPKYVHDNKMKKKNGDAVIELERTVDILKTLGEMKDKQLLIGFAAETTNVEEYATKKLREKNANMIVANDVKAQGAGFGTDTNIVTMYRKDGEVIELPLLTKKEVAREILKQIEMMLEDDRL

SEQ ID NO: 49550 - DNA, 1281 bp, Acinetobacter sp. ADP1
  CDS (1)..(1281): transl_table=11
ctgcaacagaaaggtaaactgttcgtgagctttgatttaagtgtcattccaaataaaaatattattctagctgtcacagggggaattgctgcctataagagcgcaattttagtacgccgtttaaaagattatggttttgatgtacgtgtggtcatgacacacggcgcacaagcctttattactccgctgacttttcaggcactgtctgggtatccagtacataccgaattgctggaccctgaagcagaagcgggaatggggcatattgaactggcacgttgggccgatctgatactggttgccccagcaagctgtgatacgctggcaaagtttgcccaaggcttagcagatgatttgttaagtacactttatctggcaaccaaagcgcctgtctgggttgcacctgccatgaatcagcaaatgtgggcagctaaagccactcagcgtaacctgcaaacactggtcgatgacggtgtgcatgtcattatgccagatgcgggtgcacaggcctgtggggatgttggattgggccgtatgcctgaaccagagcaactggcttatcaggttcgtgaatattttcataaagctcaacgggctattgcagagaaatttggtttgcttgcggggcagcatgtggtgattaccgcaggcccaacgcgagaggcgattgatccagtacgttatatttccaatcatagtactggaaaaatgggattctctttggctgcagcctgctatgcagcgggtgctaaagtatctttaattgcagggccagtgagtttggataccccgaatggtgtcaagcgggttaatgtgtcctcagcggtacagatgttggatgaaagcctgaaaactttagagcagggctgtgatatttttatagcgactgctgccgtagcggattatcgcgttgctcaagtttcagatcagaaaattaaaaaatcaggtgatgaacttgaggtcagtctgatcaaaaatcctgatattgtggccaccattgcccaacaagctcaaagaccctttatggtaggttttgccgccgaaacacaaaatgttgaagaatatgctgctggcaagctggttgccaagaatctggatatgatcgcttgcaatgatgtatcacgtaaagatattggatttgcatctgatgaaaatgccatggtggtgttttttgcagagcaatatcacttgaaaaaacgtgaattagaaaaagcgtctaaacaggaaattgcccagcaattggttgaatctatttcggatgccttacgacgaaaactgtaa

SEQ ID NO: 49551 - protein, 426 aa, Acinetobacter sp. ADP1
MQQKGKLFVSFDLSVIPNKNIILAVTGGIAAYKSAILVRRLKDYGFDVRVVMTHGAQAFITPLTFQALSGYPVHTELLDPEAEAGMGHIELARWADLILVAPASCDTLAKFAQGLADDLLSTLYLATKAPVWVAPAMNQQMWAAKATQRNLQTLVDDGVHVIMPDAGAQACGDVGLGRMPEPEQLAYQVREYFHKAQRAIAEKFGLLAGQHVVITAGPTREAIDPVRYISNHSTGKMGFSLAAACYAAGAKVSLIAGPVSLDTPNGVKRVNVSSAVQMLDESLKTLEQGCDIFIATAAVADYRVAQVSDQKIKKSGDELEVSLIKNPDIVATIAQQAQRPFMVGFAAETQNVEEYAAGKLVAKNLDMIACNDVSRKDIGFASDENAMVVFFAEQYHLKKRELEKASKQEIAQQLVESISDALRRKL

SEQ ID NO: 49552 - DNA, 1278 bp, Erwinia carotovora subsp. atroseptica SCRI1043
  CDS (1)..(1278): transl_table=11
atgacgactcttctgactttcaatcggaccatgatgatgacggaattttccagcctgaatgcactctccggcaaacgaatcgtgctgggtatcagcggcggtatcgcggcgtacaagtgcccggaactggtgcggcgcctgcgcgatggcggagccgacgtacgggttgtcatgacatctgccgctaaagctttcatcactccactgacgctacaagccgtctctggctacccggtctcggacgatctgcttgacccagcagcagaagcctcaatgggtcacattgagttagggaaatgggctgatttagtcattcttgccccggctaccgccgatctgatcgctcgagtcgccgcgggcatggcgaacgacctgctgagcactatttgtctggcaacatccgcccctatcgccgttgtccctgcgatgaatcagcagatgtatcgcgcagagcccacgcaggacaatctgcgcacgctggcagctcgaggtttacctatttgggggccggatagcggcagtcaggcgtgtggcgatgttggaccaggccgtatgatcgacccaatggacattgtcgggctagcgcagcgtcatttttctgccatcaacgatctgcaacatctgaacattctggtcaccgctgggccgacgagggaagcgctggacccagttcgcttcatcactaaccacagctctgggaaaatgggctttgctatcgcgcaggccgctgccgctcgtggtgctaacgtcacactggtaagcggccccgtctcgcttgctacaccgcagggcgtcacgcgtattgatgtcggcagcgcgctggagatggaacacgcggtgatggaacacgcggcgcagcagcagattgttatcggctgtgctgcggtggcagactatcgcgccaaacacatcgctgacgaaaagattaaaaaacagaatcagcagggtgatgaaatgactctcactctggtcaaaaatccagatattatcgctggtgtcgcagcaatgacgaaaaatcgtccttatgttgtcgggtttgctgccgaaacccagaatgtggaagaatacgctcggcaaaaactggcacgtaaaaagctggacctgatttgcgcaaacaacgtctctctttccgggcatggttttaacagtgaaaccaatgcgttacaccttttttggcaaggtggaaacacgccgttgccgcagtgcgacaagcgtcttcttggccaaaaattaatcgacgagattatcagccgttatgatgaaaaaaatcgacgttaa

SEQ ID NO: 49553 - protein, 425 aa, Erwinia carotovora subsp. atroseptica SCRI1043
MTTLLTFNRTMMMTEFSSLNALSGKRIVLGISGGIAAYKCPELVRRLRDGGADVRVVMTSAAKAFITPLTLQAVSGYPVSDDLLDPAAEASMGHIELGKWADLVILAPATADLIARVAAGMANDLLSTICLATSAPIAVVPAMNQQMYRAEPTQDNLRTLAARGLPIWGPDSGSQACGDVGPGRMIDPMDIVGLAQRHFSAINDLQHLNILVTAGPTREALDPVRFITNHSSGKMGFAIAQAAAARGANVTLVSGPVSLATPQGVTRIDVGSALEMEHAVMEHAAQQQIVIGCAAVADYRAKHIADEKIKKQNQQGDEMTLTLVKNPDIIAGVAAMTKNRPYVVGFAAETQNVEEYARQKLARKKLDLICANNVSLSGHGFNSETNALHLFWQGGNTPLPQCDKRLLGQKLIDEIISRYDEKNRR

SEQ ID NO: 49554 - DNA, 1233 bp, Propionibacterium acnes KPA171202
  CDS (1)..(1233): transl_table=11
gtgagtgtcgtcgttcttggtgtcgggggagggatcgccgcctacaaggcatgcctgctcgcgcggctcctctctgaggtcggccacgaggtccacgttgtccccactagggctgcccttgaattcgtcggacgcccgacgtgggaggcgctgagtgggcatccggtccacaccgaggtttttgacgacgttcccgatgtggagcatatccgcttggctgagcgcgccgacgccatcgtggtggctccagcaactgccgatctcttggcgcgccttgcgggaggccatgccgacgacctcctgacgacgacggttctcgccacgtcagcgccggtgctgctcgcacctgctatgcacaccggaatgtggcaaaacgcagcaaccgtcgataatgtcgcgaccctacgtcgccatggccttgtcgttaaggccccagctactgggcgccttactggtcgtgactcaggcccggggcgtctacctgatcccgacgagattgcagaattcgttgatcttctcatcactgttcctgagtgcgccgccgcgatggcccagcaggaccttgctggaaaacgcgtcgtcatctccctgggtggaacccgggaagccatcgaccctgtgcgttacctcggtaactcgtcgtcaggtcgaatgggcagggctatcgctcaagtcgccgctgctcgcggggccgatgtccacgttgtcgctgcccacgttgacgtcgctataccgtcagacgtgcagattacccgcattgatagcaccgaagaccttgctgaggccatggacgacttagccaagcaagccgatattgtcatccaagccgttgcggcagctgactttgcgccagtcgctgttgacaccaagattaaaaaacacgagggcgacgacgccacaggtgcaacgatggccctccaacttcaccagactcccgacgtcctggcccgcatctgttctcaatcggtacagaacagggttgtcgtcggatttgccgccgaaacggcaccagaccgtgaccagttcttgaagctggcccaggccaagctcgcacgcaagggttgcgaccttatggtcgtgaacgatgtgagcggcggaaaggtgttcggcaaggtcggcaccgacgtaaccatggttcaccagcaggggccgggtcgtcgtatcaccggatcgaagtcgcaggcggctgtcgccatccttgacgaggtccgcgcgctgctggctactcagtaa

SEQ ID NO: 49555 - protein, 410 aa, Propionibacterium acnes KPA171202
MSVVVLGVGGGIAAYKACLLARLLSEVGHEVHVVPTRAALEFVGRPTWEALSGHPVHTEVFDDVPDVEHIRLAERADAIVVAPATADLLARLAGGHADDLLTTTVLATSAPVLLAPAMHTGMWQNAATVDNVATLRRHGLVVKAPATGRLTGRDSGPGRLPDPDEIAEFVDLLITVPECAAAMAQQDLAGKRVVISLGGTREAIDPVRYLGNSSSGRMGRAIAQVAAARGADVHVVAAHVDVAIPSDVQITRIDSTEDLAEAMDDLAKQADIVIQAVAAADFAPVAVDTKIKKHEGDDATGATMALQLHQTPDVLARICSQSVQNRVVVGFAAETAPDRDQFLKLAQAKLARKGCDLMVVNDVSGGKVFGKVGTDVTMVHQQGPGRRITGSKSQAAVAILDEVRALLATQ

SEQ ID NO: 49556 - DNA, 1245 bp, Symbiobacterium thermophilum IAM 14863
  CDS (1)..(1245): transl_table=11
atgctgcacggtaagacggttctcctcggggtcagcggcggcatcgccgcctacaaggcggcggagatctgctcccggctggtgaagctgggagccgatgtgcacgtgctcatgaccgaggcggccacccgcctggtggccccgctcacgttccaggccttgtccggcaacccggtcaaagtcgacctgatgggcgagcaggtacacggccacgtggatcacgtcctgctcacccacaaggcggacctgctcatcatcgcgcctgccacggccaataccatcgcacggctggccggcggccacgcgggcgactggatcaccgtgaccgcgctgggcgtgcgctgccccgtgctggtggcgccctccatggaaacggagatgtacgccaacccgctgacgcagcggaacctgcggatcctggccgagttgggctgggacatcatggagccggaggaggggcggctcgcctcggggctcatgggcaaggggcggctgcccgagccggcgaagatcgtcgagcgggccgtcgcgctgctgcaggcgcgggaaggcaggcagcgccggcccgggggcgacctggccgggcgccgggtgctggtgacggcgggtaccacccgggagccgttcgatcccgtgcgcttcatcggcaaccgctccaccggccgcatggggtacgcgatcgccgaagccgcccgggaccggggcgcggaggtggtgctggtcagcggacccacccacctggagccgccggccggggtccggctcgtccgggtcgagtcctgtgtccagatgctggaggcgtgcctcgccgagttcccggcggcggacgttgcggtggccgccgcggccccggccgactaccgcccggcgacggtggccccgtccaagatcaagaagacgggcgaggagctcaccatcaccctggtgaaaaacccggacatcatcgcagagctgggccggcgcaagaggcccggtcaggtgacggtggcctttgccgccgagaccgacgacctcatcgccaacgcccgcaggaagctggcggacaagaacgcggacttcgtggtggccaacgacgtcacggccgagggggccgggttcggcaccgagaccaaccgggtggtcttcgtgaccgccgacgcggtggacgagcttcccctgttgccgaagcgggaggtggccgatcggatcctggatcgggcggcggccctgctggaggacggtgcgcgcggccatggagagcggtga

SEQ ID NO: 49557 - protein, 414 aa, Symbiobacterium thermophilum IAM 14863
MLHGKTVLLGVSGGIAAYKAAEICSRLVKLGADVHVLMTEAATRLVAPLTFQALSGNPVKVDLMGEQVHGHVDHVLLTHKADLLIIAPATANTIARLAGGHAGDWITVTALGVRCPVLVAPSMETEMYANPLTQRNLRILAELGWDIMEPEEGRLASGLMGKGRLPEPAKIVERAVALLQAREGRQRRPGGDLAGRRVLVTAGTTREPFDPVRFIGNRSTGRMGYAIAEAARDRGAEVVLVSGPTHLEPPAGVRLVRVESCVQMLEACLAEFPAADVAVAAAAPADYRPATVAPSKIKKTGEELTITLVKNPDIIAELGRRKRPGQVTVAFAAETDDLIANARRKLADKNADFVVANDVTAEGAGFGTETNRVVFVTADAVDELPLLPKREVADRILDRAAALLEDGARGHGER

SEQ ID NO: 49558 - DNA, 1206 bp, Bacillus cereus E33L
  CDS (1)..(1206): transl_table=11
atgctaaaagggaaaaagatacttttatgtgtaacaggaggcattgcggtctttaaagcggctgcgttaacgagtaaattgacacaagctggtgctattgtaaaagtaatgatgagtgagtcggcagtgaagtttgttacacctcttacattccaggcactttctcgtcatgatgtatatacggatacattcgatgagaaagattcagctgttattgctcatatcgatttagcagattgggcagatgttgtacttgttgcacctgctacagccaattgtattggaaagctagctaacggcattgcagatgatatgattacaactactttgttagctactacagccccagtgtggattgcacctgctatgaatgtgcatatgtatgaaaataaaattgttcaaaaaaatatgatgacgttaaaaacgttaggatatacatttattgagcctggagaaggttttttagcgtgtggttatgtagcgaagggaagattagaagaacctgaagcgattattgcacggttagaagaggctttttcagaacaaaaaccattgcaaggaaaaaggatattaataactgctggtccaactcgtgaaaagattgacccagtacgttttatgactaatttttcttctggaaaaatgggatatgcgattgcggaagtggcagcgaacttaggcgctgaagtcatactcgtttctggaccgacagcattaaatccaccattacatgtaactacagtgcaagtggaatctgcacaagatatgttagaggcagtcattcaacattatcaaaacgtagatgttgtcattaaaacagcagcagttgcagattatcgtccgaaatatgtacatgataataaaatgaaaaagaaaaatggcgatgctgtaattgaactcgagagaacagtagatattttaaaaacgttaggtgagatgaaggacaaacaattacttatcggttttgcggctgaaacgacaaacgtagaggaatatgcaacgaaaaaattacgtgagaaaaatgcgaatatgattgttgcaaacgacgtaaaggcgcaaggagctggatttggtacagacacgaacattgtaacaatgtatagaaaagatggagaagttatagagttgccacttttaacgaagaaagaggtcgctcgtgaaatattaaagcaaattgaaataatgttagaagatgatcgtctatga

SEQ ID NO: 49559 - protein, 401 aa, Bacillus cereus E33L
MLKGKKILLCVTGGIAVFKAAALTSKLTQAGAIVKVMMSESAVKFVTPLTFQALSRHDVYTDTFDEKDSAVIAHIDLADWADVVLVAPATANCIGKLANGIADDMITTTLLATTAPVWIAPAMNVHMYENKIVQKNMMTLKTLGYTFIEPGEGFLACGYVAKGRLEEPEAIIARLEEAFSEQKPLQGKRILITAGPTREKIDPVRFMTNFSSGKMGYAIAEVAANLGAEVILVSGPTALNPPLHVTTVQVESAQDMLEAVIQHYQNVDVVIKTAAVADYRPKYVHDNKMKKKNGDAVIELERTVDILKTLGEMKDKQLLIGFAAETTNVEEYATKKLREKNANMIVANDVKAQGAGFGTDTNIVTMYRKDGEVIELPLLTKKEVAREILKQIEIMLEDDRL

SEQ ID NO: 49560 - DNA, 1245 bp, Mannheimia succiniciproducens MBEL55E
  CDS (1)..(1245): transl_table=11
atgtttcctaaactatggtttttgggtgccggaggagtaatgcggaatcttaacggtaagcgaattgttgtgggtattacaggcggtattgccgcctataaaaccattgaatttattcgccttttacgtaaaagtaatgcggaagtgcgtgtagtgttaaccgcagcggcggcagaatttgttactccgcttactttgcaggctatttccggtaatcccgtagcgcaatctttgttggatcctcaggcggaattggcgatgggccatattgagttggcaaaatgggcggatgcgattattattgctccggcgagtgccgattttatcgcccgttttaccgtgggaatggcaaatgatttgctttccactgtttgtttggcgagcgctgcaccgattttccttgcgccggcaatgaatcaacaaatgttcagtcaagccgttactcggcaaaatctgaagtctttggcggaacgcggtgtaaaactgatagggccgaacagcggttttcaagcctgtggtgatgtgggggcgggacgtatgtccgaacctgcggaaatttatgccgcactttgtgaagctttatttcttcgtcaggatttattaggtataaaggttgccattaccgcaggtcctactcgcgaggcgattgatcccgttcgttatatcagcaatcatagttcgggaaaaatgggatttgctatcgctcaagcctttgcagacagaggtgcggaagtaacgttaatttccggtccggttaatttagccgcgccggataaggttaaccggataaatgtggtttccgcccgacaaatgtggcaacagtccatgaaaagtgcggtggaaaatcatatatttatcggctgtgcggcggtggcggattatcgtgtcgccgaggtttccgagcaaaaaatcaagaaaaccgacgataatgacgaactcactttaaatttaataaaaaatcccgatattattgccgatgtggcgcatttaacggagaatcgcccttttgtggtcggttttgcggctgaaacgcaaaatgtagaacaatatgcgaaagataagttgcaacgcaaaaatctggatttaatttgtgcaaacgatgtagtgggcggtagcgtgttcggtgcggagcaaaatacgctccatttattctggcaaaacggtgaaaaagtgttaccgactgatactaaaaaagccttagcgaaatctttggtacaagaaattatagagttatatcgtaagtaa

SEQ ID NO: 49561 - protein, 414 aa, Mannheimia succiniciproducens MBEL55E
MFPKLWFLGAGGVMRNLNGKRIVVGITGGIAAYKTIEFIRLLRKSNAEVRVVLTAAAAEFVTPLTLQAISGNPVAQSLLDPQAELAMGHIELAKWADAIIIAPASADFIARFTVGMANDLLSTVCLASAAPIFLAPAMNQQMFSQAVTRQNLKSLAERGVKLIGPNSGFQACGDVGAGRMSEPAEIYAALCEALFLRQDLLGIKVAITAGPTREAIDPVRYISNHSSGKMGFAIAQAFADRGAEVTLISGPVNLAAPDKVNRINVVSARQMWQQSMKSAVENHIFIGCAAVADYRVAEVSEQKIKKTDDNDELTLNLIKNPDIIADVAHLTENRPFVVGFAAETQNVEQYAKDKLQRKNLDLICANDVVGGSVFGAEQNTLHLFWQNGEKVLPTDTKKALAKSLVQEIIELYRK

SEQ ID NO: 49562 - DNA, 1218 bp, Bacillus licheniformis ATCC 14580
  CDS (1)..(1218): transl_table=11
atgctgaaaaatcgcaacatcctgctgggagtaagcggaggaatcgcggtatacaaagcggccgccttaacgagcaagctcgtgcaggcaggagccaatgtgaaagtcatcatgacaaaatccgcctgtgaatttgtgtctccgctcacctttcaggcgctttcgcgcaatgaagtatataccaatacgttcgaagaaccgaatccccgtgtcatcgcccatatcgatgccgcagattgggcggatctcgtgatcgttgctccggctacggccaatgtgatcggaaaactcgcctcaggcatcgctgacgacatgctgacgacgacgcttttggcgacgacagcgccggtgtggatcgctccggcgatgaacgttcatatgtacgaccacccggccgttcagcggaacatcagcgttctttacaaagacggctaccggtttatcgaaccgagtgaaggctaccttgcgtgcggctatatcggcaaaggcagactggaagagcctgagcggatcgtccagttggcagagtcgtatttttcaagcgaaaaaagcggtttgcttgaaggaaagcgcgtcgtaattacagcggggccgacaagagaacaagtcgatcccgtccgctttttctccaaccgttcgacagggaaaatgggctatgctttcgctgaggaagcggcacgaatgggagcgcacgtgacgctgattgcaggcccgacatcgcttgatgatcccgcaggggtcgacgtgattcatgttcagtccgcagaagatatgtatcaagcggctctgtctgttttcgatgagagcgacatcgtcattaaaacagcagctgtcgctgattacaggccaaaacatgtccacgatcaaaaaatgaagaaaaaggacggcggcctcgtcattgagcttgaacggacgaaggatattttaaaagcgctgggagagcggaaaacaaagcaaatcttggtcggctttgcagccgaaacgcagcacgtcgaagactatgccaaacaaaagctggagacgaaaaatctcgatatgattgtcgctaacaatatcacggctgaaggcgccggttttggaacggaaaccaacatcgtgacggtgtttcatcgagactgcaaaaagacggcgcatcctctaatgtcaaagcgggaggttgccgccgcagtcttgaaggaagccgctgagcttgccggacggagcgggacgtcttcatga

SEQ ID NO: 49563 - protein, 405 aa, Bacillus licheniformis ATCC 14580
MLKNRNILLGVSGGIAVYKAAALTSKLVQAGANVKVIMTKSACEFVSPLTFQALSRNEVYTNTFEEPNPRVIAHIDAADWADLVIVAPATANVIGKLASGIADDMLTTTLLATTAPVWIAPAMNVHMYDHPAVQRNISVLYKDGYRFIEPSEGYLACGYIGKGRLEEPERIVQLAESYFSSEKSGLLEGKRVVITAGPTREQVDPVRFFSNRSTGKMGYAFAEEAARMGAHVTLIAGPTSLDDPAGVDVIHVQSAEDMYQAALSVFDESDIVIKTAAVADYRPKHVHDQKMKKKDGGLVIELERTKDILKALGERKTKQILVGFAAETQHVEDYAKQKLETKNLDMIVANNITAEGAGFGTETNIVTVFHRDCKKTAHPLMSKREVAAAVLKEAAELAGRSGTSS

SEQ ID NO: 49564 - DNA, 1389 bp, Legionella pneumophila subsp. pneumophila str. Philadelphia 1
  CDS (1)..(1389): transl_table=11
ttgttacccgaactgatgaaaacggctaacaattcaatatcagagaggctatgtactccattagtaagtagtttttcgcgcaagtcaagttgctgcgctgtatgggcaaccatcattttgtattccttttatattcctttattgcgaagtttgtgctttgatcggggttattcttatcaaaaatggcgatccatgcaagattttattaataaaaaaattctacttggtgtttgtggcggcattgctgcttataaatctgctcatctggttagagagttaactcgtttgggggccgatgtgagggttgtcatgactcattcagcacaacagttcattaaccctttattgatgcaggcattatcaggcaatgaagtgaggattgatttattcgacactcaagctgaacgggctatgggacatattgaattagccagatgggcagattatttgctcattgctcctgcgtctgcaaattgtcttgctaaaatggctcaaggtcttgctgatgatttgctttcaacattatatctcgttactgaaacgccagttattgtttgtcctgccatgaacagaagcatgtgggcacatccagcaaccaaggcaaattgtgaattgttaaaagaacgaggtgtgttttttgtcgggcctgaagaaggctcccaggcctgtggggaacatggattgggaagagtcagcgaggcggatcaaattgtgaataccttgcgcttactggatgtgaatcaactattgcatggcaaacgaattgtgattactgcaggccctactcgcgagtcgattgatccagttcgttatttaagcaattacagttcagggaagatgggttttgcaatggctgaagccgccgctatggcaggcgcacaagtgacattaattagtggtccttgtcatttacaaacgttttcggacatcgaggtcataagagtggagtctgcacaatcgatgctggaagaagtgaacagacatgtacaacagggagatgtatttattggaacagccgcagtatcagattatagagtgctgaatcctgcttcggaaaaaatgaaaaaaaatgaaaactctgaactcactctccagcttgttagaaatgcagatattctttctgaagtagctaaaagtggtaaagcttcctttgttgttgggtttgcagctgaaacaactgatgtgatttcctatgcaaaagaaaaaatgaaaaataaaaaactggatatgattatcgccaatcaggtaggtaatggaatgggattcgaaagtgatgtaaatcaagtaacagtgattacaaaaaacaaacaaatagagctgccattaacccataaaacacgcctggcaggccaaattattgcaatccttgctgcaagtctgcaaaattag

SEQ ID NO: 49565 - protein, 462 aa, Legionella pneumophila subsp. pneumophila str. Philadelphia 1
MLPELMKTANNSISERLCTPLVSSFSRKSSCCAVWATIILYSFYIPLLRSLCFDRGYSYQKWRSMQDFINKKILLGVCGGIAAYKSAHLVRELTRLGADVRVVMTHSAQQFINPLLMQALSGNEVRIDLFDTQAERAMGHIELARWADYLLIAPASANCLAKMAQGLADDLLSTLYLVTETPVIVCPAMNRSMWAHPATKANCELLKERGVFFVGPEEGSQACGEHGLGRVSEADQIVNTLRLLDVNQLLHGKRIVITAGPTRESIDPVRYLSNYSSGKMGFAMAEAAAMAGAQVTLISGPCHLQTFSDIEVIRVESAQSMLEEVNRHVQQGDVFIGTAAVSDYRVLNPASEKMKKNENSELTLQLVRNADILSEVAKSGKASFVVGFAAETTDVISYAKEKMKNKKLDMIIANQVGNGMGFESDVNQVTVITKNKQIELPLTHKTRLAGQIIAILAASLQN

SEQ ID NO: 49566 - DNA, 1263 bp, Methylococcus capsulatus str. Bath
  CDS (1)..(1263): transl_table=11
atgtcgccccaaaccgccccttcctcaagatttccgtctttggccgatctccaccacaagcgcattctcctcggcgtgaccggcggcattgcggcctataaggccgcagaggtcagccgtcggctgcgtctggccggggccgaggtgcgggtggcgatgacgccggcggcctgccggttcgtccagcctttgacgttcgaagccctctccggtcatccggtcgcgtacgacatgttcgtgcccggcgccgaggcggcgatggggcacatccagttgtcccgctgggcggacgccatcctggtcgctccggcatcggcggatttcctggcccggatcagcctggggctggccgacgacctgctggccaccctgtgtctggccgcggaagtacccctgtttcttgcgccggcgatgaaccgcgcgatgtggctgcacccggcgacccgctctcacgccgccgccttggcgggaaggggtgccgtcctgttgggacccgacgaaggcgatcaggcctgcggtgagacggggccgggccggatgcgggaaccggcccggctcgtcctcgatcttgccgaggcgttggcggcggagcgcctgctttcaggcatccgggtcttgatcagcgcgggtccgacccgtgagcccatcgacccggtgcgtttcatcggcaaccgcagttccggcaaaatgggctacgccctggctgctgcggcgcggaacgccggcgcggaagtcaccctggtcagcgggccggtggcactcgatgcgccggccggggtcgaaaccgtgcgggtggaaaccgccgccgagatgcatgcggccgtcatggcccggaccgggggggcggatatctacatcggcaccgccgccgtggcggactacacgccgggtcgggtggccgacaccaagatcaagaaacacggcgagcagctggagctgaccctgatccggacgccagatatcctccgcagcgtcgcagccttggcggacagaccctttgtcgtgggattcgccgccgagaccggcgaggtcgagacctacgcccgcgccaagctggaagccaaaggcgccgatatggtggccgccaacgaagtcggtagcggggctccgggggggttcgagcgggatgaaaatgccctgttcgtgtgctggcggggcggagagtgccatttgccgctggccagcaagaccgagatcgcccgccgactgattcgattgatagccgatcgctactatgccgaaaatacagatcaggatccttga

SEQ ID NO: 49567 - protein, 420 aa, Methylococcus capsulatus str. Bath
MSPQTAPSSRFPSLADLHHKRILLGVTGGIAAYKAAEVSRRLRLAGAEVRVAMTPAACRFVQPLTFEALSGHPVAYDMFVPGAEAAMGHIQLSRWADAILVAPASADFLARISLGLADDLLATLCLAAEVPLFLAPAMNRAMWLHPATRSHAAALAGRGAVLLGPDEGDQACGETGPGRMREPARLVLDLAEALAAERLLSGIRVLISAGPTREPIDPVRFIGNRSSGKMGYALAAAARNAGAEVTLVSGPVALDAPAGVETVRVETAAEMHAAVMARTGGADIYIGTAAVADYTPGRVADTKIKKHGEQLELTLIRTPDILRSVAALADRPFVVGFAAETGEVETYARAKLEAKGADMVAANEVGSGAPGGFERDENALFVCWRGGECHLPLASKTEIARRLIRLIADRYYAENTDQDP

SEQ ID NO: 49568 - DNA, 1209 bp, Azoarcus sp. EbN1
  CDS (1)..(1209): transl_table=11
atgagcgaattgagcgggcgccggatcgtgcttggcgtcaccggcgggattgcggcgtacaaggctgcggaactcgtgcgactgctgggaaaagcgggtgccgacgtgcacgtcgtgctgaccgccggcggcgcgcgtttcgtcacgccggtgactttccaggcgctgtcgggcaacccggtgtggtcggatctttgggatccgcgcgtcgacaacaacatggcgcatatcgacctgacgcgcggcgccgacgcgatcctgatcgcgccggcgacggccgacgtcatcgcgaagctcgtccacggcatcgccgatgacctgctgacgacgctgtgcctcgcgcgcgagtgcccgctgctcgtcgcgccggcgatgaaccgccagatgtgggagcacccggcgacgcgacgcaacatcgcacagctcgccgccgatggcgccacggtggtcggcccggccgccggggaccaggcctgcggcgaaaccggcatggggaggatgctcgaacctgacgacctgctcgagcacctcattgcctttttccagccgaagctgctcgccgggcgcaaggtcgtgatgactgccgggccgactttcgaggcgatcgatccggtgcgcggcatcacgaacacgagttccggcaagatgggctacgccctcgcgcaggcgtgccgacgcgccggcgccgaagtcgtgctcgtcagcgggcctaccggactcccggcgccgctcggtgtcgatcgcgtcgacgtgcgcagcgcgctgcagatgcgcgatgccgtcgcggcggcgctgccggatgccgatgtcttcatcggcgtcgccgcggtcgcggattatcggccgctgtccgccgccgagcacaaggtgaagaagtcgtccaccgagctcactctcacgctgactcccaacccggacatcctcgccgaagtcgcggcacgaccggacgcaccgttctgcgtcggtttcgcagccgaaagccgcgagctcgatgcatacgccgaaggcaagcggcgcgccaagcgcctgccgatgctggtcggcaatctcgtgcaggatgggctcggcagtgacgacaaccaggtgatcctgtacgacgacgcggggcgccatccccagccgcgcgcagcgaaaaccgtcgtcgcgcagaagatcgtcgagcatctggccggtctgctggcgatccgggcgacccgcctggcgaaatga

SEQ ID NO: 49569 - protein, 402 aa, Azoarcus sp. EbN1
MSELSGRRIVLGVTGGIAAYKAAELVRLLGKAGADVHVVLTAGGARFVTPVTFQALSGNPVWSDLWDPRVDNNMAHIDLTRGADAILIAPATADVIAKLVHGIADDLLTTLCLARECPLLVAPAMNRQMWEHPATRRNIAQLAADGATVVGPAAGDQACGETGMGRMLEPDDLLEHLIAFFQPKLLAGRKVVMTAGPTFEAIDPVRGITNTSSGKMGYALAQACRRAGAEVVLVSGPTGLPAPLGVDRVDVRSALQMRDAVAAALPDADVFIGVAAVADYRPLSAAEHKVKKSSTELTLTLTPNPDILAEVAARPDAPFCVGFAAESRELDAYAEGKRRAKRLPMLVGNLVQDGLGSDDNQVILYDDAGRHPQPRAAKTVVAQKIVEHLAGLLAIRATRLAK

SEQ ID NO: 49570 - DNA, 1197 bp, Silicibacter pomeroyi DSS-3
  CDS (1)..(1197): transl_table=11
atgctggcttccaaacgcatcctgctgatcatcggtggcggcattgccgcttacaagacgctggacctgatccggcggctgcgcgaacgcggcgcagcggtgacgccggtgctgaccggtgccgccgaggagttcgtgacgccgctttcggtctcggcccttgcgggagaaaaggtctatcgcgcgcttttcgacctgaccgacgaggccgagatgggccatatccagctgtcgcgctcggccgatctggtggtggtggcgcccgccaccgccgatctgatgggcaagatggcggcggggctggccaatgacctcgcctcgacccttttgatggcaacggataccccggtgctgatcgctccggcgatgaatgtgcgcatgtggcagcatccggcgacacggcgcaaccacgcgcagctggcggcggatggcatccgtttcatcgggccgaacgagggcgacatggcctgcggcgaatacgggccggggcggatgtcggaaccgctggaaatcgtggccgccatcgaggcggcgctgggcgacgggccgctcaagggcaagcgggtgctggtgacctcgggccccacgcatgagccgatcgacccggtgcgctacatcgccaaccggtcctcgggtgcgcagggaacagcggtggcgcgtgccttggcggcgctgggcgccgaggtcgtgtttgttaccggcccggctgacgtaccgcccccggatggggtcgaggtggtgcgcgttcaaagcgcgcgcgagatggacgccgccgttgatgcggccctgccggtggatgcaggggtgtttgcggcggcggttgccgattggcgcgtggccagcgcctcggaccgcaagctgaagaagtccagggacgggctgccggtgctggaatttgccgagaacccggacatcctgaaacgggtgagccggatggaagcaggccgcccgccgctggtggtgggatttgccgccgagaccaatgacgtgatcgagaatgccactgcgaagcggctgcgcaagggctgtgactggatcgtggccaatgatgtcagcccggccaccggcatcatgggcggcagcgagaatgcggtgatcctgatcaccggcgagggggccgaggaatggccgcgcatgagcaaggaggcggttgccgaccgtctggcccggcgcatcgccgagaccttggtggggtag

SEQ ID NO: 49571 - protein, 398 aa, Silicibacter pomeroyi DSS-3
MLASKRILLIIGGGIAAYKTLDLIRRLRERGAAVTPVLTGAAEEFVTPLSVSALAGEKVYRALFDLTDEAEMGHIQLSRSADLVVVAPATADLMGKMAAGLANDLASTLLMATDTPVLIAPAMNVRMWQHPATRRNHAQLAADGIRFIGPNEGDMACGEYGPGRMSEPLEIVAAIEAALGDGPLKGKRVLVTSGPTHEPIDPVRYIANRSSGAQGTAVARALAALGAEVVFVTGPADVPPPDGVEVVRVQSAREMDAAVDAALPVDAGVFAAAVADWRVASASDRKLKKSRDGLPVLEFAENPDILKRVSRMEAGRPPLVVGFAAETNDVIENATAKRLRKGCDWIVANDVSPATGIMGGSENAVILITGEGAEEWPRMSKEAVADRLARRIAETLVG

SEQ ID NO: 49572 - DNA, 1227 bp, Synechococcus elongatus PCC 6301
  CDS (1)..(1227): transl_table=11
gtgactgcgatcgcctcttttgccggtcgtcggattctgattggtgtctgcggcggcattgcggtctataaactctgcgaagtggtctcccagttggtgcaggccggtgcagaggtgcgcgtcattctgacagcgggggcggagcggtttattgctcccttcagtttcagtactctctgtcgccatcccgcctatacggacgctgatttttggtcagctcgtcatggtcgtccgctccatatcgagttgggggaatgggcggaagtgatgctgatcgccccgctgactgccaataccctcgcgaagttgcgctatgggcaggccgataatctactgaccaatacagtcctcgcgacgactgccccactcttgctcgcccccgccatgaatacggatatgtggctgcagcccatcgtccaagaaaactggcaggttctgcgatcgcgccctcagaccttgggcctagaaccggggagcggtcgtttagcttgcgatcgcgtcggcagtggtcgcttgccagaaccgatcgcgattctggcagggttggaatcgttgctctggacccagggacaagccgatctgcaagggctgaagattctggtcaatgcgggtggcacccgcgagtttctcgatccggtgcgctttatcggcaatcccagtagcgggcggatgggcgtgatgctagcgatcgcggcccaacatcgcggtgctcaagtccagctgattcacgcgcctttgaccaacatcgagccggggctgttgacgagcctcgatcgccaagcggtagtcagtaccgaagaactggctgaagcgatgattgccgcaaccccgattgcagattgggttttactcgcagcagccgtgggcgatgtccggccggaactgcgatcccaccagaagctgagtaaggctgaactaccagcctcactgccactacaactgttacccgacattgcggcgcagctcagtcagcagcggtatccaaaccagaagttgatcgggtttgctgcccaaactggcgagattttggaacccgcgatcgcgaaattgcagcgcaagggactcgacgccatcatcgccaacgcgatcgatcagcccggtcaaggctttggcagtgccactaatgccgcgatcgcgctgcgtcctgatggctcatcccagcccttggggttccgcagcaaacttagcttggctcatgccatcttagattttgttaaaaatctttaa

SEQ ID NO: 49573 - protein, 408 aa, Synechococcus elongatus PCC 6301
MTAIASFAGRRILIGVCGGIAVYKLCEVVSQLVQAGAEVRVILTAGAERFIAPFSFSTLCRHPAYTDADFWSARHGRPLHIELGEWAEVMLIAPLTANTLAKLRYGQADNLLTNTVLATTAPLLLAPAMNTDMWLQPIVQENWQVLRSRPQTLGLEPGSGRLACDRVGSGRLPEPIAILAGLESLLWTQGQADLQGLKILVNAGGTREFLDPVRFIGNPSSGRMGVMLAIAAQHRGAQVQLIHAPLTNIEPGLLTSLDRQAVVSTEELAEAMIAATPIADWVLLAAAVGDVRPELRSHQKLSKAELPASLPLQLLPDIAAQLSQQRYPNQKLIGFAAQTGEILEPAIAKLQRKGLDAIIANAIDQPGQGFGSATNAAIALRPDGSSQPLGFRSKLSLAHAILDFVKNL

SEQ ID NO: 49574 - DNA, 1206 bp, Bacillus clausii KSM-K16
  CDS (1)..(1206): transl_table=11
atgttaaaaaacaagacgattgtagtaggtgtgagcggaggcatcgccgctttcaagacagcagcgcttgtcagcaagttaacacaggcgggagcgaacatttatgtggtcatgacagaagcagccacgaagtttgtaacgcctttgacgtttcaagcactatctcgcaatcctgtttatacagatacatttacagaaccagacgcaacaaaaattgcccatattgacattgctgaccaggcagatcttgttttgattgctcctgcaagcgccaatacaattgcgaaattagcggcaggcattgctgacaacatgctgacaacgcttgtgttggcaacgaaagcgccagtagcattagcgccagcaatgaacgtcaacatgtacgaacacccgtctgtacaggaaaacatggaaaaactgcggtcttatcattatcaattaattgagcctggtgctggttatcttgcgtgcgggtgggtcggcaaaggccgtatggccgagccagagcaactgctcgaactggtcgatacgcttttggaagaggcgacagatttgcgtggcaaacaggtaatcgtaacggcaggaccaacaagggaacctcttgacccagttcgttttttcagcaattactcttctggaaaaatggggtatgcgctcgcacaagaagcgcggcgacgcggcgctcatgtcacgttaataacaggtccgacggcgcttgaagcccctgttggcgttgaaacggtcgccgtacaaactgctgaggagatgtacaatgcggtaaataagcgctatcaacaagcggacatcgtcataaaagcagcagcagttgccgattaccaacctgttgacgtttttgcccataaacagaaaaagaacgcagacgaatggtcggttgcactagagcggacaaaagacatcttgcgttttcttggcgaacataaaaaggaacaaattcttgtcggctttgcggccgagtctgagcaactgcacacatacgccaaaagcaagcttgagagaaaaaaccttgacttaatcgtcgcgaacaacattactactgaaggcgctggctttgatgttgatacaaatgtggtcactgtatttactagagatggacaggagacggcttatccgcaagcctcaaaacaagaggtagccaagcaaatcctcaatgaactagaagcttatatgaaaaggcgtgaagcgtaa

SEQ ID NO: 49575 - protein, 401 aa, Bacillus clausii KSM-K16
MLKNKTIVVGVSGGIAAFKTAALVSKLTQAGANIYVVMTEAATKFVTPLTFQALSRNPVYTDTFTEPDATKIAHIDIADQADLVLIAPASANTIAKLAAGIADNMLTTLVLATKAPVALAPAMNVNMYEHPSVQENMEKLRSYHYQLIEPGAGYLACGWVGKGRMAEPEQLLELVDTLLEEATDLRGKQVIVTAGPTREPLDPVRFFSNYSSGKMGYALAQEARRRGAHVTLITGPTALEAPVGVETVAVQTAEEMYNAVNKRYQQADIVIKAAAVADYQPVDVFAHKQKKNADEWSVALERTKDILRFLGEHKKEQILVGFAAESEQLHTYAKSKLERKNLDLIVANNITTEGAGFDVDTNVVTVFTRDGQETAYPQASKQEVAKQILNELEAYMKRREA

SEQ ID NO: 49576 - DNA, 1155 bp, Campylobacter jejuni RM1221
  CDS (1)..(1155): transl_table=11
atgaaaaccatacttttagccattagcggtagtatagctttttataaatcttatgagcttatttctttgtttaaaaaagaaggctttagggtaaaagttttgctttctaatggtttgttaaaatttgctagcaaaatgagttttgaagccttggttgatgaagttttatgtgaggaaaatgaaagttggcaaaattcaaacaatcacatagcttttagcaaggatgtagaccttgttttgtttgcccctgcaagtgttaattctatcaataaacttgcttttggtatagcggataatctttttatccaaaccttaatcgcagcaaataaacctcttatcatagctcctgcggcaaatacaaatatgtttcatcattttagcacgcgaaattctttaaagatacttaaagaaaataaagctttgattatagagcctatttgtaaagttttagcttgtaaagatgaaggcgtaggagccttagctgaagttaaggatatttttaatatcaccaaaagagagcttttaaaagaaaagttttggtgcgataaaagtgtagttatcacaggtggcggcacaaaagaaaagatcgatgatgtgcgttgtgtgagtaatttttcaagtggaaaaatggcaaaggccatagctgacgctttttattttttaggagctagggtaaaacttttaagctctgtggaatttgatacgccttatgagctttgcaaatttgaaagttctaaggatctaaaggagcttttggataaaaatttaaatcatgactttttgattatgacggctgcggtgagtgattttatccctcaaagtgtaaaagggaaaattaaaaaaaatgagcatttgcagggtttaaatttgcatctatctttaaatgaagatttgcttaaaacttgcaaatttcaaggcaaaaagataggttttaagatggaatttgattctcaaaatgccttagaaaatgcgaaaaaatctttaaaagataagcaacttgatatggtttgtcttaatatcattgatcaaaaaaattattttggaagcgatcaaaatgagctttattttatcactttaaacaatgaaaataaaagcactttgcaaagcaaagaaaaattggcatttgaattagtaaaatggtgtgaaaaattatga

SEQ ID NO: 49577 - protein, 384 aa, Campylobacter jejuni RM1221
MKTILLAISGSIAFYKSYELISLFKKEGFRVKVLLSNGLLKFASKMSFEALVDEVLCEENESWQNSNNHIAFSKDVDLVLFAPASVNSINKLAFGIADNLFIQTLIAANKPLIIAPAANTNMFHHFSTRNSLKILKENKALIIEPICKVLACKDEGVGALAEVKDIFNITKRELLKEKFWCDKSVVITGGGTKEKIDDVRCVSNFSSGKMAKAIADAFYFLGARVKLLSSVEFDTPYELCKFESSKDLKELLDKNLNHDFLIMTAAVSDFIPQSVKGKIKKNEHLQGLNLHLSLNEDLLKTCKFQGKKIGFKMEFDSQNALENAKKSLKDKQLDMVCLNIIDQKNYFGSDQNELYFITLNNENKSTLQSKEKLAFELVKWCEKL

SEQ ID NO: 49578 - DNA, 1182 bp, Dehalococcoides ethenogenes 195
  CDS (1)..(1182): transl_table=11
atggataagaaaaagacagtggttctgggcataaccggcagtatttctgcctataaagcggcagatattgcctccaaactggttgccgcagggtatacggttaaagcggtcatgactgaaaacgcctgccgttttatatctcccctgactatccggacgcttagccgtcagcaggtagtgaccggtatgtgggatatgaattccgaatacagcgtggagcatgtctctctggcagaggaagcggctgttattctggttgctccggctaccgccaatataattgccgaattggcctgcgggctggcaggcgatatgatttcatcaactattttagccagcaaagccccggttataatagccccggccatgaacgacaatatgtattccaatcctgccacccagcagaatattgcaaagctgaaggaacggggttttgtatttgtagaacccgaatcaggccgcctggcctcaggcaaaacagggcaggggcgcttagcttccgtagatacaatactgggttcggttacccaggttttaggtaaaaacggacctttggccgggaaaaaactggttatcagcgccgggggcacccgtgagccggttgacccggtgcgttatctgggtaaccgcagttctggcaaaatgggctatgctctggccgaggaagctgtcagacggggtgccagcgtaaggctggtttcaggggctgttgataaacctgccccttttggggttgacataaagtatacagaaaccgctatggaaatgtttatctccctcagagaagcggtcaaaggggcagatgccctcattatgacagcggctgtggcagattaccgcccggaaaaaccggcggcggataagattaaaaaaggggacggggagcttgacctgcacctggtagccaaccctgatattttggcctcgctgcagggtgattttgtaaaggtgggttttgcggctgaaagccgtgaccttatgataaatgccgtcaaaaaaatggctgacaaaaatctggatattattgcggctaacgatatcagccagccggacagcacctttggttcagataccacccgcctgaccctcttctttaaaaacgggcggatagaggaaatgccgcttatgtccaaacaggaagcggccgtgagacttcttgatgaactttcagctttgctttaa

SEQ ID NO: 49579 - protein, 393 aa, Dehalococcoides ethenogenes 195
MDKKKTVVLGITGSISAYKAADIASKLVAAGYTVKAVMTENACRFISPLTIRTLSRQQVVTGMWDMNSEYSVEHVSLAEEAAVILVAPATANIIAELACGLAGDMISSTILASKAPVIIAPAMNDNMYSNPATQQNIAKLKERGFVFVEPESGRLASGKTGQGRLASVDTILGSVTQVLGKNGPLAGKKLVISAGGTREPVDPVRYLGNRSSGKMGYALAEEAVRRGASVRLVSGAVDKPAPFGVDIKYTETAMEMFISLREAVKGADALIMTAAVADYRPEKPAADKIKKGDGELDLHLVANPDILASLQGDFVKVGFAAESRDLMINAVKKMADKNLDIIAANDISQPDSTFGSDTTRLTLFFKNGRIEEMPLMSKQEAAVRLLDELSALL

SEQ ID NO: 49580 - DNA, 1212 bp, Thermococcus kodakarensis KOD1
  CDS (1)..(1212): transl_table=11
atgctccatcacgtcaagcttatctacgcgaccaagagcaggaagcttgttgggaagaagattgtgctggctattccaggaagcatagcggcggttgaatgcgttaagctggccagggagctgataaggcacggcgcagaggttcacgcggtaatgagcgaaaacgccacgaagataattcatccctatgccatggagttcgcgacaggaaaccctgtagttactgaaattactggcttcatcgagcacgttgaacttgctggagagcacgagaacaaagccgatctcgttctcgtctgccctgcgacagctaacaccatatcaaagatagcctgcggaattgacgatactcccgttacaacggtcgtgacaacggcttttgcccacacccccataatgatagctccagccatgcactcaacgatgtacgaccacccgatagttaaggaaaacatcgagaagctgaagaagcttggagtggagttcatagagccgcgctttgaggagggcaaggcaaaagtcgcttcaatagaggaaatagtttaccgtgtaatcaggaagcttcatcccaagagcctcgaaggaaagcgcgtcctcgtcaccgcaggtgcgacaagggagtacattgacccgatccgctacataaccaacgcgagcagcggaaaaatgggagtggcgattgcggaagaggcggagttcaggggcgccgaggtaacgctcatacgtaccaagagcagcgttccgagcttcgtggagaaccagatagaggtagagaccgtcgaggagatgcttgaagcgatagagagtgagctgaagggcaaaaagtacgacgtcgttgtcctggccgctgcagtcagcgacttccgggtgaagaacaaagcggacgtgaagataaagagcgggcaaccgctcgttctcgagcttgagccgacgccgaagataatagaccgcgttaaggaactccagcccggggttttcctcgtgggtttcaaggccgagaccggtctcagcgaggaagagctcatcagcgccgccaggaagcagattgagcgcgctggaagtgacctggttgtagcaaacaccctcaaggcctttggaagcgaggagaacgaggttgtcctggtcggaagggacttcgcaaagaaactccccagaatgaccaagcgcgagctggcggagaggctctgggacgagatagagaagatgctttag

SEQ ID NO: 49581 - protein, 403 aa, Thermococcus kodakarensis KOD1
MLHHVKLIYATKSRKLVGKKIVLAIPGSIAAVECVKLARELIRHGAEVHAVMSENATKIIHPYAMEFATGNPVVTEITGFIEHVELAGEHENKADLVLVCPATANTISKIACGIDDTPVTTVVTTAFAHTPIMIAPAMHSTMYDHPIVKENIEKLKKLGVEFIEPRFEEGKAKVASIEEIVYRVIRKLHPKSLEGKRVLVTAGATREYIDPIRYITNASSGKMGVAIAEEAEFRGAEVTLIRTKSSVPSFVENQIEVETVEEMLEAIESELKGKKYDVVVLAAAVSDFRVKNKADVKIKSGQPLVLELEPTPKIIDRVKELQPGVFLVGFKAETGLSEEELISAARKQIERAGSDLVVANTLKAFGSEENEVVLVGRDFAKKLPRMTKRELAERLWDEIEKML

SEQ ID NO: 49582 - DNA, 1200 bp, Staphylococcus epidermidis RP62A
  CDS (1)..(1200): transl_table=11
atgaaacatattttattagctgttacaggcggtatcgcagcatataaagcaattgatttaacaagtaaattaatacaatccggctatgatgtaagagttatgctatctgatcatgctcaagagtttgttactccactagcttttcaagcaatcagtagaaatcctgtttacacaaatacatttaaagaagaaaatcctgaagagattcaacatgtatcattaggagactgggcagatgcgattatagtcgcgccagcaactgctaatactatcgcaaaattaagtgttggaattgctgatgatttaattacttctacattacttgctacaacaacaccaaaattcgttgcacccgcaatgaatgtaaatatgtataacaatccgcgtactaagcataatatgaaagtgctaagtcaagacggatattattttattgaacctggtagtggctatttagcatgcggttatgtagcaaaagggcgaatggaagaacccatgcaaatcctatctgttattaataaattttttactcaacaggagaatgttgtaaaaagctctttttccggaaagcacgcattagttaccgctggacctacagttgaagttattgatccagttcgatacgtatcaaatcgttcatcaggaaaaatgggatatgctatagctgaagcattacgagataagggggcaatcgtaactttaattagtggtcctacccacttatctctacctgaagggattaatgttgttaaagttgagagtgcagaggatatgtttcaagctgtaaccgaacgctttgcgaaacaagatatagtgattaaagcagcggcggtgtctgactatacaccaatggacatacttgaacataaattaaaaaaacaagaaggaggattatctgttcaatttaagcgtactaaggatattttaaaatacttaggagaaaataaaacgcaccaatatcttgttggttttgctgctgaaacacaaaatattgaacagtatgctctagacaaactcaaaagaaaaaatgcagatgttatcatttcgaacaatgtaggtgatacatcaataggctttagttcagatgacaatgaattaactatgcattttaaaaataatgaaaaagtaaatattaagaaagggaaaaaatcagctttagcacatcaaattatagaaattttagaaactaggtggcagtaa

SEQ ID NO: 49583 - protein, 399 aa, Staphylococcus epidermidis RP62A
MKHILLAVTGGIAAYKAIDLTSKLIQSGYDVRVMLSDHAQEFVTPLAFQAISRNPVYTNTFKEENPEEIQHVSLGDWADAIIVAPATANTIAKLSVGIADDLITSTLLATTTPKFVAPAMNVNMYNNPRTKHNMKVLSQDGYYFIEPGSGYLACGYVAKGRMEEPMQILSVINKFFTQQENVVKSSFSGKHALVTAGPTVEVIDPVRYVSNRSSGKMGYAIAEALRDKGAIVTLISGPTHLSLPEGINVVKVESAEDMFQAVTERFAKQDIVIKAAAVSDYTPMDILEHKLKKQEGGLSVQFKRTKDILKYLGENKTHQYLVGFAAETQNIEQYALDKLKRKNADVIISNNVGDTSIGFSSDDNELTMHFKNNEKVNIKKGKKSALAHQIIEILETRWQ

SEQ ID NO: 49584 - DNA, 1185 bp, Neisseria gonorrhoeae FA 1090
  CDS (1)..(1185): transl_table=11
atgggcaaacatattcttttaggtgtaacgggcagtattgcggcgtataagtcttgcgagttggtgcgactgctgaaaaaacaggggcattcggttacggtggttatgagccgctcggcaactgaatttgtttctccgctgacttttcaggctttgagcggcaatcccgttctgaccgacacgcacggcggcaacggttcaaacggtatggaacatatcaacctgacccggaatgcggatgtttttctgattgcgccggcaagtatgaataccgtggcaaaaatctgtaacggcgtggcagataacctactgaccaatctggcagccgcacggaaatgccctcttgccatcgctcccgcgatgaatgtggaaatgtggctgaatcctgccaaccaacggaatatcgcacaactggtttcagacggcattactgtctatatgccgggcttgggcgaacaggcttgcagagaaaatggtatgggaaggatgccggaacctgccgaattgctggatttgcttccagacttgtggacaccgaaaattttaagggacaagaaaatcttgattaccgcaggtgcgacatttgaagccattgaccctgtcaggggcatcacaaatacctccagcggaaaaatgggcgtagctttggcgcgggcgtgccgtgccgccggtgcggaaatcagcctgattcacggacagcttcaaaccacgctgcctttcggcatatccgatacggttcaagccgtcagtgccgaagatatgcatcgcgcagtacatcgtttgattgaaaaacaagatgcttttatttctgttgccgccgtctcagactataaggttaaaaacaggagtacgcaaaaattcaaaaaagataaaaatgccaaaccgttatccatcgaattggatgagaaccccgatactttggcttctattgcctcattgccgaacccgccgttctgcatcggttttgccgctgaaacggagaatgtaatggcatatgcgcgggaaaaacgtattaagaaaaaaataccggtgatagttgccaatgatgtttcaatcgcgatgggcaagacaaccaaccaaattgttatcatagatgatgatgcggagttgtctttccccgaaacaagtaaagatgaagcggcaatgcggattgttgaaaggcttgccgtatatttgaacaaataa

SEQ ID NO: 49585 - protein, 394 aa, Neisseria gonorrhoeae FA 1090
MGKHILLGVTGSIAAYKSCELVRLLKKQGHSVTVVMSRSATEFVSPLTFQALSGNPVLTDTHGGNGSNGMEHINLTRNADVFLIAPASMNTVAKICNGVADNLLTNLAAARKCPLAIAPAMNVEMWLNPANQRNIAQLVSDGITVYMPGLGEQACRENGMGRMPEPAELLDLLPDLWTPKILRDKKILITAGATFEAIDPVRGITNTSSGKMGVALARACRAAGAEISLIHGQLQTTLPFGISDTVQAVSAEDMHRAVHRLIEKQDAFISVAAVSDYKVKNRSTQKFKKDKNAKPLSIELDENPDTLASIASLPNPPFCIGFAAETENVMAYAREKRIKKKIPVIVANDVSIAMGKTTNQIVIIDDDAELSFPETSKDEAAMRIVERLAVYLNK

SEQ ID NO: 49586 - DNA, 1209 bp, Pseudomonas fluorescens Pf-5
  CDS (1)..(1209): transl_table=11
atgcagcggctgtatcggaaacgcatcgtgctcggcgtcggcggcggcattgccgcctacaagagcgcggagctggttcgccgactcctcgaccagggcgccgaagtgcgcgtggtcatgacccggggcggcagtgaattcattaccccgctgaccatgcaagcgctctccgggcacccggtccacctcgacctgctggacccggctgccgaagccgccatgggccatatcgagctggccaagtgggccgacctggtgctgatcgcgccggccaccgcggacctgattgcccgcctggcccagggcattgccgacgatctgctgaccaccctggtgctggccaccgatgccatcgtcgccatcgccccggcgatgaatcaggccatgtggcgcgaccctgccacccaagccaacacccaactgctgcaaagccgtggcctgaaggtcttcggcccggcttccggcagccaggcctgtggcgatgtcggcctgggccgcatgctggaggccaacgacctggcccagtgcgccgccgattgtttccagcatctggcgctgaccggcaagcacctgctgattaccgccgggccgacccaggaaaacatcgatccggtgcgctacatcaccaaccatagctcaggaaaaatgggcttcgccctggccgaggccgcggttgaagccggtgcccgggtgaccctgatcactgggccggtacacctgccaacccccgatagagtcacgcggatcgacgttgtcagcgcccgggacatgctcgcggcctgtgagtcggcgatcccatgcgacgttttcatcgcctctgcggcggtcgcggactaccgaccggaagtcgtcgccccacagaaattaaagaaagaccctacgaaaggtgacggcctgttgctgcagatggtgcgcaacccggacatcctggccaccattgccagccgtccggatcggcctttcagtgtcggtttcgccgcagaaaccgaaaacttgctcgactacgctgcacgtaaattgaaggacaagaacctcgacctgatcgtcgccaacgacgttgccaacccgagcattggcttcaacagcgaggaaaacgcctgcagcgtgattgaccgggagttgcacgcaactctcttcgcccagaccagcaagggcaagattgcccgccagctgatctcttttatcgccgaacggctgaaccaggtttaa

SEQ ID NO: 49587 - protein, 402 aa, Pseudomonas fluorescens Pf-5
MQRLYRKRIVLGVGGGIAAYKSAELVRRLLDQGAEVRVVMTRGGSEFITPLTMQALSGHPVHLDLLDPAAEAAMGHIELAKWADLVLIAPATADLIARLAQGIADDLLTTLVLATDAIVAIAPAMNQAMWRDPATQANTQLLQSRGLKVFGPASGSQACGDVGLGRMLEANDLAQCAADCFQHLALTGKHLLITAGPTQENIDPVRYITNHSSGKMGFALAEAAVEAGARVTLITGPVHLPTPDRVTRIDVVSARDMLAACESAIPCDVFIASAAVADYRPEVVAPQKLKKDPTKGDGLLLQMVRNPDILATIASRPDRPFSVGFAAETENLLDYAARKLKDKNLDLIVANDVANPSIGFNSEENACSVIDRELHATLFAQTSKGKIARQLISFIAERLNQV

SEQ ID NO: 49588 - DNA, 1212 bp, Colwellia psychrerythraea 34H
  CDS (1)..(1212): transl_table=11
atgcaaattcttcaggacaaaaaaatagtactgggtattacaggtggtatcgctgcctacaaaacaccagaattagtgcgtcgacttaaagatcatggtgcggatatacgcgtggttatgaccgaaggtgcaaaagcctttattacgccattaacgcttcaagcagtatcgggcaaccatgtttctgatagcttattagatagccaagccgaactcgccatgggccatattgagttggctaaatgggctgatttaattattatcgctccagccactgcggatattattgctcgtattaccgcaggtatggctaatgatttactctcaacattatgcttagcaaccagtgcgccaattgctattgccccggcaatgaatcagcaaatgtggcatgccaaagcaacacaagttaacatcagcacattaaagcagtggggattccatctttggggccctggtgctggcgaacaggcttgtggtgatataggtttaggccgcatgttagatgttaatgaattagttactcttagcagcgatttttttgtcgacaagtatttgcaagaccaacattgggtgattaccgctggaccaacacgtgaggcgatagatccggtgcgttatatatcgaatcatagctcaggaaaaatgggctatgccattgctcatgccgcattacgtgctggcgctcaggtgacgttaatttctggtcccgtaaatatacctgctcccgcaggttgtgagctgatccaagtgactagtgccgaacaaatgcatcaacaagcgctaatttatgttccgcaagctactacctttgtcgcctgcgcagcagtagctgattatcgagttgctgatattgccgatgagaaaatcaaaaaagatagcgaacacatgcaaatttcgctcatcaagaaccatgatattgttgctgatgtagcaaatttagccaataaaccttttatcgttggctttgcggcagaaacacaaaacgttgaacactatgcacgcggcaaactaatgcgtaaaaacttagatttaatcgctgcgaatgatgttgctaaagcaggacaaggttttaatagtgatgataatgctttaaccctctatagtgctattgataaaattgaaattcctctagctaataagcagatcgttgctaaacagctagtttcattaatcaatcaacattatttagccaaaaacgccaagaaataa

SEQ ID NO: 49589 - protein, 403 aa, Colwellia psychrerythraea 34H
MQILQDKKIVLGITGGIAAYKTPELVRRLKDHGADIRVVMTEGAKAFITPLTLQAVSGNHVSDSLLDSQAELAMGHIELAKWADLIIIAPATADIIARITAGMANDLLSTLCLATSAPIAIAPAMNQQMWHAKATQVNISTLKQWGFHLWGPGAGEQACGDIGLGRMLDVNELVTLSSDFFVDKYLQDQHWVITAGPTREAIDPVRYISNHSSGKMGYAIAHAALRAGAQVTLISGPVNIPAPAGCELIQVTSAEQMHQQALIYVPQATTFVACAAVADYRVADIADEKIKKDSEHMQISLIKNHDIVADVANLANKPFIVGFAAETQNVEHYARGKLMRKNLDLIAANDVAKAGQGFNSDDNALTLYSAIDKIEIPLANKQIVAKQLVSLINQHYLAKNAKK

SEQ ID NO: 49590 - DNA, 1248 bp, Pseudomonas syringae pv. phaseolicola 1448A
  CDS (1)..(1248): transl_table=11
atgggcgtcgcgtattcactcgaccaaaaaggcaggtctatgcagcggctgtatcgaaaacgcatcgttcttggcgtcggcggcggcatcgcggcctacaagagcgccgagctggtccgccgcctgcgcgatcagggcgctgaagtgcgtgtcgtcatgaccaaaggcggagcagagttcattacgccgctgaccatgcaggccctgtccgggcaccctgtgcacctggaccttctcgacccggccgcagaggccgcgatgggccatatcgaactggccaaatgggccgacctgatcctgatcgctccggccaccgccgacctgatcgcgcgcctggcgcaaggcatcgccaacgacttgctgaccaccatcgtgctggcaaccgatgccaccgtcgccatcgcaccggcgatgaatcaggcaatgtggcgtgacgcctcagtgcaagccaatacccggcagcttgaagagcgtgactttcgtgtgtttgggccagcgtccggcagtcaggcctgcggcgatgtcggcttcggtcgcatgctggaggccgacgatctgacccagtgcgcagcggactgtttccagcgcctgagcctgaccggcaagcatgtgctgatcaccgctggcccgacccaggaaaacatcgatccggtgcgttacatcaccaaccacagctccggaaaaatgggctttgccctggccgaagcggctgtggaagccggtgcgcgcgtcacgctgatcaccgggccagtcaatctgccgacgccggatcgcgtctcgcgcatcgacgtggtcagcgcccgcgacatgctggcggcgtgcgaggctgccatcccctgtgacctgttcgtcgcctcggcagcggtggctgactaccgtccggaagttgtcgccccgcacaaattgaagaaagatccctcaaacggtgacggcttgctgctgcagatggtccgcaatccggatattctggcgaccatcgcaacccgcccggatcgccctttcagcgtcggcttcgccgccgagaccgaacacctgctcgactatgctgcccgcaagctcaaggacaagaacctggacctgattgtcgccaacgatgtcgccaaccccagcatcggcttcaacagtgaagagaacgcttgcagcgtgattgaccgggcgttgcacgcaacgctttttgcccagaccagcaaggccaagattgcccgccagctgatcacttttatcgccgaccgcatgaatcaggtttaa

SEQ ID NO: 49591 - protein, 415 aa, Pseudomonas syringae pv. phaseolicola 1448A
MGVAYSLDQKGRSMQRLYRKRIVLGVGGGIAAYKSAELVRRLRDQGAEVRVVMTKGGAEFITPLTMQALSGHPVHLDLLDPAAEAAMGHIELAKWADLILIAPATADLIARLAQGIANDLLTTIVLATDATVAIAPAMNQAMWRDASVQANTRQLEERDFRVFGPASGSQACGDVGFGRMLEADDLTQCAADCFQRLSLTGKHVLITAGPTQENIDPVRYITNHSSGKMGFALAEAAVEAGARVTLITGPVNLPTPDRVSRIDVVSARDMLAACEAAIPCDLFVASAAVADYRPEVVAPHKLKKDPSNGDGLLLQMVRNPDILATIATRPDRPFSVGFAAETEHLLDYAARKLKDKNLDLIVANDVANPSIGFNSEENACSVIDRALHATLFAQTSKAKIARQLITFIADRMNQV

SEQ ID NO: 49592 - DNA, 1191 bp, Dechloromonas aromatica RCB
  CDS (1)..(1191): transl_table=11
atggaattattgggaaaacgcatcgttctcggcgtgaccggcggtatcgctgcctacaaggcggctgagctagttcgcttgttgcgcaagcagggtgccgatgtacaggtggcgatgaccgaaggggcgactcacttcgtgacggcgaccacctttcaggcgctgtccggccaagcggtctatctcgatcaatgggatgcccggatgccgaacgcgatggctcacatcgacctttcgcgctcggccgatttgattctggttgcgccggcttcggccgattttcttgcccgtatcgcctgcggcatggctgacgatctgctggcgaccatggtgctggctcgcgattgccccttgctggtggtgccggcaatgaaccgccagatgtgggaaaacccggcgacgcaacgcaatgtcagccaattgcaggccgacggcgtgcaggtgcttggcccggccagtggtgagcaggcttgtggtgaagtcggcgccgggcgcatgctggagccggaagaaattcttgaagaagtgctcaccttcttcatgcccaaggtgttgctcagccagaagctgctgattactgccgggccgacttttgaggcaatcgacccggtgcgtggcatcaccaacctgtcttccggtcgcatggggtatgccgtggcgcgcgccgcacggcaggccggagcggaggtgaccctggtttcggggccggttggctttgccgcaccgctgggcgttgagcgcatcaatatcaggagcgcgctggaaatgcatgcggcggtgatggcacgagcgccagcagccgatatatttatcggcgttgctgccgtggccgattatcgcgtggctaatgctgccgagcacaaactgaagaaggacactggcggcattccgccgatcgaactgatcgagaatccggatatcctggctgaagtagctgcgctgaaggatggcccgttctgcgttggattcgcagccgaaagccgtagtctggaagagtatgctcaggccaagcgacgcaagaagaatatcccgttgattgccggtaacctgatccaggatggttttggtggtgacgataaccgactggtgttgtttgacgatgccggcacccatccgctgacacccgcacccaagtcggtgctggcgcggcaactgatcgaacacattgccaaactgacaggaagaaactga

SEQ ID NO: 49593 - protein, 396 aa, Dechloromonas aromatica RCB
MELLGKRIVLGVTGGIAAYKAAELVRLLRKQGADVQVAMTEGATHFVTATTFQALSGQAVYLDQWDARMPNAMAHIDLSRSADLILVAPASADFLARIACGMADDLLATMVLARDCPLLVVPAMNRQMWENPATQRNVSQLQADGVQVLGPASGEQACGEVGAGRMLEPEEILEEVLTFFMPKVLLSQKLLITAGPTFEAIDPVRGITNLSSGRMGYAVARAARQAGAEVTLVSGPVGFAAPLGVERINIRSALEMHAAVMARAPAADIFIGVAAVADYRVANAAEHKLKKDTGGIPPIELIENPDILAEVAALKDGPFCVGFAAESRSLEEYAQAKRRKKNIPLIAGNLIQDGFGGDDNRLVLFDDAGTHPLTPAPKSVLARQLIEHIAKLTGRN

SEQ ID NO: 49594 - DNA, 1239 bp, Thermobifida fusca YX
  CDS (1)..(1239): transl_table=11
atggcggctcagcgcgcaccccgggtcgttctcggtgtaggcggggggatcgccgcctacaaggtctgcgaactgctgcgccgtctcaccgagtccgggcaccacgtccgggtggtccccacccgggacgcgctccgcttcgtgggcgagcccacctgggcggcgctctccggccagccggtcgccaccgaggtgtggcaggacgtgcacgaagtcccccacgtgcggctgggacagcaggcagacctcgtcttcgtggctcccgccaccgccgacctgctcgcccgcgccgcccacggcatggccgacgacctgctgaccaacacgctgctcaccgcgcgctgtccggtcgtgttcgctcccgccatgcacaccgagatgtgggagcacccggccacccagcagaatgtcgccacgctccgcgcgcgcggagcgatcgtgctggaaccggcgacgggacggctgaccggggccgacaccggcaaaggacggctgccggagcccgccgagctgttcgacgtggcccgcagggtgctcgcccgcggcaccctcgccgcggacctgaccgggcggcacgtggtggtctccgcgggcgggacgcgggaggccctcgacccggtccgcttcctggggaaccggtcgagcgggcggcaagggtacgcactggccgctaccgcggtggcgcgcggcgcccgcgtcaccctcgtctctgcgaacgtggcgcttcccgccccggcaggagccgacgtgattccggtcacctcggctgtggagatgcgcgaagcagtgctggctgcggctgccgacgccgacgcggtcgtcatggctgccgcggtcgccgacttccgccccgacacgaaggccgccgggaagatcaagaagaccgggggaccgccccccacgattaccctcgtagagaacccggacattctcgcggaactcagccggaaccgcccccgcaaggaccaggtcatcgtcggcttcgccgcggaaacggagaacgcggtcgcctacggccgcaataagctccagcgcaaggggtgcgacctgatcgtggtcaaccaggtcggagaggggatcgcgttcggcaccccggacaacgaggcggtggtcctcgaccgggacggccgagccgtggagatcccccgcggtcctaaggaaaaccttgccgaccgggtatgggatcttgtcgtggaacgtcttggctccgtgagcaaaacccctgatactgggcggtag

SEQ ID NO: 49595 - protein, 412 aa, Thermobifida fusca YX
MAAQRAPRVVLGVGGGIAAYKVCELLRRLTESGHHVRVVPTRDALRFVGEPTWAALSGQPVATEVWQDVHEVPHVRLGQQADLVFVAPATADLLARAAHGMADDLLTNTLLTARCPVVFAPAMHTEMWEHPATQQNVATLRARGAIVLEPATGRLTGADTGKGRLPEPAELFDVARRVLARGTLAADLTGRHVVVSAGGTREALDPVRFLGNRSSGRQGYALAATAVARGARVTLVSANVALPAPAGADVIPVTSAVEMREAVLAAAADADAVVMAAAVADFRPDTKAAGKIKKTGGPPPTITLVENPDILAELSRNRPRKDQVIVGFAAETENAVAYGRNKLQRKGCDLIVVNQVGEGIAFGTPDNEAVVLDRDGRAVEIPRGPKENLADRVWDLVVERLGSVSKTPDTGR

SEQ ID NO: 49596 - DNA, 1257 bp, Prochlorococcus marinus str. NATL2A
  CDS (1)..(1257): transl_table=11
atgattaattcgacttctttatctggaaaaaaaatattagttgctgttacggggagtattgcagctgttaaagctcctattttagttagccgcctaattaaagctggtgcagaggtcaagtgcgtcataacgcaaagcgccactaatttagttagtcccttatctttgtctactttaagcagaaataaatgttaccaagataaagatcaatgggctgactctcaaaccaagccattgcacattgctttggctgagtgggcagaactaattattgttgcaccattgagcgccacatccttatccaaatttactagtggaagtgctgatggacttttagccagcattcttttagctagtcaatctcaaatagttatggctgctgccatgaatacttcgatgtgggaaaatcaatcagtaaaaaagaattggaattacgttaaaactattgaccaagttattactctcgaacctagtgcaggacttttagcttgcgacagagttggtaatgggaaaatggtcaatttagatattattgaaatggcatctgaaagtgcatttattttccatgcagaaaataaatttctcactaaagatttaaaggacataaggtttctcatatcggctggtcccactgtcgaagctcttgatgccgcaagacaattaaccaatcgaagcagtggaaagatgggggttttgatagctcaagcagcaaagttaagaggtgcagaggtcgatttagttcatggcccggtaagcgttcaacaagatctgcttgagggactgaatacttatccagttagaagttcaaatgaaatgggagcaaaaattgatgatttacaaccatctgctcaggtcatcgttatggctgcagcagtatcagatttcaaaaataatagtcccagtgaaaaaaaaatctctaaagaattttttttaaagtccgttttcgatgacttagaaatgacatcagacctaatcaaaaatcaaacgaaaaaaaaattagaaaatcaaattttccttggttttgctgctgagacaggcagtgataatgaaatcattgaaaagggagagaagaaaagggtttcaaaaggttgtgaccttctcatggccaatcccattgatagagccgggcaaggatttgatgaaaacttcaacagtggttttttgttaggtccaaaaaaaatggtcaaaaacttatctttttcaacaaaacttgcaatatcccatcaacttttagatgaaattagaaatttaaaatag

SEQ ID NO: 49597 - protein, 418 aa, Prochlorococcus marinus str. NATL2A
MINSTSLSGKKILVAVTGSIAAVKAPILVSRLIKAGAEVKCVITQSATNLVSPLSLSTLSRNKCYQDKDQWADSQTKPLHIALAEWAELIIVAPLSATSLSKFTSGSADGLLASILLASQSQIVMAAAMNTSMWENQSVKKNWNYVKTIDQVITLEPSAGLLACDRVGNGKMVNLDIIEMASESAFIFHAENKFLTKDLKDIRFLISAGPTVEALDAARQLTNRSSGKMGVLIAQAAKLRGAEVDLVHGPVSVQQDLLEGLNTYPVRSSNEMGAKIDDLQPSAQVIVMAAAVSDFKNNSPSEKKISKEFFLKSVFDDLEMTSDLIKNQTKKKLENQIFLGFAAETGSDNEIIEKGEKKRVSKGCDLLMANPIDRAGQGFDENFNSGFLLGPKKMVKNLSFSTKLAISHQLLDEIRNLK

SEQ ID NO: 49598 - DNA, 1203 bp, Ralstonia eutropha JMP134
  CDS (1)..(1203): transl_table=11
atggatttgcgcggcaagcacatcgttctcggcctgaccggcggcatcgcctgctacaagtcggccgaactggtccgcctgctgaccaaggccggcgccacggttcaagtggcgatgaccgaggcggcgacccatttcatcaccccggtcacgatgcaggccctgtcgggccgcccggtgttcctgtcgcagtgggatgcgcgcgtcgacaacaacatggcgcacatcgatctctcgcgcgaggccgatgtcatcgtgatcgcgccagcatcgacggacttcctcgccaagctggccaacgggctctgcgacgatttgctgaccacgctgtgcattgcgcgcgactgtccgcttctcgtggcaccggccatgaaccgccagatgtgggccgctgcgccgacgcaacgcaatgcggcgcaactccgtgccgatggcgtcgtcatcctcggccccggcagcggcgatcaggcctgcggcgaagtcggcgacggccgcatgctggagcccgaagagctggtcgacgacatcatcgcgttcttccagcccaagccgctggcaggcaagcgcgttctgatcaccgcgggcccgacgttcgaagcgatcgacccggtacgcggcatcaccaacctgtcgtcgggcaagatgggcttttcgatcgcgcgcgccgcgcgcgaagccggtgccgacgtgcggctggtctccggcccgactggcctgcccacgccgcgcggcgtagtgcgcagcgatgtgcgcagcgcccagcagatgcatgactcggtgctggcccagttgcacgacgtcgacgtgttcatcgcggtcgccgccgtggccgactggcgccccgccgaggtcgcccagcagaagctcaagaaggtcaacgataccgacaccccgacgctgcagttcgtgcagaacccggatatcctcgccaccgtggcggcgcgcgccgatgcgccctactgcgtcggctttgccgccgagagcgagaaccttgagcaatacggcgagcagaagcgccagcgcaagggcgtgccgctgctggttggcaatatcggccaccataccttcgggctcgacgacaacgagatcgtgctgttcgatgccgcgggcatgacgcgactgccgcgcgccgacaagctgacgctggcgcggcagcttgtggccgccatcggtcagcgcctgccgggccgtgcccacccctga

SEQ ID NO: 49599 - protein, 400 aa, Ralstonia eutropha JMP134
MDLRGKHIVLGLTGGIACYKSAELVRLLTKAGATVQVAMTEAATHFITPVTMQALSGRPVFLSQWDARVDNNMAHIDLSREADVIVIAPASTDFLAKLANGLCDDLLTTLCIARDCPLLVAPAMNRQMWAAAPTQRNAAQLRADGVVILGPGSGDQACGEVGDGRMLEPEELVDDIIAFFQPKPLAGKRVLITAGPTFEAIDPVRGITNLSSGKMGFSIARAAREAGADVRLVSGPTGLPTPRGVVRSDVRSAQQMHDSVLAQLHDVDVFIAVAAVADWRPAEVAQQKLKKVNDTDTPTLQFVQNPDILATVAARADAPYCVGFAAESENLEQYGEQKRQRKGVPLLVGNIGHHTFGLDDNEIVLFDAAGMTRLPRADKLTLARQLVAAIGQRLPGRAHP

SEQ ID NO: 49600 - DNA, 1260 bp, Methanosarcina barkeri str. Fusaro
  CDS (1)..(1260): transl_table=11
atggataatgaagaaaagcaaaaggcccccgggtccagagccgaaaagttccaccccacactctggatccaggggcaaaagagctcttcccttgccggaaaaaccatagttcttggtgtcacgggaagtattggagcagtcagggtagttgaacttgcaagagagctaatcagaaacggggctgaggtccatgctgttatgacagaggctgccacgcgtattctgcaccctgatgccctgcactatgctaccggaaatccagcaattaccgaacttggaggcagggttgaacatgtagagttctgcgggctcaagggcagggccgaccttctccttatagcccctgcaactgcaaacaccattggtaaaatcgcatacggaatagatgatactcctgtaacttcatttgcaacaactgccctcggctctggtatacctttgatggttgttcctgcaatgcacgaatcaatgttcaggcacccggctgtagctgcgaatctgataagattgaaaagctggggaatatctattgtgggccccaggcttgaagaaggcgttgcaaaaattgcagcaaatgaagaaatcgtgctcgaggtagaaagagctctcggaaacaaaacccttgaaaaccgaaaaataattatcacgagcggctctactgccgaaagtctagaccccatccgaattatcacgaaccgggcttcaggtaaaaccggcagggagcttgctcttgaagcttatcgcaagggagctgatgtaaccctggttcatagagaccggcttgggtttgcaggaatcagggaggtttttgtagagagtgccgccgacatgactgatgctgtactctcggaactcgagaaagagtacgatgttcttatcagttcggcagcaattgcagattatacagccgaaccttctcccggaaagataaaatcgggaggagaactcaccttgagactgaagcccacccgcaaattgattaaggaatgccgtcaaaagtatcctgacctcgtaattataggtttcaaggctgaaaccggaattgaaaaagaagaactcctcagaagggcagcctcaacccttaaaacttcaaaattggacctgattgcagcaaatgatgtcgcaaaaggtggaatgggcactgaggagaatgaactgtacctgcttggacagaaaaaaaatgaaccaaggcacgtaagcgggaataaacgcaaacttgcagcctttatccttgaagaggcagccgatctgttaaagtaa

SEQ ID NO: 49601 - protein, 419 aa, Methanosarcina barkeri str. Fusaro
MDNEEKQKAPGSRAEKFHPTLWIQGQKSSSLAGKTIVLGVTGSIGAVRVVELARELIRNGAEVHAVMTEAATRILHPDALHYATGNPAITELGGRVEHVEFCGLKGRADLLLIAPATANTIGKIAYGIDDTPVTSFATTALGSGIPLMVVPAMHESMFRHPAVAANLIRLKSWGISIVGPRLEEGVAKIAANEEIVLEVERALGNKTLENRKIIITSGSTAESLDPIRIITNRASGKTGRELALEAYRKGADVTLVHRDRLGFAGIREVFVESAADMTDAVLSELEKEYDVLISSAAIADYTAEPSPGKIKSGGELTLRLKPTRKLIKECRQKYPDLVIIGFKAETGIEKEELLRRAASTLKTSKLDLIAANDVAKGGMGTEENELYLLGQKKNEPRHVSGNKRKLAAFILEEAADLLK

SEQ ID NO: 49602 - DNA, 1182 bp, Dehalococcoides sp. CBDB1
  CDS (1)..(1182): transl_table=11
atgaataaggaacagacggtagttctggggataaccggcagtatttctgcctataaagcgggggatattgcctccaagctccttgccgaagggtatacagtaaaagcggtgatgacagaagatgcctgccgctttatatcccccctgaccattcggactctcagccaccagccggtagtgaccagtatgtgggatataaactccgaatacagcgtggagcatgtctctctggcagaggaagcagacgttattctggtagctccggccaccgccaatattattgccaaactggcctgcgggctggcgaatgatatgctttcggctactattctggcctgtaaatcaccagtcataatagccccggctatgaatgacaatatgtactcaaaccccatcacccagcagaatatttcaaagctgaaggaatggggttttatatttgtagaaccggaatacggccgtctggcttcgggtaaaacggggcagggcaggctggcttcactggataaaatactgggttcagttactcaggtattggctaaaagcggccctttggcgggtaaaaagctggttatcagcgccggtggcacccgcgagccggttgatccggtgcgttatgtgggtaaccgcagttccggcaagatggggtatgctctggctgaagaagccgtcagacggggtgccagcgtcaggttggtttcgggtgttaccgacaggcctgtatcttttggagttgacataaaatacaccgaaactgcgctggagatgtttgctgcccttagagaagcagtcaaaggggcagatgctttgataatgacagccgcagttgcggattaccgtccggaaaaaccagccgtggacaagattaaaaagggggctgaggggcttgatttgcatctggtggccaacccggatatattagcttccctgcagggtgattttataaaggtggggtttgcggctgaaagccgtgaccttatgataaatgccgttaaaaaaatgactgacaaaaatctggatataatagcggctaacgatatcagccagccggatagcacctttggttcagatactacccgcctgactctcttctttaaaaacggccgggtagaggaattgccgcttttaaagaaacaggaagcggccgccagactccttgatgaaatttcaggtttactttaa

SEQ ID NO: 49603 - protein, 393 aa, Dehalococcoides sp. CBDB1
MNKEQTVVLGITGSISAYKAGDIASKLLAEGYTVKAVMTEDACRFISPLTIRTLSHQPVVTSMWDINSEYSVEHVSLAEEADVILVAPATANIIAKLACGLANDMLSATILACKSPVIIAPAMNDNMYSNPITQQNISKLKEWGFIFVEPEYGRLASGKTGQGRLASLDKILGSVTQVLAKSGPLAGKKLVISAGGTREPVDPVRYVGNRSSGKMGYALAEEAVRRGASVRLVSGVTDRPVSFGVDIKYTETALEMFAALREAVKGADALIMTAAVADYRPEKPAVDKIKKGAEGLDLHLVANPDILASLQGDFIKVGFAAESRDLMINAVKKMTDKNLDIIAANDISQPDSTFGSDTTRLTLFFKNGRVEELPLLKKQEAAARLLDEISGLL

SEQ ID NO: 49604 - DNA, 1176 bp, Thiobacillus denitrificans ATCC 25259
  CDS (1)..(1176): transl_table=11
gtgtcgctagcagacaaaaaaatcgttctcggggtgacgggcgggatcgccgcctacaaggctgcggaattgtgccggctgctcgtcaaggcgggtgccgacgtaaaggtggtgatgaccgacgccgcccagcgcttcgtcaccccgctgaccttccaggccctctccggcaagccggtgctgaccgccatgtgggacgcggcgggcgatggcatggcccacattcacctctcgcgcgacgccgatctcgtgctggtcgcgccggcttctgccgatttcctcgccaagctcgcgcacggtcgggccgacgacctgctgtcgacgctgtgtctcgcgcgcgcctgccgccttgccgtcgcgcccgcgatgaaccgcgaaatgtgggctgccgcgccgacccggcgcaacctcgaccaactgcgcgcggacggcgtctgcctgctcggccccgaggccggcgagcaggcctgcggcgaaaccggaccggggcgcatgctcgaaccggtggacatcgtcgccggcctgtcgccgctcttcactaccggagttctcgccggtcgccgcgtgctcatcacgggcgggccgacctacgaggcgatcgacccggtacgcggactgaccaaccgcagttcgggcaagatgggttacgcgctcgcgcgcgcggcacacgaggccggcgccgaggtctgtctggtctcgggaccgacctgcctgacgacgccggccggcgtacgccgcgtcgacgtgcaaagtgccaccgagatgcgcgaggccgtgctgcgcgaacttcccgccaacgtcttcatcgccgtcgcggccgtcgccgactaccgggtcgaggccgcggcgccgcagaagatcaagaaatccgggggcggcctcacgctcacgctcgtcgccaaccccgacatcctggccgaagtcgctgcccgtccggatgcgccgttttgtgtcggtttcgccgccgagaccgaacgcctcgccgagcacgccgaggccaagcgccggcagaaaaagctgccgctgctggtcggcaacctcgcgcccgacacgctcggggcggacgcggcagaactcgtgcttttcgacgacgacggcgcgcaccggcttccccgcgccgacaaactcgagcaggcgcgcgcgctcatccgccatatcgcaagtcacctcaactga

SEQ ID NO: 49605 - protein, 391 aa, Thiobacillus denitrificans ATCC 25259
MSLADKKIVLGVTGGIAAYKAAELCRLLVKAGADVKVVMTDAAQRFVTPLTFQALSGKPVLTAMWDAAGDGMAHIHLSRDADLVLVAPASADFLAKLAHGRADDLLSTLCLARACRLAVAPAMNREMWAAAPTRRNLDQLRADGVCLLGPEAGEQACGETGPGRMLEPVDIVAGLSPLFTTGVLAGRRVLITGGPTYEAIDPVRGLTNRSSGKMGYALARAAHEAGAEVCLVSGPTCLTTPAGVRRVDVQSATEMREAVLRELPANVFIAVAAVADYRVEAAAPQKIKKSGGGLTLTLVANPDILAEVAARPDAPFCVGFAAETERLAEHAEAKRRQKKLPLLVGNLAPDTLGADAAELVLFDDDGAHRLPRADKLEQARALIRHIASHLN

SEQ ID NO: 49606 - DNA, 1233 bp, Anabaena variabilis ATCC 29413
  CDS (1)..(1233): transl_table=11
atggctcatcctcaagcgcaagctgaaaatcgcaaaagtagggttcttgtggctgtgggtggcggtatcgctgcttataaggtttgtgaggtcgtttccagtttgtttaaatctggggtggaagtccgagtgattcttactcgttctgcacaggaatttattgcgcctctgactttatcaaccctctcccgtcaccctgcttatacagatgatgatttttggcaacctactcactctcggccgttgcatatcgagttgggtgagtgggctgatttgttggtgattgctcctctcactgctaatactttagctaaattaacttatgggctggctgataatttactcaccaatactgtgttagcttccacttgtcctgtgttgttagcgccggcaatgaatactgatatgtgggaacagttaacggtgcagcgtaattggcagcagttgttaacagatagcagatatcatggtattggtacagcatcgggattattggcgtgcgatcgcgtcggtgctggtagaatggcagaacctccagaaattttggcttatactcaatccctattacacactcaaggtcagcgagatttagctgggaagcgagttttgattagtgcgggaggtacaagggagtatcttgacccggtacggtttattggtaatccctccacgggtaaaatgggactggctttagcccaagcggctttacaccgtggggcaaaggtgacattggtacatggcgtggcgagttgggatgtacctttgggtgtgcaagcaattcccattatcaatgccgaagaaatgcagcaggtgatgttggaatatttacccaatgcagatatcatagttatgtctgcggctgtagctgatgtcaaacctcaagattatagtacagaaaaattacccaagcgatcgctcccccagtctttacctttagaagcagtacccgatattgttgctcaattaggcaaactcaaacaaccccatcagcgtttaattggttttgctgcccagacaggggatatagttacaccagctagggaaaaattatatagtaagaaattggatgcgatcgttgctaatcccatcgacaaagcagatagcggttttggtagtgataataatcaagccatcttcttagataatcaagatagacaagtgaccatcccaccttgttctaaattgcaactagctcaccatctcttcgattttgtcagcaacctgacactatga

SEQ ID NO: 49607 - protein, 410 aa, Anabaena variabilis ATCC 29413
MAHPQAQAENRKSRVLVAVGGGIAAYKVCEVVSSLFKSGVEVRVILTRSAQEFIAPLTLSTLSRHPAYTDDDFWQPTHSRPLHIELGEWADLLVIAPLTANTLAKLTYGLADNLLTNTVLASTCPVLLAPAMNTDMWEQLTVQRNWQQLLTDSRYHGIGTASGLLACDRVGAGRMAEPPEILAYTQSLLHTQGQRDLAGKRVLISAGGTREYLDPVRFIGNPSTGKMGLALAQAALHRGAKVTLVHGVASWDVPLGVQAIPIINAEEMQQVMLEYLPNADIIVMSAAVADVKPQDYSTEKLPKRSLPQSLPLEAVPDIVAQLGKLKQPHQRLIGFAAQTGDIVTPAREKLYSKKLDAIVANPIDKADSGFGSDNNQAIFLDNQDRQVTIPPCSKLQLAHHLFDFVSNLTL

SEQ ID NO: 49608 - DNA, 1224 bp, Pseudomonas fluorescens PfO-1
  CDS (1)..(1224): transl_table=11
atgaaaggcagacctatgcagcggctgtatcggaaacgcatcgttctgggcgtcggcggcggcattgctgcctacaagagcgccgaccttgtgcgccgcctgatcgaccagggcgccgaagtgcgcgtggtcatgacccgcggcggcagcgaattcatcaccccgctgaccatgcaggccctgtccggccacccggttcacctggacttgctcgacccggctgctgaagccgcaatgggccacatcgaactggccaaatgggccgatttggtgctgatcgccccggcgaccgccgacttgttggcccgtctggcccaaggcattgccaacgacctgctgaccacgctggtgctggccaccgatgctatcgtcgcggtcgctccggccatgaaccaggccatgtggcgcgacccggcgacccaggccaacctgcaactccttgaaagtcgcggcctgaagaccttcggcccggcctccggcagccaggcctgcggcgacgtcggcatgggccggatgatggaagccaccgatctggcgcagtgcgcggcagactgcttccagcgtcaggcactgaccggcaagcacgtggtgatcaccgccggcccgacccaggaaaacatcgacccggtgcgctacatcaccaaccacagctccgggaaaatgggctttgccctcgccgaagccgcggtggaagccggcgcccgtgtgaccctgatcagcggcccggtgcacctgccgacgccagatcgcgtcacgcgcatcgatgtggtcagcgcccgcgacatgctggcggcgtgcgaatcagccatcccgtgcgatgtgttcatcgcctcggccgcggtggcggactaccgtccggaagtcgttgccccgcaaaaactcaagaaagaccctacaagcggcgacggcttcgtcctgcaaatggtgcgtaacccggacatcctggccaccatagcgacccgtcccgaccgtccgttcagtgtgggcttcgccgccgagaccgaacacctgctcgactacgctgcacgcaagctgaaagacaagaatctcgatttgatcgtcgccaacgacgtggccaatccgagcatcggtttcaacagcgaagaaaacgcctgcagcgtgatcgaccgtgagcttcacgccaccgttttcgcccagaccagcaagagcaagatcgctcgccaactggtcacttttatcgccgaacgtctgaaccaggtttaa

SEQ ID NO: 49609 - protein, 407 aa, Pseudomonas fluorescens PfO-1
MKGRPMQRLYRKRIVLGVGGGIAAYKSADLVRRLIDQGAEVRVVMTRGGSEFITPLTMQALSGHPVHLDLLDPAAEAAMGHIELAKWADLVLIAPATADLLARLAQGIANDLLTTLVLATDAIVAVAPAMNQAMWRDPATQANLQLLESRGLKTFGPASGSQACGDVGMGRMMEATDLAQCAADCFQRQALTGKHVVITAGPTQENIDPVRYITNHSSGKMGFALAEAAVEAGARVTLISGPVHLPTPDRVTRIDVVSARDMLAACESAIPCDVFIASAAVADYRPEVVAPQKLKKDPTSGDGFVLQMVRNPDILATIATRPDRPFSVGFAAETEHLLDYAARKLKDKNLDLIVANDVANPSIGFNSEENACSVIDRELHATVFAQTSKSKIARQLVTFIAERLNQV

SEQ ID NO: 49610 - DNA, 1191 bp, Rhodobacter sphaeroides 2.4.1
  CDS (1)..(1191): transl_table=11
atgctggacggaaaacggatactcctcatcatcggcggcgggatcgcggcctacaagacgctggagctgatccgccgcctgcgcgagggcggggccgcggtgacgccggtcatgacccgggccgcggcggaattcgtgacgccgctttcggttgcggcactggcgggcgagcaggtgcatcgcgagctcttcgacctcacgcaggaggccgagatggggcatatcgccctgtcgcgggtggccgatctggtggtcgtggcgcctgcgacggccgatctgatggcccggatggcgcagggccgggcggacgatctggcctcgacgctgctgctggccaccgacacgcgcgtcctgatggcgccggcgatgaacgtgcggatgtggcagcatccggccacgcagcggaacctcgcgacgctcacgtgcgacggggtgctggcggtggggccgaacgagggcgacatggcctgcggcgaatacgggccggggcggatggccgagccgatggagatcctcgccgccatcgagacggcgctgggggcggggccgctcgccgggcggcgggtgctggtgacctcggggccgacccatgagccgatcgatccggtgcgctatatcgccaatcgctcgtcgggcgcgcaaggcacggccatcgccgcggccctgcgcgatctgggcgcgcgggtgaccttcgtcaccgggcccgcgaccgtgcccccgccgcccggggtcgagctcgtgcgggtcgagacggcgcgcgagatgatggcggccgtcgaggcggcgctgccggtggaggcggcgatcttcgccgcggcggtggcggactggcgcgtggagaatgcctccggctcgaagatgaagaaggggacgggcgggcccgcgctctccttcgccgagaaccccgacatcctcgccacggtcgcgcggagggccgagggccgcccgcggctcgtggtgggctttgccgccgagaccgacgaggtgctggcccatgccaccgccaagcgcgcccgcaagggctgcgactggatcgtggcgaacgatgtctcgcctgcgacgggcatcatgggcgggaccgagaatgcggtgcatctcatcaccgaaacgggcgtcgaggactggccgcggatggacaaggcggcggtggcagagcgactggccgcccggatcgccgagcggatcgcctga

SEQ ID NO: 49611 - protein, 396 aa, Rhodobacter sphaeroides 2.4.1
MLDGKRILLIIGGGIAAYKTLELIRRLREGGAAVTPVMTRAAAEFVTPLSVAALAGEQVHRELFDLTQEAEMGHIALSRVADLVVVAPATADLMARMAQGRADDLASTLLLATDTRVLMAPAMNVRMWQHPATQRNLATLTCDGVLAVGPNEGDMACGEYGPGRMAEPMEILAAIETALGAGPLAGRRVLVTSGPTHEPIDPVRYIANRSSGAQGTAIAAALRDLGARVTFVTGPATVPPPPGVELVRVETAREMMAAVEAALPVEAAIFAAAVADWRVENASGSKMKKGTGGPALSFAENPDILATVARRAEGRPRLVVGFAAETDEVLAHATAKRARKGCDWIVANDVSPATGIMGGTENAVHLITETGVEDWPRMDKAAVAERLAARIAERIA

SEQ ID NO: 49612 - DNA, 1200 bp, Carboxydothermus hydrogenoformans Z-2901
  CDS (1)..(1200): transl_table=11
gtgtctgagggcaaaataatcttgggaatttccggcggaattgccgcatataaaacggtagagttggcccgggagttaaccaagagagggtaccaagtttttcccgtattaactgcaggagcagaaaactttgttacttccctatcactggccactgttaccggtaataaagtattaaaggaaatttttactgaagcggatcccattttgcatatatcccttactgatgaagcggacttaattttaattgctccggcaaccgctaacattattgggaaaatagctaatggcattgccgatgatttgcttaccaccattgttgccgctaaaaactgtcctgttttaatttgcccggcaatgaatacccgtatgtatcaaaacagtattgtgcaggaaaatcttaaccgattagttgctcatggttttaatatcttggagcctgattccggcagtcttgcctgcggtcatgtggggccgggtcgacttcccgatattccggaaattatagctgaggttgaaaagttgttacaggagaaaattttaagaggcataaaagttttggtaacggcgggacctacccgggagtatattgatcctgtccggtttattactaataaaagttctgggaagatggggtttgctttagctgaagcttttagaaatctgggggctgaagtctatttagtttcgggtccggtaagtttagcaccgccaacgggtgttaacttcatttccgttgaaactaccgaggaaatggcccaaagggttgatgagttatttgaaaaagtgcagatcgtagttaaagcggctgcggtagcagattatacgcccaaagaaaagtttcaacaaaaactaccgaaaaaaaattctcttaccattgatttaattaaaaccaaagatattttaaaaagcttgggagagcggaaggtggatcagtttttggtgggtttcgctgcgcaaacccatgacctggaaaattacgcaacaaaaaagcttttagaaaaaaatcttgatatgattgcagctaatgatgtttccaggactgatatagggtttgattcggaagaaaatgaaattgtagtttacaccagggatggtgaaaaaatcttaattccccgggcatccaaaaaaattgttgcccaaaaacttgcccggttaataggggaaaagtacttaaataaacaaaacgaaaaaggttaa

SEQ ID NO: 49613 - protein, 399 aa, Carboxydothermus hydrogenoformans Z-2901
MSEGKIILGISGGIAAYKTVELARELTKRGYQVFPVLTAGAENFVTSLSLATVTGNKVLKEIFTEADPILHISLTDEADLILIAPATANIIGKIANGIADDLLTTIVAAKNCPVLICPAMNTRMYQNSIVQENLNRLVAHGFNILEPDSGSLACGHVGPGRLPDIPEIIAEVEKLLQEKILRGIKVLVTAGPTREYIDPVRFITNKSSGKMGFALAEAFRNLGAEVYLVSGPVSLAPPTGVNFISVETTEEMAQRVDELFEKVQIVVKAAAVADYTPKEKFQQKLPKKNSLTIDLIKTKDILKSLGERKVDQFLVGFAAQTHDLENYATKKLLEKNLDMIAANDVSRTDIGFDSEENEIVVYTRDGEKILIPRASKKIVAQKLARLIGEKYLNKQNEKG

SEQ ID NO: 49614 - DNA, 1212 bp, Burkholderia sp. 383
  CDS (1)..(1212): transl_table=11
ttggcacacgcagaactcgcaggaaaacacctcgttctcggcctgacgggcggcatcgcctgctacaagatcgccgagctcacccggctgctcacgaaggccggcgcgaccgtacaggtcgcgatgaccgaagccgctacccagttcatcacgcccgtcacgatgcaggcgctgtcgggccggcccgtctacacgagccagtgggacgcgcgcgtcgacaacaacatggcacacatcgacctgtcgcgcgaagccgatgcaatcgtgatcgcgcctgcgtcgacggacttcctcgcgaagctcgcgcacggattcgcggacgacctgctgtcgacgctgtgcgtcgcgcgcgattgcccgctgctcgtcgttcccgccatgaaccgccagatgtggcagaacccggccacgcagcgcaacgcagcgcaactgcgcgcggacggcgtgtcggtgctcggcccggattcgggcgcgcaggcctgcggcgaagtcggcgacggccgcatgctcgaacccgaggcgatctacgaagcgatcgtcgcgcacttcgcgccgaaggtgctcgcgcaccggcgcgtgctgatcacggccgggccgacgttcgaaccgctcgacccggtgcgcggcctcacgaaccgctcgagcggcaagatgggcttcgcgctcgcgcgtgccgcacagcaagccggcgccgacgtgcatctcgtcgcggggccggtggcgctcgacacgccgtggggcgtctaccggcaggacgtgcagacggcccagcagatgtacgacgcggtcatgcatgctgtcgccgatgccgatatcttcattgcggtcgctgcggtcgccgactggcgcgccgcccagccggccgagcacaagatgaagaagacggccgaccacaaggtgcccgcgctcgcgttcgtcgagaatcccgacatcctcgcgtcggtcgcggcgctgcccgatccgccgttctgcgtcgggttcgcggccgaaagcggcgacctcgacgtgcacggcgacgagaagcgcaagcgcaagaacgtaccgttgctcgtcggcaacctcggcccgctgacgttcggccgcgacgacaacgaagtcgtgctgttcgaagccgccggcctcacgcgcctgccgcgtgcgccgaaggacgaactcgcgcacacgctcgtcgcggaaatcgcgaagcgcctgcccgacaaccgcctgatctga

SEQ ID NO: 49615 - protein, 403 aa, Burkholderia sp. 383
MAHAELAGKHLVLGLTGGIACYKIAELTRLLTKAGATVQVAMTEAATQFITPVTMQALSGRPVYTSQWDARVDNNMAHIDLSREADAIVIAPASTDFLAKLAHGFADDLLSTLCVARDCPLLVVPAMNRQMWQNPATQRNAAQLRADGVSVLGPDSGAQACGEVGDGRMLEPEAIYEAIVAHFAPKVLAHRRVLITAGPTFEPLDPVRGLTNRSSGKMGFALARAAQQAGADVHLVAGPVALDTPWGVYRQDVQTAQQMYDAVMHAVADADIFIAVAAVADWRAAQPAEHKMKKTADHKVPALAFVENPDILASVAALPDPPFCVGFAAESGDLDVHGDEKRKRKNVPLLVGNLGPLTFGRDDNEVVLFEAAGLTRLPRAPKDELAHTLVAEIAKRLPDNRLI

SEQ ID NO: 49616 - DNA, 1287 bp, Synechococcus sp. CC9605
  CDS (1)..(1287): transl_table=11
atgaagactgagcaggcgtcgccactgtgcgggcggcgtgtgctggtggccgtcagcggcagcattgctgctgtgaagacgcctttgctcgtcagcgcgctgatcaaggccggtgctgaggtgcgctgtcttgttaccgccagtggcgcggccctggtgagccccgtcgccctcgccagcctcagtcgccatcgctgctacctcgaggccgaccagtgggaccccgctgcatcgaaaccgctgcacatcgagttggcggagtgggcggagttaatcatcgtcgcgcccttgagtgccagcagcctggcgcgctggagtcagggttctgctgatgggttgctcgccagcgttctgctggcaacggaagttccggtcatcgcagctccggcgatgaacacggccatgtggcgccaccccgcggtgcaaggcaactggctgcgcattcaatcctttcctgcagtggtcccgctcgtgccagcgtcaggcctgttggcctgtgatcgcgttggcgatgggcgcatggccgatccgctcttgattgagctggcagctgcgtctgtgttcagccgcggttcgggcactcccgacgtgacccttgattggtcggggctgtccgttcttgtttcagccggaccgacccaggagtcgattgatccggcccgtttcctgagcaaccgcagcagcggtcgcatgggagtgcttttggcgcaggcggcacgcttccgtggtgccagcgtgcatttggtgcatggcccgttggacctccccgacgcctggcttgagggcctcaaatgcactgcggtggagagtgccgccgaactcggttcagctctgctcttggctcagcccggatccgatgtgctcgtgatggctgctgccgttgctgaccttcggcgggatgggcctcttccaagcaagctgaccaagctggagcttcagcaggctctgacctccggttggactgaggtgcctgatctgctgtcaaacctgacccgccaacgccgttctgaacagctggtgctcggcttcacagcgctcacaggcagtgatgccgatttgctggagcgggctgaaagcaagcggctggcgaagggctgcgatctgatgatggtgaatcccgtggaccgtgatggtcagggtttcggagaccagccgaatggaggctggttgctcggagatggctggagacgagagctgcctgtgacggcaaagctctctctggcgcatcaattgcttgatgctctgatcgaggctcgggatcaggccgcggcgtcgatggagtcttga

SEQ ID NO: 49617 - protein, 428 aa, Synechococcus sp. CC9605
MKTEQASPLCGRRVLVAVSGSIAAVKTPLLVSALIKAGAEVRCLVTASGAALVSPVALASLSRHRCYLEADQWDPAASKPLHIELAEWAELIIVAPLSASSLARWSQGSADGLLASVLLATEVPVIAAPAMNTAMWRHPAVQGNWLRIQSFPAVVPLVPASGLLACDRVGDGRMADPLLIELAAASVFSRGSGTPDVTLDWSGLSVLVSAGPTQESIDPARFLSNRSSGRMGVLLAQAARFRGASVHLVHGPLDLPDAWLEGLKCTAVESAAELGSALLLAQPGSDVLVMAAAVADLRRDGPLPSKLTKLELQQALTSGWTEVPDLLSNLTRQRRSEQLVLGFTALTGSDADLLERAESKRLAKGCDLMMVNPVDRDGQGFGDQPNGGWLLGDGWRRELPVTAKLSLAHQLLDALIEARDQAAASMES

SEQ ID NO: 49618 - DNA, 1212 bp, Geobacter metallireducens GS-15
  CDS (1)..(1212): transl_table=11
atgctcaacggcaagcagatcgtcctcggcgtcaccggcggcatagccgtctacaaggcggtggagctcgtgcggctcctgaccaaggcgggggccgacgtccacgtcatcatgacccgctcggccacggaattcgtggggcccctcacctttcagaccctcaccgcgaatccggtccacacggagattttcaacctgatcgccgagcgggagatcggccacattgccctggccgaccgggccgatctcttcatcattgccccggccacggccaacgtcatcggcaagatcgcgggcggcatcgccgatgacatgctcaccaccaccgtcatggccaccagggcgtcggtcctcattgccccggccatgaatgtgaacatgtgcaccaatcccatctaccgtgaaaacgaggagaagctccgccgccacggctatcgcttcgtggctccggtcaaggggatgctcgcctgcggttgggagggggaggggaagctccaggacccggccattatcatggaggaggcggtctgcgccctcacgcggcaggacctggttggtgagcgggttctcgtgaccgctggcccgaccctggaggagatcgacccggtccgcttcatcagcaaccactcgtcgggaaagatgggatactccattgcccgggccgcccggcgccgcggggccgaggtggttctcgtggccggacccacctgcctcgacgacccctgggggatcgagacggtccatgtctgctccgccgccgagatgcgcgacgcggtcatggagcgggtcgcggcgagcaccgtcatcgtcaaggcggcggccgtggccgactactgcccaaagagtcgggctgcggggaagatcaagaagtcagccgatgccatggtgctggagctggagaaaaaccccgacatcctggcggaagtggggcgggtgaagggggatcgggttctggtgggatttgccgccgaaaccagcgatttggtggagaatgcccggaagaagctgaccggcaagaacctggacctggtggtggccaacgacatcggccagccaggggccggtttcaacgtggataccaacatcgccaagctcctccaccgggatgggcgtgtcgaggaactccccctcatggggaaggatgagatggcgacgattatcctcgaccgggcggccgggctgcggaagcagggaatgagaggagaagagtag

SEQ ID NO: 49619 - protein, 403 aa, Geobacter metallireducens GS-15
MLNGKQIVLGVTGGIAVYKAVELVRLLTKAGADVHVIMTRSATEFVGPLTFQTLTANPVHTEIFNLIAEREIGHIALADRADLFIIAPATANVIGKIAGGIADDMLTTTVMATRASVLIAPAMNVNMCTNPIYRENEEKLRRHGYRFVAPVKGMLACGWEGEGKLQDPAIIMEEAVCALTRQDLVGERVLVTAGPTLEEIDPVRFISNHSSGKMGYSIARAARRRGAEVVLVAGPTCLDDPWGIETVHVCSAAEMRDAVMERVAASTVIVKAAAVADYCPKSRAAGKIKKSADAMVLELEKNPDILAEVGRVKGDRVLVGFAAETSDLVENARKKLTGKNLDLVVANDIGQPGAGFNVDTNIAKLLHRDGRVEELPLMGKDEMATIILDRAAGLRKQGMRGEE

SEQ ID NO: 49620 - DNA, 1227 bp, Desulfovibrio desulfuricans G20
  CDS (1)..(1227): transl_table=11
gtgagccctgcatccgtcaatgcgcatctggcttttacaggctatctcggcagacgcctgcacatgggcgtgtgcggttccgtagccgcctacaaggcgcttgatctgctgcgccggtttaaagataccggcgcggataccggtgtgaccctgacggacagcgcgtgccagttcatcacgccgctcagcttcgaagcgctgggggcttctcccgtatataccggcatgtaccccgtgggtgacgatgttttcggacatctcacccccggggatgcctgccacgcatttctcatcgctcccgccacggcggccacgctggcgcgtctggcctgcggtctggcagacgacatgctttcgtgccaggctctggcctttgaaggaccgctggtcattgcccccgccatgaacccgcgcatgtggaacaatccggcaacgcaggaaaactgggccagactgaaacagcgcggccacgtggccgtggaacccggctgcgggcgcatggcgtgcatggatgtggggcagggcaggctggcagaccttgataccatttttctgtatacgctgcgggccatgacaccgcaggacatgaccggacagcaggtcatggtcactctgggccccacccgcgaacagtgggacggcgtacgtttctggtccaatccctcttcgggggtcatgggtgcctgttttgccgtggccgcatggctgcggggcgcacaggtgcatgccgtctgcggaccggcaacaccgtggctgcccgcagacatcacacggcacgatgtaaccggtgcggcgcagatgtatcaggcagcagccgacctgtggccccgcatggacaccggtatattcactgccgcagtcgccgacttcagtccggagcctttcggtgctgaaaaattcaaaaaatccggcacggaaacgctgtccatccggttcactcccaacaccgacattctgaaaacgctgggcaccgccaagcgcgaaaaccagcgcattgtcgggtttgccgcagaaacgggcaacctgcatgaaaacgccgtcggcaagctgcggcgcaaaaacgctgacatgatagtcggcaatattgtcggcacaccggaaagcggttttcaatcggccaccaacaaagtttttgtggctgacaaaacaggccggaccgaagaatggcccgtacagcccaaaaccgaagtggcatggaggattctggattggctgttgcaaatgtag

SEQ ID NO: 49621 - protein, 408 aa, Desulfovibrio desulfuricans G20
MSPASVNAHLAFTGYLGRRLHMGVCGSVAAYKALDLLRRFKDTGADTGVTLTDSACQFITPLSFEALGASPVYTGMYPVGDDVFGHLTPGDACHAFLIAPATAATLARLACGLADDMLSCQALAFEGPLVIAPAMNPRMWNNPATQENWARLKQRGHVAVEPGCGRMACMDVGQGRLADLDTIFLYTLRAMTPQDMTGQQVMVTLGPTREQWDGVRFWSNPSSGVMGACFAVAAWLRGAQVHAVCGPATPWLPADITRHDVTGAAQMYQAAADLWPRMDTGIFTAAVADFSPEPFGAEKFKKSGTETLSIRFTPNTDILKTLGTAKRENQRIVGFAAETGNLHENAVGKLRRKNADMIVGNIVGTPESGFQSATNKVFVADKTGRTEEWPVQPKTEVAWRILDWLLQM

SEQ ID NO: 49622 - DNA, 1257 bp, Prochlorococcus marinus str. MIT 9312
  CDS (1)..(1257): transl_table=11
atgaaaactaaaagtacagactccaaaataaaggttcttttattaataacggggagtattgcagctgtaagaattccattattagttagccaattagcaaaagaaaattatgaaataaggtgcgttttatctaaaaatgcagaaaaattaataaaaccgctttctctttctatcttaagtagaaacccttgcattttagaaaatgatcaatggttaaatagtcaatcaacacctcttcatatagaactaaccaaatgggctgatattttaatcattgcccctttaacagctacaacattatcaaaatgggtaactggaaatgcagaaggattgattccaagcatattaattgcaaatattaagccaattgttgttgcaccagcaatgaatacacaaatgtggctaaataaagctgtccaagaaaattatgagaatttacagaattacgaaaatgttttgtctttgcatccaagtgaaggtctcttagcatgcgatgctattggcataggtaagatacctccaaatgatctaattcaattagctcttgaatttataacttcacataatcaaaatatttatcgcaaagatttactaaacaaagaaattttaataactggaggttgtacctcagaaaaaattgacgcagcaagaaatattactaacaaaagttctggagctatgggcttacttctttctcaagtagcaaggttcagaggagcacaagtaaaatatatccatgggcctctgaaaattgataaagatcttactgatggaataaaaagatatgaaatcgagacaagtgttgatttaattaggtcacttcaaaatgaaatttcaaattgtgattattttttcatgaatgcagcagtatctgatttcaagataacctctgatacttctgctaaaattcccaaacataaaattaatgatcatttgaataaaaattttgagctagtgccagatattttaaaaacaataagtgaatcaaaaaaagataaccaagtttttgtaggcttttgcgcttttacaggatctattggagaagcaagaacaataattaaaaaaaagattattcaaaaaggttgcgattatctattcgcaaatccaattgatcttgaagggcaaggatttggctttttggcgcaaaatgaaggttggctattcgatacaaaaaatatggaacatcatatacataaaacatcaaaaattgatttagcaaataaattaatcactcaaattatttcagtaaaaaattaa

SEQ ID NO: 49623 - protein, 418 aa, Prochlorococcus marinus str. MIT 9312
MKTKSTDSKIKVLLLITGSIAAVRIPLLVSQLAKENYEIRCVLSKNAEKLIKPLSLSILSRNPCILENDQWLNSQSTPLHIELTKWADILIIAPLTATTLSKWVTGNAEGLIPSILIANIKPIVVAPAMNTQMWLNKAVQENYENLQNYENVLSLHPSEGLLACDAIGIGKIPPNDLIQLALEFITSHNQNIYRKDLLNKEILITGGCTSEKIDAARNITNKSSGAMGLLLSQVARFRGAQVKYIHGPLKIDKDLTDGIKRYEIETSVDLIRSLQNEISNCDYFFMNAAVSDFKITSDTSAKIPKHKINDHLNKNFELVPDILKTISESKKDNQVFVGFCAFTGSIGEARTIIKKKIIQKGCDYLFANPIDLEGQGFGFLAQNEGWLFDTKNMEHHIHKTSKIDLANKLITQIISVKN

SEQ ID NO: 49624 - DNA, 1227 bp, Synechococcus elongatus PCC 7942
  CDS (1)..(1227): transl_table=11
gtgactgcgatcgcctcttttgccggtcgtcggattctgattggtgtctgcggcggcattgcggtctataaactctgcgaagtggtctcccagttggtgcaggccggtgcagaggtgcgcgtcattctgacagcgggggcggagcggtttattgctcccttcagtttcagtactctctgtcgccatcccgcctatacggacgctgatttttggtcagctcgtcatggtcgtccgctccatatcgagttgggggaatgggcggaagtgatgctgatcgccccgctgactgccaataccctcgcgaagttgcgctatgggcaggccgataatctactgaccaatacagtcctcgcgacgactgccccactcttgctcgcccccgccatgaatacggatatgtggctgcagcccatcgtccaagaaaactggcaggttctgcgatcgcgccctcagaccttgggcctagaaccggggagcggtcgtttagcttgcgatcgcgtcggcagtggtcgcttgccagaaccgatcgcgattctggcagggttggaatcgttgctctggacccagggacaagccgatctgcaagggctgaagattctggtcaatgcgggtggcacccgcgagtttctcgatccggtgcgctttatcggcaatcccagtagcgggcggatgggcgtgatgctagcgatcgcggcccaacatcgcggtgctcaagtccagctgattcacgcgcctttgaccaacatcgagccggggctgttgacgagcctcgatcgccaagcggtagtcagtaccgaagaactggctgaagcgatgattgccgcagccccgattgcagattgggttttactcgcagcagccgtgggcgatgtccggccggaactgcgatcccaccagaagctgagtaaggctgaactaccagcctcactgccactacaactgttacccgacattgcggcgcagctcagtcagcagcggtatccaaaccagaagttgatcgggtttgctgcccaaactggcgagattttggaacccgcgatcgcgaaattgcagcgcaagggactcgacgccatcatcgccaacgcgatcgatcagcccggtcaaggctttggcagtgccactaatgccgcgatcgcgctgcgtcctgatggctcatcccagcccttggggttccgcagcaaacttagcttggctcatgccatcttagattttgttaaaaatctttaa

SEQ ID NO: 49625 - protein, 408 aa, Synechococcus elongatus PCC 7942
MTAIASFAGRRILIGVCGGIAVYKLCEVVSQLVQAGAEVRVILTAGAERFIAPFSFSTLCRHPAYTDADFWSARHGRPLHIELGEWAEVMLIAPLTANTLAKLRYGQADNLLTNTVLATTAPLLLAPAMNTDMWLQPIVQENWQVLRSRPQTLGLEPGSGRLACDRVGSGRLPEPIAILAGLESLLWTQGQADLQGLKILVNAGGTREFLDPVRFIGNPSSGRMGVMLAIAAQHRGAQVQLIHAPLTNIEPGLLTSLDRQAVVSTEELAEAMIAAAPIADWVLLAAAVGDVRPELRSHQKLSKAELPASLPLQLLPDIAAQLSQQRYPNQKLIGFAAQTGEILEPAIAKLQRKGLDAIIANAIDQPGQGFGSATNAAIALRPDGSSQPLGFRSKLSLAHAILDFVKNL

SEQ ID NO: 49626 - DNA, 1275 bp, Rhodospirillum rubrum ATCC 11170
  CDS (1)..(1275): transl_table=11
gtgaacgacaagcgcatcttgttgatcgtggcgggcggcatcgccgcctataagtcgctcgacctcatccgccgcctgcgcgatcaaggggcccgggtccgctgcgtcctgacccggggtggcagccagttcgtcacgcagctgtcgcttgcggcgctgtcgggcgagccggtctatcaggatctgttctcgctgactgatgaaaccgagatgggccatatccgcctgtcgcgcgaggccgatatcgtcgtggttgccccggcgaccgccgatctgctggccaagatggccgggggccatgccgatgatctggccagcaccaccttgctcgccaccgacaagccggttctcgtcgccccgacgatgaacctgttcatgtgggcccatccggcgaccagggccaatatggccctgcttgaaagccgtggcatccatcgcgtcggccccggatcgggcgatatggcttgcggggaacagggcgaggggcggatggccgaggtgcccgagatcctcgccgccatcaaacgggtgcttggcctgtcgccggccgcgcccggccccttaagcggccgccacgccctggtgaccagcggccccacccacgaaccgatcgatccggtgcgctatatcgccaaccgttcctcgggccatcagggccatgccatcgccggggccctggcccggcttggcgcccgcgtcaccctggtcagcggcccgacagccctggccgatccgccgggaacgacggtggtgcgcgtcaccacggcgcgcgagatgctggccgcctgccagcaggccctgcccgccgatatcgccgtctgcgccgccgccgtcgccgattggacggtgacccatccggcgacccataaaaccaagaaggccgccggcgcgccgccgccggtcctcgccctcagccccaatcccgatatcctggccaacctcgccgccgccggaccccagcgccccgccctggtcgtcggcttcgccgccgagaccgaggaggtcgtcgcccaggcctcggccaagcgcctgcgcaagggctgcgactggatcatcgccaatgacgtgtccgaggctggcaatggcggtcgcggcaccgtcttcgccagccccgacaacacggtgcatgtgatcaccgccgaaggcgtcgaagactggccgaccctgtccaaggacgtggtcgcccaccgcttggccgggcgcatcgccgcgacgctgaccgaccgggccgccgccccctgcccctcccccgcgcagaagggatctttggcatga

SEQ ID NO: 49627 - protein, 424 aa, Rhodospirillum rubrum ATCC 11170
MNDKRILLIVAGGIAAYKSLDLIRRLRDQGARVRCVLTRGGSQFVTQLSLAALSGEPVYQDLFSLTDETEMGHIRLSREADIVVVAPATADLLAKMAGGHADDLASTTLLATDKPVLVAPTMNLFMWAHPATRANMALLESRGIHRVGPGSGDMACGEQGEGRMAEVPEILAAIKRVLGLSPAAPGPLSGRHALVTSGPTHEPIDPVRYIANRSSGHQGHAIAGALARLGARVTLVSGPTALADPPGTTVVRVTTAREMLAACQQALPADIAVCAAAVADWTVTHPATHKTKKAAGAPPPVLALSPNPDILANLAAAGPQRPALVVGFAAETEEVVAQASAKRLRKGCDWIIANDVSEAGNGGRGTVFASPDNTVHVITAEGVEDWPTLSKDVVAHRLAGRIAATLTDRAAAPCPSPAQKGSLA

SEQ ID NO: 49628 - DNA, 1233 bp, Moorella thermoacetica ATCC 39073
  CDS (1)..(1233): transl_table=11
gtgagggttctcgagggtaaaaacatcatcttaggggtgagcggtggtatcgccgcctataagggggcggaactctgccgcctcctcgtccaggaaggggccaccgtgagggtgattatgacccgggcggcccgggagtttatcacccccctgaccttcagcaccctgacggggcacccggccctgactgaaactttcggggagggaagcgggggtcccctcacccacatcgacctggcccggggggccgacctcttcctggtggccccggctacggccaatatcctgggtaagctggccgccggtatagccgacgacctgctgaccaccaccgccctggcggtagactgccccaccctggtggccccggctatgaacgtccatatgttcgccaaggctgccgtccaggagaacctggcgacgctgaagagacggggctggggcatcgttgagccggaggagggcttcctggcctgcggtgccacgggcaagggccgcctggcagccttggagcggatcgtcgccgcctgccgccgcgccctggctccccaggatttccgggatcgggtggtgctggtgacggccgggggcacccgggaacccctggacccggtgcgatacattggcaactatagttccggcaagatgggacacgccctggcccgggcggcctgggagcggggcgcccgggtgaccctcatcaccgccagccagttgccgccgccgcccggggtgacagcggtcccggtccggacggcggccgagatgctcgccagtctaaaggagcgcttcaatggggccgatgtggttatcatggccgcggctgttgccgatttccggcctgggagagtagcagaccggaagataaaaaaagaaaccctggaggaattaaccatcagccttgagccgacggaagacatcctggccgccctggggcgggtacgggaacagcaactgctcgtcggctttgctgccgaaacggaggacctcctggccaacgccaggcataaactggcggccaagggcctcgacctggtggtagccaacgacgtcacccggcccggggcgggattcggcagcgatacgaatattgtcaccctgctttacccaggcggccgttacgaagaattaccccggctgcccaaattagaagcggcctaccgcatcctggatgccgtcgccgccctcccgcgcttttgcaggggagagagagggccggaaagggaggactaa

SEQ ID NO: 49629 - protein, 410 aa, Moorella thermoacetica ATCC 39073
MRVLEGKNIILGVSGGIAAYKGAELCRLLVQEGATVRVIMTRAAREFITPLTFSTLTGHPALTETFGEGSGGPLTHIDLARGADLFLVAPATANILGKLAAGIADDLLTTTALAVDCPTLVAPAMNVHMFAKAAVQENLATLKRRGWGIVEPEEGFLACGATGKGRLAALERIVAACRRALAPQDFRDRVVLVTAGGTREPLDPVRYIGNYSSGKMGHALARAAWERGARVTLITASQLPPPPGVTAVPVRTAAEMLASLKERFNGADVVIMAAAVADFRPGRVADRKIKKETLEELTISLEPTEDILAALGRVREQQLLVGFAAETEDLLANARHKLAAKGLDLVVANDVTRPGAGFGSDTNIVTLLYPGGRYEELPRLPKLEAAYRILDAVAALPRFCRGERGPERED

SEQ ID NO: 49630 - DNA, 1212 bp, Burkholderia thailandensis E264
  CDS (1)..(1212): transl_table=11
ttggcacacgcagaactcgcaggaaaacacctcgtcctcggcctcacgggcggcatcgcctgctacaagatcgccgagctcacgcgcctcttgacgaaggcgggcgcgaccgtgcagatcgtgatgaccgacgccgcgacgcagttcatcacccccgtcacgatgcaggcgctgtccggccgccccgtctacacgagccagtgggacgcgcggatgccgaacaacatggcgcacatcgatctgtcgcgcgaagccgacgcgatcgtgatcgcgcccgcgtcgaccgatttcctcgcgaagctctcgcacggcttcgccgacgatctgctgtcgacgctgtgcatcgcgcgcgactgcccgctcctcgtcgtgccggcgatgaaccgccagatgtggcagaacccggcgacgcagcgcaacgtcgcgcaactgcgccgcgacggcgtcgcggtgctcggccccgattcgggcgcgcaggcgtgcggcgagatcggcgacggccggatgctcgagccggaagcgatctacgaagcgatcgtcacgcatttccagccgaaggtgttcgcgcatcgccgcgtgctgatcacggccggccccaccttcgagccgctcgatccggttcgcggcctgacgaaccgctcgagcggcaagatgggcttcgcgctcgcgcgcgccgcgcagcaggcgggcgccgacgtgcatctcgtcgccggccccgttcacctgccgacgccgtggggcgtgtaccgcgaggacgtgcggaccgcgcagcagatgtacgacgcggtgatgaacgcggtgccggacgcggacgtgttcatcgcggtcgccgcggtcgccgactggcgcgccgcgcagcccgccgagcacaagatcaagaagacggccgaccacaagatgccggcgctcacgttcgtcgagaacccggacattctcgcgagcgtcgccgcgctgcccgatgcgccctactgcgtcggcttcgcggcggaaagcggcgatctcgacgtgcacggcgaggaaaagcgcgtgcgcaagaaggtgccgctgctgatcggcaacctcgggccgctcacgttcgggctcgacgacaacgaagtcgtgctgttcgaagcgtgcggcgcgacgcggctgccgcgcgccgacaagatgacgctcgcgcacgcgctcgtcgccgagatcgcaaagcgcctgcccgacgcgagcctcatctga

SEQ ID NO: 49631 - protein, 403 aa, Burkholderia thailandensis E264
MAHAELAGKHLVLGLTGGIACYKIAELTRLLTKAGATVQIVMTDAATQFITPVTMQALSGRPVYTSQWDARMPNNMAHIDLSREADAIVIAPASTDFLAKLSHGFADDLLSTLCIARDCPLLVVPAMNRQMWQNPATQRNVAQLRRDGVAVLGPDSGAQACGEIGDGRMLEPEAIYEAIVTHFQPKVFAHRRVLITAGPTFEPLDPVRGLTNRSSGKMGFALARAAQQAGADVHLVAGPVHLPTPWGVYREDVRTAQQMYDAVMNAVPDADVFIAVAAVADWRAAQPAEHKIKKTADHKMPALTFVENPDILASVAALPDAPYCVGFAAESGDLDVHGEEKRVRKKVPLLIGNLGPLTFGLDDNEVVLFEACGATRLPRADKMTLAHALVAEIAKRLPDASLI

SEQ ID NO: 49632 - DNA, 1272 bp, Syntrophus aciditrophicus SB
  CDS (1)..(1272): transl_table=11
atgcttaaggacaaaaaaatagttctgggaataacagggggtatagcggcgtacaaggcggcggaactgactcgacaattgattaaaaacggagcggaagtgaaagtgatcatgactcgtcatgccacggagttcattaccccgttgacgatgcagaccctttcgtgtggtcctgtatttcttgatatgtttgcttgcatcaaagacttcgagattgcccatatcgccctcgcggattacgcggaccttctggtcatcgttcccgcgacggccaatgtgattgggaagattgcctcgggcatcgcggatgatctgcttacaacaacggtcatggctgcaaaagcgcccgttctgatctgtccagcaatgaatgtcaacatgttcgaaaattccatcgttcaggaaaaaatcaaggatctgggctctcatggatttcatattctatctccggcagcgggtgaactggcctgcgggacagagggcaaggggcggcttcccgaggtgcctgacattatggaagaaatagaatatctgttaaccgaaaaggacctgatgggggaacatatccttgtaacggcggggccgacaagggaacctttcgatcccgttcgattcattaccaattattcatcaggaaaaatgggatatgccatcgcgacggttgcgcgccggaggggggcgaccgtgaccctggtcagcggcccgacccatttgtctgttccttcaggtgttgaatttctatcagtttcgacagcccgggaaatgagggatgccgtacttgcgaatctgccggaagcgacggtggtgatcaaagccgccgcggtggcggattacagaccggctgtccgggagccacagaaaatcaagaaaaaggacgacgatctgacggtaaaactggaaagaaatcctgatatcattcaggagatcggaaagaagaagcagaaccgcattcttgtcggtttcgctatggagtctgaacatcttgtagaaaatgcaattgcaaaaatggttggaaaaaatatggatttcatcgttgccaacgacctgacaaagcagggcgccggttttcagggcgacaccaatatcatcagtatcctggaccgcgatggagaatttcaggaactgccgctcatggacaagatcgaggcggccgcgatcatcctggacaaggtgaggaagatccggaacagtcagcttaacaatcccgaaaaagagcgggatcctttttctgcttcgtggaagaccgccggcgataaagaccacctccaatga

SEQ ID NO: 49633 - protein, 423 aa, Syntrophus aciditrophicus SB
MLKDKKIVLGITGGIAAYKAAELTRQLIKNGAEVKVIMTRHATEFITPLTMQTLSCGPVFLDMFACIKDFEIAHIALADYADLLVIVPATANVIGKIASGIADDLLTTTVMAAKAPVLICPAMNVNMFENSIVQEKIKDLGSHGFHILSPAAGELACGTEGKGRLPEVPDIMEEIEYLLTEKDLMGEHILVTAGPTREPFDPVRFITNYSSGKMGYAIATVARRRGATVTLVSGPTHLSVPSGVEFLSVSTAREMRDAVLANLPEATVVIKAAAVADYRPAVREPQKIKKKDDDLTVKLERNPDIIQEIGKKKQNRILVGFAMESEHLVENAIAKMVGKNMDFIVANDLTKQGAGFQGDTNIISILDRDGEFQELPLMDKIEAAAIILDKVRKIRNSQLNNPEKERDPFSASWKTAGDKDHLQ

SEQ ID NO: 49634 - DNA, 1311 bp, Frankia sp. CcI3
  CDS (1)..(1311): transl_table=11
atgcccgatgcggagcgctccggcaccgggttgtccgaccctcggcgtccccgggtcgtgctcggtgtggcgggcggcatcgccgcctacaaggcggtggaggtgctccgccggttcaccgagtccggccacgaggtccgggtggtgcccacgccgtcggcgctgcggttcgtcggcgcgacgacttgggctgcgctgtcgggaaacccggtcaccacggacgtgtgggacgatgcggacgaggtcgcccatgtccggatcggccgcgaggccgacctcgtcctcgtcgcgccagccaccgcggacctgatggcccgcgcggccgccgggcgcgccgacgacctgctcaccggcaccctgctgacggcgacctgcccggtcgtctacgcgccggcgatgcacaccgagatgtggcagcacccggccacccgggcgaacgtggcgaccctgcgggcgcggggagcggtggtggttgagccggcggtgggccggctgaccggcgccgactcgggtccgggtcgcctgccagagccagcggagatcgccgcgctcggcatggcggtgctggcccggggtgcggccggggtgcggcccgatcttgccggccggcatgtcctggtcacggccggcggcacccgggagtacctcgaccccgtccggttcctcggcaacgcctcgagcggccgtcaggggtacgccgtggccagggctgccgtggtgcggggagcctccgtcacggtggtggcggcgaacgtcgcgctgcccgaggtcgccggcgcccgcacgatcccggtcacctccgcggcgcagctgcgcgatcgggtccacgaggtcgcgccctcggcggacgtggtcgtcatggcggccgcggtcgctgacttccgccccggggcgccgcaggcctacaagatcaagaaggagtccgcggccccgggctccatcccgctcgtggcgaatcccgacgtgttggccgagctgctggcgaaccgccggccccgtcaggtcctcgtcggtttcgcggccgagaccggcggtcccggcggtggggtactcgaccacgcccgggccaaactggcgcgcaagccggtcgacctgctcgtggtcaacgaggtcggcgccggcctcggattcgaggtggaacacaacgccgccgtggtactggacccccgcggtggcgagacggcgatcgagcacacgagcaaggacctcctcgcgcatcggatcctcgacctcgtggtcggcctcacggccgatcggaccgatggaacgcccgcggaggcgctacgtgtacccctcgcggcacctcggtaa

SEQ ID NO: 49635 - protein, 436 aa, Frankia sp. CcI3
MPDAERSGTGLSDPRRPRVVLGVAGGIAAYKAVEVLRRFTESGHEVRVVPTPSALRFVGATTWAALSGNPVTTDVWDDADEVAHVRIGREADLVLVAPATADLMARAAAGRADDLLTGTLLTATCPVVYAPAMHTEMWQHPATRANVATLRARGAVVVEPAVGRLTGADSGPGRLPEPAEIAALGMAVLARGAAGVRPDLAGRHVLVTAGGTREYLDPVRFLGNASSGRQGYAVARAAVVRGASVTVVAANVALPEVAGARTIPVTSAAQLRDRVHEVAPSADVVVMAAAVADFRPGAPQAYKIKKESAAPGSIPLVANPDVLAELLANRRPRQVLVGFAAETGGPGGGVLDHARAKLARKPVDLLVVNEVGAGLGFEVEHNAAVVLDPRGGETAIEHTSKDLLAHRILDLVVGLTADRTDGTPAEALRVPLAAPR

SEQ ID NO: 49636 - DNA, 1188 bp, Novosphingobium aromaticivorans DSM 12444
  CDS (1)..(1188): transl_table=11
atgaagggaaagcgcatcctgctcatcgtcggcggcggcatcgcggcctacaaggcctgcgaactcgtgcgcctgatccgcaaggagggcgccgaggtcacttgcgtcctgaccgagggcggcgcccatttcgtcaccgcgatgacgctggcggccctctccgaaaaccccgtccacaccacgctctgggacctcaagaacgaggtcgaaatgggccatatccagctctcgcgccaggccgatctcgtcgtcgtctgtcccgccacggccgacctcatggcccgcatggctgccggcatcgccgacgatctggcgacaacgctgctcctcgccaccgacaagcccgtgctggcagtgcctgcgatgaacgtgcgcatgtggcagcaccccgcgacgcgccgcaacgtcgccaccctgcgcggcgatggcatcgccgtgatggagccgggcgaaggcgcgatggcctgtggcgagttcggaccgggccgtttgccggaaccggctgacatccttgccgaaatcgcccgcatgtcgggaacggccgggcgcctgtccggcaggcacgtcctcgtcaccgccggccccacccacgaaccgatagacccggtacgctacatcgccaaccgctccagcggcaagcagggcttcgccatcgccgccgccgccgcgcgcgccggggccagggtcacgctcgtcgccggcccggtgaatctccccacgccccaaggcgttacgcgcatcgacgtggaaacggcgcgacagatggcggcggcggtcgatgccgcgctccccgccgacgtcgcgatcatggtcgcggccgttgccgactggcgcagcgccggcgaggccgcgcagaaaatcaagaaggacggatcgggcgcggtcccgccgctccagctcgtcgagaatcccgacattctcgccacgctctgcaagtccggccgccgccccccgctggtcgtcggcttcgcggccgagaccaacgacgttctcgaccatgcccgcgccaagctggcccgcaagggcgcagactggatcgtcgccaacgatgtcgccactcacgcaatgggcggtgaaatcaacggcttgcacatcgtcagcagcagcggcgtcgaaagcctcccggaaatgcccaaggacgcggcggcggccgcgctcatcgaaagaattgccgatgtcctctcctga

SEQ ID NO: 49637 - protein, 395 aa, Novosphingobium aromaticivorans DSM 12444
MKGKRILLIVGGGIAAYKACELVRLIRKEGAEVTCVLTEGGAHFVTAMTLAALSENPVHTTLWDLKNEVEMGHIQLSRQADLVVVCPATADLMARMAAGIADDLATTLLLATDKPVLAVPAMNVRMWQHPATRRNVATLRGDGIAVMEPGEGAMACGEFGPGRLPEPADILAEIARMSGTAGRLSGRHVLVTAGPTHEPIDPVRYIANRSSGKQGFAIAAAAARAGARVTLVAGPVNLPTPQGVTRIDVETARQMAAAVDAALPADVAIMVAAVADWRSAGEAAQKIKKDGSGAVPPLQLVENPDILATLCKSGRRPPLVVGFAAETNDVLDHARAKLARKGADWIVANDVATHAMGGEINGLHIVSSSGVESLPEMPKDAAAAALIERIADVLS

SEQ ID NO: 49638 - DNA, 1176 bp, Francisella tularensis subsp. holarctica
  CDS (1)..(1176): transl_table=11
atgagtaataagattttatttgggatcactggcagtatatcagcttttaaaactataaatttgataagactttttattaaaagtggtgttgaatgtagagctatagttactaaaggtgcacagcagtttataaagcctgaacttttagtagctttaggctgtgatgtttatactgatgaaaaactagatatgttatcttatcagcaaagtatggcacatataaatttatcacgttgggctgataagatatttatagttcctgcttcagcaaatactattgcaaaattagcttatggtttagcagatgatttattaagtcaaacaatattagctaatgatgataattctaaggtatatatagctcctgctatgaatgtaaatatgtggcaaaaccaacttactcaagataatattaataaacttcaaactttaggatttaatttgatattacctgataaaggtcttcaagcttgtggagatattggtagtggtagattacatgagccggaagtcttgtttgatttattgagtgtttctcaagatttcaaagctaaaaaagtagtgataacagtaggagcaactgtagaagatattgatggtgttagatatttatcaaattatagctctggtaaaatgggctttgctttggtaagagagttacttgcaagaggagctagtgttgtagtattaaaagcaaaaactacaataagctttgatattaaacatcctaatttagaaattattaataccaaaagtgctgatgatatgaaccaagcaatgcttaaaaaagctaaagatagtgatatttttataggctgtgctgcagttgctgattataagatcaaaaataaatttactaataaaattaaaaaaactgatgatacattaactttagagtttataaaaaatcctgatgttttagctaattgtaaaaaaacatacccaaatatctttgctataggttttgcagcagaatcacaaaatatagtagattatgctcaggctaaacttgtcaaaaagaatctaaatatggtagttgcaaattcaactgaagtatttggtaatgataactcaagtgtaacaatattatctaagcatcaaactaaacaatataacaataaatcaaagtcagaaatagctaagttaatattagattttgctaaggaaataatatga

SEQ ID NO: 49639 - protein, 391 aa, Francisella tularensis subsp. holarctica
MSNKILFGITGSISAFKTINLIRLFIKSGVECRAIVTKGAQQFIKPELLVALGCDVYTDEKLDMLSYQQSMAHINLSRWADKIFIVPASANTIAKLAYGLADDLLSQTILANDDNSKVYIAPAMNVNMWQNQLTQDNINKLQTLGFNLILPDKGLQACGDIGSGRLHEPEVLFDLLSVSQDFKAKKVVITVGATVEDIDGVRYLSNYSSGKMGFALVRELLARGASVVVLKAKTTISFDIKHPNLEIINTKSADDMNQAMLKKAKDSDIFIGCAAVADYKIKNKFTNKIKKTDDTLTLEFIKNPDVLANCKKTYPNIFAIGFAAESQNIVDYAQAKLVKKNLNMVVANSTEVFGNDNSSVTILSKHQTKQYNNKSKSEIAKLILDFAKEII

SEQ ID NO: 49640 - DNA, 1203 bp, Desulfitobacterium hafniense Y51
  CDS (1)..(1203): transl_table=11
atgttgcggggtaagaaactcctcataggcgtcacgggtggtattgcggcttataaagctgcggatgtggtgagccgcctccgcaagcagggcgccatcgtctatgtggcgatgactaagggggccactgaatttattgcccccttaaccctgaggactctttcggctaacccggtctatgtggacatgttcgaggagcctaaggtgtggaatgttgagcatatcgccctggcggaagccgtcgatgccgtattggttgccccggctacggctaatctattggccaaaatgaccgtgggccttgccgacgattttctctccactgtcctgctggccacgcaggcccctatctttgtggctccggccatgaatcatcatatgtatcatcatccagccacccaggagaacctgaagcggctccgggaacgttccgtacgcattctgggaccggctgccggctttcaggcctgcggcaccgatggcgacggtcgtatgagtgagcctcaggaacttgtggaggctttgcagagtttttttgccgcctcaggagtgttggcgggcaagaaagccttggtcactgccgggggaacccaggaaccccttgacccggtccgctatctcggcaaccgttcttcaggcaggatgggctttgccgtggctgaagccttaagggaggccggtgcggaaacaatccttgtctctgcgcccaatgaactgcccaccccgccgggagtaaggcgaatcaatattatgacagctcaggaaatgcatgctgcggtcatgggcgaatttgcccggatggatattgtggtcaaagccgcagcagttgccgattaccggcccgcggtcagtgctgagcagaaaatcaaaaaagctgggacaaatcttgctctggaacttgtgcccaatcccgatatcctggcggaatgcggcaggaagaaagaaaaccagtttctggtggggtttgccgctgagacggaaaacctttatgagcatgctcaagccaagatgcagcgcaaaaatgtcgatatgctggtggccaatgacgtaacccagcccggagcgggatttggcagccctacgaatatcgtgagcctgcttttcccggatgggaagaaaatcgatctgccccaaatgaacaaattagacgtagctcggcggctggttcaggagattgctgagcgccttagtgaaaaggagtga

SEQ ID NO: 49641 - protein, 400 aa, Desulfitobacterium hafniense Y51
MLRGKKLLIGVTGGIAAYKAADVVSRLRKQGAIVYVAMTKGATEFIAPLTLRTLSANPVYVDMFEEPKVWNVEHIALAEAVDAVLVAPATANLLAKMTVGLADDFLSTVLLATQAPIFVAPAMNHHMYHHPATQENLKRLRERSVRILGPAAGFQACGTDGDGRMSEPQELVEALQSFFAASGVLAGKKALVTAGGTQEPLDPVRYLGNRSSGRMGFAVAEALREAGAETILVSAPNELPTPPGVRRINIMTAQEMHAAVMGEFARMDIVVKAAAVADYRPAVSAEQKIKKAGTNLALELVPNPDILAECGRKKENQFLVGFAAETENLYEHAQAKMQRKNVDMLVANDVTQPGAGFGSPTNIVSLLFPDGKKIDLPQMNKLDVARRLVQEIAERLSEKE

SEQ ID NO: 49642 - DNA, 1236 bp, Methylobacillus flagellatus KT
  CDS (1)..(1236): transl_table=11
atgagccattattccataaaaaaactcttgctcggcgtgacaggcggcattgctgcctacaaggctgcggaactggtcaggttgctggtcaagcaggacattgatgtgcaggtggccatgacacaggcagcgacgcaattcgtcacgcccatgacattccaggcactttccggcaagcctgtctacactgatttatggcaaggggacaaaggcaacggcatggcgcatatcgacctgtctcgccaggtagatgccatactggtggcgcccgccagtgcggacttcctggccaagctggcatatggcgcggcagatgacctgctgtctacgctttgcctggcgcgcgactgcaagctgctggtcgcaccggcaatgaaccggcaaatgtggagcaatcccgccacgcagcgcaatatccgccaattgcagcacgacggcatcagcattctggggcccgccagcggttcgcaagcctgcggggaaaccgggctcggccgcatgcttgagccggacgagttggtcgagcacctgctctcggccttccagcccaaactttttacaggaaagcgcatgctcatcactgccgggcccacacaggaaaccatcgacccggtacgtgtcatcaccaatcacagctcgggcaaaatgggctacagccttgcccgcgcagccatcgagatgggcgcagaagtcacgctggtgagcgggccggttgcattacaggcgcctgcaggtgccaacaccattcatgtcacgagcgcgcaggaaatgctcgcggccgtcgaagctcacctcaaggaccaggacattttcatctcggtcgcggccgtggcggactaccgccctatccaggtgagccagcacaagatcaagaaaaacacagcgccgctcaccctcacattggaagcgacgccggatattctcgccactatcgcctcgcgcgatgatgcaccgttctgcgtcggctttgccgctgaaagcgagaatatgctgcagtatgccgaagaaaaacgccgcagaaagcgcctgccgttgattgccgccaatatcgccagcgaagccctggggcgagaccaaagcagcctggtattgctcgacgatgaaggaatacaccctttgccacaggcgcccaaactcaccttggcgcgcggcctgttgcaacatgtcgccgccatgctggacaaaagccaagcggccaagccgcccccaacacaaacccaggaagtacgttcatga

SEQ ID NO: 49643 - protein, 411 aa, Methylobacillus flagellatus KT
MSHYSIKKLLLGVTGGIAAYKAAELVRLLVKQDIDVQVAMTQAATQFVTPMTFQALSGKPVYTDLWQGDKGNGMAHIDLSRQVDAILVAPASADFLAKLAYGAADDLLSTLCLARDCKLLVAPAMNRQMWSNPATQRNIRQLQHDGISILGPASGSQACGETGLGRMLEPDELVEHLLSAFQPKLFTGKRMLITAGPTQETIDPVRVITNHSSGKMGYSLARAAIEMGAEVTLVSGPVALQAPAGANTIHVTSAQEMLAAVEAHLKDQDIFISVAAVADYRPIQVSQHKIKKNTAPLTLTLEATPDILATIASRDDAPFCVGFAAESENMLQYAEEKRRRKRLPLIAANIASEALGRDQSSLVLLDDEGIHPLPQAPKLTLARGLLQHVAAMLDKSQAAKPPPTQTQEVRS

SEQ ID NO: 49644 - DNA, 1215 bp, Burkholderia xenovorans LB400
  CDS (1)..(1215): transl_table=11
ttggcaaccgcagaactcgcaggaaaacacctcgtcctcggcatgacgggcggcattgcctgctacaagatcgccgaactcacgcgtctgttgaccaaggccggcgcgaccgtgcaggtcgtcatgaccgaagcggccacgcagttcatcactcccgtcaccatgcaggcgctgtccggccgtccggtctacacgagccagtgggacgggcgtgtgccgaacaatatggcccatatcgatctgtcgcgtgaagcggatgcgatcgtgatcgcgcccgcctccaccgatttcctcgccaaactcgcgcacggcatggccgacgacctgctgtccacattgtgcgtcgcccgcgattgtccgctgctggtggtgccggccatgaaccggcagatgtggcagaacgccgccacgcaacgcaacgtcgcgcaattgcgcgcggacggcgtcgaagtgctcggccccgattccggcccgcaagcgtgcggcgaagtcggcgacggccgcatgctcgaagccgccgccacgtacgaagccatcgcctcgttcttcacgccgaaaatcctcagcggccggcgcgtgctgctgaccgccgggccgaccttcgaaccgctcgatccggtgcgcggcatcaccaaccgctccagcggcaagatgggttttgcgctggcgcgcgccgcgcaacaggcgggcgccgaggtgcatctggtggccggcccggtcgcgctggaaacgccttggggcgtgttccgccaggacgtgcaaaccgcccagcagatgcacgacgcggtgatgcactccgtcgcggacgccgacatcttcatcggcgtggccgcggtggcagactggcgcgtcgatcacgccagcgagcacaagatcaagaagaccgcggatcgtgcgctgccgagcttcacctttgtcgaaaatccggacattctggcctcggtggcaaaactgccgcatccgccgttcacggtcggcttcgccgcggaaagcggcgacctcgaaatccacggcgaagaaaagcgcgtgcgcaaaaatgtgccgctgctgatcggcaatctcggcccgcagacttttggcctcgacgacaacgaagtgatcctgttcgaagcaggcggcgcgaccaggctgccacgcgccgacaagcagacgctcgcgcgcgcgctgatcgcggaaatcgcgaggcgtctgcccgacacaagtctgattcgctga

SEQ ID NO: 49645 - protein, 404 aa, Burkholderia xenovorans LB400
MATAELAGKHLVLGMTGGIACYKIAELTRLLTKAGATVQVVMTEAATQFITPVTMQALSGRPVYTSQWDGRVPNNMAHIDLSREADAIVIAPASTDFLAKLAHGMADDLLSTLCVARDCPLLVVPAMNRQMWQNAATQRNVAQLRADGVEVLGPDSGPQACGEVGDGRMLEAAATYEAIASFFTPKILSGRRVLLTAGPTFEPLDPVRGITNRSSGKMGFALARAAQQAGAEVHLVAGPVALETPWGVFRQDVQTAQQMHDAVMHSVADADIFIGVAAVADWRVDHASEHKIKKTADRALPSFTFVENPDILASVAKLPHPPFTVGFAAESGDLEIHGEEKRVRKNVPLLIGNLGPQTFGLDDNEVILFEAGGATRLPRADKQTLARALIAEIARRLPDTSLIR

SEQ ID NO: 49646 - DNA, 1245 bp, Methanococcoides burtonii DSM 6242
  CDS (1)..(1245): transl_table=11
atgaatacttcacaccatcctaccatgtggataaaggggcagaaaagtgcctctctttccggaaagacgatagttcttgcagtaacaggcagtataggtgcagtacgggtcatagaacttgcacgtgaactgatccgtaatggtgcagatgtatatggcgtgatgagcgaggctgcacagcatataatccataaggatgcacttcattatgcaacagggcatgaagtgatcactgaccttgccggtgaggtcgaacatgtgaagttctgtggtgctgaaggttgtgccgatcttctactgatagcaccggcaactgctaacactattggtaagatggcagttggggttgatgacactcctgtaactacttttgcgactaccgccataggttccggcattccggtaataattgtacctgctatgcataattccatgtatgaacatccggcagtgatggaaaacatcgataagctaaagggctgggatatttcatttgttggccctcatcttagtgagggtattgcgaagatcgcatcgaacgagcagatagtacttgctgtggagcgtgttcttgggagtagtgtcctttttggtaaaaaagtgcttattacaagtggggcgaccgcagaatccattgaccctataagaataatcaccaatcgttcttcaggcactactggcagggagatagcactggaattttatcggaggggcgcagatgttactgtggtccacaaggggaagctcgatctcgatggtatcagggagatacttgtggaaagtgccggtcagatggtggatgccacattaaaggaactcgaacacgattatgacatgcttataagtgcggcagcaatttctgattataccattgatgccatggacgataagatcaagtccggcggcgacatctcattgaagttcagaagtacccgcaaactgatacgtgaggtgcgtgatgcttatccttacatctctttaataggtttcaaggcagaggcatacatttctgaagatgagcttattgcccgggcaaaagattcgatgaaggatgcggatctggatatggtcgtggccaatgaggtaggtaccagcggtatgggtacaattgataacgatgtctacataataccagctgagaatggtgagataactcatgtcagtgggaacaaaaggctgatcgctgaagcattggcggataacatagaagatatgttgactaaaagggaattaaatgtcaactaa

SEQ ID NO: 49647 - protein, 414 aa, Methanococcoides burtonii DSM 6242
MNTSHHPTMWIKGQKSASLSGKTIVLAVTGSIGAVRVIELARELIRNGADVYGVMSEAAQHIIHKDALHYATGHEVITDLAGEVEHVKFCGAEGCADLLLIAPATANTIGKMAVGVDDTPVTTFATTAIGSGIPVIIVPAMHNSMYEHPAVMENIDKLKGWDISFVGPHLSEGIAKIASNEQIVLAVERVLGSSVLFGKKVLITSGATAESIDPIRIITNRSSGTTGREIALEFYRRGADVTVVHKGKLDLDGIREILVESAGQMVDATLKELEHDYDMLISAAAISDYTIDAMDDKIKSGGDISLKFRSTRKLIREVRDAYPYISLIGFKAEAYISEDELIARAKDSMKDADLDMVVANEVGTSGMGTIDNDVYIIPAENGEITHVSGNKRLIAEALADNIEDMLTKRELNVN

SEQ ID NO: 49648 - DNA, 1200 bp, Ralstonia metallidurans CH34
  CDS (1)..(1200): transl_table=11
atggatttgcgcggcaagcacatcgtccttggtctgactggcggcatcgcctgctacaagtcagccgagctggtccgactgctcaccaaggctggcgccacggtgcaggtggcgatgaccgaagcggcaacgcacttcatcacgccggtcacgatgcaggcgctctccggacgtccggtgttcctctcccaatgggacacccgcatcgacaacaacatggcgcatatcgacctctcgcgagaggcagacgccatcctgatcgcgccagcatcgaccgatttcctcgccaaggtggccaacggcctctgcgacgacctgctgaccacgctgtgcatcgcgcgtgaatgcccgctgctggtggcgccggcgatgaaccggcagatgtgggccgccgcgccaacgcaacgcaatgccgcgcagctacgcgccgatggggtcatgatcctcggccccggcacgggcgaccaggcctgtggcgaaatcggcgatgggcggatgctcgaaccggaggaactcgtcgaagacctgatcgcgttcttccagcccaaaccgctggctggcaagcgcgtgctgatcacggcgggcccgacgttcgaagcgatcgatccggtacgcggcatcacgaacctgtcctcaggcaagatgggattctcgatcgcgcgcgccgcacgtgaagcgggtgccgaggtactgctggtggctggcccgaccgcgctcgacacgccccgtggcgtcacacgcaccgatgtgcgcagcgcccagcagatgcacgacgcggtcatggcgcaactgcgcgatgtcgacgtgttcgtcgccgtggccgccgtggcggattggcgtcccgcggaggtcgcgcagcagaagctcaagaaggccaacgacaccgacacgccgaccctgcaattcgtgcagaacccggacatcctggctgccgtggccgcccgtgccgatgccccctattgcgtcggttttgcggccgagagcgagaacctggagcaatacggcgagcagaagcgcaagcgcaagggcgtgccgctgctggtcggcaatatcggccatcgcacgttcggtctcgacgacaacgagatcgtgctgttcgatgccaacggcatgacgcgcctgccgcgcgcggacaagctctcgctggcgcgcgagcttgtcaacgcaatcggccagcgtttgccgcgcaaactcgtgtaa

SEQ ID NO: 49649 - protein, 399 aa, Ralstonia metallidurans CH34
MDLRGKHIVLGLTGGIACYKSAELVRLLTKAGATVQVAMTEAATHFITPVTMQALSGRPVFLSQWDTRIDNNMAHIDLSREADAILIAPASTDFLAKVANGLCDDLLTTLCIARECPLLVAPAMNRQMWAAAPTQRNAAQLRADGVMILGPGTGDQACGEIGDGRMLEPEELVEDLIAFFQPKPLAGKRVLITAGPTFEAIDPVRGITNLSSGKMGFSIARAAREAGAEVLLVAGPTALDTPRGVTRTDVRSAQQMHDAVMAQLRDVDVFVAVAAVADWRPAEVAQQKLKKANDTDTPTLQFVQNPDILAAVAARADAPYCVGFAAESENLEQYGEQKRKRKGVPLLVGNIGHRTFGLDDNEIVLFDANGMTRLPRADKLSLARELVNAIGQRLPRKLV

SEQ ID NO: 49650 - DNA, 1239 bp, Acidobacteria bacterium Ellin345
  CDS (1)..(1239): transl_table=11
gtgctgggcaaaaagatgaaaatcgcattgggagtgaccggcggaattgccgcttacaaggcggcggaagtcctgcgtcttctacaggatcgcggcgtgacggtgcaggtcataatgacccgagccgcccaggagttcgtccgcccgttgacgtttgcagcactctccggccagaaggtcattaccgagatgttcggtgaagggaacgcggagccgaatgtggactccgccgtcgaacacatcagcgtggcgcaaggaatcgatgctttgctggttgttcccgcgactgccgatagtctcgcgaagtttgcccagggcattgccaacgatttcttgtccacgctctacctcgccaccgcggctcccgtgatcgtcgcgccggcgatgaacgtgaacatgtgggagcacccggcgaccaagattaatcttgaaacgctacgagctcgcggggtccacgtaatcgagcccggtgctgggtacttggcctgcggtatggtcggcgccggcaggctcgccgagcccgaacacatcgccaccgaaaccatagcgattttaggtatttctcaggatatggtcggcgagacggtgctcgttacggctgggcccacctacgagccaatcgatcccgtacggttcctcggcaaccgatccagcggcaagatgggctacgcgattgcggaagcggcgattcgtcgtggagcgcgggttgtcctcattaccggcccaaccgcactgaagcctccgtctgcggccgaagttgttccggtcgaaactgcagagcagatgcgcaacgccgtcatggcgcactttcccgacgctgacgttgtcatcaaaactgcggcggtcgccgactacactgccaagcaccgctctgaccagaagatcaaacgcaagggcgagatgatgctcgatctggttccgacgaccgacatcctcgccgaattgggtcagcgtcgcgtaaagccggcgcaagtaattataggattcgcagccgaaacccaggacggcgtgtccaacgcccgcgaaaaattacgcaagaagggcgttgatgccatcgtgatgaacgatgtctcgcgggtgggattagggtttagttccgaccgcaatgcggcgaccatcgtcacagcgagcgaagagattgaaatccccgaaatgacgaagttggagatggcccagcgggttctcgacctcgccgtgaaactgcgcgcttcaatcagatccgaggtcacttcccgctaa

SEQ ID NO: 49651 - protein, 412 aa, Acidobacteria bacterium Ellin345
MLGKKMKIALGVTGGIAAYKAAEVLRLLQDRGVTVQVIMTRAAQEFVRPLTFAALSGQKVITEMFGEGNAEPNVDSAVEHISVAQGIDALLVVPATADSLAKFAQGIANDFLSTLYLATAAPVIVAPAMNVNMWEHPATKINLETLRARGVHVIEPGAGYLACGMVGAGRLAEPEHIATETIAILGISQDMVGETVLVTAGPTYEPIDPVRFLGNRSSGKMGYAIAEAAIRRGARVVLITGPTALKPPSAAEVVPVETAEQMRNAVMAHFPDADVVIKTAAVADYTAKHRSDQKIKRKGEMMLDLVPTTDILAELGQRRVKPAQVIIGFAAETQDGVSNAREKLRKKGVDAIVMNDVSRVGLGFSSDRNAATIVTASEEIEIPEMTKLEMAQRVLDLAVKLRASIRSEVTSR

SEQ ID NO: 49652 - DNA, 1212 bp, Silicibacter sp. TM1040
  CDS (1)..(1212): transl_table=11
atgctgtcaggaaaacatattctgctgatcattggcggtgggattgcagcctataagtctctggaactgatccggcgactgcaggatcagggcgcgcgggtgacgccggttctgacccgcgccggagaggaattcgtcacccctctgtctgtttccgcgcttgcggggaacgccgtgcaccgagatttgtttgacctcaccgccgaggcggaaatgggccacatccagctctcgcggagtgccgatcttctggtggtggctccggcgacggctgatctgatggcgaagatggcgcagggtcatgcaaatgacctcgcctccaccttgttgctggcgacggatacgccgattttgttggcgcccgcgatgaatgtgcggatgtgggagcatcctgctacgcagcgcaacctcacccagctcaaaaatgacggtgtttccgtggtcggcccgaatgaaggcggaatggcctgcggtgagtatggcgccgggcgactggccgagccggaggagatcatcgcggcaatcaccacgcgtcttgctgccgggccgctcgcgggcaagcgcatcatcgtaacttccggtcccactcacgagcccatcgacccggtgcggtatatcgccaaccgatcctccggggcgcagggcacggcgttggcccgtgctctgcgggcactgggggcggaggtggtctttatcacgggccctgcaacggtgcgcccgccggagggggtgcaggtggtgcccgttgaaaccgccagcgacatgcacgcggctgttcaggcggcgctgcccgcggatgccggggtttttgcggcggctgtagcagactggcgcgtggcctccgcttctgaccgcaagctcaagaaaaccaaagacggcatgccccgtctcgcgtttgaggaaaaccccgacattctgcgcgaggtggcctctcagacgcaggatcgtcccggccttgtggttggcttcgccgccgaaaccaatgatgttgtcgaacacgcaacggcaaaacgcctgcgcaagggctgcgactggattgttgccaacgatgtttcccccgcgactggcatcatggggggagccgaaaacgccgtgatcttgattaccgccgagggcgaagagcattggcctcgtatgccaaaagaccaggtggcgcagcgcctggcggaaaaaattgcagctacactcaccccgccagtttcggggggataa

SEQ ID NO: 49653 - protein, 403 aa, Silicibacter sp. TM1040
MLSGKHILLIIGGGIAAYKSLELIRRLQDQGARVTPVLTRAGEEFVTPLSVSALAGNAVHRDLFDLTAEAEMGHIQLSRSADLLVVAPATADLMAKMAQGHANDLASTLLLATDTPILLAPAMNVRMWEHPATQRNLTQLKNDGVSVVGPNEGGMACGEYGAGRLAEPEEIIAAITTRLAAGPLAGKRIIVTSGPTHEPIDPVRYIANRSSGAQGTALARALRALGAEVVFITGPATVRPPEGVQVVPVETASDMHAAVQAALPADAGVFAAAVADWRVASASDRKLKKTKDGMPRLAFEENPDILREVASQTQDRPGLVVGFAAETNDVVEHATAKRLRKGCDWIVANDVSPATGIMGGAENAVILITAEGEEHWPRMPKDQVAQRLAEKIAATLTPPVSGG

SEQ ID NO: 49654 - DNA, 1221 bp, Myxococcus xanthus DK 1622
  CDS (1)..(1221): transl_table=11
atggacgtgacgactctgaaaggccgccgggtggtcgttggcgtgggtggcggcatcgcggcgtacaaggcctgcgagctggtgcgggaactgtcgcgtgcaggcgccgaggtgcgggtggccatgacggagtccgcgcgccagttcgtcaccccgctcaccttccaggcgctcagcgggcaccctgtgctcacggactatttcgaccctgcccaggaggggaacttcggccacctggaccttgcgcgctgggccgaggtgttcgtcgtggcgccggccaccgcggacctgctggcgcgcatccgcgcgggcatggggaacgacgccgtgacgacgtcgctgcttgccttccgggggccggtggtgctggcgccggcgatgaacgtggccatgtgggacaaccccctgacgcaggagaacctggcggccctgctggcctatccgcgcttctcgcgcgtgggcccaggcgcggggatgctggcctgtggtgacgtgggggaggggcgactggcggacgttccagccatcgtccaggcggtcgcggcgcgtttcggcgctggcccactggcggggaagcgggtgctgctgacggcgggccccacgcgcgagttcctggacccggtgcggttcatctccaatccctccacggggaagatgggcatggcgctcgcgcacgcggcccggaccctgggcgccgaggtgacagtggtgcttggtcccgtgggcaccgtggagcgcggcggcttggacatcgtggacgtggtgagcgcggacgacatggcgcgcgaggtgctctcacgggtgggcacggtggatgtgttcatcgccactgcggcggtcagcgactggcgcccggagacgcgcgcgccgcagaaggtgaagaagggcgcttcgacgtcgcccgaggcgctgacgctcgtgcgcacgccggacgtgctcgcggaggcctcccgccaggtggcgggacagccgaagcggccggtgctggtgggcttcgcggcggaaacggagcgcgtggtggcgcacgcgcgcgacaagctggagcgcaaggggctggacgcgattgtcgccaacgacgtgacggcccctggcgcgggctttggaacggacaccaaccgggtgacggtgctcacgcgttcgggcgcgcagcatgaactccagggcagcaagcgcgaggtggcgcaggccctcatcgagctgctgctcgtgtctccgtcctag

SEQ ID NO: 49655 - protein, 406 aa, Myxococcus xanthus DK 1622
MDVTTLKGRRVVVGVGGGIAAYKACELVRELSRAGAEVRVAMTESARQFVTPLTFQALSGHPVLTDYFDPAQEGNFGHLDLARWAEVFVVAPATADLLARIRAGMGNDAVTTSLLAFRGPVVLAPAMNVAMWDNPLTQENLAALLAYPRFSRVGPGAGMLACGDVGEGRLADVPAIVQAVAARFGAGPLAGKRVLLTAGPTREFLDPVRFISNPSTGKMGMALAHAARTLGAEVTVVLGPVGTVERGGLDIVDVVSADDMAREVLSRVGTVDVFIATAAVSDWRPETRAPQKVKKGASTSPEALTLVRTPDVLAEASRQVAGQPKRPVLVGFAAETERVVAHARDKLERKGLDAIVANDVTAPGAGFGTDTNRVTVLTRSGAQHELQGSKREVAQALIELLLVSPS

SEQ ID NO: 49656 - DNA, 1236 bp, Mesorhizobium sp. BNC1
  CDS (1)..(1236): transl_table=11
ttgagcctttccggtaagcgcatcctcctcattatcggcggcggaatcgcagcctacaagtgcctcgatcttatccgccgcttgcgcgagcgcggggcgaaggtgcggtgcgtgatgacgcaagccgcacaggaattcgtcacgcccttatccgttggcgcgctcacggctgaccatgttttcaccgatctctttgaccggcaggacgagcaggatgtcggccatatccggctgtcgcgggaggccgacctaatcgtggctgcgccagcgaccgccgatctgatggcaaagcttgcaacgggccttgcgaacgatcttgcctcggcggtgctgcttgccaccgataagccggtgctcatggcgcctgccatgaacccgagaatgtggatgcatcccgcgacgcaacgaaacttgacgcagctcaaggccgacggcgtgcgctttgtcggccccaacagcggcgaaatggccgaaagcggcgaggccggcgaagggcgcatggccgagccgctggaaatcgtaacggccatcgaaaccattctcgacggcgggaaaaggctccttaccggcaggaagatcatcgtcacctcggggccgacccgcgagccgatcgatccggtgcgctacatcgccaaccgctcctccggcaagcagggccatgcgattgccgcagcactcgccgagcttggggcggaggtgcatctcgtttcgggtccggtcgccattcccgacccgaagggtgtggcgacagtgcatgttgagagcgcgcgccagatgcgtgacgcggtggaagcgcttctgccggccgatgcgggcatctttgtcgcggcggtcgcggactggcgcccactgacggaagtcggggaaaagatcaagaaggacaggggggcgaacccgcctcccctgaaactcgccgagaatcccgatatcctggccggcgtgggccatcacgagaaccggccgcgcctcgtgatcggctttgccgcggaaacgcaaaatctggtcgagaatgcccgcacgaagctcgccaagaagggcgccgacctcatcgtggccaatgatgtttcccatgatagcggcatcggccgttccggcgttatgggcggcgaccggaacaaggtacatatcgttagccgcgaccgcgtcgaggagtggccggaggcaggcaaggaggaggtcgcccggcggctggcggccaaggtggcggaactcttaaactcgaaggccaggatgtga

SEQ ID NO: 49657 - protein, 411 aa, Mesorhizobium sp. BNC1
MSLSGKRILLIIGGGIAAYKCLDLIRRLRERGAKVRCVMTQAAQEFVTPLSVGALTADHVFTDLFDRQDEQDVGHIRLSREADLIVAAPATADLMAKLATGLANDLASAVLLATDKPVLMAPAMNPRMWMHPATQRNLTQLKADGVRFVGPNSGEMAESGEAGEGRMAEPLEIVTAIETILDGGKRLLTGRKIIVTSGPTREPIDPVRYIANRSSGKQGHAIAAALAELGAEVHLVSGPVAIPDPKGVATVHVESARQMRDAVEALLPADAGIFVAAVADWRPLTEVGEKIKKDRGANPPPLKLAENPDILAGVGHHENRPRLVIGFAAETQNLVENARTKLAKKGADLIVANDVSHDSGIGRSGVMGGDRNKVHIVSRDRVEEWPEAGKEEVARRLAAKVAELLNSKARM

SEQ ID NO: 49658 - DNA, 1206 bp, Cytophaga hutchinsonii ATCC 33406
  CDS (1)..(1206): transl_table=11
atgacattacgcggacggaaaattctgttggcggtatgtggtagtatcgcagcatacaagtctgcgttaattgtccggattcttaaaaaacaaggggcagaagtgcgtgtaataatgacgccttctgcccttacttttatcacgccacttaccctttcaaccttatctgaaaatcctgttgcgcacgccttcaccgaaggcgatcagggtgtctggaacaaccatgttgaattggctctttgggcagatgtaatgctcattgcacctgcgtctgaaaataccatcggcaaaatggcatctggtatttgcgataacttagtgctctccgtttatttctctgctaaatgccctgtttatgtttgtcctgcaatggatttagacatgtacaagcatgttaccacacagcagaatcttgtcaggcttcaacagcatggcgtgcggctgatcgatgctgaatcaggtgaattggcaagtgggttaatcggtcaaggcaggttggcagagccggaaaacattgttgaaattattgaggcagattttggaacgaaagctccgttactacataagaaaatactcattacggctggtcctacatacgaagccttagatccggtacgttttattggaaaccattcatccggtaaaatggggcttgccctggttaaagaagcatggaagatgggtgcagaggtaacattggtttgcgggccggtaaatgaagaattgttgcgtatgttaccggcttctgttcagttgcataaaattgtttcagggcagcaaatgtttgatgttgttcaggctgaaattgaaaaacaggatgtagctatatttgctgcagctgttgccgattatacaccggaacaggtttctgatatcaaaattaaaaaagcagaagattcgtttacgattcgtttaaagaagaatccggacatagcaaaaacgtgcggagaaaagaaaaaggaccatcagctgtttgttggttttgcattggaaacaaacgatgaggaaacacatgctctaaaaaaactgcagtctaaaaatttagatgccattgttttaaattcattaaatgataccggagctggttttgcgggtgataccaataagattactatttatgcaaaagataaggagccgtttcactctcaattgttaagcaaagaatatattgcaaaggatatattaaattatttgttgttgctatga

SEQ ID NO: 49659 - protein, 401 aa, Cytophaga hutchinsonii ATCC 33406
MTLRGRKILLAVCGSIAAYKSALIVRILKKQGAEVRVIMTPSALTFITPLTLSTLSENPVAHAFTEGDQGVWNNHVELALWADVMLIAPASENTIGKMASGICDNLVLSVYFSAKCPVYVCPAMDLDMYKHVTTQQNLVRLQQHGVRLIDAESGELASGLIGQGRLAEPENIVEIIEADFGTKAPLLHKKILITAGPTYEALDPVRFIGNHSSGKMGLALVKEAWKMGAEVTLVCGPVNEELLRMLPASVQLHKIVSGQQMFDVVQAEIEKQDVAIFAAAVADYTPEQVSDIKIKKAEDSFTIRLKKNPDIAKTCGEKKKDHQLFVGFALETNDEETHALKKLQSKNLDAIVLNSLNDTGAGFAGDTNKITIYAKDKEPFHSQLLSKEYIAKDILNYLLLL

SEQ ID NO: 49660 - DNA, 1188 bp, Clostridium perfringens ATCC 13124
  CDS (1)..(1188): transl_table=11
atgaaagataagaaatgtgttgttgtaggagtaagtggaggagtagctgtttataaagccttagacgttataagcagactaagaaaaaaagatgtagaagtacatgtaataatgactaaatccgctactgagtttgtaacaccattatcttttcaatcattaagccaaaacatggttataacagatatgtttgctgaaccaaaggcttgggaaatacagcatatatcactagcaaagaaagcagatttaatgcttattgtaccagctacagcaaacattataggaaaggttgcaaatggcatagctgacgatatgttatcaacaactataatggcaacaaaggcgccagttgttttttgccctgcaatgaatacaaacatgtatgaaaatcctatagttcaaaggaacataagtcttctaaaggagcttggctatgaatttatagaaccagctagtggaagattagcatgtggtgatgaggggaaaggtaaacttcaagataccgaaattattgcagaagaaacattgagaaggttacattctactaaggatttacttggtaagaaggttgttgttactgcaggacctactatggtgccaatagatccagtgagaattttaacaaatagatcttcaggtaaaatgggatactcaatagcagaggaagcgagagataggggagcagaagttgttcttatatcaggacctacttctttaagaaaacctaatggaattaaagttattgatataaagacaaatgaagatatgtttaatgctataaaaaatgaatttaaagatgctgatatagttattaagtcagcagctgtggctgattataaagctaaaaattatagcaatgaaaagattaaaaaaacaggtgatgatttaaatttaatttttgagagagatagagatattctaaaaactcttggagatatgaaagaaaatcaaattctagtaggctttgcagcagaaagtagcaacttaaaagaaaacgctaaaggtaaactagagaggaaaaatctagattatattgttgcaaatgacataagtaagccagaaacaggttttgcaagtgatgagaataaagttactataataagcaaatctggtgaagaggtatctttagaaaagatgtctaaaagagaagttgcaaagaatatatttgacattataaaagggcgctaa

SEQ ID NO: 49661 - protein, 395 aa, Clostridium perfringens ATCC 13124
MKDKKCVVVGVSGGVAVYKALDVISRLRKKDVEVHVIMTKSATEFVTPLSFQSLSQNMVITDMFAEPKAWEIQHISLAKKADLMLIVPATANIIGKVANGIADDMLSTTIMATKAPVVFCPAMNTNMYENPIVQRNISLLKELGYEFIEPASGRLACGDEGKGKLQDTEIIAEETLRRLHSTKDLLGKKVVVTAGPTMVPIDPVRILTNRSSGKMGYSIAEEARDRGAEVVLISGPTSLRKPNGIKVIDIKTNEDMFNAIKNEFKDADIVIKSAAVADYKAKNYSNEKIKKTGDDLNLIFERDRDILKTLGDMKENQILVGFAAESSNLKENAKGKLERKNLDYIVANDISKPETGFASDENKVTIISKSGEEVSLEKMSKREVAKNIFDIIKGR

SEQ ID NO: 49662 - DNA, 1305 bp, Rhodococcus sp. RHA1
  CDS (1)..(1305): transl_table=11
gtgcctgaacaggcagcgggcccgggctccgggcacgcgacggattcaccggaaccggttctctcgggggcagcccgcaagcggatcgtcgtcggtgtcggcggcggcatcgccgcgtacaagagctgtgccgttatccgggccttcacggaggccggtcaccacgtgcgggtcatcccgacggagtccgcgctcgagttcgtcggcaaggcgacgttcgaggcgctgtcgggcaaccccgtgcacacgggtgtgttcaccgacgttccacaggttccgcatgttcgtctcgggcaggaagcggatctcgtcgtcatcgcgcccgccaccgccgacctcatggcgcgggccgtggcgggacgcgcggacgacctcctgaccgcgacgctgctcaccgcacgatgtcccgtggtgttcgctcccgcgatgcacacggagatgtgggagcacccggccaccgtcgccaacgtcgccaccctgcgcgctcgcggcgtgaccgtgatcgaaccggcgtccggccgcctcaccggcaaggacaccggcgcaggccggctgcccgaacccgacgagatcgtcgggttggcgtcgctgctggtcgagcgtcccgacgcgctgcctcgtgatctcgagggccggcgggtcctcgtgtccgcgggcggcacccgcgaaccactcgacccggtgcgattcctcggtaaccgcagttcgggcaagcagggctatgccatcgcccggctcgccgtgcagcgcggggccgaggtcaccctcgtctccggctataccgccggactcgccgacccggccgctgtcgacgtggtgcacgtccgcacggccgaagacatgcgggtcgcggtcgccaagcacgcgcccgggttcgacgccgtgatcatggccgcggcggtggccgacttccggccgtcgacgacggtggcgagcaagatcaagaagggtgcgggcgagcccgactcgattgcactcaccaagaacgaggacatcctcgccggcctggtccagtcgaggagggacggcgagatcccgtcgaagaccgtgatcgtcggattcgcggccgagacgggcgacgccgacggcgacgtcctcacgtacgcgcgggccaagctcgcgcgaaagggctgcgacctcctcgtcgtcaacgcggtcggcgagggcaaggcgttcgaggtcgaccacaacgacgggtggctgctcggagccgacggttccgagtccgcgctcgagcacggatcgaaggcgttgatggccagccgggtactcgacgccgtcgaccagctgttccggacactctga

SEQ ID NO: 49663 - protein, 434 aa, Rhodococcus sp. RHA1
MPEQAAGPGSGHATDSPEPVLSGAARKRIVVGVGGGIAAYKSCAVIRAFTEAGHHVRVIPTESALEFVGKATFEALSGNPVHTGVFTDVPQVPHVRLGQEADLVVIAPATADLMARAVAGRADDLLTATLLTARCPVVFAPAMHTEMWEHPATVANVATLRARGVTVIEPASGRLTGKDTGAGRLPEPDEIVGLASLLVERPDALPRDLEGRRVLVSAGGTREPLDPVRFLGNRSSGKQGYAIARLAVQRGAEVTLVSGYTAGLADPAAVDVVHVRTAEDMRVAVAKHAPGFDAVIMAAAVADFRPSTTVASKIKKGAGEPDSIALTKNEDILAGLVQSRRDGEIPSKTVIVGFAAETGDADGDVLTYARAKLARKGCDLLVVNAVGEGKAFEVDHNDGWLLGADGSESALEHGSKALMASRVLDAVDQLFRTL

SEQ ID NO: 49664 - DNA, 1227 bp, Haemophilus somnus 129PT
  CDS (1)..(1227): transl_table=11
atgcaaaatcttattcggggaaaacgaattgtcattggaattaccggcggtattgctgcatataaaaccatagaattaattcgtttattgcgtaaagcacaagcagaagttcgagtagtgctaacaaatgcagcgacagaatttgtaacacctttaactttacaagcaatttccggcaacgctgtatcacaatctttacttgatcatgaagctgaattggcaatgggacatattgaattggctaagtgggcggatcttatcgtaattgcacctgccagtgcagactttattgcacgcatggcggtcggtatggcaaacgatttattatccactatttgtctagcaacgaattctccgatttttctggctccggcaatgaaccaacaaatgtatgcacaaactgttactcaacaaaatttagcacaactcatgactcgtggtgtgcagtttatcggaccgaatagtggtgaacaggcttgtggcgatgtaggtatcggaagaatgtcagaaccttttgaaatttttaccgcactttgccaatcctttttacatactcaagatttacttgatgtaagtgttgtgattaccgcaggtccaacaagagaagccattgatccggtacgctatattagtaatcatagctcaggcaaaatggggtttgctattgctgaagcttttgctcaacgaggtgcaaaagtcactttaatcagtggacctgtcaatttagcgacacctcataatgtacaacgcattaatgtagtttcggcacaagaaatgtatcaacatgcaatacaaagtgcggaacaaaatcagatttttattggttgtgcagcggtagctgattatcgtgtagaacaaattgcagaacaaaaaattaagaaaatccccggcaatgatgaaatggtcttaaagttggtcaaaaatccagacattcttgcaactgtagccaatttaatggaaaatcgtccttttgttgtaggatttgcggctgaaacacaaaatgtggagcagtatgcgaaagacaaattacaacgtaaaaatttggatatgatttgtgcaaatgatgtttccggtgggcaagtatttaattcagagcaaaacgcattgcagctgttttggcaaaatgggcaagaggggttggcattgaaacataaaagtgacttagctaaacaattggttgataaaattattgtgcgttataaatggaaattggaagaaagtaaatga

SEQ ID NO: 49665 - protein, 408 aa, Haemophilus somnus 129PT
MQNLIRGKRIVIGITGGIAAYKTIELIRLLRKAQAEVRVVLTNAATEFVTPLTLQAISGNAVSQSLLDHEAELAMGHIELAKWADLIVIAPASADFIARMAVGMANDLLSTICLATNSPIFLAPAMNQQMYAQTVTQQNLAQLMTRGVQFIGPNSGEQACGDVGIGRMSEPFEIFTALCQSFLHTQDLLDVSVVITAGPTREAIDPVRYISNHSSGKMGFAIAEAFAQRGAKVTLISGPVNLATPHNVQRINVVSAQEMYQHAIQSAEQNQIFIGCAAVADYRVEQIAEQKIKKIPGNDEMVLKLVKNPDILATVANLMENRPFVVGFAAETQNVEQYAKDKLQRKNLDMICANDVSGGQVFNSEQNALQLFWQNGQEGLALKHKSDLAKQLVDKIIVRYKWKLEESK

SEQ ID NO: 49666 - DNA, 1212 bp, Trichodesmium erythraeum IMS101
  CDS (1)..(1212): transl_table=11
atggatagaaaagttttaattggtatttgtggtggtattgcagcttataaagtttgtgaaatagtttctactttagtaaaatctggagctgaaactagagcaattttgacagacgctgctcaacaatttattacacctctgactttatctactctttctcgttatcccgcttatacagacaaagatttttggcaaccctctcacggacgcccgttgcatattcagttaggagaatgggcggaaataatagttattgctcccctcacagcaaataccttagccaaattaacctatggttttgcagataatttgctgactaatatcatcttggcttccagttgccccattttattagctccggcgatgaatactgatatgtgggaacaaacagcagtacaaagaaactggcaacaaatattagcagaaaaacgatttcatggtataagtcctagtactggaattttagcttgcgatcgtattggtaaaggtagaatggcagagcccaaagaaataattacaaagataaaatctttattatatacagcaggcaaaaaagatttagtaggtaagaaaatattaattagtgcagggggaacgcgggaacatttagatcctgtaagatttataggtaatccttctacgggtaaaatgggaatagctttagctcaagcagcattgcatcgcggagcaaatgtaactttggtgcatagcattgtaggaaaaatactattatcaggagtaaaaatgatagaagtagtgagtgctgctcaaatgcaacaagcaatgttagctcattttgctcaatcagatatagtgataatgaatgctgcagttgcagatgtcaaacctgctaagtataatggtgagaagttagccaagagatccctaggaaattcattacccttaaaaccagtaccagacattgtagcagagttaggaaaattaaagcagtctcaccaatatttaattggttttgcggcacagactggagatattgttccccctgctttggaaaaattgtgggttaaaaatttagatgctattgttgctaaccctatcgatcaaaaaggtgcaggttttggcagtaatacaaatcagggaatttttttagatgttgaagggcggcagctagatattccttcttgtagtaaattagagatggctcattatttgtgggattttgtcttagagaggtatggcgctaactactaa

SEQ ID NO: 49667 - protein, 403 aa, Trichodesmium erythraeum IMS101
MDRKVLIGICGGIAAYKVCEIVSTLVKSGAETRAILTDAAQQFITPLTLSTLSRYPAYTDKDFWQPSHGRPLHIQLGEWAEIIVIAPLTANTLAKLTYGFADNLLTNIILASSCPILLAPAMNTDMWEQTAVQRNWQQILAEKRFHGISPSTGILACDRIGKGRMAEPKEIITKIKSLLYTAGKKDLVGKKILISAGGTREHLDPVRFIGNPSTGKMGIALAQAALHRGANVTLVHSIVGKILLSGVKMIEVVSAAQMQQAMLAHFAQSDIVIMNAAVADVKPAKYNGEKLAKRSLGNSLPLKPVPDIVAELGKLKQSHQYLIGFAAQTGDIVPPALEKLWVKNLDAIVANPIDQKGAGFGSNTNQGIFLDVEGRQLDIPSCSKLEMAHYLWDFVLERYGANY

SEQ ID NO: 49668 - DNA, 1311 bp, Synechococcus sp. CC9311
  CDS (1)..(1311): transl_table=11
atgaagattgaggcctcaaggcctctggaggggcgtcgcctcgtcgtggcggcatcaggaagcatcgctgcggtcaagacccctctccttgtgagtgcgttagtgaaggcaggcgccgaggtgcgttgtgtcatcacctccagcgcctcgcgccttgtcagccctgtggcgcttgccagcctgagtcgtcacccttgtttgcaagatcaggatcagtgggatccatcgcaatctcggccgttgcatgtggagctagcggaatgggcggatcttgtggttgtggctcccttaagcgccacaagcttggcccgttggactcagggactcggagatgggttgctggcctccttgttgttggcttgcgagcggcctgtggtggcggcctcagccatgaacaccgggatgtggagtaaccctgcagtccgtcgtaactgggatctcttgcaacgggatcaacgggtgctgtgcctgggaccagagcctggtttgttggcttgtgatcgaatcggagaggggcgaatggccgatcccgctttgattcaattggcggttcttcatgctcttcagcaaggcagccagaaaaggcaattgacgcgtgattggagtggtcgttccttacttgtcaccgctggcccaacggtggaagccctggatcctgcccgcatcgtgagcaaccgcagcagcggacgcatgggcgtgatgctcgcgcaagcggctcggtggcggggggcccgggttgacttgatccacgggcctttgcagttgccaaacgcctggcttgaggggttgtcttgccaccctgtggagtcggcgcaagcgatggagtcagcacttattgagctgcaacccgatgttgatgcggtggcgatggcggcggcggtggccgacctgcgccggcgtggtggcgctcttcctgagaagcccgcgaaggctgcattggagagcgttttgtcagaccaaatggagcctgtcccagatctattggccggtttggctgagcgccgaccccctggtcaagtgctcttgggatttgctgctctcagcggtcacgtcgattcgctgctggaacgggcccgtcacaaactctctgccaaacaatgcgacctgttgtttgcgaatcccattgatcagcccaatcaggggtttggttcgcatcggaacggaggctggttgctcaggcgcgatggctcacaacagcccttcttgccccaatgcaagctcgagctcgccaatcgcttgctggatgagatcgccatgcaacggaccgcgctgcatggcctccattcgcaggacgttatctcagacgtttaa

SEQ ID NO: 49669 - protein, 436 aa, Synechococcus sp. CC9311
MKIEASRPLEGRRLVVAASGSIAAVKTPLLVSALVKAGAEVRCVITSSASRLVSPVALASLSRHPCLQDQDQWDPSQSRPLHVELAEWADLVVVAPLSATSLARWTQGLGDGLLASLLLACERPVVAASAMNTGMWSNPAVRRNWDLLQRDQRVLCLGPEPGLLACDRIGEGRMADPALIQLAVLHALQQGSQKRQLTRDWSGRSLLVTAGPTVEALDPARIVSNRSSGRMGVMLAQAARWRGARVDLIHGPLQLPNAWLEGLSCHPVESAQAMESALIELQPDVDAVAMAAAVADLRRRGGALPEKPAKAALESVLSDQMEPVPDLLAGLAERRPPGQVLLGFAALSGHVDSLLERARHKLSAKQCDLLFANPIDQPNQGFGSHRNGGWLLRRDGSQQPFLPQCKLELANRLLDEIAMQRTALHGLHSQDVISDV

SEQ ID NO: 49670 - DNA, 1218 bp, Shewanella sp. MR-4
  CDS (1)..(1218): transl_table=11
atgatgtcagtgagcctgataacgaaaaacgtcctactgggtattggtggcggcattgcggcctacaaaagtgcggatttagtgcgccgcttaaaagaacgcggctttgatgtgcgtgtggtgatgagccagagcgccatggaatttattaccccactcacactgcaagccttatcaggccatcccgtggcatcaagtttactcgatcccgctgccgaagcggcaatgggtcatatcgagctggcgcgctgggcggatttagtgattatcgcccctgccaccgcgaatttgctggcccgtatcaatgcgggcatggcggatgagcttatcaccaccacttgccttgcgaccgaagcgccaatagccctgtgccccgcgatgaatcagcagatgtatcgcaatgcggccacccaagccaatttaaccagtttacaaggccgtggttataccctttggggccccgccagcggcagccaagcctgcggcgaagtcggccctggccgtatgctcgaaccgcttgagattgccgagctggcaacagacttttttgcaacaaaagatgtctcctcacagcccctagcaggtcaatcggtgctcattaccgcagggccaacccgcgaagccatcgatcctgtgcgttatatctctaatcacagctcaggcaagatgggattcgccttagcgaaagccgccgccgacatgggcgccgctgtgaccttggtcgcaggaccagtaaatttagccacgcctgaaggggtgacgcgaatcaatgttgaatccgcacaaaacatgctcgatgttgtgatggataatgttgataaaaaagatatttttatcggctgtgcggcggttgccgactatcgcgtcagcgatattgcggactgtaagatcaaaaagtccgccgaagaaatgcaacttgcgctggtgaggaatcctgatatcttagcgacggtcgcaagcttggcaacccgtccttttatggtgggatttgccgccgaaacccatgatgtagaagcctacgcccgcgataaactcaaacgcaaaaatttgaatatgatcgccgcaaacgatgtatccgttgctggtcttggctttaatgccgattccaatgccctgcgtgtattctggccgcagggtagtcaagatttgcctgccaccgataagctcacgttggctcggcaattactttcgttgatagtgaaagaaaaaacaaaataa

SEQ ID NO: 49671 - protein, 405 aa, Shewanella sp. MR-4
MMSVSLITKNVLLGIGGGIAAYKSADLVRRLKERGFDVRVVMSQSAMEFITPLTLQALSGHPVASSLLDPAAEAAMGHIELARWADLVIIAPATANLLARINAGMADELITTTCLATEAPIALCPAMNQQMYRNAATQANLTSLQGRGYTLWGPASGSQACGEVGPGRMLEPLEIAELATDFFATKDVSSQPLAGQSVLITAGPTREAIDPVRYISNHSSGKMGFALAKAAADMGAAVTLVAGPVNLATPEGVTRINVESAQNMLDVVMDNVDKKDIFIGCAAVADYRVSDIADCKIKKSAEEMQLALVRNPDILATVASLATRPFMVGFAAETHDVEAYARDKLKRKNLNMIAANDVSVAGLGFNADSNALRVFWPQGSQDLPATDKLTLARQLLSLIVKEKTK

SEQ ID NO: 49672 - DNA, 1218 bp, Shewanella sp. MR-7
  CDS (1)..(1218): transl_table=11
atgatgtctgtgagcctgataacgaaaaacgtcctactgggtattggtggcggcattgcggcctacaaaagtgcggatttagtgcgccgcttaaaagaacgcggctttgatgtgcgtgtggtgatgagccaaagcgccatggagtttattaccccactcactctgcaagccttatcaggccatcccgtggcatcaagcttactcgatccggctgccgaagcggcaatgggtcatatcgagctggcgcgctgggcggatttagtgattatcgcccctgccaccgcgaatttgctggcccgtattaatgcgggcatggcggatgagcttatcactacgacttgccttgcgaccgaagcgccaatagccctgtgccctgcgatgaatcagcagatgtatcgcaatgcggccactcaagccaatttagcgagtttacaaggccgtggttacaccctgtggggccccgccagcggcagccaagcctgcggcgaagtaggtcccggccgtatgctcgaaccgcttgagattgccgagctggcaacggacttttttgcaacaaaagatgtctcctcacagcccctagcaggccagtcggtgctcattaccgctgggccaacccgtgaagctatcgatccagtgcgttatatctctaatcacagctcaggcaagatgggattcgccttagcgaaagccgccgccgacatgggcgccgctgtgaccttggtcgcaggaccagtaaatttagccacacctgaaggggtcacgcgaatcaatgttgaatctgcgcaaaacatgctcgatgctgtgatagataatgttgataaaaaagatatttttatcggctgcgcggcggttgccgactatcgcgtcagcgatattgcggactgtaagatcaaaaagtccgccgaagaaatgcaacttgcgctggtgaggaatcctgatatcttagcgacggtcgcaagcttggcaaaccgtccttttatggtgggatttgccgccgaaacccatgatgtagaaacctacgcccgcgataaactcaaacgcaaaaatttgaatatgatcgccgcaaacgatgtatccgttgctggtcttggctttaatgccgatgccaatgccctgcgtgtattctggccgcagggtagtcaagatttgcctgctaccgataagctcacgttggctcggcaattactttcgttgatagtgaaagaaaaaacaaaataa

SEQ ID NO: 49673 - protein, 405 aa, Shewanella sp. MR-7
MMSVSLITKNVLLGIGGGIAAYKSADLVRRLKERGFDVRVVMSQSAMEFITPLTLQALSGHPVASSLLDPAAEAAMGHIELARWADLVIIAPATANLLARINAGMADELITTTCLATEAPIALCPAMNQQMYRNAATQANLASLQGRGYTLWGPASGSQACGEVGPGRMLEPLEIAELATDFFATKDVSSQPLAGQSVLITAGPTREAIDPVRYISNHSSGKMGFALAKAAADMGAAVTLVAGPVNLATPEGVTRINVESAQNMLDAVIDNVDKKDIFIGCAAVADYRVSDIADCKIKKSAEEMQLALVRNPDILATVASLANRPFMVGFAAETHDVETYARDKLKRKNLNMIAANDVSVAGLGFNADANALRVFWPQGSQDLPATDKLTLARQLLSLIVKEKTK

SEQ ID NO: 49674 - DNA, 1254 bp, Alkalilimnicola ehrlichei MLHE-1
  CDS (1)..(1254): transl_table=11
atgagtacgtcagccatccagcgaatcgtggtgggcatgaccggcggtatcgccgcctacaagacaccggacctggtgcggcggctgcgcgagcgcgggctcgaggtccgcgtggtgatgacggagggggcccagggcttcgttaccccgctcacgctgcaggcggtctccggccaccgggtggccaccgagctgctggacgccgaggccgaggcggccatgggccacatcgaactcgcccgctgggccgaccagattctggtggccccggccagcgccaattttctcgcccgcctcgcctccggttttgccgatgacctgctcaccaccctgtgcctggccaccgaggcgcccattgcggtggccccggccatgaaccaagtgatgtggcgcgcgccggccacccgtgccaattgtgaacgcctgactgcccggggcgtgcgcctgctgggcccgggcgagggcgaccaggcctgcggcgagaccggcgccgggcgcatgctggagcctttggaactggtcgaggccctgctgggcgatgccgccgggccgggcccgggcgtcctgtccgggcggaccgtgctgatcacctccgggccgacccgcgaggccctggatccggtccgttacctcaccaaccacagctccgggaagatggggcacgccctggccgccgccgcccgcgatgccggggcgcgggtgctcttgatcagcggtcccactgagctgccggcgccgcatggggtcgagaccgtcgccgtggagagtgcccgggacatgcaccgggcggtcatggatcgggtcgccggcgccgatatcttcattgccgcggcggcggtggccgactaccgcccggagcagagcgccggcagcaagatcaaaaaaaccgacagcgagacggccctgcgtctggtacccaaccccgatatcctgcgcgaggtggcggccctagagcagtaccgtcccttcacggtgggcttcgctgctgagaccgacgcgctggaggcccacgcccggggcaagctggcccgcaaagggctggatatgatcgccgccaactgggtgggggcggaccgggggtttcataccgacgacaacgccctggaggtctactggcccgggggcggccataccagcctggcccgtgccgacaagccggcattggcccgtcaactcattaacctgatcaccgagcgctatcaccatgccgcaacccgtggaactgaagattctcgatccccgtctgggcagtga

SEQ ID NO: 49675 - protein, 417 aa, Alkalilimnicola ehrlichei MLHE-1
MSTSAIQRIVVGMTGGIAAYKTPDLVRRLRERGLEVRVVMTEGAQGFVTPLTLQAVSGHRVATELLDAEAEAAMGHIELARWADQILVAPASANFLARLASGFADDLLTTLCLATEAPIAVAPAMNQVMWRAPATRANCERLTARGVRLLGPGEGDQACGETGAGRMLEPLELVEALLGDAAGPGPGVLSGRTVLITSGPTREALDPVRYLTNHSSGKMGHALAAAARDAGARVLLISGPTELPAPHGVETVAVESARDMHRAVMDRVAGADIFIAAAAVADYRPEQSAGSKIKKTDSETALRLVPNPDILREVAALEQYRPFTVGFAAETDALEAHARGKLARKGLDMIAANWVGADRGFHTDDNALEVYWPGGGHTSLARADKPALARQLINLITERYHHAATRGTEDSRSPSGQ

SEQ ID NO: 49676 - DNA, 1227 bp, Hyphomonas neptunium ATCC 15444
  CDS (1)..(1227): transl_table=11
atgagcgccaaacgcatcctactcgtcatcggtggcggcattgccgcctataaaagccttgagctcatccgtgagctcggccggcgcggcattggcgcgcgcgtcatcctcacaaaggcgggcacagagtttgtcacgccgctctccgtcgccgcgctttccggcgaaaaagtgtatacggaactcttcagcctgaccgacgagaccgagatgggccatatcgagctttcccgctcggccgacctcgtcgtcgtctgccccgccaccgcagacctgatggccaaggccgttcacggccacgccaacgaccttgcgtccaccacgctgctcgccactgacaagccggtcctcatggtgcccgccatgaatgtgcgcatgtggcagcatggcgccacccagcgcaacattgcccagctccgcgcggatggcgttacagtcatggagcctgatgttggcccgatggcctgcggcgagttcggccccggccgcctgccggatgtgccgcgtatcgtggcgcagatcgaggcgatgctccgcccccggcagaaacgcctcgccggccgccacgccctcgtcaccgccgggccgacacgcgagccccttgatccggtgcgctacatctccaatcattcctccggcaagcagggctattccattgctgcggccctcgccgccgaaggcgccagggttacgctcgtctccggccctgtttctctcccagcccctgaaggcgtcacgctggtaaaggtcgaaaccgcccgcgagatgctcaaggcctgcgaagatgctctgccagcggatatctttatctcggtcgccgccgtcgcagactggcgcccggtgaaagcggccgacaagaagctcaagctgaaaggggagggcaaatcccccgccatcgagcttgccgaaaatccggacatcctgcgcacgatcagccacaagaagaaaaagcgcccggcactcgtcatcggctttgccgccgagacccacgacctggagcgccatgcgagcgaaaaactcgcccgcaagggctgcgactggatcgttgccaatgatgtctccggcgacgtcatgggcggcctcgaaaacgagatcgccctgattacccaggccggtatcgaccgctggccccgcatgcccaaggaagccgtcagcgcccgcctcgccgaaaagattgccgaggcctttgctggcgatgcagacggcctgtccctcgcggcggagtaa

SEQ ID NO: 49677 - protein, 408 aa, Hyphomonas neptunium ATCC 15444
MSAKRILLVIGGGIAAYKSLELIRELGRRGIGARVILTKAGTEFVTPLSVAALSGEKVYTELFSLTDETEMGHIELSRSADLVVVCPATADLMAKAVHGHANDLASTTLLATDKPVLMVPAMNVRMWQHGATQRNIAQLRADGVTVMEPDVGPMACGEFGPGRLPDVPRIVAQIEAMLRPRQKRLAGRHALVTAGPTREPLDPVRYISNHSSGKQGYSIAAALAAEGARVTLVSGPVSLPAPEGVTLVKVETAREMLKACEDALPADIFISVAAVADWRPVKAADKKLKLKGEGKSPAIELAENPDILRTISHKKKKRPALVIGFAAETHDLERHASEKLARKGCDWIVANDVSGDVMGGLENEIALITQAGIDRWPRMPKEAVSARLAEKIAEAFAGDADGLSLAAE

SEQ ID NO: 49678 - DNA, 1206 bp, Rhizobium leguminosarum bv. viciae 3841
  CDS (1)..(1206): transl_table=11
atggctctcagcggcaaacgcatcctcctcatcatctccggcggcatcgcggcctataagagcctggatctgatccgccggctgcgcgagcgcggcgcgagcgtgcgccctgtgatgaccaaaggcgcccaggaattcgtcacgccgcttgccgtcggtgcactggcggcggaccatgtcttcctcgatctgttttcgcggcaggacgaacaggatatcggccatatccgcctggcgcgcgaatgcgacctcgtgctgatcgcccctgccaccgccgatctgatggcgaagatggcgaacgggcttgccgacgatctcgcctcgaccgtgcttctggcgaccaacaggccggtgctggccgcaccggcgatgaaccccgccatgtgggcgcatccggcgacgcggcggaatgcggcgatgctcagagccgacggcatccgcttcgtcgggccgatggccggcgagatggcggaaagccgggaggccgggctcggccggatggcggaaccgctggagatcgtcgctgctgccgaaaccatgctcgacgatggagataagccgctcaagggacgcaaggcaatcgtcacgtcaggaccgacgcatgagccgatcgatccggtgcgctatatcgccaaccgctcctccggccggcagggccatgcgatcgccgcagcccttgcaaagctcggggcggaggtgacgctggtgtcagggccggtaacaattgcggaccccgtcggcgtaaacgtcgtgcatgtcgagcgggcagaggaaatgcgtgatgccgtgcttgcggcgctgccggccgacatcgccgtgatggtcgcggcggttgctgactggcgcgtagcctcggcggccgaccagaagctgaagaaacatccgggcgaatccattccgacgctggcgctgaccgagaatccggacatcctgaaaaccgtcggccatcatacgatgcggccgaaactggtgatcggctttgccgccgagacgcaggacgtggaaatcaatgcgaaggcgaaactcgagaggaagggcgccgacatgatcgtcgccaatgacgtttctcccgcgacaggcatcatgggcggcagccgcaacagggtcaaactcgtccgccgcgacggggtcgagcaatggcctgacctggcgaaggaagaggttgccgaacggctcgcggcgctgatcgccaagcagttcagctaa

SEQ ID NO: 49679 - protein, 401 aa, Rhizobium leguminosarum bv. viciae 3841
MALSGKRILLIISGGIAAYKSLDLIRRLRERGASVRPVMTKGAQEFVTPLAVGALAADHVFLDLFSRQDEQDIGHIRLARECDLVLIAPATADLMAKMANGLADDLASTVLLATNRPVLAAPAMNPAMWAHPATRRNAAMLRADGIRFVGPMAGEMAESREAGLGRMAEPLEIVAAAETMLDDGDKPLKGRKAIVTSGPTHEPIDPVRYIANRSSGRQGHAIAAALAKLGAEVTLVSGPVTIADPVGVNVVHVERAEEMRDAVLAALPADIAVMVAAVADWRVASAADQKLKKHPGESIPTLALTENPDILKTVGHHTMRPKLVIGFAAETQDVEINAKAKLERKGADMIVANDVSPATGIMGGSRNRVKLVRRDGVEQWPDLAKEEVAERLAALIAKQFS

SEQ ID NO: 49680 - DNA, 1194 bp, Pediococcus pentosaceus ATCC 25745
  CDS (1)..(1194): transl_table=11
atgaaaattttatttgttattactggcggaattgccgaatataaagtggttgaagcggtacggtttcaaatcaaaagtggtaatcaagtcaaggtagtgatgacgcaaatggccaaaaaattcgtcacaccattaacgtttgcaacacttaccaatgaccttgtctatgatgattttgaaattaatacggaaaacccagttgctcatgtagctctggcagactgggcagataaaattgtaatcgccccagccacggctaattttattggaaaaatggcgaatggaattgcggatgattttgcttcaactgtagtgattgcttcaacagcaactaagctgttgctaccagcaatgaatgttaatatgtggaataatccagcggttcaacggaatatcgaacaattaaaagtagatggagtagtcgttttagaaccagctgttggagagctggctgaaggttattctggaaaaggacgttttccggatgctgaaatcgtaaatgcctttatcagcacgccccttgaaaagcgggaaaatctctttaaaggaacacacattgtggttactgctggggggacgcgtgaagcgattgatcccgtacgttatattggtaatgaatcatctggtaagatggggtttgcgcttgctcaagtagcagaacggttaggagcgcaggttactttaatttctggacctacaaacttagttttaccagcgaaatcaagtattcaacggataaatattaagagtgtagcagacttacaggccgctcttgatacagcagtacaagatgcagatatattgataatggccgcagcagtttcagattaccgcgtggcgaaaatagcagatcataaaatgaaaaaagatgattttaatggtgaactggaaattaaattgattgaaaatcctgatattttagcgacactaaaacgtccagactcacttcgatacgttgtggggtttgctgcggagacgaatgatttaattgaaaatgctcaacgtaaaattcttaagaaaaacctaaatatgattgtggctaatgatgtaggtaatccccaaatcggttttgaatctaatcagaatgctgtcaccattctacgtccgcaccaagctaatatagaattgaaaaagaatgataaatcgataattgctgaacagattttaaagctaatcgaccaagaaattaattga

SEQ ID NO: 49681 - protein, 397 aa, Pediococcus pentosaceus ATCC 25745
MKILFVITGGIAEYKVVEAVRFQIKSGNQVKVVMTQMAKKFVTPLTFATLTNDLVYDDFEINTENPVAHVALADWADKIVIAPATANFIGKMANGIADDFASTVVIASTATKLLLPAMNVNMWNNPAVQRNIEQLKVDGVVVLEPAVGELAEGYSGKGRFPDAEIVNAFISTPLEKRENLFKGTHIVVTAGGTREAIDPVRYIGNESSGKMGFALAQVAERLGAQVTLISGPTNLVLPAKSSIQRINIKSVADLQAALDTAVQDADILIMAAAVSDYRVAKIADHKMKKDDFNGELEIKLIENPDILATLKRPDSLRYVVGFAAETNDLIENAQRKILKKNLNMIVANDVGNPQIGFESNQNAVTILRPHQANIELKKNDKSIIAEQILKLIDQEIN

SEQ ID NO: 49682 - DNA, 1203 bp, Oenococcus oeni PSU-1
  CDS (1)..(1203): transl_table=11
atgattttttttaaaaataaacatattttagtcgtcgttaccggcggcatagccgcctataagtcggcaattttagttcgttccttaattaaaaagggaggcaatgtccgagttgcaatgactaaatcggctgagaattttgttaccccacttactttttcgaccttaaccaagcacactgtactgactgatatctttaaagcaaacgacggtagcgttgatcatgttgcctgggcccgttgggctgattttattttcgtagttccagcaaccgcaaattttgttgctaaaatggctcatgggatcgcagatgacactgcatcgacacttttattggccagtccagcagaaaaagtcattgctccgtcaatgaatgatcaaatgtggaataatccggcgacggtccgcaacataaagcagttagatacagacggaattttaataatcgaaccaactaccggttttttggctgaaggttatgacggcaaaggtcgtcttccggaaagcaatgatattttagaacaagcccaaattcgactactggccaaaaacggaaaacttaaaaataaaaatgtcttaataactgccggaggaacaaaagaagcacttgatcctttacgttatataactaatcgttcgtcaggcaaaatgggttacgcgctggcccaggcggctgtcgaagctggagctgtcgtaaccttgatttcgacagtagaacgtcgattgccctttggcagtaaattaataaaagtgaccgatgctcgggaaatgctggacaccgtgttggaacattttgataagacagatatcttcatttcagcagcagcagtttctgattttcgtccagccaaacaatcaaatcaaaaaataaaaaaaaccggtaaccaaggattaaaagtagagcttgttcaaaatccagatattctagcaactgtcggagcaaaaaaaaccggacaattcgttgttggttttgccgctgaaacagaaaatatagtcgagtatgccaaaaacaaattggttaaaaagcatgccgatatgatcgttgcaaacgaggttggacaccctgatagtggatttaatgtcgacaataatcgtgtgattattttccgtccaaaacaagcgcagaaggaattccctttacaaagtaaaatcgatactgcccgttcaatcatagaagaaattatcaaaagcgtatttgaataa

SEQ ID NO: 49683 - protein, 400 aa, Oenococcus oeni PSU-1
MIFFKNKHILVVVTGGIAAYKSAILVRSLIKKGGNVRVAMTKSAENFVTPLTFSTLTKHTVLTDIFKANDGSVDHVAWARWADFIFVVPATANFVAKMAHGIADDTASTLLLASPAEKVIAPSMNDQMWNNPATVRNIKQLDTDGILIIEPTTGFLAEGYDGKGRLPESNDILEQAQIRLLAKNGKLKNKNVLITAGGTKEALDPLRYITNRSSGKMGYALAQAAVEAGAVVTLISTVERRLPFGSKLIKVTDAREMLDTVLEHFDKTDIFISAAAVSDFRPAKQSNQKIKKTGNQGLKVELVQNPDILATVGAKKTGQFVVGFAAETENIVEYAKNKLVKKHADMIVANEVGHPDSGFNVDNNRVIIFRPKQAQKEFPLQSKIDTARSIIEEIIKSVFE

SEQ ID NO: 49684 - DNA, 1206 bp, Leuconostoc mesenteroides subsp. mesenteroides ATCC 8293
  CDS (1)..(1206): transl_table=11
atgaatgatttctatagaaataagaatatattagtgattgtgacaggtagcatttcggcttacaagtcagcaacattagtacgcgaatttgttaaaagcggtgctcatgttcgtgtgggaatgacggctgcggcccaaaaatttattactgtacaaacattagctgttttatctaaacatgatgtgttaactgatctttttcgtgatgagaaggctgcggttactcatattgaatgggctaagtgggcagacatgatatttgttgtgccggccactgctaacattattggaaaaatagcaaatggtatcgctgatgatgctgtgactgcgacggtaatggcatcacctgcggctaaagttatcgccccagcgatgaacgatgttatgtttaataatgacgcggttgttcgtaatttgaatttattaaaaagtgatggttggtttattattgacccagcgattggtttcttagccgaaggttacgagtcgcaaggtcgcctaccggaacctgtgacaattataaatcaggcagctattcgtatacaggcgcgtggcggtgaactaaaaggaaagaaacttgttattacagctggcgggacacgtgaagcgcttgatccagtgcggtatttaacaaatcgttcttcaggaaaaatgggctatgctttggcacaggtagctgcagagttaggtgcaacggtggtacttataaccacaacaaaacgtgaagaattgtacggcgtccgagaaatagttgttacttctacacgtgacatgcatacagcggttgtgcaagaattttctgatgcggatgttttcattagttcggcagctgtatctgattatcggcctgcttcacaagctgaaaacaaaataaaaaaagtaggtcacgagaatttaacgattgaattaattcaaaatcctgatatattatcagatattggtcatatgaagaaagccgggcaaattgttgtgggatttgctgctgaaacgcaaaatgttctcgcgtctgcacaaaaaaagctatcaaagaagaatgcagatttcttaattgctaatgatgttagtaatgtggatagtggttttgactctgataataataaagtaacgattttatcacgtgataaagacccagaaaaaattgaattgttaccaaaaattgacattgcgcgggctatattagatagagtagttaaaacactcgcataa

SEQ ID NO: 49685 - protein, 401 aa, Leuconostoc mesenteroides subsp. mesenteroides ATCC 8293
MNDFYRNKNILVIVTGSISAYKSATLVREFVKSGAHVRVGMTAAAQKFITVQTLAVLSKHDVLTDLFRDEKAAVTHIEWAKWADMIFVVPATANIIGKIANGIADDAVTATVMASPAAKVIAPAMNDVMFNNDAVVRNLNLLKSDGWFIIDPAIGFLAEGYESQGRLPEPVTIINQAAIRIQARGGELKGKKLVITAGGTREALDPVRYLTNRSSGKMGYALAQVAAELGATVVLITTTKREELYGVREIVVTSTRDMHTAVVQEFSDADVFISSAAVSDYRPASQAENKIKKVGHENLTIELIQNPDILSDIGHMKKAGQIVVGFAAETQNVLASAQKKLSKKNADFLIANDVSNVDSGFDSDNNKVTILSRDKDPEKIELLPKIDIARAILDRVVKTLA

SEQ ID NO: 49686 - DNA, 1200 bp, Solibacter usitatus Ellin6076
  CDS (1)..(1200): transl_table=11
atgaaagtcctcctcggagtcggcggcggcatcgcggcgtataaatccgcggagctcgcccgcctcctgatgcagcagggccatcacgtgcaagtcgtcatgacccacgcggccgaggaattcgtccgccccctcaccttcgccgccctcaccggccgtaaagtcctcaccaacctcttcgccatcgaatccgcgatcgagcatatctcggtcgccgaggaacacgaaatcctcgtcgtcgcccccgctaccgcagacctcatggcgaggctcgcccacggcgccgccgacgatttcctcaccaccctctacctcgccttcaccggccccgtggtcatcgcgcccgccatgaacgtcaacatgtggcagcaccccgccacgcaggccaacctggagaccctcgtcaagcgcggccacatcatcgtagaacccggcagcggctatctggcctgcggcatgaccggacccgggcgcctcgccgatcccgaagccatcgcggccgccatcgagcgcagcgccaaccagcgccgcgatctggaaggcgaaaccgtcctgatcaccgccggccccacccaggagccgctcgaccccgtccgctacatttccaaccgctccagcggcaagatgggctacgcgctcgccgaagctgccgccgcacgcggcgcccgcgtcatcctggtctccggcccggttcaccttgcgccaccgcgcggcgtcgaagtcatccacgtgcgcaccgcggtcgaaatgcgcgaccaggtgatggccaacctccagctcgccggtatcgtcatcaaggccgccgccgtcgccgatttccacctctccaaggtccccgaccagaaggtcaagaagaccgctgctcgcatctcgctcgagctcgacccgactccggatatcctcgccgagctcggccgtaaaaagggtaactacctgctggtcggcttcgccgccgagacccagaacctgcagcaggaagcgcgccgcaagctcgaaaccaagaactgcgacatggtggtcggcaacctggtcggcggcagcgaactcggcttcgaatccgacgaaaacgaggtcgtgctcacccgccgccagggcgaaccgatccagattccccgcgcctccaagcgccacatcgcggaccgcatcttcgacgaaatcctggccctgcgcctgaccctacacgccaccgatggacgctga

SEQ ID NO: 49687 - protein, 399 aa, Solibacter usitatus Ellin6076
MKVLLGVGGGIAAYKSAELARLLMQQGHHVQVVMTHAAEEFVRPLTFAALTGRKVLTNLFAIESAIEHISVAEEHEILVVAPATADLMARLAHGAADDFLTTLYLAFTGPVVIAPAMNVNMWQHPATQANLETLVKRGHIIVEPGSGYLACGMTGPGRLADPEAIAAAIERSANQRRDLEGETVLITAGPTQEPLDPVRYISNRSSGKMGYALAEAAAARGARVILVSGPVHLAPPRGVEVIHVRTAVEMRDQVMANLQLAGIVIKAAAVADFHLSKVPDQKVKKTAARISLELDPTPDILAELGRKKGNYLLVGFAAETQNLQQEARRKLETKNCDMVVGNLVGGSELGFESDENEVVLTRRQGEPIQIPRASKRHIADRIFDEILALRLTLHATDGR

SEQ ID NO: 49688 - DNA, 1221 bp, Magnetococcus sp. MC-1
  CDS (1)..(1221): transl_table=11
gtggatttttggcagggtaaaaagcttgtcgtggcagtaagtggtggaattgccgcctacaaatctttggagcttatccgtcgtctacgcgagttggggtgctgtttgttgggggtggtggtaacccctgcggcgctgcaatttgtgacaccgctctctttgacggcactctctgaggcacccttgtatgacgatcttttttccctgacccaagagcgggagatgggtcatatacggttggcgcgagaggccgatctgttgattgtggctcccgccacggctgatttaatggcgcgtatggctcaggggttaggggatgacctgctcaccaccctgttgttggcgcggcgcgggccggtgctgctggccccagccatgaacagcgccatgtggttacatccggcaacccagcgcaatgtggcacaactgcgtgaggatgggattcacatggtagggccagccagtggctccctggcgtgtggcgaggtgggaccggggcgcatggccgaagccgaggccattatagaggctgcccaaggggtgctcaccccgcaacgtttggccgggcggcgtattttaattacggcaggacccacccgcgaggcggtggacccggtgcgttttatcagtaaccgttccagtggtcgcatggggtttgccattgcggcggcggcacaacgtatgggggcgcaggttacgttggtgcatggtccctgtggtatcccgccgcctaggggtgtgctgccggtggcagtagagagtgcggaacagatgttggcggcggtgcaggtggcttggccacaaagcgatgcggccattatgagtgcggcggtatcggactaccgcccgctacaggtggccccgcaaaagttgaaaaaagaggcccaagggggtcagcagatccagtggtcgttgacggaaaaccccgatattttggcctatgcaggggcaaataaacagccggggcagtggttggtcgggtttgccgctgagaccgaaaagctgttgcagcacggcacggaaaaacgtcgccgtaaggggtgtgacctgctggtggtcaacgatgtttcgcgccaggatatcggctttgatgccacccataatgaggtgatggtgttaggtccaggggaggatgcggtggagtcgtgggcgcggtgccgtaaagatgagattgcccaacagctgatggagcgtctggccgcatgtatggaaacggcgtaa

SEQ ID NO: 49689 - protein, 406 aa, Magnetococcus sp. MC-1
MDFWQGKKLVVAVSGGIAAYKSLELIRRLRELGCCLLGVVVTPAALQFVTPLSLTALSEAPLYDDLFSLTQEREMGHIRLAREADLLIVAPATADLMARMAQGLGDDLLTTLLLARRGPVLLAPAMNSAMWLHPATQRNVAQLREDGIHMVGPASGSLACGEVGPGRMAEAEAIIEAAQGVLTPQRLAGRRILITAGPTREAVDPVRFISNRSSGRMGFAIAAAAQRMGAQVTLVHGPCGIPPPRGVLPVAVESAEQMLAAVQVAWPQSDAAIMSAAVSDYRPLQVAPQKLKKEAQGGQQIQWSLTENPDILAYAGANKQPGQWLVGFAAETEKLLQHGTEKRRRKGCDLLVVNDVSRQDIGFDATHNEVMVLGPGEDAVESWARCRKDEIAQQLMERLAACMETA

SEQ ID NO: 49690 - DNA, 1230 bp, Shewanella sp. ANA-3
  CDS (1)..(1230): transl_table=11
atgatgtctgtgagcctgataacgaaaaacgtcctactgggtattggtggcggcatagcggcctacaaaagtgcggatttagtgcgccgcttaaaagaacgcggctttgatgtgcgagtggtgatgagccagagtgccatggaatttattacccctctcactctgcaagccttatcaggccatcccgtggcatcaagcttactcgatccggcggccgaagcggcaatgggtcatatcgaactcgcgcgctgggcggatttagttattatcgcccccgccaccgcgaatttgctggcccgtatcaatgcgggcatggcggatgagcttatcaccaccacttgtcttgcgaccgaagcaccgatagccctgtgtcccgcgatgaatcagcagatgtatcgcaatgtcgcaacccaagccaatttagcgagtttacaaggccgaggttataccctgtggggccccgccagcggcagccaagcctgtggcgaagtaggccctggtcgtatgctcgaaccgttagaaatcgcagaattagccagtcgcttttttgcaacaaaagatgtctatgctgaacaggaaactcagccgctagcgggccagtcggtgctcattaccgcaggaccaacccgcgaagccatcgatccggtgcgttatatctctaatcacagctcaggcaagatgggattcgccttagcgaaagccgccgccgacatgggcgccgctgtgaccttggtctcaggtccagtaaatttagccaccccagagggggtgacgcgaatcgatgtcgaatcggcacaaaatatgctcgacgcggtgatggataatgttgataaaaaagatattttcattggctgcgcggcggttgccgactatcgcgtcagtgatattgcggactgtaagatcaaaaagtccagtgaggaaatgcaacttgcgctggtgaggaatcctgatatcttagcgacggtcgcaagcttggcaaaccgtccttttgtggtgggatttgccgccgaaacccatgatgtagaagcctacgcccgcgataaactcaaacgcaaaaatttgaatatgatcgccgcaaacgatgtatccgttgctggtcttggctttaatgccgatgccaatgccctgcgtgtattctggccgcagggtagtcaagatttgcctgctaccgataagctcacgttggctcggcaattactttcgttgatagtgaaagaaaaaacaaaataa

SEQ ID NO: 49691 - protein, 409 aa, Shewanella sp. ANA-3
MMSVSLITKNVLLGIGGGIAAYKSADLVRRLKERGFDVRVVMSQSAMEFITPLTLQALSGHPVASSLLDPAAEAAMGHIELARWADLVIIAPATANLLARINAGMADELITTTCLATEAPIALCPAMNQQMYRNVATQANLASLQGRGYTLWGPASGSQACGEVGPGRMLEPLEIAELASRFFATKDVYAEQETQPLAGQSVLITAGPTREAIDPVRYISNHSSGKMGFALAKAAADMGAAVTLVSGPVNLATPEGVTRIDVESAQNMLDAVMDNVDKKDIFIGCAAVADYRVSDIADCKIKKSSEEMQLALVRNPDILATVASLANRPFVVGFAAETHDVEAYARDKLKRKNLNMIAANDVSVAGLGFNADANALRVFWPQGSQDLPATDKLTLARQLLSLIVKEKTK

SEQ ID NO: 49692 - DNA, 1275 bp, Mycobacterium avium 104
  CDS (1)..(1275): transl_table=11
gtgtacgaccgcaatcgggcttttacacgggccgcgaggatcgtcgtcggcgtctccggcggcatcgccgcctacaaggcgtgcaccgtcgtccgccagctgtctgaggccggtcattcggtccgggtcatcccgaccgagtccgcgctgcgtttcgtcggcgcggccacctttgaggcgctctccggccagccggtgcacaccggcgtcttcaacgacgttcccgaggtcccgcacgtccagctcggcaagcaggccgacctggtcgtggtggcgccggcgacggcggatctgctggcgcgcgcggtgcacggccgggccgacgatctgctgaccgccacgctgctcaccgcccgatgcccggtgctgttcgcgccggccatgcacaccgagatgtggttgcacccggccaccgtcgacaacgtggccacgttgcgccggcggggcgcggtggtgctcgagcccgccgccgggcgcctcaccgggacggacagcgggtcgggccggctgcccgaagccgaggagatcaccaccctggcccacctgctgctggaacgccacgacgcgctgccctacgacctcgccggctgcaagatgctggtcaccgccggcggcacccgcgaaccggtcgacccggtgcgcttcatcggcaaccgcagctctggcaagcagggctatgccgtggcgcgggtggcggcccagcgcggcgccgaggtcaccctgatcgccgggcacaccgccgggctgatcgatcccgccggtgtcgaggtcgtccacgtcagctccgcggcccagctgggcgacgcggtgtccaagcgcgccccggaggccgacgtgctggtgatggccgccgcggtcgccgacttccggcccgcgcacgttgccgccgcgaagatcaaaaagagcgcctcgaatgagacggcgcccccgacgatcgagctggtgcgcaacgacgacgtgctcgccggggcggtgcgggcccgcgcccacgggcagttgcccaacatgcgggccatcgtcggctttgccgccgagaccggcgacgccagcggcgacgtgctgtttcacgcccgggccaagctgcagcgcaagggctgcgatctgctggtggtcaacgccgtcggcgagggccgcgcgttcgaggtggacagcaacgacggctggctgctggcctccgacggcaccgagtccgcactgcagcacggctccaagacattgatggccagtcgtatcgtggatgcgatcgccgcgttcctgcacggggacagcgggtaa

SEQ ID NO: 49693 - protein, 424 aa, Mycobacterium avium 104
MYDRNRAFTRAARIVVGVSGGIAAYKACTVVRQLSEAGHSVRVIPTESALRFVGAATFEALSGQPVHTGVFNDVPEVPHVQLGKQADLVVVAPATADLLARAVHGRADDLLTATLLTARCPVLFAPAMHTEMWLHPATVDNVATLRRRGAVVLEPAAGRLTGTDSGSGRLPEAEEITTLAHLLLERHDALPYDLAGCKMLVTAGGTREPVDPVRFIGNRSSGKQGYAVARVAAQRGAEVTLIAGHTAGLIDPAGVEVVHVSSAAQLGDAVSKRAPEADVLVMAAAVADFRPAHVAAAKIKKSASNETAPPTIELVRNDDVLAGAVRARAHGQLPNMRAIVGFAAETGDASGDVLFHARAKLQRKGCDLLVVNAVGEGRAFEVDSNDGWLLASDGTESALQHGSKTLMASRIVDAIAAFLHGDSG

SEQ ID NO: 49694 - DNA, 1245 bp, Mycobacterium smegmatis str. MC2 155
  CDS (1)..(1245): transl_table=11
gtgagcgcgcgcaagcggatcgtcgtcggcgtcgccggcgggatcgccgcctacaaggcgtgcactgttgtccgtcaactcaccgaggctgggcattcggtgcgggtcgtccccaccgagtccgcgttgcgcttcgtcggtgccgcgaccttcgaggcgctgtccggtaacccggtgcacaccggggtgttcaccgacgtccacgaggtgcagcacgtccgcatcggccagcaggccgacctcgtcgtcatcgcacctgccaccgccgatctcctggcccgcgcggtcgcggggcgtgccgacgatctgctgaccgccacgctgctcaccgcacgatgccccgtgctgttcgcgcctgccatgcacaccgagatgtggttgcacccggccaccgtcgacaacgtggccacgctgcgccgtcgcggtgcggtggtgctggaaccggcgtccggacgtctcacaggcgccgacagcggcccgggccggctccctgaggccgaggagatcaccacactcgcgcagctgctgctggaacgcgccgacgcgcttccctacgacatggccggggtcaaggccctggtgaccgctggtggtacgcgtgagccgctcgacccggtccgtttcatcggcaaccgcagctccggcaagcagggctacgccgtcgcgcgtgtgctggcccagcgtggcgccgacgtgacgctcatcgcgggcaacacggccggtctgatcgatcccgcgggcgtcgagatggtccacatcggctcggcgacccagctgcgcgacgcggtgtccaagcacgcacccgacgcgaacgttctggtgatggccgccgcggtcgccgacttccgtcctgcgcacgttgccgccgcgaagatcaagaagggcgcctcggaacccagctcgatcgatcttgtccgcaacgacgacgtgctggccggagcggtccgcgccagggccgacggacagttgccaaacatgcgcgcgatcgtcggtttcgccgcggaaaccggggacgcgaacggcgacgtgctgttccacgccagggcgaaactcgagcgtaagggctgtgacctgctggtcgtcaacgccgtgggggagaaccgggcattcgaggtggaccacaacgacggatggttgctgagtgccgacggcaccgagtccgcactggagcacggctcgaagacgctcatggccacccgtatcgtggactcgattgcggccttcctgaagagccaggacgggtag

SEQ ID NO: 49695 - protein, 414 aa, Mycobacterium smegmatis str. MC2 155
MSARKRIVVGVAGGIAAYKACTVVRQLTEAGHSVRVVPTESALRFVGAATFEALSGNPVHTGVFTDVHEVQHVRIGQQADLVVIAPATADLLARAVAGRADDLLTATLLTARCPVLFAPAMHTEMWLHPATVDNVATLRRRGAVVLEPASGRLTGADSGPGRLPEAEEITTLAQLLLERADALPYDMAGVKALVTAGGTREPLDPVRFIGNRSSGKQGYAVARVLAQRGADVTLIAGNTAGLIDPAGVEMVHIGSATQLRDAVSKHAPDANVLVMAAAVADFRPAHVAAAKIKKGASEPSSIDLVRNDDVLAGAVRARADGQLPNMRAIVGFAAETGDANGDVLFHARAKLERKGCDLLVVNAVGENRAFEVDHNDGWLLSADGTESALEHGSKTLMATRIVDSIAAFLKSQDG

SEQ ID NO: 49696 - DNA, 1311 bp, Nocardioides sp. JS614
  CDS (1)..(1311): transl_table=11
atgcgggcagctcgttcagcgagtgatccgctgaccaccagcagcacccacgaggccgcctccccgtcaggggggcggcccgctgctcgtcccgagcaggctccgcgggtggtgctcggggtctccggcggcatcgcggcctacaaggtctgcgagctgctgcgccgcttcaccgagtcaggtcatgacgtgaccgtcgtgccgaccgtcgccgcgctggagttcgtcggagccccgacctgggcagcgctgtccggcaagcccgtgtcgaccgaggtgtggaacgacgtccaccaggtgccgcacgtgcggatcggccagtgggcggacctcctcgtgctcgcgcccgcgaccgccgacctgatcgcgaaggccgcccacgggctggcggacgacctgctcaccaacacgctgctgaccgcccgctgtccggtggtcctcgccccggcgatgcacaccgagatgtgggagcacccggcgacccaggcgaacgtggccacccttcgggagcggggcgtcgtggtcatcgagcccgccgagggccggctcaccggcaaggacaccggcaagggccggctgcccgagccggacgcgatcttcgacctgtgccgggagctgctgacccgggggagcggtgctcccgacctggccgggcggcaggtcctggtcaccgccggcggcacccgcgagtacctcgacccggtccggttcctcggcaacaggtcctcgggcctgcagggctacgccctggcccgcgcggctgccgcgcgtggcgccgaggtcaccctcgtcgccgcgaacgtcagcctccccgaccccgcgggggtgaagatcgtgcgggtcggcagcaccgccgagctgcgcgacgcggtgctggccggcgctgcgtcggccgacgcggtggtgatggcagccgcgcccgcggacttccggcccgtcgacgtgagcgaggcgaagatcaagaaggacgtcgacggctccgcgccgaccgtgaccctcgcgcagaaccccgacatcctccacgagatcagcacccatcgggcccgcccgggcgccgtgatcgtcggcttcgccgccgagaccggcgacgagaccggaaccgtgctcgacctggcccgcgccaagctcgcccgcaagggctgcgacctgctggtggtcaacgacgtcagcggcggcgcggtcttcggcagcccggagaaccaggcggtgatcctcgcggcggacggcgccgaggtggaggtgccgcggggcccgaagaacgcgctggcccacatcatctgggaccaggtggcgagcaggctgcaggattga

SEQ ID NO: 49697 - protein, 436 aa, Nocardioides sp. JS614
MRAARSASDPLTTSSTHEAASPSGGRPAARPEQAPRVVLGVSGGIAAYKVCELLRRFTESGHDVTVVPTVAALEFVGAPTWAALSGKPVSTEVWNDVHQVPHVRIGQWADLLVLAPATADLIAKAAHGLADDLLTNTLLTARCPVVLAPAMHTEMWEHPATQANVATLRERGVVVIEPAEGRLTGKDTGKGRLPEPDAIFDLCRELLTRGSGAPDLAGRQVLVTAGGTREYLDPVRFLGNRSSGLQGYALARAAAARGAEVTLVAANVSLPDPAGVKIVRVGSTAELRDAVLAGAASADAVVMAAAPADFRPVDVSEAKIKKDVDGSAPTVTLAQNPDILHEISTHRARPGAVIVGFAAETGDETGTVLDLARAKLARKGCDLLVVNDVSGGAVFGSPENQAVILAADGAEVEVPRGPKNALAHIIWDQVASRLQD

SEQ ID NO: 49698 - DNA, 1200 bp, Azoarcus sp. BH72
  CDS (1)..(1200): transl_table=11
atgaccagtctccaaggcaagaggatagtgctgggtgttaccggtggggttgccgcctacaaggcggccgaactggtacgtctgctgggcaaggccggtgtggacgtccacgtcgtactgaccgaggcgggcgcgcgcttcgtcggcgcggtcacgttccaggcgctgtcgggcaatccggtgtggagcgacctgtgggacccgcgcatgcccaacaacatggcgcacatcgacctcggccgtgaggccgacgcggtgctcgtcgcgccggcatcggcggacttcatcgcccgcatcgcgggcggccgggccgacgatctgctgaccaccttgtgccttgcgcgcgattgccccttgctggtggcgcctgcgatgaaccgccagatgtgggaacaccctgccacccagcgcaacgtcggccaggccgtcgccgacggcgtcacgatgcttggcccggcggctggcgaccaggcttgcggggaaaccggcatggggcgcatggaagagccggaggcgctgctcgagggcctggaggccttcttcgtggcgaagacgctggcggggcgccgggtcgtgttgacggccgggccgaccttcgaggccatcgatccggtgcggggcatcaccaacagcagttccggcaagatgggatacgcgctggcccgcgcctgtgcccaggccggcgccgaggtcgtgctcgtcagtggcccggtggccttgccggtgccgaggggtgttcgccgcgtcgatgtgcgcagtgcgctggagatgcgcggcgccgtgctggacgccctgccgggcactgacgtcttcatcgccgtcgccgcggtggcggactaccgcccggcgcagacggcggagcacaagatcaagaagtcgggcgacaccttgcacctttccctgacgcccaatcccgacatcctcgccgaggtcgcggcgcgcccggatgcgccgttctgcgttggttttgccgccgaaagccgcgatctggatgcctatgcggagggcaagcggcgcaacaagcggctgccgctgctcgtgggcaatctggtcggcgacggcctcgggggcgacgacaacctcgtcgtgctgtacgacgatcgcggcaagcacccgttgccacgtgcgcccaaaaccgaactcgcccgacagatcgtcgaccatctggccgccctgctgccgccttcgaattcccgctga

SEQ ID NO: 49699 - protein, 399 aa, Azoarcus sp. BH72
MTSLQGKRIVLGVTGGVAAYKAAELVRLLGKAGVDVHVVLTEAGARFVGAVTFQALSGNPVWSDLWDPRMPNNMAHIDLGREADAVLVAPASADFIARIAGGRADDLLTTLCLARDCPLLVAPAMNRQMWEHPATQRNVGQAVADGVTMLGPAAGDQACGETGMGRMEEPEALLEGLEAFFVAKTLAGRRVVLTAGPTFEAIDPVRGITNSSSGKMGYALARACAQAGAEVVLVSGPVALPVPRGVRRVDVRSALEMRGAVLDALPGTDVFIAVAAVADYRPAQTAEHKIKKSGDTLHLSLTPNPDILAEVAARPDAPFCVGFAAESRDLDAYAEGKRRNKRLPLLVGNLVGDGLGGDDNLVVLYDDRGKHPLPRAPKTELARQIVDHLAALLPPSNSR

SEQ ID NO: 49700 - DNA, 1251 bp, Mycobacterium sp. KMS
  CDS (1)..(1251): transl_table=11
gtggaccgcaagcggatcatcgtcggcgtcgccggaggcatcgccgcctacaaggcgtgcacgctggtccgtcagctgaccgaagccggacacgacgtccgcgtgctgcccaccgagtcggcgctgcgcttcgtcggcgccgcgacgttcgaggccctgtccggccacccggtccacaccggggtctgggatgacgtccacgaggtgccgcacgtgcgcatcgggcaggacgccgatctggtggtcgtggcgccggccaccgccgacctgctggcccgtgcggtcgccggccgcgccgacgatctgctgaccgccacgctgctgaccgcccggtgcccggtgctgttcgccccggcgatgcacaccgagatgtggttccaccccgcgaccgtggacaacgtcgcgaccttgcgccgccgtggtgcggtcgtcctcgaacccgcctccggacggctcaccggcgccgacagcggtgccggccggctgcccgaggccgaggagatcgccaccctggcccaactgctgctggtgcgcggtgacgcgctgccctacgacctggccggggtgaaggccctggtgaccgccggcggcacccgcgaaccgatcgaccccgtccggttcatcggcaaccgcagttccggtaagcagggctacgcgatggcgcgggtgttggcccagcgcggcgccgacgtcacgttgatcgccgggaacaccgcgggtctggtcgacccggccggcgtcgacgtggtgcacatcgggtccgcggcccaactgcgcgatgcggtgtccaaacacgcccccgccgcgcacgtgctggtgatggcggccgcggtcgccgactttcggcccgtccacgccgcgaccagcaagatcaagaagtccagcgatcccggcgaggacgcgccgacgatcgacctgacccgcaccgacgacatcctcgccggggcggtccgggcgcgcgccgacggacagctgcccaacatgcgggcgatcgtgggtttcgccgccgagaccggcgacgcgaacggtgacgtgctgttccacgcccgcgccaagttcaagcgcaagggctcggaccttctggtcgtcaacgcggtgggcgataaccgcgcgttcgaggtcgacaacaacgacggttggctgctggccgccgacggaaccgagaccgcgctggagcacggttcgaaaactctgatggccagccgtatcgtggacgcgatcgtcgcctttctgcagaacagcaacgggtga

SEQ ID NO: 49701 - protein, 416 aa, Mycobacterium sp. KMS
MDRKRIIVGVAGGIAAYKACTLVRQLTEAGHDVRVLPTESALRFVGAATFEALSGHPVHTGVWDDVHEVPHVRIGQDADLVVVAPATADLLARAVAGRADDLLTATLLTARCPVLFAPAMHTEMWFHPATVDNVATLRRRGAVVLEPASGRLTGADSGAGRLPEAEEIATLAQLLLVRGDALPYDLAGVKALVTAGGTREPIDPVRFIGNRSSGKQGYAMARVLAQRGADVTLIAGNTAGLVDPAGVDVVHIGSAAQLRDAVSKHAPAAHVLVMAAAVADFRPVHAATSKIKKSSDPGEDAPTIDLTRTDDILAGAVRARADGQLPNMRAIVGFAAETGDANGDVLFHARAKFKRKGSDLLVVNAVGDNRAFEVDNNDGWLLAADGTETALEHGSKTLMASRIVDAIVAFLQNSNG

SEQ ID NO: 49702 - DNA, 1185 bp, Neisseria meningitidis FAM18
  CDS (1)..(1185): transl_table=11
atgggcaaacatattcttttaggtgtaacgggcagtattgcggcgtataagtcttgcgagttggttcgtctgctgaaaaaacaggggcattcggttacggtggttatgagccgctcggcaactgaatttgtttctccgctgacttttcaggctttaagcggcaatcctgtcctgaccgacacgcacggcggcaacggttcaaacggtatggaacatatcaacctgacccggaatgcggatgtttttctgattgcgccggcaagtatgaataccgtggcaaaaatctgtaacggcgtggcagataacctactgaccagtctggcagccgcacggaaatgtccgcttgccatcgctcccgcgatgaatgtggaaatgtggctcaaccctgccaaccaacggaatatcgcacaactggtttcagacggcattactgtctatatgccgggcttgggcgaacaggcttgcggagaaaatggcatgggaaggatgccggaacctgccgaattgctggatttgcttccggacttgtggacaccgaaaattttaaggggcaagaaaatcttgattaccgcaggtgcgacatttgaagccattgaccctgtcaggggcatcacaaatacctccagcggaaaaatgggggtagctttggcgcgggcgtgccgtgccgccggtgcggaagtcagcctgattcacggacagcttcaaaccgcgctgcctttcggcatatccgatacggttcaagccgtcagcgctgaagatatgcatcgcgcagtgcatcgtttgattgaaaaacaagatgcttttatttctgttgccgccgtctcagactataaggttaaaaacaggagtacacaaaaattcaaaaaagataaaaatgccaaaccgttatccatcgaattggatgagaaccccgatattttggcttctattgcctcattgccgaacccgccgttctgcatcggttttgccgctgaaacggagaatgtaatggcatatgcacgagaaaaacgtattaagaaaaaaataccggtgatagttgccaatgatgtttcaatcgcgatgggcaaaccgaccaaccggattaccattatcggggacgacggggaactatcttttcccgaaacaagtaaagatgaagcggcgatgcagattgttgaaaggcttgccgtatatttgaacaaataa

SEQ ID NO: 49703 - protein, 394 aa, Neisseria meningitidis FAM18
MGKHILLGVTGSIAAYKSCELVRLLKKQGHSVTVVMSRSATEFVSPLTFQALSGNPVLTDTHGGNGSNGMEHINLTRNADVFLIAPASMNTVAKICNGVADNLLTSLAAARKCPLAIAPAMNVEMWLNPANQRNIAQLVSDGITVYMPGLGEQACGENGMGRMPEPAELLDLLPDLWTPKILRGKKILITAGATFEAIDPVRGITNTSSGKMGVALARACRAAGAEVSLIHGQLQTALPFGISDTVQAVSAEDMHRAVHRLIEKQDAFISVAAVSDYKVKNRSTQKFKKDKNAKPLSIELDENPDILASIASLPNPPFCIGFAAETENVMAYAREKRIKKKIPVIVANDVSIAMGKPTNRITIIGDDGELSFPETSKDEAAMQIVERLAVYLNK

SEQ ID NO: 49704 - DNA, 1221 bp, Acidovorax sp. JS42
  CDS (1)..(1221): transl_table=11
atgaacgaacagttggctggcaaacacattgtcctgggcttgagcggcggcgtggcctgctacaaatcggcggaactgtgccggctgctggtgaaggccggcgccacggtgcaggtggtcatgaccgaggcggctgcgcagttcatcacgcccgtgaccatgcaggcgctgtcgggacgcagcgtctacacctcgcagtgggacgcgcgcgaggcgaacaacatgccccatatcaacctgagccgcgaggcggacgcgatcctcattgcgccgtgcagcgcggacttcatcgcgcggctggtgcaggggcgggccgacgagttattgagcctgctgtgtctggcacggccccgggatcgggtgccgttgctgctggcccccgccatgaaccgcgagatgtggggccacccggccactcagcgcaacctggcccaggtggcgcgcgacggcgcaacggtgctgggcgtgggctttggtgaccaggcctgtggcgagacgggcgacggccgcatgctggaggccgcggagattctggaggaactggaggccttcttcaccccccagttgcttacgggccagcacgtgctgattaccgctggccccaccttcgaggccattgacccggtgcgcggcatcaccaacctgtccagcggcaagatgggctttgcgattgcccgcgcggcgcgtgccgctggcgcacaggtcacattggtcgccgggccggtgcatctgcccaccccgcggggcgtgcgccgcatcgacgtgcgttcagcaaaaaatatgcttgcaatcgttgaggagcaagcgcgagaagctactattttcatagctacggccgcggtggcggactggcgtcccgccactgctgcgctgcacaagatcaagaaagacggcacgggcgacgtgccggcgctggagtttgtggagaaccccgacatcctggccacggtggcgcgcaccgaacgcgcgcgcgctggccgtctgtactgtgtggggtttgccgccgagagcgagaacctgctggagcatgccagcgccaagcgcgagcgcaagggcgtgccgttgctggtgggcaatatcggcccggccacgttcgggcaggacgacaatgcgctgctgctggtcgacgcgcagggccatcgtgaactgccccgtgcttccaaggaggcgctgggccatcagctcgtggcggagatcgcgcggcgccttgccgccgtttga

SEQ ID NO: 49705 - protein, 406 aa, Acidovorax sp. JS42
MNEQLAGKHIVLGLSGGVACYKSAELCRLLVKAGATVQVVMTEAAAQFITPVTMQALSGRSVYTSQWDAREANNMPHINLSREADAILIAPCSADFIARLVQGRADELLSLLCLARPRDRVPLLLAPAMNREMWGHPATQRNLAQVARDGATVLGVGFGDQACGETGDGRMLEAAEILEELEAFFTPQLLTGQHVLITAGPTFEAIDPVRGITNLSSGKMGFAIARAARAAGAQVTLVAGPVHLPTPRGVRRIDVRSAKNMLAIVEEQAREATIFIATAAVADWRPATAALHKIKKDGTGDVPALEFVENPDILATVARTERARAGRLYCVGFAAESENLLEHASAKRERKGVPLLVGNIGPATFGQDDNALLLVDAQGHRELPRASKEALGHQLVAEIARRLAAV

SEQ ID NO: 49706 - DNA, 1281 bp, Magnetospirillum magnetotacticum MS-1
  CDS (1)..(1281): transl_table=11
atggctccctctgcttcaggctccctcgccggccgccgcatcctcttgatcgtgggcgtcggcatcgccgcctacaaggcgctcgacctgatccggcgcctgcgcgagctcggcgcgcaggtgcgcccgctgctgaccgaatccgctcaggaattcgtcacgcccctggccgccgccgcgctggcgggagagcgaagccataccgacctgttcgaccgggagaccgaggccgatatcggccatatcaagctggcgcgggatgcggacgccatcgtggtggcgccggccaccgccaacctgatcgcgcggatggcgaccggccacgccccggacctcgccgcgacggtgctgctcgccaccacactgccgatcctgatcgccccggcgatgaatgtgcggatgtggctgcacccggcgacgcagcggaacgtcgccaccctgaaggccgacggcgtcacggtggtcggccccaacgagggcgcgatggccgaggccgagttcggtcccggccggctggccgagccgcacgagatcgccgatgccctcgaagcgctcctggcgcagcgcaccgagagccccggcttcgggtttctggcgggacgcgaaaccgcacaaaagccgctggcgggacggcacgtgctggtgacctcggggccgacccacgagccgatcgaccccgtgcgctacctcgccaaccgctcctccggccgccagggtcacgcggtcgccgccgccgcggtcgaggccggcgcccgggtcaccctggtctcggggccggtggcgatcccggatccgcccggcgtcacggtggtgcgggtggagagcgcccgcgagatgctcgcggcggtcgaggcggccctgcccgccgacctcgcgatcttcgccgccgcggtcggcgattggcgcccggccgagatgcggccgggcaagatcaagaaggacggcagcctccccgcgccgctgcagctcgtcgagaacccggacatcctcgccaccatcgccgggcgcagcaccggacgcccgcccctggtcgtgggcttcgccgccgagaccgacgccgtcctcgacaacgcgcggaagaagatcgcccgcaagggctgcgacctgatcgtcgccaacgacgtctcggcggagggcggggtgatgggcgggaccgagaacagcgtccatctcgtctcccgggacggcggggtcgagacctggccgaagctcggcaaggaagaggtcgggcggcggctggtggcgcgcttcgccgatctgctcgcacagagatcaagctga

SEQ ID NO: 49707 - protein, 426 aa, Magnetospirillum magnetotacticum MS-1
MAPSASGSLAGRRILLIVGVGIAAYKALDLIRRLRELGAQVRPLLTESAQEFVTPLAAAALAGERSHTDLFDRETEADIGHIKLARDADAIVVAPATANLIARMATGHAPDLAATVLLATTLPILIAPAMNVRMWLHPATQRNVATLKADGVTVVGPNEGAMAEAEFGPGRLAEPHEIADALEALLAQRTESPGFGFLAGRETAQKPLAGRHVLVTSGPTHEPIDPVRYLANRSSGRQGHAVAAAAVEAGARVTLVSGPVAIPDPPGVTVVRVESAREMLAAVEAALPADLAIFAAAVGDWRPAEMRPGKIKKDGSLPAPLQLVENPDILATIAGRSTGRPPLVVGFAAETDAVLDNARKKIARKGCDLIVANDVSAEGGVMGGTENSVHLVSRDGGVETWPKLGKEEVGRRLVARFADLLAQRSS

SEQ ID NO: 49708 - DNA, 1206 bp, Nostoc punctiforme PCC 73102
  CDS (1)..(1206): transl_table=11
atgactaatccaaaattgaacagggttctaataggtgtaggtggcggtatcgccgcctacaaaatttgtgaattggtttcaacgctgtttaaaactggggtcgaagtccgagtcatcctcacccgttcggcgcaagaatttattacacctctgacaatagccaccctatctcgtcatcccgcctacaccgatgatgatttctggaaaccaactcactctcgtcccttgcatattgggttgggtgaatgggcagatgtcatggtaattgcccccttgacagctaatacattagcaaagctagcctacgggatggctgataatttacttacaaataccgtgctggcttctacttgtcccgtgctgttagcacccgcaatgaatacggatatgtgggaacagctatcggtgcaacggaattggcaacagctattgctcgatagccgatatcatgggatgaatacagcgtcgggtttattagcgtgcgatcgcatcggtgctggtagattagcagaacctccagaaattttggctcacatccaatcgttgttacacactcaaggtaaacgagatttagcaggtaaacgagtgttaattagtgctgggggaacgcgagagtttcttgatccagtaaggtttattggcaatccttccacaggtaaaatgggattagctttagcacaagctgcacttcaccggggggcaaacgtcaccctagtacatggcccagctaattgggatgtaccattaggagtgcaagcaattcctgttgttagtgccgagcaaatgcagcaggcaatgctggaatatttacccaacgctgatgtaattgtcatgtcagcagcagtggcagatgtgaagccacgagattatagtacagagaaattgcctaagcgatcgctcccccaagccttacctctggaaccagtaccggatatagtcgcccaattagcacaacataaacagccgtatcagatattaattgggtttgcagcacaaactgggaatattgtcaagcccgcattagaaaaattacagagtaaaaaactagatgctattgttgccaatcccatcgatcaacctgatagtggttttggtagcgataataatcaagcgatatttttagatcggcaaggaaatcaagtagcgatcgcaccttgttctaaattagaaatggcccattatttatttgattttgccatcacttga

SEQ ID NO: 49709 - protein, 401 aa, Nostoc punctiforme PCC 73102
MTNPKLNRVLIGVGGGIAAYKICELVSTLFKTGVEVRVILTRSAQEFITPLTIATLSRHPAYTDDDFWKPTHSRPLHIGLGEWADVMVIAPLTANTLAKLAYGMADNLLTNTVLASTCPVLLAPAMNTDMWEQLSVQRNWQQLLLDSRYHGMNTASGLLACDRIGAGRLAEPPEILAHIQSLLHTQGKRDLAGKRVLISAGGTREFLDPVRFIGNPSTGKMGLALAQAALHRGANVTLVHGPANWDVPLGVQAIPVVSAEQMQQAMLEYLPNADVIVMSAAVADVKPRDYSTEKLPKRSLPQALPLEPVPDIVAQLAQHKQPYQILIGFAAQTGNIVKPALEKLQSKKLDAIVANPIDQPDSGFGSDNNQAIFLDRQGNQVAIAPCSKLEMAHYLFDFAIT

SEQ ID NO: 49710 - DNA, 1227 bp, Haemophilus somnus 2336
  CDS (1)..(1227): transl_table=11
atgcaaaatcttattcggggaaaacgaattgtcattggaattaccggcggtattgctgcatataaaaccatagaattaattcgtttattgcgtaaagcacaagcagaagttcgagtagtgctcacaaatgcagcgacagaatttgtaacacctttaactttacaagcaatttccggcaacgctgtatcacaatctttacttgatcatgaagctgaattggcaatgggacatattgaattggctaagtgggcggatcttatcgtaattgcacctgccagtgcagactttattgcacgcatggcggtcggtatggcaaacgatttattatccactatttgtctagcaacgaattctccaatttttctggctccggcaatgaaccaacaaatgtatgcacaaactgttactcaacaaaatttagcacaactcatggctcgtggtgtgcagtttatcggaccgaatagtggtgaacaggcttgtggtgatgtaggtatcggaaaaatgtcagaaccttttgaaatttttaccgcactttgccaatcctttttacatactcaagatttacttgatgtaagtgttgtgattaccgcaggtccaacaagagaagccattgatccggtacgctatattagtaatcatagctcaggcaaaatggggtttgctattgctgaagcttttgctcaacgaggtgcaaaagtcactttaatcagtggacctgtcaatttagcgacacctcataatgtacaacgcattaatgtagtttcggcacaagaaatgtatcaacatgcaatacaaagtgcggaacaaaatcagatttttattggttgtgcagcggtagctgattatcgtgtagaacaaattgcagaacaaaaaattaagaaaatccccggtaatgatgaaatggtcttaaagttggtcaaaaatccagacattcttgcaactgtagccaatttaatggaaaatcgtccttttgttgtaggatttgcggctgaaacacaaaatgtggagcagtatgcgaaagacaaattacaacgtaaaaatttggatatgatttgtgcaaatgatgtttccggtgggcaagtatttaattcagagcaaaacgcattgcagctgttttggcaaaatgggcaagagaggttgacattgaaacataaaagtgacttagctaaacaattggttgataaaattattgtgcgttataaatggaaattggaagaaagtaaatga

SEQ ID NO: 49711 - protein, 408 aa, Haemophilus somnus 2336
MQNLIRGKRIVIGITGGIAAYKTIELIRLLRKAQAEVRVVLTNAATEFVTPLTLQAISGNAVSQSLLDHEAELAMGHIELAKWADLIVIAPASADFIARMAVGMANDLLSTICLATNSPIFLAPAMNQQMYAQTVTQQNLAQLMARGVQFIGPNSGEQACGDVGIGKMSEPFEIFTALCQSFLHTQDLLDVSVVITAGPTREAIDPVRYISNHSSGKMGFAIAEAFAQRGAKVTLISGPVNLATPHNVQRINVVSAQEMYQHAIQSAEQNQIFIGCAAVADYRVEQIAEQKIKKIPGNDEMVLKLVKNPDILATVANLMENRPFVVGFAAETQNVEQYAKDKLQRKNLDMICANDVSGGQVFNSEQNALQLFWQNGQERLTLKHKSDLAKQLVDKIIVRYKWKLEESK

SEQ ID NO: 49712 - DNA, 1206 bp, Fusobacterium nucleatum subsp. vincentii ATCC 49256
  CDS (1)..(1206): transl_table=11
atgaaaaatattttattaggagttacaggaggtattgctgcatttaagtcagcaagtattgtatcacttcttaaaaagaaaggttataatgtaaaagttgtaatgactaaaaatgctacaaatataataggtcccttaactcttgaaactctttcaagaaatagaatttatgttgatatgtgggatactaatccacattatgaagttgaacatatttcactagcagattgggcagatatggttttaattgctcctgcaacatataatataattggtaaggtggcaaatggaatagcagacgatatgcttacaactattatttcagcagtgtctataagaaaacctgtgttctttgctcttgcaatgaatgtaaatatgtatgaaaatccaattcttaaagaaaatattaataaattaaaatcttatggttatagatttattgaagcagaagaggggttgcttgcttgtaattatgtggcaaagggtagaatgagtgagccagaagatatagttgcagaaattgagagatatagtatttattcaaagatagaaaattatcacactgtgttaaaaggtaaaaaaattcttataacaagtggtagaacaaaagaaaatatagatcctataagatatttgtcaaataattcaagtggtaaaatgggatactcacttgcacaggcagctgttgatttaggtgcagaagtaactttaattagtggacctacaaatttaggaataccaaagagacttagaaattttatttcagtggaatcagctcttgaaatgtatgaaaaagtagatgaatattttgaagacatagatatttttatagcttgtgcagctattgcagattacagaccaaaggaatataaaaaagaaaaaattaaaaaatctgattcagatttgattttagaattggttagaaatccagatattttatttgagatgggtaaaaagaaagataaacagttactagtaggctttgcagcagaaactaatgatataaaagaaaatgctttaaaaaaattggaaaagaaaaatttagatattatagtagcaaataatgcttctacaatgggaacagatagtaatacagttgaaattataaaaaaagataaaagttcagtggaaattaaacaaaaaaataaaatggaattagcttatgatattttatcagaagttatttcagtgttaaaaaaagggtaa

SEQ ID NO: 49713 - protein, 401 aa, Fusobacterium nucleatum subsp. vincentii ATCC 49256
MKNILLGVTGGIAAFKSASIVSLLKKKGYNVKVVMTKNATNIIGPLTLETLSRNRIYVDMWDTNPHYEVEHISLADWADMVLIAPATYNIIGKVANGIADDMLTTIISAVSIRKPVFFALAMNVNMYENPILKENINKLKSYGYRFIEAEEGLLACNYVAKGRMSEPEDIVAEIERYSIYSKIENYHTVLKGKKILITSGRTKENIDPIRYLSNNSSGKMGYSLAQAAVDLGAEVTLISGPTNLGIPKRLRNFISVESALEMYEKVDEYFEDIDIFIACAAIADYRPKEYKKEKIKKSDSDLILELVRNPDILFEMGKKKDKQLLVGFAAETNDIKENALKKLEKKNLDIIVANNASTMGTDSNTVEIIKKDKSSVEIKQKNKMELAYDILSEVISVLKKG

SEQ ID NO: 49714 - DNA, 1203 bp, Haemophilus influenzae R2846
  CDS (1)..(1203): transl_table=11
atgaatttaaacggaaaacgtgttgtcgtcggtattacgggcggcattgcagcctataaaacaatagagttgattcgtttattacgcaaagcagaagctgaagtacgtgtagtattaaccccagctgcagcagaatttgttactcctttgacacttcaagccatttctggcaatgctgtatcgcaatctttacttgatccacaagcagagctggcaatggggcatattgaacttgccaaatgggctgatgccattattattgcgccagctagtgcagactttattgcccgtcttactgtaggcatggcgaatgatttactttcaacaatttgtcttgcaactgatgcgccaatttttcttgcgccagcaatgaatcagcagatgtatcaccaatccattactcaacaaaatttaacgactcttcaaacacgtgggattgagcttatcggccccaatagtggttttcaagcttgcggcgatatggggaaagggcgtatgtcagaaccagaggaaatttttaccgcactttctgactttttctctcaaaaacaagatctacaaggattaaatgtcgccattacagcaggcccaacgcgtgaagcaatcgatcccgttcgttatatttctaaccatagttctgggaaaatggggtttgcgattgctgaagcatttgccaaacgaggggcgcacgtcacgctgattgcaggccccgtgaatttaacaacaccaaaaaatgtaaatcgaattaatgccatctcagcacaagaaatgtggcaagcctctcttgaaagtgcggtgaaaaatcaaatttttattggttgtgcggctgtcgctgattacagagtagctgaagttgcagagcaaaaaatcaaaaaatctggcgatgaaatatctatcaaattaattaaaaatcccgatattatctcagatgtaggacatttaaaaacacatcgtccttttactgttggatttgcagccgaaacccaaaatattgatgattatgcaaaagataaacttgaacgcaaaaatcttgatatgatttgtgccaacgatgtatctggcggacaagtttttaacgctgatgaaaatgccttgcagcttttttggaaaaatgatcataaaaaattatcgctaaaatcaaaagtagaacttgccgctgatttagtcaatgaaatcatcgaacgctatcaaaaaaccttataa

SEQ ID NO: 49715 - protein, 400 aa, Haemophilus influenzae R2846
MNLNGKRVVVGITGGIAAYKTIELIRLLRKAEAEVRVVLTPAAAEFVTPLTLQAISGNAVSQSLLDPQAELAMGHIELAKWADAIIIAPASADFIARLTVGMANDLLSTICLATDAPIFLAPAMNQQMYHQSITQQNLTTLQTRGIELIGPNSGFQACGDMGKGRMSEPEEIFTALSDFFSQKQDLQGLNVAITAGPTREAIDPVRYISNHSSGKMGFAIAEAFAKRGAHVTLIAGPVNLTTPKNVNRINAISAQEMWQASLESAVKNQIFIGCAAVADYRVAEVAEQKIKKSGDEISIKLIKNPDIISDVGHLKTHRPFTVGFAAETQNIDDYAKDKLERKNLDMICANDVSGGQVFNADENALQLFWKNDHKKLSLKSKVELAADLVNEIIERYQKTL

SEQ ID NO: 49716 - DNA, 1200 bp, Listeria monocytogenes str. 1/2a F6854
  CDS (1)..(1200): transl_table=11
atgcaaggaaaaaatatcttactcgcagtgtccggtggcattgctgtttataaagcagtcgcacttacaagtaaattaacgcaagcgggtgcaaacgttaaagtaatgatgacagcacatgcacaagaatttgttccaccgctttcgttccaagtattatctaaaaatgatgtatacacagatacatttgacgaaaaaaaatcaagtgtagtcgcacatattgatttagccgattgggccgatttagtaatcgttgcacctgcaactgcaaatgtgattggtaaaatggcaaatggcatcgcggatgatatggtaacgacaaccattcttgcaacagaggcaccagtttgggtagcaccagcaatgaatgtccacatgattcagcatccagcagttattcggaatattaaccagctttacacagatggtgttcgttttatcgaaccagaagaaggttacttggcatgtggctatgttggtcgcggtcgcctcgaagaaccagaaaaaatcgttcttcggattgctgaattttttcaagaagataaaaacctccttcaaggaaaaaatgtgctagtaacagccggcgcaactcgcgaaaaattagatccagtacgctatttcaccaaccattcaactgggaaaatgggctttagcatagcagaatctgcggcgcgtcacggtgcgaaggttacgctagttactacaagtaaagcacttcccgtaccgcatggagtggaagcaatctatgtcgaatcggcagaagaaatgcatcaagctgtgaatgaacgtaaagtgtcacaagatatttttgtgatgaccgcagcagttgccgattacacgccagcgcaagtctcagatcaaaaaattaaaaaacaacctggtgattttacaatagcaatgaaacgaaccaaagatattttactcgaaatcggtcaacataaaacttcggagcaagtcgtgattggctttgccgctgaaacagaaaatgtagaagcaaacgcacgtaaaaaactaacctctaaaaatgccgatatgattgttgccaacaatattagtgaggccggagcaggcttttccggtgacacgaatatcgtgacattttaccggaaagatggttccagtgaagcgttaccgatactagacaaaaaagaagttgctgaacatatcatcaaagaagccgctaactttttaaggaagtga

SEQ ID NO: 49717 - protein, 399 aa, Listeria monocytogenes str. 1/2a F6854
MQGKNILLAVSGGIAVYKAVALTSKLTQAGANVKVMMTAHAQEFVPPLSFQVLSKNDVYTDTFDEKKSSVVAHIDLADWADLVIVAPATANVIGKMANGIADDMVTTTILATEAPVWVAPAMNVHMIQHPAVIRNINQLYTDGVRFIEPEEGYLACGYVGRGRLEEPEKIVLRIAEFFQEDKNLLQGKNVLVTAGATREKLDPVRYFTNHSTGKMGFSIAESAARHGAKVTLVTTSKALPVPHGVEAIYVESAEEMHQAVNERKVSQDIFVMTAAVADYTPAQVSDQKIKKQPGDFTIAMKRTKDILLEIGQHKTSEQVVIGFAAETENVEANARKKLTSKNADMIVANNISEAGAGFSGDTNIVTFYRKDGSSEALPILDKKEVAEHIIKEAANFLRK

SEQ ID NO: 49718 - DNA, 1206 bp, Bacillus cereus G9241
  CDS (1)..(1206): transl_table=11
atgctaaaagggaaaaagatacttttatgtgtaacaggaggcattgcggtctttaaagcggctgcgttaacgagtaaattgacacaagctggtgctattgtaaaagtaatgatgagtgagtcggcaatgaagtttgttacacctcttacattccaggcgctttctcgccatgatgtatatacggatacattcgatgagaaagactcagctgttattgctcatatcgatttagcagattgggcagatgttgtacttgttgcacctgctacagccaattgtattggaaagttagctaacggtattgcagatgatatgattacaactactttgttagctactacagccccagtgtggattgcacctgctatgaatgtgcatatgtatgaaaataaaattgttcaaaaaaatatgatgacgttaaaaacgttaggatatacatttattgagcctggagaaggttttttagcgtgtggttatgtagcgaagggaagattagaagaacctgaagcgattattgcacggttagaagaggctttttcagagcaaaaaccactgcaaggaaaaagaatattaataactgctggcccaactcgtgaaaagattgatccagtccgttttatgaccaatttttcttctggaaaaatgggatacgcgattgcggaagtggcggcgaacttaggtgctgaagtcatacttgtttcgggaccgacatcattaaatccaccattgcatgtaactacaatgcaagtggaatcggcacaagatatgttagaggcagttattcaacattatcaaaacgtagatgttgtcattaaaacagcagcagttgcagattatcgtccgaaatatgttcatgataataaaatgaaaaagaaaaatggcgatgctgtaattgagctagagagaacagtagatattttaaaaacgttaggtgagatgaaggacaaacagttacttgtcggttttgcagctgaaacgacaaacgtagaggaatatgcaacgaaaaaattacgtgagaaaaatgcgaatatgattgttgcaaacgacgtaaaggcgcaaggagctggatttggtacagatacgaacattgtaacaatgtatagaaaagatggagaagttatagagttgccacttttaacgaagaaagaggttgctcatgaaatattaaagcaaattgaaatgatgttagaagatgatcgtctatga

SEQ ID NO: 49719 - protein, 401 aa, Bacillus cereus G9241
MLKGKKILLCVTGGIAVFKAAALTSKLTQAGAIVKVMMSESAMKFVTPLTFQALSRHDVYTDTFDEKDSAVIAHIDLADWADVVLVAPATANCIGKLANGIADDMITTTLLATTAPVWIAPAMNVHMYENKIVQKNMMTLKTLGYTFIEPGEGFLACGYVAKGRLEEPEAIIARLEEAFSEQKPLQGKRILITAGPTREKIDPVRFMTNFSSGKMGYAIAEVAANLGAEVILVSGPTSLNPPLHVTTMQVESAQDMLEAVIQHYQNVDVVIKTAAVADYRPKYVHDNKMKKKNGDAVIELERTVDILKTLGEMKDKQLLVGFAAETTNVEEYATKKLREKNANMIVANDVKAQGAGFGTDTNIVTMYRKDGEVIELPLLTKKEVAHEILKQIEMMLEDDRL

SEQ ID NO: 49720 - DNA, 1212 bp, Crocosphaera watsonii WH 8501
  CDS (1)..(1212): transl_table=11
atgctcaagtctaaatcgatcctcataggcattggtggtggtattgctgcttataaagtctgtgaggttatctcttctttattccaggaaggagcagaggttcgcgtcatcctcaccgaaacagcacaacgctttattacacctttaaccgttgctaccctcagccgtcatcaggcatataccgatcaagatttttggcaagcaacccattcccgtcctctccatattgccttgggagaagaagctgatttactgctcattgctcctttaaccgctaataccctggctaagttaacatacgggttagcagataacttgctcagtaatacggttttagcctctcgttgccccattttactcgctccagctatgaatacagaaatgtgggagcaacctgttatccaaagaaactggcaacagttacagctagacactcgttatcatagtatcgggccaggttcaggcttattggcctgcgatcgcattggagcagggcgcatggctgaaccgagggaaattatcaccaagttacactctttaatatacacccaaggacaacaagatttccaaggtaaacgcatcttaatcagtggaggaggcaccagagaaaatcttgatccggtgcgatttttgggtaatccttctactggaaaaatgggcttagccttagcccaagcagccagcgatcggggtgctattgtcaccttaattcacgggccgatcgccccagaattactgcctcaatcacctaactataacctaatccccatagttactgctgaggaaatggaagcagcaatgatcaaccatttaaaggagtctgaaattattattatgtccgctgccgtagctgatgttaaaccggcacattatactaattataaattgcccaaaaaagagctatcacttaacttaaaattagagtctgttgttgacattttagcaaagttaggaaccctcaaaaaagactatcaaactttgattgggtttgcagcacaaacaggggatattgtcaaccctgctttagataaattaaagcgcaaaaatttagatattattgttgctaaccccattgataaagcagaagcagggtttggcactaatacaaaccaagcaatttttattgataataaaggaaaacaagaaaccatagattcttgttctaaattagaactagctcatcgattattagactttgttaaggtgagttag

SEQ ID NO: 49721 - protein, 403 aa, Crocosphaera watsonii WH 8501
MLKSKSILIGIGGGIAAYKVCEVISSLFQEGAEVRVILTETAQRFITPLTVATLSRHQAYTDQDFWQATHSRPLHIALGEEADLLLIAPLTANTLAKLTYGLADNLLSNTVLASRCPILLAPAMNTEMWEQPVIQRNWQQLQLDTRYHSIGPGSGLLACDRIGAGRMAEPREIITKLHSLIYTQGQQDFQGKRILISGGGTRENLDPVRFLGNPSTGKMGLALAQAASDRGAIVTLIHGPIAPELLPQSPNYNLIPIVTAEEMEAAMINHLKESEIIIMSAAVADVKPAHYTNYKLPKKELSLNLKLESVVDILAKLGTLKKDYQTLIGFAAQTGDIVNPALDKLKRKNLDIIVANPIDKAEAGFGTNTNQAIFIDNKGKQETIDSCSKLELAHRLLDFVKVS

SEQ ID NO: 49722 - DNA, 1191 bp, Exiguobacterium sibiricum 255-15
  CDS (1)..(1191): transl_table=11
atgctaacgaatcgtaacattttattatgtgtcggaggaggaatcgcctcgtacaaagcggcggctttggcatcgaaactcgttcaggccggagcgaacgttcaagtcgcgatgacgaagaatgcccaacaattcgtcgggaaaacgacgtttgccgcgctgacgcggaaaccggtctatgatgatgtcttcattgagcatgatgcatccaagattgcccacatcgatttagcagatgaagctgatttgattgtcgtggctcctgcgacggcgaatctgattgcgaaacttgcgcacggaatcgccgatgattttattacgacgacgattttagcagcgacgtgtccggtcgttgttgctccggcgatgaacgtcaatatgctcgaacatccggcgacggtgcgaaatatggaacggctgatggcagacggagtccacttgatcgcacccggagtcggtaacttggcatgtggctggatcggaaagggacggttgcctgaaccggaagagttggtcgaaacgttatccggcttgttccaaccgaaaccgctcgcgaatcgccatgtcctgatcagtgccggtccgaccgtcgaacggattgatccggttcgttatttgacgaacgattcgtccggtaaaatgggcattgcacttgcagaagcggcccgggatgccggagcaaccgtcacgcttgttcatggtccggttcgagaagccttgccgaccggtataacgacgaaggctgtcgagtccggtgacgagatgcttgaagcgatgttagctgactatgacaaacaggatctggtcatcatggcagcggcggtggcagattatcgtccgaccgtccggtatgaccgcaaacaaaagaaaattgacggaccgttacggattgaactggaagagacgacagatatcttacgtacgcttggtgagcggaagacaaaccagattttagtagggtttgcagccgaaactgaaaatctggaaaaacatgcgcaacaaaaactgattcgaaaacaggcggatttcatcgtcgcaaatgatgtctcccgtgcagacatcggtttttcaagtgatgagaatcaagtcacggtttacgggaataatcatccggccgttcattatgatcaacaatcgaaaacccgattggcagccgcattgattgaacagttcacggaggcattacaatga

SEQ ID NO: 49723 - protein, 396 aa, Exiguobacterium sibiricum 255-15
MLTNRNILLCVGGGIASYKAAALASKLVQAGANVQVAMTKNAQQFVGKTTFAALTRKPVYDDVFIEHDASKIAHIDLADEADLIVVAPATANLIAKLAHGIADDFITTTILAATCPVVVAPAMNVNMLEHPATVRNMERLMADGVHLIAPGVGNLACGWIGKGRLPEPEELVETLSGLFQPKPLANRHVLISAGPTVERIDPVRYLTNDSSGKMGIALAEAARDAGATVTLVHGPVREALPTGITTKAVESGDEMLEAMLADYDKQDLVIMAAAVADYRPTVRYDRKQKKIDGPLRIELEETTDILRTLGERKTNQILVGFAAETENLEKHAQQKLIRKQADFIVANDVSRADIGFSSDENQVTVYGNNHPAVHYDQQSKTRLAAALIEQFTEALQ

SEQ ID NO: 49724 - DNA, 1239 bp, Prosthecochloris aestuarii DSM 271
  CDS (1)..(1239): transl_table=11
atgatactgaacggaaaaaacattcttctcgggatctgcggaggtattgccgcatataaaatgccaatgctcatccgattactgaaaaaagagggcgctcatgtccgggtagtcatgaccggctcagccacccgttttgtcactgagctgaccctggcgacggtctcacaggagccagtcaaccgggatatcttcccggaatcatacgacactgcacatgactggacccgtcatatctctcttggagagtgggcagatatgatgatcatctcgccagcgaccgccaatacgattgcaaaaatcacggccgggctctgcgatgatcttctctcgacctgctttatcacgctgcgccccgacagaccgaaacttatcttccctgccatggatggggagatgtaccgctccgactcggtacagcggaatctggcatggctcaaaagtaacggatgcagggtagtcgagcctgaaagcggctcgctggcttcaggccaatgcggtacaggaagaatgccggaacctgaaaccatcctggaatctatcatcgaatccttaggcgaaaaacggcagtccagccgccttcaagacaaaaacatcatcgtcacagccgggccgacaagagaaaaaatcgacggagtacgctttctttccaactactcctccggtaaaatgggctttgctatagcatgcgcagcagctcgaagaggagccgacgtaacgctcatcactggccctgtcagccttcctactcccgaaggggtccgcagaatcgatatagaaaccgcctgcgacatgcagcgggaggttcagcgcatcgcttccggatgtgatatctttattggtgccgctgccgttgccgattaccggcccgctgaaaccgtcaccggaaaaatcaagaaaaccagtgaaaccatagcattgtcactgatacgaaaccctgatattctcgccggtttttcagcggagaaaaaaacacatcagctcgccgtcggcttctcgcttgaaacagagaacggactcggatacgcagcagaaaagctccgtgcaaagaacctcgatctgatcgcctataatacctatgacggagaaacatcaggttttgaagtcgacaccaatgcgctgacactcatcgatagacagggcacgacaaccgaactgccgctactgacaaaaagagacgcagcaatccggctactcgatgccattgaatcactgctgagcagaccggacaacggctga

SEQ ID NO: 49725 - protein, 412 aa, Prosthecochloris aestuarii DSM 271
MILNGKNILLGICGGIAAYKMPMLIRLLKKEGAHVRVVMTGSATRFVTELTLATVSQEPVNRDIFPESYDTAHDWTRHISLGEWADMMIISPATANTIAKITAGLCDDLLSTCFITLRPDRPKLIFPAMDGEMYRSDSVQRNLAWLKSNGCRVVEPESGSLASGQCGTGRMPEPETILESIIESLGEKRQSSRLQDKNIIVTAGPTREKIDGVRFLSNYSSGKMGFAIACAAARRGADVTLITGPVSLPTPEGVRRIDIETACDMQREVQRIASGCDIFIGAAAVADYRPAETVTGKIKKTSETIALSLIRNPDILAGFSAEKKTHQLAVGFSLETENGLGYAAEKLRAKNLDLIAYNTYDGETSGFEVDTNALTLIDRQGTTTELPLLTKRDAAIRLLDAIESLLSRPDNG

SEQ ID NO: 49726 - DNA, 1230 bp, Xylella fastidiosa Ann-1
  CDS (1)..(1230): transl_table=11
gtgactggatctcatcagccacggtcattgaacggacagcgtttgctgttgtgtgtcagtggtggtattgctgcttataaatcgcttgagcttgtgcgcctcctttgtggtgcgggtgctcaggtccaggttgtgatgactgctagtgcgcagcagtttgtcacgccacttagtttccaggcattgtctggccaatcgacccgtaccacgctgtgggatggtaatgctgaacaggcgatggggcatattgagttggcgcgttgggccgagcgtgttttgattgctcctgctagcgctgatgtgatcgcgcggttggcgcatggtttggcggatgatttggtgacgactctgtgtttggcgacaacggcgccgctgatcatatgcccagcgatgaaccacaatatgtggctgcatccagcgactcaggcgaatgttgcgatgttgttggggcgtggtgtgcaggtcatcggaccagaggatggtccgttggcagaaggtgtgtctgggttgggccgtatgagcgaaccagaggcgattgttgttgcgttggttcagggggtgtctccagctccagttcacggtggtttgttccatgggcagcgcattgtgattagtgctggacccacattcgaagatttggatccggtgcgttaccttggcaatcgcagcagtggcaagatgggttttgctttggctagtgcggcggtgtcccatggggctgaggtggtgttggtggctggtccggtgtatcagccaactccacctggggtgactcgggtggatgtacgttcggcggcacagatgcgcgatgcagtcctcagcgcgttccccgcggatgtttacatcggtgcagctgcggtggccgattacgcacctaaatcggtgttgccacaaaagatcaagaagtccggccagacgctgatcctggagttggtgcgtacccaagacatcttgtcagaggtggcagcgcagacggctaacctgaaatttgtggttggtttcgctgcagagacgcatgatgttgcgtgctacgcacgcggtaaattggctgccaagcacttggatttgattatcgccaaccaggttgggattattggaaacggttttgaaagtgatgacaatgctgtcactgcgtattggcagggtggcgaacgcgttttcgctagttgcagtaaggtggagttggctgagcgcctgctggcactgattgctgaaaggatgcagacatga

SEQ ID NO: 49727 - protein, 409 aa, Xylella fastidiosa Ann-1
MTGSHQPRSLNGQRLLLCVSGGIAAYKSLELVRLLCGAGAQVQVVMTASAQQFVTPLSFQALSGQSTRTTLWDGNAEQAMGHIELARWAERVLIAPASADVIARLAHGLADDLVTTLCLATTAPLIICPAMNHNMWLHPATQANVAMLLGRGVQVIGPEDGPLAEGVSGLGRMSEPEAIVVALVQGVSPAPVHGGLFHGQRIVISAGPTFEDLDPVRYLGNRSSGKMGFALASAAVSHGAEVVLVAGPVYQPTPPGVTRVDVRSAAQMRDAVLSAFPADVYIGAAAVADYAPKSVLPQKIKKSGQTLILELVRTQDILSEVAAQTANLKFVVGFAAETHDVACYARGKLAAKHLDLIIANQVGIIGNGFESDDNAVTAYWQGGERVFASCSKVELAERLLALIAERMQT

SEQ ID NO: 49728 - DNA, 1212 bp, Croceibacter atlanticus HTCC2559
  CDS (1)..(1212): transl_table=11
atgagtctacttagtggaaaaaaagtacttattggcgtaactggtggtatcgcagcatacaagtctgcactattagtacgccaatttattaaatatggtgcagaggttaaggttgtgatgacaccttctgctaaagattttgtaacaccactaacactatctacactttccaaaaatgaggtgttttcgtcattttataatgaagaagacgaaaatgcgcaatggaacaaccacgtagatctaggtctttgggcagaccttatggttattgctcctgcaaccgctaatacattatcaaaaatggctagtggtacaagtgataatttactactagcaacttatctttcagcaaaatgtccagtatattttgcaccagctatggatttggatatgtacaaacatccatcctctttacaaagctttaaaacattgcaatcttttggaaacatcatgattcctgccggttctggagagctagcaagtggtttacatggtgaaggtcgtatggcagagccagaagaaatagctgcttttatagagcaacacctaaaagctagtgctcctttattacataaaaaagtaattattacagctggtcctacatacgaagcaatagaccctgtacgttttataggtaatcactcaagcggtaagatgggttatgagcttgcaaaacaagccgcaaaacaaggcgcaaatgtaattttagtaagtggaccatcaagcttaactattgttgatgatagtgtaactcttattagagttaatactgcacaacaaatgtatgatgaggtacacaaacattatgattctgtagatgttggtatagctgcagcagcagtttcagattatagacctaaagtagtcgcagaccagaaaattaagaaagctggagaggagatgactattgttttagaaaaatctccagacatattactgtctatgggacagcataaaaaaaatcaacttttagtagggtttgctttagagacagaaaatgaaatagcaaatgctaaaaagaaacttgaaaagaaaaatttagattttattgttttaaattcgttaaacgacaaaggtgctggatttaagaaagacaccaataaaattacaattatagataaggcacacaatgctaagagttttgatttaaaatcaaaagcagaagttgccaaggatattattaatgaagttatagcaaaattaaatgcgtaa

SEQ ID NO: 49729 - protein, 403 aa, Croceibacter atlanticus HTCC2559
MSLLSGKKVLIGVTGGIAAYKSALLVRQFIKYGAEVKVVMTPSAKDFVTPLTLSTLSKNEVFSSFYNEEDENAQWNNHVDLGLWADLMVIAPATANTLSKMASGTSDNLLLATYLSAKCPVYFAPAMDLDMYKHPSSLQSFKTLQSFGNIMIPAGSGELASGLHGEGRMAEPEEIAAFIEQHLKASAPLLHKKVIITAGPTYEAIDPVRFIGNHSSGKMGYELAKQAAKQGANVILVSGPSSLTIVDDSVTLIRVNTAQQMYDEVHKHYDSVDVGIAAAAVSDYRPKVVADQKIKKAGEEMTIVLEKSPDILLSMGQHKKNQLLVGFALETENEIANAKKKLEKKNLDFIVLNSLNDKGAGFKKDTNKITIIDKAHNAKSFDLKSKAEVAKDIINEVIAKLNA

SEQ ID NO: 49730 - DNA, 1227 bp, Sulfitobacter sp. EE-36
  CDS (1)..(1227): transl_table=11
atggtcgggacgaataccgacgagggggcgatcatgctggctggcaaacatattctgctgataatcgggggcggcattgccgctttcaaatcccttgatctgatccgtcgcctgcgcgaacgcggggccactgtgacgcccgtgctgactcgcgcgggcgaagagtttgtgacgcctttgtctgtttcggcgttggcggggcagaagctgtatcgcgatttgttcgatctgggcgacgaggccgagatgggacatatccagctcagccgtgtcgcggatctggttgtggtggcccctgccacggcggatctgatggccaagatggcgagcggtgtggcgaatgatctggcctctaccctattgttggcgacagatacgccggtgctgattgcaccggcgatgaacgtgcgcatgtgggaccaccccgcgacgcagcgcaaccttgcgaccctgcgcggtgatggcatccatgtggtcggcccgaatgatggtgatatggcctgcggggaattcggccccggacgcatgtccgaaccgcttgagatcgtcgcggcggtcgaggcgcagctggccgatggtccgctaaaggggcgacgtattctggtgacctccggcccgacgcatgagccgattgatcctgtgcgctatatcgcgaaccggtcctcgggcgcgcagggcaccgctattgcgcgcgcgttggcggcattgggggctcaggtgatctttgtcactggccctgccgacgtgcccccgcccgacggggtagaggtgatccgcgtgcaaacggcgcagcagatgcaggaagcggtagaggcagccttgcccgtcgacgctggcgtatttgccgcggcggtggcggattggcgcatggccagcgccagtgatcgaaagctcaagaaatcgaaagacgggctgccggtgctgagctttgctgaaaaccccgatattctgaaaaccgtcagcgcggcgggtgcgcggcggcccaagctggtcgtgggctttgccgccgagacgaatgacgtcgttgaaaacgccacggcgaaacggctgcgcaaaggctgcgactggatcgttgcgaatgatgtctcaccggcgacaggcattatgggcggggcggaaaatgctgtgaccctgatcacggatgcgggtgccgaaagctggccgcgtatgggcaaggatcaggtggcacagcagttggccgcgcgcattgcagagacgttgcgctag

SEQ ID NO: 49731 - protein, 408 aa, Sulfitobacter sp. EE-36
MVGTNTDEGAIMLAGKHILLIIGGGIAAFKSLDLIRRLRERGATVTPVLTRAGEEFVTPLSVSALAGQKLYRDLFDLGDEAEMGHIQLSRVADLVVVAPATADLMAKMASGVANDLASTLLLATDTPVLIAPAMNVRMWDHPATQRNLATLRGDGIHVVGPNDGDMACGEFGPGRMSEPLEIVAAVEAQLADGPLKGRRILVTSGPTHEPIDPVRYIANRSSGAQGTAIARALAALGAQVIFVTGPADVPPPDGVEVIRVQTAQQMQEAVEAALPVDAGVFAAAVADWRMASASDRKLKKSKDGLPVLSFAENPDILKTVSAAGARRPKLVVGFAAETNDVVENATAKRLRKGCDWIVANDVSPATGIMGGAENAVTLITDAGAESWPRMGKDQVAQQLAARIAETLR

SEQ ID NO: 49732 - DNA, 1206 bp, Roseovarius nubinhibens ISM
  CDS (1)..(1206): transl_table=11
atgctttcgcaaaagcgtatcctgttgatcttgggcggcggtatcgctgcgttcaaatcgctcgacctgatccggcggctgcgcgagcggggggcctcggtcacgccggtgctgacccgtgcggcgcaggaattcgtcacgccgctgtcggtctcggcgctggcgggcgagaaggtgttcaccgatctctttgacctgacggatgaggccgagatgggccatatcgagctgtcgcgctcggccgatcttatcgtggtggccccggcgacggcggatcttatggcgaagatggcgcagggccatgccgatgatctggcctcgacgctgctcttggccaccgacacgccggtcttggtggcgccggcaatgaatgtgcggatgtgggagcatccggcgacccagcgaaacctcgccatattgcaaggcgatggggtgcgggtcgtggggccgaatgcgggcgacatggcctgtggcgaatatggcccgggccggatgtccgagccgctcgagatcgtggccgccgtcgaggcggcgctggcaggcgggcctctggcggggcggcgggtgctggtcacctctggcccgacccatgagccgattgatcccgtgcgctatatcgccaaccggtcctccggggcgcagggcacggcgattgccgccgccttgcgcgatctcggggccgaggtggtgtttgtcaccggcccggccagcgtgccgccgccgccgggggtcacggtccagcgggtcgagaccgcgcgcgagatgcgcgatgcggcgctggcggcgctgccggtggcggccgcgatctttgccgccgccgtggccgattggcgcgtgaccagcgccagcgacagcaagatgaagaagaccaagaccggtctgccgcagctcgaatttgccgagaacccggatattctcgccgaggtgagcgcgctccgcgaggggcggcccgggctggtggtgggctttgccgccgagaccgatgacgtgatcgccaatgccaccgccaaacgggcgcgcaagggctgtgactggatcgtggccaatgatgtgagccatgcgaccggcatcatgggcgggtcggagaacgccgtgacgctcatccatgccgaggggtccgaggactggccgcgcatgggcaaggcccaggtcgcggcgcgtctggcagagcggatcgccgaggcgattggcgcggataagacatga

SEQ ID NO: 49733 - protein, 401 aa, Roseovarius nubinhibens ISM
MLSQKRILLILGGGIAAFKSLDLIRRLRERGASVTPVLTRAAQEFVTPLSVSALAGEKVFTDLFDLTDEAEMGHIELSRSADLIVVAPATADLMAKMAQGHADDLASTLLLATDTPVLVAPAMNVRMWEHPATQRNLAILQGDGVRVVGPNAGDMACGEYGPGRMSEPLEIVAAVEAALAGGPLAGRRVLVTSGPTHEPIDPVRYIANRSSGAQGTAIAAALRDLGAEVVFVTGPASVPPPPGVTVQRVETAREMRDAALAALPVAAAIFAAAVADWRVTSASDSKMKKTKTGLPQLEFAENPDILAEVSALREGRPGLVVGFAAETDDVIANATAKRARKGCDWIVANDVSHATGIMGGSENAVTLIHAEGSEDWPRMGKAQVAARLAERIAEAIGADKT

SEQ ID NO: 49734 - DNA, 1200 bp, Oceanicola batsensis HTCC2597
  CDS (1)..(1200): transl_table=11
atgctgtcgggcaagaccattcttctgatcatcggcggcggtatcgccgcctacaaatcgctggacctgatccggcgcctgcgggaacgcggcgcctcggtcgtgcccgtgatgacgcgcgcggccggcgaattcgtcacgccgctttcggtctcggcattggcgggccaaaaggtctttgccgatctcttcgacctcacggacgaggcggacatgggccatgtccagctttcgcgcgcggccgacctgatcgtcgtggccccggcgaccgccgatctgatcggcaaggtggcgggggggctggcggacgatctggcgtcgacgcttctgatggcgacggataccgaggttctgatggcgccggcgatgaacgtgcggatgtggctgcatccctcggtccagcggaacgtgagcgcgttgcgcgaccaggggatcggcttcgtcgggccggatgaaggcgacatggcctgcggtgaatacgggccggggcgcatgtcggaaccgctcgagatcgtgcgcgcgatcgaggggcggctgacggcggggccgcttgcgggcaagcgcgtgatcgtgacctcgggcccgacccacgagccgatcgacccggtgcgctacatcgcgaaccgctcatctggggcgcagggcaccgccatcgcgcgggcgctggccgcacggggcgccgaggtggtctttgtcaccggacccgccgatgtcgcgccgcccgagggcgtcgaggtggtgaaggtcgagaccgccagcgagatgctgaggggcgtgcaggcggccctgccggccgatgcggcggtcatggcggcggcggtggcggactggcgggtcaaggggccgaccgccacttcgaagatcaagaaggtggccggggccatgccggtgctcgaattcgaggagaaccccgacatcctggcgaccgtttcgcagtcggggggggcggaccggccggggctggtggtcggtttcgccgccgagacggatgacgtcgtgtcgcatgcgacggccaagcgggcgcgcaagggctgcgactggatcgtcgccaacgatgtcagccccgagacgggaatcatgggcgggacggagaacgccgtcgtcctgatcacgggcgatggggccgaggaatggccccggatgggcaagcaggccgtcgccgaccggctggcggaccggatcgccgccgaactcggctga

SEQ ID NO: 49735 - protein, 399 aa, Oceanicola batsensis HTCC2597
MLSGKTILLIIGGGIAAYKSLDLIRRLRERGASVVPVMTRAAGEFVTPLSVSALAGQKVFADLFDLTDEADMGHVQLSRAADLIVVAPATADLIGKVAGGLADDLASTLLMATDTEVLMAPAMNVRMWLHPSVQRNVSALRDQGIGFVGPDEGDMACGEYGPGRMSEPLEIVRAIEGRLTAGPLAGKRVIVTSGPTHEPIDPVRYIANRSSGAQGTAIARALAARGAEVVFVTGPADVAPPEGVEVVKVETASEMLRGVQAALPADAAVMAAAVADWRVKGPTATSKIKKVAGAMPVLEFEENPDILATVSQSGGADRPGLVVGFAAETDDVVSHATAKRARKGCDWIVANDVSPETGIMGGTENAVVLITGDGAEEWPRMGKQAVADRLADRIAAELG

SEQ ID NO: 49736 - DNA, 1290 bp, Prochlorococcus marinus str. MIT 9211
  CDS (1)..(1290): transl_table=11
atgaagactaaagaatcaagccacttaaaaggtagaaaaatccttgtaatatccactggaagcatagctgcagtaaagacaccattactagttagtagcttgatcaaagaaggtgccgaagttcggtgtgtagttagtccaagtgcatctcaattaatcagtccattatctcttgcaacccttagcaggagccgctgctaccaagacaaggatcaatgggatccatctgaacccaagcctcttcatatcgctctagccgagtgggccgaagtagttgtaattgctccattaagtgcttcatccctagcaagatgggttaatggattagccgaagggctagccgccagtatcctcttggcatgcgaaaagccaattattgcagcagctgcaatgaacacaggcatgtggcacaacgaaggagtacagcgtaattggatcgcacttcaaaaatattcaaatgtattaactttgagcccatctgaagggctattagcttgtgaccgaattggtgatggaaggatgattaatccagagatgattcaattagccctagaaagcacagtaattcaaatgaaaaaggatccctcactttcaaaagactgggaaggatacaaattacttgtgactgcaggaccaactattgaggatatagatgcagcaagatatctgacaaataggagtagtgggaatatgggtgtcctaattgcacaagcagcaaagttccgtggcgcaaatgttgatttgatccacggtcctttacaaatatcagactcttttttagaaggcctggaaacctatcaaattagaagtgcggttgacatgcaaaaaatgttgaatgagcttcaatctgattcaaatgcaattgctatgacagcagccatctcagatatccgatcaaaaggagggtctttagaaaccaaagtcaataaagagtctctgattgattcaatcaaagactcttttgaactagtcccagacctaattagtgacttaataaaaaaacgaccaaaaaatcaagtgattctaggatttacagcattaacaggaagcgatcaaaaagtaaaaaaaggcggagagctgaaaaaatctaagaaaggctgcgatcttctattcgccaatcctattgacaagcctaatcaaggctttgattctgaatttaatggaggctggttacttggtcctaacgacagggcgctatcaatacctgtagcgtcaaaattatccattgcgcatctattacttgacgaactattaaaaatcctgaaaaagacatcaaaaaaaaataattaa

SEQ ID NO: 49737 - protein, 429 aa, Prochlorococcus marinus str. MIT 9211
MKTKESSHLKGRKILVISTGSIAAVKTPLLVSSLIKEGAEVRCVVSPSASQLISPLSLATLSRSRCYQDKDQWDPSEPKPLHIALAEWAEVVVIAPLSASSLARWVNGLAEGLAASILLACEKPIIAAAAMNTGMWHNEGVQRNWIALQKYSNVLTLSPSEGLLACDRIGDGRMINPEMIQLALESTVIQMKKDPSLSKDWEGYKLLVTAGPTIEDIDAARYLTNRSSGNMGVLIAQAAKFRGANVDLIHGPLQISDSFLEGLETYQIRSAVDMQKMLNELQSDSNAIAMTAAISDIRSKGGSLETKVNKESLIDSIKDSFELVPDLISDLIKKRPKNQVILGFTALTGSDQKVKKGGELKKSKKGCDLLFANPIDKPNQGFDSEFNGGWLLGPNDRALSIPVASKLSIAHLLLDELLKILKKTSKKNN

SEQ ID NO: 49738 - DNA, 1320 bp, Synechococcus sp. RS9917
  CDS (1)..(1320): transl_table=11
ttgtccgggcctgatcgtttcgtttcgggcccactggtgggcaggcgtgtgcttgtcgcggccagcggcagcatcgctgcagtcaagacccctttgttggtgagtgctcttgtgcgtgccggtgcggaggtgcgctgcctgctcacccccagcgccgccaggctggtgagtccggtggcgctggcctgcctcagccggcatcgctgttatcaggacgtcgaccaatggcagccgagcgaaccgcgcccactccacatcgacttggccgaatgggccgagctggtgatcgttgctcccctcagcgccacaagcctggcccgatggacgcaggggttggcggatggcctgctggccggggtgctgctggcctgcgagcggccggtgctggcggccgcggccatgaacaccggcatgtggacccaggccgccgtgcgccgcaattggcagcagctgcaggttgatccgcgggtgtgggccctcgatcctgccgcgggtctgctggcctgcgatcgcatcggcgatggacggatggcgtcgcccgagttgattgaactggctgccgtccatgctctgatgcaggccgacccggacggccacctgcccagggactgggccgggcgcaggctgctggtgtctgcggggccgacgctggaagcgcttgacccggcgcgcttgatcagcaatcgcagcagtgggcgcatgggagtgttgatcgcccaggcggctcggctgcggggtgctgcggtcacgctcgtgcatggtccgctcaacctgcctgaggcctggctggaggggctgtcttgtgaaccggtcgagagcgccgtgcagatggggcgggccctggaggcccgctggcctgaggccgacgccctggtgatggccgctgccgtcgctgactggcggcgacgcggtggtccggcggcgtcgaaagccagcaaggacaccacggcggcggcgctcgtgggcgacctggagcttgtgcccgatctcctggcgacattggtgcaaaccagacggcgcgaccaggtctgcctcggttttgccgccctcagcggcgatgacgccacccttcaggagcgggccgacgccaagatcagggcgaagcgctgcgactggctgttcgccaacccgatcgatcggcctgggcagggcttcggcgaggccgctaacggtggctggttgctggggctggagcgtacgccggcggcggagacgacgctggagtcgatcccagcgatggacaaatcactcctggcccacacgctgctggaccggctgctcgaacgtttggatcaggcggccatgcccgccggatcctga

SEQ ID NO: 49739 - protein, 439 aa, Synechococcus sp. RS9917
MSGPDRFVSGPLVGRRVLVAASGSIAAVKTPLLVSALVRAGAEVRCLLTPSAARLVSPVALACLSRHRCYQDVDQWQPSEPRPLHIDLAEWAELVIVAPLSATSLARWTQGLADGLLAGVLLACERPVLAAAAMNTGMWTQAAVRRNWQQLQVDPRVWALDPAAGLLACDRIGDGRMASPELIELAAVHALMQADPDGHLPRDWAGRRLLVSAGPTLEALDPARLISNRSSGRMGVLIAQAARLRGAAVTLVHGPLNLPEAWLEGLSCEPVESAVQMGRALEARWPEADALVMAAAVADWRRRGGPAASKASKDTTAAALVGDLELVPDLLATLVQTRRRDQVCLGFAALSGDDATLQERADAKIRAKRCDWLFANPIDRPGQGFGEAANGGWLLGLERTPAAETTLESIPAMDKSLLAHTLLDRLLERLDQAAMPAGS

SEQ ID NO: 49740 - DNA, 1299 bp, Synechococcus sp. WH 5701
  CDS (1)..(1299): transl_table=11
atgaggagtgagcccctggccggctgccggatcctggtggccatcagcggcagcatcgcctgcgtgaaactgccggcgctggtgagtgccttggtccagcgcggtgcccaggtccgctgcgtgctcacccccagtgccgcccggctggtgagcccggtgaccctggccagcctcagccgctccccctgccatctcgaggaggatcagtggagccaccgggcgccccggcccctgcacgtggagctggccgaatgggccgaactggtgctggtggcccccctgagtgccaccagcctggcccgctgggtgcagggctccggcgacaccctgctctccagcaccctgctggccacggaggccccggtgctggcggccgccgccatgaacacggcgatgtggcgctcccccggggtgcggcgcaactggcaggagctgcagggcttcgagcgggtgctgaccctggggcccgccgccgggctgctcgcctgtgaccgccagggtgacgggcggatggccgagccccagcagctgctgctggggctggagaccctgcgtctgcatggctggcggcgcgactggcagggcaggcggctgctggtgagcgccggacctacccgcgaatggctggatcccgcccgctgcctcaccaaccccagcacgggccggatgggggtgctgctggcccaggcagcccggttgcggggggctgaggtcgacctggtgcacggccccctcaacctcgatccgttgctgctggaaggcctgcgcgcgtatcccgccgagagcggtgtggcgatgggcgaggccctggagcagttgcaaccggcggccgatgcggtggccatggcggctgccgtggcggatcacggccgtgccgctcctgaactccagaagctcagcaagcaggatctgcttgccagcttgagtgggggctggtgcgaggtgccggacctgctggctcagctggtggcccgccgccaagcaggccagcggattctggggttcgcggcccattcgggggatgtgcttccccaggcccgggccaagcggctgcgcaagggctgcgatctgctcttcgccaacccgatcgaccaaccacaggccggcttcagggtgtgcagcaatgaaggctggttgctcggtccgggtgagcgggagctgcgcatcgagccagcgggcaagttcgccgtggcccatcagctcatcagcgccctcggagccctgctggatccgctcacgccgccagcggaggctcctcgtgaaggcctggctggtcgtcgcgctgcaacagatccatga

SEQ ID NO: 49741 - protein, 432 aa, Synechococcus sp. WH 5701
MRSEPLAGCRILVAISGSIACVKLPALVSALVQRGAQVRCVLTPSAARLVSPVTLASLSRSPCHLEEDQWSHRAPRPLHVELAEWAELVLVAPLSATSLARWVQGSGDTLLSSTLLATEAPVLAAAAMNTAMWRSPGVRRNWQELQGFERVLTLGPAAGLLACDRQGDGRMAEPQQLLLGLETLRLHGWRRDWQGRRLLVSAGPTREWLDPARCLTNPSTGRMGVLLAQAARLRGAEVDLVHGPLNLDPLLLEGLRAYPAESGVAMGEALEQLQPAADAVAMAAAVADHGRAAPELQKLSKQDLLASLSGGWCEVPDLLAQLVARRQAGQRILGFAAHSGDVLPQARAKRLRKGCDLLFANPIDQPQAGFRVCSNEGWLLGPGERELRIEPAGKFAVAHQLISALGALLDPLTPPAEAPREGLAGRRAATDP

SEQ ID NO: 49742 - DNA, 1257 bp, Synechococcus sp. WH 7805
  CDS (1)..(1257): transl_table=11
atggacgggctgctgcagggacggcgagtggttgttgcggcctgcggaagcatcgccgctgtgaagacaccactgctggtgagtgctcttgttaaggagggtgcgcaggtccgttgcttagtgaccagcagtggtgcccagcttgtcagtcctgtcgctctggcttgtctcagtcgtcattcctgtcttcaggacgctgatcaatgggatccgtcccgctcgcgacctctgcacatcgagctcgcggaatgggccgatttggtgatcgtggcaccgctgagcgccagtagcctctctcgatgggtgcacggtgagggcgaaggactgcttgccagtcttctgttggcctgtgagtgcccggttctggctgcaggagccatgaacaccgccatgtggcaacacccggcggttcagcgcaactggctcacgctccatggagatcctcgggtgctgcccctggctccggaggccggattgctggcgtgtgaccgcgtcgggaccggacggatggctgctccggagtgcgtcgtgctggctgccgccagcatgtttttgcaggctgacaagcaggggaggctgcgttgcgattggcgcggcaagcgtgtgctgatcagtgctgggcccacgcaggaaccgctggattctgtgcgcctgatgagtaaccgcagcagcggccgcatgggcgttctgctcgcgcaagcggcacgcttccgtggtgcttacgttgatttggtgcatggtccgctgaaggttccagaggcctggctggagggtctgaactgtctgccggctttcagcagcgccgcaatggagctctgcctgttggagcatcaaccacgcgccgatgccgtgttgatgtgcgcagccgttgcggatttgcggcgcaagtgcttggaggattcatccaaacttcccaaaggcgagctcatgaagacgattgctgagggctgggagcaggtgccggacctgcttcagttgctgcggtcaagacgtccttcccggcagcgcctgctgggttttgctgcattagctggagacgataaaaccttgctccagcgcggttatgagaagtatcaggccaaagggtgtgacctgttgatggtcaatccgatcgatcgcccgaatcagggtcttgactgcgacctgaacggtggctggctcatcggccccggtgaacgccaggaggaaatgcctgccatgcacaagttcgctctggcacacgatctgctggatcggctcagccagcttggcgattag

SEQ ID NO: 49743 - protein, 418 aa, Synechococcus sp. WH 7805
MDGLLQGRRVVVAACGSIAAVKTPLLVSALVKEGAQVRCLVTSSGAQLVSPVALACLSRHSCLQDADQWDPSRSRPLHIELAEWADLVIVAPLSASSLSRWVHGEGEGLLASLLLACECPVLAAGAMNTAMWQHPAVQRNWLTLHGDPRVLPLAPEAGLLACDRVGTGRMAAPECVVLAAASMFLQADKQGRLRCDWRGKRVLISAGPTQEPLDSVRLMSNRSSGRMGVLLAQAARFRGAYVDLVHGPLKVPEAWLEGLNCLPAFSSAAMELCLLEHQPRADAVLMCAAVADLRRKCLEDSSKLPKGELMKTIAEGWEQVPDLLQLLRSRRPSRQRLLGFAALAGDDKTLLQRGYEKYQAKGCDLLMVNPIDRPNQGLDCDLNGGWLIGPGERQEEMPAMHKFALAHDLLDRLSQLGD

SEQ ID NO: 49744 - DNA, 1233 bp, Pseudoalteromonas tunicata D2
  CDS (1)..(1233): transl_table=11
atggccaataaaaaaatattacttgctatctctgggggcattgctgcctataaatgcgctgaattagttcgccgtttaaaagatcatggtcacgatgtaaaagtggttatgacacattctgcgcaagcatttattaccccgcttacgatgcaagcagtttcagggcagcctgtttcagacagcttactcgacccgaatgccgaagcggcaatgggccatattgaattcgctaaatgggcagatcttattttagtagcccccgcaacagcaaatatcatcgcaaaaatgagccaaggcatggctgatgacctgctcacgacattattattggctactcctagccttgttgctattgcaccggcaatgaatcaacaaatgtacgctcatgcagccacacaagctaacttaacaacgcttgcagctagaggtattcatatttggggccctgccagtggcgtacaagcttgtggtgatgtaggtgctggtagaatgttagaacccgcagaacttgtgagcttgtgtaacgatttactcaatcgtccagcattaataagtgagatagaaataagtcatgcagaacaacccctttttgctggcaaaacaattacaattaccgctggtccgacacgagaagcgctcgacccggtacgctttattagcaatcatagttcaggaaaaatgggctatgcacttgcagcagctgcagtatcattaggtgctaaggttaatttaatttcagggcccgttaccctcaaaactcctgatggtgtccataaaatagcagtagaaagtgcgcttgaaatgcatcaagcggccttaacgctcgcagtagaatcagatgtatttattggctgtgcagccgttgctgattaccgcgctgccgatattcaaagccaaaagataaaaaaacaaggcgataacctgacattaaccctggtcaaaaacccagacatcattgcagatgtcgcggctttaaaatcacacaggccatttaccgtgggttttgctgcagaaacgcaaaatgtagcgcaatatgcccaaggtaagctcatcaacaaaaaccttgatttgatttgcgcaaacgatgtatcacagcaaggcattggctttaattctgatcataatgccttaacaatttactggcaaaatggtcagttagatttacccgttcaaagtaaagaaatactagctgtatcaattataaagacaatattcgagcgacaaaacaactaa

SEQ ID NO: 49745 - protein, 410 aa, Pseudoalteromonas tunicata D2
MANKKILLAISGGIAAYKCAELVRRLKDHGHDVKVVMTHSAQAFITPLTMQAVSGQPVSDSLLDPNAEAAMGHIEFAKWADLILVAPATANIIAKMSQGMADDLLTTLLLATPSLVAIAPAMNQQMYAHAATQANLTTLAARGIHIWGPASGVQACGDVGAGRMLEPAELVSLCNDLLNRPALISEIEISHAEQPLFAGKTITITAGPTREALDPVRFISNHSSGKMGYALAAAAVSLGAKVNLISGPVTLKTPDGVHKIAVESALEMHQAALTLAVESDVFIGCAAVADYRAADIQSQKIKKQGDNLTLTLVKNPDIIADVAALKSHRPFTVGFAAETQNVAQYAQGKLINKNLDLICANDVSQQGIGFNSDHNALTIYWQNGQLDLPVQSKEILAVSIIKTIFERQNN

SEQ ID NO: 49746 - DNA, 1209 bp, Oceanospirillum sp. MED92
  CDS (1)..(1209): transl_table=11
atgcaaagacttacaaacaaacagatcattcttggcattaccggtggcattgccgcttataaaagtgcagagctcacccgcatccttaaaggcgcaggcgccgatgtccgagtagtgatgaccccctcagcgactgaattcatcacccctttaacccttcaggcattatctggaaacccagtacatcttcatctactggatgctgaggccgaagcgggtatgggtcatattgagctcgcaaaatgggccgacctggttctcgtcgcacctgcaagcgcaaattttatctcccgcctcgcgtcaggacagggcgatgatctgttaaccacactatgtctggcaactgatgcgccaatctgcctggcgccagcaatgaatcaagccatgtggcgtgatgatggcacacaggcaaatgtgaaaaccataacagaacgtgacgttaagctgtttggccctggtattggagagcaagcttgtggtgatactggccctgggcgcatgcttgagcctgaagagatcgctaacctgactgccgagcagttccaaagcggctcactgactggcaaaacggtgtttattacagcaggccctacccgtgaagcgatggatcctgtccgttatatctctaaccacagctcaggaaagatgggctacgccttggctgaagccgcagttgaagctggggcaaaggttaaactgataagtggacctgttaacatccccgttccagaacgggttgaacgtgtatcagtagaaagcgcagaagagatgcttgaagcatctatgctagatcttggactttgcgatatttttatcgcggcagcagccgttgccgattatcgcccaaccgcgatagccgagcataaaataaaaaaaggttccgaggagataatggaactccacctggttaaaaaccctgatattgtcgctactgtagcaaacagttcacctaaaccctttacggtaggctttgcggctgaaacaaaagatgttcttgaatacgcccgaagcaaacttgagcgtaaaaaccttgatcttatcattgccaatgatgtttcacggagcgacatcggctttaacagcgatgaaaatgcagtaacgttgatctctgcctcctctaccgagagcttaccccaggcatcaaaacgtcagcttgcaaatcgcttgattgaaagaatttccgctcagtacaaaagcacggcccgctag

SEQ ID NO: 49747 - protein, 402 aa, Oceanospirillum sp. MED92
MQRLTNKQIILGITGGIAAYKSAELTRILKGAGADVRVVMTPSATEFITPLTLQALSGNPVHLHLLDAEAEAGMGHIELAKWADLVLVAPASANFISRLASGQGDDLLTTLCLATDAPICLAPAMNQAMWRDDGTQANVKTITERDVKLFGPGIGEQACGDTGPGRMLEPEEIANLTAEQFQSGSLTGKTVFITAGPTREAMDPVRYISNHSSGKMGYALAEAAVEAGAKVKLISGPVNIPVPERVERVSVESAEEMLEASMLDLGLCDIFIAAAAVADYRPTAIAEHKIKKGSEEIMELHLVKNPDIVATVANSSPKPFTVGFAAETKDVLEYARSKLERKNLDLIIANDVSRSDIGFNSDENAVTLISASSTESLPQASKRQLANRLIERISAQYKSTAR

SEQ ID NO: 49748 - DNA, 1218 bp, Xanthobacter autotrophicus Py2
  CDS (1)..(1218): transl_table=11
atgcttaacgataaacgcatcctcctcctgatcggtggcggaatcgccgcctacaagtgcctggagctggtccgccgcctgaaggaacgcggcgcgaaagtgcgggcggtcatgacccgggcggccgggcagttcgtcacccccctgtccgtgggcgcgatcaccggcgagcgcgtcttcaccgacctgttcgacctcaccgccgaacacgacatcggacacatccgcctttcgcgggaggcggatcttgtcgtggtcgcgcccgccacggcggacctgctggccaagatggcacacggcatcgccgacgatcttgccaccaccgcgctgctcgccaccgacaagccggtgctggtggcccccgccatgaacccgcgcatgtgggcgcaccccgccacgcggcgcaacgtggcgcagctgcgtgccgacggcatcgccatggtggggcccaacgctggcgccatggcagaacgcgacgagttcggggaaggccgcatggccgagcccatggagatcctcgccgccatcgaggcccatttcgggatcgccgaggcccccctgctcaaggggcggcgcatcctcgtgacctccggtccgacgcacgagcccatcgacccggtgcgctacatcgccaaccgttcctccggcaagcagggccacgccatcgccgcggcggcccgggcggcgggggcggaggtgattctggtgtccggccccgccgaggtcgccgaccccaagggggtcaaggtgatccatgctgagacggcgcaacagatgctggccgccgtggaggaaagcctgccggtggatgccgccgtgttcgccgcagcggtggccgactggcgcgtggccgacgcgtccgaccagaagatcaagaagaccgccggcggcgccccgaccctgaccctggtggagaatcccgacatcctcgccaccatcgcccgccatggcaccctgcggccgcgcctcgtggtggggttcgcggccgagacccaggaggtggtggcccatgcccgcgacaagcgcctgcgcaagggctgcgactggatcgtcgccaacgacgtgtcgccggaaaccggcatcatgggaggcgatgtgaacaccgtgcatcttgtgaccgctgccggggtggaggactggccctccgcctccaaggccgaagtcgcccgccatctggtggcgcgcatggccgccgaacttgcgggagaagcccgatga

SEQ ID NO: 49749 - protein, 405 aa, Xanthobacter autotrophicus Py2
MLNDKRILLLIGGGIAAYKCLELVRRLKERGAKVRAVMTRAAGQFVTPLSVGAITGERVFTDLFDLTAEHDIGHIRLSREADLVVVAPATADLLAKMAHGIADDLATTALLATDKPVLVAPAMNPRMWAHPATRRNVAQLRADGIAMVGPNAGAMAERDEFGEGRMAEPMEILAAIEAHFGIAEAPLLKGRRILVTSGPTHEPIDPVRYIANRSSGKQGHAIAAAARAAGAEVILVSGPAEVADPKGVKVIHAETAQQMLAAVEESLPVDAAVFAAAVADWRVADASDQKIKKTAGGAPTLTLVENPDILATIARHGTLRPRLVVGFAAETQEVVAHARDKRLRKGCDWIVANDVSPETGIMGGDVNTVHLVTAAGVEDWPSASKAEVARHLVARMAAELAGEAR

SEQ ID NO: 49750 - DNA, 1212 bp, Flavobacteria bacterium BBFL7
  CDS (1)..(1212): transl_table=11
atgatgtcggttttaagcggtaaaaacgtattactaggtattaccggtggtattgctgcttataaaacaacttaccttgtgcgcctgcttattaaagcaggcgctactgttagggtagtgatgactccatcttctaaagagtttgtcactcctttaactctttctactttatctaaaaatcctgttttatcttcttttactaatgaagatgatgaaaatgatatctggaataatcatgtcgatctaggtctttgggcagattatatgattattgcacctgcaaccgcaaataccatgagtaaaatggtatcgggaaatattgataattttttgatggcggtatactgcagtgcaaaatgccctgtgtatttcgctccggcgatggatttagacatgttcaagcatccatctactcaacataattttgatcaactttctagttatggtaataaaatgatacctgctgggactggtgaacttgccagtggattgagcggagaaggacgcatggctgagccagaagaaatcgtttcctttattgaaaaggatatcgagtctcagctgccattaaaaggaaaaatgtgtcttattacggctggccctacttatgagcctatcgatccagtaagattcataggtaatcacagtagtggtaaaatgggtgctgccctagcaatggaaatggcttctcaaggtgcacaagtgattctcgttatgggacctagccatgtaagtacaaatcatcatttgattcaaagagttaatgtaaaaacagcgcaagaaatgtatgatcaggttcatgagtatattgatcaagtagattatgctatatttagtgctgcagttgcagattataaacctgtaaatccagcagatcagaaaataaaaaagaagtccgatacgttaaccgtagaactggttaagaacccagatatattagctagcgtcggtgcgatgagtaaacgtccgtttttagtggggtttgcgttggaaacagaaaatgagttaaagcacgctttcgcgaaagcggaaaagaaaaatacagatttactcgtattgaattctacacgtgataaaggtgcaggatttggtaaagacactaataaaatcacactgattgatagggatcaaaatacaattgtttttgatacaaaacctaaaactgaagtggcaaaagatatcgttaatgaaattattaaaagagctctttaa

SEQ ID NO: 49751 - protein, 403 aa, Flavobacteria bacterium BBFL7
MMSVLSGKNVLLGITGGIAAYKTTYLVRLLIKAGATVRVVMTPSSKEFVTPLTLSTLSKNPVLSSFTNEDDENDIWNNHVDLGLWADYMIIAPATANTMSKMVSGNIDNFLMAVYCSAKCPVYFAPAMDLDMFKHPSTQHNFDQLSSYGNKMIPAGTGELASGLSGEGRMAEPEEIVSFIEKDIESQLPLKGKMCLITAGPTYEPIDPVRFIGNHSSGKMGAALAMEMASQGAQVILVMGPSHVSTNHHLIQRVNVKTAQEMYDQVHEYIDQVDYAIFSAAVADYKPVNPADQKIKKKSDTLTVELVKNPDILASVGAMSKRPFLVGFALETENELKHAFAKAEKKNTDLLVLNSTRDKGAGFGKDTNKITLIDRDQNTIVFDTKPKTEVAKDIVNEIIKRAL

SEQ ID NO: 49752 - DNA, 1206 bp, delta proteobacterium MLMS-1
  CDS (1)..(1206): transl_table=11
gtgtctttactgctcagcgacaagaaaatcctgctgggaatcagcggcgggattgccgcctataaaaccgccgactgggttcgcgagttgcgccgggagggtgccgaggtccgggtgatgatgagtgccgccgccggccgctttatcaccccgctgaccatggccgccctctccggccagccggtccatgacgatatcttcgccaccgccgaggcccagcggatcccccatatcaacctgggccgggagggcgatttgatcctgctggccccggccaccgccaacctgatcgcccgcctggcccacggcctggccgatgatctgctggccgccgtggtcctggccgcccaggccccggtcatggtctgcccggccatgaacagcaccatgtacgcccaccccgccaccggtgacaacctggcccgcctgcggcagtacggttaccacgtggtcgagccggaaacgggctccctggcttgcggcgaagaaggcccgggccggctggcctcctgggagacggtgcgccaggaaatcctcaccgtcttaagcccccaggatctgcatggcaaaaaaatcctggtcaccgccggccccacctgggaacccctggatccggtccggctgttgagcaaccgctccagcggcaagatgggttacgccctggcggcggcggcccgacggcggggagcccgggtgaccctgatcagcgggcccggcgccatcccgcccccggccggagtggagacggtcccggtggtcaccgcccggcaaatgcatgacgaggtgatcagccgggcgccggccatggaggtggtaatcaaggcggcggcggtttccgattaccggccggcccattacgcgccccacaagctcaaaaaaggggccaccgatgccaccctgccgctggtggccaacccggacatcttaggcgagctgggagagatgaagcgccaggcccgctgctttccgctactggtgggttttgccgccgagagcgaccatcatctggcagagggccgccgcaagctggcagccaaaaacctggacctggtggcgatcaacgatatcagcgccgaggatgccggtttcgcggtggataacaaccggatcaccatggtggaccgcaacgataccgtggaggagttaccgctgctgagcaaggaagcggcagcaaacagaattttagacgccattataagactttaa

SEQ ID NO: 49753 - protein, 401 aa, delta proteobacterium MLMS-1
MSLLLSDKKILLGISGGIAAYKTADWVRELRREGAEVRVMMSAAAGRFITPLTMAALSGQPVHDDIFATAEAQRIPHINLGREGDLILLAPATANLIARLAHGLADDLLAAVVLAAQAPVMVCPAMNSTMYAHPATGDNLARLRQYGYHVVEPETGSLACGEEGPGRLASWETVRQEILTVLSPQDLHGKKILVTAGPTWEPLDPVRLLSNRSSGKMGYALAAAARRRGARVTLISGPGAIPPPAGVETVPVVTARQMHDEVISRAPAMEVVIKAAAVSDYRPAHYAPHKLKKGATDATLPLVANPDILGELGEMKRQARCFPLLVGFAAESDHHLAEGRRKLAAKNLDLVAINDISAEDAGFAVDNNRITMVDRNDTVEELPLLSKEAAANRILDAIIRL

SEQ ID NO: 49754 - DNA, 1206 bp, delta proteobacterium MLMS-1
  CDS (1)..(1206): transl_table=11
gtgtctttactgctcagcgacaagaaaatcctgctgggaatcagcggcgggattgccgcctataaaaccgccgactgggttcgcgagatgcgccgggagggtgccgaggtccgggtgatgatgagtaccgccgccggccgctttatcaccccgctgaccatggccgccctctccggccagccggtccatgacgatatcttcgccaccgccgaggcccagcggatcccccatatcaacctgggccgggagggcgatttgatcctgctggccccggccaccgccaacctgatcgcccgcctggcccacggcctggccgatgatctgctggccgccgtggtcctggccgcccaggccccggtcatggtctgcccggccatgaacagcaccatgtacgcccaccccgccaccggtgacaacctggcccgcctgcggcagtacggttaccacgtggtcgagccggaaacgggctccctggcttgcggcgaagaaggcccgggccggctggcctcctgggagacggtgcgccaggaaatcctcaccgtcttaagcccccaggatctgcatggcaaaaaaatcctggtcaccgccggccccacctgggaacccctggatccggtccggctgttgagcaaccgctccagcggcaagatgggttacgccctggcggcggcggcccgacggcggggagcccgggtgaccctgatcagcgggcccggcgccatcccgcccccggccggagtggagacggtcccggtggtcaccgcccggcaaatgcatgacgaggtgatcagccgggcgccggccatggaggtggtaatcaaggcggcggcggtttccgattaccggccggcccattacgcgccccacaagctcaaaaaaggggccaccgatgccaccctgccgctggtggccaacccggacatcttaggcgagctgggagagatgaagcgccaggcccgctgctttccgctactggtgggttttgccgccgagagcgaccatcatctggcagagggccgccgcaagctggcagccaaaaacctggacctggtggcgatcaacgatatcagcgccgaggatgccggtttcgcggtggataacaaccggatcaccatggtggaccgcaacgataccgtggaggagttaccgctgctgagcaaggaagcggcagcaaacagaattttagacgccattctaagactttaa

SEQ ID NO: 49755 - protein, 401 aa, delta proteobacterium MLMS-1
MSLLLSDKKILLGISGGIAAYKTADWVREMRREGAEVRVMMSTAAGRFITPLTMAALSGQPVHDDIFATAEAQRIPHINLGREGDLILLAPATANLIARLAHGLADDLLAAVVLAAQAPVMVCPAMNSTMYAHPATGDNLARLRQYGYHVVEPETGSLACGEEGPGRLASWETVRQEILTVLSPQDLHGKKILVTAGPTWEPLDPVRLLSNRSSGKMGYALAAAARRRGARVTLISGPGAIPPPAGVETVPVVTARQMHDEVISRAPAMEVVIKAAAVSDYRPAHYAPHKLKKGATDATLPLVANPDILGELGEMKRQARCFPLLVGFAAESDHHLAEGRRKLAAKNLDLVAINDISAEDAGFAVDNNRITMVDRNDTVEELPLLSKEAAANRILDAILRL

SEQ ID NO: 49756 - DNA, 1212 bp, Rickettsiella grylli
  CDS (1)..(1212): transl_table=11
atgaaaaaaaaaattttattaggtattacagggagtatagcggcttataaaacacctgaacttgtcagaaagtttaaagaacgtgattatgacattaaagttgttctaacgagttgtggcaaagcttttgttactcctttgacattacaagcggtgtcacaacatccagtgtatgaagcgcttgtcgatgttgaagctgaaatgaatatgaatcatatcacgcttgcgcgttggcctgattatattttaatagcaccggctacagcgcagatcattgctaaattagcgcatggttttgcggatgatttattgagtacattatgtttagccacggataaacgtttaattattgcaccggctatgaatcaagcgatgtggtcgaatcagataacccaagcgaatgtttgcacgctgaaagaaagaggttacttatttttagggcctgcggaagggagtcaggcgtgtggtgagtttggtttgggtcgtatgctggaacctttagagatagtggatacggtatcaaaaatgtgggtgaggccctacttaaaagaccaaaaagttttaattactgcaggtcctactcaagagcctattgatccagtacggtatttatccaatcgtagttcaggtaaaatgggctttgcgttagcccaagcggcggttgatgcgggtgctgatgtgacactaatcagtgggcctgttactttatttcctcctgggaagttgaaatttatagccgtgaaaacagctgaagaaatgttaacggctgttaaaaaagaaatcagcggtcaggccatttttataagcactgcagcagtagcggattatcacattgtaaatccggtattacagaaaataaaaaaaacaaacgaactgttaacgttgaaattaaaaccgacgattgatattttagcgtccgtgagtcaaatgaacttacaaccccgacctttattcgttggtttttctgctgaaactgaatataccttaaaattttcagaagaaaaacgaaaaaacaaaaatattgatttaatggttgtgaatgacgtcagtcaaaaacatattggttttgatagtgataaaaatgaagtgactgttttatctaaagataaacctatccatttaacgtgcgccactaaacaaatcatcgcacaacaattgttgaaaatagtggcaagtcgaatgcaaagtgaatccatcaatgtgtcgttttag

SEQ ID NO: 49757 - protein, 403 aa, Rickettsiella grylli
MKKKILLGITGSIAAYKTPELVRKFKERDYDIKVVLTSCGKAFVTPLTLQAVSQHPVYEALVDVEAEMNMNHITLARWPDYILIAPATAQIIAKLAHGFADDLLSTLCLATDKRLIIAPAMNQAMWSNQITQANVCTLKERGYLFLGPAEGSQACGEFGLGRMLEPLEIVDTVSKMWVRPYLKDQKVLITAGPTQEPIDPVRYLSNRSSGKMGFALAQAAVDAGADVTLISGPVTLFPPGKLKFIAVKTAEEMLTAVKKEISGQAIFISTAAVADYHIVNPVLQKIKKTNELLTLKLKPTIDILASVSQMNLQPRPLFVGFSAETEYTLKFSEEKRKNKNIDLMVVNDVSQKHIGFDSDKNEVTVLSKDKPIHLTCATKQIIAQQLLKIVASRMQSESINVSF

SEQ ID NO: 49758 - DNA, 1203 bp, Oceanobacter sp. RED65
  CDS (1)..(1203): transl_table=11
atgttgagcctcagtaacaaacgaatattgcttggcattaccggcggtatcgccgcttataaaagcgcagaattggttcgcgcgctaaaaggtttaggtgcccaagtccgtgtggtcatgaccgacggagcaaaagaatttatcacaccattaaccctgcaagcgttatctggtaatcccgttcaccatagtttattggatcccgaagccgaagcaggtatggggcacattgaattagccaagtggccagaccatattttgatagcaccggccagcgcgaatttcatcgcacgcttagccaatggcatgggtgacgacttgctgaccactatttgcttggccagtattgctcctttagccatcgccccggctatgaatcaagccatgtgggcggatgccaatacccagaacaacctacaaaaactgcaggaactcaaaaaagtaaaagtttggggacccgctagcggcgaacaagcctgtggtgatgtcggtctaggacgcatgcttgatccacaagatctagtagcagagctgggcaaacagtttgagcaaaaaagcttgagtgggaaaaccgtgacgattactgcaggacccacccgcgaagccatagacccagtgcgctatatcagtaatcacagtagcggcaaaatgggttttgctctggcgcaagcggcggtagaagccggtgccaacgtcaatttaatttgtggcccagtaaccttagcgacgccagaacgtgtcaatcgcatagacgtcgaaagctgtcaaaacatgtacgacgcagtattcgaaacactgccaaacacggacatattcatcggcgcagcggcggttgcggactatcgaccggccactacagctgatcataaaattaaaaaacagagcgatgccatgagcatcgaactggtacgcaacccagatattatctctagcgtggcagccactgagaacaaaccttttacagtggggtttgccgccgaaacacaagacgttagcggttatgccaaggggaaactcattagcaaaaacctagatatgattattgcgaatgatgtcagcgataagagtattggttttaacagcgaagacaatgctgtggtggtcattggccacaactatgaaaccagtcatggcaaagccaacaaataccacttagcacgcgttattgttgagcacattgctgaatgcttagaaactcagtaa

SEQ ID NO: 49759 - protein, 400 aa, Oceanobacter sp. RED65
MLSLSNKRILLGITGGIAAYKSAELVRALKGLGAQVRVVMTDGAKEFITPLTLQALSGNPVHHSLLDPEAEAGMGHIELAKWPDHILIAPASANFIARLANGMGDDLLTTICLASIAPLAIAPAMNQAMWADANTQNNLQKLQELKKVKVWGPASGEQACGDVGLGRMLDPQDLVAELGKQFEQKSLSGKTVTITAGPTREAIDPVRYISNHSSGKMGFALAQAAVEAGANVNLICGPVTLATPERVNRIDVESCQNMYDAVFETLPNTDIFIGAAAVADYRPATTADHKIKKQSDAMSIELVRNPDIISSVAATENKPFTVGFAAETQDVSGYAKGKLISKNLDMIIANDVSDKSIGFNSEDNAVVVIGHNYETSHGKANKYHLARVIVEHIAECLETQ

SEQ ID NO: 49760 - DNA, 1263 bp, Synechococcus sp. RS9916
  CDS (1)..(1263): transl_table=11
atgaagactgagtccggggcgctgcaggggcgcaggattctggtggctgtcagcggcagcatcgcggcggtcaagacgcccctgttggtcagtgctctggtcaaggccggtgctcaagtgcgctgcgtggtcaccccaagtgcggcgcagttggtcagccccgtggccttggccagtcttagccggcatcgctgctatcaggacgacgatcagtgggatccacgcgagcccaggccgttgcatgtggcgttggcggaatgggctgaattggtgatcgtggcgcctctcagcgccagcacgttggcccgctggacccagggcatgggcgatggccttctggccagtctgctgctggcctgtgaacgccccgttgtggcggcggcggccatgaatacaggcatgtggagccagcctgcggtgcggcgtaactgggctctgctggctgacgatcccagggtcctgcgactggcgccagagtcgggcctattggcctgtgatcgtattggcgatgggcgcatggcggatccagagctgattcgcctggccgcggagagcgcgttgctcacgcaagcctctaatggttcactcccttgggattggcaaggtcgcaccgtgttggtgagtgctggtcccaccgttgagggcattgatccagcgcgggtgctcagcaaccgcagcagtggtcgtatgggcgtgctgattgctcaagcagcgcgtttccgcggcgcttcagtgcacttggtgcatggcccactgcagttgcctctggcctggctcgagggtctgcactgccaggcgattgaatctgctgagcagatgcaggagcacttgcaccgcctccaggccaatgccgctgccgtggtgatggcggccgcggtggcggattggcgtcgtcaaggaggagcgtccgtgcagaaggcccccaaggcggacctgcagcgcaccctggccgagcagctcgagccggtgccagatctgctcaaggaattgcaagccaccaagcctgacggacagcggttgctgggttttgccgcactcagcggttcagatgacgaaattcaggctctggcccgtgacaagcgcgccgccaaaggctgcgatctgttgatggccaacccaattgatcgcaacggccaggggtttggagcggccatgaatggggggtggctcgtcaaaactgatggctccacggaaggggtgcctgtcatggacaaactcgctctggcccaccgccttttggatcagcttgttgactgcttctag

SEQ ID NO: 49761 - protein, 420 aa, Synechococcus sp. RS9916
MKTESGALQGRRILVAVSGSIAAVKTPLLVSALVKAGAQVRCVVTPSAAQLVSPVALASLSRHRCYQDDDQWDPREPRPLHVALAEWAELVIVAPLSASTLARWTQGMGDGLLASLLLACERPVVAAAAMNTGMWSQPAVRRNWALLADDPRVLRLAPESGLLACDRIGDGRMADPELIRLAAESALLTQASNGSLPWDWQGRTVLVSAGPTVEGIDPARVLSNRSSGRMGVLIAQAARFRGASVHLVHGPLQLPLAWLEGLHCQAIESAEQMQEHLHRLQANAAAVVMAAAVADWRRQGGASVQKAPKADLQRTLAEQLEPVPDLLKELQATKPDGQRLLGFAALSGSDDEIQALARDKRAAKGCDLLMANPIDRNGQGFGAAMNGGWLVKTDGSTEGVPVMDKLALAHRLLDQLVDCF

SEQ ID NO: 49762 - DNA, 1200 bp, marine gamma proteobacterium HTCC2143
  CDS (1)..(1200): transl_table=11
atgcaacaattaacgaataaacagatcctggtcggtgtgactggtggaatagccgcctataaagctgccgagctaattcgccgactgcaagaccacggcgcaacagtgcgcgtgattatgaccaaggccgcgcaggcatttatcaccccgctcaccttgcaggcactttcgggcaatcctgtccactgcgacctgctagatagtgaggctgaagctgcgatgggccacatcgaattagcccgctgggctgacctagtgttaatagcgccagcaagtgccgatttcatggcgcgactagcaaccggacaagcagatgatctactggcaacagtatgtctggcgaccaatgcgagcattgctattgccccatcaatgaatcaaggaatgtggcgagatcagtcaacacaacagaatctgcaaactctcatcagcaaacaggtgttggtatttggccccggtgatggatcgcaagcctgcggcgacattggccccggccgtatgatggaaccggagcaactggctgtggaagcatccagtgtctttaaaatcggtagtctcgatggcgtaaaaatagtcattaccgccggcccgacccgcgaagccattgatccagtgcgctacatcagcaaccatagctctggtaaaatgggttttgccttagcacaggccgccatggatgcaggagcctccgtcacactgattacaggcccggtctcactacaaacaccagagcgtgtaacccgaattgatataaacagtgcagcagaaatgcaccaagctgtcatcgaaacactgcctgtttgtgacatttttattggatcagctgcagtggcagactatcgcccgacaagcatagcggaccaaaaaatcaaaaagtcgacagaaacaatgactatcgagctggttcgaaatcctgatatcatcgcggacgtatcaaaccacccgcaacgcccatttaccatcggctttgctgccgaaactcaagacgtggaaagttatgcccgagggaagttggagaagaaaaaattagaccttatcatcgccaatgatgtgtccaacaccgctataggcttcaacagtgataacaatgccgttagtgtgatctggaatgacgggaaagtgtcattaccaatgacatccaagcagcagcttggccgccatcttattgaagaaatttgccaacactatcggaaaaaataa

SEQ ID NO: 49763 - protein, 399 aa, marine gamma proteobacterium HTCC2143
MQQLTNKQILVGVTGGIAAYKAAELIRRLQDHGATVRVIMTKAAQAFITPLTLQALSGNPVHCDLLDSEAEAAMGHIELARWADLVLIAPASADFMARLATGQADDLLATVCLATNASIAIAPSMNQGMWRDQSTQQNLQTLISKQVLVFGPGDGSQACGDIGPGRMMEPEQLAVEASSVFKIGSLDGVKIVITAGPTREAIDPVRYISNHSSGKMGFALAQAAMDAGASVTLITGPVSLQTPERVTRIDINSAAEMHQAVIETLPVCDIFIGSAAVADYRPTSIADQKIKKSTETMTIELVRNPDIIADVSNHPQRPFTIGFAAETQDVESYARGKLEKKKLDLIIANDVSNTAIGFNSDNNAVSVIWNDGKVSLPMTSKQQLGRHLIEEICQHYRKK

SEQ ID NO: 49764 - DNA, 1251 bp, marine gamma proteobacterium HTCC2080
  CDS (1)..(1251): transl_table=11
atgggacaccttcacaatcggaacatcatcatcggtgtcacaggcggcattgctgcctacaaaatcgccgaattaacccgcctgctacgaggtgatggtgcggcggtacgcatcattatgtcccgaggcgcacaggccttcataactcccctcaccttacaatcactatctgggcacccaatccacaccgaacttctcgatgaaaccgctgaaatgggcatggggcatattgagctagcacgctgggccgatgcttttctcgtagcccccgcgacggccgacgcggtcgccaggcttgctgcaggacgcgcagatgacctgctaactacagccgccttagcgaccccggcaccgctgtttgtcgcccccgccatgaatcaacaaatgtggaacaaccccgcaacgtcagcaaatattcagaccctcataaatcgcggcgtaaacatcattggccctggtgctggcgatcaagcctgtggtgatgtcggtcccggcaggctgacagagcccgtagatattagcgctaaaattaatgcccactttcccaatcgagcattggagggcaaacgggttgttattacggcaggccccacgcgggaacccttggacccggtgcggtatatatcaaatcacagttccggaaaaatgggctttgctcttgctaaggctgcggctgaagcaggcgcggaaactattttgattgctggtccggttatgctcagtacccccgagggcgttacccgtttgaatgtagagaccgcggggcagatgcatgaagcttgtatagagcagatccataaacccacagatgtatttattggtagcgctgcggtcgcagactaccgagcagagttcagcgcaccacagaagataaaaaaagtgggcgatacgctaaacttaaatctgatcagaaacccagatatcatcactgaagtagccaaatccaaacatcgcccaacagtggttgtaggatttgctgccgaaactgagcatctggtagagcatgcagaagctaagcgtgtcgccaaagggcttgatgtcgttgttgcaaatgatgtcagtcgagccgacataggctttaacagcgacgccaatatggtgacctggctagataacatcgggcgcgaagttatacccttaaccacgaagcagaacctggcaaagcttttaatgatgcggtgtagtaagcgcctgtcaccgacaagcgataatgacgagaaaatggcaacgcaactggagggcgaccgttga

SEQ ID NO: 49765 - protein, 416 aa, marine gamma proteobacterium HTCC2080
MGHLHNRNIIIGVTGGIAAYKIAELTRLLRGDGAAVRIIMSRGAQAFITPLTLQSLSGHPIHTELLDETAEMGMGHIELARWADAFLVAPATADAVARLAAGRADDLLTTAALATPAPLFVAPAMNQQMWNNPATSANIQTLINRGVNIIGPGAGDQACGDVGPGRLTEPVDISAKINAHFPNRALEGKRVVITAGPTREPLDPVRYISNHSSGKMGFALAKAAAEAGAETILIAGPVMLSTPEGVTRLNVETAGQMHEACIEQIHKPTDVFIGSAAVADYRAEFSAPQKIKKVGDTLNLNLIRNPDIITEVAKSKHRPTVVVGFAAETEHLVEHAEAKRVAKGLDVVVANDVSRADIGFNSDANMVTWLDNIGREVIPLTTKQNLAKLLMMRCSKRLSPTSDNDEKMATQLEGDR

SEQ ID NO: 49766 - DNA, 1278 bp, Pseudomonas putida GB-1
  CDS (1)..(1278): transl_table=11
atgcgacgtactgccgcaggcaatttcaaacgtcgccgcccgctctcactggaaaaaggcaagcctatgcagcggctgtatcgcaagcgcatcgttctcggcgtgggtggcggcattgccgcctacaaaagcgccgagctgattcgccgtctcctggagcacggcgcgcaggtgcgcgtcgtcatgacccgtggtggtgccgagttcatcaccccgctgaccctgcaggcgctgtcgggccacccggtgcacatggacctgctggacccggccgccgaagcggccatgggccatatcgaactggccaagtgggccgacctggtgctgatcgccccggccacggccgacctcatggcgcgcatggcccaaggcatggctgacgacctgctgaccaccctggtgctggccaccgacgccaccgtcgccgtcgccccggccatgaaccaggccatgtggcgcgacccggctacacaagccaaccttgagctgctcaagagccgtggcatccaggtgttcggccctgcctccggcagccaggcctgtggtgacgtggggcttggccgcatgctcgaagccaccgacctggcctggtgcgccgcagaaagcttcaagcgccaggcactgaccggcaagcacgtgctgatcaccgccggcccgacccaggaaaacatcgacccggtgcgctacatcaccaatcatagctccggcaagatgggcttcgccctggccgaagcggctgccgaagccggggctcgggttaccctcgtcaccggccctgtgcacctgccaacccccgaccgggtcagccgcatcgacgtggtcagcgcgcgggacatgctcgcggcctgtgaagcggccatgccgtgcgacctgttcattgcctcggcggcggtcgcggactaccgtcctgaagtggttgccacacagaaactcaagaaagatcctacgaccggcgacggcatgctgctgcagatggtgcgcaatcccgatatccttgccacccttgctggccgcgccgaccgcccgttcagtgtcggcttcgccgccgaaaccgagcacttgctcgattacgccacgcgcaagctcaaggacaagaacctcgacctgatcgtcgccaatgatgtggccaaccccagcatcggcttcaacagcgaagaaaacgccttgaccgtgatcgaccgccagcagcaccagactctcttcgcgcagaccagcaagggcaagatcgcccggcaactggtcgccttcatcgccgaacggctcaaccaggttcaataa

SEQ ID NO: 49767 - protein, 425 aa, Pseudomonas putida GB-1
MRRTAAGNFKRRRPLSLEKGKPMQRLYRKRIVLGVGGGIAAYKSAELIRRLLEHGAQVRVVMTRGGAEFITPLTLQALSGHPVHMDLLDPAAEAAMGHIELAKWADLVLIAPATADLMARMAQGMADDLLTTLVLATDATVAVAPAMNQAMWRDPATQANLELLKSRGIQVFGPASGSQACGDVGLGRMLEATDLAWCAAESFKRQALTGKHVLITAGPTQENIDPVRYITNHSSGKMGFALAEAAAEAGARVTLVTGPVHLPTPDRVSRIDVVSARDMLAACEAAMPCDLFIASAAVADYRPEVVATQKLKKDPTTGDGMLLQMVRNPDILATLAGRADRPFSVGFAAETEHLLDYATRKLKDKNLDLIVANDVANPSIGFNSEENALTVIDRQQHQTLFAQTSKGKIARQLVAFIAERLNQVQ

SEQ ID NO: 49768 - DNA, 1284 bp, Marinobacter sp. ELB17
  CDS (1)..(1284): transl_table=11
atggctgatacacgaattcttgttggcgttaccggcggtatcgcggcttataaaacggcggagctggtgcggctgttaaaaaaagcggggtattcggtgcaggtggtgatgacccgtggcgctgaagcttttgtgactccactgacgtttcaggcgttgagtgggcaaccggtgcgtacctcgttgctagacccggaagccgaggctggcatgggccacattgagctggcgaaatgggcgcaacggattatcgtggccccggcgtcggcagactttatggcgcgtctggcggcgggcatggccgatgatctgctggctacggtgtgcagtgctgccgaggtgcccattgccctggtgccggcgatgaatcaggccatgtgggctaatcatcgcacccagcgggtggtgcagctgttaaaagcggacccccagattcgcctgtggggaccggcggaaggccagcaggcctgcggtgataacggcccagggcgcatgctggagccagagcagatcgtgcgggcgctggctcaggaacaagcgcaaatcgataatagcgccggcggtgtgctggctggtaagcgcctagtgatcaccgctgggccaacccgtgaacctattgatccagtacgctatatcagcaatcacagctctggcaaaatgggctacgctatggccatagccgctcatgctgccggcgctgaggttgtgctggtcagcgggccggtgaacctgcctccgcccgcgggtataaaactgcgctcggtgatgaccgcagaacaaatgcttgaaacgactatggcggcggttgatgagggttgtgatctttttatcgccaccgctgcggtggctgactatcgcccgcaggattatgccagcgacaaactcaagaaatccgccgcccagatgacgctggcgctggtgcgtaacccggacactctggcaaccgtagccgcgcgggcagacgcgccattcaccgtgggttttgcagcggaaaccaatgacgttgcccgctatgccatcagcaagatgggcaagaaggggctggatatgattgtggccaatgatgtgtcggtacctggcttgggctttaacagcgacaacaacgccgtcagcgtattcaccgccaccgaccaggtccaccttgggccctgtgccaagcagcagattgcgcacgaactggtggcgctgattgcgccgcgcctgaatgcacgggttggcgatagccaaaaccaaaagggctctcaccaaaaaccccaaaataattctgatcggaaaccttcatga

SEQ ID NO: 49769 - protein, 427 aa, Marinobacter sp. ELB17
MADTRILVGVTGGIAAYKTAELVRLLKKAGYSVQVVMTRGAEAFVTPLTFQALSGQPVRTSLLDPEAEAGMGHIELAKWAQRIIVAPASADFMARLAAGMADDLLATVCSAAEVPIALVPAMNQAMWANHRTQRVVQLLKADPQIRLWGPAEGQQACGDNGPGRMLEPEQIVRALAQEQAQIDNSAGGVLAGKRLVITAGPTREPIDPVRYISNHSSGKMGYAMAIAAHAAGAEVVLVSGPVNLPPPAGIKLRSVMTAEQMLETTMAAVDEGCDLFIATAAVADYRPQDYASDKLKKSAAQMTLALVRNPDTLATVAARADAPFTVGFAAETNDVARYAISKMGKKGLDMIVANDVSVPGLGFNSDNNAVSVFTATDQVHLGPCAKQQIAHELVALIAPRLNARVGDSQNQKGSHQKPQNNSDRKPS

SEQ ID NO: 49770 - DNA, 1335 bp, Bradyrhizobium japonicum
  CDS (1)..(1335): transl_table=11
gtgaggagccatttacgccctttgaggtgccgcctacggtatccaccgctccgacgcctcagcgcaccgggtgtccttgccgaggccagcgtcactctgatcatcggcggtgggatcgcgcgccttaaatcgctcgacctgatccgaaggctgaaggagcggtgccatcgaggtccgctgcgtactgaccagacgcggcccagcagttcggtcacgccgctcgtcggtcagcgcccgtttcgcatgagcgcgtctataccgacctgtccgatccccagaagcgagttcgacgccggccatatccgcctggcccgtgactgcgacttgatcgtggtggcccccgccacggccgacctgatgtccaagatggcgaacggccatgccgacgacctcgccagcgccattctgctcgcgaccaaccgcaaggtgctgctggcgccggcgatgaatccgctgatgtggaacaacgcggcgacccgacgcaacgtcgcgcagcttcagcgcgacggcgtcgtgctgatcgggccgaattctggagagatggccgaggcgggtgaagccggtatcggccgcatgtccgaggcgttggagatcgccgccgccgccgagcgcctgctgcggccgccggtgccgcgcccgctcgccggcaagcgcgtgctgatcaccgcgggtccgacccacgagccgatcgacccggtgcgctacatcgccaaccgctcctccggcaagcagggttttgccatcgccgccgccgcgcaggccgccggcgccgaggtgatcttggtgagcggcccggtcgatctcggcgatccccagggcgtgacggtgaagcatgtggaatcggcgcggcagatgctggagcaggtgcaggcggcccttcccgccgacatcgcgatctttcagccgccgcggtcgccagactggcgcgtcgccaatgagggcgagcagaagctgaagaagacctcggccggcatgccgccgctccagctggtcgagaaccccgacatcctcgccacgatcgcgaagctgaccgacaagcgcccgccgctgctgatcggcttcgccgccgagaccgagcacctcatcgacaacgccaagacaaaacttgcccgcaagggctgcgactggatcgtcgccaacgacgtctcgccggcgaccggcgtgatgggcggcgaccgcaacactgtccacctcatcagccgcaagaatggtgagaagaacggcgagatcgcggttgattcctggcccgcgatgaccaaggaacaggtcgccaccgagctgatcgcgcatatcgtcaagagtgtgatcggcaaatccctggagcccgcatcttga

SEQ ID NO: 49771 - protein, 444 aa, Bradyrhizobium japonicum
MRSHLRPLRCRLRYPPLRRLSAPGVLAEASVTLIIGGGIARLKSLDLIRRLKERCHRGPLRTDQTRPSSSVTPLVGQRPFRMSASIPTCPIPRSEFDAGHIRLARDCDLIVVAPATADLMSKMANGHADDLASAILLATNRKVLLAPAMNPLMWNNAATRRNVAQLQRDGVVLIGPNSGEMAEAGEAGIGRMSEALEIAAAAERLLRPPVPRPLAGKRVLITAGPTHEPIDPVRYIANRSSGKQGFAIAAAAQAAGAEVILVSGPVDLGDPQGVTVKHVESARQMLEQVQAALPADIAIFQPPRSPDWRVANEGEQKLKKTSAGMPPLQLVENPDILATIAKLTDKRPPLLIGFAAETEHLIDNAKTKLARKGCDWIVANDVSPATGVMGGDRNTVHLISRKNGEKNGEIAVDSWPAMTKEQVATELIAHIVKSVIGKSLEPAS

SEQ ID NO: 49772 - DNA, 1167 bp, Spiroplasma citri
  CDS (1)..(1167): transl_table=4
atggcaaaaattattttagttattacaggaagcattgctgcatataagggacttcatttatatgaagcattgaaaaaagaatatgatgttgaattactgttaacacaagatgctttaaaatttttaaaggatcaaccagcaacagcaaaaactgaaatttttatgaaacaatattatgataaaaaagacttatcagaacatattacaattgctgagcaagctgatttatttgttgtttatccagcaacacaaaactttattgctcaaattgctcatggttttacaaatattttagcaagtttagtatatagtgttactcaaagttataaaatgatttttcctgcaatgaatagtaagatgtatttatcaccagctaatttacgtaatttagcacaattaatagcggatgggaatcaagtttatgagcctcgttcgggaatgcttgcttgcaatatggttggtattggccgtgcttgagaatgagaagatgttttaatggaaataaagcaatttttagattgaaaaaacttgtgaaaagataaaaaagttatgcttaattttggtcgaacaaaaacatatttagatgatattcgttatgtcacaaataattctagtggcaaaatgggagatgcattgcatactgtattaagatgaacaaactgcttattaacaacaattgttggtgattgtgattttccaatttattatgagcatgttaaagcaactacaaacgaagaaatgttagcagcaatgttaaaagcatataaagaacaagatattattattgcatgtgctgctttaaatgattatcaagttgcggttcctatgaaaggaaaaattagtaaacgaaaaaatccacaacttgctgtatcattacttgctaatattgatgttttatctgaattaggtaagttaaaacagcaacaaattttagttggttttagtgcccaaaatgattttgatttagattatgcgcaacaaaaattaattgaaaaaaatttagatttaattattattaatcaaattaatgctatgggtgctgaccaaaatgaaatcattttattaacaaaaaaaggacatcaacaaattcctagtcaaaacaaaattattattgcaaaagaaattttagcagcaattagtgaattaataaaggagaaaacacaataa

SEQ ID NO: 49773 - protein, 388 aa, Spiroplasma citri
MAKIILVITGSIAAYKGLHLYEALKKEYDVELLLTQDALKFLKDQPATAKTEIFMKQYYDKKDLSEHITIAEQADLFVVYPATQNFIAQIAHGFTNILASLVYSVTQSYKMIFPAMNSKMYLSPANLRNLAQLIADGNQVYEPRSGMLACNMVGIGRAWEWEDVLMEIKQFLDWKNLWKDKKVMLNFGRTKTYLDDIRYVTNNSSGKMGDALHTVLRWTNCLLTTIVGDCDFPIYYEHVKATTNEEMLAAMLKAYKEQDIIIACAALNDYQVAVPMKGKISKRKNPQLAVSLLANIDVLSELGKLKQQQILVGFSAQNDFDLDYAQQKLIEKNLDLIIINQINAMGADQNEIILLTKKGHQQIPSQNKIIIAKEILAAISELIKEKTQ

SEQ ID NO: 49774 - DNA, 1170 bp, Hydrogenobacter thermophilus
  CDS (1)..(1170): transl_table=11
atgactagggtccttcttggtgtttcttccagcatagctatatacaaggcttgtgatcttgtaagaactttaaagaaaaagggttatcaggtaaaggtaataatgacgcccttttcggaaaagtttttaagcaagatgacctttgaagctctaacaggttatagagtttactcccaatgggaagaggaccctttagctcacataaaccttgcacggtggtgtgatgtgtttctcatagccccctgcagcgtaaacaccctatctaagatagctctcggtataggtgataatctccttaccaccacagttttggcttacgagaaaaacctcctcatagctcctgccgggaatgtatccatgtggacaaatcccataataaaagagcatgtggagaagctaaaaagtttaggacacatcatcatagagccagaggaaggcaagctggtttgtgaggaggaagggcagggaaaacttgccagcgaagagagactgctggactggatagagtattccctaagacccaaacctttagcaggtaaaagggtgctcatcacctgcggtgctacaagggagtacatagacggagtgcgctttttgtccaactcatccagcggtaggatggggtttgcactggcgagggtttttaggtggtatggtgcgcaagtaaaggtagtagccggctttacaacagctcaagagccaccagaaactcatgtgcaaagggtagtatccgctcaagatatgtaccaaaaggtgatggagttaaaagactgggcagacataatagttatgaacgcagcagtctctgactatatgccagaaaggaaagaaacgggcaagatcaaaaagacacagagccttaccctaaggcttgtgagcacacccgacatactcttgcatcttggagaaagaaaaggagataagttacttataggctttgctctggaagaaagggaaaatcttctggaaaatagccgtcagaagctccgaaggaaaaacttggacatgcttatagccaatcctcttgaggtgatggacagggactttcacgaagggtatatactttacgcagacggcagggaggagaagatagagtttggtgataaggttatctccgcagagcttatagtcaaaaaggtcataaacggtttgctctccaagagcctataa

SEQ ID NO: 49775 - protein, 389 aa, Hydrogenobacter thermophilus
MTRVLLGVSSSIAIYKACDLVRTLKKKGYQVKVIMTPFSEKFLSKMTFEALTGYRVYSQWEEDPLAHINLARWCDVFLIAPCSVNTLSKIALGIGDNLLTTTVLAYEKNLLIAPAGNVSMWTNPIIKEHVEKLKSLGHIIIEPEEGKLVCEEEGQGKLASEERLLDWIEYSLRPKPLAGKRVLITCGATREYIDGVRFLSNSSSGRMGFALARVFRWYGAQVKVVAGFTTAQEPPETHVQRVVSAQDMYQKVMELKDWADIIVMNAAVSDYMPERKETGKIKKTQSLTLRLVSTPDILLHLGERKGDKLLIGFALEERENLLENSRQKLRRKNLDMLIANPLEVMDRDFHEGYILYADGREEKIEFGDKVISAELIVKKVINGLLSKSL

SEQ ID NO: 49776 - DNA, 1200 bp, Listeria monocytogenes
  CDS (1)..(1200): transl_table=11
atgcaaggaaaaaatatcttactcgcagtgtccggtggcattgctgtttataaagcagtcgcacttacaagtaaattaacgcaagcgggtgcaaacgttaaagtaatgatgacagcacatgcacaagaatttgttccaccgctttcgttccaagtattatctaaaaatgatgtatacacagatacatttgacgaaaaaaaatcaagtgtagtcgcacatattgatttagccgattgggccgatttagtaatcgttgcacctgcaactgcaaatgtgattggtaaaatggcaaatggcatcgcggatgatatggtaacgacaaccattcttgcaacagaggcaccagtttgggtagcaccagcaatgaatgtccacatgattcagcatccagcagttattcggaatattaatcgattatacgcagacggtgtccgttttatcgagccagaagaaggttacttagcttgtggctacgttggtcgcggtcgtcttgaagaaccagaaaaaatcgttcttcgtattgctgaattttttcaagaagataaaaacctccttcaagggaaaaatgtgctagtaacagccggcgcaactcgcgaaaaattagatctcatacgctatttcaccaaccattcaactgggaaaatgggctttagcatagcagaatctgcggcgcgtcacggtgcgaatgttacactaattactacaagtaaggcacttcccgtaccgcatggagtagaagcaatctatgtcgaatcggcagaggaaatgcatcaagctgtgaatgaacgtaaagtgtcacaagatatttttgtgatgaccgcagcagttgccgattacacgccagcgcaagtctcagaccaaaagattaaaaaacaacctggtgattttacaatagcaatgaaacgaaccaaagatattttactcgaaatcggtcaacataaaacttcggagcaagtcgtgattggctttgccgctgaaacagaaaatgtagaagcaaacgcacgtaaaaaactaacctccaaaaatgccgatatgattgttgccaacaatattagtgaggccggagcaggcttttccggtgacacgaatatcgtgacattttaccggaaagatggttccagtgaagcgttaccgatactagacaaaaaagaagttgctgaacatatcatcaaagaagccgctaactttttaaggaagtga

SEQ ID NO: 49777 - protein, 399 aa, Listeria monocytogenes
MQGKNILLAVSGGIAVYKAVALTSKLTQAGANVKVMMTAHAQEFVPPLSFQVLSKNDVYTDTFDEKKSSVVAHIDLADWADLVIVAPATANVIGKMANGIADDMVTTTILATEAPVWVAPAMNVHMIQHPAVIRNINRLYADGVRFIEPEEGYLACGYVGRGRLEEPEKIVLRIAEFFQEDKNLLQGKNVLVTAGATREKLDLIRYFTNHSTGKMGFSIAESAARHGANVTLITTSKALPVPHGVEAIYVESAEEMHQAVNERKVSQDIFVMTAAVADYTPAQVSDQKIKKQPGDFTIAMKRTKDILLEIGQHKTSEQVVIGFAAETENVEANARKKLTSKNADMIVANNISEAGAGFSGDTNIVTFYRKDGSSEALPILDKKEVAEHIIKEAANFLRK

SEQ ID NO: 49778 - DNA, 1173 bp, Borrelia burgdorferi
  CDS (1)..(1173): transl_table=11
atggataaaaataaacatatattaattggtatatgtgggggcatagcctcttacaagtcagtttacatagtttccagtttagttaaattaggatacaaagttaaagttataatgacacaaaatgcaactaaatttattactccattaactttagaaaccatttctaagaacaaaataattactaatttatgggatttagaccacaatgaggtggagcatataaaaattgcaaaatgggcacacctaattcttgttattcctgctacctacaacacaatatctaaaattgcatcaggaattgctgatgatgcattaactacaataatatctgcaagcacggctcctacttattttgcaatagcaatgaataatataatgtattcaaaccctattttaaaagaaaatataaaaaagcttaaaacttataattataaattcattgaacctgataaaggatttttagcttgctcatcaaatgctttagggcgccttaaaaatgaagacaaaattataaaaataatattgaatgaatttaatcaaaaagactacctaaaaaataaaaaaatacttataacagcatccagaactgaagaattaatagatccaattcgctatttctcaaatacatcaacgggaaaaatggggttttgcttagcacaagaggctgtcaaactaggagctcaagttacaattattacaggaccaaccaatgaaaatgatcctgaaggggtcaacattataaaaataaaaactgcaatggaaatgtacaaggaagctctcaaaatatataataaatttgaaataataattggagccgcagctgttgccgattttaaacccaaacacattttcaatagtaaaattaaaaaaaataaaatcaatagattatatataaaattagtaaaaaatcccgacataatccaacacataggacacaataagcttaaaaaccaaattgttattggattttgcgctgagaattctaaaaatttaattcaaaaagctaaagaaaaattaaaaaagaaaaacttggactttatcattgcaaatgaacttaaatattttggttcaaaattaaacaaagtttatataataaataaacaaagcataaaagaactgccagaaatggaaaaatcagaagtagctaaagaaattttaaaaattttatactaa

SEQ ID NO: 49779 - protein, 390 aa, Borrelia burgdorferi
MDKNKHILIGICGGIASYKSVYIVSSLVKLGYKVKVIMTQNATKFITPLTLETISKNKIITNLWDLDHNEVEHIKIAKWAHLILVIPATYNTISKIASGIADDALTTIISASTAPTYFAIAMNNIMYSNPILKENIKKLKTYNYKFIEPDKGFLACSSNALGRLKNEDKIIKIILNEFNQKDYLKNKKILITASRTEELIDPIRYFSNTSTGKMGFCLAQEAVKLGAQVTIITGPTNENDPEGVNIIKIKTAMEMYKEALKIYNKFEIIIGAAAVADFKPKHIFNSKIKKNKINRLYIKLVKNPDIIQHIGHNKLKNQIVIGFCAENSKNLIQKAKEKLKKKNLDFIIANELKYFGSKLNKVYIINKQSIKELPEMEKSEVAKEILKILY

SEQ ID NO: 49780 - DNA, 1221 bp, Escherichia coli O6
  CDS (1)..(1221): transl_table=11
atgagcctggccggtaaaaaaatcgttctcggcgttagcggcggtattgctgcctataaaacccctgaactggtgcgtcgtttgcgcgatcgcggggccgacgtccgcgtagccatgaccgaagcggcaaaagcctttatcaccccacttagcttgcaggcggtttctggttatcccgtttccgacagtctgctggacccggcagccgaagccgctatgggccatattgagctgggtaaatgggctgatttagtgattctcgcccctgccacggcagatttgattgcccgtgttgctgccggaatggcgaatgacctggtatcgacgatttgtctggctacacctgcgcctgtagccgtgctccccgccatgaaccagcagatgtaccgtgccgctgccacgcagcataatttagaggtgcttgcttcccgtggtttgctcatctgggggccagacagtggcagtcaggcttgtggtgatatcggtcctgggcgaatgctcgatccgttaaccattgtggatatggcggtagcgcatttttcgcccgtcaacgacctgaaacatctgaacattatgattaccgccggcccgacgcgtgaaccgctcgatccggtgcgttatatctctaatcacagctccggcaagatgggttttgctatcgccgccgccgctgcccgtcgtggcgcgaacgtcacgctggtatcaggtccggtttcactaccgacgccaccgtttgttaaacgtgttgatgtgatgaccgcgctggaaatggaagccgccgtgaatgcttctgtacagcagcaaaatatttttatcggctgcgccgccgtggcggattatcgcgcagctaccgtggccccagagaaaatcaaaaagcaggccacgcagggtgatgaattaacaataaaaatggttaaaaaccccgatatcgtcgcaggcgttgccgcactaaaagaccatcgaccctacgtcgttggatttgccgccgaaacaaataatgtggaagaatacgcccggcaaaaacgtatccgtaaaaaccttgatctgatctgcgcgaacgatgtttcccagccaactcaaggatttaacagcgacaacaacgcattacaccttttctggcaggacggagataaagtcttaccgcttgagcgcaaagagctccttggccaattattactcgacgagatcgtgacccgttatgatgaaaaaaatcgacgttaa

SEQ ID NO: 49781 - protein, 406 aa, Escherichia coli O6
MSLAGKKIVLGVSGGIAAYKTPELVRRLRDRGADVRVAMTEAAKAFITPLSLQAVSGYPVSDSLLDPAAEAAMGHIELGKWADLVILAPATADLIARVAAGMANDLVSTICLATPAPVAVLPAMNQQMYRAAATQHNLEVLASRGLLIWGPDSGSQACGDIGPGRMLDPLTIVDMAVAHFSPVNDLKHLNIMITAGPTREPLDPVRYISNHSSGKMGFAIAAAAARRGANVTLVSGPVSLPTPPFVKRVDVMTALEMEAAVNASVQQQNIFIGCAAVADYRAATVAPEKIKKQATQGDELTIKMVKNPDIVAGVAALKDHRPYVVGFAAETNNVEEYARQKRIRKNLDLICANDVSQPTQGFNSDNNALHLFWQDGDKVLPLERKELLGQLLLDEIVTRYDEKNRR

SEQ ID NO: 49782 - DNA, 1203 bp, Haemophilus influenzae
  CDS (1)..(1203): transl_table=11
atgaaattaaacggaaagcatattgtagttggcataactggcggtattgcagcctataaaacaatagagttgattcgtttgttacgcaaagcagaagctgaagtacgtgtagtattaacccctgctgcggcagaatttgttacgcctttgacacttcaagccatttctggcaatgctgtatcgcaatctttacttgatccacaagcagagctggcaatggggcatattgaacttgccaaatgggctgatgccattattattgcgccagctagtgcagattttatcgcccgtcttactattggcatggcgaatgatttactttcaacaatttgtcttgcgactaatgcgccaatttttcttgcgccagcaatgaatcagcagatgtatcaccaatccattactcaacaaaatttaacgactcttcaaacacgtgggattgagcttatcggccccaatagtggttttcaagcttgcggcgatatggggaaagggcgtatgtcagaaccagaggaaatttttaccgcactttctgactttttctctcaaaaacaagatctacaaggattaaatgtttccattacagcaggcccaacgcgtgaggcaatcgatcctgttcgttatatttctaaccatagttcagggaaaatggggtttgcgattgctgaagcatttgccaaacgaggggcgaacgtcacgctgattgcagggccagtgaatttaacaacaccaaaaaatgtaaatcgaattaatgtcatctcagcacaagaaatgtggcaagcctctcttgaaagtgcggtaaaaaatcaaatttttattggttgtgcggctgttgctgattacagagtaactgaagttgctgagcaaaaaatcaaaaaatctggcgatgaaatatctatcaaattaattaaaaatcctgatattatctcagatgtaggacatttaaaaacacatcgtccctttactgttggatttgcggctgaaacccaaaatgttgatgattatgcaaaagataaacttgaacgcaaaaatcttgatatgatttgtgccaacgatgtatctggcggacaagtttttaacgctgatgaaaatgccttgcagcttttttggaaaaatggtcataaaaaattatcgctaaaatcaaaagtagaacttgccgctgatttagtcaatgaaatcatcgaacgctatcaaaaaaccttataa

SEQ ID NO: 49783 - protein, 400 aa, Haemophilus influenzae
MKLNGKHIVVGITGGIAAYKTIELIRLLRKAEAEVRVVLTPAAAEFVTPLTLQAISGNAVSQSLLDPQAELAMGHIELAKWADAIIIAPASADFIARLTIGMANDLLSTICLATNAPIFLAPAMNQQMYHQSITQQNLTTLQTRGIELIGPNSGFQACGDMGKGRMSEPEEIFTALSDFFSQKQDLQGLNVSITAGPTREAIDPVRYISNHSSGKMGFAIAEAFAKRGANVTLIAGPVNLTTPKNVNRINVISAQEMWQASLESAVKNQIFIGCAAVADYRVTEVAEQKIKKSGDEISIKLIKNPDIISDVGHLKTHRPFTVGFAAETQNVDDYAKDKLERKNLDMICANDVSGGQVFNADENALQLFWKNGHKKLSLKSKVELAADLVNEIIERYQKTL

SEQ ID NO: 49784 - DNA, 1212 bp, Methanococcus jannaschii
  CDS (1)..(1212): transl_table=11
atgataagtgaaatcatgcacccaactaaattattaaaaggaactaaatcaaagctcttagagaataaaaaaatcttagttgctgtaacttcatcaatagcggctattgaaacaccaaagttaatgagagaattgataaggcatggagcagaggtttattgcatcattacagaagagacaaagaagattataggcaaagaggcattaaaatttggttgtggaaatgaggtttatgaagagataactggagatattgagcatatccttttatacaatgaatgtgattgccttttaatatatccagcaacagccaatataatctcaaaaataaatttaggaattgcagataatattgtaaatacaactgccttaatgttttttggaaataaaccgatatttattgtcccagcaatgcatgaaaatatgttcaatgcaattaaaagacatatagataagcttaaagagaaagataaaatttatatcatatctccaaagtttgaagaagggaaggcaaaagtagcaaatattgaggatgttgttaaagcagttattgaaaaaatcggaaataacttaaaaaaagaaggaaatagagttttaatattaaacggagggactgttgagtttatagacaaagttagagttatatctaatttatcatctggaaaaatgggtgttgctttagctgaagctttttgcaaagaaggattttatgttgaggttataaccgctatgggtttagagccaccttattatataaaaaatcataaggttttaacagctaaggagatgttaaataaagctattgagttggctaaggactttgatataattatttcatcggcagcaatatctgattttactgttgagagttttgaaggtaagctaagttctgaagaagagctaatattaaagttaaagagaaatcctaaagttttagaagagttaagaaggatttataaggataaggtaattattggatttaaagcagaatacaatttagatgaaaaggaacttataaatagggctaaggagcgactaaataaatacaatttaaatatgattatagccaatgatttaagtaagcactattttggagatgattatatcgaggtttatattataacaaaatatgaagttgagaaaatctctggatctaaaaaggaaatttccgaaagaattgttgaaaaagttaaaaaattggtgaaatcatga

SEQ ID NO: 49785 - protein, 403 aa, Methanococcus jannaschii
MISEIMHPTKLLKGTKSKLLENKKILVAVTSSIAAIETPKLMRELIRHGAEVYCIITEETKKIIGKEALKFGCGNEVYEEITGDIEHILLYNECDCLLIYPATANIISKINLGIADNIVNTTALMFFGNKPIFIVPAMHENMFNAIKRHIDKLKEKDKIYIISPKFEEGKAKVANIEDVVKAVIEKIGNNLKKEGNRVLILNGGTVEFIDKVRVISNLSSGKMGVALAEAFCKEGFYVEVITAMGLEPPYYIKNHKVLTAKEMLNKAIELAKDFDIIISSAAISDFTVESFEGKLSSEEELILKLKRNPKVLEELRRIYKDKVIIGFKAEYNLDEKELINRAKERLNKYNLNMIIANDLSKHYFGDDYIEVYIITKYEVEKISGSKKEISERIVEKVKKLVKS

SEQ ID NO: 49786 - DNA, 1257 bp, Mycobacterium bovis
  CDS (1)..(1257): transl_table=11
gtggtggaccataaacggatccccaagcaggtaatagtcggtgtctccgggggcatcgccgcctacaaggcgtgcacggttgttcgtcaactcaccgaggccagtcatcgcgtccgagtcattcccaccgaatccgccctgcgcttcgtcggtgccgcgaccttcgaggcgctctccggtgagccggtgtgcaccgacgttttcgccgacgttccggcggtcccgcatgttcacctcggccagcaggccgatctggtcgtagtggcgccggccaccgccgacctgctggcccgcgcggcggccggtcgagccgacgatctgctgaccgcgacgctgctgacggcgcggtgtccggtgctgttcgcgccggcgatgcacaccgagatgtggttgcatccggccaccgtcgacaacgtggccacgctgcgccgccgcggcgcggtggtgctcgagcccgcgacaggacggcttaccggcgccgacagcggggccggccgactgcccgaggcggaggagatcaccaccctcgcccagctgctgctggagcggcacgacgccctgccctacgatctcgcggggcgaaagctgctggttaccgccggtggcacacgcgagccgatcgatccggtgcgctttatcggcaaccgcagctccggcaagcagggctatgcggtggcgcgggtggccgcccagcgcggcgccgacgttactttgatcgctgggcataccgcagggctcgtcgatcccgccggcgtcgaggtggtgcacgtcagctcggcccagcaactcgccgacgcggtgtccaagcacgctccgaccgccgacgtattggtgatggcggcggccgtcgccgacttccggcccgcgcaggttgccaccgccaaaatcaagaaaggcgtcgaaggcccaccgaccatcgagctgctgcgcaacgacgacgtgctggccggggtggtgcgggcccgagcccatggacaactgcccaacatgcgggccattgtgggcttcgcagccgagaccggcgacgccaatggcgacgtgctctttcatgcccgagctaaactgcgacgcaaaggctgcgatctgttagtcgtcaatgccgtcggcgaaggcagggcctttgaggtagacagcaacgacggctggctactggcgtccgatggtaccgagtcggcattgcagcacggctccaagacactgatggcgagccgtatcgttgatgcaatcgtcacgttcctggcaggctgtagcagctaa

SEQ ID NO: 49787 - protein, 418 aa, Mycobacterium bovis
MVDHKRIPKQVIVGVSGGIAAYKACTVVRQLTEASHRVRVIPTESALRFVGAATFEALSGEPVCTDVFADVPAVPHVHLGQQADLVVVAPATADLLARAAAGRADDLLTATLLTARCPVLFAPAMHTEMWLHPATVDNVATLRRRGAVVLEPATGRLTGADSGAGRLPEAEEITTLAQLLLERHDALPYDLAGRKLLVTAGGTREPIDPVRFIGNRSSGKQGYAVARVAAQRGADVTLIAGHTAGLVDPAGVEVVHVSSAQQLADAVSKHAPTADVLVMAAAVADFRPAQVATAKIKKGVEGPPTIELLRNDDVLAGVVRARAHGQLPNMRAIVGFAAETGDANGDVLFHARAKLRRKGCDLLVVNAVGEGRAFEVDSNDGWLLASDGTESALQHGSKTLMASRIVDAIVTFLAGCSS

SEQ ID NO: 49788 - DNA, 1200 bp, Vibrio cholerae
  CDS (1)..(1200): transl_table=11
atgcaatcattggcaggcaaaaagattctgctcggtatcagtggcggtatcgcagcgtataagtgtgcagaattgactcgtcgattggtggagcgcggcgcgaccgtgcaagtggtgatgacccacgccgccaaagaattcattactccgctgaccatgcaggccgtttccggacgtcccgtatcggatagcttgcttgaccctgcggcagaagcctcaatggggcatattgagctcgctaaatgggccgatttggtgctgctggcaccggcgactgccgatctcatcgcgcgcatggccgcaggcatgggcaatgatttgctcaccacgctcattctggccaccagcgcaccagtcgcgattgcgccagccatgaatcagcagatgtatcgcaatatcgcgacccaagaaaatctacaaacgcttatccgccgtggttatctgacttggggtcctgcggctggcgaacaagcctgtggagatgtcggcccaggtcgtatgttggagccgatggaattagtggcgcactgtgaaaacttcttcgccccgaaaattcttgtcggtaaacgcgtgctgatcaccgcgggccccactcgtgaagcgctcgacccagtacgctacatcaccaaccacagctcaggaaaaatgggctttgcgctcgccaaagccgccgcgcagctcggcgctgacgtcacgctggtcagcggtccggtgcatctgccaacgccggtgggcgtcaatcgcattgatgtgcaaagtggattagaaatgcacagcgcggtgatgaaagaggcaacctcacaccagatctttatcgcgtgcgccgcggtagccgactaccgcccacaaaccgtggccgaacagaagataaaaaagagccgtgataacgacacattgaccattgagatggtgaaaaatcccgatatcgtggcgtccgttgcggctctgactgagaatcgaccgtttaccgttggctttgcggcagaaacgcaagatgtcgagacctatgcgcgtagcaagctcgtgcgcaagaatctggatatgatctgcgctaacgacgtctcgattgctggccaaggctttaacagcaatgacaatgccttgaccctattctggaaagaagggcaacacagcctacctttaaccagtaaagacgcgctcgctagcgcagtaatgcatttgattcatgagcaaatgtag

SEQ ID NO: 49789 - protein, 399 aa, Vibrio cholerae
MQSLAGKKILLGISGGIAAYKCAELTRRLVERGATVQVVMTHAAKEFITPLTMQAVSGRPVSDSLLDPAAEASMGHIELAKWADLVLLAPATADLIARMAAGMGNDLLTTLILATSAPVAIAPAMNQQMYRNIATQENLQTLIRRGYLTWGPAAGEQACGDVGPGRMLEPMELVAHCENFFAPKILVGKRVLITAGPTREALDPVRYITNHSSGKMGFALAKAAAQLGADVTLVSGPVHLPTPVGVNRIDVQSGLEMHSAVMKEATSHQIFIACAAVADYRPQTVAEQKIKKSRDNDTLTIEMVKNPDIVASVAALTENRPFTVGFAAETQDVETYARSKLVRKNLDMICANDVSIAGQGFNSNDNALTLFWKEGQHSLPLTSKDALASAVMHLIHEQM

SEQ ID NO: 49790 - DNA, 1200 bp, Vibrio parahaemolyticus
  CDS (1)..(1200): transl_table=11
atgcaaacactagcaggaaagaaaattctactcggcatcagtggcggtattgccgcgtataaatgtgcggagctaacccgtcgcctaatagagagaggggcacaagttcaagtcgtcatgacgaaagctgcaaaagagtttattactccgttaaccatgcaagccgtctcaggacgaccagtatccgatagcttgctcgatccggcggctgaagcgtcaatgggtcacatcgagttagctaaatgggcggatttagtgctgcttgctcctgctacggcagacctcattgctcgtatgtcagctggcatgggcaatgatttattgacgacgttagtgttggcaacggattcgcctgttgcggtatctccagcaatgaatcagcagatgtatcgcaacatcgcgacgcaagagaacattgcgactttagctcgccgcggtatgaacatttggggtccagcagcaggtgaacaagcctgtggtgatgttggtccgggtcgaatgcttgaaccaatgcaattggtgcatctgtgtgagcagtttttccaacctaaagtcttggaaggcaagtccattctgatctcagcaggcccaacgcgagaagccatcgacccagtgcgttacattacgaaccacagctccgggaaaatggggtatgcactagcaaacgctgccgcgcagttaggcgcaaaagtcacgctagtgagcggccctgtcaacctgagcacaccgatgggagtggagcgcattaacgtgtctagcgcacaagaaatgtatgaggccgtgatggctcaagccatcagtcacgatgcgttcatcagctgcgcagcagtagcagattatcgacctgaggccattgcgtctcaaaagttgaaaaagacggcagacaacgatcagatgaccatcaaaatggtgaaaaaccctgatattgtagcgtccgtcgcagcactgactgataagcgcccatttacggtaggttttgcagcagaaaccaacgatgtcgaaacttatgcccgaggaaagttagcgaagaaaaacctcaatatgatctgcgctaacgatgtgtcagtcgaaggccaaggcttcaatagtaatgacaacgccatcaccctattttggcctgatggtgagcttgcattagctctagagtcaaaagaagccctgagcttcaaaatcctcgagaaaatgcgtgaattgatgtaa

SEQ ID NO: 49791 - protein, 399 aa, Vibrio parahaemolyticus
MQTLAGKKILLGISGGIAAYKCAELTRRLIERGAQVQVVMTKAAKEFITPLTMQAVSGRPVSDSLLDPAAEASMGHIELAKWADLVLLAPATADLIARMSAGMGNDLLTTLVLATDSPVAVSPAMNQQMYRNIATQENIATLARRGMNIWGPAAGEQACGDVGPGRMLEPMQLVHLCEQFFQPKVLEGKSILISAGPTREAIDPVRYITNHSSGKMGYALANAAAQLGAKVTLVSGPVNLSTPMGVERINVSSAQEMYEAVMAQAISHDAFISCAAVADYRPEAIASQKLKKTADNDQMTIKMVKNPDIVASVAALTDKRPFTVGFAAETNDVETYARGKLAKKNLNMICANDVSVEGQGFNSNDNAITLFWPDGELALALESKEALSFKILEKMRELM

SEQ ID NO: 49792 - DNA, 1206 bp, Vibrio vulnificus
  CDS (1)..(1206): transl_table=11
atgcaaacattggcaggaaagaagattctactgggtatcagtggtggtattgcggcctacaaatgtgcagacctcacccgacgtcttaaagaaagaggcgcagaggtgcaagtggtgatgaccaaagccgcgaaagaatttattaccccgctcacgatgcaggcagtctctggccgaccagtctcggatagcttgcttgatcccgccgccgaagcctcaatgggccacatcgagctggcgaagtgggccgatttaattttgcttgctcctgccactgcggatctgattgctcgcatggccgctggcatgggcaacgacctactgaccaccttagtgttggccactgacgcccctgttgcggtctctccagcgatgaatcaacagatgtatcgcaacgtcgcgacccaagagaacattgcgactctgagccgacgcggtatggaaatctggggcccagcggctggcgaacaagcgtgtggcgatgtgggcccaggccgtatgttagagccgatgcagttggttgcgttgtgcgaacaattcttccagccaaaaccgctgcaagacaaatcgattttgatcactgcgggtccaactcgcgaagccattgaccctgtgcgctacattaccaaccacagctcaggcaaaatgggttatgcgctggcgcaagccgcaatgcaattgggtgcgaatgtgacacttgtcagcggcccggtttctctgccaacccccgtcaatgtcaaccgcatcaacgtcgacagtgcccaagaaatgtatgacgccgtgatggctcaggcatctgatcacgatatcttcatcagttgcgcggccgtggcagattaccgcccagctacaattgctgagcaaaaactgaagaaaactgacgacagtgatgaaatgaccatcactatggtgaagaatcccgatatcgtcgcgtctgtctccgccatgacggagaatcgtccttttacagtcggctttgcggcagaaaccaacgacgttgaagtgtacgctcgccgtaaactggaaaagaaaaagctcgatctgctctgcgcgaacgacgtgtccgtggaagggcaaggcttcaacagcagcgacaatgcgattacgctttactggtcacagggagagaaagccctgccactcaacagcaaagcggtattaagtatggagatcttgaaacagatccaaaccctgatgggtcactaa

SEQ ID NO: 49793 - protein, 401 aa, Vibrio vulnificus
MQTLAGKKILLGISGGIAAYKCADLTRRLKERGAEVQVVMTKAAKEFITPLTMQAVSGRPVSDSLLDPAAEASMGHIELAKWADLILLAPATADLIARMAAGMGNDLLTTLVLATDAPVAVSPAMNQQMYRNVATQENIATLSRRGMEIWGPAAGEQACGDVGPGRMLEPMQLVALCEQFFQPKPLQDKSILITAGPTREAIDPVRYITNHSSGKMGYALAQAAMQLGANVTLVSGPVSLPTPVNVNRINVDSAQEMYDAVMAQASDHDIFISCAAVADYRPATIAEQKLKKTDDSDEMTITMVKNPDIVASVSAMTENRPFTVGFAAETNDVEVYARRKLEKKKLDLLCANDVSVEGQGFNSSDNAITLYWSQGEKALPLNSKAVLSMEILKQIQTLMGH

SEQ ID NO: 49794 - DNA, 1245 bp, Vibrio vulnificus; identical to SEQ ID NO: 49506
  CDS (40)..(1245): transl_table=11

SEQ ID NO: 49795 - protein, 401 aa, Vibrio vulnificus
MQTLAGKKILLGISGGIAAYKCADLTRRLKERGAEVQVVMTKAAKEFITPLTMQAVSGRPVSDSLLDPAAEASMGHIELAKWADLILLAPATADLIARMAAGMGNDLLTTLVLATDAPVAVSPAMNQQMYRNVATQENIATLSRRGMEIWGPAAGEQACGDVGPGRMLEPMQLVALCEQFFQPKPLQDKSILITAGPTREAIDPVRYITNHSSGKMGYALAQAAMQLGANVTLVSGPVSLPTPVNVNRINVDSAQEMYDAVMAQASDHDIFISCAAVADYRPATIAEQKLKKTDDSDEMTITMVKNPDIVASVSAMTENRPFTVGFAAETNDVEVYARRKLEKKKLDLLCANDVSVEGQGFNSSDNAITLYWPQGEKALPLNSKAALSMEILKQIQTLMGH

SEQ ID NO: 49796 - DNA, 21 bp, Artificial sequence
  primer
atggtaaaggggaaacgcatc

SEQ ID NO: 49797 - DNA, 24 bp, Artificial sequence
  primer
ttaaatccgttccaacagatattg

SEQ ID NO: 49798 - protein, 450 aa, Artificial sequence
  consensus sequence
  Variant (2)..(2): Xaa in position 2 is any amino acid
  Variant (5)..(5): Xaa in position 5 is any amino acid
  Variant (8)..(14): Xaa in position 8 to 14 is any amino acid
  Variant (16)..(17): Xaa in position 16 to 17 is any amino acid
  Variant (18)..(20): Xaa in position 18 to 20 is any or no amino acid
  Variant (22)..(23): Xaa in position 22 to 23 is any amino acid
  Variant (25)..(28): Xaa in position 25 to 28 is any amino acid
  Variant (30)..(31): Xaa in position 30 to 31 is any amino acid
  Variant (33)..(34): Xaa in position 33 to 34 is any amino acid
  Variant (36)..(37): Xaa in position 36 to 37 is any amino acid
  Variant (39)..(57): Xaa in position 39 to 57 is any amino acid
  Variant (58)..(68): Xaa in position 58 to 68 is any or no amino acid
  Variant (70)..(71): Xaa in position 70 to 71 is any amino acid
  Variant (73)..(74): Xaa in position 73 to 74 is any amino acid
  Variant (75)..(79): Xaa in position 75 to 79 is any or no amino acid
  Variant (82)..(85): Xaa in position 82 to 85 is any amino acid
  Variant (89)..(89): Xaa in position 89 is any amino acid
  Variant (91)..(98): Xaa in position 91 to 98 is any amino acid
  Variant (100)..(100): Xaa in position 100 is any amino acid
  Variant (102)..(110): Xaa in position 102 to 110 is any amino acid
  Variant (112)..(114): Xaa in position 112 to 114 is any amino acid
  Variant (115)..(117): Xaa in position 115 to 117 is any or no amino acid
  Variant (119)..(122): Xaa in position 119 to 122 is any amino acid
  Variant (127)..(128): Xaa in position 127 to 128 is any amino acid
  Variant (130)..(135): Xaa in position 130 to 135 is any amino acid
  Variant (136)..(137): Xaa in position 136 to 137 is any or no amino acid
  Variant (139)..(141): Xaa in position 139 to 141 is any amino acid
  Variant (143)..(150): Xaa in position 143 to 150 is any amino acid
  Variant (151)..(152): Xaa in position 151 to 152 is any or no amino acid
  Variant (154)..(162): Xaa in position 154 to 162 is any amino acid
  Variant (163)..(167): Xaa in position 163 to 167 is any or no amino acid
  Variant (170)..(190): Xaa in position 170 to 190 is any amino acid
  Variant (191)..(216): Xaa in position 191 to 216 is any or no amino acid
  Variant (218)..(218): Xaa in position 218 is any amino acid
  Variant (220)..(220): Xaa in position 220 is any amino acid
  Variant (222)..(222): Xaa in position 222 is any amino acid
  Variant (224)..(225): Xaa in position 224 to 225 is any amino acid
  Variant (230)..(232): Xaa in position 230 to 232 is any amino acid
  Variant (234)..(234): Xaa in position 234 is any amino acid
  Variant (238)..(239): Xaa in position 238 to 239 is any amino acid
  Variant (241)..(243): Xaa in position 241 to 243 is any amino acid
  Variant (245)..(250): Xaa in position 245 to 250 is any amino acid
  Variant (253)..(253): Xaa in position 253 is any amino acid
  Variant (255)..(255): Xaa in position 255 is any amino acid
  Variant (257)..(258): Xaa in position 257 to 258 is any amino acid
  Variant (260)..(277): Xaa in position 260 to 277 is any amino acid
  Variant (278)..(283): Xaa in position 278 to 283 is any or no amino acid
  Variant (285)..(297): Xaa in position 285 to 297 is any amino acid
  Variant (298)..(304): Xaa in position 298 to 304 is any or no amino acid
  Variant (308)..(308): Xaa in position 308 is any amino acid
  Variant (309)..(309): Xaa in position 309 is any or no amino acid
  Variant (311)..(334): Xaa in position 311 to 334 is any amino acid
  Variant (335)..(342): Xaa in position 335 to 342 is any or no amino acid
  Variant (345)..(355): Xaa in position 345 to 355 is any amino acid
  Variant (356)..(364): Xaa in position 356 to 364 is any or no amino acid
  Variant (370)..(374): Xaa in position 370 to 374 is any amino acid
  Variant (375)..(385): Xaa in position 375 to 385 is any or no amino acid
  Variant (387)..(388): Xaa in position 387 to 388 is any amino acid
  Variant (390)..(392): Xaa in position 390 to 392 is any amino acid
  Variant (393)..(397): Xaa in position 393 to 397 is any or no amino acid
  Variant (399)..(400): Xaa in position 399 to 400 is any amino acid
  Variant (402)..(405): Xaa in position 402 to 405 is any amino acid
  Variant (407)..(432): Xaa in position 407 to 432 is any amino acid
  Variant (433)..(445): Xaa in position 433 to 445 is any or no amino acid
  Variant (447)..(449): Xaa in position 447 to 449 is any amino acid
GXIAXYKXXXXXXXLXXXXXGXXVXXXXTXXAXXFXXPXXXXXXXXXXXXXXXXXXXXXXXXXXXXXXHXXLXXXXXXXADXXXXAPAXAXXXXXXXXGXAXXXXXXXXXAXXXXXXPXXXXPAMNXXMXXXXXXXXNXXXLXXXXXXXXXXPXXXXXXXXXXXXXXGRXXXXXXXXXXXXXXXXXXXXXXXXXXXXXXXXXXXXXXXXXXXXXXXTXGXTXEXXDPVRXXXNXSSGXXGXXXAXXXXXXGAXVXLXXGXXXXXXXXXXXXXXXXXXXXXXXXMXXXXXXXXXXXXXXXXXXXXAAVXXDXXXXXXXXXXXXXXXXXXXXXXXXXXXXXXXXDIXXXXXXXXXXXXXXXXXXXXGFAAEXXXXXXXXXXXXXXXXAXXKXXXXXXXXKXXDXXXXNXXXXXXXXXXXXXXXXXXXXXXXXXXXXXXXXXXXXXXXKXXXA

SEQ ID NO: 49799 - protein, 22 aa, Artificial sequence
  protein pattern
  Variant (2)..(2): Xaa in position 2 is Asp or Glu
  Variant (3)..(3): Xaa in position 3 is any amino acid
  Variant (4)..(4): Xaa in position 4 is Phe, Ile, Leu, Met or Val
  Variant (5)..(5): Xaa in position 5 is Phe, Ile, Leu or Val
  Variant (6)..(6): Xaa in position 6 is Ile, Leu or Val
  Variant (7)..(7): Xaa in position 7 is Ala, Cys or Val
  Variant (9)..(10): Xaa in position 9 to 10 is any or no amino acid
  Variant (12)..(19): Xaa in position 12 to 19 is any amino acid
  Variant (20)..(21): Xaa in position 20 to 21 is any or no amino acid
AXXXXXXPXXAXXXXXXXXXXG

SEQ ID NO: 49800 - DNA, 1953 bp, Synechocystis sp.
  CDS (1)..(1953): transl_table=11
atgactgaattaccccccaatcctaattccaccgttgtttcccgtcgtactgcgctcaagcttttaggggtgggtaccctggggggcgccattggttattcccgtttagctaagccccagccggcccggtacgatactgatcgcctagatttgccgcaatatttgtcccaactaaagtcggtggtggtggtgggagctggtttagctggtttagcttcagcctatgaactgagcaagcggggctttaaggttacccttttggaaaaatcgccaaatttagggggcaaggtggcgggctggcccatccaggtgggggaagaaactttccagatggagcacggtttccacggctttttcccccagtattacaacctcaaaagcattgttaatgaattggcgatcgccgacaattttcgttcccttgatttctattctttagtctttaaagagggctatgagccggaggtgtttcgccctagccattccgcctttccctggaatattgtcgatctgaccatttcttccccgaaccgattgcgctggggcattaatttaaccaagcctgcccattggcaagtttttcgagccattacaggttttcaaattcccaaaagctatgaccaactagatagcatcaccgtcagtgattgggtggcgaagggtttccccaaaggtttgtacgatctttacttcctaccctttgccaaatctagcttgaacgcccccgatgtgttgagtgcgggggaattgatgcagtttttccatttttactttttcggtaatcccgaaggcctagcttttaatggcaccaaggacgatatggtgactagtttggtcatgcctatggtggaatccatcaaagcccacggcggacaaatcatcaccgaagccaccgttagtgcgattaactgtgaccaaggtttaatccaatccctccagtatgtgcagggggatgatccggtcagcgatgtgccgtttactgtgccccgcaatgatctgcttacccaggcaaacccaggggggaatgtttactatggcgctggcgatcgggtttattgggctaagccagaaggaaaagaagctctatccctcacctgtagccatcaaggttgcaccgttgccaaacaggagaatggtcaatttatctgtccttgccatggcgctgtgtatgatgcggatggtcaagttatccaagggccagctaagcgaaatttagccaagtttgcggttaaaccgggaagtagtgccacggaagtacagttggtgtcccgcaccaaggacaaaccaccggcgcaaaccctcaaagcagattattatgtgctggcggcggatgtagtgggcatgaaaaacctggccgatcgcctggggggagatgttaatccccaatttgtccaacaggtgaaaaacctagcggtggcggatccctttgcagtggcccggttttggtttgatcaagattttgaatggccccacagtaacttcgcctccctatccggttaccgtttaaccgatagcattaccctttatcaccgaatccaaaatcaatttattgcctgggcggaacgcaccgggggcagtgtggtggagttacacgcctattgctacaaagaaaaagagttccccacccagggggatttgttagccacctttgagcaggaattgtacgaaattgtcccctcgttagctacggcaaaactcctacaccgggaattggttaaccagaaaaatttctccggttttccccccaacagctacggcgatcgcccggagacggaaactccggtggccaatcttttgttcgctggggattgggtgaaaatgccctttccctgcggtttgatggagcgggccatcagcagtgggctattatcagccaacgccatttgtcatcaagagggtttgcaacggcgggaattgttaacggtgatgcccgagggaattttgcaaatttaa

SEQ ID NO: 49801 - protein, 650 aa, Synechocystis sp.
MTELPPNPNSTVVSRRTALKLLGVGTLGGAIGYSRLAKPQPARYDTDRLDLPQYLSQLKSVVVVGAGLAGLASAYELSKRGFKVTLLEKSPNLGGKVAGWPIQVGEETFQMEHGFHGFFPQYYNLKSIVNELAIADNFRSLDFYSLVFKEGYEPEVFRPSHSAFPWNIVDLTISSPNRLRWGINLTKPAHWQVFRAITGFQIPKSYDQLDSITVSDWVAKGFPKGLYDLYFLPFAKSSLNAPDVLSAGELMQFFHFYFFGNPEGLAFNGTKDDMVTSLVMPMVESIKAHGGQIITEATVSAINCDQGLIQSLQYVQGDDPVSDVPFTVPRNDLLTQANPGGNVYYGAGDRVYWAKPEGKEALSLTCSHQGCTVAKQENGQFICPCHGAVYDADGQVIQGPAKRNLAKFAVKPGSSATEVQLVSRTKDKPPAQTLKADYYVLAADVVGMKNLADRLGGDVNPQFVQQVKNLAVADPFAVARFWFDQDFEWPHSNFASLSGYRLTDSITLYHRIQNQFIAWAERTGGSVVELHAYCYKEKEFPTQGDLLATFEQELYEIVPSLATAKLLHRELVNQKNFSGFPPNSYGDRPETETPVANLLFAGDWVKMPFPCGLMERAISSGLLSANAICHQEGLQRRELLTVMPEGILQI

SEQ ID NO: 49802 - DNA, 1950 bp, Nostoc sp. PCC 7120
  CDS (1)..(1950): transl_table=11
atgagtttattatctaatttgccagagtctactaatatatcccatatatcccgtcgcacccttttaaaggtgtttggtgttggtgcagtcgcaggagtaacaggatactctcggtttaccaagcccaagccaacggtatttcaaaaagataccttgagtttgccacggttactgaatcaagcaaaaagtgtcatagttatcgggggtggtttagcgggtttagcttgtgcgtatgaattgagtcaacgggggtttacagtcacactgatagaaaaatcaccccaactcggtggtaaaattgctagctggcaaatagaagccgtgggcgaaaccttcatgatggaacatggctttcatggcttttttccccagtactataatttgaaaagtatagttgcagaactgggaataaatgagaatttccaatcattaaacttttattcagttgtctatcgaggagatcaatacaaaccagaggtttttcgtcccagtcattcagcatttccttggaatattgtagacttagcgatcgcctctcctaatcgcttccaatggggaattaatttaacgaagattaaacacctacaagtatttcaagccatcacaggttttcagcgagaaaagaattatcaacgctttgataatatatccgtggctgattgggtgaaaacggaatttccccaaggtttatatgatttgtattttctcccatttgctaagtctagcttgaacgcaccagatacgatgagtgtgggagaattaatgcaattcttccatttttatttttttggcaatccagaaggactggcttttaatggtacgaaagatgatatggggacaagtttagtccaacccattgccaagagtgtgaaaaataagagtgggacaattatcactgatgctacggtgagtgaaattattgccaaggatggtaaaattcaaggcttgaaatattatgttggcaataatcaaaataatgcccctttttgggtaaaacgtaactcagttattactgaagaaaaaacagaatattttggtgctgctgatgaagtatttgctgtagaatctggtagcgaaacagcaatttctctcacttgtactcatcaaggttgtactgtgaaaaaatccacagatggtaaataccgttgcccttgtcatggggctgagtttgcggctgatggtaaagtgttgaaggggccagccaagcgggatttacaaaagttgcaggttgtacaaaaacaaaatgatgaattgcaactgctagctacaaccaatgatgcacccttaccagagacaatcaccgcagattattacgtgtttgctaccgatgtacctggagtgcaacaattatttaagcatattagtggtgatgtagatcaaacagtgcgatcgcaagtggaaaacttgagtatcgctgatccttttgctgtgtgtcgtttctggtttgatcaagattttgagtgggaacaaagtaactttacttccttatctggctatcagttaaccgacagcatcaccttatatcaccgcattcagcaacaatttattgattggtcaaaaaagactggtggtagtgtagtggagttacacgcctattgttacaaagaaaaagaatttcccacccaagaagctttgttaactacctttgaaaacgaattatatgagatagtcccccagttgaagcaagcaaaactcctgcatcgggaattagtgaatcaacataacttttctggctatccaccaaatagttatggagaacgtccagaaaccagtacaaacatttctaacttattatttgctggtgattgggtaaaaatgccttttccctgcggcttaatggaacgcgccgtcagtagtggtttaatcgcagctaatgagattttacaccgagaaggtttgcagaggcgatcgcttttatcggtgaatccagagggtttgttgcagatttaa

SEQ ID NO: 49803 - protein, 649 aa, Nostoc sp. PCC 7120
MSLLSNLPESTNISHISRRTLLKVFGVGAVAGVTGYSRFTKPKPTVFQKDTLSLPRLLNQAKSVIVIGGGLAGLACAYELSQRGFTVTLIEKSPQLGGKIASWQIEAVGETFMMEHGFHGFFPQYYNLKSIVAELGINENFQSLNFYSVVYRGDQYKPEVFRPSHSAFPWNIVDLAIASPNRFQWGINLTKIKHLQVFQAITGFQREKNYQRFDNISVADWVKTEFPQGLYDLYFLPFAKSSLNAPDTMSVGELMQFFHFYFFGNPEGLAFNGTKDDMGTSLVQPIAKSVKNKSGTIITDATVSEIIAKDGKIQGLKYYVGNNQNNAPFWVKRNSVITEEKTEYFGAADEVFAVESGSETAISLTCTHQGCTVKKSTDGKYRCPCHGAEFAADGKVLKGPAKRDLQKLQVVQKQNDELQLLATTNDAPLPETITADYYVFATDVPGVQQLFKHISGDVDQTVRSQVENLSIADPFAVCRFWFDQDFEWEQSNFTSLSGYQLTDSITLYHRIQQQFIDWSKKTGGSVVELHAYCYKEKEFPTQEALLTTFENELYEIVPQLKQAKLLHRELVNQHNFSGYPPNSYGERPETSTNISNLLFAGDWVKMPFPCGLMERAVSSGLIAANEILHREGLQRRSLLSVNPEGLLQI

SEQ ID NO: 49804 - DNA, 1944 bp, Chlorobium tepidum TLS
  CDS (1)..(1944): transl_table=11
atgcagcgacgcgagtttttccagcatttcctcaaacgcgccggtatcggggcgggcgctctcggtgccgcaaccgccggtcttgtcggctattaccaaccgcgcaaggaggtcttcgacacctccggcaagaacaacgacgagctggcagaaaagctgacgacgcctaaaaaagcggtggtgattggcggcgggctggcgggcatcagctcggcgctggaacttgcgcgtcggaacttcgaggtgacgctggtcgaggcctcgccgtcgctgggcggcaagctgactggctggtccatcgaggcgctcggcgagcagttcccggtggagcatggctttcacggctttttcgaccagtactataacctgaacgaaatgttcgcctcggcgggcatcggcagcgacatgttcaccgcctcgcccggctatccggtcatcttcagcgaccggcaggtcgaggtgttcggccagacgccgaagtggtttccgttcaacattctctcggtggtgcagcagtcgaaacggctcgacatcatgtcgttcctgaaggattatcccggactgtggccggtcatcagcatgttccgctaccagtacgaccgcaccttccgcgactgggacagcattgatttcatgacctactgccggcgtggcgaggtgcttccggccttcatcgacaccgtgctgcatcctttctcggacgccacgatgaaccgcatggaggtgctctcagccgccgaggcgatgcgttacttccatttctacttcatgggcagtccggaggggctggctttccggatcatcacgaaggattgcatgagcgccctcatcgagccgctggagcgcaagatgacgtcgctgggcgtgcgggtgctgaaagggcgcaaggcacagaacctcgtgatgcaggatgggcgcgtcacggcggtgcggctcgacggcgcgggagctgcgaatggcgaggtggcgtcgattccgaagcgcgaggtgccagtgaccggatggctgcaacacatgtccgacgcggggattcccgtgctggtggcgcggcgaggtgcgtcgtgggtggccctcgacgggcgctgcactcacatgggttgcccggtggctcccgaagtgtcaacaggaggctttcattgcccctgccacgatggccgcttcaacgcagaagggcttccggtgagtggcccgccgaaagcgccgctgccccggctcgatgtgcgggaagcgggggagatgctcgtcatcgggcaggcgtcgtcaagctcgtcgccggtggttgtcaccgctgaggagctgccgtgcgattactgcgtggtggcttcgggcgtgcgcggtacccgcgagctgatcgccttgacccggcctggcaacagtggcttcgccggtcaggtggccgcgcttggtgaggccgatccctacgtcgtctggcgcgtttggctcgaccgcccgttaccatccgccgactttccgttctacaccgtctcgggctacacctacaccgactcgatcaccttttattcgagctttcagcagcccttcatcgactgggccaagcgcaccggtggctgcgtcgtcgagctgcacgcctacgccgtcgcgccgcaagacgtgcgccccgagccggagatccgcgccacgatgttgcaagagctgcacgccatgttcccggaatcgaaaaacgccacgatccggcacgaaattttcatgatgcaatcaaacttcacccgctgggcacccggcgaccatgccaaacgccccggcgtcgaaacaccctatgccaacctctttctggcgggcgactgggtaagcaccaaagccccggttttcctgatggaagccgccgtcttcacgggccgtatggccgccaacgccatttctgcaaaagagtcgctgaggcagaagccgttgccgattgtgccgatgaacgggatttttgcttaa

SEQ ID NO: 49805 - protein, 647 aa, Chlorobium tepidum TLS
MQRREFFQHFLKRAGIGAGALGAATAGLVGYYQPRKEVFDTSGKNNDELAEKLTTPKKAVVIGGGLAGISSALELARRNFEVTLVEASPSLGGKLTGWSIEALGEQFPVEHGFHGFFDQYYNLNEMFASAGIGSDMFTASPGYPVIFSDRQVEVFGQTPKWFPFNILSVVQQSKRLDIMSFLKDYPGLWPVISMFRYQYDRTFRDWDSIDFMTYCRRGEVLPAFIDTVLHPFSDATMNRMEVLSAAEAMRYFHFYFMGSPEGLAFRIITKDCMSALIEPLERKMTSLGVRVLKGRKAQNLVMQDGRVTAVRLDGAGAANGEVASIPKREVPVTGWLQHMSDAGIPVLVARRGASWVALDGRCTHMGCPVAPEVSTGGFHCPCHDGRFNAEGLPVSGPPKAPLPRLDVREAGEMLVIGQASSSSSPVVVTAEELPCDYCVVASGVRGTRELIALTRPGNSGFAGQVAALGEADPYVVWRVWLDRPLPSADFPFYTVSGYTYTDSITFYSSFQQPFIDWAKRTGGCVVELHAYAVAPQDVRPEPEIRATMLQELHAMFPESKNATIRHEIFMMQSNFTRWAPGDHAKRPGVETPYANLFLAGDWVSTKAPVFLMEAAVFTGRMAANAISAKESLRQKPLPIVPMNGIFA

SEQ ID NO: 49806 - DNA, 1965 bp, Gloeobacter violaceus PCC 7421
  CDS (1)..(1965): transl_table=11
gtgagtgagcagggtacttatccagcttcccgtcggttcgtgcgcaccctttcacggcggcgggtgctgggtctattagcgctggcgggggccgggagcggtttgtggcactggcgccacgcgaaaacccaaccaacgatctttgaacaggacacgctgcaactgccccgccgcacagagcgcccgcgccgggtggtggtcgtaggggccgggctcgcggggctcgcttgcgcctatgagctttcggcgcgggggttcgccgtcaccctcatcgagcgcgccgagcagttggggggcaagctggtgagctggcccatcgaggtcctgggcgagaagttcaccatggaacacggcttccacggcttcttcccgcagtactacaatctcaacggcctggtggcggagttgcagctggcccagaatttcgtggatctcaagacctacgcggtgctgtaccgccacaagtacgcccccgagatcttcaggcccagcagtgcggcgtttccgtggaatatcgtcgatctggccgtcagttccgccaaccggggcgcctggggtctcaacctggccagtttcgaccactggcgggtctttcaggcgattaccagctttcatacccaggtcacccgccggccgctcgaggagctttcggtgagcgagtgggtagccaagaactttccgcagggtctctacgacctgtactttctgccctttgccaaatccaccctcaacgctcccgatctgctcagcgtcggggagatgctccagttttttcacttttattttttcggcaatcctgaaggtctggcctttcggggtacgcgccaggacatgggcaccagtcttatcgacccgattgccgccgccttcgtgcacaacggcggcaccctgattaccggcgcccaggtcgagcgggtgcgctggcagagcggtcgggtggtttcgatgacttaccggcagggtcaggacagcctcgatgctcccctctgggtcgatcgcgaccgctcgctcgccggtcccgatcgctattaccgccagggcgaacgggtattcgccgtgcgcggagccgcccgggaggccgtcgcgctcaactgcacccaccagggctgcacggtggacaggctcgcagacggcggattccagtgtccctgtcacggggcgactttcgacagtgaagggcgggtagtgcagggtccggcccgcgccgatctgccccgggcgcgcattgtcgagcaggagggcgaacggttgcgacttgcaggtaaagataccccaacccaaacaggcgaactggaggccgactacttcgtgctcgccgccgacgtgcccggcatgcgccaactgttcgagcgctccgagggcgaagtgcacgaaggcgtgcgccggcaaatcgcggacctggcgattgccgatccgttcgccgtggcccgcttctggttcgaccgcgatttcgagtggaattacagcgactttgcttcgctgtcgggttacaggctcaccgacagcatcaccctctaccaccacattcaggagcaatatatcgattgggcgaagcgcaccggcggcagcgtcgtcgaactgcacgcctactgctacaaagaaaaggaatttccgacccgcgaggcgctgctggccaccttcgaatcggagctgttcgagatcgtgcctgcgctgcgcgaagcccaagtgctccaccgcgaactgctcaatcaaaaaaacttctccggctacccgccgggcagctacgccgggcggcccgagacgacgacggcggtgccgaacctgatattcgcaggcgactgggtgaagatgccctttccctgcggcctgatggaacgggccgtcagttccggctttctggccgccaacgccgtcttgcagcgcgaaggactccagcgccgggttctgcttaccgtcagcccggagggcgccctgcggcctttcacccaatggttagaaccttga

SEQ ID NO: 49807 - protein, 654 aa, Gloeobacter violaceus PCC 7421
MSEQGTYPASRRFVRTLSRRRVLGLLALAGAGSGLWHWRHAKTQPTIFEQDTLQLPRRTERPRRVVVVGAGLAGLACAYELSARGFAVTLIERAEQLGGKLVSWPIEVLGEKFTMEHGFHGFFPQYYNLNGLVAELQLAQNFVDLKTYAVLYRHKYAPEIFRPSSAAFPWNIVDLAVSSANRGAWGLNLASFDHWRVFQAITSFHTQVTRRPLEELSVSEWVAKNFPQGLYDLYFLPFAKSTLNAPDLLSVGEMLQFFHFYFFGNPEGLAFRGTRQDMGTSLIDPIAAAFVHNGGTLITGAQVERVRWQSGRVVSMTYRQGQDSLDAPLWVDRDRSLAGPDRYYRQGERVFAVRGAAREAVALNCTHQGCTVDRLADGGFQCPCHGATFDSEGRVVQGPARADLPRARIVEQEGERLRLAGKDTPTQTGELEADYFVLAADVPGMRQLFERSEGEVHEGVRRQIADLAIADPFAVARFWFDRDFEWNYSDFASLSGYRLTDSITLYHHIQEQYIDWAKRTGGSVVELHAYCYKEKEFPTREALLATFESELFEIVPALREAQVLHRELLNQKNFSGYPPGSYAGRPETTTAVPNLIFAGDWVKMPFPCGLMERAVSSGFLAANAVLQREGLQRRVLLTVSPEGALRPFTQWLEP

SEQ ID NO: 49808 - DNA, 1944 bp, Anabaena variabilis ATCC 29413
  CDS (1)..(1944): transl_table=11
atgagtttattacctaatttgccagagtctactaataatatatcccgtcgcacccttttaaaggtgtttggtgttggtgcagttgcaggagtaacaggatactctcgctttactaagcctaagccaacggtatttcaaaaagataccttgagtttgccacggttactgaatcaagcaaaaagtgtcatagttatcgggggtggtttagcgggtttagcttgtgcgtatgaattgagtcaacgggggtttacagtcacactgatagaaaaatcaccccaactcggtggtaaaattgctagctggcaaatagaagccgtgggcgaaaccttcatgatggaacatggctttcatggcttttttcctcagtactataatttgaaaagtatagttgcagaactgggaataaatgataattttcaatcattaaacttttattcagttgtttatcgaggagatcaatacaaaccagaggtttttcgtcctagtcattcagcctttccttggaatattgtagacttagcgatcgcctctcctaatcgcttccaatggggaattaatttaactaagattaaacacctacaagtatttcaagccatcacaggttttcagcgagaaaagaactatcaacgcttcgataatatatcggtggctgattgggtaaaaacagaatttccccaaggtttgtacgatttgtattttctcccatttgctaagtctagcttgaacgcaccagatacaatgagcgtgggagaattaatgcagtttttccatttttatttttttggcaatccagaaggactggcttttaatggtacgaaagatgatatggggacaagtttagtccaacccattgccaacagtgtgaaaaataagaatgggacaattcttactgatgcaacggtgagcgaaattattgccaaagatggtaaaattcgaggtttgaaatattatgttggcagtaatcaaaataatgtccctttttgggtaaaacgtaactcagtgattactgaagaaaaaacagagtattttggtgcggctgatgaagtatttgctgtggaatctgctagcgaaacagcaatttctttaacttgtactcatcaaggttgtactgtgaaaaaatccacagatggtaaataccgttgcccttgtcatggggcagaatttgcggcggatggtaaagtgttgaaggggccagccaagcgggatttacaaaagttgcaagttgtacaaaaacaaaatgatgaattgcaactgttagctacaactaatgatgcactgttaccagagacaatcaccgcagattattacgtgtttgccacagatgtgcctggagtacaacaattatttaagcatattagtggagatgtagatcaaacagtgcgatcgcaagtagaaaacttgagtatcgctgatccttttgctgtgtgtcgtttctggtttgatcaagattttgagtgggaacaaagtaactttacttccttatctggctatcagttaaccgacagcatcaccttatatcaccgcattcagcaacaatttattgattggtcacaaaaaactggcggtagtgtggtagagttacacgcctattgttacaaagaaaaagaatttcccacccaggaagctttgttaactacctttgaaaacgaactatatgacatagtcccccagttgaaacaagcaaaactcctgcatcgggaattggtaaatcaacataacttttccggttatccacccaatagttatggagaacgtccagaaaccagtacaaatatttctaacttattgtttgctggtgattgggtaaaaatgccctttccctgcggcttaatggaacgcgccgtcagtagtggtttaatcgcagccaatgagattttacaccgggaaggtttgcagaggcgatcgcttttatcggtgaatccagagggtttgttgcagatttaa

SEQ ID NO: 49809 - protein, 647 aa, Anabaena variabilis ATCC 29413
MSLLPNLPESTNNISRRTLLKVFGVGAVAGVTGYSRFTKPKPTVFQKDTLSLPRLLNQAKSVIVIGGGLAGLACAYELSQRGFTVTLIEKSPQLGGKIASWQIEAVGETFMMEHGFHGFFPQYYNLKSIVAELGINDNFQSLNFYSVVYRGDQYKPEVFRPSHSAFPWNIVDLAIASPNRFQWGINLTKIKHLQVFQAITGFQREKNYQRFDNISVADWVKTEFPQGLYDLYFLPFAKSSLNAPDTMSVGELMQFFHFYFFGNPEGLAFNGTKDDMGTSLVQPIANSVKNKNGTILTDATVSEIIAKDGKIRGLKYYVGSNQNNVPFWVKRNSVITEEKTEYFGAADEVFAVESASETAISLTCTHQGCTVKKSTDGKYRCPCHGAEFAADGKVLKGPAKRDLQKLQVVQKQNDELQLLATTNDALLPETITADYYVFATDVPGVQQLFKHISGDVDQTVRSQVENLSIADPFAVCRFWFDQDFEWEQSNFTSLSGYQLTDSITLYHRIQQQFIDWSQKTGGSVVELHAYCYKEKEFPTQEALLTTFENELYDIVPQLKQAKLLHRELVNQHNFSGYPPNSYGERPETSTNISNLLFAGDWVKMPFPCGLMERAVSSGLIAANEILHREGLQRRSLLSVNPEGLLQI

SEQ ID NO: 49810 - DNA, 1947 bp, Trichodesmium erythraeum IMS101
  CDS (1)..(1947): transl_table=11
atgaatcaattaactaatctgaaatcatttacatcagtttcgcgacgaacaatactcaaattattaactattggagctactactggtttactaggttatactcgattctctaaacctcaaccaagggtttttacccaagataatctagatttaccacaatatttaaacaatgataaaagtgtagtagtagttgggggtggattagcaggattagcttgtgcttatgaacttactcagcgaggttttacagttactttattagaaagatccccacaactaggaggaaaaattgctagttggtctgttgatgtaggaggagaaaagtttataatggaacatggttttcatggtttttttcctcaatattacaatctgaatagtttggtagaagaattgaatattacagataattttcaatctttagagttctattctgtggtgtttagaaaagggaaatataacccagaagtatttcatcctaatagttctgtgtttccttggaatatagtagatttagcaatttcttcttctaatagatttagctggggaattaatttagccaagcctaaacattgggaagtatttcgtgctataggtggctttaatttagagaaaacttatcataaatttgacaatttatctgttgctgaatgggtcgaaaaagattttcctcaaggattatatgatttgtattttttgccttttgctaaatcaagtcttaatgctccaaacaagttgagcgttgccgaattaatgcaattttttcacttctatttttttggtaatccagaaggtttagcttttaatggtactagacaagatatgggtacaagtttagtacaaccagttgctaaagaaattgagaataagggaggtaaaatttttactgatgttggtgttagtggaattaatttgcaaaacaataagattagttcaattagttatcagttaggagaggtgaaaagtttgattcctttttgggtagaacgtaatttagaaatcaatcaagaaaaagttaattattttggttcaagtgatcgcctctttgcggttaaatataattcaaatgaggctatttctttgacttgtactcatcaaggttgtactgttatcttagcagaagatggaaatttttactgcccttgtcacggagcagtttatgatagaaaaggaaaagtattgacaggtccggcaaaacaaaatttatcgcgctataaaattactcaacgccaagaaaatcaagttcagttagttagcataaaggaaaataaatcagaaattatatccacagaaattaaagctgattattatgtatttgctacagatgttccgggagttcaacacttatttaatttgatggaaggagaagtaaatcaaaatgtaaaatctcaggtacaaaaattaaatatagctgacccctttgcagtttgtcgtttttggtttgaccgagactttgactggaaacatagcaattttacttctctatccggttatcaattaattgatagtattactctctatcatcgcattcaaaaacagttcattcaatggcataaaaaaacaggtggtagtgttgtggagttacacgcctattgttacaaagaaaaacagtttcctactcaagaaattttactcacaacttttgcacaagaattatatgaaattgtaccagaattaaaggaagctaatttgctgcatcaagagttagtaaaccagaaaaatttttccggttatcctccaggtagttatcaacaacgtccagaaattaacagtggtatttctaatttaatgtttgctggagattgggtaaaaatgccatttccttgtggtttaatggaaagagctactagtagtgggttattagcagcaaatgaaattctttctagagaaggtttacaaagacgaaaattattctcagtcaaccctgaaggtattctcaaagtttga

SEQ ID NO: 49811 - protein, 648 aa, Trichodesmium erythraeum IMS101
MNQLTNLKSFTSVSRRTILKLLTIGATTGLLGYTRFSKPQPRVFTQDNLDLPQYLNNDKSVVVVGGGLAGLACAYELTQRGFTVTLLERSPQLGGKIASWSVDVGGEKFIMEHGFHGFFPQYYNLNSLVEELNITDNFQSLEFYSVVFRKGKYNPEVFHPNSSVFPWNIVDLAISSSNRFSWGINLAKPKHWEVFRAIGGFNLEKTYHKFDNLSVAEWVEKDFPQGLYDLYFLPFAKSSLNAPNKLSVAELMQFFHFYFFGNPEGLAFNGTRQDMGTSLVQPVAKEIENKGGKIFTDVGVSGINLQNNKISSISYQLGEVKSLIPFWVERNLEINQEKVNYFGSSDRLFAVKYNSNEAISLTCTHQGCTVILAEDGNFYCPCHGAVYDRKGKVLTGPAKQNLSRYKITQRQENQVQLVSIKENKSEIISTEIKADYYVFATDVPGVQHLFNLMEGEVNQNVKSQVQKLNIADPFAVCRFWFDRDFDWKHSNFTSLSGYQLIDSITLYHRIQKQFIQWHKKTGGSVVELHAYCYKEKQFPTQEILLTTFAQELYEIVPELKEANLLHQELVNQKNFSGYPPGSYQQRPEINSGISNLMFAGDWVKMPFPCGLMERATSSGLLAANEILSREGLQRRKLFSVNPEGILKV

SEQ ID NO: 49812 - DNA, 1908 bp, Crocosphaera watsonii WH 8501
  CDS (1)..(1908): transl_table=11
atgttttctcgtcgtacttttttcaaggtttttggagttgggggtttaggtagtttaatcgcttattctcgctttaaaaagccatctccttctttttatcaacaagatagtttaactttaccttcccgtttaactcaatctaaatctgtggttgttatcggtgctggtttggctggtttggcttgtgcttatgagttaagtcgccgaggttttgaggtgactctactagaaaaatctcccaatttaggggggaaaattgccagttggactatcaatgttggtcaagatagtttcaaaatggaacatggttttcatggtttttttcctcaatattataatcttaaaaaaattgtttctgaattaaatatagaaaataattttcgctctttaggcttttattctgttctcttttctgacaagaaatataaatataaagccgaaaacttttatcccagtcattcctcttttccttggaatattgtcgaccttgctgtttggtcagaaaatcgttttaactggggtattaatatgagtaagttatcccattggcaggtatttaaagagattaccgggtttagaatgcctgatagttttgacaggttggatcatctctctgttcttgagtggtcaaaaataggttttccccaaggactttatgatttatattttcttccttttgctcgttcaactctaaattcccctgatgttttaagtgcaggagaattactccaatttttccatttctattttttcggcaaccccgaaggtttagcttttaatggcacaaaagatgatatgggaaccagtctagttgaacctattattaataatattagaaataatcaaggtaatgttataaaagaagcacaggttagcaatattgtttgtcaagaaaataaaattatctctctcaactatcaacagggaaatgaggtaactaatgttccttttaatgttgacaaaaataccatgtcatgtaatgacaatgaaagctattatggagatagcgatcgcctatttttagagacagatgaacaggtgattggtttaacttgtactcatcaaggttgtacggttaaaaaacaagaagatgggagctttttatgtccttgtcatggtgcaacatatgatgaaaatggcaatatcaaaaaaggaccagcgaaacaaaatttagctcgttatcaagttgtagaaaaagaagatacatcggttaagttagttagtcaagaagctaaggaaaatatcaatagcgagactttacaagcagactattatgttattgccaccgatgtgccaggaatacgtcatttatggacaagaatggaaggagaaaataatgagagtttaacccaaaaaattgaacaattagcggttgctgatccctttgcggtgggtaggttttggtttgatgaagattttgattgggaacatagtcattttacctctctttctggttacgatctcaccgatagtattaccttatatcatcgcatccaaacccagtttattgagtggtcgaaaaaaacgggaggaagtgtcatagaattacacgcatattgttataaagaaaaagattttcccacccaagaagttttattaagaacctttgaaaaagagttatatgaaattgttcctcaactatcacaagctaacctattacacaaagaattagttaatcaaaagaacttctctggttatcctcccaatagttaccaaaatcgtccagatacggttacagatgttgataatttgttttttgcaggagactgggttaaaatgccgtttccctgtggtttaatggaaaaagctgttagtagtggtttattagctgctaacgctattttagaaaaagaaggtttacaaagacggacattattgactgttaatgaaggtatcagattaatctag

SEQ ID NO: 49813 - protein, 635 aa, Crocosphaera watsonii WH 8501
MFSRRTFFKVFGVGGLGSLIAYSRFKKPSPSFYQQDSLTLPSRLTQSKSVVVIGAGLAGLACAYELSRRGFEVTLLEKSPNLGGKIASWTINVGQDSFKMEHGFHGFFPQYYNLKKIVSELNIENNFRSLGFYSVLFSDKKYKYKAENFYPSHSSFPWNIVDLAVWSENRFNWGINMSKLSHWQVFKEITGFRMPDSFDRLDHLSVLEWSKIGFPQGLYDLYFLPFARSTLNSPDVLSAGELLQFFHFYFFGNPEGLAFNGTKDDMGTSLVEPIINNIRNNQGNVIKEAQVSNIVCQENKIISLNYQQGNEVTNVPFNVDKNTMSCNDNESYYGDSDRLFLETDEQVIGLTCTHQGCTVKKQEDGSFLCPCHGATYDENGNIKKGPAKQNLARYQVVEKEDTSVKLVSQEAKENINSETLQADYYVIATDVPGIRHLWTRMEGENNESLTQKIEQLAVADPFAVGRFWFDEDFDWEHSHFTSLSGYDLTDSITLYHRIQTQFIEWSKKTGGSVIELHAYCYKEKDFPTQEVLLRTFEKELYEIVPQLSQANLLHKELVNQKNFSGYPPNSYQNRPDTVTDVDNLFFAGDWVKMPFPCGLMEKAVSSGLLAANAILEKEGLQRRTLLTVNEGIRLI

SEQ ID NO: 49814 - DNA, 1923 bp, Prosthecochloris aestuarii DSM 271
  CDS (1)..(1923): transl_table=11
atggaccgaagggatttttttagaacgtttctcaaaagaacgggcattggtgccggtattacagcagcgggcgctgttggtgcgcttggttactaccagcctcgcagggaggtgtatgtcgaggaagggagtgtatcagatgatctttccggagagaagcttgagcgtcctaagaaagctgttattgtgggcggcgggcttgcggggatgagcgcggctatggaattggcaaaacgtcatttcgaggtgactcttgtcgaggcgtcggatgagcttggcggcaaggttacgggatgggatgtcgatgcgcttggggagcgtttccctgtcgagcatggatttcacggttacttcgatcagtattacaatctcaatgaattgttcgatgcagcaggggttggtgacgtgtttacacccgccccggggtatcctgtcaagttcagagatcgtcctatggaggtcttcggtcagacaccgaagctttttccgcttaatattctgacggttgtccagcagtcggattcgctggatatgattcctatcatgcagcatttccggcagatgcgtccggtgctggatatgtttcgctacgactatgaccggacctttgcgcaatatgatgatcttgattttatgagcttctgtcgggagcaggagatctatgaaccgtttctgacgacagtgctgcacccgttttctgatgctacgatgaatcgaatggaggtgctttctgcggctgaggcgttgcggtattttcatttttattttcttggcagccctgaggcgctgggatttcgtattacgaagaagagctgtatgcatgctttgatcaatcctgttgtagagatgcttgaagggcttggcgtgaggattgtgtcagggacgaaggtcgagcgtcttgtgctggaggaaaacagggtttcaggagtggtgcttggaggcagcggcggaggcgctcttgccagggttccgaggggttcggtcagggagggagagtggttctcgatgacagctgacgatggggttccgcttcttgtgacgatccgcggtgacgaatatcaggcgtttgatgcgacgtgtacccatatgggctgccctgtgcgcccggatgagacgaccggcggatttttctgtccctgccatgcaggcgtgtttgatgctgcaggcaatgcgacgagcgggccgcctgaggagccgcttcagaggctgcatgttgcgctcgatggcgatgagcttgtgctgtcccggccggattctggagcggggccggaggttctggagtgcgattattgcgtcgtggcttcaaatgtgagcggtacgaaagcgattatcggtcgttcggatatcggggacactgcatttgcaaggagcgtggcttcgctgggagaggctgatccctatgttgtctggcggatctggctggataagcctgtgacgtcagcgaagtatccgttttatacggttgcccgttttacgtataccgactcggtgtcgattttctctcattttcaggaaccgttcatctcatgggcttccagaacggggggcagtgtcgttgaactgcatgcgtatgctatcgcaccggacgaccttcgttccgacgaggttatcaagcagaccatgcttgaggagatgcatcatatgttcccggaaaccaaggatgcccggatactctacgatgtctacatgcagcaggataattttacccgatgggcgccaggggaccatgccgaccgtcctgtttccgaaactccgtatgccaatctctattttgccggtgactgggtgaaggttgatgctcctgtatttctgatggaggcggctacctttaccggtcgtcttgctgcaaatgcgatttgtcgtaaggagtcgctgaaacctacaccgctgccgattgtcccgatggatgggatctttgcgtag

SEQ ID NO: 49815 - protein, 640 aa, Prosthecochloris aestuarii DSM 271
MDRRDFFRTFLKRTGIGAGITAAGAVGALGYYQPRREVYVEEGSVSDDLSGEKLERPKKAVIVGGGLAGMSAAMELAKRHFEVTLVEASDELGGKVTGWDVDALGERFPVEHGFHGYFDQYYNLNELFDAAGVGDVFTPAPGYPVKFRDRPMEVFGQTPKLFPLNILTVVQQSDSLDMIPIMQHFRQMRPVLDMFRYDYDRTFAQYDDLDFMSFCREQEIYEPFLTTVLHPFSDATMNRMEVLSAAEALRYFHFYFLGSPEALGFRITKKSCMHALINPVVEMLEGLGVRIVSGTKVERLVLEENRVSGVVLGGSGGGALARVPRGSVREGEWFSMTADDGVPLLVTIRGDEYQAFDATCTHMGCPVRPDETTGGFFCPCHAGVFDAAGNATSGPPEEPLQRLHVALDGDELVLSRPDSGAGPEVLECDYCVVASNVSGTKAIIGRSDIGDTAFARSVASLGEADPYVVWRIWLDKPVTSAKYPFYTVARFTYTDSVSIFSHFQEPFISWASRTGGSVVELHAYAIAPDDLRSDEVIKQTMLEEMHHMFPETKDARILYDVYMQQDNFTRWAPGDHADRPVSETPYANLYFAGDWVKVDAPVFLMEAATFTGRLAANAICRKESLKPTPLPIVPMDGIFA

SEQ ID NO: 49816 - DNA, 22 bp, Artificial sequence
  primer
atgactgaattaccccccaatc

SEQ ID NO: 49817 - DNA, 21 bp, Artificial sequence
  primer
ttaaatttgcaaaattccctc

SEQ ID NO: 49818 - protein, 641 aa, Artificial sequence
  consensus sequence
  Variant (2)..(18): Xaa in position 2 to 18 is any amino acid
  Variant (20)..(23): Xaa in position 20 to 23 is any amino acid
  Variant (25)..(36): Xaa in position 25 to 36 is any amino acid
  Variant (38)..(40): Xaa in position 38 to 40 is any amino acid
  Variant (41)..(41): Xaa in position 41 is any or no amino acid
  Variant (43)..(45): Xaa in position 43 to 45 is any amino acid
  Variant (47)..(49): Xaa in position 47 to 49 is any amino acid
  Variant (51)..(51): Xaa in position 51 is any amino acid
  Variant (53)..(53): Xaa in position 53 is any amino acid
  Variant (58)..(60): Xaa in position 58 to 60 is any amino acid
  Variant (62)..(62): Xaa in position 62 is any amino acid
  Variant (65)..(66): Xaa in position 65 to 66 is any amino acid
  Variant (68)..(68): Xaa in position 68 is any amino acid
  Variant (70)..(70): Xaa in position 70 is any amino acid
  Variant (74)..(74): Xaa in position 74 is any amino acid
  Variant (76)..(76): Xaa in position 76 is any amino acid
  Variant (78)..(79): Xaa in position 78 to 79 is any amino acid
  Variant (84)..(86): Xaa in position 84 to 86 is any amino acid
  Variant (88)..(93): Xaa in position 88 to 93 is any amino acid
  Variant (95)..(95): Xaa in position 95 is any amino acid
  Variant (97)..(98): Xaa in position 97 to 98 is any amino acid
  Variant (107)..(107): Xaa in position 107 is any amino acid
  Variant (113)..(124): Xaa in position 113 to 124 is any amino acid
  Variant (125)..(125): Xaa in position 125 is any or no amino acid
  Variant (127)..(131): Xaa in position 127 to 131 is any amino acid
  Variant (133)..(133): Xaa in position 133 is any amino acid
  Variant (135)..(141): Xaa in position 135 to 141 is any amino acid
  Variant (142)..(145): Xaa in position 142 to 145 is any or no amino acid
  Variant (147)..(147): Xaa in position 147 is any amino acid
  Variant (149)..(154): Xaa in position 149 to 154 is any amino acid
  Variant (157)..(157): Xaa in position 157 is any amino acid
  Variant (160)..(165): Xaa in position 160 to 165 is any amino acid
  Variant (167)..(167): Xaa in position 167 is any amino acid
  Variant (168)..(168): Xaa in position 168 is any or no amino acid
  Variant (170)..(200): Xaa in position 170 to 200 is any amino acid
  Variant (202)..(218): Xaa in position 202 to 218 is any amino acid
  Variant (219)..(219): Xaa in position 219 is any or no amino acid
  Variant (221)..(224): Xaa in position 221 to 224 is any amino acid
  Variant (227)..(231): Xaa in position 227 to 231 is any amino acid
  Variant (233)..(237): Xaa in position 233 to 237 is any amino acid
  Variant (239)..(240): Xaa in position 239 to 240 is any amino acid
  Variant (242)..(245): Xaa in position 242 to 245 is any amino acid
  Variant (251)..(251): Xaa in position 251 is any amino acid
  Variant (253)..(253): Xaa in position 253 is any amino acid
  Variant (260)..(261): Xaa in position 260 to 261 is any amino acid
  Variant (263)..(264): Xaa in position 263 to 264 is any amino acid
  Variant (266)..(269): Xaa in position 266 to 269 is any amino acid
  Variant (271)..(272): Xaa in position 271 to 272 is any amino acid
  Variant (274)..(290): Xaa in position 274 to 290 is any amino acid
  Variant (292)..(346): Xaa in position 292 to 346 is any amino acid
  Variant (347)..(352): Xaa in position 347 to 352 is any or no amino acid
  Variant (354)..(357): Xaa in position 354 to 357 is any amino acid
  Variant (361)..(361): Xaa in position 361 is any amino acid
  Variant (364)..(364): Xaa in position 364 is any amino acid
  Variant (366)..(370): Xaa in position 366 to 370 is any amino acid
  Variant (371)..(371): Xaa in position 371 is any or no amino acid
  Variant (373)..(375): Xaa in position 373 to 375 is any amino acid
  Variant (380)..(386): Xaa in position 380 to 386 is any amino acid
  Variant (388)..(391): Xaa in position 388 to 391 is any amino acid
  Variant (394)..(397): Xaa in position 394 to 397 is any amino acid
  Variant (399)..(426): Xaa in position 399 to 426 is any amino acid
  Variant (427)..(431): Xaa in position 427 to 431 is any or no amino acid
  Variant (434)..(434): Xaa in position 434 is any amino acid
  Variant (436)..(436): Xaa in position 436 is any amino acid
  Variant (438)..(439): Xaa in position 438 to 439 is any amino acid
  Variant (441)..(441): Xaa in position 441 is any amino acid
  Variant (443)..(445): Xaa in position 443 to 445 is any amino acid
  Variant (447)..(463): Xaa in position 447 to 463 is any amino acid
  Variant (464)..(464): Xaa in position 464 is any or no amino acid
  Variant (466)..(467): Xaa in position 466 to 467 is any amino acid
  Variant (471)..(472): Xaa in position 471 to 472 is any amino acid
  Variant (474)..(474): Xaa in position 474 is any amino acid
  Variant (476)..(476): Xaa in position 476 is any amino acid
  Variant (478)..(478): Xaa in position 478 is any amino acid
  Variant (480)..(488): Xaa in position 480 to 488 is any amino acid
  Variant (490)..(492): Xaa in position 490 to 492 is any amino acid
  Variant (496)..(497): Xaa in position 496 to 497 is any amino acid
  Variant (503)..(503): Xaa in position 503 is any amino acid
  Variant (505)..(507): Xaa in position 505 to 507 is any amino acid
  Variant (509)..(510): Xaa in position 509 to 510 is any amino acid
  Variant (513)..(513): Xaa in position 513 is any amino acid
  Variant (515)..(517): Xaa in position 515 to 517 is any amino acid
  Variant (529)..(543): Xaa in position 529 to 543 is any amino acid
  Variant (545)..(547): Xaa in position 545 to 547 is any amino acid
  Variant (550)..(553): Xaa in position 550 to 553 is any amino acid
  Variant (555)..(558): Xaa in position 555 to 558 is any amino acid
  Variant (560)..(561): Xaa in position 560 to 561 is any amino acid
  Variant (564)..(568): Xaa in position 564 to 568 is any amino acid
  Variant (570)..(570): Xaa in position 570 is any amino acid
  Variant (573)..(576): Xaa in position 573 to 576 is any amino acid
  Variant (578)..(582): Xaa in position 578 to 582 is any amino acid
  Variant (585)..(587): Xaa in position 585 to 587 is any amino acid
  Variant (589)..(591): Xaa in position 589 to 591 is any amino acid
  Variant (594)..(594): Xaa in position 594 is any amino acid
  Variant (602)..(604): Xaa in position 602 to 604 is any amino acid
  Variant (606)..(607): Xaa in position 606 to 607 is any amino acid
  Variant (611)..(611): Xaa in position 611 is any amino acid
  Variant (613)..(615): Xaa in position 613 to 615 is any amino acid
  Variant (617)..(618): Xaa in position 617 to 618 is any amino acid
  Variant (622)..(622): Xaa in position 622 is any amino acid
  Variant (624)..(626): Xaa in position 624 to 626 is any amino acid
  Variant (628)..(628): Xaa in position 628 is any amino acid
  Variant (630)..(633): Xaa in position 630 to 633 is any amino acid
  Variant (635)..(636): Xaa in position 635 to 636 is any amino acid
  Variant (638)..(639): Xaa in position 638 to 639 is any amino acid
  Variant (640)..(640): Xaa in position 640 is any or no amino acid
RXXXXXXXXXXXXXXXXXYXXXXKXXXXXXXXXXXXLXXXXLXXXKXXXVXGXGLAGXXXAXELXXRXFXVTLXEXSXXLGGKXXXWXXXXXXEXFXXEHGFHGFFXQYYNLXXXXXXXXXXXXXFXXXXXYXVXXXXXXXXXXXEXFXXXXXXFPXNIXXXXXXSXXRXXXXXXXXXXXXXXXXXXXXXXXXXXXXXXXDXXXXXXXXXXXXXXXXXXDXXXXPFXXXXXNXXXXXSXXEXXXXFHFYFXGXPEGLAFXXTXXDXXXXLXXPXXXXXXXXXXXXXXXXXVXXXXXXXXXXXXXXXXXXXXXXXXXXXXXXXXXXXXXXXXXXXXXXXXXXXXXXXXXXXXXAXXXXCTHXGCXVXXXXXXGXXXCPCHXXXXXXXGXXXXGPXXXXLXXXXXXXXXXXXXXXXXXXXXXXXXXXXXXXXXDYXVXAXXVXGXXXLXXXXXXXXXXXXXXXXXXLXXADPXXVXRXWXDXXXXXXXXXFXXXSGYXXTDSITXYXXXQXXFIXWXXXTGGSVVELHAYXXXXXXXXXXXXXXXTXXXELXXXXPXXXXAXXLHXXXXXQXNFXXXXPXXXXXRPXXXTXXXNLXFAGDWVKXXXPXXLMEXAXXXGXXAANXIXXXEXLXXXXLXXVXXXG

SEQ ID NO: 49819 - protein, 62 aa, Artificial sequence
  protein pattern
  Variant (2)..(2): Xaa in position 2 is Phe or Tyr
  Variant (3)..(3): Xaa in position 3 is Ala or Val
  Variant (5)..(5): Xaa in position 5 is any amino acid
  Variant (7)..(7): Xaa in position 7 is Phe, Ile or Val
  Variant (9)..(9): Xaa in position 9 is Phe or Leu
  Variant (11)..(11): Xaa in position 11 is any amino acid
  Variant (12)..(12): Xaa in position 12 is Asp or Pro
  Variant (13)..(13): Xaa in position 13 is Phe, Leu or Val
  Variant (14)..(14): Xaa in position 14 is Asp, Glu, Pro or Thr
  Variant (15)..(19): Xaa in position 15 to 19 is any amino acid
  Variant (21)..(21): Xaa in position 21 is any amino acid
  Variant (22)..(22): Xaa in position 22 is Ser or Thr
  Variant (23)..(23): Xaa in position 23 is Leu or Val
  Variant (24)..(24): Xaa in position 24 is Ala or Ser
  Variant (25)..(25): Xaa in position 25 is any amino acid
  Variant (26)..(26): Xaa in position 26 is Phe or Tyr
  Variant (27)..(28): Xaa in position 27 to 28 is any amino acid
  Variant (32)..(33): Xaa in position 32 to 33 is any or no amino acid
  Variant (35)..(38): Xaa in position 35 to 38 is any amino acid
  Variant (39)..(40): Xaa in position 39 to 40 is any or no amino acid
  Variant (42)..(42): Xaa in position 42 is Glu, Asn, Gln or Thr
  Variant (43)..(43): Xaa in position 43 is Pro or Gln
  Variant (44)..(44): Xaa in position 44 is Phe or Tyr
  Variant (46)..(46): Xaa in position 46 is Ala, Asp, Glu or Ser
  Variant (48)..(48): Xaa in position 48 is Ala or Ser
  Variant (49)..(49): Xaa in position 49 is any amino acid
  Variant (50)..(50): Xaa in position 50 is Lys or Arg
  Variant (54)..(54): Xaa in position 54 is Cys or Ser
  Variant (56)..(56): Xaa in position 56 is Ile or Val
  Variant (62)..(62): Xaa in position 62 is Ala or Cys
PXXVXRXWXDXXXXXXXXXFXXXXXXXXTDSXXIXXXXXXQXXXIXWXXXTGGXVXELHAYX

SEQ ID NO: 49820 - protein, 59 aa, Artificial sequence
  protein pattern
  Variant (4)..(4): Xaa in position 4 is any amino acid
  Variant (5)..(6): Xaa in position 5 to 6 is any or no amino acid
  Variant (8)..(8): Xaa in position 8 is any amino acid
  Variant (9)..(9): Xaa in position 9 is any or no amino acid
  Variant (12)..(12): Xaa in position 12 is Ala, Ser or Thr
  Variant (13)..(13): Xaa in position 13 is any amino acid
  Variant (15)..(15): Xaa in position 15 is any amino acid
  Variant (17)..(17): Xaa in position 17 is any amino acid
  Variant (21)..(21): Xaa in position 21 is Ile, Leu or Val
  Variant (23)..(23): Xaa in position 23 is any amino acid
  Variant (24)..(24): Xaa in position 24 is Ala or Ser
  Variant (25)..(25): Xaa in position 25 is Asp, Glu or Pro
  Variant (26)..(26): Xaa in position 26 is Glu, Asn or Gln
  Variant (31)..(31): Xaa in position 31 is Ile, Leu or Val
  Variant (32)..(32): Xaa in position 32 is Ala, Thr or Val
  Variant (33)..(33): Xaa in position 33 is Gly or Ser
  Variant (35)..(35): Xaa in position 35 is Asp, Pro, Gln, Ser or Thr
  Variant (36)..(36): Xaa in position 36 is Ile or Val
  Variant (37)..(37): Xaa in position 37 is Asp, Glu, Asn or Gln
  Variant (38)..(38): Xaa in position 38 is Ala or Val
  Variant (39)..(39): Xaa in position 39 is Gly, Leu or Val
  Variant (40)..(40): Xaa in position 40 is Glu, Gly or Gln
  Variant (41)..(41): Xaa in position 41 is Asp or Glu
  Variant (42)..(42): Xaa in position 42 is any amino acid
  Variant (44)..(44): Xaa in position 44 is any amino acid
  Variant (45)..(45): Xaa in position 45 is Met or Val
  Variant (52)..(52): Xaa in position 52 is Phe or Tyr
  Variant (54)..(54): Xaa in position 54 is Asp or Pro
GLAXXXAXXELXXRXFXVTLXEXXXXLGGKXXXWXXXXXXXXFXXEHGFHGXFXQYYNL

SEQ ID NO: 49821 - protein, 61 aa, Artificial sequence
  protein pattern
  Variant (2)..(2): Xaa in position 2 is any amino acid
  Variant (5)..(5): Xaa in position 5 is Ser or Thr
  Variant (6)..(6): Xaa in position 6 is any amino acid
  Variant (7)..(7): Xaa in position 7 is Phe, Trp or Tyr
  Variant (8)..(8): Xaa in position 8 is Ala or Pro
  Variant (10)..(10): Xaa in position 10 is Gly or Asn
  Variant (11)..(11): Xaa in position 11 is Asp or Ser
  Variant (12)..(12): Xaa in position 12 is His or Tyr
  Variant (13)..(13): Xaa in position 13 is Ala, Gly or Gln
  Variant (14)..(14): Xaa in position 14 is any amino acid
  Variant (17)..(18): Xaa in position 17 to 18 is any or no amino acid
  Variant (20)..(23): Xaa in position 20 to 23 is any amino acid
  Variant (24)..(25): Xaa in position 24 to 25 is any or no amino acid
  Variant (28)..(28): Xaa in position 28 is any amino acid
  Variant (29)..(29): Xaa in position 29 is Phe or Leu
  Variant (35)..(38): Xaa in position 35 to 38 is any amino acid
  Variant (40)..(40): Xaa in position 40 is Cys or Val
  Variant (41)..(41): Xaa in position 41 is any amino acid
  Variant (45)..(45): Xaa in position 45 is any amino acid
  Variant (47)..(48): Xaa in position 47 to 48 is any amino acid
  Variant (49)..(49): Xaa in position 49 is Ser or Thr
  Variant (51)..(51): Xaa in position 51 is any amino acid
  Variant (52)..(52): Xaa in position 52 is Ile, Leu or Met
  Variant (53)..(53): Xaa in position 53 is Ala or Ser
  Variant (56)..(56): Xaa in position 56 is Ala or Glu
  Variant (57)..(57): Xaa in position 57 is Ile or Val
  Variant (58)..(60): Xaa in position 58 to 60 is any amino acid
QXNFXXXXPXXXXXRPXXEXXXXXXNLXXAGDWVXXXXPXXLMEXAXXXGXXXANXXXXXE

SEQ ID NO: 49822 - protein, 55 aa, Artificial sequence
  protein pattern
  Variant (2)..(3): Xaa in position 2 to 3 is any amino acid
  Variant (4)..(4): Xaa in position 4 is any or no amino acid
  Variant (6)..(6): Xaa in position 6 is any or no amino acid
  Variant (9)..(9): Xaa in position 9 is Ala or Ser
  Variant (10)..(10): Xaa in position 10 is Asp, Lys or Arg
  Variant (11)..(11): Xaa in position 11 is Ala or Ser
  Variant (12)..(12): Xaa in position 12 is Ser or Thr
  Variant (13)..(13): Xaa in position 13 is Leu or Met
  Variant (15)..(16): Xaa in position 15 to 16 is any amino acid
  Variant (17)..(17): Xaa in position 17 is Asp, Glu or Asn
  Variant (18)..(18): Xaa in position 18 is any amino acid
  Variant (19)..(19): Xaa in position 19 is Leu or Met
  Variant (21)..(21): Xaa in position 21 is Ala or Val
  Variant (22)..(22): Xaa in position 22 is Ala or Gly
  Variant (24)..(24): Xaa in position 24 is any amino acid
  Variant (25)..(25): Xaa in position 25 is Leu or Met
  Variant (26)..(26): Xaa in position 26 is Gln or Arg
  Variant (27)..(27): Xaa in position 27 is Phe or Tyr
  Variant (33)..(33): Xaa in position 33 is Phe or Leu
  Variant (35)..(35): Xaa in position 35 is Asn or Ser
  Variant (38)..(38): Xaa in position 38 is Ala or Gly
  Variant (40)..(40): Xaa in position 40 is Ala or Gly
  Variant (42)..(42): Xaa in position 42 is Asn or Arg
  Variant (43)..(43): Xaa in position 43 is Gly or Ile
  Variant (45)..(45): Xaa in position 45 is Lys or Arg
  Variant (46)..(46): Xaa in position 46 is any amino acid
  Variant (47)..(47): Xaa in position 47 is Asp or Ser
  Variant (48)..(50): Xaa in position 48 to 50 is any amino acid
  Variant (51)..(51): Xaa in position 51 is Ala or Ser
  Variant (53)..(53): Xaa in position 53 is Ile or Val
  Variant (54)..(54): Xaa in position 54 is any amino acid
LXXXLXPFXXXXXNXXXXXSXXEXXXXFHFYFXGXPEXLXFXXTXXXXXXXLXXP

SEQ ID NO: 49823 - protein, 33 aa, Artificial sequence
  protein pattern
  Variant (2)..(4): Xaa in position 2 to 4 is any amino acid
  Variant (9)..(9): Xaa in position 9 is any or no amino acid
  Variant (11)..(15): Xaa in position 11 to 15 is any amino acid
  Variant (16)..(16): Xaa in position 16 is any or no amino acid
  Variant (18)..(18): Xaa in position 18 is any amino acid
  Variant (19)..(19): Xaa in position 19 is Ala, Ile or Val
  Variant (20)..(21): Xaa in position 20 to 21 is any amino acid
  Variant (24)..(24): Xaa in position 24 is Ala or Pro
  Variant (25)..(25): Xaa in position 25 is Glu, Lys or Arg
  Variant (26)..(26): Xaa in position 26 is any amino acid
  Variant (27)..(27): Xaa in position 27 is Asp, Asn or Pro
  Variant (29)..(29): Xaa in position 29 is any amino acid
  Variant (30)..(30): Xaa in position 30 is Lys or Arg
  Variant (31)..(32): Xaa in position 31 to 32 is any amino acid
  Variant (33)..(33): Xaa in position 33 is Ile or Val
GXXXCPCHXGXXXXXXGXXXXGPXXXXLXXXXX

SEQ ID NO: 49824 - protein, 23 aa, Artificial sequence
  protein pattern
  Variant (2)..(2): Xaa in position 2 is any amino acid
  Variant (4)..(4): Xaa in position 4 is any amino acid
  Variant (5)..(5): Xaa in position 5 is Pro or Gln
  Variant (6)..(6): Xaa in position 6 is Asn, Ser or Thr
  Variant (7)..(9): Xaa in position 7 to 9 is any amino acid
  Variant (12)..(12): Xaa in position 12 is any amino acid
  Variant (15)..(16): Xaa in position 15 to 16 is any or no amino acid
  Variant (18)..(18): Xaa in position 18 is Asp or Val
  Variant (19)..(19): Xaa in position 19 is any amino acid
  Variant (20)..(20): Xaa in position 20 is Ala, Gln or Thr
  Variant (21)..(22): Xaa in position 21 to 22 is any amino acid
EXFXXXXXXFPXNIXXVXXXXXS

SEQ ID NO: 49825 - protein, 25 aa, Artificial sequence
  protein pattern
  Variant (2)..(3): Xaa in position 2 to 3 is any amino acid
  Variant (4)..(9): Xaa in position 4 to 9 is any or no amino acid
  Variant (11)..(11): Xaa in position 11 is Phe or Met
  Variant (12)..(13): Xaa in position 12 to 13 is any amino acid
  Variant (15)..(15): Xaa in position 15 is Leu or Met
  Variant (16)..(16): Xaa in position 16 is Phe, His or Tyr
  Variant (17)..(17): Xaa in position 17 is Asp, Glu or His
  Variant (18)..(18): Xaa in position 18 is Ile or Met
  Variant (19)..(19): Xaa in position 19 is Phe or Val
  Variant (21)..(21): Xaa in position 21 is Ala, Glu, Gln or Ser
  Variant (22)..(23): Xaa in position 22 to 23 is any amino acid
  Variant (24)..(24): Xaa in position 24 is Asp, Glu, Gln or Thr
LXXXXXXXXTXXXEXXXXXPXXXXA

SEQ ID NO: 49826 - protein, 23 aa, Artificial sequence
  protein pattern
  Variant (2)..(7): Xaa in position 2 to 7 is any amino acid
  Variant (8)..(10): Xaa in position 8 to 10 is any or no amino acid
  Variant (12)..(12): Xaa in position 12 is Phe, Ile, Leu or Val
  Variant (13)..(13): Xaa in position 13 is Ala, Asp or Ser
  Variant (14)..(14): Xaa in position 14 is Ala, Gly or Leu
  Variant (15)..(15): Xaa in position 15 is any amino acid
  Variant (17)..(17): Xaa in position 17 is Ser or Thr
  Variant (19)..(19): Xaa in position 19 is any amino acid
  Variant (22)..(22): Xaa in position 22 is Pro or Thr
VXXXXXXXXXAXXXXCXHXGCXV

SEQ ID NO: 49827 - protein, 24 aa, Artificial sequence
  protein pattern
  Variant (3)..(3): Xaa in position 3 is any amino acid
  Variant (5)..(5): Xaa in position 5 is Phe, Ile, Leu or Val
  Variant (7)..(7): Xaa in position 7 is Ala, Ser or Thr
  Variant (8)..(8): Xaa in position 8 is Asp or Gly
  Variant (10)..(10): Xaa in position 10 is any amino acid
  Variant (12)..(14): Xaa in position 12 to 14 is any amino acid
  Variant (16)..(20): Xaa in position 16 to 20 is any amino acid
  Variant (21)..(21): Xaa in position 21 is any or no amino acid
  Variant (23)..(23): Xaa in position 23 is Asp, Glu or Asn
  Variant (24)..(24): Xaa in position 24 is Asn, Ser or Val
DYXVXAXXVXGXXXLXXXXXXGXX

SEQ ID NO: 49828 - DNA, 2187 bp, Synechocystis sp.
  CDS (1)..(2187): transl_table=11
atgatccaagctatgccctctgctcccaccgttgactttaaagatcctgcttactatttcaatcgagaattgagttggttagcctttaatcagcgggtgctccatgaaggtttagacgaccgtacccccttgttggaacggttaaagtttttggcgattttttgctccaacctagatgaattttttatggtcagggtggcggggctcaagcaacaggtagaagcgaatgtcaccaagttgactgcggatggtcgtactccatcccaacagcttaaagaaattagcaaaagtctgcggcctttggtatatcaacaaaaccaggtgtttgagtatgtgctcaaggaaaaattagcggatgagggcattttcctcaacgattatgtagatctaagccaagaagaaagacagtatttgcatcaattctatgatgaccatattttcccggttttaactcccctggcggtggaccccagccatccttttccctacatttccaaccttagtcttaatttgggggtggtggtgcgagacccggatacggatgaagaattatttgccagggtaaaagtgccccccactctgccccgctttgtggctttgccggaggacgtgtgtcagccagaccccaacaaaccatggctctggaccggtgtgcccctggagcaggtcatcgcccacaatttagcttccctttttcccggcatgatcatccaggaatgtcatttatttcgggtgacccgtaacgcagacattgcagtggaagaagacgaggctgatgatctactcctggcgatcgaagaggaattgcgtaaacgtagggtggggaaatccgctgtgcgcttggagatcaatgcttcaactccgaaaaatattcgcgatcgcctgatgacggatctagggctagaagaaattgacgtttatgacattgacggcctgttggggctgaaggatctgttctttttcctttctttacctgctccccacctcaaggacgaaccctgggcttcggttattcctccccgcctgaagcatgtctatgaatttgtcgatggggacgaagacggccgggtccagcaggaggggatagatatttttactctgattcgccagggagatattttagttcaccatccctaccaatccttcaccgcttcggtgcaacaatttattacccaggcggcctacgatccccatgtattgaccattaaaatgaccctgtaccgcacttcgggggattcccccattgttaacgctctgattgcggcggcggaaaatggcaaacaggtggcggtgttggtggaactcaaggcccgttttgatgaagaaaataacattaactgggctagaaagctagaacagtacggcgtccatgtggtctatggactggtggggctaaaaacccacactaaaaccgtcctcgtggtgcgccaggaaggccctgatatccgtcgttacgttcacattggtactggtaattacaatcccaaaaccgctaagctctacaccgatttggggttgattacctgtcgtccggaattgggcaatgacctgaccaatttatttaactttctcaccggctattcccgccaaaaggattaccaaaaattgctggtggctccggttaatatgcgggaaagaatggtggccatgattgagcgggaagcggaccattgtttaaatgggggcaccggccgcattgtggccaagatgaattccctggtagatacccagatcattcgtgccctctacgcagcttcccaggcgggggtgcagattgatctgattgtgcggggtatttgttgcctccgaccgggggtggaaaatgtcagtgaaaacattcgggtaatcagtgtaattggtcgtctgttggagcactcccgcattttctatttccacaatggcggtgaagaggaaatttacattggcagtgccgattggatgagtcgtaatctaacccgacgggtggaggcggtggtgccggtggaacagccggatctcaaacaggaattacagtccatcttgggcattcttttggccgataatcgtcaagcttgggagctacagcccgatggcacctatgtgcaacgccgtcccgcttccccggaacaaagccagagttcccaggcaattttcactgcccaggcgatcgccgaaactacggaagacccggaactacgttcagtttaa

SEQ ID NO: 49829 - protein, 728 aa, Synechocystis sp.
MIQAMPSAPTVDFKDPAYYFNRELSWLAFNQRVLHEGLDDRTPLLERLKFLAIFCSNLDEFFMVRVAGLKQQVEANVTKLTADGRTPSQQLKEISKSLRPLVYQQNQVFEYVLKEKLADEGIFLNDYVDLSQEERQYLHQFYDDHIFPVLTPLAVDPSHPFPYISNLSLNLGVVVRDPDTDEELFARVKVPPTLPRFVALPEDVCQPDPNKPWLWTGVPLEQVIAHNLASLFPGMIIQECHLFRVTRNADIAVEEDEADDLLLAIEEELRKRRVGKSAVRLEINASTPKNIRDRLMTDLGLEEIDVYDIDGLLGLKDLFFFLSLPAPHLKDEPWASVIPPRLKHVYEFVDGDEDGRVQQEGIDIFTLIRQGDILVHHPYQSFTASVQQFITQAAYDPHVLTIKMTLYRTSGDSPIVNALIAAAENGKQVAVLVELKARFDEENNINWARKLEQYGVHVVYGLVGLKTHTKTVLVVRQEGPDIRRYVHIGTGNYNPKTAKLYTDLGLITCRPELGNDLTNLFNFLTGYSRQKDYQKLLVAPVNMRERMVAMIEREADHCLNGGTGRIVAKMNSLVDTQIIRALYAASQAGVQIDLIVRGICCLRPGVENVSENIRVISVIGRLLEHSRIFYFHNGGEEEIYIGSADWMSRNLTRRVEAVVPVEQPDLKQELQSILGILLADNRQAWELQPDGTYVQRRPASPEQSQSSQAIFTAQAIAETTEDPELRSV

SEQ ID NO: 49830 - DNA, 2196 bp, Bradyrhizobium sp. ORS278
  CDS (1)..(2196): transl_table=11
atggataccgagcaagttactgaactcgcagcgaaagagccggttgcggcgcccacgaacgagatcgcctcgagccccgagcgcttcatcaatcgggagctgtcctggctgcacttcaaccgccgcgtgctcgaggaatcagtcaatccacgccatccggcgctggagcgtgtgcggttcctatcgatttccgccaacaaccttgatgaattcttcatggtccgcgtcgccggcatccgcgcccaggtgcgcgaaggcatcgcggagcgcagcccggacgggctgacaccaaccgagcagctcaagctgatcaacgaaaccgtgtcgcagctcgcgatcgaccagcaggcgatctggcgcgacctgcgcaagttcctcgccgagctcggcatcgtgctggtcgacggccaggacgtcaccaaggccgagcgcgcctggatcgaggatcatttcctcgccaacatcttcccgctgctgacgccgctggcgatcgatccagcgcatccgttcccgttcatcccgagcctcggcttcacggtggcgctgcagctgacccgcacctccgacggccggccgatgaacgcgctgatccgcatgccgggcaagatcgaccgcttcatccgcttccccggcgccaaggacggcgtcatccgcctgatcacgctcgaacaggccaccagcctgttcatcggccggctgtttcccggctacacggtgaagggccagggcgccttccgcatcatccgcgacagcgagatcgagatcgaggaagaagccgaggacctcgtccggctgttcgagaccgcgctgaagcggcgccgccgcggctcggtcatccggctcgagatcgaggccgccatgccggaggagctgcgccaattcgtgcaggacgcgctggcgacaactgacgacgaggtgttcgtggtcgacggcgtgctggcgatgaacgagctgtcacagctcacgcgcgtcgatcgccccgacctcgaattcgcgccctacgtgccgcgccatcccgagcgcgtgcgcgaccatggcggcgacatcttcgcggcgatccggcagaaggacctgatcgtccatcacccctacgagtcgttcgacgtcgtcgtgcagttcctgcagcaggcggcgcgcgatcccgacgtcgtcgcgatcaagcagacgctgtatcgcacctcgaacaactcgccgatcgtgcgcaccctggtggaagcggccgaggccggcaagtcggtcacggcgctggtcgagctcaaggcgcgattcgacgaggaggccaatatccgctgggcgcgcgacctcgagcgcgccggcgtgcaggtcgtctacggcttcctgcagctcaagacgcatgcgaaattgtcgatggtcgtgcgccgcgagggcggcagcctcacgacctacgtgcacaccggcactggcaactatcatccggtgacggcgcgcatctacaccgacctgtcctacttcacgtcggacccagtgatcggccgcgacgtcacgcgggtgttcaactacatcaccggctatgccgagcccatcgacatcgagaagatggcagtgtcgccgctcacgcttcgcaagcgcatgatcgagcacatccatggcgagaccagctttgcccgccagggcaagccggccgtgatctggatgaagatgaactcgctggtcgatcccgatatcatcgacgcgctctatgaggcgtctcaggccggcgtctcgatcgagctgatcgtgcgcggcatctgctgcctgcgtcccggcattcccggcttgtccgacaacatccgcgtcaagtcggtgatcggccgcttcctggagcatggccgcatctactgctttggtatgggtcagggcctgccgagtgccaaggcggcggtctacatctcctcggccgacatgatgccgcgcaatctcgaccgtcgcgtcgaggtgctctgcccgttgcagaacccgaccgtgcaccagcaggtgctggagcagatcatggtcgcgaatctcaaggataccgaacagagctggcaattgttgccggacgggtcgtcaacgcgtatgaaggccgcgaagggcgaggagcccttcaacctgcacaattacttcatgacgaatccgagtctctccggccgtggcaagtcgctcaaggaatcatcaccgcgccggctcacccgccggaacgagcgccccccttcctag

SEQ ID NO: 49831 - protein, 731 aa, Bradyrhizobium sp. ORS278
MDTEQVTELAAKEPVAAPTNEIASSPERFINRELSWLHFNRRVLEESVNPRHPALERVRFLSISANNLDEFFMVRVAGIRAQVREGIAERSPDGLTPTEQLKLINETVSQLAIDQQAIWRDLRKFLAELGIVLVDGQDVTKAERAWIEDHFLANIFPLLTPLAIDPAHPFPFIPSLGFTVALQLTRTSDGRPMNALIRMPGKIDRFIRFPGAKDGVIRLITLEQATSLFIGRLFPGYTVKGQGAFRIIRDSEIEIEEEAEDLVRLFETALKRRRRGSVIRLEIEAAMPEELRQFVQDALATTDDEVFVVDGVLAMNELSQLTRVDRPDLEFAPYVPRHPERVRDHGGDIFAAIRQKDLIVHHPYESFDVVVQFLQQAARDPDVVAIKQTLYRTSNNSPIVRTLVEAAEAGKSVTALVELKARFDEEANIRWARDLERAGVQVVYGFLQLKTHAKLSMVVRREGGSLTTYVHTGTGNYHPVTARIYTDLSYFTSDPVIGRDVTRVFNYITGYAEPIDIEKMAVSPLTLRKRMIEHIHGETSFARQGKPAVIWMKMNSLVDPDIIDALYEASQAGVSIELIVRGICCLRPGIPGLSDNIRVKSVIGRFLEHGRIYCFGMGQGLPSAKAAVYISSADMMPRNLDRRVEVLCPLQNPTVHQQVLEQIMVANLKDTEQSWQLLPDGSSTRMKAAKGEEPFNLHNYFMTNPSLSGRGKSLKESSPRRLTRRNERPPS

SEQ ID NO: 49832 - DNA, 2169 bp, Dichelobacter nodosus VCS1703A
  CDS (1)..(2169): transl_table=11
atgacagaacaattaccaacttctccaaaaaacacttccacagaaaaagcaccgttcattgatattgatactgccgatcccaaagatatttatttaaaccgtgagcttacttggctcgcttttaatgaacgcgtactttttgaagcacggcggaaaaatgtgccgctgcttgaacgcgttaaattccttgccatcgtcaacaataatcttgatgaatttttcatgaaacgcatcggcggactcaagcaacaagttggcgcgggactgcatcatttgagtttggacggacgcacgccgcaaaaacaaattgatgattgttatgaaaaaatcaataaaatccagcaagatattgaaaatacatggaaacaattagaaagcgcgctgaaaaaagaaaacattgaaattgttgaattcaaacaattatccgccgaaaaacaacaagaaatgcgcacttatttcctcgacaatatttattcgctgctcacgccgcaagctatggatcccgcgcacccgttcccatttgtttccaatttatcgcttaatttattgattcgcatgaattatccggaaacgcaaaaaacttccaccgcgcgggtcaaaattcccgttgggcaaggtagtaaacgttttattaatgtgcaaattcctaatacgctgacgtttatcacgttagaagatttgatcattaataatcttgatattttgtttcccgaaatggagatcaatcaaattgatattttccgcgtaacgcgtaatgccgttaccgaaaaagacgaagaaaaagctgatgatttattggaattgattgaggtggaattacgcgagcggcgttttgcgcccatcgtgcgcatggaatacaaaaaaggcatcgatcccaaacacaaaggcatgctcgcctccgaactgcatttggaagaggataaagatacttttgaagtgcgcaatttgatgcaaatgcgcgatttattcgaattgaccgcaattgatcgtgaagatttaaaactcaaaccttatcaccccgttgatcatgaaggattagtgggtgaagacaatattttccacgcgattcgccgcgcgggcaattttttgctgcaaatgccctatgaatcgtttaccagttccgtggaacgttttattcgcgatgccagccgcgatcccaaagtgctcgggattaaaatgacgatttaccgcacgtccagcgattcaaaaatcattgattatttaatcgaagcatcgcgtaacggcaaacaagttaccgtggtggtagaagttaaagcgcgttttgatgaatccgccaatattcgttgggcaaatcatttggaagaagccggcattcacgttacctacggcatcgttggcttaaaaacgcacgccaaactcatttatgtaattcggcaagattatgacggtttgcgccgttacgcacacatcggcaccggaaattatcacagcggcaccgccagacaatacagcgattttggtttattgacggcagatcccgctatcggcgccgatttaaccgaattatttaattatttaacaacgggttacacgccaagccgtttttatcaaaaattattgccggcgcccaaacatatgaaatcgggattgctcgatcgcattcaccgcgaaataaaacacgcaaaagccggtaaaaaatcgcttattattttaaaaaccaatgcgttagaagataaagatattgcttattctttatatcaagcctcgcaagccggcgttaaaatcgaattgctcgtgcgcgacagctgctgcattatcgctggcgttgccggattatctgaaaatattacgattaccagcatcgttggacgctttttagagcacgctcgtgtttactatttttataacggcggcgacgaggagtatttcattggttctgcagatttaatgcaccgcaatttagaaagtcgcgtggaagttatcgtgcccatagaaaatcaaaaaatgcgcgatatgttgcaacatttcctcgaaacgcagcttaacgatcgcgaaaatgcatggaaaatgtgcaacgatggcagttataaacggtgtgtaaatccgcaccggaaaataggttcacaagagcaatttatgcaagaagcaacgcaacgttataaaaacgcttctcgcttaagacaccgtaaaacaaaatcaatcaaataa

SEQ ID NO: 49833 - protein, 722 aa, Dichelobacter nodosus VCS1703A
MTEQLPTSPKNTSTEKAPFIDIDTADPKDIYLNRELTWLAFNERVLFEARRKNVPLLERVKFLAIVNNNLDEFFMKRIGGLKQQVGAGLHHLSLDGRTPQKQIDDCYEKINKIQQDIENTWKQLESALKKENIEIVEFKQLSAEKQQEMRTYFLDNIYSLLTPQAMDPAHPFPFVSNLSLNLLIRMNYPETQKTSTARVKIPVGQGSKRFINVQIPNTLTFITLEDLIINNLDILFPEMEINQIDIFRVTRNAVTEKDEEKADDLLELIEVELRERRFAPIVRMEYKKGIDPKHKGMLASELHLEEDKDTFEVRNLMQMRDLFELTAIDREDLKLKPYHPVDHEGLVGEDNIFHAIRRAGNFLLQMPYESFTSSVERFIRDASRDPKVLGIKMTIYRTSSDSKIIDYLIEASRNGKQVTVVVEVKARFDESANIRWANHLEEAGIHVTYGIVGLKTHAKLIYVIRQDYDGLRRYAHIGTGNYHSGTARQYSDFGLLTADPAIGADLTELFNYLTTGYTPSRFYQKLLPAPKHMKSGLLDRIHREIKHAKAGKKSLIILKTNALEDKDIAYSLYQASQAGVKIELLVRDSCCIIAGVAGLSENITITSIVGRFLEHARVYYFYNGGDEEYFIGSADLMHRNLESRVEVIVPIENQKMRDMLQHFLETQLNDRENAWKMCNDGSYKRCVNPHRKIGSQEQFMQEATQRYKNASRLRHRKTKSIK

SEQ ID NO: 49834 - DNA, 2304 bp, Agrobacterium tumefaciens str. C58
  CDS (1)..(2304): transl_table=11
ttgactgtcacagttccgtcgtcaaactgttatacgggcaagaaggacgatcacgcgatgcagcaggatcacgggacggcaatcggtcaggggacggaacagggcatggacgctatcgcgcaggaagacttcaacaaggtgcagccggtggctgaggtcgagaacctctgggacagcccggcgcgtttcatcaaccgcgaattctcctggctgcagttcaaccgccgtgttctcgaggaaacgctgaacacggatcacccgcttctggaacggctgcgcttcctgtccatctcggccgccaatcttgatgaattcttcatggtccgcgtcgccggtctcgaaggccaggtgcgccagaagatcaccgtcaggacgcccgacggcaagacaccggccgagcagttggaagatattctaaaggaaatcgacaatctgcagatggagcaacaggcctcgcttgccgtcctgcagcaatatctcgccaaggaagaaatcttcatcgtgcggcctgccgcactttccgaagcggaccgtacctggcttggcaccgaattcgaggaacgtattttcccggtgctgacgccgctgtccatcgaccctgcgcacccgtttcccttcattccgaacctaggcttctccatgggcctgcagctcgacagcgtcaacggccgcgagccgatgacggcgctgttgcgtctgcccacggcgctcgatcgcttcgttcgtttgccggatgaaaaaaacgccatccgttacatcacgctggaagatgtggtcggcctgttcattcaccggctttatccgggctataccgttcgaggattcggcacgttccgcatcatcagagacagcgatatcgaggtggaggaagaggcggaagatctggttcgctttttcgaaagcgcgctgaagcgccgccgccgcggttcggtcatccgcatcgagaccgatagcgaaatgccgccgtcgctgcgccagttcgtggtgcatgagcttggcgtgcctgataatcgcgttgctgttctgcccggtttgctcgcgctcaacaccatttcggaaatcgtgcgtgcgccgcgcgacgacctgaaattcgagccttacaacgcccgtttcccggagcgcgtgcgcgaacatgccggcgattgcctcgctgccatccgcgaaaaggacatggtggttcaccacccctatgaaagcttcgacgtggttgtgcagttcctgttgcaggctgcgcgcgatcccgaagtgcttgccattaagcagacgctttaccgcacctccaatgacagcccgatcgttcgtgcgctgattgacgcggcggaagccggcaaatccgtgaccgcgctggtcgagttgaaggcgcgtttcgacgaagaggcgaacatccgctgggcgcgcgatctggagcgcgccggtgtgcaggtcgtgttcggcttcatcgaactcaagacccatgccaagatgtcgatggtggtgcgccgcgaagacggcaaactcagaacctattgccacctcggcaccggtaactatcacccgatcacggcgaagatttataccgacctgtccttcttcacctgcaacccgaagatcgcccatgacatggcgaatatcttcaacttcatcacgggttacggcgaaccggaagagggcatgaagctcgccatttcgccttacacgctgcgcgcccgcatcgtgaagcacatcaacgaagagatcgagcacgccaagcgcggtgcgccggcggcgatctggatgaagatgaattcgctggtcgaccctgaaatcatcgatacgctttaccgtgccagtgcggcgggcgttgagatcgatctggtaatccgcggtatctgctgcctgcgcccgcaggtggcgggactgtcggataacatccgcgtcaaatccatcgtcggccgcttcctggaacacagccgcatcttctgcttcggcaatggtttcggcctgccatccgacaaggctctggtctatatcggctctgccgacatgatgccgcgtaaccttgatcggcgcgtcgaaacgctggtgccgctcaccaatcccaccgtgcatgagcaggttctttcacagattatgctgggcaatctcattgacaaccagcagagctacgagatacttgcggacggaacgtcgaggcgcatcgaggtgcgtaaaggcgaagaaccgttcaacgcgcagcactatttcatgaccaatcccagcctttccggacgtggtgaagccttgaaatccagtgcgcccaaattgattgccgggttgatttcgtcccgcaagaaacaggctgaatga

SEQ ID NO: 49835 - protein, 767 aa, Agrobacterium tumefaciens str. C58
MTVTVPSSNCYTGKKDDHAMQQDHGTAIGQGTEQGMDAIAQEDFNKVQPVAEVENLWDSPARFINREFSWLQFNRRVLEETLNTDHPLLERLRFLSISAANLDEFFMVRVAGLEGQVRQKITVRTPDGKTPAEQLEDILKEIDNLQMEQQASLAVLQQYLAKEEIFIVRPAALSEADRTWLGTEFEERIFPVLTPLSIDPAHPFPFIPNLGFSMGLQLDSVNGREPMTALLRLPTALDRFVRLPDEKNAIRYITLEDVVGLFIHRLYPGYTVRGFGTFRIIRDSDIEVEEEAEDLVRFFESALKRRRRGSVIRIETDSEMPPSLRQFVVHELGVPDNRVAVLPGLLALNTISEIVRAPRDDLKFEPYNARFPERVREHAGDCLAAIREKDMVVHHPYESFDVVVQFLLQAARDPEVLAIKQTLYRTSNDSPIVRALIDAAEAGKSVTALVELKARFDEEANIRWARDLERAGVQVVFGFIELKTHAKMSMVVRREDGKLRTYCHLGTGNYHPITAKIYTDLSFFTCNPKIAHDMANIFNFITGYGEPEEGMKLAISPYTLRARIVKHINEEIEHAKRGAPAAIWMKMNSLVDPEIIDTLYRASAAGVEIDLVIRGICCLRPQVAGLSDNIRVKSIVGRFLEHSRIFCFGNGFGLPSDKALVYIGSADMMPRNLDRRVETLVPLTNPTVHEQVLSQIMLGNLIDNQQSYEILADGTSRRIEVRKGEEPFNAQHYFMTNPSLSGRGEALKSSAPKLIAGLISSRKKQAE

SEQ ID NO: 49836 - DNA, 2211 bp, Sinorhizobium meliloti 1021
  CDS (1)..(2211): transl_table=11
atggacagcgcaacgtctgcaatcacggaacacgaggcatctgccgagcagaagcgtgaggcgccggccgaggcgctggaccttctcaagagccccgagcgcttcgtcaaccgcgagttctcctggcttcagttcaaccgccgggtcctcgaggagacgctgaacacggcgcatccccttctggagcgcgtccgttttctatcgatctccgccgccaatctcgatgaattcttcatggttcgcgtcgcgggtctggagggccaggtccgttccgggctttcgctgcgcagcccggacggcctgacgccggcggaaacgctcgagagcattctgacggaggtcgacaatctgcagatggagcagcaggcatcgcttgccgtcctgcagcaatatctcgccaaggaagatatcctcatcgtccgtccggcttcgctttccgcgcaggatcgcagctggctcgcgaacgaattcgaccaggcgatcttccccgtgctgacgccgctctcgatcgacccggcacatccgttcccgttcattcccaatctcggcttctcgatcggcctgcagctcgtcagcaagaccggtcgcgacccgatgacggcactgctgcgcctgcccgtggcgctcgatcgcttcgttcgcctgccggacgtcaagaacgtcatccgctacatcaccctcgaagacgtcgtcagccagttcatcgaccggcttttccccggctacgaggtgaaggggtcgggcacgttccgcatcattcgagacagcgacatcgaagtcgaggaggaagccgaagacctcgtgcgccttttcgagacggccctcaagcgccgccgccgcgggtcggtgatccgcatcgagaccgattccgaaatgccggcttcgctgcgtcagttcgtcgtgcaggaactcggcgttcccgaaaatcgcgtcgcggtactgcctggcctgctggcgctgaatacgctttcggaaatcaccaaggcgccgcgcgaggatctgcgcttcgagccctacaacccgcgcttcccggaacgcgtacgcgaacacgcgggcgactgtcttgcggccatccgcgaaaaggacatggtggtccaccacccctacgaatccttcgacgtcgtcgtgcagttcctgctgcaggctgcgcgcgatccggacgtgctggcgatcaagcagacgctctaccgaacctcgaacgacagcccgatcgtgcgcgcgctgatcgatgccgccgaggccggcaagtcggtgaccgcgcttgtcgagctgaaggcgcgcttcgacgaggaggcaaatatccgctgggcgcgcgatctcgagcgcgccggcgtgcaggtggttttcggcttcatcgaattgaagacccacgcaaagatgtcgatggtggtgcgccgtgaggagggcaagctcaggacctattgccatctcggtaccggcaactaccacccggtcacggcgaaaatctacaccgacctgtcgttcttcacctgcaacccggtgatcgcccacgacatggcgaacatcttcaacttcatcaccggctacggcgagccggaagggggcatgaagctcgcggtctcaccgcatacgctgcgtccgcgcatcctcaagcacatcgaggaggagatcgtccatgcgcaagccgggcgtccggcgtcgatctggatgaagatgaactccctggtggatccggaaatcatcgacgcgctctacaaggcaagctgcgcgggcgtcgtgatcgatctcgtcgtgcgcggcatctgctgtctcaggccgcaggtgcccgggctctccgacaacatccgcgtcaaatccatcgtcggccgcttcctggagcattcaagaattttctgcttcggcaacggacatggacttccatcggagaatgcgcttgtctatatcggctcggcggatatgatgccgcgcaatctggataggcgggtggagacgctcgttcctctcatcaaccgcactgtgcacgaacaggttctttcgcagatcatgctgggcaatctcatcgacaaccagcagagctacgagattcttccggacggcacctcgcgccgcatggaagtcggcaaggacgccgagccgttcaacgctcagcattatttcatgaccaatccgagcctttcgggccggggtgaggctctgaaatccagtgcaccgaagctgatcgccggctggaagagcggctggcacaagtaa

SEQ ID NO: 49837 - protein, 736 aa, Sinorhizobium meliloti 1021
MDSATSAITEHEASAEQKREAPAEALDLLKSPERFVNREFSWLQFNRRVLEETLNTAHPLLERVRFLSISAANLDEFFMVRVAGLEGQVRSGLSLRSPDGLTPAETLESILTEVDNLQMEQQASLAVLQQYLAKEDILIVRPASLSAQDRSWLANEFDQAIFPVLTPLSIDPAHPFPFIPNLGFSIGLQLVSKTGRDPMTALLRLPVALDRFVRLPDVKNVIRYITLEDVVSQFIDRLFPGYEVKGSGTFRIIRDSDIEVEEEAEDLVRLFETALKRRRRGSVIRIETDSEMPASLRQFVVQELGVPENRVAVLPGLLALNTLSEITKAPREDLRFEPYNPRFPERVREHAGDCLAAIREKDMVVHHPYESFDVVVQFLLQAARDPDVLAIKQTLYRTSNDSPIVRALIDAAEAGKSVTALVELKARFDEEANIRWARDLERAGVQVVFGFIELKTHAKMSMVVRREEGKLRTYCHLGTGNYHPVTAKIYTDLSFFTCNPVIAHDMANIFNFITGYGEPEGGMKLAVSPHTLRPRILKHIEEEIVHAQAGRPASIWMKMNSLVDPEIIDALYKASCAGVVIDLVVRGICCLRPQVPGLSDNIRVKSIVGRFLEHSRIFCFGNGHGLPSENALVYIGSADMMPRNLDRRVETLVPLINRTVHEQVLSQIMLGNLIDNQQSYEILPDGTSRRMEVGKDAEPFNAQHYFMTNPSLSGRGEALKSSAPKLIAGWKSGWHK

SEQ ID NO: 49838 - DNA, 2370 bp, Caulobacter crescentus CB15
  CDS (1)..(2370): transl_table=11
atgaggggtcgatcaccctatccgcccagaaacccctcatccggcgcttcgcgccaccttctcccacaaggggagagggcgttttcaagctgtcttcaccgcgtcattcaccgcgttcaccatgacggaacaaagttcgcctatatagagtccatgaccgacgccctgccgatcgccgccaacgctcctgtcgccgccaacgccagcgccttgacgctggacgtcgagctgatggcctcgcccgaacggttcttcaatcgcgagctgtcgtggctggccttcaaccagcgggtgctggaggagagctccaatccgcgccatccgctgctggagcggctgcggttcctgtcgatcagcgccaacaacctcgacgaattctacatggtgcgcgtggccggcctcaaaggccaggtgcgcgagggcgtgcgggtgatcagccaggacggcctgatccccagcgagcagctgacccgcatcaacgcctcggccgccgagctgatggccgagcagcagaagatctggcgcctgctgcgcacccagctgtgggacgagggcctgaagctgctggacgccaaggacatcgagggcgacgacaaggtccgggccgaggagatcttccgcaaccagatcttcccggtgatgacgccgctggccatcgatccggcccacccgttcccgttcatcccgaacctgggcttctgcctggcgctgaagctgcggcggatcgccgacgacaagcacctctacgccctggccccgatcccctcgcaggtgcggcggttctgggagctgtcctcggtggtgtcgcgcgggcgcaagcgccagcgcaagatcgtggccctggagagcctgatcatcctctttctggagcacctgttccccggctacgaggtcgaggggctgggcctgttccgcctgatccgcgactcagacctcgagatcgaggaagaggccgaagacctggtgcgcgagttcgaggcgcggttgaagaagcggcgcctgggtcaggtggtgcgggtcaagatccagaccaccatgccggccgacctgcgcgacttcatcgtcgaaggcctgcgcgccgagcccgaggatgtggtgctgctggacggcaagctcggtttggcacagatgtcggaactgatcccgccggaccgtccggacctgaagttcccgcccttcaacgcccgcttccccgagcgcatccgcgaccacggcggcgactgcttcgcggcgatccgcgagaaggacatcctggttcaccacccgttcgagagcttcgatgtggtggtgcagttcctgcgccaggccgcgcgcgatccgaacgtgctggcgatcaagcagaccctgtaccgcacctccaaggacagcccgatcgtggcggccctgatcgaggcggccgacaacggcaagaacgtcacggccctggtggagatcaaggcccgcttcgatgaggagaacaacctcaaatgggcgcgcgacctggagcgggcgggcgtgcacgtggtgttcggcttcgtcgactggaagacccacgccaagctgtcggtggtggtgcgccgcgagggcgaggccctgcgcacctattgccactatggcaccggcaactatcacccgcagacggccagggtttacaccgaccttagcctgttcacctgcgacccggccctggggcgcgacggcggcaagctgttcaacttcatcaccggctacgcccagcccgggcggctggagaagctgtcgttctcgccccagacgctgaagcccgatctcctgcggatgatcgccctggaggccgacgccgcccgcgagggccggccggccgggatctgggccaagatgaacgcggtcgtggatccgcagatcatagacgcgctgtacaaggccagccaggcgggcgtgcagatcgatctggtggtgcgcggcatctgctgcctgcgtccgggcatcaagggtctgtcggagaacatccgggtcaagtcgatcgtcggccggttcctggagcactcgcgcatcgtggccttcgccaacggcgcgcccatgcccagcgcccagacgcggctctatatgagctcggccgactggatgccgcgcaacctcgatcgccgggtcgagagcctggtgccgatcgagaacccgaccgtgcaccagcaggtgctggaccagatcatggtcgccaacctcaatgacgaggcccagagctggaagctgggcagcgagggcgactacgcccgcgacccggcctggaagaccaagggggcgttctcggcccacgactacttcatgaccaatcccagcctgtcgggacgcggtcacggggcccgcgacctgccgcgcgccttcgaccacgtggggcccaagcgcaagcggtga

SEQ ID NO: 49839 - protein, 789 aa, Caulobacter crescentus CB15
MRGRSPYPPRNPSSGASRHLLPQGERAFSSCLHRVIHRVHHDGTKFAYIESMTDALPIAANAPVAANASALTLDVELMASPERFFNRELSWLAFNQRVLEESSNPRHPLLERLRFLSISANNLDEFYMVRVAGLKGQVREGVRVISQDGLIPSEQLTRINASAAELMAEQQKIWRLLRTQLWDEGLKLLDAKDIEGDDKVRAEEIFRNQIFPVMTPLAIDPAHPFPFIPNLGFCLALKLRRIADDKHLYALAPIPSQVRRFWELSSVVSRGRKRQRKIVALESLIILFLEHLFPGYEVEGLGLFRLIRDSDLEIEEEAEDLVREFEARLKKRRLGQVVRVKIQTTMPADLRDFIVEGLRAEPEDVVLLDGKLGLAQMSELIPPDRPDLKFPPFNARFPERIRDHGGDCFAAIREKDILVHHPFESFDVVVQFLRQAARDPNVLAIKQTLYRTSKDSPIVAALIEAADNGKNVTALVEIKARFDEENNLKWARDLERAGVHVVFGFVDWKTHAKLSVVVRREGEALRTYCHYGTGNYHPQTARVYTDLSLFTCDPALGRDGGKLFNFITGYAQPGRLEKLSFSPQTLKPDLLRMIALEADAAREGRPAGIWAKMNAVVDPQIIDALYKASQAGVQIDLVVRGICCLRPGIKGLSENIRVKSIVGRFLEHSRIVAFANGAPMPSAQTRLYMSSADWMPRNLDRRVESLVPIENPTVHQQVLDQIMVANLNDEAQSWKLGSEGDYARDPAWKTKGAFSAHDYFMTNPSLSGRGHGARDLPRAFDHVGPKRKR

SEQ ID NO: 49840 - DNA, 2211 bp, Nostoc sp. PCC 7120
  CDS (1)..(2211): transl_table=11
atgcctaaatcaaaaaaaagctctaattctatcaacttaaacgatcctcaatactatcttaaccgagagttaagctggttagaattcaataaccgagttttacatgaagcttgtgactcgcgcacaccactattagaaagacttaaatttttagcaatttttagttctaacttggatgagtttttcatggtgcgggttgcagcattgaaacaacaggtagaagcaaaggttagccagttaacccccgatgggcggacacctcaacaacagctaaatgatattcggctgaatctcataccccaagttaccaaacaacatcaacattgtgaacaaataattcgcccgttgttagctagtcatggtatccatattttggattatattaacttgactcaaaaacaacgcagttatctagataattactttgaagaccaaattttcccagttctgacacccctagctgttgaccctagccatccatttccctatatttctaatctcagcttgaatttagctgttgtggtgaaaaaccccgacacagaagaagaattttttgccagagtcaaagttcctagcgttcttcctagatttttgccattaccgccagagttagcatttcaggagaacggacaagcagctaactgggtaggtgtaccattagaacaggcgatcgctcataatctagattccctatttccagggatgaatatccaagaatatcaccccttccgcattacccgcgatgctgacctcgccctcgaagaagatgaagctgatgatttattattagcgatagaacaagaactgcgaaaacgccgcatgggtggttctccagtcagaatcgaaattcaatcccaaaccccacaagcaatacgcatcaggttattacaagacctagacttaacagaacaagatgtctacgaggtagagggactgttaggattgcgtgacttaatgtcatttatggctttaccattaccagaactcaaagatccaccacgccaatctgtagtagttccccgtctacaacggttgggagaaccaagcgtagacccaaatgctttagagttggaagatggtaaagatttcttttctgtaattcgagaaaaagatttattcgtacaccatccttaccaatctttttctgctacggttgtacgcttcattacccatgcagcccatgacccgaatgttttagcaattaagatgacactgtaccggacttcgggagattcgcccatcgtcaatgccttgattgcggcggcagaaaatggtaaacaagtgtcagtcttggtagaacttaaagcccgatttgatgaagaaaataatatttattgggctagacgattagaaagagttggagttcacgtcgtctatggtttagtgggtctaaaaactcactgcaaaactgtgatggtagtaaggcgagaaaaagaccggatgcgccgctatgtgcatattggaaccggcaactacaacccaaaaacggcacgactctatacagatataggcttatttacttgtcgtgaagaattaggtgctgacatcaccgatttatttaattttttgacagggtattcacgacaaaagtcttatcgagaattgttggttgcgcctgtaaatatgcgcgatcgctttttggaattaatccgcagggaaatcaccaacgtccagaatggattctctggtcgcatagtagcaaaaatgaattcccttgttgatccccaaattattaccaccttatatgaagcttccagcgcgggagtacaaatcgatttaattattcggggcatttgctgtttgcgtccagggattaaagatatcagtgacaatattcgcattatcagcattatcggccgctttttagaacactcccgtatctattatttccataacaatggacaagaagaaatttttattggtagtgccgattggatgagccgtaacttagatcggcgagtagaagtaattacccccataaaagacccagatattgccaaggatttgcaagaaatcttgggaattttgctggctgataatcgtcaagcttgggatttacaagctgatggtagttacattcaacgccttccaggagaaaattgtccagaaactaactcacagaaaactctcatgaatatggctttacgttcaacgggaatcgctacaaacctgatcgattcaccaaaaagttctgcatataaagacaattaa

SEQ ID NO: 49841 - protein, 736 aa, Nostoc sp. PCC 7120
MPKSKKSSNSINLNDPQYYLNRELSWLEFNNRVLHEACDSRTPLLERLKFLAIFSSNLDEFFMVRVAALKQQVEAKVSQLTPDGRTPQQQLNDIRLNLIPQVTKQHQHCEQIIRPLLASHGIHILDYINLTQKQRSYLDNYFEDQIFPVLTPLAVDPSHPFPYISNLSLNLAVVVKNPDTEEEFFARVKVPSVLPRFLPLPPELAFQENGQAANWVGVPLEQAIAHNLDSLFPGMNIQEYHPFRITRDADLALEEDEADDLLLAIEQELRKRRMGGSPVRIEIQSQTPQAIRIRLLQDLDLTEQDVYEVEGLLGLRDLMSFMALPLPELKDPPRQSVVVPRLQRLGEPSVDPNALELEDGKDFFSVIREKDLFVHHPYQSFSATVVRFITHAAHDPNVLAIKMTLYRTSGDSPIVNALIAAAENGKQVSVLVELKARFDEENNIYWARRLERVGVHVVYGLVGLKTHCKTVMVVRREKDRMRRYVHIGTGNYNPKTARLYTDIGLFTCREELGADITDLFNFLTGYSRQKSYRELLVAPVNMRDRFLELIRREITNVQNGFSGRIVAKMNSLVDPQIITTLYEASSAGVQIDLIIRGICCLRPGIKDISDNIRIISIIGRFLEHSRIYYFHNNGQEEIFIGSADWMSRNLDRRVEVITPIKDPDIAKDLQEILGILLADNRQAWDLQADGSYIQRLPGENCPETNSQKTLMNMALRSTGIATNLIDSPKSSAYKDN

SEQ ID NO: 49842 - DNA, 2214 bp, Ralstonia solanacearum GMI1000
  CDS (1)..(2214): transl_table=11
atgaaaaagtggccggatagtcattcgttggaaaccaccatgtcgacccttccgaccggcgacctgctcaatcgggaagtcggcatcctcgagttcaacgcgcgcgtgctcgcacaggcggccgacccgggcgttccgctgatggagcgcttgaagttcatctgcatcgtgtcgagcaatctggatgagttctttgagatccgcgtcgccgggctgaaggaacagatgcgcgacaacgcctcggccctcacccccgacggcctgtcggtgcagcaggcatttggcgtggtgacggagcgggtacggcagctggtcgcgcaacagtatgccatgctgcaggacgaaatcctgccgctgctcgagaaggaaggcgtgttcttccacatgaccaccaactggaacgaagcccagcgcgcctggtgccgcggcttcttccagcgtgagctggtgcccatcctgacgccgatggcgctggacccggcccaccccttcccgcgcgtgctcaacaagagcctgaacttcatcatcgaactgtcgggcaaggatgccttcgggcgcgaagccgaactggccatcgtgcaggcgccgcgcgccctgccccgcctggtgcagatgccgccggagctgtcggggtatccgtacggcttcgtgctgctgtcgtcgttcatgcagggcttcgtgcacgagctgtttccgcagatcgacgtgcatggctgctaccagttccgcgtcacgcgcaactccgacctgttcgtctccgaagacgaaatcaccgacctgcgcgaagcgctgcaaggcgaactgtcgacccggcacttcggcgatgcggtgcggctggagatcgcgcacgacatctcgcccgcgctggcgcgccggctgcagcaggaattcggcctgtccgaagccgactgctaccgcgtcaaggggccggtgaacctggtgcgcctgctgcaggtgcccgacctggtggaccgcccgatgctgaagtacccgccgcatgcgcccgccgccgtgaaggccgtggccgcgtcgtcgagcatcttcgatgccatccgccagggcgacatcctgatgcaccacccgtacgagagcttcatgcccgtgctggagctgctgcagcaggccgcgcgcgatccggacgtggtcgccatcaagcagaccgtgtaccgcaccggcaacgaatccccggtgatggaggcgctgatcaaggccgcccgcaacggcaaggaagtgacggtggtggtcgagctgctggcgcgcttcgacgaagagaccaacatcaactgggccgaccagctcgaatcggccggcgcccacgtggtgtacggcgtggtcggccacaaatgccacgccaagatgctgctggtggtgcgccgcgaggccgccggcggcaaggccaagaccgtcaagctgcgccgctatgcgcatctcggcaccggcaactaccacccgaagaccgcccggctctataccgacttcggcctgatgacggccgacgaagccatctgcgaagacgtccaccacgtgttccagctgctgaccggcaccggcgcccaggtgaagctgcaccacctgtggcactcgccgttcacgatgcacgccaacctgatcgagcacatccgcgcggaagcgcgcgccgcccgtgccggcaagcgcgcgcgcatcatcggcaagatgaacgcgctgctggagccgaccatcatcgacgagctctacaaggcctcgcgcgcgggcgtcaagatcgacctgatcgtgcgcggcgtgtgcgcgctcagggccggcgtgccggggctgtcggaacacatcagcgtgcgctcgctcgtcgggcgcttcctggagcatcaccgcgtctactacttccatgccggcggcgaggaagtcgtctatctgtccagcgccgactggatggaccgcaacctgttccgccgcgtcgaggtcgccttcccggtgctcgatcgcaagctgaaggcgcgcgtgatccgcgaaagcctgcaggtgcacctgcgcgacaacgcctcggcctgggtgatgcagccgaacggctcgtacgtgcggcgccagaccaagggcaagcacgtgcgcgtgagccagatggatctgctgaaccacttctcgccgcaagccgccgcggccgcggaaacggccgccgccgtcgcagcggccaccgcgaccgagccgccgcgcaagccgcccgcggaaatctccgcgggctga

SEQ ID NO: 49843 - protein, 737 aa, Ralstonia solanacearum GMI1000
MKKWPDSHSLETTMSTLPTGDLLNREVGILEFNARVLAQAADPGVPLMERLKFICIVSSNLDEFFEIRVAGLKEQMRDNASALTPDGLSVQQAFGVVTERVRQLVAQQYAMLQDEILPLLEKEGVFFHMTTNWNEAQRAWCRGFFQRELVPILTPMALDPAHPFPRVLNKSLNFIIELSGKDAFGREAELAIVQAPRALPRLVQMPPELSGYPYGFVLLSSFMQGFVHELFPQIDVHGCYQFRVTRNSDLFVSEDEITDLREALQGELSTRHFGDAVRLEIAHDISPALARRLQQEFGLSEADCYRVKGPVNLVRLLQVPDLVDRPMLKYPPHAPAAVKAVAASSSIFDAIRQGDILMHHPYESFMPVLELLQQAARDPDVVAIKQTVYRTGNESPVMEALIKAARNGKEVTVVVELLARFDEETNINWADQLESAGAHVVYGVVGHKCHAKMLLVVRREAAGGKAKTVKLRRYAHLGTGNYHPKTARLYTDFGLMTADEAICEDVHHVFQLLTGTGAQVKLHHLWHSPFTMHANLIEHIRAEARAARAGKRARIIGKMNALLEPTIIDELYKASRAGVKIDLIVRGVCALRAGVPGLSEHISVRSLVGRFLEHHRVYYFHAGGEEVVYLSSADWMDRNLFRRVEVAFPVLDRKLKARVIRESLQVHLRDNASAWVMQPNGSYVRRQTKGKHVRVSQMDLLNHFSPQAAAAAETAAAVAAATATEPPRKPPAEISAG

SEQ ID NO: 49844 - DNA, 2199 bp, Agrobacterium tumefaciens str. C58
  CDS (1)..(2199): transl_table=11
atggacgctatcgcgcaggaagacttcaacaaggtgcagccggtggctgaggtcgagaacctctgggacagcccggcgcgtttcatcaaccgcgaattctcctggctgcagttcaaccgccgtgttctcgaggaaacgctgaacacggatcacccgcttctggaacggctgcgcttcctgtccatctcggccgccaatcttgatgaattcttcatggtccgcgtcgccggtctcgaaggccaggtgcgccagaagatcaccgtcaggacgcccgacggcaagacaccggccgagcagttggaagatattctaaaggaaatcgacaatctgcagatggagcaacaggcctcgcttgccgtcctgcagcaatatctcgccaaggaagaaatcttcatcgtgcggcctgccgcactttccgaagcggaccgtacctggcttggcaccgaattcgaggaacgtattttcccggtgctgacgccgctgtccatcgaccctgcgcacccgtttcccttcattccgaacctaggcttctccatgggcctgcagctcgacagcgtcaacggccgcgagccgatgacggcgctgttgcgtctgcccacggcgctcgatcgcttcgttcgtttgccggatgaaaaaaacgccatccgttacatcacgctggaagatgtggtcggcctgttcattcaccggctttatccgggctataccgttcgaggattcggcacgttccgcatcatcagagacagcgatatcgaggtggaggaagaggcggaagatctggttcgctttttcgaaagcgcgctgaagcgccgccgccgcggttcggtcatccgcatcgagaccgatagcgaaatgccgccgtcgctgcgccagttcgtggtgcatgagcttggcgtgcctgataatcgcgttgctgttctgcccggtttgctcgcgctcaacaccatttcggaaatcgtgcgtgcgccgcgcgacgacctgaaattcgagccttacaacgcccgtttcccggagcgcgtgcgcgaacatgccggcgattgcctcgctgccatccgcgaaaaggacatggtggttcaccacccctatgaaagcttcgacgtggttgtgcagttcctgttgcaggctgcgcgcgatcccgaagtgcttgccattaagcagacgctttaccgcacctccaatgacagcccgatcgttcgtgcgctgattgacgcggcggaagccggcaaatccgtgaccgcgctggtcgagttgaaggcgcgtttcgacgaagaggcgaacatccgctgggcgcgcgatctggagcgcgccggtgtgcaggtcgtgttcggcttcatcgaactcaagacccatgccaagatgtcgatggtggtgcgccgcgaagacggcaaactcagaacctattgccacctcggcaccggtaactatcacccgatcacggcgaagatttataccgacctgtccttcttcacctgcaacccgaagatcgcccatgacatggcgaatatcttcaacttcatcacgggttacggcgaaccggaagagggcatgaagctcgccatttcgccttacacgctgcgcgcccgcatcgtgaagcacatcaacgaagagatcgagcacgccaagcgcggtgcgccggcggcgatctggatgaagatgaattcgctggtcgaccctgaaatcatcgatacgctttaccgtgccagtgcggcgggcgttgagatcgatctggtaatccgcggtatctgctgcctgcgcccgcaggtggcgggactgtcggataacatccgcgtcaaatccatcgtcggccgcttcctggaacacagccgcatcttctgcttcggcaatggtttcggcctgccatccgacaaggctctggtctatatcggctctgccgacatgatgccgcgtaaccttgatcggcgcgtcgaaacgctggtgccgctcaccaatcccaccgtgcatgagcaggttctttcacagattatgctgggcaatctcattgacaaccagcagagctacgagatacttgcggacggaacgtcgaggcgcatcgaggtgcgtaaaggcgaagaaccgttcaacgcgcagcactatttcatgaccaatcccagcctttccggacgtggtgaagccttgaaatccagtgcgcccaaattgattgccgggttgatttcgtcccgcaagaaacaggctgaatga

SEQ ID NO: 49845 - protein, 732 aa, Agrobacterium tumefaciens str. C58
MDAIAQEDFNKVQPVAEVENLWDSPARFINREFSWLQFNRRVLEETLNTDHPLLERLRFLSISAANLDEFFMVRVAGLEGQVRQKITVRTPDGKTPAEQLEDILKEIDNLQMEQQASLAVLQQYLAKEEIFIVRPAALSEADRTWLGTEFEERIFPVLTPLSIDPAHPFPFIPNLGFSMGLQLDSVNGREPMTALLRLPTALDRFVRLPDEKNAIRYITLEDVVGLFIHRLYPGYTVRGFGTFRIIRDSDIEVEEEAEDLVRFFESALKRRRRGSVIRIETDSEMPPSLRQFVVHELGVPDNRVAVLPGLLALNTISEIVRAPRDDLKFEPYNARFPERVREHAGDCLAAIREKDMVVHHPYESFDVVVQFLLQAARDPEVLAIKQTLYRTSNDSPIVRALIDAAEAGKSVTALVELKARFDEEANIRWARDLERAGVQVVFGFIELKTHAKMSMVVRREDGKLRTYCHLGTGNYHPITAKIYTDLSFFTCNPKIAHDMANIFNFITGYGEPEEGMKLAISPYTLRARIVKHINEEIEHAKRGAPAAIWMKMNSLVDPEIIDTLYRASAAGVEIDLVIRGICCLRPQVAGLSDNIRVKSIVGRFLEHSRIFCFGNGFGLPSDKALVYIGSADMMPRNLDRRVETLVPLTNPTVHEQVLSQIMLGNLIDNQQSYEILADGTSRRIEVRKGEEPFNAQHYFMTNPSLSGRGEALKSSAPKLIAGLISSRKKQAE

SEQ ID NO: 49846 - DNA, 2091 bp, Methanosarcina acetivorans C2A
  CDS (1)..(2091): transl_table=11
ctgagcaacccatgcctttatgcggacagggaatacagctggctccagttcaatgaccgggtactcgaagaagctctggatgaacgtaatcccctgcttgagagagttaaatttctttccatcttcgggagcaatcttgatgagtttttcatggtcagggtctccggagtccagaaacgtattgctgaaggggcaaaagaagaccaggcagatgaactggcccaggaacagctgcaggtaatccgggaagaacttctaaagcagcttcccgtaaacgacagttgctggaacgaaatgctcgaaccggctctgagggaaaggggaattaaagtccttaactactttgagctttccggagaagacagagaaaaactcagggactacttcgaaagaaatatttttccattacttactcccctcggtttcgattcggggcatcctttcccccatatatcaaacctcagtctcaaccttgccgtacttattgatgaccctgactacggggaacgttttgccagggttaagatccctccaatgtttgcaaggcttattgttgtccctgaagaaggtcaggaaaaaataagttccagttttgaagaactgaaatcaggacgttttgtgtggctcgaacagctgattgctgcaaacctcgatttgctgttccccgggcagcgtatcctcggagcctatcctttcaggatcacccgggatgctgacttaggctttgacgaagatggggacaaggacctcctgaccgctgttaagcagagggtggggagaaactacttcgggcctgctgttcggcttgagaccgacgataccatgcctgaaagggtttctgagattctccttaaaaatctggagctgacttctcctcttatgttcaggtcagcggcgcctctgggcctctcaagcctcatgaagcttactcaaattaaccgccctgagcttaaatataagccttttaagccaagaaaacattcccttatggctgataaagaaaacattttttcagccctgaaaaagcaggatatcctgctctatcacccttacgacagttttgaatcggtagtcgatctggtcgaagaagccgctgatgacccggatgtcctggcaattaaaatgactctgtacagggtagacgacaactccaggattatccaggctctcatgaaagccgcggaccggaacaagcaggttgcagtccttgtcgaacttaaagcccgctttgacgaagagaataacattggctgggcaaaggaactcgagcgcaaaggcgttcacgtagcctatggttttccggggcgtaaaacccatgccaagatgtgccttattgtaagagccgaaaaagagggcattaaatattatgtgcatatgggcactggaaactataatgccgtcaccggaagactctatacagacttcggctatcttacaagtgaccccttcataggcaaagatatctctgaccttttcaatgccctcacaggctattcaaggaaggatcattacatcaagctccttgtagcgccccagaacatgaggcatcagatcctcgaacgcatcaggcgcgagattgacatgcaagaaaaattcggaaacggacacctgatcttcaagatgaactcccttgtggactaccagtgcatccgggaactctacagggcttcacgggttggagtaaaggtagatctcattgtcaggggcatctgctgcctcaggcccggaatctacggactgagcgaaaatatcagggtcacctcaatagtcgggcgttttcttgagcattcaagggcatactatttcaggaacggcggaaaagaagagatcttcatgggtagtgcagaccttatgccccgaaatctcgacaatcgggtcgaagtcctctttcccgtttcttcggattacatccctattctgcgcgatgctattctcgggacccacatgaaggataacataaaagctcgccttctcctccccaacggcagaactgaaaggatctacccgcagcctgaagaagaagaactggactcccagctctggatgcttgagaatagaggcgtctgggagcttaaaacggaaaagagctga

SEQ ID NO: 49847 - protein, 696 aa, Methanosarcina acetivorans C2A
MSNPCLYADREYSWLQFNDRVLEEALDERNPLLERVKFLSIFGSNLDEFFMVRVSGVQKRIAEGAKEDQADELAQEQLQVIREELLKQLPVNDSCWNEMLEPALRERGIKVLNYFELSGEDREKLRDYFERNIFPLLTPLGFDSGHPFPHISNLSLNLAVLIDDPDYGERFARVKIPPMFARLIVVPEEGQEKISSSFEELKSGRFVWLEQLIAANLDLLFPGQRILGAYPFRITRDADLGFDEDGDKDLLTAVKQRVGRNYFGPAVRLETDDTMPERVSEILLKNLELTSPLMFRSAAPLGLSSLMKLTQINRPELKYKPFKPRKHSLMADKENIFSALKKQDILLYHPYDSFESVVDLVEEAADDPDVLAIKMTLYRVDDNSRIIQALMKAADRNKQVAVLVELKARFDEENNIGWAKELERKGVHVAYGFPGRKTHAKMCLIVRAEKEGIKYYVHMGTGNYNAVTGRLYTDFGYLTSDPFIGKDISDLFNALTGYSRKDHYIKLLVAPQNMRHQILERIRREIDMQEKFGNGHLIFKMNSLVDYQCIRELYRASRVGVKVDLIVRGICCLRPGIYGLSENIRVTSIVGRFLEHSRAYYFRNGGKEEIFMGSADLMPRNLDNRVEVLFPVSSDYIPILRDAILGTHMKDNIKARLLLPNGRTERIYPQPEEEELDSQLWMLENRGVWELKTEKS

SEQ ID NO: 49848 - DNA, 2325 bp, Streptomyces coelicolor A3(2)
  CDS (1)..(2325): transl_table=11
atgaagccgaccgagccacagccttccgggcccttcgggccctccgacgcgcctgacgcgcgcgcggcgcggaagaatgggttcatgaggcagccgaacactcaggccgaggcccagcacacgcagccctccgtgggttccatcgcggcgcaccgcccgaacaccgtggccgccacggtctccggcctggagccggacatcgacgccgacctcgacgcgtacgaggagtcggaggagtcccaggacggcggcgcccgcctcccgcagggccgcttcctggaccgcgaacgcagctggctcgcgttcaacgaacgcgtgctcgaactcgccgaggacccgagcacccccctcctcgagcgtgccaacttcctcgcgatcttcgccagcaacctggacgagttcttcatggtccgcgtcgccggcctcaagcgccgcatcgcgaccggcgtcgccacccgctccgcctccggcctccagccccgcgaggtgctggagatgatctgggcccgctcccgcgagctgatggcccggcacgccgcctgcttccacgaggacgtcgccccggccctcgccgaggagggcatccacctggtccgctggagcgagctggccgagaaggagcaggcccgcctgttcaccctcttccggcaccggatcttcccggtcctcacccccctcgcggtcgaccccgctcaccccttcccgtacatctcgggcctctccctcaacctcgcggtcgtcgtccgcaaccccgtcaccggccaccgccacttcgcccgcgtcaaggtccccccactgctctcccgcttcctggaggcctccccgggccgctacgtccccgtcgaggacgtcatcgccgcccacctggaggagctgttcccgggcatggaggtcctggagcaccacaccttccgcctcacccgcaacgaggacctggaggtcgaggaggacgacgcggagaacctgctccaggccctggagaaggagctgatgcggcgccgcctgggcccgcccgtccgactggaggtcgaggagtccgtcgaccgcgaggtcctggacctcctcgtacgcgagctgaagatcggcgaggcggaggtctacccgctccccggccccctggacctcaccggcctcttccgcatccacagcatcgaccggcccgagctgaagtacccgaagttcgtcgccggcacccaccgcgacctggccgaggtcgagtccgcgtccgcgccggacatcttcgccgccctgcgcaccaaggacgtcctgctccaccacccgtacgactccttctccacctccgtgcaggcgttcctggagcaggccgccgccgacccggacgtcctcgcgatcaagcagacgctgtaccggacgtccggcgactcccccatagtcgacgcgctcatcgaggcggccgagtccggcaagcaggtcctcgtcctggtggagatcaaggcccgcttcgacgagtccgccaacatcaagtgggcccgcaagctggaggagtccggctgccacgtcgtctacggcctggtgggcctgaagacccactgcaagctctccctggtcgtacggcaggagggcgagaccctgcgccggtacagccacgtcggcaccggcaactaccacccgaagacggcccgcctctacgaggacctgggcctgctcacctcggacccgcaggtcggcgcggacctctccgacctgttcaaccgcctctccggctactcacggcgcgagacctaccgccgcctcctcgtcgcgcccaagtcgctgcgcgacggcctcgtctcccgcatccacaaggagatccagcaccaccgcgccgggcgccccgcccacgtccgcatcaaggtcaactcgatggtcgacgaggccgtggtcgacgcctgctaccgcgcctcccaggccggtgtgccggtcgacgtgtgggtgcgcggcatctgcgcgctgcgcccgggcgtgccgggcctgtcggagaacatccgggtccgctccgtcctcggccgcttcctggagcactcgcgggtcttcgccttcggcaacggcggtgagcccgaggtgtggctcggcagcgccgacatgatgcaccgcaacctcgaccgccggatagaggccctggtccgggtgaccgacccggcccaccgggcggccctgaaccggctcctcgagaacggcatgtccgacggcaccgcctcctggcacctcggcccggacggcgagtggacccggcacgcgaccgacgcggacggccagcccctgcgcaacatccaggagatgctcatagacgcccggaggcgccggcgtggcacagcgacaccttga

SEQ ID NO: 49849 - protein, 774 aa, Streptomyces coelicolor A3(2)
MKPTEPQPSGPFGPSDAPDARAARKNGFMRQPNTQAEAQHTQPSVGSIAAHRPNTVAATVSGLEPDIDADLDAYEESEESQDGGARLPQGRFLDRERSWLAFNERVLELAEDPSTPLLERANFLAIFASNLDEFFMVRVAGLKRRIATGVATRSASGLQPREVLEMIWARSRELMARHAACFHEDVAPALAEEGIHLVRWSELAEKEQARLFTLFRHRIFPVLTPLAVDPAHPFPYISGLSLNLAVVVRNPVTGHRHFARVKVPPLLSRFLEASPGRYVPVEDVIAAHLEELFPGMEVLEHHTFRLTRNEDLEVEEDDAENLLQALEKELMRRRLGPPVRLEVEESVDREVLDLLVRELKIGEAEVYPLPGPLDLTGLFRIHSIDRPELKYPKFVAGTHRDLAEVESASAPDIFAALRTKDVLLHHPYDSFSTSVQAFLEQAAADPDVLAIKQTLYRTSGDSPIVDALIEAAESGKQVLVLVEIKARFDESANIKWARKLEESGCHVVYGLVGLKTHCKLSLVVRQEGETLRRYSHVGTGNYHPKTARLYEDLGLLTSDPQVGADLSDLFNRLSGYSRRETYRRLLVAPKSLRDGLVSRIHKEIQHHRAGRPAHVRIKVNSMVDEAVVDACYRASQAGVPVDVWVRGICALRPGVPGLSENIRVRSVLGRFLEHSRVFAFGNGGEPEVWLGSADMMHRNLDRRIEALVRVTDPAHRAALNRLLENGMSDGTASWHLGPDGEWTRHATDADGQPLRNIQEMLIDARRRRRGTATP

SEQ ID NO: 49850 - DNA, 2103 bp, Xanthomonas campestris pv. campestris str. ATCC 33913
  CDS (1)..(2103): transl_table=11
atgggccacgccaagcactctaaagaccccgcaccttccgaggacatcggcagcgatccgctgcgcgacccggcgctgtatctcaaccgggaactgtcgcagctggatttcaatttccgcgtgctggcgcaggcgctggacgaacaggttccgctattggagcggctgcggttcctgtgcatttcctgcaccaacctagacgagttcttcgagatccgcgcagccaccgtgcggcatgcgcaagagttcggcctgccgcccgcacccgatggcatgagccccaccgccatcctcaacgcggtgcacgaccgcgccgccaagctggtggatcagcagtaccacgtgtggaacgacgtgctgcgcccggcgatggaacaggccggcgtagcggtgctgagccgcaccacctggaattcgcgccagaaacgctggctgcgcgcctacttccgcaacgagatcatgccggtgctgtcgccgctgggcctggacccggcacatccgttcccgaagatcctcaacaagaccttgaacatcgtggtggtgctcgaaggccaggacgcgttcgggcgcgccggccatctggcgatcgtgcgcgcgccgcgctcgctgccgcgcatcatccagctgccggccagcctgtcgccggacggcgagcagagcttcgtgttcctgtcctcggtgctgtcggagttcgtggatgaactgttccccggcatgcaggtcaagggctcctaccaattccgcgtcacccgcaattccgagctggtggtagacgaagaagaagtggaaaacctggcgctggcgttgcgcgacgaactggtcacgcgcggctaccggccggcggtgcgactggagattgcgcacgattgcccgccggcgatcatgcgcaccctgctgcagaatttcggcctcaacgaaaacgcggtgtatcgcattgccggtccagtgaacctgagccgcgtgacccaggtctacgacctggtgcaacggcccgagctcaagtacccggcgttcaatccgcgcaccctgcgcgacaacgtgggcatcttcgagatcgtcaacaagggcgatgtgctgctgcatcaccccttcgatgcgttcactgcggtgctggacgtgatccgccaggcggcggtcgacccgaacgtgctggcgatcaagcagacgctgtaccgcaccggcaaggattcgctgattgtcgatgcgttgatcctggccgcgcgcaacggcaaggacgtcaccgtggtagtggagctgcgtgcgcgcttcgacgaagaagccaatctgggcctggccgacaagttgcaggaagccggcgtgcaggtggtctacggcgtggtcggttacaagacccacgccaagatgttgctgatcgtgcgccgcgaaggacgcaagctcaaacgctacgtgcacctgggcaccggcaactaccacagcggcacagcgcgcctgtacaccgacctgagcctgatcaccgccgatgtggagatcggcaacgatgtgcacatgctgtttcagcagctctccggcctggcgccgcgcatgaagctggaacagctgctgcaatcgcccttcaccctgcataccggcgtgctgcagcggatcgaacgcgagacgcggctagcgcgcaacggccggcccgggcgcatcatcgccaagatgaacgcactcaacgaaccgcaggtggtgcgcgcgttgtataccgcctcgcaggcgggcgtgcagatcgacctgatcgtgcgtggggcctgcaccttgcgcccgggcgtgccgggcgtgtcggacaacatccgcgtgcgctcgatcgtggggcgttttctggaacatagccgcgtgtactggttcggcaacgacggcgcagcggagttgtattgcgccagcgccgactggctggagcgcaatctgctgcgccgggtggagacctgcttcccgatcctggatccggacctggccaagcgcgtctaccgcgaagtgctgcagaactacctggacgacaacgtcaacgcgtgggaactggatgccgaaggcatctatcacaagcgcacgcccgggcctggcgagccggcgcattcggcccagatgaccttgctcgatcgggtctga

SEQ ID NO: 49851 - protein, 700 aa, Xanthomonas campestris pv. campestris str. ATCC 33913
MGHAKHSKDPAPSEDIGSDPLRDPALYLNRELSQLDFNFRVLAQALDEQVPLLERLRFLCISCTNLDEFFEIRAATVRHAQEFGLPPAPDGMSPTAILNAVHDRAAKLVDQQYHVWNDVLRPAMEQAGVAVLSRTTWNSRQKRWLRAYFRNEIMPVLSPLGLDPAHPFPKILNKTLNIVVVLEGQDAFGRAGHLAIVRAPRSLPRIIQLPASLSPDGEQSFVFLSSVLSEFVDELFPGMQVKGSYQFRVTRNSELVVDEEEVENLALALRDELVTRGYRPAVRLEIAHDCPPAIMRTLLQNFGLNENAVYRIAGPVNLSRVTQVYDLVQRPELKYPAFNPRTLRDNVGIFEIVNKGDVLLHHPFDAFTAVLDVIRQAAVDPNVLAIKQTLYRTGKDSLIVDALILAARNGKDVTVVVELRARFDEEANLGLADKLQEAGVQVVYGVVGYKTHAKMLLIVRREGRKLKRYVHLGTGNYHSGTARLYTDLSLITADVEIGNDVHMLFQQLSGLAPRMKLEQLLQSPFTLHTGVLQRIERETRLARNGRPGRIIAKMNALNEPQVVRALYTASQAGVQIDLIVRGACTLRPGVPGVSDNIRVRSIVGRFLEHSRVYWFGNDGAAELYCASADWLERNLLRRVETCFPILDPDLAKRVYREVLQNYLDDNVNAWELDAEGIYHKRTPGPGEPAHSAQMTLLDRV

SEQ ID NO: 49852 - DNA, 2151 bp, Yersinia pestis KIM
  CDS (1)..(2151): transl_table=11
atgatatctgttggacttttttgtcaatttttcgcaataatgtttacggacactaaatactcccacaataatcttaatggagttgcaatgggtcaggaaaagctctataccgaaaaagaactcagttggttatcttttaatgagcgggtattgcaggaagcggcggataagagcaacccgcttattgagcggatgcgatttcttggcatttactccaataatctggatgagttttataaagttcgttttgccgatctgaaacggcgcattcttattaacgaagagcaaggctctgctgtgacgtcccgccatttgctgaaaaaaattcagagcaaagtggtgaaagccgatcaagagtttgatgggctgtataatgacctgttactggaaatggcccgtaatcaaatctttttggttaatgagcggcaaatttccgagaatcagcaaacgtggctgaagcaatactttaaacagcatctgcgtcaacacattacaccgatcctgattaaccatgacaccaatctggttcagtttttaaaagatgattatacctatctggcggtagaaattattcgtgggcaggatattgcctatgccctgctggaaattccatcagataaaataccgcgctttgtcaatttaccgcctgaagcgcctcgccgtcgcaagccaatgatattacttgataatatattgcgcttctgtctggatgaaatatttaaaggcttctttgattatgatgcgctgaatgcatattcaatgaaaatgacgcgggatgccgaatatgatttggtgaccgagatggaatcaagcctcttggaattgatgtcatctagtttgaaacagcgtctgacagccgaacccgtgcgttttgtttaccagcgggatatgcccgatgaaatggtagaactcctgcgcaataaattgggtatatctaacgatgattccgtgatcgccggtggccgttaccataatttcaaagactttatcaacttccccaatgtaggcaaaagtaatctggttaaccggccaatgccacgcctgcgccatgtctggtttgataaattccgcaacggttttgatgccatccgcgaacaggatgtgctgctgtactacccgtatcatacctttgagcatgtgctggagttattacggcaagcctcattcgatccaagcgttctggcgattaaaatcaatatttatcgggtcgccaaagattcacgcattatcgactcgatgatccatgccgctcataacggcaaaaaggtaacggtggtcgtggagttgcaggctcgctttgatgaagaggccaatattcattgggctaaaagtctgacggcggctggggtacacgttattttctctgcgccagggctgaaaattcatgccaaactgttcctgatttctcgccttgaaaatgacgaaatcgtgcgttatgcccatattggcaccggtaactttaacgagaagaccgccagaatttataccgactattcgttgctgacggcagatgccaggattaccaacgaagtgcgccgggtatttaactttattgaaaatccctatcgcccggttacgttcgataatctgatggtttcgccacagaattcgcgcttaatattatatcagttgattgatcaggaaattatccacgcacaggccggtgaaagcgcaggaattactctaaaaataaataatttagtggataaaggcctggtagataggttatatagcgcctccagtgctggcgtcaaaatacgtctattggtacgcggtatgtgttcattaatcccgaatatgccgggtatcagcgataatattcaggtcaccagtattgttgatcgctttttagagcatgaccgtgtgtacgtctttgagaataaaggcgataaactggtttatctctcctctgcggactggatgacccgtaatattgactaccgaattgaagtggctgtttcgctgttggatccaaaattgaagcagcgggtgctggatatcttagagatattattcaacgacaccgtcaaagcccgttatattgataaagagctgagtaatcgttatgtaccgcgtggaaaccggcgcaaagtacgtgcacagattgctatctatgattatttaaaagcactggaacaaccggagcagtag

SEQ ID NO: 49853 - protein, 716 aa, Yersinia pestis KIM
MISVGLFCQFFAIMFTDTKYSHNNLNGVAMGQEKLYTEKELSWLSFNERVLQEAADKSNPLIERMRFLGIYSNNLDEFYKVRFADLKRRILINEEQGSAVTSRHLLKKIQSKVVKADQEFDGLYNDLLLEMARNQIFLVNERQISENQQTWLKQYFKQHLRQHITPILINHDTNLVQFLKDDYTYLAVEIIRGQDIAYALLEIPSDKIPRFVNLPPEAPRRRKPMILLDNILRFCLDEIFKGFFDYDALNAYSMKMTRDAEYDLVTEMESSLLELMSSSLKQRLTAEPVRFVYQRDMPDEMVELLRNKLGISNDDSVIAGGRYHNFKDFINFPNVGKSNLVNRPMPRLRHVWFDKFRNGFDAIREQDVLLYYPYHTFEHVLELLRQASFDPSVLAIKINIYRVAKDSRIIDSMIHAAHNGKKVTVVVELQARFDEEANIHWAKSLTAAGVHVIFSAPGLKIHAKLFLISRLENDEIVRYAHIGTGNFNEKTARIYTDYSLLTADARITNEVRRVFNFIENPYRPVTFDNLMVSPQNSRLILYQLIDQEIIHAQAGESAGITLKINNLVDKGLVDRLYSASSAGVKIRLLVRGMCSLIPNMPGISDNIQVTSIVDRFLEHDRVYVFENKGDKLVYLSSADWMTRNIDYRIEVAVSLLDPKLKQRVLDILEILFNDTVKARYIDKELSNRYVPRGNRRKVRAQIAIYDYLKALEQPEQ

SEQ ID NO: 49854 - DNA, 2238 bp, Thermosynechococcus elongatus BP-1
  CDS (1)..(2238): transl_table=11
gtggaagctagtgtgaccaataaacaagaacagacggccatgccctctgcgaagtcccctcgccgtaaagcacccgaacctattgatctggataatccgcaatactacttcaatcgctctttaagctggctggaatttaataagcgggtactccacgaagcctatgacccccgcacaccgctactagagcggctcaaatttatggccattttcagttccaacttggatgaatttttcatggtgcgtgtggctggtttgaagcagcaagtggaaagtggcattctccaagtaggagccgatggtatgcctccagcggagcaattacaggcagtgcggcaatatctcttaccgattgttacggagcaacaccgctatttcgatcaagaactgcgtgccctcttggccaaggagtctatttttctcactcgctttaatgagttgacccccgagcagcaggcctacctcaacgactacttccaggcccaagtgttccctgtgcttacccctttagccgttgatccggcgcaccctttcccctatatttctagtctcagccttaaccttgctgtgctgattcgtgatccagaatctggccaagagcgactggcacgggtgaaggtaccgaatcagtttccacgctttgttgcccttccccagcacttgcactcgccccaaggtgttcattggctgggcgttcccctcgaagaaattattgcccacaacctcagtgccctctttccggggatggagattgaggcctactttgcctttcgcattacccgcagtgccgacctcgaactagaaacggacaaggccgatgatttactgattgccattgaacaggaaattcgtaaacggcgctttggctctgtagtgcggctggaggtgcagcggggcattccaccgcttctgaggcaaaccctaatggaagagatggatctcgaggagatcgatgtctatgaactcgagggtctgttgtgcttgaatgatttatttgcctttatgggattgcccttgccccagttcaaggatcccgagtggcaaccccaagttccccccagtttccaacgggtagaggaacgggagtccatgtttgacaccagcagtgaaattaccacccttggcaccgactattgggaagctgttgccaacgaactctttagtctcattcgcgaaggggatattatcgttcatcacccctaccattcctttgcggcaacggtacagcgctttattactttggcggcccatgatccccaggtgctggccattaagataaccctctatcgcacttctggtgactcgccgattgtcagtgccctgattaaagctgccgagaatggcaaacaggtggcggttttggtggaactgaaggcgcgctttgatgaggaaaataatatcctctgggcacggaagctggagaaagtgggtgtccatgtggtctatggcgtaccgggtctgaagacccacaccaaaacagttctggtggtgcgccaagaggcggggcaaattcgccgctatgtccacattggcactggcaattacaatcccaaaactgctagcctctatgaggatttggggctattttcctgccgtgaggaattgggagcagatctctcggaactctttaatgtgctcacgggctatgcccgccagcgggattatcgcaagcttcttgttgccccagtcacgatgcgcgatcgcacccttcagttgatttaccgcgagattgaacacgcccgcaatggtcagccggcgcggattattgccaagatgaatgcgattacagacacgcaggtgattcgcgccctctatgaggcgtcccaagcaggggtggacattgatttgattattcgcggtatgtgctgtctacgccccggcgtaccgggcgtgagcgatcgcattcgggtgattagtatcattggccgctttttagagcactcccggattttctactttggcaacaatggggacccagagtattacatcggcagtgccgactggcgatcgcgcaacctagaccgccgcgttgaagccattacccccattgaagatccagcgattcaactggaactcaaagaacgactggaaattatgttggcagacaatcgccaagcctgggaactgcaacccgatggcacctaccgccaacggcagccagcacctggagaagccgagcgcggtacccacagtgttttaatggctcgcaccctcaaggacgttcaagggagtcactag

SEQ ID NO: 49855 - protein, 745 aa, Thermosynechococcus elongatus BP-1
MEASVTNKQEQTAMPSAKSPRRKAPEPIDLDNPQYYFNRSLSWLEFNKRVLHEAYDPRTPLLERLKFMAIFSSNLDEFFMVRVAGLKQQVESGILQVGADGMPPAEQLQAVRQYLLPIVTEQHRYFDQELRALLAKESIFLTRFNELTPEQQAYLNDYFQAQVFPVLTPLAVDPAHPFPYISSLSLNLAVLIRDPESGQERLARVKVPNQFPRFVALPQHLHSPQGVHWLGVPLEEIIAHNLSALFPGMEIEAYFAFRITRSADLELETDKADDLLIAIEQEIRKRRFGSVVRLEVQRGIPPLLRQTLMEEMDLEEIDVYELEGLLCLNDLFAFMGLPLPQFKDPEWQPQVPPSFQRVEERESMFDTSSEITTLGTDYWEAVANELFSLIREGDIIVHHPYHSFAATVQRFITLAAHDPQVLAIKITLYRTSGDSPIVSALIKAAENGKQVAVLVELKARFDEENNILWARKLEKVGVHVVYGVPGLKTHTKTVLVVRQEAGQIRRYVHIGTGNYNPKTASLYEDLGLFSCREELGADLSELFNVLTGYARQRDYRKLLVAPVTMRDRTLQLIYREIEHARNGQPARIIAKMNAITDTQVIRALYEASQAGVDIDLIIRGMCCLRPGVPGVSDRIRVISIIGRFLEHSRIFYFGNNGDPEYYIGSADWRSRNLDRRVEAITPIEDPAIQLELKERLEIMLADNRQAWELQPDGTYRQRQPAPGEAERGTHSVLMARTLKDVQGSH

SEQ ID NO: 49856 - DNA, 2238 bp, Bifidobacterium longum NCC2705
  CDS (1)..(2238): transl_table=11
atggcacagatatttgacgcaccctcgaaggcaattctgcgcagccaaatcgcagagcatattgccgaaaacgacaacaacgaccgccgcgtcgatcaggaaggcgaggcaccgctgcccaaggaccgtttcttcgaccgcgagctcagctggctcaagttcaaccagcgcgtgctcgaatgtgcggagaacgaagacatgcccctgctcgagcgcgccaacttcgccgcgatcttcgcctcgaaccttgacgagttcttcatggtccgcgtcgccggcctgaagcgccgtatcgactcgggcatcgccgtgccgtctgccgccggcctgagcccgcgtcagcagctgcgcgcgatcagcgagaccgcacaccgtctgcaagacgagcacgcacattacacgatcgacaccattctgccggaattggagaaggagcgcatcgtcctgctgacgtgggacaagctcacatcctccgagcaggagcgcctctcgcgctactaccgccagcaggtgttcccggtcctgacgccgctcgccgtggatccggcccacccgttcccctacatttccggcggttccatcaacctggccgtgattgtggagaacccggcctccggcaagtcgcacttcgcccgcgtcaagatcccgggcaacctgccgcgcctggtgccggtggacgacatgaccgatgaggagtccaaggacgagcgttacggcttcatcgccatggaaaagctcatcgccgcgcatctggaatccctgttcccgggcatgatcatcaaggaggcccgctccttccgcgtgactcgtaacgaggacatcgacgtggaagaggatgacgccgagaacctgctcaacgccatggagaaggagctgctgcgccgccgcttcggaccgccgatccgcctggagatcacggacaccacgagccccttcctctcccagctgctcgccgaccagctcggcgtgagccaggacgaggtataccgtctgcccagcccgctggacctgaccgtgctctttgagctcggcagcgtggaccgcccggacctgaagaaccgtccgttcgtgccgaccacgaaccgtcagatcgccgaggtcgagtcctcccgcgcacaggatattttcgctgccatccgcgagcgcgacatcctgctgcatcacccctatgactccttctccacttccgtgcaggccttccttgcgcaggccgccgcggacccgaaggtgctggccatcaagcagaccctgtaccgcaccagctccaactcgccgatcatcgacgccctgatcgacgccgctcatgccggcaagcaggtgctggctttggtggaaatcaaggctcgtttcgacgaggacgccaacatcgcgtgggcccgcaagctcgaacgcgccggcgtgcacgtggtgtacggcatcgtgggcttgaagacccactgcaagctcatcgaggtcgtgcgtcaggaagcggacggtctgcgccgctactgccacgtaggcaccggcaactacaacccgaagaccgcgcgactgtacaccgatctgggtctgctgacctgcgacccggtggtcggccaggatctgactcgtctgttcaaccagctctctggttacgcgccgaagtccagcttccaccgtctgctggtggccccgcgtaccgtgcgcaccggcctgattcagcgcatccgccgcgaggaggacgccgcccgcgccggcaaggaggcctggatcaagatcaaggtcaactccatcgtggacgagaagaccatcgacgccttgtaccgtgcctctcaggccggcgtgaagatcgacatcgtcgaacgcggcatctgcgctctgaagcccggcgttcccggcctgtccgagaacatccgcgtgcgttcgattctcggccgcttcctggagcactcccgcatctacgccttctgcaacgcggacggcccgcagatcggcgagggtccggcttccggcccggaggtctacatcggttcggctgacctcatgcaccgtaaccttgaccgccgtgtggaggctctggtgcgtgtcaccgccccggagcaggtcgacgggctcatcaagtacgtggacctgcagatggccgactccaccatgagctggcacatgcagcccgacggcacgtatgtgctgcacaccaaggacgacgagggccgcccgctggtcgacagtcaggaatatctgattcgcaagcaccagcgccgccccaattcgcacaactga

SEQ ID NO: 49857 - protein, 745 aa, Bifidobacterium longum NCC2705
MAQIFDAPSKAILRSQIAEHIAENDNNDRRVDQEGEAPLPKDRFFDRELSWLKFNQRVLECAENEDMPLLERANFAAIFASNLDEFFMVRVAGLKRRIDSGIAVPSAAGLSPRQQLRAISETAHRLQDEHAHYTIDTILPELEKERIVLLTWDKLTSSEQERLSRYYRQQVFPVLTPLAVDPAHPFPYISGGSINLAVIVENPASGKSHFARVKIPGNLPRLVPVDDMTDEESKDERYGFIAMEKLIAAHLESLFPGMIIKEARSFRVTRNEDIDVEEDDAENLLNAMEKELLRRRFGPPIRLEITDTTSPFLSQLLADQLGVSQDEVYRLPSPLDLTVLFELGSVDRPDLKNRPFVPTTNRQIAEVESSRAQDIFAAIRERDILLHHPYDSFSTSVQAFLAQAAADPKVLAIKQTLYRTSSNSPIIDALIDAAHAGKQVLALVEIKARFDEDANIAWARKLERAGVHVVYGIVGLKTHCKLIEVVRQEADGLRRYCHVGTGNYNPKTARLYTDLGLLTCDPVVGQDLTRLFNQLSGYAPKSSFHRLLVAPRTVRTGLIQRIRREEDAARAGKEAWIKIKVNSIVDEKTIDALYRASQAGVKIDIVERGICALKPGVPGLSENIRVRSILGRFLEHSRIYAFCNADGPQIGEGPASGPEVYIGSADLMHRNLDRRVEALVRVTAPEQVDGLIKYVDLQMADSTMSWHMQPDGTYVLHTKDDEGRPLVDSQEYLIRKHQRRPNSHN

SEQ ID NO: 49858 - DNA, 2241 bp, Brucella suis 1330
  CDS (1)..(2241): transl_table=11
atgacagtcgaactgccccccagttccccttattccggctttgcttcgggcgatctggcgcagacggacattcacgaagctttgaacggcgggttgatgcaaagtgccgaccgcttcgtcaatcgagagttttcctggcttcagttcaatcgccgcgttcttgaggaggcggcgaatatccgccagccgctgctggagcgcttacgcttcctttccatctcggcggccaatctcgatgagttcttcatggtgcgcattgccggtctggccggtcaggttcgcgcaggcatagccttgcgcagccccgacgggcgcacaccgcaggagcagcttgatttcgttctggaagaggtggggcgccttcaggcggagcagcagcaatgtctgcgcacgttgcgcaaggagctggaaaaggaaaatatcgagatcgttcgcccgcccgccttgtcgaaacacgaaaaggaatggctggaaaaccattttctggaaacgatcttccctgtcctgacgccgctttccatcgacccggcgcatccgtttccgttcattcccaatctgggcttttccatcgccttgcagcttgcgcggcgtgccgataatcatccgatgacggcgcttctgcgcattccggtcgcgttgaaacgcttcatccagctaccgaccgaccagaacaacatctatcgctttattactatcgaggatgcggtaagcctctttatcgggcggctattccccggttatgaggtgcgcggcgccggtacgttccgcatcatccgcgacagcgatattgaagtggaggaagaggcggaagacctcgttcgcctgttcgagacggccttgaaacgccgacgccgcggtcaggtgatccgcatcgaatttgacggtgaaataccggaggcgctgcgcatcttcgtggcgatggagcttggtgtttccgaaaatcgcatcagcgtgcatgaaggccttctggcgctgaacatgatttcagaggtcgtttccatcccgcgcgaggaccttaaattcgtctcctacaatccgcgtttcccggaacgtatccgcgaacatggcggcgattgcctggcggcgattcgcgaaaaggacatcgtggtccatcacccctatgaatccttcgatgtcgtggtgcagtttctgcgtcaggcggcagccgaccccgatgtgctggctatcaagcagacgctttaccgcacctccaacgatagcccgatcgtccgcgcgctggtggatgccgccgaggcgggcaagtcggtgacggctctggtggaattgaaggcccgcttcgatgaggaggcgaatattcgttgggcgcgcgatctggagcgtgcgggcgtgcaggtggtattcggcttcatcgaattgaaaacacatgcgaaaatgtcgctcgtggtgcgccgcgaagaccagaagctgcgctcctatgtgcatctgggaaccggcaattatcatcccatcacagcgcgtatttataccgatctttccttcttcacctcggatgctgaaattgcgcgtgacgtggcgcatatcttcaatttcattaccggctatgcgcagccggccgaggaaatgaagattgcgatttctcctttcacactgcgcgcgcgcatcttgaaacacattgaggatgaggttgcccatgcgaaggcgggaaagcctgcggcaatctggatgaagatgaactcgctcgtcgatccacagataatcgatgcgctctatatggcgagccaggcgggcgtgcagatcgatctggtcgtgcgcggcatctgctgcctgcgtccgggggttccggggctttcagataatatccgcgccaagtcgattgtcgggcgttttctggagcacagccgcatattctgtttcggaaacggccacgacctgccgtccggcaaggcaattgtctatattggttccgccgatatgatgccgcgtaatctcgaccgtcgcgtggagaccctcgttccgatcacaaatgccacagtgcatcagcaaatcctgtcgcaaatcatgtttgccaacataattgataaccaacagagctatcagctacttgcggacggcacctctcgccggatagaaaaggaagcaggagaagaagctttcaacgcgcaggaatatttcatgaccaatcccagcctgtcgggtcgcggaaagtcgctgaagtcttcggccccccgccttatcgcgcatcgcaagcgcgcgcaggcggagagaaaaacgactgcatga

SEQ ID NO: 49859 - protein, 746 aa, Brucella suis 1330
MTVELPPSSPYSGFASGDLAQTDIHEALNGGLMQSADRFVNREFSWLQFNRRVLEEAANIRQPLLERLRFLSISAANLDEFFMVRIAGLAGQVRAGIALRSPDGRTPQEQLDFVLEEVGRLQAEQQQCLRTLRKELEKENIEIVRPPALSKHEKEWLENHFLETIFPVLTPLSIDPAHPFPFIPNLGFSIALQLARRADNHPMTALLRIPVALKRFIQLPTDQNNIYRFITIEDAVSLFIGRLFPGYEVRGAGTFRIIRDSDIEVEEEAEDLVRLFETALKRRRRGQVIRIEFDGEIPEALRIFVAMELGVSENRISVHEGLLALNMISEVVSIPREDLKFVSYNPRFPERIREHGGDCLAAIREKDIVVHHPYESFDVVVQFLRQAAADPDVLAIKQTLYRTSNDSPIVRALVDAAEAGKSVTALVELKARFDEEANIRWARDLERAGVQVVFGFIELKTHAKMSLVVRREDQKLRSYVHLGTGNYHPITARIYTDLSFFTSDAEIARDVAHIFNFITGYAQPAEEMKIAISPFTLRARILKHIEDEVAHAKAGKPAAIWMKMNSLVDPQIIDALYMASQAGVQIDLVVRGICCLRPGVPGLSDNIRAKSIVGRFLEHSRIFCFGNGHDLPSGKAIVYIGSADMMPRNLDRRVETLVPITNATVHQQILSQIMFANIIDNQQSYQLLADGTSRRIEKEAGEEAFNAQEYFMTNPSLSGRGKSLKSSAPRLIAHRKRAQAERKTTA

SEQ ID NO: 49860 - DNA, 2139 bp, Leptospira interrogans serovar Lai str. 56601
  CDS (1)..(2139): transl_table=11
atgtcaaaatccaaagtacaaggccaaactccggcaataacaaatcaaaacgaatcttccaacggaagccaaccggaaattcatttaaacaatccaaatatattttttgaccgggaactttcttggatcgatttcaatcggcgagtattggaagaagctaatgatcccgaaaatccacttttggaaagactgaaattcttaagtataaccgaaaccaatttagacgaattttatatggttcgagtcgccggacttcgtaacctagtaaaagaaggaaacgacgaaagaagtttaaacggagacagcgcgtccgaaattttatccgacttatcagataaagtcagagtttttgtaagggaagaatatgaaacctttgccagaacattagaagaattgaaagtagccggaattcatttgatactcaatccagaagaactaacaatagaagaaattaaacagattcaaaactattatcaggaagacgtatctccaattcttactcctcttgcaatcgacacggctcatcctttcccacatatacttaacaaatccttaaaccttgcgatggtattaagtacagacgatgaaaaaaccggaggaaaaaaagatttgttcgctgtcgtacaagtgccttctgtacttccaagatttttgcaactcaaaggaaaaggagaagaaagaagattttttccattggaagaaatcatcaaactgcacgtagacgatcttttttacggaatgaccgtaagagaaatttatccgtttagaatcataagagacgcagacatatccatcgacgaggaaaaatccgtcaaagacctactcattacgatgaaagacgaacttagaaaccgaatctggggagatgcggttcggatggatatacaccaaggcacatcaccttttattaaaaacaccttgagagaacttttagaattacaagataacgaagtattcgacgttgcctctattttgaatataaacgacgcaatgtttttttacggattggatcacacttctaaactcaaatatccttttttccaacaaaagaccactcttaagttcgaaactccagaaaaaattttcgaggcgatcaaaaagaaagacagactacttcatcatccatatcaatctttttctgccattgaagatctgttacgaatttcttccgaagatcctaaagttttaggaatcaagatgacactttatcgtacaagcggagattctcctatcatacaatatttaggagaagcggcggagaacggaaaacaagtaaccgttcttgtagaactcaaagctcgttttgacgaagaaagaaatatcaagtgggctcaaaaacttgaagcgagaggagttcacgtagtttacggagtagttggactaaaaattcattgtaaaatgcttatgatcgttagaaaggaagatgatcatctagtgcgttatgtgcatcttggaaccggtaattataattccaccacttccaaatactataccgatctcagtttttttacggtaaataaacagatcacggaagacgtagctacaatctttaacacgatcactagttacgctaagatgccaactttaaaccttttatccgcttctccgcataatctaaaatccaccttcatttctttgatcgataaagaaaaagaaaacgcactttcgggaaaaccggcaaggatcatttttaaaatgaattcccttgtggacccacatattatactttccttatacaaggcaagccaagccggagtaaaagtagacctgatcatccggggaatctgttgtctcaaaccgggactaaaagggatttctgaaaacattaccgtgttatcaatcgtcggaagatttttggaacatactagaatctattactttcattcgggaggtttcgaatctgtttttcttgcgtctgcggattgtatgcctagaaattttgaaagaagaatagaagttctttttccaattatagaaagtaaaaataaagaacgaatcaaaaagatcttagatgtacaattacgagacaacgtaaaagctcggtttttgcgcccagacggacattacgtaaagaaaatattagaaaaagatgaaaaacccgtagattctcaaatcgaaagaatgacatttgcggaataa

SEQ ID NO: 49861 - protein, 712 aa, Leptospira interrogans serovar Lai str. 56601
MSKSKVQGQTPAITNQNESSNGSQPEIHLNNPNIFFDRELSWIDFNRRVLEEANDPENPLLERLKFLSITETNLDEFYMVRVAGLRNLVKEGNDERSLNGDSASEILSDLSDKVRVFVREEYETFARTLEELKVAGIHLILNPEELTIEEIKQIQNYYQEDVSPILTPLAIDTAHPFPHILNKSLNLAMVLSTDDEKTGGKKDLFAVVQVPSVLPRFLQLKGKGEERRFFPLEEIIKLHVDDLFYGMTVREIYPFRIIRDADISIDEEKSVKDLLITMKDELRNRIWGDAVRMDIHQGTSPFIKNTLRELLELQDNEVFDVASILNINDAMFFYGLDHTSKLKYPFFQQKTTLKFETPEKIFEAIKKKDRLLHHPYQSFSAIEDLLRISSEDPKVLGIKMTLYRTSGDSPIIQYLGEAAENGKQVTVLVELKARFDEERNIKWAQKLEARGVHVVYGVVGLKIHCKMLMIVRKEDDHLVRYVHLGTGNYNSTTSKYYTDLSFFTVNKQITEDVATIFNTITSYAKMPTLNLLSASPHNLKSTFISLIDKEKENALSGKPARIIFKMNSLVDPHIILSLYKASQAGVKVDLIIRGICCLKPGLKGISENITVLSIVGRFLEHTRIYYFHSGGFESVFLASADCMPRNFERRIEVLFPIIESKNKERIKKILDVQLRDNVKARFLRPDGHYVKKILEKDEKPVDSQIERMTFAE

SEQ ID NO: 49862 - DNA, 2073 bp, Escherichia coli CFT073
  CDS (1)..(2073): transl_table=11
gtggtaatgggtcaggaaaagctatacatcgaaaaagagctcagttggttatcgttcaatgaacgcgtgcttcaggaagcggcggacaaatctaacccgctgattgaaaggatgcgtttcctggggatctattccaataaccttgatgagttctataaagtccgcttcgctgaactgaagcgacgcatcattattagcgaagaacaaggctccaactctcattcccgccatttactgggcaaaattcagtcccgggtgctgaaagccgatcaggaattcgacggcctctacaacgagttgttgctggagatggcgcgcaaccagatcttcctgattaatgaacgccagctctccgtcaatcaacaaaactggctgcgtcattattttaagcagtatctgcgtcagcacattacgccgattttaatcaatcctgacactgatttagtgcagttcctgaaagatgattacacctatctggcggtggaaattatccgtggcgataccatccgttacgcgctgctggagatcccatcagataaagtgccgcgctttgtgaatttaccgccagaagcgccgcgtcgacgcaagccgatgattcttctggataacattctgcgttactgccttgatgatattttcaaaggcttctttgattatgacgcgctgaatgcctattcaatgaagatgacccgcgatgccgaatacgatttagtgcatgagatggaagccagcctgatggagttgatgtcttccagtctcaagcagcgtttaactgctgagccggtgcgttttgtttatcagcgcgatatgcccaatgcgctggttgaagtgttacgcgaaaaactgactatttcccgctacgactccatcgtccctggtggtcgttatcataattttaaagactttattaatttccccaatgtcggcaaagccaatctggtgaacaaaccactgccgcgtttacgccacatttggtttgataaagcccagttccgcaatggttttgatgctattcgcgaacgcgatgtgttgctctattatccttatcatacctttgagcatgtactggaactgctgcgtcaggcttcgttcgacccgagcgtactggcgattaaaattaacatttaccgcgtggcgaaagattcacgcatcatcgactcgatgatccacgccgcacacaacggtaagaaagtcaccgtggtggttgagttacaggcgcgtttcgacgaagaagccaacattcactgggcgaagcgcctgaccgaagcaggcgtgcacgttatcttctctgcgccggggctgaaaattcacgccaaactgttcctgatttcacgtaaagaaaacggtgaagtggtgcgttacgcacacatcgggaccgggaactttaacgaaaaaaccgcgcgtctttatactgactattcgttgctgaccgccgatgcgcgcataaccaacgaagtacggcgggtgttcaactttattgaaaacccataccgtccggtgacatttgattatttaatggtgtcgccgcaaaactcccgccgcctgttgtatgaaatggtggaccgcgaaatcgccaacgcgcagcaagggctgcccagcggtatcaccctgaagctaaataaccttgtcgataaaggcctggttgatcgtctgtatgcggcctccagctccggcgtaccggttaatctgctggttcgcggcatgtgttcgctgatccccaatctggaaggcattagcgacaacattcgtgccatcagtattgttgaccgttaccttgaacatgaccgggtttatatttttgaaaatggcggcgataaaaaggtctacctttcttccgccgactggatgacgcgcaatattgattatcgtattgaagtggcgacgccgctgctcgatccgcgcctgaagcagcgggtgctggacatcatcgacatattattcagcgatacagtcaaagcacgttatatcgataaagaactcagtaatcgctacgttccccgcggcaatcgccgcaaagtacgggcgcagttggcgatttacgactacatcaaatcactcgaacaatctgaataa

SEQ ID NO: 49863 - protein, 690 aa, Escherichia coli CFT073
MVMGQEKLYIEKELSWLSFNERVLQEAADKSNPLIERMRFLGIYSNNLDEFYKVRFAELKRRIIISEEQGSNSHSRHLLGKIQSRVLKADQEFDGLYNELLLEMARNQIFLINERQLSVNQQNWLRHYFKQYLRQHITPILINPDTDLVQFLKDDYTYLAVEIIRGDTIRYALLEIPSDKVPRFVNLPPEAPRRRKPMILLDNILRYCLDDIFKGFFDYDALNAYSMKMTRDAEYDLVHEMEASLMELMSSSLKQRLTAEPVRFVYQRDMPNALVEVLREKLTISRYDSIVPGGRYHNFKDFINFPNVGKANLVNKPLPRLRHIWFDKAQFRNGFDAIRERDVLLYYPYHTFEHVLELLRQASFDPSVLAIKINIYRVAKDSRIIDSMIHAAHNGKKVTVVVELQARFDEEANIHWAKRLTEAGVHVIFSAPGLKIHAKLFLISRKENGEVVRYAHIGTGNFNEKTARLYTDYSLLTADARITNEVRRVFNFIENPYRPVTFDYLMVSPQNSRRLLYEMVDREIANAQQGLPSGITLKLNNLVDKGLVDRLYAASSSGVPVNLLVRGMCSLIPNLEGISDNIRAISIVDRYLEHDRVYIFENGGDKKVYLSSADWMTRNIDYRIEVATPLLDPRLKQRVLDIIDILFSDTVKARYIDKELSNRYVPRGNRRKVRAQLAIYDYIKSLEQSE

SEQ ID NO: 49864 - DNA, 2220 bp, Bradyrhizobium japonicum USDA 110
  CDS (1)..(2220): transl_table=11
atggaccgacttctcatggactccgcgcaagctgttgaaataaaagaaaaagtcccggagacggaaagcctgccggcgatcgcctcgagccccgagcgattcatcaaccgcgagctgtcctggctgcatttcaaccgccgcgtcctggaggaatcggtcaatcccagccatcccgtgctggagcgggtgcgattcctgtcgatttccgcgaacaacctcgacgaattcttcatggtccgcgtcgccggcatcaaggcccaggtgcgcgagggcattgccgagcgtagccccgacggcctgacgccgtccgagcagctcgcgctgatcaaccgcacggtctcccagcttgcttcagaccagcaggcgatctggcgcgacctgcgcgccacgctggccgatgtcggcatcgtgctggtggacggcaaggaggtcaccaaggcggagcggacctggatcgaggactacttcctcaacaacgtgttcccgctgctgacgccgctcgcgatcgacccggcccatcccttcccgttcatcccgagcctcggtttcaccatcgcgctccagctcacgcgcgccgccgacggcaagcagatgaacgcgctgatccgcatgcccggcaagatcgaccgcttcatccgcctgccgtccgagggcacgatgcggctgatctcgctggagcaggcgaccgccctgttcatcaaccgactgttccccggctacaatctgcatggccagggcgccttccgcatcctccgcgactccgagctcgaaatcgaggaagaggccgaggatctcgtccgcctgttcgagaccgcgctgaagcgccgccgccgcggatcggtgatccggctcgagatcgacgccaagatgccggagcagctgcgcaacttcgtgcagcatgccctctccgccgccgacgacgaagtattcctggtcgacggcgtgctcgccatgaatgagctctcgcagctcacccgcctcgaccggcccgacctcgaattcacgccttacgtgccgcgccatcccgagcgcgtgcgcgagcatggcggcgacatctttgccgcgatccggcagaaggaccttgtcgtccatcacccctacgaatccttcgacgtggtggtgcagttcctccagcaggcaacgcgcgaccccgatgtcgtcgcgatcaagcagacgctctaccgcacctccaataactcgccgatcgtgcgcgcgctcgccgaagccgccgaggccggcaagtccgtcaccgcgctgatcgagctcaaggcgcgcttcgacgaggaggccaacatccgctgggcgcgcgacctcgagcgcgcaggcgtgcaggtcgtctatggcttcctcgaactgaagacgcacgcaaaactctcgatggtggtgcgccgcgagggcggcagcctcacgacctacgtccacaccggcaccggcaactaccacccggtcaccgcgcgcatctacaccgacctctcctacttcacctccgagccgaccatcggccgcgacgccgcgcgcgtcttcaacttcatcaccggctatgccgcgccgagcgatctggaaaagatggcggtgtcgccgctgaccctgcgcaagcgcatcatcgagcacatccagggcgagaccgcgcatgcgcggcacggccgccccggcgcggtctggatgaagatgaatgcgctggtcgacccagacatcatcgacgcgctgtatgaggcctcacaggccggcgttcaggtcgaactcgtggtgcgcggtatctgttgcctcaggcccggtatccctggcctgtcggagaacatccgcgtcaagtcgatcatcgggcgcttcctggaacacggccgaatctactgcttcggcatgggccaggggctgccgagcacgaaagcggctgtgtatatctcctcggccgacatgatgccgcgcaacctcgaccgccgcgtcgaggtgctgtgtccgctgcaaaatcccacggtgcatcagcaggttctcgaacagatcatggtcgcgaatctcaaggacaatgagcagagctggcaattgttgccggatgggtcctcaacgcgtatgaagaccgcgaagggcgaggagcctttcaacgtccacaactacttcatgacaatccgagtctgtctggccgtggaaagtcgctcaaggaatcctcgccgcgtcgtctcacgcgccggaacgaacgccatccatcctgatcgggcgtcgacgtga

SEQ ID NO: 49865 - protein, 739 aa, Bradyrhizobium japonicum USDA 110
MDRLLMDSAQAVEIKEKVPETESLPAIASSPERFINRELSWLHFNRRVLEESVNPSHPVLERVRFLSISANNLDEFFMVRVAGIKAQVREGIAERSPDGLTPSEQLALINRTVSQLASDQQAIWRDLRATLADVGIVLVDGKEVTKAERTWIEDYFLNNVFPLLTPLAIDPAHPFPFIPSLGFTIALQLTRAADGKQMNALIRMPGKIDRFIRLPSEGTMRLISLEQATALFINRLFPGYNLHGQGAFRILRDSELEIEEEAEDLVRLFETALKRRRRGSVIRLEIDAKMPEQLRNFVQHALSAADDEVFLVDGVLAMNELSQLTRLDRPDLEFTPYVPRHPERVREHGGDIFAAIRQKDLVVHHPYESFDVVVQFLQQATRDPDVVAIKQTLYRTSNNSPIVRALAEAAEAGKSVTALIELKARFDEEANIRWARDLERAGVQVVYGFLELKTHAKLSMVVRREGGSLTTYVHTGTGNYHPVTARIYTDLSYFTSEPTIGRDAARVFNFITGYAAPSDLEKMAVSPLTLRKRIIEHIQGETAHARHGRPGAVWMKMNALVDPDIIDALYEASQAGVQVELVVRGICCLRPGIPGLSENIRVKSIIGRFLEHGRIYCFGMGQGLPSTKAAVYISSADMMPRNLDRRVEVLCPLQNPTVHQQVLEQIMVANLKDNEQSWQLLPDGSSTRMKTAKGEEPFNVHNYFMTIRVCLAVESRSRNPRRVVSRAGTNAIHPDRAST

SEQ ID NO: 49866 - DNA, 2079 bp, Bacteroides thetaiotaomicron VPI-5482
  CDS (1)..(2079): transl_table=11
atggaaagcaaatataattatttcaaacgtgatatcagctggctctcattcaactatcgggtgttgctcgaagcgctggatgagcacctgccgctatacgagcgcatcaatttcatctccatctactcctccaatctggaagagttttacaaaatccgggtggcggaccacaaggccgtggcatccggcgcaacggagagcgatgaagaaaccgtacaatccgcccgcgaactcgtggaagaaatcaaccacgaagtaaaccgccagctggacgaccgtgtacgcatttacgaagaaaagatactgcccgccctgcgcaaaaaccacatcatcttctaccaggacagacatgtggaaccgtttcaccagcagtttatcaaggactttttccgggaagaaatcttcccctacctgcaacccgtgcccgtatcgaaagacaaaatcgtctcttttctgcgagacaaccggctctacctcgccatccgcctctatccgaaggaaaacaggaaccccgccaaccggcagcctttctatttcgtcatgaagcagccgtacgccaaagtgccccgtttcatcgaacttccgccccgtggagacaactattacatcatgttcaccgaggacatcatcaaagcgaacctcaaccttattttccccggctacgacgtcgattcgagctactgcatcaaaatatcccgtgacgccgacattctgatagacgacaccgccagcagcgccgacctcgtagctcaactgaaaaagaaggtaaaaaaacgcaagataggcgacgtctgccgctttgtctacgaccgtgccatgccgcaagacttcctcgactttctggtcgacgccttccgcatccaccgtgacgaactcgtccccggcgacaagcacctgaacctcgaagacctgcgccacctgcccaacccgaacaagtctctacgccgcatcgaaaagccgcaaccgatgaagctgaacatcctcgacgaaaaagaatcgatcttcaactacgtcgcccaaaaggatctgctgctgtattacccgtaccactccttcgagcacttcacccacttcctctacgaagcagtgcacaatccggagacgcgcgaaatcatggtcacccaataccgtgtagccgaaaactcggccgtcatcaacaccttgatagccgccgcgcagaacggcaagaaagtcaccgtatttgtcgagctcaaagcccgtttcgacgaagagaacaacctcgccaccgccgaaatgatgcaagccgccggcatcaaaatcatttacagcatccccggactaaaagtacacgccaaagtggccctcgtccgtcgccgcggactgaatggagagaaaatccccagctacgcctacatcagcacgggcaacttcaacgaaaagaccgccaccctatacgccgactgtggacttttcacctgccgcaaggaaatagtgaacgacctttacaacctcttccgcaccctgcaaggcaaggaagatccgaaattcaccactctcctcgtcgcccgcttcaacctcataccggaactgaaccgcctcatcgaccgtgaaatatcccttgccgaccaaggcaaaggcggacgtatcatcctcaaaatgaacgccctccaagaccccgcaatgatcgaccgactctacgaggcctccgaacacggcgtgcagatcgacctcatcgtccgcggcatctgctgcctcataccggagcagtcatacagccgtaacatccgtgtcacccgcattgtcgacagttttctggagcacgcccgcatctggtatttcggcaacgaagggcaccccaaaatatacatgggctcgcccgactggatgcgccgcaacctctaccgccgtatcgaagccgtcacccccatcctcgaccctgacctgcgcgccagtctgatcgaaatgctccatatccagctcgctgacaaccaaaaagcctgttgggtagacgacaaactgcaaaacgtattcaaaaaaagagcgtccggcacccctgctgtccgtgcccaatacgatttttatgaatggctcaaaaaagacattgtaacagaaatgtaa

SEQ ID NO: 49867 - protein, 692 aa, Bacteroides thetaiotaomicron VPI-5482
MESKYNYFKRDISWLSFNYRVLLEALDEHLPLYERINFISIYSSNLEEFYKIRVADHKAVASGATESDEETVQSARELVEEINHEVNRQLDDRVRIYEEKILPALRKNHIIFYQDRHVEPFHQQFIKDFFREEIFPYLQPVPVSKDKIVSFLRDNRLYLAIRLYPKENRNPANRQPFYFVMKQPYAKVPRFIELPPRGDNYYIMFTEDIIKANLNLIFPGYDVDSSYCIKISRDADILIDDTASSADLVAQLKKKVKKRKIGDVCRFVYDRAMPQDFLDFLVDAFRIHRDELVPGDKHLNLEDLRHLPNPNKSLRRIEKPQPMKLNILDEKESIFNYVAQKDLLLYYPYHSFEHFTHFLYEAVHNPETREIMVTQYRVAENSAVINTLIAAAQNGKKVTVFVELKARFDEENNLATAEMMQAAGIKIIYSIPGLKVHAKVALVRRRGLNGEKIPSYAYISTGNFNEKTATLYADCGLFTCRKEIVNDLYNLFRTLQGKEDPKFTTLLVARFNLIPELNRLIDREISLADQGKGGRIILKMNALQDPAMIDRLYEASEHGVQIDLIVRGICCLIPEQSYSRNIRVTRIVDSFLEHARIWYFGNEGHPKIYMGSPDWMRRNLYRRIEAVTPILDPDLRASLIEMLHIQLADNQKACWVDDKLQNVFKKRASGTPAVRAQYDFYEWLKKDIVTEM

SEQ ID NO: 49868 - DNA, 2106 bp, Nitrosomonas europaea ATCC 19718
  CDS (1)..(2106): transl_table=11
atggcaccggtagccaagccggagatgcccgctgccaaacagtttctgaaccgtgaacttagtcagatcgaattcaatcgccgggtattggcgcaggcagagaatgaggaaacacctctgctggaacgcctgcgtttcatttgtatcgtcagcagtaacctcgatgaattttttgaagttcgtgttgccgggctgaaagaacaaatcaagctggatgcacctggttccggtgcggatggcatggcgcctggccaggcattcgaacgggtatccgagcaggtgcgtgaactggtctcccggcaatatcagttgctcaatgacaatattcttcccgcactggtggaacagggtatttgtttcctgcggcgcgattcctggaatgatggccagcgcgaatggatcagggatttcttctttcgcgagctgatgccgatgcttacccccatcggtttggatcctttccatcctttcccgcgtatattgaataaaagcctgaatttcgcggttgcattggaaggaaaagatgcttttggccgtaattcaggtgttgcaatcgttcaggcgccgcgtattttgcctcgtgtcatacggctgccaaaagaaatcagtggcagcccctatagtttcgtattcctgtcatccattatccatgctcatgtgggtgaactttttacgggtatgcgggtggtgggctgttaccagtttcgtgtcacccgtaacagtgatttgttcgttgatgaagaggaaataaagaatcttcgtattgcattgcagggtgaattgtcgcaacgtcatctggggaatgcggtcaggctcgaggtggcagatagttgctcgcaacagatggttgaatttttgctggggcagttttctcttgggaacgaagatctgtttcaggtgaacgggccagtcaatctggtgcggctgatacaggtttttgatctgatcgatcgacctgacctcaaatttccacgtttcattcccggtctgccttttttttctcagaaaaagaaagcacataacattttcgagctgatcagtaagggtgacatattactgcatcatccctaccagtcgttccagccggtcattgaattcattcagcaggcttatgcagatccggatgtgattgctgtcaagcagactgtttatcgcaccggttcggattcaacgctgatggaagcgctcgtggcagcggccaggctgggcaaggaagttacggtagtggtagagttgctggcccggttcgatgaagaagccaatatcaactgggcgaaacggctggaagaggtgggtgcccacgtcatttatggtgtgtttggtcacaagacgcattgcaaaatggccatgatagtacggcgtgaggcggggcagttgaaacgttacgtccatctgggtacaggtaattaccaccctggcacagcccgtgtttacacggattttggcttgctgacctgccatgaggaaatttgtaccgatgtcagtgaagtatttttgcaactgaccgggttgggcaaagcgagcaagctgaagcatctctggcaatcaccattcagtctgcatgggcagatactgaacagcattcaacaggagataaagcatgccaacgcgggagaacctgctgccatcatcgctaaaatgaatgcattactggagccgtctgtcattcaggcactttatgcggcttccggtgcaggcgtaaaaattgatctgattgtgcgaggtgcctgcgcactgcgccccggtgtgccgggattatcagagaatattcgtgtgcgctccatcgtcgggcgctttctggaacatacccgcattttctattttctcaatgcaaagcagcataacgtctatctggcaagtgctgactggatgtaccggaatttttttcgtcgggtggagatttgttttccggtactcgatccgcggttgaagaagcgggtaatcctggaggggctgaagccctatctccgtgataacgtacaggcatgggagatgaatggtgacggccactacaaacgaaaatctgcaaggaagaacaacagattcagtgcgcaggaagttttactcgagaaacttgcagcagtaaaacaggacgctgtcgaataa

SEQ ID NO: 49869 - protein, 701 aa, Nitrosomonas europaea ATCC 19718
MAPVAKPEMPAAKQFLNRELSQIEFNRRVLAQAENEETPLLERLRFICIVSSNLDEFFEVRVAGLKEQIKLDAPGSGADGMAPGQAFERVSEQVRELVSRQYQLLNDNILPALVEQGICFLRRDSWNDGQREWIRDFFFRELMPMLTPIGLDPFHPFPRILNKSLNFAVALEGKDAFGRNSGVAIVQAPRILPRVIRLPKEISGSPYSFVFLSSIIHAHVGELFTGMRVVGCYQFRVTRNSDLFVDEEEIKNLRIALQGELSQRHLGNAVRLEVADSCSQQMVEFLLGQFSLGNEDLFQVNGPVNLVRLIQVFDLIDRPDLKFPRFIPGLPFFSQKKKAHNIFELISKGDILLHHPYQSFQPVIEFIQQAYADPDVIAVKQTVYRTGSDSTLMEALVAAARLGKEVTVVVELLARFDEEANINWAKRLEEVGAHVIYGVFGHKTHCKMAMIVRREAGQLKRYVHLGTGNYHPGTARVYTDFGLLTCHEEICTDVSEVFLQLTGLGKASKLKHLWQSPFSLHGQILNSIQQEIKHANAGEPAAIIAKMNALLEPSVIQALYAASGAGVKIDLIVRGACALRPGVPGLSENIRVRSIVGRFLEHTRIFYFLNAKQHNVYLASADWMYRNFFRRVEICFPVLDPRLKKRVILEGLKPYLRDNVQAWEMNGDGHYKRKSARKNNRFSAQEVLLEKLAAVKQDAVE

SEQ ID NO: 49870 - DNA, 2094 bp, Helicobacter hepaticus ATCC 51449
  CDS (1)..(2094): transl_table=11
atgacaattaatgattcaaaaatgtattttaatcgtgagctttcgtggctcaaatttaatacacgtgtgcttaatgaagctaaaaacactaatattccgcttttggagcgattaaaatttgtagcaatttatgggacaaatcttgatgaattttatatgatacgcgtagcagggcttaaacgtttgtatgcaagtggaattaccgaagtgggcgcagataaacttacgccattgcagcagcttaaaagtatacgcgaataccttgataaagaaaaaaatatgcttgagagtgtttttaaggagattcaaagtggcttagcaaaggaaggtatgcacattaaacaagtcaatcagttaaataatgagcaaaaaaagcgattgcacgaattttttattaattatttgtatcctgtgattgtgcctgtggcaatagatgctacacacccctttcctcatctaaataatttaagttttgccattgcgcttaaacttaaagatacacaagaggggagtgtaaaatttgctatggtaagaatctcgcgtttgctttcgcgttttgtggagattgaaagcggcgtgtttatagcggttgaagatattgtaggtgagtttgcaagtgaattgtttggagaatatgagattctcaattatgttccttttagaatcacgcgtaatgcggatatggaaattgaagaagaagaggcagatgattttatagagattatgagtgaggggcttaaaactcgtaggaaaggtgaagtagtgcgtcttgagataggtgcagataaagatagtagccttttagattttattaattctcatttaaaagttgatgctaaagatgtttatgtttatcatattccgctcaatttaagtggattgtgggagttggtagggagcaaggcatatgctcatcttaccactccaccttttaatccaaaaacacttccaccattacacgggagtagagagattctctctacaatggaaaatgatgatattttgctcttccacccctatgaaagctttgatccaatagtgaattttattcagagcgcagcaaaagaccctgatgtgctctccattcgtatgacactttatcgtgtaggaaaaaattcacctattgttaaagctctcatacaggcagctgaaaataataagcaagtaacggcgttggttgagttaaaagcacgatttgatgaagaaaataatctgtattgggcgcattctttagaatctgctggagcacacgttatttatggtgtgcccggacttaaggtgcatgccaaaattgcgcttgtgattaaaaaaattggcaatacacttaaagaatatgtgcatttaagcacaggaaattataatcctagcactgcaaaaatttatactgatatttcgttcttaacttgcaatcagtcttttgcaaaagatgcaattaaacttttccactctctctctacaggttcttcatatcgcaccaagcttagtcatttattgattgctcctacacagattaagactaaaattttagagcttattgaacacgaaaagaaaatgggaagtgaagggcgcattattatgaaagcaaatgcttttatagacattgatgtgatacgtgcactttatggagcatcaatagctggagtaaagattgatttgattgtgcgtggtgtatgtgccttgcgtccgggtataaagggtgtgagtgaaaatattcgtgtattttcaatcattggaaaataccttgaacacgctagaatctatcattttaagaatgataaagtaggcgtatattttgcttcagcagatattatgcctcgtaatttagagcgacgtgtggagattctcacaccaagcttaaatacacagatgagcaaacgtttaatggagattctccaaatgcagcttaatgataacgtccaaatgtatgaactacaaagcaatggggagtatcagaaagtagtgagctcacaaaaaccctttagttcacaacttgcttatgaggaatatgtgaatgctatttatggagatttggtaagaaatgatgaggtgaataaggcaaaaaaacttgctaaaagaatgctcaaagagagttaa

SEQ ID NO: 49871 - protein, 697 aa, Helicobacter hepaticus ATCC 51449
MTINDSKMYFNRELSWLKFNTRVLNEAKNTNIPLLERLKFVAIYGTNLDEFYMIRVAGLKRLYASGITEVGADKLTPLQQLKSIREYLDKEKNMLESVFKEIQSGLAKEGMHIKQVNQLNNEQKKRLHEFFINYLYPVIVPVAIDATHPFPHLNNLSFAIALKLKDTQEGSVKFAMVRISRLLSRFVEIESGVFIAVEDIVGEFASELFGEYEILNYVPFRITRNADMEIEEEEADDFIEIMSEGLKTRRKGEVVRLEIGADKDSSLLDFINSHLKVDAKDVYVYHIPLNLSGLWELVGSKAYAHLTTPPFNPKTLPPLHGSREILSTMENDDILLFHPYESFDPIVNFIQSAAKDPDVLSIRMTLYRVGKNSPIVKALIQAAENNKQVTALVELKARFDEENNLYWAHSLESAGAHVIYGVPGLKVHAKIALVIKKIGNTLKEYVHLSTGNYNPSTAKIYTDISFLTCNQSFAKDAIKLFHSLSTGSSYRTKLSHLLIAPTQIKTKILELIEHEKKMGSEGRIIMKANAFIDIDVIRALYGASIAGVKIDLIVRGVCALRPGIKGVSENIRVFSIIGKYLEHARIYHFKNDKVGVYFASADIMPRNLERRVEILTPSLNTQMSKRLMEILQMQLNDNVQMYELQSNGEYQKVVSSQKPFSSQLAYEEYVNAIYGDLVRNDEVNKAKKLAKRMLKES

SEQ ID NO: 49872 - DNA, 2082 bp, Bordetella bronchiseptica RB50
  CDS (1)..(2082): transl_table=11
atgacctctcgaccgccgtccgagccgctgctcctgaatcgtgaactgtcgctgctgaaattcaatgaacgcgtgctggcgatggccgagaacccgcgtgttcccttgcttgagcggttgcgctacgtgtgcatcgtcagctccaacctggacgagttcttcgagatccgcatctcgacgctgaaggagcagcagcgccagaccccgacgctggtcgggcccgacggcatgacggccgatgaggccttcgagcgggtccaggtcaaggtgcacgcgctggtggcgagccaatacgccttgctcaacgacgatatcctgccgcgcctgcaggccgagggcatcgtgctgcatcacgcctccgaatggaacgcgcagcagcaggagtgggcgcgcgaggtcttcaatcgcgatgtcatgccgctgctgacgccgatcgggctggatccggcgcatccgtttccgcgcgtctacaacaagagcctgaatttcatcgtggccctgtcgggcgccgatgccttcggccgccaggcgtccattgccgtggtgcaggcgccgcgcgcgctgccgcgactgatcaagatgccgcccgagatctccggccatcccgacggctacatcctgctgacctcgctgctgcgggccttcgtgggcgaactgttccccggcctggaaatgctgggctgttaccaatggcgcgtgacgcgcaacagcgatctgttcgtcgacgaagaggaagtcaccaacctgcgccatgccctgcagggcgagctgtcgcagcgcaatttcggcgcggccgtgcggctggagatcgacaagctgaccccgcccgacctggaggcctacctgcagcgcgaattctcgctggcgcccgaggacacctaccgggtcagcggcccggtgaacctgtcgcgcctgatgcagttgtgcaattccaacacccggccggacctgctgtttcccgcctacctggcgcccgtgccggcgccgttcgaccgcgtgggcgagaagccggccgagctgttcgccgccgtggccgagcaggatcgcctgctgcaccatccctaccagtcgttccagccggtcatcgacttcctgaccgccgcggcgctggatccggacgtgatggcgatcaagcagaccatctaccgcaccggcgaggactccgagctcatgcagatcctgctggcggcggcgcgcgccggcaaggaagtcaccgtggtggtggagctgatggcgcgctttgacgagcagaccaacatcaactgggccgcgcgcctggaggaagtgggcgcgcacgtggtctatggcgtggtcgcgcacaagacgcacgccaagatggcgctggtgctgcgccgcgagaaagggcggctgcgccgctacgcgcacctgggcaccggcaactaccatccgcgcacggcccgcctgtacaccgatttcggcctgctgaccgccgatccgcgcctgtgcgaggacatggacaaggtctttacccagctgaccggcctgggggcgcggcgctcgctcaaggcgctgctgcagtcgccgttctcgctgcacgacggcatggtcagcctgatccgcgccgagacgcgcgccgcgcgcgccggcaagcgggcgcgcatcatggcgaagatgaactcgctactggaagtgcaggtcatcgaagagctctacaaggccagccaggccggggtcaagatcgacctgatcgtgcgcggggtatgcgcgctgcgcgccggcgtgcccgggctgtcggagaatatccgggtgcgttccatcgtggggcgctttctggagcactcgcgcgtgttctatttctatgccgatggcgccgaaaccgtttacctgtcgtcggccgactggatggaccgcaatttcttccggcgcgtggaaatcgcctttcccgtctacgacaagacgctcaggaagcgcgtcatcgacgaggccttcacctacgcgctgcgcgacaaccagctggcctggcagcagcaggccgatggcacctatgcgcgggtgcgcaaccggcgcgaggcctacgacgtgcaggaagcgctgatccagcgcctggggcaggacggctga

SEQ ID NO: 49873 - protein, 693 aa, Bordetella bronchiseptica RB50
MTSRPPSEPLLLNRELSLLKFNERVLAMAENPRVPLLERLRYVCIVSSNLDEFFEIRISTLKEQQRQTPTLVGPDGMTADEAFERVQVKVHALVASQYALLNDDILPRLQAEGIVLHHASEWNAQQQEWAREVFNRDVMPLLTPIGLDPAHPFPRVYNKSLNFIVALSGADAFGRQASIAVVQAPRALPRLIKMPPEISGHPDGYILLTSLLRAFVGELFPGLEMLGCYQWRVTRNSDLFVDEEEVTNLRHALQGELSQRNFGAAVRLEIDKLTPPDLEAYLQREFSLAPEDTYRVSGPVNLSRLMQLCNSNTRPDLLFPAYLAPVPAPFDRVGEKPAELFAAVAEQDRLLHHPYQSFQPVIDFLTAAALDPDVMAIKQTIYRTGEDSELMQILLAAARAGKEVTVVVELMARFDEQTNINWAARLEEVGAHVVYGVVAHKTHAKMALVLRREKGRLRRYAHLGTGNYHPRTARLYTDFGLLTADPRLCEDMDKVFTQLTGLGARRSLKALLQSPFSLHDGMVSLIRAETRAARAGKRARIMAKMNSLLEVQVIEELYKASQAGVKIDLIVRGVCALRAGVPGLSENIRVRSIVGRFLEHSRVFYFYADGAETVYLSSADWMDRNFFRRVEIAFPVYDKTLRKRVIDEAFTYALRDNQLAWQQQADGTYARVRNRREAYDVQEALIQRLGQDG

SEQ ID NO: 49874 - DNA, 2139 bp, Prochlorococcus marinus str. MIT 9313
  CDS (1)..(2139): transl_table=11
atgagtaatccagcagtagcttcggagcactacatcaaccgagagctcagctggatctccttcaacgaaagggtccttgctcaggcactggatacgcgcaccccgctgctggaacaagccaagttcagtgccatcttcagcaacaacctcgacgaattcttcatggttcgcgtggcctccctcaaagcacaagtggaagccggcattaccaaaaccagcgcagacggtctaacccctcttcagcagctcctcacgatccgagatcaccttgttcctctcatcgagcaacaacaagatcactaccgtaaacacctcaaaaaccagctagtcgagcatggtgttcacctactcgactatgagcaactcaatccaaaagaacgcctctggattgacaattatttccaaacagccattttcccggtgctgacaccactagccgtggatcaagcccatcccttccctttcgttagcaatctcagcctcaacattgcgaccctgatcctcgatccggaaacaggccaacaacaattcgcccgggtcaagattccacaaaaaacgatccctcggtttgtagagatacctcctgatctaagtggcatcaatcccaaaccagttcacacagcagttccattggagcaagtggtggccttcaacctcaaattgctcttccccgggatgaagattgaagagcactacttcttccgagtcacccgcgatgccgaccttgaactcagggacctagaagccgacgatctcatgagcgccatggaacaaggcctgcataagcggcggatgggcggagaagtggtgagactcgaagtgacaaacgaaatgccccagagagtcgttgagatgctgattgaaggtatggctgttgaagaaaaagacctttatcgcatcgagggactactaggcctcgatgatctattcggtctcatgcgtttacctctggaacaactcaaagaccaaccccacattggcctgaccgccaaagttctctcccgcagccagcgcagaatgcttgaagacgaatcaatcaaagaagaagaattcaaaagcatcttctcggtgattcgccgcaaagacattctccttcaccacccatacgaactgttcgcgacctctgtagaggaattcatcaatcaggcagcagacgatcccctagtcatgggaatcaagatcacgctctatcggacatctaaggattccccaatcattgcggccctgattcgtgcagccgaacacggaaagcaggtcatggctctggttgaactcaaggcacgcttcgatgaaggcaacaatattcaatgggcccgtcatctagaacgatctggcgttcacgttgtctatggcgttttaggactaaaaacccacacaaaaaccatcttggtcgttcgcaaagaaaaagagcgcctacgcagctacgtgcacatcggcacagggaactacaactcgaagacatcacgtctctataccgatcttggtctgctctctgcaagaccggaactcagccaagatctagtcgagctattcaattatctcactggcttttcaaagcaacaaagcttccgtcgactgctggtggcacctgtcaccctacgcaagggaatggaatcactcatcctccgcgaaatcgaacacgcccgcgaaggtagaggcggacacatccgcgccaagatgaatgctctggtggatccagccatcattagcctgctctacgaagcttcccaagttggagttcgtatcgaactgatcatccgcggtatgtgctgtctctacccaggacgaaaaggattcagcgaaaacatcagcgtgatcagcatcatcggccggttcctggaacactcccgtatcttctggtttgccaatgacaacaacccagaggtttatatcggcagcgcagacttgatgcctcgaaacctagacagacgcgtggaagccattactccaattgaagaaccagagcaaaaggaacacctagagcgactgctgaacctctacctaaacgacaaccgcgaagcatgggatatgcagagcgatggcagctttttacagcgccaacccaatcccaatagtgaagaacatcgtgcacagcaacagctgatcaacctttggcaacaaggcatcccagcagcgtga

SEQ ID NO: 49875 - protein, 712 aa, Prochlorococcus marinus str. MIT 9313
MSNPAVASEHYINRELSWISFNERVLAQALDTRTPLLEQAKFSAIFSNNLDEFFMVRVASLKAQVEAGITKTSADGLTPLQQLLTIRDHLVPLIEQQQDHYRKHLKNQLVEHGVHLLDYEQLNPKERLWIDNYFQTAIFPVLTPLAVDQAHPFPFVSNLSLNIATLILDPETGQQQFARVKIPQKTIPRFVEIPPDLSGINPKPVHTAVPLEQVVAFNLKLLFPGMKIEEHYFFRVTRDADLELRDLEADDLMSAMEQGLHKRRMGGEVVRLEVTNEMPQRVVEMLIEGMAVEEKDLYRIEGLLGLDDLFGLMRLPLEQLKDQPHIGLTAKVLSRSQRRMLEDESIKEEEFKSIFSVIRRKDILLHHPYELFATSVEEFINQAADDPLVMGIKITLYRTSKDSPIIAALIRAAEHGKQVMALVELKARFDEGNNIQWARHLERSGVHVVYGVLGLKTHTKTILVVRKEKERLRSYVHIGTGNYNSKTSRLYTDLGLLSARPELSQDLVELFNYLTGFSKQQSFRRLLVAPVTLRKGMESLILREIEHAREGRGGHIRAKMNALVDPAIISLLYEASQVGVRIELIIRGMCCLYPGRKGFSENISVISIIGRFLEHSRIFWFANDNNPEVYIGSADLMPRNLDRRVEAITPIEEPEQKEHLERLLNLYLNDNREAWDMQSDGSFLQRQPNPNSEEHRAQQQLINLWQQGIPAA

SEQ ID NO: 49876 - DNA, 2079 bp, Chromobacterium violaceum ATCC 12472
  CDS (1)..(2079): transl_table=11
atgtcacaaccgcaagacctgctgctgaaccgtgaactgggactgatagaattcaaccgccgcgtgctggcccaggcggaagacccggacctgccgctgctggagcgcctgaagttcctgtgcatcgtctcctccaacctggacgaattcttcgaagtccgcgtcgcctggctgcaagacgccgcccacgccacgcccgaccgcatcctggcggatggctccacgccggagcaggcgctggccaaggtgtcccgcgccagccaccagctggtgcgcgagcaatacgcggtgatgagcgaggtgctgttcccggcgctgcgcgaacagggcatcgtgttcttgcgccgcagcgagtggaccgagcagcagcaggaatgggtgaaaaactacttcttccgcgagctgatgcccatcctgacgccgatcgggctcgatccgtcccaccccttccccaaggtattgaacaaatcgctcaacttcgcggtggagctggaaggccgcgacgccttcggccgcgcgtccggcaccgccatcgtgcaggcgccgcgcatcctgccgcgcgtgatcaagctgccggccgacgtctgcgacggccgcccgcactgcttcgtgttcctgtcgtcgatactgcactcgcacgtgcacgagctgttccccggcatggcggtcaagggctgctaccagttccgcgtgacccgcgacagcgaactgtcggtcgacgacgacgacttcaagaacctgcgcaccgcgctgcagggcgaactgcgccagcgccagttcggcgacgcggtgcggctggagatcgccgatacctgcccgcaacacatggaatccttcctgctgacccagttcaacctgcagccgcgcgacgtctaccgcgtcaacggcccggtgaacctggtgcggctaatgcaggtgcccgacctggtggaccgcgccgatctcaagttcgcgccgttcacgccgacgctgccggccaatctgcagaagaagtccaagtcctcgctgttcgacgtcatccgcaagggcgacgtgctgctgcaccacccgtaccagagcttccagccggtgatcgacttcctcacccaggcggcgaccgatccgcacgtggtggccatcaagatgacggtgtaccgcaccggcaccgactcggtgctgatggagtcgctgatcgccgccgcccgcgccggcaagcaggtgacggtggtggtggagctgatggcccgcttcgacgaagaggccaacatcggctgggccagccggctggaagacgccggcgcccacgtggtctacggcgtgatcggctacaaagtgcacgccaagatgctgatggtggtgcgccgcgaggcccacggcctgcaccgctacgtgcatctgggcaccggcaactaccacccgcgcaccgcgcgcttgtacaccgacttcggcctgttgacctgcaacgaggaaatcgccagcgacgtcaacgacattttcatccagctcaccggcctgggacgcgccggcagcctgaagcggctgttccagagcccgttcacgctgcacagcatgatcatggaggcgatacagcgcgagaccgagcacgcgcaggccggcaagccggcgcagatcatcgccaagatgaactcgctgctggagccgcaggtgatccacgcgctgtaccgcgccagccaggccggggtgaagatccagctgatcgtgcgcggcgtgtgcgcgctgcggccgggcgtgccggggctgtcggacaatatcaccgtccgctccatcgtcggccgcttcctcgaacacccgcgcgtgttctacttctacaacgatcacaaggaagacctgctgatgtccagcgccgactggatgggtcgcaacttcttccgccgcatcgagacctgcgcgcctatcctggacaacaagttgaagcgccgcatcatcaaggaggcgctgcgcctgtatctggaagacaacgtcaacagctgggaaatgctgccggacggcggctacaagcgccggaccagccgcggcaagccgcactgcgcgcagcgcgagctgctggcctcctataccggcaatccggaagcggaataa

SEQ ID NO: 49877 - protein, 692 aa, Chromobacterium violaceum ATCC 12472
MSQPQDLLLNRELGLIEFNRRVLAQAEDPDLPLLERLKFLCIVSSNLDEFFEVRVAWLQDAAHATPDRILADGSTPEQALAKVSRASHQLVREQYAVMSEVLFPALREQGIVFLRRSEWTEQQQEWVKNYFFRELMPILTPIGLDPSHPFPKVLNKSLNFAVELEGRDAFGRASGTAIVQAPRILPRVIKLPADVCDGRPHCFVFLSSILHSHVHELFPGMAVKGCYQFRVTRDSELSVDDDDFKNLRTALQGELRQRQFGDAVRLEIADTCPQHMESFLLTQFNLQPRDVYRVNGPVNLVRLMQVPDLVDRADLKFAPFTPTLPANLQKKSKSSLFDVIRKGDVLLHHPYQSFQPVIDFLTQAATDPHVVAIKMTVYRTGTDSVLMESLIAAARAGKQVTVVVELMARFDEEANIGWASRLEDAGAHVVYGVIGYKVHAKMLMVVRREAHGLHRYVHLGTGNYHPRTARLYTDFGLLTCNEEIASDVNDIFIQLTGLGRAGSLKRLFQSPFTLHSMIMEAIQRETEHAQAGKPAQIIAKMNSLLEPQVIHALYRASQAGVKIQLIVRGVCALRPGVPGLSDNITVRSIVGRFLEHPRVFYFYNDHKEDLLMSSADWMGRNFFRRIETCAPILDNKLKRRIIKEALRLYLEDNVNSWEMLPDGGYKRRTSRGKPHCAQRELLASYTGNPEAE

SEQ ID NO: 49878 - DNA, 2088 bp, Porphyromonas gingivalis W83
  CDS (1)..(2088): transl_table=11
gtggacgtatctgcatatcctttttttcgtcgcgatatgagttggctctcctttaacgaacgcgtgttgatggaggctgccgaccggactttgccggtttacgacaggatcaagttcctgtccatcttctcttccaatctggaggagttctataccgtacgggtggcctatcatcaggccgtcctacagaaacggcgcgacaggagcgaggccgaagaggattccgatgcggatgctcatatcctgcaagctattcgggagactgtaatcagacaggacgaactgtattatcggattttttacgatcagatcctgcccaccttggaggaacacggtatccgactgcgtacgcatgcccccactcatccggatcataaagcctacctgcgtcgtttcttccacgaggagattttccctctgctctatccgatgctgttgctgccgagcaaggtgcgtacatttatccgttcaggtagggtgtatctggctgttcggctcaaagaaaaagagacggacgaggcctacagctatgcactgctcaatgtgcctaccgacggccttcctcgcttcgtagagctgccacggctccagaccgacacattttattactactcttttctggaagatattatcaaagagcacctggatgtagtcttccccggatacgaggtgatggacagctattcgatcaaagtgtcgcgcgatgccgatttgctgttggatgcacagcgtcctgaagatctgcccggagagatccgcaagaaggtgaagactcgcaagctcggtgctcctacgcgattcatgtatgacgggcgcatgcccgacgaggtgctgcgatacatctgcagttcgtgcgacatcgatccggaggaggcgattcggagtggaaactacgtcaatctgcaagatctggctatgctgcccaatccgtttgcccccagactggagacactcacgccggagcctctcctctcgaagcatttggagcaggccccctctctgatggaaggcattcgtaggaaggactacctgattcatgtgccttactatacgtatgactatgtcgtgcgcctgctgatggaagcggccatctcaccggatgtgtcggaaatacgccttacacagtatcgcgtagctgaaaattcgtccattatcagtgcattggaagcggctgcacagagtggaaagaaggtatctgtcttcgtggagttgaaagcccgattcgatgaggaaaacaacttgcgtttgtcagagcgtatgcgccgttcggggattcggatcgtttacagtatgcccgggctgaaagtccatgccaaaacggctctcatcctctatcatacaccggccggtgaacgtccgcaaggcatcgctttgctctctacggggaattttaatgagaccactgctcgcatttactccgacactacgctgatgactgccaatacggacattgtgcatgatgtgtaccgccttttccgcattttggacggagatcccgaaccggcacgtttcagtcgtctgctcgtggctcgctacaacatgggtgaagccattaccaacctgatcgaacgcgagatagaaaatgtgaagcgtggtaagcgtggctatatgctcctgaagatgaacggcctgcaggacaagaatgtcatcacacagctctatcgggcttccgaagccggtgtggagatcgatctgatcgtgcgaggtatctgctgtttggtacccgatatgccacagagtcgcaatatacgtgtcactcgattggtggatatgtatttggagcatagccgtatctggtgcttccacaacggggggaaagaagaggtattcatctcttcggccgactggatgaagcgcaatctatacaaccgcatcgagactgcctgccctgtgctggatcctgctttacgaagagagattatcgacatattggagatccagcttcgcgacaatatcaaggcttgccggatcgattcttctctcaacaacatttacaaacacaatagcgatgagaaaccggtgcgagcacaagctgctatctaccgctatctcaaaggcaaagaagaggccactcctgctgcaaaataa

SEQ ID NO: 49879 - protein, 695 aa, Porphyromonas gingivalis W83
MDVSAYPFFRRDMSWLSFNERVLMEAADRTLPVYDRIKFLSIFSSNLEEFYTVRVAYHQAVLQKRRDRSEAEEDSDADAHILQAIRETVIRQDELYYRIFYDQILPTLEEHGIRLRTHAPTHPDHKAYLRRFFHEEIFPLLYPMLLLPSKVRTFIRSGRVYLAVRLKEKETDEAYSYALLNVPTDGLPRFVELPRLQTDTFYYYSFLEDIIKEHLDVVFPGYEVMDSYSIKVSRDADLLLDAQRPEDLPGEIRKKVKTRKLGAPTRFMYDGRMPDEVLRYICSSCDIDPEEAIRSGNYVNLQDLAMLPNPFAPRLETLTPEPLLSKHLEQAPSLMEGIRRKDYLIHVPYYTYDYVVRLLMEAAISPDVSEIRLTQYRVAENSSIISALEAAAQSGKKVSVFVELKARFDEENNLRLSERMRRSGIRIVYSMPGLKVHAKTALILYHTPAGERPQGIALLSTGNFNETTARIYSDTTLMTANTDIVHDVYRLFRILDGDPEPARFSRLLVARYNMGEAITNLIEREIENVKRGKRGYMLLKMNGLQDKNVITQLYRASEAGVEIDLIVRGICCLVPDMPQSRNIRVTRLVDMYLEHSRIWCFHNGGKEEVFISSADWMKRNLYNRIETACPVLDPALRREIIDILEIQLRDNIKACRIDSSLNNIYKHNSDEKPVRAQAAIYRYLKGKEEATPAAK

SEQ ID NO: 49880 - DNA, 2094 bp, Wolinella succinogenes DSM 1740
  CDS (1)..(2094): transl_table=11
atgaacctaaatgatccaaaactctacttcaatcgagagctctcttggttgcagttcaatactcgtgtgctcaaagaggcgcataacaagaaaaatcccttgctggagcgcctgaagttcatcgcgatttatggcaccaacttagatgagttttatatgattcgtgtggcgggactcaaacgcctctataccgcggggattagcgagagtggtgcggatcgcctcacccctttgcagcagctcacctctattcgtgactcgctccatgaggagaaaaaagagcttgaggcgcttttttttgaagtcaaaggcgagctagaaaaagaaggactctttatcaaagagtttatagaattggataatgaaaaaaaacaggagctaaaagactattttgattcctacctctatcctatcattatccctatcgcggtggacgcgactcaccccttccctcacctcaataatcttagcttcgcgatcgtggtgaagctccaaagtagtgagaatccccaagagattaaatttggcatggtgaggattcctcgaatgttgccacgatttgttgagatgagcgacaacacctatgttcctattgagacggtggtgggagagttcatcggagaggtcttctcaggctatgaggcgctcgagtatgccccctttagggtgacacgaaatgccgatatggaaattgaagaggaggaggcggatgacttcatggagctcatggaggagggattgaagcttcgtaaaaaaggggagatcgtccgccttgaagtgggcagaggctcggatgaagagctttttggattcctcaatctccacctcaaggttcagcctgaagatatctatgagtacgcgatcccgctcaaccttaatgccctgtggcagatcgtgggcaacaaaaactttgcccctctcacctatcctctctacaatccccgtacgcttcctcctttggataaaaatgtgaatattttttcggtgcttgatcagcacgatgtggcgatgtttcacccctatgagagctttgatcccgtggtcactttcatccaaaacgccgctaaagaccccgatgtctattcgattcgcatgacgctctatcgcgtgggcaaaaactctcccatcgtcaaggcgctcatggaggcggcggagaataacaagcaggtgactgcgcttgtggagctcaaggcgcgctttgatgaggagaacaacctccactgggcaaaagccttggagtcagcgggtgctcatgtcatctatggagttccagggctcaaggtgcatgccaaaatcgcactcgtgattaaaaaggtgggcaaggagctaagagagtatgttcacctctctacgggcaactataaccccgccaccgctaaaatctacaccgacattagcttcatgagctccaagcgcgaattcacgcaagatgcgaccaaatttttccataatctctcaggcttctcccatcgttcgcgccttgacactatctttgtcgcgcctttgcagatcaagcccaagattcttgccctcattgagaacgagaccaagaggggcgcagaggggcgaatcatccttaaggctaactctgttgtggatactgatgtgatcaaagcactctacaaagcctctcaagcgggcgtgaagatcgatatgatcgtgcggggaatctgctgccttaggcctaaagtggagggggtgagcgagaatatccgtgtcatctccattgtggggcgctatttggagcacgcgagaatctactatttcaaaaacagcactccaagcgtctatttctcaagcgcggatttgatgccaaggaatctagagcgtcgcgtggagcttatgacccctgtctttgatgagggaattgctgagaagtttttggggatcctcaaactccagctcgaagataatgtccaatcctacgagctcaaagaggatggaagctacgagagaatcgtgggtgagggcaagaatgtgagtagtcaaaaaatctttgaagagtatgtaagcacgctctatgcctcactcaagaaggacgaagaggatatcaaagccaagcgcttggccaagcgaatgttcaaggagagctag

SEQ ID NO: 49881 - protein, 697 aa, Wolinella succinogenes DSM 1740
MNLNDPKLYFNRELSWLQFNTRVLKEAHNKKNPLLERLKFIAIYGTNLDEFYMIRVAGLKRLYTAGISESGADRLTPLQQLTSIRDSLHEEKKELEALFFEVKGELEKEGLFIKEFIELDNEKKQELKDYFDSYLYPIIIPIAVDATHPFPHLNNLSFAIVVKLQSSENPQEIKFGMVRIPRMLPRFVEMSDNTYVPIETVVGEFIGEVFSGYEALEYAPFRVTRNADMEIEEEEADDFMELMEEGLKLRKKGEIVRLEVGRGSDEELFGFLNLHLKVQPEDIYEYAIPLNLNALWQIVGNKNFAPLTYPLYNPRTLPPLDKNVNIFSVLDQHDVAMFHPYESFDPVVTFIQNAAKDPDVYSIRMTLYRVGKNSPIVKALMEAAENNKQVTALVELKARFDEENNLHWAKALESAGAHVIYGVPGLKVHAKIALVIKKVGKELREYVHLSTGNYNPATAKIYTDISFMSSKREFTQDATKFFHNLSGFSHRSRLDTIFVAPLQIKPKILALIENETKRGAEGRIILKANSVVDTDVIKALYKASQAGVKIDMIVRGICCLRPKVEGVSENIRVISIVGRYLEHARIYYFKNSTPSVYFSSADLMPRNLERRVELMTPVFDEGIAEKFLGILKLQLEDNVQSYELKEDGSYERIVGEGKNVSSQKIFEEYVSTLYASLKKDEEDIKAKRLAKRMFKES

SEQ ID NO: 49882 - DNA, 2091 bp, Gloeobacter violaceus PCC 7421
  CDS (1)..(2091): transl_table=11
atgagcgagacttccatcacagacagcgttgaaactaaaattgggctggacgacccggcgcttctgattaaccgggaactcagttggctcgaatttaattcccgggtgctcgacgaagcgctcgacgagcgcaacccgctgttggagcggctcaagtttctggccatcttcagcagcaacctggatgaatttttcatggtgcgcgtctcgggcctcaagcaacaggtcgaattgggtttgacgaacaaaacccccgacggtcttggaccgcaggcgcagctcgacgccatcgcccaccggctgcggccgttgctcgagacccagacgatggcgctgcgcacccagattttgccgaggctcgccgaagagggcatccgcatctgcgactacggcgagatcaagattctgccccggcagcaggagcggctgcagcgttacttcgaggagcaggtcttcccggtgctcaccccgcttgcggtcgatccgggtcacccgtttccgtacatctccaacttgagcctgtccctggcggtgctggtgcgcgatccggtgagccgcaaggaactgttcgcccgcgtcaaggtaccccaggggctgccgcgtctggtgccgctcgggattcccaatcagttcgtttcgcttgaagaggtgatcggtgcccacctcgaccagctgtttccgggcatggaagtcctcagccggcatccgtttcggctcacgcgcaacagcgatctggaaatggccgaggaagaagccgaagatctgctgctcaccatcgagcagtcggtgcgcaatcgccgcttcggcgaagcggtgcgtctggagattaccccccagatgccggttcacgtgcgtgcgcgcctgctcgaagaactcgaactggacgagcaggacgtctatgaaatcaacggcttgctcgatttgcgctgtctttggcaactggccgggctggagaggcccgatctcaagcaccggccctttagcgcccaggtgccgcccgattttcgcaaccctcaactcgatatctttcagctcatccgccagggcgaccggctggtgcaccacccctacgattcgtttgccgccaccgtcgagcgcttcgtctcggcggcggcggacgatccggacgtgctcaccatcaagcagaccctgtaccgcacctccggcgactcgcctatcgtgcgcgccttgattcgcgccgctgaaaacggcaagcaggtggcggtgctggtggaactcaaagcccgcttcgacgaagagaacaacatcaactgggcgcgagccctggagcgcgccggggtgcacgtcgtctacggcctggtgggtcttaagacccacgccaaggcgctgttggtggtccgccgcgaaaaaggccacatccgtcgctacgtgcatctggccaccggcaactacaactccaaaaccgccaatctctacaccgactacggtctatttagctgcaggccggatctgggggccgacgtcaccgatttgttcaactatctgaccggctactcccaccagacccattaccgcaagctgctggtcgctcctgcccgcatgcgcgaccaatttgtcgaactgatcgaccgcgagattgccgcgcgctcccccgaggctcccgggcggatcatcgccaagatgaattccctggtcgacccgattttgatccgggcgctgtgccgggcttcccaggccggggtgcacatcgatctgattgtgcgcggcatctgctgtctgcggccgggctatgccgaggtgagcgaaaatattcgcgtcatcagcatcgtgggccgcctgctcgaacattcgcgggtgttctacttcggcaacgccggcaacagcgaagtctacatcggctctgctgactggatgccccgcaatctcgatcggcgcgtcgaggtgatgacccctgtcgaagagccgcgcctgcgcgaggaactggtcgcttttttgaatctgctgctcagcgacaaccgccagagctgggagttgcagaccaacggcgcctacgcccgccgtcaggcgttgcccggtgaaatcgaaatcagctcccagcaggtgctcatcgaccgggcgctcagccgctga

SEQ ID NO: 49883 - protein, 696 aa, Gloeobacter violaceus PCC 7421
MSETSITDSVETKIGLDDPALLINRELSWLEFNSRVLDEALDERNPLLERLKFLAIFSSNLDEFFMVRVSGLKQQVELGLTNKTPDGLGPQAQLDAIAHRLRPLLETQTMALRTQILPRLAEEGIRICDYGEIKILPRQQERLQRYFEEQVFPVLTPLAVDPGHPFPYISNLSLSLAVLVRDPVSRKELFARVKVPQGLPRLVPLGIPNQFVSLEEVIGAHLDQLFPGMEVLSRHPFRLTRNSDLEMAEEEAEDLLLTIEQSVRNRRFGEAVRLEITPQMPVHVRARLLEELELDEQDVYEINGLLDLRCLWQLAGLERPDLKHRPFSAQVPPDFRNPQLDIFQLIRQGDRLVHHPYDSFAATVERFVSAAADDPDVLTIKQTLYRTSGDSPIVRALIRAAENGKQVAVLVELKARFDEENNINWARALERAGVHVVYGLVGLKTHAKALLVVRREKGHIRRYVHLATGNYNSKTANLYTDYGLFSCRPDLGADVTDLFNYLTGYSHQTHYRKLLVAPARMRDQFVELIDREIAARSPEAPGRIIAKMNSLVDPILIRALCRASQAGVHIDLIVRGICCLRPGYAEVSENIRVISIVGRLLEHSRVFYFGNAGNSEVYIGSADWMPRNLDRRVEVMTPVEEPRLREELVAFLNLLLSDNRQSWELQTNGAYARRQALPGEIEISSQQVLIDRALSR

SEQ ID NO: 49884 - DNA, 2292 bp, Rhodopseudomonas palustris CGA009
  CDS (1)..(2292): transl_table=11
atggaaacgtcatgcagcgtcagcattgtctcgcggcgccgcagccgcggtgcgccccatcctggtctggatcaacttctcatggactccgagcaagtgattgccatcgaagagaaaaaaggcgaaaccgagccggcgtcgatgatcgccgccggccccgagcgattcatcaatcgcgagctgtcatggcttcacttcaaccgtcgggtgctcgaagaatcggtcaatccgcaccacccggtgctggagcgggtgcgatttctgtcgatttcggccaacaacctcgacgaattcttcatggtccgcgtcgccggcatcaaggcgcagatccgcgagggcatcaccgaacgcagtccggatggcctgaccccttccgaacagctcggcctgatcaacgaggcggtctccaaactcgccagcgaccagcagtcgatctggcgtgacctgcgtggggttttggccgattccggtattctgttgttggacggcaaggatgtcaccaaggctgagcgggcctggatcgaggatcacttcctccacaacatcttcccgctgctgacgccgctggcgatcgacccggcgcatccgttccccttcattccgagcctcggcttcaccatcggcctgcagcttgcccgggtgtccgacggcaggccgatgaatgcgttgatccggatgccggcgcggatcgaccgtttcatccgtctgcccgggaatgggcgcgaccagaccgtccgggtgatgacgctggagcaggcgacctcgctgttcatcgggcggctgttccccggctaccacgtcaaggggcagggctcgttccggatcatccgcgacagcgaactggaaatcgaggaagaggccgaggacctggtgcggctgttcgagaccgcgctgaagcggcggcggcgcgggtcggtgatccggatggaggtcgactcctccatgccggaggagctacgcgtgttcgtgcagcgtgcgctgaccgcggccgacgacgaggtgttcctggtcgacggcgtgctcgcgatgaacgaactgtcgcagctgacccgggtcgatcgtcctgacctcgaattcgttccctatgtgccgcggcatccggaacgggtgcgcgaccatggcggcgacatcttcgcggcgatccggcagaaggacctgatcgtccaccatccatatgaatcgttcgacgtcgtcgtccagttcctgcagcaggcggcgcgcgaccccgacgtcgtcgcgatcaagcagacgctgtatcgcacatcgaacaactcgccgatcgtgcgcgcgctcgccgaagccgccgaggccggcaagtcggtcaccgcgctggtcgaactgaaagcgcggttcgacgaagaagccaatatccgctgggcgcgcgacctcgagcgcgccggcgtgcaggtggtgtacggcttcctgcagctcaagacccacgccaagctgtcgctggtcgtgcggcgcgagggtggcagcctgacgacctacatccacaccggcaccggcaactaccatccggtgacggcgcgtatttatacggacctgtcgtacttcacgtccgatccgatcctcggccgcgacgccgcgcgggtgttcaactacatcaccggctacgccgagccgagcgacatcgagaagatggcggtatcgccgatcacgctgcgcaagaccatgctggagcacatccgcggcgagaccgcgttcgccaagcacggcaagccggcggcgatctggctgaagatgaatgcgctggtcgatccggagatcatcgacgcgctgtacgaagcctcccgggcaggggtctcggtcgagctggtggtccgcggcatctgctgcctgcggccgggggtgccggggctgtccgacaacatccgggtgaagtcgatcatcggccggttcctcgaacacggccgcatctattgcttcggcaacggctacgggctgccgagcgccaaggcggcggtgtacatctcctccgccgacatgatgccgcgcaatctcgaccgccgggttgaagtgctgtgcccgatgctcaacccgaccgtgcatcagcaggtgctggaacagatcatggtcgccaacctgaaagataccgagcagagctggcggttgttgccggacggatcgtcgacgcgtatgaaggccgccaagggcgaggagcccttcaacgtccacaactacttcatgaccaatccgagtctgtccggccgtgggaagtcgctccaggaatcctcgccccgccggcttacccggcgggccgagcgccagcagtcccagcaatcttcctaa

SEQ ID NO: 49885 - protein, 763 aa, Rhodopseudomonas palustris CGA009
METSCSVSIVSRRRSRGAPHPGLDQLLMDSEQVIAIEEKKGETEPASMIAAGPERFINRELSWLHFNRRVLEESVNPHHPVLERVRFLSISANNLDEFFMVRVAGIKAQIREGITERSPDGLTPSEQLGLINEAVSKLASDQQSIWRDLRGVLADSGILLLDGKDVTKAERAWIEDHFLHNIFPLLTPLAIDPAHPFPFIPSLGFTIGLQLARVSDGRPMNALIRMPARIDRFIRLPGNGRDQTVRVMTLEQATSLFIGRLFPGYHVKGQGSFRIIRDSELEIEEEAEDLVRLFETALKRRRRGSVIRMEVDSSMPEELRVFVQRALTAADDEVFLVDGVLAMNELSQLTRVDRPDLEFVPYVPRHPERVRDHGGDIFAAIRQKDLIVHHPYESFDVVVQFLQQAARDPDVVAIKQTLYRTSNNSPIVRALAEAAEAGKSVTALVELKARFDEEANIRWARDLERAGVQVVYGFLQLKTHAKLSLVVRREGGSLTTYIHTGTGNYHPVTARIYTDLSYFTSDPILGRDAARVFNYITGYAEPSDIEKMAVSPITLRKTMLEHIRGETAFAKHGKPAAIWLKMNALVDPEIIDALYEASRAGVSVELVVRGICCLRPGVPGLSDNIRVKSIIGRFLEHGRIYCFGNGYGLPSAKAAVYISSADMMPRNLDRRVEVLCPMLNPTVHQQVLEQIMVANLKDTEQSWRLLPDGSSTRMKAAKGEEPFNVHNYFMTNPSLSGRGKSLQESSPRRLTRRAERQQSQQSS

SEQ ID NO: 49886 - DNA, 2181 bp, Bdellovibrio bacteriovorus HD100
  CDS (1)..(2181): transl_table=11
ttgaacacgcccaaagcggcttcgccgaaacgcacatcgaaaaagaaatctacacgcaagccgaaggttgtcgaacatcctctgtcatctgaaagtcttttctccagccgggagatcggctggctgaatttcaacagacgggtgttggctgaagccgaggacgctcgcaatcctttgttggagcgtgtgaaattcttaagcatctccggatccaatctggatgagttctttatgaaacgtgtgggcggtttgaaacgtcacatggcctatggtgtttccgccaaatcgtctgacggaaaaacaccgatgcatcagttgcaggaaatccgtcagtttgtgattccgatgattcaggatcaggctcatgcctacaacaaggtgcttaagcctgctctggaaaaagaaggcatccatctgctttcttggaaggacctttctgacaaagaaaaagaaagtgtcaaaaagtactataaccgcaatgtcttcccggtactgacgccgctgtcggtggatccaggacatccattcccgttcatctcgaatctgtcgatttctttaggagtgaccctgaaacatcccggaagtgaagaaaagctctttgcccgggtgaaaatccccaaagttttgccgcagtggattcgtactgatgctgaaagcaaggattatcgcttcatcagtcttttggatgtgatcaaggaaaatctggcggatctgttcccggccatgcaggtgctgggagtgatgccgttccgactgactcgtaatgccgattcggaccaggatcaggaagatgcggaagacttgctggaagccattgaggaagaactgcgccagcgccgttttgccgaagtggtgcgcctggagcacgggccgcacccggatccgtggatgctgaagttcctgatggaggaactggagctgattgaagaggacatttatgagacctccagtcttttggatttcacagacttgggtgtgatctcggatgtaaatctgccgaaattgaaatttgatccttacactccggtggtggcgcccgcatttgccgaagacgggcacgggatgtttaacgccattaagatggcggaccagctggtgcatcatccctatgaaagcttcgcggcttcggtggaaaagttcattcgtgtggccagtgaagatcccaaggtgctggcgatcaagatgactttgtaccgcaccggtgataacagcccctttattcgctcactgattcgtgcggccgaacagggcaagcaggtcgtgtgtctggtggaactgaaggcgcgcttcgatgaagagcgcaatatctattgggccactgaacttgaaaatgccggcgtgcatgtggtttatggcgttgttggtttgaagactcacgccaagaccgcgctggtggttcgtcaggagcaagagggcttgcgctgttactgccatatcgggacgggaaattacaacgtggcgacttcgcgattctatacggatctggggcttttgacggcgcgtgaagaaatcaccaatgatgtggtggagtttttccattatctgacgggaagatctttaaagagcaactatcagaatctgctgattgcgcccgtgaatatgttctcgcgctttaagtccatgatcgaacgcgaggccgaacacgccaaagcgggtcgtccggcgcagatcattgccaaattcaataacttcgaagaaaacgacattgctgtggccctgtacgcggcttcgcaaaaaggggttgatatcgagatgatcgtgcggggcttctgctgtcttcgtcccggggtcccgggcatgagtgagcgcatccgcgtgacctcgatcatcggtcgtttcctggagcattcacgcattttctatttccgcaacggggaaaaggacccggtggacggagagttctatctgggatctgccgattggatgtatcgcaatctgcatgcccgggtggaggccattgtgccgattctggatcgcagtttgaaagaaaagtgctgggagatcctgagtttgtgtgtgaaagagcaacgccagtcctgggaaatgaagtccgatgggacttatgtacgtcagaactcgcaggatgtcggtttgcatcaaaccctgatgcaaattgcgaaagcccgggttacatttgtggatgaaaataccagttcatccaccagttcaaattcggagtag

SEQ ID NO: 49887 - protein, 726 aa, Bdellovibrio bacteriovorus HD100
MNTPKAASPKRTSKKKSTRKPKVVEHPLSSESLFSSREIGWLNFNRRVLAEAEDARNPLLERVKFLSISGSNLDEFFMKRVGGLKRHMAYGVSAKSSDGKTPMHQLQEIRQFVIPMIQDQAHAYNKVLKPALEKEGIHLLSWKDLSDKEKESVKKYYNRNVFPVLTPLSVDPGHPFPFISNLSISLGVTLKHPGSEEKLFARVKIPKVLPQWIRTDAESKDYRFISLLDVIKENLADLFPAMQVLGVMPFRLTRNADSDQDQEDAEDLLEAIEEELRQRRFAEVVRLEHGPHPDPWMLKFLMEELELIEEDIYETSSLLDFTDLGVISDVNLPKLKFDPYTPVVAPAFAEDGHGMFNAIKMADQLVHHPYESFAASVEKFIRVASEDPKVLAIKMTLYRTGDNSPFIRSLIRAAEQGKQVVCLVELKARFDEERNIYWATELENAGVHVVYGVVGLKTHAKTALVVRQEQEGLRCYCHIGTGNYNVATSRFYTDLGLLTAREEITNDVVEFFHYLTGRSLKSNYQNLLIAPVNMFSRFKSMIEREAEHAKAGRPAQIIAKFNNFEENDIAVALYAASQKGVDIEMIVRGFCCLRPGVPGMSERIRVTSIIGRFLEHSRIFYFRNGEKDPVDGEFYLGSADWMYRNLHARVEAIVPILDRSLKEKCWEILSLCVKEQRQSWEMKSDGTYVRQNSQDVGLHQTLMQIAKARVTFVDENTSSSTSSNSE

SEQ ID NO: 49888 - DNA, 2139 bp, Prochlorococcus marinus str. MIT 9303
  CDS (1)..(2139): transl_table=11
atgagtaatccagcggtagcttcggagcactacatcaaccgcgagctcagctggatcgccttcaacgaaagggtccttgctcaggcactgaatacgcgcaccccgctgctggaacaagccaagttcagtgccatcttcagcaacaacctcgacgaattcttcatggttcgcgtggcctccctcaaagcgcaagtggaagccggcattaccaaaaccagcgcagatggtctaacccctattcagcagctcctcacgatccgagatcaccttgttcctctcatcgagcaacaacaagatcactaccgtaaacacctcaaaaaccagttagtcgagcaaggtgttcacctactcgactatgagcaactcaatcaaaaagaacgcctctgggttgacaattatttccagacagccattttcccggtgctgacaccactagccgtggatcaagcccatcccttccctttcgttagcaatctcagcctcaacattgcgaccctgatcctcgatccggaaacaggccaacaacaattcgcccgggtcaagattccacaaaaaacgatgcctcgttttgtagagatacctcctgatctaagtggcatcaatcccaagccggttcacacagcagttccattggagcaagtggtggccttcaacctcaaattgctcttccccggaatgaagattgaagagcactacttcttccgagtcacccgcgatgccgaccttgaactcagggacctagaagccgacgatctcatgagcgccatggaacagggccttcacaagcggcggatgggcggagaagtggtgagactcgaagtgacaaacgaaatgccccagagagtcgttgagatgctgattgaaggtatggctgttgaagaaaacgacctttatcgcatcgagggactactaggcctcgatgatctattcggtctcatgcgtttgcccctggagcaactcaaagaccaaccccacattggcctgaccgccaaagttctctcccgcagccagcgcagaatgcttgaagacgaatcaatcaaagaagaagaattcaaaagcatcttctcggtgattcgccgcaaagacattctccttcaccacccatacgaactgttcgcgacctctgtagaggaattcatcaatcaagcagcagacgatcccctcgtcatgggaatcaagatcacgctctatcggacatccaaggattccccaatcattgcggccctgatccgtgcagcagaacacggtaagcaggtcatggctctggttgaactcaaggcacgcttcgatgaaggcaacaatattcaatgggcccgtcatctagagcgatcgggcgttcacgttgtctatggcgttttaggactaaaaacacacacaaaaaccatcttggtcgttcgcaaagaaaaagagcgcctacgcagctacgtgcacatcggcacaggtaactacaactcgaagacatcacgtctctacaccgaccttggcctgctctctgcaagaccggaactcagccaagatctagttgaactattcaattatctcactggcttttcaaagcaacaaagtttccgtcgactgctggtggcgcctgtcaccctacgcaaggggatggaatcactgatcctccgcgaaatcgaacacgcccgcgaaggtagaggcggacacatccgcgccaagatgaatgctctggtggatccagccatcattagcctgctctacgaagcttcccaagttggagttcgcattgaactgatcatccgcggtatgtgctgtctctacccagggcgaaaagggttcagcgaaaacatcagcgtgatcagcatcatcggccggttcctggaacactcccgtatcttctggtttgccaatgacaacaacccagaggtttatatcggcagcgcagacttgatgcctcgaaacttagacagacgcgtggaagccgttactccaattgaagaaccagagcaaaaggaacacctagagcgactgctgaacctctacctaaacgacaaccgggaagcctgggatatgcagagcgatggcagctttttacagcgccaacccaatcccaatagtgaagaacatcgtgcacagcaacagctgatcaacctctggcaacaaggcatccctgcagggtga

SEQ ID NO: 49889 - protein, 712 aa, Prochlorococcus marinus str. MIT 9303
MSNPAVASEHYINRELSWIAFNERVLAQALNTRTPLLEQAKFSAIFSNNLDEFFMVRVASLKAQVEAGITKTSADGLTPIQQLLTIRDHLVPLIEQQQDHYRKHLKNQLVEQGVHLLDYEQLNQKERLWVDNYFQTAIFPVLTPLAVDQAHPFPFVSNLSLNIATLILDPETGQQQFARVKIPQKTMPRFVEIPPDLSGINPKPVHTAVPLEQVVAFNLKLLFPGMKIEEHYFFRVTRDADLELRDLEADDLMSAMEQGLHKRRMGGEVVRLEVTNEMPQRVVEMLIEGMAVEENDLYRIEGLLGLDDLFGLMRLPLEQLKDQPHIGLTAKVLSRSQRRMLEDESIKEEEFKSIFSVIRRKDILLHHPYELFATSVEEFINQAADDPLVMGIKITLYRTSKDSPIIAALIRAAEHGKQVMALVELKARFDEGNNIQWARHLERSGVHVVYGVLGLKTHTKTILVVRKEKERLRSYVHIGTGNYNSKTSRLYTDLGLLSARPELSQDLVELFNYLTGFSKQQSFRRLLVAPVTLRKGMESLILREIEHAREGRGGHIRAKMNALVDPAIISLLYEASQVGVRIELIIRGMCCLYPGRKGFSENISVISIIGRFLEHSRIFWFANDNNPEVYIGSADLMPRNLDRRVEAVTPIEEPEQKEHLERLLNLYLNDNREAWDMQSDGSFLQRQPNPNSEEHRAQQQLINLWQQGIPAG

SEQ ID NO: 49890 - DNA, 2085 bp, Prochlorococcus marinus str. MIT 9301
  CDS (1)..(2085): transl_table=11
atgaaaatccaggctgatatttttattaatagagaattaagttggattgaattcaataaaagagtactcctaactggtatggaaaaggagtacaaaatcctagataaagttaaattttgttcaatttttagtaacaatctagatgaattttttatggtaagggtagcctcattaaaagctcaagttgaagcaggaattacaaaaaaaagtgttgatggacttacccctcaagagcaattaacaaaaataaataaagaagtaaagaatttaactgccctacaagaaaactatataaataatgaactaaattatgaattaaaagaaaaaggtataattttaaaaaaatataatgacctaagtgaaaatgaaagaaattggtgcgataactactttacttcatctattttccctttattaactccattagttgttgatccagcacatccatttccttttataagtaatttaagtctaaatttagcagctcttataagggatggggaaaattctaaaaatcagtttgtcagagtaaaaataccaacaaaaaatataagtagatttatacaaattcctaatgaaattattaaacatggtgatgaaagtaaatatttttttataagtgtggaagatttaattgggaataatataaacactttatttaacggaatggaatgtataaattactctttttttagagttacaagggatgcagatttagaattaaaagaacttgaagctgatgatcttcttttagcagttgaacaaagtttgcaaaagagaagattaggtggagacgtagttagattagaagttgaatcggatatgccagaaaatattctgaaattactcattgaaagtatttcaatacaaaaagagtatatttacttttgcaaaagttttttaggccttgacgatttcaatcagcttacaagaattaatagagatgatttaaaagaaaatctgctaattgggaaaactcacccgaaattaaagaatttagatttaccttcaaacaaaaactttaattctatttttaatatccttaggaaaaaaaatattctgcttcatcatccatacgacttgtttagaacttcagttgaagaatttataaacaaagcagctgatgatccacttgtaatggctataaaaattactttatatcgagtttccaaggattccactatcatttcagctttaatgagagctgcagagaatggtaaagaagtaatgactcttgttgagctaaaagcaagatttgatgaagacaataatattcaatgggcaaaacaacttgaacaagctggagttcatgttgtatatggaatcataggatttaaaactcatacaaaaatagctttaatagtaagaaaagaaaaaggacgattaaggaattatttccatattggaacaggtaactataactctaatacttcaaaattttatacagatttaggattactttcaactgatcctgatattgcatctgatttacttgggctatttaactacttatcaggtttttctaaacaaaaaagttatcaaaagttattagtttctccctcatctatgagagagaaatttatatttctgataaagagagaaattaaaaatgcagaggaaggcaaaaaagcggaaataattgcaaaaatgaattctttagttgacccagaaataattaaacttctctatttagcttcagactcaggtgtaaaaattagcctcatcataagaggtatttgttgcttatacccacaaagaaaaaatttaagtgaaaatattaaagtcataagcattattggccactttcttgaacactcaagaattttttggtttagtaacaacggtcaaagtgaggtttttattgggagtgctgattggatgagaagaaatcttgatagaagaatagaagctgttactccaatagaggattatgacttgaaatctaaaatatactcacttttgcaaacctacattaaagataactacttttcttggataatgaaggaagatggttcttattcgaaatatgaattagattcttcaaataatcgttcgcaaattgacctcatagaaaaacaaaattaa

SEQ ID NO: 49891 - protein, 694 aa, Prochlorococcus marinus str. MIT 9301
MKIQADIFINRELSWIEFNKRVLLTGMEKEYKILDKVKFCSIFSNNLDEFFMVRVASLKAQVEAGITKKSVDGLTPQEQLTKINKEVKNLTALQENYINNELNYELKEKGIILKKYNDLSENERNWCDNYFTSSIFPLLTPLVVDPAHPFPFISNLSLNLAALIRDGENSKNQFVRVKIPTKNISRFIQIPNEIIKHGDESKYFFISVEDLIGNNINTLFNGMECINYSFFRVTRDADLELKELEADDLLLAVEQSLQKRRLGGDVVRLEVESDMPENILKLLIESISIQKEYIYFCKSFLGLDDFNQLTRINRDDLKENLLIGKTHPKLKNLDLPSNKNFNSIFNILRKKNILLHHPYDLFRTSVEEFINKAADDPLVMAIKITLYRVSKDSTIISALMRAAENGKEVMTLVELKARFDEDNNIQWAKQLEQAGVHVVYGIIGFKTHTKIALIVRKEKGRLRNYFHIGTGNYNSNTSKFYTDLGLLSTDPDIASDLLGLFNYLSGFSKQKSYQKLLVSPSSMREKFIFLIKREIKNAEEGKKAEIIAKMNSLVDPEIIKLLYLASDSGVKISLIIRGICCLYPQRKNLSENIKVISIIGHFLEHSRIFWFSNNGQSEVFIGSADWMRRNLDRRIEAVTPIEDYDLKSKIYSLLQTYIKDNYFSWIMKEDGSYSKYELDSSNNRSQIDLIEKQN

SEQ ID NO: 49892 - DNA, 2118 bp, Herminiimonas arsenicoxydans
  CDS (1)..(2118): transl_table=11
atggcaaaagtcaagaaaatgcacaagaaagccataccagaaagcgcttctgcatctcctcttccgcaaagtgcaatctatctgaaccgagaattatcccagttggcgttcaatcgccgcgttctggcgcaagctgaaaatccagccgtccccttgctggagcgcttgaagtatttatgtatcgtcagcaacaatctggatgaactgtttgaagtacgcatcgccagcctgctggccaacaaccatctggatggcgaagtcatcgagccacccactctgtctgccgcgctggccgttgcaggcgcagaatgccacaagatcgtcgaacgccagtatcgcgtactgaatgaagaagtgttgccgcaactggcgcaacagggcatccatctattacgcgatcaagatcgcaatgaagcgcaacgggcctgggtcaaagcatatttcgatcgcgaagtaaggccgctgctgacgccgatcgggctcgatccggcccatcctttcccacaggtcgtcaacaagagtctgaatttcatcgtcgagctgtccggcaaggacgccttcggccgcggcaccgcgattgcgatcctgaaagcgccacgcgtactgccgcgcgtcatccagctgccagccgaactgtcgcagaacggcgtttccttctgtctgctgtcctcgattattcatgcacacatcaaggacttgttcaccggacgcgacgtactggcgtattcgcaattccgggtcacgcgcaacagcgatttgtgggtcgatgaagaagaagtgaaaaatctgcgccaggccttgcagggagaactgcaaagccgcaattttggcgttgccgtacggctggaagttgccaagaactgtccgccgcgtctgtcgcaatttttgctggaacaattttccatcgacaagaaccggctgtatgcagtggatggcccggtcaacatggttcgcctgtcggaattgatcgagcacgtcaaccagcccgaactgcgctttccaccctactcgcccacctatccgcccaagctggcgaatgtcgatctgttcggcgccatcggcaaacacgatgtgctgctgcaccatccgttccaatcgttccagccggtgcttgagttcatacgctcggctgcacaggacccggacgtggtggcgatcaagcaaaccatttatcgcaccggcatgaactccgacttgatggaatcgctgatcatcgccgcgcaacgcggcaaggaagtcaccgtgattgtcgaattgatggcgcggttcgatgaagaagccaatatcaactgggcagaccggctagaacgcgccggcgcacaagtcgtgtacggcgtagtcggactgaaaacgcatgcaaagctggcgttggtgattcgtcgcgaagaaggcgcattgcgttattacgcccatctgggcaccggcaattatcatccgagcaccaccaagttttataccgatttcgggctgctgacggcgaatccggcgctagccaccgaagtcaatgaaatcttcatccacctgaccagcctgaccaaaccgaaaacgctcacgcatctgtggctggcgccgtttgccttgcaaaaggaattcatccgcgccatccgcaacgaagcgaagatagcgaaggcaggacgacccggccgcatcatcgccaagatgaacgcgctgctggatgaatcggtgatccgcgccttgtatgcggcgtcggcggatggcgtcaagatagatctgatcgtgcgcggcgcctgcgctttgcgacccggcgtgccgggtttgtcggaaaacatccgcgtgcgctccatcgtcggacgttttctcgaacacactcgtatctattatttccgcaacgatctggcgcatgacatttatctgtccagcgcggactggatgaatcgcaacctgttccgccggattgaagtcgcttttccgattctcgatcccggcctgaaaaaacgggtaatcgcggaaggtttgaatccctacctcaaagataatacgaatacctgggaactggattccaatggcgtctatcaaaaacgtaaaccacgcggcaaggcaggcgccttcagcgcgcaacaatatttaatgcaggttctgggcaacccgatggagtaa

SEQ ID NO: 49893 - protein, 705 aa, Herminiimonas arsenicoxydans
MAKVKKMHKKAIPESASASPLPQSAIYLNRELSQLAFNRRVLAQAENPAVPLLERLKYLCIVSNNLDELFEVRIASLLANNHLDGEVIEPPTLSAALAVAGAECHKIVERQYRVLNEEVLPQLAQQGIHLLRDQDRNEAQRAWVKAYFDREVRPLLTPIGLDPAHPFPQVVNKSLNFIVELSGKDAFGRGTAIAILKAPRVLPRVIQLPAELSQNGVSFCLLSSIIHAHIKDLFTGRDVLAYSQFRVTRNSDLWVDEEEVKNLRQALQGELQSRNFGVAVRLEVAKNCPPRLSQFLLEQFSIDKNRLYAVDGPVNMVRLSELIEHVNQPELRFPPYSPTYPPKLANVDLFGAIGKHDVLLHHPFQSFQPVLEFIRSAAQDPDVVAIKQTIYRTGMNSDLMESLIIAAQRGKEVTVIVELMARFDEEANINWADRLERAGAQVVYGVVGLKTHAKLALVIRREEGALRYYAHLGTGNYHPSTTKFYTDFGLLTANPALATEVNEIFIHLTSLTKPKTLTHLWLAPFALQKEFIRAIRNEAKIAKAGRPGRIIAKMNALLDESVIRALYAASADGVKIDLIVRGACALRPGVPGLSENIRVRSIVGRFLEHTRIYYFRNDLAHDIYLSSADWMNRNLFRRIEVAFPILDPGLKKRVIAEGLNPYLKDNTNTWELDSNGVYQKRKPRGKAGAFSAQQYLMQVLGNPME

SEQ ID NO: 49894 - DNA, 2190 bp, Bartonella quintana str. Toulouse
  CDS (1)..(2190): transl_table=11
atggaaaaaacggttgcagatcagatttctatgtcggacataacaatggaaagtccgacgcggtttattaaccgagaattttcatggcttcaatttaataatcgtgtattgatggaggctgctaatccgaagaatcctttattagaacggctacaatttctttcgatttcagcgacaaatcttgatgagttttttatggtgcgtgttgctggccttgctgctcaaattcgtgctggagttacagcatgcagtgcagatgggtgcacaccgcaggagcaacttgattttgtgttagctgagacttcacgtttgcaggctcatcagttgcgagaattgagggttttatgtcatgaattaaaacaaaatgatattgaaattatttgtcctgctaagcttgcagaaattgaaaaatcatggcttgaaaaatatttttttgatacgattttccctgttttaacgcctttgcctgttgatcttgatcgttcttttccatttattcctaatttaacgctttctattgctcttcaattatcccggtgtgctaatcaacactctatcatagtgttgttaccactcccaactgttctgaaacgttttattctccttcctcaagaagacaatcgttttcgttttattgcggctgaagatgttatgtgcctttttataagtcatatatttcctgattacgaagttgatggaattggtacatttagagtgattcgcgatagtgatattgaagtagaagaagaggctgaagatcttgttcatttttttgaaactgcgcttaaaaggcgtcgtcgcgggcaggttattcaaattgaatttgacgcaaaaatgccagaaaatttacgccaatttataaccaatggtcttgctgttcctgatgattgtataagtgttcttgatggatttttagcacttaatatggtctcagagattgtttcgatttcacgcagtgatttaaaatttattccttataatcctcgttttcctgaatatattcgtgagcataatggtgattgctttgcggctattcgtaaaagtgatatcgtgattcatcatccttatgaatcatttgatgttgttgtacagtttttacgtcaggctgctagtgatcctgatgttattgaaatcaaacaaaccctttatcgcacatcgaatgatagcccaattgttagcgctttgattgatgctgccaaacagggtaagtcggtgacggctttggtagaacttaaagcgcgttttgatgaagaagcgaatattcgttgggcacgtgatcttgagcgtgcgggcgttcaagttttttttggttttattaccttaaaaacacatgctaaaatgtcgcttgttgtgcggcgtgaaggaaaccgtcattgcttttacgttcatcttggaactggaaattaccatcccattaatgctaaagtttatactgatctctctttttttaccactgatgatgatattggtcatgatgttgcattactattcaattatatcgctcaatatgtgcgccatgtgcgcccaaataaagcaatgaagattgctttttcgcctttaacattgcgcagccgtattcttaagcatatcgaagaagaaattaccaatgcgcaacaggggcgatttgctgctatttggataaaagttaatgcattggttgatcctgaaattattgatgctttataccgtgccagtcaagcgggtgtacagatcgatttggtcgtgcgtggcatatgttgtttgcgttctggtattccgggaatttcagataatattcgtgtgaaatcaattgtagggcgttttcttgaacatagccgcattttttgttttggtaatggtggagatttaccaggtgagaatgcgcttgtttatttaggatctgctgatatgatgcctcgtaatctggattatcgtattgaaatattggttccagtttttaacaaaatggttcgtaagcagattcttttacaaattatgttggctaatatcattgataatcaacaaagctttgatatactaagtgacggaacgtcaaaacgtataataccgcaaagaggtgaaagcccatttaatgcacaggaatattttatgaccaacgcaggtctttcggggtgggaaaaatcttttgagtcttctgcttcgcgtttggttgcgttgcatcggcagcaagctaaagtatataaagactga

SEQ ID NO: 49895 - protein, 729 aa, Bartonella quintana str. Toulouse
MEKTVADQISMSDITMESPTRFINREFSWLQFNNRVLMEAANPKNPLLERLQFLSISATNLDEFFMVRVAGLAAQIRAGVTACSADGCTPQEQLDFVLAETSRLQAHQLRELRVLCHELKQNDIEIICPAKLAEIEKSWLEKYFFDTIFPVLTPLPVDLDRSFPFIPNLTLSIALQLSRCANQHSIIVLLPLPTVLKRFILLPQEDNRFRFIAAEDVMCLFISHIFPDYEVDGIGTFRVIRDSDIEVEEEAEDLVHFFETALKRRRRGQVIQIEFDAKMPENLRQFITNGLAVPDDCISVLDGFLALNMVSEIVSISRSDLKFIPYNPRFPEYIREHNGDCFAAIRKSDIVIHHPYESFDVVVQFLRQAASDPDVIEIKQTLYRTSNDSPIVSALIDAAKQGKSVTALVELKARFDEEANIRWARDLERAGVQVFFGFITLKTHAKMSLVVRREGNRHCFYVHLGTGNYHPINAKVYTDLSFFTTDDDIGHDVALLFNYIAQYVRHVRPNKAMKIAFSPLTLRSRILKHIEEEITNAQQGRFAAIWIKVNALVDPEIIDALYRASQAGVQIDLVVRGICCLRSGIPGISDNIRVKSIVGRFLEHSRIFCFGNGGDLPGENALVYLGSADMMPRNLDYRIEILVPVFNKMVRKQILLQIMLANIIDNQQSFDILSDGTSKRIIPQRGESPFNAQEYFMTNAGLSGWEKSFESSASRLVALHRQQAKVYKD

SEQ ID NO: 49896 - DNA, 2181 bp, Bartonella henselae str. Houston-1
  CDS (1)..(2181): transl_table=11
atggaaaaaacggttgcagatcagatttctctgtcggatataacaatgaaaaatccggcgcggtttattaaccgagaattttcatggctacaatttaataaccgtgtattgatggaagctgctaattcaaagaatcctttattagaacggttacagtttctttcaatttcagcaacaaatcttgatgagttttttatggttcgtgttgctggacttgctgctcaaattcgtgctggagttacagcgtgcagtgcagatggtcgtactccgcaggagcaacttgattttgtattagctgagatttcgtgtttgcaggataatcaactacgagaattgagtattttacgtcatgaattaaaacaaaataatattgaaattatttgttctgctgggctttcagaaactgaaaagtcatggattgaaaaatattttttggatacgatctttcctgttttgacacctttatctgttgatcctgttcgcccttttccatttattcctaatctagggttttccattgctcttcaattatctcgctgtgctgatcaacactcttttatagctttgttgccacttccaacgaccttgagacgttttattcctcttcctcaaaaagataatcgctttcgttttattgcatgtgaagatgttataaacctttttatgcgtcatgtatttcctgattatgaagtcgagggaattggtacatttagggtgattcgtgatagtgatattgaagtagaagaagaagctgaagatcttgttcatttttttgaaactgcacttaagaggcgtcgtcgtgggcaagtcattcggattgaatttgaggcaaaaatgccagatcatttacgccaatttattaccaatggtcttgcggttcctgagtattgtatcaatgttcttgatggatttttggcgcttaatacagtctcagagattgtttctattccacgcaatgacttaaagtttgctccttatgatcctcgtgttcctgaatgtatctgtcagcataagggtgattgttttgcagctattcgtcaaaatgatatcgtgattcatcatccttatgaatcctttgatgttgttgtagagtttttacgtcaggctgctcgtgatcctgatgttattgaaatcaaacaaacactttatcgcacatcaaatgatagcccaattgttagcgctttgattgaggctgctgaacagggtaagtcagtgacagctttagtagaacttaaagcacgttttgatgaggaagccaatattcgctgggcacgtgatcttgaacgtgcgggcgttcaagttttttttggttttattgcattaaaaacacatgctaaaatgtcactcgttgtgcggcgtgaaggaaaacgccgttgctcttatgttcatcttggaacgggaaattaccatcctattaatgctaaagtttataccgatctttctttttttactactgatgatgatattgctcatgatgttgcattattgtttaattatattgctgaatatgtacgcccaaatgaagcaatgaagattgctttttcacccttaacattgcgcagtcgtattttggagcatattgaaggagaaattaccaatgcacggcaggggcagcttgctgctatttggatgaaagtcaatgcattggttgatcctgaaataattgatgctttatatcgtgccagtcaagcgggagtgcagattgatttggtggtgcgtggaatatgttgcttgcgtcctggtattccaggaatttccgataatattcgtgtcaaatcaatcgtagggcgttttcttgaacatagtcgcattttttgttttggtaatggtgtaaatctcccaagtgagaatgcgcttgtttatttcggatctgctgatatgatgcctcgtaatctcgattaccgtattgaaatattggttccagtttttaataaaatggtccgtcagcagattcttttacaagttatgctagcgaatatcattgataatcaacagagctttgatatattaaacgatggaacatcacaacttataacaccgcaaagaggtgaaagcccatttaatgcgcaggagtattttatggccaatgcgggtctttcaaggatggaaaggtcttttgactcttctgtttcgcatttggttgcgttgtatcagcagaaggtcaaactatataaagactga

SEQ ID NO: 49897 - protein, 726 aa, Bartonella henselae str. Houston-1
MEKTVADQISLSDITMKNPARFINREFSWLQFNNRVLMEAANSKNPLLERLQFLSISATNLDEFFMVRVAGLAAQIRAGVTACSADGRTPQEQLDFVLAEISCLQDNQLRELSILRHELKQNNIEIICSAGLSETEKSWIEKYFLDTIFPVLTPLSVDPVRPFPFIPNLGFSIALQLSRCADQHSFIALLPLPTTLRRFIPLPQKDNRFRFIACEDVINLFMRHVFPDYEVEGIGTFRVIRDSDIEVEEEAEDLVHFFETALKRRRRGQVIRIEFEAKMPDHLRQFITNGLAVPEYCINVLDGFLALNTVSEIVSIPRNDLKFAPYDPRVPECICQHKGDCFAAIRQNDIVIHHPYESFDVVVEFLRQAARDPDVIEIKQTLYRTSNDSPIVSALIEAAEQGKSVTALVELKARFDEEANIRWARDLERAGVQVFFGFIALKTHAKMSLVVRREGKRRCSYVHLGTGNYHPINAKVYTDLSFFTTDDDIAHDVALLFNYIAEYVRPNEAMKIAFSPLTLRSRILEHIEGEITNARQGQLAAIWMKVNALVDPEIIDALYRASQAGVQIDLVVRGICCLRPGIPGISDNIRVKSIVGRFLEHSRIFCFGNGVNLPSENALVYFGSADMMPRNLDYRIEILVPVFNKMVRQQILLQVMLANIIDNQQSFDILNDGTSQLITPQRGESPFNAQEYFMANAGLSRMERSFDSSVSHLVALYQQKVKLYKD

SEQ ID NO: 49898 - DNA, 2076 bp, Acinetobacter sp. ADP1
  CDS (1)..(2076): transl_table=11
atgaatactgcgatgacaacaccaccagtagaatacacttataatgatcgatacattaatcgtgaactttctattttagatttccatttacgtgttttggaacaagcggttgatcctttgcatccattattggagcgcatgaattttctattaatcttttctcgtaatctggatgaattctttgaaattcgtgtggcaggcgttttggagcaattggatttaggtaatgagagccgcagtccagatggtttgacaccgaaacaggtgcttgagcaaatttccaagacggcacatgcagcgattgagcgtcaatatcgtattttaaatgaagagatattgccaaaattgcgtgaagaagatatttgctttttacgtcgtggtgaattaacaccagcacagtcatcttgggtgaaaaaatactttcaagagcaggttgcacctgtattaaccccgattagtctggatcctgcgcatccgttccctcgcttagtcaataaaagtctcaattttgtgattacgcttgaaggtaaagatgcatttggtcgacagattgatctggctgttgtacctgcacctcgttcgttaccacgtgtggttcgtttacctgatgagcttacgggtggaaaagagcatcatgtgatgctgtctgcaatcattcatgaacatgtttcagatctgtttccgggcatgaccgcaacggggtgctatcaatttcgtgtaacacgtaatgcagatcttgcattaaatgaagatgtagaagatttggcaaaagccttgaaaggcgagttgagctcacgccgttttggacgtgctgtacgtctggaagtgactgaaaactgtccaaaacatatttatgaatatctgcttgatgaatttgatcttgatgaagaacagctttataaggttgaagggcctgtcaatctggctcgcttattgtcaaacttcaagcgtccgcatttacgttacgactcacatacgcctgttattccaaaaatcctgaaaaaatcagaaaatatttttgcggcaatgcaaaagcaggacatcttgctgcatcatccatttgaatcatttgcacctgtcattaatctcttgcgtgaagctgcacgtgatccgcaagtgctggcaatcaaacaaacgctgtatcgcagtggtccagattccgagattgttcagattcttgctgaagccgcgcgtaatggtaaagaagtgaccgcagtgattgagctacgtgcccgttttgatgaagaatccaatattgcagttgccaatgtgcttcaggaagcgggggctgtggtggtatatgggattgtaggctataaaacccatgccaaaatgattatggttgtgcgccgagaaaacaataaactggtgcgttatgtacatttgggtacgggtaattaccatgcaggaaatgccagaatctataccgattatggtctgttaacgaccgacaaagaactatgtgaagatgtgcaccgtatctttcaagaactgacaggtatgggcaaaatggcaaaacttaaaaagttattgcatgcgccatttaccttacatgcgcagttgctcaatttcattgatgatgaaattgccaatgtcaaagcaggaaagcctgcgcatattattgtaaaagtcaacgcactcaccgaattgcaattgatcaataaactatatgaagcctctcaggctggcgtacaaattgatctgattattcgttcaatttgttgtttacgtccaggtttgccagggctttcagaaaatatccgtgttcgttcgattgtggggcgctttcttgagcatacgcgtgtttattattttagtaataatggtgacgcacgaatttattgctcaagtgcagactggatggatcgtaatctattcaatcgtgttgaagcatgttttccgattgaagattcagctttgaaaaaacgcatttaccaacaaggtttgttaaattatttacaagataatcagcaagcatggttattgcaaagtgatggaacatgggtaagagtggaatctactgaaggcgaaaccgcacacaatgcgcagcaaactttgctgtctatctttgcctaa

SEQ ID NO: 49899 - protein, 691 aa, Acinetobacter sp. ADP1
MNTAMTTPPVEYTYNDRYINRELSILDFHLRVLEQAVDPLHPLLERMNFLLIFSRNLDEFFEIRVAGVLEQLDLGNESRSPDGLTPKQVLEQISKTAHAAIERQYRILNEEILPKLREEDICFLRRGELTPAQSSWVKKYFQEQVAPVLTPISLDPAHPFPRLVNKSLNFVITLEGKDAFGRQIDLAVVPAPRSLPRVVRLPDELTGGKEHHVMLSAIIHEHVSDLFPGMTATGCYQFRVTRNADLALNEDVEDLAKALKGELSSRRFGRAVRLEVTENCPKHIYEYLLDEFDLDEEQLYKVEGPVNLARLLSNFKRPHLRYDSHTPVIPKILKKSENIFAAMQKQDILLHHPFESFAPVINLLREAARDPQVLAIKQTLYRSGPDSEIVQILAEAARNGKEVTAVIELRARFDEESNIAVANVLQEAGAVVVYGIVGYKTHAKMIMVVRRENNKLVRYVHLGTGNYHAGNARIYTDYGLLTTDKELCEDVHRIFQELTGMGKMAKLKKLLHAPFTLHAQLLNFIDDEIANVKAGKPAHIIVKVNALTELQLINKLYEASQAGVQIDLIIRSICCLRPGLPGLSENIRVRSIVGRFLEHTRVYYFSNNGDARIYCSSADWMDRNLFNRVEACFPIEDSALKKRIYQQGLLNYLQDNQQAWLLQSDGTWVRVESTEGETAHNAQQTLLSIFA

SEQ ID NO: 49900 - DNA, 2073 bp, Erwinia carotovora subsp. atroseptica SCRI1043
  CDS (1)..(2073): transl_table=11
atgggtcaggacaaactctacatagagaaagaattaagttggttatcctttaatgaacgagtacttcaggaagcagcagataaaagcaatccgttaatcgaacgcatgcgctttcttgggatttactccagcaaccttgatgaattttataaagtccgttttgccgatttgaagagacgcattctgattaacgaagaacaaggtctcgacggcaatctgcgacatcttttaggcagaattcaggctcgcgtactaaaaaccgatcaactctttgacagcttgtacaacgaactgctgctggagatggcgcgtaaccagatttttttggtcaatgagcgtcaggtttcccctaatcagcaagagtggctgagggaatacttccggcaatatctgcgcccgcacattacgccaatactcatctttaacgagaccaatttggtggagttccttaaggataactacacctatcttgccgtcgaaattattcgtggcaatgagatcagttacgccttgttggaaattccttcggataaaataccacgcttcgtcaacttgccggcagaagcgccacgccgtcgtaagaccatgatcctcatcgataacatcctgcgttactgtctggatgatatcttcaagggcttctttgattatgatgcactgaacgcgtattccatgaagatgacacgcgatgcggaatacgatctggtcacggaaatggaatctagcctgttggagctgatgtcctctagccttaagcagcgcctaaccgccgagccggtaaggttcgtgtatcagcgcgatatgccagacgccatggtcaagatgctacaagaaaaactggggatctcttcctttgactccgtcatccccggcgggcgttaccataatttcaaagactttatttctttcccgaacgtcggacgcgccaatctggtcaacaaatccttgccccgtctgcggcacactgggttcaaccggtttcgcaatgggtttgatgcgattcgtgagcgcgacgttctactctattacccgtatcacaccttcgagcatgtattggagttgctgcgacaagcgtcttttgaccccaatgtactgtccatcaaaatcaatatttaccgcgtcgccaaggattcccgcatcattacctcaatgattcatgcggcgcacaatggcaagaaagtcacggtagtcgtagagttacaggcgcgctttgacgaagaagcgaatattcactgggccaagcgtctaaccgaggctggcgtgcacgtaattttctcggtgcccggattgaaaattcacgccaagctgttcctaatctcccgccgtgagggagaaaacatcgtgcgttacgcgcacatcggcaccggtaacttcaacgaaaaaacggcccgtctgtataccgactattcgctgctgaccgccgacgaacgcattaccaacgaagtccgtcgcgtcttcaacttcattgaaaacccctaccgtccggtcagtttcgagcacctgctggtgtctccgcaaaactcccgcgacaagctttaccaactgatcgataccgagatcgaaaacgcgctggctaatcgtgatgcaggcattacgcttaaggtaaataatctggtggataaagggctggcggaaaagctgtatcaggcttcctcggcaggcgtgaaaattaatctgctggtacgcggtatgtgttcactgatccccaatctgccggggatcagtgaaaatattcaggtcatcagtattcttgaccgctatctggaacacgatcgggtgtatgtcttcaacaacggcggggacaaaaaagtctacctctcctccgcagactggatgacacgtaacattgattatcgcattgaagtcgcagtggaaatccttgatcccattttgaaaaaccgcgtactggaaacgctggatattctgttcagcgatacggtgaaagcccgtgtcattgataaagagtcgagcaaccgctatgtatcacgcggtaacaagcgtaaagtacgcgcgcaaaatgccatttacgactacatcaaggcgttggagcaacctggagataagcctgaataa

SEQ ID NO: 49901 - protein, 690 aa, Erwinia carotovora subsp. atroseptica SCRI1043
MGQDKLYIEKELSWLSFNERVLQEAADKSNPLIERMRFLGIYSSNLDEFYKVRFADLKRRILINEEQGLDGNLRHLLGRIQARVLKTDQLFDSLYNELLLEMARNQIFLVNERQVSPNQQEWLREYFRQYLRPHITPILIFNETNLVEFLKDNYTYLAVEIIRGNEISYALLEIPSDKIPRFVNLPAEAPRRRKTMILIDNILRYCLDDIFKGFFDYDALNAYSMKMTRDAEYDLVTEMESSLLELMSSSLKQRLTAEPVRFVYQRDMPDAMVKMLQEKLGISSFDSVIPGGRYHNFKDFISFPNVGRANLVNKSLPRLRHTGFNRFRNGFDAIRERDVLLYYPYHTFEHVLELLRQASFDPNVLSIKINIYRVAKDSRIITSMIHAAHNGKKVTVVVELQARFDEEANIHWAKRLTEAGVHVIFSVPGLKIHAKLFLISRREGENIVRYAHIGTGNFNEKTARLYTDYSLLTADERITNEVRRVFNFIENPYRPVSFEHLLVSPQNSRDKLYQLIDTEIENALANRDAGITLKVNNLVDKGLAEKLYQASSAGVKINLLVRGMCSLIPNLPGISENIQVISILDRYLEHDRVYVFNNGGDKKVYLSSADWMTRNIDYRIEVAVEILDPILKNRVLETLDILFSDTVKARVIDKESSNRYVSRGNKRKVRAQNAIYDYIKALEQPGDKPE

SEQ ID NO: 49902 - DNA, 2106 bp, Propionibacterium acnes KPA171202
  CDS (1)..(2106): transl_table=11
atggccaagaagcccacccccgggacttccccgtcttctcccgacgagctgccggagggtcgctacagcgatcgtgagctatcgtggctcgccttcaacgaacgggtgctggatcttgcgcgcgataccgaacgcatccctctgctcgagagagcgaagtttctggccattttctcgtccaacctcgacgaatttttcatggtgcgagtcgccggtctcaaacgccgtatcgacgctggagtcgccgtgccttccgtcgctgggatgctaccccgtgagctccacgatgccattctggcccgcacccatgacctagtttctgaacaatctcgggtattcgctgaggaggtgcgccccgggctggtagatgaaggcattgagatcctgcgttgggccgagctgtccgatgatgaaaagggccgcatgcgcaccttgttctcggaacggattttccccattcttacccccttagccgtcgacccatcccaccccttcccgtacattcgcggcctatcgatcaacctggccgtcatgctggcaaatcccattactggcgcagagcagttcgctcgggtcaaagtgccgtcggtgctgcctcggctggtcaacctgggcgagggacgattccttccgctagaggaaatcatcagtcgtcacctcgaccaactgttcaccggcatgcacgtgctgcaacacaccaccttccgcgtcactcgaaacgaagacctcgaggtcgaggaggatgacgccgagaacctgctgttcgctctcgagaaggagctgctgcgccgcaaggtgggccgccctccggtgcgattggaggtccaggacgacatttccgcggagatgctcgagctactcacccgtgaacttgacatcagagacaaggaggtcttccggctgccggccccactggacctgaccggcctgttctcgctggccgacgtcgaccgcgacgatctgtcctacccgaacttcctgcccatcacgcatccgcacttggccgaggtggagacggctcgcccagccgacatgtttgccgcgatccgtcgtcgcgacgtgctcgtccatcacccctacgactccttcgccaccagcgtgcagcggttcatcgagcaagctgctcaagacccccaggtgctggccatcaaacaaaccctgtaccgcacttccggcgactcccccatcattgacgccctcgtcgatgccgccgaggctggcaagcaggtgctggcggtcgtggagattaaggcgaggttcgacgaacaggccaacatcacctgggcccgactgctggaacgggccggagtccacgtcgtttacggcatggtgggcctcaagacccactgcaagttggccatggtaatccgcgacgagggcgaagggttgcgccgctacgcccacatcggcaccggaaactacaatcccaagacggctcgccagtacgaggacctcggtctactaacctccaacccgatcattaccgaagacgtcgcgaggctgtttaatcacctatccgggatgacggctgagaaacgttaccgccgtctcctggtagcccctgaaagcatccggagcggcatcatcgacgcgattgagcgcgagatcgacaataagaaggctgggttgcctgccggagtgaggatcaaggtcaactccatcgtcgatgagcgcgtcatcgacgccctttaccgcgcctcccgcgccggtgttccagtagacctgtgggtacgtggtatttgctctatcagaccgggggttcccgggctcagtgagaacatccgggtcatctctatcctgggccggttcctagaacactcccgcatcttctggttcgccaacggtggtcgcccgatggtggcaatcggctcagccgatctcatgcaccgcaacctggaccgccgggtagaagcccttgtcggcttgtccaacaagcagcacgtggcggaggttgaagagatgttcgacatggccttcgacccaggtacggtgtcgtggcacctgcaggatcgcacttggaccgaggtgtcacgcggaccggacgacatccccctaactgacttacaagaagaactcatccgacgcacccgcgacaggaggcggtga

SEQ ID NO: 49903 - protein, 701 aa, Propionibacterium acnes KPA171202
MAKKPTPGTSPSSPDELPEGRYSDRELSWLAFNERVLDLARDTERIPLLERAKFLAIFSSNLDEFFMVRVAGLKRRIDAGVAVPSVAGMLPRELHDAILARTHDLVSEQSRVFAEEVRPGLVDEGIEILRWAELSDDEKGRMRTLFSERIFPILTPLAVDPSHPFPYIRGLSINLAVMLANPITGAEQFARVKVPSVLPRLVNLGEGRFLPLEEIISRHLDQLFTGMHVLQHTTFRVTRNEDLEVEEDDAENLLFALEKELLRRKVGRPPVRLEVQDDISAEMLELLTRELDIRDKEVFRLPAPLDLTGLFSLADVDRDDLSYPNFLPITHPHLAEVETARPADMFAAIRRRDVLVHHPYDSFATSVQRFIEQAAQDPQVLAIKQTLYRTSGDSPIIDALVDAAEAGKQVLAVVEIKARFDEQANITWARLLERAGVHVVYGMVGLKTHCKLAMVIRDEGEGLRRYAHIGTGNYNPKTARQYEDLGLLTSNPIITEDVARLFNHLSGMTAEKRYRRLLVAPESIRSGIIDAIEREIDNKKAGLPAGVRIKVNSIVDERVIDALYRASRAGVPVDLWVRGICSIRPGVPGLSENIRVISILGRFLEHSRIFWFANGGRPMVAIGSADLMHRNLDRRVEALVGLSNKQHVAEVEEMFDMAFDPGTVSWHLQDRTWTEVSRGPDDIPLTDLQEELIRRTRDRRR

SEQ ID NO: 49904 - DNA, 2358 bp, Methylococcus capsulatus str. Bath
  CDS (1)..(2358): transl_table=11
atggagaccgtggaaggcaatagaacggagaaggaggggggacgtttggtcatcagtaaagtcaaaggcatcagcaagtcgacacggatcatgctggcggagcacgggatcttttcggtcgaggagctcgccgacgccgacgtcggccggctcaccaagattccgggcctgagccggcagaaggcactgcgcatggtcagggccgccaaattcatggtgggtgacatggaaaaagggcgcgatgaggtctctgccggcacgggctccgccgaaacggcggagatttcctcggcggacgtcggtctggatgattcgcgatgcttcctgaaccgtgaactcagcctgctggagttcaaccgccgggtactggaccaggccaaggatgtacggacgccgctgctggaacggctcaatttcctgagtatcgcctgttccaatatggatgagttcttcgaaatcagggtcgccggtctgctgcaaaaatctgaactcggggcggcgcaaaccgaaccggatggcatgacgccgcaggaagtcctcgccgccatcagcgaacgcgcccacgagctggtcgccgagcagtatcacgtgctcaatcaggaactgctgcccgcgctggaagccgaaggcatccgcttcatccgccgttccgactggactgatgcccagcataaatggctgcggcgctacttcgaggaggagctggcgccgattctcagcccgatcgggctggatccgacccatccgtttccgcgtcccctcaacaaagccctcaatttcatcatctcccttgccggtaaggatgccttcggccgcaacatccatctcgccatcctgcaggcgccgcgggctctgccgcgcatcatccagttgccgaagagcgtgaccagcggccggctccacgatttcgtattcctttcctccgtcatccacgccttcgtcgatgacctgtttcatggcatgaaggtgaaagggtgctaccagttccgggtgacccgcaacagcgatctgtttctggacgaggaggaaatcgacgatctgctgcaggcggtcgaaggcgaactggcgagccgcaactacggcgacgaggtacggctggaggtggccgacaactgcccggacgcagtcatcgagttcctgctgagccagttcggtctcggcgaggaccgcctgtaccgggtggacggtccggtcaatctgagccgggcccgcgagatctacgatctggtcgaccgtccggacctcaaatatccgcccttcacgccgggctggccggcgcagctcacgggccaccaggatttcttcgagatcctgcgccggcaggacatcctgctgcaccatccttacgagtccttcatccccgtcatcgacctgatccgccaggccgccgacgatccgcaggtggtagccatcaagcagacgctgtatcgcaccggaccggattcacccatcgttgatgcactggcgcgggccgcgcgggctggcaaggaggtgaccgtcgtggtcgagctcctggcgcggttcgacgagcgtgccaatatttcactcgccacccgcctgcaggatgccggggtccaggtggtctatggcatcgtcggctacaagacccacgccaagatcctgctgattctgcgccgggaagggcgttcgctgcggtactacacccatctgggcactggcaattaccacccccgtaccgcccggatgtacaccgactacggcctgatgacttccgacaaggcgctgggtgaggacgtgcagcgagtgttcgtccagctcaccagtctgggcaagatgggcaagctgcacaagctcttgcagtcacctttcactctccacaagaccctgatccgcaagatcgagcgggaaatcgagcatgcgaaggagggaaagccggcgcggatcgtcatcaagatcaattccctggtcgagcccaagctgattcgcgcgctttatcgtgcctcgtgcgctggggtacaggtcaggctgatcgtgcgaggcatctgctgcttgcggcctggtattccaggtgtttcggagaacatcgaggtgcgttccatcgtcggcaggttcctcgaacacagccgcgtgtactgcttcgaaaacggaggagaacccgaggtctatgcggcgagcgcggatttcatggcgcgcaacatgtttcgccgggtggaaacctgctttcccatcgaaaacaagaagctggccgagcgggtacgcaatgatctcgagctttatttgagagacgattgccagacctggcagctgcgctcggatggcagctacgagcggctgcccgacgtccaccattgcgacgctcaggcggaactgctggaggcgctcaagaaaaccgtctga

SEQ ID NO: 49905 - protein, 785 aa, Methylococcus capsulatus str. Bath
METVEGNRTEKEGGRLVISKVKGISKSTRIMLAEHGIFSVEELADADVGRLTKIPGLSRQKALRMVRAAKFMVGDMEKGRDEVSAGTGSAETAEISSADVGLDDSRCFLNRELSLLEFNRRVLDQAKDVRTPLLERLNFLSIACSNMDEFFEIRVAGLLQKSELGAAQTEPDGMTPQEVLAAISERAHELVAEQYHVLNQELLPALEAEGIRFIRRSDWTDAQHKWLRRYFEEELAPILSPIGLDPTHPFPRPLNKALNFIISLAGKDAFGRNIHLAILQAPRALPRIIQLPKSVTSGRLHDFVFLSSVIHAFVDDLFHGMKVKGCYQFRVTRNSDLFLDEEEIDDLLQAVEGELASRNYGDEVRLEVADNCPDAVIEFLLSQFGLGEDRLYRVDGPVNLSRAREIYDLVDRPDLKYPPFTPGWPAQLTGHQDFFEILRRQDILLHHPYESFIPVIDLIRQAADDPQVVAIKQTLYRTGPDSPIVDALARAARAGKEVTVVVELLARFDERANISLATRLQDAGVQVVYGIVGYKTHAKILLILRREGRSLRYYTHLGTGNYHPRTARMYTDYGLMTSDKALGEDVQRVFVQLTSLGKMGKLHKLLQSPFTLHKTLIRKIEREIEHAKEGKPARIVIKINSLVEPKLIRALYRASCAGVQVRLIVRGICCLRPGIPGVSENIEVRSIVGRFLEHSRVYCFENGGEPEVYAASADFMARNMFRRVETCFPIENKKLAERVRNDLELYLRDDCQTWQLRSDGSYERLPDVHHCDAQAELLEALKKTV

SEQ ID NO: 49906 - DNA, 2058 bp, Neisseria gonorrhoeae FA 1090
  CDS (1)..(2058): transl_table=11
atgaccgaacaaaaccgcatcctctgccgcgaactgagcctgctggcattcaaccgccgcgtgttggcacaggcggaagacaaaaacgtcccccttttggaacgcctgcgcttcctgtgcatcgtgtcgtccaatcttgacgagttttttgaagtccgcatggcgtggctcaagcgtgaaaacaagctgcacccccggcgcaggccggacaacggcaaaatgccgtctgaaaccatcgccgacgttaccgaagcggcgcgctccctgatacggcaccagtacgacctgttcaacaacgtccttcagcccgagttggcgcgggaaagcatccatttttaccgccgccgcaattggacgggcacgcagaaaaaatggatcgaagactatttcgaccgcgaactgctgccgatcctgacccccatcggactcgacccttcccaccctttcccgcgcccgctgaacaaatcgctcaacttcgccgtagaactcgacggcacggacgcgttcggcaggccttcgggtatggcgattgtccaagcaccgcgcatcctgccgcgcgttgttcccctgccgtccgaactgtgtggcggcggacacggcttcgtcttcctgtcgtccatcctccacgcccacgtcggcaaactcttcccgggcatgaacgtcaaaggctgccaccagttccgcctcacgcgcgacagcgacttgaccgttgacgaagaagacgtacaaaacctccgcgccgccattcaaaacgaactgcacgaccgcgaatacggcgacggcgtgcggctcgaagtcgccgacacctgtcccgcctacatccgcgactttctgctcgcgcaattcaggctgaccgacgccgaactctatcaggtcaaaggcccggtcaacctcgtccgcctcaacgccgtccccgacctagtcaaccgccccgatttgaaatttccgccgcacacgccgggccgtctgaaagccttgggcaaaaacagcccgatcttcgatttggtgcgccaatcgcccatcctgctgcaccacccctaccaatctttcgatcccgtggtcgatatgatacgcgaagccgccgccgatcccgccgttcttgccgtcaaaatgacgatttaccgcaccggcacgcgctccgaactcgtccccgccctgatgaaggcggcactcgccgacaaacaagtaaccgtcgtcgtcgaactgatggcgcgttttgacgaagccaacaacgtcaactgggcgaagcagctcgaagaggcgggagcgcacgtcgtgtacggcgtgttcggctacaaagtccacgccaaaatggcactggtcatccgccgcgaagacggcgtgctcaagcgttacgcccacctcggcacgggcaactaccaccaaggcacatcgcgcatctacaccgacttcggcctcattaccgccgacgaacaaatcaccgccgacgtgaacacattatttatggaaatcacaggcttgggcaaacccgggcggctgaacaaactctaccaaagtccgtttaccctgcacaaaatggttatcggccgcatcgctcgcgaaaccgaacacgcaaaagccggcaaaccggcgcggattaccgccaagatgaattcgctcatcgaaccgactgtcatagaagccctgtatcgggcaagcgcggcaggcgtgcaaatcgatttgattgtgcgcggtatgtgtaccttgcgcccgggtgtaaaaggcttgtccgaaaacatccgcgtccgctccatcgtcggcaggcagctcgaacacgcgcgcgtatattgtttccacaacaacggcgcggacgacacctttatttccagcgcggattggatggggcgcaatttcttccgccgcatcgaaaccgccaccccgattaccgcgcccgaactcaaaaaacgcgtcatccgcgaaggtttggaaatggcactggcagacaatacccacgcgtggctgatgcagcccgacggcggctatatccgcgccgcgcccgccgaaggcgaaagcgaagccgacctgcaaaacgatttatgggatttgctccgaggctga

SEQ ID NO: 49907 - protein, 685 aa, Neisseria gonorrhoeae FA 1090
MTEQNRILCRELSLLAFNRRVLAQAEDKNVPLLERLRFLCIVSSNLDEFFEVRMAWLKRENKLHPRRRPDNGKMPSETIADVTEAARSLIRHQYDLFNNVLQPELARESIHFYRRRNWTGTQKKWIEDYFDRELLPILTPIGLDPSHPFPRPLNKSLNFAVELDGTDAFGRPSGMAIVQAPRILPRVVPLPSELCGGGHGFVFLSSILHAHVGKLFPGMNVKGCHQFRLTRDSDLTVDEEDVQNLRAAIQNELHDREYGDGVRLEVADTCPAYIRDFLLAQFRLTDAELYQVKGPVNLVRLNAVPDLVNRPDLKFPPHTPGRLKALGKNSPIFDLVRQSPILLHHPYQSFDPVVDMIREAAADPAVLAVKMTIYRTGTRSELVPALMKAALADKQVTVVVELMARFDEANNVNWAKQLEEAGAHVVYGVFGYKVHAKMALVIRREDGVLKRYAHLGTGNYHQGTSRIYTDFGLITADEQITADVNTLFMEITGLGKPGRLNKLYQSPFTLHKMVIGRIARETEHAKAGKPARITAKMNSLIEPTVIEALYRASAAGVQIDLIVRGMCTLRPGVKGLSENIRVRSIVGRQLEHARVYCFHNNGADDTFISSADWMGRNFFRRIETATPITAPELKKRVIREGLEMALADNTHAWLMQPDGGYIRAAPAEGESEADLQNDLWDLLRG

SEQ ID NO: 49908 - DNA, 2067 bp, Bacteroides fragilis NCTC 9343
  CDS (1)..(2067): transl_table=11
atgaaatcagacgaagcgaaacgtaaaaagctttatgtagaacgggacatcagttggatgtatttcaatcaacgcattttgcttgaagctgcccgcccggaagttccgttactggaacaacttacctttctgggcatttactctaacaatttagacgagttcttccgcgttcgcgtagctacactgaaccgcattgtagagtacgatgacaagaacatccgtgaagagcgtgacacggccgcacgcaccttgaaacagatcggaaagctgcacaatcaatactaccggcagtttgaagaaacgttcgcttcgatcatggagaagttaaagcaagaaaacatccacgtcatcaaagataccgaactgacaccggaacaggaacacttcatcacttcactctaccggaaccggctgaatgggtctaccaatccgctctttcttactaaaacgtcccgtcatacggacgaccagaccgatgaagacatctaccttgccatccgcctgttgcgcaaagacagtgagggaaaagtgaaaatgaaagattatgccgtcatcgggctccccaccgccgagttcggacgcttcatccgcctgccggattcggaaggcaaaacctatctgatgtttctggacgacgttatccgctactgcttgccgatgatcttcataggcatgaattatacggactatgaagcttacactttcaagttcaccaaagacgccgaaatggagatagacagtgatctgcgtacaggtgtgctccaaaaaatatcgaaggggatcaaaagccggaaacggggcgaaccgatccgtttcgtctatgacaaagagatgccgaaagatctgctgcgaaagctgaccgaccgcctcaacgtggataaaaacgacacccgtgtagcaggcgggcgctatcataacttcaaagacctgatgaagtttcccgactgcggacggtccgacctgaaatatcctgcctggcctcccgtcttcaaacaggaactgaacgggacggaaagtatcctgagactgatcaggaaacaggaccggtcgctgcattacccctatcaatcgttcgataccgtgatccgtgtattgcgcgaggcagccatcagcaaagaagtgaaaagcatcaagatgactctctatcgcctggccaaagactcgaaggtagtgaaagctctgatctgcgctgcacaaaacggaaaaaaagtaacggttatcatcgaattgctcgcccgtttcgacgaagcgtccaacatcagctggagcaaacgcatgcaagaggcaggaatcaaagtgatattcggagtggaaggtctgaaaatccactccaagctggtacatatcggaacacggtttggcgacctggcctgtatcagcaccggaaattttcatgaaggaaacgcacggatgtataccgatttcaccatcatgacagcacatcgctccattgtgagggaagtagaccgggtattcgacttcatagagaagccctacctcccggtgaacttcaaggaactgctcgtgtcgcccaacgatatgcgcaaacggctgacagccctgatcaaccaagaaatcaagaacaagcgacagggaaaagaggcatacatccttgccaaagtgaaccatattaccgaccggatactgatacagaaactctacgaagcttcgacagccggtgtacaaacagacctggtggtccggggcaactgctccctggtgaccggcatcccgggagtcagcgacaacatccggatcaacggcatcatcgaccgttatctggaacatccgcgcatcttcatcttcgccaatggaggggaagaaaaatactatataggatcggccgactggatgccccgcaatctggacaaccgcatcgaagtgcttacgcctgtatacgacaaagtgatacaagcagaactgaaacgtgtggtctgctacggacttcgcgacacagccaaagggcgaatcgtggacggaagcggcgataacaagacttgggaaaacagcgatgcacctttccgctcgcaggaagaattatacaaatactataaagaatcagaatga

SEQ ID NO: 49909 - protein, 688 aa, Bacteroides fragilis NCTC 9343
MKSDEAKRKKLYVERDISWMYFNQRILLEAARPEVPLLEQLTFLGIYSNNLDEFFRVRVATLNRIVEYDDKNIREERDTAARTLKQIGKLHNQYYRQFEETFASIMEKLKQENIHVIKDTELTPEQEHFITSLYRNRLNGSTNPLFLTKTSRHTDDQTDEDIYLAIRLLRKDSEGKVKMKDYAVIGLPTAEFGRFIRLPDSEGKTYLMFLDDVIRYCLPMIFIGMNYTDYEAYTFKFTKDAEMEIDSDLRTGVLQKISKGIKSRKRGEPIRFVYDKEMPKDLLRKLTDRLNVDKNDTRVAGGRYHNFKDLMKFPDCGRSDLKYPAWPPVFKQELNGTESILRLIRKQDRSLHYPYQSFDTVIRVLREAAISKEVKSIKMTLYRLAKDSKVVKALICAAQNGKKVTVIIELLARFDEASNISWSKRMQEAGIKVIFGVEGLKIHSKLVHIGTRFGDLACISTGNFHEGNARMYTDFTIMTAHRSIVREVDRVFDFIEKPYLPVNFKELLVSPNDMRKRLTALINQEIKNKRQGKEAYILAKVNHITDRILIQKLYEASTAGVQTDLVVRGNCSLVTGIPGVSDNIRINGIIDRYLEHPRIFIFANGGEEKYYIGSADWMPRNLDNRIEVLTPVYDKVIQAELKRVVCYGLRDTAKGRIVDGSGDNKTWENSDAPFRSQEELYKYYKESE

SEQ ID NO: 49910 - DNA, 2097 bp, Bacteroides fragilis NCTC 9343
  CDS (1)..(2097): transl_table=11
ttgggcaaaccttacgtgcaaatggaaaacaaataccaatacttcaaaagagatattagttggctatcattcaactaccgggtacttctggaagctgacgacgaccggctcccactctacgaacgtatcaattttatctctatttattcctccaacctggaagagttctacaaaatcagagtagccgaccacaaagctgtagcctccggcgtaacagatggaacggaagaatccctgcaatcggccaaggacctgctggaagaaatcaaccgggaagtgaaccgacaattggaggatcgtatccacatctatgaaaaaaagatcatacctgcattacgcaaaaatcacgttgtcttctatcaaagccgcaatgtagagcctttccaccaacaattcgtaaaagactttttccgggaagagatattcccttacctgcaaccggtaccggtatccaaagacaaagtaatctcttttctgcgcgacaaccggctctacctggcagttcgcctgttcctgaaaggtacaaacaaagaagatgctgatcatctgcaatattttgtgatgaaactaccctacagtaaagtgccccgctttatcgaattacccaagcatggcagagattattatctgatgtttatcgaagatattatcaaagcgaacatagacgtcattttccccggatacgaagtagattgcagttattgtatcaaaatatcgagagatgccgatattatgatagacgacacgatcaacagtgtcgacctggtggaacaagtaaagaaaaaaatcaaaaagcgcaagataggtgccgtatgccgtttcgtctatgaccgcgccatgcccgatgattttctgaacttcctggtagacgctttccgaatccggcacgaagagttggtaccgggagacaaacaccttaacctggaagatctgcgtcacttgccgaaccccaatcattccattccccggattgagagaccgatcccaatgaaactgaatcgactgaacgacaaggaatccattttcagttatgttgaaaagaaagatttattgttatactatccttaccattctttcgaccacttcatccacttcctttacgaagcagtgcacaatcccgaaacccgtgaaatcatggtaacccaatatcgggtagcagaaaactcggctgtcatcaacaccttgattgctgctgcacaaaacggtaaaaaagtcacggtattcgtggaactcaaagcccgtttcgatgaagagaacaacctcgccactgccgaaatgatgaaagcggccggtatcaacattatctatagtataccggggctgaaggtacatgccaaagtagctctgatacgccgtcgcagcttcaccggtgaaaagattcacagttacgcttatatcagtaccggcaacttcaacgagaagacggctacactgtatgcagactgcggactgtttaccagcaatccggtcatcgtacatgacctcacaaacctgttccgtaccctcagaggcaaagagaatccccgattcacccggttgcttgtggcacgtttcaacctgattcccgaactgaacaggctgatcgacaaagaaatagaactggccgaaaaaggaagaggcggaagaatcatcttgaagatgaacgccctgcaagacccgataatgatagaccggctctacgaggcctcacaaaaaggtgtaaaaatagatctgatcgtacgaggcatttgttgcctgatacccggacaagaatatagttgtaacatacgtgtcacccgtattgtggacagttttctggaacatgcccgcatctggtatttcggtaatgccggacaccccaaagtatatatgggttcaccggactggatgcgtcgtaacttatatcgacgaatcgaagcggtggtacccattctcgatcatgaattacgggaagaaatcgtcgatatgcttcatatccagttatcggacaatcaaaaggcttgcttcgtcgatgataaactgaataatatatttaaattcaaaacaaatgccgcgcccgtcagagcgcagtataccttctataattacctaaaagagaagaatgaaacatttctgtaa

SEQ ID NO: 49911 - protein, 698 aa, Bacteroides fragilis NCTC 9343
MGKPYVQMENKYQYFKRDISWLSFNYRVLLEADDDRLPLYERINFISIYSSNLEEFYKIRVADHKAVASGVTDGTEESLQSAKDLLEEINREVNRQLEDRIHIYEKKIIPALRKNHVVFYQSRNVEPFHQQFVKDFFREEIFPYLQPVPVSKDKVISFLRDNRLYLAVRLFLKGTNKEDADHLQYFVMKLPYSKVPRFIELPKHGRDYYLMFIEDIIKANIDVIFPGYEVDCSYCIKISRDADIMIDDTINSVDLVEQVKKKIKKRKIGAVCRFVYDRAMPDDFLNFLVDAFRIRHEELVPGDKHLNLEDLRHLPNPNHSIPRIERPIPMKLNRLNDKESIFSYVEKKDLLLYYPYHSFDHFIHFLYEAVHNPETREIMVTQYRVAENSAVINTLIAAAQNGKKVTVFVELKARFDEENNLATAEMMKAAGINIIYSIPGLKVHAKVALIRRRSFTGEKIHSYAYISTGNFNEKTATLYADCGLFTSNPVIVHDLTNLFRTLRGKENPRFTRLLVARFNLIPELNRLIDKEIELAEKGRGGRIILKMNALQDPIMIDRLYEASQKGVKIDLIVRGICCLIPGQEYSCNIRVTRIVDSFLEHARIWYFGNAGHPKVYMGSPDWMRRNLYRRIEAVVPILDHELREEIVDMLHIQLSDNQKACFVDDKLNNIFKFKTNAAPVRAQYTFYNYLKEKNETFL

SEQ ID NO: 49912 - DNA, 2298 bp, Psychrobacter arcticus 273-4
  CDS (1)..(2298): transl_table=11
gtgtcagagatggataataagtgcagtagtagtgataaggcagctgatgttattgaggaatatcttgatgcgaatcatgatgtcaatagagagagtgacacagacaacgcagacagtgtcattaataccggtaatcctcctaccgatgacagccttcacgatctgcgtagcacccaagtcttagccgaggttgattggcaacgctcggaagatggcaattattcacccagcagctatatcaatcgcgacttgtctttattgcaatttcatctgcgggtcttggcacaagcggcagatccccgccatcctttgcttgagcgtttattctttttaatgattttttcctccaatatcgatgagttttttgagattcgcatggcaggtatcatgcaaaagctcagtctgggtgatgtatccactagcgttcacggtatgcgcccaagtgaaattcttaatgaaatatcagccgtgacccatgatgccatcgctgagcaataccgtattttaaatgaagatatcttgccagcattggcgcttgaagacatccgttatctaaagcgcgatgaacttaataccgagcaatcagcatggatgaagcgctattttactgagcaggtatcgccagtattgacgcccattagcattgatcctgcacacccattcccgcgcttggtcaataaaagcttgaactttattgcgacgttagagggcaaagatgcctttggtcgcgatatcaatttggctatcgtacccgcgccgcgtagcttgccacgcgttattcgtctgcctgatgagttgactggtggcaaagagcatcatgtcatgctatcggcagtgattcatgagcatatcggtgagctattccccggtatgaatgtcaccggttgccatcagtttaggttgacgcgtaatgctgatttggacttggcagatgacgtcgatgacattgctaaagcattagagggtgagcttgaaaaccgccgctttggtgataaggtacgacttgaagtgaccaccaaatgtccgaccccaatcagtgattatttgctcaatgagtttgagctgcatgacaatcaattataccgcgtcaatggacccgtcaatttaacgcggctgctcttcgattttaatattccagcattgcgttatcagcctttcacccatgtggtgcctaaaccgtttcgccgtgaagtcgacaagcttgataaagcgaccagtatgtttgctgctatgcgtaaaggtgatgtgttggtgcatcatccgttccatgcgttttcaccgattatcaatttgctgtggcaagctgccattgatccaaaggtattggcgattaaacaaacgctctatcgttcaggtaccaattcagaaatcgtcaaggccctagcggcagcagcgcgcaatggcaaagaggtgacggcggtcattgagttacgcgcgcgttttgatgaggcgtctaatattgccgttgccaattatctgcaagaagcgggtgcagtggttgtctacggtattgtcggctacaaaacccacgccaagctcatactcatcgtgcgccgcgaggacgataaaattcggcgttatgtgcatttaggcacgggcaactatcatgcggcaaatgccaaagcctataccgattatggcttgttcagcgctgaccccgatatctcagaagacgtccacaagatattccaagagctgacgggcatgggcaaacccgctaacctcaaaaagctgttacatgcaccgtttaccttgcacgataaattgatgagctttatcgatgatgaaattgctcatgcaaaggcgggcaagcgcgctcatattattgtcaaagtaaacgccttaaccgaacgtcgtttgattgataaactatatgatgcctcacaagcaggggtcaaaatcgagctgattttgcgctccatatgctgtctgcgcccacaagtaaaaggtctgtccgaaaatatcaccgtacgttctgttgtcggtcgatttttggagcatactcgcatttattacttctataatgatggtgatgagcgtctgtactgtggcagcgccgattggatggatcgtaatttattccaccgtgtagaggtggcgtttccgattgaagatgaaaagctgttcaagcagatctatcaagatggattgttaaactacctccaagacaatacccaagcatggacactcagcggtgatggccgctggcagcaaaatcagccagcaataggtgagacgccgcatattgcccaagagtatttattaaaggtgattaatcgcgtgggtgagcctgtataa

SEQ ID NO: 49913 - protein, 765 aa, Psychrobacter arcticus 273-4
MSEMDNKCSSSDKAADVIEEYLDANHDVNRESDTDNADSVINTGNPPTDDSLHDLRSTQVLAEVDWQRSEDGNYSPSSYINRDLSLLQFHLRVLAQAADPRHPLLERLFFLMIFSSNIDEFFEIRMAGIMQKLSLGDVSTSVHGMRPSEILNEISAVTHDAIAEQYRILNEDILPALALEDIRYLKRDELNTEQSAWMKRYFTEQVSPVLTPISIDPAHPFPRLVNKSLNFIATLEGKDAFGRDINLAIVPAPRSLPRVIRLPDELTGGKEHHVMLSAVIHEHIGELFPGMNVTGCHQFRLTRNADLDLADDVDDIAKALEGELENRRFGDKVRLEVTTKCPTPISDYLLNEFELHDNQLYRVNGPVNLTRLLFDFNIPALRYQPFTHVVPKPFRREVDKLDKATSMFAAMRKGDVLVHHPFHAFSPIINLLWQAAIDPKVLAIKQTLYRSGTNSEIVKALAAAARNGKEVTAVIELRARFDEASNIAVANYLQEAGAVVVYGIVGYKTHAKLILIVRREDDKIRRYVHLGTGNYHAANAKAYTDYGLFSADPDISEDVHKIFQELTGMGKPANLKKLLHAPFTLHDKLMSFIDDEIAHAKAGKRAHIIVKVNALTERRLIDKLYDASQAGVKIELILRSICCLRPQVKGLSENITVRSVVGRFLEHTRIYYFYNDGDERLYCGSADWMDRNLFHRVEVAFPIEDEKLFKQIYQDGLLNYLQDNTQAWTLSGDGRWQQNQPAIGETPHIAQEYLLKVINRVGEPV

SEQ ID NO: 49914 - DNA, 2082 bp, Dechloromonas aromatica RCB
  CDS (1)..(2082): transl_table=11
atgacccatccccaattaaaaccccgcttcccgcccgagaactatctcaaccgcgaacttggcttgctggctttcaatcgccgggttctcgcccaggcgcaagacgaacggatacccttgctcgaacgcctgcgcttcctgtgcatcgtttccagcaatctggatgagttcttcgagattcgcatggccgggctgaaggaacaggtcaaggcacacgccacggtggtcacgaccgacggcaagaccgcgcaggaggcctaccgcctggtctcggccgagacgcatgcaatggtcgccgagcagtaccagcacctgaacgatgtcattctgccggcactggcggaacagagtatccgcttcctgcgccgcacgacctggaacgaagcacagcgcgagtggattcgcaattacttcatccgcgagatggttccggtgttgacccccatcggtctcgacccctcgcaccccttcccgcgtgtgctcaacaagagcctgaatttcgccatcgagctggaaggcaaggatgccttcggccgcagctccaacgccgccattgtccaggccccgcgcgtgctaccgcgcgtcatccgcctgccggaagaactggccggctgtgaatacggcttcgtgttcctgtcttccatcctgcacgaattcgtcggcgaattgttcaccggcatgaccgtactcggctgctaccagttccgcgccacgcgcaactccgacctgtttgtcgacgaggaagaagtcaccaacctgcgcaccaagctgcagggcgaattgccacagcgccacttcggcaatgccgtccgcctcgaagtcgccaataattgctcggaggcaatgaccgaattcctgcttgcccagttcgatctgaagccaaccgacctttaccgcgtcaatggcccggtgaacctggttcgtctgatgcaggtgccggactgggtcgaccgtccggacatgaaattccgccccttcacacccggcaccccgaaaggactggccaagggggccaacatcttcgagagcattcgcaagaacgatatcctgctgcatcatccctaccagtccttcgcaccggtcatcgagtttctcaaccaggcagcgaccgacccgagcgtggtcgcgatcaagatgaccgtctaccggaccggcaccgattcggtcttgatggagtcgctgattcgcgccgcccagaacggcaaggaagtcaccgtcgtcgtcgaattgatggcccgttttgacgaggaagccaacatcagctgggcaaccaagctggaacaggttggcgcccatgtcgtctatggcgtcgtcggctacaagacacacgccaaggccttgctgatcgtacgccgggaagaaggcggcctgaagcgctacgcccacctcggcaccggcaactaccacccgcgtacggcccgtctctacaccgactttggcctgatgacggccaacgaggaagtcacgcacgacgttgccgaagtgttcaagcaactgaccggtctgggcaaggcacggaccctgaagcacctgtggcaggcaccatttaccttgcagcagaacgtcgtcgccggcatccaggccgaggcggagattgcccgcaagggcggcaaggcgcgcatcgtcgccaagatgaattcgctgctcgagtccgaagtgatcgatgcactctacaaggcctcacaggccggcgtcgagatcgacctgatcgtgcgcggtgtctgcgcgctgcggcccggcgtccccggcctgtccgacaagattcgcgtccgctcgatcattggccgcttcctcgaacaccatcgcattttctacttcctggccggcggcaaggaaaacgtctacctgtcgagcgccgactggatggaccgcaatttcttcaaacgcatcgaactggccttccccatcctcgaccccaagctaaagaaacgggtcattaacgaagggttgaagttctacctggccgataaccagcaaggctgggaaatgaacggtcagggcgtctaccagcgtcgccgctcgacccgcagcacgccgcacaatgcgcaaggcgagttgatggtcaacgtagggaacagctaa

SEQ ID NO: 49915 - protein, 693 aa, Dechloromonas aromatica RCB
MTHPQLKPRFPPENYLNRELGLLAFNRRVLAQAQDERIPLLERLRFLCIVSSNLDEFFEIRMAGLKEQVKAHATVVTTDGKTAQEAYRLVSAETHAMVAEQYQHLNDVILPALAEQSIRFLRRTTWNEAQREWIRNYFIREMVPVLTPIGLDPSHPFPRVLNKSLNFAIELEGKDAFGRSSNAAIVQAPRVLPRVIRLPEELAGCEYGFVFLSSILHEFVGELFTGMTVLGCYQFRATRNSDLFVDEEEVTNLRTKLQGELPQRHFGNAVRLEVANNCSEAMTEFLLAQFDLKPTDLYRVNGPVNLVRLMQVPDWVDRPDMKFRPFTPGTPKGLAKGANIFESIRKNDILLHHPYQSFAPVIEFLNQAATDPSVVAIKMTVYRTGTDSVLMESLIRAAQNGKEVTVVVELMARFDEEANISWATKLEQVGAHVVYGVVGYKTHAKALLIVRREEGGLKRYAHLGTGNYHPRTARLYTDFGLMTANEEVTHDVAEVFKQLTGLGKARTLKHLWQAPFTLQQNVVAGIQAEAEIARKGGKARIVAKMNSLLESEVIDALYKASQAGVEIDLIVRGVCALRPGVPGLSDKIRVRSIIGRFLEHHRIFYFLAGGKENVYLSSADWMDRNFFKRIELAFPILDPKLKKRVINEGLKFYLADNQQGWEMNGQGVYQRRRSTRSTPHNAQGELMVNVGNS

SEQ ID NO: 49916 - DNA, 2187 bp, Methanosarcina barkeri str. Fusaro
  CDS (1)..(2187): transl_table=11
atggagcggaacttccccattcagtgtgcagattttgatagactgattatggataatgttgaaggaactcgggtagaagtttccggtatgcctgaactaagcgatccatgtttatatacggaccgcgagtacagctggcttcagttcaatgacagggtactcgaagaggcttttgatgatcgcaatcctctgctggaaagagtcaagtttctttcgatctttggaagtaatcttgatgaatttttcatggtcagggtttcaggtgtccagaaaagaatagtggaggctatgaaagaggaccggacagatgaaaccgcacaggaacagcttcgcgtcatccgggaagagcttctcagtcagcttcctctcaatgacagttgctggaatgaaatgcttgagcctgctctcaggaaagaaggaattaaagtccttaattactttgagctttctaagaaggaaagagataagttgagaaactatttcgagagaaacattttccctttgcttactcctctgggttttgattcagggcatcctttccctcatatctccaacctcagccttaaccttgcggtattaattgatgatccggactacggggaacgttttgccagagtcaagatccctccaatgtttatgcgactaattgttgttcctgaaggagaccaggagaaaataacttccagtctggaggagttgaaaaaagggcgttttgtctggcttgaacagcttatcgctgcaaatcttgacctcctatttcccggacagcgcatccttggagcttatcctttcagaatcacacgcgatgcagaccttgggtttgatgaggatggagacaaagaccttctgaccgctgtaaaacagagagtcggcaggaactatttcgggtcggttgtcagacttgagaccgactatacaatgccagcaaaagtctcggatattcttcttaagaacctggaactttccccttctcttatgttcaggtctgcagctccgctggggctttcaaatctaatcaaacttgcaaagatcaaccgtcctgaccttaagtacgaacccttcgagccgaaaaaacattctcagctagcaaacagggagaaaatttttgcaactctgacaaaacgagatattcttctctatcatccctatgacagtttcgaatcggtaattgattttgtggaagaatctgccgacgatcctgatgttctggcaatcaaaatgactctgtacagggtggatgacaattccagaattgttcaggcccttatgaaggctgcggaccggagaaagcaggtagcggtcctggttgagcttaaagctcgtttcgatgaggaaaacaatatcggatgggcaaaagagcttgagcgcaaaggggtccatgtagcttacggcttcccggggcgtaagattcatgccaaaatgtgcctggttgtcagagctgaaaaagaaggtatcaggtattatgtgcacatgagtacaggtaactataacgcagtcacaggaaaactgtataccgatatgggatatctgacaagtgatccatgcataggtaaggacgtctctgacctttttaatgcccttaccggatattcgcgaaaagatcattatatcaaactccttgtagccccccagactctaagacatcagattttagagcgtatcaggcgtgaaatcgaccttcacgaaaagtgtggtaacggacacctgatcttcaagacgaactcccttgtggactaccagtgtatccgggaactttacagggcttctcaggctggagtgaaggtagatcttcttgtccgaggaatctgctgtctcaggccaggtattattgggctcagtgaaaatatcagggttacctcgatagttggccgttttctcgaacattccaggatatattatttcaggaatggtggaaaagaagagatccttatgggaagtgcagatctcatgccgcgcaacctggacaacagggtagaaatcctctttccggtatcttccgaatatattcctgtcttgagagatgtaatccttggcgttcacctcaaagataacgtaaaagctcgcctgctgcttcctaatggcaagactgagagaatctacccgcagcccgaagaagaagaactggattctcagttatggatgcttgaaaatagcagaagctgggatttaagctataagaaagactga

SEQ ID NO: 49917 - protein, 728 aa, Methanosarcina barkeri str. Fusaro
MERNFPIQCADFDRLIMDNVEGTRVEVSGMPELSDPCLYTDREYSWLQFNDRVLEEAFDDRNPLLERVKFLSIFGSNLDEFFMVRVSGVQKRIVEAMKEDRTDETAQEQLRVIREELLSQLPLNDSCWNEMLEPALRKEGIKVLNYFELSKKERDKLRNYFERNIFPLLTPLGFDSGHPFPHISNLSLNLAVLIDDPDYGERFARVKIPPMFMRLIVVPEGDQEKITSSLEELKKGRFVWLEQLIAANLDLLFPGQRILGAYPFRITRDADLGFDEDGDKDLLTAVKQRVGRNYFGSVVRLETDYTMPAKVSDILLKNLELSPSLMFRSAAPLGLSNLIKLAKINRPDLKYEPFEPKKHSQLANREKIFATLTKRDILLYHPYDSFESVIDFVEESADDPDVLAIKMTLYRVDDNSRIVQALMKAADRRKQVAVLVELKARFDEENNIGWAKELERKGVHVAYGFPGRKIHAKMCLVVRAEKEGIRYYVHMSTGNYNAVTGKLYTDMGYLTSDPCIGKDVSDLFNALTGYSRKDHYIKLLVAPQTLRHQILERIRREIDLHEKCGNGHLIFKTNSLVDYQCIRELYRASQAGVKVDLLVRGICCLRPGIIGLSENIRVTSIVGRFLEHSRIYYFRNGGKEEILMGSADLMPRNLDNRVEILFPVSSEYIPVLRDVILGVHLKDNVKARLLLPNGKTERIYPQPEEEELDSQLWMLENSRSWDLSYKKD

SEQ ID NO: 49918 - DNA, 2067 bp, Thiobacillus denitrificans ATCC 25259
  CDS (1)..(2067): transl_table=11
atgaacctgcccagccccgacacactcatcaatcgcgaactcggcattctcggcttccagcgccgggtcctcgcccaggccgaggacccggccgtaccgctgctcgagcggctgcgctttctgtgcatcgtgtcgagcaacctcgacgagttcttcgaggtgcgcgtcgccggcctcaaggaacagatccgcgccgattcgacccgcacctcgcccgacggcctgacgccgcgccagcagttccgcgccgtggcggacgccgcgcacctgctcgtcgcgcgccaatacgcgctcttcaacgaggacctcattccggaactcgccgcgcacggcatccatttcatccgccgcacgcagtgggacgaggcccaggcggcgtggatacgcgactatttcttcaacgaactgatgccggtgctgacgccggtcggcctcgacccttcgcacccgtttccgcgcgtgctcaacaagagcctcaatttcgccgtcgaactgtcggggcgcgatgccttcggccgcaattcgggcgctgccgtcgtgcaggcgccacgctcgctgccgcgcgtgatccgtctgccgcccgagatcgccggcgccgagtacggcttcgtcttcctgtcttcgatcctgcacgcgcacgtcggcgaactcttcgccgggatgacggtgcagggctgctaccagttccgcgtcacgcgcaactcggacctcttcgtcgacgaggaggaaaacaagaacctgcgtcagtcgctgcagggcgagttgccgcagcgccacttcggcgccgccgtgcgcctcgaggtcgccgacaactgctcgccggagatggcggccttcctgctcgcccagttcgagctcgacgccgacgacctctaccaggaacgcggcccggtcaacctcgtgcggctcatgcaggtgccggactgggtcgagcggcccgacctcaagttcacgcccttcgtccccgcgctgccggcgcggctcgccaagcaggacgacatctttgcgcacatccgcaagaacgacatcctgctgcatcaccccttcgaatccttccagccggtcatcgacttcatcgaacaggccgccgccgatcccgccgtcgtcgcgatccgccagaccgtctaccgtaccggcaccgattcgcagctcatgcaggcgctgatccgcgccgcccagtccggcaaggaagtcacggtcgtcgtcgaactgatggcgcgcttcgacgaagaggccaacatcaactgggcggccaggctcgaggaaaccggcgcccacgtgatctacggcgtcgtcggccacaagacccacgccaagctcgcgctcgtcgtgcgccgcgaggaaggcaagctcaggcgctacgtccacctcggcaccggcaactaccacgcgcgcaccgcgcggctctacaccgacttcggcctgctcaccgccgacgaggcgatcagcgccgacgtcgcgagtctcttcacccagatcaccgggctcggcaaggccggcaagctcaaacgcctgtggcagtcgccgttcacgttgcacagcgaggtcatcgccgcgatcaaccgcgaggccggattcgccgccgccggcaagcccgccgcgatcgtcgccaagatgaacgcgctggtcgagccgcaggtcatcgccgcgctctacgccgcgagccaggccggcgtccggatcgatctcgtcatccgcggcgtctgcgcgctgcgcccgggcatcccgggcctctcggagacaatccgcgttcgctcggtggtcgggcgctttctcgagcactcgcggatcttctacttccgcaacggcggcgacgagcaggtctacctgtcgtcggccgactggatggaccgcaacttcttccgccgcatcgagacgagctttcccatccttaaccccaagctgaaaaagcgcgtcatcaacgaaggcctcacgccctatctgcgcgacaacgtccaggcctgggatatgcagcccgacggcagctaccgccgccgcaccaagcgcggcgcgaaagcctattgcgcgcagtgcgcactgctggcgctgctgacgacccccagctga

SEQ ID NO: 49919 - protein, 688 aa, Thiobacillus denitrificans ATCC 25259
MNLPSPDTLINRELGILGFQRRVLAQAEDPAVPLLERLRFLCIVSSNLDEFFEVRVAGLKEQIRADSTRTSPDGLTPRQQFRAVADAAHLLVARQYALFNEDLIPELAAHGIHFIRRTQWDEAQAAWIRDYFFNELMPVLTPVGLDPSHPFPRVLNKSLNFAVELSGRDAFGRNSGAAVVQAPRSLPRVIRLPPEIAGAEYGFVFLSSILHAHVGELFAGMTVQGCYQFRVTRNSDLFVDEEENKNLRQSLQGELPQRHFGAAVRLEVADNCSPEMAAFLLAQFELDADDLYQERGPVNLVRLMQVPDWVERPDLKFTPFVPALPARLAKQDDIFAHIRKNDILLHHPFESFQPVIDFIEQAAADPAVVAIRQTVYRTGTDSQLMQALIRAAQSGKEVTVVVELMARFDEEANINWAARLEETGAHVIYGVVGHKTHAKLALVVRREEGKLRRYVHLGTGNYHARTARLYTDFGLLTADEAISADVASLFTQITGLGKAGKLKRLWQSPFTLHSEVIAAINREAGFAAAGKPAAIVAKMNALVEPQVIAALYAASQAGVRIDLVIRGVCALRPGIPGLSETIRVRSVVGRFLEHSRIFYFRNGGDEQVYLSSADWMDRNFFRRIETSFPILNPKLKKRVINEGLTPYLRDNVQAWDMQPDGSYRRRTKRGAKAYCAQCALLALLTTPS

SEQ ID NO: 49920 - DNA, 2211 bp, Anabaena variabilis ATCC 29413
  CDS (1)..(2211): transl_table=11
atgcctaaatcaaaaaaaagctctaattctattaatttaaacgatcctcaatactatcttaaccgggagttaagctggttagaatttaataaccgagttttacatgaagcttgcgactcacgcacaaaactattagaaagacttaagtttttggcaatttttagttccaacttagatgagtttttcatggtgcgggtggcagctctaaaacaacaggtagaagcaaaggtcagcaaactaactcccgatggacgcacaccccaacaacaattaaatgatattcgcctgaatctcataccccaagttacaaaacagcatcaacattttgaacaaataattcgccccttgttagctagtcatggtatccatattttggattacattaacttgactcaaaaacaacgcagttatctagataactattttgaagatcaaattttcccggttctgacacccttagccgttgaccccagtcatccctttccctacatttctaatctcagcttgaatttggctgttgtggtcaagaacccagagacagaagaagaattttttgccagagtcaaagttcccagcgttctccctcggtttttgcccctaccgccagagttagcatttcaagagaacggacaagcagctaactgggtaggtgtaccattagagcaggcgatcgctcataatctagattccctctttccagggatgaatatccaagaatatcatcccttccgcattacccgcgacgctgacctaactctggaagaagatgaagctgatgacttgttattggcaatagaacaagaactgcgaaaacggcgtatgggtggttctcccgtcagaattgaaattcaatcccaaacgccagaactcatccgcaccaggttactgcaagacctagacctaacagaacaagatgtctacgaagtcgatggtctgttaggactgcgtgatttgatgtcctttatggctttgccgttgccagaactcaaagatccaccacgccaatctgtagtaccgatgcgtctacaacgattgcgagaaccaaacttaaatcctgatgttttggagttagaggaaggtaaagactttttctcggtcattcgagaaaaagatttgttcgtacaccatccctatcaatctttttctgccacagtcgtgcgctttatcacccatgcagcccacgacccaaatgtcttagcaataaagatgacattgtatcgtacttccggcgattcacccatcgttaatgctttaattgcggcggcagaaaatggtaaacaagtatcagtcctagtagaacttaaagcacgatttgatgaagaaaataatatttattgggcaaggcgattagaaagagttggtgttcacgttgtctatggcttagtaggtctgaaaactcactgcaaaacggtgatggtagtgcgacgagaaaaagaccggatgcggcgttatgtacatattggaactggcaattacaacccaaaaacagccagactatatacagatttaggattgtttagttgtcgggaagaattgggtgcggatattacagatttgtttaatttcttgactggttattcacggcaaaagtcttatcgagaattgctagttgcgcctgtaaatatgcgcgatcgctttttggagttaatacgtcgggaaatcaccaacgtacagaatggattttcaggtcgtattgttgccaaaatgaactctcttgttgatccacaaattattgcgactttgtacgaagcttcccgtgctggcgtacaaattgatttaattattcgaggcatttgctgtttgcgcccaggtattaaagatatcagtgagaatattcgcattatcagcattatcggccgctttttagaacactcccgcatctattacttccataacaatggacaagaagaaatttttattggtagtgcagattggatgagccgtaacttagatcggcgagtagaagtaattacccctataaaagacccagatattgctaaggatttgcaagaaatattgggaattttgctagctgataatcgtcaagcttgggatttacaagctgatggtagttacattcagcgccttccgggagaaaattgtccagaaactaactcacagaaaactctcatgaatatggcgttacgttcaacgggaatcgctacaaatctgatcgattcaccaaaaagtcctgcatataaagacaattaa

SEQ ID NO: 49921 - protein, 736 aa, Anabaena variabilis ATCC 29413
MPKSKKSSNSINLNDPQYYLNRELSWLEFNNRVLHEACDSRTKLLERLKFLAIFSSNLDEFFMVRVAALKQQVEAKVSKLTPDGRTPQQQLNDIRLNLIPQVTKQHQHFEQIIRPLLASHGIHILDYINLTQKQRSYLDNYFEDQIFPVLTPLAVDPSHPFPYISNLSLNLAVVVKNPETEEEFFARVKVPSVLPRFLPLPPELAFQENGQAANWVGVPLEQAIAHNLDSLFPGMNIQEYHPFRITRDADLTLEEDEADDLLLAIEQELRKRRMGGSPVRIEIQSQTPELIRTRLLQDLDLTEQDVYEVDGLLGLRDLMSFMALPLPELKDPPRQSVVPMRLQRLREPNLNPDVLELEEGKDFFSVIREKDLFVHHPYQSFSATVVRFITHAAHDPNVLAIKMTLYRTSGDSPIVNALIAAAENGKQVSVLVELKARFDEENNIYWARRLERVGVHVVYGLVGLKTHCKTVMVVRREKDRMRRYVHIGTGNYNPKTARLYTDLGLFSCREELGADITDLFNFLTGYSRQKSYRELLVAPVNMRDRFLELIRREITNVQNGFSGRIVAKMNSLVDPQIIATLYEASRAGVQIDLIIRGICCLRPGIKDISENIRIISIIGRFLEHSRIYYFHNNGQEEIFIGSADWMSRNLDRRVEVITPIKDPDIAKDLQEILGILLADNRQAWDLQADGSYIQRLPGENCPETNSQKTLMNMALRSTGIATNLIDSPKSPAYKDN

SEQ ID NO: 49922 - DNA, 2187 bp, Rhodobacter sphaeroides 2.4.1
  CDS (1)..(2187): transl_table=11
atgacaccggcagatttcctgagagcccccttccccgatcccgtcaccctgcccgaggaggaagtctcgggaccgaggcgcttcttcaaccgcgagctcagctggctcgccttcaactggcgcgtcttggacgaggccggcaatccgcgcgttcccctgctcgaacgtctgcgcttcctgtcgatctcggccaccaacctcgacgaattctatacggtgcgcgtcgcgggcctgcgggcgctcgtccgggcgggcaacctcatgctctccgaggacgggcggacgcctgccgagcagcttcagctcatcaacgccgatgcgcggcggctgatgcagacccagcagacggtgtggaacaagctgcgccgcgagatggaggagcaggggatctcgatcctgacccgctcgaagctcaccgcccgcgacctgcgccacctcgaggatcatttcctctcgaaggtctttccggtgctctcgccgctggccatcgacccggcccacccgttccccttcatcccgaacacgggcttcacgctcgggctcgaactcgagcgcatgtcggaccgccgcccgcttcaggccctgctgccgatcccgcagcagatcgcccgcttcatcgagctgccggcgaagcccggcgagcaccgtttcctgccgctcgaggaactgcttcttttgcatctggggatgctctttcccggctacagcgaacgcgggcactgcgccttccgcgtgctgcgcgacagcgacctcgaggtcgaggacgaggccgaggatctggtgcgcgaattcgagaccgcgctgaagcggcggcgccggggcgaggtcatccgcatgaagatctcggccggtgcgccgaaggagctgcatgccctcatcatggaagaactcggcgtcacctcggacgaggtgatcgaggtgcgcggcctgatcggcgtggccgacctgaaggagctggtgatctcgtcgcgcgccgatctgctctggcccgccttcacgccgcgcgtgcccgagcggctggccgaccacgagggcgacatgttctcggcgatccggcagaaggacatcctgctgcatcacccctacgagaccttcgatctcgtgatccgcttcctccagcaggcggcgagcgatccgaacgtgctggcgatcaagcagacgctctaccgcaccagctgggacagccccatcgtctcggcgctctgcgaggcggccgaggcgggcaagtcggtcacggcgctggtggagctgaaggcccgcttcgacgaagccgccaacatccgccagagccgacgtctggaacgggcgggcgcgcatgtggtctatggcttcatgcacctgaagacccacgccaagatctcgaccgtggtccggcgcgagggcgacaatctcgtgacctacacccactacgggacgggcaactaccacccgatcaccgcgcgggtctacacggacctctcgttcttcacctgcgatccggccctcgggcgggatgcgaccaagatcttcaactatctctcgggctacgttcagcctgcggggctcgagaatgtggcgatcgcgcccatcaccctgcgcggccgcctgcacgagctgatcgcggccgaggccgaccatgcccgcgccggccgcccggccgagatctggctcaaggtcaattcgatcatcgaccccgagctgatcgacgcgctctatgccgccagtcaggccggcgtgaagatcagcctgatcgtgcgcgggatctgcgggctgcgccccggcgtgaagggcctgtcggacaatatccgggtgaagtcggtggtcggacgcttcctcgagcacagccgcatcgtctgcttcggcaacggatcgggcctgccctcgaagaaggcgcgggtgttcttctcctcggccgactggatgggccgcaacatggaccgccgggtcgagacgctggtcgaggcgctgaaccccacggtgaaggcgcagatcgtggggcagatcatggccgccaacctcgccgacgagtcgcagagctggctgctccagccgaacggccgctatgtccgtccgccggtcgcggccgacgaacctctcttctcctgccacgccttcttcatggagaacccctcgctgtccggccgcggcacggccggcgccaaggacgtgcagcgcctcgccacgttgcgcgacgaggggccgctgtga

SEQ ID NO: 49923 - protein, 728 aa, Rhodobacter sphaeroides 2.4.1
MTPADFLRAPFPDPVTLPEEEVSGPRRFFNRELSWLAFNWRVLDEAGNPRVPLLERLRFLSISATNLDEFYTVRVAGLRALVRAGNLMLSEDGRTPAEQLQLINADARRLMQTQQTVWNKLRREMEEQGISILTRSKLTARDLRHLEDHFLSKVFPVLSPLAIDPAHPFPFIPNTGFTLGLELERMSDRRPLQALLPIPQQIARFIELPAKPGEHRFLPLEELLLLHLGMLFPGYSERGHCAFRVLRDSDLEVEDEAEDLVREFETALKRRRRGEVIRMKISAGAPKELHALIMEELGVTSDEVIEVRGLIGVADLKELVISSRADLLWPAFTPRVPERLADHEGDMFSAIRQKDILLHHPYETFDLVIRFLQQAASDPNVLAIKQTLYRTSWDSPIVSALCEAAEAGKSVTALVELKARFDEAANIRQSRRLERAGAHVVYGFMHLKTHAKISTVVRREGDNLVTYTHYGTGNYHPITARVYTDLSFFTCDPALGRDATKIFNYLSGYVQPAGLENVAIAPITLRGRLHELIAAEADHARAGRPAEIWLKVNSIIDPELIDALYAASQAGVKISLIVRGICGLRPGVKGLSDNIRVKSVVGRFLEHSRIVCFGNGSGLPSKKARVFFSSADWMGRNMDRRVETLVEALNPTVKAQIVGQIMAANLADESQSWLLQPNGRYVRPPVAADEPLFSCHAFFMENPSLSGRGTAGAKDVQRLATLRDEGPL

SEQ ID NO: 49924 - DNA, 2187 bp, Geobacter metallireducens GS-15
  CDS (1)..(2187): transl_table=11
atggcccgcaagccctcctccccgaagagaaccgcccccgaaacagcggcgggcggggagtggtcggtctgcgacctggccgcccccgagctctacctgaaccgggagctcacctggctcgcgttcaaccgccgggtcctccacgaggccgaggacgagcggacgccgcttctggagcgggtcaagtttgccgccatcgtcagcagcaacctggacgagtttttcatgaagcggatcggcggcctcaagcagcaggtgggggcgggcatccagaacctgaccgtggacggccgcaccccccggcagcagatcgaggagtgctacgccgtggtgcgggaactgggggagcggaagcggctccttttcggcgagctcctgacgctcctgcggtcggccggcatccagatcctcggctacagcgagatcccggcccgggagcggaaagggctccgcgactattacatccggaacatctttcccctggtcaccccccagtccatcgaccccgcccaccccttccccttcatctccaacctctccctgaacctgctggtgacgctccgctacccccgggagcgggagacctccctggcccgggtcaaggtgccggtggggaccgggattccccgtttcctccgggtgggtgacaaggaccggttcgtccccctggaggaggtgatgcagcacaacctggacctcctcttcccggagatggaggtggtggcctgcgagttcttccgggtcacccgcaacgccaataccgagcggaacgaggagcaggccgacgacctcctctccatgatcgagtcggaactccaagaccggcgcttcgctcccatcgtgcggctggaggttgtggccggcatgggggcggtgcaccgggggatgctcgccgcggagctggaactgaacgaggccgccgacgtcttcgaggtggaggggatgctggccctgcgggacctgttcgagatcgccggcctcggctacccggagctccacgacccgtcccaccacccggtcgaccacccccgcctcatgaccgaccggaacatctttcacgtgatccgggacgccggcgccattctcctccagcacccctacgactccttcgccacctcggtggagcgcttcctcttcgaggcaagcgaggatcccaaggtgcgggccatcaagatgaccctctaccggaccgcctccgacagccggatcatcgattgcctggtgaacgcggcgagtaacggtaagcaggtggcggtggcggtggagttgaaggcccgcttcgacgaggcggccaacattcggcttgcggagcggatggaggaggcggggatccacgtcacctacggcgtggtggggctcaagacccactgcaaggtgatcctcgtggtgcggcaggactacgatgggctgcggcgctacgtccacatcggcaccggcaactaccatcccggcaccgcccggctctactccgacctggggctcctcaccagcgacgaggcgattggccaggacgccaccgagcttttcaactacctcaccaccggctacaccccccggcgcaactatcagaaactgctgccggcgccgaagcacctgaagcgggcgctcctggccaggatcgagcgggaggcggaactccactcggagaagacgccggggctcatccagttcaaaatgaacgccctggaagacgccgacatcgtggcagccctctaccgttcggcccggaagggggtgcggatcgacctcctcatccgggacagctgccgcctgcgccccggcgttccggggctctcggagacggtgcgggtggtgagcgtggtgggacggttcctggagcactcacggatctactacttccgcaacaatggtgacgaggagtactacatcggttccgccgacgccatgaagcggaacctggaataccgggtcgaggtcctcgcaccggtggaggccccggacctgcggaaggaactccgagccatgctcgacgcgcaactcggcgaccggcggagcgcctgggagatgcagcccgacggcagctccgtgcagcggatgccgggggaaggggacgacccgaggggaagccacgagatcctcatcgccctggccgaaaaacgccgcaaggccggtgcgcgcctcaaaaagaaaaaggccaggggagttgtccggcgccctgtccggtaa

SEQ ID NO: 49925 - protein, 728 aa, Geobacter metallireducens GS-15
MARKPSSPKRTAPETAAGGEWSVCDLAAPELYLNRELTWLAFNRRVLHEAEDERTPLLERVKFAAIVSSNLDEFFMKRIGGLKQQVGAGIQNLTVDGRTPRQQIEECYAVVRELGERKRLLFGELLTLLRSAGIQILGYSEIPARERKGLRDYYIRNIFPLVTPQSIDPAHPFPFISNLSLNLLVTLRYPRERETSLARVKVPVGTGIPRFLRVGDKDRFVPLEEVMQHNLDLLFPEMEVVACEFFRVTRNANTERNEEQADDLLSMIESELQDRRFAPIVRLEVVAGMGAVHRGMLAAELELNEAADVFEVEGMLALRDLFEIAGLGYPELHDPSHHPVDHPRLMTDRNIFHVIRDAGAILLQHPYDSFATSVERFLFEASEDPKVRAIKMTLYRTASDSRIIDCLVNAASNGKQVAVAVELKARFDEAANIRLAERMEEAGIHVTYGVVGLKTHCKVILVVRQDYDGLRRYVHIGTGNYHPGTARLYSDLGLLTSDEAIGQDATELFNYLTTGYTPRRNYQKLLPAPKHLKRALLARIEREAELHSEKTPGLIQFKMNALEDADIVAALYRSARKGVRIDLLIRDSCRLRPGVPGLSETVRVVSVVGRFLEHSRIYYFRNNGDEEYYIGSADAMKRNLEYRVEVLAPVEAPDLRKELRAMLDAQLGDRRSAWEMQPDGSSVQRMPGEGDDPRGSHEILIALAEKRRKAGARLKKKKARGVVRRPVR

SEQ ID NO: 49926 - DNA, 2196 bp, Synechococcus elongatus PCC 7942
  CDS (1)..(2196): transl_table=11
atgcatcccttgctaggatcagcggctgattctgtgatgagattggccatgaccgatgctgcgattgaactgaatcggccagaaaatttctttaatcgtgaaattagctggctggctttcaatcagcgcgttctacaccaagccctcgacccccgcacgcctctgctggaacgcctcaagttcatggggattttcagcaataacctcgatgaatacttcatggtgcgcgtggcgagtctcttgcagcaaattgaggctggcgtcagcaagcgatcgcccgatggcctcaccccagcggagcaactcgagcaaattcgagcctgccttggccccctggtggagcaacaacacagccatttctaccgagagctacgccccctgctggctgaaacgggcatccatctgctcaactacaacgacctcaaccgcacccaacagcgatacctcgatcagtatttcgcagcgcagatttttccagtcttgacaccgctcgcggttgatccggcgcaccccttcccccacatttccaatctcagtctcaacttggcggtcttgatccaagacgacagtgttggcgaggagcagtttgcgcggattaaggtgccgaacattctgccgcgctttattgaactgccggccaaaacccgccggcgatcgcagcaaccgattgtctggatgggcgtaccgatcgaacaggtaatcgcccacaacctcagcacgcttttcccaggcatgagcgtgatcgattggtttgtcttccgtgtcacccgcgatgctgacctcgatgtcaaggaagacgaagctgacgatctgctgttggcgatcgaacaagaattgcgtaagcgacgcctgggggcaggctcagtcgtccgcctagaaattgaggcaggctctccagcctccatcctcgaaatcctgatgaacggcatggacctcgatccgcaggatgtctatgccctacccggtctcctgagccttgaagacctgatgtcgctgacgtccttgccgttgcccgaactgaaggatcagccttggacgcaagtggttcccaagcgattgcggcgggtacaaatgcccgttggcgaagacctgcagcgttctaagcccagtgaggaaagcgaagacatctttacggtgattcgccagcgcgacctgttgatgcatcacccctacgattcttttgcggcttcagtcgaacagttcgttgcccaagccgcaacagatccccacgtgctggctatcaaaatgacgctctatcgcacctcgggagattcgccgattgtgcagagcctgatgcaggctgcggagcatggcaagcaggtgctcgctcttgtagaactcaaagctcgctttgatgaagagaacaacatcacctgggcgcggcgccttgagaaagcaggtgtgcatgttgtctatggcttagtgggtctcaagattcacaccaaagtggtgttggtggttcgccaagagcgcaaccaaatccgtcgctatgttcatatcggcaccggcaactacaactccaaaacagcccgcatctacactgacttggggctcttgagctgccgtgaggatttgggcgctgatatttctgaactcttcaactacctgacgggtttctcgaagcaacgggactatcgcaagctgctgattgcgccggtcagcttgcgggagcaaatgatcggcctgatcgatcgcgaaattcagcatgcgatcgcagggcgtccggcagcgattcgcgccaagatgaactcgctagttgatcctaaaatcatcctcaagctctatgaggcctcacaagctggcgtcgagattgatttgattgtgcggggggtctgctgcctacgaccgggtgtgccggggttgagcgatcgcattcgggtgattagtatcattggccgcttcctcgaacactcgcgcatcttcagcttccacaacaacggccaggaagagtttttcatcggcagtgcggactggatgacccgtaacctcgatcgccgcgtagaagcgattacccctattgaagatgaagcgatcgcagcagaactgcgggcaatcctggatatttccttagccgacgaccgactggcctgggatttactgcccagtggtgagtaccaactccggcaaccggtggatcccgagactccccatagttcgcagcagcaattcatgaatcgcgcggctaccacccgctag

SEQ ID NO: 49927 - protein, 731 aa, Synechococcus elongatus PCC 7942
MHPLLGSAADSVMRLAMTDAAIELNRPENFFNREISWLAFNQRVLHQALDPRTPLLERLKFMGIFSNNLDEYFMVRVASLLQQIEAGVSKRSPDGLTPAEQLEQIRACLGPLVEQQHSHFYRELRPLLAETGIHLLNYNDLNRTQQRYLDQYFAAQIFPVLTPLAVDPAHPFPHISNLSLNLAVLIQDDSVGEEQFARIKVPNILPRFIELPAKTRRRSQQPIVWMGVPIEQVIAHNLSTLFPGMSVIDWFVFRVTRDADLDVKEDEADDLLLAIEQELRKRRLGAGSVVRLEIEAGSPASILEILMNGMDLDPQDVYALPGLLSLEDLMSLTSLPLPELKDQPWTQVVPKRLRRVQMPVGEDLQRSKPSEESEDIFTVIRQRDLLMHHPYDSFAASVEQFVAQAATDPHVLAIKMTLYRTSGDSPIVQSLMQAAEHGKQVLALVELKARFDEENNITWARRLEKAGVHVVYGLVGLKIHTKVVLVVRQERNQIRRYVHIGTGNYNSKTARIYTDLGLLSCREDLGADISELFNYLTGFSKQRDYRKLLIAPVSLREQMIGLIDREIQHAIAGRPAAIRAKMNSLVDPKIILKLYEASQAGVEIDLIVRGVCCLRPGVPGLSDRIRVISIIGRFLEHSRIFSFHNNGQEEFFIGSADWMTRNLDRRVEAITPIEDEAIAAELRAILDISLADDRLAWDLLPSGEYQLRQPVDPETPHSSQQQFMNRAATTR

SEQ ID NO: 49928 - DNA, 2265 bp, Rhodospirillum rubrum ATCC 11170
  CDS (1)..(2265): transl_table=11
atgacctccgctccgccgccccccgccgtcgaagccatccagggtgttgccgcccaggatgtcgccccgcggacccgtcagggggtcaaaccgacggcggcggcctctggcgatcaccccgaggcgccggtgatcaccatggacatgcccgatcgcttcatcaatcgcgaggtctcgtggctggccttcaatttccgggtgatggaggaggcgcgcaatacccgccatcccttgatggagcggctgcgcttcctgtcgatttccggctccaacctcgacgagttctatatggtgcgcgtcgccgggctgaaggggcaggtcgaggccggggtgaacaaggtcagccaggatgggctgaccccggcccagcagctgaccgagatcaatcaggccgcccgccagcttctggaagagcagcaggtggcctgggaaatcctccatgacgaactggccgcccagggcatcaccgtggttaccccgggccagttgtccaaggccgaccgggtgtggctcgatacctatttcatggggcaggtcttcccggttctgacgccgctggccatcgatccggcccatccctttccgttcattcccaatctgggccatgccctggtgctgcagctccatcgtcccaacgacgacaccagcctgcgcgccctggtgcccttgcccaatcacgtcagccgcttcacccgcctgccttcggaagaggggcagggggcgcgctatattttcctggaagacatggtcgggctgcatctcgaccggctgttccccggcttcaaggtcagccagggcgggcacttccgggtcattcgcgattccgaaatggaaatcgacgaagaggccgaggatctggtgatgagcttcgaatcggcgctcaagcgccggcggcgcggccattgcatccgcctgaccctcaacgccaatatgcccgaggagctggtcaagctgatctgcgacgagatggacgtcgccgaggaggatatcttcaaggtgcgcgggccgatcggtcaggccgacctcaagcagctgatctccgatgaccgccccgatctgcagttcaccccctataccgcccgcttccccgagcgcatccgcgacttcggcggcgattgcttcgccgcgatccgcaagaaggacatcatcgtccaccacccctatgaatccttcgatgtggtggtgcagttcctgcgtcaggcggcgcgcgatcccaatgtgctgtcgatcaagcagacgctctatcgcacgtcgaataattcctcgatcgtcgcggccctggtcgaggcggccgaggccgggaagtcggtcaccgcgatggtcgagttgaaggcccgcttcgatgaggaggccaatatccgctgggcccgcgatctggaacgctcgggcgccaatgtcgtctatggcttcatggatctgaagacccacgccaagatctcgctggtggtgcgccgggaaagcggcggcgagctgcggtcctatgttcacttcggaacgggcaattaccatccgatcaccgccaagatctatacggatctttcctatttcacctccgacgagaagctgtgccaggacgccgcccgcgccttcaactacatgaccggctatgcccgcccgggcgagatggaaaagctgcgcatcgcgcctttggggctgaaggaatacctgctcgaacgcatccaggccgaagaggatcacgcgcgcgccgggcggccgggaaccatctgggccaagctcaacgccctggtcgatcccgatgtcatcgacgccctttatcgcgcctcgcaggccggggtgcgcatcgatctggtggtgcgcggtatctgctgcctgcgtcccggcgtggccgggctgtcgtcgaccatccgggtgaagtcgatcgtcggccgcttcctcgagcattcgcgcatcgcctgttttggcaatggcaagccgctgcccggacccgatgccctggtctatatctcctcggccgactggatgccgcgcaacctcaatcgtcgcgtcgagtctttcgtccccatcgaaaacccgacggtgaaggcccaggttcttaaccagatcatggtggccaatctcaatgatcgggcccagtcgtggtatctgaccgccgatggcgtcttccgccgggccaaggcctcggatgacgccttctcggcccatacctatttcatgaccaacccgagtctgtcgggacggggatccgcgctcaatgaccctgaaaaggacattcctaccctggaggtttcagctcagaggaactaa

SEQ ID NO: 49929 - protein, 754 aa, Rhodospirillum rubrum ATCC 11170
MTSAPPPPAVEAIQGVAAQDVAPRTRQGVKPTAAASGDHPEAPVITMDMPDRFINREVSWLAFNFRVMEEARNTRHPLMERLRFLSISGSNLDEFYMVRVAGLKGQVEAGVNKVSQDGLTPAQQLTEINQAARQLLEEQQVAWEILHDELAAQGITVVTPGQLSKADRVWLDTYFMGQVFPVLTPLAIDPAHPFPFIPNLGHALVLQLHRPNDDTSLRALVPLPNHVSRFTRLPSEEGQGARYIFLEDMVGLHLDRLFPGFKVSQGGHFRVIRDSEMEIDEEAEDLVMSFESALKRRRRGHCIRLTLNANMPEELVKLICDEMDVAEEDIFKVRGPIGQADLKQLISDDRPDLQFTPYTARFPERIRDFGGDCFAAIRKKDIIVHHPYESFDVVVQFLRQAARDPNVLSIKQTLYRTSNNSSIVAALVEAAEAGKSVTAMVELKARFDEEANIRWARDLERSGANVVYGFMDLKTHAKISLVVRRESGGELRSYVHFGTGNYHPITAKIYTDLSYFTSDEKLCQDAARAFNYMTGYARPGEMEKLRIAPLGLKEYLLERIQAEEDHARAGRPGTIWAKLNALVDPDVIDALYRASQAGVRIDLVVRGICCLRPGVAGLSSTIRVKSIVGRFLEHSRIACFGNGKPLPGPDALVYISSADWMPRNLNRRVESFVPIENPTVKAQVLNQIMVANLNDRAQSWYLTADGVFRRAKASDDAFSAHTYFMTNPSLSGRGSALNDPEKDIPTLEVSAQRN

SEQ ID NO: 49930 - DNA, 2244 bp, Burkholderia thailandensis E264
  CDS (1)..(2244): transl_table=11
gtgtcggtcgcgcgccggccgacaccggctttcattgtatctagaggacgcttttatgaaatcccaggttttcgagcgtatgattggccgacaaacatcaaactgtcatcagcacgtcatcgcaccgtgagaatttccgagcgacctttcgagtctgcgcctgaccttccgtattctctgccgatgtctctccgttatccgctcctgaatcgcgaactcggcatcctgggcttcaacgagcgcgtgctcgcccaagccgccgatccgcacgtgcccctcctcgagcgcctgcgcttcatctgcatcacgagcagcaacctcgacgaattcttcgaagtccggatggccggcctccaggagcagatgcgcgacaatcccggcgcgctcgcgccggacggcatgtcgctgcagcacgtgtacggcctcgtcgtcgagcgcgcccagcggctcgtgcaccggcagtacacgatgctgcacgaaacgatcctgcccgcgctcgaacaggaaggcatctattttcacggcaccgagacgtggagcgacgcgcagatcgaatgggcgcgccgctacttcttcgacgagctgctgcccgtgctcacgccgatcggcctcgatcccgcgcatccgttcccgcgcgtgctgaacaagagcctgaacttcgtggtcgagctcgaaggccgcgacgcgttcggccgccaggcggtgatgggcatcgtgcaggcgccgcgcgcgctgccgcgcctcgtgcgcatgccgcaggagctgtcgggttttcagcacgggttcgtgctgctcagctcgctgatgcagcgcttcgtcggcgagctgtttccgaagctcgtcgtcaagagctgcaaccagtttcgcatcacgcgcaacagcgagctcttcgtcgacgaagacgaaatcacgaacctgcgcgtcgcgctgcagggcgaactgcccgcgcgccatctcggcaatgcggtgcggctcgaggtatcggccgacacgccgccgcatctcgtgcggcgcctgctcgacgaaagcggcctgaccgagaaggactgctaccgcgtcgacggccccgtcaatctcgtgcggctgatgcagttgccggatctcgtcgacctgcccgagctcaagttcacgccgttcctgccggcgatcccgcccgcgatcgcgaacgcgccgtccatgttcgacgcgatcgatcgcggcgacatcctgctgcaccacccatacgagagcttccagccggtgctcgagctgctgcagcaggccgcgcaggacccgagcgtcgtcgcgatcaagcagacgatctaccgcaccggcaccgattcgccgctgatggacgcgctgatggaagccgcgcgcaacggcaaggaagtgacggtcgtcgtcgagctgctcgcgcgcttcgacgaggagacgaacatcaactgggccgcgcagctcgaatcggtgggcgcgcacgtggtatatggcgtcgtcggccacaagtgccacgcgaagatgatgctgatcgtgcgccgcgcgacgcaaggcggcaaatcggtgctgcgccgctacgcgcacctcggcaccggcaactatcatccgcgcaccgcgcgcctttacaccgacttcggattgatgacgtccgagcccacgatctgcgaggacgtgcatcatgtgttccagcagctgacgggcatcggcggcgaactgaagctgcacgagatgtggcaatcgccgttcacgctgcatccgcggctgatcgagcacatccgcgcggaggccggaaacgcgcgcgccggcaagcgtgctcggatcgtcgcgaagatgaatgcgctgctcgagccgaccgtgatcgccgagctctacgaagcgtcgcaagccggcgtgaagatcgacctgatcgtgcgcggcgtgtgcgcgctgcaacccggcgtaccggggctgtcggagaacatcacggtgcgttcgatcgtcgggcgctttctcgagcaccaccggatctattacttccacgcggacggcgaagagcgtgtttatctgtcgagcgccgactggatggatcgcaatctgttccggcgcgtcgaggtcgcgttcccggtgcgcgatcgcaagctcaagcgccgcgtgatcgccgaagggttgtcggtgttcctcggggacaatcaatccgcgtggctcatgcagagcgacggccactatcgccgacgccgcgcgggcaaggcgccgcgcaacgcgcagctcgggctcctcgcgaaattctgctga

SEQ ID NO: 49931 - protein, 747 aa, Burkholderia thailandensis E264
MSVARRPTPAFIVSRGRFYEIPGFRAYDWPTNIKLSSARHRTVRISERPFESAPDLPYSLPMSLRYPLLNRELGILGFNERVLAQAADPHVPLLERLRFICITSSNLDEFFEVRMAGLQEQMRDNPGALAPDGMSLQHVYGLVVERAQRLVHRQYTMLHETILPALEQEGIYFHGTETWSDAQIEWARRYFFDELLPVLTPIGLDPAHPFPRVLNKSLNFVVELEGRDAFGRQAVMGIVQAPRALPRLVRMPQELSGFQHGFVLLSSLMQRFVGELFPKLVVKSCNQFRITRNSELFVDEDEITNLRVALQGELPARHLGNAVRLEVSADTPPHLVRRLLDESGLTEKDCYRVDGPVNLVRLMQLPDLVDLPELKFTPFLPAIPPAIANAPSMFDAIDRGDILLHHPYESFQPVLELLQQAAQDPSVVAIKQTIYRTGTDSPLMDALMEAARNGKEVTVVVELLARFDEETNINWAAQLESVGAHVVYGVVGHKCHAKMMLIVRRATQGGKSVLRRYAHLGTGNYHPRTARLYTDFGLMTSEPTICEDVHHVFQQLTGIGGELKLHEMWQSPFTLHPRLIEHIRAEAGNARAGKRARIVAKMNALLEPTVIAELYEASQAGVKIDLIVRGVCALQPGVPGLSENITVRSIVGRFLEHHRIYYFHADGEERVYLSSADWMDRNLFRRVEVAFPVRDRKLKRRVIAEGLSVFLGDNQSAWLMQSDGHYRRRRAGKAPRNAQLGLLAKFC

SEQ ID NO: 49932 - DNA, 2253 bp, Frankia sp. CcI3
  CDS (1)..(2253): transl_table=11
atgccacatcgatgctgccgagtccatcggggactggcaccatctacaggcatgagcgagctgatggcgacccgtcctgaacagcctcagcgcaaggcccgcagtggcctgctcgagcccctggaggcgccgcgtcagccggcgccgtccgacctgcccgccggccgcttcatcaaccgggaggcgtcctggctcgacttcaacgcccgggtcctcgcgctcgccgaggacgtgtccacgcccctgctggagcgcgcgaagttcctagcgatcttcgccagcaacctggacgagttctacatggtccgggtcgcggggctgatgcgacgcgaggcgacgggactggccgtccgctccgccgacgggctgaccgcccgggaacaactcgatctcatcagcacgatgacggccgaggtcacccggcggcattcgcgatgcttcaccgacgaggtggggccgtcgctggcccatgccgggatcagcatccggttctggccccagctgaccgagacccagcgtgatcagctgcaccactacttccacgaacagatcttcccggtgctcactcccctcgccgtcgatccggcgcaccccttcccctacatcagcgggctgtcgctcaatctggccgtccaggtccgtgacccgggcggggaggtcgaccgcttcgcccgggtgaaggtgccccagaacgttcctcggctggtccccgtagcggtggagcctaccgacacggccggtgtcccggggggtctggccccccaggcgagcgcatgcttcgtcccgctggaggaagtgatcgctgcccatctctcccagctgttcccgggcatggaagtgatcgactcccatctgttccgggtcacccgcaacgccgacctcgaagtcgaggaggacgaggcggaggatctgctccaggctctggagcgcgagctcgcccggcgccggttcggtcccgccgtccgcctggaagtggacgccgacatcgatgatgatctgctcaccctgctgatgcgggagctggagatcaccgagcgcgaggtacatcgggtcgccggcctgctcgacctgtcgaccctgtgggctctctacgacctcgaccgcccggagctgaaagatacgccgcgggtcccaatcacacatcggcggctgacgaccgatgacggcgagacaccggacttcttcagcgtgctccgggagggcgacatcctcgtccaccacccgtacgactcgttcaccacgtccgttcagcggttcatcgagcaggcggcggccgatccgcatgttctcgccatcaagcagacgctctatcgcacgtccggggactcccccatcgtggatgccctcatcggcgcggccgaggcgggaaagcaggtcgtcgtcctcgtcgagatcaaggcccggttcgacgagagcgccaacatccgctgggcccgcgagctggaacgggccggctgccacgtggtctacggtctcatcggcctgaagacccactgcaagacctgcctcgtggtacgccaggaacgcggcggcctgcgccgctactgccatgtgggtaccggcaactacaaccccaagaccgctcggctctacgaggacctcgggctgctgaccgccgacccgggcgtgggcgcggatctcaccgacctgttcaacgtcctcaccggctacagccgacagacggagtaccgctcgctgttggtcgccccgcagcacatgcgggacggcatcctgcagcggatcgaagccgaggcccaggctgcccgggggggcggggagtccgggatccgcatcaaggtcaacagccttgtcgacgaacaggtgatcgacgcgctgtatcacgcctccatcgccggggtacccgtgcactgcctggtccgcgggatctgcgccctacgtcccggagtgccgggcctgtcggagacggtccacgtgcgctcgatcctggggcggttcctggagcacagccgggtcctcgagttcacctcgtctggcgagttctggatcggcagcgcggacatgatgcaccgcaatctcgaccgccgtatcgaggcactcgtgcgcgtcccgcacccggaccggcgagacaccctgcggcagatgctcgaccatgcgttctccgacgaggtgtccgcctgggtgctgcagtccgacggccgctgggaacgacgcacgaccgggccggacgacgttcgcctgtcggactaccagcacgacctgatggccgacgccatgcggcgcgggcaccggtaa

SEQ ID NO: 49933 - protein, 750 aa, Frankia sp. CcI3
MPHRCCRVHRGLAPSTGMSELMATRPEQPQRKARSGLLEPLEAPRQPAPSDLPAGRFINREASWLDFNARVLALAEDVSTPLLERAKFLAIFASNLDEFYMVRVAGLMRREATGLAVRSADGLTAREQLDLISTMTAEVTRRHSRCFTDEVGPSLAHAGISIRFWPQLTETQRDQLHHYFHEQIFPVLTPLAVDPAHPFPYISGLSLNLAVQVRDPGGEVDRFARVKVPQNVPRLVPVAVEPTDTAGVPGGLAPQASACFVPLEEVIAAHLSQLFPGMEVIDSHLFRVTRNADLEVEEDEAEDLLQALERELARRRFGPAVRLEVDADIDDDLLTLLMRELEITEREVHRVAGLLDLSTLWALYDLDRPELKDTPRVPITHRRLTTDDGETPDFFSVLREGDILVHHPYDSFTTSVQRFIEQAAADPHVLAIKQTLYRTSGDSPIVDALIGAAEAGKQVVVLVEIKARFDESANIRWARELERAGCHVVYGLIGLKTHCKTCLVVRQERGGLRRYCHVGTGNYNPKTARLYEDLGLLTADPGVGADLTDLFNVLTGYSRQTEYRSLLVAPQHMRDGILQRIEAEAQAARGGGESGIRIKVNSLVDEQVIDALYHASIAGVPVHCLVRGICALRPGVPGLSETVHVRSILGRFLEHSRVLEFTSSGEFWIGSADMMHRNLDRRIEALVRVPHPDRRDTLRQMLDHAFSDEVSAWVLQSDGRWERRTTGPDDVRLSDYQHDLMADAMRRGHR

SEQ ID NO: 49934 - DNA, 2109 bp, Saccharophagus degradans 2-40
  CDS (1)..(2109): transl_table=11
atgattgaaatgaactctgcagactccgacctacccgaattagatgattctgcacccagtatcagtttggatgaccccgcgtactatatcaatcgcgaactcagccacttagcttttaatcaacgtgtactggagcaagcgctagacgaaagccaccccattttagagcggctaaagtttctgcttatttttagctcaaacctcgatgagttttttgaaattcgcgttgcaggcctcatgcaaagtattaagtttgagcgtgaaaccgcaggcttagacggcgcacaccccaaagaaaccctgcgcgaaattagccgtatttgccacgaaacggtggaaaaacagtatgaaatactgaataacatcttgtttcctgcattggaaaaagaagatattcgctttttgcgtcgcagcgaatggtctgatgagcaaagcgcgtgggtaaacaactttattgaaaccgaagtactgcccattattagccccataggcttagaccctgcgcaccccttcccgcgattagtaaacaaaagtcttaacttcattgtagagctagaaggtaaagatgcctttggccgcgatttaaactacgcgatagtgcctgcaccgcgcaccttgccacgcatcatcaaattgccagaagacttgggcaaccccggccacaactttattttcttgtcgtcgatgattcacgcccacgccgaccagctcttccccggcatggaagtaaaaggctgctaccagtttcgtttaacccgcaacgccgacctcgacgtagacgtagagggtattgccgatttagcccgcgccctgcgcggtgaattgcactctcgccgctttggtaccgccgtacgcttagaagtggccgacaactgccctagcgaacttaccgactttttattaaaagaaactggcttaaccgaagacgacctgtaccgtgtagacgggccagttaacctcaagcgcctaatgcgcgtgccatcgatggtgggccgcacagatttactctacccgccgtttacccccagcatgcccaagggtatgagccgtaaagacaacatttttgatgcgattgcacgcaaagattacctgctattgcacccattcgagtcgtacgcgccggtagtgcagttgttgcgtcaagccgccaaagacccaaacgtagtagccatcaagcaaaccctctaccgcacgggcaacttatcatcggttgtggatgcccttatcgacgccgcgcgcaacggtaaagaagtcaccgccgttgtagaattgcgcgcccgtttcgacgaagaggaaaacctcgagctagcaagccgcctgcaagaagcgggagccgtggtggtatacggcgtagtgggctacaaaacccacgcaaaaatgatattaattgtgcgacgcgacggcacagagctaaaacgctatgtgcatttgggcaccggtaactaccacagcggcaacgcgcgcttgtacaccgactactcactgctaaccgccgacccagtgatgggcgccgacgtacaccgtgtattccagcaacttaccggtatgggcaaaaccgagcgcatggataaactgctacatgcgccttttacccttaaacgccagctattgcgtttgattgaccgcgaagtacaggcccaacgcgaaggcaagcaggggcgcattattcttaaatgcaacggcttaaccgagccaaaaaccttacaagcgctgtacaaagcatcgcaggaaggcgtgcaaatcgacttgattattcgcggcatgtgctgcttgcgcccaggcatacctggggtgtccgaaaacattcgcgtgcactctattattggccgctttttagagcacacccgtgtttattacttcgccaatgccgaatataacgtttattgtgccagcgccgacttgatggagcgcaacctaaaccgccgcgtggaaacctgcttccctatctgccagcccgagctcgcgcagcgggtgctgacagagcttgaactgtatataaatgatacaaatcagcgttgggaactggataaagaaggggtttacacccgcgtggaggccgaagaaagccgtgcagcgcaagcagaattgctacagaaacttgcaaattag

SEQ ID NO: 49935 - protein, 702 aa, Saccharophagus degradans 2-40
MIEMNSADSDLPELDDSAPSISLDDPAYYINRELSHLAFNQRVLEQALDESHPILERLKFLLIFSSNLDEFFEIRVAGLMQSIKFERETAGLDGAHPKETLREISRICHETVEKQYEILNNILFPALEKEDIRFLRRSEWSDEQSAWVNNFIETEVLPIISPIGLDPAHPFPRLVNKSLNFIVELEGKDAFGRDLNYAIVPAPRTLPRIIKLPEDLGNPGHNFIFLSSMIHAHADQLFPGMEVKGCYQFRLTRNADLDVDVEGIADLARALRGELHSRRFGTAVRLEVADNCPSELTDFLLKETGLTEDDLYRVDGPVNLKRLMRVPSMVGRTDLLYPPFTPSMPKGMSRKDNIFDAIARKDYLLLHPFESYAPVVQLLRQAAKDPNVVAIKQTLYRTGNLSSVVDALIDAARNGKEVTAVVELRARFDEEENLELASRLQEAGAVVVYGVVGYKTHAKMILIVRRDGTELKRYVHLGTGNYHSGNARLYTDYSLLTADPVMGADVHRVFQQLTGMGKTERMDKLLHAPFTLKRQLLRLIDREVQAQREGKQGRIILKCNGLTEPKTLQALYKASQEGVQIDLIIRGMCCLRPGIPGVSENIRVHSIIGRFLEHTRVYYFANAEYNVYCASADLMERNLNRRVETCFPICQPELAQRVLTELELYINDTNQRWELDKEGVYTRVEAEESRAAQAELLQKLAN

SEQ ID NO: 49936 - DNA, 2082 bp, Methylobacillus flagellatus KT
  CDS (1)..(2082): transl_table=11
atgttgcccgtcaaattgactcccgagtatttcatcaatcgcgagctaggcattctcgccttcaaccgtcgcgtattggcccaagctgaggacgaacgcgtacccctgcttgaacgcctcaagttcctctgcattttcagcagcaatatggatgagttcttcgaggtgcgcgtagcaggcctcaagaaccagatcaaatacaactcgccgcatgtaggcgccgacggcatgctgcccaagcaggcgctcgccaagatcagcaagctggcgcatgaaatggtggatcaccagtacaagatcctcaatgaaatcgtactcccacagctggcagcccaggaaatccgctttatccgccgcggtgactggaacgaggtccagcgcgagtggattgctacttacttcttccgcgagttgatgcccattctcaccccgatcgggctggatccagcacacccgttccctcgcgtactgaacaaaagcctgaactttgccgtcgagctggaaggcaaggacgccttcgggcgcaattcgggcgtcgccatcgtgcaggcgccgcgcgcgctgccgcgcgtcatccgcctgccgcgcgacattgccggctgcgaccatggtttcgtattcctgtcatccatcctgcacgcgcatgttaacgaactgttctccggcatgacggtaaaaggttgctaccagttccgcgtcacgcgcgatagcgagttgaccttggatgatgaagagaccaaggacttgcgcctcgccctgcaaggtgagctgactcaccgtcaatacggcgatgccgtacgcctggaagtagccgacagctgcccggcggaaatgtccgcctttttactgggtcaatttggcctgggccaggacgacctctaccaggtcaatggtctggtcaacctcgttcggctgatgcagatcccggacagcgtggaccgcccggacctgaagtatccgcattacacgcccagcctgccacgggagctggataaggaccaggacatcttcaaggccatccgcaagcaggatatcctgctgcatcatccattccagtcgttcaatccggtagtagaattcatcaagcaggctgcggaggatccgcaagtgttggccatcaagcagacgttctaccgcaccagcgcagactccacactgatgacatccctgattgacgccgcacagcgcggcaaggaagtcaccgtggtggtggagctgttggcacgctttgatgaagaagccaatatcaactgggcagccaagctggaaaatgccggcgctcacgtcgtgtatggcgtggtggggcacaagacccatgccaagatggccatggtggtgcggcgcgatgaagacaagctgcggcgttatgtgcatattgccaccggcaactaccaccagcgtaccgcgcgcctgtataccgacttcggcctgctcacctgccaggaagaaatcagcgaggatgtgaatgacgtcttcgcccagctgacgggcctgggcaaggctagcaagctgcgccatctctggcagtcgccgttcaccttgcaccagcgcacggtcaaggcaatccagaatgaagcggaaattgccaggtcgggcaagaaggcccgcatcattgccaagatgaatgccctactcgatcccgacgtgatccgagccttgtacgatgcctcctgcgccggcgtgcaaatcgacctcatcgtgcgcggcgtctgcgccctccgcccaggcattccgggcatatcggagaatatccgggtgcgttccatcgtgggacgatttctcgagcacacgcgcatcttctatttttatgacgacggcgcagaacacatttacctgtcgagcgcagactggatgtatcgcaatttcttccgccgcatcgaagtttgcttcccgctactggatgccaaggtaaagaagcgcgtgttcaaggaaggcctggaaccctatctcaaggataacagcaacgcctgggaaatgcagtccgatggccattacgaacgcaaggccagccgccgggccagttttgcagcacagcaattcctgatggcggagcatggacaggaaatattgcccgagagctga

SEQ ID NO: 49937 - protein, 693 aa, Methylobacillus flagellatus KT
MLPVKLTPEYFINRELGILAFNRRVLAQAEDERVPLLERLKFLCIFSSNMDEFFEVRVAGLKNQIKYNSPHVGADGMLPKQALAKISKLAHEMVDHQYKILNEIVLPQLAAQEIRFIRRGDWNEVQREWIATYFFRELMPILTPIGLDPAHPFPRVLNKSLNFAVELEGKDAFGRNSGVAIVQAPRALPRVIRLPRDIAGCDHGFVFLSSILHAHVNELFSGMTVKGCYQFRVTRDSELTLDDEETKDLRLALQGELTHRQYGDAVRLEVADSCPAEMSAFLLGQFGLGQDDLYQVNGLVNLVRLMQIPDSVDRPDLKYPHYTPSLPRELDKDQDIFKAIRKQDILLHHPFQSFNPVVEFIKQAAEDPQVLAIKQTFYRTSADSTLMTSLIDAAQRGKEVTVVVELLARFDEEANINWAAKLENAGAHVVYGVVGHKTHAKMAMVVRRDEDKLRRYVHIATGNYHQRTARLYTDFGLLTCQEEISEDVNDVFAQLTGLGKASKLRHLWQSPFTLHQRTVKAIQNEAEIARSGKKARIIAKMNALLDPDVIRALYDASCAGVQIDLIVRGVCALRPGIPGISENIRVRSIVGRFLEHTRIFYFYDDGAEHIYLSSADWMYRNFFRRIEVCFPLLDAKVKKRVFKEGLEPYLKDNSNAWEMQSDGHYERKASRRASFAAQQFLMAEHGQEILPES

SEQ ID NO: 49938 - DNA, 2163 bp, Myxococcus xanthus DK 1622
  CDS (1)..(2163): transl_table=11
atgccgaaacgcggcggcggcggtcgcggcgtcacccagaagccctccaaccgggacgtgctcccggccggcgcggagtcgaaggacacggagctcttcttcaaccgagagctgtcctggatggccttcaatgaccgcgtcctccagctcgccgagtctccggagattccgctgctggagcggctgaagttcatcgccatctacgcgcgcaacctggacgagttcttcatgattcgcgtcgcccgtctgcacgagcagattcgcggcggcgtggcgcgcctggttcccgacggagcctctcccagcgacaccctggacaagctgcacgacggcatcctcaagcagacgcgccggcacggcgacgccttcgagaaggtgctccgccccgccctggccgaaaagggcctgcgcatcctctccgccaggaatctggacgccgagcagcgcgcccaggtggaccagcgcttcaaggagcagattttccccgtcctcaccccgctggccatcggcctgggacggcactttccctacatctccaacctgtcgctcagcctggcggtgctgctgagagacccggacgcggacgaggagagcgtggcccgggtgaaggtgcccaaggagctgctgccgcgcttcctgcccctcaagggcaacgtcttcgtccccttggaggaaatcatcgcccagcacctgggggacttgttccccggcatggaggtgctgagctggggcaccttccgcgtcacccgcgacgcggacttcaccgtgtccgaggacgcggaggacctgctcaaggccgtggagacggagctgcgcgagcgccgcttcggcgacgtcatccgcatggaagtccaggccggcatgagccccaagctgctcgagccgctggtggaggccatgggcctggaggcgcgtcaggtctacgaggagcacggcctggtgggcctcaacgatttgcagtccatcgccttcgccccgggcttcccggagctgaaggacccgccgtgggtccctgtcacccaggcccgcctgcgcacggacgcggacgcgccggatggcggcacggtgatgtcgtccatgcgccggggggacctgctggtccaccacccctatgagtccttcgccacctccgtggagcgcttcgtcaccgaggccgtggccgacccggacgtgctggccatcaagcagacggtgtaccgcacgtcggacagctcgcccctggtgcccgcgctgattaccgccaccgagcgcggcaagcaggcggtgtgcatggtggagctgaaggcccgcttcgacgagcgcaccaacatccgctgggccaacgcgctggaagaggcgggcgtgcacgtcgtctacgggattccgtccctgaagacgcacgcgaaggccatcctcatcgtccggcgcgagggcgacaaggtgcggcactacgtgcacatcggcacgggcaactacaacccgaagacggcgcgcctctacacggacatgggcctgttcaccacggacccggacattggcgcggacgtggcggacgtcttcaactacctcaccggttttggccggccgaagagcttccgcaagctgctggtggccccgctcaccatgcgccagggcctgctggcggaaatcaagcgcaccgtcgccgcgcacacagccgagcgccccgcgcgcatccagatgaagatgaacgcgctggtggaccccggcatcatccacgccctctacgaggcgtcccgcgcgggcgtgaaggtggagctgaacgtgcgcggcatctgctgcctgcgcccgggcgttcccggcgtgtcggagaacatccgcgtggtgtccgtgctgggccgcttcctggagcactcgcgcatctacatcttcgagcgcggcccggagctgcgttgcttcatcggctcggcggacttgatgccgcgcaacctggaccaccgcgtggaaatcctcgcgccggtggaggacgccagcctggccgcccaggtgaaagactcgctggagcgctgcatggcagacaccacgtccgcctgggagctgacggcggatggcggatggcgccgccggctaccgcgcgccggtgacgagaagcgctgggcccagggcgagatgatggagcgcgcccagcgcatggcccagttccagggcggccgtccgctgccctga

SEQ ID NO: 49939 - protein, 720 aa, Myxococcus xanthus DK 1622
MPKRGGGGRGVTQKPSNRDVLPAGAESKDTELFFNRELSWMAFNDRVLQLAESPEIPLLERLKFIAIYARNLDEFFMIRVARLHEQIRGGVARLVPDGASPSDTLDKLHDGILKQTRRHGDAFEKVLRPALAEKGLRILSARNLDAEQRAQVDQRFKEQIFPVLTPLAIGLGRHFPYISNLSLSLAVLLRDPDADEESVARVKVPKELLPRFLPLKGNVFVPLEEIIAQHLGDLFPGMEVLSWGTFRVTRDADFTVSEDAEDLLKAVETELRERRFGDVIRMEVQAGMSPKLLEPLVEAMGLEARQVYEEHGLVGLNDLQSIAFAPGFPELKDPPWVPVTQARLRTDADAPDGGTVMSSMRRGDLLVHHPYESFATSVERFVTEAVADPDVLAIKQTVYRTSDSSPLVPALITATERGKQAVCMVELKARFDERTNIRWANALEEAGVHVVYGIPSLKTHAKAILIVRREGDKVRHYVHIGTGNYNPKTARLYTDMGLFTTDPDIGADVADVFNYLTGFGRPKSFRKLLVAPLTMRQGLLAEIKRTVAAHTAERPARIQMKMNALVDPGIIHALYEASRAGVKVELNVRGICCLRPGVPGVSENIRVVSVLGRFLEHSRIYIFERGPELRCFIGSADLMPRNLDHRVEILAPVEDASLAAQVKDSLERCMADTTSAWELTADGGWRRRLPRAGDEKRWAQGEMMERAQRMAQFQGGRPLP

SEQ ID NO: 49940 - DNA, 2109 bp, Rubrobacter xylanophilus DSM 9941
  CDS (1)..(2109): transl_table=11
atgaccgacgtagtagaagagagaacgcccagcctctccgacccttcgctgtacataaaccgggagctctcgtggctgcagttcaacgaccgggtgctcgcgcaggcccgcgaccggcggcacccgctgctggagcgggtcaggttcgtggccatctccgagaccaacatggacgagttcttcatgatccgggtggccggcttgcagcagcaggtcatctccgggctgcccaacccggtgcccgacgggatgacgcccgaggagcagctctccagaatccacgaccatgccgagcggttcttcgccgagcagcggcgggtgctcaaggggctgctctcggagctggagggggaggggataagggtggtcccctacggggagctgcgggccggcgaccggcggctgttgcgggagcggttcgcgcgcgaggtgcagcccatcctcaccccgctcgccatagacccggcccaccccttcccgcacatctccaacctctcgctcaacctgctggtcgtcatcgaggaggggggcaggaccttcatggcccgggtgaaggtgcccaccaccatcgaccgcttcatacggctgccggaccgggagccgaacaacaacggcgggggccggcccgaggtccggctggtgcgggtggaggaggtcatagcggccaacctcgacgccctcttccccggcaagaacatcgccgccagctacgtcttccaggtcacgcgcaacgcggacttcgtgatcgaggaggacgaggcctccgacctcttgcaggccatcgaggacgagctggagagccggtggttcgggcggagcgcccggctggtggtctccgagcggatgcccgggcggctgcgggagtggctggcgggcaacctggacatagacccgggctcggtgtacgccgtccccgagccgctggggctagcggacctggaggagctcacccggctcgaccggccggacctgctctacccgccggtcacgccccgggtgccggcggagctgaagagcgcgcgctccatcacccaggccatccggcagggggacatcctcctctaccacccctacgactccttcgcgccggtggtggagttcgtccggcacgcggccgccgaccccgacgtgctggccataaagcagaccctctaccgggtggggtccaactcgcccatcgtggaggcgctctccgaggcgcgcgacgaggagacgcaggttgcggtgatcgtggagctgaaggcccgcttcgacgagcagccgaacatcgtctgggcgcgccggctggaggcccagggggtgcacgtggcctacgggctggtggggctcaagacccacgccaagctgtgtctggtggtgcggcgggagggctcgggcctcaggcgctacctgcacctcgggaccggcaactacaaccccagcaccgcgcgggtctacacggacttctcgtacttcaccgacgacccggagctggtcgaggacggctccgatctcttcaactacctcaccggctactccggccagcgggagtaccggcggctgctggtggccccggtggggctgcgggagcacgtgctgcgcctgatcggggagcaggtcgagcgcgcccgggccgggggggaggcccggatcctgtggaagatcaactccctcaccgacccgaaggtcatcgaggccctctaccgggcctcccaggagggggtgagggtggatctcgtggtgcgggggatctgctgcctgcgcccggggatagagggggtgagcgagaacataagggtggtctcgctcgtggggcgttttctggagcacgcccgggtcttcatcttcggggagggcgaggacgagcgggtctacctgggcagcgcggacatgatgcagcgcaacctggataagcgggtggagacgctcttccccctaaaggaggagcggcaccggcggcgggtgcgccggatactagagttgcagctctcggacaacgtgaacgcctgggagctgcggcccgacggctcctgggagtggctgcgccccggggagggcgaggggcgggtggacagccaggccatcctgctggaggaccccgacgctaatccaccgggtgaagaccgctga

SEQ ID NO: 49941 - protein, 702 aa, Rubrobacter xylanophilus DSM 9941
MTDVVEERTPSLSDPSLYINRELSWLQFNDRVLAQARDRRHPLLERVRFVAISETNMDEFFMIRVAGLQQQVISGLPNPVPDGMTPEEQLSRIHDHAERFFAEQRRVLKGLLSELEGEGIRVVPYGELRAGDRRLLRERFAREVQPILTPLAIDPAHPFPHISNLSLNLLVVIEEGGRTFMARVKVPTTIDRFIRLPDREPNNNGGGRPEVRLVRVEEVIAANLDALFPGKNIAASYVFQVTRNADFVIEEDEASDLLQAIEDELESRWFGRSARLVVSERMPGRLREWLAGNLDIDPGSVYAVPEPLGLADLEELTRLDRPDLLYPPVTPRVPAELKSARSITQAIRQGDILLYHPYDSFAPVVEFVRHAAADPDVLAIKQTLYRVGSNSPIVEALSEARDEETQVAVIVELKARFDEQPNIVWARRLEAQGVHVAYGLVGLKTHAKLCLVVRREGSGLRRYLHLGTGNYNPSTARVYTDFSYFTDDPELVEDGSDLFNYLTGYSGQREYRRLLVAPVGLREHVLRLIGEQVERARAGGEARILWKINSLTDPKVIEALYRASQEGVRVDLVVRGICCLRPGIEGVSENIRVVSLVGRFLEHARVFIFGEGEDERVYLGSADMMQRNLDKRVETLFPLKEERHRRRVRRILELQLSDNVNAWELRPDGSWEWLRPGEGEGRVDSQAILLEDPDANPPGEDR

SEQ ID NO: 49942 - DNA, 2265 bp, Mesorhizobium sp. BNC1
  CDS (1)..(2265): transl_table=11
atgctggcaacacattatgtgtcgcgggagaagaccgcatgggtggagcagcggaacgccatgaacgagttaaagccggttaaaactgaatttcccaaagtgccggaaggcgaggggcagattgcgctcacgagcccggatcgcttcgtcaaccgcgagttttcatggctgcagttcaatcgccgtgtgcttgaggaatcacagaaccccagccacccgcttctggagcgcgttcgctttctttctatctcggccgacaatctcgacgagttctttatggtccgagtggcgggacttgccggccaggttcgtcagggcatcctcgaaaagagcgcggatggccgcacgcccgaagagcagctggagcatatcctgcgtgaggtgagccggctgcagatcgagcagcagcaaagtttcgctcatcttctggagctgatgaagaagcaggggatcgagatcgtcgggccgggcgccttgtcccgggaagaccgtgcctgggtcgagcagcattttatggatgagatctacccggtgctaacgccgctttccatcgacccggcgcacccgtttcccttcatccccaatctcggcttctcgatagcgctcgacctgcagcacctgtcgaataaggagaccatgacggcgctgttgcgcctgccggtgacactccagcgcttcatcgccttgcccgagcggccgaggcgcgtgcgcttcatcgcgctggaagacgtggtggagatgttcaccggcaagctctttccgggctataaggtgaacggctccggcaccttccgcattatccgcgacagcgatatcgaggtggaggaggaggccgaggaccttgtccgctttttcgaaacggcactgaagcgcaggcgccgtggctccgtgatccggattgagttcgagcgctcgatgccggaggatttgcgtggtttcgtggcgacgcaactgggagtgccgggatcgcgcatcagcgtgctggagcggccgcttgcgatcaatcagatttcggagatcgtcaggctctccagggacgacctcaaattccagccctacaatccgcgtttccctgagcgcatccgcgagcatggcggggattgcttcgccgccatccgcgaaaaggatatgatcgtccaccacccctacgaatccttcgacgtggtggtgcagtttctgcgtcaggccgcgcaggacccggatgttgtggcgatcaagcagacgctctatcgcacctccaatgacagccccatcgtgcgcgcgttgatcgacgcctcggaggcgggcaagtccgtgacggcgttggtggagcttaaggcccgcttcgacgaggaggccaatatccgctgggcgcgcgatctggagcgtgccggcgtgcaggtcgtattcggctttttggaactcaagacacacgccaagatgtcgcttgtggtgcgccgggaagatggccgcttgcggagctatgttcatctaggcacgggcaattatcatccgattacggcgcggatctatacggatctgtcgtttttcaccgacgatccggtcatcgctcacgatgtggccaaggtcttcaatttcatcaccggctatgccgagccggacgtgaaaatgaagcttgccgtttctcccttcacgctgagggacaggattctggagcatattcgggccgagatcgagcatgcgaaagccggcaggcctgcgcagatctggatgaagatgaacgcgcttgtcgatccgcaggttatcgatgccttatactgggcaagccgagcgggcgtggagatcgatctggtggtgcgcggcatatgctgcctgcgtcctcaggtaacggggctctctgaaaacatccgcgtgaaatccattgtcgggcggttcctggagcatagccgcatttattgctttggaaatggtcacggcctgccgtcggacgaagcggtcgtgtacatttcgtcggctgacatcatgccgcgcaatctcgaccgcagggtggagtgcatggtgccgatcacgaacccgactgtgcatgagcaggttttgggtcagatcatgctgggcaatatcatggacaaccagcaaagtttcgaagtattgcctgacggtacctcccggcggatgatgcctgaggagggtgaggaagcattcaacgcccaggagtatttcatgaccaatcccagcctgtcgggtcgaggagaagctttgaagtctcatgcgccaaagcggatcgccgccttcaagcggcgaaaaaaggctgtagccgtcggctaa

SEQ ID NO: 49943 - protein, 754 aa, Mesorhizobium sp. BNC1
MLATHYVSREKTAWVEQRNAMNELKPVKTEFPKVPEGEGQIALTSPDRFVNREFSWLQFNRRVLEESQNPSHPLLERVRFLSISADNLDEFFMVRVAGLAGQVRQGILEKSADGRTPEEQLEHILREVSRLQIEQQQSFAHLLELMKKQGIEIVGPGALSREDRAWVEQHFMDEIYPVLTPLSIDPAHPFPFIPNLGFSIALDLQHLSNKETMTALLRLPVTLQRFIALPERPRRVRFIALEDVVEMFTGKLFPGYKVNGSGTFRIIRDSDIEVEEEAEDLVRFFETALKRRRRGSVIRIEFERSMPEDLRGFVATQLGVPGSRISVLERPLAINQISEIVRLSRDDLKFQPYNPRFPERIREHGGDCFAAIREKDMIVHHPYESFDVVVQFLRQAAQDPDVVAIKQTLYRTSNDSPIVRALIDASEAGKSVTALVELKARFDEEANIRWARDLERAGVQVVFGFLELKTHAKMSLVVRREDGRLRSYVHLGTGNYHPITARIYTDLSFFTDDPVIAHDVAKVFNFITGYAEPDVKMKLAVSPFTLRDRILEHIRAEIEHAKAGRPAQIWMKMNALVDPQVIDALYWASRAGVEIDLVVRGICCLRPQVTGLSENIRVKSIVGRFLEHSRIYCFGNGHGLPSDEAVVYISSADIMPRNLDRRVECMVPITNPTVHEQVLGQIMLGNIMDNQQSFEVLPDGTSRRMMPEEGEEAFNAQEYFMTNPSLSGRGEALKSHAPKRIAAFKRRKKAVAVG

SEQ ID NO: 49944 - DNA, 2163 bp, Trichodesmium erythraeum IMS101
  CDS (1)..(2163): transl_table=11
atgtccaaaaacaaaaagaatacagtagaaactcctatcgaaaaaaaacttagtaatccacaatactactttaatagagaattgagttggttagagtttaaccgtagggttttatctgaaggtttagacccccgtactcccctattagaacgtttaaaatttttaggaatttttagttctaacttagatgaatattttatggttagggtagcagttcttaaaaaacaaatagaagctgaagtgcataagttaactccagacggtcgtactcctcaagaacaactagatgagattaatcaaatactattaccaatggtttctttacaacaccaattctttgagcaaaacttacgaccagagttaagaaaaaatggtattgatatcctaaattatatagacttagatagagaagaaaaaacatatctaagaaactattttgaagaacacatatttcccgtacttactcctctagctattgatgctagtcatccttttccttatttatctaatctcagttttaacttagcagtaatgctgaaaaatccagatactcaagaagatttattagccagaattaaagttcccaaaatattacctcgctttttgtgcttaccagaaaaattacaaatagaacaaaaggctaaaactctaaattggacaggagttcctctcgaacaagtcattgctcacaatttgggagctctgtttcctggtatggatattcaggagtatcacgtatttcggattactcgtgatgctgacttggcagtgcaagaagatgagggagatgacttgctcttagtgattgagaaagaactcagaaaacagcgtataggtggtaccgtagttagaatggaaattaatccaacaatgccaagtaaattaaaaaagacattaatggacaacttggagttatcagaaaaagacgtttacacagtagatggattacttgatttaaaagatttaatgtcatttttagggttgccgttgcctcatcttaaagatccaacttggacatctactatgccaccaaggttgcgacattatggtgatgagctcagaattcctgacctgaatgagaataacaaaattgatttttttgaagtgattcgccagaaagacttattgttacatcatccatatcattcttttgcaagtacggtacaaggtttcattagtcaagcagcacacgatcctaatgtattggcgattaagatgactctttatcggacttctggaaattcacctattgttaatgctttaattgctgcagctgaaaacgataaacaagttgcagtattggtggaattgaaggcaagatttgatgaagaaaataatattcaatgggcgcggaagttagaacaatatggtgttcatgtggtttatggtttagcaggtctgaagactcatactaaaattgtgatggtggtccgtcaggaagaaggtcatatccgtcgctatgttcatattggcactggtaactataatcccaagactgctaaaatttatactgatttgggtttgttgagttgtcgaccagaattaggagcagatttggcagatttgtttaatttcttgacgggatattctcgtcagcagtcttaccggaaattgttggtggcacctgtaaatatgcgcgatcgctttatgaaactgattcgtcgggaaattgaaaattgccaaaatggagatacaggtcgtatagttgcccagatgaactctttggtagatcctaaaattattacttctttgtataaagcgtcccaagtaggggtgaaaattgatttgattgtccgtggtatttgttgtttgcgtccgggtttaaaaggtatcagtgataatattaaggtggtgagtattattgggcgttatttagaacactctcgggttttctacttctataataaaggtaaagaggaggtgtatattggttctgctgattggatgcctcgtaatctcgatcgtcggatagaggctattatacctgtggaagactctgaaatcacaaaagagttgcaagaaattatgggcattctgttatctgacaaccgacaagcttgggatctacaaccagatggtaagtatattcagcgtcgttctactgagaattttcctgaacttgcctgccataaaattttgatggaaaccgtagctaatacttag

SEQ ID NO: 49945 - protein, 720 aa, Trichodesmium erythraeum IMS101
MSKNKKNTVETPIEKKLSNPQYYFNRELSWLEFNRRVLSEGLDPRTPLLERLKFLGIFSSNLDEYFMVRVAVLKKQIEAEVHKLTPDGRTPQEQLDEINQILLPMVSLQHQFFEQNLRPELRKNGIDILNYIDLDREEKTYLRNYFEEHIFPVLTPLAIDASHPFPYLSNLSFNLAVMLKNPDTQEDLLARIKVPKILPRFLCLPEKLQIEQKAKTLNWTGVPLEQVIAHNLGALFPGMDIQEYHVFRITRDADLAVQEDEGDDLLLVIEKELRKQRIGGTVVRMEINPTMPSKLKKTLMDNLELSEKDVYTVDGLLDLKDLMSFLGLPLPHLKDPTWTSTMPPRLRHYGDELRIPDLNENNKIDFFEVIRQKDLLLHHPYHSFASTVQGFISQAAHDPNVLAIKMTLYRTSGNSPIVNALIAAAENDKQVAVLVELKARFDEENNIQWARKLEQYGVHVVYGLAGLKTHTKIVMVVRQEEGHIRRYVHIGTGNYNPKTAKIYTDLGLLSCRPELGADLADLFNFLTGYSRQQSYRKLLVAPVNMRDRFMKLIRREIENCQNGDTGRIVAQMNSLVDPKIITSLYKASQVGVKIDLIVRGICCLRPGLKGISDNIKVVSIIGRYLEHSRVFYFYNKGKEEVYIGSADWMPRNLDRRIEAIIPVEDSEITKELQEIMGILLSDNRQAWDLQPDGKYIQRRSTENFPELACHKILMETVANT

SEQ ID NO: 49946 - DNA, 2187 bp, Synechococcus sp. CC9311
  CDS (1)..(2187): transl_table=11
atgattgctacctttcccttgcgagcacagtgctcaaaacacatcattaacggcgtcatgcttcccgagaatctctacatcaatcgggaactcagctggatctccttcaacagacgcgtgttggctcaggcgcttgaccaaagaacgcagttattggaacaggccaaattcagcgccattttcagcaacaaccttgatgagtttttcatggtgcgcgtggcgtccttgaagtctcaggttgaggctggcatcgacaagcgaagcgaggacggcctcacgccccgagagcaactccatgagattcgcaaccagctctcagctctgctggaagcgcaacaaaagcactacctcaaccatctccgcgttggcctcgaagactatggggtgtttctgttcaactacgaacaactgaacgaagcacaacgtgactgggtggccaacttctttcaaacggcgatttttccggtcttaacgcccctggctgtggatcctgctcatccctttccattcgttagcaatctcagcctcaacgtggccgccctgatccatgacccagagtcgggccaacgccaactcgctcgagtgaaggtgcctcaaaagatccttcctcgctttgtatcgattccagttgagcttggcagcgatgaatccaagccaatccacacagcagttcctcttgagcaggtgattgccttcaatctcagcctgctctttccaggaatgagcattgaaggccattactttttccgggtcaccagggatgcagacctagagctccgcgaccttgaagccgacgatctcatgatcgcaatcgaacaaggcctccgaaaacggcgcatgggtggtgaagtggtccgcctggaagttgctgaagacacccctcaagacgtcatggagatgttgatggagggcatgtccgttgttgaagaagacctctacagggtgaacggacctctcgggctcgatgacctcttcggcttgatgagcctgccgctaccgcacctcaaagacaccacgcactcaggtcaaactcccaccgtcctcagtcgtactcagaggggcatgttggaagacggatccatcaaagaagaggaatttgagagcattttttcggtgatacgccgccacgatgttctcctgcatcacccttacgacttgttttccacgtcagtggaggaattcatcaatcaagcagcagatgatcccctcgtgatgggcatcaagatgaccctctaccgcacctccaaagattctccgatcatcgcagcactcatcagggcagcagaaaatggaaaacaggtgatggcactggttgagctaaaagcacgtttcgacgaagacaacaatattcagtgggccaaacatctggagcgctcaggagtgcatgtggtctacggagtcattggccttaaaacgcacaccaagattgttctggttgttcgcaaagagaaagaacgcttgcgcagctatgtccatatcggcactggcaattacaactccaaaacctcacgtctttacaccgatttaggcctactttcagcaagaccggaactcggccaggacctcgtggagttgtttaactatctaaccggcttctccaaacaacaaagctttcgcaagctactcgtagcgcctgtctccttaagaaaaggaatggagcaattaatccgtcgtgaaatcgaacatgctcagcaagggcgaggtggatcgatcaaagcaaaaatgaattccctagtagatccaggaatcattgctcttttgtatgaagcatctcaagccggagtaaaaatccaattgatcatccgagggatgtgcagcctttatcccggccttgaaggaattagcgacaacatcagcgtggtaagcatcattggcagattcttggagcattcacgtattttttggtttaacaatggcgacaaaccggaggtgttcatcggaagcgccgacttaatgccacgcaatcttgacagacgtgttgaagcggttgtgcccattgaagaaccagatctaagagcacagctcgaacgcctgcttgggtgctacttaagcgacaacaggggcgcatgggacatgcaacctgacggttctttcattcagcgacaccctgagggagaggagtacaactcccaattgcagttaatcgatggttggaaaggaagcgccctagttcagccaactcgctag

SEQ ID NO: 49947 - protein, 728 aa, Synechococcus sp. CC9311
MIATFPLRAQCSKHIINGVMLPENLYINRELSWISFNRRVLAQALDQRTQLLEQAKFSAIFSNNLDEFFMVRVASLKSQVEAGIDKRSEDGLTPREQLHEIRNQLSALLEAQQKHYLNHLRVGLEDYGVFLFNYEQLNEAQRDWVANFFQTAIFPVLTPLAVDPAHPFPFVSNLSLNVAALIHDPESGQRQLARVKVPQKILPRFVSIPVELGSDESKPIHTAVPLEQVIAFNLSLLFPGMSIEGHYFFRVTRDADLELRDLEADDLMIAIEQGLRKRRMGGEVVRLEVAEDTPQDVMEMLMEGMSVVEEDLYRVNGPLGLDDLFGLMSLPLPHLKDTTHSGQTPTVLSRTQRGMLEDGSIKEEEFESIFSVIRRHDVLLHHPYDLFSTSVEEFINQAADDPLVMGIKMTLYRTSKDSPIIAALIRAAENGKQVMALVELKARFDEDNNIQWAKHLERSGVHVVYGVIGLKTHTKIVLVVRKEKERLRSYVHIGTGNYNSKTSRLYTDLGLLSARPELGQDLVELFNYLTGFSKQQSFRKLLVAPVSLRKGMEQLIRREIEHAQQGRGGSIKAKMNSLVDPGIIALLYEASQAGVKIQLIIRGMCSLYPGLEGISDNISVVSIIGRFLEHSRIFWFNNGDKPEVFIGSADLMPRNLDRRVEAVVPIEEPDLRAQLERLLGCYLSDNRGAWDMQPDGSFIQRHPEGEEYNSQLQLIDGWKGSALVQPTR

SEQ ID NO: 49948 - DNA, 2163 bp, Shewanella sp. MR-4
  CDS (1)..(2163): transl_table=11
gtgtccccgaataccgataaactgtcgatcgataaagaaatctcttggttgtcattcaacgagcgggtgctgcaggaggcctgtgatcccaatgtgcctatcgtggagcgggtgcgctttttaggcatattctccaataatatggatgagttcttccgggtgcgggtggccgcggtcagacgctcaattctgctctctgcgctgcaggaaggtcgcagcaatagccgccatctaatggccaaaattcagaccaaagtcatggcattgcaggaacgtttcgacagcatttacgtcgagctgatgcgtgagttagtccgccgtaatattttgttaatcaacgaaaaacaattaagcgagttccacagtaactggcttaaaaaacattttcgcgatcactttaaacgccatatcgcgccgcttatcgtcaacaacaatcgcgacctagtgaagcatatcaacgacgacgccacctatctgtgcgtgtgtttattcactaaatcccgcagacaatatgccctcgtggaagtgcccactaaaaatgtgccgcgtttcatcgagttacccgccgaaaaatcgaaggcgaaaaaatacttgatcctgctggataacattattcgccactgtgtggacgacctatttggtcccttcttcgagtacgaggccattgaagtctattcgatgaagctgacccgcgacgccgagttcgatattaccgacgaacttgaacaaacccagctcgagaaaatgaccaagggtttgaaaaaacgcctgaccgccgaacccgtgcgtttggtgtacgacaaagaaatgcccgagcacatgctcgaaatgctaaaagaaaatttaaacattagctcgactgagtgtttgatccccggcgggcgttaccacagctttaaggactttatcggcttccctaaccctagccgtgattacctcgaaaacgaaaaattgcccgccctcaatagctcgggctttggccgcagcgccaacagtttcgatgcgatcaagatgggcgatattatggtcaactacccgtaccataagttctcccactttaccgaaatggtgcgtcaggcagcctacgatcctgctgtgcgttttattcggatcaacctttaccgtgttgcgaaaaaatcccatgtgatgcaatcacttatcgatgcggttaaaaatggtaaacaagtcaccgccgtgattgagttgcgggcgcgctttgacgaacaatctaatattgagtggacacgggtgctcgccgaggcgggtgtgaaggtccaccatgggatcaccagcttaaaagtgcactctaagttgtgtttgattggccgcgaagagcaaggcgagatgaaactctattgccacgtaggctcaggcaactttaacgaaggcacggcgcgggtctataccgacttatcgctatttaccgccaatcaggaaatcgcccgcgaagtggagcaagtgttcgacttgattgaacatccttaccgccgcgataacttccagcatttgattgtgtcgccctatgatgcgagacaaaaactaacccatttgatcgataacgaaatcgtcaatgcccagagccatattaaggcggcgatcaccttaaaattgaataacctgctcgatgaatccttagtccaaaaactttacgaggcctcggctgcgggagtcaaaatcaaactgttgatccgcggtatgtgctcgcttattccacaaattccggggatcagcgacaacatcgagatctacagtattgtcgaccgatttttagaacattcacgggtgatgctattccacgccggtggtgagaataaattatttatcagctcggccgattggatgagccgcaacatagataaccgcgtcgaagtgagtgtgcctatttatgatctgcgtctaaaacaaatggtgatggatattttatcgttacagttcaatgacaacactaaggcgcgcatcatcaataaggagcagagcaatccttatcgtaaccgcggtaataaacgtaaagtgcgttctcaaattgccatttatcaatatctgattaattatgagaagcggttgcagcaagaatttagcgcccagcgcgaagccgcaaagcttgaagcggagcacgcggcggaacttgcccacaatcccgaattacaggccaaagccagctaa

SEQ ID NO: 49949 - protein, 720 aa, Shewanella sp. MR-4
MSPNTDKLSIDKEISWLSFNERVLQEACDPNVPIVERVRFLGIFSNNMDEFFRVRVAAVRRSILLSALQEGRSNSRHLMAKIQTKVMALQERFDSIYVELMRELVRRNILLINEKQLSEFHSNWLKKHFRDHFKRHIAPLIVNNNRDLVKHINDDATYLCVCLFTKSRRQYALVEVPTKNVPRFIELPAEKSKAKKYLILLDNIIRHCVDDLFGPFFEYEAIEVYSMKLTRDAEFDITDELEQTQLEKMTKGLKKRLTAEPVRLVYDKEMPEHMLEMLKENLNISSTECLIPGGRYHSFKDFIGFPNPSRDYLENEKLPALNSSGFGRSANSFDAIKMGDIMVNYPYHKFSHFTEMVRQAAYDPAVRFIRINLYRVAKKSHVMQSLIDAVKNGKQVTAVIELRARFDEQSNIEWTRVLAEAGVKVHHGITSLKVHSKLCLIGREEQGEMKLYCHVGSGNFNEGTARVYTDLSLFTANQEIAREVEQVFDLIEHPYRRDNFQHLIVSPYDARQKLTHLIDNEIVNAQSHIKAAITLKLNNLLDESLVQKLYEASAAGVKIKLLIRGMCSLIPQIPGISDNIEIYSIVDRFLEHSRVMLFHAGGENKLFISSADWMSRNIDNRVEVSVPIYDLRLKQMVMDILSLQFNDNTKARIINKEQSNPYRNRGNKRKVRSQIAIYQYLINYEKRLQQEFSAQREAAKLEAEHAAELAHNPELQAKAS

SEQ ID NO: 49950 - DNA, 2085 bp, Alkalilimnicola ehrlichei MLHE-1
  CDS (1)..(2085): transl_table=11
atggaccaaaaaacgatcgatctcaagcaaccggacctctacttcaaccgcctgctcagcctgctggagttcaaccgccgggtgctcgcccaggccaaggacaccgacaccccgctgctggaacgcctcaagttcctctgtatctgcacctcgaacatggacgagttcttcgaggtgagggtctcgggggtgaaacacaaggccgaggccggttcggttcaggccgagtcggacaatcgcagcccgcaggagaccctgaatgccatcagtgccgtcagccacgagctggtagccgagcagtaccgcgtcctcaacgaggaattgatcccggccctggcggaagaggacatccgcttcatccgccgggccgattggaccgacgcccagacggagtggctgcgccgttttttcgaggacgagctgctgccggtgctcagccccctgggactggatccggcccaccccttccccaaggtactgaacaagagcctgaacttcatcgtcagcctggagggcaaagatgccttcggccgcaacagcgggttcgccatcgtgcaggcgccgcgcgccctgccgcgcctgattcaactgccccgggagggtgaggacaacggaccctgggacttcgtcttcctgtcctcggtcattcacgccttcgtggatcagctcttcccgggcatgaagatcaagggctgttatcaattccgggtgacccgcaacagcgatctgtttgttgacgaggaggaggtggacgacctgctgcgggcgctggagggggagctgctctcccgccggtacggcgaggccattcgcttggaggtggcggccaactgttccgaggacctggccaacttcctgctgcgcaagttcgagctcgggccggacgacctctaccaggtggacgggccggtcaacctgaaccggatgatggcggtctacgacctggtggaccgccccgatctgaagtatccgtcgttcacccccgggctgccggcggatttcagccacagcggcgatatcttcaaggtcctgcgcaagcgccaggtgctgctgcaccaccccttccagtcctttgccccggtcatcgagctggtgcgccaggcctcgctggatccggacgtgctcgccatcaagcagaccctctaccgcaccgggcccgattccgccatcgtcgatcacctggtgcgcgcggcgcgggacggtaaggaggtcaccgttatcatcgagttgcgcgcccgctttgacgaggcggccaacatcgccctcgccaaccggctgcaggaggccggcgtgcacgtggtctatggggtcgtgggccacaagacccatgccaagatgctgctggtggtgcgccgcgaggggcgcaagctgcgccactacgtgcacctggggaccggcaactaccactcacgcaccgcgcggctctacaccgactatggcctgttcacccgagacaagcatacgggtgaggatgtccaccggctgttcctgcaaatgaccagcctggggcgtttctccgagctgaaacgcctgctgcaatcgcccttcaccttgcgggagggggtgatccagcgcatccaacgggaggccgaacacgccctcgccggtcacgaggcccgcattatcgtcaaggtcaattccctcaccgagcctggtgtcatccaggcgctctaccaggcctcgcaggcaggcgtcaccgtcgacctgatcgtgcgcggcatgtgctgtctgcgccccggggtaccgggggtctcggacaacattcaagtccgctccatcatcggccgcttcctggaacatacccgggtgttctatttccacaaccggggcgacagcgacctctatgccagcagcgccgattggatggagcgcaatttcttccggcgggtggagacggccttccccctcctggacgaggaggcgcgccggcgggtgctgctggacctggagtgctatctcaaggacaacacccaggcctggctgctgcaacccgacggcagttacgtgcgcctccagcccgcggagggcgaggaaccctactgcgcccagcgggccctcctcgcgttgctcgccgacagtgcctga

SEQ ID NO: 49951 - protein, 694 aa, Alkalilimnicola ehrlichei MLHE-1
MDQKTIDLKQPDLYFNRLLSLLEFNRRVLAQAKDTDTPLLERLKFLCICTSNMDEFFEVRVSGVKHKAEAGSVQAESDNRSPQETLNAISAVSHELVAEQYRVLNEELIPALAEEDIRFIRRADWTDAQTEWLRRFFEDELLPVLSPLGLDPAHPFPKVLNKSLNFIVSLEGKDAFGRNSGFAIVQAPRALPRLIQLPREGEDNGPWDFVFLSSVIHAFVDQLFPGMKIKGCYQFRVTRNSDLFVDEEEVDDLLRALEGELLSRRYGEAIRLEVAANCSEDLANFLLRKFELGPDDLYQVDGPVNLNRMMAVYDLVDRPDLKYPSFTPGLPADFSHSGDIFKVLRKRQVLLHHPFQSFAPVIELVRQASLDPDVLAIKQTLYRTGPDSAIVDHLVRAARDGKEVTVIIELRARFDEAANIALANRLQEAGVHVVYGVVGHKTHAKMLLVVRREGRKLRHYVHLGTGNYHSRTARLYTDYGLFTRDKHTGEDVHRLFLQMTSLGRFSELKRLLQSPFTLREGVIQRIQREAEHALAGHEARIIVKVNSLTEPGVIQALYQASQAGVTVDLIVRGMCCLRPGVPGVSDNIQVRSIIGRFLEHTRVFYFHNRGDSDLYASSADWMERNFFRRVETAFPLLDEEARRRVLLDLECYLKDNTQAWLLQPDGSYVRLQPAEGEEPYCAQRALLALLADSA

SEQ ID NO: 49952 - DNA, 2178 bp, Hyphomonas neptunium ATCC 15444
  CDS (1)..(2178): transl_table=11
atgccggacgggcaacagcagcgtgcactcagacaactcatgtcatcgccgcagcgatttctgaaccgggagctttcctggctgcagttcaaccagcgtgtgctggatgaagcagataaccctgcccatccgctattggagcggctgcgcttcctgtcgatttcggcgagcaatctcgatgaattcgacatggtccgctatgccggtattcgcgagcaggtgcgcgcgggcgtgaccaagcagagcctggacgggctgacaccggctcagcaggtggccgagattgaggcggcctcgctgaagctgattgccgctcagcaggagcaatggcgcaagctgaaggcggaaatgacgcgcgagaacattcatgttctcgaacctgatgagctgacgcgcaaggagcgcgctgaactggaaacgtatttcaacaccaacatcttcccgatcctgacgccgttggcggtagaccctgcccatcctttcccgttcattcccaatcttggtttcacgattgcctttgatcttgcctcagagacgggcggcgaggggcaggtgggcattgtgccgatgccgaccttcgtgcggcggttcatccgcttgcagacgggtagcaagccgggcgtgcgcttcattgcgctggaagacgtgatcggcatgttcctgggcacgctgttccctgggtttgaagaagaaggccggtgcctgttccgcatcgtgcgggacagcgatatagagatcgaggaagaatccgaagatctgatccgtgagttcgaagtgctgctgaagcaacggcgccgcgggcgaattgtgcgtctacggatgcaatcaagcgcgccggagaagttgcgcgggttcattatgcgcgagatcggggcggaaccttccgacatcgtgctttatgacggaattctcggcatggcgcgcctgtccgaactgattgtggaggatcggccggagctgctgtttcctgcctatgagccgcgctaccccgaacgcatccgcgagatgggcggggacatttttgccgccgtgcgtgccaaggacattctggtgcatcacccgttcgagagtttcgatgtggtggtggagttcgtgcgccaggcggccgctgatccgcaggtcgtggcgatcaagcagacgctctatcgcacgaccgtgaactcgcccatcgttggcgcgctgatcgaggcggccgaagcgggcaagaccgtaacggcgctggtcgagatcaaggcgcgctttgatgaagaggcaaacctgcgtctcgcgcgggatcttgagcgcgcaggcgtgcaggtcgtttatgggttcatcgaatataaaacccatgcgaaagtgtctctggtcgtgcgccgggaaggcaatgatcttcgcacgtatacgcactatgggacggggaactatcacccgacaaatgcccggatttataccgatctttccctgtttacggctgatcaggctctggggcgggatgccaaccgcctgttcaactatgtgacggcctatcgcgagccaccggaggtcgcgccccctttcgagatcatcggaatgtcgccggtgacgatgaaaaaacagcttatcgaaatgatcgaggccgaagcccaggccgcccgcaagggcaagccgagcggggtctgggcaaagatgaacagcctggtcgacccggatgtgatcgatgcgctctacaaggcgagccaggcgggggtgccaaccgttcttgttgtgcggggtatatgctgcctgaggccgggcattccggggttctcggagaacatcacggtaaagagtattgtcgggcggtttctggagcattcccgcatcctctgctttgccaatggcgaggcattgccctcacccaatgccaaggtgtttctctcctcggcggactggatgccgcgtaatctgatgcgccgggtggaggtcctcgtgccgcttaccaatccgaccgttcatcggcaggtgctcaaccagatcatggttgcaaatctcaatgatgagcgccaatcctggttgatgcattcggatggcgagtatgagcgtttcaatgtatcgccgccggaaacagccttcacagcacacggatattttatggacaatcccagcctttccggtcgtggcagcgcgctggaggtcagtctaccgccacgcctgtcctatcgtgagacccatccgaaatga

SEQ ID NO: 49953 - protein, 725 aa, Hyphomonas neptunium ATCC 15444
MPDGQQQRALRQLMSSPQRFLNRELSWLQFNQRVLDEADNPAHPLLERLRFLSISASNLDEFDMVRYAGIREQVRAGVTKQSLDGLTPAQQVAEIEAASLKLIAAQQEQWRKLKAEMTRENIHVLEPDELTRKERAELETYFNTNIFPILTPLAVDPAHPFPFIPNLGFTIAFDLASETGGEGQVGIVPMPTFVRRFIRLQTGSKPGVRFIALEDVIGMFLGTLFPGFEEEGRCLFRIVRDSDIEIEEESEDLIREFEVLLKQRRRGRIVRLRMQSSAPEKLRGFIMREIGAEPSDIVLYDGILGMARLSELIVEDRPELLFPAYEPRYPERIREMGGDIFAAVRAKDILVHHPFESFDVVVEFVRQAAADPQVVAIKQTLYRTTVNSPIVGALIEAAEAGKTVTALVEIKARFDEEANLRLARDLERAGVQVVYGFIEYKTHAKVSLVVRREGNDLRTYTHYGTGNYHPTNARIYTDLSLFTADQALGRDANRLFNYVTAYREPPEVAPPFEIIGMSPVTMKKQLIEMIEAEAQAARKGKPSGVWAKMNSLVDPDVIDALYKASQAGVPTVLVVRGICCLRPGIPGFSENITVKSIVGRFLEHSRILCFANGEALPSPNAKVFLSSADWMPRNLMRRVEVLVPLTNPTVHRQVLNQIMVANLNDERQSWLMHSDGEYERFNVSPPETAFTAHGYFMDNPSLSGRGSALEVSLPPRLSYRETHPK

SEQ ID NO: 49954 - DNA, 2205 bp, Rhizobium leguminosarum bv. viciae 3841
  CDS (1)..(2205): transl_table=11
atggatagcgcagtcgcagaacatcaggaactcactccggaaatcaacgacaacacccccccgctggaagagctgctcaagagccccgagcgcttcattaacagagaattctcctggctgcagttcaaccgccgtgtcctggaagaaactttgaataccgagcatccgttgctcgagcgtgtccgcttcctgtcgatctcggccgccaacctcgatgagttcttcatggtgcgtgtcgccggcctcgaaggccaggtacgccagaatatcgccatccgcagccctgacggcaagacgccggccgagcagctcgactcgatcctgcaggagatcgaccatctgcagatggagcaacaggcctcgctcgccgtgctgcagcaatatctcgccaaggaagacatcctgatcgtgcgccccggcgccctgagcgagggcgaccgccagtggctggccgccgagttcgaacaggcgatcttcccggtgctgacgccgctgtcgatcgatcccgcccatccgttccccttcattccgaatctcggcttctccatcggtctgcagctcgtcagcaagaacggccgcgagccgatgacggcgctgctgcgcctgccggtggcgctcgaccgcttcgtccgcctgccggatgatggaaacacaatccgctacatcacgctggaagacgtcgccaacatcttcatccatcggctctacccgggttacgaggtgcagggctccggtacgttccgcgtcatccgcgacagcgatatcgaagtcgaggaagaggccgaggatctcgtccgcttcttcgaaacggcgctgaaacgccgccgccgcggcaaggtcatccgcatcgagaccgattcggaaatgccggcgtcgctgcgccagttcgtcgtccaggcgctgagcatccccgacaatcgcgtcgccgttctgccgggtcttctggcgctgaacacgctgtcggagatcaccaaggcgccgcgcgacgatctgcgctttgccccctacaatgcgcgatttcccgagcgcgtccgcgaacacgccggcgattgctttgccgccatccgcgaaaaggacatggtcgtccatcacccctacgaatccttcgacgtggtggtccagtttcttctccaggctgcgcacgatcctgacgtcctggcgataaagcagacgctttaccgcacctccaacgacagcccgatcgttcgcgcgctgatcgatgccgccgaagccggcaagtcggtgacggcgttggtcgagctcaaggcccgcttcgacgaagaggcgaacatccgctgggcgcgtgacctcgaacgcgccggcgtccaggtcgtcttcggctttatcgagctcaagacccacgccaagatgtcgctggtcgtccgtcgcgaggatggcaaactgcgcacctattgccatctcggcaccggcaactatcacccgatcaccgcgaagatctacaccgacctttcctacttcacctgcaatcccgtcattgcccacgacatggcgaacatctttaacttcatcaccggttacggcgagccggaacagggcatgcagctcgcgatctcgccctatacgatgcgctcgcgcatcctgcgtcacatcgaggaagaggtccagcacgccaggaacggcgcaccggcggcgatctggatgaagatgaattcgcttgtcgatcccgatatcatcgacgcgctctatcgcgccagccacgccggcgtcgagatcgatctcgtcgtgcgcggcatttgctgcctgcgtccgcaggtgcccggcctttcggaaaagatccgcgtcaagtcgatcgtcggccgcttcctcgagcacagccgcatcttctgcttcggcaacggccacggcctgccgtccgacaaggcactggtttacatcggctcggccgacatgatgccgaggaacctcgatcgtcgcgtcgaaaccatggttccgctgacaaatcccaccgttcacgagcaggtcttgtcacagattatgctcggcaacgtgattgacaatcaacaaagctacgagatattgcccgacggtacgtcgcgtcgcatggaagtgcgcaggggcgaagaaccgttcaatgcgcagcagtatttcatgaccaatccgagcctgtcaggccgtggtgaagctctgaagtccagtgcgccgaagctgatcgccggcctgctcgaaggccgcaacaacaagtaa

SEQ ID NO: 49955 - protein, 734 aa, Rhizobium leguminosarum bv. viciae 3841
MDSAVAEHQELTPEINDNTPPLEELLKSPERFINREFSWLQFNRRVLEETLNTEHPLLERVRFLSISAANLDEFFMVRVAGLEGQVRQNIAIRSPDGKTPAEQLDSILQEIDHLQMEQQASLAVLQQYLAKEDILIVRPGALSEGDRQWLAAEFEQAIFPVLTPLSIDPAHPFPFIPNLGFSIGLQLVSKNGREPMTALLRLPVALDRFVRLPDDGNTIRYITLEDVANIFIHRLYPGYEVQGSGTFRVIRDSDIEVEEEAEDLVRFFETALKRRRRGKVIRIETDSEMPASLRQFVVQALSIPDNRVAVLPGLLALNTLSEITKAPRDDLRFAPYNARFPERVREHAGDCFAAIREKDMVVHHPYESFDVVVQFLLQAAHDPDVLAIKQTLYRTSNDSPIVRALIDAAEAGKSVTALVELKARFDEEANIRWARDLERAGVQVVFGFIELKTHAKMSLVVRREDGKLRTYCHLGTGNYHPITAKIYTDLSYFTCNPVIAHDMANIFNFITGYGEPEQGMQLAISPYTMRSRILRHIEEEVQHARNGAPAAIWMKMNSLVDPDIIDALYRASHAGVEIDLVVRGICCLRPQVPGLSEKIRVKSIVGRFLEHSRIFCFGNGHGLPSDKALVYIGSADMMPRNLDRRVETMVPLTNPTVHEQVLSQIMLGNVIDNQQSYEILPDGTSRRMEVRRGEEPFNAQQYFMTNPSLSGRGEALKSSAPKLIAGLLEGRNNK

SEQ ID NO: 49956 - DNA, 2115 bp, Oenococcus oeni PSU-1
  CDS (1)..(2115): transl_table=11
atgctgacagaaaataaaaattcaaaatatctagttaaccgtgagctttcctggttgaagtttaacgatcgagtcttagcgcaggcaaacgatcaaaggcatcccttattagaacgagcccgttttctctctattacccaaaaaaatcttgatgaatggtttatggttcgtctggcctcgattcatcagatggttcaactgcgtttaaagtcgaaagatccgactggcctttcgccaacggaggaactggacgtaatttcgcttgctgcaggtgcccagttgaaaaaacaacattctctatatgcacgatcactggttccaatgctggccaaaaagcacattaacattcttgggatcgacgaacttgaagaatcacaatatgattggctggaaaaatattttcagcaggagattttgccgattttaaccccgatggctgatgatggtacacgcccttttccttttttgtctaacgacagtttaaatcttggcattcggattgttgccaatccgactaaaaagaaaaaaagcaaaacggagaattatgcttttattcaggttccaaagaatctgcagcgggtaattaaacttccgatcggagttggacagacttatgttttgatcgaagatgtaattcgagaatatatcaatcttttatttcaaggctataaaattcaagaagtaactgcttttcatttacttcgtgatatggaattaagcattgccgaagaagattctcctaatcttttaaaagaagtccagacccaattaaaaaaacgtgaacgtggtcaggtaatccgtttggtagcagagaaaaaaatgtccaagaaacttgagaagcatcttcaaaaagctctcccccttaacaaacggagaatttatcgtgtttctggtccggttgatctggcttttcttgatactttgatcaaacaagttcaaattcctgaattaatttatcaacccttccaaccgagaactgagttgtcgttaatgggcaaaggaatttttaaaacgattgccgaccatgatgttcttttgcagcatccttacgatgattatggaccagttgtaaatttaataaatcaagctgccgatgatgaccaaacgatggcaatcaaaatgactctttatcgagtttctgatcattctccgattgtagctgcgctaggaagagccgctgaagcaggtaaacaggttacgactctggtggaagtcaaagcacgttttgacgaagagaacaatgttcactgggctgaggaattagaaaaacagggagttcacgtgatttatggtcttcctaatctaaaggttcatgccaaaatgactttaataatcagaaaagagagttccggaatcaagcgctatatgcatgttggaaccggcaactataatgaagtaaccgctcgtctttatacagatatttctttgtttacatccaatgatcttttggctgatgatcttgctcaggtttttaattacttaaccggctattttgcaccgaaaaatttgaaaattgctcatatatctccgaatgggatcgctgatcatcttgagaaattgattgatgccgaaagtgaggcggaactaaagggtcaaatttcaggaatttggattaaggctaattcgttaaatgacaccaatatcattgaacatcttatttacgctagccagactggcgttccgattcatttgttgattaggggtatcgaaacactcaaaccggaaataaagtcggttacgaataaaatcaaggttcattcgattgttggacgttttcttgaacattctcgaatttataggtttgctaataatggtaaccccttgacttatatttccagtgcagatttaatgccaagaaatctttaccgtcgtgttgaacttttagtgccgattgttgatccgaaatgcgaatcggaacttgccgagatctttgaaacgatgtgggccgatacagttaatatgtggaagatgaaatcagatggcagttatgctcggcattccaaacgtcgccggagagttgatagccaagcgttgtttatggaacaggaattcgttgcagacaggttcgctgaaaaatttgttggcgatgaatatgttagactaaaagctggatag

SEQ ID NO: 49957 - protein, 704 aa, Oenococcus oeni PSU-1
MLTENKNSKYLVNRELSWLKFNDRVLAQANDQRHPLLERARFLSITQKNLDEWFMVRLASIHQMVQLRLKSKDPTGLSPTEELDVISLAAGAQLKKQHSLYARSLVPMLAKKHINILGIDELEESQYDWLEKYFQQEILPILTPMADDGTRPFPFLSNDSLNLGIRIVANPTKKKKSKTENYAFIQVPKNLQRVIKLPIGVGQTYVLIEDVIREYINLLFQGYKIQEVTAFHLLRDMELSIAEEDSPNLLKEVQTQLKKRERGQVIRLVAEKKMSKKLEKHLQKALPLNKRRIYRVSGPVDLAFLDTLIKQVQIPELIYQPFQPRTELSLMGKGIFKTIADHDVLLQHPYDDYGPVVNLINQAADDDQTMAIKMTLYRVSDHSPIVAALGRAAEAGKQVTTLVEVKARFDEENNVHWAEELEKQGVHVIYGLPNLKVHAKMTLIIRKESSGIKRYMHVGTGNYNEVTARLYTDISLFTSNDLLADDLAQVFNYLTGYFAPKNLKIAHISPNGIADHLEKLIDAESEAELKGQISGIWIKANSLNDTNIIEHLIYASQTGVPIHLLIRGIETLKPEIKSVTNKIKVHSIVGRFLEHSRIYRFANNGNPLTYISSADLMPRNLYRRVELLVPIVDPKCESELAEIFETMWADTVNMWKMKSDGSYARHSKRRRRVDSQALFMEQEFVADRFAEKFVGDEYVRLKAG

SEQ ID NO: 49958 - DNA, 2133 bp, Leuconostoc mesenteroides subsp. mesenteroides ATCC 8293
  CDS (1)..(2133): transl_table=11
atgacagatctgaaacaacacaaatattatgttaatcgtgaaatgagttggttagcttttaataaacgtgtgcttgaagaagggcgcgatacacaaaatcctatcctagagcgcgctaattttttggcgattacacaaaaaaacatggatgaatggttcatggttcgtgtggcaagcttacaacaacaaatgtttgtaggtcacgataaggtggatgcatctggtttatcgcccaaacaacagctaattaaaatttctgccgctgcaggagaacaaattaaaaaccagtaccaagtattaaatcgtagtattattccgaccatgaaaaagttaggtttttcattggtccataaaaatgatttgacgaatgcacaagttaactttttaaagaaattttttgagaaggagttacgtccagtcttaacgccgatggcgattgatagtacacgaccatttccttttttggcaaatgatacgttaaatattggtgttcgtctgaaaaaaaacgacgaaaaatctgaaaaatatattgcagtattacaggttccagaaacctctggacgagtaatcgcactaccagaagaaaatcaagtgattttagtagaagatgttgtgcaactatttttagatgcgctttttccaggttataccattaaagaatcaaatgtttttcatattttacgtgatatggaattagatgttgctgatgatgaagatacgcccaatattttgcaagaagtacaaagtaaattgcaagaacgggagcgtggacgagttatccgtgtgattgtaagtgcgaacacgggtaaaatgttgatgacccaactcatcaaagccttacaggtccctgatgatagaatttatgaagtgagtggtccgattgatttaacattcatcagttcatggttgaaagtaattgatgcacctacactagaatatacatcatttcatgggtacgaaaatcccgacttgaccgctgataaaatatttgaaagtatacgaaaacgcgattatctgttgcatcacccctatgattcatttaagccagtagttcagtttattcaaacagctgctatagatgatgatgtgctagccattaaaatgactctataccgtgtatccggcaattcaccaattattaaggcactctctgatgctgctcaacgtggcaagcaggtaacggtattgcttgaaatcaaggcacgctttgacgaggaaaataatgtccattgggcgcgtgaattagagcaaaagggcgtccatgtggtctatggacttcgtggactaaaagtgcatgctaaaatggccatggtagtgcgacgggaaagtgatactattcgtcgatatgtccatctcgctactggaaactataatgatgttacagcgaatttttatacggatcttggattgctaacagtggatagcgaattaggtgcagatgtggcttcgatttttaatattctaacgggttactctgatccgagtttttttcatcaactgcatatgtcacctaatggcattcgtgagtttatttatgaaaaaataaacgtcgaaattaagaatgctaaggcaggaaaaccatccggtattaagatgaaattcaattcgttatctgatgaacgaatgattcgtcatttgtatgaagcaagtgaagccggtgtaccagtagaattgatagttcgaggaattacaatgctcaaggttggtattccaaaagtcagtgaaacgatagctgtgcattcaattgttggccgttttttggaacatagtcgggtgttcatctttcataatgatgatagtccacaagtttatttatcttctgcagatttaatgacaagaaacttagatcgacgtgttgaattgttattcccaattcgcaatgctggtttgtctcaacaggtgattaatatttttgaaatcatgtgggcagataatgttaaaacacgtgtcttacaaccagatggatcgtttgataaaattgatcgtagaggcttatcctctgttaacgcacaagaaatgtttatagctgaatctatggtcaaacaaattgagttaaagcaacaacaggaccgagaaaatacgcaaaaagaatttgagccaatcaacaacccgtttataggaggtgaatcatga

SEQ ID NO: 49959 - protein, 710 aa, Leuconostoc mesenteroides subsp. mesenteroides ATCC 8293
MTDLKQHKYYVNREMSWLAFNKRVLEEGRDTQNPILERANFLAITQKNMDEWFMVRVASLQQQMFVGHDKVDASGLSPKQQLIKISAAAGEQIKNQYQVLNRSIIPTMKKLGFSLVHKNDLTNAQVNFLKKFFEKELRPVLTPMAIDSTRPFPFLANDTLNIGVRLKKNDEKSEKYIAVLQVPETSGRVIALPEENQVILVEDVVQLFLDALFPGYTIKESNVFHILRDMELDVADDEDTPNILQEVQSKLQERERGRVIRVIVSANTGKMLMTQLIKALQVPDDRIYEVSGPIDLTFISSWLKVIDAPTLEYTSFHGYENPDLTADKIFESIRKRDYLLHHPYDSFKPVVQFIQTAAIDDDVLAIKMTLYRVSGNSPIIKALSDAAQRGKQVTVLLEIKARFDEENNVHWARELEQKGVHVVYGLRGLKVHAKMAMVVRRESDTIRRYVHLATGNYNDVTANFYTDLGLLTVDSELGADVASIFNILTGYSDPSFFHQLHMSPNGIREFIYEKINVEIKNAKAGKPSGIKMKFNSLSDERMIRHLYEASEAGVPVELIVRGITMLKVGIPKVSETIAVHSIVGRFLEHSRVFIFHNDDSPQVYLSSADLMTRNLDRRVELLFPIRNAGLSQQVINIFEIMWADNVKTRVLQPDGSFDKIDRRGLSSVNAQEMFIAESMVKQIELKQQQDRENTQKEFEPINNPFIGGES

SEQ ID NO: 49960 - DNA, 2169 bp, Solibacter usitatus Ellin6076
  CDS (1)..(2169): transl_table=11
atggccgtcagctccagtagtgcgccttcgcgggcaaagaaacaccaggcacccacacccgacctgactgaccccagcctgtatgtcaatcgcgaactcggtctgctgagtttccagtggcgggtattggaggaggcgcgcgacggtacgaatccgctgttggagcgcatccgcttcctgagcatcgtgggatcgaacctgaacgaatttttcatggtgcgggtggccagtttgaacgctcagctggacgcggggattccggagttcgggccggaccggatgagcccgagcgcgcaactgatcgcgatccggcgcgagaccaagcgactgatggaggcggcacaccagtgcctggagacggaactcagaccggagctgagcgacgaaggaattcacatcctgccatacgacgatctcaatgaccggcagctgcagagctgcgagagttatttttcggagatcattttcccggtgctgacgccgctggcgttcgaccagggaaggccgtttccgcacatctcgaacctgagcctgaacctggccgtactgatcctggatgcgggaggcgagcaacggtttgcgcggctgaaggtgccagattcgctgcccgcgctggtaccgttgacgcggacgcagaaggccgcctcgaagcgcagccgcccgcggcgggagcaatcctacgtgtggattgaagaagtgatcgcggcgaatctggacagcctttttcccgggatgcagattgtggaggcgcacccgttccacgtgacgcgcgacgcggatattgcgatcaaggaactggaagccgacgatctgctggagacgatcgaggaaggcgtgcggcagcgcaagttcggcagcgtggtgcggctgcaggtcaaccagcagatgccgcaacacattctgcagatcctgatggagaacctggaagtggaaccgagcgaggtatatcgctcgaaggggctgctgggattgagccggctggcggcgctgacgcagatcgaccgcccggatttgaaatacacgccgtttctggcttcgtcgccgccggagttacagccggccaacgaagaagaggacctgttcgcgattatccggcagcgcgacgtgctgctgcaccatccgttccaatcgtttcagccggtggtggattttctgcgcaaggcggcgcgcgatccggatgtgctggcgatcaaggtggtgctgtatcgcgtggggcggaattcgccggtggtggaagcgctgctggaagcgatcgaggagggcaagcaagtcgcggtgctgatggagttgaaggcacgcttcgacgaggagagcaatatcgagtgggccaagacgctggaaaaagcgggctgccacgtggtgtacggcctgcccgggttgaagatccactgcaaggccgcggtagtgctgcggagggagagcggcgcgatccggccgtacatgcacctggccacggggaattacaacgtggtaacggcgcacttgtacaccgatatcggactgttcacctgtaatcccgagatctcgacggacctgctggatcttttcaattttctgacgggctactcggcgaagcgcgactatcagaagctgctggtggcacccgtgaacttgcgcgagcgcctgcaaaagctggtggagcgcgaggtggagaagcacgagaaggagggcaagggccatcttgtgttcaagatgaatgcgctggtggatccgcagatggtgcgcatgttgtacaaggcgtcgcaggcgggtgtgaagatcgacctgctggtgcgcggcatctgctgtctgcgtccgggcgtgcctggcgtgagcgagacgatccgtgtgacgtcgatcgtggggcgatttctggaacacagccggatcttctatttccgcaatggcggagatgaggagatttatctggggagtgctgatctgatgccgcgcaatctgaatcgccgcgtggagatcttgtttccgctaaaggatccggatttattgcggcgcgtgcgggatggaattctggcggagtacttgacggacaacgtgaaggcccggcggatgatggcggatggaagttataaacgcgtgccgcacagcgaggggcacgcggcgcacaacagccaggagagtctgctggggatgggaccgaagtcgcggaagaaggcgcggctaacgtggtga

SEQ ID NO: 49961 - protein, 722 aa, Solibacter usitatus Ellin6076
MAVSSSSAPSRAKKHQAPTPDLTDPSLYVNRELGLLSFQWRVLEEARDGTNPLLERIRFLSIVGSNLNEFFMVRVASLNAQLDAGIPEFGPDRMSPSAQLIAIRRETKRLMEAAHQCLETELRPELSDEGIHILPYDDLNDRQLQSCESYFSEIIFPVLTPLAFDQGRPFPHISNLSLNLAVLILDAGGEQRFARLKVPDSLPALVPLTRTQKAASKRSRPRREQSYVWIEEVIAANLDSLFPGMQIVEAHPFHVTRDADIAIKELEADDLLETIEEGVRQRKFGSVVRLQVNQQMPQHILQILMENLEVEPSEVYRSKGLLGLSRLAALTQIDRPDLKYTPFLASSPPELQPANEEEDLFAIIRQRDVLLHHPFQSFQPVVDFLRKAARDPDVLAIKVVLYRVGRNSPVVEALLEAIEEGKQVAVLMELKARFDEESNIEWAKTLEKAGCHVVYGLPGLKIHCKAAVVLRRESGAIRPYMHLATGNYNVVTAHLYTDIGLFTCNPEISTDLLDLFNFLTGYSAKRDYQKLLVAPVNLRERLQKLVEREVEKHEKEGKGHLVFKMNALVDPQMVRMLYKASQAGVKIDLLVRGICCLRPGVPGVSETIRVTSIVGRFLEHSRIFYFRNGGDEEIYLGSADLMPRNLNRRVEILFPLKDPDLLRRVRDGILAEYLTDNVKARRMMADGSYKRVPHSEGHAAHNSQESLLGMGPKSRKKARLTW

SEQ ID NO: 49962 - DNA, 2163 bp, Shewanella sp. ANA-3
  CDS (1)..(2163): transl_table=11
gtgtccccgaataccgataaactgtcgatcgataaagaaatctcttggttgtcattcaacgagcgggtgctgcaggaggcctgtgatcccaatgtgcctatcgtggagcgggtgcgctttttaggcatattctccaataatatggatgagttctttcgggtgcgggtggccgcggtcagacgttcaattctactctccgcgttgcaggaaggtcgcagcaatagccgtcacctcatggccaaaattcaaactaaagtgatggcattgcaggagcgtttcgatagcatttacgtcgaactgatgcgtgagttagtccgtcgcaacattttgttaattaacgaaaaacaattaagtgagttccacagtaactggcttaaaaaacattttcgcgatcattttaaacgccatatcgcgccgcttatcgttaacaacaatcgcgatttagtaaagcatatcaacgacgacgccacttatctgtgtgtgtgtttgttcactaaatcccgcagacaatatgccctcgtggaagtgcccaccaaaaatgtgccgcgttttattgagttacccgccgaaaaatcgaaggcgaaaaaatacttaatcctgctggataatattattcgccactgtgtggacgatctctttggtcccttcttcgagtacgatgcgattgaagtctattcgatgaagctgactcgcgacgccgagttcgatattaccgacgaacttgaacaaacccagcttgaaaaaatgaccaagggtttgaaaaaacgcctgaccgccgaacccgtgcgtttggtgtacgacaaagaaatgcccgagcatatgcttgaaatgctaaaggaaaatttaaacatcagctcgactgaatgtttgatccccggcgggcgctaccacagcttcaaagactttatcggcttccctaaccctagccgtgattacctcgaaaacgagaaattgcccgcgctcaatagctcgggctttggtcgcagcgccaacagtttcgatgcgatcaagatgggcgatattatggtcaactatccgtaccataagttttcccactttaccgaaatggtgcgtcaggccgcctacgatcctgctgtgcgttttattcgcatcaacctttaccgtgtcgcgaaaaaatcccatgtgatgcaatcgcttatcgatgcggtgaaaaatggtaaacaagtcaccgccgtgattgagctacgggcacgctttgacgagcaatctaatattgagtggacacgggtgctcgccgaggcgggcgtgaaagtccaccatgggatcaccagcttaaaagtacactcaaagttgtgtttgattggccgcgaagagcaaggcgagatgaagctctattgccacgtaggttcaggcaactttaacgaaggcacggcgcgggtctataccgacttatcgctgtttaccgccaatcaggaaatcgcccgcgaagtggagcaagtgtttgacctgattgaacatccataccgccgcgataacttccagcatttgattgtgtcgccctatgatgcgagacaaaaactgacccatttgattgataacgaaatcgtcaatgcccagagccatattaaggcggcgattaccttaaaattgaataacctgctagatgaatccttagtccaaaaactttatgaggcctcggctgcgggggtcaaaatcaaactgttgatccgcggtatgtgctcgctgattccacaaattccggggatcagcgacaacatcgagatttacagtattgtcgaccgatttttagaacattcacgggtgatgctgttccatgccggtggtgagaataaattatttatcagctccgccgattggatgagccgcaacatagataaccgcgtcgaagtgagtgtgcctatttatgatccgcgtctaaaacaaatggtgatggatattttatcgttacagttcaatgacaacactaaggcgcgcatcatcaataaggaacagagcaatccttatcgtaaccgcggtaataaacgtaaagtgcgttctcaaattgccatttatcaatatctgattaattatgagaagcgattgcagcaagaatttagcacccagcgcgaagccgcaaagcttgaagcggagcacgcggcggaacttgcccacaatctcgaattacaggccaaagccagctaa

SEQ ID NO: 49963 - protein, 720 aa, Shewanella sp. ANA-3
MSPNTDKLSIDKEISWLSFNERVLQEACDPNVPIVERVRFLGIFSNNMDEFFRVRVAAVRRSILLSALQEGRSNSRHLMAKIQTKVMALQERFDSIYVELMRELVRRNILLINEKQLSEFHSNWLKKHFRDHFKRHIAPLIVNNNRDLVKHINDDATYLCVCLFTKSRRQYALVEVPTKNVPRFIELPAEKSKAKKYLILLDNIIRHCVDDLFGPFFEYDAIEVYSMKLTRDAEFDITDELEQTQLEKMTKGLKKRLTAEPVRLVYDKEMPEHMLEMLKENLNISSTECLIPGGRYHSFKDFIGFPNPSRDYLENEKLPALNSSGFGRSANSFDAIKMGDIMVNYPYHKFSHFTEMVRQAAYDPAVRFIRINLYRVAKKSHVMQSLIDAVKNGKQVTAVIELRARFDEQSNIEWTRVLAEAGVKVHHGITSLKVHSKLCLIGREEQGEMKLYCHVGSGNFNEGTARVYTDLSLFTANQEIAREVEQVFDLIEHPYRRDNFQHLIVSPYDARQKLTHLIDNEIVNAQSHIKAAITLKLNNLLDESLVQKLYEASAAGVKIKLLIRGMCSLIPQIPGISDNIEIYSIVDRFLEHSRVMLFHAGGENKLFISSADWMSRNIDNRVEVSVPIYDPRLKQMVMDILSLQFNDNTKARIINKEQSNPYRNRGNKRKVRSQIAIYQYLINYEKRLQQEFSTQREAAKLEAEHAAELAHNLELQAKAS

SEQ ID NO: 49964 - DNA, 2091 bp, Nocardioides sp. JS614
  CDS (1)..(2091): transl_table=11
gtggagccgccgtaccagcccgaccacgacgagatcgccgcggtcgagaagtacgacgaccgcttcctcgaccgggagctctcctggctccggttcaaccagcgggtgctcgagctcgccgaggacagccggctgccgctgctcgagcgggcccggttcctggcgatcttcaccagcaaccttgacgagttcttcatggtccgggtcgccggcctcaagcgccggatcgcggccggggtggccgtgccggccgcgtccgggctgatgccgaccgaggtgctggacgtgatcctctcgacgacccgtggactgctcgagcggcagggccgggtgttccgcgacgaggtggtgcccgcgctcgccgccgccgggatcgagctggtccgctggggcgacctggaccgcgaggagcagaagacctgcaagcggctgttccgcgaccgggtgttcccggtgctgaccccgctcgccgtcgacccggcccacccgttcccctacatctccgggctctcgctcaacctggccgtgctgatccgcaacccgcgcaccggcaaggagcacttcgcgcgggtgaaggtgccgccgatcttcgcccggttcgtgccggtcgggaaccagcggttcgtgccgctggaggacgtgatccgcgagcacctcaagcggctgttccccggcatggaggtgctcgaggtgcacaccttccgggtcacccgcaacgaggacctggaggtcgaggaggacgacgccgagaacatcctggccgcgctggagaaggagctgctgcgccgccggttcggcccgccggtgcgcctggaggtcgaggagtcgatcgcgccgcaggtgctcgacctgctgatgtccgagctcggcatctccgaggaggaggtgttccggctgcgcggcccgctggacctgcgcggcctgcacgacatcgccgacctgccccgccaggagctgaagtaccccgcgttcttgccctccacccatccccggctcgccgaggtggagtcggccgcgccggtcgacgtcttcaaggcgacccggcgccacgacgtgctgctgcaccacccctacgactcgttcgcgacctcggtgcagcgcttcctcgagcaggccgccgccgacccgcacgtgctggcgatcaagcagacgctgtaccgcacgtccggcgactcccccatcatcgacgcgctcgtcgacgccgccgaggccggcaagcaggtgctggtgatcgtcgagatcaaggcccgcttcgacgaggaggccaacatccgctgggcccgcaagctcgagcaggccggctgccacgtggtctacggcctggtcgggctgaagacccactgcaagctctcgatggtggtccgcgacgagcccgacgggatccgccgctacacccacatcggcaccggcaactacaacccgaagacctcccggctctacgaggacctcggcctgctgaccaccgacgagcggatcggcgaggacgtcgcccacctgttcaacaacctctccgggtggtcgcgcaacgcgacgtacgacgagctgctggtcgcaccggactcgatccgcaccggcctggtcgaccagatccaccaggaggtcgcccaccaccaggccgggcggccggcccggatccggctgaaggccaactccgtggtcgacgaggcggtcatcgacgcgctctacctggcctcccaggccggggtgccggtcgagctgctggtccgcggcatctgcgcgctgcgccccggcgtgcccgggctctcggagacgatcgcggtgcgctcgatcctcgggcggttcctcgagcacagccggatcttctggttcgagaacggcggggacccgaccgcgtggatcgggtcggccgacatgatgcaccgcaacctggaccgtcgggtcgaggtgctggtgcggctgcccgacgaggacagcgtcggccaggtcggccggctgctcgacctcgccttcgaccccgacaccatcgcctgggacctggacagcaccggtgagtggcgccgcaacgacggcgacacgcacctccaggaggcgctgatcgagtcgcagcggcggcgccgtacgtcgccgtga

SEQ ID NO: 49965 - protein, 696 aa, Nocardioides sp. JS614
MEPPYQPDHDEIAAVEKYDDRFLDRELSWLRFNQRVLELAEDSRLPLLERARFLAIFTSNLDEFFMVRVAGLKRRIAAGVAVPAASGLMPTEVLDVILSTTRGLLERQGRVFRDEVVPALAAAGIELVRWGDLDREEQKTCKRLFRDRVFPVLTPLAVDPAHPFPYISGLSLNLAVLIRNPRTGKEHFARVKVPPIFARFVPVGNQRFVPLEDVIREHLKRLFPGMEVLEVHTFRVTRNEDLEVEEDDAENILAALEKELLRRRFGPPVRLEVEESIAPQVLDLLMSELGISEEEVFRLRGPLDLRGLHDIADLPRQELKYPAFLPSTHPRLAEVESAAPVDVFKATRRHDVLLHHPYDSFATSVQRFLEQAAADPHVLAIKQTLYRTSGDSPIIDALVDAAEAGKQVLVIVEIKARFDEEANIRWARKLEQAGCHVVYGLVGLKTHCKLSMVVRDEPDGIRRYTHIGTGNYNPKTSRLYEDLGLLTTDERIGEDVAHLFNNLSGWSRNATYDELLVAPDSIRTGLVDQIHQEVAHHQAGRPARIRLKANSVVDEAVIDALYLASQAGVPVELLVRGICALRPGVPGLSETIAVRSILGRFLEHSRIFWFENGGDPTAWIGSADMMHRNLDRRVEVLVRLPDEDSVGQVGRLLDLAFDPDTIAWDLDSTGEWRRNDGDTHLQEALIESQRRRRTSP

SEQ ID NO: 49966 - DNA, 2082 bp, Azoarcus sp. BH72
  CDS (1)..(2082): transl_table=11
atgtacaagcccaacaacaccagacgcttccccaccgaccatttcatcaatcgcgaactttcgctgctcgaattccagcgtcgggtgctcgcccaggcggccgacgaaaccgtaccgctgctcgaacgcctgcgcttcctgtgcatcgtctccagcaacctcgacgagttcttcgagatccgcgtgtccggcgtcaaggaacagatccgcctcgccacccacggggccggcaacgacggcctgtcgcccaccgagctgctggcgcgcatcagcaccgaggtgcacaagctgatcgcccagcagtacgcgttgctcaacgacgaaatcctgccggcactacacgccgaaggcgtggtgttcctgcgccgcagcgtgtggaccgaagcccagcacgcctggatcgcgcgctacttccacgacgaagtgatgccggtgctgacaccgatcgggctcgatccggcgcacccgtttccgcgcgtgctcaacaagagcctcaactttgccgtggagctggaaggccgcgatgccttcgggcgcgactcgggcgccgccatcgtgcaggcgccgcgcgcgctgccgcgggtgatccggctgccgcgcgaggtgtgcgacgcggagtacagcttcgtgttcctgtcctccatcctgcacgcccacgtgggcgaactcttcagcggcatgaacgtgctcggctgctaccagttccgcgtcacgcgcaattccgacctgttcgtcgacgaggaagaggtgaaggacctgcgtgcgacgttgaagggcgaactgcagcagcgccattacggcgacgcggtgcggctggaggtggccgacaactgctcggaggacatggcggacttcctgctgcagcatttccggctcgaacgtgccgacctctatcgcacgcccggcatcgtcaacctggttcggctgatgcaggtgccggactgggtcgagcgccccgacctcaaatacccgccgttccagcccggtctgcccaaggcgctcgacaagcggcgcgaaatcttcgcggcgatccgcagccaggacatcctcctccaccaccccttccagagtttcggcccggtgatcgacctgctgcgcgccgctgccgacgacaccgaggtggtcgcaatcaagatgaccgtctatcgcaccggaaccgattccgtgctgatggaacacctggtgcgtgccgcgcagaagggcaaggaagtgacggtggtgctcgagctgatggcgcgcttcgacgaggaggcgaacatctcgtgggcgaaccggctggaagaggtcggcgtgcacgtggtctatggcgtgttcggctacaagacgcacgccaagctgctgatgctggtgcggcgcgaggatggcggcctgcgccgctacgtccatctgggcaccggcaactaccacccgcgcacgacgcgcttctacaccgacttcggcctgctcacctgcaacgaagccatcggcgaggacgttgccgaagtgttcaagcagctcactggcctcggcaccgcgtcagcgctgcgccacctgtggcaggcaccgttcagcctgcagcccaaggtggtggaggccatccagcgcgaggccgagatcgcgcgcaacggcggcaaggcccgcatcatcgcgaagatgaatgcgttgctggaacccgaaacgatcgaagccctgtacaccgcgtcccaggccggcgtggaagtcgatctcatcatccgcgggccgtgcgcgctgcgcccgggcgtgccggggttgtcggacaacatccgcgtgcgctcggtgatcggccgcttcctggaacaccaccgcatcttccacttccatgccgacggcgaggaagtgatctacctgtcgagcgccgactggatggaccgcaatttcttccgccgcatcgagatcgccttcccggtgctcgacccgcgtctgaagcggcgggtgatgaaggaaggcctgcgcccctatctcggcgacaactgccaggcgtgggacatgctgtccgacgggagctaccggcgcaaaaccccgcgcggcacgcgccgcgccgcgcagctcatcctgctcgccgaactcggcaacgccggctga

SEQ ID NO: 49967 - protein, 693 aa, Azoarcus sp. BH72
MYKPNNTRRFPTDHFINRELSLLEFQRRVLAQAADETVPLLERLRFLCIVSSNLDEFFEIRVSGVKEQIRLATHGAGNDGLSPTELLARISTEVHKLIAQQYALLNDEILPALHAEGVVFLRRSVWTEAQHAWIARYFHDEVMPVLTPIGLDPAHPFPRVLNKSLNFAVELEGRDAFGRDSGAAIVQAPRALPRVIRLPREVCDAEYSFVFLSSILHAHVGELFSGMNVLGCYQFRVTRNSDLFVDEEEVKDLRATLKGELQQRHYGDAVRLEVADNCSEDMADFLLQHFRLERADLYRTPGIVNLVRLMQVPDWVERPDLKYPPFQPGLPKALDKRREIFAAIRSQDILLHHPFQSFGPVIDLLRAAADDTEVVAIKMTVYRTGTDSVLMEHLVRAAQKGKEVTVVLELMARFDEEANISWANRLEEVGVHVVYGVFGYKTHAKLLMLVRREDGGLRRYVHLGTGNYHPRTTRFYTDFGLLTCNEAIGEDVAEVFKQLTGLGTASALRHLWQAPFSLQPKVVEAIQREAEIARNGGKARIIAKMNALLEPETIEALYTASQAGVEVDLIIRGPCALRPGVPGLSDNIRVRSVIGRFLEHHRIFHFHADGEEVIYLSSADWMDRNFFRRIEIAFPVLDPRLKRRVMKEGLRPYLGDNCQAWDMLSDGSYRRKTPRGTRRAAQLILLAELGNAG

SEQ ID NO: 49968 - DNA, 2172 bp, Acidovorax sp. JS42
  CDS (1)..(2172): transl_table=11
atgtcctcttccgtgactccgtccgctgtctctcgccagatcgacgaggaaccggataccggcgtggaaaagaagggggccgccgccgctttgccggttcccgtggctggcgtgccgttgctggaccgtgaccacagcattcttgctttcaatgaacgggtgctggactgggcgatgcgggaagacgtgccgctgctggagcggctgcgctacctgtgcatcgtttcttccaaccttgacgagttcttcgaagtacgtgccgctgcccatcttgccgcggcggacggtggtgaagccaagcaaggctacagcctgcattcgtttgaggcgctggcacgcaaagcccacgatctggtcgagcggcaatacgccctgtacaaccattcgctgattcccgcgtttgccgcgcagggcatacgcatggtctcgcatggcgagcgcacggcggcgcagcggcggtgggtgcgtgagtatttccagcgcgatgtgcgcccgctgctcattccggtggggttggatccggcgcacccatttccccaagtggcgaacaaatccctgaacttcatcgtgcgcctgcgcggcagcgatgccttcgggcgtgaaaacgagatcgccattgtcaaggtgccgcgcgtattgccgcgcatcatgcgcctgcccgcacatgtggcgcccacgggcatgcagttcgtcagcctctccagcatcatccgcacgcacctggtggacctgtttccgggccgcgaggtgtacgaattttcgcagttccgcgtcacccgtcactcggacctcgctgtggatgaggaagacgtgcgcaacctgcgcaccgccctgcggcagggactgcagcagcggcacttcggtcaagcggtgcgcctggaggtgtcttccggttgctcgcgattcctggccgaattcctgcaatcccagttcgctctgcctgccgcggcgctgtaccgggtgcatggccctgtcaacctggtgcggttggtgcagatggtggaactgattaatgtgccagccttgctgttccctccgtggcgcccggcatggccagtgcaattgccgcgctccagctccatcatggcggagctgcgccgcagagacctgctcatccaccagcctttcgagagttttgacggagtgctggcattcctgcgcgaagcggtcaacgatccgcaggtgctggccatcaagcagaccatctatcgcacgggctcggattcggaactcatggagctcctgcgtgaggcggtgcgtcgcggcaaggaagtgacggcagtcgtggaactgaaggcacgctttgacgaggaggccaacatcaactgggccgaagcgctggagtccatcggcgcgcaggtggtgtatggcgtcgtgggcttgaagacccatgccaagatgctcttggtgacgcgccgcgaaggagggcgcctgcggcgctacgggcacctgtccactggcaattacaacccacgcacggcccggctctacaccgatctaagctatctgacggcggatgcggacctgacggcggacatggatctcgtctttgaccatctggccaatcagaaccggctgccaccgctgaagcagttggtcatggcgcccttcgacctgcacccgttcctgttggagcaaatcgagcaggcagggttggcggctgagcgcggcgagggcggtcgcatcgtcgccaagatgaacgcgctgaccgatgaggcattggtgcaggcgctcatccgtgcgggccagcgtggcgcaagcgtggacctcatcgtgcgcggcgcatgcatcctccccgcacaggtggcgggcgccacggagaacatccgggtgcgttccgtcatcggtcgcttcctggagcacacgcgcgtgttttacttccgcagcggtacgcgggaagacctttacctgtccagcgctgattggatgaaccgcaacatgctgcgccgcgtggaactggcgtggccggtgacggacaagaagctgcgccagcgcatcattgacgaatgccttgtggcctacctgcacgacaaccgtgatgcgtggagcctggagagcgatggcagttattcccgcgcgccgcatgtgctggatggcgcgggagcccaaaatgccctgatggcgcgctacgcccccgtagctgcgcccatgccccggaaagaaagcgcatga

SEQ ID NO: 49969 - protein, 723 aa, Acidovorax sp. JS42
MSSSVTPSAVSRQIDEEPDTGVEKKGAAAALPVPVAGVPLLDRDHSILAFNERVLDWAMREDVPLLERLRYLCIVSSNLDEFFEVRAAAHLAAADGGEAKQGYSLHSFEALARKAHDLVERQYALYNHSLIPAFAAQGIRMVSHGERTAAQRRWVREYFQRDVRPLLIPVGLDPAHPFPQVANKSLNFIVRLRGSDAFGRENEIAIVKVPRVLPRIMRLPAHVAPTGMQFVSLSSIIRTHLVDLFPGREVYEFSQFRVTRHSDLAVDEEDVRNLRTALRQGLQQRHFGQAVRLEVSSGCSRFLAEFLQSQFALPAAALYRVHGPVNLVRLVQMVELINVPALLFPPWRPAWPVQLPRSSSIMAELRRRDLLIHQPFESFDGVLAFLREAVNDPQVLAIKQTIYRTGSDSELMELLREAVRRGKEVTAVVELKARFDEEANINWAEALESIGAQVVYGVVGLKTHAKMLLVTRREGGRLRRYGHLSTGNYNPRTARLYTDLSYLTADADLTADMDLVFDHLANQNRLPPLKQLVMAPFDLHPFLLEQIEQAGLAAERGEGGRIVAKMNALTDEALVQALIRAGQRGASVDLIVRGACILPAQVAGATENIRVRSVIGRFLEHTRVFYFRSGTREDLYLSSADWMNRNMLRRVELAWPVTDKKLRQRIIDECLVAYLHDNRDAWSLESDGSYSRAPHVLDGAGAQNALMARYAPVAAPMPRKESA

SEQ ID NO: 49970 - DNA, 2181 bp, Nostoc punctiforme PCC 73102
  CDS (1)..(2181): transl_table=11
atggcaaaatctaagaaaagcgctacccccaccaatctcagcgatccacaatattatcttaaccgagagttaagctggttagaatttaatggcagggtattacatgaagcctgtgacgatcgcactcctcttcttgaacgcctgaagtttttagcaatcttcaactctaatttggatgagtttttcatggtgcgagttgctggtttaaagcaacaagtagaggcgaaagtcagcctattaactcctgatggtcggacaccacaacaacagctagatgatattaggtctaccctgattcctcatgtcaagaaagagcatcaacattttgaacaagtacttcgtcctctactagcaaatcatggcatccatattctggattacataaatttgaatcaaaaacagcgaactcatctcaataattattttgaggaacaagtctttccagtcttgacacctctggctgtcgatcctagtcatccttttccatttatttctaatctcagtctgaatctggctgttgtggtcaaaaacccagataccgaagaagaattctttgccagagttaaagtccccagtgttctcccacgatttttaccgataccacctgagttgggagatcaaaataacggcaaacctgctcactggactggagtacctttagaacaagcgatcgctcataacttagaatctctatttccagggatgaatattcaagaatatcatccgttccgcattacccgtgatgccgatttggtattggaagaagatgaagcagatgatttgttattagcgattgaacaggaattgcgaaaacggcggctaggtgggagtccagtccggctagaaattcaatcccagactcctgaaatagtgcgatcgcgattattgcacgatttggaattaacagaaagcgatctctacgaagtagacggtcttttgggcctgcgggatttgatgtattttatgtccttgccattgccagaactcaaagatccaccacgccaatctgttgtaccatcacgcttgcaaaggctgagagaaccgagtttagacccagatgcgctagagacggacgagggaaaagatttttttgctgtgattcgggaaaaggatttgctagtacaccatccctatcaatccttttcggctacggtggtgcgctttatcacccatgctgcctatgatccgaatgtgttagccatcaagatgaccctttaccggacttctggcgattcgcccatcgtcaacgccttaattgccgctgctgaaaatggcaagcaagtatccgtgctagtggaattaaaggcgcgatttgatgaggagaataatatttattgggcaaaacggctagaaagagttggagttcatgtagtctatggtttagtagggctgaaaactcacagtaaaaccgttatggtggtacggcgcgaaaaagatcgaatccgccgctacgtacatattggcactggtaactataatcccaaaacagcacggctatatacagatttgggattgtttagttgccgtgaagaattaggtgctgacatcacagatttatttaatttcttgacaggatactccctgcaaaagtcttatcgagaattgttggttgcacctgtgaatatgcgcgatcgctttttggcactaattcatcgcgaaattgaaaatgttcaaaatggattttctggacgcattgttgccaaaatgaattccttagtcgatccagaaattatcgccacattatatgaagcttcccgcgccggagtacaaatagacttaattattaggggcgtttgctgtttgcgtccaggactcaaagacattagtgaaaatattcgcatcatcagcattgttggtcgctttttagaacactctcggatttattattttcataacaatacacaggaggaaatctttatcggtagtgccgactggatgcgccgcaacctagatcgtcgagtcgaagtaattaccccagtaaaagacccagatattgccaaggatttgcaagaaatcatgggaattatgcttgcggataatcgccaagcttgggaattacaagccgatggcacttacattcaacgccgtccttatgatgattctccagaagccaattcacaaaaaattcttatgaatatggcattacgctcaactggcgtaacctcaaacttgattgattaa

SEQ ID NO: 49971 - protein, 726 aa, Nostoc punctiforme PCC 73102
MAKSKKSATPTNLSDPQYYLNRELSWLEFNGRVLHEACDDRTPLLERLKFLAIFNSNLDEFFMVRVAGLKQQVEAKVSLLTPDGRTPQQQLDDIRSTLIPHVKKEHQHFEQVLRPLLANHGIHILDYINLNQKQRTHLNNYFEEQVFPVLTPLAVDPSHPFPFISNLSLNLAVVVKNPDTEEEFFARVKVPSVLPRFLPIPPELGDQNNGKPAHWTGVPLEQAIAHNLESLFPGMNIQEYHPFRITRDADLVLEEDEADDLLLAIEQELRKRRLGGSPVRLEIQSQTPEIVRSRLLHDLELTESDLYEVDGLLGLRDLMYFMSLPLPELKDPPRQSVVPSRLQRLREPSLDPDALETDEGKDFFAVIREKDLLVHHPYQSFSATVVRFITHAAYDPNVLAIKMTLYRTSGDSPIVNALIAAAENGKQVSVLVELKARFDEENNIYWAKRLERVGVHVVYGLVGLKTHSKTVMVVRREKDRIRRYVHIGTGNYNPKTARLYTDLGLFSCREELGADITDLFNFLTGYSLQKSYRELLVAPVNMRDRFLALIHREIENVQNGFSGRIVAKMNSLVDPEIIATLYEASRAGVQIDLIIRGVCCLRPGLKDISENIRIISIVGRFLEHSRIYYFHNNTQEEIFIGSADWMRRNLDRRVEVITPVKDPDIAKDLQEIMGIMLADNRQAWELQADGTYIQRRPYDDSPEANSQKILMNMALRSTGVTSNLID

SEQ ID NO: 49972 - DNA, 2175 bp, Crocosphaera watsonii WH 8501
  CDS (1)..(2175): transl_table=11
atggcacaggcaaaagttaaagaagacaatatcaatcttaaagatccccaatactattttaatcgtgaattgagttggttagaattcaatcatcgtgttttaaacgaagcgttagatagtcggactcctttgttagaaagactgaagtttgccgccatttttagttctaacctagacgaatttttcatggttagggttgctgtattaaagcaacaacttaaagcaggtgtaagaaagttaagcgccgatggaagaagccctttagaacaattaaaagctattagcgatcgccttcgtcctttagtgaaagatcaagatcatctttttgaatataccctgagaaatttattaattaatcaaggcatttatttaattaattatgtagacttagatcaagaacaaaggacttatttacatcagtattttgaagataatatttttcctgctttaacccccttagcagttgatccttctcaccctttcccctacatttctaatcttagtttaaacttgggggtggtggttcgtgatcctgatacagaagaagaacattttgcaagggtaaaagtacctggagttttgcctcgttttgtggcactccccccagaattaagacatcaagaagacgagcaaacagctatttggacgggggttcctttagaacaagttattgcccacaatcttgaggcattatttcctgggatgattgtgcaagagtgtcatggttttcgagtgacaagaaatgcagatttctccgtggaagaagacgaagcagatgacctacttttggccattgaacaagagttaagaaaaagacatattggtaagtctgcggtaagattagaaattcatgcagcgacccctgaacccatcagaaaacaactgatagaagatttaggcttagaggaaattgatgtctatgatatcgagggtttattaggattaaaagacctattttattttatgtctcttccttgtccagacttgaaagataaatcctggagcgcagtagttccccctaaattacaacgtataaaagagattatagatggtaacgatgacgggaaaattcaacaggatggagaggatattttttctctaattcgtcaggaggatattttagttcatcatccctatcaatcttttagtgcttctgtgcaacaatttattactcaagctgcttatgatcccgatgttttaactattaaaatgactctctatagaacgtcaggagattcacccattgttaatgctttaattgctgctgctgctaatgggaaacaagtggctgctttggtggaattaaaagctagatttgatgaagaaaataacattatttgggcccgtcgtttagaacaatcaggggttcacgttgtttatggattggtgggattaaaaacccacacaaaaattattttagttgtgcgtaaagaaggagagaaaatacgtcgttatgttcatattggcacgggtaattataatcctaaaactgctaaattgtatacggatttaggtctattaagttgtcgagagaaattaggggcagatttaacggatttattcaactttttaactggttattctcgacaaaaatcctatcgtaaattgttagttgctcctgttaatatgcgcgagcgcatggtttctatgattaatcgagaagcagaacattgtcgcaatggagggagtggtcgtattgtggcaaaaatgaattctttagtagatccacaaatcattgcaaccctttataaagctagtcaagcaggggttaatatcgatttagttatacggggaatttgttgtttaaaacccggtatcaagggggtgagtgataatattaatgttattagtattgttggccgtttcttggaacattcacgaattttttacttccataatgggggagaagaagagatttatattggtagtgcagactggatgactcgtaatctttctcgtcgagttgaagcgatcacccctgtagaagatccgaaaattgctcaacaattacaagaaattttaggggttatgttagcagataaccgtcaagggtgggaattacaatccgatggtagttatattcaacgtcaacctcaaagcaaagagtatgaacaaagttctcaaaaaacctttatggaaatggcgttgcaatctagtgacatcctccccaactaa

SEQ ID NO: 49973 - protein, 724 aa, Crocosphaera watsonii WH 8501
MAQAKVKEDNINLKDPQYYFNRELSWLEFNHRVLNEALDSRTPLLERLKFAAIFSSNLDEFFMVRVAVLKQQLKAGVRKLSADGRSPLEQLKAISDRLRPLVKDQDHLFEYTLRNLLINQGIYLINYVDLDQEQRTYLHQYFEDNIFPALTPLAVDPSHPFPYISNLSLNLGVVVRDPDTEEEHFARVKVPGVLPRFVALPPELRHQEDEQTAIWTGVPLEQVIAHNLEALFPGMIVQECHGFRVTRNADFSVEEDEADDLLLAIEQELRKRHIGKSAVRLEIHAATPEPIRKQLIEDLGLEEIDVYDIEGLLGLKDLFYFMSLPCPDLKDKSWSAVVPPKLQRIKEIIDGNDDGKIQQDGEDIFSLIRQEDILVHHPYQSFSASVQQFITQAAYDPDVLTIKMTLYRTSGDSPIVNALIAAAANGKQVAALVELKARFDEENNIIWARRLEQSGVHVVYGLVGLKTHTKIILVVRKEGEKIRRYVHIGTGNYNPKTAKLYTDLGLLSCREKLGADLTDLFNFLTGYSRQKSYRKLLVAPVNMRERMVSMINREAEHCRNGGSGRIVAKMNSLVDPQIIATLYKASQAGVNIDLVIRGICCLKPGIKGVSDNINVISIVGRFLEHSRIFYFHNGGEEEIYIGSADWMTRNLSRRVEAITPVEDPKIAQQLQEILGVMLADNRQGWELQSDGSYIQRQPQSKEYEQSSQKTFMEMALQSSDILPN

SEQ ID NO: 49974 - DNA, 2160 bp, Exiguobacterium sibiricum 255-15
  CDS (1)..(2160): transl_table=11
gtgaagatagactcccctgagttttttaacaaccgggaaatcagctggttacaatttaatgaacgtgtcttaggcgaagtgaccgatacacgaaatcccttgatggaacgatttaagtttttaggtatcttcagttccaatttggatgaattttatatggttcgtgtcggtggattaaaggatgaggtactggcaggattcaataaaccggaaaataaacaacagctgacaccgaaacaacagttacgtgccatcgcgacgaaaacaaaagagcttgtcgatcaacaatacgaagcctttaaagatgtcactcaagcattaaaggccgaaggtatctcttttctgaagcatgacgagttaaatgaaatgcagtcagaatatgtcaaaacctttttcagagaacaggtttttccggttctgacgccggtcgccgtcgatgcgtatcgaccattcccgatgctgtcttccaaatcattgaatatcgcaacggctctcgaagcggaagacggttccaaacggaatctggcgcttgttcaggttccggccgtcctcccgcgtttcgtcgatttacccgtcgatgatgaagaaacaaccgctgtgatcttactcgaagatgtcatcatttcctttatcgattctttgttcaaaggatatcacgtcctgtctgcgatgccgtttcgaattacacggaacgcggatttaccattccatgaagaaggaacgcatgatttattgaagttgattgaaaaagaattgaagaaacggcgctggggagtcggaatccggcttgagatccagaagaatgccatcaatacgaacttgctcaatatgttacgtgatgtcctcgacctacaggaccgggacatctatgctgtcgatggtccgatcgatttgacattcgctttcgctttttacagccagatcggtgtcgagtatgaccatttgatttatcagacaatcatgcctgtcgaaccgccggcactggagaagtccaaaaaactatttgatcaaattctgcaacaggattatttgttgcaccacccttaccatacgtttgatccaatcgtccgcctgattgttcaagccgccaatgatcccaatgtcttggcaatcaaacaaacgctgtaccgcgtatcaggagattctccgattattaaagcattgaagactgctgcagaaaacgggaaacaggtcactgtcctcgtcgaattgaaagcacggtttgacgaagccaaaaatatcgagtgggcgaaacagttggaaaaagcaggtgctcacgtcatttacggttacagcgatttaaagacccattccaaaatcacattaatcgtccgattacaggaaggccggattcagcggttcgtccatctcggaacaggtaattacaatgactctacggctaaactgtacactgatatcggtcttttgacggcaaaggaacaaattgcagaagatgcgacaaatttctttaactggttatccggttatggggagcaacctgaatggaatgcccttcatacgtcaccgaactcgatgctcgagaaatttttatccttgattgatgaagaaatcaaatatcataaaaaacacggtaacggtcgaatcgttgctaaaatgaacagtttgacggaaaaagacattatcgtgaaactgtatcaagcatctcgggccggggtcagaattgaattgattgtacgtggcgtctgctgccttcgtcctcaaatcaaaggcgtctcggaaaatatccgggtcacgtccgttgtcgatcgttatttggaacattcccgtatcttttacttccatcataacggcgatgatttgatttattgttccagtgccgactggatgacacgcaatatgcggaaacggattgaaatccttttcccaatcgcggatgaagaacagaaaaactatatcaaggattgtttggcattaacgatggcggacaacgtcaaagcacgggaacaagacgactccggtaactatcattacgtaacaaaaggtaaacaggaatgtgaatcacaaattctcattcagctttatacgaatgggaagctaaaagcaaaaccgtcctttgaacatccgcttgagcaaaaatggacaccggtcgaacgtgcggaagaaaagatcacctttgacccgactactagtaaaaaataa

SEQ ID NO: 49975 - protein, 719 aa, Exiguobacterium sibiricum 255-15
MKIDSPEFFNNREISWLQFNERVLGEVTDTRNPLMERFKFLGIFSSNLDEFYMVRVGGLKDEVLAGFNKPENKQQLTPKQQLRAIATKTKELVDQQYEAFKDVTQALKAEGISFLKHDELNEMQSEYVKTFFREQVFPVLTPVAVDAYRPFPMLSSKSLNIATALEAEDGSKRNLALVQVPAVLPRFVDLPVDDEETTAVILLEDVIISFIDSLFKGYHVLSAMPFRITRNADLPFHEEGTHDLLKLIEKELKKRRWGVGIRLEIQKNAINTNLLNMLRDVLDLQDRDIYAVDGPIDLTFAFAFYSQIGVEYDHLIYQTIMPVEPPALEKSKKLFDQILQQDYLLHHPYHTFDPIVRLIVQAANDPNVLAIKQTLYRVSGDSPIIKALKTAAENGKQVTVLVELKARFDEAKNIEWAKQLEKAGAHVIYGYSDLKTHSKITLIVRLQEGRIQRFVHLGTGNYNDSTAKLYTDIGLLTAKEQIAEDATNFFNWLSGYGEQPEWNALHTSPNSMLEKFLSLIDEEIKYHKKHGNGRIVAKMNSLTEKDIIVKLYQASRAGVRIELIVRGVCCLRPQIKGVSENIRVTSVVDRYLEHSRIFYFHHNGDDLIYCSSADWMTRNMRKRIEILFPIADEEQKNYIKDCLALTMADNVKAREQDDSGNYHYVTKGKQECESQILIQLYTNGKLKAKPSFEHPLEQKWTPVERAEEKITFDPTTSKK

SEQ ID NO: 49976 - DNA, 2142 bp, Prosthecochloris aestuarii DSM 271
  CDS (1)..(2142): transl_table=11
atgatggataattctacagaaagcgttgaagacgcagtttctttgcctgattttgacaatccgtccttttatgtcaacagggaactcagctggatggcttttaaccagagggttcttgaagaggcgttgagtcgtgacgagcatccgctgcttgaacgcattaaatttatttcgattttcagttccaatctcgatgagtttttcatgatccgggttgccggtctggaagatcagtatgaggccggtgttcaggaccgttcaattgatggcatgactcctgctgaacagctggaaaagatccgcgagggcgtcactgcccagtttattcagcgcgatgcctgtttttacggagatatctgccctgaactggccaggcatggtatagagtttgtcgattaccgttctttttcggagtcgaacaaggaggtgctgcagcagtatttccgtcatgagatttttcctgttctgacccctcttgctttcgataccggccatccctttcccttcgtgtcgaacctttcgctcaatctggctattgagcttgaggatctggaacatcaatcgatgaaatttgcaagggtcaaggttcccagcatcctgccgcggattttgagacttgatctcattgacgggcttgattttggggatgaccgcataagactgctctggctcgacgatttcatctctcatcatctggagcagttgtttcctctcatgagaatcgttcaggcttatcctttccgggtcattcgcgatgccgatatcgaaatcgaggaagatgaggccggcgatcttttggaaaccattgagcagggcatccgctcccgccgctacggcaaggtggtgcggcttgatgtgacgcctgatatgccggagtcgatcaggcttcttctgataaagcatctcgaggtctcctcgcgtaatgtctatgaaattcccggagctctgggactgagcagtcttatggagttgatgcgtatcgataagccggagctgaaagatgaaccttttgctcccagcaacccgattgaggagaaggccggaggagacattttttctgcgatccgtcagagcgatcatcttttttatcatccctacgattcgtttcagcctgttgtcgatttgatcaatcaggcggcccgcgatcctcaggtgctctctatcaaacagaccttataccgggttggaagcaactctcctatcgtgcaggcgttgatgcatgctgtcgaagagggaaagcaggttgctgttcttgtggaacttaaggcgcggtttgatgaagaaaacaatatcgtatgggccagggcccttgaaaatgtcggtgctcatgtcgtctacggccttgtgggattgaaaactcatgccaaactcacgatgatcgttcgtcgggagcacgataaactcaagcgctatctccatctcggtacggggaactacaatccggctacggctaaaatctatacggattacagttttctgacagcaaacgagattctctccgaggacgtatcggaactcttcaacgccctgacaggttattccaggcatacagcgtatcgcaagctcatcgtttcgccgctcaatacccgtaagcgcatcattgctatgatcgagcgggagattgaatggcacaaaaaggagggcaacggcagaattgttatgaaaatgaatgcccttgtcgataggaaaaccatcaaggctctttatcttgcttccgctgcaggtgttcaagtcgatcttattgtgcgtggaatctgctgtcttgtgcccggtattgaaggggtaagccacaacattcgtgtcataagtgtgataggaagatttttagaacacagccgcgcgtattattttcggaacggaggaatggatgaactgtttctcggaagcgcagatatcatgccaagaaatcttgatcaccgcgttgaggttctctttcctgtactggatagcgaacttatcaatgttgtcaaatctgaacttgagcttatactcagtgacaacgtcaaggcctggcagatgaatgccgatgggacatacagtaaagttgtcgatcaaaggcctgcggtcaacagccagagtgtgtttctccagcaggcgtctatgaaaaaatcaataagtaaatttaaagtaaacggattatga

SEQ ID NO: 49977 - protein, 713 aa, Prosthecochloris aestuarii DSM 271
MMDNSTESVEDAVSLPDFDNPSFYVNRELSWMAFNQRVLEEALSRDEHPLLERIKFISIFSSNLDEFFMIRVAGLEDQYEAGVQDRSIDGMTPAEQLEKIREGVTAQFIQRDACFYGDICPELARHGIEFVDYRSFSESNKEVLQQYFRHEIFPVLTPLAFDTGHPFPFVSNLSLNLAIELEDLEHQSMKFARVKVPSILPRILRLDLIDGLDFGDDRIRLLWLDDFISHHLEQLFPLMRIVQAYPFRVIRDADIEIEEDEAGDLLETIEQGIRSRRYGKVVRLDVTPDMPESIRLLLIKHLEVSSRNVYEIPGALGLSSLMELMRIDKPELKDEPFAPSNPIEEKAGGDIFSAIRQSDHLFYHPYDSFQPVVDLINQAARDPQVLSIKQTLYRVGSNSPIVQALMHAVEEGKQVAVLVELKARFDEENNIVWARALENVGAHVVYGLVGLKTHAKLTMIVRREHDKLKRYLHLGTGNYNPATAKIYTDYSFLTANEILSEDVSELFNALTGYSRHTAYRKLIVSPLNTRKRIIAMIEREIEWHKKEGNGRIVMKMNALVDRKTIKALYLASAAGVQVDLIVRGICCLVPGIEGVSHNIRVISVIGRFLEHSRAYYFRNGGMDELFLGSADIMPRNLDHRVEVLFPVLDSELINVVKSELELILSDNVKAWQMNADGTYSKVVDQRPAVNSQSVFLQQASMKKSISKFKVNGL

SEQ ID NO: 49978 - DNA, 2166 bp, Kineococcus radiotolerans SRS30216
  CDS (1)..(2166): transl_table=11
atgacggccacgacacgcgccaccgcccccctgcctgccgtgagcccggtcgaggagccgaccgaactgcccgaggaccgcttcgccgaccgcgaggtctcctggctggccttcaacgagcgcgtgctgcagctggccgaggaccccgacgtccacctgctggaacgggcccggtacctgtcgatcttcgccaacaacctcgacgagttcttcatggtccgggtcgcggggctcaagcgccgcatcgccaccggtctggccgtcaccgccgccagcggcctggagccgcgccaggtgctcgacgcgatcgccgtgcgcgcccacgagctgaccgagcgccacgccgccgccttcctggggtcggtgcgccccgcgctggccgaggccggcatcaccatcgtgcgctgggacgagctctcccccggcgagcaggtccgcctgcacgggttcttccgcgacatggtcttcccggtgctgaccccgctggcggtggacccggcccacccgttcccctacatctccgggctgtccctgaacctggccgtcgtcgtgcgcaacccgaccacggacaaggagcacttcgcccgggtgaaggtgccgccgctgctgccgcggttcgtcgccgtcgagccggccgagggcgaggacccccgcgacgcgcggttcgttcccctggaggacgtcgtcggcgtccacctggaccagctgttccccggcatggaggtcgtgcagcaccacaccttccgggtcacccgcaacgaggacctcgaggtcgaggaggacgacgcggagaacctgctccaggccctggagaaggagctcctgcgccgccgcttcggcccggccgtccgcctcgaggtcgcctccgacatcgaccagaaggtgcgcgagctgctggtccgcgagctgggcgtgcacgagcaggaggtctacgagctccccgagcccctcgacctgcgcgggctcggcgacatcgccgacctcgaccgcccggagctgaagttccccaagtccgtcgcgcgcacccaccgcgacctcaccgacggcgccgagacggccaagccctccgacgtgttcgcggccatccgcaaccgcgacgtgctgctgcaccacccctacgactccttctccacgagcgtgcaggcgttcctggagcaggccgcggcggacccgaaggtcctggccatcaagcagacgctgtaccggacctcgggcgactcccccatcgtcgacgccctcatcgacgccgccgaggccggcaagcaggtcctcgcgctggtcgagatcaaggcccgcttcgacgagcaggccaacatcacctgggcccgcaagctggagcaggccggcgtgcacgtcgtctatggcctggtggggctgaagacgcacgcgaagctgagcctggtggtgcgccaggagtccggcgggctgcgccgctactgccacatcggcacgggcaactacaaccccaagaccgcgcgggtctacgaggacatggggctgctcaccgccgacccgcaggtcggcgaggacctgacccgcctgttcaaccagctctccggctacgcgcccaagaccgcctacaagcggctgctggtcgcgccgcgctcgctgcggaccgggctggtggaccgcatcgaccgcgagatcgagaaccaccgccagggccagccctccggggtccggatcaaggtgaactcgatcgtcgacgagggcgtcatcgacgcgctgtatcgcgcctcggcggcgggcgtgcccgtcgacgtgatcgtccgcgggatctgcgccctcaagccgggggtgcccgggctgagcgagaacatccgcgtccgcagcatcctgggccggttcctcgagcacagccggatcttctggttcgcctccggcggcgaccccgtcgccatgatcggcagcgcggacatgatgcaccgcaacctggaccgccgcgtcgaggccgtcgtgcggctcaacgacccgcggcacgtgcgcgaggtctcgcagctgctcgaccagtgcatggccgacaccacgagctcgtggcacctgggcgcggacgggacgtggacgcgccaccaccgcgacgccgacggggccccgctgacggacctgcaggagcacatcatcgccacccgcccgggtcggcgcccgagctcgcgccgccgccggtga

SEQ ID NO: 49979 - protein, 721 aa, Kineococcus radiotolerans SRS30216
MTATTRATAPLPAVSPVEEPTELPEDRFADREVSWLAFNERVLQLAEDPDVHLLERARYLSIFANNLDEFFMVRVAGLKRRIATGLAVTAASGLEPRQVLDAIAVRAHELTERHAAAFLGSVRPALAEAGITIVRWDELSPGEQVRLHGFFRDMVFPVLTPLAVDPAHPFPYISGLSLNLAVVVRNPTTDKEHFARVKVPPLLPRFVAVEPAEGEDPRDARFVPLEDVVGVHLDQLFPGMEVVQHHTFRVTRNEDLEVEEDDAENLLQALEKELLRRRFGPAVRLEVASDIDQKVRELLVRELGVHEQEVYELPEPLDLRGLGDIADLDRPELKFPKSVARTHRDLTDGAETAKPSDVFAAIRNRDVLLHHPYDSFSTSVQAFLEQAAADPKVLAIKQTLYRTSGDSPIVDALIDAAEAGKQVLALVEIKARFDEQANITWARKLEQAGVHVVYGLVGLKTHAKLSLVVRQESGGLRRYCHIGTGNYNPKTARVYEDMGLLTADPQVGEDLTRLFNQLSGYAPKTAYKRLLVAPRSLRTGLVDRIDREIENHRQGQPSGVRIKVNSIVDEGVIDALYRASAAGVPVDVIVRGICALKPGVPGLSENIRVRSILGRFLEHSRIFWFASGGDPVAMIGSADMMHRNLDRRVEAVVRLNDPRHVREVSQLLDQCMADTTSSWHLGADGTWTRHHRDADGAPLTDLQEHIIATRPGRRPSSRRRR

SEQ ID NO: 49980 - DNA, 2163 bp, Xylella fastidiosa Dixon
  CDS (1)..(2163): transl_table=11
gtggcctcactgttgttccttcctacttatatttctttcctagtctctttcgtctcaagacgttctatgtctaaatcttctcccattgaacctgtttcagcatctgatgtcagccagcagttccgtgatcctgggctgtatttgaacagggagctatcacagctcgacttcaattttcgagtgttggcacaggcattggatgagcaggtgccgttgttagagcggttgcgcttcctgtgtatttcttgcacgaatctggatgaattcttcgaaatccgtgttgctaccgtgcgccatgctcaggaattcggtttgccgccagcgcctgatgggatgaggccgacggtaatcctcaacgctgttcacgacctgacaaccaaactcgtccatgatcagtacaactgctggaaccaagtgctgtgtccggcacttgcggcccttggagtgggtgtactgagtcataacagttggaacgtgcgtcagaaacgttggctacgtggttactttcgcaacgaaatcatgccggtgttatcgccacttggtttagatcctgcgcatccatttccgaaaatattcaataaaaccttaaatatcgtggtggtgcttaacggtattgatgcttttggtcgtgctggtcatttggctatcgtgcgtgccccgcgttcgttgccgcgtattatcgagttgccccaacatctgtccagagatggttctcaaaacttcgtcttcttgtcctcagtactgtctgcttttgtcggtgagttgtttcctggcatggtggtcaagggggcttatcaatttcgggttactcgtaattctgaattggtggtggatgaggatgaagtcgagaatctggcgctggcgttgcgtaatgaattggtgacccgcggttatcgtcttgcagtcaggctagagatcgctgaggactgcccaatcccgattgtgcgtacattactgcagaattttgggttgcaagaaaacgctgtatatcggattaacggtcctgtcaatctgagccgagtgagtcaggtctatgacatggtgttgcgtccggaactgaaatatcccccgttcaatccacgcacggtgcgtaacagtgatcacattttcgagatcattgccaagggggatgtgttgttgtaccacccctacgacgcttttaccgcagtccttgatttgctgcgtcaggcggcggctgacccggatgtactggccatcaaacaaaccctctaccgtaccggcaaggattccaccatcgttgatgcgctgatccaagccgcacgtagtggcaaggatgtcactgtggtggttgagttgcgcgcgcgttttgacgaggaagccaacctcggtttggccgataagctgcaggaggctggggtacaagtggtctatggtgtggttggttacaagacccacgccaagatgttgctgattgtacgccgtgagggccgcaaactacgtcgctacgtgcatttgggcactggcaactaccatagtggtacggcacggatatataccgatttgagtttgatgacggctaatgcggcgatcggtaaagatgtgcatcaactatttctgcaattgtctggattagcacccaaaatgaagctggagtgcttattgcagtccccattcaccctgcatgcaggggtgttgttccggatcgaacgtgagaccacgttcgcccggaaggggcgccctgcccgcatcgttgccaagatgaatgcgctgaatgagccacaggtcgtacgcgcactgtacgtcgcctcgcaggcgggtgtgcaaattgatctgattgtgcgtggggcttgcacgttgcggcctggtgtgcagggtatatccgaaaacatccgcgtgcgttcaatcgtcggccgctttttggagcacagccgggtgtattggtttgctaataacggtacgcctgaactgttctgcgccagcgccgattggttagagcgcaatttgctacgtcgggtcgagatctgtttcccgatcttgaatccggatttggcgaaacgtatttattctgatgttttacagagttacttggatgacaacctcaatgcttgggaattggggagtgatggcgtttaccggaaactgctccccgagacagatcatgcgccatactcggcccaggcggctctactggagtctttatag

SEQ ID NO: 49981 - protein, 720 aa, Xylella fastidiosa Dixon
MASLLFLPTYISFLVSFVSRRSMSKSSPIEPVSASDVSQQFRDPGLYLNRELSQLDFNFRVLAQALDEQVPLLERLRFLCISCTNLDEFFEIRVATVRHAQEFGLPPAPDGMRPTVILNAVHDLTTKLVHDQYNCWNQVLCPALAALGVGVLSHNSWNVRQKRWLRGYFRNEIMPVLSPLGLDPAHPFPKIFNKTLNIVVVLNGIDAFGRAGHLAIVRAPRSLPRIIELPQHLSRDGSQNFVFLSSVLSAFVGELFPGMVVKGAYQFRVTRNSELVVDEDEVENLALALRNELVTRGYRLAVRLEIAEDCPIPIVRTLLQNFGLQENAVYRINGPVNLSRVSQVYDMVLRPELKYPPFNPRTVRNSDHIFEIIAKGDVLLYHPYDAFTAVLDLLRQAAADPDVLAIKQTLYRTGKDSTIVDALIQAARSGKDVTVVVELRARFDEEANLGLADKLQEAGVQVVYGVVGYKTHAKMLLIVRREGRKLRRYVHLGTGNYHSGTARIYTDLSLMTANAAIGKDVHQLFLQLSGLAPKMKLECLLQSPFTLHAGVLFRIERETTFARKGRPARIVAKMNALNEPQVVRALYVASQAGVQIDLIVRGACTLRPGVQGISENIRVRSIVGRFLEHSRVYWFANNGTPELFCASADWLERNLLRRVEICFPILNPDLAKRIYSDVLQSYLDDNLNAWELGSDGVYRKLLPETDHAPYSAQAALLESL

SEQ ID NO: 49982 - DNA, 2103 bp, Croceibacter atlanticus HTCC2559
  CDS (1)..(2103): transl_table=11
atgcacgataaccaatatgtaaaccgggaattaagctggttacaatttaatgcccgagttttacaggaagcagcagatataaaagtacccttaatagagcgcttaagatttataggaattttttcaaacaacttagacgaattctttaaggtaagatacgctacaataaagcgaatagacttagctggcaaaggtgctaaaagcattttgggaggtataaaagcttcagatttattagagaaaataaccaaaattgttattgagcagcaaaccgagagcttaacaatacttaaagctattcagaaggaaatggcagaggaaaatattcttttcctaaatgaaactaacttgtctgaagagcaacaactatggtgtaaaaattactttctacaaaaagtaagtcctgcattagttaccatagtattaaatgatctggttgaacttcctagacttaaagatacagctgcatacctagctgtaaagatggttatgaatgaggttgaagaacctaagggcataaaaaaaattataggaaaaccacagcgtgaaaaaaaatatatactaattgaaatccctaaagatatagagcgctttgttgttatgccagagaaagatggtaaacaacaaattataattctagacgatttaattagggcgaatcttcaaaccatatttaacatctttaattttgaaagtatcactgcgcatatgattaaaattaccagagatgcagagctggatatggatagtgatttgagtaaaagtttcatcgagaaaatatcattaagtgttaaggatagagtagaaggagatcctgtacgctttgtgtatgataagaagataggaaaagatacgcttaccttcttaatgaatatgatgggtatagacaataatgatagtataattcctggtggtcgttaccacaataggagagactatatgagttttcctagtttaagtgaaggtaagtatctgtatgaaaaagtagaacctttgcctatagcaaattttaatattcagggaagtttgttaaaacagatatcagagaaagatgtgctgcaatatgcaccatatcacacattttcatatacagttaaatttttaagagaagctgctttagatccaactgtaagatctgtaaagattacaatatataggttggctaagatatctcatattgccagctcattaattaatgcagttaaaaacggtaaaaaagtaacagtacaaattgaattgcaagcacgttttgatgaagctgcaaacattaagtatgccgagcaaatgcagcgtgaaggtgtaaagttgatttttggtgttacaggcctaaaagtgcactgtaaagcttgtgtgattgaacgtgaggaaaaagatggtatgaaacgctacggctttataagtactggtaactttaatgaatctactgcaaggatttatacagattatacattgtttactgccaatcaaaaaattcttaaagaggtaaataaagtatttaacttctttgagataaactacaaggttagcaggtataaacatttattggtaagtcctcattatacaaggtctggattgctaaaattaattcagaatgaaataaatcttgcaaggttaggcaagcctgcagaaataaaaatgaagctaaacagcctttgtgattacccaatgattgataaactttatgaagcaagcagagctggcgtaaaaataaagttaattattagaggtattaacagtctaattcctggcgtggaaggtatgagtgagaatatagaagccataagcattatcgataaatttttagaacatcctagattatatatctttggaaaaggaagtgattctaaaatctatatttcttcagcagatttaatgtcgagaaacttagataacagagtcgagatttcttgtcctatttatgacgaagatattaaacaagagctgttagatactttcgatatatgttggagtgacaatgtaaaagcacgcgtgttttcagcaaaagaagacaacgcctataaaaaagcaataggtcctaaaattagaagtcagttcaagacttacgagtattatcttaataaaaataaaagcttaaatatatag

SEQ ID NO: 49983 - protein, 700 aa, Croceibacter atlanticus HTCC2559
MHDNQYVNRELSWLQFNARVLQEAADIKVPLIERLRFIGIFSNNLDEFFKVRYATIKRIDLAGKGAKSILGGIKASDLLEKITKIVIEQQTESLTILKAIQKEMAEENILFLNETNLSEEQQLWCKNYFLQKVSPALVTIVLNDLVELPRLKDTAAYLAVKMVMNEVEEPKGIKKIIGKPQREKKYILIEIPKDIERFVVMPEKDGKQQIIILDDLIRANLQTIFNIFNFESITAHMIKITRDAELDMDSDLSKSFIEKISLSVKDRVEGDPVRFVYDKKIGKDTLTFLMNMMGIDNNDSIIPGGRYHNRRDYMSFPSLSEGKYLYEKVEPLPIANFNIQGSLLKQISEKDVLQYAPYHTFSYTVKFLREAALDPTVRSVKITIYRLAKISHIASSLINAVKNGKKVTVQIELQARFDEAANIKYAEQMQREGVKLIFGVTGLKVHCKACVIEREEKDGMKRYGFISTGNFNESTARIYTDYTLFTANQKILKEVNKVFNFFEINYKVSRYKHLLVSPHYTRSGLLKLIQNEINLARLGKPAEIKMKLNSLCDYPMIDKLYEASRAGVKIKLIIRGINSLIPGVEGMSENIEAISIIDKFLEHPRLYIFGKGSDSKIYISSADLMSRNLDNRVEISCPIYDEDIKQELLDTFDICWSDNVKARVFSAKEDNAYKKAIGPKIRSQFKTYEYYLNKNKSLNI

SEQ ID NO: 49984 - DNA, 2196 bp, Sulfitobacter sp. EE-36
  CDS (1)..(2196): transl_table=11
atgcaacgccataaggccgtcatgacaaacgctgactttctcgaatccgccttcgttccgccgcaggatatgcccgatctggatatcaccggccccggtcgtttctataaccgcgagctcagctggctcgggttcaactggcgtgttctcgaagaggccaagaacccccgcgtgccgctgctggaacgcctgcgcttcctgtcgatctcggcgggcaacctcgacgaattctataccgtgcgtgttgcgggcctgcgcgagctggctcaggccggcaacaccacccccgccagcgacgggctgacccctgcccagcaattggtgctgatcaacgaagacgcgcgcaagctgatgaccgaacaacagcgcgtactggtcgatctgatgtccgagatggacgaccagaatatcatgctcgaacgcgccgctgatctggacgaggccgatctggcctatcttgacgatgtattcctgcaccgcgtttttgcggttctgaccccgctggcgattgaccccgcgcaccccttccccttcatccccaacaccggctacgcgctggcgctgcaactggaacgcaccagcgacaaacgcccccttcaggcgctgctgccgatcccggcgcagatcgaccgtttcgtcgccctgcccgccgccgaagggtcgctgcggttcctgccgcttgaagatctgctggtgctcaaggtgccggggctgtttccgggctacaagctcaaggcgcatttcgaattccgcgtgctgcgcgacagcgatcttgaggtcgaggaagaggccgaagacctagtacgcgaattcgaggtcgccctgaaacgccgccgccgcggcgaggtcgtgcgcctgacccattccgccggtgcccccgaaaagctgaaatccgtggtcatggccgaactgggcgtgcgcccgcaggatgtgatcgaactggacgggatgatcggcatcaacgacctgtccgaactggtgaccgacagccgccccgatctgctctggccgcaattcaccccgcgcatccccgaacgcgtgaccgaccacgaaggcgatatgttcgccgcgatccggtccaaggacatgctgctgcaccacccctacgagaccttcgatatggtggtccgctttctggcacaggccgcacgcgatcccgatgtggtggcgatcaaacagacgctctaccgcacctcgcgcgacagccccattgtcgaggcgctgtgcgaagccgccgaagacgggaaatccgtcaccgcgctggtcgagctcaaggcgcgtttcgacgaggctgccaacatccgccagtcacgccggctggaacgcgcaggcgcacatgtcgtctatgggtttctcgatctcaagacccacgcaaaaatctcgaccgtggtgcgccgcgagggcgatcaactggtcacctatacccactatggcaccggcaactatcacccgatcaccgcacgcatttataccgatctgtcgctgttcacctgtgaccagaagctgggccgcgacgcgaccaaagtgttcaactacctgtccggctacgcgcaacccgacacgctggacaacctcgccatctcgcccatctcgttgaagccgcgcctgctggcgatgatcgccgccgaggccgaccatgccgccgctggcaaaccggcagagatctgggccaagatgaactccatcgtggatgcggatgtgatcgacgcgctttacgccgcgagccaggcaggggtgaagatcagcctggtgatccgcggcatctgcgggttgcgccccggtatcaaggggctatcggaaaacatccgcgtaaaatccatcgtcgggcgctttctggagcattcacgcatcgtctgctttggcaatggctacgggctgccgcataagaaatcgcgggtcttcatgtcctccgccgactggatgggccgcaacctgacccgccgcgtcgaaaccctggtcgagatcgagaaccccaccgtcaaggcgcaaatcaccagtcaggtcatggcggccaatcttgcggatgtggcgcaaagctgggtcatgtcccccgatggcagctttgcccgccccgagattgcagaaggcaccttcgccttcaactgccaccgcttcttcatggagaacccctctctctccgggcgtggcacggcgggcgcatccgacgtcccgaaactgacccataccgaagactaa

SEQ ID NO: 49985 - protein, 731 aa, Sulfitobacter sp. EE-36
MQRHKAVMTNADFLESAFVPPQDMPDLDITGPGRFYNRELSWLGFNWRVLEEAKNPRVPLLERLRFLSISAGNLDEFYTVRVAGLRELAQAGNTTPASDGLTPAQQLVLINEDARKLMTEQQRVLVDLMSEMDDQNIMLERAADLDEADLAYLDDVFLHRVFAVLTPLAIDPAHPFPFIPNTGYALALQLERTSDKRPLQALLPIPAQIDRFVALPAAEGSLRFLPLEDLLVLKVPGLFPGYKLKAHFEFRVLRDSDLEVEEEAEDLVREFEVALKRRRRGEVVRLTHSAGAPEKLKSVVMAELGVRPQDVIELDGMIGINDLSELVTDSRPDLLWPQFTPRIPERVTDHEGDMFAAIRSKDMLLHHPYETFDMVVRFLAQAARDPDVVAIKQTLYRTSRDSPIVEALCEAAEDGKSVTALVELKARFDEAANIRQSRRLERAGAHVVYGFLDLKTHAKISTVVRREGDQLVTYTHYGTGNYHPITARIYTDLSLFTCDQKLGRDATKVFNYLSGYAQPDTLDNLAISPISLKPRLLAMIAAEADHAAAGKPAEIWAKMNSIVDADVIDALYAASQAGVKISLVIRGICGLRPGIKGLSENIRVKSIVGRFLEHSRIVCFGNGYGLPHKKSRVFMSSADWMGRNLTRRVETLVEIENPTVKAQITSQVMAANLADVAQSWVMSPDGSFARPEIAEGTFAFNCHRFFMENPSLSGRGTAGASDVPKLTHTED

SEQ ID NO: 49986 - DNA, 2193 bp, Roseovarius nubinhibens ISM
  CDS (1)..(2193): transl_table=11
atgcggtacaaggcggccatgacctacgcagactttctcaaatccccgtttccgcccgcccaggagcttcccgagcttgacctctccggacccggccgtttcttcaatcgtgaactgagctggctcggcttcaactggcgggtcctcgaagaggcgcgcaaccccaaggtgccgcttctggaacggctgcgctttctgtcgatctcggccaccaacctggacgagttctacaacgtgcgcgtcgcgggtctgcgcgaactggcccaggctggcaacaccacccccgccgccgatgggctgacgcccgccgaacagttggtgctcatcgacgaagacgcccgcaacctgatgaacgaacagcatcagacctatgaggcgctgcaaaaggaaatggaagccgaggacatccatatcctcaacagctcgatgctcgacgccgaggacaaggcctatctcgacgaggtctttctcaatcaggtcttcccggtgctgtcgccgctggccatcgatccggcgcatcccttccccttcattcccaaccttggcttttcgctggccctgcaattgcgccgccgcgccgacaagaaagagctcaaggcgctgctgccgatcccgcagcagatcgaccgctttgtcgccctcgcgccgcgcaatggtgcggtgcgcttcctgccgctcgaagagctggtgctggtccatctcgacagcctcttcccgggctatgcctatagcggccactgcgcctttcaggtgctgcgcgacagcgatctcgaggtcgaggaagaggccgaggatctggtgcgcgaattcgaagtggcgctcaaacgccgtcgccgtggcgaggtggtgcggctcaagatttccaccgacgcccccgacgatctgcgcaagctcgtgatgaacgagctgcacgtcaatgccgatgaactggtcgcggtgaacgggcttcttggcctcgccgatctcaaggagctggtgctcgacaaccgccccgacctgctctggccgcccttcaccccgcgcgtgccggaacgggtgcaggaccacgacggcgacatgttcgccgcgatccgccaaaaggacatgctgctccaccacccctacgagaccttcgatatggtggtgcgctttctcgcgcaggcggcgcgcgatccgaacgtggtcgcgatcaaacagacgctctaccgcacctcgaacgacagccccatcgtgagcgcgctctgcgaggccgcggaaaacggcaaatccgtcaccgccctggtcgagctcaaggcgcggttcgacgaggccgccaacatccgtcagtcgcgccgtctcgaacgtgcgggcgcgcatgtggtctatgggttcctcaacctcaagacccacgccaagatcagcaccgtggtccgccgcgagggcgatcagctggtgacctatacccattacggcaccggcaattaccacccgatcaccgcccgcatctataccgacctgtcgtttttcacctgcgacacggtgctgggccgcgacgcgaccaagctcttcaactacctctcgggctatgcccagcccgaaaagctcgagaacctcgccatctcgccgatctcgctcaagccccggctgctcgagatgatcaaggccgagatcgcccatgccgaggccgggaaacccgccgaaatctgggccaagatgaactcgctgatcgaacccgatgtgatcgacgcgctctatgaggcgagccaggctggcgtgaaaatcagcctcgtcgtgcgcggcatctgcgggctgcgccccggcgtcaccggcatgagcgagaacatccgggtgaaatccatcgtcgggcgtttcctcgaacactcgcgcatcgtctgtttcggcaatggccatggcctgccgcacaagaaatcgcgcgtctatatcagctcggccgactggatgggccgcaacctcaaccggcgggtggaaaccctcgtcgagatcgagaaccccaccgtcaaggcccagatcgtcagccaggtgatggccgccaatatggccgatgtggcgcagagctgggtcatggccccggacggaagctttgcccgcgccgaaaccaccgagggcgagttcgctttcaactgccaccgtttcttcatggaaaacccgtcgctctctggtagagggtcggctggggcgtcggatgtgccgaaactgacccacacagaagattga

SEQ ID NO: 49987 - protein, 730 aa, Roseovarius nubinhibens ISM
MRYKAAMTYADFLKSPFPPAQELPELDLSGPGRFFNRELSWLGFNWRVLEEARNPKVPLLERLRFLSISATNLDEFYNVRVAGLRELAQAGNTTPAADGLTPAEQLVLIDEDARNLMNEQHQTYEALQKEMEAEDIHILNSSMLDAEDKAYLDEVFLNQVFPVLSPLAIDPAHPFPFIPNLGFSLALQLRRRADKKELKALLPIPQQIDRFVALAPRNGAVRFLPLEELVLVHLDSLFPGYAYSGHCAFQVLRDSDLEVEEEAEDLVREFEVALKRRRRGEVVRLKISTDAPDDLRKLVMNELHVNADELVAVNGLLGLADLKELVLDNRPDLLWPPFTPRVPERVQDHDGDMFAAIRQKDMLLHHPYETFDMVVRFLAQAARDPNVVAIKQTLYRTSNDSPIVSALCEAAENGKSVTALVELKARFDEAANIRQSRRLERAGAHVVYGFLNLKTHAKISTVVRREGDQLVTYTHYGTGNYHPITARIYTDLSFFTCDTVLGRDATKLFNYLSGYAQPEKLENLAISPISLKPRLLEMIKAEIAHAEAGKPAEIWAKMNSLIEPDVIDALYEASQAGVKISLVVRGICGLRPGVTGMSENIRVKSIVGRFLEHSRIVCFGNGHGLPHKKSRVYISSADWMGRNLNRRVETLVEIENPTVKAQIVSQVMAANMADVAQSWVMAPDGSFARAETTEGEFAFNCHRFFMENPSLSGRGSAGASDVPKLTHTED

SEQ ID NO: 49988 - DNA, 2175 bp, Oceanicola batsensis HTCC2597
  CDS (1)..(2175): transl_table=11
atgatcagtgccgattttctcaagtcagacctgccagaaccgcaagatcccggcgggcgcgatctggcgggccccgcgcggttcgtaaaccgcgaactcagctggctcggcttcaactggcgggtgctggaagaggccgagaaccccaaggtgccgcttctggaacggctgcgcttcctgtcgatcagcgccacgaacctggacgaattctacaccgtccgggtcgccggcctgcgcgagctgtaccgcgagggacacaagacgccggcggcggacgggctgacgcccgaggaacagcttgacctgatagacgcggatgcccggcggctgatggggcggcagcaggtgatcctggaaagcctccagcacgagatgcgcgagaacggcgttttcgtgctcaggcgggacgagctgaccgaggccgaccgcaccttcctgggcgaggtcttcctgcacagggtctttccggtgctctcgccgctggccgtcgatccggcgcacccgttcccgttcatcccgaacatgggcctgtcgctcgcgctcatgctcgagcggcggcgcgacggccggtcgctgatggccctcctgcccattccgcagcagatcgaccgcttcgtcgcccttcccagcgagcccgggctcacccgtttcctgccgctcgaagagcttctgttgctgaacatcgaccagctgtttcccggctaccggacgcagggttcctgcaccttccgcgtgctgcgcgacagcgatcttgaggtcgaggaagaggccgaggacctcgtgcgcgaattcgagaccgcgctcaagcgccgccgccggggcgaggtggtacggatgaagatctcctccgaagcgcccgaggcgctgaagtcggtcatcatgcgcgagctgcacgtgacttcgcaggaggtgatcgaggtcaccgggctgatcggaatctcggatctcagggaactggtgatcgacacccgcgccgatctgctgtggccctcattcaccccgcgcatccccgagcgggtgcaggatcacgacggcgacatgttcgccgcgatccggcagaaggacatgctgctgcatcacccctacgagacattcgacatggtggtgcgctttctccagcaggccgcgcaggacccggatgtcgtcgcgatcaagcagacgctctatcgcacctccaaggactcgcccatcgtgcaggcgctctgcgatgccgccgaagaaggcaagtcggtgacggcgctggtggagctcaaggcccggttcgacgaggcggcgaacatccggcagtcgcggcggctggaacggtcgggcgcgcatgtggtctacggcttcgtcgactggaagacccatgccaagatctcgaccgtggtccgccgcgaaggggatcacctggtcacctacacgcattacggcaccggcaactaccacccgatcacggcgcgcatctacaccgatctgagcttcttcacctgcgaccccgcgctcggccgggacgcgaccaaggtcttcaactatctctcgggctatgcccagccggagacgctcgagaacctgaagatctcgccgcaccggatgaaggatttccttctggagcagttcgaggccgaggccgagcacgcccgcgcgggacggcccgcccagatctgggccaagatgaattcgctgatcgaaccggatgtgatcgacggcctctatcgggcaagccaggcgggggtgaagatcgacctggtgatccgcggcatctgcggcatccggccgggcgtgaaggggctctccgagaacatccgcgtgaaatccatcgtcggccggttcctcgaacacagccggatcgtctgtttcggcaacggccacggactgccctccaagggatcgcgcgtcttcatctcgtcggccgactggatggggcggaacctgaaccgccgggtcgagacactggtcgagacgacgaacgcgacggtcaaggcgcagatcgtcagccagatcatggccgcgaacctggccgatcaggcgcagagctgggtcatgcggccggacggtcacttcgaacgcgccacgctttcccccggagaattcgccttcaactgccaccggttcttcatggaaaacccctcgctctcggggcgcggctcggccggggccggggacgtgccggtgctgacccacgaggcggactga

SEQ ID NO: 49989 - protein, 724 aa, Oceanicola batsensis HTCC2597
MISADFLKSDLPEPQDPGGRDLAGPARFVNRELSWLGFNWRVLEEAENPKVPLLERLRFLSISATNLDEFYTVRVAGLRELYREGHKTPAADGLTPEEQLDLIDADARRLMGRQQVILESLQHEMRENGVFVLRRDELTEADRTFLGEVFLHRVFPVLSPLAVDPAHPFPFIPNMGLSLALMLERRRDGRSLMALLPIPQQIDRFVALPSEPGLTRFLPLEELLLLNIDQLFPGYRTQGSCTFRVLRDSDLEVEEEAEDLVREFETALKRRRRGEVVRMKISSEAPEALKSVIMRELHVTSQEVIEVTGLIGISDLRELVIDTRADLLWPSFTPRIPERVQDHDGDMFAAIRQKDMLLHHPYETFDMVVRFLQQAAQDPDVVAIKQTLYRTSKDSPIVQALCDAAEEGKSVTALVELKARFDEAANIRQSRRLERSGAHVVYGFVDWKTHAKISTVVRREGDHLVTYTHYGTGNYHPITARIYTDLSFFTCDPALGRDATKVFNYLSGYAQPETLENLKISPHRMKDFLLEQFEAEAEHARAGRPAQIWAKMNSLIEPDVIDGLYRASQAGVKIDLVIRGICGIRPGVKGLSENIRVKSIVGRFLEHSRIVCFGNGHGLPSKGSRVFISSADWMGRNLNRRVETLVETTNATVKAQIVSQIMAANLADQAQSWVMRPDGHFERATLSPGEFAFNCHRFFMENPSLSGRGSAGAGDVPVLTHEAD

SEQ ID NO: 49990 - DNA, 2118 bp, Prochlorococcus marinus str. MIT 9211
  CDS (1)..(2118): transl_table=11
atgtcaaaaacaaagctaagtaaggataactatcttaatagagagttgagctggattggttttaatgaacgtgttctcgcgatagcattgaaccagaaaacacctttactagagcaagcaaaatttagtgcgatatttagtaataatctagatgagtttttcatggtaagagtcgcttctcttaagtcacaagttgaggctgggattaccaagcgaagcgaagacaatcaaacacctaaagaacagttaatcaatatcagaaaacatctagagcctcttttaaaaaaacaacaaagtcactacaaaaataatttaatcagttcctatatcaatgaaaaaatttttctacttgaatataaagacttaaatgatcgccagagaacttgggttgataactatttccaaacagctattttcccagttcttactccattagcagttgaccctgcacatccattcccgttcgtaagtaatctaagccttaacattgcggcactgattagagacccagagactggtaaagaacaatttgcacgagtaaaggtgccaggaagaaccatggataggttcataactattccaaatgatttaagtggaatagaccctaaccctatctataacgcaataccaatagagcaaatagttgcttttaatttgcacatgctctttcctggcatgaaagtagagcagcactcattttttagggttacacgagatgctgacttagaactacgagatttagaagctgatgatttaatgattgcgctcgaagagggactccgcaaacgtcgaataggaggagaagtagtgcggcttgaagtctcgaaagatataccagtcacgatattagagttactgatggaaggcatggcagttgaggaagcagatttatatcacattgatggactactaggccttgatgatcttcaggcattgctaaaaatcgatatgccagttctcaaatatccgcaacaaagagggcaaacacataagttactcaaaagtagtcaaagaggattactagaagatgggtcaattaagcaagaggagttcaagagcattttttcaattatcaaaaaacaggatttgctactccaccacccattcgacctcttctccacttctgtagaagagtttattaatcaatctgctgaagatcctcaagttatggggattaaaatgactctttatcgagtatcaaaagattcaaaaataatcgaagcgctaattagggcagctgaaaatggcaagcaggttatggcattggttgagcttaaagcccgttttgatgaagacaataatattcaatgggcaaaacaactggagaaatctggggtgcatgttgtatatggcgttctgggattaaaaacacatacaaagattgccttagttattagaaaagaaaaagagcgcttacggagttactttcatatcggtacaggtaactacaattcaaaaacatccaaactgtatacagatttaggactgctctcggtaaatcctgagcttggtcaagatttaatcgaactgtttaactatttaactggcttctctaaacaacaaacctttagaaaattattagttgcaccagttactctgaggaaaggaatggaagcattaatacgtcgagaaatcaaatttgcaaagaatggtaaaacagggaaaatacgtgcaaaaatgaattcacttgtcgatcccaacattattaatttactctacgaagcatctgaagccggagtccaaattgaactaattattcgaggaatgtgttgtttatatcctcagcgaaatgggttgagtgaaaacataaaagtaattagtgtgatcggaagatatctagaacattcaagagttttttggttccataacgatggtaattcagaagtttttataggtagtgcagattggatgcgtcgaaatttagacagaagagtagaggctgttactcccatagaggacaaaaatctaaaagaggaactatcacaactgctagatatttatctgaatgacaactgcaattcatgggaaatgaataaagatggaatattcattcaacaaaagtctcaagataaagagaagtctgctcaaaaccttttaatccatacaaataaaaagtaa

SEQ ID NO: 49991 - protein, 705 aa, Prochlorococcus marinus str. MIT 9211
MSKTKLSKDNYLNRELSWIGFNERVLAIALNQKTPLLEQAKFSAIFSNNLDEFFMVRVASLKSQVEAGITKRSEDNQTPKEQLINIRKHLEPLLKKQQSHYKNNLISSYINEKIFLLEYKDLNDRQRTWVDNYFQTAIFPVLTPLAVDPAHPFPFVSNLSLNIAALIRDPETGKEQFARVKVPGRTMDRFITIPNDLSGIDPNPIYNAIPIEQIVAFNLHMLFPGMKVEQHSFFRVTRDADLELRDLEADDLMIALEEGLRKRRIGGEVVRLEVSKDIPVTILELLMEGMAVEEADLYHIDGLLGLDDLQALLKIDMPVLKYPQQRGQTHKLLKSSQRGLLEDGSIKQEEFKSIFSIIKKQDLLLHHPFDLFSTSVEEFINQSAEDPQVMGIKMTLYRVSKDSKIIEALIRAAENGKQVMALVELKARFDEDNNIQWAKQLEKSGVHVVYGVLGLKTHTKIALVIRKEKERLRSYFHIGTGNYNSKTSKLYTDLGLLSVNPELGQDLIELFNYLTGFSKQQTFRKLLVAPVTLRKGMEALIRREIKFAKNGKTGKIRAKMNSLVDPNIINLLYEASEAGVQIELIIRGMCCLYPQRNGLSENIKVISVIGRYLEHSRVFWFHNDGNSEVFIGSADWMRRNLDRRVEAVTPIEDKNLKEELSQLLDIYLNDNCNSWEMNKDGIFIQQKSQDKEKSAQNLLIHTNKK

SEQ ID NO: 49992 - DNA, 2202 bp, Erythrobacter sp. NAP1
  CDS (1)..(2202): transl_table=11
atgagcagccagcctattaccagcgatcaaatcgtttcggcggcgtctccgccgtcggcacctcctgcgtccatcgcgcccggtggcgaggcttacttcaaccgcgaattgtcatggctggccttcaacgagagagtcctcgcagaggcatgtaacgagcgttatccgctgcttgagcggctgcggttcctgtcgatctctggcagcaaccttgatgaattcatgatgatccgcgtggcgggcctggtcggtcaggcgcagcgcgggatcgacaaaccagccatcgatggtcgcactccgacccagcaactcagcgccatacgcgaaaagctggccgaattgtccgcgcgccaacaggatatctggcgcaacctgcatgcgctgcttgccgaagccgacattcatatcgccgacgaacagcgagtgaagcccgccgctcacaagtggctcgaggcgttcttccttgaagagattcttcccgtgatcacgccgcaggcgctcgatccggcgcacccatttcctttcgtgcacaacgaaggaatgggcctgctgttcacgctgagccgcgatgcggacaaggaacagatcatggagatgatcctgatcccgaccgccttgccgcgttttgtccgggtgccgggtgacatcgccggggcaggggaggcggtctacatctcgatagcaagcctcatccagcgctacgcaaagaagctcttcccgggcttcacaatcgagggcgacggacttttccgcgtgctgcgcgacagcgatatcgagatcgaggaagaagccgaagacctcgtgcgcaccttccgcagcgccatccagcgccgtcggcgcgggcaagtgatccagcttgagctggaagaggacttcgatccgcagggcgaggaaatcctactccagcagcttggcgtgcacgaggccgccgtcatcaagaccgacgggatgatcggtatcgacggccttgccgagattgtcgatgaagaccggcccgatctcaagttcgacgcctattcaccgcgctatccagagcgcattcgcgaacatgatggagatgccttctccgccattcgcgagaaagacatcgtcattcaccacccctacgaaagcttcgaagtggtggtcgatttcattcggcaggcggctgccgatccggatgtcgtcgcgatcaagcagacgctttaccgtgcagggtctcagtccgccgtcatcagcgcgctgatcgaggcggcggagaacggcaagtcggtaactgcggtggtcgaactgaaagcccgcttcgatgaggaacagaacctcaaatgggcgactaagctggagcgtgccggggtgcaggtcatctatggcttcaccgactggaaaacccacgccaaggttgcgatggtggtgcggcgcgaggagagcggttttcgcacatactgccactttgggaccgggaattatcacccgatcacggccaaaatctacaccgacatgagcttcttcaccgccgatcccaaactgggtcgcgatgcggcgaagatgatgaatttcgtcactggttatgtcgaaccgcatggccttgaaatgatctcgatcgcgccgctcgacttgcgcgaagagatctacgagcgcatcgacgccgagatcgctaacgctcgcaagggcaagccagccgcgatctggatgaagtgcaaccagatcacggacgaaggcatgatcgaccgcctctacgccgccagcaatgcaggagttcgcgtggaactggtggtgcgcggcatttgctgcctgcgcccgggagtcgagggcctttcggagaacatcagggtcaaatcgatcatcggacgctttcttgagcattcgcgcatctacgcctttgcgaacggccgcgcgatgccggggccaaatgcacgagtttacatctcttcggccgatctgatgggccgcaacctcgatcgccgtgtagaatcgcttattccgattaccaaccggaccgtacatgaccagattctacagcaggtgctgctcgccaacatgctcgacaccgagcaaagctggtggctccatgccgatggcagctattcgcgggttgagaccgacgggaagccgttcaattgccaccgctactttatgaccaacccctctctgtcagggcgcgggggcgccttggaggcgggagcggtgcctaagctcagcttgcgccggggacgtgctggatga

SEQ ID NO: 49993 - protein, 733 aa, Erythrobacter sp. NAP1
MSSQPITSDQIVSAASPPSAPPASIAPGGEAYFNRELSWLAFNERVLAEACNERYPLLERLRFLSISGSNLDEFMMIRVAGLVGQAQRGIDKPAIDGRTPTQQLSAIREKLAELSARQQDIWRNLHALLAEADIHIADEQRVKPAAHKWLEAFFLEEILPVITPQALDPAHPFPFVHNEGMGLLFTLSRDADKEQIMEMILIPTALPRFVRVPGDIAGAGEAVYISIASLIQRYAKKLFPGFTIEGDGLFRVLRDSDIEIEEEAEDLVRTFRSAIQRRRRGQVIQLELEEDFDPQGEEILLQQLGVHEAAVIKTDGMIGIDGLAEIVDEDRPDLKFDAYSPRYPERIREHDGDAFSAIREKDIVIHHPYESFEVVVDFIRQAAADPDVVAIKQTLYRAGSQSAVISALIEAAENGKSVTAVVELKARFDEEQNLKWATKLERAGVQVIYGFTDWKTHAKVAMVVRREESGFRTYCHFGTGNYHPITAKIYTDMSFFTADPKLGRDAAKMMNFVTGYVEPHGLEMISIAPLDLREEIYERIDAEIANARKGKPAAIWMKCNQITDEGMIDRLYAASNAGVRVELVVRGICCLRPGVEGLSENIRVKSIIGRFLEHSRIYAFANGRAMPGPNARVYISSADLMGRNLDRRVESLIPITNRTVHDQILQQVLLANMLDTEQSWWLHADGSYSRVETDGKPFNCHRYFMTNPSLSGRGGALEAGAVPKLSLRRGRAG

SEQ ID NO: 49994 - DNA, 2139 bp, Synechococcus sp. WH 7805
  CDS (1)..(2139): transl_table=11
atgagtgacaaagtgctttcccccgatctctacatcaaccgggagctcagctggatcgcgttcaacgaaagggttctcgttcaggcattggacgagcggacaccgctgctggaacaagcgaaattcagcgccattttcagcaacaacctcgatgaattcttcatggtgagggtggcctccctgaaggcccaggttgaagcaggcatcgaaaaactcagcgaagacggacacacacccatcgagcagctccacgcgatccgcgagcacctcaccccactgctgcacaaacaacaggagcattaccgctcccgcctgaagatccagcttctcgagcatggtgcccatctgctggattacgaacagctcaacgaacgtcaacggctctgggttgacaactacttccagacagcgatctttcctgtcctcacccccctggccgttgatccggctcatcccttcccgttcgtgagcaatctgagcctgaatgtggcagctctgatccacgacccccaaagcggtcaacgtcagctcgcccgggtcaaggtgcctcagaagatcctgccccgcttcgtcaccattcccgccgatctcgccagcggtgactgtgaaccgcttcacaccgccgtgccgctggagcaggtggtggcgttcaacctgagcttgctcttccctggcatgtccatcgaaggacactatttcttccgagtcacccgcgatgcggacttggaattgagggatctcgaggccgatgacctcatgatcgccattgagcagggcttgcgcaaacgccgaatgggcggcgaggtcgtgcgcctggaggttgccgatgaaatgccccaggacgtggtcgagatgctgatggagggaatgtccgttgaggaggaggacctctacagaattgatggcccccttggcctggatgacctcttcgccctgatggcgattcctcttccgcaactcaaggatgaaagccactcaggactgactcccgccatcctcgggcgtgcccagcgaagcatgttggaggacggctccctcaaagaagaggagttcgaaagcattttttcggtggtgcgacgccgcgacgttctgctgcaccatccctacgacctgttttccacatccgtggaggaattcatcaaccaggcggccgacgatccactggtgatgggcatcaagatgaccctctatcgcacctccaaggattcaccgatcatcgccgcattgattcgtgccgccgagaacggaaaacaggtcatggccctggtggaactcaaggcccgcttcgatgaagacaacaacattcaatgggcgaagcacctggaacgttccggcgttcatgttgtttatggagttctgggtctcaagacccacaccaaaatcgttctggtggtccgtaaggagaaagaacgactgcggagttacgtgcatattggaacaggaaattacaactccaaaacctcacggctctatacagacctcggtcttctctccgcgcgacctgagctgggccaagacctcgtggagctgttcaattacctcactggtttctccaaacaacaagggttccgcaagcttcttgtcgctcccgtttccctgcgtaagggaatggagaatctgatccgcagagagatcgaacatgcccagcagggtcggggaggccacatccgagccaaaatgaactccctagtggatcctggaatcattgccctgctgtatgaagcctcacaagcaggcgtcacgatcgaattgatcatccgcggaatgtgctgcctctaccctggccgcaaaggactcagtgaatccatccacgtggtcagcatcatcggccgcttcctggaacactcacgcatcttctggtttgggaacggcggtagccctgaggtcttcatcggcagtgctgactggatgccccgcaacctggaccgacgtgtggaagcggtcaccccgatcgaagagccggcattgcgcgaacaactcgaacgactgctacaggtgtatctcgatgacaaccgcggagcttttgatatgcaaagcaacggtgatttcacgcaacgacatcccgaggacatcgagagaaattcccaacttcaactcatcgaaacctggaagaaaggcgttcccgcctcggatgactga

SEQ ID NO: 49995 - protein, 712 aa, Synechococcus sp. WH 7805
MSDKVLSPDLYINRELSWIAFNERVLVQALDERTPLLEQAKFSAIFSNNLDEFFMVRVASLKAQVEAGIEKLSEDGHTPIEQLHAIREHLTPLLHKQQEHYRSRLKIQLLEHGAHLLDYEQLNERQRLWVDNYFQTAIFPVLTPLAVDPAHPFPFVSNLSLNVAALIHDPQSGQRQLARVKVPQKILPRFVTIPADLASGDCEPLHTAVPLEQVVAFNLSLLFPGMSIEGHYFFRVTRDADLELRDLEADDLMIAIEQGLRKRRMGGEVVRLEVADEMPQDVVEMLMEGMSVEEEDLYRIDGPLGLDDLFALMAIPLPQLKDESHSGLTPAILGRAQRSMLEDGSLKEEEFESIFSVVRRRDVLLHHPYDLFSTSVEEFINQAADDPLVMGIKMTLYRTSKDSPIIAALIRAAENGKQVMALVELKARFDEDNNIQWAKHLERSGVHVVYGVLGLKTHTKIVLVVRKEKERLRSYVHIGTGNYNSKTSRLYTDLGLLSARPELGQDLVELFNYLTGFSKQQGFRKLLVAPVSLRKGMENLIRREIEHAQQGRGGHIRAKMNSLVDPGIIALLYEASQAGVTIELIIRGMCCLYPGRKGLSESIHVVSIIGRFLEHSRIFWFGNGGSPEVFIGSADWMPRNLDRRVEAVTPIEEPALREQLERLLQVYLDDNRGAFDMQSNGDFTQRHPEDIERNSQLQLIETWKKGVPASDD

SEQ ID NO: 49996 - DNA, 2103 bp, Photobacterium sp. SKA34
  CDS (1)..(2103): transl_table=11
atgactaccgaaaatctatatatagaaaaagagctaagttggctctcttttaacgaacgagtgttacaagaagcagcagataagtctgttccactcattgaacgagtacgatttctcggtattttttccagcaatacagatgagttctacaaagtgcgctttgctgatgtgaagcgccagatcttaattcatgaagaacaaggtggtattgatcaagccaagcaattattgagtaagatccaaagtcgagtactaaagttaaatcaagattttgacacgctatacaatgaaatattgttagaaatggcgcgccgtcatatatttttagtcaatgaattacagttagaagactgccagaaagcgtggttaaaacattatttccaacacgccatattgcctcatgttacccctattttacttactgacgatgtcgacatactgcaagtcctcaaggatgaatgctcctatctagccgtcgctatgactaaaaaccgtgagacacattatgcgttaatagagatcccaaccgatcaactgcctcgttttgttcaattgccaaaaactaaggggaaacgccataaaacccttattttgcttgataatattattcgactttgtatcgatgatttattcaacggcttttttgaatatgacgatcttaccgtatttgcgatgaaaatgacccgtgatgcagaatacgatctcagccaagaagttgaacacagcttgctagaacaaatgtcagaagggttaaatcaacgcctaactgccatgcctgtacgctttgtatatcaacgcgatatgcccggtgacatgatcaatgtgttgtgcaataaactccaagtatcaagctatgacagtgtgatccccggtggccgttatcacaattttaaagactttattggtttccctaatgtcggtagaagctatttagagaacaaagatctcccgccaattaaaagctatcaattcacatcagctcgtaatgcctttgatgctataaaagcgcaagatatattattgtattacccgtaccacacctttagtcatataacagagttggtacgacaagcctcttacgatcccaaagttcgtagcattaaaatcaatatttatcgtgtcgctaaaaattcgcgcattattgaatctatgattgatgcagccaacaacggtaagaatgtaaccgtcgttgttgagctgcaagcgcgctttgatgaagaagccaatattgaatgggcgagatgcctcacagaggctggggtaaacgttatttttggtgtgccggggttaaaaattcactctaaactttgcttaataacccgtaaagagtcaggcgaactggttcgatatgcgcatatcggtacggggaactttaatgaaaaaaccgcccgaatttataccgacttttcactgctaacctgtgataaatccattaccgatgaagtaaaacaagtctttgcttatattgcgaacccatatcgcaccgttgaatttaaccatttaatcgtctctcctcgtaactctcgttctcggctgtatgaactaattgatagagaaatagctcacgccaagcaaaagttaccatcaggtattacacttaaggtcaataacctcgtcgatagaggcttgattaatatgctatatcaagccagtaataacggtgtgaaaatcaaattaattattcgaggtatgtgctcattaatccccggcattaaagggatcagtgacaacattactgcgatcagtattatcgacagatttctagagcaccctcgcgtcgcggtatttgaaaataatggtgataatgacgtttatatttcatctgctgattggatgagccgtaatattgataaccgtattgaagttgggtgccctattaattcaccggtgttaaaacaacgaattatcgatattctcaatatccagctttgcgataccgtcaaagcacgcactatcgatgaaggcatgcataaccattatgtaccgcgaggcaatagacgcaaaattcgctcacaaacggccatttatgattatctgaaacacagcgagaagaatctgaaaaagcacgctgaaaaaacagagaaatacgatgacaaaaactaa

SEQ ID NO: 49997 - protein, 700 aa, Photobacterium sp. SKA34
MTTENLYIEKELSWLSFNERVLQEAADKSVPLIERVRFLGIFSSNTDEFYKVRFADVKRQILIHEEQGGIDQAKQLLSKIQSRVLKLNQDFDTLYNEILLEMARRHIFLVNELQLEDCQKAWLKHYFQHAILPHVTPILLTDDVDILQVLKDECSYLAVAMTKNRETHYALIEIPTDQLPRFVQLPKTKGKRHKTLILLDNIIRLCIDDLFNGFFEYDDLTVFAMKMTRDAEYDLSQEVEHSLLEQMSEGLNQRLTAMPVRFVYQRDMPGDMINVLCNKLQVSSYDSVIPGGRYHNFKDFIGFPNVGRSYLENKDLPPIKSYQFTSARNAFDAIKAQDILLYYPYHTFSHITELVRQASYDPKVRSIKINIYRVAKNSRIIESMIDAANNGKNVTVVVELQARFDEEANIEWARCLTEAGVNVIFGVPGLKIHSKLCLITRKESGELVRYAHIGTGNFNEKTARIYTDFSLLTCDKSITDEVKQVFAYIANPYRTVEFNHLIVSPRNSRSRLYELIDREIAHAKQKLPSGITLKVNNLVDRGLINMLYQASNNGVKIKLIIRGMCSLIPGIKGISDNITAISIIDRFLEHPRVAVFENNGDNDVYISSADWMSRNIDNRIEVGCPINSPVLKQRIIDILNIQLCDTVKARTIDEGMHNHYVPRGNRRKIRSQTAIYDYLKHSEKNLKKHAEKTEKYDDKN

SEQ ID NO: 49998 - DNA, 2151 bp, Oceanospirillum sp. MED92
  CDS (1)..(2151): transl_table=11
atggttgagatggtagagcagagcgaagctgcggcggcgttgttggaaagtcgtgaaagtgtagcaatcactgagcaggaagttgaagaaacgccggttgatcttaaagtgcccgagctctatatcaaccgagagttgagccatctacagttcaacatccgtgttctggagcaggcgctggaagagaaccatccgctattggaaagattgatgttcctgttgatcttctccagtaacctggatgagtttttcgagatccgtgttgctgagcagatgacccagctgaaatatggccgtgaggctgtaggaccggatgcgatgcatcctcgtaccgtgttggagcgtattagtgagatctgccatctgaccgttgatcgtcagtacaaaatccttaacgaaacgatcttccctgaactgcaaaaagagaatattcatttcatccgccgccgcctttggactccggagcagcgtgagtgggtacagacctatttccatgaaaaagtagtgccggtgatcagcccggtagggctggatccttcacaccccttcccgcgtctggttaacaagagtcttaacttcattgttgagttagatggtaaggatgcgtttggccgtgaaacaggcatggcgattatcccggcacctcgctcattgcctcgcctgatccgtctgccggatgagctgtgtgatggtggagataacctgatcttcctgtcgtcgatcatccatgagtttgctgatgagcttttcccagggatgacggtggaaggttgttatcagttccgtatcacccgtaatgccgatatgacctttgatatggaagaggttgaggatttggcaaataccttacgtggtgagctgcattcccgtaagtacggtgatgctgttcgtctggaggttgatcagcgtacccctgaagagctaatcgagttcttgcagaaagagtataagctggatgaatcacagacttatcgcgttgatggtccggtcaacctgacccgtctgatggcggtacgtgacctggttgagcgcaatgaattacgttggaagcctttctctcctggtgttccgggtaaactgaaaggcgacaatatctttgaggcgcttaaacaagctgaccaattgctgttgcatccgttccagtcgtttacccccgttgtggatctgctgcgtcaggcggctaaagaccctgatgtggtagcgatcaagcagacgctttatcgtaccggggttaagtcagatatcgttaatgccttagttgaggctgcgcgaagtggtaaagaggtgacggtcgtcatcgagctgcgagcgcgttttgatgaagagagtaacctccatcttgctgcccgtttgcaggaagcaggctgtctggtggtgtatggggtagtgggctacaaatgtcacgccaaggcgatgctcattgtccgtgaagagggtaaccgattggtgcgttattcccacttgggtaccggtaactaccactccggcaccgcgcgtttgtactctgattacagtttcctaacggccgatcaggatgtgggtgaagatgtgcacaaggtcttccagcagctaacgggtatgggcaagattcagaaactgaagaagctctacaatgcgccctttactctgcatgcgaagatgattgaactgatccgtcgtgaagcacgtttggctaaatctggtaaaccgggccatatcatggtgaaggtcaatggcctgacggaaccgaagatgattcgtgctctttatgaagcctctgctgcaggggtgaaggtcgagttaattatccgtggtatgtgccgtcttcgtccagggattgagggtttgtcagataacatacaggtgcgctcgattatcggtcgtttccttgaacatacccgtgtttactattttggtaataacggtaaaccagacgtgttctgtgccagtgctgactggatggagcgtaatatgctcaaccgagttgaaaccggttttcaggtatttggtaagcatggcgagcgtctcaagcgcgagctggattactacatgcaggacaactgtcagagctgggaactacaggcggatggcagttatattcagaaccatcctgcagaaggtgaagagctgttctcagcccagcaagcgttgctggatgagttcgctaagtaa

SEQ ID NO: 49999 - protein, 716 aa, Oceanospirillum sp. MED92
MVEMVEQSEAAAALLESRESVAITEQEVEETPVDLKVPELYINRELSHLQFNIRVLEQALEENHPLLERLMFLLIFSSNLDEFFEIRVAEQMTQLKYGREAVGPDAMHPRTVLERISEICHLTVDRQYKILNETIFPELQKENIHFIRRRLWTPEQREWVQTYFHEKVVPVISPVGLDPSHPFPRLVNKSLNFIVELDGKDAFGRETGMAIIPAPRSLPRLIRLPDELCDGGDNLIFLSSIIHEFADELFPGMTVEGCYQFRITRNADMTFDMEEVEDLANTLRGELHSRKYGDAVRLEVDQRTPEELIEFLQKEYKLDESQTYRVDGPVNLTRLMAVRDLVERNELRWKPFSPGVPGKLKGDNIFEALKQADQLLLHPFQSFTPVVDLLRQAAKDPDVVAIKQTLYRTGVKSDIVNALVEAARSGKEVTVVIELRARFDEESNLHLAARLQEAGCLVVYGVVGYKCHAKAMLIVREEGNRLVRYSHLGTGNYHSGTARLYSDYSFLTADQDVGEDVHKVFQQLTGMGKIQKLKKLYNAPFTLHAKMIELIRREARLAKSGKPGHIMVKVNGLTEPKMIRALYEASAAGVKVELIIRGMCRLRPGIEGLSDNIQVRSIIGRFLEHTRVYYFGNNGKPDVFCASADWMERNMLNRVETGFQVFGKHGERLKRELDYYMQDNCQSWELQADGSYIQNHPAEGEELFSAQQALLDEFAK

SEQ ID NO: 50000 - DNA, 2181 bp, Xanthobacter autotrophicus Py2
  CDS (1)..(2181): transl_table=11
atgaacgaggctgcagctctcgcggaggtcgagatcccggctggcgcagcggaggtgctggcgctggcgcaatcgccgcagcgcttcatcaaccgcgagatttcctggctgcacttcaaccggcgggtgctggaggaggcggagaaccgcaaccaccccctgctggagcagctgcgcttcctctccatctcggccaacaacctcgacgagttcttcatggtccgcgtggcgggcctgaaggagcaggtgcgcgagggcgtgcagaccccgagccccgacggccttaccccctcggagcagctggccaccatcctcgccagcgccgcccagctcatctccgaccagcagggccgctggctggagctgcggcacgacctcgccggcgtcggcatcgtgctggtggatggcgtcgaggtcacggccgaagacctggtggtgctggaccggcatttcctcaaccacgtcttcccggtgctgaccccgctggccatcgacccggcgcaccccttccccttcatccccaatctcggcttctcgcttgcgctccagctggtgcggcaagcggacgggcggggcatgaacgcgctgatccgcatccccgccaaggtggagcgtttcatccgcctgccggacctcggcaccggggccctgcgcttcatcaccctggaacagatgatcggcctgttcatctcccgcctcttccccggctacgcagtgaagggccagggcgtgttccgagtggtccgcgacagcgaccttgaaatcgaggaggaggcggaggatctcgtccgcctgtttgagaccgcgctgaaacagcgccgctacggcgaggtgatccgcatggaggcggatgccgccatgccggcggagctgcgcaatttcgtcgcccgcgagctgggcgtgaacgacgacgagatcttcgtggtgggcggcgtgctcgccctgaacgaattctcccagctggtctcggtggaccggccggacctgaagtttcaggcctacaacgcccgatttcccgaacgcatccgcgaccacggcggagactgctttctcgctattcgcgagaaggacatattggttcaccacccttatgaatcctttgacgtggtggttcagtttctccgccaggccgcccgcgaccccaacgtcgtcgccatcaagcagaccctctaccgcacctcctccgacagccccatcgtgaaggccctggccgaggcggcggaggccggcaaatcggtgaccgcgctggtggagctgaaggcccgcttcgacgaggaagccaacatccgctgggcccgcgacctggagcgtgccggcgtgcaggtggtgttcggcttcatcgagctgaagacccacggcaagctctccatggcggtgcggcgcgagggcgcgcagctggccacctacgtccatgtgggcaccggcaactaccaccccattaccgcccggatctatacggacctcagcttcttcaccgccgatccggtgatcgcccaggacgtggcccgcatcttcaacttcatcaccggctatgccacccccggcgagctggacgccatggcggtctcgcccacgggcctgaagccccggctgctcaaccacatcgccgacgagatcgagttcgccaaggccggccgcccggccgccatatggctgaagtgcaactcgctggtggatccggagatcatcgacgcgctgtacgaggcgagcgccgccggcgtgcaggtggactgcatcatccgcggcatctgctgcctgcgccccggcattcccggactctccgagaacatccgggtgaagtccatcgtcgggcgcttcctggagcactcgcgcgtgtattgcttcggcgccggccacggcctgccgagccccaatgcggtggtctacatctcctcggcggacctgatgccgcgtaacctcgaccgccgggtcgagaccctgtgccccatcaccaatcccacggtgcacgagcaggtgctcgaccagatcatggtcgccaaccttatcgacaaccagcagagctggcgtgtcttgcccgacggctcctccgaacgcatagtccccgcgccgggcgaagagccgttcaacgcccatcaatatttcatgaccaacccgagcttgtccggacgtggaaagtctctcaaagattcttcgccgcgtagcctcttcgtccgtcgctga

SEQ ID NO: 50001 - protein, 726 aa, Xanthobacter autotrophicus Py2
MNEAAALAEVEIPAGAAEVLALAQSPQRFINREISWLHFNRRVLEEAENRNHPLLEQLRFLSISANNLDEFFMVRVAGLKEQVREGVQTPSPDGLTPSEQLATILASAAQLISDQQGRWLELRHDLAGVGIVLVDGVEVTAEDLVVLDRHFLNHVFPVLTPLAIDPAHPFPFIPNLGFSLALQLVRQADGRGMNALIRIPAKVERFIRLPDLGTGALRFITLEQMIGLFISRLFPGYAVKGQGVFRVVRDSDLEIEEEAEDLVRLFETALKQRRYGEVIRMEADAAMPAELRNFVARELGVNDDEIFVVGGVLALNEFSQLVSVDRPDLKFQAYNARFPERIRDHGGDCFLAIREKDILVHHPYESFDVVVQFLRQAARDPNVVAIKQTLYRTSSDSPIVKALAEAAEAGKSVTALVELKARFDEEANIRWARDLERAGVQVVFGFIELKTHGKLSMAVRREGAQLATYVHVGTGNYHPITARIYTDLSFFTADPVIAQDVARIFNFITGYATPGELDAMAVSPTGLKPRLLNHIADEIEFAKAGRPAAIWLKCNSLVDPEIIDALYEASAAGVQVDCIIRGICCLRPGIPGLSENIRVKSIVGRFLEHSRVYCFGAGHGLPSPNAVVYISSADLMPRNLDRRVETLCPITNPTVHEQVLDQIMVANLIDNQQSWRVLPDGSSERIVPAPGEEPFNAHQYFMTNPSLSGRGKSLKDSSPRSLFVRR

SEQ ID NO: 50002 - DNA, 2055 bp, Flavobacteria bacterium BBFL7
  CDS (1)..(2055): transl_table=11
gtgaaagaacagactaaataccccatcagacatagagaccttaactggttaagttttaacgatcgtgtacttcaagaggcaaaggatactacaaaccctttatacgagcgattaaagtttatcagtatcttttcttcaaatctcgatgagttttttagggtacgagtttcacaattacgacagattaaaaaggtaaaaaaaaatctgcgtaaaaaacttgctcttagacctaataaaattctcaaagagatattagttaaagtcaatcaacaacaagaagagttgggttctatattttatgatactgttgtgcccgaattattagagcataatattcaactactgtcctatgaagagttgatggctagctatactgtagaggctagtgattattttaaagaacatattcaaaaacttgtacaacctgttacaataaaggctgctacagactctgatgtgtttttagagaatagtgaactgtactttctggttacttttatgtcagagcatcattatggaatagtcaatataccttcagatcaattaaatagatttatcaaattaacgactgaagacggtacacatgtgattgcttttctagatgatattgtgaagtctcaactgcaaagtttgttcagtaatcaggatgttttaaggtcctattcaataaaattatcacgcgatgcagagttatacctagaacaagaagttgatgttgatcaatcgctagcagatcaaatttatgaatccttgagccagcgtttaaacggtcaacctacacgactgctttacgatagtgcaattcctaaagagatacgtaaaaaccttagaaaaagtttagggctaggaaagatagatatggttgctggtggtacttaccataattttgatgattttatcaagtttccagatcttactgatgataaatcattgaaagcagaaaagctagttacagttaagcacaaagttttacatgatagtacagactattttgatgcaattagcaaaaaagaccaattagtacattttccatatatgtcgtttgattatgttcaaaacttgatcaatcaagctgccacagataaagatgtattagagattaaaatatccttgtatcgtgtcgcagaccattctgccttaacagatgccttactactagctttagaaaatggaaaaaaaataaccgtttttatagaggctaaggcaagatttgacgaagaaaataatatcaaatggggacgcatttttgaagaaaaaggtgctcatgtgatttatagctatcctaaaatcaaagtgcacagtaaggtaatgctgatcctacgtcgagaacaaaataaagtgagacgatatgcatatataggtactggaaattttaatgctcagacttcaaaattttattgtgaccacggactttttacagctcaaaaaaaaataaccaaagaactacatcgagtatttaaagtattgcaaggtgatatgattatccctagagcaaaaaatcttttaatctctccgtttaccactagagagacttttgaagatctgattagaaacgaaatgaatgctgctattgctggcaagcctagtggtattacagcaaaaatgaatcaattagaagacgaaaaaatgatcaagctactatataaagctagtcaggctggagtacctataagacttatagttagaggattttctaggcttattcctggtatagatggaataagcgatcacatttttataactagtattgttgatcaatttttagaacatggacgtatttataaatttcataataatggtttacctgttatgtatatgggaagtgcagactggatgtcccgcaatctcgataggagaattgaagtgctaacgcctatttatgatcaggacatatttcgtgaactagaggatattttagacatccaattatcagataatgtaaaagcacgcgttcacactatacatgaagataatgtaatggtatctaatgatgaaacagatattagatctcaaattaaaattcacaactacttactcgcaaaacatcacgcttaa

SEQ ID NO: 50003 - protein, 684 aa, Flavobacteria bacterium BBFL7
MKEQTKYPIRHRDLNWLSFNDRVLQEAKDTTNPLYERLKFISIFSSNLDEFFRVRVSQLRQIKKVKKNLRKKLALRPNKILKEILVKVNQQQEELGSIFYDTVVPELLEHNIQLLSYEELMASYTVEASDYFKEHIQKLVQPVTIKAATDSDVFLENSELYFLVTFMSEHHYGIVNIPSDQLNRFIKLTTEDGTHVIAFLDDIVKSQLQSLFSNQDVLRSYSIKLSRDAELYLEQEVDVDQSLADQIYESLSQRLNGQPTRLLYDSAIPKEIRKNLRKSLGLGKIDMVAGGTYHNFDDFIKFPDLTDDKSLKAEKLVTVKHKVLHDSTDYFDAISKKDQLVHFPYMSFDYVQNLINQAATDKDVLEIKISLYRVADHSALTDALLLALENGKKITVFIEAKARFDEENNIKWGRIFEEKGAHVIYSYPKIKVHSKVMLILRREQNKVRRYAYIGTGNFNAQTSKFYCDHGLFTAQKKITKELHRVFKVLQGDMIIPRAKNLLISPFTTRETFEDLIRNEMNAAIAGKPSGITAKMNQLEDEKMIKLLYKASQAGVPIRLIVRGFSRLIPGIDGISDHIFITSIVDQFLEHGRIYKFHNNGLPVMYMGSADWMSRNLDRRIEVLTPIYDQDIFRELEDILDIQLSDNVKARVHTIHEDNVMVSNDETDIRSQIKIHNYLLAKHHA

SEQ ID NO: 50004 - DNA, 2088 bp, Oceanobacter sp. RED65
  CDS (1)..(2088): transl_table=11
atgagcgataccgtcagcgacaatagcattgatctcagtgcaccagagtattatttcaatcgtgaaatcagtcacctgcaattcaatattcgcgtattggaacaggccttggacgattctcacccgctgctcaaccgcctcatgttcctttgtatttttagtagcaatctagacgagtttttcgaagttcgtgttgcggatctaaaaaaacaaatggcgtttagccgtgaaattcccggacccgatggtacgccaccgtcagaagtactggatcaaatctatcaactggcatcggaaaccacagagcgccaatacaatattctcaatgagtatctgcttccagaacttgaaaaagaaaatattcgctttattcgccgctccgattggaatgaaaagcaaaccaagtgggccaagcagtatttccgcgatgaggtacaaccggtaatcagcccgattggtttagacccggctcatccattcccacgcttggtaaacaaatcgcttaactttattgttgagctagatggtaaagatgctttcggccgtaatacgggtatggcggtcatacctgcgccgcgctctttacctcgtattagtcgctttcctgatgaaatctgtgatggtggcgataactatgttttcctttccagtatgattcaccagttcgctgatgaactgtttcctggcatgaaggtaaaaggttgctatcaattccgcctaacccgtaatgccgatttaagttttgataaagaggacgtcagtgacttggccagcgccttagagggcgaactccatgcgcgacattatggcgatgccgtgcgcttggaagtcgcagataattgtcctgaaccactttggcaattcctactggataaattcaacttgacctatcaagacctgtatcaagtgaatgggccagtgaacgttcaccgtttgatgtccgtcgccattggtgccgaacgacctgagttgcgttacccaaccttcacgccaagtattccaaagggcttaaagggcagcagtgatgtatttgctgcgattcgtaaaagtgaccagcttttattgcatcctttccaaagcttcacgcctgtggtggatttagtccgcagcgccgctcaagatccagatgtgctagcgattaagcagaccttatatcgtacaggtgcgaccagtgagatcgtcaatggcttggttgaggctgcacgtaaaggcaaagaggtgacggttgtcattgaattacgagcgcgcttcgatgaagaggaaaacctacatcttgctaaccgtttgcaagaagccggctgtgttgtggtatacggcgtggtgggttacaaaacccatagtaagatgatgatgatcgtacgccgtgaaggtaaaaagctaaagcgctatgtccatttgggcacgggtaattatcacgcaggtaacgcacgtctttacacggattatagcttgattacctgtgcaaaagatctaacagaagatgttcacaaattattccagcagctaacaggcatgggcaaggcactgagtatcaagaaaatctatcatgccccctttactctgcataaaagcttgctaggactgattgccgaagaagccaaaaatgcaaaagaaggcaagccggcgcgcattaccattaaagttaactctttgaccgagccgaaaatcattcaggctttgtataaagctagccaagccggcgtacaagtagattgcattgtccgaggcatgtgccgcctagtgccgggcattccaggtgtcagcgagaacatttctgtgcgcagtatcattggtcgcttcttagagcatactcgagtttattactttgaaaacaatgatagccctaaggtattcgcatccagtgctgactggatggagcgcaacttgctgaaccgcgttgagacgtgcttccctatcgaaaatgccaagtgggcgaagcgactgcgtgaagagctggatttatatctcagtgacaattgccaaagctggcaattacaacgtgatggtcgctatatgaaaaatgaaccgcttgaaggggaagaacgcattagtgcacagcaagtattattagagagtctaagtgcctaa

SEQ ID NO: 50005 - protein, 695 aa, Oceanobacter sp. RED65
MSDTVSDNSIDLSAPEYYFNREISHLQFNIRVLEQALDDSHPLLNRLMFLCIFSSNLDEFFEVRVADLKKQMAFSREIPGPDGTPPSEVLDQIYQLASETTERQYNILNEYLLPELEKENIRFIRRSDWNEKQTKWAKQYFRDEVQPVISPIGLDPAHPFPRLVNKSLNFIVELDGKDAFGRNTGMAVIPAPRSLPRISRFPDEICDGGDNYVFLSSMIHQFADELFPGMKVKGCYQFRLTRNADLSFDKEDVSDLASALEGELHARHYGDAVRLEVADNCPEPLWQFLLDKFNLTYQDLYQVNGPVNVHRLMSVAIGAERPELRYPTFTPSIPKGLKGSSDVFAAIRKSDQLLLHPFQSFTPVVDLVRSAAQDPDVLAIKQTLYRTGATSEIVNGLVEAARKGKEVTVVIELRARFDEEENLHLANRLQEAGCVVVYGVVGYKTHSKMMMIVRREGKKLKRYVHLGTGNYHAGNARLYTDYSLITCAKDLTEDVHKLFQQLTGMGKALSIKKIYHAPFTLHKSLLGLIAEEAKNAKEGKPARITIKVNSLTEPKIIQALYKASQAGVQVDCIVRGMCRLVPGIPGVSENISVRSIIGRFLEHTRVYYFENNDSPKVFASSADWMERNLLNRVETCFPIENAKWAKRLREELDLYLSDNCQSWQLQRDGRYMKNEPLEGEERISAQQVLLESLSA

SEQ ID NO: 50006 - DNA, 2148 bp, Desulfitobacterium hafniense DCB-2
  CDS (1)..(2148): transl_table=11
atgatgaaaactatctacgacaccacggggaattttatcaatcgcgaattaagctggctggagtttaatcagcgggttttggagggggctctggatgccgctaaccctctgtttgaacggcttaatttcctggccattgtcagctccaatctggatgagttttttgcggtgagagtcgcatccttgggggaccaaatcctggctggtctggagaaacgtgatccctccggtttgcttccccaggaatgtatggcgcaaattgtggagcgtgcccatgggatagtagagggtcagtaccggtgttacaggaactctctgcttaaaaaactcaggaaggaaaacatcaatattgtcaaccctaaatccttaaccaaggaccaaaagaaatttgtgaaagattattacctgcataaagtttttccggtgctcacccccttggtggtggatcagggccggccttttcctttgctgcgcagcagagagctgtatattgccttattgattaaaggagtggagactcatcttttcgctacggttcaagttccgaaagtcctgccccgctttgtggaagttccctcggcgaccaaagacagggaatttatcatgttggaggatctgatcaccttaaaattgccggatctttttcaagggcataagctggcagccgcaggctttttccgcattacccgcaatgccgacctggatttcgacgaagagggggcggaagatttattagaagccattgaattatccatacgtcagcgcaaatggggttcggtgatccgtctggaggtgggcaaagggtttcataaagatcttctggccatccttaaggaagaattggaaatcactgaggacaagatttatgaagtacggggacccattgatctgacgtttctctcggacttcattaagcttaagggatgtgagcatttacgctatctcccttttcaacctcaggatgtcccggaactgatcagggaaaaggacatcttcaaggctattcaggagcaggatattctgcttcatcacccctaccaatccttccaaccggtggttgagttagtgaaaacggcggccagagatcctcaggttctggcgattaagcaaaccctttaccgcgtcagcggcaattcgccgattattgccgccctggcccaggcggcggagcttggcaaacaggttacggttcttgtggagcttaaggcccgctttgacgaggagaagaacattcattgggccaagcatctggaggaggccggctgccatgtcatctatggtttagtggggctgaaaacccactgtaaggtcctcttgattgtgcgccgggaagaggatggcatcaagcgctatgttcatatgagcacgggcaactataatgatgtgactgccaaaatctatacagatatcgggctgatgacagtgaatccccagtttggggctgatgcctcagcattattcaatatgctttccggactttcccaaccggtcaatcttaataaattcaccttggcacctgctgggatgagagagaaattcctccagcttattgaggatgaagcacataacgcccaaaagggaatgaaggcggtcatcgtcgtcaaggttaattctctgcttgataagcaaatcattctcgctttatatcatgcttccagccagggtgtggaaatcaagctgattgtgcggggggtctgctgcctccggcccggtttgccgggagtcagcgaaaccattgctgtccgcagtattgtgggaagatttctggagcatagccgtatcttttatttctatcatggcggagaagagctggtgtatttgtccagcgccgactggatgccaagaaacctggatcgccgggttgaactactgtttcctgtcgaaaatcccgatgccaaggaagaagtaaaggccatactggacatagcctggcaggatacggtaaaggcccgcatattaaatgccaaaggtatctataaaaaggtggataaacggcggaaaaaatcagttgaaagccaggacgccctctgtgaacgagcggtagctcaaagcaccagggaaaaagccaggttgcaggaaagactggaggggagttttcatcccgtgactgccggggcggaaatgcaggggtttaccggaatgaaatag

SEQ ID NO: 50007 - protein, 715 aa, Desulfitobacterium hafniense DCB-2
MMKTIYDTTGNFINRELSWLEFNQRVLEGALDAANPLFERLNFLAIVSSNLDEFFAVRVASLGDQILAGLEKRDPSGLLPQECMAQIVERAHGIVEGQYRCYRNSLLKKLRKENINIVNPKSLTKDQKKFVKDYYLHKVFPVLTPLVVDQGRPFPLLRSRELYIALLIKGVETHLFATVQVPKVLPRFVEVPSATKDREFIMLEDLITLKLPDLFQGHKLAAAGFFRITRNADLDFDEEGAEDLLEAIELSIRQRKWGSVIRLEVGKGFHKDLLAILKEELEITEDKIYEVRGPIDLTFLSDFIKLKGCEHLRYLPFQPQDVPELIREKDIFKAIQEQDILLHHPYQSFQPVVELVKTAARDPQVLAIKQTLYRVSGNSPIIAALAQAAELGKQVTVLVELKARFDEEKNIHWAKHLEEAGCHVIYGLVGLKTHCKVLLIVRREEDGIKRYVHMSTGNYNDVTAKIYTDIGLMTVNPQFGADASALFNMLSGLSQPVNLNKFTLAPAGMREKFLQLIEDEAHNAQKGMKAVIVVKVNSLLDKQIILALYHASSQGVEIKLIVRGVCCLRPGLPGVSETIAVRSIVGRFLEHSRIFYFYHGGEELVYLSSADWMPRNLDRRVELLFPVENPDAKEEVKAILDIAWQDTVKARILNAKGIYKKVDKRRKKSVESQDALCERAVAQSTREKARLQERLEGSFHPVTAGAEMQGFTGMK

SEQ ID NO: 50008 - DNA, 2088 bp, Alteromonadales bacterium TW-7
  CDS (1)..(2088): transl_table=11
atgaatgcccacatagaacatactcaaaccgttgaatactttgctaaagagcttagttggctgtcattcaacgagcgcgttctacaagaggctaaagacaaaaataatccaataattgaacgcatgcggtttttggggattttttctaataaccttgatgaattttttagggtgcgtgttgccgacgttaaacgccgtattttattaaacaaacttcccgatgctaattttgaagaagacgaagctttattaagtcaaattcaacaaaaagttttgcagctaggcaaaaaatttaacctaatacaccaacaaattttaaacgatttaaccactcataacatccatgtagatcgccccgaaaaattaacagattttcatcttaattggcttaaaacgtattttcatgacaaggttttacagcatatatcacccattttacttaatgaaaataaagattactcagactatataaacgacacaatgacttacttgtttattgaaatgagtgacgaaaaaagccactacgctatgcttgaagtccccacagaccgagtaccccgttttattatattaccgcctgaaaagacacgtcgtcgtaaaaccattgttatgcttgatgacgttatttcttactttttaaatgatgtttttagtaacttttttcactttgataaaattcaaggtcatgcaataaaactcacacgagacgcagaatacaacttagacgatgagctagaagaaggtctgctcgataaaatgtctaagggtcttaaacaacgtatttatgcagagcctgtgcgccttgtttacgacgagagcatgccagaaagtatgttaaaagtgatgaaaaaacgtttaaacgtgagtcatcatgatgcgctgatacccgcgggtcgataccgtaactttagagattttattgcttttcctaatgtcggtcgccagtaccttgaaaacaaaccacttccagccatacaaagcacagcttttaacaaacacagcagcgtatttgacgcaataagcgagcaagacatactgctttactacccatatcacacatttaatcatttactggagtatgttcgccaagccgcatttgatcctatggtgacgcagattaaagtaaatatttatcgagtggcgagtaagtctcggcttatttctttactcatcaatgccgctaaaaatggcaaaagtgtcacggtaatggttgagcttaaagcacgctttgatgagcagaacaatattgaatgggctaaagttcttagcagtgctggaataaaagttatttttggtattccagccttaaaagtgcacagcaaactgtgtgttattcaccgtaaagaaaaaaacaaaatagttaaatacgcccatatcggtaccggaaactttcacgaaaaaacagctaaaatctacactgactttagccttttcacaaaacataacggtatttgtgaagaatgcgatagcgtatttaagtttatagaaagcagctacaagccctttaattttgaatatttaatgctctcccctattaatgctcgcgacactttattggatttaattgataaagagattcagcatgttgaagatggtttcacaggaaaaattacaattaaagtaaataatttagttgataaacaacttgtagataaactttattatgccggtcgtcgtggagtaaaaatccgaattattgtacgtggtatgtgctcattaataccgggggtggctcactttagcgaaaacataaaagtgatcagtattgttgatcgctttttagagcatcctcgcgtaatggtatttggcaataatggcaatgataaggtgtatatttcttccgctgattggatgactcgcaatcttgatcaacgcgttgaagtgggagtgcctattttaaataataaattaaaacagctcattatggatattttagagctacaatttaaagaccgcacaaaagctcggctaatcgatagcgagcaaaaaaatacctatgttaggcgcggtaacagaaaaaaaattcgctcacaaatagcaatatacgatcacttaaaaaaatgggagggtaattataataatgaatga

SEQ ID NO: 50009 - protein, 695 aa, Alteromonadales bacterium TW-7
MNAHIEHTQTVEYFAKELSWLSFNERVLQEAKDKNNPIIERMRFLGIFSNNLDEFFRVRVADVKRRILLNKLPDANFEEDEALLSQIQQKVLQLGKKFNLIHQQILNDLTTHNIHVDRPEKLTDFHLNWLKTYFHDKVLQHISPILLNENKDYSDYINDTMTYLFIEMSDEKSHYAMLEVPTDRVPRFIILPPEKTRRRKTIVMLDDVISYFLNDVFSNFFHFDKIQGHAIKLTRDAEYNLDDELEEGLLDKMSKGLKQRIYAEPVRLVYDESMPESMLKVMKKRLNVSHHDALIPAGRYRNFRDFIAFPNVGRQYLENKPLPAIQSTAFNKHSSVFDAISEQDILLYYPYHTFNHLLEYVRQAAFDPMVTQIKVNIYRVASKSRLISLLINAAKNGKSVTVMVELKARFDEQNNIEWAKVLSSAGIKVIFGIPALKVHSKLCVIHRKEKNKIVKYAHIGTGNFHEKTAKIYTDFSLFTKHNGICEECDSVFKFIESSYKPFNFEYLMLSPINARDTLLDLIDKEIQHVEDGFTGKITIKVNNLVDKQLVDKLYYAGRRGVKIRIIVRGMCSLIPGVAHFSENIKVISIVDRFLEHPRVMVFGNNGNDKVYISSADWMTRNLDQRVEVGVPILNNKLKQLIMDILELQFKDRTKARLIDSEQKNTYVRRGNRKKIRSQIAIYDHLKKWEGNYNNE

SEQ ID NO: 50010 - DNA, 2139 bp, marine gamma proteobacterium HTCC2080
  CDS (1)..(2139): transl_table=11
atgagtcaaacgccgattgaagaactcttggctgaccttggtgagccacacacttatcccagagaactcagctggcttagcttcaatgcgcgcgttttgcaggaagctcaagacaaggacgtgccgttaattcagcgagtgcgttacctcggtattttttcaaataatttagacgagttcttcagggtgcgggttgccgaagttcggcgcctcatctcgcttacgaacggcaaaggtcggcagcgcgctgaaaaattgttgggggcgattcagtatcgcgttttgttactgcagcaagagttcgaagctatttacattaaattgttgagggagctcgctcgcaggggcgtttacttaattaatgaaacgcagctgcaggaggggcagctggaatttgtcgaggcgttcttccgtgacaaagtattgcctgagctggaacctattttattaagagatgaccagcccattcctcatttgaccgacgaatcgctatatcttgctgttgatattgagacgacttcggggcctcaatatgccctgctagaagttcctacaaatagattagggcgctttattgaggttccaggccgtaagcgtcgcaagggcagagtctttattgtgctcgataatattattcgggcgtgcttacctcaggtatttcgcggtgtctttgaaattaagtctgcctcagcctattgctttaagttctcaagagacgctgagcttgaaattgattcgagtattaatgagagcctgattgccaaaatggcatcgggcctgaggcaacgtcgcagagcagacgcagttcgctttgtatttgatgaaaagatgcctaagcgcatgcttgactacctgcgcaaacggtttggctttggaaaatacgacagcatgattccaggggcgcgataccacaactccaaggattttatggggtttcctaacgccggaccaaagtacctcgagtttaaacctttgccgacaataccgattgagcgattagacggtggcggcagtattttttcagcgattcgagagcaggacgtgctgttgcactacccctaccatgcctttgattacatcattgatgtgctcaaaactgcagcactagatcccagcgttataacgattcgaatttgtttgtaccgcgttgcggaaaattcgcgcgttgtcgacgcccttattaatgccaaggacaacggtaagtcggtgcaagtggtcgtagagctggcggcacgctttgatgagcaggcgaatatcgcctgggcgcagcgactaacagatgctggcattgaggttatttttggacttccagggttgaaggttcacagcaagatttttttgattgagcgccgagagtctcagaaggttcgctactacagtcatattggaacgggtaatttcaatgaaaataccgcaagactttacagcgacttgtctttgcttacctctgaccaaactattggtcgtgatgtcgcgaaggttttcgactttttaaaatacaactaccggcgacctgaatacgagcagcttctagtatcgccacacagctcccgctctggtctcatggccatgatcgatagagagattcagcacgcgaaggatggctatcgtgcagagatggttcttaagtgtaataaccttgttgatagtggtttctctagcaaactctacgaggcaagccaggccggcgttgaaattaggttaattattcgcggaatgtgttcgctgctaccaggcgtcgcaggtttgtcagaaaatatcgaagcaatcagcattgtggatcggtatttagagcattccagagtttatgtatttcataaccgaggatgtcctgactactactttggttctgctgatttgatgacacgaaacatcgactttagagtagaagttctttgccctattcgtgatcttgatgcacaaaacatggttcaaaacaccctcgaccagcagtggaatgacaatgttaaagcccggcggctcaatatagatcaagacaatgtattgctgtcgtcgtccaaatccagcagccacattcaatctcaggaaacaatctatcggtacctagcgacgggcaagcttccgcgctatccaaagtcaacgatgaggcagccctcaatgcggcgcagaagaggttaa

SEQ ID NO: 50011 - protein, 712 aa, marine gamma proteobacterium HTCC2080
MSQTPIEELLADLGEPHTYPRELSWLSFNARVLQEAQDKDVPLIQRVRYLGIFSNNLDEFFRVRVAEVRRLISLTNGKGRQRAEKLLGAIQYRVLLLQQEFEAIYIKLLRELARRGVYLINETQLQEGQLEFVEAFFRDKVLPELEPILLRDDQPIPHLTDESLYLAVDIETTSGPQYALLEVPTNRLGRFIEVPGRKRRKGRVFIVLDNIIRACLPQVFRGVFEIKSASAYCFKFSRDAELEIDSSINESLIAKMASGLRQRRRADAVRFVFDEKMPKRMLDYLRKRFGFGKYDSMIPGARYHNSKDFMGFPNAGPKYLEFKPLPTIPIERLDGGGSIFSAIREQDVLLHYPYHAFDYIIDVLKTAALDPSVITIRICLYRVAENSRVVDALINAKDNGKSVQVVVELAARFDEQANIAWAQRLTDAGIEVIFGLPGLKVHSKIFLIERRESQKVRYYSHIGTGNFNENTARLYSDLSLLTSDQTIGRDVAKVFDFLKYNYRRPEYEQLLVSPHSSRSGLMAMIDREIQHAKDGYRAEMVLKCNNLVDSGFSSKLYEASQAGVEIRLIIRGMCSLLPGVAGLSENIEAISIVDRYLEHSRVYVFHNRGCPDYYFGSADLMTRNIDFRVEVLCPIRDLDAQNMVQNTLDQQWNDNVKARRLNIDQDNVLLSSSKSSSHIQSQETIYRYLATGKLPRYPKSTMRQPSMRRRRG

SEQ ID NO: 50012 - DNA, 2244 bp, Pseudomonas putida GB-1
  CDS (1)..(2244): transl_table=11
atgaataatgaagtgctcacccctgtcgcgatcaaggatgcccaggagctcccagaagagatggtgcagaccccgcctgacctgccgccggcgcccgagcccgtagcggagcaggtggccgagcctgtggccccggtgcccgcaccggccccggcaatcaccgtccctggcctggacgacagcagcctgtacattcatcgcgaactctcgcagttgcagttcaacatccgcgtgctggaacaggcactggacgagaactacccgttgcttgaacggctcaagttcctgctgatcttctccagcaacctcgatgagttcttcgagatccgcgtggccgggctgaagaagcagatcaattttgcccgtgaacaggccggtgccgatggcttgcagccgcaccaggcgttggcgcgtatcagcgaactggtgcacatcgaggtagagcgccagtacgcgatcctcaatgacgtgctgctgccggagctggaaaagcatcagattcgcttcattcgccgtcgttactggacgcccaaactcaagacctgggtgcgccgctatttccgcgacgaaatcgccccgatcatcaccccgatcggcctcgacccgacccacccgttcccgttgctggtgaacaagagcctcaacttcatcgtcgagcttgagggtgtggacgccttcggtcgcgattcgggcttggcgatcatccctgccccacgcctgctgccacgggtcatccgcgtgcctgaagaggtgggtggcccgggtgccaactacgtgttcctgtcgtcgatgatccacgcgcacgccgacgacctgttccagggcatgaaggtgaagggctgctaccagttccgcctcacccgtaacgccgacctggcgctggactccgaagaagtcgacgacctggcccgtgctctgcgtggtgagctgttctcgcgccgttacggcgatgccgtgcgcctggaagtggccgacacctgcccaaaacacctgtcggactacctgctcaagcagttcagcctcagcgaaagcgagctgtaccaggtcaatggcccggtcaacctcacccgcctgttcagcattaccggcctggacagccacccggagcttcagtacacgccgttcaccccggcaatccccaagctgctggtgaacgccgacaacattttcagcgtgatcagcaagcaggacatcctgctgatgcacccgttcgagtccttcaccccggtggtcgacctgctgcgccaggccgccaaggacccgcatgtgctcgccgtgcgccagaccctgtaccgctccggggccaactcggaaatcgtcgacgccctggtggacgcggcgcgtaacggcaaggaggtcactgcggtgatcgagttgcgtgcgcgcttcgacgaagagtccaacctgcagatggccagccgcctgcaagcggccggtgcggtggtgatctacggcgtggtcgggttcaagacccacgccaagatgatgctgatcctgcgccgcgagcagggcgagatcgtgcgttatgcgcacctgggtaccggcaactaccacgccggcaacgcccgcctgtacaccgactacagcctgctgacctctgacgacgccctcaccgaggacgttggcaagctgttcagccagctgatcggcatgggcaagaccctgcgcatgaagaagctgctgcacgcgccgttcaccctgaaaaagggcatgctcgacatgatcgcgcgggaaacccagttcgccctcgaaggcaagccggcgcacatcatcgccaagttcaactcgctgaccgacgccaaggtcatcaaggcgctgtacaaggccagccagtcgggtgtgaaaatcgacctggtggtgcgcggcatgtgctgcttgcgcccaggtattccgggggtttcgcacaacatccaggtgcgctcgatcatcggccgcttcctcgagcacacgcgggtgttctacttcctcaatggcggcgaagagcagatctacctgtccagcgccgactggatggagcgcaacctcgacaagcgcgtcgagacctgcttcccggtggaaggcaagaagctgttgctgcgggtgaagaaggagctggaaggctacctgaccgacaacacccacgcctggacgttgcagccagacgggcgctacgtgcgtagcaccccgaccggcaaccagaacccgcgcagtgcccaggcgaccctgctggagcgcctgagcaacccggtcctcaacgtacgctga

SEQ ID NO: 50013 - protein, 747 aa, Pseudomonas putida GB-1
MNNEVLTPVAIKDAQELPEEMVQTPPDLPPAPEPVAEQVAEPVAPVPAPAPAITVPGLDDSSLYIHRELSQLQFNIRVLEQALDENYPLLERLKFLLIFSSNLDEFFEIRVAGLKKQINFAREQAGADGLQPHQALARISELVHIEVERQYAILNDVLLPELEKHQIRFIRRRYWTPKLKTWVRRYFRDEIAPIITPIGLDPTHPFPLLVNKSLNFIVELEGVDAFGRDSGLAIIPAPRLLPRVIRVPEEVGGPGANYVFLSSMIHAHADDLFQGMKVKGCYQFRLTRNADLALDSEEVDDLARALRGELFSRRYGDAVRLEVADTCPKHLSDYLLKQFSLSESELYQVNGPVNLTRLFSITGLDSHPELQYTPFTPAIPKLLVNADNIFSVISKQDILLMHPFESFTPVVDLLRQAAKDPHVLAVRQTLYRSGANSEIVDALVDAARNGKEVTAVIELRARFDEESNLQMASRLQAAGAVVIYGVVGFKTHAKMMLILRREQGEIVRYAHLGTGNYHAGNARLYTDYSLLTSDDALTEDVGKLFSQLIGMGKTLRMKKLLHAPFTLKKGMLDMIARETQFALEGKPAHIIAKFNSLTDAKVIKALYKASQSGVKIDLVVRGMCCLRPGIPGVSHNIQVRSIIGRFLEHTRVFYFLNGGEEQIYLSSADWMERNLDKRVETCFPVEGKKLLLRVKKELEGYLTDNTHAWTLQPDGRYVRSTPTGNQNPRSAQATLLERLSNPVLNVR

SEQ ID NO: 50014 - DNA, 2142 bp, Marinobacter sp. ELB17
  CDS (1)..(2142): transl_table=11
atgaccagtaaaaagggcaatctgaagattgccgacaatgattctactttgcccgcagcggacactgtgctttcgcccgaggaaagtctgagcctggacgcctgccaaaattttttcaaccgcgagttgagccaactgcagttcaaccatcgggtgttgaagcaggccctggacgacacccatccgctaatcaaccggcttattttctgctgcatattcagcagcaacatggacgaattcttcgaaatccgcgtggcgggtatgcgccagcagttgaagtacggccgggagcaaatccacgccgacggactgcagccggaacagctactggcggagatcagccgtgtggctcacgagtacattgacgaacagtacgatattttgaacaacgtgctgattccggaattggaaaagcaaaatatccactttgtgcgccggcacgagtggactccggcccaggcccaatgggtgcgcacctattttgacgaagaaatactaccggtggtcagcccgattggcctggatccatcgcacccgttcccgcggctggtgaataaaagcctcaactttattgtggaactggacggcaaagatgcttttggccgtgaaaccggtatggccattgtgccggcgccgaagtctttgccgcggctggtgcggctgccggatgacgtttgcgacggcggcgacaatctggtgtttttgtcgtcgatgattcacgcccataccgacgagctgttcccgggtatggaaatcaaaggctgttaccagtttcgcctgacccgtaatgcggatctggagctggaagacgacctggaagacctggcatcggccctgcgcggtgagttgctgagccgccgttttggtgacggtgtgcgcctggaagtggcggataattgcccgcaggagctggttcagtttctgctgaccgagtttggcctgaccgagcgcgacctctacgaggtgcgtggcccggtgaacctggcccggctgctggcggtagggggtctggtggaccgaccggacctgagctattccggtttttcaccggtgatcccgcgccagattcgcagccgtgactcgatgtttgacagcatccgcaagcgtccgattctgttgctccatccctatgagaacttcagtccggtggtggatttgctgcgccaggccgccaaagatccgcaggtgctggccattcgtcagaccttgtatcgctccggtgccaactccgaagtggccgaagccttggccgatgccgctcgccgcggtaaggaagtcaccgttgttatcgagctgacggcgcgattcagcgaggaggaaaacctggagctggccagccgcctgcaggaagccggggtaattgtggtgtacggggtagtgggctacaaaacccacgccaaaatgattctgattgtgcgccgcgaagaaggccgcttgcggcgctatgtgcacttgggtacgggtaactatcatgccgccaacgctcgcctgtacaccgactacagctttatgacctgcgacgaatctatcggcgacgatgtgaacaaactgttccagcagttgaccggtatgggcaaggcgttaaaaatcaagaaactgttccactcaccattcactctgcattcgcgaatactgcaactgattgagcgggaaacccgcctgggtgagaagggccggattattttcaagttcaacggcctgaccgagcctcagctgattaaagcgctgtatcgtgcctcccaggccggtgcgaaaattgacctgattattcgtggtatctgctgccttcggccccaggtgcccgggttgtcgagcaccattcacgtgcgctctattatcgggcgctttctggagcatacccgggtttactattttggtaacgatggccaagcccaggtgtattgctccagcgccgatggcatggaacgtaacctgctaaggcgggttgaagtcgccttccctgtggaggagccggcgctggtggagcgtttgcaagacgatttgaatacctatcttgctgataactgccagtcttgggtgttgcaggctgatggcagttatgagcagaacgaaccggcggagggcgagccaaggctggcttcgcagttggtgttgctggagcggctgaccgccaaatcttga

SEQ ID NO: 50015 - protein, 713 aa, Marinobacter sp. ELB17
MTSKKGNLKIADNDSTLPAADTVLSPEESLSLDACQNFFNRELSQLQFNHRVLKQALDDTHPLINRLIFCCIFSSNMDEFFEIRVAGMRQQLKYGREQIHADGLQPEQLLAEISRVAHEYIDEQYDILNNVLIPELEKQNIHFVRRHEWTPAQAQWVRTYFDEEILPVVSPIGLDPSHPFPRLVNKSLNFIVELDGKDAFGRETGMAIVPAPKSLPRLVRLPDDVCDGGDNLVFLSSMIHAHTDELFPGMEIKGCYQFRLTRNADLELEDDLEDLASALRGELLSRRFGDGVRLEVADNCPQELVQFLLTEFGLTERDLYEVRGPVNLARLLAVGGLVDRPDLSYSGFSPVIPRQIRSRDSMFDSIRKRPILLLHPYENFSPVVDLLRQAAKDPQVLAIRQTLYRSGANSEVAEALADAARRGKEVTVVIELTARFSEEENLELASRLQEAGVIVVYGVVGYKTHAKMILIVRREEGRLRRYVHLGTGNYHAANARLYTDYSFMTCDESIGDDVNKLFQQLTGMGKALKIKKLFHSPFTLHSRILQLIERETRLGEKGRIIFKFNGLTEPQLIKALYRASQAGAKIDLIIRGICCLRPQVPGLSSTIHVRSIIGRFLEHTRVYYFGNDGQAQVYCSSADGMERNLLRRVEVAFPVEEPALVERLQDDLNTYLADNCQSWVLQADGSYEQNEPAEGEPRLASQLVLLERLTAKS

SEQ ID NO: 50016 - DNA, 2244 bp, Lactobacillus reuteri
  CDS (1)..(2244): transl_table=11
atgtataaggagttttataagccgcagaattatgttaatcgagaattgagttggattgactttaatggccgagtactgggagaggcaactgatactgctaatcctttgttagaacgtgctaacttcttgggaattactcaaagcaatgttgatgaattttttatggtgcgggttgcatcgcttcataagcttgctgctgccaatgttactactactgatgcgtctggtctgactccagaagagcagttggatgcagtaaatgaaaaagaacaccggatggttaagcaacggtatgaagtttataatcagcaaatcatcccggaccttgctaaaaataatattcatattctccatgtccccaaacttgacgagaagcaatatgaatttattcgtcggtactttaatgatgagctgatgccagttttgactcccatggcagatgatgcctcacgtccttttccttttatctccaataattctttaaatattgctgttcagctacggcgtcaaatccgttcaacaagtgaaccagttgcagaggaaattctagagggagatcaagaagttcatcgtccacaaatggaaccacatgatgatcgtcaagaagcagatatcaaatttgcaacagtccgtgttccagaaatttataagcggttagttcggttaccaggagaaaatagcttcattttgattgatgaaatcattactgaatttctgagcgcgctttttccaggatacgagatcttagctacagcgtcatatcgagttatgcgggatatggacttagatgtggctgaagaagatacgtctgatttgctccgggcagtcaaacggcaattgcgggaacgagagcatggacaggtgatgcgcctagaagttcctgcttctatcgatgaatggttaaaagatcaattaattgataatctgcatgtaagtgaacggtcactgtatgaagtagatggtcccgtcgatttaactttcttaaaaaaattatcggggatggttgatggtcatgatgacttgcgctatccaccatataagccatacctcaacccagcgttagatatggatcataatattttttcttcaattcgccaaaaggattacctaatgcagcatccttatgataattttcaagccgtggtcaactttattcatcaagcagccattgatccagatgttttggcaatcaagatgactctttatcgggtctctggtaattcaccgattattaagtatctcggaatggccgcgcaacagggtaagcaagtaacggttctagttgaagttaaagcgcggtttgatgaacaaaataacgttcggtgggcacaacggcttgaacagatggggtgccacgttatttacggtttagttggccttaaaacgcactgtaaagttgctttggttatccgtcgcgatgaagatgggctgcggcgttatatgcacctaggaactgggaactataatgatgtaacagctcatttttacactgatatgggattatttacttgtgaccatgagctgggtatcgatatgacaaacctgtttaatatgctgtcaggatttgcacgaccagcttatttcaatgaattacgggtatctcctgatgggattcggacatttattaatgccaaaattgatgagcaaattgaaaatgccaaaaatggtaatcctacgttaattcggatgaagatgaattccttgtctgacaagcaaatcattgcccgcctatacgctgctgctgctagtggagttaaggttgagttattaattcgaggcattacctgtttaaggaacgatttgccagaattacatgggaatattgaggttcattcgattattgggcgtttccttgaacactcccggatctactactttaagagtaatggtcatgaggaagtctacctcgcaagtgccgatatgatgacgagaaatcttaatcgacgagttgaagaattgtatcccgttacccagccagacacaaaagctcatgcaattcatatttttgacgttatgtggaaagataatgtcaaggctcgacggttagtaggagatcattacgaacggattgatcgtggtgatgtcgcaccattcagttcacaagaatactttgttaaacaagcaatgaaattgaatgcgcgtgagaaaaaggagaagaaagcaaaaaaccatttttcttctgtttttgaaactttaacctcccatgtccccaatcttcatttagatgagcgaaaggatgagtaa

SEQ ID NO: 50017 - protein, 747 aa, Lactobacillus reuteri
MYKEFYKPQNYVNRELSWIDFNGRVLGEATDTANPLLERANFLGITQSNVDEFFMVRVASLHKLAAANVTTTDASGLTPEEQLDAVNEKEHRMVKQRYEVYNQQIIPDLAKNNIHILHVPKLDEKQYEFIRRYFNDELMPVLTPMADDASRPFPFISNNSLNIAVQLRRQIRSTSEPVAEEILEGDQEVHRPQMEPHDDRQEADIKFATVRVPEIYKRLVRLPGENSFILIDEIITEFLSALFPGYEILATASYRVMRDMDLDVAEEDTSDLLRAVKRQLREREHGQVMRLEVPASIDEWLKDQLIDNLHVSERSLYEVDGPVDLTFLKKLSGMVDGHDDLRYPPYKPYLNPALDMDHNIFSSIRQKDYLMQHPYDNFQAVVNFIHQAAIDPDVLAIKMTLYRVSGNSPIIKYLGMAAQQGKQVTVLVEVKARFDEQNNVRWAQRLEQMGCHVIYGLVGLKTHCKVALVIRRDEDGLRRYMHLGTGNYNDVTAHFYTDMGLFTCDHELGIDMTNLFNMLSGFARPAYFNELRVSPDGIRTFINAKIDEQIENAKNGNPTLIRMKMNSLSDKQIIARLYAAAASGVKVELLIRGITCLRNDLPELHGNIEVHSIIGRFLEHSRIYYFKSNGHEEVYLASADMMTRNLNRRVEELYPVTQPDTKAHAIHIFDVMWKDNVKARRLVGDHYERIDRGDVAPFSSQEYFVKQAMKLNAREKKEKKAKNHFSSVFETLTSHVPNLHLDERKDE

SEQ ID NO: 50018 - DNA, 2217 bp, Pseudomonas chlororaphis
  CDS (1)..(2217): transl_table=11
atgaataccgaaggactcactgaagttgccgtaaaagaagctcaacccgtggtcgagcaggttgttgaaacaccgcgggactggagccccgccggtgcaagcggacgcgccgcatgtggcgatgccgaccctggtcatcccggcctggatgacagcagcctgtatatccatcgcgagctgtcgcaactgcagttcaacatccgcgtgctggaacaggcgctggacgagtcctacccgttgctggagcgcctgaagttcctgctgatcttctccagcaacctggacgagttcttcgagatccgcgtcgccggcctgaagaagcagattaccttcgcccgtgaacaggccggtgccgatggcctgcaaccgcaccaggccctggcgcgcatcagcgacctggtgcacggtcacgtcgaccgccagtacgcgatcctcaacgacattctgttgccggagctggagaaacatcaggtccgcttcatccgtcgccgttactggaccaccaagctcaagacctgggtccgtcgctacttccgcgacgagatcgcgccgatcatcaccccgatcggcctcgacccgacccacccgttcccgctgctggtgaacaagagcctgaacttcatcgtcgaactcgaagggatcgacgccttcggccgcgattccggcctggcgatcatcccggcgccgcgcctgctgccgcggatcatcaaggtgccggaagaagtcggcggccctggcgacaactatgtattcctctcgtcgatgatccacgcccacgccgatgacctgttccagggcatgaaggtaaagggctgctatcagttccgcctgacccgcaacgccgacctggcggtggacaccgaggacgtcgaagacctggcccgcgccctgcgcggcgatctgttctcccgtcgttacggcgatgcggtgcgtctggaagtggccgacacctgcccgaaacatctgtccgactacctgctcaagcagttcaacctgagcgagaccgagctgtaccaggtcaacggtccggtgaacctgacgcgcctgttcagcatcaccggcctggacagccatccggagctgcaatacacgccgttcaccccgcagattcccaagctgctgcagaacagcgagaacatcttcagcgtgatcagcaagcaggacatcctgctgctgcacccgttcgagtccttcactccggtggtcgacctgctgcgccaggcggccaaggacccgcacgtgctggcggtgcgccagaccctgtaccgcagcggcgccaactcggaaatcgtcgatgcgctggtggacgcggcgcgtaacggcaaggaagtcaccgcggtgatcgagctgcgcgcgcgtttcgacgaagagtccaacctgcaactggccagccgcctgcaagcggccggcgcggtggtgatctacggcgtggtcggcttcaagacccacgccaagatgatgctgatcctgcgtcgcgaatccggtgagatcgtgcgctatgcccatctgggcaccggcaactaccacgccggcaacgcccgcctgtacaccgactacagcctgctgacctccgacgatgccttgtgcgaagacgtcggcaagctcttaagccagttgatcggcatgggcaagaccctgcgcatgaagaagctgctgcatgcgcccttcaccctgaagaagggcatgctcgacatgatcgcccgggagacccagttcgccctggacggcaagccggcgcacatcatcgccaagttcaactcgctgaccgatccgaagatcatccgcgcgctgtacaaggccagccagtcgggcgtgcgtatcgacctggtggtgcggggcatgtgctgcctgcgtccggggatcgccggcgtgtcgcacaacatccatgtgcgttcgatcatcggtcgcttcctggagcacacccgggtgttctatttcctcaatggcggcgaggagcagatgttcctgtccagcgccgactggatggagcgcaacctcgacaagcgtgtcgagacctgcttcccggtcgagggcaagaagctgatcctgcgggtcaagaaggagctggaaagttatctcaccgataacacccacagctggagcctgcagtcggacggccgctacatccgcaacacgccgaccggcaaccagaacccgcgcagcgcccaggccacattgctggagcgcctgagcaacccggtgctggcggtgcgctga

SEQ ID NO: 50019 - protein, 738 aa, Pseudomonas chlororaphis
MNTEGLTEVAVKEAQPVVEQVVETPRDWSPAGASGRAACGDADPGHPGLDDSSLYIHRELSQLQFNIRVLEQALDESYPLLERLKFLLIFSSNLDEFFEIRVAGLKKQITFAREQAGADGLQPHQALARISDLVHGHVDRQYAILNDILLPELEKHQVRFIRRRYWTTKLKTWVRRYFRDEIAPIITPIGLDPTHPFPLLVNKSLNFIVELEGIDAFGRDSGLAIIPAPRLLPRIIKVPEEVGGPGDNYVFLSSMIHAHADDLFQGMKVKGCYQFRLTRNADLAVDTEDVEDLARALRGDLFSRRYGDAVRLEVADTCPKHLSDYLLKQFNLSETELYQVNGPVNLTRLFSITGLDSHPELQYTPFTPQIPKLLQNSENIFSVISKQDILLLHPFESFTPVVDLLRQAAKDPHVLAVRQTLYRSGANSEIVDALVDAARNGKEVTAVIELRARFDEESNLQLASRLQAAGAVVIYGVVGFKTHAKMMLILRRESGEIVRYAHLGTGNYHAGNARLYTDYSLLTSDDALCEDVGKLLSQLIGMGKTLRMKKLLHAPFTLKKGMLDMIARETQFALDGKPAHIIAKFNSLTDPKIIRALYKASQSGVRIDLVVRGMCCLRPGIAGVSHNIHVRSIIGRFLEHTRVFYFLNGGEEQMFLSSADWMERNLDKRVETCFPVEGKKLILRVKKELESYLTDNTHSWSLQSDGRYIRNTPTGNQNPRSAQATLLERLSNPVLAVR

SEQ ID NO: 50020 - DNA, 1827 bp, Thermus caldophilus
  CDS (1)..(1827): transl_table=11
atgcacctccttcccgaagcaagctggctccagtttaaccgaagggtgctcctccagacggaacgccccgacttccccctcctggcgcagctccgcttcctcggcatctggaaccggaacctggacgagttcttcgccgcccgcatcgccaagcccttcctgaaatcccggcgcggcccagaccacctggccctcctccaagaggccctggaccaggccaagctcgcccgggcgcggtacgatagcctcctccaggaggccttcccccgcctgagggtgctggaccccggggagcttgacgacctggactggctctacttcagggtcttcctggccgagaaggtggcccccaagacggacctcatcccctgggaggcggcgcaggacctctcccacagcgccctctacttcgcctcggagcgctacctcgtgctccttccccaggacctgccccggctcgtggaggtcccgggccgggaggggacctacgtccgcctcggggccctgatgcgctggcggagcgacctcttcctgcccgaggaggcgcccttttacgagttccgcgtcctgaggcttttggagagcgaacgggtgcgggcggactgggacgagctggcggaaagcctcgagggccgccaggagggcacccccaccctcctcgtggtggaggagggcttccccgaggcgtggcttgacgcgctacgccgcgccctggggcttttccccgaggaggtcttcgccctcaagccccccctgaacctctccctggtggacgccctggtggcccaaggcccgcccgagtggcgcttcccccccttccgcccggagaggccccgcaccttcctcaaaaaccccctcgccctcctcggcaagcgggacgtcctcctgtaccacccctttgaggactacgccgccgtggagcgcttcgccgaggcggcgttggccgaggaggtggaggaggtctgggccaccctgtaccgcaccggggaggagaaccccctcgccgaggccctgatcgcggcggcccgcaagggcaagcgggtccacgtcctcctggagggccgggcccggtttgacgagctcttaaacctccgctggtacctgaggctcgtccgcgccggggtggaggtccttccccttcccgaacgcaaggtccacgccaaggccttcctgatcctcacgcaagagggcggctacgcccacctgggcacggggaactacaaccccacgaacggccgccactacaccgacttctccctcttcaccgcccggaaggaggtggtggccgaggtgcgggccttcttccaggctatggccgaggagaagaccccccgcctcggcctcctccgcaccggggaggggatccgccgcctcctcctggaggcggtgctccacgaggcccaccccaaggggcgggtgatcctcaagttcaaccacctcaccgaccctgagctcctcgaggccctggtctacgccgcctcccggggcgcccgggtggaccttctggtgcggagcaccctcacccggctccaccccgccatccgggcgaaaagcctcgtgggccgcttcctggagcacgcccgggccgccgccttccgggctgggggggagtggcgggtctacctcgccagcgccgacgccatgccccgcaacttccagaaccgctttgagctcctcttccccgtcctggacaaggaggccaagaagaaggccctcaaggtgctcaagcgccaggtcgccgacgaccgcaacagcttcctcctcacccccgagggagaaaagcgcctctggggaggccgccacgacgcccagcgcctggagctatga

SEQ ID NO: 50021 - protein, 608 aa, Thermus caldophilus
MHLLPEASWLQFNRRVLLQTERPDFPLLAQLRFLGIWNRNLDEFFAARIAKPFLKSRRGPDHLALLQEALDQAKLARARYDSLLQEAFPRLRVLDPGELDDLDWLYFRVFLAEKVAPKTDLIPWEAAQDLSHSALYFASERYLVLLPQDLPRLVEVPGREGTYVRLGALMRWRSDLFLPEEAPFYEFRVLRLLESERVRADWDELAESLEGRQEGTPTLLVVEEGFPEAWLDALRRALGLFPEEVFALKPPLNLSLVDALVAQGPPEWRFPPFRPERPRTFLKNPLALLGKRDVLLYHPFEDYAAVERFAEAALAEEVEEVWATLYRTGEENPLAEALIAAARKGKRVHVLLEGRARFDELLNLRWYLRLVRAGVEVLPLPERKVHAKAFLILTQEGGYAHLGTGNYNPTNGRHYTDFSLFTARKEVVAEVRAFFQAMAEEKTPRLGLLRTGEGIRRLLLEAVLHEAHPKGRVILKFNHLTDPELLEALVYAASRGARVDLLVRSTLTRLHPAIRAKSLVGRFLEHARAAAFRAGGEWRVYLASADAMPRNFQNRFELLFPVLDKEAKKKALKVLKRQVADDRNSFLLTPEGEKRLWGGRHDAQRLEL

SEQ ID NO: 50022 - DNA, 2061 bp, Enterobacter agglomerans
  CDS (1)..(2061): transl_table=11
atgggtcaggtaaagctttatattgaaaaagaaatgagctggttgtgctttaacgaacgtgttttgcaggaagcggcagacaaaagtaatccgctgattgaacgtatgcgtttcttaggtatttactcaaataacctcgacgaattttacaaggtccgctttgccgacctgaaacgacgcatcctgattggcgaagagcaaggctccgccagtacaccgcgccacctgttgaagaagattcagcagcgcgtcctgaaatcggatcaggaatttgatgcgctctacaacgacctgttgctggaaatggcgcgcaatcaaatctttctgattaacgaacgtcagctttcacctaatcagcaaagctggctgcgtcactactttaagcatgaactgcgtcagcacatcacgccgatcctgattacccatgaaaccgacctgacggagtttctgaaagacgattacacctatctggcggtcgagatcattcgcggcagcgatattcagtacgcgttgctggaaatcccgtcagacaaggtcccgcgttttattaacctgcctgcggagccgccgcgccgccgcaagccgatgatcctgttagacaacatcctgcgctactgcctggatgatattttcaaaggtttctacgattacgacacgctgaacgcctattcaatgaaaatgacgcgcgatgcggagtacgatctggtcaccgaaatggagtccagcctgctggaactgatgtcctccagcctgaaacagcgtctgacggcagaacctgtgcgttttgtctatcagcgcgatatgccggattctatggtggcgctgctgtgcgacaagctgtcgatttccaactacgactccgtgctggcaggcggacgctatcacaacttcaaagactttatcgggtttcctaacgtcgggaaaaacaacctgattaaccgtccgatgccgcagattcgccacattggttttgacggcttccgcaacggttttgacgccattcgtaatcgcgacgtcctgctttattatccgtatcacacgttcgagcatgtgctggaactgctacgccaggcatcattcgaccccagcgtgctggcgattaaaattaatatttaccgcgtcgccaagcattcccgcatcatggatgcgatgattcacgccgcctataacggtaagaaagtgacggtggtcgtcgaacttcaggcgcgtttcgatgaagaagccaatatttactgggctaagcgcctgacagaagccggtgttcacgttattttctcggcgcctggcctgaaaattcacgccaaactgttcctgatttcccgtcgtgaaggcgaagaaatcgtgcgctatgcccacatcggcaccggtaactttaatgagaaaaccgcgcgtctgtacacggactactcgctgctgaccgccgatgcgcggatcaccaatgaagtgcgccgggtctttaactttatcgaaaacccgtaccgcccggtgacgtttgatcacctgatggtttctccgcaaaactcacgtcggatgctgtatgatttgatcgataacgagattgcgaatgcccaacaaaagcgccccagtggcataactcttaaaattaacaacctggtggacaaagggctggtagacaggctttatacggcctccagcgttggcgtaaatgttaatttactggttcgtgggatgtgctcattgattccggacttgcctgggatcagtgaaaatattcgtgtgatcagtatcgttgatcgcttcctggaacatgaccgcgtttatatctttgaaaacggtggggacaagaaagtgtttctctcctcggctgactggatgacgcgtaacattgattaccgtatcgaagtggccgtggctatcctggatccacaaataaagcagcgcattctggacatcattgccattcagctcagcgacacggttaaagcgcgcgtcgtggataaagagctgagtaaccaatacgttcagcgcggcaatcgtcgtaaggtgcggtcgcaaatggcgatttacgaatacattaagaagctggaacaacctgaataa

SEQ ID NO: 50023 - protein, 686 aa, Enterobacter agglomerans
MGQVKLYIEKEMSWLCFNERVLQEAADKSNPLIERMRFLGIYSNNLDEFYKVRFADLKRRILIGEEQGSASTPRHLLKKIQQRVLKSDQEFDALYNDLLLEMARNQIFLINERQLSPNQQSWLRHYFKHELRQHITPILITHETDLTEFLKDDYTYLAVEIIRGSDIQYALLEIPSDKVPRFINLPAEPPRRRKPMILLDNILRYCLDDIFKGFYDYDTLNAYSMKMTRDAEYDLVTEMESSLLELMSSSLKQRLTAEPVRFVYQRDMPDSMVALLCDKLSISNYDSVLAGGRYHNFKDFIGFPNVGKNNLINRPMPQIRHIGFDGFRNGFDAIRNRDVLLYYPYHTFEHVLELLRQASFDPSVLAIKINIYRVAKHSRIMDAMIHAAYNGKKVTVVVELQARFDEEANIYWAKRLTEAGVHVIFSAPGLKIHAKLFLISRREGEEIVRYAHIGTGNFNEKTARLYTDYSLLTADARITNEVRRVFNFIENPYRPVTFDHLMVSPQNSRRMLYDLIDNEIANAQQKRPSGITLKINNLVDKGLVDRLYTASSVGVNVNLLVRGMCSLIPDLPGISENIRVISIVDRFLEHDRVYIFENGGDKKVFLSSADWMTRNIDYRIEVAVAILDPQIKQRILDIIAIQLSDTVKARVVDKELSNQYVQRGNRRKVRSQMAIYEYIKKLEQPE

SEQ ID NO: 50024 - DNA, 2106 bp, Thiobacillus ferrooxidans
  CDS (1)..(2106): transl_table=11
atgtctgaggtgcctgcgccggaaaaagcccgttccgcgccgcctctcgacagccctgagctgtacttcaaccgagacctcagcatcctcgccttcaaccagcgggtactggccctggctgacgaccagcgcgtaccgctgctggaacgtttacgctacctgaccatcgtttccagcaatctggacgaattttttgaagtgcgcatggccggactgttgcagcggcttaaattcggcgccggccccttgggaccggacatgcttgggccccaacgcgaaatcgaggcagtagcgaaaaaggcccatgaaatcatttccgaacaataccgatgcctgaatcagcgcctgctgcccgctctggctaaggaaggtattcgcttgttgcgccgccgcgaatggcgggcagcgcagaaacgttggatcagcaattatttccagacggaggtgctgcctctgctcactcccctgagcctcgaccccgcccacccctttcccaaggtacagaacaaagggctgaatttcgctatcgttctggaaggccaggatgcttacgggcgacacagccccatcgccatcgtacaggcgccacgcattctcccccgcatcatctggattccgcaacatctggcgggtccgaatgatttcgtgtttctctcctccgtcatccacgaacatgtgcaggcgctctttccgggtctgaccatccagggtttttatcagtttcgggtgacgcgcaacagtgaactctttgtggatgaggaagaggtggacaatctcctcgacgcgctggccgatgaattaccgctacgcccctttggcgaggcggtacggctggaggtcgctaacaattgtccgcgggaagtggtggaatatcttctgaaacattttgaactgagcgagagcaacctgtattcattgcagggtcccgtgaatctgtcacggttggcggccatcatcgaaatggtcccccgccccgacttgctttatccgcccttcataccggggctgccagcggtttgttcacaccccgagaacatattcgcgcatctacgggaggcgcccatcctgctccatcacccataccagagcttcaacccggttctggatttcctccgccaggcggtcagcgatccaaaagtcatcggcatcaagcagacgctgtaccgtaccacccccgactccccggtcatcgacgcgttgatagaagcggccatggccgggaaacaggtcacggcagtggtcgaactcaaggcccgctttgacgaagccaataacatccggatggccgagcgtctggaagaagtgggtgtgcaggtggtatacggcgtggtcaatcacaaggtgcatgccaagatgattctcatcctgcgccgggaggaggacgggatccgcctctacgggcacttgggtacgggcaattatcatccccgcaatgcgcggatttacactgatctcagcctgctcacggcaaatcccgacatcacggcggacatgaatgacctgttcatgcatatcactggcatgggcaaggcaccacaattgcgctgtctgctgcagagtccctttacgatgttccagggcatacaggaagccatcgatacggagatccgtcacggaagcaaaggtcgcatcatcgtgcgggtgaacgcgctggtcgaacccgatctgattcgcgccctgtaccgggcctcccaggccggggtggaaatcgacctggtggtgcgcggcgcctgtgccctgcgccccggcatcccaggtgtctccgatcatatccgggtacgttccattgtcggccgtttcctcgaacacagtcgcgtctattacttcggaaacaacgggcatccccgtctctggatatcgagcgccgactggatgggacgcaatcttttccgccgtctggaagtcgcagtacccattaccgaccccgacttgcgcgcccgcatactcacggaaacccttcagctatacttggaagacgactgtaacgcttgggcgatgcgtgcggatggtgattatgaatttttacgcaaccccctggatgccaactgcaaatccgcacaggaccgtctgctggaacactacaacaggagcagtcattatgggtga

SEQ ID NO: 50025 - protein, 701 aa, Thiobacillus ferrooxidans
MSEVPAPEKARSAPPLDSPELYFNRDLSILAFNQRVLALADDQRVPLLERLRYLTIVSSNLDEFFEVRMAGLLQRLKFGAGPLGPDMLGPQREIEAVAKKAHEIISEQYRCLNQRLLPALAKEGIRLLRRREWRAAQKRWISNYFQTEVLPLLTPLSLDPAHPFPKVQNKGLNFAIVLEGQDAYGRHSPIAIVQAPRILPRIIWIPQHLAGPNDFVFLSSVIHEHVQALFPGLTIQGFYQFRVTRNSELFVDEEEVDNLLDALADELPLRPFGEAVRLEVANNCPREVVEYLLKHFELSESNLYSLQGPVNLSRLAAIIEMVPRPDLLYPPFIPGLPAVCSHPENIFAHLREAPILLHHPYQSFNPVLDFLRQAVSDPKVIGIKQTLYRTTPDSPVIDALIEAAMAGKQVTAVVELKARFDEANNIRMAERLEEVGVQVVYGVVNHKVHAKMILILRREEDGIRLYGHLGTGNYHPRNARIYTDLSLLTANPDITADMNDLFMHITGMGKAPQLRCLLQSPFTMFQGIQEAIDTEIRHGSKGRIIVRVNALVEPDLIRALYRASQAGVEIDLVVRGACALRPGIPGVSDHIRVRSIVGRFLEHSRVYYFGNNGHPRLWISSADWMGRNLFRRLEVAVPITDPDLRARILTETLQLYLEDDCNAWAMRADGDYEFLRNPLDANCKSAQDRLLEHYNRSSHYG

SEQ ID NO: 50026 - DNA, 2070 bp, Serratia marcescens
  CDS (1)..(2070): transl_table=11
atgggtcaggaaaagctctacatcgaaaaagaactaagctggttatcctttaaagagcgcgtgttgcaggaagccgcagataagagcaatcccctgattgaacgtatgcgttttctgggcatttactccaacaacctcgacgagttctataaagtccgcttcgccgatctcaaacggcgcatcctgatcagcgaagagcaaggctccgccggttcctcacgccatctgctgaaaaagatccaggccaaggtgctgaaaaccgatcaggagttcgacggtctgtacaacgatctgctgctggaaatggcgcgcaaccagatcttcctgatcaacgaacgccaggtgtccgagaaccagcaaatctggctgcggcaatatttcaaacagcacctgcgccagcacatcacgccgatcctgatcaaccacgacaccaacctggtgcagttcctgaaagacgattacacctatctggcggtggagattatccgcggcgcgcgcactgactatgcgctgctggatatcccgtcggacaaggtgccgcgcttcgtcaatctgccgccggaagcgccgcgccgccgcaagccgatgatcctgctcgacaacatcctgcgctactgcctggacgatatcttcaagggcttcttcgactacgacgcgctcaacgcctattcgatgaagatgacccgtgacgccgagtacgatctggtgaccgaaatggaatccagcctgctggaactgatgtcctccagcctgaaacagcgcctcaccgccgaaccggtgcgcttcgtttatcagcgcgacatgccgaacgaaatggtggagctgctgcgcggcaagctgggcatctccaactacgattcggtgatcgccggcggccgctaccacaactttaaagatttcatcagcttcccgaacgtcggcaaagccaacctggtcaacaagccgctgccgcgcctgcgccacatctggttcgacggtttccgcaacggcttcgacgccattcgcgaaaaagacgtgctgctctactacccgtaccacacctttgagcacgtcctggagctgctgcgccaggcgtcgttcgatccgagcgtgctggcgatcaaaatcaacatctaccgcgtggcgaaagactcgcgcatcatcgaatcgatgatccgcgcgcacaacggcaagaaagtcacggtggtggtcgagctgctgcaggcgcgcttcgacgaagaggccaacattcactgggcgaacggcctgaccgaggccggcgtacacgtgatcttctccgcgccggggctgaaaatccacgccaaactgttcctgatttcgcgccgtgaaggcgatgaaattgtgcgctatgctcatatcggcaccggcaactttaacgaaaaaaccgcgcgcatctacaccgactattcgctgttgaccgccgactcgcgcatcaccaacgaggtgcgccgggtgttcaactttatcgagaacccctaccggccggtcaccttcgacaacctgatggtgtcgccgcagaactcgcgcctgaagttgtatgagctgattgacaacgaaatcgccaacgccaacgcccaggccggggaacaggccggcattatgttgaaaataaataatctggtggataaagggctggtagatcggttatataccgcgtccggcgccggcgtgaagatccgtctgctggtgcggggcatgtgttccctgattcccaacctgccggggatcagcgacaatattcaggtgatcagcatcgtcgatcgctttttggaacacgatcgggtttacgttttcgacaacaaaggtgacaaacgggtgtatctgtcctccgccgactggatgacccgcaacatagattaccgtatcgaagtggcggtatcgctgctggatccggcgctgaaacagcgcgttctggacattctggagatcctgttcagcgatacggtcaaggcccgttatgtggataaagaactgagcaaccagtacgtgccgcgcggcaaccgccgcaaagtgcgcgcccaggtggctatttacgagtatttaaaagctctggaacaaccaggacagtag

SEQ ID NO: 50027 - protein, 689 aa, Serratia marcescens
MGQEKLYIEKELSWLSFKERVLQEAADKSNPLIERMRFLGIYSNNLDEFYKVRFADLKRRILISEEQGSAGSSRHLLKKIQAKVLKTDQEFDGLYNDLLLEMARNQIFLINERQVSENQQIWLRQYFKQHLRQHITPILINHDTNLVQFLKDDYTYLAVEIIRGARTDYALLDIPSDKVPRFVNLPPEAPRRRKPMILLDNILRYCLDDIFKGFFDYDALNAYSMKMTRDAEYDLVTEMESSLLELMSSSLKQRLTAEPVRFVYQRDMPNEMVELLRGKLGISNYDSVIAGGRYHNFKDFISFPNVGKANLVNKPLPRLRHIWFDGFRNGFDAIREKDVLLYYPYHTFEHVLELLRQASFDPSVLAIKINIYRVAKDSRIIESMIRAHNGKKVTVVVELLQARFDEEANIHWANGLTEAGVHVIFSAPGLKIHAKLFLISRREGDEIVRYAHIGTGNFNEKTARIYTDYSLLTADSRITNEVRRVFNFIENPYRPVTFDNLMVSPQNSRLKLYELIDNEIANANAQAGEQAGIMLKINNLVDKGLVDRLYTASGAGVKIRLLVRGMCSLIPNLPGISDNIQVISIVDRFLEHDRVYVFDNKGDKRVYLSSADWMTRNIDYRIEVAVSLLDPALKQRVLDILEILFSDTVKARYVDKELSNQYVPRGNRRKVRAQVAIYEYLKALEQPGQ

SEQ ID NO: 50028 - DNA, 2145 bp, Chlorobium tepidum
  CDS (1)..(2145): transl_table=11
atgacagattcggaaaacgggacattggttccggcggctatagccgagccggatctgcgcgatcccttgctctacgtgaaccgtgagctgagctggatcgatttcaaccagcgagtgctcgaagaggcactcgattccgccgcgcatccgttgttggagcgcgtcaagttcctctcgattttcagctccaacctcgacgagtttttcatgatccgcgtggcgggacttgatgaccagtgcgctgcgggcatcaacgagcgctcggtcgatggcctcacgcctatcgagatgctcgagcggattcgcgagcgcgtcatcggccagctccggcagcgcaacgcctgttttttcgatgatattctgcctgcgctcaaaaggaaagggatcgaattcgtcagtgtctcttcgctttccgtcgagcagcagcaacttcttcagcactatttcagaaaggaggtttttccggttctgacgccgctcgctttcgatacgggccatccctttccgttcatgtccaacctctcgctgaatcttgcaatcgagcttgaggacgaggagagcggagcgatcaagtttgctcgcgtcaaggtgcccggcattttgtcgagaatcatccgactcgaccagatcgagggtctcggcttcgacgacggacggatacgcctactgtggctcgaagaccttgtagagcacaacctcgatcagctctttccgaagatgcgcattttgcagtgccacccattcaggatcatccgtgacgcggatatcgagatcgaggaggacgaggcgggcgatttgctcgaaagcatcgaacagggggtgcgctcgcgccgctatggcaaggtggtacgtctcgatatcaatcccgacatgccgcactccatccggagcctcctcgtcaagaaccttgaaacttacgagcggaacgtttacgaaattggcggcgtgctcggcatgagcgcgctgatggagctgcttaaaatcgaccggcctgatctgaaagacgagcttttcgtgccgaacaatccgcttgatgacaagcggactgctgacatatttgctgaaatgcgttccggcgatatgctgctgcatcacccatacgactcgttcaagccagtggttgatctcatctggcaggcggcgcgcgatcccgatgtgctctctatcaagcagacgctctaccgggtaggcagcaactcgccggtggtcaaggcgctgatgttcgccgccgagcagcgcaagcaggtggcggtgctggtcgagctcaaggcaaggtttgacgaggagaacaacatcctctgggcgcgttcgctcgaagatgctggagcgcatgtggtttacggcctgcccggcctgaagactcacgccaagctcacgatgatcgtacggcgtgagcaggagggacttcgccactacctgcatctcggcaccggcaactataacaccgtgaccgcgagaatctataccgattatagctatctgacgaccgacccggtgcttgctgacgacgtcaccgagctgttcaactcactgaccggctactcgaagcatcgcgaatatcgctcgctgatcgtttctccgcttaatatgcggcgctggatcatggagatgatccgtcacgaagtcgaccaccaaaagcataccggcaacggcagaatcgtcatgaagatgaatgcactggtcgatgaggagatcatccgagcgctctaccgcgcctcgatggccggcgtgaagatcgatctggccatccggggtatctgctgtctcaagcctggtattcccggcatcagcgaaaacatccgggttgtcagcgtgatcggtagatttctcgaacacagccgggtttattattttaacaatggagatcatgcccggatttttctgggcagtgctgacatcatgccgcgtaacctcgacaagcgggtcgagacgctttttcccgttattgagccgcgcctggttgaatcgatcaaatccgatcttgaactgaccctgagcgataaccgcaaatcgtgggagatgcagccggacggaacctacatcagaaaacggggcgggcggccagcagtcgacagccagaggctgtttatgcggcgctctctccggaggaagaaaaacatcaaaaaaaaggttaaaggattatga

SEQ ID NO: 50029 - protein, 714 aa, Chlorobium tepidum
MTDSENGTLVPAAIAEPDLRDPLLYVNRELSWIDFNQRVLEEALDSAAHPLLERVKFLSIFSSNLDEFFMIRVAGLDDQCAAGINERSVDGLTPIEMLERIRERVIGQLRQRNACFFDDILPALKRKGIEFVSVSSLSVEQQQLLQHYFRKEVFPVLTPLAFDTGHPFPFMSNLSLNLAIELEDEESGAIKFARVKVPGILSRIIRLDQIEGLGFDDGRIRLLWLEDLVEHNLDQLFPKMRILQCHPFRIIRDADIEIEEDEAGDLLESIEQGVRSRRYGKVVRLDINPDMPHSIRSLLVKNLETYERNVYEIGGVLGMSALMELLKIDRPDLKDELFVPNNPLDDKRTADIFAEMRSGDMLLHHPYDSFKPVVDLIWQAARDPDVLSIKQTLYRVGSNSPVVKALMFAAEQRKQVAVLVELKARFDEENNILWARSLEDAGAHVVYGLPGLKTHAKLTMIVRREQEGLRHYLHLGTGNYNTVTARIYTDYSYLTTDPVLADDVTELFNSLTGYSKHREYRSLIVSPLNMRRWIMEMIRHEVDHQKHTGNGRIVMKMNALVDEEIIRALYRASMAGVKIDLAIRGICCLKPGIPGISENIRVVSVIGRFLEHSRVYYFNNGDHARIFLGSADIMPRNLDKRVETLFPVIEPRLVESIKSDLELTLSDNRKSWEMQPDGTYIRKRGGRPAVDSQRLFMRRSLRRKKNIKKKVKGL

SEQ ID NO: 50030 - DNA, 2079 bp, Acinetobacter baumannii
  CDS (1)..(2079): transl_table=11
atgaattccgtagttacacaagcctcccccccggtatatggtcaagttgagcgatatattaatcgcgagttgtcaattttagattttaatttacgtgtcttagaacaagcggtcgatcctttaaatccactcttagaaaaattgaattttttattaattttttctagaaatttagatgagttttttgaaattcgtgttgcaactatgttggaacattttgttcaagagcgagacatacaaacggctgatggtttatccccacaagaaattttacatcaaatttcggagacagcacatgctgcgattgaacgccaatatcaaattttaaatgagcaaatttttccgcagttaagagaagaaggcatcagctttttaagacgtggagagttaactcaagcacaatctaattgggtcaaaaaatattttcaggaacaggttgcaccagccttaacaccaataagtttagatcctgcgcatccctttccacgcttggtcaacaaatcacttaatttcattgtgactttggaaggtaaggatgcctttggccgtcagatcgatttggcagtggttcctgcaccacattcattgccacgtgtggtgcgtttgccagatgagttgaccgaaggcaaagagcatcatgtgatgctctcttcaattattcatactcatgtgtctgattcatttccgggaatgacggcaacgggttgctatcaatttagagtaacccgaaatgcagatttaacgttaactgaagatgttgaagacttagcggaagccttaaaagacgaactcagttcacgccgttttggtcgggcagtacgtttggaggtcaataaaaattgtccaacacatatttatgaatacttactcaaagaattcgatttggatacgcatcaattgtatcgtgtagacgggcctgttaatttggctcgattggtctcggattttaaacgcccatatttacgctatgagccacatactcctgtgattccaaaaatactgaaaaaatctgcaaatattttcagtgcgatgcagaaacaagatattttattgcatcatccttttgaatcattttcccctgtaattcgattattacgtgaagccgcgcaagatccgcatgttttggccattaaacagaccttataccgtagcggtgcaaattcagaaattgtgcaaattttggctgaggcggcacgaaatggtaaagaagtcaccgcagtgattgaattacgggcacggtttgatgaagagtccaatatcgctgttgccaatgttttacaggaagcgggtgctgtggtggtatatggcattgtcggctataaaactcatgccaaaatgattttggtggtacgccgagaaaatcaaaaactggtgcgctacgcacatttaggtacaggaaattatcatgctggcaatgccaaaatttacactgattacggtttattaacgaccaatcaagatttgtgtgaagatgtacatcgtatttttcaagaattaaccggtatgggcaaaatggtgaagttaaagaaacttctacatgcaccatttactttgcatagtcagttgatgaattttattgaaaatgagattgtgcttgcgaaagcagggaaaccggcaaaaattatcattaaggtcaatgcactaaccgaagttcaattgattaataaattatacgaagcttctcaagctggtgtgaaaatagaattaataattcgttctatttgttgtttacgtccaggtctagcaggactgtcagaaaatattcgtgtccgttcgattgtgggacgtttccttgaacatactcgtgtctattatttttacaataatggtgatacacgtgtgtattgctcaagtgcagactggatggagcgtaatttatttaaacgtgttgaagtgtgccttcctattgaaaatactggactcaaaaaaagaatttatcagcaagggttagaaaattatttaatggataatcagcaatcatggttattgcaaagtgatggtagttggtgtcgtaacatctcgacagaagatcaaaagcctcataatgcacaacagatgttattaggtgatattatttga

SEQ ID NO: 50031 - protein, 692 aa, Acinetobacter baumannii
MNSVVTQASPPVYGQVERYINRELSILDFNLRVLEQAVDPLNPLLEKLNFLLIFSRNLDEFFEIRVATMLEHFVQERDIQTADGLSPQEILHQISETAHAAIERQYQILNEQIFPQLREEGISFLRRGELTQAQSNWVKKYFQEQVAPALTPISLDPAHPFPRLVNKSLNFIVTLEGKDAFGRQIDLAVVPAPHSLPRVVRLPDELTEGKEHHVMLSSIIHTHVSDSFPGMTATGCYQFRVTRNADLTLTEDVEDLAEALKDELSSRRFGRAVRLEVNKNCPTHIYEYLLKEFDLDTHQLYRVDGPVNLARLVSDFKRPYLRYEPHTPVIPKILKKSANIFSAMQKQDILLHHPFESFSPVIRLLREAAQDPHVLAIKQTLYRSGANSEIVQILAEAARNGKEVTAVIELRARFDEESNIAVANVLQEAGAVVVYGIVGYKTHAKMILVVRRENQKLVRYAHLGTGNYHAGNAKIYTDYGLLTTNQDLCEDVHRIFQELTGMGKMVKLKKLLHAPFTLHSQLMNFIENEIVLAKAGKPAKIIIKVNALTEVQLINKLYEASQAGVKIELIIRSICCLRPGLAGLSENIRVRSIVGRFLEHTRVYYFYNNGDTRVYCSSADWMERNLFKRVEVCLPIENTGLKKRIYQQGLENYLMDNQQSWLLQSDGSWCRNISTEDQKPHNAQQMLLGDII

SEQ ID NO: 50032 - DNA, 2109 bp, Bacillus anthracis
  CDS (1)..(2109): transl_table=11
atggaattatcgaaggggaatatagtaaatttaaatgatacagcttattacaacaatcgagagttaagttggttggcatttaatgaacgtgtactacaagaggcacaagatgaaacgaatccactcttagaaagattgaagtttattagcatttttagctcaaatttagatgaattctttatggtacgcgtggcaggattgaaggatcaagtaagtgctggttttaaccaaccagaaaataaggccggtttaacaccaaaaaagcaattaaataaaattgcgataaaagcacatgaattaatgacagtacaatatggtacgtttaaaaattatgtgttgccagcgcttgagttagaagggattgagcgtttaacatttcatgatttgacgaaagaacagagagaatttatagaagagtattttgatgaacaaattttcccagtcttaacacctgtggctatcgatgcatatcgtccatttccgatgttattaaataaaagtttaaatttagctactcttttatatgatgagaaacaagtagaagaagaaaatcgcacgaagttaggaattgtacaagttccttcactacttgaacgtttcatatttttaccgagtgaagggcaaaagcataaatttattttattagaagacgtaattagtagttttactcataaattatttacaggatataaagtatcatctgttactcgtttccgtattacacgcaacgcggatttaacaattcacgaagaaggtgcgagagatttattaaaggtaattgaaaaagaattaaaaaaacgtaagtggggagctgctgtacgtttagaagttggcaaagagcatattgatgaaagagtattagcattgttatatgaggtgttggaagtaaaggatgaagatgtatatataatggatggaccattagatttaacatgtctattttctttatataaaaaactagctcctttatatgaacatctagtatatccggctcttattccgcaacggcctcaagacttaggggatgcagaagatgtatttgaaaaagcgattgagcatgatattttattacatcatccttttgaatcgtttcagccagtagttgattttgtccgtgatgcggcagacgatccgaatgtacttgcaattaaacaaacattatatcgagtaagtggggattcgccgatcattcaggcgctaaagatagcggctgaaaaaggaaagcaagtgacagtattagttgaattaaaggcaaggtttgatgaggaaaataatgtgcattgggctaaagaattagaacaggctggatgtcatgttatttacggtgtaagtcatttaaaaacacatagtaaaattacactagttgtaagaagaaaaaacggaaaaattgaaaggttcgtacatcttggaaccggaaattataatgatgcaactgcaaagctatatactgattttggctatattacatcacgaaaagactttggtgtcgatgcaacaaatttctttaattatttgagtggttatacaacaaaaccgcattttcatcatttatcggttgcgccatttgatataagagagcaatttatggatttaatagatgaggaaatccgttatcatagacaatatggaaatggttatattatcgctaagatgaattcattaactgataaaccactcattaaaaaaatgtatgaagcatcacaagctggagtaaaggtggaactcatcgttcgaggaacatgttgcctacgacctggtattccaaatgtaagtgaaaatattcgggtagttagtgttgttgggagatatttagaacatagtcgaatttattatttccatcataatggggaagagaaaatatacttatcttcagctgactggatgacgcggaatatggagaagcgagtagaaatatctttcccgatattagatattgaaatgaaggcgagaattaaggcgattttacagcttactttagctgataatgtgaaaacgcgcgaacaaaataaagacggtgactattattatgttattaatagcggtgcagaagagattgatagtcaagtgaagttgtttaagatggcgtatcaaaacacagatgctgaataa

SEQ ID NO: 50033 - protein, 702 aa, Bacillus anthracis
MELSKGNIVNLNDTAYYNNRELSWLAFNERVLQEAQDETNPLLERLKFISIFSSNLDEFFMVRVAGLKDQVSAGFNQPENKAGLTPKKQLNKIAIKAHELMTVQYGTFKNYVLPALELEGIERLTFHDLTKEQREFIEEYFDEQIFPVLTPVAIDAYRPFPMLLNKSLNLATLLYDEKQVEEENRTKLGIVQVPSLLERFIFLPSEGQKHKFILLEDVISSFTHKLFTGYKVSSVTRFRITRNADLTIHEEGARDLLKVIEKELKKRKWGAAVRLEVGKEHIDERVLALLYEVLEVKDEDVYIMDGPLDLTCLFSLYKKLAPLYEHLVYPALIPQRPQDLGDAEDVFEKAIEHDILLHHPFESFQPVVDFVRDAADDPNVLAIKQTLYRVSGDSPIIQALKIAAEKGKQVTVLVELKARFDEENNVHWAKELEQAGCHVIYGVSHLKTHSKITLVVRRKNGKIERFVHLGTGNYNDATAKLYTDFGYITSRKDFGVDATNFFNYLSGYTTKPHFHHLSVAPFDIREQFMDLIDEEIRYHRQYGNGYIIAKMNSLTDKPLIKKMYEASQAGVKVELIVRGTCCLRPGIPNVSENIRVVSVVGRYLEHSRIYYFHHNGEEKIYLSSADWMTRNMEKRVEISFPILDIEMKARIKAILQLTLADNVKTREQNKDGDYYYVINSGAEEIDSQVKLFKMAYQNTDAE

SEQ ID NO: 50034 - DNA, 2118 bp, Bacillus halodurans
  CDS (1)..(2118): transl_table=11
atggggactgaggagaaaatgacaagatcagacatcgatttaaatgaaccagccttctataacaatcgtgaacttagttggctcgcttttaacgagcgtgtactagaagaagcgattgatgaacgaaaccctttgctggagcggctaaaattcttagccattttcagttcaaacctagacgagttttttatggttcgggttgcagggttaaaggatcaagtaaaagctggtttcaacaagccagaaaataaagcaggtcttacgcctaaacagcaattacggcaaatttcagaacgaaaccatcagctcgtccaactccaagatcgtgtctacacggaaacgattatacccatgctttcacagcacggtattcaatttttaacgttcgatgagctttcagacaagcagcgatctttcctagaaaaacggtttgatcattatatttttcctgttcttactcccatggccgtagacgcctatcggccatttccaatgttacttaataaaagtctgaatttagccgtcgtcattaagaataaagagtctgatagccgagagcaactcgcgattgttcaagtaccttccgttcttaaccgcttcatcttgttaccttgtgaagatggaaagaatcaatttattctgcttgaaaatgtcattagctattttatcgaaaaactttttaagggatatacagtcaaatctgtctctccgtttcgaattacgcgtaacgccgacttgcccattcacgaagaaggggctagagatctgttacgtgaaatcgaaaaagaattaaagaaacgaaaatggggagctgctgtacgactcgaaatgcaagaagggcttatggatcccaatgtactaaagctccttcttgacgtattggaaattcataaaaatgacgtttattcactgcaaggtcctctcgatttaacgtttttatttaagctatacaatagactcatcgtcgattacgagcatttaacgaatgagacattaattccacagccaccagaagatttaattggggaaacgaatatttttgatgcgattttaaaacgagatatttttttgcaccatccgtacgaatcgtttcaaccggtcatcgactttatcgcaaccgctgcggaagaccctcaagtgttagcaatcaaacagacgttgtatcgagtaagcggtgattctccaattatcaatgcattggcaagagctgcggaaaacggcaaacaagtaaccgtgcttgtggaattaaaggctcgcttcgacgaggaaaataacattcagtgggcaaaaaagttggaaaagtcaggggttcacgtcatttacgggattaccggcttgaaaacacatagtaaaatcacgttggtcgttcgccaccataacgatgaaattcaacgttttgtccatttagggaccggaaattataacgattctaccgcaaagttatataccgacatgggtctcttaacagcggacgaagaatttggcattgatgccacgaacttttttaatcatttgagcggttatagtgaaaagccgcagtggcaccatctgtcaaccgctccgtttgaaattcgggacaccttcttagatttaattgatcaagaaattgaatgtcacaaacaaaatggaaatggccacatcattgcgaaaatgaattcacttacagataaaccgattattttaaagctttatgaagcttcccgcgcaggtgtaagaatcgaactaatcgttcgcggcatttgctgcttacgccctggaataccaaatgtaagtgaacatattcgcgtctttagcatcgtcgatcgcttccttgaacatagccgaatcttttattttcatcatggcggcgacgacaaagtgttcctttcgtctgcagactggatgacaaggaatatggagaagcgaattgaaattttgttcccgatttatcaacaatccacgaagagacgaatcatcgaaattttaacgattaccctccttgataatatgaaagcacgggagcaaaatcagttcggtcaataccgatacgtgaagcggaatccgtctgagcaacccgttcagagtcaattaacgtttttcgatatggcttctcgattcagcgacagcgaagcggagtag

SEQ ID NO: 50035 - protein, 705 aa, Bacillus halodurans
MGTEEKMTRSDIDLNEPAFYNNRELSWLAFNERVLEEAIDERNPLLERLKFLAIFSSNLDEFFMVRVAGLKDQVKAGFNKPENKAGLTPKQQLRQISERNHQLVQLQDRVYTETIIPMLSQHGIQFLTFDELSDKQRSFLEKRFDHYIFPVLTPMAVDAYRPFPMLLNKSLNLAVVIKNKESDSREQLAIVQVPSVLNRFILLPCEDGKNQFILLENVISYFIEKLFKGYTVKSVSPFRITRNADLPIHEEGARDLLREIEKELKKRKWGAAVRLEMQEGLMDPNVLKLLLDVLEIHKNDVYSLQGPLDLTFLFKLYNRLIVDYEHLTNETLIPQPPEDLIGETNIFDAILKRDIFLHHPYESFQPVIDFIATAAEDPQVLAIKQTLYRVSGDSPIINALARAAENGKQVTVLVELKARFDEENNIQWAKKLEKSGVHVIYGITGLKTHSKITLVVRHHNDEIQRFVHLGTGNYNDSTAKLYTDMGLLTADEEFGIDATNFFNHLSGYSEKPQWHHLSTAPFEIRDTFLDLIDQEIECHKQNGNGHIIAKMNSLTDKPIILKLYEASRAGVRIELIVRGICCLRPGIPNVSEHIRVFSIVDRFLEHSRIFYFHHGGDDKVFLSSADWMTRNMEKRIEILFPIYQQSTKRRIIEILTITLLDNMKAREQNQFGQYRYVKRNPSEQPVQSQLTFFDMASRFSDSEAE

SEQ ID NO: 50036 - DNA, 2301 bp, Campylobacter coli
  CDS (130)..(2214): transl_table=11
ctttttaagataaatttaaagatatatttactcttaattaaccggaataaaaattttgaatttgatttctctaaaaaactcattattttcaaaaataaatgttaaaataacgcaaaaaaaggagttttaatgcaaacaaatccgaatatgtttttaaatagagaactttcttggctacgctttaactcacgggtattagatcaatgttcgcgtccgttgcctttattagaacgccttaaatttgtagctatatattgtaccaatttggatgaattttatatgatacgcgttgccggattaaaacaacttttttcagctggagttaatataagcagtagtgatgagatgtctcctttgcagcaattaaaagctatacgcaaatatcttcacaaagaaaaagatcttttagagcattattttaatgaaattataagcgatcttgaaaaagaaaatctttttatcaaaaattatgaaaatttagacaacaacctcaaacaaaaagtgtacgaatattttttctctactatttttcctgttattgttccaatcgctgtggatgcgactcacccttttccgcacctaaataatctttcattttctttggcggttaatatttgtgataatacccatcctgagcttatcaaatttggaatgattcgaattccaagagttttacctcgtttttatgaagtgagtgccaatgtttatgttccaattgaaagtatagtagaaaaacatacagaagaaatttttccaggttacaaactccttacttcagctgcttttagggtaactagaaatgcagatatggtgatagaagaggaagaagctgatgattttatgatgatattagagcaaggcttaaaacttcgtagaaaaggtgcttttgtaagattacaaattcaaaagggtgcagatgaacaaatcgtagaatttcttaatactcatatgaaaattttccacaaggatgtttatgagtattctatcttgttaaatcttcctagcctttggcaaattgctggcaataaaacctttactcatcttttaagtcccctttatacacctaaaaccttaccgccttttgatgaaaatttatccatttttgatgcgatagataaagaagatatactcatcattcaaccttttgaaagctttgatcctgtttataagttcatcaaagaagcaagcaaagatcctgaggttatttctataagaatgactctttatagagtagaaaaaaactctaacatagtccaagccttaatcggtgccgcaagcgctgggatacaagttacagttatggtagagcttaaagctcgctttgatgaagaaaacaatcttcactgggcaaaagctttagaaaatgctggagctcatgtgatttatggaatcactggctttaaagttcatgccaaagtttctcaagttatacgcaaaaaaggcgataagcttaaattttatatgcatttaagcacgggaaactacaatgcaagcagtgctaaaatctacactgatgtgagttattttacaagcaaagttgaatttgcaagagatacaacaagcttttttcatatactttcaggttttagcaaaaatcgtcgccttcaaactctctctatgagtccaaatcaaatcaaagaaaaaattctagaaatgatagctttagaggcaagcaaaggaagcgaaggagttatcattgcaaagatgaattctcttgtagatagcgatatcataaaagctctttatgaagcaagtattaaaggaactcaaatcgatcttatcgtgcgtggaattttctgtttaaaacctaatgaagaattcagcaaaaacatactcgttagaagtattataggaaaatatttagaacatgctagggtgttttattttaaacacagtgagccaaattattttatatcaagtgcggactggatgccaagaaatttagagcgtcgtttagagcttatgactcctatatatgatgaaagaagtaaggcaaaattagcacaattcttgcgcttgcaactcagcgataatttacttgcttatgaacttcaaaatgatggagaatatgcaaaagttgctagcaatgaaaaagtgattgactcacaacaaattttagaagaatatgtcagtaaaatttataaaacacttaaaaaagatacagatcaaagtcgtgcaacgcacttagcttctaaacttttcaaagaaaactaaaagtttttaaggtttttgctctaaagacttatttacttgtttatgataaaaaaggactttaaaataaagccctaggagatttcccat

SEQ ID NO: 50037 - protein, 694 aa, Campylobacter coli
MQTNPNMFLNRELSWLRFNSRVLDQCSRPLPLLERLKFVAIYCTNLDEFYMIRVAGLKQLFSAGVNISSSDEMSPLQQLKAIRKYLHKEKDLLEHYFNEIISDLEKENLFIKNYENLDNNLKQKVYEYFFSTIFPVIVPIAVDATHPFPHLNNLSFSLAVNICDNTHPELIKFGMIRIPRVLPRFYEVSANVYVPIESIVEKHTEEIFPGYKLLTSAAFRVTRNADMVIEEEEADDFMMILEQGLKLRRKGAFVRLQIQKGADEQIVEFLNTHMKIFHKDVYEYSILLNLPSLWQIAGNKTFTHLLSPLYTPKTLPPFDENLSIFDAIDKEDILIIQPFESFDPVYKFIKEASKDPEVISIRMTLYRVEKNSNIVQALIGAASAGIQVTVMVELKARFDEENNLHWAKALENAGAHVIYGITGFKVHAKVSQVIRKKGDKLKFYMHLSTGNYNASSAKIYTDVSYFTSKVEFARDTTSFFHILSGFSKNRRLQTLSMSPNQIKEKILEMIALEASKGSEGVIIAKMNSLVDSDIIKALYEASIKGTQIDLIVRGIFCLKPNEEFSKNILVRSIIGKYLEHARVFYFKHSEPNYFISSADWMPRNLERRLELMTPIYDERSKAKLAQFLRLQLSDNLLAYELQNDGEYAKVASNEKVIDSQQILEEYVSKIYKTLKKDTDQSRATHLASKLFKEN

SEQ ID NO: 50038 - DNA, 2085 bp, Campylobacter jejuni
  CDS (1)..(2085): transl_table=11
atgcaaacaagtcctgatatgtttatcaatcgcgaactttcttggcttcgctttaattctcgtgttttagaccaatgttctaaaaatttacccttgttagaaaaattaaaatttatagctatatattgcactaatttagatgaattttatatgatacgcgtcgcaggcttaaaacaacttttttcagctggagttaatgcaagcagtagcgatgaaatgaccccgttacaacaattaaaagccatacgcaaatatttacaccaagaaaaagaacttttggagcgttattttaatgaaatcacaagtgaattagaaaaagaaaatcttttcataaaacattatgagaatttagatgaaaatttaaaacaaaaatgtgatgagtattttttctctaatatttttcctgttattgttccaatagctgttgatgctactcacccttttccgcatttaaacaacttatctttttcactagcggttaaaatttgcgataaagcgcatcctgaacttgtaaaatttggaatgattagaattccaagagttttacctcgtttttatgaagtaagtgcaaatatttatgttcctatagaaagtatagtccatcaacacgcagaagaaatttttccaggctataaactcttagcttcagcagcatttagagtgactagaaatgcagatatggtaatagaagaggaagaagctgatgattttatgatgattttagaacaaggcttgaagcttcgcagaaaaggagcttttgtaagattgcaaattcaaaaagatgcagatgagcaaatcgtagaatttcttaatactcacatgaaaatttttcataaagatgtttatgaatattctattttactcaatctccctagcctttggcaaatcgcaggaaataaaacctttacgcatcttttaagcccactttacacgcctaaaactttaccaccttttgatgagaatttatctatttttgatgctgtagaaaaagaagatatactcattatacaaccttttgaaagttttgatccagtttataaatttatcaaagaagcaagcaaagatcctgaagtaatttccataagaatgacactttatagagttgaaaaaaattccaatatagttcaagctttaattgatgctgcaagcgatggaaaacaagtaactgtgatggtagaattaaaagcacgctttgatgaagaaaacaatcttcattgggcaaaagctttagaaaatgccggagctcatgttatttatggcattacaggttttaaagtccacgctaaggtttctcaagtcatacgcaaacaaggagataaacttaaattttatatgcatttaagtacgggaaattataatgcaagcagtgctaaaatctatactgatgtgagttattttacaagcaaagcagaatttgcaagagatacgacaagcttttttcacatcttatcgggctttagcaaaaatcgtcgccttcaaactctttcaatgagcccaaatcaaatcaaagaaaaagttttagaaatgatacgcattgaaacaagcaagaaaaatgaaggtgtgattgtagctaaaatgaattctcttgtagatagtgatatcatacaagcgctttatgaagcaagtatggaaggagtgcaaatcgatcttatcatacgcggaatttgttgcttaaaacctgatgaagaatacagcaaaaacatacgcgttagaagcatcataggaaaatacttagaacatgctagagtattttattttaaacatagtgagccaaattattttatatcgagtgcagattggatgccaagaaatttagagcgtcgcttagaacttatgactcctatatatgatgaaagaagtaaagctaaattagctcaatttttacgcttgcaacttagtgataatgttttagcttatgagcttaaaaacaatggagagtatgaaaaaattccttcttctgaaaaaatcatagattctcaacaaaccttagaagaatatgtaagtaaaatttataaaacacttaaaaaagatacagatcaaagtcgtgcaacgcacttagcttccaaactttttaaggaaaactaa

SEQ ID NO: 50039 - protein, 694 aa, Campylobacter jejuni
MQTSPDMFINRELSWLRFNSRVLDQCSKNLPLLEKLKFIAIYCTNLDEFYMIRVAGLKQLFSAGVNASSSDEMTPLQQLKAIRKYLHQEKELLERYFNEITSELEKENLFIKHYENLDENLKQKCDEYFFSNIFPVIVPIAVDATHPFPHLNNLSFSLAVKICDKAHPELVKFGMIRIPRVLPRFYEVSANIYVPIESIVHQHAEEIFPGYKLLASAAFRVTRNADMVIEEEEADDFMMILEQGLKLRRKGAFVRLQIQKDADEQIVEFLNTHMKIFHKDVYEYSILLNLPSLWQIAGNKTFTHLLSPLYTPKTLPPFDENLSIFDAVEKEDILIIQPFESFDPVYKFIKEASKDPEVISIRMTLYRVEKNSNIVQALIDAASDGKQVTVMVELKARFDEENNLHWAKALENAGAHVIYGITGFKVHAKVSQVIRKQGDKLKFYMHLSTGNYNASSAKIYTDVSYFTSKAEFARDTTSFFHILSGFSKNRRLQTLSMSPNQIKEKVLEMIRIETSKKNEGVIVAKMNSLVDSDIIQALYEASMEGVQIDLIIRGICCLKPDEEYSKNIRVRSIIGKYLEHARVFYFKHSEPNYFISSADWMPRNLERRLELMTPIYDERSKAKLAQFLRLQLSDNVLAYELKNNGEYEKIPSSEKIIDSQQTLEEYVSKIYKTLKKDTDQSRATHLASKLFKEN

SEQ ID NO: 50040 - DNA, 2067 bp, Escherichia coli O157
  CDS (1)..(2067): transl_table=11
atgggtcaggaaaagctatacatcgaaaaagagctcagttggttatcgttcaatgaacgcgtgcttcaggaagcggcggacaaatctaacccgctgattgaaaggatgcgtttcctggggatctattccaataaccttgatgagttctataaagtccgcttcgctgaactgaagcgacgcatcattattagcgaagaacaaggctccaactctcattcccgccatttactgggcaaaattcagtcccgggtgctgaaagccgatcaggaattcgacggcctctacaacgagctattgctggagatggcgcgcaaccagatcttcctgattaatgaacgccagctctccgtcaatcaacaaaactggctgcgtcattattttaagcagtatctgcgtcagcacattacgccgattttaatcaatcctgacactgacttagtgcagttcctgaaagatgattacacctatctggcggtggaaattatccgtggcgataccatccgttacgcgcttctggagatcccatcagataaagtgccgcgctttgtgaatttaccgccagaagcgccgcgtcgacgcaagccaatgattcttctggataacattctgcgttactgccttgatgatattttcaaaggcttctttgattatgacgcgctgaatgcctattcaatgaagatgacccgcgatgccgaatacgatttagtgcatgagatggaagccagcctgatggagttgatgtcttccagtctcaagcagcgtttaactgctgagccggtgcgttttgtttatcagcgcgatatgcccaatgcgctggttgaagtgttacgcgaaaaactgactatttcccgctacgactccatcgtccccggcggtcgttatcataattttaaagactttattaatttccccaatgtcggcaaagccaatctggtgaacaaaccactgccgcgtttacgccatatttggtttgataaagcccagttccgcaatggttttgatgccattcgcgaacgcgatgtgttgctctattatccttatcacacctttgagcatgtgctggaactgctgcgtcaggcctcgttcgatccgagcgtgctggcgattaaaatcaacatttaccgtgtggcaaaagattcacgcatcatcgactcgatgatccacgccgcacacaacggtaagaaagtcaccgtggtggttgagctacaggcacgttttgacgaagaagccaacattcactgggcgaagcgcctgaccgaagcaggcgtgcacgttatcttctctgcgccggggctgaaaattcacgccaaactgtttctgatttcacgtaaagaaaacggtgaagtggtgcgttatgcacacatcgggaccgggaactttaacgaaaaaaccgcgcgtctttatactgactattcgttgctgaccgccgatgcgcgcatcaccaacgaagtacggcgggtatttaactttattgaaaacccataccgtccggtgacatttgattatttaatggtgtcgccgcaaaactcccgccgcctgttgtatgaaatggtggaccgcgagatcgccaacgcgcagcaagggctgcccagtggtatcaccctgaagctaaataaccttgtcgataaaggcctggttgatcgtctgtatgcggcctccagctccggcgtaccggttaatctgctggttcgcggaatgtgttcgctgatccccaatctggaaggcattagcgacaacattcgtgccatcagtattgttgaccgttaccttgaacatgaccgggtttatatttttgaaaatggcggcgataaaaaggtctacctttcttccgccgactggatgacgcgcaatattgattatcgtattgaagtggcgacgccgctgctcgatccgcgcctgaagcagcgggtgctggacatcatcgacatattgttcagcgatacggtcaaagcacgttatatcgataaagaactcagtaatcgctacgttccccgcggcaatcgccgcaaagtacgggcgcagttggcgatttatgactacatcaaatcactcgaacaacctgaataa

SEQ ID NO: 50041 - protein, 688 aa, Escherichia coli O157
MGQEKLYIEKELSWLSFNERVLQEAADKSNPLIERMRFLGIYSNNLDEFYKVRFAELKRRIIISEEQGSNSHSRHLLGKIQSRVLKADQEFDGLYNELLLEMARNQIFLINERQLSVNQQNWLRHYFKQYLRQHITPILINPDTDLVQFLKDDYTYLAVEIIRGDTIRYALLEIPSDKVPRFVNLPPEAPRRRKPMILLDNILRYCLDDIFKGFFDYDALNAYSMKMTRDAEYDLVHEMEASLMELMSSSLKQRLTAEPVRFVYQRDMPNALVEVLREKLTISRYDSIVPGGRYHNFKDFINFPNVGKANLVNKPLPRLRHIWFDKAQFRNGFDAIRERDVLLYYPYHTFEHVLELLRQASFDPSVLAIKINIYRVAKDSRIIDSMIHAAHNGKKVTVVVELQARFDEEANIHWAKRLTEAGVHVIFSAPGLKIHAKLFLISRKENGEVVRYAHIGTGNFNEKTARLYTDYSLLTADARITNEVRRVFNFIENPYRPVTFDYLMVSPQNSRRLLYEMVDREIANAQQGLPSGITLKLNNLVDKGLVDRLYAASSSGVPVNLLVRGMCSLIPNLEGISDNIRAISIVDRYLEHDRVYIFENGGDKKVYLSSADWMTRNIDYRIEVATPLLDPRLKQRVLDIIDILFSDTVKARYIDKELSNRYVPRGNRRKVRAQLAIYDYIKSLEQPE

SEQ ID NO: 50042 - DNA, 2058 bp, Klebsiella pneumoniae
  CDS (1)..(2058): transl_table=11
atgggtcaggaaaagttatatatcgagaaagagctaagctggttagcatttaacgaacgtgtactccaggaagcggcagacaaaagtaacccgctgatcgagcgcatgcgttttttgggcatttattccaacaacctggatgagttctacaaggttcgctttgccgagctgaaaagacgcatcatcatcagcgaagaacagggcttaaactcgcactcgcggcatctgctgggcaaaatccagtcccgcgtactgaaagccgatcaggaatttgacggcctgtataacgaactgctgctggagatggcgcgcaatcaaatcttcctgattaacgaacgccagctttccgttaaccaacaaaactggctgcgccactacttcaaacactatctgcgccagcacattaccccgattctgatcaaccgcgaaaccgatctggttcagttcctgaaggatgattacacctacctggcggtggaaattattcgcggtgagtctatccgttacccgctgctggagatcccgtccgacaaggtgccgcgctttgtgaacctgccgccggaaaccccgcgcagacgcaagccgatgatcctgctggataacatcctgcgctactgtctggacgacatcttcaaaggcttcttcgattacgatgcgttaaacgcctactcgatgaaaatgacccgtgacgccgaatatgacctggtgcacgagatggaagccagcctgatggagctgatgtcctccagcctgaaacagcctgacgccgagccggtgcgctttgtctatcagcgcgatatgccggacgccatggtggagatgctgcgcgataaactgaccatttcgcgctatgactccatcgtgccgggcggtcgttaccacaactttaaagactttattggcttcccgaacgtcggcaaagccaatctggtgaacaagccgctgccgcgcctgcgccatctgtggttcgataaattccgcaacggattcgacgccattcgcgaacgcgacgtcctgctctactatccgtatcacacgtttgagcacgtgctcgaactgctgcgtcaggcctcgttcgatccgagcgtgctggcgatcaaaatcaacatctaccgcgtggcaaaagattcccgcatcatcgacgcaatgatccacgcggcgcacaacgccaaaaaggtcaccgtggtggttgagctgcaggcgcgcttcgacgaagaggccaatattcactgggcgcgccgtctgacggaagccggtgtgcacgtcatcttctccgcgccggggctgaaaattcacgccaagctgttcctcatctcccgtaaagagggtgacgatgtagtgcgctatgcccacatcggtaccgggaactttaacgagaaaacttctctaatttataccgactactcgctcttaaccgccgacgcccgcatcactaacgaagtgcgccgggtctttaactttatcgaaaacccgtaccgtccggtgagctttgactatctgctggtctcgccgcagaactcgcgtcgcctgctgtacgatatgatcgataaagagatcgccaatgcccagaaagggctgtcgtccggcatcacgctgaagctcaacaacctggtcgacaaagggctggtggacagactgtatgcagcgtccagctcaggcgtgccggttaacctgctgatccgcggcatgtgctcgctgatcccggaactggaaggcatcagcgacaatattcgcgtgatcagcatcgttgaccgttacctggaacacgatcggatctatatttttgataatgcgggtgataaacaggtctatctctcttcggcagactggatgacgcgcaatattgactaccgtattgaagtcgcggcaccgctgctggatccgcgtctgaagcagcagatcctcgacatcatcgagattctgttcagcgataccgtgaaagcacgctatatcgacaaagaactcagtaaccgctatgtaccgcgcggcaaccgccgcaaagtgcggtcgcaactggcgatttacgactatatcaaatcactcgagcaacccgattaa

SEQ ID NO: 50043 - protein, 685 aa, Klebsiella pneumoniae
MGQEKLYIEKELSWLAFNERVLQEAADKSNPLIERMRFLGIYSNNLDEFYKVRFAELKRRIIISEEQGLNSHSRHLLGKIQSRVLKADQEFDGLYNELLLEMARNQIFLINERQLSVNQQNWLRHYFKHYLRQHITPILINRETDLVQFLKDDYTYLAVEIIRGESIRYPLLEIPSDKVPRFVNLPPETPRRRKPMILLDNILRYCLDDIFKGFFDYDALNAYSMKMTRDAEYDLVHEMEASLMELMSSSLKQPDAEPVRFVYQRDMPDAMVEMLRDKLTISRYDSIVPGGRYHNFKDFIGFPNVGKANLVNKPLPRLRHLWFDKFRNGFDAIRERDVLLYYPYHTFEHVLELLRQASFDPSVLAIKINIYRVAKDSRIIDAMIHAAHNAKKVTVVVELQARFDEEANIHWARRLTEAGVHVIFSAPGLKIHAKLFLISRKEGDDVVRYAHIGTGNFNEKTSLIYTDYSLLTADARITNEVRRVFNFIENPYRPVSFDYLLVSPQNSRRLLYDMIDKEIANAQKGLSSGITLKLNNLVDKGLVDRLYAASSSGVPVNLLIRGMCSLIPELEGISDNIRVISIVDRYLEHDRIYIFDNAGDKQVYLSSADWMTRNIDYRIEVAAPLLDPRLKQQILDIIEILFSDTVKARYIDKELSNRYVPRGNRRKVRSQLAIYDYIKSLEQPD

SEQ ID NO: 50044 - DNA, 2229 bp, Mycobacterium bovis
  CDS (1)..(2229): transl_table=11
atgatgagcaatgatcgcaaggtgaccgaaatcgaaaacagtcccgtcacagaggtgcggccagaggagcatgcgtggtatccagacgactcggcgctggcggcaccgcccgctgccacccccgccgcgattagcgaccagctaccctcggatcgctacctgaaccgggagctgagttggctggacttcaacgcgcgcgtgcttgccctggccgccgataagtcgatgccattgctcgagcgcgccaagtttctggcaatcttcgcgtccaatctcgacgagttctacatggtccgggtggccggcctcaaacgccgcgacgagatggggttgtcggtgcgctccgccgacggtctaacaccgcgcgaacaactaggccggatcggcgagcagactcaacagctcgccagccggcatgcccgggtgttcctcgattcggtgctacccgcgctcggcgaggaaggcatctacatcgtcacctgggccgatttggatcaggctgagcgcgaccgattgtcgacctatttcaacgaacaggtcttccccgtcctgaccccgctggccgtcgatcccgcccacccgttcccgtttgtcagcgggttgagcttgaacctggcggtcacggtacgccaacctgaagacggcacccagcatttcgcgagggtcaaggtgcccgacaacgtcgaccgcttcgtcgaactcgctgcacgtgaggccagcgaggaagctgcggggaccgaaggccggaccgcgctgcggttcctgccgatggaggagctgatcgcggccttccttccggtgcttttcccgggtatggaaatcgtcgagcaccacgcatttcgcatcactcgcaacgctgacttcgaggttgaagaggatcgcgacgaggacctactgcaggcgctcgagcgagaactggcccgccgccggttcggttcaccggtgcgactcgagatcgcagacgacatgaccgagagcatgctggagttgctgcttcgcgaactcgacgtgcatcccggtgatgtcatcgaagtgcccgggctgctcgacctatcgtcgttgtggcagatctacgccgtggaccgcccgacgcttaaggatcggacattcgtcccagctacccatcccgccttcgccgagcgggaaacacccaaaagcatcttcgcgacgctgcgcgaaggcgatgtgctggttcaccatccgtatgactcgttctccaccagcgtgcagcgattcatcgaacaggccgcggccgaccccaacgtgctggcgatcaaacagacgctgtaccgcacctccggcgactcgccgatcgtccgggcgctgatcgacgccgccgaagccggaaagcaagtggtggcactggtcgagatcaaggcacgcttcgacgaacaggccaacatcgcctgggcgcgcgcactagaacaagccggcgtgcatgtggcgtacgggctcgtcgggctcaagacgcactgcaagaccgccttggtggtgcgccgcgaaggtccgacaatccggcggtactgccatgtcggcaccggcaattacaacagcaagacagcacgactctacgaggacgtcggactgctgaccgctgcacccgatatcggcgccgacttgaccgacttgttcaattcgctcaccggctactcacgcaagttgtcctaccgcaacttgttggtggccccgcacggaatccgcgccggcatcattgaccgcgtcgagcgggaggtcgcggcgcaccgtgcagagggtgcccacaacggcaaaggccgcatccgactcaagatgaatgcccttgttgatgagcaggtcatcgatgcgctgtaccgcgcgtcgcgagccggtgtgcggatcgaggtggtggtacgcggcatctgcgcgctgcgtccaggtgcgcagggcatttcggaaaacatcatcgtgcgctcgattctcggccgcttcctcgagcactcgcggatcctccatttccgtgccatcgacgagttctggatcggcagcgccgacatgatgcaccgcaacctcgaccggcgagtcgaggttatggctcaagtcaaaaacccgaggctgaccgcgcagctggacgaattgttcgaatccgcactggacccgtgcacccggtgctgggagctcgggcccgacgggcagtggaccgcgtcgccgcaagaaggccatagcgtgcgcgaccatcaggaatcgctgatggaacggcaccgcagcccctga

SEQ ID NO: 50045 - protein, 742 aa, Mycobacterium bovis
MMSNDRKVTEIENSPVTEVRPEEHAWYPDDSALAAPPAATPAAISDQLPSDRYLNRELSWLDFNARVLALAADKSMPLLERAKFLAIFASNLDEFYMVRVAGLKRRDEMGLSVRSADGLTPREQLGRIGEQTQQLASRHARVFLDSVLPALGEEGIYIVTWADLDQAERDRLSTYFNEQVFPVLTPLAVDPAHPFPFVSGLSLNLAVTVRQPEDGTQHFARVKVPDNVDRFVELAAREASEEAAGTEGRTALRFLPMEELIAAFLPVLFPGMEIVEHHAFRITRNADFEVEEDRDEDLLQALERELARRRFGSPVRLEIADDMTESMLELLLRELDVHPGDVIEVPGLLDLSSLWQIYAVDRPTLKDRTFVPATHPAFAERETPKSIFATLREGDVLVHHPYDSFSTSVQRFIEQAAADPNVLAIKQTLYRTSGDSPIVRALIDAAEAGKQVVALVEIKARFDEQANIAWARALEQAGVHVAYGLVGLKTHCKTALVVRREGPTIRRYCHVGTGNYNSKTARLYEDVGLLTAAPDIGADLTDLFNSLTGYSRKLSYRNLLVAPHGIRAGIIDRVEREVAAHRAEGAHNGKGRIRLKMNALVDEQVIDALYRASRAGVRIEVVVRGICALRPGAQGISENIIVRSILGRFLEHSRILHFRAIDEFWIGSADMMHRNLDRRVEVMAQVKNPRLTAQLDELFESALDPCTRCWELGPDGQWTASPQEGHSVRDHQESLMERHRSP

SEQ ID NO: 50046 - DNA, 2184 bp, Pseudomonas putida
  CDS (1)..(2184): transl_table=11
atgctgcagaccccgccagacctgcctccggtggccgagcctgtagcggaacaggtggtcgaggctgtggctccggtgcccgcgccgtccccgaccatcgccgtccctggcctggacgacagcagcctgtacattcatcgcgaactctcgcaactgcagttcaatatccgggtgctggagcaggcactggacgagaactacccgctgctggaacgcctcaagttcctgttgatcttctccagcaacctcgacgagttctttgagattcgcgtcgccggcctgaagaagcagatcaacttcgcccgtgaacaggccggcgccgatggcctgcagccgcaccaggcgctagcgcgtatcagcgaactggtgcacatcgaggtagagcgccagtacgcgatcctcaacgacgtgctgctgcctgagctggaaaagcaccagatccgcttcatccgccgccgctactggacacccaagctcaagacctgggtacgccgctacttccgcgacgaaattgccccgatcattaccccgattggcctcgacccgactcacccgttcccgctgctggtgaacaagagcctcaacttcatagtcgagctcgagggggtggacgccttcggtcgcgactcgggcctggcgatcatcccggcaccacgcctgttgccgcgggttattcgcgtgccggaagaggtgggcggcccgggcgcaaactacgtgttcctgtcgtcgatgatccacgcgcatgccgacgacctgttccagggcatgaaggtgaagggctgctaccagttccgtctgacgcgcaacgccgacctggcgctggactctgaagaggtcgacgacctggcccgcgcgctgcgcggcgagctgttctcgcgccgctacggtgacgccgtgcgcctggaagtggccgacacctgcccgaaacacctgtcggactacctgttgaagcagttcagcctcagcgaaagcgagctgtaccaggtcaatggcccggtcaacctcacccgcctgttcagcatcaccggcctggacagccacccggaactgcaatacacaccgttcaccccggcgatccccaagctgctggcgaacgctgacaacattttcagtgtgatcagcaagcaggacatcctgctgatgcacccgttcgagtccttcacgccagtggtcgacctgctgcgccaggccgccaaggacccgcacgtgctcgccgtgcgccagaccctgtaccgctcgggggctaactcggaaatcgtcgacgccctggtggatgcggcgcgtaacggcaaggaggtcactgcggtgatcgagttgcgtgcgcgttttgacgaagagtccaacctgcagatggccagccgcctgcaagcggctggtgcggtagtgatctacggtgtggttggcttcaagacccacgccaagatgatgctgattctgcgccgcgagcagggcgagatcgtgcgttacgcgcatctgggcaccggcaactaccacgccggcaacgcccgcctgtacaccgactacagcctgctgacttctgacgatgcgctcaccgaagacgtcggcaagctgttcagccagctgatcggcatgggcaagaccctgcgcatgaagaagctgctgcatgcgccgttcacccttaaaaagggcatgctcgacatgatcgcgcgggaaacccagtttgcccttgaaggcaagccggcgcacatcatcgccaagttcaactcgctgaccgacgccaaagtcatcaaggcgttgtacaaggccagccagtcgggcgtgaaaatcgacttggtggtgcgtggcatgtgctgcctgcgcccgggcattccgggggtttcgcacaacatccaggtgcgctcgatcattggccgcttcctcgagcacacgcgggtgttctacttcctcaatggcggcgaagagcagatctacctgtccagcgccgactggatggagcgcaacctcgacaagcgtgtcgagacctgcttcccggtggaaggcaagaaactgttgctgcgggtgaagaaggagctggaaggctacctgaccgacaatacccacgcctggaccttgcagccagacgggcgctacgtgcgcagcaccccgaccggcaaccagaacccgcgcagcgttcaggcgaccctgctggagcgcctgagcaacccggtcctcaacgtacgctga

SEQ ID NO: 50047 - protein, 727 aa, Pseudomonas putida
MLQTPPDLPPVAEPVAEQVVEAVAPVPAPSPTIAVPGLDDSSLYIHRELSQLQFNIRVLEQALDENYPLLERLKFLLIFSSNLDEFFEIRVAGLKKQINFAREQAGADGLQPHQALARISELVHIEVERQYAILNDVLLPELEKHQIRFIRRRYWTPKLKTWVRRYFRDEIAPIITPIGLDPTHPFPLLVNKSLNFIVELEGVDAFGRDSGLAIIPAPRLLPRVIRVPEEVGGPGANYVFLSSMIHAHADDLFQGMKVKGCYQFRLTRNADLALDSEEVDDLARALRGELFSRRYGDAVRLEVADTCPKHLSDYLLKQFSLSESELYQVNGPVNLTRLFSITGLDSHPELQYTPFTPAIPKLLANADNIFSVISKQDILLMHPFESFTPVVDLLRQAAKDPHVLAVRQTLYRSGANSEIVDALVDAARNGKEVTAVIELRARFDEESNLQMASRLQAAGAVVIYGVVGFKTHAKMMLILRREQGEIVRYAHLGTGNYHAGNARLYTDYSLLTSDDALTEDVGKLFSQLIGMGKTLRMKKLLHAPFTLKKGMLDMIARETQFALEGKPAHIIAKFNSLTDAKVIKALYKASQSGVKIDLVVRGMCCLRPGIPGVSHNIQVRSIIGRFLEHTRVFYFLNGGEEQIYLSSADWMERNLDKRVETCFPVEGKKLLLRVKKELEGYLTDNTHAWTLQPDGRYVRSTPTGNQNPRSVQATLLERLSNPVLNVR

SEQ ID NO: 50048 - DNA, 2067 bp, Salmonella typhimurium
  CDS (1)..(2067): transl_table=11
atgggtcaggaaaagctatatatcgagaaagaactgagctggttagcatttaacgaacgcgtgttacaggaagcagcggataaatccaacccgttgattgagcggatgcggttcctgggaatctattctaataacctcgacgagttctacaaagtgcgtttcgctgaactgaaacgacgtattattatcagcgaagaacagggttcaaattctcattcacgccatttgttaggcaaaattcagtcccgcgtgttgaaagcagaccaggagttcgacggcctgtacaacgaattactgctggaaatggcgcgtaatcaaatctttctgatcaacgagcgtcagctctcggtgaaccaacaaagctggttgcgccactattttaagcactatttgcgccagcatattaccccgattctcattaaccgggagacggatcttgttcagtttttaaaagatgattacacctatctggcggtggagattatccgtggcgacaccatcaactatgcgctgctggagataccgtccgacaaagtcccacgcttcgttaatctgccgccggagacaccgcgcagacgcaagccgatgatcctgctggataatattctgcgctactgcctggatgacatttttaaagggttcttcgactatgacgcgcttaatgcctattcgatgaaaatgacccgcgatgccgaatatgacctggtgcatgagatggaatccagtctgatggagctgatgtcttccagcctgaagcagcgcctgaccgctgagcctgtgcgctttgtctatcaacgcgatatgcccgccgcgctggtcgacgtactgcgggaaaaactgacgatctcccggtatgactcaatcgtacccggcgggcgctaccacaattttaaagactttattaattttccgaatgtcggtaaagccaacctggtcaataaaccgttaccgcggttacgccatctttggtttgataaagagaagtttcgtaacggtttcgacgcgattcgtgaacgtgatgtgctgctctattatccttatcacacctttgaacatgtgctggaactgctgcgtcaggcgtcgtttgacccaagcgtgctggcgatcaaaatcaatatttatcgcgtagcgaaagactcgcgcattattgactcgatgatccatgccgcccataacggcaaaaaagtcaccgtggtggtggagttgcaggcgcgcttcgatgaagaggcaaatattcactgggccaagcggttaaccgaagcgggcgtccatgttattttctctgcgcccgggctgaaaattcacgccaaactctttctcatctcacgaaaagagggtgatgacgtggtgcgttatgcgcatatcggcaccggtaacttcaacgaaaaaacagcgcggctgtataccgattattcgctgctgaccgccgatgcgcgcattaccaatgaagtgcgtcgggtctttaattttattgaaaacccctatcgcccggtcactttcgattatttgatggtttctccacaaaactcacggcgtctgctgtatgagatgatcgatcgtgaaatcgccaatgcccagcaaggcttaccgtcagggattaccttaaagcttaacaacctggttgataaagggttggtcgacaggctatacgccgcgtcgggttcgggcgtccaggtcaatctgctggtacgcggtatgtgttctcttattccgcaactggaaggcattagcgataatattcgtgcgattagcattgtggatcgctatctggaacacgatcgggtttatattttcgaaaacggcggtgataagcaagtttggctctcttcagctgactggatgacgcgtaatattgactaccgtatcgaagtcgctacgcctatcctcgacccgcggcttaaacaacgcgtcctggatatcattgacattctgtttagcgacacggtaaaagcgcgttttatcgataaagaactcagcaaccgctacgtaccgcgcggcaatcgccgtaaagtccaggcgcagctggcaatttatgactacatcaaatcactcgagcaaccagactaa

SEQ ID NO: 50049 - protein, 688 aa, Salmonella typhimurium
MGQEKLYIEKELSWLAFNERVLQEAADKSNPLIERMRFLGIYSNNLDEFYKVRFAELKRRIIISEEQGSNSHSRHLLGKIQSRVLKADQEFDGLYNELLLEMARNQIFLINERQLSVNQQSWLRHYFKHYLRQHITPILINRETDLVQFLKDDYTYLAVEIIRGDTINYALLEIPSDKVPRFVNLPPETPRRRKPMILLDNILRYCLDDIFKGFFDYDALNAYSMKMTRDAEYDLVHEMESSLMELMSSSLKQRLTAEPVRFVYQRDMPAALVDVLREKLTISRYDSIVPGGRYHNFKDFINFPNVGKANLVNKPLPRLRHLWFDKEKFRNGFDAIRERDVLLYYPYHTFEHVLELLRQASFDPSVLAIKINIYRVAKDSRIIDSMIHAAHNGKKVTVVVELQARFDEEANIHWAKRLTEAGVHVIFSAPGLKIHAKLFLISRKEGDDVVRYAHIGTGNFNEKTARLYTDYSLLTADARITNEVRRVFNFIENPYRPVTFDYLMVSPQNSRRLLYEMIDREIANAQQGLPSGITLKLNNLVDKGLVDRLYAASGSGVQVNLLVRGMCSLIPQLEGISDNIRAISIVDRYLEHDRVYIFENGGDKQVWLSSADWMTRNIDYRIEVATPILDPRLKQRVLDIIDILFSDTVKARFIDKELSNRYVPRGNRRKVQAQLAIYDYIKSLEQPD

SEQ ID NO: 50050 - DNA, 2166 bp, Staphylococcus epidermidis
  CDS (1)..(2166): transl_table=11
atgcaaactcgattgggagaaaaagatattaatttaccgcagtattacaacaatagggagttaagttggctagattttaactatagggtattacaagaatcatatgataaaaataatccgttgcttgaaaaacttaattttatttctatcttcagttcaaatttagatgaattctttatggttcgagtggctgggttaaaagaccaagtcaaaatgggatatgacaaacctgaaaataaagcacaaatgacgcctcaagaacaacttgatgctattaaaattaaaaatacagactatgtgaacactcaatatcaacgttataacgaattaattaaagaattagccaattacgatattgagatggtaaaacctgaagacttatcagatgcattgatagaaaaattagaacaagagttcaagttaagtgtcttgccgacactcactccgttaggtattgatgcgtatcatccatttccaaagttaaataataaaagtttaaatatttttgttgatatcgatacggaagatgccattaattcagctatcgttcaaattccttcattaattccacgctttttaactttaaatgagggtacaaaacaatacgttgtcatggtagaagatgtgattacgtatttcatcaattatttatttacaggatacgaagtactaaatacttttactttccgaatcacacgtaatgcagatttaaccattcatgaagatggcgctgaggacttgcttatagaaattgaacgtttcttaaaagaacgtaagagtggttcggctgtacgtttagaattagattgtcgcacttctgaaaaagagaatgtagaatggttaatcaatcaattagaaattgaagataatgatatttattatttagatggtccacttgatttaacattcttatttggattggttgatcatctatctcataagctcaaatatttaacgtatgagaaatatactcctcaaccacctagatcattaggcaacaagaatatctatcaattatcattagaaagagatatattcttccaccatccgtatgaatcatttgaaccaatagttgactttattcgacaagcagcagatgacccaaatacaatcgctatcaaacaaaccttgtatcgagtgagtaaggattcgccgattattaacagcttaaaagaagctgctgaaaacggcaagcaagtaacggtgctcgtagaattaaaagcacgctttgatgaagaaaataacgtacattgggcacgtatgctagaagatgctggctgtcacgttatttatggtatgacacatctaaaaacgcatagtaaaattgcgctagtcgttaaacgcatcaacaatgaacttacgtcatttgttcatttaggcacaggtaactataatgataaaactgctaaattatacacagatatgggtatcattacgacaaataaagatatcgctgaggatgcaattaacttctttaattacttgagtggttactcaacaaaaccagaatacaataaattgattgtagcaccatacgatattcgagacgtcttcattgatcgtatcgataaagagatacgtagtcatttacaacatggtaatggtaaaattatgatgaaaatgaactctttaaccgataaaacgattatcgaaaagctcttcgaagcatcccaagcaggcgttaaaatacaactcatcattcgtggtatatgttgtcttaaaccaggcattccaggtattagcgaaaatatagaggttgttagtatagtgggtcgtttgcttgaacattcacgtatttactacttccataataatagtgaggcgcatatttatttatcttcagctgacgttatgacacgtaatatgattaaacgtgtcgaaatattgttccctgttgaagataaatcaataggacaacgattagttaactatatgaatttacaattatctgacaaccaaaaaggtcgttaccaagatgcacaaggcctttatcattatgtcgaaaacaattcatctcctttaaactctcaatcttacttgatgcaagaagcaattaagtatggagaagaactaaaaaaacaatcggtacaaccttctggacaacctgttcattctagacgtggcggtagttggatgcgaaaattaaaaaacacatttaaaagataa

SEQ ID NO: 50051 - protein, 721 aa, Staphylococcus epidermidis
MQTRLGEKDINLPQYYNNRELSWLDFNYRVLQESYDKNNPLLEKLNFISIFSSNLDEFFMVRVAGLKDQVKMGYDKPENKAQMTPQEQLDAIKIKNTDYVNTQYQRYNELIKELANYDIEMVKPEDLSDALIEKLEQEFKLSVLPTLTPLGIDAYHPFPKLNNKSLNIFVDIDTEDAINSAIVQIPSLIPRFLTLNEGTKQYVVMVEDVITYFINYLFTGYEVLNTFTFRITRNADLTIHEDGAEDLLIEIERFLKERKSGSAVRLELDCRTSEKENVEWLINQLEIEDNDIYYLDGPLDLTFLFGLVDHLSHKLKYLTYEKYTPQPPRSLGNKNIYQLSLERDIFFHHPYESFEPIVDFIRQAADDPNTIAIKQTLYRVSKDSPIINSLKEAAENGKQVTVLVELKARFDEENNVHWARMLEDAGCHVIYGMTHLKTHSKIALVVKRINNELTSFVHLGTGNYNDKTAKLYTDMGIITTNKDIAEDAINFFNYLSGYSTKPEYNKLIVAPYDIRDVFIDRIDKEIRSHLQHGNGKIMMKMNSLTDKTIIEKLFEASQAGVKIQLIIRGICCLKPGIPGISENIEVVSIVGRLLEHSRIYYFHNNSEAHIYLSSADVMTRNMIKRVEILFPVEDKSIGQRLVNYMNLQLSDNQKGRYQDAQGLYHYVENNSSPLNSQSYLMQEAIKYGEELKKQSVQPSGQPVHSRRGGSWMRKLKNTFKR

SEQ ID NO: 50052 - DNA, 3780 bp, Streptomyces coelicolor
  CDS (1085)..(3325): transl_table=11
ctgcacgacgtcgtcgaccacggcggcgtcggcgcagcggctgcgcatgcgggcggtcagccaaggggcgtaccggcggtacagctcctcgaaggcgcggcggtcggcatccgccgcgacggcccgcagcagctccccgtcgcttctcgtttcgctcacatctcctcatcgcacgagcccgcccgaccggttcacacgatctcctggcggaggctttggcgagggtagggggtgcggtgaaccaaggttcgcgggcacccggggtcgatgcgggtcgcgcgcccggcgtcgcacccggtgcccggggtgggtgcgggcgcaagggggagcgcggcccggcgttgcggggtgccgcagcgcccacccgtgccgccccagcggcacgactgcccgcagcgacggcgggggagccgcgtacggcggggcgggggacgcggggcgttggcggggagagccgcgtacggcgaggaggggtacccggagcgatggcggggagagccgcgtacggcgaggaggggtacccggagcgatggcggggagagccgcgtacggcgaggaggggtacccggagcgatggcggggagagccgcgtacggcgaggaggggtacccggagcgatggcggggagagccgcgtacggcgaggaggggtacccggagcgttggcggggagagccgcgtacggcgaggagggggcgtgtcggggggtgtccgcccgcagcggttggcgcgtcaacgccccgcacccccgtagccaaccgattccgcgccgttccgaggacggacaccccccggcgcgaccccgacccacccaccggacaaaccgcgctacgcgcacccccaccgcacccgcacaggccgccgcaggcatcgcgcacccccagccaccccgcgcaggccgccgcaggcacccccagccaccaccctccagaggctccccgctatcccacacgtcatgtccccgtaaccatcgattcagacagccttgcgaggctcaccgaatgaagccgaccgagccacagccttccgggcccttcgggccctccgacgcgcctgacgcgcgcgcggcgcggaagaatgggttcatgaggcagccgaacactcaggccgaggcccagcacacgcagccctccgtgggttccatcgcggcgcaccgcccgaacaccgtggccgccacggtctccggcctggagccggacatcgacgccgacctcgacgcgtacgaggagtcggaggagtcccaggacggcggcgcccgcctcccgcagggccgcttcctggaccgcgaacgcagctggctcgcgttcaacgaacgcgtgctcgaactcgccgaggacccgagcacccccctcctcgagcgtgccaacttcctcgcgatcttcgccagcaacctggacgagttcttcatggtccgcgtcgccggcctcaagcgccgcatcgcgaccggcgtcgccacccgctccgcctccggcctccagccccgcgaggtgctggagatgatctgggcccgctcccgcgagctgatggcccggcacgccgcctgcttccacgaggacgtcgccccggccctcgccgaggagggcatccacctggtccgctggagcgagctggccgagaaggagcaggcccgcctgttcaccctcttccggcaccggatcttcccggtcctcacccccctcgcggtcgaccccgctcaccccttcccgtacatctcgggcctctccctcaacctcgcggtcgtcgtccgcaaccccgtcaccggccaccgccacttcgcccgcgtcaaggtccccccactgctctcccgcttcctggaggcctccccgggccgctacgtccccgtcgaggacgtcatcgccgcccacctggaggagctgttcccgggcatggaggtcctggagcaccacaccttccgcctcacccgcaacgaggacctggaggtcgaggaggacgacgcggagaacctgctccaggccctggagaaggagctgatgcggcgccgcctgggcccgcccgtccgactggaggtcgaggagtccgtcgaccgcgaggtcctggacctcctcgtacgcgagctgaagatcggcgaggcggaggtctacccgctccccggccccctggacctcaccggcctcttccgcatccacagcatcgaccggcccgagctgaagtacccgaagttcgtcgccggcacccaccgcgacctggccgaggtcgagtccgcgtccgcgccggacatcttcgccgccctgcgcaccaaggacgtcctgctccaccacccgtacgactccttctccacctccgtgcaggcgttcctggagcaggccgccgccgacccggacgtcctcgcgatcaagcagacgctgtaccggacgtccggcgactcccccatagtcgacgcgctcatcgaggcggccgagtccggcaagcaggtcctcgtcctggtggagatcaaggcccgcttcgacgagtccgccaacatcaagtgggcccgcaagctggaggagtccggctgccacgtcgtctacggcctggtgggcctgaagacccactgcaagctctccctggtcgtacggcaggagggcgagaccctgcgccggtacagccacgtcggcaccggcaactaccacccgaagacggcccgcctctacgaggacctgggcctgctcacctcggacccgcaggtcggcgcggacctctccgacctgttcaaccgcctctccggctactcacggcgcgagacctaccgccgcctcctcgtcgcgcccaagtcgctgcgcgacggcctcgtctcccgcatccacaaggagatccagcaccaccgcgccgggcgccccgcccacgtccgcatcaaggtcaactcgatggtcgacgaggccgtggtcgacgcctgctaccgcgcctcccaggccggtgtgccggtcgacgtgtgggtgcgcggcatctgcgcgctgcgcccgggcgtgccgggcctgtcggagaacatccgggtccgctccgtcctcggccgcttcctggagcactcgcgggtcttcgccttcggcaacggcggtgagcccgaggtgtggctcggcagcgccgacatgatgcaccgcaacctcgaccgccggatagaggccctggtccgggtgaccgacccggcccaccgggcggccctgaaccggctcctcgagaacggcatgtccgacggcaccgcctcctggcacctcggcccggacggcgagtggacccggcacgcgaccgacgcggacggccagcccctgcgcaacatccaggagatgctcatagacgcccggaggcgccggcgtggcacagcgacaccttgacccgacggacattccgacggactttccaccggaaaccccgacgaaaaccccggcgaccaccggaccaccgcaccccgcctcgaccggcgcgcacccgcacggggccgcgcacccgcacggagccgcgcacgcccacggggacccgaaccgggacaccggtgccgccccgcacgccggcaccgaagcgggcaccgacgccctggtgggctacctgcgcgcccaggccaccgagttcctgcgcgccctgcgccgccaccgggagtcggggccgggcacgggcaccggcacgggcacggcggcgggcgcgaacggtgccctcggcgaaccgggccgggcggcccagcccggggacgacgtggacgcggcccgcgccctgcgccgcgcggcccgccgcatcagcggcaccctgcacaccttccagccgctgctggacgccggctgggcggaggagatgc

SEQ ID NO: 50053 - protein, 746 aa, Streptomyces coelicolor
MRQPNTQAEAQHTQPSVGSIAAHRPNTVAATVSGLEPDIDADLDAYEESEESQDGGARLPQGRFLDRERSWLAFNERVLELAEDPSTPLLERANFLAIFASNLDEFFMVRVAGLKRRIATGVATRSASGLQPREVLEMIWARSRELMARHAACFHEDVAPALAEEGIHLVRWSELAEKEQARLFTLFRHRIFPVLTPLAVDPAHPFPYISGLSLNLAVVVRNPVTGHRHFARVKVPPLLSRFLEASPGRYVPVEDVIAAHLEELFPGMEVLEHHTFRLTRNEDLEVEEDDAENLLQALEKELMRRRLGPPVRLEVEESVDREVLDLLVRELKIGEAEVYPLPGPLDLTGLFRIHSIDRPELKYPKFVAGTHRDLAEVESASAPDIFAALRTKDVLLHHPYDSFSTSVQAFLEQAAADPDVLAIKQTLYRTSGDSPIVDALIEAAESGKQVLVLVEIKARFDESANIKWARKLEESGCHVVYGLVGLKTHCKLSLVVRQEGETLRRYSHVGTGNYHPKTARLYEDLGLLTSDPQVGADLSDLFNRLSGYSRRETYRRLLVAPKSLRDGLVSRIHKEIQHHRAGRPAHVRIKVNSMVDEAVVDACYRASQAGVPVDVWVRGICALRPGVPGLSENIRVRSVLGRFLEHSRVFAFGNGGEPEVWLGSADMMHRNLDRRIEALVRVTDPAHRAALNRLLENGMSDGTASWHLGPDGEWTRHATDADGQPLRNIQEMLIDARRRRRGTATP

SEQ ID NO: 50054 - DNA, 2091 bp, Vibrio parahaemolyticus
  CDS (1)..(2091): transl_table=11
atgagcgcagaaaaactatatatagaaaaagagcttagttggttatctttcaatgaacgagtgttacaagaagcggccgacaaaaccgttccgttgatcgagcgtattcgttttcttgggatcttttccaacaacctcgacgaattctacaaagtgcgcttcgctgatgtgaaacgtcgtattttgatcaaccaagagcgaggagggagtgacaactccaagcgtctgttgagtaagatgcaagccaaagcccttaagcttaacgaacaattcgacgaactttacagtgaattaattagagaaatggcacggcgtcgcattttcttggtcaatgagcatcaactcgatgaagcgcaggaaaagtggatcaccaaatacttccgcaaagaagtcatgccacatatcacgcctttgttgatgaaagatgaaatcgacgtgctgcaattcctcaaagacgaatacgcttacatcgccgtcgaactgcgcaaagaagaccactctcaatacgctctcatcgaaattccaaccgaccacctgccacgcttcgtgatggtgccagagcaaaaaggcaaacgccgtaagaccatcatcctgcttgataacatcatccgatactgtttagacgagctttttaaaggctttttcgactatgatgagctcgcaggctacgcgatgaaaatgacgcgtgatgcagaatacgacttgcgtaatgaaatcgaatacagcttgctagagcaaatgtcagcaggtgtaaaccaacgtttaaccgccatgccagtacgctttgtgtatgagcgtgaaatgccgcaagagatgctcgacttcttgtgcagcaaactaagaatttccaattacgacaacctaattccaggtggacgctaccacaacttcaaagatttcatcgcttttccaaacgtcgggcgagaatacctcgaaaacaaacctatgccaccaatgaagtgtgcagactttgaaggttacgccaacagtttcgaagccatcaaagccaaagacattctgctctactacccttatcacacctttgaccatattggtgaattggttcgccaggcatcctttgacccgaaagtgctcagcatcaaaattaatatctaccgcgtagccaaagactctcgcttgatgaactctttgattgatgcggtgcataacggcaaaaacgttactgtagtcgttgagttgcaggcgcgatttgatgaagaagcaaatattgaatggtcaaaagttctgactgaagctggcgtgcacgtcatctttggtgcgcccggtttaaagattcactcaaagttattgatgatcagtcgccgtgaaggtgacgatattattcgctacgcgcacattggcacgggcaacttccacgaaaaaaccgctcgaatctataccgacttttcgctgctcaccgcagaccaagaaatcaccaatgaagtgcgcaacgtgtttggatacattgagaacccttatcgcccagtgaagttcaatcacttgatggtttctccgcgtaattcgcgcacccaaatttaccgcctgattgacaatgaaatcgccaatgcaaaggcgggcaaaaaggccggattaaccataaaggtcaacaacctcgtcgataaaggcatcgtcacccgtctttacgcagcaagcaacgcgggggtaaagatcaacatgatcatccgcggcatgtgcgctttggttccaggaattgaaggcgtcagcgaaaacattcgaatcatcagtatcgttgatcgctttttggaacacccacgcgtagtgatcacgcacaatgatggggatcctcaagtctacatttcatctgccgattggatgacacgaaacatcgatcatcgtatcgaagttgccgctcctgttcgtgatccacgtttaaaacagagaattattgatataactaacatccactttaccgatacagtaaaggcacgtttgatagacaaagagatgagcaatagctatgtaccgcgcgggaaccgtaaaaaagttcgctcacaagttgccatctacgactatcttaaaaatatagaaaagcaaacgagaagacaaaagtcagatgtctcagatacttga

SEQ ID NO: 50055 - protein, 696 aa, Vibrio parahaemolyticus
MSAEKLYIEKELSWLSFNERVLQEAADKTVPLIERIRFLGIFSNNLDEFYKVRFADVKRRILINQERGGSDNSKRLLSKMQAKALKLNEQFDELYSELIREMARRRIFLVNEHQLDEAQEKWITKYFRKEVMPHITPLLMKDEIDVLQFLKDEYAYIAVELRKEDHSQYALIEIPTDHLPRFVMVPEQKGKRRKTIILLDNIIRYCLDELFKGFFDYDELAGYAMKMTRDAEYDLRNEIEYSLLEQMSAGVNQRLTAMPVRFVYEREMPQEMLDFLCSKLRISNYDNLIPGGRYHNFKDFIAFPNVGREYLENKPMPPMKCADFEGYANSFEAIKAKDILLYYPYHTFDHIGELVRQASFDPKVLSIKINIYRVAKDSRLMNSLIDAVHNGKNVTVVVELQARFDEEANIEWSKVLTEAGVHVIFGAPGLKIHSKLLMISRREGDDIIRYAHIGTGNFHEKTARIYTDFSLLTADQEITNEVRNVFGYIENPYRPVKFNHLMVSPRNSRTQIYRLIDNEIANAKAGKKAGLTIKVNNLVDKGIVTRLYAASNAGVKINMIIRGMCALVPGIEGVSENIRIISIVDRFLEHPRVVITHNDGDPQVYISSADWMTRNIDHRIEVAAPVRDPRLKQRIIDITNIHFTDTVKARLIDKEMSNSYVPRGNRKKVRSQVAIYDYLKNIEKQTRRQKSDVSDT

SEQ ID NO: 50056 - DNA, 2103 bp, Vibrio vulnificus
  CDS (1)..(2103): transl_table=11
atgagtgcggataaattctatatagaaaaagagcttagctggctgtcattcaatgaacgggtattacaagaagccgccgacaaaaccgtgccgctcattgagcgcattcgctttcttggtatcttctccaataacttggatgagttttacaaagtgcgattttcggatgtaaaacgccgaattttgattaatcgtgagcaaggtggcaacgacatttcaaagcacttgttgtcaaagatgcagagcaaagccttaaaactcaacgaacgctttgatgaactctacaatgaactgatccgagatatggcaaggcggcatatttttctcgtcaacgaaagccaactcgatgaagctcaacaaaaatggatcatcaaatatttccagaaagaagtgttgcctcacatcactccgctgatgttgaccgatgaaattgacgtactgcagtttttgaaagacgagtacgcgtacatcgctgtggagttgaaacaacaagaacaggccaaatatgccttactggaaatccccaccgatcaccttcctcgcttcattatggtgccagagcaaaaaggcaaacgtaagaaaaccattatcttgctcgacaacatcattcgcttttgccttaacgatatcttccgtggcttttttgactacgacgagctcaatggctatgcgatgaaaatgacccgagacgccgaatacgacttgcgtcatgaagttgaatacagcttgctagagcagatgtctgaaggcctcagccaacgcctaaccgccttgccagtgcgctttgtttacgagcgagacatgcccgaggacatgctcaaatatctctgctataagctcaaaatatctcattacgacagtttgattcctggcggtcgttatcacaatttcaaagactttatcgcctttccaaacgttggacgtgactacttggagaacaaaccgctgccaccattggcctgcgcagattttgaaggctacgccaacgcgtttgatgccattcgcaatcaagatattctcctgcactacccttaccatagctttgagcatattacggaattggtgcgtcaagcctcattcgaccctaaagtcgtcagcatcaaaatcaatgtttatcgtgttgcaaagaattcacgcttgatgaactcattgatcgatgcggtgcataacggcaagcgggtcacagtggtcgttgagctacaagcacgctttgatgaagaggccaatattgaatggtcaaaacgcctaaccgatgcgggcgtgcacgtcatttttggtgtgccggggatgaaaattcacgccaagttactactgatcacacgtcgcgaagagcaagggttcgttcgctacgcgcacatcggtacgggtaatttccacgaacgcactgcccgtatctacaccgacttttcgctgcttacggcggatcaagaactcgctgcagaagtgagaggcgtgtttagttacatcatgaatcctttccgaccgataaaatttcgtcatctcatcgtttcccccagaaactctcgctcgcaactttatcgtttattggatagagaaattcacaacgcgcaagcgggcaaaaaagcctcaattaccctcaaagtgaacaatttggtcgataaagggttgatcagtaagctctatgcggccagcagcgctggggtgaaaattcgcatgatcattcggggcatgtgctcattggttcctgggttagaagggattagcgaaaacattgaaatcatcagcatcattgatcgatttttagaacacccacgcgtattggtggtgcacaacgatggtgatccgcaagtattcatctcttctgcggactggatggaacgcaacatcgataaccgtattgaggtgatgtcccctgtacgtgacgcacgtatcaaacaacggattatcgatattctcagcatccaatttactgatacagtgaaggctcgccgcatcgacaaagagatgagcaataactatgttgaacgcggtaatcgcaaaaaaatacgttctcagatagccatctacgactatcttaaaaatgttgagaaacatacgcgcaagcaaaaggggcaagtagaaccgaatgacaacaacgaatag

SEQ ID NO: 50057 - protein, 700 aa, Vibrio vulnificus
MSADKFYIEKELSWLSFNERVLQEAADKTVPLIERIRFLGIFSNNLDEFYKVRFSDVKRRILINREQGGNDISKHLLSKMQSKALKLNERFDELYNELIRDMARRHIFLVNESQLDEAQQKWIIKYFQKEVLPHITPLMLTDEIDVLQFLKDEYAYIAVELKQQEQAKYALLEIPTDHLPRFIMVPEQKGKRKKTIILLDNIIRFCLNDIFRGFFDYDELNGYAMKMTRDAEYDLRHEVEYSLLEQMSEGLSQRLTALPVRFVYERDMPEDMLKYLCYKLKISHYDSLIPGGRYHNFKDFIAFPNVGRDYLENKPLPPLACADFEGYANAFDAIRNQDILLHYPYHSFEHITELVRQASFDPKVVSIKINVYRVAKNSRLMNSLIDAVHNGKRVTVVVELQARFDEEANIEWSKRLTDAGVHVIFGVPGMKIHAKLLLITRREEQGFVRYAHIGTGNFHERTARIYTDFSLLTADQELAAEVRGVFSYIMNPFRPIKFRHLIVSPRNSRSQLYRLLDREIHNAQAGKKASITLKVNNLVDKGLISKLYAASSAGVKIRMIIRGMCSLVPGLEGISENIEIISIIDRFLEHPRVLVVHNDGDPQVFISSADWMERNIDNRIEVMSPVRDARIKQRIIDILSIQFTDTVKARRIDKEMSNNYVERGNRKKIRSQIAIYDYLKNVEKHTRKQKGQVEPNDNNE

SEQ ID NO: 50058 - DNA, 20 bp, Artificial sequence
  primer
atgatccaagctatgccctc

SEQ ID NO: 50059 - DNA, 20 bp, Artificial sequence
  primer
ttaaactgaacgtagttccg

SEQ ID NO: 50060 - protein, 760 aa, Artificial sequence
  consensus sequence
  Variant (3)..(3): Xaa in position 3 is any amino acid
  Variant (5)..(5): Xaa in position 5 is any amino acid
  Variant (7)..(7): Xaa in position 7 is any amino acid
  Variant (10)..(10): Xaa in position 10 is any amino acid
  Variant (14)..(15): Xaa in position 14 to 15 is any amino acid
  Variant (17)..(20): Xaa in position 17 to 20 is any amino acid
  Variant (21)..(22): Xaa in position 21 to 22 is any or no amino acid
  Variant (25)..(25): Xaa in position 25 is any amino acid
  Variant (28)..(29): Xaa in position 28 to 29 is any amino acid
  Variant (31)..(32): Xaa in position 31 to 32 is any amino acid
  Variant (34)..(36): Xaa in position 34 to 36 is any amino acid
  Variant (42)..(44): Xaa in position 42 to 44 is any amino acid
  Variant (46)..(46): Xaa in position 46 is any amino acid
  Variant (48)..(59): Xaa in position 48 to 59 is any amino acid
  Variant (60)..(72): Xaa in position 60 to 72 is any or no amino acid
  Variant (74)..(101): Xaa in position 74 to 101 is any amino acid
  Variant (102)..(103): Xaa in position 102 to 103 is any or no amino acid
  Variant (105)..(123): Xaa in position 105 to 123 is any amino acid
  Variant (124)..(125): Xaa in position 124 to 125 is any or no amino acid
  Variant (127)..(131): Xaa in position 127 to 131 is any amino acid
  Variant (133)..(135): Xaa in position 133 to 135 is any amino acid
  Variant (137)..(139): Xaa in position 137 to 139 is any amino acid
  Variant (141)..(143): Xaa in position 141 to 143 is any amino acid
  Variant (144)..(144): Xaa in position 144 is any or no amino acid
  Variant (148)..(164): Xaa in position 148 to 164 is any amino acid
  Variant (165)..(200): Xaa in position 165 to 200 is any or no amino acid
  Variant (202)..(205): Xaa in position 202 to 205 is any amino acid
  Variant (207)..(208): Xaa in position 207 to 208 is any amino acid
  Variant (209)..(212): Xaa in position 209 to 212 is any or no amino acid
  Variant (214)..(235): Xaa in position 214 to 235 is any amino acid
  Variant (236)..(252): Xaa in position 236 to 252 is any or no amino acid
  Variant (255)..(262): Xaa in position 255 to 262 is any amino acid
  Variant (263)..(267): Xaa in position 263 to 267 is any or no amino acid
  Variant (269)..(271): Xaa in position 269 to 271 is any amino acid
  Variant (273)..(283): Xaa in position 273 to 283 is any amino acid
  Variant (284)..(287): Xaa in position 284 to 287 is any or no amino acid
  Variant (289)..(294): Xaa in position 289 to 294 is any amino acid
  Variant (295)..(295): Xaa in position 295 is any or no amino acid
  Variant (297)..(298): Xaa in position 297 to 298 is any amino acid
  Variant (300)..(301): Xaa in position 300 to 301 is any amino acid
  Variant (303)..(305): Xaa in position 303 to 305 is any amino acid
  Variant (306)..(307): Xaa in position 306 to 307 is any or no amino acid
  Variant (309)..(322): Xaa in position 309 to 322 is any amino acid
  Variant (323)..(323): Xaa in position 323 is any or no amino acid
  Variant (325)..(355): Xaa in position 325 to 355 is any amino acid
  Variant (356)..(360): Xaa in position 356 to 360 is any or no amino acid
  Variant (362)..(377): Xaa in position 362 to 377 is any amino acid
  Variant (378)..(405): Xaa in position 378 to 405 is any or no amino acid
  Variant (407)..(412): Xaa in position 407 to 412 is any amino acid
  Variant (413)..(413): Xaa in position 413 is any or no amino acid
  Variant (415)..(415): Xaa in position 415 is any amino acid
  Variant (417)..(419): Xaa in position 417 to 419 is any amino acid
  Variant (421)..(423): Xaa in position 421 to 423 is any amino acid
  Variant (425)..(426): Xaa in position 425 to 426 is any amino acid
  Variant (427)..(427): Xaa in position 427 is any or no amino acid
  Variant (429)..(434): Xaa in position 429 to 434 is any amino acid
  Variant (436)..(437): Xaa in position 436 to 437 is any amino acid
  Variant (440)..(440): Xaa in position 440 is any amino acid
  Variant (442)..(443): Xaa in position 442 to 443 is any amino acid
  Variant (446)..(446): Xaa in position 446 is any amino acid
  Variant (448)..(448): Xaa in position 448 is any amino acid
  Variant (451)..(454): Xaa in position 451 to 454 is any amino acid
  Variant (456)..(460): Xaa in position 456 to 460 is any amino acid
  Variant (462)..(463): Xaa in position 462 to 463 is any amino acid
  Variant (466)..(467): Xaa in position 466 to 467 is any amino acid
  Variant (470)..(470): Xaa in position 470 is any amino acid
  Variant (472)..(474): Xaa in position 472 to 474 is any amino acid
  Variant (478)..(478): Xaa in position 478 is any amino acid
  Variant (479)..(479): Xaa in position 479 is any or no amino acid
  Variant (485)..(486): Xaa in position 485 to 486 is any amino acid
  Variant (488)..(490): Xaa in position 488 to 490 is any amino acid
  Variant (492)..(493): Xaa in position 492 to 493 is any amino acid
  Variant (495)..(497): Xaa in position 495 to 497 is any amino acid
  Variant (499)..(500): Xaa in position 499 to 500 is any amino acid
  Variant (502)..(503): Xaa in position 502 to 503 is any amino acid
  Variant (505)..(508): Xaa in position 505 to 508 is any amino acid
  Variant (510)..(510): Xaa in position 510 is any amino acid
  Variant (512)..(512): Xaa in position 512 is any amino acid
  Variant (514)..(518): Xaa in position 514 to 518 is any amino acid
  Variant (520)..(523): Xaa in position 520 to 523 is any amino acid
  Variant (524)..(534): Xaa in position 524 to 534 is any or no amino acid
  Variant (536)..(536): Xaa in position 536 is any amino acid
  Variant (538)..(538): Xaa in position 538 is any amino acid
  Variant (544)..(546): Xaa in position 544 to 546 is any amino acid
  Variant (549)..(550): Xaa in position 549 to 550 is any amino acid
  Variant (554)..(557): Xaa in position 554 to 557 is any amino acid
  Variant (559)..(565): Xaa in position 559 to 565 is any amino acid
  Variant (567)..(570): Xaa in position 567 to 570 is any amino acid
  Variant (572)..(583): Xaa in position 572 to 583 is any amino acid
  Variant (584)..(589): Xaa in position 584 to 589 is any or no amino acid
  Variant (591)..(593): Xaa in position 591 to 593 is any amino acid
  Variant (595)..(604): Xaa in position 595 to 604 is any amino acid
  Variant (606)..(607): Xaa in position 606 to 607 is any amino acid
  Variant (609)..(614): Xaa in position 609 to 614 is any amino acid
  Variant (615)..(623): Xaa in position 615 to 623 is any or no amino acid
  Variant (625)..(626): Xaa in position 625 to 626 is any amino acid
  Variant (628)..(628): Xaa in position 628 is any amino acid
  Variant (630)..(630): Xaa in position 630 is any amino acid
  Variant (632)..(639): Xaa in position 632 to 639 is any amino acid
  Variant (642)..(642): Xaa in position 642 is any amino acid
  Variant (645)..(646): Xaa in position 645 to 646 is any amino acid
  Variant (649)..(651): Xaa in position 649 to 651 is any amino acid
  Variant (653)..(654): Xaa in position 653 to 654 is any amino acid
  Variant (657)..(657): Xaa in position 657 is any amino acid
  Variant (659)..(659): Xaa in position 659 is any amino acid
  Variant (661)..(661): Xaa in position 661 is any amino acid
  Variant (663)..(665): Xaa in position 663 to 665 is any amino acid
  Variant (667)..(667): Xaa in position 667 is any amino acid
  Variant (669)..(669): Xaa in position 669 is any amino acid
  Variant (672)..(672): Xaa in position 672 is any amino acid
  Variant (674)..(674): Xaa in position 674 is any amino acid
  Variant (677)..(677): Xaa in position 677 is any amino acid
  Variant (684)..(684): Xaa in position 684 is any amino acid
  Variant (686)..(688): Xaa in position 686 to 688 is any amino acid
  Variant (690)..(698): Xaa in position 690 to 698 is any amino acid
  Variant (699)..(710): Xaa in position 699 to 710 is any or no amino acid
  Variant (714)..(714): Xaa in position 714 is any amino acid
  Variant (716)..(716): Xaa in position 716 is any amino acid
  Variant (719)..(721): Xaa in position 719 to 721 is any amino acid
  Variant (723)..(723): Xaa in position 723 is any amino acid
  Variant (725)..(727): Xaa in position 725 to 727 is any amino acid
  Variant (729)..(746): Xaa in position 729 to 746 is any amino acid
  Variant (747)..(748): Xaa in position 747 to 748 is any or no amino acid
  Variant (750)..(758): Xaa in position 750 to 758 is any amino acid
  Variant (759)..(759): Xaa in position 759 is any or no amino acid
REXSXLXFNXRVLXXAXXXXXXPLXERXXFXXIXXXNLDEFXXXRXAXXXXXXXXXXXXXXXXXXXXXXXXXLXXXXXXXXXXXXXXXXXXXXXXXXXXXXXXIXXXXXXXXXXXXXXXXXXXXXFXXXXXPXXXPXXXDXXXXPFPXXXXXXXXXXXXXXXXXXXXXXXXXXXXXXXXXXXXXXXXXXXXXXXXXXXXXAXXXXPXXXXXXRXXXXXXXXXXXXXXXXXXXXXXXXXXXXXXXXXXXXXXXLFXXXXXXXXXXXXXFXXXRXXXXXXXXXXXXXXXLXXXXXXXLXXRXXGXXXXXRXXXXXXXXXXXXXXXLXXXXXXXXXXXXXXXXXXXXXXXXXXXXXXXXXXXXLXXXXXXXXXXXXXXXXXXXXXXXXXXXXXXXXXXXXXXXXXXXXFXXXXXXXDXLXXXPXXXFXXXVXXXXXXAXXDPXVXXIKXTXYRXXXXSXXXXXLXXAAXXGKXVXXXVELXXARFDEXXNXXXAXXLXXXGXXVXXGXXXXKXHXKXXXXXRXXXXXXXXXXXXXXXYXHXGTGNYXXXTAXXYTDXXXXTXXXXXXXDXXXXFXXXXXXXXXXXXXXXXXXLXXXPXXXXXXXXXXIXXEXXXXXXXXXXXXXXXIXXKXNXLXXXXXXXXLYXASXXGVXXXLXXRGXCXLXPXXXGXSXNIXVXSIXGRFLEHXRXXXFXXXXXXXXXXXXXXXXXXXXXSADXMXRNXXXRXEXXXPXXXXXXXXXXXXXXXXXXXXDXXXXXXXXXXG

SEQ ID NO: 50061 - protein, 30 aa, Artificial sequence
  protein pattern
  Variant (2)..(3): Xaa in position 2 to 3 is any or no amino acid
  Variant (6)..(6): Xaa in position 6 is any amino acid
  Variant (8)..(8): Xaa in position 8 is Ile, Leu, Met or Val
  Variant (9)..(9): Xaa in position 9 is Ala, Glu, Gly, Ser or Thr
  Variant (11)..(11): Xaa in position 11 is Lys or Arg
  Variant (12)..(12): Xaa in position 12 is any amino acid
  Variant (13)..(13): Xaa in position 13 is Cys, Asn, Thr or Val
  Variant (14)..(14): Xaa in position 14 is Phe, Ile, Leu or Val
  Variant (17)..(17): Xaa in position 17 is Ala, Ser, Thr or Val
  Variant (18)..(18): Xaa in position 18 is Ala, Asp, Glu, Gly, Ser or Thr
  Variant (19)..(20): Xaa in position 19 to 20 is any amino acid
  Variant (22)..(22): Xaa in position 22 is any amino acid
  Variant (23)..(23): Xaa in position 23 is Phe, Ile, Leu or Val
  Variant (24)..(26): Xaa in position 24 to 26 is any amino acid
  Variant (27)..(27): Xaa in position 27 is Leu or Met
  Variant (28)..(29): Xaa in position 28 to 29 is any amino acid
AXXDPXVXXIXXXXYRXXXXSXXXXXXXXA

SEQ ID NO: 50062 - protein, 30 aa, Artificial sequence
  protein pattern
  Variant (2)..(2): Xaa in position 2 is any amino acid
  Variant (4)..(4): Xaa in position 4 is Ala, Gly, Asn or Ser
  Variant (5)..(5): Xaa in position 5 is Phe, Ile, Leu or Val
  Variant (6)..(6): Xaa in position 6 is any amino acid
  Variant (7)..(7): Xaa in position 7 is Asp or Glu
  Variant (8)..(10): Xaa in position 8 to 10 is any amino acid
  Variant (11)..(11): Xaa in position 11 is Ala, Ile, Leu or Val
  Variant (12)..(13): Xaa in position 12 to 13 is any amino acid
  Variant (16)..(16): Xaa in position 16 is any amino acid
  Variant (19)..(20): Xaa in position 19 to 20 is any amino acid
  Variant (23)..(28): Xaa in position 23 to 28 is any amino acid
KXNXXXXXXXXXXLYXASXXGVXXXXXXRG

SEQ ID NO: 50063 - protein, 25 aa, Artificial sequence
  protein pattern
  Variant (2)..(2): Xaa in position 2 is Ile or Leu
  Variant (3)..(3): Xaa in position 3 is any amino acid
  Variant (9)..(9): Xaa in position 9 is Ala, Asp, Glu, Gly, Gln or Ser
  Variant (10)..(10): Xaa in position 10 is any amino acid
  Variant (12)..(12): Xaa in position 12 is Ile, Leu or Val
  Variant (13)..(14): Xaa in position 13 to 14 is any amino acid
  Variant (16)..(17): Xaa in position 16 to 17 is any amino acid
  Variant (19)..(19): Xaa in position 19 is Glu, Gln, Ser or Thr
  Variant (20)..(21): Xaa in position 20 to 21 is any amino acid
  Variant (23)..(24): Xaa in position 23 to 24 is any amino acid
EXXARFDEXXNXXXAXXLXXXGXXV

SEQ ID NO: 50064 - protein, 36 aa, Artificial sequence
  protein pattern
  Variant (5)..(5): Xaa in position 5 is Phe or Tyr
  Variant (6)..(8): Xaa in position 6 to 8 is any amino acid
  Variant (9)..(9): Xaa in position 9 is Asn or Thr
  Variant (10)..(10): Xaa in position 10 is Ala, Ser or Thr
  Variant (11)..(12): Xaa in position 11 to 12 is any amino acid
  Variant (14)..(14): Xaa in position 14 is Glu, Ser or Thr
  Variant (16)..(16): Xaa in position 16 is any amino acid
  Variant (17)..(17): Xaa in position 17 is Gly or Ser
  Variant (18)..(18): Xaa in position 18 is any amino acid
  Variant (19)..(19): Xaa in position 19 is Phe, Ile, Leu or Met
  Variant (20)..(20): Xaa in position 20 is Ser or Thr
  Variant (21)..(25): Xaa in position 21 to 25 is any amino acid
  Variant (26)..(26): Xaa in position 26 is Ala, Cys, Gly, Ser, Thr or Val
  Variant (27)..(27): Xaa in position 27 is any amino acid
  Variant (28)..(28): Xaa in position 28 is Asp or Glu
  Variant (29)..(32): Xaa in position 29 to 32 is any amino acid
  Variant (34)..(35): Xaa in position 34 to 35 is any amino acid
  Variant (36)..(36): Xaa in position 36 is Ile, Leu, Met or Val
GTGNXXXXXXXXYXDXXXXXXXXXXXXXXXXXFXXX

SEQ ID NO: 50065 - protein, 23 aa, Artificial sequence
  protein pattern
  Variant (2)..(2): Xaa in position 2 is Ile, Leu or Met
  Variant (3)..(3): Xaa in position 3 is Ala, Glu, Asn or Gln
  Variant (4)..(6): Xaa in position 4 to 6 is any amino acid
  Variant (7)..(7): Xaa in position 7 is Phe or Tyr
  Variant (8)..(9): Xaa in position 8 to 9 is any amino acid
  Variant (11)..(13): Xaa in position 11 to 13 is any amino acid
  Variant (18)..(18): Xaa in position 18 is any or no amino acid
  Variant (20)..(21): Xaa in position 20 to 21 is any amino acid
  Variant (22)..(22): Xaa in position 22 is any or no amino acid
LXXXXXXXXIXXXNLDEXFXXXR

SEQ ID NO: 50066 - protein, 19 aa, Artificial sequence
  protein pattern
  Variant (2)..(2): Xaa in position 2 is any amino acid
  Variant (4)..(4): Xaa in position 4 is any amino acid
  Variant (6)..(7): Xaa in position 6 to 7 is Ile, Leu or Val
  Variant (8)..(8): Xaa in position 8 is Asp or Gly
  Variant (9)..(9): Xaa in position 9 is His, Lys or Arg
  Variant (10)..(10): Xaa in position 10 is any amino acid
  Variant (14)..(14): Xaa in position 14 is any amino acid
  Variant (16)..(16): Xaa in position 16 is Ala, Ile or Val
  Variant (17)..(18): Xaa in position 17 to 18 is any amino acid
IXVXSXXXXXLEHXRXXXF

SEQ ID NO: 50067 - protein, 21 aa, Artificial sequence
  protein pattern
  Variant (4)..(4): Xaa in position 4 is any amino acid
  Variant (6)..(6): Xaa in position 6 is any amino acid
  Variant (9)..(9): Xaa in position 9 is Phe, Ile, Leu or Met
  Variant (10)..(11): Xaa in position 10 to 11 is any amino acid
  Variant (13)..(13): Xaa in position 13 is Ile, Leu or Val
  Variant (15)..(17): Xaa in position 15 to 17 is any amino acid
  Variant (19)..(20): Xaa in position 19 to 20 is any amino acid
  Variant (21)..(21): Xaa in position 21 is Ala, Asp, Glu, Gly, Asn, Gln or Ser
SADXMXRNXXXRXEXXXPXXX

SEQ ID NO: 50068 - protein, 15 aa, Artificial sequence
  protein pattern
  Variant (2)..(2): Xaa in position 2 is Phe, Ile, Leu, Met or Val
  Variant (3)..(3): Xaa in position 3 is Gly, Ser or Thr
  Variant (4)..(4): Xaa in position 4 is any amino acid
  Variant (5)..(5): Xaa in position 5 is Ile, Leu or Met
  Variant (6)..(6): Xaa in position 6 is any amino acid
  Variant (9)..(9): Xaa in position 9 is any amino acid
  Variant (13)..(14): Xaa in position 13 to 14 is any amino acid
  Variant (15)..(15): Xaa in position 15 is Ala, Cys, Gly, Ser or Thr
EXXXXXFNXRVLXXX

SEQ ID NO: 50069 - protein, 18 aa, Artificial sequence
  protein pattern
  Variant (2)..(2): Xaa in position 2 is any amino acid
  Variant (3)..(5): Xaa in position 3 to 5 is any or no amino acid
  Variant (7)..(7): Xaa in position 7 is any amino acid
  Variant (9)..(9): Xaa in position 9 is Ala, Cys, Ser or Thr
  Variant (11)..(13): Xaa in position 11 to 13 is any amino acid
  Variant (14)..(14): Xaa in position 14 is Ile or Val
  Variant (15)..(15): Xaa in position 15 is any amino acid
  Variant (17)..(17): Xaa in position 17 is any amino acid
GXXXXKXHXKXXXXXRXE

SEQ ID NO: 50070 - DNA, 465 bp, Synechocystis sp.
  CDS (1)..(465): transl_table=11
atggctactgaactactttttaatctcagcaatgtgtttgtgttgccgttttggggcttgatgattctactgccacggtggcaatggacggaaaaagtgatgaagtccctgctccccatcgccattttagctgcggtttatctatttttatttatcggttccttggggtccgaatcggcggcggcgttggccagtccggagttgtccgttattgcccaagcttttgctgacgaaaaaattatggctgtgggttgggtccactatctggtgatggatttgtttgtgggtcgctggatttattggcaggggcgagaaactggggtttggacggtacattccctcattttatgtttattcgctgggcccattggtctgttgtcccatctgctcacggcggccattactaaacaatggggcaaggggaatgactcgacaatggaaacgccccaaacggagattggttaa

SEQ ID NO: 50071 - protein, 154 aa, Synechocystis sp.
MATELLFNLSNVFVLPFWGLMILLPRWQWTEKVMKSLLPIAILAAVYLFLFIGSLGSESAAALASPELSVIAQAFADEKIMAVGWVHYLVMDLFVGRWIYWQGRETGVWTVHSLILCLFAGPIGLLSHLLTAAITKQWGKGNDSTMETPQTEIG

SEQ ID NO: 50072 - DNA, 1154 bp, Glycine max
  CDS (170)..(922)
  misc_feature (50)..(50): n is a, g, c or t
cttgtttggtgtgagacttagagtaattgagttggtcctcttccactatntgagttgttttctttctcagtgccattccgtcactctcttcattaataaattctactatatatatgaagaaaggggccactgctgctgattgagtgtcctccttggttttgcttcaattatggctttctcttctttcttttcccattctccattggcattgaagattgatcgcttggggcagactataaaaccttgtggtacagttgagaaggggcaaaagttttctttccctatcagaagtaatggtggtgagcttgaactttgttaccagagtcaacttaatcagagaagtagagtcaacctaatcagagattggagtttcataggaggatcaagaattgttgttaaaccaaatttcgtgagattggttccttttcgaaaagccagtcgtgtctatgcttcatggttgtcaggatcacaacttgctagcagcgcctttacactgggaacaacagcagtgctaccattttacacactcatggttctagctccaaattctgagctaactaggaagtctatggaaagtagtgtaccatatgtagtgcttggcattctatatgcatatttgttgtaccactcttggacccctgagacagttggacttatttttgcaagtaaatacttgctaccagagctgactagtatagggaaaatgttctccagtgagatgactttagcatcagcttggattcaccttttggttatggatctctttgctgcaaggcatgtttttcttgatggattagagaatcagatagagactcggcattcagtttctctgtgcttgttcttttgccctattggggttcttagtcatgccatcaccaaagaaatgactaaaagtgccagaaaaaacaagcacagcttatagagggcacctacttgctttcccacataaccaaaaaagaaatttaattgaagtttaagagtttcagaaattcatgttcaagtttttaaattaagttacttgtaattttgtttggaattgttttcccctcaatcaaaatactattagtattttgttccatctcaagtgtataaattattttgacttgatgttcattacatttttacttcaattgcaaagaaagctttccattttc

SEQ ID NO: 50073 - protein, 250 aa, Glycine max
MAFSSFFSHSPLALKIDRLGQTIKPCGTVEKGQKFSFPIRSNGGELELCYQSQLNQRSRVNLIRDWSFIGGSRIVVKPNFVRLVPFRKASRVYASWLSGSQLASSAFTLGTTAVLPFYTLMVLAPNSELTRKSMESSVPYVVLGILYAYLLYHSWTPETVGLIFASKYLLPELTSIGKMFSSEMTLASAWIHLLVMDLFAARHVFLDGLENQIETRHSVSLCLFFCPIGVLSHAITKEMTKSARKNKHSL

SEQ ID NO: 50074 - DNA, 471 bp, Nostoc sp. PCC 7120
  CDS (1)..(471): transl_table=11
atgaacatcactcaactatttaacatcgctaatgttttcgtcttaccattttgggcgttaatgattcttctccccaactggaaagtcacacggcgagtaatggaatcatatctaatctttttgcccttagctggagcctatctatatctatttatcaccagcattactccagaaaatgcccaagctttatctaatccccaattagcagatatcgctcgtttctttgctgacgaaacagcagccgcaactggttggattcattttttagtgatggatttatttgtcggtcgctggatatattgggaagggcagaaaacgggaatttggacaattcattccctcacactttgtttatttgctgggcctttgggagttttatcccatatttttacttattggattactaaagcaatttctcccaaattatcaagtagcgataccgctaaatcaccagaacaagctgcttcctaa

SEQ ID NO: 50075 - protein, 156 aa, Nostoc sp. PCC 7120
MNITQLFNIANVFVLPFWALMILLPNWKVTRRVMESYLIFLPLAGAYLYLFITSITPENAQALSNPQLADIARFFADETAAATGWIHFLVMDLFVGRWIYWEGQKTGIWTIHSLTLCLFAGPLGVLSHIFTYWITKAISPKLSSSDTAKSPEQAAS

SEQ ID NO: 50076 - DNA, 663 bp, Arabidopsis thaliana
  CDS (1)..(663)
atgggtttttcttctttcatttctcagcctttgtcttcatctctctcggtgatgaaacgcaacgtttctgctaaaagatcggaactttgtcttgattcttcaaagattagattagatcatcgttggagcttcattggaggatcaagaatctctgttcagtccaattcttacaccgtagttcacaagaaattctccggtgtacgagcttcatggttaactactactcagattgcaagcagtgtatttgcggttggaactaccgcggttttacccttctatactctaatggttgtagcaccaaaagctgaaattaccaagaagtgtatggagagtagcgtaccgtatatcatcttaggcgtattatatgtgtatttgttatacatttcttggacacccgagacgctcaaatacatgttttctagtaaatacatgttgccagagttgtctggaatagctaaaatgttctcaagtgaaatgactcttgcttctgcttggattcatcttcttgttgtagatcttttcgctgcacggcaagtttataatgatgggttagagaaccagatcgagacgaggcattcggtttcactttgccttctcttctgtccggttggaatcgtttcgcatttcgtaaccaaagctataatcaacaaccagtacaaataa

SEQ ID NO: 50077 - protein, 220 aa, Arabidopsis thaliana
MGFSSFISQPLSSSLSVMKRNVSAKRSELCLDSSKIRLDHRWSFIGGSRISVQSNSYTVVHKKFSGVRASWLTTTQIASSVFAVGTTAVLPFYTLMVVAPKAEITKKCMESSVPYIILGVLYVYLLYISWTPETLKYMFSSKYMLPELSGIAKMFSSEMTLASAWIHLLVVDLFAARQVYNDGLENQIETRHSVSLCLLFCPVGIVSHFVTKAIINNQYK

SEQ ID NO: 50078 - DNA, 447 bp, Gloeobacter violaceus PCC 7421
  CDS (1)..(447): transl_table=11
atgaccgtttcgctgctgtttgacgcggccaacctgttcgtgctgcccttttgggcgctgatgatcgtcgctcccaactggaaggtgactcgcagggtgatggcctcctatctacccttcatcgccctggcgctggtatatctttacctggtggcgggaagcctcaacaccgaatcgctccaggcaatgtccaacccaaaacttgccgacatcgcgcgcttttttggcaccgagcagggagccgccgcgggctgggtacattatctggtgttcgatttattcgtcggccgctggatttacttcgaaggtcaacgcacggcagtctggacgatccactcgctaattttgtgtctatttttcggcccgttcgggctgctctcccacatcctcaccgcctgggtcagccaaaaaggtgcgctctccgcttccgccgatgcccgaccctga

SEQ ID NO: 50079 - protein, 148 aa, Gloeobacter violaceus PCC 7421
MTVSLLFDAANLFVLPFWALMIVAPNWKVTRRVMASYLPFIALALVYLYLVAGSLNTESLQAMSNPKLADIARFFGTEQGAAAGWVHYLVFDLFVGRWIYFEGQRTAVWTIHSLILCLFFGPFGLLSHILTAWVSQKGALSASADARP

SEQ ID NO: 50080 - DNA, 471 bp, Anabaena variabilis ATCC 29413
  CDS (1)..(471): transl_table=11
atgaacatcacacaactatttaacatcgctaatgttttcgtcttgccattttgggcattaatgattcttctccccaactggaaagtcacacggcgggtaatggaatcatatctaatctttttgcccttagctggagcatacctgtatttatttatcaccagcattactccagaaaatgcccaagctttatctaatccccaattagcagacatcgctcgtttctttgccgacgaaacagcagccgcaactggttggattcattttctggtgatggatttatttgtcggtcgctggatatattgggaagggcagaaaacagggatttggacaattcattccttaacactttgtttatttgcaggccccttaggcgttttatcccatatttttacttactggattactaaagcaatttctcccaaattatcaagtagtgatatagctaaatcaccagaacaagctgcttcttaa

SEQ ID NO: 50081 - protein, 156 aa, Anabaena variabilis ATCC 29413
MNITQLFNIANVFVLPFWALMILLPNWKVTRRVMESYLIFLPLAGAYLYLFITSITPENAQALSNPQLADIARFFADETAAATGWIHFLVMDLFVGRWIYWEGQKTGIWTIHSLTLCLFAGPLGVLSHIFTYWITKAISPKLSSSDIAKSPEQAAS

SEQ ID NO: 50082 - DNA, 453 bp, Synechococcus elongatus PCC 7942
  CDS (1)..(453): transl_table=11
atgctggctgaactcttttttaacggtgccaatttggctgtcttgcccttttggctcttgttgattgggcgacctcgctggacttggacccagcggattatcaactcgccctacccattcgcagtcctcgcgatcgcctatctcttcttgctggtgaccgctgtttcgccagaatctgccgctgccctagccagccccaagctagctgatattgctcaggccttcgccgacccgggcgtgaccgcagcgggttggattcactttgtcgtgctggatctgtttgtggggcgatgggtggcccaaaccgcagccgagaaaccgggccttcccgtgcgtcactccttggttctctgcttatttgccggcccactcggactactcagccacctgatcacccaagcgatttggcagtggtggcaacagcggcaagctgcctcaaccacaacggcctag

SEQ ID NO: 50083 - protein, 150 aa, Synechococcus elongatus PCC 7942
MLAELFFNGANLAVLPFWLLLIGRPRWTWTQRIINSPYPFAVLAIAYLFLLVTAVSPESAAALASPKLADIAQAFADPGVTAAGWIHFVVLDLFVGRWVAQTAAEKPGLPVRHSLVLCLFAGPLGLLSHLITQAIWQWWQQRQAASTTTA

SEQ ID NO: 50084 - DNA, 468 bp, Trichodesmium erythraeum IMS101
  CDS (1)..(468): transl_table=11
atgacaattgatttaattttcaacagtgctaatttctttgtattaccattctgggcattaattatatttttgcctaactggaaagtaactcgtaaaatcatggaatcttttattccttttatattattagtagtcgtttatctttatctacttattagtagccttacccctgaatctgcagcagctttatccaatcctactttgtcagatattgctaaattctttggagaagaatcagccgcagcaacaggatgggttcattttttagttatggatttatttgttggtcgttggatttattgggaaggacaacgtacaggtgtttggactttccactcaataattctttgtttgtttgccggacctttcggcttattatctcatattttaacatcttggataagtacaaaatttttcaaaaattctcaggaaaatacaacttcaaaacccactgtagaaggtgtataa

SEQ ID NO: 50085 - protein, 155 aa, Trichodesmium erythraeum IMS101
MTIDLIFNSANFFVLPFWALIIFLPNWKVTRKIMESFIPFILLVVVYLYLLISSLTPESAAALSNPTLSDIAKFFGEESAAATGWVHFLVMDLFVGRWIYWEGQRTGVWTFHSIILCLFAGPFGLLSHILTSWISTKFFKNSQENTTSKPTVEGV

SEQ ID NO: 50086 - DNA, 471 bp, Nostoc punctiforme PCC 73102
  CDS (1)..(471): transl_table=11
atgacaatctctcaaatttttaacttcgcaaacctttttgtgttgccattttgggcgttgatgattttattgccaaactggaaagttacacggcagataatgtcatcatatttgccatttgtgctgttagctggcgcatatttgtatttgtttatcagcagtattacgccagaaaatgcccaagctttatcgaatcctcaattaactgatattgcgcgattttttacagatgaaactgctgctgcaacaggttggattcattttctagtgatggatttattcgtcggtcgttggatttattgggaagggcaaaaaacaggtgtttggacaattcactctcttgcactgtgtttatttgctggccctatgggattactgtctcatatcttgacttactggattgctaagacatttttccccaattttcagcagaatgaaacggtgacagtagaagaaaaagctacttcataa

SEQ ID NO: 50087 - protein, 156 aa, Nostoc punctiforme PCC 73102
MTISQIFNFANLFVLPFWALMILLPNWKVTRQIMSSYLPFVLLAGAYLYLFISSITPENAQALSNPQLTDIARFFTDETAAATGWIHFLVMDLFVGRWIYWEGQKTGVWTIHSLALCLFAGPMGLLSHILTYWIAKTFFPNFQQNETVTVEEKATS

SEQ ID NO: 50088 - DNA, 453 bp, Crocosphaera watsonii WH 8501
  CDS (1)..(453): transl_table=11
atgattgatttaagtctcttgttcaacattgctaacttttatgccttacccttttggttattaatggttattttaccgaaatgggtagtgacacaaaaagtcatgtcttcttaccttccctttgttcccttagcagggttatatatttatctttttgggggtagtcttgatcctgagtctgcggaagctttttctaatcctactttaccggttttagcgcagctttttagtcaagaacctgtaatgttaacgggatggatacattttattgttttggatttatttacgggtcgctatgtttatttagaaggaagagaaaaagggatttttactattcattctctgattttatgtttcttcgctggtcccattggtttattgagtcatattgttacttcttggatacagttaaaagtttctaaaccagaagaaatagaggcaagtgctacttaa

SEQ ID NO: 50089 - protein, 150 aa, Crocosphaera watsonii WH 8501
MIDLSLLFNIANFYALPFWLLMVILPKWVVTQKVMSSYLPFVPLAGLYIYLFGGSLDPESAEAFSNPTLPVLAQLFSQEPVMLTGWIHFIVLDLFTGRYVYLEGREKGIFTIHSLILCFFAGPIGLLSHIVTSWIQLKVSKPEEIEASAT

SEQ ID NO: 50090 - DNA, 453 bp, marine gamma proteobacterium HTCC2143
  CDS (1)..(453): transl_table=11
atgtctttagaacaaatatttagcctgagcggcctgattgcgatgaccggctgggccggtttggtgctggcgccgcggtggactgtaacgcgtgattggctggccccagtaatcgcgccgctactcattgccatggtgtatgtgtggttgatgaccagcaatagtcgccctgaaggtggcggctttgggtccctgcaggaagtcacgcttttattttcagatcctcatttgctgctggccggatggatccactatttagcctttgatttgtttgtgggtgcatgggaggttcgtgatgcccagcgtcagggtatccatcatcttttagtgatcccttgtttgtttgcaaccttgatggcggggccgggcggcttggcgctctactggctgattcgtagtgtggtcatgatcattaagcgccgaaagcgccaggcagcagaggcagtgctatga

SEQ ID NO: 50091 - protein, 150 aa, marine gamma proteobacterium HTCC2143
MSLEQIFSLSGLIAMTGWAGLVLAPRWTVTRDWLAPVIAPLLIAMVYVWLMTSNSRPEGGGFGSLQEVTLLFSDPHLLLAGWIHYLAFDLFVGAWEVRDAQRQGIHHLLVIPCLFATLMAGPGGLALYWLIRSVVMIIKRRKRQAAEAVL

SEQ ID NO: 50092 - DNA, 818 bp, Oryza sativa
  CDS (52)..(738)
ctcttcccctcctccgcctccccgctgctcctgctcgcttcctgccctgcaatggcggctctcctcctcctctcctccgccgctcgggttggcgtggctgcgccactggcgctgaggcagcagcgcccggtggtgctgcccggtggccagctccgcacgggaagcggcgccggcgcagcgtcggcgtgggcggcgcgccctctccggccggagctcgccgcggtctcccgccccgccgtccccgcccgcggcagggcgcctctgttccggcctcgcgcatggatggcgtcgtctcagattgccagctccgccttcacctggggcaccatcgccgtcctccctttctacactctcatggtcgtcgcccccaacgccgacgtcaccaagcgtgccgtggatagcagcgcgccgtacgtcgccctcggcatcctctacgcctacctgctctacctatcctggactcccgacaccctacgcgccatgttcgccagcaagtactggctccccgagttgacggggatcgtcaggatgttcgccagcgagatgaccgtcgcctccgcctggatccacctcctagccgtcgacctcttcgccgcaaggcaggtgtaccatgacggcatcaagaacaacatagagaccaggcattcggtttctctgtgcctgctcttctgcccaattgggatcgcgactcacgttctgactaaggtactggcgggttcaattggtcgctcacattgatcgattgtatgtaggttcatattgcttagatggtgtatttttatgtgattcatatatgaataaaatttattcaattaact

SEQ ID NO: 50093 - protein, 228 aa, Oryza sativa
MAALLLLSSAARVGVAAPLALRQQRPVVLPGGQLRTGSGAGAASAWAARPLRPELAAVSRPAVPARGRAPLFRPRAWMASSQIASSAFTWGTIAVLPFYTLMVVAPNADVTKRAVDSSAPYVALGILYAYLLYLSWTPDTLRAMFASKYWLPELTGIVRMFASEMTVASAWIHLLAVDLFAARQVYHDGIKNNIETRHSVSLCLLFCPIGIATHVLTKVLAGSIGRSH

SEQ ID NO: 50094 - DNA, 663 bp, Arabidopsis thaliana
  CDS (52)..(663)
atgggtttttcttctttcatttctcagcctttgtcttcatctctctcggtgatgaaacgcaacgtttctgctaaaagatcggaactttgtcttgattcttcaaagattagattagatcatcgttggagcttcattggaggatcaagaatctctgttcagtccaattcttacaccgtagttcacaagaaattctccggtgtacgagcttcatggttaactactactcagattgcaagcagtgtatttgcggttggaactaccgcggtcttacccttctatactctaatggttgtagcaccaaaagctgaaattaccaagaagtgtatggagagtagcgtaccgtatatcatcttaggcgtattatatgtgtatttgttatacatttcttggacacccgagacgctcaaatacatgttttctagtaaatacatgttgccagagttgtctggaatagctaaaatgttctcaagtgaaatgactcttgcttctgcttggattcatcttcttgttgtagatcttttcgctgcacggcaagtttataatgatgggttagagaaccagatcgagacgaggcattcggtttcactttgccttctcttctgtccggttggaatcgtttcgcatttcgtaaccaaagctataatcaacaaccagtacaaataa

SEQ ID NO: 50095 - protein, 203 aa, Arabidopsis thaliana
MKRNVSAKRSELCLDSSKIRLDHRWSFIGGSRISVQSNSYTVVHKKFSGVRASWLTTTQIASSVFAVGTTAVLPFYTLMVVAPKAEITKKCMESSVPYIILGVLYVYLLYISWTPETLKYMFSSKYMLPELSGIAKMFSSEMTLASAWIHLLVVDLFAARQVYNDGLENQIETRHSVSLCLLFCPVGIVSHFVTKAIINNQYK

SEQ ID NO: 50096 - DNA, 699 bp, Brassica napus
  CDS (1)..(699)
atggctttttctcagcctttgtcttcttcgtctctctcgatgatgaatcggagctttgtagctaagagctcggtgacagcaagtctttctctcaacaagtctttaaagattcgattccataatcgttggagcttcaacggaggatcaagaatcgttcttttccccagtgtatcatccaattcgtcctcccttgttcacaagaaacgctcctgcgtacgagcttcatggatggctacgtctcaaatcgcaagcagtgtatttgctgtcggaacaaccgcggttcttcctttttacactctgatggttgtagctcctaaagctgaaattaccaagaagtgtatggagagtagcataccgtatgtcgtcttaggcgtattatacgcgtatttgttgtacctttcttggacacctgaaacgctcaaatacatgttttccagtaaatacttgttgccagagttgtccggaatagcgaaaatgttctcaagtgaaatgactcttgcttctgcttggattcatcttcttgttattgatctttttgctgccagacaagtttttaatgatggcttggagaataagatcgagacgaggcactcggtttcactttgccttctcttctgtccggttggaatcgtttctcatgtggtaaccaaagctttaaccaacagttctacatccaacaccaacaaccagtgcaagtaa

SEQ ID NO: 50097 - protein, 232 aa, Brassica napus
MAFSQPLSSSSLSMMNRSFVAKSSVTASLSLNKSLKIRFHNRWSFNGGSRIVLFPSVSSNSSSLVHKKRSCVRASWMATSQIASSVFAVGTTAVLPFYTLMVVAPKAEITKKCMESSIPYVVLGVLYAYLLYLSWTPETLKYMFSSKYLLPELSGIAKMFSSEMTLASAWIHLLVIDLFAARQVFNDGLENKIETRHSVSLCLLFCPVGIVSHVVTKALTNSSTSNTNNQCK

SEQ ID NO: 50098 - DNA, 25 bp, Artificial sequence
  primer
atggctactgaactactttttaatc

SEQ ID NO: 50099 - DNA, 20 bp, Artificial sequence
  primer
ttaaccaatctccgtttggg

SEQ ID NO: 50100 - protein, 133 aa, Artificial sequence
  consensus sequence
  Variant (2)..(7): Xaa in position 2 to 7 is any amino acid
  Variant (12)..(13): Xaa in position 12 to 13 is any amino acid
  Variant (15)..(18): Xaa in position 15 to 18 is any amino acid
  Variant (20)..(23): Xaa in position 20 to 23 is any amino acid
  Variant (25)..(29): Xaa in position 25 to 29 is any amino acid
  Variant (31)..(36): Xaa in position 31 to 36 is any amino acid
  Variant (38)..(40): Xaa in position 38 to 40 is any amino acid
  Variant (42)..(43): Xaa in position 42 to 43 is any amino acid
  Variant (45)..(47): Xaa in position 45 to 47 is any amino acid
  Variant (49)..(50): Xaa in position 49 to 50 is any amino acid
  Variant (53)..(58): Xaa in position 53 to 58 is any amino acid
  Variant (59)..(64): Xaa in position 59 to 64 is any or no amino acid
  Variant (66)..(66): Xaa in position 66 is any amino acid
  Variant (68)..(69): Xaa in position 68 to 69 is any amino acid
  Variant (71)..(73): Xaa in position 71 to 73 is any amino acid
  Variant (75)..(76): Xaa in position 75 to 76 is any amino acid
  Variant (78)..(80): Xaa in position 78 to 80 is any amino acid
  Variant (82)..(83): Xaa in position 82 to 83 is any amino acid
  Variant (85)..(85): Xaa in position 85 is any amino acid
  Variant (87)..(87): Xaa in position 87 is any amino acid
  Variant (90)..(90): Xaa in position 90 is any amino acid
  Variant (94)..(95): Xaa in position 94 to 95 is any amino acid
  Variant (97)..(101): Xaa in position 97 to 101 is any amino acid
  Variant (103)..(108): Xaa in position 103 to 108 is any amino acid
  Variant (109)..(111): Xaa in position 109 to 111 is any or no amino acid
  Variant (113)..(113): Xaa in position 113 is any amino acid
  Variant (116)..(117): Xaa in position 116 to 117 is any amino acid
  Variant (121)..(123): Xaa in position 121 to 123 is any amino acid
  Variant (125)..(125): Xaa in position 125 is any amino acid
  Variant (127)..(128): Xaa in position 127 to 128 is any amino acid
  Variant (131)..(132): Xaa in position 131 to 132 is any amino acid
FXXXXXXVLPFXXLXXXXPXXXXTXXXXXSXXXXXXLXXXYXXLXXXSXXPEXXXXXXXXXXXXPXLXXIXXXFXXEXXXAXXWXHXLVXDLFXXRXXXXXGXXXXXXXXXTXHSXXLCLXXXPXGXXSHXXT

SEQ ID NO: 50101 - protein, 29 aa, Artificial sequence
  protein pattern
  Variant (2)..(2): Xaa in position 2 is any amino acid
  Variant (4)..(4): Xaa in position 4 is Ala, Ser or Thr
  Variant (5)..(5): Xaa in position 5 is Asp, Gly, Ser or Val
  Variant (7)..(8): Xaa in position 7 to 8 is any amino acid
  Variant (9)..(9): Xaa in position 9 is any or no amino acid
  Variant (11)..(15): Xaa in position 11 to 15 is any amino acid
  Variant (16)..(16): Xaa in position 16 is any or no amino acid
  Variant (18)..(18): Xaa in position 18 is Ala, Ser, Thr or Val
  Variant (19)..(19): Xaa in position 19 is Ala or Gly
  Variant (21)..(21): Xaa in position 21 is Ile or Val
  Variant (23)..(23): Xaa in position 23 is any amino acid
  Variant (24)..(24): Xaa in position 24 is Leu or Val
  Variant (25)..(25): Xaa in position 25 is Ala or Val
  Variant (26)..(26): Xaa in position 26 is Phe, Ile, Leu, Met or Val
PXLXXIXXXFXXXXXXAXXWXHXXXXDLF

SEQ ID NO: 50102 - protein, 54 aa, Artificial sequence
  protein pattern
  Variant (2)..(6): Xaa in position 2 to 6 is any amino acid
  Variant (7)..(8): Xaa in position 7 to 8 is any or no amino acid
  Variant (12)..(12): Xaa in position 12 is Trp or Tyr
  Variant (13)..(13): Xaa in position 13 is any amino acid
  Variant (15)..(15): Xaa in position 15 is Ile or Met
  Variant (16)..(16): Xaa in position 16 is Ile or Val
  Variant (17)..(17): Xaa in position 17 is Phe, Ile, Leu or Val
  Variant (18)..(18): Xaa in position 18 is Ala or Leu
  Variant (20)..(23): Xaa in position 20 to 23 is any amino acid
  Variant (25)..(28): Xaa in position 25 to 28 is any amino acid
  Variant (29)..(29): Xaa in position 29 is any or no amino acid
  Variant (31)..(31): Xaa in position 31 is any amino acid
  Variant (32)..(32): Xaa in position 32 is Ala, Ile, Leu or Val
  Variant (33)..(33): Xaa in position 33 is Ile or Pro
  Variant (34)..(34): Xaa in position 34 is any amino acid
  Variant (35)..(35): Xaa in position 35 is Ala, Ile, Leu or Val
  Variant (36)..(36): Xaa in position 36 is Ala, Ile, Leu, Pro or Val
  Variant (38)..(38): Xaa in position 38 is Ala, Gly or Val
  Variant (39)..(39): Xaa in position 39 is Ala, Gly, Ile, Leu or Val
  Variant (40)..(40): Xaa in position 40 is Ala, Leu or Val
  Variant (42)..(42): Xaa in position 42 is Ala, Ile, Leu or Val
  Variant (43)..(43): Xaa in position 43 is Phe or Tyr
  Variant (45)..(45): Xaa in position 45 is Phe, Leu or Val
  Variant (46)..(47): Xaa in position 46 to 47 is any amino acid
  Variant (49)..(49): Xaa in position 49 is any amino acid
  Variant (50)..(50): Xaa in position 50 is Asp, Gly, Asn or Thr
  Variant (51)..(51): Xaa in position 51 is Pro, Ser or Thr
  Variant (52)..(52): Xaa in position 52 is Asp or Glu
  Variant (53)..(53): Xaa in position 53 is Asn, Ser or Thr
  Variant (54)..(54): Xaa in position 54 is Ala, Leu or Val
FXXXXXXXLPFXXLXXXXPXXXXTXXXXXSXXXXXXLXXXYXXLXXXSXXXXXX

SEQ ID NO: 50103 - protein, 18 aa, Artificial sequence
  protein pattern
  Variant (3)..(3): Xaa in position 3 is Ile, Leu or Val
  Variant (4)..(4): Xaa in position 4 is any amino acid
  Variant (8)..(8): Xaa in position 8 is any or no amino acid
  Variant (10)..(10): Xaa in position 10 is any amino acid
  Variant (11)..(11): Xaa in position 11 is any or no amino acid
  Variant (13)..(13): Xaa in position 13 is Phe, Ile, Leu, Met or Val
  Variant (15)..(15): Xaa in position 15 is Ile, Leu or Val
  Variant (16)..(16): Xaa in position 16 is Ala, Leu or Val
  Variant (17)..(17): Xaa in position 17 is Ser or Thr
HSXXLCLXFXXPXGXXXH

SEQ ID NO: 50104 - DNA, 318 bp, Synechocystis sp.
  CDS (1)..(318): transl_table=11
atggcaactatgattcctggcgaaatcattacccccgaaggtgacatagaactaaacgtaggccgctccacctgcactattaatgtggccaacactggcgatcgccctattcaagtgggttcccattaccatttctacgaagtcaatgccgctctgcaattcgaccgggatttggccaaggggatgcggttggatattccagcgggaacggcggtgcgctttgagccaggggacgaaaaaaacgttaacttagtggcctatgctggcagtcgggaaatctatggcttcaatggcttggtgaacggccctctagagtaa

SEQ ID NO: 50105 - protein, 105 aa, Synechocystis sp.
MATMIPGEIITPEGDIELNVGRSTCTINVANTGDRPIQVGSHYHFYEVNAALQFDRDLAKGMRLDIPAGTAVRFEPGDEKNVNLVAYAGSREIYGFNGLVNGPLE

SEQ ID NO: 50106 - DNA, 2709 bp, Oryza sativa
  CDS (29)..(2560)
gatccccatcggcgaccacagcaacaggatgaagctggtacaaagggaggcggagaagctggcgctgcacaatgcagggtttttggcccagaagcgcctcgcacgggggctccgcctcaactacacggaggccgtcgcgctcatcgccgcccagattcttgagtttgttcgtgatggagacagaactgtgacagacttgatggacttaggaaaacaactgctgggaaggaggcaagttcttccagctgttccacaacttttagaaactgtacaggttgaaggaacatttatggatggaacaaaactaattactgtacatgatcctatttcttctgatgatggaaatttggagctagcactgcatggttctttcctcccagtaccttcacttgaaaagttttcttcggttggtgtggacgactttcctggcgaagtacgtttttgctctggtcacatagtcctcaatcttcatcgcagggctttaactctgaaggttgttaacaaggcagacagacctattcagattgggagtcattaccacttcatagaggccaatccataccttgtttttgatagacaaagagcttatggcatgagactgaacataccagctggcacagctgtccgttttgagccaggggatgcaaaaacggttacacttgtaagcattggtggtcgtaaagtgatcaggggtggaaatggaattgctgatggtgctgtcaacagatctcagcttaatgaggtaatggaaaaggttattgcaaatggttttgggcatgaagattatccagattcaagtgaaggtattattggtgatggcacacatgactacagtgttgatcatgagaaatatgcaagcatgtatgggcctacaactggtgacaagattagacttggtgacactgacctttttgcggagattgaaaaggactatgccatctatggtgatgagtgcatatttggaggcggaaaggttctacgtgatggaatgggacagtcggcagggtatccagcctcagattgcctggacacagttgtaacaaatgctgttgtgattgactatacaggaatatacaaagctgacattggtataaatggtggacttatcgttgctattgggaaggctggaaaccctgatgtcatggacatggatggtgttaatgaagagatgattgtgggggttaatactgaagttattgctgctgaaggcatgattgttactgctggtggaattgattgccatgttcacttcatatgccctcagttggcagaagaggcaattgcaagtggcatcacaacattggtgggaggtggaactggaccagcacatggaacttgtgccacaacttgcaccccttcaccatctcacatgaaactaatgctacagtccactgatgaattaccaatcaatatgggattcacaggcaagggaaatactacaaaacctgatggattggctgagatcattaaggcaggagcaatgggcttgaagttgcatgaagattggggaagcaccccagctgcgatagataactgtttatctgtcgcagaagcttttgatatccaggtaaatatccacacagacaccttaaatgagtcaggctgtgtggagcatacaattgccgcatttaaagataggacaatacatacatatcatagtgaaggagcaggtggtggtcatgctccagacattatcaaagtatgtggagtgaaaaatgtgttaccctcttcaacaaatccaactcggccatttactttgaacactgtagatgagcaccttgatatgctgatggtctgccatcacctcgatagaaatatcccagaagatgtagcatttgccgagtctagaattcgagctgaaacaatagctgctgaggatatcttgcatgacatgggagcaatcagtatcatatcatccgattcgcaggctatggggcgcattggagaggtgattactcggacatggcaaactgcaaataagatgaagagacagagaggtagattacctatatccagttcccccgatgctgcagaggacaatgacaatttccggataagaagatacatagctaaatacaccataaatcctgctatagtgaatggcttttctgattttgttggctctgttgaggtgggaaaattagctgaccttgttatttggaaaccttctttctttggagcaaaaccagaaatggttataaagggtggtgctattgcatgcgctaatatgggtgatccaaatgctagcattccaacacctgaaccggttatgatgcgacctatgtttggtgcatttggaggggctggaagtgccaactctatagcatttgtgagcaaggctgctaaagaagctggcgttgcagtgcagtacaagctgggaaagagggtggaagctgtaggtcgcgttcgtggtttgacaaagctgaatatgaaactaaacgatgcacttccgaaaattgatgtcgatcctgaaacctacacggttactgctgatggagaggttttgagatgtcaaccaacacccacagtaccactatctcggaattacttcctcttttagacaactttagtgaaccagcctttcttaattagggttaatgcatgcatttggtctctctcttgtatccttttcaataatatgacttgtaaacttaaagctttttatgtgagttttccttcacaggtgcaataaggataacttttggccgc

SEQ ID NO: 50107 - protein, 843 aa, Oryza sativa
MKLVQREAEKLALHNAGFLAQKRLARGLRLNYTEAVALIAAQILEFVRDGDRTVTDLMDLGKQLLGRRQVLPAVPQLLETVQVEGTFMDGTKLITVHDPISSDDGNLELALHGSFLPVPSLEKFSSVGVDDFPGEVRFCSGHIVLNLHRRALTLKVVNKADRPIQIGSHYHFIEANPYLVFDRQRAYGMRLNIPAGTAVRFEPGDAKTVTLVSIGGRKVIRGGNGIADGAVNRSQLNEVMEKVIANGFGHEDYPDSSEGIIGDGTHDYSVDHEKYASMYGPTTGDKIRLGDTDLFAEIEKDYAIYGDECIFGGGKVLRDGMGQSAGYPASDCLDTVVTNAVVIDYTGIYKADIGINGGLIVAIGKAGNPDVMDMDGVNEEMIVGVNTEVIAAEGMIVTAGGIDCHVHFICPQLAEEAIASGITTLVGGGTGPAHGTCATTCTPSPSHMKLMLQSTDELPINMGFTGKGNTTKPDGLAEIIKAGAMGLKLHEDWGSTPAAIDNCLSVAEAFDIQVNIHTDTLNESGCVEHTIAAFKDRTIHTYHSEGAGGGHAPDIIKVCGVKNVLPSSTNPTRPFTLNTVDEHLDMLMVCHHLDRNIPEDVAFAESRIRAETIAAEDILHDMGAISIISSDSQAMGRIGEVITRTWQTANKMKRQRGRLPISSSPDAAEDNDNFRIRRYIAKYTINPAIVNGFSDFVGSVEVGKLADLVIWKPSFFGAKPEMVIKGGAIACANMGDPNASIPTPEPVMMRPMFGAFGGAGSANSIAFVSKAAKEAGVAVQYKLGKRVEAVGRVRGLTKLNMKLNDALPKIDVDPETYTVTADGEVLRCQPTPTVPLSRNYFLF

SEQ ID NO: 50108 - DNA, 321 bp, Prochlorococcus marinus str. MIT 9301
  CDS (1)..(321): transl_table=11
atgagtaatttaattcctggcgaaataattcccgaacaaggtgaaatcgaattaaatcttggtaaggaagttaaaacagtaaaagtttctaattctggagatagacctgtccaaattggatctcattatcatttttttgaagctaataaggctttaatttttgatcgagaattaacacttggcatgcgtcttgacattcctgcgggaacagcaattagatttgaacctggagacacaactgatgtcaaattagttccatataaaggtttaagaattgcatatggttttaattcattggttaacggttctttagatacttaa

SEQ ID NO: 50109 - protein, 106 aa, Prochlorococcus marinus str. MIT 9301
MSNLIPGEIIPEQGEIELNLGKEVKTVKVSNSGDRPVQIGSHYHFFEANKALIFDRELTLGMRLDIPAGTAIRFEPGDTTDVKLVPYKGLRIAYGFNSLVNGSLDT

SEQ ID NO: 50110 - DNA, 2517 bp, Arabidopsis thaliana
  CDS (1)..(2517)
atgaagttgttgccgcgagagatcgagaagttagagctacatcaagctggtttccttgcacagaaacgtcttgctcgtggtattagactcaattacactgaagctgtagcacttattgctactcagattcttgagtttattcgtgatggtgataaaagcgtggctgagctaatggatatcgggagacaactattaggaaggagacaggttcttcctgctgttttacatcttttgtatacggttcaggtcgaaggtacatttcgtgatggtacaaagttagtcacggttcatgagccgatttctcttgaaaacggcaaccttgaacttgctttgcatggatctttccttccagttccttcattggataaatttccagaagttcatgagggtgtaattattcctggtgatatgaaatatggagatggaagtataattataaatcatggaaggaaagcagtagttctgaaagtagtgaacactggagacagaccagtgcaggttggaagtcactaccattttattgaagtgaatccactattggtgtttgacagacgtaaagctcttggtatgcgtttaaacatacccgctggaacagctgttcgctttgagccaggagaaagaaaaagcgttgtacttgtgaatattggtggaaataaagtgataaggggaggaaatggaattgttgatggtctagttgatgatgtcaattggacagttttaatggaaacaatggagagaagaggatttaagcacctggaagatattgatgctagtgaggggatagcaggggaagatcctcgatttacaactatgatttctcgtgaaaagtatgcaaatatgtatggtcctaccactggggacaagcttcgcctaggtgataccaacttatacgcaagaattgaaaaagattatactgtttatggagatgaatgtgtatttggaggtggaaaagttctaagagaaggcatgggacaaggcatagagcaagctgaagctctttctttggatactgtcattaccaatagtgtgataattgattattcaggaatatataaggcagatattggcattaaaaatggtcatattgttggtattgggaaagcaggcaatccagataccatgcatggtgtgcagaacaatatgcttattgggaataagactgaggttattgctggagaaggaatgattgtaactgcaggagctattgattgtcatgtacatttcatatgtcctcaattggtgtatgaagcagtgtcaagcggcattacaactatggttgggggagggacagggcctgcttatggtacacgtgctactacgtgtaccccttctccgttcgatatgaagttaatgctgcagtccacagatagcctgccactaaactttggctttacaggaaagggaaatacagctaaaccgttagagcttcgtcacatagtggaggctggagcaatgggattgaagctgcatgaggactggggaactactcctgctgcaatagacaattgtttggcagttgcagaagaatatgatatccaggtgaacattcatactgacaccttaaatgaatccggttttgttgagcacactatcaatgcatttcgtgggagaacaatacatacatatcacagtgaaggtgctggtggtggacatgcaccagatatcattagagtttgtggagtgaaaaatgtactcccgtcatcaaccaacccaacacggccatatacgaaaaatactgtagatgaacatcttgacatgctgatggtttgccatcaccttgacaagaacatcccagaagatgtagcttttgctgaatcaagaataagagctgaaacaatagctgcagaggatatattgcatgatatgggagcaatcagcattatctcctccgactcacaagcaatgggtcgcattggagaggtaataagcagaacttggcagacagctgacaagatgaaggctcagaggggagccattgatcctaacatggctgatgatgataactcaaggatcaagagatacattgcaaagtacactataaacccagctatagccaatgggtttgcagacttaattggctcggttgaggtgaagaagctggctgatcttgttatatggcagccggctttcttcggagcaaaaccagaaatgataatcaaaggaggcaatatagcatgggctaatatgggcgatgcaaatgcgagcatacccactcctgagccggtgatatcaagacctatgtttggagcatttggaaaggccggaagtgaaaactctgttgcatttgtcagcaaggctgccttgagaaagggggtaaaagaactatatggactcaagaagagggttgtagcggtgtccaacgtgaggcagctcacaaaactcgacatgaagctgaatgatgcgcttccagagatcaccgtggatccagagacatacgttgtcacagcaaatggcgaggtccttacatgtgcgccagccgattcagtccctctctcccggaactatttcctcttttaa

SEQ ID NO: 50111 - protein, 838 aa, Arabidopsis thaliana
MKLLPREIEKLELHQAGFLAQKRLARGIRLNYTEAVALIATQILEFIRDGDKSVAELMDIGRQLLGRRQVLPAVLHLLYTVQVEGTFRDGTKLVTVHEPISLENGNLELALHGSFLPVPSLDKFPEVHEGVIIPGDMKYGDGSIIINHGRKAVVLKVVNTGDRPVQVGSHYHFIEVNPLLVFDRRKALGMRLNIPAGTAVRFEPGERKSVVLVNIGGNKVIRGGNGIVDGLVDDVNWTVLMETMERRGFKHLEDIDASEGIAGEDPRFTTMISREKYANMYGPTTGDKLRLGDTNLYARIEKDYTVYGDECVFGGGKVLREGMGQGIEQAEALSLDTVITNSVIIDYSGIYKADIGIKNGHIVGIGKAGNPDTMHGVQNNMLIGNKTEVIAGEGMIVTAGAIDCHVHFICPQLVYEAVSSGITTMVGGGTGPAYGTRATTCTPSPFDMKLMLQSTDSLPLNFGFTGKGNTAKPLELRHIVEAGAMGLKLHEDWGTTPAAIDNCLAVAEEYDIQVNIHTDTLNESGFVEHTINAFRGRTIHTYHSEGAGGGHAPDIIRVCGVKNVLPSSTNPTRPYTKNTVDEHLDMLMVCHHLDKNIPEDVAFAESRIRAETIAAEDILHDMGAISIISSDSQAMGRIGEVISRTWQTADKMKAQRGAIDPNMADDDNSRIKRYIAKYTINPAIANGFADLIGSVEVKKLADLVIWQPAFFGAKPEMIIKGGNIAWANMGDANASIPTPEPVISRPMFGAFGKAGSENSVAFVSKAALRKGVKELYGLKKRVVAVSNVRQLTKLDMKLNDALPEITVDPETYVVTANGEVLTCAPADSVPLSRNYFLF

SEQ ID NO: 50112 - DNA, 675 bp, Sulfolobus tokodaii str. 7
  CDS (1)..(675): transl_table=11
atgtgggctgaaaaaatgtttctaacacctagagagcaagaaaaactacttatttcatgggctgcagaagttgcaagaaggagaagagttaaaggattaaagctaaactatgcagaagctatggcaattatagtagattatattttagaaaaagctagagaaggagttaaaatggaagatataattaaaggtgcacaagaattattaactgaaaacgatgtaatggaaggtgtaccagaacttcttgacctagttcaagtagaagcaacatttccggatggtaccaaattagttacagttagaaatccaataaaaagtagtaagaaaacattaaatacttatataattaaacaaggagaaatagaagttaagggagaagagatagaattagaaataactaatactggtgatagacctatacaagtgggttcacattttcacttttttgaagtgaataaggctctaaaatttgatagggaaaaagcttatggaatgagattatcaatcccagcagggacagctgtaagatttgagcctggacaaactaaagttgttaggctaagaaagataggaggtggaagaagagttaccgggttaaacggtttaacagaaggttctctagaacataataaggaagaatctattaaaagagcaaaggagagggggtttgcttga

SEQ ID NO: 50113 - protein, 224 aa, Sulfolobus tokodaii str. 7
MWAEKMFLTPREQEKLLISWAAEVARRRRVKGLKLNYAEAMAIIVDYILEKAREGVKMEDIIKGAQELLTENDVMEGVPELLDLVQVEATFPDGTKLVTVRNPIKSSKKTLNTYIIKQGEIEVKGEEIELEITNTGDRPIQVGSHFHFFEVNKALKFDREKAYGMRLSIPAGTAVRFEPGQTKVVRLRKIGGGRRVTGLNGLTEGSLEHNKEESIKRAKERGFA

SEQ ID NO: 50114 - DNA, 477 bp, Yersinia pestis KIM
  CDS (1)..(477): transl_table=11
atgcgagtaaaacctgaactgattattgcagaggattcaagcatgagcgcgaagaaaagtacgaaagacagtaaagaacagaatacgccactgggtggcctcgttttagcggaaacaccaattacgtttaacgaaaataaacccgtgaccaaagttaaagtccgcaataccggtgaccggccaattcaggttgggtcccatttccatttcttcgaggttaaccgcgcactggaatttgatcgtgcagcagcttatggcaagcgcctcaatatctcctcgacgacggctatccgttttgaacctggtgatgaaactgaagttccgcttatcccctttggcggcaagcagacactgtatggttttaacaatcttgtcgatgggtggaccggtgagggtgtggtacccaacagtgagcgcccggataaactcgcggctatccgccttgccgccgagcgtggttttaaatcatctaaataa

SEQ ID NO: 50115 - protein, 158 aa, Yersinia pestis KIM
MRVKPELIIAEDSSMSAKKSTKDSKEQNTPLGGLVLAETPITFNENKPVTKVKVRNTGDRPIQVGSHFHFFEVNRALEFDRAAAYGKRLNISSTTAIRFEPGDETEVPLIPFGGKQTLYGFNNLVDGWTGEGVVPNSERPDKLAAIRLAAERGFKSSK

SEQ ID NO: 50116 - DNA, 681 bp, Anopheles gambiae str. PEST
  CDS (1)..(681)
atgcatttaacaccgagagaaaccgagaagcttatgctgttcatggcaggagagcttgcgctaaaaagaaaggccagaggcctgaaactaaattatccagaatcaatagcacttatcagtcatttcttactggaaggagcaagagatgggaaaaaagttgctgaactgatgcaggaaggagcacagattcttactaaagatgatgtaatgccgggagtggctgagatgatccacgatgtgcaaatagaagcaacattcccggacgggacaaagttggtaacagtacataatccaatccgtaaaaccagtagtatgataccaggagaaatttttgtaaaagaagggactatcatctgcaacgaaggcagagaaaccgtaaagataaaagtaataaacagaggcgaccgtcctatacaggtaggttctcactatcatttttttgaggtgaataaagcaatgagcttcgatcgtgagaaagcttttggtaaaaggctgaacattgtggccagcacagccgttcgctttgaaccgggagaggaaaaagaagtagagcttgtggaaattggtggaaccaaaaaagctataggtttcaataaccttgtggatggttctgtagattctgctgctcagaaagaagaaagcttggctaaagcgaatcaattaaattttaaaaacctgtaa

SEQ ID NO: 50117 - protein, 226 aa, Anopheles gambiae str. PEST
MHLTPRETEKLMLFMAGELALKRKARGLKLNYPESIALISHFLLEGARDGKKVAELMQEGAQILTKDDVMPGVAEMIHDVQIEATFPDGTKLVTVHNPIRKTSSMIPGEIFVKEGTIICNEGRETVKIKVINRGDRPIQVGSHYHFFEVNKAMSFDREKAFGKRLNIVASTAVRFEPGEEKEVELVEIGGTKKAIGFNNLVDGSVDSAAQKEESLAKANQLNFKNL

SEQ ID NO: 50118 - DNA, 2508 bp, Magnaporthe grisea 70-15
  CDS (1)..(2508)
atgcatctggtgccaagagagcttgacaagctcgtcatcacccagcttggccacctcgcgcaacgtcgcctggcgcgcggcgtcaaattgaaccacagtgaagccacggcgctcatcacctgcgtgctgcaggagctgattcgcgatggcgcccacaccgtctctgacttgatgtcgctcggagcgactatgctgggccgtcgccacgtcatgcccagcgtctgctccacgctgcatgagatccaggtcgagggcacctttccctctgggacctacctcgtcacggtgcacaaccccatcgccaccgacgacggtgacttgatgcgcgcgctgtatgggagcttcctgcccgtcccggacgcggatctgttctctatgccggagcttgaggactatgagcccgagagacagcccggcgcggtagtcgcggtcaagggcgttgttgagctcaacaagggccggaggagacggagattaagggtcgtcagcaagggggataggccggtgcaggtgggcagccactaccactttgttgaggcgaatgcacagctcgagtttgaccgtggcaaggcttatggcttccgccttgacatcccagccggcacgtcggtccgtttcgagcccggcgatgccaagacggtcaccatcgtcgagatcggaggatccaaggccatccgcggcgggaactggcttgcgaacggtgatgtggactactcgcgcgtggaggagttcattcaaagctgtcaaagtcaaggattcgcgcatgtcccggcgcctgtctgggacgatgaggacgtaaagggcttcgtgcttgagaggaacgcctatgtaaccatgtttggccccaccaccggcgacagagttcgcctgggaatgacggacctctggattgaggtggagcgtgacatgacggtctatggagacgagtgtaaattcggcggcggcaagactctgcgcgaaggcatgggtcaggcgtctgggcgatccgatgaagaaactctggatatggtggtcacaaacgcgctcattctggactggagtggaatttacaaggccgacattggtatcaagaatggcatgattgtggccatcggcaaggctggaaaccccgatgtcatggatggcatcactgaaggcatggttgttggaagctgtaccgatgttgtggctggcgagggcaagatcatcacagctggtggaatcgacactcacatccacttcatatgtccgcaacaagcagacgaggcgctggctgctggtgtcacgactttcctgggtggtggaacaggcccgagcgctggaaccaacgcaacgacctgtacccccggcaaacactacacaaaacagatgcttcaggcagctgatacgcttcctctcaatatcggaataacaggcaagggcaacgacagcggcctgcctggcctgcgggaccaggtcatttctgggcaatgcggcctcaagatccacgaggactggggctcaacaccagcggctatcgacgcgtgtctctcggtgtgcgaagagtttgatgtccagtgcatgattcacactgacacgctcaacgagagtggttttgttgaagccaccgtcgcagccttcaagggacggacaatccacacgtaccacaccgaaggagctggcggcggccacgcgcccgacattatccgcgtagtggagcatgacaatgttctccccagtagtacaaatccgacccgcccgttcacgcggaacacgctagatgagcacctcgacatgctgatggtgtgccaccatctctctcgcgacatccccgaggatgtggcgtttgccgagtcgcgcatccgggccgagaccatcgcggccgaggacgtgctccacgatctgggcgccatcagcatgatgtcatcggacagccaggccatgggccgcgtcggcgaggtcgtgctgcggacctggaacacggcgcacaagaacaaggtgcagaggggccggctgcctgaagacgaagctaacggcaacgacaactgcagggccaagaggtacgtcagcaagtacaccatcaacccggccctggcccagggcatgtcgcacctgataggcagcgtcgaggtcggcaagctggcggacctggtggtgtgggatcccgcgtggttcggcaccaagccgaacctggtcatcaagtcgggcctgatcgcctgcgccatgatgggcgaccccaacgcgagcatccccaccatccagcccatcgtcgccaggcccatgtttgcgccccgcgtgccgcagacctcggtcctgttcgtctcgcaggccagcgtggaccagggcgtcgtgcagacgtacgggctccggaagcgcgtcgagcccgtcaagggctgcaggagcgtcggcaagaaggacatgaagcacaacgctgtcatgccgcggatgagggtggacgccgagacgtacacagtggaggccgatggggttgtttgcacggccctgcccagtgacgagctgcctttgacgcagcagtattttgtgtattga

SEQ ID NO: 50119 - protein, 835 aa, Magnaporthe grisea 70-15
MHLVPRELDKLVITQLGHLAQRRLARGVKLNHSEATALITCVLQELIRDGAHTVSDLMSLGATMLGRRHVMPSVCSTLHEIQVEGTFPSGTYLVTVHNPIATDDGDLMRALYGSFLPVPDADLFSMPELEDYEPERQPGAVVAVKGVVELNKGRRRRRLRVVSKGDRPVQVGSHYHFVEANAQLEFDRGKAYGFRLDIPAGTSVRFEPGDAKTVTIVEIGGSKAIRGGNWLANGDVDYSRVEEFIQSCQSQGFAHVPAPVWDDEDVKGFVLERNAYVTMFGPTTGDRVRLGMTDLWIEVERDMTVYGDECKFGGGKTLREGMGQASGRSDEETLDMVVTNALILDWSGIYKADIGIKNGMIVAIGKAGNPDVMDGITEGMVVGSCTDVVAGEGKIITAGGIDTHIHFICPQQADEALAAGVTTFLGGGTGPSAGTNATTCTPGKHYTKQMLQAADTLPLNIGITGKGNDSGLPGLRDQVISGQCGLKIHEDWGSTPAAIDACLSVCEEFDVQCMIHTDTLNESGFVEATVAAFKGRTIHTYHTEGAGGGHAPDIIRVVEHDNVLPSSTNPTRPFTRNTLDEHLDMLMVCHHLSRDIPEDVAFAESRIRAETIAAEDVLHDLGAISMMSSDSQAMGRVGEVVLRTWNTAHKNKVQRGRLPEDEANGNDNCRAKRYVSKYTINPALAQGMSHLIGSVEVGKLADLVVWDPAWFGTKPNLVIKSGLIACAMMGDPNASIPTIQPIVARPMFAPRVPQTSVLFVSQASVDQGVVQTYGLRKRVEPVKGCRSVGKKDMKHNAVMPRMRVDAETYTVEADGVVCTALPSDELPLTQQYFVY

SEQ ID NO: 50120 - DNA, 2511 bp, Gibberella zeae PH-1
  CDS (1)..(2511)
atgcatctggtacctaaagagatcgacaagctagtcatctctcagctgggagcacttgcacagagacgtttggctagaggcgtcaagttgaaccactcagaggctgtggctctcattgctaataacctccatgaactcattagagatggaaaccataccgtatctgacttgatggcgctgggtgcgacgatgctaggacgtcgtcacgttatgccctcagtctgcgccaccctccatgagattcaagttgaaggcacctttccatctggaacataccttgtcacagtccataaccccatcagctcagatgatggagacttgcgaagggctctctacggaagctttctccccgttccagataacagcatctttcccatggcagcttctgaagagtatcaacttggcaagcaacctggtgcggtgatacccgtcaagactaagaagattactctcaacgagggaagaaagaggattcgtcttcaagtgacgagtatgggagacagacctatccaggttggatcgcattatcactttatcgagactaacccgcagcttgagtttgaccggatccgctcatatggataccgtcttgatatcccagctggaacgtcagtgcgattcgaacctggtgacaccaagactgttactttggttgagattggtggtaaacgtgtgattcgcggtggtaacaaccttgcatcgggcgttgttgacctctctcgcgccgatgagatccttgcccgattacaagaagctggatatgctcacaaatcgaaccccgcaggggacatggcccatatcgaccccttccagatggatcacgcctcgtacgcgaccatgtttggccctacaactggcgatcttgttcgacttggcagcacagatctttggatcaaagttgaacgcgacgagaccatatacggtgatgagtgcaagtttggtggcggaaagactctacgcgagggaatgggtcaagcgagtggacgaacagacgccgagactctcgatctcgtagtttcaaacgccctcattgttgactggactggtatctataaggcagatattggaatcaaggaaggtatgatcgtggctatcggaaaggcaggaaacccagatgttatggatggcgtaacagaaggaatggtcgtcggcagctgtaccgatgtcgttgcaggcgaggggaagatcgtcaccgctggtgcgattgactctcatattcactttatctgcccacagcaagtgcccgaagcacttgcgtctggtgtaaccaccatgcttggcggaggtacaggtccaagtgcgggaacaaacgcaacgacttgtactcctggcgttcactacatgcgttcaatgctccaagcatgcgatcagctccctatcaacattggtatcacaagcaaaggtaatgatagctctcccgagggtctccgtgatcaggtcaatgctggcgcatgtggtctgaagttgcacgaggattggggcagtacaccggcggctatagacacctgtctcagtgtttgcgatgagtttgatatccagtgccttattcacacagacacgctcaatgaggctggctttgtcgagtctactatcgctgcgatgaaaggacgcactatccacacctatcataccgaaggtgcgggaggtggccatgcgccagacatcatctctgtagtagagcatgagaatgtgctcccatcgtccaccaaccccacgagaccgtttacactcaatactctggacgaacatcttgatatgcttatggtgtgccatcacttatccaagaatatccccgaagacgttgcctttgccgagagccgcatccgcgctgagactatcgctgctgaagatgtgttgcacgataagggcgccatcagcatgatgagttccgactcgcaggcaatggggcgttgcggagaggttattctgagaacgtggaacacggcacacaagaataaggtccagaggggctggttgcctgaagacgagggcacaggagctgacaatgcgcgtgtcaagcgctacgtgagcaagtacactattaacccagccattgcccagggctttggacatgttataggaagtatcgaagttggaaagtttgcggatctagttctgtgggatcctgcatggtttggcacgaagcccagctatgtcctcaagggtggacatatcgcgtatgctcagatgggtgatcctaatgcctctattccaacggtccaacccattattgctcggcccatgttctcgccccactgcgcttctacaagcattctcttcgtctcatccgcatctatcgaaacgggtgccattgcctcatacggcctacgcagtcgtgtcgaggctgttcgtggatgtcgttctattggcaagagtgatatgaaacataatgataccaagcctaggatgcgtgttgatcctgaaagttacactgttgaagctgatggggagatttgtgaggcagcgcctgcagacaccctgccacttacacaacagttctatgtttactag

SEQ ID NO: 50121 - protein, 836 aa, Gibberella zeae PH-1
MHLVPKEIDKLVISQLGALAQRRLARGVKLNHSEAVALIANNLHELIRDGNHTVSDLMALGATMLGRRHVMPSVCATLHEIQVEGTFPSGTYLVTVHNPISSDDGDLRRALYGSFLPVPDNSIFPMAASEEYQLGKQPGAVIPVKTKKITLNEGRKRIRLQVTSMGDRPIQVGSHYHFIETNPQLEFDRIRSYGYRLDIPAGTSVRFEPGDTKTVTLVEIGGKRVIRGGNNLASGVVDLSRADEILARLQEAGYAHKSNPAGDMAHIDPFQMDHASYATMFGPTTGDLVRLGSTDLWIKVERDETIYGDECKFGGGKTLREGMGQASGRTDAETLDLVVSNALIVDWTGIYKADIGIKEGMIVAIGKAGNPDVMDGVTEGMVVGSCTDVVAGEGKIVTAGAIDSHIHFICPQQVPEALASGVTTMLGGGTGPSAGTNATTCTPGVHYMRSMLQACDQLPINIGITSKGNDSSPEGLRDQVNAGACGLKLHEDWGSTPAAIDTCLSVCDEFDIQCLIHTDTLNEAGFVESTIAAMKGRTIHTYHTEGAGGGHAPDIISVVEHENVLPSSTNPTRPFTLNTLDEHLDMLMVCHHLSKNIPEDVAFAESRIRAETIAAEDVLHDKGAISMMSSDSQAMGRCGEVILRTWNTAHKNKVQRGWLPEDEGTGADNARVKRYVSKYTINPAIAQGFGHVIGSIEVGKFADLVLWDPAWFGTKPSYVLKGGHIAYAQMGDPNASIPTVQPIIARPMFSPHCASTSILFVSSASIETGAIASYGLRSRVEAVRGCRSIGKSDMKHNDTKPRMRVDPESYTVEADGEICEAAPADTLPLTQQFYVY

SEQ ID NO: 50122 - DNA, 4461 bp, Gibberella zeae PH-1
  CDS (1)..(4461)
atgcattacacaccccgtgaggttgagaaacttgccttttctcatgccggttatcttgctcagaagcggctggcacatggaaggaagctcaatcatctagagtctagtgctctcatttccaatgttctccaagagatcatccataacgaagattactctgtcgccgatctcatgaaacttggcaagattattctgggccgacgacatgttcacccatctgtcgttgctacgctcaaacagatgcaggtcgaaggcacttttgagactggaactcatttgattaccatccataaccccatcagtactgacgaaggagacttgaagatggctttctacggaagcttcattccagttccctctgcagaattatttccttctgtcaacgaggcggactttcaccctttggcgatgccaggggctattgaaccagcagaggctgaagacatcattctcaacgcggggcgtgaccgagtcataatcactgttacgaacaaagggactcgagccgttcatgtcggatctcactttcacttcatggacacaaaccctgatctcaactttgatcgcgaaaaggcctacggctaccatctcgatcttccagctggagagtttctgcgtttcgagcccaatgagccgaaatccgtaactctagttcaaatcggaggctcaaaggtcattcaaggtgggagtggccttgccaaaggtccggtcaaccgtcacaacgcccagaacatcctccagcaactgcaacaggcgggttatcagcactcgcttgaagcatcagaggagcaaagtcttattcgaccgtgctcaatcagtagaaaagcgtatgcctctgcatatggtcctacaacaggcgatctgatccgtcttgggtctactgacctttgggccaaagttgagaaagattacacattttacggcgacgagtgcacattgggatgcggcaagactattcgtgatggcatgggagccgcgagcggttgtgctgatgccgattgtctcgacttggctatcgtcaacgctgtcatcattgattggactggcattttcaaggctgacattgggatcaaagacggcatcattgttggcattggaaaggctggtaacccaagtgtaatggatggtgtttctgacaacatggttattggatcaaacacggacatcattgacgctggtggtaaaattgttaccgctggtggagtcgatactcacgtccataacatttgcccgcagcaggcattcgaggcgatctcatccggtatcacgactctctttggaggcggtaccggcccaagcacctcgtctacagctgtcaatggcactgcgagcaaaaagtacattcgacaaatgatgcaagcatgcgatcagctacctgtcaacttcggactcgttggaaagggaagtgactccgagaagatcggactccttgatcagatcaacgccggtgttattgcattgaagctacatgaggactttggatgtacaccctccacaattgagaactgtctgaatgtctgcgaagaacaggacatccaatgccatatccataccgatggtctcaacgaagcaggcttccttgaacacacagcagcaatcttcaaaggccgaagcattcatgtgtaccatgtcgaaggcgcaggtggcggtcatgcacccgacgtcatcaagcttgtcgcgtacccaaatgtactccccagcagcacttccccgacaatgcctttcactacaaacacgattgaagagcatatcgacatggctgctaattgtcaccgcctctcaaaggacaatcccgatgatgcctcattccttaagaaccgtatccgagaggaaaccatttcagccgaggacattcttcatgacattggagcgatcagcattatgtcatcggattctcaagctatgggtcgatcagcagaggtgttggtgtgcacttggcaggcggctcataagaacaagctccagcgcggtgctctagcagaggacaaggacactggtgcagacaacttccgtatcaagcgatatatcagcaagtataccataaatcctgccattacacaaggaatcagtcatacggttggcagtgttgaaacgggcaaattggccgacttggtcatttgggaccccgctgagtttggaacgaagccattccaggttcttaagaaggggtttattacttatgcgcaaatgggagatcccaacggagctctctccgatgtcgaacccttggtcggccgaccaatgtatggagccctacatcccgagtccagcgtcatgtttgtctctcaagcaagcgcttcacaaggtggcgatgttcactcgtacaatctcaaaaagcagattgaggtcgtgaagaactgtcgaacggtgaagaagagtgatctcaagtttaacagcgctacacccaacgttgatgttgatcccgagactttggctgtcacttgcgatggaatggcactcaagtctgagccgaactgcatttattgccatgtcttttgtttcaaatggtatcgaagcaagcgagcttctaccttgagcatggaaaatagcgaagaagatgatggcggaactcgcaacgaacctggcacacgcgcctatcgactccatactaggcgtcgaccctgtgataaatgtcgtgcccggaaggttcggtgtcaaatagaggatggcaaatcgcactgccgtcgctgtgaaaactctcagactccatgtactttcgaaggacgatcaagacgtactacacgacagagcaagactacatccgtttctagcagtgctcattcaccagttgtccatcatacctctcacgatgatacattgggccttgacaactccttcggagtatctgacgaacaacactctgatagaccaacgatcttcgtggctactcctccagtctttacacccgagaccgagatcccgtatgatcacgcacaaacacttagtagtgtcgccaccacaactcagttgcaattttccaggtcagtggatgatatacagggacagtcatcaacccttctaggatcatcctccgaggcagatccctggctgctacgccactgccggttcgatgactatggactcagaagcttctatggtctgcagttccgaaatattggtggagttccaaaccggcagaagattcctgtacactttatcgtgaccccgaagttaacgaatgatgcaacgttggacaaaatgatgtctttaagatccaggcttaacgggctcatttcagtgtccatgggcatcaggcttgccaagctccaggacttactcgataacccacttcctggatcgaccgctcttgaccatattccctgccacttactcggtgctatttatggtcttgcgttaccctttgcccgaaacgatgagcatctatccatcattgaaatacaccatcagttacccagcgcagacatatggaacattgtacatgaaagcctgcaacaacaacttcgtaccccagatctcagtgttttgacggcaggcctcatgtgtctccatgcaacgatgaatcacagattcgctactacaacagacacgttcaaatggacttggctaggcactctggtagggatagcacagaatctgggtctgcatcttgaaactcgtatgtgcgccattcctgctgaagagaaacagatgcgtgcccggttgtggtgggctttatacatcgaggacagctggttatcattacttatgggtcgtcctccatacatttctgacgatgagtgggacgttggtgaactggatgatactgattttgccattcctacaagtattccatgcaccaatgttggacatgctgagattacgaggcctttccgggacatggctcgtctctcggtcattgcacactcggtgcagtcttctttatattcattgaaggcgtcacagaagctgtctgagaatctgtcgctctccatccaaacagcgcagcccatatttgaacaactaagctcatggcgcgcttcggtacaagtcccagaggcatcaagaacaagtaacaatggcatgctcaacgacaatgaatcatatccggcagcaatactcatcgcacacgcaaccttggtcacgtacgtatggagagcacttctacgacccatcgtgccatcggctgtaccgccacttgttattgatgatcaacagcttgctgaagcttctctttttatggaactccagccgcgagatgtagagaacctctgctgggatgtaccagatctctcacatctcgagttaccactaagaagctccgccgatggtactagatcacatcatacagtcattcagaacctccatcagtcttcattggcatgggctacgagcctctcaagtctagttaagaacttattacccgctcgtttccacgatttttggtattcctttacttgcattaggatatttactcattatcatgccgctgtgtcggttgcagtttcactgggccgcgaatga

SEQ ID NO: 50123 - protein, 1486 aa, Gibberella zeae PH-1
MHYTPREVEKLAFSHAGYLAQKRLAHGRKLNHLESSALISNVLQEIIHNEDYSVADLMKLGKIILGRRHVHPSVVATLKQMQVEGTFETGTHLITIHNPISTDEGDLKMAFYGSFIPVPSAELFPSVNEADFHPLAMPGAIEPAEAEDIILNAGRDRVIITVTNKGTRAVHVGSHFHFMDTNPDLNFDREKAYGYHLDLPAGEFLRFEPNEPKSVTLVQIGGSKVIQGGSGLAKGPVNRHNAQNILQQLQQAGYQHSLEASEEQSLIRPCSISRKAYASAYGPTTGDLIRLGSTDLWAKVEKDYTFYGDECTLGCGKTIRDGMGAASGCADADCLDLAIVNAVIIDWTGIFKADIGIKDGIIVGIGKAGNPSVMDGVSDNMVIGSNTDIIDAGGKIVTAGGVDTHVHNICPQQAFEAISSGITTLFGGGTGPSTSSTAVNGTASKKYIRQMMQACDQLPVNFGLVGKGSDSEKIGLLDQINAGVIALKLHEDFGCTPSTIENCLNVCEEQDIQCHIHTDGLNEAGFLEHTAAIFKGRSIHVYHVEGAGGGHAPDVIKLVAYPNVLPSSTSPTMPFTTNTIEEHIDMAANCHRLSKDNPDDASFLKNRIREETISAEDILHDIGAISIMSSDSQAMGRSAEVLVCTWQAAHKNKLQRGALAEDKDTGADNFRIKRYISKYTINPAITQGISHTVGSVETGKLADLVIWDPAEFGTKPFQVLKKGFITYAQMGDPNGALSDVEPLVGRPMYGALHPESSVMFVSQASASQGGDVHSYNLKKQIEVVKNCRTVKKSDLKFNSATPNVDVDPETLAVTCDGMALKSEPNCIYCHVFCFKWYRSKRASTLSMENSEEDDGGTRNEPGTRAYRLHTRRRPCDKCRARKVRCQIEDGKSHCRRCENSQTPCTFEGRSRRTTRQSKTTSVSSSAHSPVVHHTSHDDTLGLDNSFGVSDEQHSDRPTIFVATPPVFTPETEIPYDHAQTLSSVATTTQLQFSRSVDDIQGQSSTLLGSSSEADPWLLRHCRFDDYGLRSFYGLQFRNIGGVPNRQKIPVHFIVTPKLTNDATLDKMMSLRSRLNGLISVSMGIRLAKLQDLLDNPLPGSTALDHIPCHLLGAIYGLALPFARNDEHLSIIEIHHQLPSADIWNIVHESLQQQLRTPDLSVLTAGLMCLHATMNHRFATTTDTFKWTWLGTLVGIAQNLGLHLETRMCAIPAEEKQMRARLWWALYIEDSWLSLLMGRPPYISDDEWDVGELDDTDFAIPTSIPCTNVGHAEITRPFRDMARLSVIAHSVQSSLYSLKASQKLSENLSLSIQTAQPIFEQLSSWRASVQVPEASRTSNNGMLNDNESYPAAILIAHATLVTYVWRALLRPIVPSAVPPLVIDDQQLAEASLFMELQPRDVENLCWDVPDLSHLELPLRSSADGTRSHHTVIQNLHQSSLAWATSLSSLVKNLLPARFHDFWYSFTCIRIFTHYHAAVSVAVSLGRE

SEQ ID NO: 50124 - DNA, 3480 bp, Aspergillus nidulans FGSC A4
  CDS (1)..(3480)
atgcctaaaaacgattcaaagaccgtcacaatcgatgtggaggagttcactaagactcgtgacagttttctcgctaaacttgcgcagctccagtctctcacttttgagctgtcgcgcgcatacatcaaccacaccagtgcggtgcttggtcaggataacgcaaatgtagatatctcggcgatcaccaacaccctcgccgccagtcttcgggacactggcgtactcgctgcagccggcactggttccggcgccgagtctggcgagaagaagaagcgtaagcgtcgcgctgatcctaacgctccgaagcgcaccttgaccccattcttcctgtacatgcatcacaaccgggcacgcattgctgaagagctgggccccgatgcgaagccaaaggatgtctcaaacgaaggtaccagacgctgggccgaaatgcccgactcgcaaaaggaggtctggaagaaactctatgcggacaatcttgcggcgtaccgcgagaaggttgctgcttataaggcgggtcttccttttgatcgggatgacaatgataaggcagccgaccaactacacctagacgtcgccgccgccgaagcatcggatgaggaggaggaagaagaagaggatgagcatggagaggaagaagaggaagaggaggaggagtcgcctgagcctgctaaggaacccactccccctcctcccaagcgtcgccgtagcgagggtaagccatccaaggatgtctcctctcctgtcgttgagaagaagggccgaaacgagtcgccggagaagaagaggcgcggggcggctaagaaggacaaggaggagccgcgcaagtctcttggaggggagtcgaagcgctcgaagaagaagcgcaagagcgactacattcctattcgcgaagagaactggtttgcgtcgcaactcacaatccttgcaaggcgaccattctacttcaagtatatcccggatataataaaaggcaggatacataggcaagcgtggcaatatgcaccttattccgaaggaagctttttggcccagcggcgtcttgcacgtggtgtgcgactcaatcatgccgaagctgcggcattgatttcttcgaacctgcacgagttgattcgtgatgggcaatactcggtagctgacctgatgtccatcggcaagaccatgcttggtcgccggcatgtactcccatcagtcccttcgaccctggtggagctgcaggtggaaggcactttcaccacgggcagctatttagtgactgtccaccaccccatcagttcagacgatggagacctcgaaaaggctctctacgggagtttcctaccgataccgccggctgatacatttccggaccccgatccggaggattatctacctgaaaaggtgcctggagcggttattcctgtgaagaacgcgcgcatcacattgagcgagggaaggaagcggattaagctcaaggtgatgagcaagggtgatcgaccgattcaggttggctcgcattatcattttatcgaggctaaccctcaactgcatttcgatcgatttcgcgcttatggatataggcttgatattcctgcaggcacgtctgttcggttcgagcctggtgacacgaagactgttactctggttgagattgggggccataggatcatcaagggaggcaattcccttgcatccgggccggtggaccttcgtcgggcggacgacatcatacagcgcttgcaaactgctggttttgcgcatgttcctgaacccgctgcggataacgcgctcgttgctcctttcacgattgatcgcgaagcgtatgctcggctatttgggcccactactggggatttgattcgcttgggactgacaaacctctgggtcaagattgagaaggattatactcactatggagacgagtgttcatttggcggtggcaagagtatccgcgaaggcatgggccaggcatcagggaagtcccacaaggactgtctggatacggtcatcacaaacgctgtcatcatagactggtccggtatctacaaggcagacattggtataaaaaacggcaccattgtcgggattggcaagtcaggaaacccagacgttatggatggcgtccatccggacatgatcatcggctcgtcaacggatgtcattgcgggagaaaacaagatcgtgactgcaggaggcttcgacacgcacatccattttatctgccctcaacaagcacaggaggcactcgcttctggaatcaccacgtttttgggaggaggaactggtccatcaaccggcacaaacgcaaccacatgcacgcccggcccaacacacatgcgccaaatgatccaagcatgtgaccagatccccatcaatgtcggcatcactgggaaggggaatgacagtggcggaattggcatcgaagagcagattatcgccggagcagccggactcaagctccatgaagactggggatctacacccgcagccatcgacacctgcctggacatttgtgagaagtacgacgtacagtgtatgattcacaccgacactctaaacgaatctggcttcgtcgaacaaactattcaagccttcaagaaccgcacaattcacacctaccacaccgaaggcgccggcggcggccatgcacccgatatcatatctgtcgttgagcaccccaatgttctccccagcagcacgaaccccacccggcccttcacaatgaacactttggacgaacatctcgatatgcttatggtctgccaccacctgtcaaagaacattccggaagacgtcgcattcgcagaaagccgcattcgcgccgagactatcgctgcggaagacgtcctccacgacctcggcgccatcagcatgatgtcctcagactctcaggccatgggacgctgtggtgaggtcatcctccgcacatggaacacagcgcacaagaacaaggaacagcgtggtcaattgccagaggacgaaaacacaggggctgataatttccgtgtcaaacgctacatcagcaagtataccatcaacccggccattgcgcagggcatgtctcatttgattgggagcgtggaggtcggcaagctcgcggatctggtgatctggtcgcctagctactttggcacgaagccgagccaggtattgaagagcggcatgattgttgcctcgatgatgggtgaccccaatggttcaatccccacaatccaacccgtgatcatgcgtccacaattcggcgcctaccttcccagcacatctgtaatgttcgtctcgcaagcttcactcgacacaaacaccgtccaatcctacgggcttaagaagcgcgttgaagccgtcaaaaactgccgcaatatcggcaaggccgatatgaagttcaatgacacgatgccaaagatgaaggttgatccggagagttatcgcgttgaagcggatggaaggctctgtgatgcgcagcctgcggagacgctgccattgacgcaggattattttgtttattaa

SEQ ID NO: 50125 - protein, 1159 aa, Aspergillus nidulans FGSC A4
MPKNDSKTVTIDVEEFTKTRDSFLAKLAQLQSLTFELSRAYINHTSAVLGQDNANVDISAITNTLAASLRDTGVLAAAGTGSGAESGEKKKRKRRADPNAPKRTLTPFFLYMHHNRARIAEELGPDAKPKDVSNEGTRRWAEMPDSQKEVWKKLYADNLAAYREKVAAYKAGLPFDRDDNDKAADQLHLDVAAAEASDEEEEEEEDEHGEEEEEEEEESPEPAKEPTPPPPKRRRSEGKPSKDVSSPVVEKKGRNESPEKKRRGAAKKDKEEPRKSLGGESKRSKKKRKSDYIPIREENWFASQLTILARRPFYFKYIPDIIKGRIHRQAWQYAPYSEGSFLAQRRLARGVRLNHAEAAALISSNLHELIRDGQYSVADLMSIGKTMLGRRHVLPSVPSTLVELQVEGTFTTGSYLVTVHHPISSDDGDLEKALYGSFLPIPPADTFPDPDPEDYLPEKVPGAVIPVKNARITLSEGRKRIKLKVMSKGDRPIQVGSHYHFIEANPQLHFDRFRAYGYRLDIPAGTSVRFEPGDTKTVTLVEIGGHRIIKGGNSLASGPVDLRRADDIIQRLQTAGFAHVPEPAADNALVAPFTIDREAYARLFGPTTGDLIRLGLTNLWVKIEKDYTHYGDECSFGGGKSIREGMGQASGKSHKDCLDTVITNAVIIDWSGIYKADIGIKNGTIVGIGKSGNPDVMDGVHPDMIIGSSTDVIAGENKIVTAGGFDTHIHFICPQQAQEALASGITTFLGGGTGPSTGTNATTCTPGPTHMRQMIQACDQIPINVGITGKGNDSGGIGIEEQIIAGAAGLKLHEDWGSTPAAIDTCLDICEKYDVQCMIHTDTLNESGFVEQTIQAFKNRTIHTYHTEGAGGGHAPDIISVVEHPNVLPSSTNPTRPFTMNTLDEHLDMLMVCHHLSKNIPEDVAFAESRIRAETIAAEDVLHDLGAISMMSSDSQAMGRCGEVILRTWNTAHKNKEQRGQLPEDENTGADNFRVKRYISKYTINPAIAQGMSHLIGSVEVGKLADLVIWSPSYFGTKPSQVLKSGMIVASMMGDPNGSIPTIQPVIMRPQFGAYLPSTSVMFVSQASLDTNTVQSYGLKKRVEAVKNCRNIGKADMKFNDTMPKMKVDPESYRVEADGRLCDAQPAETLPLTQDYFVY

SEQ ID NO: 50126 - DNA, 2607 bp, Ustilago maydis 521
  CDS (1)..(2607)
atgcacctgcttccacgcgaacgagacaagctcttactccaccatgccggctccctagcccaaaaacgtttggctaggggcgttcgcttgaaccagaccgaagctacggcgctgatcgctacggtactacaggaacgtattcgagatggcgaacattcggtcgcagagctaatgcagcatgggaaaactttgcttggtcgatgtcatgtgctgccgggtgtacccgagttgctgcacgaggtcatggttgaaggtaccttttcagatggttcattcttggtgacggtgcatcaaccagtgtgcacggaaacaggcgatattcaggctgctctctactcgagcttttatcctgctccggatgtaagcgtgttcttggcccagatgcaagcagaaacgaaggcgttggttggcaaggcagctgccgaagaagtgttgccaggagcgttggtcaccaagagaggagcacaaccgatccagctctgccccaaacgcaagcgggtcgcagtcaaagtgaccaacacgggcgatcgtcccattcaagttggctcgcactatcctttcctcgaaaccaacgctgctctttctttcccacgaatgctggccttgggcaagcgactcgacattgccgcaggtacagccatccgtttcgagccaggtgattcgaaaaccgtcacgctggtccaagttggaggtaccaagatccttgctggtggtaacaacctcgcggcgggccctcttgatgaatttctggctacttccgaatctcaagttgccctcgtcaagcgtatcgaagcggccggattcgctaacgagccgctcccagacatggaagatgactcgatcccggcgccagcgccctgtgagctgtcgcgtgatgcctacgcctctctgtacggccccaccgtgggcgacaaggtaagactcgcagacagcccactctggctcgaagtcgagaaggatttcactgtctatggcgacgagctcaagtttggaggtggcaaagtgttgcgtgatggcatgggtcaagcatcgggtcgtgccgacagtgccgtgctggacattgttatcatcaacgcactcatcgtcgattggtggggcattgtcaaggcggatatcggtatcaggaacggtcacattgtggctattggcaaggcgggcaatccggccatcatggatggcgttgatcccaacctggtcgtgggttcttgtaccgaggtaattgcaggcgaaaagttcatcgtgacagcaggagccattgatgcacacgtgcactacatctgcccagatctgcatgaggaggcactcgccacgggcatcaccaccctgattggcggtggaacaggtcctacagcgggatcgagcgcaacgacgtgcacgccaggacaggatcagcttcgcaacatgatgatcgccaccgacaatgttccgctcaactttgcctttacgggtaagggcaatgactcgggtttagccggtttggaagaccagatccgcgctggatgcgccggtatgaagatccacgaagattggggagcgacgccggctgtcatcgacgcatgcttgaccgcctgcgacaagtacgacgtacagtgcaacatccataccgacacgctcaacgaatcgtgcttcgtcgaaggcacgcttgccgctttcaagggtcgaaccattcatacgtaccactctgagggtgccggtggaggacacgctccagacatcatccgtgtttgtggagagaccaacgtgctgccatcttcgaccaacccgacgcgaccttacgcaaagaacacgctcgacgaacatctcgacatgctgatggtgtgccatcatctgtcaaaagacattgtcgaagatgtggcgtttgctgactcaaggattcgcgcagagacggtggctgccgaggacgtattgcaggacagcggtgcaatttctatgatcagctccgactcgcaggctatgggcaggatcggtgaagtggtttcgcgtacgtggagaactgcttccaagatggccagtctggtcgggccgcttcatgaaccaggctctgatccacagacaaagggcgtgcctcatccgagcgaggcagtatcggacaacctacgcatcaagcgctacgtggccaaatacacgatcaaccctgctcttgttcacggctgttcgcatctgattggcagtattgaacccggcaaactggctgatcttgtcttctacctgccctccaaatttggcatatgccctgaatttgtgctcaagggcgggcaggtagcatgggcacagatgggcgatgccaacgcctccatccccacagtgcagcctatctacggcagaccgatgcacggctcaaacaccaatgctgcatcgcacaactcggtgctatttgtttcgcagatctctgtcgatcagggtaccgttaggggctacggagtcaacaagagaatcgagggggtcaaggggtgcaggacggtcagcaaaaaggatatgaagctgaacacccacacacctgatttgaaggtggatccagagacatacgaggtcacggacggaggtcgactgttgaccgtccctccagctgacgagttgccattgacgcagagtctgcacctgttctaa

SEQ ID NO: 50127 - protein, 868 aa, Ustilago maydis 521
MHLLPRERDKLLLHHAGSLAQKRLARGVRLNQTEATALIATVLQERIRDGEHSVAELMQHGKTLLGRCHVLPGVPELLHEVMVEGTFSDGSFLVTVHQPVCTETGDIQAALYSSFYPAPDVSVFLAQMQAETKALVGKAAAEEVLPGALVTKRGAQPIQLCPKRKRVAVKVTNTGDRPIQVGSHYPFLETNAALSFPRMLALGKRLDIAAGTAIRFEPGDSKTVTLVQVGGTKILAGGNNLAAGPLDEFLATSESQVALVKRIEAAGFANEPLPDMEDDSIPAPAPCELSRDAYASLYGPTVGDKVRLADSPLWLEVEKDFTVYGDELKFGGGKVLRDGMGQASGRADSAVLDIVIINALIVDWWGIVKADIGIRNGHIVAIGKAGNPAIMDGVDPNLVVGSCTEVIAGEKFIVTAGAIDAHVHYICPDLHEEALATGITTLIGGGTGPTAGSSATTCTPGQDQLRNMMIATDNVPLNFAFTGKGNDSGLAGLEDQIRAGCAGMKIHEDWGATPAVIDACLTACDKYDVQCNIHTDTLNESCFVEGTLAAFKGRTIHTYHSEGAGGGHAPDIIRVCGETNVLPSSTNPTRPYAKNTLDEHLDMLMVCHHLSKDIVEDVAFADSRIRAETVAAEDVLQDSGAISMISSDSQAMGRIGEVVSRTWRTASKMASLVGPLHEPGSDPQTKGVPHPSEAVSDNLRIKRYVAKYTINPALVHGCSHLIGSIEPGKLADLVFYLPSKFGICPEFVLKGGQVAWAQMGDANASIPTVQPIYGRPMHGSNTNAASHNSVLFVSQISVDQGTVRGYGVNKRIEGVKGCRTVSKKDMKLNTHTPDLKVDPETYEVTDGGRLLTVPPADELPLTQSLHLF

SEQ ID NO: 50128 - DNA, 2514 bp, Strongylocentrotus purpuratus
  CDS (1)..(2514)
atgcggttgagtccaagagagcaggagagcctgttggttcatgaagcaggcgcccttgctcagaagcgccttgcgagaggtctgaagctgaatcacccagaaactgtggcactcattgcatctcagatgcaggagtttgtgagagatggaaaaccagtttctgaattgatgaacattgggagacagttattaggtgtccggcaggtcctgcctggtgttgcagacatgatccctgaggtacagattgaggccaccttcccggacggcaccaagcttgtcacgatccatcaacctgttgctagagagaatggagacctcagccttgccctctatggtagcttcttgccagtgcctgatctgtctgtctttgaccagccacatttagtgatttgcccagcccaggccaaatactttgcagcgtcggatgaacctatcacgctcaacgctggtcgggcaaccaaaaggttaaaggtcacctccacctgtgatcgtcccattcagattggcagccattaccatttcattgaagcaaacaagtatttgacctttgaccggctggcttccctcggtatgagattgaatattgcatctggtacagcagtacgcttcagtcctggagagacaagggatgtcaatctcgtcgctattgctggaaagagagtgatacgaggtggcaatggattggtggacggaccggtttccaaagcctctgagagctcactgagagaaaagatccaacagcattccttcggaaaccaggcacaggtaagatgcagtagaaatgcagagactgtttctaacttcacatgcttgatgccacgactcaactacattcatacatacggaccaacagttggagacaaggtgagacttggagatacatcactggtgattgaagtggaacatgatttaatctctgtgctaggtggacagctcaaatatggagatgaatgcaagtttggaggtggtaaggtcttgcgggaaggaatgggacaagcagctcatctgacatcaaaagataccctagacactgtcatcacaaatgccctcattgttgacgcagtggcaggcatcatcaaggcagatgttggtattaaggatggaatgatagttgggattggaaaggctggaaaccccgatgtgatggacggagtgacagcaggaatggctgttggcgtggaaacagaagccatcgctggagaagggaagatcctgacagcgggagggttggacgcccatattcatttcatctgtcctcaactcgccaaggaagctattgcatctggactgacgactatgtttggtggaggaacaggaccagctactggtacgtgtgcgaccacctgtaccccaggaccaaaccacatcaagaacatgatccagagcaccgacgcattccctctcaattttggattcacaggaaaggggaacacctccaattctgacaaagaatcttgtcgagagcttgaggaacaaattgaagcaggagcgattggaatgaagctgcatgaggactggggatccacccctgaggcaattcgtacatgtctgcgcgttgctgagaggcacgatgtccaagtcatgatccatacggacactctcaatgaatcctgctgtgtggaagataccatagctgcttttgagggccgcaccatccacacctatcactcggagggtgcaggaggaggccacgcccctgacatcatgaaggtagtgggcgtgcccaatgtgttaccctcgtctaccaacccaacccgccccttcacagtgaacaccatcgatgaacacctggatatgctcatggtctgccaccatcttgacaagaatctcaaggaagatgttgcctttgccgaatctcggatccgggccgaaaccatagctgctgaagatatccttcatgatctgggagccatcagtattgtggcctccgactcacaggccatggggcgtgtcggtgaggtgatcacccgtacatggcagacggcagacaaaatgaagattttcagaggcagactgtcagaggaaacgggtgacaacgacaacctaagggtcaagcgttacattgccaagtacacggtcaacccggccattgcccacggcatgggccatctcattggctctgtacaggttggtaaaatggctgacctggttctctggaatccggcattcttcggagctaaacctgacctcatcatcaaaggaggttacattgcttgggcacaaatggaactcaaccttctacaaatctccatgttccacattgtatttatcatggatatagatattccaaaggcctcaagattattgaactcattccagtgcaagattaatctgcactgctgccgctccctcaagaaaaaggacatgatcttgaacgactttttaccagacataaagattgatgcagagtcttacaaggtgaccatcaaagatcgaggcaaggagacagatgagctcctgacatgtcctccggccaaacgactctctctcgctcagcgctacttcctcttctag

SEQ ID NO: 50129 - protein, 837 aa, Strongylocentrotus purpuratus
MRLSPREQESLLVHEAGALAQKRLARGLKLNHPETVALIASQMQEFVRDGKPVSELMNIGRQLLGVRQVLPGVADMIPEVQIEATFPDGTKLVTIHQPVARENGDLSLALYGSFLPVPDLSVFDQPHLVICPAQAKYFAASDEPITLNAGRATKRLKVTSTCDRPIQIGSHYHFIEANKYLTFDRLASLGMRLNIASGTAVRFSPGETRDVNLVAIAGKRVIRGGNGLVDGPVSKASESSLREKIQQHSFGNQAQVRCSRNAETVSNFTCLMPRLNYIHTYGPTVGDKVRLGDTSLVIEVEHDLISVLGGQLKYGDECKFGGGKVLREGMGQAAHLTSKDTLDTVITNALIVDAVAGIIKADVGIKDGMIVGIGKAGNPDVMDGVTAGMAVGVETEAIAGEGKILTAGGLDAHIHFICPQLAKEAIASGLTTMFGGGTGPATGTCATTCTPGPNHIKNMIQSTDAFPLNFGFTGKGNTSNSDKESCRELEEQIEAGAIGMKLHEDWGSTPEAIRTCLRVAERHDVQVMIHTDTLNESCCVEDTIAAFEGRTIHTYHSEGAGGGHAPDIMKVVGVPNVLPSSTNPTRPFTVNTIDEHLDMLMVCHHLDKNLKEDVAFAESRIRAETIAAEDILHDLGAISIVASDSQAMGRVGEVITRTWQTADKMKIFRGRLSEETGDNDNLRVKRYIAKYTVNPAIAHGMGHLIGSVQVGKMADLVLWNPAFFGAKPDLIIKGGYIAWAQMELNLLQISMFHIVFIMDIDIPKASRLLNSFQCKINLHCCRSLKKKDMILNDFLPDIKIDAESYKVTIKDRGKETDELLTCPPAKRLSLAQRYFLF

SEQ ID NO: 50130 - DNA, 318 bp, Prochlorococcus marinus str. MIT 9303
  CDS (1)..(318): transl_table=11
atgcctccgctaattcccggtgaactgattcctgaaccgggcacgcttgaactcaacagcaaccggccaaccctcaccctgcgcgtggccaatagtggcgatcgaccgattcaagttggctcccactttcactttttcgagaccaatacagctctgcactttgatcgtgatgctgcacgggggcaccgattggacatccctgctggaacagcgatccgcttcgagcccggcgacgaacgtgacgtccgcctggttgcccttgctggtcactgcaaggttttcggtttcaacggtctggtcaacggaccactcgactga

SEQ ID NO: 50131 - protein, 105 aa, Prochlorococcus marinus str. MIT 9303
MPPLIPGELIPEPGTLELNSNRPTLTLRVANSGDRPIQVGSHFHFFETNTALHFDRDAARGHRLDIPAGTAIRFEPGDERDVRLVALAGHCKVFGFNGLVNGPLD

SEQ ID NO: 50132 - DNA, 309 bp, Methylobacillus flagellatus KT
  CDS (1)..(309): transl_table=11
atgatcccaggtgaaatgaaaatagacgcgggcgaaatcctgctcaacgacgggcgcgagacggtgacgctggaggtggcgaatacgggtgaccggcctatccaggtgggttcgcattatcatttttatgagaccaatgaagccttatcgtttgagcggcaactggcttatggcttccgcctcgatattgctgcaggtacggcggtgcggttcgagccgggacagagccgcacggtgcaattggtggcgttgagcggtaagcgtgaagtgtatgggtttgccggtaaggtgatgggagcgctgaaatga

SEQ ID NO: 50133 - protein, 102 aa, Methylobacillus flagellatus KT
MIPGEMKIDAGEILLNDGRETVTLEVANTGDRPIQVGSHYHFYETNEALSFERQLAYGFRLDIAAGTAVRFEPGQSRTVQLVALSGKREVYGFAGKVMGALK

SEQ ID NO: 50134 - DNA, 306 bp, Burkholderia xenovorans LB400
  CDS (1)..(306): transl_table=11
atgatccccggcgaactcctcatcgacgacggcgaacacgagctcaacgcaggccgcgccaccgtgacggtggtcgtgtcgaacaccggcgaccggccggtgcagattggctcgcactatcacttctacgaagtgaacgacgccctcgcgttcgatcgcgccgccgcgcgcggcttccggctgaacatcgcggcgggcaccgccgtgcgcttcgagcccggccaggaacgcaccgtcgaactggtcgaactggcgggcgatcgcatcgtctacggcttcaacggcaaggtgatgggcaagctctga

SEQ ID NO: 50135 - protein, 101 aa, Burkholderia xenovorans LB400
MIPGELLIDDGEHELNAGRATVTVVVSNTGDRPVQIGSHYHFYEVNDALAFDRAAARGFRLNIAAGTAVRFEPGQERTVELVELAGDRIVYGFNGKVMGKL

SEQ ID NO: 50136 - DNA, 306 bp, Ralstonia metallidurans CH34
  CDS (1)..(306): transl_table=11
atgattcccggtgaactgatgccgctcgacggcgagatcgaactgaatgcggggcgtcccacggtcaccgtgaccgtggccaacactggcgaccggccggtgcaggtcggctcgcacttccatttctacgaaaccaacgccgcgttgtcgttcgaccgcgaggccgcgcgcggctatcgcctcgacatcgccgccggcacggcagtgcgcttcgagccggggcagtcgcgcacggtacaactcgtggcgctggacggtgaccgcatcgtctatggtttcaacggcagaatcatgggagcactctga

SEQ ID NO: 50137 - protein, 101 aa, Ralstonia metallidurans CH34
MIPGELMPLDGEIELNAGRPTVTVTVANTGDRPVQVGSHFHFYETNAALSFDREAARGYRLDIAAGTAVRFEPGQSRTVQLVALDGDRIVYGFNGRIMGAL

SEQ ID NO: 50138 - DNA, 306 bp, Silicibacter sp. TM1040
  CDS (1)..(306): transl_table=11
atgatcccaggagagctgatgcccgccgcaggtgatctgaccctgaatgagggcgccgaggccctcacactgatggttgcaaacaccggcgaccgcccggtgcaggtgggcagccactaccatttcgccgaagcgaaccctgcgctcgactttgaccgtgaggccgctaggggcctacgtctcgacattgccgccggaaccgccgtgcggtttgaacccggccaacgccgtgaggtgccgctgatccccatcggcggggcacgcaggatttttgggttcaacgccgaaatcatgggggatctgtga

SEQ ID NO: 50139 - protein, 101 aa, Silicibacter sp. TM1040
MIPGELMPAAGDLTLNEGAEALTLMVANTGDRPVQVGSHYHFAEANPALDFDREAARGLRLDIAAGTAVRFEPGQRREVPLIPIGGARRIFGFNAEIMGDL

SEQ ID NO: 50140 - DNA, 318 bp, Mycobacterium sp. MCS
  CDS (1)..(318): transl_table=11
atggtgcccggtgagatcttcttcggcgaaggggatgtcgagatcaacgccggtgcccgacgcctggagatggagatcgtcaacaccggtgaccggccggtgcaggtcggcagccatgtccacctgccgcaggccaacgccgcactcgacttcgaccgcaccgccgcccgcggccaccgcctcgacgtcccggccggcaccgcggtgcgcttcgaacccggtgtggcccagcgcgtccggctcgtgccgctgggaggcagtcgtgaggtgcacggcctgtcgctgaacccacccggcagattggacggggcgtcgtga

SEQ ID NO: 50141 - protein, 105 aa, Mycobacterium sp. MCS
MVPGEIFFGEGDVEINAGARRLEMEIVNTGDRPVQVGSHVHLPQANAALDFDRTAARGHRLDVPAGTAVRFEPGVAQRVRLVPLGGSREVHGLSLNPPGRLDGAS

SEQ ID NO: 50142 - DNA, 306 bp, Mesorhizobium sp. BNC1
  CDS (1)..(306): transl_table=11
atgatcccgggcgaagtcattccaaaagcaggtgaaatcgagctgaatgccggcgctcctcaagtggtgcttgaggtcagtaataccggcgaccgtcccattcaggtcggctcccattatcacttctacgagacgaacggcgcactctccttcgaccgcgagaaggcccgcggtatgcgcctcgacattgcggccggaacggcggtgcgcttcgagccgggccaggcgcgcgaggtgcgccttgttccgctctccggcgcacgcaaggtcttcggctttcagcagaaaatcatgggagatctctga

SEQ ID NO: 50143 - protein, 101 aa, Mesorhizobium sp. BNC1
MIPGEVIPKAGEIELNAGAPQVVLEVSNTGDRPIQVGSHYHFYETNGALSFDREKARGMRLDIAAGTAVRFEPGQAREVRLVPLSGARKVFGFQQKIMGDL

SEQ ID NO: 50144 - DNA, 747 bp, Cytophaga hutchinsonii ATCC 33406
  CDS (1)..(747): transl_table=11
atgagacttgcaccgaaggatattgaaaagttaatgctgcacaatgccggagttcttgcacagaaaagatatgccagaggtattctgctaaattacccggaaaccattgcacttttatctgcacagcttttagagtttatccgtgaaggatacagtgttgctgagctgatggatcttggcatgaagattcttggcgtagacgatgtaatggatggcgttgcgcagatggtagacgaagtacagatagaaggtacatttccggatggtacaaaactcgtaacggtccatcatcctgtctgtaatcaaaacctgtcaaatggttatgccctgtatggttccggattaacaaagtcagcatcaaaactgcttattgataatacgatcaatccaacaccaggtgcaaaagaatatgccgccggtacgatcgaattgaacgcaggcagaaaaacgaaaatacttgatgtgattaactccggcgacaggccggtacaggttggttcacattatattttttcagaaacaaatgcggcgctgaagtttgaccgtgtcggagcaatcggctaccgacttgatataccggcaggcacagcggtacgctttgaaccgggtgagaagaaaacggtgcaggtagttgagattgccgggcagcaaatcgtatacggaggaaatgggttgatcgatggcggtatcacagaagatgatattccgcagatcaagcagcgcatgcaggaaaaaggatttatttaa

SEQ ID NO: 50145 - protein, 248 aa, Cytophaga hutchinsonii ATCC 33406
MRLAPKDIEKLMLHNAGVLAQKRYARGILLNYPETIALLSAQLLEFIREGYSVAELMDLGMKILGVDDVMDGVAQMVDEVQIEGTFPDGTKLVTVHHPVCNQNLSNGYALYGSGLTKSASKLLIDNTINPTPGAKEYAAGTIELNAGRKTKILDVINSGDRPVQVGSHYIFSETNAALKFDRVGAIGYRLDIPAGTAVRFEPGEKKTVQVVEIAGQQIVYGGNGLIDGGITEDDIPQIKQRMQEKGFI

SEQ ID NO: 50146 - DNA, 315 bp, Rhodococcus sp. RHA1
  CDS (1)..(315): transl_table=11
gtgattccaggtgaagtcgtgtgcgccgagggcgtgatcgagctcaacgagggttctccccgcaccgaactcgaggtggtcaacaccggtgaccgcccggtccaggtcgggagtcacgttcatttcccgcagtccaatcacgccctgcagttcgaccgttccgccgcccacgggctgcggctggacattcccgccggcaccgcggtgcgcttcgaaccgggtatcgcgcagacgatttcactcgtccccctgcgcgggacccgtgaggtgcacgggctgagcctcactcctcccggaaagctggacgcgtcatga

SEQ ID NO: 50147 - protein, 104 aa, Rhodococcus sp. RHA1
MIPGEVVCAEGVIELNEGSPRTELEVVNTGDRPVQVGSHVHFPQSNHALQFDRSAAHGLRLDIPAGTAVRFEPGIAQTISLVPLRGTREVHGLSLTPPGKLDAS

SEQ ID NO: 50148 - DNA, 309 bp, Trichodesmium erythraeum IMS101
  CDS (1)..(309): transl_table=11
atgatcccaggagaaataattactcaaataggtgaaattgaattgaattccgggcgttcaacaattcaggtaatagtagctaatacaggcgatcgcccgattcaaattggttctcattttcatttttatgaagtcaactcggccttagagtttgagcgtgaacctactaaaggaatgcgtttaaatattccagcgggtacagcagttaggtttgaaccaggagatgaaaaagaagtcgagttagtggcgatcgcaggtagtcgagaaatatacggttttaactctttagttaatcaaaaattagaataa

SEQ ID NO: 50149 - protein, 102 aa, Trichodesmium erythraeum IMS101
MIPGEIITQIGEIELNSGRSTIQVIVANTGDRPIQIGSHFHFYEVNSALEFEREPTKGMRLNIPAGTAVRFEPGDEKEVELVAIAGSREIYGFNSLVNQKLE

SEQ ID NO: 50150 - DNA, 321 bp, Synechococcus sp. CC9311
  CDS (1)..(321): transl_table=11
atggcacccctgatccccggtgaattgttagcggaacccggcgaacttgaactcaacgccaacagagaggtcacgaccctcaccgttgccaacagcggagaccgtcccgtgcaggtgggatcccacttccatttccaagaagccaatgctgccttgatctttgaccgtgacgctgcacgcgggcaaaggcttgacatcccagccggtacggccattcgcttcgagccaggtgacaaccgcgacgtgaatttgatcccattttctggagcacgccgcgtggtcggcttcaacggaaacatcaacggacccctcgacgcctga

SEQ ID NO: 50151 - protein, 106 aa, Synechococcus sp. CC9311
MAPLIPGELLAEPGELELNANREVTTLTVANSGDRPVQVGSHFHFQEANAALIFDRDAARGQRLDIPAGTAIRFEPGDNRDVNLIPFSGARRVVGFNGNINGPLDA

SEQ ID NO: 50152 - DNA, 321 bp, Alkalilimnicola ehrlichei MLHE-1
  CDS (1)..(321): transl_table=11
atgatacccggagaaatccttcccgaggacggcgagatcaccctcaacgcggggcgcgacaccctcaccgtggaggtgaccaacaccggcgaccgccccgcccaggtgggctcccactaccacttctacgaggtcaacgaccacctccacttcgaccgcgagcctacccggggcttccggctggatatcgccgccggcacggcggtgcgcttcgagcccggccagagccgcacggtgcagttggtgcgctacgcgggcagtggcgatatctacggctttcagggccgggtgatggggccggcaacaggagagagcgcatga

SEQ ID NO: 50153 - protein, 106 aa, Alkalilimnicola ehrlichei MLHE-1
MIPGEILPEDGEITLNAGRDTLTVEVTNTGDRPAQVGSHYHFYEVNDHLHFDREPTRGFRLDIAAGTAVRFEPGQSRTVQLVRYAGSGDIYGFQGRVMGPATGESA

SEQ ID NO: 50154 - DNA, 306 bp, Rhizobium leguminosarum bv. viciae 3841
  CDS (1)..(306): transl_table=11
atgattccaggtgagatcattgccgcaagcggcgacatcgaactgaatgccggcgcgccgacggtgacgctggaggtttccaataccggcgatcggccggtgcaggtcggcagccactatcatttcgccgagaccaatgccgggctttccttcgatcgcgcggtagcacgcggcaagcggctcgatattccggcggggacggcggtgcgcttcgagccggggcagacgcgctcggtgacgctgatcccgctttccggcaagcgcgaggtctacggtttccgtcagctggtgatgggcaagctttaa

SEQ ID NO: 50155 - protein, 101 aa, Rhizobium leguminosarum bv. viciae 3841
MIPGEIIAASGDIELNAGAPTVTLEVSNTGDRPVQVGSHYHFAETNAGLSFDRAVARGKRLDIPAGTAVRFEPGQTRSVTLIPLSGKREVYGFRQLVMGKL

SEQ ID NO: 50156 - DNA, 312 bp, Magnetococcus sp. MC-1
  CDS (1)..(312): transl_table=11
atgattccaggtgaacttttccctgccccaggtgacattattctcaatgccgggtgtgagaccctgaccctaacggtggccaatggtggcgaccggcccatacaggttggttcgcactaccactttgccgagaccaaccccgccttacagtttgaccggcagcgggccaggggctaccggctggatattccggcgggcacggcggtccgttttgagccggggcaggcgcgggatgttaccctggtgccctatggtgggcggcggcaggtggtgggttttaatggcttggtcaacggccaattggaggactaa

SEQ ID NO: 50157 - protein, 103 aa, Magnetococcus sp. MC-1
MIPGELFPAPGDIILNAGCETLTLTVANGGDRPIQVGSHYHFAETNPALQFDRQRARGYRLDIPAGTAVRFEPGQARDVTLVPYGGRRQVVGFNGLVNGQLED

SEQ ID NO: 50158 - DNA, 657 bp, Mycobacterium smegmatis str. MC2 155
  CDS (1)..(657): transl_table=11
gtgaacctcacgcccaccgaactcgaacgcctcacggtgttcaccgccgccgagatggcgcgacgcaatctgcgcgagggggttctgctgagccatcccgaggccgtcgcgctgctcaccgacgaggtcatgctggccgcgcgcaagaacctggcgtacgacgaggtggtcgacatggccgcgaacctgctgcaggccaaggactgtgagcccggtgtgcccgacctggtgcgcatggtgatgatcgacgccccgttccccgacggcaccaagctcgtcgcgctgatcgacccgatcaccccggccgaggacgacatccggccgggggagatcatcgtcggtgaccaacccgtcgagctgttccctggcgtcgagcgcatcacgctcaccgtggtcaaccgcggtgaccgggacatccaggtgcgcagtcaatcccatttctacgagaccaacccggcgctggagttcgatcgccgcgcggcgtgggggtacaagctcgacatcgcctccggtggcggcgtccggttcgagccaggcatcccggtcgaggtcagccttgtgccgatgggcggtgcgcgggtgatccagggcttctccggactggtcaacggaccgctcgacggtgccgaccaactcaccgagcagaagggcgcctga

SEQ ID NO: 50159 - protein, 218 aa, Mycobacterium smegmatis str. MC2 155
MNLTPTELERLTVFTAAEMARRNLREGVLLSHPEAVALLTDEVMLAARKNLAYDEVVDMAANLLQAKDCEPGVPDLVRMVMIDAPFPDGTKLVALIDPITPAEDDIRPGEIIVGDQPVELFPGVERITLTVVNRGDRDIQVRSQSHFYETNPALEFDRRAAWGYKLDIASGGGVRFEPGIPVEVSLVPMGGARVIQGFSGLVNGPLDGADQLTEQKGA

SEQ ID NO: 50160 - DNA, 330 bp, Mycobacterium smegmatis str. MC2 155
  CDS (1)..(330): transl_table=11
atgacgtcacgcgaaccggtggtgcccggcgagatcctccacggcgaaggcgacatcgagatcaatgcgggcgcaccgcgtctgacgctcgacgtggtcaacgccggcgaccggcccgtgcaggtcggtagccacgtgcatctcccgcaggccaactcggcgctggagttcgaccgcacggccgcgcacggccaccgtctcgacatccccgcaggcaccgcggtgcgattcgaacccggtgtggcacagcgcgtcacgctggtgccgctgcgcggcacccgtgaggtgtacggcctgagcatcaatccaccagggaggctggacggctga

SEQ ID NO: 50161 - protein, 109 aa, Mycobacterium smegmatis str. MC2 155
MTSREPVVPGEILHGEGDIEINAGAPRLTLDVVNAGDRPVQVGSHVHLPQANSALEFDRTAAHGHRLDIPAGTAVRFEPGVAQRVTLVPLRGTREVYGLSINPPGRLDG

SEQ ID NO: 50162 - DNA, 306 bp, Azoarcus sp. BH72
  CDS (1)..(306): transl_table=11
atgattccaggtgaaatcctgccggccgacggcgacatcgaactcaatgccggccgcgccacgctgacgctgtcggtgaccaacaccggcgaccgcccgatccaggtgggttcgcactaccactttgccgaaaccaacgccgcgctcgccttcgaccgcgccgcggcgcgcggcttccgcctcaacatcgccgccggcaccgcggtgcgcttcgagccggggcaggcgcgcacggtcgagctggtcgcgctcgccggcgcgcgcaaggtctacggcttcaacggcgacgtcatgggagcgctctga

SEQ ID NO: 50163 - protein, 101 aa, Azoarcus sp. BH72
MIPGEILPADGDIELNAGRATLTLSVTNTGDRPIQVGSHYHFAETNAALAFDRAAARGFRLNIAAGTAVRFEPGQARTVELVALAGARKVYGFNGDVMGAL

SEQ ID NO: 50164 - DNA, 306 bp, Nostoc punctiforme PCC 73102
  CDS (1)..(306): transl_table=11
atgattcctggggaaattatcacaccagcaggtgaaattgaactaaatgttggtcgtccaactataaaattacaagtgtcaaatacaggcgatcgccccatacaagtaggttctcattatcacttttatgaagttaacaccgccttaaactttgacagagaacaagctagaggaatgcgccttgatatccccgccggaaccgctgtccgctttgaaccaggcgatgaaaaagaaatcatcttagtccccctcgtcggtactcgccaagtctacggcttcaacgccaaaattaatggaaacctctaa

SEQ ID NO: 50165 - protein, 101 aa, Nostoc punctiforme PCC 73102
MIPGEIITPAGEIELNVGRPTIKLQVSNTGDRPIQVGSHYHFYEVNTALNFDREQARGMRLDIPAGTAVRFEPGDEKEIILVPLVGTRQVYGFNAKINGNL

SEQ ID NO: 50166 - DNA, 306 bp, Actinobacillus pleuropneumoniae serovar 1 str. 4074
  CDS (1)..(306): transl_table=11
atgatccccggagaataccaattagcggacggtgatatacaagcgaatgtgggtcgcaaaaccgtcaaattagaagtagtcaatacaggtgaccgcccgattcaagtcggttcgcattaccatttttttgaaaccaatcacgccctaaaattcgaccgcttgcaggctcgcggtatgcgtttaaatgtgccgtccggcaatgcggtgcgttttgaacccggcgaagcgaaagaagtggaactggttgagtttggtggtaataaagtgatttacggtttccataatgaaatcgacggcaaattatag

SEQ ID NO: 50167 - protein, 101 aa, Actinobacillus pleuropneumoniae serovar 1 str. 4074
MIPGEYQLADGDIQANVGRKTVKLEVVNTGDRPIQVGSHYHFFETNHALKFDRLQARGMRLNVPSGNAVRFEPGEAKEVELVEFGGNKVIYGFHNEIDGKL

SEQ ID NO: 50168 - DNA, 306 bp, Burkholderia vietnamiensis G4
  CDS (1)..(306): transl_table=11
atgatccccggcgaaatcctcaccgacgacggcgagcacgaactgaacgccggccgcgcgacgcgctcgctcgtcgtcgcgaacaccggcgaccggccggtgcaggtcggctcgcattaccacttcttcgaagtcaacgacgcgctgtcgttcgatcgcgcggccgcgcgcggtttccggctgaacatcgcggccggcacggccgtgcgcttcgagccgggccagacgcgcaccgtcgagctcgtcgagctggccggcgaccgcgccgtctacggttttcagggcaaggtgatggggccgctgtaa

SEQ ID NO: 50169 - protein, 101 aa, Burkholderia vietnamiensis G4
MIPGEILTDDGEHELNAGRATRSLVVANTGDRPVQVGSHYHFFEVNDALSFDRAAARGFRLNIAAGTAVRFEPGQTRTVELVELAGDRAVYGFQGKVMGPL

SEQ ID NO: 50170 - DNA, 306 bp, Sulfitobacter sp. EE-36
  CDS (1)..(306): transl_table=11
atgatccccggagaggtgctgtgcgccgcgggggacatcaccctgaacgccgatcgcacagccatcaccctgatggttgccaataccggcgaccggcccgtgcaggtcggcagccactaccactttgccgaaaccaaccccgcgctcgactttgaccgcgccgccgcgcgtggttaccggctggacatcgccgccggcaccgccgtgcgctttgaacccggtcaacgccgcgaggtgcagctgatcccgctcgcgggagaccgcaaggtgtacgggttcaacgctgaagtgatgggcgcgctctaa

SEQ ID NO: 50171 - protein, 101 aa, Sulfitobacter sp. EE-36
MIPGEVLCAAGDITLNADRTAITLMVANTGDRPVQVGSHYHFAETNPALDFDRAAARGYRLDIAAGTAVRFEPGQRREVQLIPLAGDRKVYGFNAEVMGAL

SEQ ID NO: 50172 - DNA, 306 bp, Oceanicola batsensis HTCC2597
  CDS (1)..(306): transl_table=11
atgatcccgggcgagctcttcccgggcgacggggccatcacgctcaatgccggtcgcgagacgatcaccctgatggtggccaataccggcgaccgtcccgttcaggtcggctcgcattatcactttgccgaggccaacgccgcgctcgatttcgaccgggcggcggcgcgggggatgcggctggacattgccgcaggaacggccgttcggttcgagccgggccaacggcgcgaggtccagctggtgccggtctcgggcgcgcgcgccatctacgggttcaaccagcaggtgatgggcgccctctga

SEQ ID NO: 50173 - protein, 101 aa, Oceanicola batsensis HTCC2597
MIPGELFPGDGAITLNAGRETITLMVANTGDRPVQVGSHYHFAEANAALDFDRAAARGMRLDIAAGTAVRFEPGQRREVQLVPVSGARAIYGFNQQVMGAL

SEQ ID NO: 50174 - DNA, 684 bp, Oceanicola batsensis HTCC2597
  CDS (1)..(684): transl_table=11
atgctgctgacccccactgaactggaacggctgacgatattcaccgccgccgagcttgccagaaaacgtcgcgctcgcggccgcagtctgaacgcccccgaggccgtggcgctgatctgcgatgaaattctcgaaggcgcccgcgacgggcgcagcgtggccgagctgatctcatacggctcgacgatcctgacgtcggacgacgtgatggagggtgtcgcggaccttctgcccatgatccaggtcgaggccgtctttccggacggcaccaagcttgtcaccgtccacgatccgatccggcccggctcggacgccccggctgaacgcatcggcaagcccggcgagatccgcgccgaggacggcgagatcgagctgaacccaggccgggaccgcgtcagcctgatcgtcaccaataccggcgaccggcccgtccaggtcgggagccactatcatttcttcgagaccaacaaggcgctggacttcgaccgtgcgacggccttcggttttcggctcgacattcccgcaggtaccgccgtccggttcgagcccgggcaggaaaaagaggtcacgctctgcacgttcggcggcaacaagcgcctgtcgggtctcaataatctgaccaacggcgaagatcgcgaggccgcgctgacccgcgcccgcgccgccggtttcaagggggcctga

SEQ ID NO: 50175 - protein, 227 aa, Oceanicola batsensis HTCC2597
MLLTPTELERLTIFTAAELARKRRARGRSLNAPEAVALICDEILEGARDGRSVAELISYGSTILTSDDVMEGVADLLPMIQVEAVFPDGTKLVTVHDPIRPGSDAPAERIGKPGEIRAEDGEIELNPGRDRVSLIVTNTGDRPVQVGSHYHFFETNKALDFDRATAFGFRLDIPAGTAVRFEPGQEKEVTLCTFGGNKRLSGLNNLTNGEDREAALTRARAAGFKGA

SEQ ID NO: 50176 - DNA, 309 bp, Synechococcus sp. WH 5701
  CDS (1)..(309): transl_table=11
atgattcccggcgaactttttcctgagcccggcagcctcgagctcaacgccggccggccggtcaccacgatcgaggtggccaaccggggtgatcgtcctgtgcaggtgggatcccacttccacttccacgaggccaaccatgccctggtcttcgatcgggaggcggctcggggccagcgcctcgacatccccgccggcaccgcgatccgcttcgagccgggggatcaacgtcccgttcagctggtgcccctggccggatcccgctgtgtgttcggcttcaacggcctgatcaacggccccctcgactga

SEQ ID NO: 50177 - protein, 102 aa, Synechococcus sp. WH 5701
MIPGELFPEPGSLELNAGRPVTTIEVANRGDRPVQVGSHFHFHEANHALVFDREAARGQRLDIPAGTAIRFEPGDQRPVQLVPLAGSRCVFGFNGLINGPLD

SEQ ID NO: 50178 - DNA, 327 bp, Oceanospirillum sp. MED92
  CDS (1)..(327): transl_table=11
atgattccaggagagattcaggctgccgaaggcagtatcgaattaaatgtagggcgtaagactgttcgtttacgcgtcgaaaatagtggcgatcgtccggtacaagtaggttcccactatcacttttacgaggttaatccagccctggtctttgagcgcgaactggccaaaggctatcgattgaatattgcttcaggtactgccgtgcggtttgaacccggtcaggggcgtgaagtcgagctagtggcttatgccggcagcaaaacaatctatgggtttaggggtgatgtcatggggcctcttgaagagcagggaggtgcatcatga

SEQ ID NO: 50179 - protein, 108 aa, Oceanospirillum sp. MED92
MIPGEIQAAEGSIELNVGRKTVRLRVENSGDRPVQVGSHYHFYEVNPALVFERELAKGYRLNIASGTAVRFEPGQGREVELVAYAGSKTIYGFRGDVMGPLEEQGGAS

SEQ ID NO: 50180 - DNA, 1014 bp, Xanthobacter autotrophicus Py2
  CDS (1)..(1014): transl_table=11
ttgcccacggcgacgccatgggggaggggcatctggaggatcactggcgcctccgccgcgacggcgccctcattttcgccgacgccttgcgtctcgccggcccgatgggcgcgcttctcgcccggccggcggtggccggcgggaatcgggcgctggcgacgctgctttatgtggcgcccgatgccgaggcccggctggaggaggcccgcgcgctgctcgacgccgcccgctgcgaagctggcgccagcgcgtggaacgggcttctgtgcgtgcgcctgctcgcgcctgacatcgaaacgttgcgtcgggatgcgacctcgtttctcatggcgttcagaaacgccccgctgccccgcgtatgggccacctgacgttcgcttcaaggagattgccgtgctgctgacgccgcgcgagaaggacaagctcttcatcgccatggccgccgaggtggcccgcaagcgcctcgcccggggcgtgaagctgaaccatccggaagccgttgccctcatcaccgacttcgtggtggaaggcgcccgcgacggcaggaccgtcgccgagctgatggagctgggcgcccgcgtcatcacagccgaccaggtgatggacggcatctccgagatgatccacgacatccaggtggaagccaccttcccggacggcaccaagctggtcaccgtgcaccaccccattcgcggcgcgccctcccaaacggtgcccggcgagctggtgccgcaggagggcgacatccacttcaacgaaggcgccgagcgggtgcgcctcacggtgtccaacaccggcgaccggccgatccaggtgggcagccactaccatttctacgagaccaacccggcgctggccttcgagcgggagcaggcccgcggcatgcgcctcgacatcgcccccggcacggcggtgcgcttcgagcccggcgcctcgcgggaggtgacgctggtgccgttcggcggcaagcgcgaggtgttcggcttccgtggcgcggtgcagggcaagttgtaa

SEQ ID NO: 50181 - protein, 337 aa, Xanthobacter autotrophicus Py2
MPTATPWGRGIWRITGASAATAPSFSPTPCVSPARWARFSPGRRWPAGIGRWRRCFMWRPMPRPGWRRPARCSTPPAAKLAPARGTGFCACACSRLTSKRCVGMRPRFSWRSETPRCPAYGPPDVRFKEIAVLLTPREKDKLFIAMAAEVARKRLARGVKLNHPEAVALITDFVVEGARDGRTVAELMELGARVITADQVMDGISEMIHDIQVEATFPDGTKLVTVHHPIRGAPSQTVPGELVPQEGDIHFNEGAERVRLTVSNTGDRPIQVGSHYHFYETNPALAFEREQARGMRLDIAPGTAVRFEPGASREVTLVPFGGKREVFGFRGAVQGKL

SEQ ID NO: 50182 - DNA, 372 bp, marine gamma proteobacterium HTCC2207
  CDS (1)..(372): transl_table=11
atgatccccggagaatttaaaacagcccctggcgatatcgagctcaataccgggcgcaatctggtcactatctcagtagccaatattggcgatcgaccgattcaaatcggctctcattatcatttctatgaggtcaatgatgcgttgatttttgagcgtgaaaccaccctcggataccgactcaatattgcctctggcactgcagtgcgctttgagccggggcaggagcgcaccattgaattagtcgagtacggcggctctgggcatatctatggattccagggcaaggtcatgggtcagctagaggatggcgtgcaagcgagcacgactgatcgtcttgcggcacaaaacaaaagtacgaggcaggagtaa

SEQ ID NO: 50183 - protein, 123 aa, marine gamma proteobacterium HTCC2207
MIPGEFKTAPGDIELNTGRNLVTISVANIGDRPIQIGSHYHFYEVNDALIFERETTLGYRLNIASGTAVRFEPGQERTIELVEYGGSGHIYGFQGKVMGQLEDGVQASTTDRLAAQNKSTRQE

SEQ ID NO: 50184 - DNA, 306 bp, Oceanobacter sp. RED65
  CDS (1)..(306): transl_table=11
atgattccaggtgaaatcgaatacgccgaaggcgagatagaaattaatgctggattgaaaaccgtatcagttacggtagccaatactggagatcgccctattcaggtgggcagtcactatcatttttatgaagtgaaccctgcgcttacatttgagcgtgaggcggcacgtggatttcgtttgaatattgcggcaggtacagcagtgcgtttcgaaccgggacaatcgcgcaccgtagagttggttgaatatcaaggcaaaaaaaccgtttacggttttcgtggcgacatacaaggagctttgtaa

SEQ ID NO: 50185 - protein, 101 aa, Oceanobacter sp. RED65
MIPGEIEYAEGEIEINAGLKTVSVTVANTGDRPIQVGSHYHFYEVNPALTFEREAARGFRLNIAAGTAVRFEPGQSRTVELVEYQGKKTVYGFRGDIQGAL

SEQ ID NO: 50186 - DNA, 321 bp, Synechococcus sp. RS9916
  CDS (1)..(321): transl_table=11
atggcacctctcattccaggcgaactgttttccgaaccgggtgaactggagctgaatgcaggccgacccgtcaccacggtgagcgtcgccaacagcggcgacaggccagtgcaggtgggctcccatttccatttcgctgaagccaacgccgccctgcagttcgaccgggccgcagcccgcggtcaacggctcgacatccccgccggcaccgccatccgcttcgaacccggtgacagccgcgacgtgaatctgattcccttcgccggtgcgcggcgcgtcatcggcttcaacggccagatcaacggacccctcgacgcctga

SEQ ID NO: 50187 - protein, 106 aa, Synechococcus sp. RS9916
MAPLIPGELFSEPGELELNAGRPVTTVSVANSGDRPVQVGSHFHFAEANAALQFDRAAARGQRLDIPAGTAIRFEPGDSRDVNLIPFAGARRVIGFNGQINGPLDA

SEQ ID NO: 50188 - DNA, 2496 bp, Aspergillus niger
  CDS (1)..(2496)
atgcatttgtgtcccaaggagcttgacaagctcgttatctctcagctgggcttcctggcccagcgtcgactggctcgcggtattcgtctcaaccatgccgaagctgcgctgatccgggatggacaatattctgtagccgatctcatgtctatcgggaagagcatgctgggtcgccgtcatgttctcccgtccgtcgtttcgactctttacgaattacaggtcgaaggtacattcaccactggtacctatctcgtgacagtacacaaccctatcagtagcgatgatggagaccttgaaaaggccctctacggaagtttccttcccattcccccggcagatgccttccccgatcctgatccggaggactacgaacccgagaagacgcccggagcgatattacctgtgaagaacgaacgcatcatcctgaacgagggaaggaagcgcattaagctcaaggtgatgagcaggggtgaccggcccatccaggtcggatcacactaccatttcatcgaaaccaacccgcagttgcacttcgaccgccttcgatcctatggatatcgactcgacattcccgctggtacgtcggtacggttcgagcccggagacaccaaggtagttacgcttgtggagattggaggccaccgggttatccgtggaggtaattgtatcgcgtccggcaaggtcgatcttgcccgtgccgaggagatcatggcccgtctgcaagtgcagaacttcgcccatgttcccgaacctactgccgacagcgcgctggtacctacaccgttctccatggaccgtgaggcctatgcgcgtatgtttggccctactactggtgatctcgtgcgcctgggtctgaccaatctctgggttcgtgtggagaaggactacacatcttatggagacgagtgtacattcggcggtggcaagactattcgagatggcatgggtcagtcttcggaaaagtccacgcagcatgctctggacaccgtcatcacgaatgctctgattatcgactggactggtatcttcaaggccgatattggaatcaaggatgggctcatcgtgggcattggtaaagctggaaaccccgatatcatggacggtgttaccccgggcatgactgtcggctcctcgaccgatgttattgcaggtgagaacaagatcgtcacagctggtggtttcgacacccacatccatttcatctgcccccagcaggtggacgaggcgctcgcttctggtatcacgacgttcttgggaggaggaaccggtccctccactggctccaatgccacgacttgcacgcctggtcccgttcacatgcgccaaatgctccaagcttgcgaccgcctgcccatcaatgttggtatcaccggtaagggtaacgactgcggtggcgtaagcattgaggagcagatctacgccggtgccgccgggttgaagctgcacgaagattggggttccacgcccgccgccatcgacagctgccttgacctgtgcgacaagttcgacgtccagtgcatgattcacaccgacacgctaaacgaatccggattcgttgaacagaccattgaagcattcaagaaccgcactatccacacctaccacaccgaaggtgccggtggaggtcacgctccggacatcatctcagtcgtggagcaccccaacgtcctccccagtagtaccaacccaactcgtcccttcactctcaacaccctcgatgaacacctcgacatgctcatggtctgccaccatttgtccaagaacattgccgaggacgtcgccttcgcagagtctcgtatccgcgcggaaaccattgcggccgaagacgttcttcacgaccttggcgctattagcatgatgtcctccgactcccaggctatgggtcgctgcggtgaagtcatcctgcggacatggaacaccgcacacaagaacaaggagcagcgcggcccgctgccggaggacgaaggcaccggcgccgacaacttccgcgtgaagcgctacgtcagtaaatacaccattaacccagccatcgcgcagggtatgtcccatatgattggcagtatcgaggtcggcaagatcgccgatctcgtcctatggacgcccagtgcgtttggcgtgaagccaacgcaagtagtgaagagcggcatgatcgccgtgtcagtgatgggtgaccccaacgcatccatccccaccgtccaacccgtcatcatgcgtccccaattcggcaatacccaggccctcgtcccctccacctccatcaccttcgtctcccaagcctccctcgacgcaggcatagtccagtcctacaacctgcaaaaacgcgtcgaagccgtcaaaaactgccgcaacatcggcaaagccgacatgaagttcaacgacatcatgcccaagatgcatgtcgaccccgaaagttaccgtgtcgaggcggacggaatgctctgtgatgccgaaccggcaggaagtctgccgctgacacaggattacttcgtttattaa

SEQ ID NO: 50189 - protein, 831 aa, Aspergillus niger
MHLCPKELDKLVISQLGFLAQRRLARGIRLNHAEAALIRDGQYSVADLMSIGKSMLGRRHVLPSVVSTLYELQVEGTFTTGTYLVTVHNPISSDDGDLEKALYGSFLPIPPADAFPDPDPEDYEPEKTPGAILPVKNERIILNEGRKRIKLKVMSRGDRPIQVGSHYHFIETNPQLHFDRLRSYGYRLDIPAGTSVRFEPGDTKVVTLVEIGGHRVIRGGNCIASGKVDLARAEEIMARLQVQNFAHVPEPTADSALVPTPFSMDREAYARMFGPTTGDLVRLGLTNLWVRVEKDYTSYGDECTFGGGKTIRDGMGQSSEKSTQHALDTVITNALIIDWTGIFKADIGIKDGLIVGIGKAGNPDIMDGVTPGMTVGSSTDVIAGENKIVTAGGFDTHIHFICPQQVDEALASGITTFLGGGTGPSTGSNATTCTPGPVHMRQMLQACDRLPINVGITGKGNDCGGVSIEEQIYAGAAGLKLHEDWGSTPAAIDSCLDLCDKFDVQCMIHTDTLNESGFVEQTIEAFKNRTIHTYHTEGAGGGHAPDIISVVEHPNVLPSSTNPTRPFTLNTLDEHLDMLMVCHHLSKNIAEDVAFAESRIRAETIAAEDVLHDLGAISMMSSDSQAMGRCGEVILRTWNTAHKNKEQRGPLPEDEGTGADNFRVKRYVSKYTINPAIAQGMSHMIGSIEVGKIADLVLWTPSAFGVKPTQVVKSGMIAVSVMGDPNASIPTVQPVIMRPQFGNTQALVPSTSITFVSQASLDAGIVQSYNLQKRVEAVKNCRNIGKADMKFNDIMPKMHVDPESYRVEADGMLCDAEPAGSLPLTQDYFVY

SEQ ID NO: 50190 - DNA, 2566 bp, Agaricus bisporus
  CDS (1)..(2517)
atgcgtctcctcccgcgcgaagaggccaaagtcctcctccaccaggttggatttattgcgcaaaagcgacttgcaagaggtgtcaagttgaataagacagaggcagtggccttgattgcttcggttcttcaagagcgaatacgagatggtcgacattctgtcgcagaattgatgcaacacgggaaaaagatacttgggcgaaggcatgtgctaccagatgttccagcgctgttacatgaaattcaagttgagggtacttttctcgatggagtttttttggtgacggtgcaccaacccatctgtactgaagacggcgatctcgaagctgcactctatggctctttcctccccatacctccacaagacgatttcccagtggctcccgactcggattacctcccggagaagaccgcgggggcaatcatacccaaacaagaggatatcgttttaaatcagggtcgagagagaatccgtcttcggataactaatacgggagatagacctattcaagttggctcacactatcactttattgaaaccaatcgcgctctttcatttgataggctgaaatcttatggaaaaaggctagatatcgctgctggaactgctgtacgattcgaacccggagacaccaaggctgtcactctcgtgtctatttctggaaacaaagtcatttctggtggaaatagtttggcttctggacacataggaacgttccgaagtgaagttcttctagaggacatcctgcgaagagactttgcacatgtctccgaaccgggtgctctcgaggtgatggaggatacgaagattggaagggagacgtatatctcgatgtacggcccgactgtgggtgatagagtaaggctaggcgatactgagttgtggattgaagtcgaacatgacgagaccgtctatggcgacgaagtcaaatttgggggaggcaaggttattcgagagggtatgggtcaggctacaaatcgctcgtcaaacgaaactcttgaccttgtaatcaccaacgcactcattgtagactggtcgggaatttacaaggcagatattggtgttaagaacggtttcatatgcggaattggaaaagcaggaaatcctgatgtgatgtcaaacatccaccccactctcgtcattggatcgtcgacagaagtcatcgcgggagaaaagctcattatcacggcaggtggaatcgacacccacatacactttatctgtccacaattggtcgatgaagctctggcatctggtttgactacattgattggaggcggaactggtcctagcgctggaacaaatgcgacaacgtgtacgccaagtcctttctacatgcgacatatgttagcggctacagacggtttgccaatgaactttggttttacgggtaaaggaaatgatgctggcccgacggcaattgaggagatcgttcgtgcgggtgcatcaggtttgaagttgcatgaggattggggtacaacgccagccgctatcaggaattgtttggacgttgcagataagtatgacgttcaggtcacaattcataccgacactctcaacgagagtggttttgttgagagtaccatcgaggcctttggcgggcgaacaatccatacttaccacaccgagggcgcaggcggaggccacgcacctgatatcattgtggtttgtggccaaaacaacgttttgccatcatcaaccaatcccactcgtccgtatgccaagaatacgcttgatgaacacctcgacatgctcatggtatgtcatcacctcgataaatcaattccggaggacctcgattttgcggagtcacgtatcagggcggagacagttgctgcagaagatgttttgcatgatattggtgcgatttcaatgataagctccgattctcaggctatgggccggattggagaggtgattagtcggacatggaggactgcgagtaagatgagggaagtccgaggacctttgacagatctcggcgatgatggtcggaaagacaatgccagagtcaaacgttatattgccaagtatactgtcaatcctgctatcgcccatggcatcagtcacctcgtcggtcacgtcgcagtaggcacacttgccgatcttgttctctggaaacctgaaaacttcggctcaaaaccggaaatgattctcaaggctggcgtaataacatattcccagatgggagatgcgaatgcttcgataccgtctgttcaaccattttactctaaacccatgtggggagcaaaaccaggttcggcggcacttaattctgtggcttttgtctcgcaagtttcgattacgtcgagggtgattgaatcgtatggattgtcaaagaagattgaagctgtcaggggatgtagggatattggtaagaaggatatgaagtggaatgatacgacccctgcgatgaaggtggacccggagagttatgaggtccgtgctgatggtgtactaatggatgtaaagcctgtagagagggtagctttggcgacaccgtataatctattctaaaagcgtacggtctgtaatttacttttagcttttctgctgtttcatcggt

SEQ ID NO: 50191 - protein, 838 aa, Agaricus bisporus
MRLLPREEAKVLLHQVGFIAQKRLARGVKLNKTEAVALIASVLQERIRDGRHSVAELMQHGKKILGRRHVLPDVPALLHEIQVEGTFLDGVFLVTVHQPICTEDGDLEAALYGSFLPIPPQDDFPVAPDSDYLPEKTAGAIIPKQEDIVLNQGRERIRLRITNTGDRPIQVGSHYHFIETNRALSFDRLKSYGKRLDIAAGTAVRFEPGDTKAVTLVSISGNKVISGGNSLASGHIGTFRSEVLLEDILRRDFAHVSEPGALEVMEDTKIGRETYISMYGPTVGDRVRLGDTELWIEVEHDETVYGDEVKFGGGKVIREGMGQATNRSSNETLDLVITNALIVDWSGIYKADIGVKNGFICGIGKAGNPDVMSNIHPTLVIGSSTEVIAGEKLIITAGGIDTHIHFICPQLVDEALASGLTTLIGGGTGPSAGTNATTCTPSPFYMRHMLAATDGLPMNFGFTGKGNDAGPTAIEEIVRAGASGLKLHEDWGTTPAAIRNCLDVADKYDVQVTIHTDTLNESGFVESTIEAFGGRTIHTYHTEGAGGGHAPDIIVVCGQNNVLPSSTNPTRPYAKNTLDEHLDMLMVCHHLDKSIPEDLDFAESRIRAETVAAEDVLHDIGAISMISSDSQAMGRIGEVISRTWRTASKMREVRGPLTDLGDDGRKDNARVKRYIAKYTVNPAIAHGISHLVGHVAVGTLADLVLWKPENFGSKPEMILKAGVITYSQMGDANASIPSVQPFYSKPMWGAKPGSAALNSVAFVSQVSITSRVIESYGLSKKIEAVRGCRDIGKKDMKWNDTTPAMKVDPESYEVRADGVLMDVKPVERVALATPYNLF

SEQ ID NO: 50192 - DNA, 423 bp, Edwardsiella ictaluri
  CDS (1)..(423): transl_table=11
atgaaaatgaccaatgcgaaaaatagtaaggctaaagtaaaagagagtaacgtacctgtcggtggtcttctgctgaaaaatgaagatatcagctttaatgaagataagcctgtggtaaaagttcgtgtgcgtaatactggtgatcgtgcggtgcaggttggctcacacttccatttctttgaagccaatagagccttagagtttgatcgatccgcagcatatggcatgcggcttaatatcatggcgactaccgctattcgttttgagccaggtgatgaaattgaagtctctttgattccatttggtggaaagcgactgttgtatggatttaataatttgctggatggttgggcaatgtcaaactatggcaaagaagcggtcgttgagaaagccatcaaatccggatttaagttttccaaataa

SEQ ID NO: 50193 - protein, 140 aa, Edwardsiella ictaluri
MKMTNAKNSKAKVKESNVPVGGLLLKNEDISFNEDKPVVKVRVRNTGDRAVQVGSHFHFFEANRALEFDRSAAYGMRLNIMATTAIRFEPGDEIEVSLIPFGGKRLLYGFNNLLDGWAMSNYGKEAVVEKAIKSGFKFSK

SEQ ID NO: 50194 - DNA, 435 bp, Yersinia enterocolitica
  CDS (1)..(435): transl_table=11
atgagcgcaaagaaaagcactaaagataatgcagaacaaaataccccattgggtggttgcattttagccgatacaccgatcacctttaatgaaaacaagcccgttaccaaagtaaaagttcgcaataccggtgaccggccaattcaggtgggctcacatttccacttctttgaagctaaccgggcactggagtttgaccgtgctgcggcttacggaaaaaggctgaatatctcttcaacaaccgccatccgttttgaacccggtgatgaaaccgaagttccgctgattccttttggtggtaagcaaacactatatggctttaacaacctggtggatggttggaccggtgaaggcgtcgttcccaatagcgaacgtccggataagctagaggctattcgtcgtgcggctgaacgtggtttcaaatcgtctaaatga

SEQ ID NO: 50195 - protein, 144 aa, Yersinia enterocolitica
MSAKKSTKDNAEQNTPLGGCILADTPITFNENKPVTKVKVRNTGDRPIQVGSHFHFFEANRALEFDRAAAYGKRLNISSTTAIRFEPGDETEVPLIPFGGKQTLYGFNNLVDGWTGEGVVPNSERPDKLEAIRRAAERGFKSSK

SEQ ID NO: 50196 - DNA, 2511 bp, Aspergillus oryzae
  CDS (1)..(2511)
atgcacctcatccctaaggagctcgataaactcgcgatctcgcaattgggcttcttggcccaacggcgtcttgcacgtggtgtgcgactgaatcatgcagaagcagtggctttgatatcctcgaatctccaggaactcatccgcgatggcctctactccgtcgcggacttgatgtccatcggcaagaccatgcttggtcgtcgtcatgtcttaccgtccgttgtgtccacccttgtagaattacaggtcgaaggcacgttcccgaccggcacatacctcgtaacggtccaccaccccatcagtagcgacgaaggagacttggagaaggctctatacgggagtttccttccgatccccccggcggacgcgttccctgatccggatccgaacgactttgagcccgagaagatgcccggtgcgatcatccccgtgaagaacgagcgcattaccttgaatgagggacgacgaagaatcaggctcaaggtgatgagtaagggcgatcggccaattcaggttgggtcccactatcatttcattgaagtcaacccgcaattgcattttgatcgtcttcgcgcgtatggttatcgcctggatattcctgcgggaacatcggtacgattcgaacctggagacaccaagactgtgacgcttgtggaaattgccggccatcaggttatcaagggtggtaacttcattgcgtcgggcaaggtcgatttgagcagagtggacgagatcatgctgcgtctgcaagctgacggtttcgctcacattgctgagcccactgcggatgccgccctcgtcaccccgtttacgatggaccgagaagcctacgctcggatgttcgggcccaccactggtgatctggttcgcctgggattgacaaacctgtgggtcagggttgaaaaggattacacgtcttacggtgatgagtgcagttttggcggaggcaagactattcgagatggaatgggccaatcgtcggagaagtcccaccaacactgtctggacacggttatcacgaatgcgcttattatcgactggagtggtatttataaggccgatattggaatcaagaacggtatcatcgtcggcattggcaaggctggaaatcccgatattatggacggcgtgcatccggacatggtcgtcggctcctcgacggacgtggtcgccggtgagaacaagatcatcactgctggagggttcgatacccatatccatttcatctgtcctcagcaggtggatgaagcgttggcttctggaatcactacattcttgggtggaggaactggcccttcgacaggttcgaacgcgactacttgcaccccgggacctacccatatgcgccagatgatccaggcttgcgatcacctccccatcaacgtgggtatcaccggtaaaggaaacgactgtggtggaatcagcattgaggaacaaatcgtggccggagcagcgggactgaagctccatgaagactggggctccactcctgcggccattgacacctgcctggatatgtgcgacaagtacgacgtgcaatgcatgattcacaccgatactctgaacgagtctggtttcgtggaacaaacgatcgaagccttcaagaaccgcacaattcacacctatcacacggaaggagccggtggtggccatgctcccgatatcatctccgtcgttgagcacccgaacgtacttcccagtagcaccaaccccacccgtccgttcacgatgaacactctagatgaacatcttgacatgttgatggtgtgccatcacttgtccaagaacattgccgaggacgttgcgtttgccgagagtcgtatccgtgccgagaccatcgccgccgaagatgttctccatgatcttggcgccatcagtatgatgtcctcggattcgcaggctatgggccgctgtggtgaagtgatcctgcggacatggaacacagcgcataagaacaaggagcagcgcggcccgctgaaggaggacgaaggcacaggcgcagacaacttccgagtcaagaggtacattagcaagtacaccatcaacccagccatcgcccagggcatgtcccacatgattggtagcgtggaggtcggcaagattgccgatttggttttctggcaccccagctctttcggtaccaagcctacccaaatcatgaagagcggaatgattaccgctgcacagatgggtgatccaaacggctccattcccaccatcgagccggtcatcatgcgtcccatgttcggagcctacgtccccagcacctcaatcatgttcgtctcccaagcctccatcgacgccggcaccgtccaatcctacggaatcaagaagcgcattgaagccgtcaagaactgccgcaacatcggcaaagccgacatgaagtacaacgacaccatgccaaagatgcacgtcgacgcggaaagctacgccgtcgaagccgacggtgtcctttgcgacgcccaacccgcagtaagcctgccgcttacgcaagatttcttcgtttactag

SEQ ID NO: 50197 - protein, 836 aa, Aspergillus oryzae
MHLIPKELDKLAISQLGFLAQRRLARGVRLNHAEAVALISSNLQELIRDGLYSVADLMSIGKTMLGRRHVLPSVVSTLVELQVEGTFPTGTYLVTVHHPISSDEGDLEKALYGSFLPIPPADAFPDPDPNDFEPEKMPGAIIPVKNERITLNEGRRRIRLKVMSKGDRPIQVGSHYHFIEVNPQLHFDRLRAYGYRLDIPAGTSVRFEPGDTKTVTLVEIAGHQVIKGGNFIASGKVDLSRVDEIMLRLQADGFAHIAEPTADAALVTPFTMDREAYARMFGPTTGDLVRLGLTNLWVRVEKDYTSYGDECSFGGGKTIRDGMGQSSEKSHQHCLDTVITNALIIDWSGIYKADIGIKNGIIVGIGKAGNPDIMDGVHPDMVVGSSTDVVAGENKIITAGGFDTHIHFICPQQVDEALASGITTFLGGGTGPSTGSNATTCTPGPTHMRQMIQACDHLPINVGITGKGNDCGGISIEEQIVAGAAGLKLHEDWGSTPAAIDTCLDMCDKYDVQCMIHTDTLNESGFVEQTIEAFKNRTIHTYHTEGAGGGHAPDIISVVEHPNVLPSSTNPTRPFTMNTLDEHLDMLMVCHHLSKNIAEDVAFAESRIRAETIAAEDVLHDLGAISMMSSDSQAMGRCGEVILRTWNTAHKNKEQRGPLKEDEGTGADNFRVKRYISKYTINPAIAQGMSHMIGSVEVGKIADLVFWHPSSFGTKPTQIMKSGMITAAQMGDPNGSIPTIEPVIMRPMFGAYVPSTSIMFVSQASIDAGTVQSYGIKKRIEAVKNCRNIGKADMKYNDTMPKMHVDAESYAVEADGVLCDAQPAVSLPLTQDFFVY

SEQ ID NO: 50198 - DNA, 312 bp, Streptococcus vestibularis
  CDS (1)..(312): transl_table=11
atgattccaggtgaataccatgtggcgagtgagccaattgattataatggtggttacgaagccattagtattgaagtgaaaaatgtgggtgaccgtgctgctcaagtagggtctcattatcatttttacgaagcaaacgaagctggtcttcaatttgatcgtgaaaaggcgcgaggcaaacgtctagatattccagcaggtacagccattcgttttgagccaggtgaaacgaaaacagtacaacttattgactttggagggaaacgccgtatttttggtttcaataacaaggtcaatggtttcttagactag

SEQ ID NO: 50199 - protein, 103 aa, Streptococcus vestibularis
MIPGEYHVASEPIDYNGGYEAISIEVKNVGDRAAQVGSHYHFYEANEAGLQFDREKARGKRLDIPAGTAIRFEPGETKTVQLIDFGGKRRIFGFNNKVNGFLD

SEQ ID NO: 50200 - DNA, 435 bp, Yersinia intermedia
  CDS (1)..(435): transl_table=11
atgagcgcaaagaaaagcactaaaaataatgcagaacagaatacccctctcggtggctgcattttagccgatacaccgattacctttaatgaaaataagccggtaactaaagttaaagtgcgtaataccggtgaccgacccattcaagtggggtcgcattttcacttcttcgaagttaaccgtgcactggagtttgaccgtgctgcggcttatggcaagagactcaatatctcctcaacaaccgcaattcgttttgaacccggtgatgaaaccgaagttccgctgatccctttcggtggcaagcagacactgtatggctttaacaacctggtggatggttggactggcgagggtgtggtgcctaatagcgaacgcccggataagctagaagctatccgtcgtgcggctgaacgtggtttcaaatcgtctaaatga

SEQ ID NO: 50201 - protein, 144 aa, Yersinia intermedia
MSAKKSTKNNAEQNTPLGGCILADTPITFNENKPVTKVKVRNTGDRPIQVGSHFHFFEVNRALEFDRAAAYGKRLNISSTTAIRFEPGDETEVPLIPFGGKQTLYGFNNLVDGWTGEGVVPNSERPDKLEAIRRAAERGFKSSK

SEQ ID NO: 50202 - DNA, 468 bp, Yersinia frederiksenii
  CDS (1)..(468): transl_table=11
atgagcgcaaagaaaggcactagcactaatcgcactaaaggcattaatactgaaggcacaacagaaaaaaacacgccccttgggggctgcattttagctgatgcgccgattacctttaatgagaataagcctgttaccaaagtgaaggtccgcaataccggtgaccgacccattcagataggttctcattttcacttctttgaagttaaccgcgcacttgagtttgatcgtaccgcggcttatggcaaaaggctgaatatctcttcaacaacggcaatccgttttgaacccggtgacgaaactgaagtttcgctaattcctttcggtggtaagcaaacactgtatggctttaacaatctggtcgatggctggaccggtgacggtgtggtgccaaatagtgagcgcccggataagctagaggctatccgccgtgcggctgcacgtggttttaagtcatcatctaaataa

SEQ ID NO: 50203 - protein, 155 aa, Yersinia frederiksenii
MSAKKGTSTNRTKGINTEGTTEKNTPLGGCILADAPITFNENKPVTKVKVRNTGDRPIQIGSHFHFFEVNRALEFDRTAAYGKRLNISSTTAIRFEPGDETEVSLIPFGGKQTLYGFNNLVDGWTGDGVVPNSERPDKLEAIRRAAARGFKSSSK

SEQ ID NO: 50204 - DNA, 435 bp, Yersinia bercovieri
  CDS (1)..(435): transl_table=11
atgagcgcaaagaaaggcactaaaacatcaacagaagagaatacccctctgggcggctgcattttagccgatatccccatcacttttaatgaaaataagccggtaaccaaagtgaaagtgcgaaataccggtgaccggcccattcaggtgggttcacacttccacttcttcgaggctaaccgcgcacttgagtttgaccgtgctgcggcttatggcaagcggctgaatatctcctcaactaccgccatccgttttgaacccggtgatgagaccgaagttcagctgattcccttcggtggcaagcaaacactgtatggttttaacaatctggtggatggctggactggcgaaggcgtggtgccgaacagtgagcgcccggataagctcgaggctatccgccgtgcggcggcgcgtggtttcaaatcacctaaataa

SEQ ID NO: 50205 - protein, 144 aa, Yersinia bercovieri
MSAKKGTKTSTEENTPLGGCILADIPITFNENKPVTKVKVRNTGDRPIQVGSHFHFFEANRALEFDRAAAYGKRLNISSTTAIRFEPGDETEVQLIPFGGKQTLYGFNNLVDGWTGEGVVPNSERPDKLEAIRRAAARGFKSPK

SEQ ID NO: 50206 - DNA, 435 bp, Yersinia aldovae
  CDS (1)..(435): transl_table=11
atgagcgcaaagaaaagcagtaaagataatgcagaacagaatactccgctcggaggctgcattttagccgatacaccgattacctttaatgaaaataagcctgttaccaaagtgaaagtccgtaataccggtgaccggccaattcaggtggggtcgcacttccatttctttgaagttaaccgcgccttggagtttgaccgtgcggcggcttatggcaaacgactgaatatctcttccaccaccgcaatccgttttgaacccggcgatgaaaccgaagttccgctgattccttttggcggcaaacaaacgctgtatggtttcaataacctggtggatggctggactggtgacggcgtggtacctaacagtgaacgcccggataaactggcggctattcgtcgtgcggctgaacgtggttttaaatcatctaaataa

SEQ ID NO: 50207 - protein, 144 aa, Yersinia aldovae
MSAKKSSKDNAEQNTPLGGCILADTPITFNENKPVTKVKVRNTGDRPIQVGSHFHFFEVNRALEFDRAAAYGKRLNISSTTAIRFEPGDETEVPLIPFGGKQTLYGFNNLVDGWTGDGVVPNSERPDKLAAIRRAAERGFKSSK

SEQ ID NO: 50208 - DNA, 417 bp, Haloarcula quadrata
  CDS (1)..(417): transl_table=11
atgagcgatggactcgtgcccggtgaggtcatcccgggtgaagggacagtgacgctgaacgaaggccgagagacgacggaagtgactgtcgggaacaccggcgacagaccctcacaagtcgggtcgcacttccactttttcgaggccaacgcggcgctggagttcgaccgcgaagcggccatggggatgcggctgaacatccctgccggcacggctgtccggttcgaacctggtgacgagcaaacggtcgaactcgtcgaaattggtgggaagcgacgcgcccacgggatgaacggacttgtcaacgggagcgtcgacggcgagacgggcgacgcggtcgaacgcatgcgtgcggcaggatttggagacacaggcgaggcggcaccggacgacggcgacacggagcccgaccaatga

SEQ ID NO: 50209 - protein, 138 aa, Haloarcula quadrata
MSDGLVPGEVIPGEGTVTLNEGRETTEVTVGNTGDRPSQVGSHFHFFEANAALEFDREAAMGMRLNIPAGTAVRFEPGDEQTVELVEIGGKRRAHGMNGLVNGSVDGETGDAVERMRAAGFGDTGEAAPDDGDTEPDQ

SEQ ID NO: 50210 - DNA, 414 bp, Haloarcula argentinos
  CDS (1)..(414): transl_table=11
atgagtgacggactcgtgcctggcgaggtcatcccgggcgagggggcagtgtcgctgaacgaaggtcgggaaacgacggaagtgactgtcgggaacaccggcgataggccctcgcaagtcggatcgcacttccacttcttcgaggccaacgcggccctggagttcgaccgcgaggcggccatggggatgcggctgaacatcccagccggcacggccgtccggttcgaacccggcgacgagcagacagtcgaactcgtcgaaatcggcgggaagcgccgcgctcatggaatgaacggattggtcaacgggagcgtcgacggcgatacgagcaacgctatcgaacgcatgcgtgcagcagggttcggggataccggcgaggaagcagcggacggcgacgcggagtccgaccaatga

SEQ ID NO: 50211 - protein, 137 aa, Haloarcula argentinos
MSDGLVPGEVIPGEGAVSLNEGRETTEVTVGNTGDRPSQVGSHFHFFEANAALEFDREAAMGMRLNIPAGTAVRFEPGDEQTVELVEIGGKRRAHGMNGLVNGSVDGDTSNAIERMRAAGFGDTGEEAADGDAESDQ

SEQ ID NO: 50212 - DNA, 417 bp, Haloarcula aidinensis
  CDS (1)..(417): transl_table=11
atgagcgacggactcgtacccggtgaggtcctccctggcgagggaactgtaacactgaacgagggtcgcgagacgacggaagtgacggtcggtaacaccggcgaccggccctcgcaggttggatcgcatttccacttcttcgaggccaacgcagccctagagttcgaccgcgaggctgccatgggaatgcggctgaacatccccgccggcacggccgtccggttcgaacccggcgacgagcagacagtcgaactcgtcgaaatcggcgggaagcgccgcgcccacgggatgaacggactggtcaacgggagcgtcgacagcgatacgagcgatgctgtcgagcgcatgcgtgcggcaggcttcggggacactggcgagacggcaacggacggcggcgacgcggagtccgaccaatga

SEQ ID NO: 50213 - protein, 138 aa, Haloarcula aidinensis
MSDGLVPGEVLPGEGTVTLNEGRETTEVTVGNTGDRPSQVGSHFHFFEANAALEFDREAAMGMRLNIPAGTAVRFEPGDEQTVELVEIGGKRRAHGMNGLVNGSVDSDTSDAVERMRAAGFGDTGETATDGGDAESDQ

SEQ ID NO: 50214 - DNA, 2517 bp, Glycine max
  CDS (1)..(2517)
  misc_feature (588)..(588): n is a, g, c or t
atgaaactgagtccaagggaggtggagaaactaggccttcacaatgctggctaccttgctcagaaacgtcttgctcgtggtttaagactcaattatactgaagctgtggcactcattgccacgcagattatggaatttgctcgtgatggtgaaaagactgtggcacaactaatgtgcattgggaaacatctattggggaggagacaagttcttccagaggttcaacatctcttgaatgctgttcaggttgaagctacctttcctgatgggactaagctggtcacagttcatgatccaatttcctgtgagcatggagatctagggcaagcactatttggttcttttcttccagtaccttcacttgacaagtttgctgagaacaaagaagataatagaattccaggtgaaataatatatggagatggaagtctagttcttaaccctggaaagaatgcagtgattctcaaagttgtcagcaatggagaccggccaattcaggttggtagccactatcattttattgaagtaaatccctacttgacttttgatcgaaggaaagcatatggcatgcgcctcaatatagctgcngggaatgccacacgctttgagccaggggaatgtaaaagcgttgtgcttgtaagcattggaggtaacaaagtcatcagaggaggtaataacattgccgatggtccagttaatgattctaattgcagagcagccatgaaagctgtggtcacaaggggatttggacatgtggaagaggaaaatgctagggaaggtgttactggagaagactattcattaactacagtaatttctcgagaggaatatgctcacaagtatggccctacaactggtgacaaaatccgtcttggtgatactgacttgtttgctgaaattgaaaaagattttgctctctatggtgatgaatgtgtttttggaggtgggaaagttttaagagatggaatgggtcagtcatgtggggatccacctgcaatctccttggatactgttataacaaatgctgtgataattgattatagtggaatcatcaaagcggatataggcattaaagatggtctcattgtttcaattggaaaagcaggaaatccagacatcatggatgatgtattttttaatatgatcattggggctaatactgaagttattgctggagaagggttgattgtaacagcaggggctatagattgtcacgtgcattatatatgccctcaattagtagatgaggccatatcaagcggcatcacaacattagtgggaggtggaaccggaccgactgctggaacacgtgccacaacttgtacaccagcaccatctcagatgaaactaatgctgcaatcaactgatgacctgcctctaaactttggtttcactggcaaaggaagtagttccaagcctgatgaactacatgacataatcaaggctggagcaatgggactgaagctgcatgaggactggggaagtactcccgctgcaatagacagttgcttgactgttgctgatcaatacgatatccagattaacatacataccgacaccctaaatgaagctggatttgtcgaacatagcattgcagcatttaaaggaagaactattcatacttaccacagtgaaggtgcaggtggtggtcatgctccagatatcatcaaagtatgtggtatgaagaatgttctgccctcatcaacaaacccaacacgccctttaacactcaatactatagatgagcatcttgacatgttgatggtctgccatcatctgaatagggaaattccagaagacttagcttttgcatgttcaaggataagagaaggaacgattgctgccgaagatattttgcatgatattggggcaattagcatcatatcttctgattctcaggctatgggtcgagttggagaggtgataagcagaacttggcaaactgccaataagatgaaggtacaacgaggaccactccagcctggtgaatccgacaatgacaacttccggatcaaacgatacattgcaaaatacactataaatccagctatagcgaatggtttttcacaatatgttggttcggtggaggtgggaaagttagctgatcttgtgatgtggaagccatctttttttggggcaaaaccagaaatggtgatcaaaggtggggtggttgcatgggctgatatgggtgacccaaatgcaagcatccccactcctgaaccggtgaagatgaggcctatgtttggaacactaggcaaggctggtggtgctttatccatagcttttgtgagcaaggcagctgtagaccagagagtacatgctctatacggactgaacaagagggtggaagcagtaggcaatgtgaggaagctcactaaactagacatgaaacttaatgactctcttccacaaatcactgtcgacccagataactacactgttacagcagatggcgaggttctcaccagttttgcaaccacctttgttcccctttctcgaaattacttcctcttttaa

SEQ ID NO: 50215 - protein, 838 aa, Glycine max
MKLSPREVEKLGLHNAGYLAQKRLARGLRLNYTEAVALIATQIMEFARDGEKTVAQLMCIGKHLLGRRQVLPEVQHLLNAVQVEATFPDGTKLVTVHDPISCEHGDLGQALFGSFLPVPSLDKFAENKEDNRIPGEIIYGDGSLVLNPGKNAVILKVVSNGDRPIQVGSHYHFIEVNPYLTFDRRKAYGMRLNIAAGNATRFEPGECKSVVLVSIGGNKVIRGGNNIADGPVNDSNCRAAMKAVVTRGFGHVEEENAREGVTGEDYSLTTVISREEYAHKYGPTTGDKIRLGDTDLFAEIEKDFALYGDECVFGGGKVLRDGMGQSCGDPPAISLDTVITNAVIIDYSGIIKADIGIKDGLIVSIGKAGNPDIMDDVFFNMIIGANTEVIAGEGLIVTAGAIDCHVHYICPQLVDEAISSGITTLVGGGTGPTAGTRATTCTPAPSQMKLMLQSTDDLPLNFGFTGKGSSSKPDELHDIIKAGAMGLKLHEDWGSTPAAIDSCLTVADQYDIQINIHTDTLNEAGFVEHSIAAFKGRTIHTYHSEGAGGGHAPDIIKVCGMKNVLPSSTNPTRPLTLNTIDEHLDMLMVCHHLNREIPEDLAFACSRIREGTIAAEDILHDIGAISIISSDSQAMGRVGEVISRTWQTANKMKVQRGPLQPGESDNDNFRIKRYIAKYTINPAIANGFSQYVGSVEVGKLADLVMWKPSFFGAKPEMVIKGGVVAWADMGDPNASIPTPEPVKMRPMFGTLGKAGGALSIAFVSKAAVDQRVHALYGLNKRVEAVGNVRKLTKLDMKLNDSLPQITVDPDNYTVTADGEVLTSFATTFVPLSRNYFLF

SEQ ID NO: 50216 - DNA, 312 bp, Streptococcus thermophilus
  CDS (1)..(312): transl_table=11
atgattccaggtgaataccatgtggcgagtgagccaattgattataacggtggttacgaagccattagtcttgaagtgaaaaatgtgggtgaccgtgctgctcaagtgggttctcactaccatttttatgaagcaaacgaagctggtcttcaatttgatcgtgaaaaggcgcgaggcaaacgtctagatattccagcaggtacagccattcgttttgagccaggtgaaacgaaaacagtacaacttattgactttggaggggaacgtcgtatttttggtttcaataacaaggtcaatggtttcttagactag

SEQ ID NO: 50217 - protein, 103 aa, Streptococcus thermophilus
MIPGEYHVASEPIDYNGGYEAISLEVKNVGDRAAQVGSHYHFYEANEAGLQFDREKARGKRLDIPAGTAIRFEPGETKTVQLIDFGGERRIFGFNNKVNGFLD

SEQ ID NO: 50218 - DNA, 2618 bp, Canavalia ensiformis
  CDS (30)..(2207)
ataagtaatttggaactagaaaaggctgaatgaaccattttaacaggagacaggtgcttccagcagttccacatctgttgaacattattcaggttgaggctaccttacctaatgggaccaagttagtgacagttcatgatccgattgcgaatgagaatggagatctagaagaagcattatatggttcttttcttccagttccttcgcttgacaagtttgctgagagtaaagaagagcataaaattcctggagaaataatatgtgcagatggaagactaactcttaaccctggaaggaaagcagtatttctcaaagttgtcaaccatggagacaggccaatccaggtagggagccattatcattttattgaagtaaatccatacttgacttttgatcgaaggaaagcttatggcatgcgcctgaatatagctgcaggggattctgttcgctttgagcctggggatcataaaactgttaatcttgtaagcattggaggtaacaaaatcattagaggaggtaatgccattgctgatggtccagttaatgaagccaattgtaaagcagctatggagattgtgtgcagaagggaatttggacataaggaagaagaagaagcaagtgagggtgttaccacaggagaccctgattgtcctttcaccaaagccattcctcgtgaagaatatgctaacaagtatggtccgactattggtgacaaaatccgtcttggtgacactgatttgattgctgaaattgaaaaggattttgccctttatggtgatgaaagtgtttttggaggtggaaaagttataagagatggaatgggtcaatcaagtgggcatccacctgctatgtccttggatactgttataacaagtgcagtgataattgactatactggaatcatcaaagcagatataggtatcaaagatggccttattgcctctattggaaaagcaggaaatccagacatcatgaatggtgtatttcctaatatgatcattggggttaatactgaagttatatgcggagaagggttgatcgtaactgctgggggtatagactgtcatgttcattatatatgccctcaatcacttgatgaggccatatcaagcggcatcacaacagtagtaggaggtggaacaggaccaacggatggaagtcgtgccaccacttgtacaccggcaccaactcagatgaagctaatgctgcaatcaacagatgacattccgctaaactttggtttcactggcaaagggagtggttcacatcctgatgaactacatgaaataatcaaggctggagcaatgggactgaagctgcatgaggactggggatgcacgccagctgcaatagataattgtttggctgttgctgaacaacatgatatccaggttaatatacacactgacaccgtaaatgaatctggattcgtggaacacactattgctgcatttaatggaagaactattcatacttaccacagtgaaggtgcaggtggtggtcatgctccagatatcatcaaagtatgtagtatgaaaaatgtcctaccttcatcaaccaacaccacacgccctttaacatctaataccgtagatgagcatcttgacatgctgatggtctgccataagttgaatagggaaattccagaagatttagcttttgcaagttcaagggtaagagaacaaacaattgctgctgaagatattttgcaccatattgggggaattagcattatatcttctgatgcacaggctgtgggtcgaattggagaggtgataagctgcacttggcaaactgctgataagatgaaggcagaaagaggaccacttcagcctgatggttcagacaatgataactttcgaatcaaacgatatattgcaaaatacactataaatccagccatagtaaatggcatctcacaatatgttggttcagttgaggtgggaaagttagctgatcttgtgatttggaagccatcatttttcggggcaaaaccagacattgtgatcaaaggtggttcaattgcatgggctgacatgggtgacccaaatggcagcatacctacacctgaaccggtgctgatgaggcctatgtatggaacacttggcaaggctggtagtgctttatccatagcttttgtgagcaaggcggctttagaccttggagtgaaagttttatatggactgaacaaagggtggaacccgtgagcaatgtgagaaagctcaccaaactagacttgaaactcaataactctcttccagaaatcactgtgtgcccagaaacattcacagttacagtagatggccaggctctctccagcgaggcagtcaccactttgccactttctcaaaattacttcatcttttaagtactcctacaaattaaggttaattattgttaaacatgcacctacaatgactgattgagtgaaagtgtgtttaataactgattaagtcaaagtgtgttttctagtttgtaggggtttgtttatcctataattagtgattgagttaaactatgtttcctaatttgtatggatttgtttatattgagtcaaagtgtgatttttttttaaattttaaataatattgttatgtctacaaaaaaaaaaaaaaaaa

SEQ ID NO: 50219 - protein, 725 aa, Canavalia ensiformis
MNHFNRRQVLPAVPHLLNIIQVEATLPNGTKLVTVHDPIANENGDLEEALYGSFLPVPSLDKFAESKEEHKIPGEIICADGRLTLNPGRKAVFLKVVNHGDRPIQVGSHYHFIEVNPYLTFDRRKAYGMRLNIAAGDSVRFEPGDHKTVNLVSIGGNKIIRGGNAIADGPVNEANCKAAMEIVCRREFGHKEEEEASEGVTTGDPDCPFTKAIPREEYANKYGPTIGDKIRLGDTDLIAEIEKDFALYGDESVFGGGKVIRDGMGQSSGHPPAMSLDTVITSAVIIDYTGIIKADIGIKDGLIASIGKAGNPDIMNGVFPNMIIGVNTEVICGEGLIVTAGGIDCHVHYICPQSLDEAISSGITTVVGGGTGPTDGSRATTCTPAPTQMKLMLQSTDDIPLNFGFTGKGSGSHPDELHEIIKAGAMGLKLHEDWGCTPAAIDNCLAVAEQHDIQVNIHTDTVNESGFVEHTIAAFNGRTIHTYHSEGAGGGHAPDIIKVCSMKNVLPSSTNTTRPLTSNTVDEHLDMLMVCHKLNREIPEDLAFASSRVREQTIAAEDILHHIGGISIISSDAQAVGRIGEVISCTWQTADKMKAERGPLQPDGSDNDNFRIKRYIAKYTINPAIVNGISQYVGSVEVGKLADLVIWKPSFFGAKPDIVIKGGSIAWADMGDPNGSIPTPEPVLMRPMYGTLGKAGSALSIAFVSKAALDLGVKVLYGLNKGWNP

SEQ ID NO: 50220 - DNA, 717 bp, Helicobacter pylori
  CDS (1)..(717): transl_table=11
atgaaactcaccccaaaagagttagataagttgatgctccactatgctggagaattggctaggaaacgcaaagaaaaaggtattaagcttaactatgtggaagcagtagctttgattagtgcccatattatggaagaagcgagagctggtaaaaaaagtgcggctgaattgatgcaagaaggacgcactcttttaaaacctgatgatgtgatggatggcgtggcaagcatgatccatgaagtgggtattgaagcgatgtttcctgatgggaccaaactcgtaaccgtgcatacccctattgaggctaatggtaaattagttcctggtgagttgttcttaaaaaatgaagacatcactatcaacgaaggcaaaaaagccgttagcgtgaaagttaaaaatgttggcgacagaccggttcaaatcggctcacacttccatttctttgaagtgaatagatgcttagactttgacagagaaaaaactttcggcaaacgcttggacattgcgagcgggacagcggtaaggtttgagcctggcgaagaaaaatctgtagaattgattgacattggtggcaacagaagaatctttggatttaacgcattggttgataggcaagcagataacgaaagcaaaaaaattgctttacacagagctaaagagcgtggttttcatggcgctaaaagcgatgacaactatgtaaaaacaattaaggagtaa

SEQ ID NO: 50221 - protein, 238 aa, Helicobacter pylori
MKLTPKELDKLMLHYAGELARKRKEKGIKLNYVEAVALISAHIMEEARAGKKSAAELMQEGRTLLKPDDVMDGVASMIHEVGIEAMFPDGTKLVTVHTPIEANGKLVPGELFLKNEDITINEGKKAVSVKVKNVGDRPVQIGSHFHFFEVNRCLDFDREKTFGKRLDIASGTAVRFEPGEEKSVELIDIGGNRRIFGFNALVDRQADNESKKIALHRAKERGFHGAKSDDNYVKTIKE

SEQ ID NO: 50222 - DNA, 717 bp, Helicobacter pylori
  CDS (1)..(717): transl_table=11
atgaaactcaccccaaaagagttagataagttgatgctccactatgctggagaattagctaggaaacgcaaagaaaaaggcattaagcttaactatgtggaagcagtagctttgattagtgcccatattatggaagaagcgagagcgggtaaaaaaagtgcggctgaattgatgcaagaagggcgcactcttttaaaacctgatgatgtgatggatggtgtggcaagcatgatccatgaagtgggtattgaagcgatgtttcctgatgggaccaaactcgtaaccgtgcatacccctattgaggtcaatggcaaattagttcctggtgagttgttcttaaaaaatgaagacatcactatcaacgaaggcaaaaaagccgttagcgtgaaagttaaaaatgttggcgacagaccggttcaaatcggctcacacttccatttctttgaagtgaatagatacttagactttgacagagaaaaaactttcggcaaacgcttggacattgcgagcgggacaacggtaaggtttgagcctggcgaagaaaaatccgtagagttgattgacattggtggcaacagaagaatctttggatttaacgcattggttgataggcaagcagataacgaaagcaaaaaaattgctttacacagagctaaagaacgtggttttcatggcgctaaaagcgatgacaactatgtaaaaacaattaaggagtaa

SEQ ID NO: 50223 - protein, 238 aa, Helicobacter pylori
MKLTPKELDKLMLHYAGELARKRKEKGIKLNYVEAVALISAHIMEEARAGKKSAAELMQEGRTLLKPDDVMDGVASMIHEVGIEAMFPDGTKLVTVHTPIEVNGKLVPGELFLKNEDITINEGKKAVSVKVKNVGDRPVQIGSHFHFFEVNRYLDFDREKTFGKRLDIASGTTVRFEPGEEKSVELIDIGGNRRIFGFNALVDRQADNESKKIALHRAKERGFHGAKSDDNYVKTIKE

SEQ ID NO: 50224 - DNA, 2505 bp, Solanum tuberosum
  CDS (1)..(2505)
atgaagttggctccaagagaaatagagaaattgatgctccataatgctggttatcttgctcaaaaacgtcttgctcgagctcaacttcttaactatactgaagccgttgctcttattgcaactcaggtcttagaatttgtccgtgatggagataagagtgtggctgagctgatggatatcgggagacaattacttggaaggagacaagttcttccaactgttcctcatctgttggattgtgttcaggtagaggggacgtttccagatggaacaaaattaatcaccatccatgaccctatagcatgtgaaaatgggaatctggatctagctctgcatggttctttccttcctgttcctcctcaggaaaagtttcctgtgatagaagatagcaaaattcctggccagatgtgctttggaggtggacttattgtccttaatcctcaaagaaaggcagtaattctcaaagtcactaatacaggtgacagaccaattcaggttggcagccactaccactttattgaggtcaatccatccttgatatttgatcgaatgaaagcacttggcatgcgtctaaatatacctgcaggagcagccacgagatttgaaccaggagaaacaagaagtgttgttcttattgggattagtggaaaaaaagtgatcagaggaggtaatgcaattgctgattgtccagttgatgatgcaaaagttatgacattaatgggagctctaagtgaaggaggatttggtcatttggaagagccaaatccaagggaaggtgttgtaggagaagaatcttgcttttcgttttcgatgactcatgaggaatatgccaacatgtttggccccactactggagacagaatacgtctgggtgacactgacctgtttgctgaaattgagaaagactttggtatctttggtgatgagtgcgtgtttgggggtggaaaagttctaagagatggaatgggtcaggcgtgtggatatcctccagcagattgtttggatactgttataacaaatgctgtagtgattgactatacaggaattttcaagtgtgatattggaattaaagatggtcatattgtttccctttgtaaggcaggtaacccagatatcatggatagtgatgcgataattggggttaacactgaggttattgcgggcgaaggaatgattgtaacagcaggagctatagattgtcatgtgcactttatatgccctcaactggcatatgaggcaatatcaagtggaatcactacaatggtgggaggtggtacagggcctgctcatgggacacgtgcaaccacttgtacaccggggcatgtgcacatggaattgatgttgcagtcaacagacgaaattcccctaaattttggtttcactggaaaaggtaacagttccaaggctgatggcctacatgaaataatcaaagctggagcaatgggactaaagcttcatgaggactggggaactactcctgctgctatagatatgtgtctaactgttgcagatcaatatgatattcaggtcaacatccatactgacaccttgaacgaatctggatttgttgagcatacaattgctgcttttaaaggtcgcaccatacatacatatcacagtgaaggtgctggtggtggacatgctccggatataatcaaagtttgtggtgtaaagaatgtaattccctcatcaaccaatccaacacgtccattcactttgaatactgtggacgagcaccttgacatgctgatggtatgccatcatctttgcaagaactcccgagaggatgtagcttttgctgaatcccggattcgggctgaaacaattgctgcagaagacattttgcatgatatgggagcaattagcattatatcttctgattcacaagccatgggtcgaattggagaggtgatctgtagaacatggcagactgcccacaagatgaagttatttagaggaccattggacattgacggatcagacaatgacaatttccggatcaagcgatacatcgcaaaatacactataaatccagcaattgctaatgggatctctcaatttgtcggatcagttgaggtagggaaattagctgatcttgtggtgtggaaaccctcatttttcggagcgaaaccagaaatggtgatcaaaggaggcgtaatagcttggtcaaacatgggagacccaaatgctagtatcccaactcctgaaccggtgacaatgaggcctatgtttggagcattctccaaggctgcaagttctaattcaattgcttttgtcagcaaggcagctttggatgctggaataaaagattcatatagactaaacaagagggttgaagctgtaactaatgtgagaaatatcagtaaactagatatgaagctcaatgatgcactgcctgacatcaaagtcgatcccgagacatacacggtgactgcagatggaacagcccttacatgccccccggctactactgtaccactctccaggaactatttcctcttttag

SEQ ID NO: 50225 - protein, 834 aa, Solanum tuberosum
MKLAPREIEKLMLHNAGYLAQKRLARAQLLNYTEAVALIATQVLEFVRDGDKSVAELMDIGRQLLGRRQVLPTVPHLLDCVQVEGTFPDGTKLITIHDPIACENGNLDLALHGSFLPVPPQEKFPVIEDSKIPGQMCFGGGLIVLNPQRKAVILKVTNTGDRPIQVGSHYHFIEVNPSLIFDRMKALGMRLNIPAGAATRFEPGETRSVVLIGISGKKVIRGGNAIADCPVDDAKVMTLMGALSEGGFGHLEEPNPREGVVGEESCFSFSMTHEEYANMFGPTTGDRIRLGDTDLFAEIEKDFGIFGDECVFGGGKVLRDGMGQACGYPPADCLDTVITNAVVIDYTGIFKCDIGIKDGHIVSLCKAGNPDIMDSDAIIGVNTEVIAGEGMIVTAGAIDCHVHFICPQLAYEAISSGITTMVGGGTGPAHGTRATTCTPGHVHMELMLQSTDEIPLNFGFTGKGNSSKADGLHEIIKAGAMGLKLHEDWGTTPAAIDMCLTVADQYDIQVNIHTDTLNESGFVEHTIAAFKGRTIHTYHSEGAGGGHAPDIIKVCGVKNVIPSSTNPTRPFTLNTVDEHLDMLMVCHHLCKNSREDVAFAESRIRAETIAAEDILHDMGAISIISSDSQAMGRIGEVICRTWQTAHKMKLFRGPLDIDGSDNDNFRIKRYIAKYTINPAIANGISQFVGSVEVGKLADLVVWKPSFFGAKPEMVIKGGVIAWSNMGDPNASIPTPEPVTMRPMFGAFSKAASSNSIAFVSKAALDAGIKDSYRLNKRVEAVTNVRNISKLDMKLNDALPDIKVDPETYTVTADGTALTCPPATTVPLSRNYFLF

SEQ ID NO: 50226 - DNA, 2514 bp, Glycine max
  CDS (1)..(2514)
atgaaactgagtccaagggagatcgagaaactagacctgcataatgcaggctaccttgcacagaaacgccttgctcgtggtttaaggctcaattatgttgaaactgtggctctcatagcaacacagattttggaatttgttcgtgatggtgaaaagactgttgcacagctaatgtgcattgggagagaacttctgggaaggaaacaagttcttccagctgttcctcatcttgttgaaagtgttcaggttgaagccacctttcgagatggtactaagttagtcaccattcatgacctatttgcttgcgagaatggaaaccttgaactagcattatttggttcttttcttccagtaccttcacttgacaagtttacagagaacgaagaagatcatagaactccaggtgaaatcatatgtagaagtgaaaatctgattcttaaccccagaaggaatgcaataattctcagagttgtcaacaagggagacagaccaattcaggttggcagccactatcattttattgaagtaaatccttatttaacctttgatcgaaggaaagcatatggcatgcgcctcaatatagctgctgggaatgccacacgctttgagccaggggaatgtaaaagcgttgtgcttgtaagcattggaggtaacaaagtcatcagaggaggtaataacattgccgatggtccagttaatgattctaattgcagagcagccatgaaagctgtggtcacaaggggatttggacatgtggaagaggaaaatgctagggaaggtgttactggagaagactattcattaactacagtaatttctcgagaggaatatgctcacaagtatggccctacaactggtgacaaaatccgtcttggtgatactgacttgtttgctgaaattgaaaaagattttgctgtctatggtgatgaatgtgtttttggaggtgggaaagtcataagagacggaatgggtcaatcaagtggccatccacctgagggctccttggatactgttataacaaatgctgtgatcattgattatactggaattatcaaagcagatatcggtattaaagatggactgatcatctcaacaggaaaagcaggaaatccagacattatgaatgatgtatttcctaatatgataattggggctaataccgaagttattgctggagagggcttgattgtgacagctggggctatagattgtcatgtgcattttatatgtcctcaattagtatatgatgccgtaacaagtggtatcacaacattagtgggaggaggaacaggaccagctgatggaacacgtgctacaacttgtacaccagcaccaaatcagatgaaattgatgctacaatcaacagatgacatgcctttaaactttggtttcactggaaaagggaatagtgccaaacctgatgaactgcatgaaataatcagggctggagctatgggactgaagctgcatgaggactggggaactacaccggctgcaatagacagttgtttgacagttgcagaccaatatgatatccaggttaacatacatactgacaccttaaacgaatctggatttgttgaacatacaattgctgcatttaaaggaagaactattcatacttaccacagtgaaggagctggtggtggccatgctccagatatcataaaagtatgtggtgagaagaatgtcctaccctcatcaacaaatcccacacgtccttatacacataataccatagatgagcatctcgacatgttgatggtctgccatcatcttaataagaatattccagaagatgtagcttttgctgaatcaagaataagagctgaaacaattgctgctgaagatattttacatgacaagggggcaattagcattatatcatctgattcacaggctatgggtcgaattggagaggtgataagcagaacctggcaaactgctgataagatgaagtcacaaagaggaccactgcagcctggtgaagacaatgacaactttcggatcaagcgttatgttgcaaagtataccataaatccagctatagcgaatggtttgtcgcaatatgttggttcagttgaggcgggtaagttggctgatcttgtattatggaagccgtcattttttggagcaaaaccagaaatggtgatcaaaggtggtgaggttgcatatgctaacatgggtgacccaaatgcaagcatcccaacacctgaaccggtgattatgaggcctatgttcggagcatttggcaaggctggtagttcacactccattgcttttgtgagcaaggcagctttggacgaaggggtgaaagcttcatatggacttaacaagagggtggaagctgtgaagaatgtgaggaagctcaccaaacgagacatgaaactgaatgacactcttccacaaatcactgtggacccagaaacatacacagttacagcagatggagaggttctcacctgcaccgcagccaagactgttcctctttcccgaaattacttcctcttttaa

SEQ ID NO: 50227 - protein, 837 aa, Glycine max
MKLSPREIEKLDLHNAGYLAQKRLARGLRLNYVETVALIATQILEFVRDGEKTVAQLMCIGRELLGRKQVLPAVPHLVESVQVEATFRDGTKLVTIHDLFACENGNLELALFGSFLPVPSLDKFTENEEDHRTPGEIICRSENLILNPRRNAIILRVVNKGDRPIQVGSHYHFIEVNPYLTFDRRKAYGMRLNIAAGNATRFEPGECKSVVLVSIGGNKVIRGGNNIADGPVNDSNCRAAMKAVVTRGFGHVEEENAREGVTGEDYSLTTVISREEYAHKYGPTTGDKIRLGDTDLFAEIEKDFAVYGDECVFGGGKVIRDGMGQSSGHPPEGSLDTVITNAVIIDYTGIIKADIGIKDGLIISTGKAGNPDIMNDVFPNMIIGANTEVIAGEGLIVTAGAIDCHVHFICPQLVYDAVTSGITTLVGGGTGPADGTRATTCTPAPNQMKLMLQSTDDMPLNFGFTGKGNSAKPDELHEIIRAGAMGLKLHEDWGTTPAAIDSCLTVADQYDIQVNIHTDTLNESGFVEHTIAAFKGRTIHTYHSEGAGGGHAPDIIKVCGEKNVLPSSTNPTRPYTHNTIDEHLDMLMVCHHLNKNIPEDVAFAESRIRAETIAAEDILHDKGAISIISSDSQAMGRIGEVISRTWQTADKMKSQRGPLQPGEDNDNFRIKRYVAKYTINPAIANGLSQYVGSVEAGKLADLVLWKPSFFGAKPEMVIKGGEVAYANMGDPNASIPTPEPVIMRPMFGAFGKAGSSHSIAFVSKAALDEGVKASYGLNKRVEAVKNVRKLTKRDMKLNDTLPQITVDPETYTVTADGEVLTCTAAKTVPLSRNYFLF

SEQ ID NO: 50228 - DNA, 306 bp, Rhodobacter capsulatus
  CDS (1)..(306): transl_table=11
atgattcccggagaaattttccccgccgagggggacattgaactgaatgcgggcgccgcgacgatcacgctcatggtggccaataccggcgaccgcccggtgcaggtgggctcgcattatcattttgccgagacgaacccgggcctggtcttcgaccgcaccgccgcccggggctatcgtcttgatatcgcagccggaaccgccgtccgtttcgagcccggacaatcgcgcgaagtgcagcttgtgccgctttccggtgcccgccgtgtcttcggcttcaacgccaaagtgatgggagagctctga

SEQ ID NO: 50229 - protein, 101 aa, Rhodobacter capsulatus
MIPGEIFPAEGDIELNAGAATITLMVANTGDRPVQVGSHYHFAETNPGLVFDRTAARGYRLDIAAGTAVRFEPGQSREVQLVPLSGARRVFGFNAKVMGEL

SEQ ID NO: 50230 - DNA, 324 bp, Vibrio parahaemolyticus
  CDS (1)..(324): transl_table=11
atgattccgggtgagattagagtaaaccacgaattaggtgacattgttctgaatgaaggacgccgaaccaaaaccttacgtgtttctaatttgggtgatcgccctatacaagttgggtcgcattaccatttttttgaagtaaataaattcttagattttgaccgcgatgaagcgttgggattccgccttaatattcccgccggaatggcggttcgatttgagccaggccaacgccgaaccgtcgaactggttacgtttgctggtaagcaagaagtctacggatttcagggcgcaataatgggaaaattacaggatagatcatga

SEQ ID NO: 50231 - protein, 107 aa, Vibrio parahaemolyticus
MIPGEIRVNHELGDIVLNEGRRTKTLRVSNLGDRPIQVGSHYHFFEVNKFLDFDRDEALGFRLNIPAGMAVRFEPGQRRTVELVTFAGKQEVYGFQGAIMGKLQDRS

SEQ ID NO: 50232 - DNA, 465 bp, Corynebacterium glutamicum
  CDS (1)..(465): transl_table=11
atgatcccaggcgagtacatcctgtccagcgaatcactcaccggaaatgttgggcgcgaggccaaaaccatcgaaatcatcaacaccggtgataggcctgtgcagattggttcgcatttccacttcgctgaagtaaaccccagcatcagctttgatcgcagtgaaggttacggcttccgccttgatatcccatccggcaccgcggtgcgcctcgagccaggcgatgcccgcaccgtcaaccttgttgccattggcggtgaccgcattgttgcaggtttccgagatctcgtcgatgggccgttggagactcaagtcaacgtgtggaggaccgaagacgatggcgtcgtcctcagctgctgtgatgtccacaagattgccacagtcgaagctgctgaacgtgcccggaaactagatgacgccactgatgcgaacacaaatgtgggcacagaagaaggtcgaaattaa

SEQ ID NO: 50233 - protein, 154 aa, Corynebacterium glutamicum
MIPGEYILSSESLTGNVGREAKTIEIINTGDRPVQIGSHFHFAEVNPSISFDRSEGYGFRLDIPSGTAVRLEPGDARTVNLVAIGGDRIVAGFRDLVDGPLETQVNVWRTEDDGVVLSCCDVHKIATVEAAERARKLDDATDANTNVGTEEGRN

SEQ ID NO: 50234 - DNA, 312 bp, Actinomyces naeslundii
  CDS (1)..(312): transl_table=11
atgatcccgggagagtaccggctcgcgagcggcaccatcaccatcaacgagggccgccccaccctcaccctcgacgtcctcaacaccggggaccgtcccattcaggtcggttcgcacttccacttcgccgaggtcaactccgcactgtccttcgaccgacaggccgctcgcggtttccgcctcgacattccggccggaaccgccgttcgcttcgagccgggcgactccagaccagtccacctggtggcgctggcgggagcacgaagggtcttcgggctggcaggcgagacgaacggccccgtccagggctga

SEQ ID NO: 50235 - protein, 103 aa, Actinomyces naeslundii
MIPGEYRLASGTITINEGRPTLTLDVLNTGDRPIQVGSHFHFAEVNSALSFDRQAARGFRLDIPAGTAVRFEPGDSRPVHLVALAGARRVFGLAGETNGPVQG

SEQ ID NO: 50236 - DNA, 480 bp, Brucella suis
  CDS (1)..(480): transl_table=11
atggccaaggaaccgactaaagctgcccatccgcagccggaacagacgaaaaccaaccacaaggcgcatcggcctgttggcggctatgttctggcaaaagaccccatcgagatcaatcagggccgcccgcgcaccacgctgacggtgcgcaataccggtgatcgcccgatccagatcggctcgcatttccatttctttgaagtcaatcgctatcttgaattcgaccgctccaaagcctttggcctgcgtctcgacattcccgccaataccgccgtccgtttcgagccgggcgacgagaaggaagtgacgctggttccctttgcgggcaaacgcttcatcttcggcttcaacaatctggtggatggctggagcggcgacggtccaacgcccgactatcagccgaaccgcgaaatcgctgccgaacgcgctgaaaaacttgggtttaagtcgtgcaagtccggtggcaaggacgccaaatag

SEQ ID NO: 50237 - protein, 159 aa, Brucella suis
MAKEPTKAAHPQPEQTKTNHKAHRPVGGYVLAKDPIEINQGRPRTTLTVRNTGDRPIQIGSHFHFFEVNRYLEFDRSKAFGLRLDIPANTAVRFEPGDEKEVTLVPFAGKRFIFGFNNLVDGWSGDGPTPDYQPNREIAAERAEKLGFKSCKSGGKDAK

SEQ ID NO: 50238 - DNA, 687 bp, Deinococcus radiodurans
  CDS (1)..(687): transl_table=11
atgcaactcaccgaacgagagcgcgacaaattgctgattttcacggcggcccagctcgcccgcgaacgccgcgccagagggctgaaactcaaccaccccgaggcggtcgccctcattaccgctgaagtcctcgaaggcatccgcgacgggcggcgggtcgaggacctgatgagcttcggcgcggccatcctgacgcccgacgacgtgctcgacggcgtgccagagctgattcacgagattcaggtcgagggcaccttccccgacggcaccaagctcgtcaccgtccacgaccccattcgcggcgcggcgagccggcgggtggcgggcgagtacctgctggaaggtggcgagattgaactcaacgccgggcggcccgtcaccacgctgaccgtcgccaacaccgctgaccgcccggtgcaggtgggcagccactttcactttttcgaggtgaacgccgggctgcgtttcgaccgagccgccgcgtatggtttccgcctcaacatccccgccgggaccgctgtgcgtttcgagcccggtgaggaaagggaagtggacctcgtgccgctcggcggaagtcgcaccgtgtacggcatgaacgcgctggtgaacggcgacctcgacgcgccgggcacccgcgaggccgcgctcgaaggcgcccgggcggcgggtttcgggggcgcacagtga

SEQ ID NO: 50239 - protein, 228 aa, Deinococcus radiodurans
MQLTERERDKLLIFTAAQLARERRARGLKLNHPEAVALITAEVLEGIRDGRRVEDLMSFGAAILTPDDVLDGVPELIHEIQVEGTFPDGTKLVTVHDPIRGAASRRVAGEYLLEGGEIELNAGRPVTTLTVANTADRPVQVGSHFHFFEVNAGLRFDRAAAYGFRLNIPAGTAVRFEPGEEREVDLVPLGGSRTVYGMNALVNGDLDAPGTREAALEGARAAGFGGAQ

SEQ ID NO: 50240 - DNA, 705 bp, Helicobacter heilmannii
  CDS (1)..(705): transl_table=11
atgaaactgacacctaaagagttggataagttgatgctccattatgcgggcgaactagccaaacaacgcaaagcaaaaggcattaagctaaactacaccgaagctgtagcactcattagcgcccatgtcatggaagaggcccgcgccggtaaaaaaagcgtggcggatttgatgcaagaaggcaggactttactcaaagccgatgatgtgatgcctggcgtggcgcatatgatccacgaagtggggattgaagcgggctttcccgatgggacaaaattagtgaccatccacactcccgtagaagctggcagcgacaagcttgctcccggtgaagtgatcctcaaaaacgaagacatcaccctcaacgccggcaaacacgccgtccaattaaaagtcaaaaacaaaggcgatcgccccgtacaagtgggttcacacttccacttctttgaagtgaataagcttttagacttcgatcgcgaaaaagcctatggcaaacgcctagacattgcttctggcaccgctgtgcgctttgaacctggggaagaaaaaaccgtggaactcatcgacatcggtggcaataaacgcatttatggtttcaacgctctagtcgatcgccaagccgatcacgatggcaaaaaactcgccttaaaacgcgctaaagaaaaacactttggcactatcaactgcggttgcgacaacaaataa

SEQ ID NO: 50241 - protein, 234 aa, Helicobacter heilmannii
MKLTPKELDKLMLHYAGELAKQRKAKGIKLNYTEAVALISAHVMEEARAGKKSVADLMQEGRTLLKADDVMPGVAHMIHEVGIEAGFPDGTKLVTIHTPVEAGSDKLAPGEVILKNEDITLNAGKHAVQLKVKNKGDRPVQVGSHFHFFEVNKLLDFDREKAYGKRLDIASGTAVRFEPGEEKTVELIDIGGNKRIYGFNALVDRQADHDGKKLALKRAKEKHFGTINCGCDNK

SEQ ID NO: 50242 - DNA, 678 bp, Helicobacter hepaticus
  CDS (1)..(678): transl_table=11
atgagattaacgcctaaagaattagacaaattaatgttgcattatgctggggcactagccaaaagtcgcaaagaacgaggtattaaacttaattatgttgaatctatagcccttattagtatggagattatggagcttgcgcgcgagggtaacaaaagtgtagcagagcttatgcaacaaggcagagagattctcaaagccgatgaagtaatggagggtgtagcaagtatggttaatgaagtgcaggtagaagtgagtttccccgatggaacaaagcttgttacgattcataatcctattgaagataatggcaaacttactcccggagagtatattctcaaagatgaagacattacgctcaatgccaataaagaatctataagtattaaagttactcataagggcgatagacctatacaagtaggttcacattttcatttttttgaagtcaatgcacttttggaatttgatagagcccaagcatttggtaaacgtttagatattgcctctggcacatcagtgcgttttgagccgggtgaagaaaaaaatgtgaatcttattgattttggaggcaaacaaaaaattattggatttaatgacttaacgaatgcgcatataaataaagaaaataaagagcaatgccttgcaaatgcagcacaaaaacattttatacactaa

SEQ ID NO: 50243 - protein, 225 aa, Helicobacter hepaticus
MRLTPKELDKLMLHYAGALAKSRKERGIKLNYVESIALISMEIMELAREGNKSVAELMQQGREILKADEVMEGVASMVNEVQVEVSFPDGTKLVTIHNPIEDNGKLTPGEYILKDEDITLNANKESISIKVTHKGDRPIQVGSHFHFFEVNALLEFDRAQAFGKRLDIASGTSVRFEPGEEKNVNLIDFGGKQKIIGFNDLTNAHINKENKEQCLANAAQKHFIH

SEQ ID NO: 50244 - DNA, 717 bp, Helicobacter pylori J99
  CDS (1)..(717): transl_table=11
atgaaactcaccccaaaagagttagataagttgatgctccactacgctggagaattagctaggaaacgcaaagaaaaaggcattaagcttaactatgtggaagcggtagctttgattagtgcccatattatggaagaagcgagagctggtaaaaagactgcggctgaattgatgcaagaagggcgcactcttttaaaaccggatgatgtgatggatggtgtggcaagcatgatccatgaagtgggtattgaagcgatgtttcctgatgggaccaaactcgtaaccgtgcatacccctattgaggctaatggtaaattggttcctggtgagttgttcttaaaaaatgaagacatcactatcaacgaaggcaaaaaagccgttagcgtgaaagttaaaaacgtgggcgacagaccggttcaaatcggttcacacttccatttctttgaagtgaatagatgcctagactttgacagagaaaaaactttcggcaaacgcttagacattgcgagcgggacagcggtaaggtttgagcctggcgaagaaaaatccgtagaattgattgacattggtggcaacagaagaatctttggatttaacgcattggttgataggcaagcagacaacgaaagcaaaaaaattgctttacacagagctaaagagcgtggttttcatggtgctaaaagcgatgacaactatgtaaaaacaattaaggagtaa

SEQ ID NO: 50245 - protein, 238 aa, Helicobacter pylori J99
MKLTPKELDKLMLHYAGELARKRKEKGIKLNYVEAVALISAHIMEEARAGKKTAAELMQEGRTLLKPDDVMDGVASMIHEVGIEAMFPDGTKLVTVHTPIEANGKLVPGELFLKNEDITINEGKKAVSVKVKNVGDRPVQIGSHFHFFEVNRCLDFDREKTFGKRLDIASGTAVRFEPGEEKSVELIDIGGNRRIFGFNALVDRQADNESKKIALHRAKERGFHGAKSDDNYVKTIKE

SEQ ID NO: 50246 - DNA, 660 bp, Sulfolobus tokodaii
  CDS (1)..(660): transl_table=11
atgtttctaacacctagagagcaagaaaaactacttatttcatgggctgcagaagttgcaagaaggagaagagttaaaggattaaagctaaactatgcagaagctatggcaattatagtagattatattttagaaaaagctagagaaggagttaaaatggaagatataattaaaggtgcacaagaattattaactgaaaacgatgtaatggaaggtgtaccagaacttcttgacctagttcaagtagaagcaacatttccggatggtaccaaattagttacagttagaaatccaataaaaagtagtaagaaaacattaaatacttatataattaaacaaggagaaatagaagttaagggagaagagatagaattagaaataactaatactggtgatagacctatacaagtgggttcacattttcacttttttgaagtgaataaggctctaaaatttgatagggaaaaagcttatggaatgagattatcaatcccagcagggacagctgtaagatttgagcctggacaaactaaagttgttaggctaagaaagataggaggtggaagaagagttaccgggttaaacggtttaacagaaggttctctagaacataataaggaagaatctattaaaagagcaaaggagagggggtttgcttga

SEQ ID NO: 50247 - protein, 219 aa, Sulfolobus tokodaii
MFLTPREQEKLLISWAAEVARRRRVKGLKLNYAEAMAIIVDYILEKAREGVKMEDIIKGAQELLTENDVMEGVPELLDLVQVEATFPDGTKLVTVRNPIKSSKKTLNTYIIKQGEIEVKGEEIELEITNTGDRPIQVGSHFHFFEVNKALKFDREKAYGMRLSIPAGTAVRFEPGQTKVVRLRKIGGGRRVTGLNGLTEGSLEHNKEESIKRAKERGFA

SEQ ID NO: 50248 - DNA, 306 bp, Actinobacillus pleuropneumoniae
  CDS (1)..(306): transl_table=11
atgatccccggagaataccaattagcggacggtgatgtacaagcgaatgtgggtcgcaaaaccgtcaaattagaagtcgtaaacagcggtgaccgtccgatccaagtcggttcgcactaccatttttttgaaaccaatcacgccctaaaatttgaccgcttacaggcgcgcggtatgcgtttaaatgtgccgtcaggcaatgcggtacgttttgagcccggcgaagcgaaagaagtggaactggttgagtttggtggtaataaagtgatttacggtttccataacgaaatcgacggcaaattatag

SEQ ID NO: 50249 - protein, 101 aa, Actinobacillus pleuropneumoniae
MIPGEYQLADGDVQANVGRKTVKLEVVNSGDRPIQVGSHYHFFETNHALKFDRLQARGMRLNVPSGNAVRFEPGEAKEVELVEFGGNKVIYGFHNEIDGKL

SEQ ID NO: 50250 - DNA, 306 bp, Agrobacterium tumefaciens
  CDS (1)..(306): transl_table=11
atgaagccaggcgaaatcattgccgcagaaggcaccatcgaacttaatgccggccagccgacggtgacgatcgaggtggccaattcgggcgaccggccggtgcaggtgggtagccactatcatttcttcgagaccaatgccggtctcctcttcgatcgtgacaaggcgcgcggcatgcgtctcgatattcccgccggcacggcggtgcgtttcgagcccggccagaagcgggaagtgacgttggtgccgctatccggcaagcgcgaggtttacgggtttcgtcaacagatcatggggaggttatga

SEQ ID NO: 50251 - protein, 101 aa, Agrobacterium tumefaciens
MKPGEIIAAEGTIELNAGQPTVTIEVANSGDRPVQVGSHYHFFETNAGLLFDRDKARGMRLDIPAGTAVRFEPGQKREVTLVPLSGKREVYGFRQQIMGRL

SEQ ID NO: 50252 - DNA, 327 bp, Anabaena variabilis
  CDS (1)..(327): transl_table=11
atgattccaggggaaataattacaccagatggcgaaattgaactaaatgctggtcgtaatactgtgaaattaagtgttgcgaatgcaggcgatcgccctatacaagttggttcccattttcatttttatgaagttaatcatgggttaatttttgatagggaattggcgttaggaatgcgtttagatattcctgcggggacggcggttaggtttgaacctggggatgagaaggaagtgacgttggttcctttggttgggagtcgtgaggtttatggatttaatgggagggtgaatggggaaattaacgcagaggggcgcggaggttag

SEQ ID NO: 50253 - protein, 108 aa, Anabaena variabilis
MIPGEIITPDGEIELNAGRNTVKLSVANAGDRPIQVGSHFHFYEVNHGLIFDRELALGMRLDIPAGTAVRFEPGDEKEVTLVPLVGSREVYGFNGRVNGEINAEGRGG

SEQ ID NO: 50254 - DNA, 330 bp, Bacillus cereus
  CDS (1)..(330): transl_table=11
atgattccagggcaatatattcttgcgaaagaagacatagtatgtaatggagataaaaaagtaacgaaagttaaggtgttaaatcagggagatagacctattcaaattggatctcattaccatttttatgaagtgaatgaggcattaaaattcgatcgtagtgtagtaattggacaacacttaaatattccagcgggtacagctgtaagatttgaacctggagatgaaaaaacgattgaattagttccatattccggggaacaaaaagtgtatggatttaaaaataaagtggatggcgatattcaatcttacacaaaaagagggagatag

SEQ ID NO: 50255 - protein, 109 aa, Bacillus cereus
MIPGQYILAKEDIVCNGDKKVTKVKVLNQGDRPIQIGSHYHFYEVNEALKFDRSVVIGQHLNIPAGTAVRFEPGDEKTIELVPYSGEQKVYGFKNKVDGDIQSYTKRGR

SEQ ID NO: 50256 - DNA, 375 bp, Bacillus subtilis
  CDS (1)..(375): transl_table=11
atgaagccgggagcatttcaaattgctgagggaaccattacgattaatgaaggccgtgagatacgggaggtaacggtaaaaaacaccggatcacgctccattcaagtcggttcgcattttcattttgcggaggccaacggggctttattatttgaccgtgagctggcgatcggcatgcgtcttgatgttccatcaggcacgtcggtccgttttgagccgggagagcagaaaacggtctcactagtggaaatcagaggacgcaagacaattagagggctgaacggaatggccgacacgtttatcgatgaacgcggcaaagaaaaaacgttggccaacttaaaacaagccggctggatggagggtgtaatccgatga

SEQ ID NO: 50257 - protein, 124 aa, Bacillus subtilis
MKPGAFQIAEGTITINEGREIREVTVKNTGSRSIQVGSHFHFAEANGALLFDRELAIGMRLDVPSGTSVRFEPGEQKTVSLVEIRGRKTIRGLNGMADTFIDERGKEKTLANLKQAGWMEGVIR

SEQ ID NO: 50258 - DNA, 312 bp, Blochmannia floridanus
  CDS (1)..(312): transl_table=11
atgattcctggtgaattacatattgcagatggtataatagaattaaatgtaaatcgagaaaaagttattgtaatggttattaataatggtgatagaccaattcaagttgggtctcattttcatttttatgaagttaataatgcgttattctttaatcgtaattttgcccttggttttcggttaaacgtaccatctggcacatcaataagatttgaaccgggacaaactagagaagtagagttggttcgatattctggagaattaaagattgttggtttttgtaaaaaaattatgggaaaattaagtaaataa

SEQ ID NO: 50259 - protein, 103 aa, Blochmannia floridanus
MIPGELHIADGIIELNVNREKVIVMVINNGDRPIQVGSHFHFYEVNNALFFNRNFALGFRLNVPSGTSIRFEPGQTREVELVRYSGELKIVGFCKKIMGKLSK

SEQ ID NO: 50260 - DNA, 309 bp, Bordetella bronchiseptica
  CDS (1)..(309): transl_table=11
atgattccgggagaaatactgaccgaaccgggccagatcgagctcaacgtgggccggccgaccttgacgatcgccgtggtcaacgagggcgaccggccgatccaggtgggttcgcactatcacttcgccgaggcgaacaacgccctggtcttcgaccgcgagctggcaaccggctaccggctgaacattccggccggcaacgcggtgcgtttcgagccgggcatgcgccgcaccgtcgagctggtggcggtcggcggcgagcgccgcatcttcggtttccagggcaaggtgatgggggcgctgaaatga

SEQ ID NO: 50261 - protein, 102 aa, Bordetella bronchiseptica
MIPGEILTEPGQIELNVGRPTLTIAVVNEGDRPIQVGSHYHFAEANNALVFDRELATGYRLNIPAGNAVRFEPGMRRTVELVAVGGERRIFGFQGKVMGALK

SEQ ID NO: 50262 - DNA, 309 bp, Bordetella pertussis
  CDS (1)..(309): transl_table=11
atgattccgggagaaatactgaccgaaccgggccagatcgagctcaacgtgggccggccgaccttgacgatcgccgtggtcaacgaggacgaccggccgatccaggtgggttcgcactatcacttcgccgaggcgaacaacgccctggtcttcgaccgcgagctggcaaccggctaccggctgaacattccggccggcaacgcggtgcgtttcgagccgggcatgcgccgcaccgtcgagctggtggcggtcggcggcgagcgccgcatcttcggtttccagggcaaggtgatgggggcgctgaaatga

SEQ ID NO: 50263 - protein, 102 aa, Bordetella pertussis
MIPGEILTEPGQIELNVGRPTLTIAVVNEDDRPIQVGSHYHFAEANNALVFDRELATGYRLNIPAGNAVRFEPGMRRTVELVAVGGERRIFGFQGKVMGALK

SEQ ID NO: 50264 - DNA, 306 bp, Bradyrhizobium japonicum
  CDS (1)..(306): transl_table=11
atgatccccggtgaactcttcattcaggacggcgagatcgagctcaatgccggccgcaagaccgtgacgctgacggtcgccaacaccggcgaccgccctatccaggtcggctcgcactaccatttcttcgagaccaacccggccttgaaattcgagcgcaagaaggcccgcggcatgcgcctcgacatcgccgccggcaccgccgtccgcttcgaacccggccagacccgcgacgtccagctcgtcgcgctcgccggcaagaagaccatctacggcttccgtggcgacgtgatggggaagctgtga

SEQ ID NO: 50265 - protein, 101 aa, Bradyrhizobium japonicum
MIPGELFIQDGEIELNAGRKTVTLTVANTGDRPIQVGSHYHFFETNPALKFERKKARGMRLDIAAGTAVRFEPGQTRDVQLVALAGKKTIYGFRGDVMGKL

SEQ ID NO: 50266 - DNA, 306 bp, Burkholderia mallei
  CDS (1)..(306): transl_table=11
atgattcccggcgaactcgtcatcgacgacggcgagcacacgctgaacgccggccgccacacgatcgcgctcgtcgtcgcgaacacgggcgatcgcccggtgcaggtcggctcgcactatcacttccacgaagtcaacgatgcgctgtcgttcgatcgcgcggccgcgcgcggctttcggctgaacatcgcggcgggcaccgcggtgcgcttcgagccgggccagacacgcacggtcgagctcgtcgagctcggcggcgcccgcgccgtctacggcttccagggcaaggtgatggggccgctctga

SEQ ID NO: 50267 - protein, 101 aa, Burkholderia mallei
MIPGELVIDDGEHTLNAGRHTIALVVANTGDRPVQVGSHYHFHEVNDALSFDRAAARGFRLNIAAGTAVRFEPGQTRTVELVELGGARAVYGFQGKVMGPL

SEQ ID NO: 50268 - DNA, 309 bp, Clostridium perfringens
  CDS (1)..(309): transl_table=11
atgataccaggagaatttaaatttggtcaaggtaaaatactatgtaatgcagacaaaaaagctataactattgaagttaaaaatactggagatagggcagtgcaagttggatctcattatcatttttatgaagtaaactctgctttagactttgatagaaaattagcttgggggaaaaaattagatataccatcaggtgctggtgttagatttgaaccaggagatgttaagaaggttaatttagtagattttacaggtgaaagaagaatatttggatttcatgatgaagtgaatggatatttagattag

SEQ ID NO: 50269 - protein, 102 aa, Clostridium perfringens
MIPGEFKFGQGKILCNADKKAITIEVKNTGDRAVQVGSHYHFYEVNSALDFDRKLAWGKKLDIPSGAGVRFEPGDVKKVNLVDFTGERRIFGFHDEVNGYLD

SEQ ID NO: 50270 - DNA, 363 bp, Corynebacterium efficiens
  CDS (1)..(363): transl_table=11
atgattcccggagagtatgtcctgtccgacacaccgattctttgcaaccgtggtcgcgaagccattgagatcgaggtgatcaacacgggggaccggcccgtccaaatagggtcgcattaccacttcgcagaagtaaatccgctggtgaccttcgatcgcgtacgagcccgtggcatgcgtctggacatcccggccggaaccgctgcccgcctggaacccggtgatgccaccaccgttcgattaattccctttgcgggcgggcgcctgatacggggatttcgcaatgaaatcaacggtgccgttgaatcttgcatggtttcgggtgccagtgaacccgccagtgggacgggggaaacatcctga

SEQ ID NO: 50271 - protein, 120 aa, Corynebacterium efficiens
MIPGEYVLSDTPILCNRGREAIEIEVINTGDRPVQIGSHYHFAEVNPLVTFDRVRARGMRLDIPAGTAARLEPGDATTVRLIPFAGGRLIRGFRNEINGAVESCMVSGASEPASGTGETS

SEQ ID NO: 50272 - DNA, 306 bp, Dechloromonas aromatica
  CDS (1)..(306): transl_table=11
atgatccccggagaactcctcgccgaacccggcgaactcgaactgaacgccggccggccgacgattacgctggtcgtcgccaacaccggcgaccgcccgatccaggtcggctcgcactatcatttctacgaaaccaacgccgggctgagcttcgaccgcgaggcggcgcgcggcttccgcctcgacatcgctgccggcaccgccgtgcgcttcgagccgggccagacgcggaccgtgcaactggtcgcgctggccggtgaccgcaaggtctatggcttccgcggcctcgttcagggagcactatga

SEQ ID NO: 50273 - protein, 101 aa, Dechloromonas aromatica
MIPGELLAEPGELELNAGRPTITLVVANTGDRPIQVGSHYHFYETNAGLSFDREAARGFRLDIAAGTAVRFEPGQTRTVQLVALAGDRKVYGFRGLVQGAL

SEQ ID NO: 50274 - DNA, 324 bp, Escherichia coli
  CDS (1)..(324): transl_table=11
atgatccccggtgaaattaaagtcaaccacgctttgggtgatatcgaactaaatgcaggccgagaaacccaaacgatacaagttgccaaccatggtgaccgcccgattcaaattggctctcactatcatttttatgaagtcaacgacgccctaaaatttgaacgcgaaaatacactcggttttcgtttgaatatccctgcgggcatggcggtacgttttgaaccaggacaaagccgcacagttgaacttgtggcttttagcggcaagcgagaaatatatggtttccatggcaaagtcatgggtaaattagagagtgagaattaa

SEQ ID NO: 50275 - protein, 107 aa, Escherichia coli
MIPGEIKVNHALGDIELNAGRETQTIQVANHGDRPIQIGSHYHFYEVNDALKFERENTLGFRLNIPAGMAVRFEPGQSRTVELVAFSGKREIYGFHGKVMGKLESEN

SEQ ID NO: 50276 - DNA, 336 bp, Geobacillus kaustophilus
  CDS (1)..(336): transl_table=11
atgatcccaggagaataccgattgcgtgaggaaccgattgtgtgcaatcgacaaaaatcggccacgaaactgacggttgtaaaccgcggcgaccgcccggtgcaagtcggttcccattttcacttttttgaagtcaactcgtttcttgaatttgaccggcaggcggcgtacggaaaacatttgaacatcccagccgggacagcggttcgttttgagcctggggatgcgaagcaagtggagcttgttccgttctccggcgagcgccgggtgtacggattaaacaatatggtcaacggtccgcttgatggcaacgggaaggggggagtaagagaatga

SEQ ID NO: 50277 - protein, 111 aa, Geobacillus kaustophilus
MIPGEYRLREEPIVCNRQKSATKLTVVNRGDRPVQVGSHFHFFEVNSFLEFDRQAAYGKHLNIPAGTAVRFEPGDAKQVELVPFSGERRVYGLNNMVNGPLDGNGKGGVRE

SEQ ID NO: 50278 - DNA, 321 bp, Klebsiella aerogenes
  CDS (1)..(321): transl_table=11
atgatccccggtgaatatcacgttaagcccggtcagatagccctgaataccggccgggcaacctgtcgcgtggtcgttgagaaccacggcgatcggccgattcaggtcggttcgcactaccatttcgccgaggttaacccggcgctgaagttcgaccgtcagcaggccgccggctatcgcctgaatatcccggcgggcacggcggtacgctttgaacccggccagaaacgcgaggtcgagctggtggccttcgccggtcaccgcgccgtcttcggcttccgcggcgaggtcatgggccctctggaggtaaacgatgagtaa

SEQ ID NO: 50279 - protein, 106 aa, Klebsiella aerogenes
MIPGEYHVKPGQIALNTGRATCRVVVENHGDRPIQVGSHYHFAEVNPALKFDRQQAAGYRLNIPAGTAVRFEPGQKREVELVAFAGHRAVFGFRGEVMGPLEVNDE

SEQ ID NO: 50280 - DNA, 375 bp, Lactobacillus fermentum
  CDS (1)..(375): transl_table=11
atggttcctggagaatataagttacaaccagacaaagtaccatacaatgttggttacgatgatatctcactcaaagtaaaaaacgttggtgaccgtcctgtccaagttggttcagaataccacttttacgaagcaaacgagcaaggtctacaatttgatcgtagtcaggcatggggtaagcaccttgatataccagccggaactgctattcgtctagaagctggtgaagagcggaccgttaaacttattgactttggtggaaaacgtcgggtattcggctttaacaataaagttaatggttggcttgatgttgataagaaggctgacacatataatgggtatccgcttgagaagagttatcctgaagaaaagtaa

SEQ ID NO: 50281 - protein, 124 aa, Lactobacillus fermentum
MVPGEYKLQPDKVPYNVGYDDISLKVKNVGDRPVQVGSEYHFYEANEQGLQFDRSQAWGKHLDIPAGTAIRLEAGEERTVKLIDFGGKRRVFGFNNKVNGWLDVDKKADTYNGYPLEKSYPEEK

SEQ ID NO: 50282 - DNA, 321 bp, Prochlorococcus marinus
  CDS (1)..(321): transl_table=11
atgagtaatttaattcctggcgaaataattcctgaacaaggtgaaatcgaattaaatcttggtaaggaagttaaaacagtaacagtttcgaattctggagatagacctgtccaagttggatctcattatcattttttcgaagctaataaggcgttaatttttgatcgagaaataacacttggtatgcgtcttgacatacctgcaggaacagcaattagatttgaacctggagatacaacagatgtcaaattagtttcatattcaggtttaaaaaatgcctatggttttaattcattagttaacggttctttagatacttaa

SEQ ID NO: 50283 - protein, 106 aa, Prochlorococcus marinus
MSNLIPGEIIPEQGEIELNLGKEVKTVTVSNSGDRPVQVGSHYHFFEANKALIFDREITLGMRLDIPAGTAIRFEPGDTTDVKLVSYSGLKNAYGFNSLVNGSLDT

SEQ ID NO: 50284 - DNA, 330 bp, Proteus mirabilis
  CDS (1)..(330): transl_table=11
atgatccccggtgaaattagagttaatgcagcattaggcgatattgaactgaatgctggtcgcgagacaaaaaccatacaggtggctaatcatggcgatagacctgtacaagtcggctctcattaccacttttatgaagtgaatgaggcactcaggtttgcacgaaaagagacattaggttttcgtttaaatattcctgctggtatggctgtgcgcttcgagcccggtcaaagtcgcactgttgatgagttagtggcttttgcaggaaaacgtgaaatttatggttttcatggcaaagtgatgggtaaattggagagtgagaaaaaatga

SEQ ID NO: 50285 - protein, 109 aa, Proteus mirabilis
MIPGEIRVNAALGDIELNAGRETKTIQVANHGDRPVQVGSHYHFYEVNEALRFARKETLGFRLNIPAGMAVRFEPGQSRTVDELVAFAGKREIYGFHGKVMGKLESEKK

SEQ ID NO: 50286 - DNA, 321 bp, Prochlorococcus marinus
  CDS (1)..(321): transl_table=11
atgtcctatttaattcctggagaacttattcccgaagatggttttattgaactaaacaaaggaagagaaaccacaaccctaaaagtcgctaacacctctgatcgacctatacaaattggctctcattatcatttctttgagtccaataaaggtctagaatttgatcgcaaaaaatctctcgggaaaaggttagacatccccgccggtactgctatcagatttgagccaggtgaccaaagagaagttaatcttgttccttatgctggagaccgtaaaatttttgggttcaacggacttataaacaattcacttcaacaataa

SEQ ID NO: 50287 - protein, 106 aa, Prochlorococcus marinus
MSYLIPGELIPEDGFIELNKGRETTTLKVANTSDRPIQIGSHYHFFESNKGLEFDRKKSLGKRLDIPAGTAIRFEPGDQREVNLVPYAGDRKIFGFNGLINNSLQQ

SEQ ID NO: 50288 - DNA, 327 bp, Proteus vulgaris
  CDS (1)..(327): transl_table=11
atgatccctggtgaaattagagttaatcaagcattaggcgatattgaacttaatgctggtcgtgaaacaaaaataatccaagtggctaatcatggtgatagacccgtacaagtgggttctcattaccacgtttatgaagtaaatgaagcgcttaagtttgaacgtgaagaaacacttggctttcgtttgaacattcctgcgggaatggcggttcgttttgaaccgggtcaatgtcgtactgttgaattagtggcgtttgatggaaaacgtgaaatttacggctttcatggaaaagtaatgggtaaattagagagtgagaacaaatga

SEQ ID NO: 50289 - protein, 108 aa, Proteus vulgaris
MIPGEIRVNQALGDIELNAGRETKIIQVANHGDRPVQVGSHYHVYEVNEALKFEREETLGFRLNIPAGMAVRFEPGQCRTVELVAFDGKREIYGFHGKVMGKLESENK

SEQ ID NO: 50290 - DNA, 306 bp, Pseudomonas aeruginosa
  CDS (1)..(306): transl_table=11
atgatccccggtgaatacgacatccagcccggcgatatcgaactcaacgccggccgccgcaccctcgccctgagcgtggcgaacaccggtgaccggccgatccaggtcggctcgcactaccacttcttcgaggtcaacgacgccctcgccttcgaccgtccggccacccgtggcatgcgcctgaacatcgccgccggcaccgcggtgcgcttcgaaccggggcagagccgcgaggtggagctggtggaaatcggcggcggacggcgggtatacggctttgccgggcgggtgatgggggacctctag

SEQ ID NO: 50291 - protein, 101 aa, Pseudomonas aeruginosa
MIPGEYDIQPGDIELNAGRRTLALSVANTGDRPIQVGSHYHFFEVNDALAFDRPATRGMRLNIAAGTAVRFEPGQSREVELVEIGGGRRVYGFAGRVMGDL

SEQ ID NO: 50292 - DNA, 306 bp, Pseudomonas fluorescens
  CDS (1)..(306): transl_table=11
atgattcctggccaataccagatccagcccggcgagatcgaactcaacgccgggcgccgcaccctgcgcctgaacgtatccaacagcggcgaccggccaatccaggtcggctcccactaccacttcttcgaaaccaacgacgccttgaccttcgaccgagccgccagccgcggcatgcgcctgaacatcgccgccggcaccgcggtgcgcttcgaaccgggccagacccgggaagtggaactggtggaactggccggcaagcgccgggtattcggcttcgccgggcggatcatgggcgacctctga

SEQ ID NO: 50293 - protein, 101 aa, Pseudomonas fluorescens
MIPGQYQIQPGEIELNAGRRTLRLNVSNSGDRPIQVGSHYHFFETNDALTFDRAASRGMRLNIAAGTAVRFEPGQTREVELVELAGKRRVFGFAGRIMGDL

SEQ ID NO: 50294 - DNA, 306 bp, Pseudomonas fluorescens
  CDS (1)..(306): transl_table=11
atgattcccggcgaataccagatccagcccggcgacatcgaactcaacgtcggtcgtcgcaccatcaccctgaaggtggcgaacagcggcgaccggccgattcaggtcggctcgcactaccattttttcgagaccaacgacgccctgaccttcgaccgcgccgccagccgtggcatgcgcctgaacattccggcgagcaccgcggtgcgcttcgagccgggccagagccgcgaggtagaactggtggattacgccgggcaccggcgggtgttcgggtttgccgggcgggtcatgggtgacctctga

SEQ ID NO: 50295 - protein, 101 aa, Pseudomonas fluorescens
MIPGEYQIQPGDIELNVGRRTITLKVANSGDRPIQVGSHYHFFETNDALTFDRAASRGMRLNIPASTAVRFEPGQSREVELVDYAGHRRVFGFAGRVMGDL

SEQ ID NO: 50296 - DNA, 318 bp, Pseudomonas putida
  CDS (1)..(318): transl_table=11
atgatcccaggtgaaatccaggtcgccgcgggcgacatcgagttgaacagtggccgggaaacggtcagcgtcagtgtggccaaccatggcgaccggccggtgcaggtcggctcgcactaccacttctatgaagtcaacgacgcgctggtgttcgaccgggcgcccaccctgggctttcgcctggacatcccggccggcactgccgtgcgcttcgagccgggtcaggcgcgtaccgtgcaactggtggcttacgccggcaagcgtgaggtctatggttttcagggcaaggtgatgggcgcgctggagggcagggcatga

SEQ ID NO: 50297 - protein, 105 aa, Pseudomonas putida
MIPGEIQVAAGDIELNSGRETVSVSVANHGDRPVQVGSHYHFYEVNDALVFDRAPTLGFRLDIPAGTAVRFEPGQARTVQLVAYAGKREVYGFQGKVMGALEGRA

SEQ ID NO: 50298 - DNA, 306 bp, Ralstonia eutropha
  CDS (1)..(306): transl_table=11
atgattcccggtgaactgatggcagcggacggcgagatcgaactcaatgccggccgtcacacggcgagcgtaacagtagccaacacgggcgaccgcccgatccaggtgggctcgcattttcacttctacgaaaccaacgccgcactgtcgttcgatcgcgaggccacccgaggttttcgcctcaatatcgccgcggggactgcagtgcggtttgaaccgggccagacgcgtaccgtggaactcgtcgcgctcgatggtgaccgcatcgtctacggcttcaacggcaagatcatgggagcgctgtga

SEQ ID NO: 50299 - protein, 101 aa, Ralstonia eutropha
MIPGELMAADGEIELNAGRHTASVTVANTGDRPIQVGSHFHFYETNAALSFDREATRGFRLNIAAGTAVRFEPGQTRTVELVALDGDRIVYGFNGKIMGAL

SEQ ID NO: 50300 - DNA, 306 bp, Ralstonia solanacearum
  CDS (1)..(306): transl_table=11
atgatccccggcgaactcctgccgcaggacggcgatctcgaactcaacgcgggccggcccacgctgacggtgacggtggccaacaccggcgatcgtcccgtgcagatcggctcgcactaccacttccacgaagtcaacgacgcgctgcgcttcgaccgcgaggccacgcgcggctaccggctcaacatcgccgccggcaccgccgtgcgcttcgagccggggcaggagcgcaccgtggaactggtggcgctggccggggaccgcgtggtctacggctttgccggccgcgtgatgggcaagctctga

SEQ ID NO: 50301 - protein, 101 aa, Ralstonia solanacearum
MIPGELLPQDGDLELNAGRPTLTVTVANTGDRPVQIGSHYHFHEVNDALRFDREATRGYRLNIAAGTAVRFEPGQERTVELVALAGDRVVYGFAGRVMGKL

SEQ ID NO: 50302 - DNA, 306 bp, Rhizobium loti
  CDS (1)..(306): transl_table=11
atgatccccggcgaaatcatccccgtccaaggcgacatcgagctcaacaagggcctgccgaccgtcaccctgaaagtcgccaacagcggcgaccggccgatccaggtcggcagccactaccatttcttcgaaaccaatgagggactgaagttcgaccgcgaacagacccgcggcatgcgcctcgacatcgccgccggcaccgccatgcgcttcgagccgggacaggaacgcgacgtcacgctggtgccgctcggcggcaagcgcgaggtctacggattccagcagaaggtgatgggcaagctgtga

SEQ ID NO: 50303 - protein, 101 aa, Rhizobium loti
MIPGEIIPVQGDIELNKGLPTVTLKVANSGDRPIQVGSHYHFFETNEGLKFDREQTRGMRLDIAAGTAMRFEPGQERDVTLVPLGGKREVYGFQQKVMGKL

SEQ ID NO: 50304 - DNA, 306 bp, Rhizobium meliloti
  CDS (1)..(306): transl_table=11
atgattccaggtgagattatcgccgccgccggtgagatcgagttgaatgcgggcctcgaaaccgtcagcatcgaggttgccaactcgggcgaccgaccggtgcaggtcggtagccattatcatttcgccgagaccaatccgggcctgatcttcgaccgtgacgccgcgcgcggcaagcggctcgacattcctgcgggtacggccgtccgcttcgagccgggacagacacggcaggtgacgctcatcccgctttcgggaaaacgcgaggttttcggcttccgccagcaggtcatggggaagctatga

SEQ ID NO: 50305 - protein, 101 aa, Rhizobium meliloti
MIPGEIIAAAGEIELNAGLETVSIEVANSGDRPVQVGSHYHFAETNPGLIFDRDAARGKRLDIPAGTAVRFEPGQTRQVTLIPLSGKREVFGFRQQVMGKL

SEQ ID NO: 50306 - DNA, 306 bp, Rhodopseudomonas palustris
  CDS (1)..(306): transl_table=11
atgatccctggtgaactgtttatcgaagacggcgagatcgagctcaacgccggccgcaagacggtgacgctgacggtgtcgaacaccggcgatcggccgatccaggtcgggtcgcactatcatttcttcgaaacaaacccggcgctaaaattcgatcgcgacaaggcccgcgggatgcggctcgacatcgcggccggcactgcggtgcgcttcgagcccggccagagccgcgacgtgcaactggtcgaactcgccggcaagcgcaccatctacggcttccgcggcgacgtgatgggcaagctgtaa

SEQ ID NO: 50307 - protein, 101 aa, Rhodopseudomonas palustris
MIPGELFIEDGEIELNAGRKTVTLTVSNTGDRPIQVGSHYHFFETNPALKFDRDKARGMRLDIAAGTAVRFEPGQSRDVQLVELAGKRTIYGFRGDVMGKL

SEQ ID NO: 50308 - DNA, 306 bp, Rhodobacter sphaeroides
  CDS (1)..(306): transl_table=11
atgatccccggagaactctttcccgccgagggcgagatcctgttgaacgcggaacgggcgcagatcacgctcgttgtctccaatgccggcgaccggccggtgcaggtaggctcgcactaccatttcgcggagacgaaccccgcactcgagttcgatcgtgaggcggcgcgcgggatgcgtctcgacattcccgccggaaccgccgtgcgattcgagccgggtcagactcgcgaagtgagacttgtgtcctatgccggctcccgcgaagtctatggcttcaacggccggatcatgggcaagctgtag

SEQ ID NO: 50309 - protein, 101 aa, Rhodobacter sphaeroides
MIPGELFPAEGEILLNAERAQITLVVSNAGDRPVQVGSHYHFAETNPALEFDREAARGMRLDIPAGTAVRFEPGQTREVRLVSYAGSREVYGFNGRIMGKL

SEQ ID NO: 50310 - DNA, 306 bp, Saccharophagus degradans
  CDS (1)..(306): transl_table=11
atgaaaccaggcgaatacgatattcaacccggcgaaataatattaaacgaaggcagagcaaggctcacaataaccgtagaaaacagtggcgaccgtcctattcaagttggctcccattatcatttttacgaaactaacccagcacttgttttcgaccgagaaaaaacacgcggctatcgtttaaacattgctgccggtaccgcagtgcggtttgagccgggccaagatcgcgaagtagagttagttgaagtttcaggtaacaaaattatttacggtttccgcggcgaaataatgggagagctataa

SEQ ID NO: 50311 - protein, 101 aa, Saccharophagus degradans
MKPGEYDIQPGEIILNEGRARLTITVENSGDRPIQVGSHYHFYETNPALVFDREKTRGYRLNIAAGTAVRFEPGQDREVELVEVSGNKIIYGFRGEIMGEL

SEQ ID NO: 50312 - DNA, 306 bp, Silicibacter pomeroyi
  CDS (1)..(306): transl_table=11
atgatccccggcgagttgttcccggcggagggtgagctgatcctcaaccaaggtcgcgcggtcacacggttgatggtggccaataccggggaccgaccggtgcaggttggatcacactatcattttgccgagaccaaccccgccctggaattcgaccggggtgcggcgcgcggcatgcggctggacatcgccgcgggaacggcggtccggttcgagccgggacagcggcgcgaggtcgtattgatcccgattggcggggcgcggcggatttacggtttcaatcaacaggtgatgggagagctctga

SEQ ID NO: 50313 - protein, 101 aa, Silicibacter pomeroyi
MIPGELFPAEGELILNQGRAVTRLMVANTGDRPVQVGSHYHFAETNPALEFDRGAARGMRLDIAAGTAVRFEPGQRREVVLIPIGGARRIYGFNQQVMGEL

SEQ ID NO: 50314 - DNA, 411 bp, Staphylococcus aureus
  CDS (1)..(411): transl_table=11
atgataccaggagaaattattacaaaaagtacagaggttgaaattaataaccatcatcctgaaacagttatcgaagttgaaaatacaggagatcgaccaattcaagtgggctcacattttcatttttatgaagcaaatgcagcattagatttcgaacgtgaaatggcatatggaaaacatttagatattccagctggagcagctgttcgatttgaacctggggataaaaaagaagttcaattagttgaatatgctggcaaacgtaaaatttttggttttcgtggtatggtcaatggtcctatcgatgagtcacgtgtctatcgcccaactgatgaaaatgatgcatatgcaggtgtattcggagataacggtgctgaaaacgtgaataaaaaaggaggaaaaagatcatga

SEQ ID NO: 50315 - protein, 136 aa, Staphylococcus aureus
MIPGEIITKSTEVEINNHHPETVIEVENTGDRPIQVGSHFHFYEANAALDFEREMAYGKHLDIPAGAAVRFEPGDKKEVQLVEYAGKRKIFGFRGMVNGPIDESRVYRPTDENDAYAGVFGDNGAENVNKKGGKRS

SEQ ID NO: 50316 - DNA, 411 bp, Staphylococcus aureus
  CDS (1)..(411): transl_table=11
atgataccaggagaaattattacaaaaagtacagaggttgaaattaataaccatcatcctgaaacagttatcgaagttgaaaatacaggagatcgaccaattcaagtgggctcacattttcatttttatgaagcaaatgcagcattagatttcgaacgtgaaatggcatatggaaaacatttagatattccagctggagcagctgttcgatttgaacctggggataaaaaagaagttcaattagttgaatatgctggcaaacgtaaaatttttggttttcgtggtatggtcaatggtcctatcgatgagtcacgtgtctatcgcccaactgatgaaaatgatgaatatgcaggcgtattcggagataacggtactgaaaacgtgaataaaaaaggaggaaaaagatcatga

SEQ ID NO: 50317 - protein, 136 aa, Staphylococcus aureus
MIPGEIITKSTEVEINNHHPETVIEVENTGDRPIQVGSHFHFYEANAALDFEREMAYGKHLDIPAGAAVRFEPGDKKEVQLVEYAGKRKIFGFRGMVNGPIDESRVYRPTDENDEYAGVFGDNGTENVNKKGGKRS

SEQ ID NO: 50318 - DNA, 402 bp, Staphylococcus epidermidis
  CDS (1)..(402): transl_table=11
atgattcctggtgaaattattgttaaaaatactgaaatagaagtcaataaacatcatcccgaaacggtgattgaagtaaaaaatacaggcgatagacctatacaagtaggttcacatttccactttttcgaagcaaataaagcattagaatttgatcgtgagaaagcatatggtaaacatttggatattcctgcaggagctgcagtgagatttgaacctggagatgaaaaaaaagtacaacttgtcgaatattctggacgacgtaaaatttatggattccgtggtttagtcgatggcgatattgacgaagaacgcgtattccgtccaaatgattcaaatcaaaacgccgccgttaaaaacgatgcaggcgaagacaatgcgaataaaaaaggtggtaaataa

SEQ ID NO: 50319 - protein, 133 aa, Staphylococcus epidermidis
MIPGEIIVKNTEIEVNKHHPETVIEVKNTGDRPIQVGSHFHFFEANKALEFDREKAYGKHLDIPAGAAVRFEPGDEKKVQLVEYSGRRKIYGFRGLVDGDIDEERVFRPNDSNQNAAVKNDAGEDNANKKGGK

SEQ ID NO: 50320 - DNA, 414 bp, Staphylococcus xylosus
  CDS (1)..(414): transl_table=11
atgaaacctggcgaaattatagttaaacgtacagaaattgaagttaatcgtggacacaacgctacgatactcgatgtaaaaaacacaggagatcgccctattcaagtaggttctcattatcatttttttgaagcgaatcccgccttacaatttgaacgagaaaaagcttatgggaaacgtttagacatccctgctggtgccgcagtgcgttttgaacctggtgacgaaaaagaagttcagctcgttgaatatagcggtaaaagaagaatttttggtttccatggtgaagtgaatggacctatcgacgaggcgcgtgtttataaggctgaagatgacgacagcgctacagaaattatagctgaagaaaataaagtcagcgaaaatgctaataaagaaagtgggtataacagatga

SEQ ID NO: 50321 - protein, 137 aa, Staphylococcus xylosus
MKPGEIIVKRTEIEVNRGHNATILDVKNTGDRPIQVGSHYHFFEANPALQFEREKAYGKRLDIPAGAAVRFEPGDEKEVQLVEYSGKRRIFGFHGEVNGPIDEARVYKAEDDDSATEIIAEENKVSENANKESGYNR

SEQ ID NO: 50322 - DNA, 312 bp, Streptomyces avermitilis
  CDS (1)..(312): transl_table=11
atgattcccggagagatcctcttcgccgacggacccgtcgcctacaacgagggccgcgaggtcacccggctgaccgtcctcaacgccgccgaccggcccgtccaggtcggctcccactaccacttcgccgaggccaaccccggtctggacttcgaccgcgccgccgcccgcggcaagcggctcaacgtcgccgccggcaccgccgtgcgcttcgaacccggaatccccgtcgacgtcgaactcgttccgctcgccggcgcccgcgtggtgcccgggctgcgcggggagaccggaggtgccctcgatgcctga

SEQ ID NO: 50323 - protein, 103 aa, Streptomyces avermitilis
MIPGEILFADGPVAYNEGREVTRLTVLNAADRPVQVGSHYHFAEANPGLDFDRAAARGKRLNVAAGTAVRFEPGIPVDVELVPLAGARVVPGLRGETGGALDA

SEQ ID NO: 50324 - DNA, 312 bp, Streptococcus salivarius
  CDS (1)..(312): transl_table=11
atgattccaggtgaataccatgtggcgagtgagccaattgattataacggtggttacgaagccattagtcttgaagtgaaaaatgtgggtgaccgtgctgctcaagtgggctctcactaccatttttatgaagcaaacgaatctggtcttcagtttgatcgtgaaaaggcgcgaggcaaacgtctagatattccagcaggtacagccattcgttttgagccaggtgaaacgaaaacagtacaacttattgactttggagggaaacgtcgtatttttggtttcaataacaaggtcaatggtttcttagactag

SEQ ID NO: 50325 - protein, 103 aa, Streptococcus salivarius
MIPGEYHVASEPIDYNGGYEAISLEVKNVGDRAAQVGSHYHFYEANESGLQFDREKARGKRLDIPAGTAIRFEPGETKTVQLIDFGGKRRIFGFNNKVNGFLD

SEQ ID NO: 50326 - DNA, 2845 bp, Cryptococcus neoformans
  CDS (222)..(2723)
atgagacacgccgtcacttggattgggaggacgttactacggatggaactgaatgggaaactaaataagctcgctgattggattggcgggattggctcgttccgtgcatcataagccccacaaaggcacgcagctccccttcccatctcgcttttgattcctcgctcctatttcttttttcttttctcttttgccttacttcctcttcactctccaagaacatgcatctccttccaagagaaacggacaaactcattgtcaccaccttgggcacccttgctcaacgtcgccttgcccgaggccttattcttaaccgtgctgagaccattgctctcatctcctcccagttgcaagaattcattcgagatggacgtcattctgttgcagagctcatggatttgggcaagaaaatgctaggcaggcgacatgtcaggaagggcgttccagaatcaattcacactattcaggtggaaggcaccttccccgacggtgtatttttggtcacagttgatgatcctatctcctcagatgatggcgacttgaacaacgccttttacggttctttcctgccaatcccgtcggcagacgtcttccctgctgcgcccgagccagccgataccctcttaggagcccttatttgtcgtaaggagccaattaagatcaatgcttcccgacgacgcttcaagcttgaagtcaagaatgctggagacaggcctattcaagttggctcccactaccatttcctcgaaaccaacccggccctcattttcgacaggctcttgtcctatggctaccatttggacatccccgccggtacggcggtcaggtttgagccaggagagaagaagactgtaacaatggtggaattcggcggaaagaagatcttccacggtggaagtggattggcaagcggatctttcgacgagaatttaagggagactaaagtcaaggagatggttgaaaaaggtggatttggtcataaggatcaagaaaaggtagaagaggggccaacaactgagatgaacagagaagtgtacgcttccatgttcggaccaacaactggcgacaagatcaagctcgctgacatggatctgtggatcgaggtcgaaaaagattacactgtctacggcgaggaatgcaaattcggcggaggcaaggtccttcgagatggcggaggtcaagcatctggtaggcatgaacatgaggtccttgacctcgttattaccaatgctcttatcgttgactggaatggcatctacaaggccgatattggtgtaaaaaatggcattattgttggtattggtaaagctggtaaccccgatatgatggatggagtcacagatggaatgattgtggggtcaagcactgaagttatcgctggcgaaaagttgatcatcactgcgggagctctcgacgtccacgttcattacatttgccctcaactcatgacggaggccttggcatccggtatcaccactgttgtcggaggtggtacaggtcctgcagacggctccaacgccactacttgcacgtcttcgtccttctacatgcaaaacatgatcaaagcaaccgacactgttcctctcaactttggtttcaccggaaagggcaacgattctggcactaatgctttgagggacgttatcgaggctggagcttgtggattgaaggtgcatgaagattggggcgcgacgcccgaagttattgacagggctctgagcattgccgatgagtacgacgtacaggtcaaccttcacagtgatactctcaacgaaagtggatacgtcgagagtaccttggccgccatcaaagggaggactattcacagttaccacactgaaggagctggtggcggacatgctccagacatcatcgttgtctgtgaatatgaaaacgtcttgcctagttccaccaacccaactaggccttatgctgttaacactcttgatgagcatcttgacatgcttatggtctgtcaccacctcgataagtctatcccggaggacattgcctttgccgactctcgtatccgttctgaaaccgttgcagccgaagacgttttacaggacacaggcgcgatttccatgatctcatctgactgtcaagctatgggtcgtatcggtgaagtcatcactcgtacatggcgtacggctgcgaagatgaagcaattccgtggtcctcttgagggcgatgaacccacgagagacaacaatagggtgaaacggtatgttgccaagtacactattaaccccgccattacccacggtatgtcgcacctcatcggtcaagttgccgtgggctgtctggcagatctggtcttctggacggcagagtcctttggtgctagaccggagatgatcctcaagggtggtgtcattgcttgggctgcaatgggcgatgcgaacgcttcgatccccactgtgcagcccgtcattggcaggcccatgtggggctctcagcctgaggccgctgcactcaattcaattgtttgggtcagccaggcatctcttgacaaggatctcgtgaagagattcaacatcaagaagagggcggaggctgtcaagaactgtcgtgcaattggaaagaaggatatgaagtggaatgacagtatgccgaagatgactgtcgatccggagacctacgacgttcacgctgacggcgtcctttgcgacgtcccaccggcagacaaactcccactgaccaagagatacttcgtttactaataagcatcagtataatttccacgctgttcatgaatcgtacatatatttaataaatctctagttatcctccaatagggtgaattacaaagataaatcgtgaaattgtacacatactcaagtga

SEQ ID NO: 50327 - protein, 833 aa, Cryptococcus neoformans
MHLLPRETDKLIVTTLGTLAQRRLARGLILNRAETIALISSQLQEFIRDGRHSVAELMDLGKKMLGRRHVRKGVPESIHTIQVEGTFPDGVFLVTVDDPISSDDGDLNNAFYGSFLPIPSADVFPAAPEPADTLLGALICRKEPIKINASRRRFKLEVKNAGDRPIQVGSHYHFLETNPALIFDRLLSYGYHLDIPAGTAVRFEPGEKKTVTMVEFGGKKIFHGGSGLASGSFDENLRETKVKEMVEKGGFGHKDQEKVEEGPTTEMNREVYASMFGPTTGDKIKLADMDLWIEVEKDYTVYGEECKFGGGKVLRDGGGQASGRHEHEVLDLVITNALIVDWNGIYKADIGVKNGIIVGIGKAGNPDMMDGVTDGMIVGSSTEVIAGEKLIITAGALDVHVHYICPQLMTEALASGITTVVGGGTGPADGSNATTCTSSSFYMQNMIKATDTVPLNFGFTGKGNDSGTNALRDVIEAGACGLKVHEDWGATPEVIDRALSIADEYDVQVNLHSDTLNESGYVESTLAAIKGRTIHSYHTEGAGGGHAPDIIVVCEYENVLPSSTNPTRPYAVNTLDEHLDMLMVCHHLDKSIPEDIAFADSRIRSETVAAEDVLQDTGAISMISSDCQAMGRIGEVITRTWRTAAKMKQFRGPLEGDEPTRDNNRVKRYVAKYTINPAITHGMSHLIGQVAVGCLADLVFWTAESFGARPEMILKGGVIAWAAMGDANASIPTVQPVIGRPMWGSQPEAAALNSIVWVSQASLDKDLVKRFNIKKRAEAVKNCRAIGKKDMKWNDSMPKMTVDPETYDVHADGVLCDVPPADKLPLTKRYFVY

SEQ ID NO: 50328 - DNA, 2508 bp, Schizosaccharomyces pombe
  CDS (1)..(2508)
atgcaacccagagagctacacaaattaacgcttcaccagctgggatctttagcccaaaaaaggctgtgtagaggggtaaagcttaacaagttagaggctacttcacttattgcatctcaaattcaagaatatgttcgcgacggtaatcattccgtagcagatttgatgagtcttggtaaagatatgctgggtaaacgccatgttcagcccaatgtcgttcatttgttacatgaaattatgattgaagctactttccctgatggaacctatctaattaccattcatgatcccatttgcactacagatggtaatctcgaacatgctttatatggaagcttcctgcccacgccaagccaagaactgttccctctggaagaggaaaagttatatgctccggaaaatagccctggttttgttgaagtcttggagggcgagattgaactattgcctaatttacctcgtactcccatcgaggtacgaaacatgggtgacaggccaattcaagttggatcacactatcattttattgaaactaatgaaaaactatgcttcgatcgctcaaaggcttatggaaagcgcttggacattccgtcaggtactgctattcgatttgaacctggcgtaatgaaaattgtcaatttaatccctatcggtggtgcaaaactaattcaaggaggtaattcactttcgaagggtgtcttcgatgattctaggactcgggaaattgttgacaatttgatgaaacagggattcatgcatcaacctgaatctccgttgaatatgccattacaatctgcacgcccttttgttgttcctcgtaaattatacgctgtaatgtatggtccaacaacgaatgataaaattcgtctgggagatacaaatttgattgtgcgcgtggaaaaggactttactgaatatggaaatgaatctgttttcggcggcggaaaggttatacgtgatggtacgggacagtctagctcaaaatcaatggacgaatgcttggacactgtaattacaaatgctgtaatcattgatcataccggtatctacaaggctgacattggcatcaaaaacggatatatcgtaggtataggtaaagcaggaaacccggatacaatggataacattggagaaaacatggtcattggatcttctacagatgttatatcagctgagaataaaattgttacttatggtggtatggacagccacgttcatttcatctgtcctcaacaaattgaagaggcattggcttccggtataactactatgtatggtggaggaactggccctagtacgggaactaatgctactacctgcaccccaaataaagacttaatccgttccatgcttcgttctactgattcttatcccatgaacattggtctcaccggaaaaggaaatgatagcggttcaagttctttgaaggagcaaatagaagcaggctgcagtggacttaagcttcacgaagattggggatctactcccgcagcaattgacagttgtttgtctgtttgtgatgagtatgacgttcagtgcctaattcataccgacaccctcaatgaatcctcttttgtagaaggtacatttaaagcttttaaaaataggaccattcacacgtatcacgttgaaggagccggtggtgggcatgcccccgatattatttctttagtccaaaatccaaatattcttccctctagcaccaatcccacacgaccatttactacaaatacgcttgatgaggaactggacatgttaatggtatgccatcatctttctaggaatgttcctgaagacgttgcatttgcagaatcccgtattcgtgctgaaacaattgctgctgaagatattttacaggatttgggagctattagtatgattagttcagactctcaagccatgggtcgttgtggtgaagtaatttcaagaacttggaaaaccgcccataaaaataagctacaacgaggagcacttcctgaggacgagggttcaggtgttgataatttccgtgtgaaacgttatgtatccaaatacactataaaccctgcaattactcatggaatttctcatattgttggttctgtggagataggcaagtttgctgaccttgtcttatgggactttgctgactttggggcaagacccagtatggtgctgaaaggaggaatgattgcattggcctctatgggtgatccaaatggatcgattccaacggtttctcccctcatgtcctggcaaatgtttggtgcacatgaccccgagaggagcattgcatttgtttccaaggcctctataacatccggtgttattgaaagctatggacttcataagagagttgaagccgtaaaatctacgagaaacattgggaagaaagacatggtttacaattcatatatgccaaaaatgactgttgatccagaagcttacacagttactgcagatggtaaagttatggaatgtgagcctgtagacaaacttccactttcccagtcttattttatcttttaa

SEQ ID NO: 50329 - protein, 835 aa, Schizosaccharomyces pombe
MQPRELHKLTLHQLGSLAQKRLCRGVKLNKLEATSLIASQIQEYVRDGNHSVADLMSLGKDMLGKRHVQPNVVHLLHEIMIEATFPDGTYLITIHDPICTTDGNLEHALYGSFLPTPSQELFPLEEEKLYAPENSPGFVEVLEGEIELLPNLPRTPIEVRNMGDRPIQVGSHYHFIETNEKLCFDRSKAYGKRLDIPSGTAIRFEPGVMKIVNLIPIGGAKLIQGGNSLSKGVFDDSRTREIVDNLMKQGFMHQPESPLNMPLQSARPFVVPRKLYAVMYGPTTNDKIRLGDTNLIVRVEKDFTEYGNESVFGGGKVIRDGTGQSSSKSMDECLDTVITNAVIIDHTGIYKADIGIKNGYIVGIGKAGNPDTMDNIGENMVIGSSTDVISAENKIVTYGGMDSHVHFICPQQIEEALASGITTMYGGGTGPSTGTNATTCTPNKDLIRSMLRSTDSYPMNIGLTGKGNDSGSSSLKEQIEAGCSGLKLHEDWGSTPAAIDSCLSVCDEYDVQCLIHTDTLNESSFVEGTFKAFKNRTIHTYHVEGAGGGHAPDIISLVQNPNILPSSTNPTRPFTTNTLDEELDMLMVCHHLSRNVPEDVAFAESRIRAETIAAEDILQDLGAISMISSDSQAMGRCGEVISRTWKTAHKNKLQRGALPEDEGSGVDNFRVKRYVSKYTINPAITHGISHIVGSVEIGKFADLVLWDFADFGARPSMVLKGGMIALASMGDPNGSIPTVSPLMSWQMFGAHDPERSIAFVSKASITSGVIESYGLHKRVEAVKSTRNIGKKDMVYNSYMPKMTVDPEAYTVTADGKVMECEPVDKLPLSQSYFIF

SEQ ID NO: 50330 - DNA, 2514 bp, Glycine max
  CDS (1)..(2514)
atgaaactgagtccaagggagatcgagaaactagacctgcataatgcaggctaccttgcacagaaacgccttgctcgtggtttaaggctcaattatgttgaaactgtggctctcatagcaacacagattttggaatttgttcgtgatggtgaaaagactgttgcacagctaatgtgcattgggagagaacttctgggaaggaaacaagttcttccagctgttcctcatcttgttgaaagtgttcaggttgaagccacctttcgagatggtactaagttagtcaccattcatgacctatttgcttgcgagaatggaaaccttgaactagcattatttggttcttttcttccagtaccttcacttgacaagtttacagagaacgaagaagatcatagaactccaggtgaaatcatatgtagaagtgaaaatctgattcttaaccccagaaggaatgcaataattctcagagttgtcaacaagggagacagaccaattcaggttggcagccactatcattttattgaagtaaatccttatttaacctttgatcgaaggaaagcatatggcatgcgcctcaatatagctgctgggaatgccacacgctttgagccaggggaatgtaaaagcgttgtgcttgtaagcattggaggtaacaaagtcatcagaggaggtaataacattgccgatggtccagttaatgattctaattgcagagcagccatgaaagctgtggtcacaaggggatttggacatgtggaagaggaaaatgctagggaaggtgttactggagaagactattcattaactacagtaatttctcgagaggaatatgctcacaagtatggccctacaactggtgacaaaatccgtcttggtgatactgacttgtttgctgaaattgaaaaagattttgctgtctatggtgatgaatgtgtttttggaggtgggaaagtcataagagacggaatgggtcaatcaagtggccatccacctgagggctccttggatactgttataacaaatgctgtgatcattgattatactggaattatcaaagcagatatcggtattaaagatggactgatcatctcaacaggaaaagcaggaaatccagacattatgaatgatgtatttcctaatatgataattggggctaataccgaagttattgctggagagggcttgattgtgacagctggggctatagattgtcatgtgcattttatatgtcctcaattagtatatgatgccgtaacaagtggtatcacaacattagtgggaggaggaacaggaccagctgatggaacacgtgctacaacttgtacaccagcaccaaatcagatgaaattgatgctacaatcaacagatgacatgcctttaaactttggtttcactggaaaagggaatagtgccaaacctgatgaactgcatgaaataatcagggctggagctatgggactgaagctgcatgaggactggggaactacaccggctgcaatagacagttgtttgacagttgcagaccaatatgatatccaggttaacatacatactgacaccttaaacgaatctggatttgttgaacatacaattgctgcatttaaaggaagaactattcatacttaccacagtgaaggagctggtggtggccatgctccagatatcataaaagtatgtggtgagaagaatgtcctaccctcatcaacaaatcccacacgtccttatacacataataccatagatgagcatctcgacatgttgatggtctgccatcatcttaataagaatattccagaagatgtagcttttgctgaatcaagaataagagctgaaacaattgctgctgaagatattttacatgacaagggggcaattagcattatatcatctgattcacaggctatgggtcgaattggagaggtgataagcagaacctggcaaactgctgataagatgaagtcacaaagaggaccactgcagcctggtgaagacaatgacaactttcggatcaagcgttatgttgcaaagtataccataaatccagctatagcgaatggtttgtcgcaatatgttggttcagttgaggcgggtaagttggctgatcttgtattatggaagccgtcattttttggagcaaaaccagaaatggtgatcaaaggtggtgaggttgcatatgctaacatgggtgacccaaatgcaagcatcccaacacctgaaccggtgattatgaggcctatgttcggagcatttggcaaggctggtagttcacactccattgcttttgtgaacaaggcagctttggacgaaagggtgaaagctccatatggacttaacaagaaggtggaagctgtgaagaatgtgaggaagctcaccaaacgagacatgaaactgaatgacactcttccacaaatcactgtggacccagaaacatacacagttacagcagatggagaggttctcacctgcaccgcagccaagactgttcctctttcccgaaattacttcctcttttaa

SEQ ID NO: 50331 - protein, 837 aa, Glycine max
MKLSPREIEKLDLHNAGYLAQKRLARGLRLNYVETVALIATQILEFVRDGEKTVAQLMCIGRELLGRKQVLPAVPHLVESVQVEATFRDGTKLVTIHDLFACENGNLELALFGSFLPVPSLDKFTENEEDHRTPGEIICRSENLILNPRRNAIILRVVNKGDRPIQVGSHYHFIEVNPYLTFDRRKAYGMRLNIAAGNATRFEPGECKSVVLVSIGGNKVIRGGNNIADGPVNDSNCRAAMKAVVTRGFGHVEEENAREGVTGEDYSLTTVISREEYAHKYGPTTGDKIRLGDTDLFAEIEKDFAVYGDECVFGGGKVIRDGMGQSSGHPPEGSLDTVITNAVIIDYTGIIKADIGIKDGLIISTGKAGNPDIMNDVFPNMIIGANTEVIAGEGLIVTAGAIDCHVHFICPQLVYDAVTSGITTLVGGGTGPADGTRATTCTPAPNQMKLMLQSTDDMPLNFGFTGKGNSAKPDELHEIIRAGAMGLKLHEDWGTTPAAIDSCLTVADQYDIQVNIHTDTLNESGFVEHTIAAFKGRTIHTYHSEGAGGGHAPDIIKVCGEKNVLPSSTNPTRPYTHNTIDEHLDMLMVCHHLNKNIPEDVAFAESRIRAETIAAEDILHDKGAISIISSDSQAMGRIGEVISRTWQTADKMKSQRGPLQPGEDNDNFRIKRYVAKYTINPAIANGLSQYVGSVEAGKLADLVLWKPSFFGAKPEMVIKGGEVAYANMGDPNASIPTPEPVIMRPMFGAFGKAGSSHSIAFVNKAALDERVKAPYGLNKKVEAVKNVRKLTKRDMKLNDTLPQITVDPETYTVTADGEVLTCTAAKTVPLSRNYFLF

SEQ ID NO: 50332 - DNA, 2520 bp, Glycine max
  CDS (1)..(2520)
atgaaactgagtccaagggaggtggagaaactaggccttcacaatgctggctaccttgctcagaaacgtcttgctcgtggtttaagactcaattatactgaagctgtggcactcattgccacgcagattatggaatttgctcgtgatggtgaaaagactgtggcacaactaatgtgcattgggaaacatctattggggaggagacaagttcttccagaggttcaacatctcttgaatgctgttcaggttgaagctacctttcctgatgggactaagctggtcacagttcatgatccaatttcctgtgagcatggagatctagggcaagcactatttggttcttttcttccagtaccttcacttgacaagtttgctgagaacaaagaagataatagaattccaggtgaaataatatatggagatggaagtctagttcttaaccctggaaagaatgcagtgattctcaaagttgtcagcaatggagaccggccaattcaggttgggagccactatcattttattgaagcaaatccctacttgacttttgatcgaaggaaagcatatggcatgcgcctcaatatagctgcaggaaatgccacacgctttgagccaggggaaagtaaaagcgttaagcttgtaagaattggaggtaacaaagtcatcagaggaggtaataacattgccgatggtcaagttaatgaaaccaatcgcagagaagcaatgaaagctgtgggcaaaaggggatttggacataaggaagaggaaaatgcaagggaaggtattactggagaacctgacaatccattaaccacaataattcctcgagaggaatatgctaacaagtacggcccaacaactggtgacaaaatccgtcttggtgacactgacttgtttgctaaaattgaaaaagattttgctctctatggtgatgaatgtgtttttggaggtgggaaagttttaagagatggaatgggtcagtcatgtggggatccacctgcaatctccttggatactgttataacaaatgctgtgataattgattatagtggaatcatcaaagcggatataggcattaaagatggtctcattgtttcaattggaaaagcaggaaatccagacatcatggatgatgtattttttaatatgatcattggggctaatactgaagttattgctggagaagggttgattgtaacagcaggggctatagattgtcacgtgcattatatatgccctcaattagtagatgaggccatatcaagcggcatcacaacattagtgggaggtggaaccggaccgactgctggaacacgtgccacaacttgtacaccagcaccatctcagatgaaactaatgctgcaatcaactgatgacctgcctctaaactttggtttcactggcaaaggaagtagttccaagcctgatgaactacatgacataatcaaggctggagcaatgggactgaagctgcatgaagaacggggaagtactcccgctgcaatagacagttgcttgactggtgctgatcaatacgatatccagattaacatacataccgacaccctaaatgaagctggatttgtcgaacatagcattgcagcatttaaaggaagaactattcatacttaccacagtgaaggtgcaggtggtggtcatgctccagatataatcaaagtatgtggtatgaaaaatgtcctgccctcatcaacaaacccaacacgccctttaacactcaatactatagatgagcatcttgacatgctgatggtctgccatcatctgaatagggaaattccagaagacttagcttttgcatgttcaaggataagagaaggaacaattgctgccgaagatattttgcatgatattggggcaattagcatcatatcttctgattctcaggctatgggtcgagttggagaggtgataagcagaacttggcaaactgccaataagatgaaggtacaacgaggaccactccaccctggtgaatacgacaatgacaacttccggatcaaacgatacattgcaaaatacactataaatccagctatagcgaatggtttttcacaatatgttggttcggtggaggtgggaaagttagctgatcttgtgatgtggaagccatctttttttggggcaaaaccagaaatggtgatcaaaggtggggtggttgcatgggctgatatgggtgacccaaatgcaagcatccccactcctgaaccggtgaagatgaggcctatgtttggaacactaggcaaggctggtggtgctttatccatagcttttgtgagcaaggcagctgtagaccagagagtacatgctctatacggactgaacaagagggtggaagcagtaggcaatgtgaggaagctcactaaactagacatgaaacttaatgactctcttccacaaatcactgtcgacccagataactacactgttacagcagatggccaagttctcaccagttttgcaaccacctttgttcccctttctcgaaattacttcctcttttaa

SEQ ID NO: 50333 - protein, 839 aa, Glycine max
MKLSPREVEKLGLHNAGYLAQKRLARGLRLNYTEAVALIATQIMEFARDGEKTVAQLMCIGKHLLGRRQVLPEVQHLLNAVQVEATFPDGTKLVTVHDPISCEHGDLGQALFGSFLPVPSLDKFAENKEDNRIPGEIIYGDGSLVLNPGKNAVILKVVSNGDRPIQVGSHYHFIEANPYLTFDRRKAYGMRLNIAAGNATRFEPGESKSVKLVRIGGNKVIRGGNNIADGQVNETNRREAMKAVGKRGFGHKEEENAREGITGEPDNPLTTIIPREEYANKYGPTTGDKIRLGDTDLFAKIEKDFALYGDECVFGGGKVLRDGMGQSCGDPPAISLDTVITNAVIIDYSGIIKADIGIKDGLIVSIGKAGNPDIMDDVFFNMIIGANTEVIAGEGLIVTAGAIDCHVHYICPQLVDEAISSGITTLVGGGTGPTAGTRATTCTPAPSQMKLMLQSTDDLPLNFGFTGKGSSSKPDELHDIIKAGAMGLKLHEERGSTPAAIDSCLTGADQYDIQINIHTDTLNEAGFVEHSIAAFKGRTIHTYHSEGAGGGHAPDIIKVCGMKNVLPSSTNPTRPLTLNTIDEHLDMLMVCHHLNREIPEDLAFACSRIREGTIAAEDILHDIGAISIISSDSQAMGRVGEVISRTWQTANKMKVQRGPLHPGEYDNDNFRIKRYIAKYTINPAIANGFSQYVGSVEVGKLADLVMWKPSFFGAKPEMVIKGGVVAWADMGDPNASIPTPEPVKMRPMFGTLGKAGGALSIAFVSKAAVDQRVHALYGLNKRVEAVGNVRKLTKLDMKLNDSLPQITVDPDNYTVTADGQVLTSFATTFVPLSRNYFLF

SEQ ID NO: 50334 - DNA, 20 bp, Artificial sequence
  primer
atggcaactatgattcctgg

SEQ ID NO: 50335 - DNA, 21 bp, Artificial sequence
  primer
ttactctagagggccgttcac

SEQ ID NO: 50336 - protein, 141 aa, Artificial sequence
  consensus sequence
  Variant (2)..(12): Xaa in position 2 to 12 is any amino acid
  Variant (13)..(48): Xaa in position 13 to 48 is any or no amino acid
  Variant (50)..(56): Xaa in position 50 to 56 is any amino acid
  Variant (57)..(65): Xaa in position 57 to 65 is any or no amino acid
  Variant (67)..(67): Xaa in position 67 is any amino acid
  Variant (69)..(69): Xaa in position 69 is any amino acid
  Variant (74)..(74): Xaa in position 74 is any amino acid
  Variant (80)..(80): Xaa in position 80 is any amino acid
  Variant (83)..(83): Xaa in position 83 is any amino acid
  Variant (85)..(85): Xaa in position 85 is any amino acid
  Variant (87)..(88): Xaa in position 87 to 88 is any amino acid
  Variant (89)..(89): Xaa in position 89 is any or no amino acid
  Variant (91)..(91): Xaa in position 91 is any amino acid
  Variant (95)..(98): Xaa in position 95 to 98 is any amino acid
  Variant (100)..(100): Xaa in position 100 is any amino acid
  Variant (103)..(103): Xaa in position 103 is any amino acid
  Variant (105)..(105): Xaa in position 105 is any amino acid
  Variant (110)..(110): Xaa in position 110 is any amino acid
  Variant (116)..(119): Xaa in position 116 to 119 is any amino acid
  Variant (121)..(121): Xaa in position 121 is any amino acid
  Variant (122)..(122): Xaa in position 122 is any or no amino acid
  Variant (124)..(127): Xaa in position 124 to 127 is any amino acid
  Variant (129)..(133): Xaa in position 129 to 133 is any amino acid
  Variant (135)..(140): Xaa in position 135 to 140 is any amino acid
GXXXXXXXXXXXXXXXXXXXXXXXXXXXXXXXXXXXXXXXXXXXXXXXNXXXXXXXXXXXXXXXXVXNXGDRPXQVGSHXHFXEXNXXXLXFDRXXXXGXRLXIXAGTAXRFEPGXXXXVXXLXXXXGXXXXXGXXXXXXG

SEQ ID NO: 50337 - protein, 33 aa, Artificial sequence
  protein pattern
  Variant (2)..(2): Xaa in position 2 is any amino acid
  Variant (6)..(7): Xaa in position 6 to 7 is any amino acid
  Variant (8)..(8): Xaa in position 8 is Ala, Ser or Thr
  Variant (9)..(9): Xaa in position 9 is any amino acid
  Variant (11)..(11): Xaa in position 11 is any amino acid
  Variant (12)..(12): Xaa in position 12 is His, Lys or Arg
  Variant (14)..(14): Xaa in position 14 is Asp, Asn or Ser
  Variant (15)..(15): Xaa in position 15 is Ile or Val
  Variant (16)..(16): Xaa in position 16 is Ala, Pro or Ser
  Variant (17)..(17): Xaa in position 17 is Ala or Ser
  Variant (18)..(18): Xaa in position 18 is Gly, Asn, Ser or Thr
  Variant (19)..(19): Xaa in position 19 is any amino acid
  Variant (20)..(20): Xaa in position 20 is Ala, Gly, Ser or Thr
  Variant (21)..(21): Xaa in position 21 is any amino acid
  Variant (27)..(30): Xaa in position 27 to 30 is any amino acid
  Variant (31)..(31): Xaa in position 31 is Ile or Val
  Variant (32)..(32): Xaa in position 32 is any amino acid
  Variant (33)..(33): Xaa in position 33 is Ile, Leu, Met or Val
LXFDRXXXXGXXLXXXXXXXXRFEPGXXXXXXX

SEQ ID NO: 50338 - protein, 21 aa, Artificial sequence
  protein pattern
  Variant (2)..(2): Xaa in position 2 is any amino acid
  Variant (3)..(3): Xaa in position 3 is Asn or Ser
  Variant (4)..(4): Xaa in position 4 is any amino acid
  Variant (5)..(5): Xaa in position 5 is Ala or Gly
  Variant (9)..(9): Xaa in position 9 is any amino acid
  Variant (11)..(11): Xaa in position 11 is Ile or Val
  Variant (15)..(15): Xaa in position 15 is Phe or Tyr
  Variant (18)..(18): Xaa in position 18 is any amino acid
  Variant (20)..(20): Xaa in position 20 is Ala, Thr or Val
VXXXXDRPXQXGSHXHFXEXN

SEQ ID NO: 50339 - DNA, 597 bp, Synechocystis sp.
  CDS (1)..(597): transl_table=11
atgaatttagctgaaggtgttcagtacatatccttcctaatcctggcttttttagtcattggggcggccctgggggtcgtactgctctctaatattgtttattctgccttcctattggggggagttttcctcagtatttccggtatttatattctgctcaatgcggattttgtggcggcggcccaagtgctagtttacgtgggggcagtcagtgtacttattctttttgccattatgttggtcaataaacgggaggatttttccaaaattcccggtcgttggctaagaaatgtttccactgctctggtatgtaccggcatctttgccctgttgagcaccatggtgttgatcaccccctggcagattaatgaaacggggccttttgtggaaaacaccctagtcaccattggcaaacacttttttagtgattaccttttgccctttgagttggcttccgttctgctattgatggccatggtgggggcaattattttggcccgtcgggacttaattcccgaattgtccgaggaaaacaaaaccgccacggccctgactttgccagagcgtccccgggagttaacctccgcttccaaataa

SEQ ID NO: 50340 - protein, 198 aa, Synechocystis sp.
MNLAEGVQYISFLILAFLVIGAALGVVLLSNIVYSAFLLGGVFLSISGIYILLNADFVAAAQVLVYVGAVSVLILFAIMLVNKREDFSKIPGRWLRNVSTALVCTGIFALLSTMVLITPWQINETGPFVENTLVTIGKHFFSDYLLPFELASVLLLMAMVGAIILARRDLIPELSEENKTATALTLPERPRELTSASK

SEQ ID NO: 50341 - DNA, 489 bp, Arbacia lixula
  CDS (1)..(489): transl_table=9
atgattatttatctttccttagtttgtttattggttggaagaactctggttttctacagtttatctccatactactcagcacttggtttggtagtagtttcaatttctggctgtatctctttaagtcttataggaggaagctttatagctttagtgttattgcttgtttatatgggaggaatgcttgtagtgtttgcttattctagtgcgatatctgcagagcgttttccctcggtaagaaatattagagaagttattgggttgtccgcgttcttttcctcctgggtattcctgtctttcgataatttaaatgaaactagaaaatgttcctcaaccatcataaggaacgaaggggttttggggagaagaatattttataaagatggaagagtcttagtagtattaggggtatttatattatttatagttcttgttggagctttaataatttctcggggggcagagaacaaaatagttcaggctatctaa

SEQ ID NO: 50342 - protein, 162 aa, Arbacia lixula
MIIYLSLVCLLVGSTLVFYSLSPYYSALGLVVVSISGCISLSLIGGSFIALVLLLVYMGGMLVVFAYSSAISAERFPSVSNISEVIGLSAFFSSWVFLSFDNLNETSNCSSTIISNEGVLGSSIFYNDGSVLVVLGVFILFIVLVGALIISRGAENNIVQAI

SEQ ID NO: 50343 - DNA, 618 bp, Beta vulgaris subsp. vulgaris
  CDS (1)..(618)
atgatactttctgttttgtcgagcccggctttggtctctggtttgatggttgtacgtgctaaaaatccggtacattccgttttgtttcccatcccagtctttcgcaacacttcaggtttacttcttttgttaggtctcgatttttccgctatgatcttcccagtagtttatataggagctatagccgtttcattcctattcgttgttatgatgttccatattcaaatagcggagattcacgaagaagtattgcgctatttaccagtgagtggtattattggactgatcttttggtgggaaatgttcttcattttagataatgaaaccattccattactaccaacccaaagaaatacgacctctctgagatatacggtttatgccggaaaggtacgaagttggactaatttggaaacattgggcaatttactttatacttactattttgtctggtttttggtttctagtcttattttattagtagccatgattggggctatagtactgactatgcataggactactaaggtgaaaagacaggatgtattccgacgaaatgctattgattctagaaggactataatgaagaggacgacagacccactcacgatctactaa

SEQ ID NO: 50344 - protein, 205 aa, Beta vulgaris subsp. vulgaris
MILSVLSSPALVSGLMVVRAKNPVHSVLFPIPVFRNTSGLLLLLGLDFSAMIFPVVYIGAIAVSFLFVVMMFHIQIAEIHEEVLRYLPVSGIIGLIFWWEMFFILDNETIPLLPTQRNTTSLRYTVYAGKVRSWTNLETLGNLLYTYYFVWFLVSSLILLVAMIGAIVLTMHRTTKVKRQDVFRRNAIDSRRTIMKRTTDPLTIY

SEQ ID NO: 50345 - DNA, 489 bp, Aquifex aeolicus VF5
  CDS (1)..(489): transl_table=11
gtggagtggttaatcttcttcatcttaggagcttggcttataatttctgccttggggacggttctggctaaaaatcccattcacgttatgctcttcttcctttcctccttactcgctatggcgggtcttttcctgagcctcggggcggaactcctcgcgggtcttcagctcataatctacgcggttgccatagtggtgttctacgtccttgccataaccacgataccttgggaaaagataaagcgctttgagggtgtttacaaaacggaaattctcactgcatcccctatactgcttgtgctcttcctcgttatgagttacatggttattaaggggaagtttgctgagccttcgggtgtagtaaaggacaacgtggaggctgtgggaaggaccttatttacttcttacctctttccctttgaggtagcttcggtaatacttctggttgcaatggtgggtgcaatccttcttgccagaaaagaagagtga

SEQ ID NO: 50346 - protein, 162 aa, Aquifex aeolicus VF5
MEWLIFFILGAWLIISALGTVLAKNPIHVMLFFLSSLLAMAGLFLSLGAELLAGLQLIIYAVAIVVFYVLAITTIPWEKIKRFEGVYKTEILTASPILLVLFLVMSYMVIKGKFAEPSGVVKDNVEAVGRTLFTSYLFPFEVASVILLVAMVGAILLARKEE

SEQ ID NO: 50347 - DNA, 549 bp, Helicobacter pylori J99
  CDS (1)..(549): transl_table=11
atgtttgaaaccattgccttttatttctttgcgatccttactttaagcatggcgttagtggtgatcacaaccacaaatatcctctatgccattaccgctctcgctagtagcatggtttttatttctgcttttttctttttactggacgctgagtttttgggcgtggtgcaaatcacggtgtatgtgggtgcggtcattgtgatgtatgcgtttggcatgatgtttttcaactccgctgcagaagtagttgaacgcaagcaaagccctaaaatcttgtgcgttctttcatttggcgtggcgctgttgctcaccttgattttaagcgctcctagcattggcgaaaacctttctaagcaagtcaattccaacgctattgatgcgcaaatccctaacattaaagcgattggttatgtgcttttcaccaattacctcattccctttgaagcggcggctttaatgcttttagtcgctatggttggaggcatcgctacagggattcaaaaaatccatgggaaaaatcacacgcaatttataaaggaatctctatga

SEQ ID NO: 50348 - protein, 182 aa, Helicobacter pylori J99
MFETIAFYFFAILTLSMALVVITTTNILYAITALASSMVFISAFFFLLDAEFLGVVQITVYVGAVIVMYAFGMMFFNSAAEVVERKQSPKILCVLSFGVALLLTLILSAPSIGENLSKQVNSNAIDAQIPNIKAIGYVLFTNYLIPFEAAALMLLVAMVGGIATGIQKIHGKNHTQFIKESL

SEQ ID NO: 50349 - DNA, 672 bp, Neisseria meningitidis MC58
  CDS (1)..(672): transl_table=11
atgactttccaactgattttattttatatttttgcagtgataattctttatggcgcgctcaaaaccgtcaccgctaaaaaccctgttcacgccgctttgcatctggtgctgaccttctgcgtgagcgcgatgctttggatgctgatgcaggctgagtttttgggcgtgacgctggtggtggtttacgtcggcgccgtgatggtgttgttcctgttcgtcgtgatgatgttgaacatcgacattgaagaaatgcgtgccggtttctggcggcacgcgcctgttgccggtgtggtcggcacattgttggcggttgcgctgatcctgattctggtcaacccgaaaaccgaccttgccgcatttggtctgatgaaagacattcctgccgattacaacaatatccgcgatttgggcagccgtatttataccgactatctgttgccgtttgaattggcggcggtattgctgttgttgggtatggtggcggcgattgcgctggttcaccgtaaaacggttaatccgaaacgcatggatcctgccgaccaagtcaaagtacgcgccgaccagggccgtatgcgtctggtgaaaatggaagcggtcaaaccgcaagtcgaatctgccgaagaaagcgaagtttcagacgacctcaagccgaaagaggagggcaaagcatga

SEQ ID NO: 50350 - protein, 223 aa, Neisseria meningitidis MC58
MTFQLILFYIFAVIILYGALKTVTAKNPVHAALHLVLTFCVSAMLWMLMQAEFLGVTLVVVYVGAVMVLFLFVVMMLNIDIEEMRAGFWRHAPVAGVVGTLLAVALILILVNPKTDLAAFGLMKDIPADYNNIRDLGSRIYTDYLLPFELAAVLLLLGMVAAIALVHRKTVNPKRMDPADQVKVRADQGRMRLVKMEAVKPQVESAEESEVSDDLKPKEEGKA

SEQ ID NO: 50351 - DNA, 519 bp, Campylobacter jejuni subsp. jejuni NCTC 11168
  CDS (1)..(519): transl_table=11
atgatagaaaatttggcttttgtattttttagtgtagtggttttaggcttttttggcattgcggttttaagtaaaaatatgctttattctctttctgctttagcgggtggaatggtatttttatcgggattttattttttacttgatgcagagtttttaggcgtgatacaaattattgtttatagtggagctgtacttggactttatagttttgcgatgatgttttttgatgcttctaaagaatttaaagaacaacttaaagctaaaaaaagtttttttactttggtggttttaagtacgattttacttttggccatgcttataggttttaaataccaaaatatcagcacggatttgcctttaaatgatcctgctttgtttgattttaataaacaactggctttagcgattttttcaaaatatcttttagcttttgagtttatagctattttgcttttgattgctttagtctgtgctatagtgcttactcataaagagctaacaaaggaaaaacaatga

SEQ ID NO: 50352 - protein, 172 aa, Campylobacter jejuni subsp. jejuni NCTC 11168
MIENLAFVFFSVVVLGFFGIAVLSKNMLYSLSALAGGMVFLSGFYFLLDAEFLGVIQIIVYSGAVLGLYSFAMMFFDASKEFKEQLKAKKSFFTLVVLSTILLLAMLIGFKYQNISTDLPLNDPALFDFNKQLALAIFSKYLLAFEFIAILLLIALVCAIVLTHKELTKEKQ

SEQ ID NO: 50353 - DNA, 672 bp, Neisseria meningitidis Z2491
  CDS (1)..(672): transl_table=11
atgactttccaactgattttattttatatttttgcagtgataattctttatggcgcgatcaaaaccgtcaccgctaaaaatcctgttcacgccgctttgcatctggtgttgaccttctgcgtgagcgcgatgctttggatgctgatgcaggctgagtttttgggcgtgacgctggtggtggtttacgtcggcgccgtgatggtgttgttcctgttcgtcgtgatgatgttgaacatcgacattgaagaaatgcgtgccggtttctggcggcacgcgcctgttgccggtgtggtcggcacattgttggcagttgccctgattctgattctggtcaatccgaaaaccgaccttgccgcatttgggctgatgaaagacattcccgccgattacaacaatatccgcgatttgggcagccgtatttataccgattatctgctgccgtttgaattggcggcggtattgctgctgttgggtatggtggccgcgattgcgctggttcaccgtaaaacggttaatccgaaacgtatggatcctgccgaccaagttaaagtacgcgccgaccaaggccgtatgcgcttggtgaaaatggaagccgtgaaaccgcaaaccgaatctgccgaagaaagcgaagtttcagacgacctcaagccgaaagaggagggcaaagcatga

SEQ ID NO: 50354 - protein, 223 aa, Neisseria meningitidis Z2491
MTFQLILFYIFAVIILYGAIKTVTAKNPVHAALHLVLTFCVSAMLWMLMQAEFLGVTLVVVYVGAVMVLFLFVVMMLNIDIEEMRAGFWRHAPVAGVVGTLLAVALILILVNPKTDLAAFGLMKDIPADYNNIRDLGSRIYTDYLLPFELAAVLLLLGMVAAIALVHRKTVNPKRMDPADQVKVRADQGRMRLVKMEAVKPQTESAEESEVSDDLKPKEEGKA

SEQ ID NO: 50355 - DNA, 618 bp, Deinococcus radiodurans R1
  CDS (1)..(618): transl_table=11
atgatgctggcctttctccttctcggcgccctcgccattgccgggggcatcctgaccgtcgcggcgaaaaacgccgtgcacgccgcgttggggctggtgggcaccctgatctgcgtggcggggctcttcgcctccatgaacgcctcgtttctggcggccacccaggtcatcgtgtacgccggggccatcatggtgctgtttctcttcgtcatcatgctgctcggggccagtcagccgattacggcgcgtgacccgctgcccttcgtggggccgctcggggcgattgctgcgctgctgctcgcgggcggtttcgtgacgctggcgctgacgtatcaggacccccgcccgcttgccgaaagtgtgcaggccctgcgcggcggcgcggcgggcgcggtgggcgagacgctgctcacccgcttcctgctgccgtttgaagcggtgagcattctgctgctcgtcgccatcgtcggctcggtgacgctggtgcagcgcccggtgccgcagcctgacggcgtgactgatgaaacgggcgccgaactgcccccggcgccgcgtgcgtggcgcgaagggcagagcgcccccgccctgaattccgaacccctcaaggagcgtgcctga

SEQ ID NO: 50356 - protein, 205 aa, Deinococcus radiodurans R1
MMLAFLLLGALAIAGGILTVAAKNAVHAALGLVGTLICVAGLFASMNASFLAATQVIVYAGAIMVLFLFVIMLLGASQPITARDPLPFVGPLGAIAALLLAGGFVTLALTYQDPRPLAESVQALRGGAAGAVGETLLTRFLLPFEAVSILLLVAIVGSVTLVQRPVPQPDGVTDETGAELPPAPRAWREGQSAPALNSEPLKERA

SEQ ID NO: 50357 - DNA, 789 bp, Mycobacterium tuberculosis CDC1551
  CDS (1)..(789): transl_table=11
atgaccgcggtgctggcttcagatgtcatcgtccgcacctccaccggggaagcggtgatgttctgggtgctcagtgcgttggcgctgctgggcgcggtcggggttgtgctggccgtcaacgccgtgtactcagcgatgtttctggcgatgaccatgatcatcctggcggtgttctacatggcccaggacgcgctgtttttgggtgtcgtccaggtggttgtctacaccggcgcggtgatgatgctgttcctgttcgtgctgatgctgatcggtgtggactccgcggaatcactgaaggagacgctgcgcgggcagcgggtcgccgcggtgctgaccggtgtcgggttcggcgttctcctgatcagcaccatcggccaggtggcgacccgaggttttgccggactaaccgtcgccaacgccaacggcaacgtcgaaggcttggccgcgctgattttttcccgttacctgtgggcgttcgagttgaccagtgcgctgttgattaccgccgccgtcggggcgatggtgctagcgcaccgggagcgtttcgagcgccgcaagacccagcgcgaactctcccaggaacgcttccgtcccggcgggcaccccaccccgctgcccaacccgggtgtctacgcgcgccacaacgcggtcgacgttgccgccctgctccccgacggttcctattccgaattgtcggtcccccggatgctgcgcacccgcggggccgacggcctgcaaacaccctcgcccggagccgtctccggctctttagaaggcggtgcatcatga

SEQ ID NO: 50358 - protein, 262 aa, Mycobacterium tuberculosis CDC1551
MTAVLASDVIVRTSTGEAVMFWVLSALALLGAVGVVLAVNAVYSAMFLAMTMIILAVFYMAQDALFLGVVQVVVYTGAVMMLFLFVLMLIGVDSAESLKETLRGQRVAAVLTGVGFGVLLISTIGQVATRGFAGLTVANANGNVEGLAALIFSRYLWAFELTSALLITAAVGAMVLAHRERFERRKTQRELSQERFRPGGHPTPLPNPGVYARHNAVDVAALLPDGSYSELSVPRMLRTRGADGLQTPSPGAVSGSLEGGAS

SEQ ID NO: 50359 - DNA, 618 bp, Caulobacter crescentus CB15
  CDS (1)..(618): transl_table=11
atgcccgtgcaggcgatcgcattttatctactggctttcgtgaccatagcggcgggtctcctcgtcgtgtcggcgcgcaacccggtgcactcggtgctcttcctgatcaccgccttcttctcggccgccggcctcttcgtcctgctgggcgcggagttcctggcgatgctgctggtcgtcgtctatgtcggcgcggtcgcggtgctgttcctgttcgtcgtcatgatgctggacgtggacttcgccgagcttcgccaaggcttcgtgcagtatctgccgttcggcggcttaatcgccctggtgatcgccatcgagatggtgatggtcgtcgcggccgtggccacgaacggcgccgccgccaagaaccccctgccgaacgcttcgccgggcggcgtgcccaacaccgaagcgatcggtcgcgtgctctacaccgactatgtcttcttcttccaactggcgggcctggtgctgctggtcgccatgatcggcgccatcgtcctgaccctgcgccacaagccgggcgtcaagcgccaggacatcggcaagcaggtcgcccgtacgcccaagaccggcatggagctggttcagatcaagccgggtgaggggatctccgaatga

SEQ ID NO: 50360 - protein, 205 aa, Caulobacter crescentus CB15
MPVQAIAFYLLAFVTIAAGLLVVSARNPVHSVLFLITAFFSAAGLFVLLGAEFLAMLLVVVYVGAVAVLFLFVVMMLDVDFAELRQGFVQYLPFGGLIALVIAIEMVMVVAAVATNGAAAKNPLPNASPGGVPNTEAIGRVLYTDYVFFFQLAGLVLLVAMIGAIVLTLRHKPGVKRQDIGKQVARTPKTGMELVQIKPGEGISE

SEQ ID NO: 50361 - DNA, 633 bp, Ralstonia solanacearum GMI1000
  CDS (1)..(633): transl_table=11
atggaaatcacgacgatcatcttctactgtttctcgctggtgctggtgctgtcggcgctgaaggtcatcaccgcgaagaacccggtgcacgcggcgctgttcctcgtgctgtcgttcttcacggcggcggcgatctggatgctgctgaaggcggagttcctcgccatcacgctggtgctggtctacgtgggcgcggtgatggtgctgttcctgttcgtggtgatgatgatcgatgtcgacatcgagcatctgcggcgcgatttctggacttacgtgccgatgggtgcgttcgtgggggctgtcatcatcatggaaatggccgtggtcctgaccaaggccttcatggggcgctcgcagccggtgcaggagttgcccaaggcgctgtcgggccccaacacccaggcgctcggcaagctgatctacaccgactacatctatgcgtttgaagtcgccggcgcggtgctgctgctggcgatcgtggccgccgtggcgctgaccgcccgccgccgcaaggacagcaaggcccagaacgtggccgaccagatccgcgtgcagcgcaaggaccgcgtccgcctggtctcgatgccggcggagaaggccgcgtccgcggccccggccgagaccaaccgctga

SEQ ID NO: 50362 - protein, 210 aa, Ralstonia solanacearum GMI1000
MEITTIIFYCFSLVLVLSALKVITAKNPVHAALFLVLSFFTAAAIWMLLKAEFLAITLVLVYVGAVMVLFLFVVMMIDVDIEHLRRDFWTYVPMGAFVGAVIIMEMAVVLTKAFMGRSQPVQELPKALSGPNTQALGKLIYTDYIYAFEVAGAVLLLAIVAAVALTARRRKDSKAQNVADQIRVQRKDRVRLVSMPAEKAASAAPAETNR

SEQ ID NO: 50363 - DNA, 615 bp, Agrobacterium tumefaciens str. C58
  CDS (1)..(615): transl_table=11
atgggtctgcacgctgtattcttttatatattcgctttcgtcgccgtggcgtctgcgttcatggtcattgcatcgaagaaccctgttcattcggtgctcttcctgattttgaccttcttcaacgcagccgcgctgttcctgctgacgggagccgagttcctcgccatgatcctgcttgtggtctatgtcggcgctgtcgcggtgcttttcctcttcgtcgtcatgatgctggatgtggactttgccgagcttcgttccggcgtgttgcaatatgccccgatcggcgcgctgatcggcgtcattctggcggctgagctgatcgtcgtggttggcggcagcatgctgaacccgattgcggctaaatcgatcaccatgccgatcccgccggccgccgagcggaccaatacggcagcgctcggcgatgtgctctataccaattacgtctacttcttccagcttgccggtctcgtgctgctggtggccatgatcggcgccatcgtgctgacgctgcgtcatcgcaccgatatcaagcggcaggatatctccacgcaggttggccgcgacccgaagaccgccgtaacaacggtcaaggtcaagccgggccagggcatctga

SEQ ID NO: 50364 - protein, 204 aa, Agrobacterium tumefaciens str. C58
MGLHAVFFYIFAFVAVASAFMVIASKNPVHSVLFLILTFFNAAALFLLTGAEFLAMILLVVYVGAVAVLFLFVVMMLDVDFAELRSGVLQYAPIGALIGVILAAELIVVVGGSMLNPIAAKSITMPIPPAAERTNTAALGDVLYTNYVYFFQLAGLVLLVAMIGAIVLTLRHRTDIKRQDISTQVGRDPKTAVTTVKVKPGQGI

SEQ ID NO: 50365 - DNA, 567 bp, Psilotum nudum
  CDS (1)..(567): transl_table=11
atgaatttacccgaatctattcaaaaggggattttgctaattatagaattaggtattctattaggaagtatgggagtaatactattaaatgatatagtgcagtctgctttctccttaggacttacctttatctccatatctttattatatctcgtattgaatgcagattttgtagctgctgcacaagtgctcatttatgtaggagctataaatgttctaattgtattttctgtaatgcttattcaaaagccgcataagaacgaagatttgtctacatctcgaaatacaggaaataatattactttaatagtctgtacaagtctatttctgtttttagttagcattattctagatacatcatggtcccaaatctattccataaaaaaatccactaagatttttgagcctattttaaaaagcaatgttcaacttataggatcccagttattaactgaatttttgcttccattcgaacttctttctgtacttctcttagtcgctttagtaggagctataactatgtctcgacaaagtagaatgtttgaaatgccggatgatgaaatttga

SEQ ID NO: 50366 - protein, 188 aa, Psilotum nudum
MNLPESIQKGILLIIELGILLGSMGVILLNDIVQSAFSLGLTFISISLLYLVLNADFVAAAQVLIYVGAINVLIVFSVMLIQKPHKNEDLSTSRNTGNNITLIVCTSLFLFLVSIILDTSWSQIYSIKKSTKIFEPILKSNVQLIGSQLLTEFLLPFELLSVLLLVALVGAITMSRQSRMFEMPDDEI

SEQ ID NO: 50367 - DNA, 771 bp, Hypocrea jecorina
  CDS (1)..(771): transl_table=4
attaaattcaaaaaaataatgaaccaattatttgccatttatgatattttatctaatggatatacaattgaatatttagatattttaagtgtaatagcactattatttggtatagcagttatagtaaacaaaaaccctatagcatctttattatcattgataggattattcgcttctatatctgtttatttaatattatctggattaacttttataggtttttcttacttaatagtttatataggagccgtatctatattattcttgtttattctgatgttaattaatataagaacaagtgaattacaaagtaacaatataaatagtattcctttagcattatttataacaatattattaaattatgcgttattccaactattaccttattctatagctattataaatagttataacaataaattaagtaatataatatattatttaccaacaagcaaatataatgatataattactcatataagtaaaaatttagatataaatacagctaatgttatgttcgtaacaagtaatagttgagatggaaacatggctgaaactagtcatatatctacaataggtaatattttatatacttcttacaatatgtgattattcattgctagttttattttattattagcgatggtaggagctatagttataacaataaaacaagaacgtaatagaggaattagttcaatggtagaacgtttgttttacacacaaaatgttaaaggttcaagtcctttattgctcaaaattatttag

SEQ ID NO: 50368 - protein, 256 aa, Hypocrea jecorina
MKFKKIMNQLFAIYDILSNGYTIEYLDILSVIALLFGIAVIVNKNPIASLLSLIGLFASISVYLILSGLTFIGFSYLIVYIGAVSILFLFILMLINIRTSELQSNNINSIPLALFITILLNYALFQLLPYSIAIINSYNNKLSNIIYYLPTSKYNDIITHISKNLDINTANVMFVTSNSWDGNMAETSHISTIGNILYTSYNMWLFIASFILLLAMVGAIVITIKQERNRGISSMVERLFYTQNVKGSSPLLLKII

SEQ ID NO: 50369 - DNA, 594 bp, Streptomyces coelicolor A3(2)
  CDS (1)..(594): transl_table=11
atgaccctcgccgccgcatcccacggcttcctgtccccgaccggcgtggagatcgccttcctcctcgtcggcctggtcaccctcgcggccgccgtcgtcaccgtgaccacccgccagctcgtccacgcggccctgtggctggtggtggccctcggcggcctcgccgtcgaatacctgctgctcaccgcggagttcatcgcctgggtccaggtcctcatctacgtcggtgccgtcgtggtgctcatcctcttcggcctgatgctcacccgggcgcccatcggccggtcgccggacgccgactccggcaaccgctgggccgccctcaccgtggccgtggcctccgcggcggccctggtgtgggtcgtcgtcgacgccttccgcaccacctggatcgatctggacggcccggccgcgggctccaccgccgtcacgggggcgagcctgttccagaactgggtcctccccttcgaagcactctccgtcctccttctggccgccctggtcggcgccatcgtcctgtcccgcaaggccaaggcggcccgcgccgacgaagcgtcccggcccggaacctcccggacaggcggtgcccgctga

SEQ ID NO: 50370 - protein, 197 aa, Streptomyces coelicolor A3(2)
MTLAAASHGFLSPTGVEIAFLLVGLVTLAAAVVTVTTRQLVHAALWLVVALGGLAVEYLLLTAEFIAWVQVLIYVGAVVVLILFGLMLTRAPIGRSPDADSGNRWAALTVAVASAAALVWVVVDAFRTTWIDLDGPAAGSTAVTGASLFQNWVLPFEALSVLLLAALVGAIVLSRKAKAARADEASRPGTSRTGGAR

SEQ ID NO: 50371 - DNA, 522 bp, Chlorobium tepidum TLS
  CDS (1)..(522): transl_table=11
atgaatcaactgaccatcgccatcatcttctacatcttcgcggccgttacggtactgtcggcggcgtttgtggtcttttcgaaaaatgtcatctactcggcattctcgctgctctttacctttttcggtgtcgcggctctctatgtttttctgagcgcggacttcatcgctgtgacccaggtggtcgtctatgtcggcggcattctggtgctcctgcttttcggtgttatgttcaccaacaccatcatgtcaaccgagctgaaggctgacgtgctgaacgtcgtgccaggcattcttctgacgctgctcctgattgttggtatgcttttcaccttctacacaaccggaagctggatgccgggtgagatgcagctcaatggcagcgtggtgcagagcatcggtcttgaaaccatgtcgcgctacatgctgccgtttgaaatgttctccatcgtactgctggtcgccctgcttggcgctgcttacctggcccgctacgacaaggcaaacaaaaaagaacattaa

SEQ ID NO: 50372 - protein, 173 aa, Chlorobium tepidum TLS
MNQLTIAIIFYIFAAVTVLSAAFVVFSKNVIYSAFSLLFTFFGVAALYVFLSADFIAVTQVVVYVGGILVLLLFGVMFTNTIMSTELKADVLNVVPGILLTLLLIVGMLFTFYTTGSWMPGEMQLNGSVVQSIGLETMSRYMLPFEMFSIVLLVALLGAAYLARYDKANKKEH

SEQ ID NO: 50373 - DNA, 603 bp, Thermosynechococcus elongatus BP-1
  CDS (1)..(603): transl_table=11
gtggacttagccaccctgacccaaacgattaccttctttgcccttgctgctgcagtcatcattgctgctcttggcgttgtgcttctagacaatgttgtctattctgcctttttgctggggggagtgttcctgagcatcgctgggctgtatatccttatgaatgctgattttgtctcagcggcgcaaattctcatctatgttggtgccgtaaacgttctcatcctgtttgccatcatgctcgtcaataagcgcgagacctataccccagtgccagggcgttggctacggcaagggggtgccgcagtggtctcccttggggtctttgccttgctgacaaaaatgattttgcaaaccccttggcaactcagctccgtgccccccacgcctgacagcatcaccaccattggccagcactttttcagcgatttcctcttgccctttgagttggcctcggtcttactgctgatggctttgattggggcagtggttcttgcacgccgcgaactggtcctggaaccggaacccatcctaggggaagaggtggttccccccttggagttaccggaacgtccccgtgaacctgtcgctttgtctgaaaaatag

SEQ ID NO: 50374 - protein, 200 aa, Thermosynechococcus elongatus BP-1
MDLATLTQTITFFALAAAVIIAALGVVLLDNVVYSAFLLGGVFLSIAGLYILMNADFVSAAQILIYVGAVNVLILFAIMLVNKRETYTPVPGRWLRQGGAAVVSLGVFALLTKMILQTPWQLSSVPPTPDSITTIGQHFFSDFLLPFELASVLLLMALIGAVVLARRELVLEPEPILGEEVVPPLELPERPREPVALSEK

SEQ ID NO: 50375 - DNA, 540 bp, Chaetosphaeridium globosum
  CDS (1)..(540): transl_table=11
atgttagaacaaagtgcacaaattacattatttgtattagatttttttatttttgtaggtgctttaggtgttgtttttttcaataatattatttattcagctttatttttagggctaacttttttatcagtagcattattatacttacttcttggttccgaatttttaagtgtagctcaagtaattatttatgttggtgctattaatgttttaattgtatttgcaattatgttagttaacaaacctgagtttgataaaaaagatatgatctgggtaccaatagatttaaaaagtttttgcgttaattttattttattttcaacaatagttactatgattgtaactacaccttggaaattattagttaataatatagatgtgaaattaaattctttaaattttttgagccctattgcaaaaataggttatcaatttttaagtacattagttcttccttttgaattattatctcttttattgttaattgctcttataggagccgttataatagcaagacgtgaattaattgaagatacctaa

SEQ ID NO: 50376 - protein, 179 aa, Chaetosphaeridium globosum
MLEQSAQITLFVLDFFIFVGALGVVFFNNIIYSALFLGLTFLSVALLYLLLGSEFLSVAQVIIYVGAINVLIVFAIMLVNKPEFDKKDMIWVPIDLKSFCVNFILFSTIVTMIVTTPWKLLVNNIDVKLNSLNFLSPIAKIGYQFLSTLVLPFELLSLLLLIALIGAVIIARRELIEDT

SEQ ID NO: 50377 - DNA, 609 bp, Cryptococcus neoformans var. grubii
  CDS (1)..(609): transl_table=4
atgaatacatttctacttgatcttcttgcatttggtgctgtactatcaggagttcttgttattacatcagttaatccagttatttcagtgctatttctaatctctgtgtttgttaacgctgctggatatcttgtacttctaggtgttggatttgtaggtatctcatatctaattgtttatgtaggtgctattgctattctattcctatttgtagttatgatgctaaatatttctattactgaaattgtttcagttggacgtgaatatactaagaatctccctcttggttttgttgtaggtacagtattcttctttgaaattctatctgttattccagctgctacaactaatgctggtgaactacctctaggactatttacatatctaaatggactactactaggagttaatacatctattacaaattctgatgttaatatggcttttgctaatactggtgctgataatgctttctcatctcatcttcaaatcgaagctattggtcatggactttatacatatggttcagtatggcttctactagctagttttattctacttctagctatggtaggacctattgcactatgtctacgaccacgaacataa

SEQ ID NO: 50378 - protein, 202 aa, Cryptococcus neoformans var. grubii
MNTFLLDLLAFGAVLSGVLVITSVNPVISVLFLISVFVNAAGYLVLLGVGFVGISYLIVYVGAIAILFLFVVMMLNISITEIVSVGREYTKNLPLGFVVGTVFFFEILSVIPAATTNAGELPLGLFTYLNGLLLGVNTSITNSDVNMAFANTGADNAFSSHLQIEAIGHGLYTYGSVWLLLASFILLLAMVGPIALCLRPRT

SEQ ID NO: 50379 - DNA, 552 bp, Shewanella oneidensis MR-1
  CDS (1)..(552): transl_table=11
atggaactggcattttatgcctcggccctagtggccgtttacagcacgctgcgggtgataagcaccagcaacccaatgcatgcgctgctcaatctcatcatctccctcatcgccgtggccatgatctttttctgcctgggcgccgcctttgcgggcgccctgcaggtgattgtctacgccggcgccatcatggtgctgttcgtgttcgtggtgatgatgctcaacttaggctcggaccaagcgcaggaaaaaaactggctgacccccatgacttgggtgggccctgggctactgtcgctaacgctgctgggctttttggcccacggcattttgggcgtgactggcggccaaatagggctcactgaggtgagcgctaagcaggtcggtatcgagctctttggcccctatgtgctggcggtagagcttgcctccatcctgctgctcgcgggtatggtgaccgcctatcatctgggccgggaggacaagagtggtgaagtgctcagcgtcccgcgctcagcatcccactctggacaggaaggaggtcagcaatga

SEQ ID NO: 50380 - protein, 183 aa, Shewanella oneidensis MR-1
MELAFYASALVAVYSTLRVISTSNPMHALLNLIISLIAVAMIFFCLGAAFAGALQVIVYAGAIMVLFVFVVMMLNLGSDQAQEKNWLTPMTWVGPGLLSLTLLGFLAHGILGVTGGQIGLTEVSAKQVGIELFGPYVLAVELASILLLAGMVTAYHLGREDKSGEVLSVPRSASHSGQEGGQQ

SEQ ID NO: 50381 - DNA, 639 bp, Bradyrhizobium japonicum USDA 110
  CDS (1)..(639): transl_table=11
atgatccttcccgcgctgttcttctatctcttcgccggcgtctgcgtcgcctcggcggtgatggtgattgtctcgcgcaatcccgtgcactccgtgctgtacctgatcctggccttcgtcaacgcctccggcctgttcgtgctgatgggcgccgagttcctcggcatgatgctgatcgtcgtctatgtcggcgcggtcgcggtgctgttcctgttcgtgatcatgatgctcgacgtcgacttcctcgagctgcgcgagggcttcatcgagtacctgccggtcggcctcgtcatcggcggcatcttcctgttcgagctgctgctcaccgtcggcttctgggtcatcaaccccggcgtctccaagacgatcacggcggcgatcccgaccaacgtgtccaacaccgaggcgctcggcctcgtgctctatacgaagtacgtctactacttccagctcgcgggcatggtgctgctggtcgccatgatcggtgccatcgtgctgacgctcaggcacaaggtgagcgtgaagcggcaggacatcaacgttcagaacgcgcgcacgcccgacatggcgatggcgatgcgcaaggtggcgccggggcaggggctgtcggatgccgatgcggcggagtgggtgaaatga

SEQ ID NO: 50382 - protein, 212 aa, Bradyrhizobium japonicum USDA 110
MILPALFFYLFAGVCVASAVMVIVSRNPVHSVLYLILAFVNASGLFVLMGAEFLGMMLIVVYVGAVAVLFLFVIMMLDVDFLELREGFIEYLPVGLVIGGIFLFELLLTVGFWVINPGVSKTITAAIPTNVSNTEALGLVLYTKYVYYFQLAGMVLLVAMIGAIVLTLRHKVSVKRQDINVQNARTPDMAMAMRKVAPGQGLSDADAAEWVK

SEQ ID NO: 50383 - DNA, 645 bp, Lecanicillium muscarium
  CDS (1)..(645): transl_table=4
atgttttgatctatacatgaatactatttttcaggttatactgtagaattcgatatcgaattcttagatatattaagcgttatagcagtactatttggtattacagtaattgtaaataaaaaccctataggttctttattatttttaataggattatttgcttcaatttcagtatatttaattttatcaggattaacatttattggtttttcttatttaatagtatatataggtgcagtatctattttattcttatttatattaatgcttattaatataagaacaagtgaattacaaagtaataatgtaaatagtatacctttggctttatttataggtatattatgaaattacagtttattccaattattaccttatactttatcaataaatactaataattgattattaggatcttataattataataatgtattaccagctgttcataatattgacacaagtaatataatgtttgtaacaagtaataattgagatggtacaatgacagaaacaagtcatatttcaacaataggaaatatattatatacatcatataatatgtgattattcttatcaagtataatattattattagcaatggtaggtgctataataataacaattaaacaagaaaataattaa

SEQ ID NO: 50384 - protein, 214 aa, Lecanicillium muscarium
MFWSIHEYYFSGYTVEFDIEFLDILSVIAVLFGITVIVNKNPIGSLLFLIGLFASISVYLILSGLTFIGFSYLIVYIGAVSILFLFILMLINIRTSELQSNNVNSIPLALFIGILWNYSLFQLLPYTLSINTNNWLLGSYNYNNVLPAVHNIDTSNIMFVTSNNWDGTMTETSHISTIGNILYTSYNMWLFLSSIILLLAMVGAIIITIKQENN

SEQ ID NO: 50385 - DNA, 531 bp, Atropa belladonna
  CDS (1)..(531): transl_table=11
atggatttatctgaaccaatacatgattttcttttagtctttctaggatcgggtcttatattagggggtctaggggtggtattacttcccaatccaatttattctgccttttccttgggattggttcttgtttgtacatcgttattctatattctatctaactcctattttgtagctgctgcgcagctacttatttacgtaggagctataaatgttttaatcatttttgctgtgatgttcatgaatggttcagaatattacaaagattttcatctttggaccgtaggagatggaattacttcgatggtttgtataagtctttttatttcactaattactactatttcagatacttcatggtacgggattatttggactacaagatcaaaccagattatagagcaagattttctaagtaatagtcaacaaattggaattcatttatcaacagatttttttcttccatttgaactaatttcaataatccttttagatgctttaataggtgcaattgctgtagctcgtcaataa

SEQ ID NO: 50386 - protein, 176 aa, Atropa belladonna
MDLSEPIHDFLLVFLGSGLILGGLGVVLLPNPIYSAFSLGLVLVCTSLFYILSNSYFVAAAQLLIYVGAINVLIIFAVMFMNGSEYYKDFHLWTVGDGITSMVCISLFISLITTISDTSWYGIIWTTRSNQIIEQDFLSNSQQIGIHLSTDFFLPFELISIILLDALIGAIAVARQ

SEQ ID NO: 50387 - DNA, 843 bp, Streptomyces avermitilis MA-4680
  CDS (1)..(843): transl_table=11
atgagcgcgcagctcgccgcctactccacctccaccggtgaggccttccagttctggatcctcggcaccgtcgccgtgatcggcgccctgtgcaccgtcctcatgaagaaggccgtgcacagcgccctctgcctcgccggcaccatgatcatcctggcggtgttctacctcgccaacggcgcctacttcctgggcgtcgtgcagatcgtcgtctacaccggcgcgatcatgatgctgttcctgttcgtggtgatgctcgtcggcgtcaccgcggcggactcgctgaaggagaccatcaagggccagcgctggctggccctggtgtgcgggctcggtttcggcaccctgctgttcgcgggcatcggcaacgcgtccatcaaggagttcgacggcctcggcacggccaatgcgaacggcaacgtggagggcctcgccgccctcatcttcaccaagtacgtgttcgccttcgaaatcaccggcgccctgctcatcacggccgccgtcggcgccatggtgctcacccaccgcgagcgcaccgagcgggccaagacccagcgcgagctgtccgagcagcgcgtacgcgagggcaagcacctgccgccgctgccggcccccggcgtctacgcccggcacaacgcggtggacatcgcgggcctcctcccggacggcaccccgtccgagctgaccgtcaacaagacgctgcgggagcgcggccagatccgtgacgtgtccaccgaggcgctgaacgacctgaaggctctggagcgccgggccgaggagcgcctggagcggaccgacgtcgagccggtgagcccgaagcggaccgaggaggcgtcgaagtga

SEQ ID NO: 50388 - protein, 280 aa, Streptomyces avermitilis MA-4680
MSAQLAAYSTSTGEAFQFWILGTVAVIGALCTVLMKKAVHSALCLAGTMIILAVFYLANGAYFLGVVQIVVYTGAIMMLFLFVVMLVGVTAADSLKETIKGQRWLALVCGLGFGTLLFAGIGNASIKEFDGLGTANANGNVEGLAALIFTKYVFAFEITGALLITAAVGAMVLTHRERTERAKTQRELSEQRVREGKHLPPLPAPGVYARHNAVDIAGLLPDGTPSELTVNKTLRERGQIRDVSTEALNDLKALERRAEERLERTDVEPVSPKRTEEASK

SEQ ID NO: 50389 - DNA, 624 bp, Streptomyces avermitilis MA-4680
  CDS (1)..(624): transl_table=11
gtgacccccgcagcagctcacgtcgcgaccgcggtcgccgccgaatcccacggcttcctctccccgaccggcatcgagatcgccttcctcctcgtcggcctcgtcaccttcggcgccgcgatcgtcaccgtcaccaccaagcagctcgtacatgccgccctgtggctggtggcgaccctcggcggtctcgccgtggagtacctcctgctcaccgccgagttcatcgcctgggtgcaggtcctcatctacgtcggctccgtcgtcgtcctcctcctgttcggtctgatgctcaccaaggcccccatcggccgctccccggacgccgactccggcaaccgctgggccgccctcaccgtggccgtcgcctccgccgccaccctggtctgggtcgtcgtcgacgccttccgcacgacgtggctcgacctgaacggcgccgccgccggctccaccgccgtcaccggcgcgagcctcttccagaactgggtccttcccttcgaagccctttccgtcctcctcctcgccgccctggtcggcgcgatcgtcctctcccgcaaggcgaaggcggacgcggcgaccaccacgagcctcccgagcgcccggagcgaaaaggaaggggcccgctga

SEQ ID NO: 50390 - protein, 207 aa, Streptomyces avermitilis MA-4680
MTPAAAHVATAVAAESHGFLSPTGIEIAFLLVGLVTFGAAIVTVTTKQLVHAALWLVATLGGLAVEYLLLTAEFIAWVQVLIYVGSVVVLLLFGLMLTKAPIGRSPDADSGNRWAALTVAVASAATLVWVVVDAFRTTWLDLNGAAAGSTAVTGASLFQNWVLPFEALSVLLLAALVGAIVLSRKAKADAATTTSLPSARSEKEGAR

SEQ ID NO: 50391 - DNA, 525 bp, Bacillus cereus ATCC 14579
  CDS (1)..(525): transl_table=11
atgaatggcgagtttgtagcattctttatactatccttgtctgcaattatcggcggtgttcttatgttgaacttaacgaaagttatgcacatgatgctagctctcgttctgacatttctcagcattgcaggtttgtattttcttttgtcagccgaatttataggcgttgcacaaattttactttactccggtgcaatcacaattattatgattttcggcattatgttaacgaaacataacgcggaaaatgaatcgcgtcttactcttcgaaaatggattatcttctttgcagttgtagcatttggagcggttatgtatttcgctgttaataatgttgattttgcaaatgaaagcacacaaggaagtttacctctccatgaaaacaacacacttcaaatcggtacgcttctctattcaaaatatattattccatttgaactaacttcagttattttacttgtagcactcgttggcgcaattatacttgcgaaaaaggacgagaaagaggaggattccaatgagtag

SEQ ID NO: 50392 - protein, 174 aa, Bacillus cereus ATCC 14579
MNGEFVAFFILSLSAIIGGVLMLNLTKVMHMMLALVLTFLSIAGLYFLLSAEFIGVAQILLYSGAITIIMIFGIMLTKHNAENESRLTLRKWIIFFAVVAFGAVMYFAVNNVDFANESTQGSLPLHENNTLQIGTLLYSKYIIPFELTSVILLVALVGAIILAKKDEKEEDSNE

SEQ ID NO: 50393 - DNA, 606 bp, Nitrosomonas europaea ATCC 19718
  CDS (1)..(606): transl_table=11
atgaatttacaggatttcgttttttatagcctggcaagtgtagtagtcattgctgcactgggagtgattacactgcgcaatcctgttcactcggcgctattactggtactcgcttttgtgacatcttccggattatggttgctgcttgaagcagagttcctggccatcgttctgattctggtatatgtcggtgcagtcatggtgttgttcctgttcgtggtaatgatgttggatatcaacctggatcgtatgcgggaaggattctggaagtggttcccgtttggcgccatactggctctgattatgacgggtgagataggtatagtactgatgagtaaacaattcggacctgaaaatatacaaattccagtttccaaatcagtggactacagtaatacgaaagagttgggacaattgctttataccgactacgtatacgcttttgaactgtcagccgtcattcttctggtagcgatggttgctgccattgctataacgttgcgttaccgaaccgataaaaaatcttcgaatgtttcaaaacaagtagctgctagtcgtgaaaagcggttaaaagttatatccataccagcagaaagaaaagaataa

SEQ ID NO: 50394 - protein, 201 aa, Nitrosomonas europaea ATCC 19718
MNLQDFVFYSLASVVVIAALGVITLRNPVHSALLLVLAFVTSSGLWLLLEAEFLAIVLILVYVGAVMVLFLFVVMMLDINLDRMREGFWKWFPFGAILALIMTGEIGIVLMSKQFGPENIQIPVSKSVDYSNTKELGQLLYTDYVYAFELSAVILLVAMVAAIAITLRYRTDKKSSNVSKQVAASREKRLKVISIPAERKE

SEQ ID NO: 50395 - DNA, 531 bp, Calycanthus floridus var. glaucus
  CDS (1)..(531): transl_table=11
atggatttacctggaccaatacatgatattcttttagtatttctaggattaggtcttatattgggaggtctgggagtggtattacttaccaatccaatttattctgccttttcgttgggattggttcttgtttgtatatccttatttcatattccatctaactcctattttgtagctgctgcacagctccttatttatgtgggagcggtaaatgttttaatcgtatttgctgtgatgttcatgaatggttcagaatattccaacgatttccatctttggaccgttggagatggagtcacctcattggtttgtacaagtattcttttttcactaattactactatttggaatacgtcatggtacgggattatttggactacaagatcaaaccagattatagagcaggacctaacaagtaacgttcaacaaattggtattcgtttagcaactgatttttatcttccatttgaactcatttctataattcttttagctgctttgataggtgcaattgctatggctcgtcagtaa

SEQ ID NO: 50396 - protein, 176 aa, Calycanthus floridus var. glaucus
MDLPGPIHDILLVFLGLGLILGGLGVVLLTNPIYSAFSLGLVLVCISLFHIPSNSYFVAAAQLLIYVGAVNVLIVFAVMFMNGSEYSNDFHLWTVGDGVTSLVCTSILFSLITTIWNTSWYGIIWTTRSNQIIEQDLTSNVQQIGIRLATDFYLPFELISIILLAALIGAIAMARQ

SEQ ID NO: 50397 - DNA, 603 bp, Prochlorococcus marinus subsp. marinus str. CCMP1375
  CDS (1)..(603): transl_table=11
atgaatatagcgaatagtacagagcaaatatgctttcttattcttgcaagtgtaattattagtggaagcctaggagttgtattaatagagaatattgtgtattcagcttttttacttggtggcgtatttatgtcagttgcaggtttataccttctattaaatgcaagctttgttgcagcagcacaagtattggtttatgtaggtgctgtaaatgtgctcattcttttcgcaataatgttagtcaataagcgagaagagctaaagcctatagcaggattgcaaataagaagatttttctctggatgtgtttgtgctggccttcttgctcttttgtttagagtaaatttaactacaaagtgggcaacaccaggtccccaagctataggagaggaagcgacagaacgtattggcgagcatttatttactgattatctactacctttcgaattagcctctgtacttttgttaatggcaatgataggtgcaatagtattagctagaagagatgtatttcttacagaagaggagaagcttggtgaaagagcaggcaatattatagacaacaaaagcaaggctattcttattgatcaatcaactgagtga

SEQ ID NO: 50398 - protein, 200 aa, Prochlorococcus marinus subsp. marinus str. CCMP1375
MNIANSTEQICFLILASVIISGSLGVVLIENIVYSAFLLGGVFMSVAGLYLLLNASFVAAAQVLVYVGAVNVLILFAIMLVNKREELKPIAGLQIRRFFSGCVCAGLLALLFRVNLTTKWATPGPQAIGEEATERIGEHLFTDYLLPFELASVLLLMAMIGAIVLARRDVFLTEEEKLGERAGNIIDNKSKAILIDQSTE

SEQ ID NO: 50399 - DNA, 600 bp, Prochlorococcus marinus subsp. pastoris str. CCMP1986
  CDS (1)..(600): transl_table=11
atgtctttagcagtaacaactcaaataatttgtttttcagtattatctttagttgtaataattggagcactaggtgtaattcttctagagaacattgtttactctgcatttttgcttgggggagtctttatgagtgttgcaggcttatatctactactaaacgcaagttttgttgctgcagctcaagttttagtttatgtaggggcagttaatgttctaataatttttgcaataatgttggttaataaaaaagaagatttaaaggctattgcaaatatcaaatcaagaagaattatatcaacatcaatttgtttaactcttctaagtctattaataagagttgatttatccaatacttggggtttggctgaacctaatgcatctataggggaagaatctacagtaagaataggagaacacttatttagtgattatttgctcccttttgaagtggcatctgtattgctcttaatggccatgattggtgctattgttttggctagaagagatgtcatgaatgaagatatttcaacaggtttaccggtagatcaagagctaatagagaaaccaaatgaacctttacttataaaaaaaaattaa

SEQ ID NO: 50400 - protein, 199 aa, Prochlorococcus marinus subsp. pastoris str. CCMP1986
MSLAVTTQIICFSVLSLVVIIGALGVILLENIVYSAFLLGGVFMSVAGLYLLLNASFVAAAQVLVYVGAVNVLIIFAIMLVNKKEDLKAIANIKSRRIISTSICLTLLSLLIRVDLSNTWGLAEPNASIGEESTVRIGEHLFSDYLLPFEVASVLLLMAMIGAIVLARRDVMNEDISTGLPVDQELIEKPNEPLLIKKN

SEQ ID NO: 50401 - DNA, 603 bp, Prochlorococcus marinus str. MIT 9313
  CDS (1)..(603): transl_table=11
atgacgattgctacttccacagaattaatctgtttcctggtactaggcgccgtggtggttctcggcagccttggtgtcgtcttgctgggcaatatcgtctactccgcctttttgcttggtggagtatttatggctgtggctggtctctatctgctcctcaatgcaagttttgttgcagcagcacaggtgctggtttatgtgggtgcagtcaacgtgctgattctcttcgcgatcatgctggtcaacaagcgcgaagatttgaagcctatcgagggattgcctattcgaaggctgctctctggtggagtttgtgcagggttgtttgttcttttctttcgtgtggtgatcaccacaccttgggcagtgccaggccccgcagcgattggagtaggggccactgagcgaattggtgaacacctatttactgactaccttttgccttttgagctggcgtctgtgcttctactgatggcaatgatcggtgcaattgtgttggcccgcagagatgtgctggagactgatgttggtacaggtgatgctgtcaatcagggtctgatcgagaaggctcaaacgcctttgcttgtcgataagtccacgccctga

SEQ ID NO: 50402 - protein, 200 aa, Prochlorococcus marinus str. MIT 9313
MTIATSTELICFLVLGAVVVLGSLGVVLLGNIVYSAFLLGGVFMAVAGLYLLLNASFVAAAQVLVYVGAVNVLILFAIMLVNKREDLKPIEGLPIRRLLSGGVCAGLFVLFFRVVITTPWAVPGPAAIGVGATERIGEHLFTDYLLPFELASVLLLMAMIGAIVLARRDVLETDVGTGDAVNQGLIEKAQTPLLVDKSTP

SEQ ID NO: 50403 - DNA, 603 bp, Synechococcus sp. WH 8102
  CDS (1)..(603): transl_table=11
atgagcattgccacaaccaccgaactgatctgtttcctggtgttgtccgcggtcgtggtgaccggtgccctgggggtcgtactgctcagcaacatcgtctattccgccttccttctgggaggtgtcttcatggccgtggccggtctctacctgctgctgaatgccagttttgtcgccgcggcccaggtcctcgtgtacgtgggggcgatcaatgtgttgatcctgttcgcgatcatgctcgtgaacaagcgcgaggacctcaaggccatcgctggattgaacgttcgacgggctgtttcgggcggggtttgtctggggctgctggcgctgctggtccgcgttgtgctcaccactccctggtccttacctggccctgctgctgtgggtgaagaggcaaccgctcgcatcggcgagcacctgttcaccgactacctgttgccctttgaggtggcgtccgtattgctgctgatggcgatgatcggagccatcgttctggctcgccgagatgtgctggcgacggatgttgtgaccggtgaggtcgctgatcagggcctgatcgaaaaatcccgcaccccgctgctggttgagcggccttcctcctga

SEQ ID NO: 50404 - protein, 200 aa, Synechococcus sp. WH 8102
MSIATTTELICFLVLSAVVVTGALGVVLLSNIVYSAFLLGGVFMAVAGLYLLLNASFVAAAQVLVYVGAINVLILFAIMLVNKREDLKAIAGLNVRRAVSGGVCLGLLALLVRVVLTTPWSLPGPAAVGEEATARIGEHLFTDYLLPFEVASVLLLMAMIGAIVLARRDVLATDVVTGEVADQGLIEKSRTPLLVERPSS

SEQ ID NO: 50405 - DNA, 645 bp, Chromobacterium violaceum ATCC 12472
  CDS (1)..(645): transl_table=11
atgaacctaactacggtaattttctacgttctgtccgccatcctggtcttcgccggcctgcgcgtggtgacggccaagaacccggtgcacgccgcgctgtacctggtgctggccttcttcaccagcgccggccactggctgctgatggagtcggagttcctggcgatcaccctggtgctggtctacgtcggcgcggtgatggtgctgttcctgttcgtggtgatgatgctggacatcaacatcgagaagctgcgcgaaggcttctggaagaacctgccggtggccgccaccgtcggcgccatcatggtgttcgaaatggcgctgatcctggtcagcccgcaagccagcctgtcccagtacaaggctgccgcgccgctggccgccgacttcagcaacgtgaagatgctgggcagccagctgtacaccacctacctgctgccgttcgagatcgccgccgtggtgctgctgctggcgatgatcgccgccatcggcctgaccatgcgcacgcgcaaggacagcaaggtgatcgaccccgccgtccaggtgaaggtacgccgcgaagaccgcgtccgcatcgtcaagatggacgccgtgaaaaaagtggaagaagccgaacaggccgattccggtgagcaacaggcctga

SEQ ID NO: 50406 - protein, 214 aa, Chromobacterium violaceum ATCC 12472
MNLTTVIFYVLSAILVFAGLRVVTAKNPVHAALYLVLAFFTSAGHWLLMESEFLAITLVLVYVGAVMVLFLFVVMMLDINIEKLREGFWKNLPVAATVGAIMVFEMALILVSPQASLSQYKAAAPLAADFSNVKMLGSQLYTTYLLPFEIAAVVLLLAMIAAIGLTMRTRKDSKVIDPAVQVKVRREDRVRIVKMDAVKKVEEAEQADSGEQQA

SEQ ID NO: 50407 - DNA, 534 bp, Amborella trichopoda
  CDS (1)..(534): transl_table=11
atggatttacttggaccaatacatgatattcttttggtatctttgggctcaggtattatattaggaagtttaggagtagtattacttaccaatcctatttattctgccttttcatcgggattggttcttgttcgtatatccttattccatattctatcaaactcctattttgtagctgctgcacagctccttatttacgtaggagccataaatgtcttaatcatatttgctgtgatgttcatgaatggttcagaatattacaataatttccatctttggaccgttggagatgggatctcttcagtagtttgtacaagtattcttttttcactaattgctactattctagatacgtcatggtacgggattatttggactacaagatcaaatcagatcatagagcaggaccttacaagtaacgtacaacaaattgggattcatttatcaactgatttttttcttccatttgaactcatttctataattcttttagttgccttggtaggggcaattgctatggctcgtgcggaataa

SEQ ID NO: 50408 - protein, 177 aa, Amborella trichopoda
MDLLGPIHDILLVSLGSGIILGSLGVVLLTNPIYSAFSSGLVLVRISLFHILSNSYFVAAAQLLIYVGAINVLIIFAVMFMNGSEYYNNFHLWTVGDGISSVVCTSILFSLIATILDTSWYGIIWTTRSNQIIEQDLTSNVQQIGIHLSTDFFLPFELISIILLVALVGAIAMARAE

SEQ ID NO: 50409 - DNA, 594 bp, Physcomitrella patens subsp. patens
  CDS (1)..(594): transl_table=11
attgaattattcgggccgcttcaagaaattattttttttattttagaaataggcgtaatattaggaagtttaggagtagtattacttagtaatattgtatattcagctttttttttagggctagtttttttttgtatatctcttttatattttgcattaaatgcggattttgtagctgctgcacaaattttaatttatgtaggagctgtaaatgttttaattgtatttgctgttatgttaattaataaaccagagtctttaaaaatttttccagtttggactgtaggcgataaaattacgttagctatctgtttaactagtttttttttattagtaaatataattttaaatacgtcatggtctaatattactgtaattacagaatcaaaaggttttttagaatcaaattttacacaaaatgttcaacgtattggctctcttttattaacccaatatttgcttccatttgaacttctttctatcgtccttttagttgcattaataggcgctattgttatagctcgtcgagaaaatttgattgaaacaaataaaaaaaaagttttacaaataaaaaaaagtcctacaactttttaa

SEQ ID NO: 50410 - protein, 197 aa, Physcomitrella patens subsp. patens
MELFGPLQEIIFFILEIGVILGSLGVVLLSNIVYSAFFLGLVFFCISLLYFALNADFVAAAQILIYVGAVNVLIVFAVMLINKPESLKIFPVWTVGDKITLAICLTSFFLLVNIILNTSWSNITVITESKGFLESNFTQNVQRIGSLLLTQYLLPFELLSIVLLVALIGAIVIARRENLIETNKKKVLQIKKSPTTF

SEQ ID NO: 50411 - DNA, 573 bp, Wolinella succinogenes DSM 1740
  CDS (1)..(573): transl_table=11
atgtttgagaccatcgccttttatctttttgccgcactcagcgcttcgatgtttttgattgtggtgaccactaacaatgttcttcatgccctaagcgcgctagccgcagggatgatcttcatctcagccttcttttttatgcttggcgcggagtttcttggggtggcgcagatcatcgtctatacaggagcggtgatggcgctttatgcctttggaatgatgttttttgatagcagtaaagcgatcaaggagaaagaggagaatcgatgggttctttgggtcttgattggaatcgtcacgcttttgcttttagtgattctaggcgccccctttatccatctctcgcttgatgcacgccatcctattcctgagggggttggtaacaccgaggcgattggctatgttcttttcacccaataccttgtgccttttgagctagccgcagtgatgctcttggtggcgatgatcgcaggaatcgtgctagcgggcaaaaagatggatcaatccctcacgcttatgagcgatgaagaggcggagattcttcttaaaaaaaccaaaaaaaggagcttttga

SEQ ID NO: 50412 - protein, 190 aa, Wolinella succinogenes DSM 1740
MFETIAFYLFAALSASMFLIVVTTNNVLHALSALAAGMIFISAFFFMLGAEFLGVAQIIVYTGAVMALYAFGMMFFDSSKAIKEKEENRWVLWVLIGIVTLLLLVILGAPFIHLSLDARHPIPEGVGNTEAIGYVLFTQYLVPFELAAVMLLVAMIAGIVLAGKKMDQSLTLMSDEEAEILLKKTKKRSF

SEQ ID NO: 50413 - DNA, 594 bp, Gloeobacter violaceus PCC 7421
  CDS (1)..(594): transl_table=11
gtgacattttctgaaggggtccaactggtttcgtttatcatcctcaccgccatcgtgctcggtggggcggcgggggtggtgctcctgcgcagcatggtccactccgcctttttgttgggcctggtctttattggtgctgccgggctctacgtgctgctcaacgccgattttgtcgccgccgcccagattttgatttacgtcggcgcggtcaacgtgcttatcttgttcgcgatcatgcttgtcaacaagcgcatccccaccgaccggccggccttctcgccgcgcaacgccgtgaccggtctggtctgcgcggggcttttcgcgcttttggccgtctgcatctttcaggttccctggcagatccaggagccggtggcgatgaacaccgtcgtcgagatcggcaagcgcttcttcagcgaatttttgctgccctttgaagtggcctcggtgctgctgctgctggccatggtcggtgcaatcatcctcgcccagcgcgagtacgttcccgaccgcgtcgagggggaacccgagcccctcgccctgccggagcgcccccgcgaagaggtcgataccacccccaccggccgccgctaa

SEQ ID NO: 50414 - protein, 197 aa, Gloeobacter violaceus PCC 7421
MTFSEGVQLVSFIILTAIVLGGAAGVVLLRSMVHSAFLLGLVFIGAAGLYVLLNADFVAAAQILIYVGAVNVLILFAIMLVNKRIPTDRPAFSPRNAVTGLVCAGLFALLAVCIFQVPWQIQEPVAMNTVVEIGKRFFSEFLLPFEVASVLLLLAMVGAIILAQREYVPDRVEGEPEPLALPERPREEVDTTPTGRR

SEQ ID NO: 50415 - DNA, 603 bp, Chara vulgaris
  CDS (1)..(603)
atgatacttttttctattttttcaagcatcgctttagtttctggcgttatggttatacgtgctagaaacccagttcattccgttttatttctcattttagtattttgtaatacttcaggtttacttgtgttattaggtcttgatttttttgctatgatttttttagttgtttatgtaggagctattgctgttctatttttatttgtggttatgatgctaaatataaagatagcagaaattcacgaaaatgtattacgttatttgcctgtaggtggtattattggacttatctttttgctggaaattttcttagttgtagataatgattacattccaatattaccaacagaattgagtacaactgtatttcaatatactgtttatgcttccaaaatacaaagttggacgaatctggaaactttaggaaatctactttataccacttatttttatttgtttctggtttcaagtcttattttattagtggccatgattggagctatagtacttaccatgcataagactactcaagtaaaaagacaagatgtttttcaacaaaatatgatagattttcaaaagactatcaaaaaaatacgacaatag

SEQ ID NO: 50416 - protein, 200 aa, Chara vulgaris
MILFSIFSSIALVSGVMVIRARNPVHSVLFLILVFCNTSGLLVLLGLDFFAMIFLVVYVGAIAVLFLFVVMMLNIKIAEIHENVLRYLPVGGIIGLIFLLEIFLVVDNDYIPILPTELSTTVFQYTVYASKIQSWTNLETLGNLLYTTYFYLFLVSSLILLVAMIGAIVLTMHKTTQVKRQDVFQQNMIDFQKTIKKIRQ

SEQ ID NO: 50417 - DNA, 585 bp, Penicillium marneffei
  CDS (1)..(585): transl_table=4
atgccagaagtgttagatataatttatttattatctattgtgtttggtgttttaataataataaataaaaatcctattatttcggtattatatttaataggattgtttgttaatatttctgttttattaatattagtaggatttggttttataggattatcttacatattagtgtatgtaggagctgtttctatcttatttttatttattttaatgttaataaatataagaatatcagaacttactaatgaaactagtaattatacacctttagctattttaactgttatgttattttactttttagtaggacgtattttacctggtaattttattttattaaatacaaatctagttaattcatacataattgatacatatgttaatgaacatatatatgatgaactaatacaatatgcaagtagtaaatcatgagatacttctttagtagatatgactcatattactggtataggtaatgtaatgtatacaaattatgctattttacttattatagcttctataatattattattagctatggtaggttctattgtaattacaaagaagggagataaaagataa

SEQ ID NO: 50418 - protein, 194 aa, Penicillium marneffei
MPEVLDIIYLLSIVFGVLIIINKNPIISVLYLIGLFVNISVLLILVGFGFIGLSYILVYVGAVSILFLFILMLINIRISELTNETSNYTPLAILTVMLFYFLVGRILPGNFILLNTNLVNSYIIDTYVNEHIYDELIQYASSKSWDTSLVDMTHITGIGNVMYTNYAILLIIASIILLLAMVGSIVITKKGDKR

SEQ ID NO: 50419 - DNA, 639 bp, Rhodopseudomonas palustris CGA009
  CDS (1)..(639): transl_table=11
atgtcgatgcccgtcctgttcttctatctctacgccggggtggcgatcgctgccgcggtgatggtcgtggtcgcccgcaacccggtgcactccgcgctgttcctgatcctggtgttcgtcaacgccgccggcatgttcgtgctgatgggggccgaattcctggcgatgatcctgatcgtggtctatgtcggcgccgttgcggtgctgttcctgttcgtgatcatgatgctggacgtcgactacagccagctccgcgaaggcttcctcgaatatctgccgttcggcctcttgatcggcttcatcttcctggccgagctgctgctgctggccggcggctgggtgatcagcccgaccgtcaccaaagcggtgacctcgccgatcccgaccggcgtgtccaacaccgaggcgctcggcctcgtgctctacacccgttacatccactacttccaggtgtcgggcatggtgctgctggtggcgatggtcggcgcgatcgtgctgacgctgcgtcacaagaagaaggtcaagcggcaggatatcgccgcgcagaacgcccgctccaaggaaacggcgatggcgatccgccacgtcaagacggggcagggcctgtccgacaacgatgccggggagtgggtgcgatga

SEQ ID NO: 50420 - protein, 212 aa, Rhodopseudomonas palustris CGA009
MSMPVLFFYLYAGVAIAAAVMVVVARNPVHSALFLILVFVNAAGMFVLMGAEFLAMILIVVYVGAVAVLFLFVIMMLDVDYSQLREGFLEYLPFGLLIGFIFLAELLLLAGGWVISPTVTKAVTSPIPTGVSNTEALGLVLYTRYIHYFQVSGMVLLVAMVGAIVLTLRHKKKVKRQDIAAQNARSKETAMAIRHVKTGQGLSDNDAGEWVR

SEQ ID NO: 50421 - DNA, 504 bp, Geobacter sulfurreducens PCA
  CDS (1)..(504): transl_table=11
atggaaacgttcttcttcacgatcgtggcagcggttgctgtactggccagcatactggtcatcacctgcaagaacccgatcaacagcgcgctctcccttatcctgacgttcttctgtcttgccaccttctacgtgatgctcgacgctccgttcatggcggccattcaggtgatcgtctacgctggggccattatggtgctaattgtcttcgtcataatgcttctcaacgtgcggactgaggccgggagacgctcctctcacaccgtgcttctcggctcgctggtcggtatatttacgcttgttcagctgttctatgtactcaatcggagctctctcactggcaacaagggtgagatcagccctgaactgatacatcggatcgggcacactgaaattatcggcaaagcactctacacggatttccttttgccttttgaggtgacatccatactgttgcttgttgccataattggtgccgtaatactgactaagaaaaaaatctaa

SEQ ID NO: 50422 - protein, 167 aa, Geobacter sulfurreducens PCA
METFFFTIVAAVAVLASILVITCKNPINSALSLILTFFCLATFYVMLDAPFMAAIQVIVYAGAIMVLIVFVIMLLNVRTEAGRRSSHTVLLGSLVGIFTLVQLFYVLNRSSLTGNKGEISPELIHRIGHTEIIGKALYTDFLLPFEVTSILLLVAIIGAVILTKKKI

SEQ ID NO: 50423 - DNA, 825 bp, Mycobacterium avium subsp. paratuberculosis K-10
  CDS (1)..(825): transl_table=11
gtgagtgccttcgccggccacgccgtcgccgccacgctggcctccagctattcccaggacaccatcgtccgcacatccaccggcgaggcagtgacgttctgggtgctgggcgcgctggccgtgatcggtgcgctcggggtggtgctggccgtcaacgccgtctactcggccatgttcctggccatgacgatgatcatcctggcggtgttctacatgatccaggacgcgctgtttttgggcgtcgtccaggtcgtggtctacaccggcgcggtgatgatgctgttcctgttcgtgctgatgctcatcggcgtcgactcggccgaatcgctcagggagacgctgcgcggccagcgcgtcgccgcggtggccgccggtgtcgggttcggcatcctgctcatcgccgcggtcggcaacgtggccagcggcgggttcgccgggctgaccaccgccaacgccaacggcaacgtggaagggcttgccgccctgatcttttcccgctacctgtgggccttcgagctgaccagcgcgctgctgatcaccgcggccgtcggggccatggtgctggcgcaccgggagcgtttcgagcgccgcaagacccagcgcgaactgtcccaggagcgtttccgggccggcgggcaccccaccccgctgcccaaccccggtgtctacgcccgccacaacgccgtcgacgtggccgccctgttgccggacggctcgtattcgaagctgtcggtgtcgcccatcctgcaaagccgcggcggcgacggcaaggacgtcgccgcaccggagcccagcccgagtctgtcgcaaggcggtgcgtcgtga

SEQ ID NO: 50424 - protein, 274 aa, Mycobacterium avium subsp. paratuberculosis K-10
MSAFAGHAVAATLASSYSQDTIVRTSTGEAVTFWVLGALAVIGALGVVLAVNAVYSAMFLAMTMIILAVFYMIQDALFLGVVQVVVYTGAVMMLFLFVLMLIGVDSAESLRETLRGQRVAAVAAGVGFGILLIAAVGNVASGGFAGLTTANANGNVEGLAALIFSRYLWAFELTSALLITAAVGAMVLAHRERFERRKTQRELSQERFRAGGHPTPLPNPGVYARHNAVDVAALLPDGSYSKLSVSPILQSRGGDGKDVAAPEPSPSLSQGGAS

SEQ ID NO: 50425 - DNA, 537 bp, Bdellovibrio bacteriovorus HD100
  CDS (1)..(537): transl_table=11
atgacagcagatgcatttcttttctggtttttagcgtttgtcactctggcctccggccttagtgtcattttgatgtccaatccgatctactccgctttgtgcctggcgatgaccatggtgggaatctccgcattgttcgtgactctgaatgcctacttcatcgcgggcgttcagctgattgtctacgccggtgcggtcatggttttgttcacgatggtgatcatgctcttcgacttgaaaaaagacgttcaggccttcactcgtggcaagttcacgggtgtggttaagatcgcctctgtcggcctgtttgcaggcttggtagtgggtgccatcgccatgtcggtgaatctgatgggtgaaaaaaccactgataatccggtgctggtgggtacaggcatggaatcaaccaaagctttgggacagatcttgttcaccaaatacatcttcggatttgaggctttgggcgttcttcttctggtaattgcagtgggtgccgttgctttggcacgcagtaaaggtggaacacatgaacactga

SEQ ID NO: 50426 - protein, 178 aa, Bdellovibrio bacteriovorus HD100
MTADAFLFWFLAFVTLASGLSVILMSNPIYSALCLAMTMVGISALFVTLNAYFIAGVQLIVYAGAVMVLFTMVIMLFDLKKDVQAFTRGKFTGVVKIASVGLFAGLVVGAIAMSVNLMGEKTTDNPVLVGTGMESTKALGQILFTKYIFGFEALGVLLLVIAVGAVALARSKGGTHEH

SEQ ID NO: 50427 - DNA, 534 bp, Nuphar advena
  CDS (1)..(534): transl_table=11
atggatttacctgcaccaatacatgatattcttttagtatctctgggatcaggtcttatagtaggaggtctaggagtggtattacttaccaatccaatttattctgccttttcgtcgggattggttcttgtttgtatatctttattttatattccatcgaactcttattttgtagctgctgcgcagctccttatttacgtgggagccataaatgtcttaatcctatttgctgtgatgtttatgaatggttcagaatattacaattcttttcatttttggactatcggagatgggttcacttcggtagtttgtacaagtatttttttttcactaattgctactatcccaaacacgtcatggtacgggattatttggactacaagatcaaaccagatcatagaacaggacctgacaagtaatgttcaacagattgggattcatttatcaacagatttttatcttccatttgaacttatttctataatccttttagtttccttagtgggcgcaattgctatggctcgccgggaatag

SEQ ID NO: 50428 - protein, 177 aa, Nuphar advena
MDLPAPIHDILLVSLGSGLIVGGLGVVLLTNPIYSAFSSGLVLVCISLFYIPSNSYFVAAAQLLIYVGAINVLILFAVMFMNGSEYYNSFHFWTIGDGFTSVVCTSIFFSLIATIPNTSWYGIIWTTRSNQIIEQDLTSNVQQIGIHLSTDFYLPFELISIILLVSLVGAIAMARRE

SEQ ID NO: 50429 - DNA, 600 bp, Prochlorococcus marinus str. AS9601
  CDS (1)..(600): transl_table=11
atgtccattgcaataacaactcaaattatttgttttacagttttatctttagttatccttatcggagcacttggtgttgtattactcgaaagtattgtttattcagcctttcttctaggaggagttttcatgagtgtggcaggattatatcttcttttaaatgcaagttttgttgctgcagctcaagtattagtttatgtaggtgcagttaatgtattaataatatttgcaataatgttagtcaataaaaaagaagatttaaagcccataagtgacattaaatcaagaagaatcatatcaacatcaatatgtttaaccctgcttagcctgttaataagagttgacttgactaatgtatggcgcctatcaaatcctcaaaactctataggagaagaatcaactatcagaattggtgaacatctatttagtgattatttactaccatttgaagtagcatcagttttactattaatggcaatgattggagctattgtattagctagaagagatgtaatgagcaaggatatttctactggattaccagttgatcaagaattaattgaaaaatcatcagaaccattacttacaaataaaaattaa

SEQ ID NO: 50430 - protein, 199 aa, Prochlorococcus marinus str. AS9601
MSIAITTQIICFTVLSLVILIGALGVVLLESIVYSAFLLGGVFMSVAGLYLLLNASFVAAAQVLVYVGAVNVLIIFAIMLVNKKEDLKPISDIKSRRIISTSICLTLLSLLIRVDLTNVWRLSNPQNSIGEESTIRIGEHLFSDYLLPFEVASVLLLMAMIGAIVLARRDVMSKDISTGLPVDQELIEKSSEPLLTNKN

SEQ ID NO: 50431 - DNA, 600 bp, Prochlorococcus marinus str. MIT 9515
  CDS (1)..(600): transl_table=11
atgtctatagcagtcacaacacaaattatttgtttttcagtattgtctttagttgtaatagttggagcactaggggtaattcttcttgatagtattgtttactctgcattcttacttggtggagtcttcatgagtgttgcaggcttatatcttttattaaatgctagttttgttgcggcagctcaagtactagtttatgtaggagcagttaatgttctgattatttttgcaataatgctagtcaataaaaaagaagatttaaaacctattaataacatcaattcaagaagaatcatatcaacatcaatttgtttaactctcctaagtctattaattagagttgacttatcaaatgtttggagtttggcagatcctaattcctccataggcgaggaatctacaattagaattggagaacatttatttagtgattatttgcttcccttcgaagtggcgtctgtattgcttttaatggcgatgattggagctatagtattagctagaagagatgtatttaacaaagatatctcgacaggattaccagttgatcaagagttaatagagaagccaagtgagccattgctaattaaaaaaaattaa

SEQ ID NO: 50432 - protein, 199 aa, Prochlorococcus marinus str. MIT 9515
MSIAVTTQIICFSVLSLVVIVGALGVILLDSIVYSAFLLGGVFMSVAGLYLLLNASFVAAAQVLVYVGAVNVLIIFAIMLVNKKEDLKPINNINSRRIISTSICLTLLSLLIRVDLSNVWSLADPNSSIGEESTIRIGEHLFSDYLLPFEVASVLLLMAMIGAIVLARRDVFNKDISTGLPVDQELIEKPSEPLLIKKN

SEQ ID NO: 50433 - DNA, 603 bp, Prochlorococcus marinus str. NATL1A
  CDS (1)..(603): transl_table=11
atgaatatcgcttattcaacagaattaatttgctttttaattcttagtgccatcatagtttctggaagtttggcagttgttttattagaaaatattgtttactcagcatttttattaggcggagtatttatggctgtagcaggtttatatcttttgctaaatgctagttttgtcgctgcagctcaaattcttgtatatgtaggagctgtaaatgttttgatattatttgcaattatgttagttaataataaagaaaagttaaaaccaattaaaggtcttagaactagaaaattgatatctggtggggtttgtggtggattattaatcctattattgcgggttagcattaccaccaaatggaacttaccaggaccaacctctattggtgaagaagcaactgagataataggtgaacatctattcacagattatttattaccttttgaacttgcttcgattctattattaatggctatgattggagcaatcgtattagcaagaagagatgtatcaatttcaacagctgatataaatgatttaaagaatcaaaattccttaagtgataggaaagttcctcttctttccgaaaatagtataaaatga

SEQ ID NO: 50434 - protein, 200 aa, Prochlorococcus marinus str. NATL1A
MNIAYSTELICFLILSAIIVSGSLAVVLLENIVYSAFLLGGVFMAVAGLYLLLNASFVAAAQILVYVGAVNVLILFAIMLVNNKEKLKPIKGLRTRKLISGGVCGGLLILLLRVSITTKWNLPGPTSIGEEATEIIGEHLFTDYLLPFELASILLLMAMIGAIVLARRDVSISTADINDLKNQNSLSDRKVPLLSENSIK

SEQ ID NO: 50435 - DNA, 603 bp, Prochlorococcus marinus str. MIT 9303
  CDS (1)..(603): transl_table=11
atgacgattgctacttccacagaattaatctgtttcctggttctaggcgccgtggtggttctcggcagtcttggtgtcgtcttgctgggcaatatcgtctactccgcctttttgcttggtggtgtatttatggctgtggctggtctctatctgctcctcaatgccagttttgttgcagcagcacaggtgctggtttatgtgggtgcagtcaacgtgctgattctcttcgcgatcatgctggtcaacaagcgcgaagatttgaagccgatcgagggattgcctattcgaaggctgctctctggtggagtttgtgcagggttgtttgttcttttctttcgtgtggtgatcaccaccccttgggcagtgccaggccccgcagcgattggagtaggggctactgagcgaattggtgaacacttatttactgactaccttttgccttttgagctggcgtctgtgcttttactgatggccatgatcggtgcaattgtgttggcccgcagagatgttctggagactgatgttggtacaggtgatgctgtcaatcagggtctgatcgagaaggctcgaaccccgttgcttgtcgataagtccacgccctga

SEQ ID NO: 50436 - protein, 200 aa, Prochlorococcus marinus str. MIT 9303
MTIATSTELICFLVLGAVVVLGSLGVVLLGNIVYSAFLLGGVFMAVAGLYLLLNASFVAAAQVLVYVGAVNVLILFAIMLVNKREDLKPIEGLPIRRLLSGGVCAGLFVLFFRVVITTPWAVPGPAAIGVGATERIGEHLFTDYLLPFELASVLLLMAMIGAIVLARRDVLETDVGTGDAVNQGLIEKARTPLLVDKSTP

SEQ ID NO: 50437 - DNA, 645 bp, Chlorokybus atmophyticus
  CDS (1)..(645): transl_table=11
atgattttagctgagggggttcagaaattttctcttttttttcttgaaggagcggttcttgttggggctttaggagttgttttattgcctaacattctttattcggcctttttattaggcggcgttttaatgagtattgcaggaatctatttgctgttaaatgcagattttgttgctgcagcacaagtgttaatctatgtcggagcgatcaacgtattaatactatttgctattatgttggtcaataagaatgatggaagggttgcagctggaacatcaaattcgtctggggttaccaataatataattggtttaacttgtataggtttagctggttttttaatagatatgattgtaacaaccccttggctgcccaaaggagttgcagttgctactagtttatctgcaaaagctgattcaacagccgctcaaacgcaattaaaaggaagtatttctattattggtttacatatctttagtgattttttattgccctttgaagtgatctctttattgttattagttaccttagtaggggctattgttattgcacgaagggaaagattatccgatcttgaaatatcaaaaatatctttattaaatttacccgatccatcaaatggaaaaacccctagcctcaaataa

SEQ ID NO: 50438 - protein, 214 aa, Chlorokybus atmophyticus
MILAEGVQKFSLFFLEGAVLVGALGVVLLPNILYSAFLLGGVLMSIAGIYLLLNADFVAAAQVLIYVGAINVLILFAIMLVNKNDGRVAAGTSNSSGVTNNIIGLTCIGLAGFLIDMIVTTPWLPKGVAVATSLSAKADSTAAQTQLKGSISIIGLHIFSDFLLPFEVISLLLLVTLVGAIVIARRERLSDLEISKISLLNLPDPSNGKTPSLK

SEQ ID NO: 50439 - DNA, 594 bp, Angiopteris evecta
  CDS (1)..(594): transl_table=11
atgattttacccgaaccaatccataaagttattttagtaattatagaattaggtatccttttaggaagtttaggagtggtattacttaccaatatagtctattctgcactcttattgggactagtttttatctgtatatcccttctatatcttgtactaaatgctgattttgtagctgctgctcaagtattgatctacgtaggagctgtaaatgttttaaccgtatttgctgtaatgttaattgataaaccaaagaatataactcttttttcattctcaaatgtaggggataatattactttaggagtctgtacaagtctcttcatattattgactataatgattccagatgcatcatggtctgagatatatatgactaaacaatcaacgaagtttgtggaacaaggtttgacaactgatgttcagcttattgggtcccaattattaactaaatttttgcttccatttgaacttctttccatccttctcttagttgctctaataggagcaatcactatagcccgtcaggaaaggatagtagaaatagatgataataaagcttcggaatctaaagaggatttatctctcttttag

SEQ ID NO: 50440 - protein, 197 aa, Angiopteris evecta
MILPEPIHKVILVIIELGILLGSLGVVLLTNIVYSALLLGLVFICISLLYLVLNADFVAAAQVLIYVGAVNVLTVFAVMLIDKPKNITLFSFSNVGDNITLGVCTSLFILLTIMIPDASWSEIYMTKQSTKFVEQGLTTDVQLIGSQLLTKFLLPFELLSILLLVALIGAITIARQERIVEIDDNKASESKEDLSLF

SEQ ID NO: 50441 - DNA, 600 bp, Prochlorococcus marinus str. MIT 9301
  CDS (1)..(600): transl_table=11
atgtccatcgcaataacaactcaaattatttgttttacaattttgtctttagtgattctgattggagcactaggtgttgtattgctagaaagtattgtctattcagcctttcttttaggaggagttttcatgagtgtagcaggactatatcttcttttaaatgccagttttgttgctgcagcacaagtactagtttatgtgggtgcagttaatgtattaataatctttgcaataatgctagtcaataaaaaagaagatttaaaaccaatcaatgacatcaaatcaagaagaattatatcgacatcaatatgtttaaccctgcttagccttttaataagagttgacttgactaatacatggagcctatcaagtactcaaaactctataggtgaagaatcaactatcagaattggtgaacatctttttagtgattatttactcccatttgaagtagcctcagttttacttttgatggcaatgattggggctattgttttagctagaagagatgtaatgagtaaggatatttccactggattacctgttgatcaagagttaattgaaaaatcatcagaaccattgcttacaaataaaaactaa

SEQ ID NO: 50442 - protein, 199 aa, Prochlorococcus marinus str. MIT 9301
MSIAITTQIICFTILSLVILIGALGVVLLESIVYSAFLLGGVFMSVAGLYLLLNASFVAAAQVLVYVGAVNVLIIFAIMLVNKKEDLKPINDIKSRRIISTSICLTLLSLLIRVDLTNTWSLSSTQNSIGEESTIRIGEHLFSDYLLPFEVASVLLLMAMIGAIVLARRDVMSKDISTGLPVDQELIEKSSEPLLTNKN

SEQ ID NO: 50443 - DNA, 612 bp, Pseudendoclonium akinetum
  CDS (1)..(612)
atgaacctttttattatattttgtgcgctgcttatagcaagcgctttatttgtagtccaatgtaataatccagtttatgccgttttatttttaatccttgcttttttcaatgctagtgcattgacacttttagcaggccatgattacttagcagccttgcttattgttctttatgtaggtgcaacttgtactttttttttatttgcaattatgatattgaatattcaaatagcggaaatttctgagaagcggcttaaattagcaccaattagcgctattattggtattatactagctttacagttggaaacaatagtcgcttcttttgaaagcccaattgtaatggactatttacctttaattagtagtatagactccagtgggcctgagggggtagctttgctaatagatacttctactcaaatttatggcttaggagctatcttgtacactcattatgcttcttttttaattttagcaagtttgattttactatctgcaatgattggaagcattagtttaactttatcaaaaggcactggtaacctacgtcagcaagtatttcaacaaaatattcgagatttcaagcaaacagttataaaacatcgataa

SEQ ID NO: 50444 - protein, 203 aa, Pseudendoclonium akinetum
MNLFIIFCALLIASALFVVQCNNPVYAVLFLILAFFNASALTLLAGHDYLAALLIVLYVGATCTFFLFAIMILNIQIAEISEKRLKLAPISAIIGIILALQLETIVASFESPIVMDYLPLISSIDSSGPEGVALLIDTSTQIYGLGAILYTHYASFLILASLILLSAMIGSISLTLSKGTGNLRQQVFQQNIRDFKQTVIKHR

SEQ ID NO: 50445 - DNA, 525 bp, Bacillus thuringiensis serovar konkukian str. 97-27
  CDS (1)..(525): transl_table=11
atgaatggcgagtttatagcattctttatactatccttgtctgcaattatcggcggcgttcttatgttgaatttaacgaaagtcatgcatatgatgctagctctcgttctgacatttctcagcattgcgggtttgtactttcttttatcagctgaatttataggggttgcacaaattttactttactcgggtgcgatcacaattattatgatttttggcattatgttaacgaaacataacgcggaaaatgaatcacgtcttactcttcgaaaatggattatcttctttgcggttgtagcatttggggcagttatgtatttcgctgttaacaatattgattttgcaaatgagagcgcacaaggaagtttacctctccatgaaaaaaacacacttcaaatcggtacacttctctattcaaaatatattattccatttgagttaacctcagttattttacttgtagcacttgttggcgcaattattcttgcgaagaaggatgagaaagaggaggattccaatgagtag

SEQ ID NO: 50446 - protein, 174 aa, Bacillus thuringiensis serovar konkukian str. 97-27
MNGEFIAFFILSLSAIIGGVLMLNLTKVMHMMLALVLTFLSIAGLYFLLSAEFIGVAQILLYSGAITIIMIFGIMLTKHNAENESRLTLRKWIIFFAVVAFGAVMYFAVNNIDFANESAQGSLPLHEKNTLQIGTLLYSKYIIPFELTSVILLVALVGAIILAKKDEKEEDSNE

SEQ ID NO: 50447 - DNA, 534 bp, Nymphaea alba
  CDS (1)..(534): transl_table=11
atggatttacctgcgccaatacatgatattcttttagtatctctgggatcaggtcttatagtaggaggtctaggagtggtattacttaccaatccaatttattctgccttttcgttgggattggttcttgtttgtatatctttattttatattccatcgaactcttattttgtagctgctgcgcagctacttatttacgtgggagccataaatgtcttaatcttatttgctgtgatgtttatgaatggttcagaatattacaattattttcatttttggactgtcggagatggattcacttcgctagtttgtacaagtatttttttttcactaattgctactatcccaaacacgtcatggtacgggattatttggactacaagatcaaaccagatcatagaacaggacctgacaagtaatgttcaacagattgggattcatttatcaacagatttttatcttccatttgaactcatttctataatccttttagtttccttagtgggcgcaattgctatggctcgccgggaatag

SEQ ID NO: 50448 - protein, 177 aa, Nymphaea alba
MDLPAPIHDILLVSLGSGLIVGGLGVVLLTNPIYSAFSLGLVLVCISLFYIPSNSYFVAAAQLLIYVGAINVLILFAVMFMNGSEYYNYFHFWTVGDGFTSLVCTSIFFSLIATIPNTSWYGIIWTTRSNQIIEQDLTSNVQQIGIHLSTDFYLPFELISIILLVSLVGAIAMARRE

SEQ ID NO: 50449 - DNA, 618 bp, Rickettsia typhi str. Wilmington
  CDS (1)..(618): transl_table=11
atgccaatatttttttatttatttacaacattaataattattagcagtttatgcgttgttttaagcaaaaattccgtatattcagtattatggttaatttttacatttatcaatgctgcaggtctgatgattttgcttggagcagaatttttagctatgctacttatagtaatttatgttggagctgtagctgtattatttctgtttgttataatgatgttggatataaattttaatcaggcgataacaaagttaagagaaaatctatctttaagtatttttataactttaattatgtttgtagatttagtaataactgttatacttagtactaaaaacattaatcacagttccaatatatcatttgctatagcaaataatatatcaaatactaaagcaataggaagtgtactttatacagattttatgctaccatttcaaatggcaggacttatattatttgttgctatgatttcatgcattacgttaacattaaaaaaacgtgagagagtaaaatatcaagatattagaaagcaactatctcataataaaggtaatgttatattaatgacaaaacctattttaaataaaggtgttgaaaatattaaatatgaatga

SEQ ID NO: 50450 - protein, 205 aa, Rickettsia typhi str. Wilmington
MPIFFYLFTTLIIISSLCVVLSKNSVYSVLWLIFTFINAAGLMILLGAEFLAMLLIVIYVGAVAVLFLFVIMMLDINFNQAITKLRENLSLSIFITLIMFVDLVITVILSTKNINHSSNISFAIANNISNTKAIGSVLYTDFMLPFQMAGLILFVAMISCITLTLKKRERVKYQDIRKQLSHNKGNVILMTKPILNKGVENIKYE

SEQ ID NO: 50451 - DNA, 531 bp, Symbiobacterium thermophilum IAM 14863
  CDS (1)..(531): transl_table=11
gtgacaacagacctgctcatgagcggccagttctggaccttcatcatcctcgcggtggtcaccctggtgtcgacctaccgcatggtcaccacgccgctcatcacccacgccgctctgttcatggcgctctcgttcacagccgtggccggcatcttcctgctcatgcaggcggagttcatcgcggccatccaggtgcttgtctacgccggcgccatcaccacgatggtgatcttcgccatcatgctctccgggctgcgggatatcaagcggcagcagcaggagcgggtgaagctgtggcgctccaacccggccgtcctggtggtcggcgccgtgttcgccgccttcatgctgtacctgtactccaccgccaacctgccggccggcggcggtgagcggcaggtggttccggtgagcgcgatcgggtcgcagctgttcaccacctacgtgatcccgtttgaggtcgcctcgatcctgctcctggtggccatgatcggcgccatcatcctgacggcgaaggaggcggagtcgtag

SEQ ID NO: 50452 - protein, 176 aa, Symbiobacterium thermophilum IAM 14863
MTTDLLMSGQFWTFIILAVVTLVSTYRMVTTPLITHAALFMALSFTAVAGIFLLMQAEFIAAIQVLVYAGAITTMVIFAIMLSGLRDIKRQQQERVKLWRSNPAVLVVGAVFAAFMLYLYSTANLPAGGGERQVVPVSAIGSQLFTTYVIPFEVASILLLVAMIGAIILTAKEAES

SEQ ID NO: 50453 - DNA, 531 bp, Panax ginseng
  CDS (1)..(531): transl_table=11
atggatttacctggaccaatacatgattttcttttagtctttctgggatcgggtcttatattaggaggtctgggagtggtattacttcccaatccaatttattccgccttttcattgggattggttcttgtttgtacatctttattctatattctatcgaactcccattttgtagctgctgcacagctccttatttatgtaggggccataaatgttttaattctttttgctgtgatgttcatgaatggttccgaatattacaaagattttcatctttggaccattggagatggggttacttcgatggtttgtacaagtatttttgtttcactaattactactattccagatacgtcatggtacgggattatttggactacaaaatcaaaccagattatagagcaagatttgataagcaatagtcaacaaattgggattcatctatcaacagatttttttcttccatttgaactcatttcaataattctattagttgcgttaataggtgcaattgccgtagctcgtcaataa

SEQ ID NO: 50454 - protein, 176 aa, Panax ginseng
MDLPGPIHDFLLVFLGSGLILGGLGVVLLPNPIYSAFSLGLVLVCTSLFYILSNSHFVAAAQLLIYVGAINVLILFAVMFMNGSEYYKDFHLWTIGDGVTSMVCTSIFVSLITTIPDTSWYGIIWTTKSNQIIEQDLISNSQQIGIHLSTDFFLPFELISIILLVALIGAIAVARQ

SEQ ID NO: 50455 - DNA, 660 bp, Legionella pneumophila subsp. pneumophila str. Philadelphia 1
  CDS (1)..(660): transl_table=11
atgcatgaatgggtaatccaagcaattttttatgtctttgcattattgaccgtactgtcggcagtaatggtaataagccaaaacaatccagttcgttgtgttttgtttttagtgctcactttttttaccagtgcggttttatgggttttagctgaagctgaatttttagcattaatccttatcctggtatatgttggcgctgtcatgactttatttctgtttgtcgtcatgatgttaaacattgacattgaaagcatgaaaagtcatttaattaaatatctaccatttggattaataatagttgccttattgactgggttattaatggtagctatccctaaagatttatttaagaacagtgtgcaaactcaagaaaagcctttgagtgttaactcacaattaatggatttatctaccgaagatgggctggttacacctgaaaaggctacatcgaacacagaaaagttaggaatggtcctttatacagattatattcttgcctttgaaatagctgccgtcattttactagtggctattgtgtctgcaattactttggtgcataggggggctatcaggtcaaaacgacaagatatcactcagcaaattatgactcgaagggcagaacgagtgaagttgatcagtatgaagtcagagaaatag

SEQ ID NO: 50456 - protein, 219 aa, Legionella pneumophila subsp. pneumophila str. Philadelphia 1
MHEWVIQAIFYVFALLTVLSAVMVISQNNPVRCVLFLVLTFFTSAVLWVLAEAEFLALILILVYVGAVMTLFLFVVMMLNIDIESMKSHLIKYLPFGLIIVALLTGLLMVAIPKDLFKNSVQTQEKPLSVNSQLMDLSTEDGLVTPEKATSNTEKLGMVLYTDYILAFEIAAVILLVAIVSAITLVHRGAIRSKRQDITQQIMTRRAERVKLISMKSEK

SEQ ID NO: 50457 - DNA, 603 bp, Anaplasma marginale str. St. Maries
  CDS (1)..(603): transl_table=11
gtgctcagctttttgttcttctgctttgcgggagtggcggtactgtctgctgtaggtgttgtcctgttgccaaacccggtatactcggttttgagcttgattttgactttttttgtctccagtgccgtgtttatcatgttgggggcagagctggtggccatgctgctcgtcatagtgtacgtaggggcggttgccgtacttttcttgtttgttgtgatgatgctggatatcagtcgagtggggtccagacacggcttggtcaagcactatccgcttggagttgcgtgcatgtttttgttttttggctgcatggtatactcggtttttcatgccaagtcctctgcagtcgatggttctggcagtgggttcggcagcgtggataacgtgttccttataggcttgcagctttacactgaatacgcttatgcgttccagctggccggggttttgttactcattgccggggttggcagcctaattttgatagtcggggggagcagtggtcggtccctgaagcaggatgttggccagcaggttgggagatcatctaggatcaagttactttcacctgaagtaggtgtgggcgtttctgatgcggactga

SEQ ID NO: 50458 - protein, 200 aa, Anaplasma marginale str. St. Maries
MLSFLFFCFAGVAVLSAVGVVLLPNPVYSVLSLILTFFVSSAVFIMLGAELVAMLLVIVYVGAVAVLFLFVVMMLDISRVGSRHGLVKHYPLGVACMFLFFGCMVYSVFHAKSSAVDGSGSGFGSVDNVFLIGLQLYTEYAYAFQLAGVLLLIAGVGSLILIVGGSSGRSLKQDVGQQVGRSSRIKLLSPEVGVGVSDAD

SEQ ID NO: 50459 - DNA, 603 bp, Azoarcus sp. EbN1
  CDS (1)..(603): transl_table=11
atggatttcaagactttcgtcttttacgttcttgccgtgatcatggttttcgccgggttgagagtcattacggctcgaaacccggtacacgcggccttgttcctggtgctgtcgttcttctcggcaggcgggatctggctgttgctggcggcggagtttctcgcggttgtcctcgtgatggtgtatgtgggcgcagtcatggtgctgttcctgttcgtcgtcatgatgctggacatcaacctcgatcggctgcgacagggattctggagctatctcccggtgggcgcgctgatcggcgtgctgctggtggtcgagatggcgctggtgctcggtgggcggtacttcggactggaagcaatgcccgagccgccggcggctcaggcggggtacagcaacacgcgtgagttggggcggctgctctataccgattacgtgtatccgttcgagctcgcttcgctgttgctgctcgtggcgatgatcgtcgcggtgaccctgacgctgcgcaagcgcaagggcgtgcgttatctcaatccgtccgaacagatttcgatcaagcgtggcgatcgcgtcgaactgatttcgatgcccgccgagaaagaataa

SEQ ID NO: 50460 - protein, 200 aa, Azoarcus sp. EbN1
MDFKTFVFYVLAVIMVFAGLRVITARNPVHAALFLVLSFFSAGGIWLLLAAEFLAVVLVMVYVGAVMVLFLFVVMMLDINLDRLRQGFWSYLPVGALIGVLLVVEMALVLGGRYFGLEAMPEPPAAQAGYSNTRELGRLLYTDYVYPFELASLLLLVAMIVAVTLTLRKRKGVRYLNPSEQISIKRGDRVELISMPAEKE

SEQ ID NO: 50461 - DNA, 603 bp, Silicibacter pomeroyi DSS-3
  CDS (1)..(603): transl_table=11
atgagcgtgtttgcgttttacctctttgccatcagcgccatcaccggcgggctgttcaccgtgatcagccgccagccggtgcattcggttctgtggctcatcctggccttcatctcgtcggcggggctgttcgtgctgttgggggccgagttcgtggccatgcttctggtcatcgtctatgtgggcgcggtcgcggtgctgttcctgttcgtcgtcatgatgctggacgtggatttcgccgagctgaaggccgagatggcgcgctatatgccactggccttgctgatcgggctggtgatcctgatgcagtttgtcatggcctatggcgcctgggaaaccgccgaaggcgcggccgggcatctggcccagccgatgccggcggatcgccacaataccgaggccctgggccttatcatttatgaccagtatttccttctgttccagcttgccggtctgatcctgctggtggcgatgattggcgcgatcgtgctgaccctgcgccaccgtcaggacgtcaagcgccaggacatcgtcgcgcagatgatgcgcgacccggccaaagcgatggaactcaaggacgtgaaaccggggcaggggctgtga

SEQ ID NO: 50462 - protein, 200 aa, Silicibacter pomeroyi DSS-3
MSVFAFYLFAISAITGGLFTVISRQPVHSVLWLILAFISSAGLFVLLGAEFVAMLLVIVYVGAVAVLFLFVVMMLDVDFAELKAEMARYMPLALLIGLVILMQFVMAYGAWETAEGAAGHLAQPMPADRHNTEALGLIIYDQYFLLFQLAGLILLVAMIGAIVLTLRHRQDVKRQDIVAQMMRDPAKAMELKDVKPGQGL

SEQ ID NO: 50463 - DNA, 606 bp, Synechococcus elongatus PCC 6301
  CDS (1)..(606): transl_table=11
gtgactcttgccgaaggcgttcaactagttacattcatcatcctgacggctggggtggttttggcagccctaggtgttgtactcagcagcaacattgtctactcggcctttttgctgggaggcgcattcatcagcatcgctggtctctacctgctgctgaatgccagctttgtggcctttgcccaagtgctgatttatgttggcgctgtcaacgtcttaatcctgtttgcgatcatgttggtcaacaaacgggaagacttccgaccactcaagtttaattggctgcgcaaagggctgacggttctggtttgtggcggtctctttgccctcctgagcctgactgtaatttcgaccccttgggcggtgacgccaacccctggtgccagtggcgatgaagcgatttacctgatcggtgaacacttcttcagcgactacctgctgccctttgagttggcttcggtgttgctgttgatggcgatgattggggcgatcgtcttggcccgccgcgacttcgaacctgaagacctgatcacgggtgcggccgcagatttgcagctacccgagcgatcgcgggaagagttgctgacaggtgctggcaagaaataa

SEQ ID NO: 50464 - protein, 201 aa, Synechococcus elongatus PCC 6301
MTLAEGVQLVTFIILTAGVVLAALGVVLSSNIVYSAFLLGGAFISIAGLYLLLNASFVAFAQVLIYVGAVNVLILFAIMLVNKREDFRPLKFNWLRKGLTVLVCGGLFALLSLTVISTPWAVTPTPGASGDEAIYLIGEHFFSDYLLPFELASVLLLMAMIGAIVLARRDFEPEDLITGAAADLQLPERSREELLTGAGKK

SEQ ID NO: 50465 - DNA, 687 bp, Nicotiana tabacum
  CDS (1)..(687)
atgatactttctgttttgtcgagccctgctttggtctctggtttgatggttgtacgtgctaaaaatccggtacattccgttttgtttctcatcccagtctttcgcaacacttcaggtttacttcttttgttaggtctcgacttcttcgctatgatcttcccagtagtttatataggagctatagccgtttcattcctattcgttgttatgatgttccatattcaaatagcggagattcacgaagaagtattgcgctatttacctgtgagtggtattattggactgctcttttggtgggagatgttctttattttagataatgaaagcattccattactaccaacccaaagaaatacgacctctctgagatatacggtttatgccggaaaggtacgaagttggactaatttggaaacattgggcaatttactttatacctactatttcgtctggtttttggtttctagtcttattttattagtagccatgattggggctatagtactgactatgcataggactactaaggtgaaaagacaggatgtatttcgacgaaatgctctggattctaggaggactataatgaggaggacgacagacccactcacgacaataaggagaagcagtggttcgaatccacatcgtgagaccaggacagtgtggagaagcatcgataaatgctattaa

SEQ ID NO: 50466 - protein, 228 aa, Nicotiana tabacum
MILSVLSSPALVSGLMVVRAKNPVHSVLFLIPVFRNTSGLLLLLGLDFFAMIFPVVYIGAIAVSFLFVVMMFHIQIAEIHEEVLRYLPVSGIIGLLFWWEMFFILDNESIPLLPTQRNTTSLRYTVYAGKVRSWTNLETLGNLLYTYYFVWFLVSSLILLVAMIGAIVLTMHRTTKVKRQDVFRRNALDSRRTIMRRTTDPLTTIRRSSGSNPHRETRTVWRSIDKCY

SEQ ID NO: 50467 - DNA, 519 bp, Campylobacter jejuni RM1221
  CDS (1)..(519): transl_table=11
atgatagaaaatttggcttttgtattttttagtgtagtggttttaggtttttttggcattgcggttttaagtaaaaatatgctttattctctttcggctttagcaggtggaatggtgtttttatcgggattttattttttacttgatgcagagtttttaggcgtgatacaaattattgtttatagcggagctgtacttggactttatagttttgcgatgatgttttttgatgcttctaaagaatttaaagaacaacttaaagctaaaaaaagtttttttactttggtggttttaagtgcgattttacttttgactatgcttataggttttaaataccaaaatatcagcacggatttgcctttaaatgatcctgctttgtttgattttaataaacaactggctttagcgattttttcaaaatatcttttggcttttgagtttatagctattttacttttgattgctttagtgtgtgctatagtgcttactcataaagagcttacaaaggaaaaacaatga

SEQ ID NO: 50468 - protein, 172 aa, Campylobacter jejuni RM1221
MIENLAFVFFSVVVLGFFGIAVLSKNMLYSLSALAGGMVFLSGFYFLLDAEFLGVIQIIVYSGAVLGLYSFAMMFFDASKEFKEQLKAKKSFFTLVVLSAILLLTMLIGFKYQNISTDLPLNDPALFDFNKQLALAIFSKYLLAFEFIAILLLIALVCAIVLTHKELTKEKQ

SEQ ID NO: 50469 - DNA, 483 bp, Dehalococcoides ethenogenes 195
  CDS (1)..(483): transl_table=11
gtggaaatagcgttctggattatagccataacctgtatagcctccgccttgctggtggtgggagtgaaaaatattttccactcatccctctggctgatactctgtttcctttcggttgccggcgtgttcctgctgctttcggcagactttctggcagcagtgcagatacttatttatatcggtgctatatcggtactgataatactggcaatcatgcttacccgtgaggttcagcggggcaaccttaccaacaagcttaaaataccggctctggctgttgttaccgctttgggcgggataatgacctatatgcttatcagctcaaactggacctccagtgacgcacccgccccctccaccaccaccgccggcctggccgaaatgcttttcggttcagacgggttcgggctgggagtactgattacgggtgtaatattactggtggccattatcggggctatagtactggtgagggacaaataa

SEQ ID NO: 50470 - protein, 160 aa, Dehalococcoides ethenogenes 195
MEIAFWIIAITCIASALLVVGVKNIFHSSLWLILCFLSVAGVFLLLSADFLAAVQILIYIGAISVLIILAIMLTREVQRGNLTNKLKIPALAVVTALGGIMTYMLISSNWTSSDAPAPSTTTAGLAEMLFGSDGFGLGVLITGVILLVAIIGAIVLVRDK

SEQ ID NO: 50471 - DNA, 645 bp, Rhizopus oryzae
  CDS (1)..(645)
atgaacgcaattctattagatttattggtttttggttctgtattatcaggtattttagtaattacatcacgaaatcctgtagtttctgttttatttttaatttctgtttttattaatgtagcttgttatttaattttattaggtatcaattttatcggtcttgcatatttaattgtttatgtaggagcaattgctattttatttttattcgtaattatgatgttaaatattaaattagtagaattacaagattcttcagaagattattctaatccatatccattagcttttgtattaggtactttatttgtaagtggtttaagtttaactaataaaaatatttggggagttcattcagaacaatcattatttggaagttctaatgggtctggtattaaattagatttatctggactttttgattgggttaatttattatcatttaaatctaatacattagaaacattaacaattaatcattcaaattgggataatgtatttgtatctatggatcaaattaacagtattggtcaagtattatacacatctcatgcattatttttaattgtagcaagtatgattctattattagctatggtgggacctattattttatgtcttaaccctactaaacgagtatcttaa

SEQ ID NO: 50472 - protein, 214 aa, Rhizopus oryzae
MNAILLDLLVFGSVLSGILVITSRNPVVSVLFLISVFINVACYLILLGINFIGLAYLIVYVGAIAILFLFVIMMLNIKLVELQDSSEDYSNPYPLAFVLGTLFVSGLSLTNKNIWGVHSEQSLFGSSNGSGIKLDLSGLFDWVNLLSFKSNTLETLTINHSNWDNVFVSMDQINSIGQVLYTSHALFLIVASMILLLAMVGPIILCLNPTKRVS

SEQ ID NO: 50473 - DNA, 513 bp, Smittium culisetae
  CDS (1)..(513): transl_table=4
atgattataacaccttttattaatattttaatttttatttttggtttattaatttttctttttattaatcctatttattctgtactttctttaatttctgtttttattttaactggtattttatttattttttatggtttaacttttataggtttatcatattttattatttatgtaggagctatttctattttatttatttttgctattatgatgcttgaaactgactttccttctactataaaatatttagatttaaaaaaagatatacctttaataacaggtattttatgtatattaatttattattatttagatttatcttatataaataataataaaaatattatttctggaattaataatatttatttttattcttccaatattaaattaattggttattgtttatatactacacattgtctttggttaattttaataagttttattcttcttttagctatgattggacctattattttatgtttaaaaatgaataaaaattattaa

SEQ ID NO: 50474 - protein, 170 aa, Smittium culisetae
MIITPFINILIFIFGLLIFLFINPIYSVLSLISVFILTGILFIFYGLTFIGLSYFIIYVGAISILFIFAIMMLETDFPSTIKYLDLKKDIPLITGILCILIYYYLDLSYINNNKNIISGINNIYFYSSNIKLIGYCLYTTHCLWLILISFILLLAMIGPIILCLKMNKNY

SEQ ID NO: 50475 - DNA, 603 bp, Mortierella verticillata
  CDS (1)..(603): transl_table=4
atgaataatatattattagatttattaacatttacttctgtattatcagctatattggtaattacagctcgaagtcctgttatctccgtattattcttaattgctgtatttataaatatagctggttatttaattttattaggtgttaactttatagcattatcatacataatggtatatataggagctatagctattttattcttatttgtaattatgatgctaaatgtgcgtttaactgaacttcacgaaataggtagtgattatagcaaaaatttccctttagctatagttgtagctgcttcattaagttatattatattatcaaattctttaactaaatcaattgatcaaatttatttaatcacagcactttttgataaattaaatttcttaaattcaggtataaatactactacagataattatatcaatattggatataatactatctataataacatctttgtgaattacgaacaaattcaagctataggtaatataatgtattcttcatatggattatatttaatcttatgttcttttgtattattattagcaatgcttggtcctatcattattacattagataaaaaaatgtaa

SEQ ID NO: 50476 - protein, 200 aa, Mortierella verticillata
MNNILLDLLTFTSVLSAILVITARSPVISVLFLIAVFINIAGYLILLGVNFIALSYIMVYIGAIAILFLFVIMMLNVRLTELHEIGSDYSKNFPLAIVVAASLSYIILSNSLTKSIDQIYLITALFDKLNFLNSGINTTTDNYINIGYNTIYNNIFVNYEQIQAIGNIMYSSYGLYLILCSFVLLLAMLGPIIITLDKKM

SEQ ID NO: 50477 - DNA, 672 bp, Neisseria gonorrhoeae FA 1090
  CDS (1)..(672): transl_table=11
atgactttttccgtgattctgttctatatccttgccgccatcgttttgtacggtgcggttcgtaccgttaccgccaaaaaccctgtccatgccgctttgcatctggtgctgaccttctgcgtgagcgcgatgatttggatgctgatgcaggcggagtttttgggcgtgacgctggtggtggtttacgtcggcgccgtaatggtgttgttcctgttcgtcgtgatgatgctgaatatcgacatcgaggaaatgcgcgccggtttctggcggcacgcgcctgttgccggtgtggtcggtacgttgttggcggttgccctgatcctgattctggtcaacccgaaaaccgacctggccgcatttggtctgatgaaagacattccggccgattacaacaatatccgcgatttgggcagccgtatttataccgactacctgttgccgtttgaattggcggcggtattgctgctgttgggcatggtggccgcgattgcattggttcaccgcaaaaccaccaatccgaaacgtatggatccagccgaccaagttaaagtacgcgccgatcaaggccgtatgcgtctggtgaaaatggaagcggtcaaaccgcaagtcgaatctgccgaagaaagcgaagtttcagacggcctcaagacggaaggggagggcaaagcatga

SEQ ID NO: 50478 - protein, 223 aa, Neisseria gonorrhoeae FA 1090
MTFSVILFYILAAIVLYGAVRTVTAKNPVHAALHLVLTFCVSAMIWMLMQAEFLGVTLVVVYVGAVMVLFLFVVMMLNIDIEEMRAGFWRHAPVAGVVGTLLAVALILILVNPKTDLAAFGLMKDIPADYNNIRDLGSRIYTDYLLPFELAAVLLLLGMVAAIALVHRKTTNPKRMDPADQVKVRADQGRMRLVKMEAVKPQVESAEESEVSDGLKTEGEGKA

SEQ ID NO: 50479 - DNA, 591 bp, Huperzia lucidula
  CDS (1)..(591): transl_table=11
attgatttacccgaattcttttataaggctattctgcttcttatagagtcaggtgttattctaggaagtttaggagtagttttattcacaaatatagtgtattctgcttttcttttagggtgggttcccgtctgtatatccttcctatatatcttattgaatgcggatttcgtagctgctgtacaaattctaatttatgtaggaaccataaatgttttaattgtatttgctgttatgctgataaacaagccacaatattttcgttttttaaaatattggactgtaggagatggtactgctttagcactttgtacaagtccttttctttcaataattgctgcaattctgagtacaccatggtccaaaatatctttaatcgtattgtcgaacaagatcgtggaggaacctttaacagataacgttcaacgtattggatttcattcattaactgattctccgcttccattcgaactactttctataattcttttagttgctccagtaggagctattactatggctcgtcgagaagaagcagttgaagctgaagagagtgaagcattaaagaccaaagatgattttccattttga

SEQ ID NO: 50480 - protein, 196 aa, Huperzia lucidula
MDLPEFFYKAILLLIESGVILGSLGVVLFTNIVYSAFLLGWVPVCISFLYILLNADFVAAVQILIYVGTINVLIVFAVMLINKPQYFRFLKYWTVGDGTALALCTSPFLSIIAAILSTPWSKISLIVLSNKIVEEPLTDNVQRIGFHSLTDSPLPFELLSIILLVAPVGAITMARREEAVEAEESEALKTKDDFPF

SEQ ID NO: 50481 - DNA, 513 bp, Bacteroides fragilis NCTC 9343
  CDS (1)..(513): transl_table=11
atgggacttacacttgaaacagtagtattctactttctggcagtgttcatcattgccatgtccatactgacagtgaccacgcagcgtatcgtgcgttcggccacttacctgctgttcgtgcttttcggcacagcaggtatctactttctgttaggatacactttcctcggatcggtacagatcatggtctatgccggaggtatcgtggtgctctatgtattctccatcctgctgacgagtggagaaggcgaccgggccgctcacctgaaacggagtaaattcctggcagggcttgtcactacgattataggtgcaatcctggtgctcttcattacactgacacacaaatttgtgccgacaagcgatccggaacctgtagaaatcagtatcaagaccatcggacatgctttgttaagcagtggtaaatatggatatgtattgccttttgaagcagtcagcattctgttgctggcctgtatcgtgggcggattattaattgcacgtaaaagatag

SEQ ID NO: 50482 - protein, 170 aa, Bacteroides fragilis NCTC 9343
MGLTLETVVFYFLAVFIIAMSILTVTTQRIVRSATYLLFVLFGTAGIYFLLGYTFLGSVQIMVYAGGIVVLYVFSILLTSGEGDRAAHLKRSKFLAGLVTTIIGAILVLFITLTHKFVPTSDPEPVEISIKTIGHALLSSGKYGYVLPFEAVSILLLACIVGGLLIARKR

SEQ ID NO: 50483 - DNA, 468 bp, Candida metapsilosis
  CDS (1)..(468): transl_table=4
atgtttttaattagcggtattagtagtatattagctataggtctattatcgccagttcaatcaattgtatgtttaatagtattatttgtaagtgcagctattagtttatattctaatgggtttgtacttatgggtatactttatgtacttatatatgttggtgctatagctatattatttttatttatattatcattattaaatatagaatataattataagggaacaattcatcctttaatattaactatattacttatatgtttaataccattagatttatcatatgaaacatatggtatagttgaaaatgttaatatagcttatccatttaatggtttattagattgagatttagaattaacaactgttggttctttattatatactgaatatgctattcctatgattttaattggtttaattttaattctttctgttataggggctattgctattactaaataa

SEQ ID NO: 50484 - protein, 155 aa, Candida metapsilosis
MFLISGISSILAIGLLSPVQSIVCLIVLFVSAAISLYSNGFVLMGILYVLIYVGAIAILFLFILSLLNIEYNYKGTIHPLILTILLICLIPLDLSYETYGIVENVNIAYPFNGLLDWDLELTTVGSLLYTEYAIPMILIGLILILSVIGAIAITK

SEQ ID NO: 50485 - DNA, 531 bp, Cucumis sativus
  CDS (1)..(531): transl_table=11
atggatttgcctggaccgatacatgattttcttgtagtcttgtggggatcaggtcttatattaggaagtatgggagtactattatttaacaactccatttattctgctttttcgttgggactggttcttgtttctatatccttattctatattctagcaaacgcccagtttgtagctgctgcgcaactccttatttacgtgggagctataaatgttttaatcatatttgctgtgatgttcatgaagggttcagaatattccaaagattttaatctttggaccgttgggaatggagttacttttctggtttgtacaagtatttttgtttcactaatgactactattgtggatacgtcatggtatggtattatttggactacacgatcaaatcagattctagagcaagatttaataagtaatagtcaacaaattggaatttatttatcaacatatttttttcttccatttgaactcatttcgatcattcttttagctgctttgatcggcgcaattgccgtggctcgccagtaa

SEQ ID NO: 50486 - protein, 176 aa, Cucumis sativus
MDLPGPIHDFLVVLWGSGLILGSMGVLLFNNSIYSAFSLGLVLVSISLFYILANAQFVAAAQLLIYVGAINVLIIFAVMFMKGSEYSKDFNLWTVGNGVTFLVCTSIFVSLMTTIVDTSWYGIIWTTRSNQILEQDLISNSQQIGIYLSTYFFLPFELISIILLAALIGAIAVARQ

SEQ ID NO: 50487 - DNA, 597 bp, Dechloromonas aromatica RCB
  CDS (1)..(597): transl_table=11
atggattttcaaactgcggttttttacttcctgtcggcgattctggtcttcgcgagtcttcgcgtgatcactgcccgcaacccggttcacgccgcgttgcacctgattctcgccttcttcacctgcggcggcatctgggcgctgctgcaggccgagttcctggcgatcgccatcatcctcgtctatgtcggcgcggtcatggtgctcttcctgttcgttgtgatgatgctcgatatcaatatcgaccgtattcgcgagggattctggaattatctgcccctcggtgccttgctcggtctgctgatggtcatggaaatgggcttggtgctcggcagcaagtacttccaggtgccggcagctgaagcgatggtaccggctggggtatccaataccaaggctattggcgcgctgatgttcagcgattacgtctatccgttcgaactggcctctttgatcttgctcgtcggcatgattgcggcgatcgtcctgacctaccgtggtccaaagaagtccaagtacaccaacccaaatcagcaggtcttcgtcaaggcgaaggatcgcgtccgcgtcctgcagatgccggttgaaaaagactga

SEQ ID NO: 50488 - protein, 198 aa, Dechloromonas aromatica RCB
MDFQTAVFYFLSAILVFASLRVITARNPVHAALHLILAFFTCGGIWALLQAEFLAIAIILVYVGAVMVLFLFVVMMLDINIDRIREGFWNYLPLGALLGLLMVMEMGLVLGSKYFQVPAAEAMVPAGVSNTKAIGALMFSDYVYPFELASLILLVGMIAAIVLTYRGPKKSKYTNPNQQVFVKAKDRVRVLQMPVEKD

SEQ ID NO: 50489 - DNA, 723 bp, Ralstonia eutropha JMP134
  CDS (1)..(723): transl_table=11
atggaaggatgccgcaggcgcgggccacccggtaggggaggtttgtgccgaaggccaagagaggatccgacaaggaccatggaactcacgaccaccatcttctacgtctttgcgctggtgctggtgctctccgcactgaaagtcatcaccgcgaagaacccggtgcactccgcactgttcctcgtactgtcgttcttcacggccgcggcgatctggttgctgctcaaggcagaattcctcgccatcctgctggtgctggtgtatgtcggcgccgtgatggtgctgttcctgttcgtagtcatgatgatcgatatcgacatcgaacatctgcgcagggatttctggacgtacgtgccgctcgcgtctgtggtcggtgcgctgatcattgccgaaatggccatcgtgctggtgcgcaacttcatcggcacgactgcgccggtgctgcccgccggttcgcaggatccgggctactcgaacaccgccgcgctcggcaagctgatctacaacgactatatctatgcgttcgaagtggccggcatcatcctgctggtggctatcatcgcggccgttgctttgaccctgcgccgccgcaaggatgtcaagggccaggatattccgtcgcagctgcgtactcgccgcgacgaccgcgtacgcctggttgccatgcctgctgaaagccagactgcccaggccgacgccgcggcgactgccaacaagaactaa

SEQ ID NO: 50490 - protein, 240 aa, Ralstonia eutropha JMP134
MEGCRRRGPPGRGGLCRRPREDPTRTMELTTTIFYVFALVLVLSALKVITAKNPVHSALFLVLSFFTAAAIWLLLKAEFLAILLVLVYVGAVMVLFLFVVMMIDIDIEHLRRDFWTYVPLASVVGALIIAEMAIVLVRNFIGTTAPVLPAGSQDPGYSNTAALGKLIYNDYIYAFEVAGIILLVAIIAAVALTLRRRKDVKGQDIPSQLRTRRDDRVRLVAMPAESQTAQADAAATANKN

SEQ ID NO: 50491 - DNA, 603 bp, Ehrlichia canis str. Jake
  CDS (1)..(603): transl_table=11
atggtttattttttatttcacttttttgcagcattgatagtattatcatcggtagctgtagtttatatatcaaatcctgtttactctgtattgtttttaattttaacgtttttcatatctagtacattatttattttattaggtgcagagttaatagcaatgttagttataatagtttatgttggtgctgtagctgtactgtttttgtttgtagttatgatgctggatataaattattcgagatttaaaaatgtttttacgaaatatcttgctatagggttgctttgcggtgttatattatttgttaatatagtgtttattattaggcaatctgcaacaactgagttagtaacagaatccgtgcagtatgtaagtaatgttgttgcaattggtaatttaatatatactgagtatatgtatatatttcatttatctggtatattgcttttaatatcaataattggagctttagtattgactttacgtgctaaaaacagtagtgtacataggcaaaatataaatatgcaaatcaatagaccatcttctataaaatatgtaagtgttaaagtaaaagagggagttaattatgaagattctaattga

SEQ ID NO: 50492 - protein, 200 aa, Ehrlichia canis str. Jake
MVYFLFHFFAALIVLSSVAVVYISNPVYSVLFLILTFFISSTLFILLGAELIAMLVIIVYVGAVAVLFLFVVMMLDINYSRFKNVFTKYLAIGLLCGVILFVNIVFIIRQSATTELVTESVQYVSNVVAIGNLIYTEYMYIFHLSGILLLISIIGALVLTLRAKNSSVHRQNINMQINRPSSIKYVSVKVKEGVNYEDSN

SEQ ID NO: 50493 - DNA, 483 bp, Dehalococcoides sp. CBDB1
  CDS (1)..(483): transl_table=11
gtggaaatagcgttctggattatagccataacctgtatagtctccgccttgctggtggtgggagtgaaaaatattttccactcatcactctggctgatactctgtttcctttcggtggcaggtgtattcctgcttctttcagctgactttctggcggcagtgcagatacttatctatatcggcgctatatcggtgcttattatactggccatcatgcttacccgtgaggttcagcgcggcaatcttaccaataaactcaagataccggctctatttgttgttaccgctctaggcgggataatgacctatatgcttatcagttcaaactggacttcaagcgacgcccctcccccgtctaccaccactgcagggcttgccgatatgcttttcggggcagacgggtttgggctgggagtactgctgacgggcgtaatattactagtcgccattatcggggctatagtgctggtgagggataaataa

SEQ ID NO: 50494 - protein, 160 aa, Dehalococcoides sp. CBDB1
MEIAFWIIAITCIVSALLVVGVKNIFHSSLWLILCFLSVAGVFLLLSADFLAAVQILIYIGAISVLIILAIMLTREVQRGNLTNKLKIPALFVVTALGGIMTYMLISSNWTSSDAPPPSTTTAGLADMLFGADGFGLGVLLTGVILLVAIIGAIVLVRDK

SEQ ID NO: 50495 - DNA, 600 bp, Epidermophyton floccosum
  CDS (1)..(600): transl_table=4
atgatgcaattaaatttatatgtagataaattaaataatggatttaattcaaatattttagatattttagctcttattagtataatgtttggtatatatactatagtatgtaaaaatcctgtaatttctgtattatttttaataggtttattttcaacaatttctatttatttaatattaataggtttaacatttataggtttatcttatttattagtatatattggagcagtatctattttatttttatttattttaatgttaattaatataagaatttcagaattagttagtactaataataattatataccattagctgtattaagtatgataacattagtttatatattaggtcaaaaagtaataactaatgtagtacaattaaatacattttcatcttctttatttgaaaaaagttttaaagaatgaataaattattctaatagtttaagttgagatactaatttaatagatataacacatacaagtgctataggtaatataatgtatagtaattattcactatgacttataattatctcattaattctattattagctatggtaggttcaatagttatttctataggtagataa

SEQ ID NO: 50496 - protein, 199 aa, Epidermophyton floccosum
MMQLNLYVDKLNNGFNSNILDILALISIMFGIYTIVCKNPVISVLFLIGLFSTISIYLILIGLTFIGLSYLLVYIGAVSILFLFILMLINIRISELVSTNNNYIPLAVLSMITLVYILGQKVITNVVQLNTFSSSLFEKSFKEWINYSNSLSWDTNLIDITHTSAIGNIMYSNYSLWLIIISLILLLAMVGSIVISIGR

SEQ ID NO: 50497 - DNA, 636 bp, Thiobacillus denitrificans ATCC 25259
  CDS (1)..(636): transl_table=11
atgtatacgaccgcgatcttctacttcttcgctgccatcctcgtgttcgccggattgcgcgtgatcacggcgcgcaacccggtgcacgcggcgctattcctcgttcttgcctttttcaccgccgcggggctgtggctgctgctcgaagccgaattcctcgcgatcacgctggtgttggtctacgtcggcgcggtcatggtgctgttcctgttcgtggtcatgatgctcgacatcaacctcgaccagttgcgcgaggggttctggaactacctgccgctcgccggcgtcgtggccatactgctggtgatcgagatggcgctcattctcggcggacgccacttcggcctcgatgtgatcggcgtgccgccggcgcagcctgccgactacagcaataccaaggaactcgggcgccttatctataccgactacgtctacgccttcgaactcgccgcagtgatcctgctggttgccatcgtcgcggccattgcgctcacgctgcgccggcgcaaggacacgaagtacatcgatccggcgcagcaggtgaaggtcaagcgtaacgaccggttgcgcatcatcaagatgccggccgagaaaaaagccacggccggcgcgccggcagggggaggggacgcgtga

SEQ ID NO: 50498 - protein, 211 aa, Thiobacillus denitrificans ATCC 25259
MYTTAIFYFFAAILVFAGLRVITARNPVHAALFLVLAFFTAAGLWLLLEAEFLAITLVLVYVGAVMVLFLFVVMMLDINLDQLREGFWNYLPLAGVVAILLVIEMALILGGRHFGLDVIGVPPAQPADYSNTKELGRLIYTDYVYAFELAAVILLVAIVAAIALTLRRRKDTKYIDPAQQVKVKRNDRLRIIKMPAEKKATAGAPAGGGDA

SEQ ID NO: 50499 - DNA, 534 bp, Acorus calamus
  CDS (1)..(534): transl_table=11
atggatttacctggaccaatacatgatgttcttttagtatttctgggatcaggtcttatattaggaggtttaggagtggtattacttaccaatccaatttattctgccttttcattgggattggttcttgtttgtatatccttattctatattctatcgaactcctattttgtagctgctgcacagctccttatttacgtgggagccgtaaatgtcttaatcatatttgctgtgatgttcatgaatggttcagactattccaacgatttctatctttggaccgttggggatggagtcacttcactggtttgtacaagtattcttttttcactaattactactatcctagatacgtcatggtacggaattatttggaatacaggatcgaaccagattgtagagcaggacttaacaagtaacgttcaacaaattggaattcatttatcaacagatttttatcttccatttgaactcgtttcaataattcttttagttgccttgataggtgcaattactatggcgcgtcagtactaa

SEQ ID NO: 50500 - protein, 177 aa, Acorus calamus
MDLPGPIHDVLLVFLGSGLILGGLGVVLLTNPIYSAFSLGLVLVCISLFYILSNSYFVAAAQLLIYVGAVNVLIIFAVMFMNGSDYSNDFYLWTVGDGVTSLVCTSILFSLITTILDTSWYGIIWNTGSNQIVEQDLTSNVQQIGIHLSTDFYLPFELVSIILLVALIGAITMARQY

SEQ ID NO: 50501 - DNA, 609 bp, Anabaena variabilis ATCC 29413
  CDS (1)..(609): transl_table=11
gtgaatctagcggaaggagtacaggttgtttcctttggcatactagctacgatgttgattggaaccgcccttggtgtggtgctagcatccagcatcgtctattctgcctttttactgggaggtgtattcatcagtattgctggaatgtacctgttgctaaatggtgatttcgtcgccgccgcccaagtgctggtttatgttggggcggtaaacgtgttgattttgttcgctattatgttggtgaacaagcggcaggattttataccttatcctagcgctggcatacggaaaattttgacggcgatcgtcagcgtcggattattcgcgttgttaagcactatggtgttagctacaccttgggcttactcgaccactcctaaagtaggagatggttcgatcattgtgattggggagcatttctttagcgacttcttgctaccttttgaactggcttctgttttgttgttaatggcgatggtgggagcaattattttggcacgtcgtgagtacctgcctgaagtaacaccatctgacttacctcaaaccgtgttgacattaccagaacgccccagagaattagtaggcgctggtagcgaaactcaagagtaa

SEQ ID NO: 50502 - protein, 202 aa, Anabaena variabilis ATCC 29413
MNLAEGVQVVSFGILATMLIGTALGVVLASSIVYSAFLLGGVFISIAGMYLLLNGDFVAAAQVLVYVGAVNVLILFAIMLVNKRQDFIPYPSAGIRKILTAIVSVGLFALLSTMVLATPWAYSTTPKVGDGSIIVIGEHFFSDFLLPFELASVLLLMAMVGAIILARREYLPEVTPSDLPQTVLTLPERPRELVGAGSETQE

SEQ ID NO: 50503 - DNA, 654 bp, Aspergillus niger
  CDS (1)..(654): transl_table=4
atgaataatatttttttattaaacgattatataactcatgggtatagattagaatttgtagattttatttatataatttctattttatttgggatatttactactattagtagaaaccctctggtatctgcagtatttttaataggggtatttgttgatatagcaggagtattaatattagtaggagatgatgatataggagtatcctcatatattttagtatatgtaggggctgctgccactttatttttactcatattaatgttaattaatatgagaatttctgaattagtaagtgaaactaatcgcgataccccttgagctgttataactgtatcacttttttattttataatgggacaagtaacccctagtaatttcacagataacacaatagtcactagttcatcaacttcattttctgaagtatatgatctacaagtagatgatgaaatattaaatatagtagatttacaacaagaaacagcttctgctagtagtaaaagtggagatacttcattagtagaacttcctcatcttagcgggataggtaatagtatgtatactaactattcgttatgattaataataagttcagtaatattattagtaggtatggtaggtgctatagttataactataaaacaaaaatag

SEQ ID NO: 50504 - protein, 217 aa, Aspergillus niger
MNNIFLLNDYITHGYRLEFVDFIYIISILFGIFTTISRNPLVSAVFLIGVFVDIAGVLILVGDDDIGVSSYILVYVGAAATLFLLILMLINMRISELVSETNRDTPWAVITVSLFYFIMGQVTPSNFTDNTIVTSSSTSFSEVYDLQVDDEILNIVDLQQETASASSKSGDTSLVELPHLSGIGNSMYTNYSLWLIISSVILLVGMVGAIVITIKQK

SEQ ID NO: 50505 - DNA, 615 bp, Rhodobacter sphaeroides 2.4.1
  CDS (1)..(615): transl_table=11
atgagtgtcgccgacgtggccttctactgtttcgccgtgcccgcggtcttcgccgcgctcatggtggtgacgcagcgcaacatggttcatgccgtgctgtggctgatcctcgtcttcctgagctctgccgggatgttcgtgctgctgggcgccgagttcgtggcgatgctgctggtgatcgtctatgtcggcgcggtggcggtgctgttcctcttcgtcgtcatgatgctcgacgtcgacttcgaggcgctgaagtccgaggtggtgcgctacatgccggtggccgcgctgatggggatcgtgatcctgctgcagctctcgatggggatcggcgcctgggtcacggccgacggcgcgccggcgatgcgtcaggcggtgacgcccgacccgaaccagatcgagaacagccgcgcgctcggcctgctgatctacgacaagtatctctacctcttccagaccgcggggctgatcctgctcgtggccatggtgggggcgatcctgctcacgctgcgcgagcgccgcgacgtcaagcgccagaacgtgctggcgcagatgtggcgcgatcccgcgaaggcgatggagctgaaggacgtgaagccgggtcagggcctctga

SEQ ID NO: 50506 - protein, 204 aa, Rhodobacter sphaeroides 2.4.1
MSVADVAFYCFAVPAVFAALMVVTQRNMVHAVLWLILVFLSSAGMFVLLGAEFVAMLLVIVYVGAVAVLFLFVVMMLDVDFEALKSEVVRYMPVAALMGIVILLQLSMGIGAWVTADGAPAMRQAVTPDPNQIENSRALGLLIYDKYLYLFQTAGLILLVAMVGAILLTLRERRDVKRQNVLAQMWRDPAKAMELKDVKPGQGL

SEQ ID NO: 50507 - DNA, 510 bp, Carboxydothermus hydrogenoformans Z-2901
  CDS (1)..(510): transl_table=11
atgcttaatggagaggttatagcctttgccattgtagctttcttacttattttctcggctttaggggttgtctttatgcgtaacattgttcacagcgtgctttttttagctgcaacttttgtcttgatggcagtaacttaccttatgttagatgcgggttttctcgcaggagttcagctggtggtttatgcgggtgcggtctcaataatggtcgtttttgcggtgatgttaaccaaaagaagtgatttacacgaaaccaacctttttaaccgcttaaccatccccggagcaattatcagcttcttggtttttataggattatcctgggtagttgttaaaaccccctggaacttagccgaacgtcctttagttgatccgatggccattaataaactggctgatttaatgtttgggaagtttgtaattccctttgaagttgcggcagtcttgcttttagtggctcttattggtgccattatcttggctctggaggtgaagccgcagaaatga

SEQ ID NO: 50508 - protein, 169 aa, Carboxydothermus hydrogenoformans Z-2901
MLNGEVIAFAIVAFLLIFSALGVVFMRNIVHSVLFLAATFVLMAVTYLMLDAGFLAGVQLVVYAGAVSIMVVFAVMLTKRSDLHETNLFNRLTIPGAIISFLVFIGLSWVVVKTPWNLAERPLVDPMAINKLADLMFGKFVIPFEVAAVLLLVALIGAIILALEVKPQK

SEQ ID NO: 50509 - DNA, 651 bp, Burkholderia sp. 383
  CDS (1)..(651): transl_table=11
atggaattcacgaccgtactgttctacatcttcgcgctgctcctggtggtatcagggctgaaggtgatcacttcgcgcaacccggtggcgtctgcgcttttccttgtgctggcgttcttcaacgccgccgcgatctggatgctgctggaagcggagttcctcgcgatcctgctggtgctggtctacgtgggcgcggtgatggtgctgttcctgttcgtcgtgatgatgctggacatcaacatcgactacctgcgccgcgatttcaagcgctttgtcccgatggcgaccgtggttggcgcgatcatcgtgatcgaaaccgcgctgatcctgtggcgcggctacggcgacacgcagaccgtgcacgcgatggcgacgggcgagatggccaactggtcgaacacgcgcctgatcggcaaggtgatctacaccgactacatcttcgcgtttgaaatcgccggcctcgtgctgctggtcgcgatcattgccgcgatcgggctgaccgagcgcaagggcaaggacagcaagcgccagcgcgtgtcggatcaggtcaaggtgcgccgcaacgaccgcgtgcgcctcgtgaagatggaagcggaaaagccgcagccggaagcggcgcagagcgaagccggttcgggcaccaacggctaa

SEQ ID NO: 50510 - protein, 216 aa, Burkholderia sp. 383
MEFTTVLFYIFALLLVVSGLKVITSRNPVASALFLVLAFFNAAAIWMLLEAEFLAILLVLVYVGAVMVLFLFVVMMLDINIDYLRRDFKRFVPMATVVGAIIVIETALILWRGYGDTQTVHAMATGEMANWSNTRLIGKVIYTDYIFAFEIAGLVLLVAIIAAIGLTERKGKDSKRQRVSDQVKVRRNDRVRLVKMEAEKPQPEAAQSEAGSGTNG

SEQ ID NO: 50511 - DNA, 600 bp, Synechococcus sp. CC9605
  CDS (1)..(600): transl_table=11
atgaccatcgcgacaaccaccgagctgatctgtttcctggtgctgtccgccgttgtcgtgatcggcgccctgggtgtggtgttgctcagcaacatcgtctattctgccttcctgctgggcggggtgttcactgctgttgcagggctctacttgctgctgaacgccagtttcgtggccatggcccagatcctggtttacgtgggcgcgatcaacgtgttgatcctgttcgcgatcatgcttgtgaacaagcgggaagacctcaaggccattgccaacctcaccacgcgccgtgtggtgtccgccggcgtttgcgccggtctgatggcgttgctcgttcgtgttgtggttaccaccccctggtcgctgcccggtcctgtcgccgtgggtgaggaagccacggctcgcattggtgaacacctgttcaccgattacttgctgccgtttgaagtggcatcggtgctgttgctgatggccatgatcggtgccatcgtcttggcccgtcgtgatgtgctcgccaccgatgtagtcaccggtgaggtggccaatcaaggcctgattgagaaggcccgtactcccctgctgatgaatcgagcggactga

SEQ ID NO: 50512 - protein, 199 aa, Synechococcus sp. CC9605
MTIATTTELICFLVLSAVVVIGALGVVLLSNIVYSAFLLGGVFTAVAGLYLLLNASFVAMAQILVYVGAINVLILFAIMLVNKREDLKAIANLTTRRVVSAGVCAGLMALLVRVVVTTPWSLPGPVAVGEEATARIGEHLFTDYLLPFEVASVLLLMAMIGAIVLARRDVLATDVVTGEVANQGLIEKARTPLLMNRAD

SEQ ID NO: 50513 - DNA, 504 bp, Geobacter metallireducens GS-15
  CDS (1)..(504): transl_table=11
atggaaacgttcttcttcatgatcgtggcagcagtagctgtcctggccagtattctggtcattacctgcaagaacccgatcaacagcgcgctctctctcattctgactttcttctgcttggcaactctgtacgtgacgcttgatgcaccgttcatggcagccatacaggtgttggtctatgcaggcgcaatcatggtcttgattgtgttcgtaatcatgcttctcaacgtacggacagaatctggtcggaggagctcgcacagtgtgctgtttggcagtctgatcggactatttagcttgttccagctgttctacctgtttaatagaagttcgctcacagggcagaagggagcaattgattcggctctcataaacaaggttggccatactgaattgatcggcaaagcgttgtacactgacttccttctccccttcgaggtgacctccattcttctcttggtggccatcatcggcgcggttgttctcacgaagaagaaaatctaa

SEQ ID NO: 50514 - protein, 167 aa, Geobacter metallireducens GS-15
METFFFMIVAAVAVLASILVITCKNPINSALSLILTFFCLATLYVTLDAPFMAAIQVLVYAGAIMVLIVFVIMLLNVRTESGRRSSHSVLFGSLIGLFSLFQLFYLFNRSSLTGQKGAIDSALINKVGHTELIGKALYTDFLLPFEVTSILLLVAIIGAVVLTKKKI

SEQ ID NO: 50515 - DNA, 531 bp, Lactuca sativa
  CDS (1)..(531): transl_table=11
atggatttacctggactaatacatgattttcttttagtctttctgggattgggtcttatattagggggtctgggagtagtattacttcccaatcctatttattctgccttttcgttgggattggtttttgtttgtatatctttattctatattctatcaaactcccattttgtagctgctgcgcagctccttatttacgtaggagccataaatgttttaataatttttgctgtgatgtttataaatggttcagaatattccaaagatttccatctttggaccgttggagatggaataacttcggtggtatgtacaagtctttttgtttcactaattactactattccagatacgtcatggtacggaattatttggactacaaaagcaaaccagattatagaacaagatttgataagtaatagtcaacaaattgggattcatttatcaacagatttttttcttccgtttgaattcatttcaataattcttttagttgcgttaatcggcgcaattgctgtagctcgtcaataa

SEQ ID NO: 50516 - protein, 176 aa, Lactuca sativa
MDLPGLIHDFLLVFLGLGLILGGLGVVLLPNPIYSAFSLGLVFVCISLFYILSNSHFVAAAQLLIYVGAINVLIIFAVMFINGSEYSKDFHLWTVGDGITSVVCTSLFVSLITTIPDTSWYGIIWTTKANQIIEQDLISNSQQIGIHLSTDFFLPFEFISIILLVALIGAIAVARQ

SEQ ID NO: 50517 - DNA, 606 bp, Synechococcus elongatus PCC 7942
  CDS (1)..(606): transl_table=11
gtgactcttgccgaaggcgttcaactagttacattcatcatcctgacggctggggtggttttggcagccctaggtgttgtactcagcagcaacattgtctactcggcctttttgctgggaggcgtattcatcagcatcgctggtctctacctgctgctgaatgccagctttgtggcctttgcccaagtgctgatttatgttggcgctgtcaacgtcttaatcctgtttgcgatcatgttggtcaacaaacgggaagacttccgaccactcaagtttaattggctgcgcaaagggctgacggttctggtttgtggcggtctctttgccctcctgagcctgactgtaatttcgaccccttgggcggtgacgccaacccctggtgccagtggcgatgaagcgatttacctgatcggtgaacacttcttcagcgactacctgctgccctttgagttggcttcggtgttgctgttgatggcgatgattggggcgatcgtcttggcccgccgcgacttcgaacctgaagacctgatcacgggtgcggccgcagatttgcagctacccgagcgatcgcgggaagagttgctgacaggtgctggcaagaaataa

SEQ ID NO: 50518 - protein, 201 aa, Synechococcus elongatus PCC 7942
MTLAEGVQLVTFIILTAGVVLAALGVVLSSNIVYSAFLLGGVFISIAGLYLLLNASFVAFAQVLIYVGAVNVLILFAIMLVNKREDFRPLKFNWLRKGLTVLVCGGLFALLSLTVISTPWAVTPTPGASGDEAIYLIGEHFFSDYLLPFELASVLLLMAMIGAIVLARRDFEPEDLITGAAADLQLPERSREELLTGAGKK

SEQ ID NO: 50519 - DNA, 507 bp, Moorella thermoacetica ATCC 39073
  CDS (1)..(507): transl_table=11
gtgcttgatatcagtgcccttttattctgggtcctggccgcaattaccatcgctgcggccctggccgtagtgctgctaaaaaatatcgtccacagtgccctttacctggttttgacctttgccggggtagccggcctctatatcctgctccaggccgagttcctggcggcggtgcagctcctggtctatgccggggcagtagcaattctaattgtctttgcggtgatgcttacccgccgtggcgatatcaaagccagtaatttgtttaatattaattacctggcagccggtgttgtctccctggccctgtttgtggtcatcgtcctgggcaccgggcgcatgacctggactaccgctcccgcccaggcgccggccaacaatgtggcggccattgccaacgcctttttgggtcgcttcgccatacccttcgaagtagcggctgttttgctcctggtggctatggtgggagctatcctgctggcgaggggagggaaaccggaacggtga

SEQ ID NO: 50520 - protein, 168 aa, Moorella thermoacetica ATCC 39073
MLDISALLFWVLAAITIAAALAVVLLKNIVHSALYLVLTFAGVAGLYILLQAEFLAAVQLLVYAGAVAILIVFAVMLTRRGDIKASNLFNINYLAAGVVSLALFVVIVLGTGRMTWTTAPAQAPANNVAAIANAFLGRFAIPFEVAAVLLLVAMVGAILLARGGKPER

SEQ ID NO: 50521 - DNA, 618 bp, Novosphingobium aromaticivorans DSM 12444
  CDS (1)..(618): transl_table=11
atgatccaggtattcgccttctatctcttcgccacgctgtgcatcttcagcggcgcggtgacgatccttgcccgcaacccggtgcattcggttctgtggctgattctcgcgttcttcaacgcagccggcctgatggtgctggcaggcgccgaattcatcgcgatgctgctggtcatcgtctacgtcggcgcggtcgcggtgttgttcctgttcgtggtgatgatgctcgatatcgattttgccgaactgcgcgccgggttcatcaagaacttcccgctgggcatggcgctggcggtcgtgctgttcgtcgaactcttcgtgggactggtcgtgcgcggctcgggcgctgtcgcgctgggcaaggctgacggttcggcgatgcaggcggcgggcgcttccaatatcgagtcgatcggcgctctcctctacagccgctacctgttcctgttcgaagcggcaggcatcgtcctgctggtcgcgatgatcggcgcaatcgtgctgacccatcgccagcgcaccgacacgcgcggccagaacgtctctaagcaggtcgcgcgtcgtccagaggacgccaccgtcaatctccagccggaagtgggcaagggggtccagatctga

SEQ ID NO: 50522 - protein, 205 aa, Novosphingobium aromaticivorans DSM 12444
MIQVFAFYLFATLCIFSGAVTILARNPVHSVLWLILAFFNAAGLMVLAGAEFIAMLLVIVYVGAVAVLFLFVVMMLDIDFAELRAGFIKNFPLGMALAVVLFVELFVGLVVRGSGAVALGKADGSAMQAAGASNIESIGALLYSRYLFLFEAAGIVLLVAMIGAIVLTHRQRTDTRGQNVSKQVARRPEDATVNLQPEVGKGVQI

SEQ ID NO: 50523 - DNA, 606 bp, Anaplasma phagocytophilum HZ
  CDS (1)..(606): transl_table=11
atggttgggttcttatttttctgctttgctgggatggtagtgttttccgcagtagcagttgtgatatcttctaacccagtctatgcagttctgagcctgatcttgacattttttatatctagtgttctgttcatcctgcttggtgcggaactggtagctatgctgcttgttgttgtgtatgtgggggcagtggcggttttgtttttatttgtggtgatgatgctagatatggattttgtcaagtcctcccatgggtttgttaggtattatcctatatgtgttgcacttgctacggcgctttttggatgtgcgacgtatgcgattttccatactaaggctgctttcattaggggtataggtgaggcaggagctagcgctatgggaaatgtatttctgattggatctcagatgtacacgaaatatttttacgcatttcaaatgtcgggcattttacttttagttgcttctataggggctttggttttgacggtgaggtcaaaggctgtgaaatcgcgcaagcagaatgtgtacgcacaagttgatcgttcttcaaaggtggagttatgctctcctgctgtctgtaaaggtattgaagatattgattaa

SEQ ID NO: 50524 - protein, 201 aa, Anaplasma phagocytophilum HZ
MVGFLFFCFAGMVVFSAVAVVISSNPVYAVLSLILTFFISSVLFILLGAELVAMLLVVVYVGAVAVLFLFVVMMLDMDFVKSSHGFVRYYPICVALATALFGCATYAIFHTKAAFIRGIGEAGASAMGNVFLIGSQMYTKYFYAFQMSGILLLVASIGALVLTVRSKAVKSRKQNVYAQVDRSSKVELCSPAVCKGIEDID

SEQ ID NO: 50525 - DNA, 492 bp, Desulfitobacterium hafniense Y51
  CDS (1)..(492): transl_table=11
gtgttcttcattttcgccataatcgccgtggcttcagcatggggagttgttacctcgaaaaacattgtccacagtgcgtttttcctggctctttcctttgccggggttgccgtcctgtatgtcctcttaaatgctgagtatcttgcagcagttcaacttctcgtttatgcaggcgcaatttcgattatggtgatctttgcagtcatgctgaccttaaggggcgatgtggctgaaagcagccctgtcaccaaaaaatggacccaaggggctttagtaagcgctcttgtcttcattgttttggccttggttattctgaccaatagtgactggcggattcttgccatgcctgcacttgctggagggaccacagtagaactctccaaactgctcttgtcatggtatatggtgccctttgaagcggcggccatcctgattactgtagccttgattggggcagtgattatcgcgaaaggagggcatgaaagcaaatga

SEQ ID NO: 50526 - protein, 163 aa, Desulfitobacterium hafniense Y51
MFFIFAIIAVASAWGVVTSKNIVHSAFFLALSFAGVAVLYVLLNAEYLAAVQLLVYAGAISIMVIFAVMLTLRGDVAESSPVTKKWTQGALVSALVFIVLALVILTNSDWRILAMPALAGGTTVELSKLLLSWYMVPFEAAAILITVALIGAVIIAKGGHESK

SEQ ID NO: 50527 - DNA, 558 bp, Paracoccidioides brasiliensis
  CDS (1)..(558): transl_table=4
atgtttttaatttacgataattttaattttggttattatgataattatttagatatactttatattatatgtattttttttggactttatactatattaaataaaaatcctgttatctctatattctttcttataggccttttcagtagtatttcttgttatttatttttaattggattagaatttataggtttatcctacttattagtatatataggagctgtatctattttatttttatttatattaatgttaattaatttacgtatttctgaacttactactaaaactactaattcattacctttagctatttttagctttatcttatttatatttattttaaattttaatcttccaataaatacaagagataatccagaaataatttatgttataagtttaaattgagataatatattaataaataatacacaaattaatagtataggtaatattttatatactaattattctctttgacttataattctttctgtaattttattattagctatggtaggttctattgtaataacattaaataaaaataaataa

SEQ ID NO: 50528 - protein, 185 aa, Paracoccidioides brasiliensis
MFLIYDNFNFGYYDNYLDILYIICIFFGLYTILNKNPVISIFFLIGLFSSISCYLFLIGLEFIGLSYLLVYIGAVSILFLFILMLINLRISELTTKTTNSLPLAIFSFILFIFILNFNLPINTRDNPEIIYVISLNWDNILINNTQINSIGNILYTNYSLWLIILSVILLLAMVGSIVITLNKNK

SEQ ID NO: 50529 - DNA, 531 bp, Solanum bulbocastanum
  CDS (1)..(531): transl_table=11
atggatttatctgaaccaatacatgattttcttttagtctttctaggatcgggtcttatattagggggtctaggagtggtattacttcccaatccaatttattcggccttttccttgggattggttcttgtttgtacatcgttattctatattctatctaactcctattttgtagctgctgcgcagctacttatttacgtaggagctataaatgttttaatcatttttgctgtgatgttcatgaatggctcagaatattacaaggattttcatctttggaccgtaggaaatggaattacttcgatggtttgtataagtctttttatttcattaattactactatttcagatacgtcatggtacgggattatttggactacaagatcaaaccagattatagagcaagattttctaagtaatagtcaacaaattggaattcatttatcaacagatttttttctcccatttgaacttatttccataatccttttagttgctttaataggtgcaattgctgtagctcgtcaataa

SEQ ID NO: 50530 - protein, 176 aa, Solanum bulbocastanum
MDLSEPIHDFLLVFLGSGLILGGLGVVLLPNPIYSAFSLGLVLVCTSLFYILSNSYFVAAAQLLIYVGAINVLIIFAVMFMNGSEYYKDFHLWTVGNGITSMVCISLFISLITTISDTSWYGIIWTTRSNQIIEQDFLSNSQQIGIHLSTDFFLPFELISIILLVALIGAIAVARQ

SEQ ID NO: 50531 - DNA, 531 bp, Gossypium hirsutum
  CDS (1)..(531): transl_table=11
atggatttgcctggaccaatacacgattttcttttagtttttctgggatcgggtcttatattaggaggcctgggagtggtattacttaccaatccaatttattctgccttttcattgggattggttcttgtttgtatatccttattttatattctctcaaattctcattttgtagctgctgcccagctccttatttatgtgggagccataaatgttttaatcctatttgctgtgatgttcatgaatggttcagaatattataaagattttaatctgtggaccattgggaatggccttacttcgttggtttgtacaagtattcttgtttcgctaattactactatattagatacatcatggtacgggattatttggactacaagatcaaatcaaattatagaacaagatttgataagtaatagtcaacaaattggaattcatttagcaaccgatttttttcttccatttgaattcatttcaataattcttttagttgctttgataggtgcaattgctgtggctcgtcagtaa

SEQ ID NO: 50532 - protein, 176 aa, Gossypium hirsutum
MDLPGPIHDFLLVFLGSGLILGGLGVVLLTNPIYSAFSLGLVLVCISLFYILSNSHFVAAAQLLIYVGAINVLILFAVMFMNGSEYYKDFNLWTIGNGLTSLVCTSILVSLITTILDTSWYGIIWTTRSNQIIEQDLISNSQQIGIHLATDFFLPFEFISIILLVALIGAIAVARQ

SEQ ID NO: 50533 - DNA, 606 bp, Physcomitrella patens
  CDS (1)..(606)
atgatacttttttctgttttttcgagcattgctttagtctctagtgttatggtaatacgtgctaaaaatccagtccattctgttttatttttcatcctagtttttttcaacacttcgggtttacttgttttgttaggtcttgacttctttgctatgatttttttagtggtttatgtaggagctattgccgttttatttttatttgtagttatgatgttaaatattaaaatagcagaaattcacgagaatgtattgcgttatttacctgtaggtggtattattggagttatttttttgttggaaatttttttcattgtagataatgattacattccaatattaccaacgaaattgagtacaacttatttaacatatacagtttatgctgaaaagatacaaagttggactaatttggaaacattaggcaatttactttataccacctattttgttttgtttttggtttctagtcttattttattagtagccatgattggagctatagtacttactatgcataaaactactcaagtcaaaagacaggatgtgttccgacaaaatgctatagattttaaaaatactatcaaaaaaatcagagatatttga

SEQ ID NO: 50534 - protein, 201 aa, Physcomitrella patens
MILFSVFSSIALVSSVMVIRAKNPVHSVLFFILVFFNTSGLLVLLGLDFFAMIFLVVYVGAIAVLFLFVVMMLNIKIAEIHENVLRYLPVGGIIGVIFLLEIFFIVDNDYIPILPTKLSTTYLTYTVYAEKIQSWTNLETLGNLLYTTYFVLFLVSSLILLVAMIGAIVLTMHKTTQVKRQDVFRQNAIDFKNTIKKIRDI

SEQ ID NO: 50535 - DNA, 639 bp, Methylobacillus flagellatus KT
  CDS (1)..(639): transl_table=11
atgatattccaggattatgtgttttatgctttagccgccattctgctatttgcgggggtgcgtgtcattacgacgcgtaacccggtgcacgccaccttatttctggtattggcttttttcacggctgcaggtatctggctgctgctggaggccgagttccttgccattgccctggtgctggtgtatgtgggtgcagtgatggtgctgttcctgttcgtcgtgatgatgctcgacatcaatctcgacaaaatgcgcgaaggcttctggaatgccttgccagtcgccttgccggtaggcctgttgatggccggcgagatggtgatgatcctgggcagcaagcatttcagccccgacatgctcagcaccccggcaccccggcctgcaggatatagcaatactgccgaaatcggtcgacagctatacaccgattacctgttgccatttgaattggcttccgtcgtgctgctggttgcgattgtcgcggcgattgcgctgaccttgcgcgagcgcaaggattccaagttcatggaccccgcggagcaggtcaaggtcaagcgcgccgaccgcgtgcgcatcgtcagtatgccggcagaaaaggaaatcctgccgactccagaacctgcagttgaaaaaaaatag

SEQ ID NO: 50536 - protein, 212 aa, Methylobacillus flagellatus KT
MIFQDYVFYALAAILLFAGVRVITTRNPVHATLFLVLAFFTAAGIWLLLEAEFLAIALVLVYVGAVMVLFLFVVMMLDINLDKMREGFWNALPVALPVGLLMAGEMVMILGSKHFSPDMLSTPAPRPAGYSNTAEIGRQLYTDYLLPFELASVVLLVAIVAAIALTLRERKDSKFMDPAEQVKVKRADRVRIVSMPAEKEILPTPEPAVEKK

SEQ ID NO: 50537 - DNA, 690 bp, Burkholderia xenovorans LB400
  CDS (1)..(690): transl_table=11
atggaattcacgaccgtactgttctacatcttcgcgctgctcctggtggtttcagggctgaaggtgatcacctcgcgcaacccggtgtcgtccgcactgtttctggtgctggcgttcttcaatgcagccgcgatctggatgctgctggaggccgagttccttgcgatcctgctggtgctggtctacgtcggcgcggtgatggtgctgttcctgttcgtcgtgatgatgctggacatcaacatcgacgtgctgcgcaaggacttcaaacgcttcgtgccaatggccacgctggtcggcgcgatcatcgtgatcgaaaccgcgctgatcctgtggcacggttacggcgcgaccgccacggcgctgcgcgacaccacggccgccgccaacggcatgggcgactggtcgaacacccgcctgatcggcaagatcatttacaccgattacatcttcgcgttcgaagtggccggtctggtgctgctggtggcgatcatcgcggcgatcgcgctgaccacgagccacaagaaagacagcaaacgtcagaacgtcagcgagcaggtcaaggtacgcgctcaggaccgtgtgcgcgtcgtgaagatgaaatcggaaaagaccgcggccaccgtcgcggcggaagaagccgcggcagcggcggcagcagcggccgactcggcaccagccaagaacagctga

SEQ ID NO: 50538 - protein, 229 aa, Burkholderia xenovorans LB400
MEFTTVLFYIFALLLVVSGLKVITSRNPVSSALFLVLAFFNAAAIWMLLEAEFLAILLVLVYVGAVMVLFLFVVMMLDINIDVLRKDFKRFVPMATLVGAIIVIETALILWHGYGATATALRDTTAAANGMGDWSNTRLIGKIIYTDYIFAFEVAGLVLLVAIIAAIALTTSHKKDSKRQNVSEQVKVRAQDRVRVVKMKSEKTAATVAAEEAAAAAAAAADSAPAKNS

SEQ ID NO: 50539 - DNA, 531 bp, Vitis vinifera
  CDS (1)..(531): transl_table=11
atggatttacctggaccaatacatgattttcttttagtctttctgggatcaggtcttatattaggaggtctaggagtggtattacttaccaatccgatctattctgccttttcattgggattggtttttgtttgtatatccttattctatattccatcaaactcccattttgtagctgctgcacagctccttatttacgtgggagctataaatgttttaatcatatttgctgtgatgttcatgaatggttcagaatattacaaagattttaatctttggaccgttggagatggggttacttcggtagtttgtacaagtatttttgcttcactaattactactattctagatacgtcatggtacgggattatttggactacaagatcaaaccaaattatagagcaagatttgataagtaatagtcaacaaattggaattcatttatcaacagatttttttcttccatttgaactaatttcgataattcttttagttgctttgataggtgcaattgctgtggcccgtcagtaa

SEQ ID NO: 50540 - protein, 176 aa, Vitis vinifera
MDLPGPIHDFLLVFLGSGLILGGLGVVLLTNPIYSAFSLGLVFVCISLFYIPSNSHFVAAAQLLIYVGAINVLIIFAVMFMNGSEYYKDFNLWTVGDGVTSVVCTSIFASLITTILDTSWYGIIWTTRSNQIIEQDLISNSQQIGIHLSTDFFLPFELISIILLVALIGAIAVARQ

SEQ ID NO: 50541 - DNA, 531 bp, Helianthus annuus
  CDS (1)..(531): transl_table=11
atggatttacctggactaatacacgattttcttttagtctttctgggattgggtcttatattagggggtctgggagtagtattacttgccaatcccatttattctgccttttcattgggattggtttttgtttgtatatcgttattctatattctatcgaactcccattttgtagctgccgcgcagctccttatttacgtaggagccataaatgttttaatcatttttgctgtgatgttcataaatggttcagaatattccaaagatttccatctttggaccgtgggagatggagtaacttccgtggtctgtacaagtctttttgtttcactaattactactattccagatacgtcatggtacgggattatttggactacaaaagcaaaccagattatagagcaagatctgataagtaatagtcaacaaatcgggattcatttatcaacagatttttttattccgtttgaattcatttcaataattcttttagttgcgttaatcggcgcaattgctgtagctcgtcaataa

SEQ ID NO: 50542 - protein, 176 aa, Helianthus annuus
MDLPGLIHDFLLVFLGLGLILGGLGVVLLANPIYSAFSLGLVFVCISLFYILSNSHFVAAAQLLIYVGAINVLIIFAVMFINGSEYSKDFHLWTVGDGVTSVVCTSLFVSLITTIPDTSWYGIIWTTKANQIIEQDLISNSQQIGIHLSTDFFIPFEFISIILLVALIGAIAVARQ

SEQ ID NO: 50543 - DNA, 510 bp, Acidobacteria bacterium Ellin345
  CDS (1)..(510): transl_table=11
atgacacccgtcgcaacaccattctttttctattttcttgcggcgctcagcgtgggcagcgcactgggtgtgatcctgcgcaagaacgccgtgcactccgcgatcttcctgatcttcaccctgctggcgcaggccggattgtacctgatgctgtatgccccgtttgtcgctggcgtgcagattatcttgtacgcgggcggaatcatggtgctgttcctcttcgtgatcatgctcgtaaacctcgagagatcgctgaaggaagagcagttcaacaagcagtggctggcgggatcggcggtggcagcgttgttcggcgtgatgctgctgctgatctatcgcaacggcggcgggaccttcccgagcacgcgagcgattctgccggaagccagcaatacgcaggacatcggcgtgatgctctaccggaattacatgctgccgtttgaagtggcgtcgctgctgctgctggtggcaattgtgggcgccgttgtaatggcgaagaagaggatctga

SEQ ID NO: 50544 - protein, 169 aa, Acidobacteria bacterium Ellin345
MTPVATPFFFYFLAALSVGSALGVILRKNAVHSAIFLIFTLLAQAGLYLMLYAPFVAGVQIILYAGGIMVLFLFVIMLVNLERSLKEEQFNKQWLAGSAVAALFGVMLLLIYRNGGGTFPSTRAILPEASNTQDIGVMLYRNYMLPFEVASLLLLVAIVGAVVMAKKRI

SEQ ID NO: 50545 - DNA, 501 bp, Acidobacteria bacterium Ellin345
  CDS (1)..(501): transl_table=11
atgctgcacgagatcctattctttttctttgctgccggatgcgtggccggcgccatcaacctgctggcgcagaagcaccccattaacagcgccctgtcgctggtggtggtcatggcctcgcttgccgggctcttcctgctgatgggcgctgagttcgtcggcgccatccaggtaatcgtttatgccggcgccatcatggtgctcttcgtcttcgtcatcatgttgttgaacgcgggcgtggaggagcacaccaagagcagcaagattgccatcgtgctaggcgttccggctgcagccatcgtcgcaacgctgatcacatggatactgctgcataacgagcagtcgttcaccaaggtcagtatcggcgaactgcacggcacgggcaaggagatcggcatgctgctctttgggccgtacctgttgccgtttgaagtgaccagcgtgctcgtgctcatcggcatcatgggcgccgtggtcctggcgcgaaaggaggatgtatga

SEQ ID NO: 50546 - protein, 166 aa, Acidobacteria bacterium Ellin345
MLHEILFFFFAAGCVAGAINLLAQKHPINSALSLVVVMASLAGLFLLMGAEFVGAIQVIVYAGAIMVLFVFVIMLLNAGVEEHTKSSKIAIVLGVPAAAIVATLITWILLHNEQSFTKVSIGELHGTGKEIGMLLFGPYLLPFEVTSVLVLIGIMGAVVLARKEDV

SEQ ID NO: 50547 - DNA, 603 bp, Silicibacter sp. TM1040
  CDS (1)..(603): transl_table=11
atgagcgtttttgccttttacctcttcgccatcagcgccatcaccggcgggctgttcacagtgatcagccgccagccggtgcactcggtgctgtggctcattttggcatttctttcttctgccgggttgttcgtgcttttgggggcggagttcgtcgccatgttgctcgtcatcgtttatgtgggcgcggtcgcggtgctgttcctctttgtggtgatgatgctcgacgtggactttgccgagctcaaggccgagatggcccgctacacgccgctggccctgttgatcgggctggtgatcctgatgcagttcgtgatcgcctatgggtcctgggagagcgcgcatagcgttgccgagaacctgagccagccgatcccaacggaccgtcacaacaccgaggcgcttggcctcattctttatgaccaatatttccttctgttccagctggcgggtctgatccttctggtggccatgatcggtgccatcgttctgaccctgcgccaccgccaggatgtgaagcgtcaggacgtgctcgcccagatgtatcgcgatccggccaaggcaatggagctcaaggacatcaaaccgggccaagggctttga

SEQ ID NO: 50548 - protein, 200 aa, Silicibacter sp. TM1040
MSVFAFYLFAISAITGGLFTVISRQPVHSVLWLILAFLSSAGLFVLLGAEFVAMLLVIVYVGAVAVLFLFVVMMLDVDFAELKAEMARYTPLALLIGLVILMQFVIAYGSWESAHSVAENLSQPIPTDRHNTEALGLILYDQYFLLFQLAGLILLVAMIGAIVLTLRHRQDVKRQDVLAQMYRDPAKAMELKDIKPGQGL

SEQ ID NO: 50549 - DNA, 678 bp, Metarhizium anisopliae
  CDS (1)..(678): transl_table=4
atgaatcaattattctctgtaaatgaaattttaacaagtggacatacagtggaatttctagatataattagtgtaatagcattattatttggtatagcagttatagtgaataaaaatcctatagcatctttattatctttaataggtttatttggatcaatatctgtatatttaatcctatctggattaacatttataggtttttcttacttaattgtatatattggagcagtatctattttattcttgttcatcttaatgttattaaacataagaacaagtgaattacaaagtaataatgtaaatagtatacccttagctttatttataacaatattattcaattatgcattattccaattattaccttactatatggctatattaaacagttataatagtaaattaagtaatatattatactatttacctacaagtaaatacagtgatataatcatgaacacaaattcaaatctagatatagatacacataacattatgtttgtaacaagtaacagttgagatggtacaataacagaaacaagtcatatctcaacaataggtaatattttatatacatcatataatatgtgattattccttgtaagtataattttattagttgtaatggtaggggccattattataacaataaaacaagaaacagttaaacaataa

SEQ ID NO: 50550 - protein, 225 aa, Metarhizium anisopliae
MNQLFSVNEILTSGHTVEFLDIISVIALLFGIAVIVNKNPIASLLSLIGLFGSISVYLILSGLTFIGFSYLIVYIGAVSILFLFILMLLNIRTSELQSNNVNSIPLALFITILFNYALFQLLPYYMAILNSYNSKLSNILYYLPTSKYSDIIMNTNSNLDIDTHNIMFVTSNSWDGTITETSHISTIGNILYTSYNMWLFLVSIILLVVMVGAIIITIKQETVKQ

SEQ ID NO: 50551 - DNA, 507 bp, Myxococcus xanthus DK 1622
  CDS (1)..(507): transl_table=11
ttgaacatcgagctcatcctcttcggggcgttcgcgctcctgacgttgctgtcggctggaacggtcatcttcgcgcgcagccccatcaattcggccatggcgctggtgtccacgttcttcttcatggccggcatctacgtgctgctgtgggcgcacacggtggccgtcatgcaggtgctcgtgtacgcgggcgccatcatggtgctcttcctgttcgtcatcatgctgctcaacctgggagagtcgcccacgcgcggcaagcccacggtggcccgcgtcgcgggcggcgcggcgacggtgggcctgttcgcggtcctggccatcatcctcctgaagctgcccgccgagccggccacgctgagcacgggagcccaggcctccttcggcaccatcgccaccatgggtcaggtcatcttcacccagtggctgttcccctttgaagctgtgagcttgctgctgctggtggccatggtgggcgcagtcgtcgtggccaagtcgcggatctga

SEQ ID NO: 50552 - protein, 168 aa, Myxococcus xanthus DK 1622
MNIELILFGAFALLTLLSAGTVIFARSPINSAMALVSTFFFMAGIYVLLWAHTVAVMQVLVYAGAIMVLFLFVIMLLNLGESPTRGKPTVARVAGGAATVGLFAVLAIILLKLPAEPATLSTGAQASFGTIATMGQVIFTQWLFPFEAVSLLLLVAMVGAVVVAKSRI

SEQ ID NO: 50553 - DNA, 537 bp, Chara vulgaris
  CDS (1)..(537): transl_table=11
atggatttcttaaatatgtcttatcaattaatagtagcttatttaattcaattaggaatttatataggagctttagcagtcattttttttaataatattgtatatgctgcgatatctttagcgctagttttaagcttgatagctttattgtatcttttttttgatgcagactttttagcagttactcaaattcttatatatgtaggagctattaacgtattaattctatttgccattatgttaataagcttacctaaatcatctacatttattttctattttactaaaaaaagtcaaatttctgcttttgcttgtataagcttatttgtattgctggttaaaattattctacaaacaccttggtcaactcaatcttcctatattttattgaacgagaataataaactcgatcaaattggtatttatcttttaagtaattttcttcttccgtttgaattaatttcattattgctattaatagcattaataggagcagtttcgattgctcgttatcaaaacacagaagaaactgaatga

SEQ ID NO: 50554 - protein, 178 aa, Chara vulgaris
MDFLNMSYQLIVAYLIQLGIYIGALAVIFFNNIVYAAISLALVLSLIALLYLFFDADFLAVTQILIYVGAINVLILFAIMLISLPKSSTFIFYFTKKSQISAFACISLFVLLVKIILQTPWSTQSSYILLNENNKLDQIGIYLLSNFLLPFELISLLLLIALIGAVSIARYQNTEETE

SEQ ID NO: 50555 - DNA, 531 bp, Eucalyptus globulus subsp. globulus
  CDS (1)..(531): transl_table=11
atggatttgcctggaccaatacatgattttcttttagtttttctgggatcaggtcttatattaggaagtctaggggtggtattacttaccaatccaatttattctgccttttccttgggattggttcttgtttgtatatccttattttatattctatcaaactcccattttgtagcggctgcgcagctccttatttatgtaggagctataaacattttaattctatttgctgtgatgttcatgaatggttcagaatattacaaagatttgaatctttggactgttggagatgggattacttcgttggtttgtacaagtattttggtttcactaatgactactattttagatacgtcgtggtacgggattatctggacgacaaagtcaaaccagattatcgagcaagatttgataggtaatagtcaacaaattggaattcatttatcaacagatttttttcttccatttgaactcatttccataattcttttagttgctttgataggtgcaattgctgttgctcgtcaatga

SEQ ID NO: 50556 - protein, 176 aa, Eucalyptus globulus subsp. globulus
MDLPGPIHDFLLVFLGSGLILGSLGVVLLTNPIYSAFSLGLVLVCISLFYILSNSHFVAAAQLLIYVGAINILILFAVMFMNGSEYYKDLNLWTVGDGITSLVCTSILVSLMTTILDTSWYGIIWTTKSNQIIEQDLIGNSQQIGIHLSTDFFLPFELISIILLVALIGAIAVARQ

SEQ ID NO: 50557 - DNA, 546 bp, Staurastrum punctulatum
  CDS (1)..(546): transl_table=11
atgaatatggtttccttaccagaaacaattaattctcctattctctattttttagatgttggtattcttttaggtggtttaggagtagttttttttggaaaaattatttattctgccctttttcttggagttgtttttgtttgtgtagctttgctatatcttttattaaatgctgattttttagcagcagcgcaaatactaatatatgtaggggctataaatgttttaattgtatttgcaattatgttaataaataaaccagaaacaaaaatcaataaaaaaaaaataacttttggagatattttgtcaggtttttcagtttttggtttatttagttttttaatcataatgatcttaaacacaacttggcttcaacctactttagtcagtcaagaagtgaaaaattcatttcaaagtatagatataattggaattcatcttttaactgatttacttttaccatttgaattattatctatactactcctggttgctttagttggagctataacgatagctcgtaaagaaattagtcctaaaatatag

SEQ ID NO: 50558 - protein, 181 aa, Staurastrum punctulatum
MNMVSLPETINSPILYFLDVGILLGGLGVVFFGKIIYSALFLGVVFVCVALLYLLLNADFLAAAQILIYVGAINVLIVFAIMLINKPETKINKKKITFGDILSGFSVFGLFSFLIIMILNTTWLQPTLVSQEVKNSFQSIDIIGIHLLTDLLLPFELLSILLLVALVGAITIARKEISPKI

SEQ ID NO: 50559 - DNA, 546 bp, Zygnema circumcarinatum
  CDS (1)..(546): transl_table=11
atgatacctatttccgaatcaacaaacacgttgttgtttgttgtattagaatttgcaattttagttggtgccttaggagtagtattactttcaagagtgatttactcagctttattattaggttttgtatttatttgtgtagcattgttatatcttcttttaaatgctgattttttagctgctgctcaagttcttatttacgtaggtgctgttaatgtacttattgtatttgccattatgcttgtaagtacaccagatgatgtgaagaataaacctaagactacaggagaaataatttcggcttttacttttatagctttatttgtattactaacaattatgatatttacaacttcatgggacacacaccataatcttgctacacaagatgaagttttattacaacctttaatgagtaatgttcaaacaattggttttcacttgttaactgatttattatttccttttgaacttttatctttgttattgcttgtagctttagtaggagctatcacaattgcaagtaaaaataaaattacagaatag

SEQ ID NO: 50560 - protein, 181 aa, Zygnema circumcarinatum
MIPISESTNTLLFVVLEFAILVGALGVVLLSRVIYSALLLGFVFICVALLYLLLNADFLAAAQVLIYVGAVNVLIVFAIMLVSTPDDVKNKPKTTGEIISAFTFIALFVLLTIMIFTTSWDTHHNLATQDEVLLQPLMSNVQTIGFHLLTDLLFPFELLSLLLLVALVGAITIASKNKITE

SEQ ID NO: 50561 - DNA, 750 bp, Mycobacterium sp. MCS
  CDS (1)..(750): transl_table=11
atggtgctcgccgcggacggtgcggcacgcacctccactagcgaggcggtcgtgttctggattctcggcggcatcgcgctgatcggggcgctcggtgtggtctccgcgccgaaggcggtgtactccgcgatcttcctcgcgacgaccatgatcgcgctggccgtgctctacatcgcccaggaggcgttgttcctgggggtcgtccagatcgtggtctacaccggcgcggtgatgatgctgttcctgttcgtgctgatgctcgtcggcgtggacaattcggagtcgctggtggaaaccattcggggacaacgtgttgcggccatcgcggtcggcgtcggtttcggggtgctgctgatcgcgggcatcggcaccgtctcgacgagcgggttcaccggcctgcccgacgccaacagcagcggcaacgtcgagggtctggccgcgctgatcttcacccgctacctgtgggcgttcgaactcaccggcgccctgctgatcaccgcggcactgggcgccatggtcctcgcgcaccgggagcgcttcgaacaccgtaaaacccagcgcgagttgtccatcgaacgcttccaggacggtggtcacgccaccccgatgcccaatcccggtgtctacgcccgccacaacgccgtcgacatgcccggtcggcttccggacggcagcggcgcgaaaacgtcggtcagcacgatcctgcagccacgcgaggtgccggagaacggaaggaacggcgaccggtga

SEQ ID NO: 50562 - protein, 249 aa, Mycobacterium sp. MCS
MVLAADGAARTSTSEAVVFWILGGIALIGALGVVSAPKAVYSAIFLATTMIALAVLYIAQEALFLGVVQIVVYTGAVMMLFLFVLMLVGVDNSESLVETIRGQRVAAIAVGVGFGVLLIAGIGTVSTSGFTGLPDANSSGNVEGLAALIFTRYLWAFELTGALLITAALGAMVLAHRERFEHRKTQRELSIERFQDGGHATPMPNPGVYARHNAVDMPGRLPDGSGAKTSVSTILQPREVPENGRNGDR

SEQ ID NO: 50563 - DNA, 534 bp, Rubrobacter xylanophilus DSM 9941
  CDS (1)..(534): transl_table=11
ttgacggtagcgttcgcgttcctgaccgggatgacgctcgtctcggctctgggcgtggtcctgagccggagcgtggtccactcggcgcttttcatgtccggcgcctttctgggggtggccgggttcttcgtgatgctgaacgtcccggtgctggcggcgttccaggtgctcatctacgtcggggcggtgaccgtggtgatcctcttcgggatcatgttcacccagcggccgcaggtgcggcgcttccggacgatcatcaaccggcagatatggcccgggttcttcgcggcggccggcgtgggcgcctttctctgctacatcctggccacggagggctggggggagaccgggccgggcaacggggcgcggtcggtcgccgtgctcgggcgcagcctgctcggggtggatgaggggctggagatcttctcgctgctcttcgaggccgcctcggtcctgctgctggtggcgctggtcgcggccatagccatcagccgccgcaaggagggcgccggaggggaggaggcgggccggtga

SEQ ID NO: 50564 - protein, 177 aa, Rubrobacter xylanophilus DSM 9941
MTVAFAFLTGMTLVSALGVVLSRSVVHSALFMSGAFLGVAGFFVMLNVPVLAAFQVLIYVGAVTVVILFGIMFTQRPQVRRFRTIINRQIWPGFFAAAGVGAFLCYILATEGWGETGPGNGARSVAVLGRSLLGVDEGLEIFSLLFEAASVLLLVALVAAIAISRRKEGAGGEEAGR

SEQ ID NO: 50565 - DNA, 531 bp, Populus alba
  CDS (1)..(531): transl_table=11
atgaatttacctggaccaatacatgattttcttttagtctttctaggattaggtcttatattaggaggtctaggagtggtattacttaccaatcccattttttctgccttttcattaggattggttcttgtttgtatatccttattctatattttatcaaactctcattttgtagctgcggcgcagctccttatttatgtgggagctataaatgttttaattttatttgctgtgatgttcatgaatggttcagaatattacaaagatttcaatctttggactgttgggaatggtcttacttctctaatttgtacaagtctttttgttttactaattactattatttcaaatacaacatggtatgggattatttggactacaagagcaaaccagattatagagcaagatttggtaagtaatggtcaacaaattggaattcatttatcaacagatttttttcttccatttgaatttatttcaataattcttttagttgctttgataggtgcgattgccacggctcgtcagtaa

SEQ ID NO: 50566 - protein, 176 aa, Populus alba
MNLPGPIHDFLLVFLGLGLILGGLGVVLLTNPIFSAFSLGLVLVCISLFYILSNSHFVAAAQLLIYVGAINVLILFAVMFMNGSEYYKDFNLWTVGNGLTSLICTSLFVLLITIISNTTWYGIIWTTRANQIIEQDLVSNGQQIGIHLSTDFFLPFEFISIILLVALIGAIATARQ

SEQ ID NO: 50567 - DNA, 594 bp, Nephroselmis olivacea
  CDS (1)..(594)
atgttttctattttttctagtctcgcgattatttgcggaattttagtaattcgtgcaaaaaaccctgtacactctgttttatttcttatacttgtattttgtcatgctgcaggtctattattaatgttagatcttgattttttcgccatggtattcttagttgtatacgtaggtgctattgcagttttatttttgtttgttgttatgatgttaaatattaaaattgaagaagtatatgaaacagcattaccttatttacctttaggagggcttattggattaatttttgtgacagaaattttacttgttgtagaaagagattttattccaatgatttcatcttcatctcttaatttacaatatattcaatttttaccagaaacatcatcaactatccaagctattggagagcttatttatacttattattttttttactttatagtagctagcttgatattattaattgctatgattggtgctattgtattaactatgtacaaaggtgcgggtgtaaaacgacaagaagtattttttcaaaacgcacgagaatgcactaaaacaattcaaaaatatcgtcaagttaatgcatag

SEQ ID NO: 50568 - protein, 197 aa, Nephroselmis olivacea
MFSIFSSLAIICGILVIRAKNPVHSVLFLILVFCHAAGLLLMLDLDFFAMVFLVVYVGAIAVLFLFVVMMLNIKIEEVYETALPYLPLGGLIGLIFVTEILLVVERDFIPMISSSSLNLQYIQFLPETSSTIQAIGELIYTYYFFYFIVASLILLIAMIGAIVLTMYKGAGVKRQEVFFQNARECTKTIQKYRQVNA

SEQ ID NO: 50569 - DNA, 669 bp, Verticillium dahliae
  CDS (1)..(669): transl_table=4
atgacaaatttgtttattatagatgaaatgtatactagtgggtttaaaacaggtatgttagatattgtatctttatttattatattatgtggtgtattaattataataagtaaaaatcctatagtttctgtactatttttaataggattatttggaggtgtagcctcatatttaattttattaggtttaaattttatagggttttcttatttaattgtttatattggagcagtgtctatattatttttatttatattaatgttaattaatataagaattagtgaattacaaagtaatactaaaaatagtatacctttagctttatttataacaattttctttaattattcacttttccaagtattaccttacgacttagcaatattaaataataataataattatataaacaatatattatattatatatctttaaataaacaagaaactattaatgatagtaagttattaaatactgataatgatttatattttgctacaagtaatagctgagatggtaatttaatagaaacaagtcatatttctagtataggaaatattttatatactactaataatatgtgattaatattagttagtttaattttattattagctatggtaggtgccataataataactattaaatctaatagaaattctttatag

SEQ ID NO: 50570 - protein, 222 aa, Verticillium dahliae
MTNLFIIDEMYTSGFKTGMLDIVSLFIILCGVLIIISKNPIVSVLFLIGLFGGVASYLILLGLNFIGFSYLIVYIGAVSILFLFILMLINIRISELQSNTKNSIPLALFITIFFNYSLFQVLPYDLAILNNNNNYINNILYYISLNKQETINDSKLLNTDNDLYFATSNSWDGNLIETSHISSIGNILYTTNNMWLILVSLILLLAMVGAIIITIKSNRNSL

SEQ ID NO: 50571 - DNA, 621 bp, Mesorhizobium sp. BNC1
  CDS (1)..(621): transl_table=11
atgctgacaggactcgaggcgatcttcttctatctcttcgccttcatcggggttgcggcggccttcatggtcatttccgcgcgcaatcccgtgcactcggttctttttctgatcctgaccttcttcaacgcggcggcactcttcctgctgaccggggccgagttcctggcgatgatcctcctcatcgtctatgtgggcgcggtggcggtgctcttcctctttgtggtcatgatgctcgatgtggactttgccgagctgaagcagggcgcacttcaatatgcgccggtcggcgctatcgtgggcatcatccttgcggtggagcttatcgtggtgcttggcggctacgccttcacgccggagatcgccgccgaaatcgcccagcccgcgccggcaatcgcggaacggcacaacacggccgcattgggcgatatcctttacacgaactacttctacttctttcaggtcgcgggcctgatcctgctcgtggccatggtcggcgccatcgtgctcaccctcaggcacaagccgaatgtgaggcggcagaacatcgccgcccaggtggcgcgcacgcctgcgaccgcgatcgagatccgcaaggtggaaacgggcgagggaatctga

SEQ ID NO: 50572 - protein, 206 aa, Mesorhizobium sp. BNC1
MLTGLEAIFFYLFAFIGVAAAFMVISARNPVHSVLFLILTFFNAAALFLLTGAEFLAMILLIVYVGAVAVLFLFVVMMLDVDFAELKQGALQYAPVGAIVGIILAVELIVVLGGYAFTPEIAAEIAQPAPAIAERHNTAALGDILYTNYFYFFQVAGLILLVAMVGAIVLTLRHKPNVRRQNIAAQVARTPATAIEIRKVETGEGI

SEQ ID NO: 50573 - DNA, 510 bp, Cytophaga hutchinsonii ATCC 33406
  CDS (1)..(510): transl_table=11
atgggtaatatcttattttatatcttatctggaattacgctatgcagtgcattgttcgtgatcctttctaaaaatcctgtatatagcgtattgtcattggtaattacattttgctgtattaccggtcatatgctattgttatctgcggactttttagcagtcgttaatatcattgtttacgccggagccatcatggtattgttcctgtttgtaatcatgatgctgaacttaaacgatgcggcggctcagccgaataaaccgttccttagtaaactggctgcatgtgtttcgggcggcttattattgatctctctggtttatctgctaaaaggatatcaggtaggaagcattgatatgtcaaagcttgatcacaacttcggcagtgcgcaggaattgggtaaaattttattcaatcaatttatcctcccttttgaaatcacatctgtattattcctttctgccatgatcggtgcagtaatgttgggtaaaaaagatttaaaagattattaa

SEQ ID NO: 50574 - protein, 169 aa, Cytophaga hutchinsonii ATCC 33406
MGNILFYILSGITLCSALFVILSKNPVYSVLSLVITFCCITGHMLLLSADFLAVVNIIVYAGAIMVLFLFVIMMLNLNDAAAQPNKPFLSKLAACVSGGLLLISLVYLLKGYQVGSIDMSKLDHNFGSAQELGKILFNQFILPFEITSVLFLSAMIGAVMLGKKDLKDY

SEQ ID NO: 50575 - DNA, 810 bp, Rhodococcus sp. RHA1
  CDS (1)..(810): transl_table=11
atgccgtccgcggtccaactggtcgcggaacccttcacccagacctcgacgggcgagggtgtgcagttctgggtcctcgcgaccgtggcggtgatcggcgcgctcggagtggtcagcgcaaccaaggccgtctactcggcgatcttcctagcgacgaccatgatcatcctcgccgtgttctacatcgcccagggcgcactcttcctcggcgtcgtacagatcgtggtgtacaccggcgcggtcatgatgctgttcctgttcgtgctcatgctcatcggtgtcgattcctccgaatccctcgtcgagaacctccgcggtcagcgggtagccgcgatcgcggccgggctgggattcggtctcctgctgatcggcggcatcggcagcgcgtccgtctccgcgttcaccggtctcgatcaggccaacgccgcgggcaacgtcgaggggctggccgaactcgtgttcgtccggtacgtgtgggctttcgaactgaccggtgcgttgctgatcaccgcgaccatcggtgcgatggtgctggcccaccgggagcgtttcgagcggcggaaggaccagcgcgagctgtcccaggaccgcgtccgggagggggcccgggtcacgccgctgcccagtccgggtgtgtacgcgcggcacaacgcggtcgacataccggcgttgctgcccgacggcacgttctccgagctgtccgtcagccggtcgctcgaacggcggccgagcctgcccgctcgggcgctgggcaccgcggacgtcgcgacccccgaccccggtgcgaccgacgagggggatcggcgatga

SEQ ID NO: 50576 - protein, 269 aa, Rhodococcus sp. RHA1
MPSAVQLVAEPFTQTSTGEGVQFWVLATVAVIGALGVVSATKAVYSAIFLATTMIILAVFYIAQGALFLGVVQIVVYTGAVMMLFLFVLMLIGVDSSESLVENLRGQRVAAIAAGLGFGLLLIGGIGSASVSAFTGLDQANAAGNVEGLAELVFVRYVWAFELTGALLITATIGAMVLAHRERFERRKDQRELSQDRVREGARVTPLPSPGVYARHNAVDIPALLPDGTFSELSVSRSLERRPSLPARALGTADVATPDPGATDEGDRR

SEQ ID NO: 50577 - DNA, 624 bp, Trichodesmium erythraeum IMS101
  CDS (1)..(624): transl_table=11
gtggatttagcgcaaggagttcaattcgtttcatttgttatattagctgtaatgatgattgcggctgctttgggagtagtattattttctaatattgtccactcagcgtttttgctgggtggagtatttatgagcatttctggtttatatcttttgttaaatgctgactttgtagctactgcccaggttttgatttatgttggggctgttaatgtcctgattttatttgcgattatgcttgtaaacaaacgagaagattttaaagctttgcctaatgcttggtttagaaaggtagctacaggtttagtttgttttggtttgtttgctttactgagtacaatggtattgtctagttcctggtcaattcctgttgttggaaatgctactagagaaagttcaattgtgttaattggtaaacacttttttacagattttttactcccttttgaacttgcttctgtgtgtttgttaatagcaatggtgggagctattattttagctcgtcgagatattttgcctgatgaagtaccaactaatgtatctcaaacacctgttttaagtttgccagaacgtcctcgtgaattagtttcaagtcttggtgaaagttctgctcaaatcaaatag

SEQ ID NO: 50578 - protein, 207 aa, Trichodesmium erythraeum IMS101
MDLAQGVQFVSFVILAVMMIAAALGVVLFSNIVHSAFLLGGVFMSISGLYLLLNADFVATAQVLIYVGAVNVLILFAIMLVNKREDFKALPNAWFRKVATGLVCFGLFALLSTMVLSSSWSIPVVGNATRESSIVLIGKHFFTDFLLPFELASVCLLIAMVGAIILARRDILPDEVPTNVSQTPVLSLPERPRELVSSLGESSAQIK

SEQ ID NO: 50579 - DNA, 600 bp, Synechococcus sp. CC9311
  CDS (1)..(600): transl_table=11
atgacgatcgccgcgtcaacgcagctcatttgttttttggctctgagtgccgtcatcgttcttggagccctcggtgttgttctcttgagcaacatcgtttattcggccttcctcctcggaggagtctttctggcagtggcaggtctctatctcctgctcaacgccagttttgtggctgcggcccaggttctggtctatgtgggtgctgtgaacgtcttgatcctgttcgcgatcatgcttgtcaataagaaggaggatctggctccgattccgggacttcctatacgccgtcttttatctggtggtgtgtgtgtgggtctgtttgctcttttgacccgtgttgtggtcaccactccttggaccgagggcccaacgccgataggggaggatgcaaccgtacggattggtgagcatttgtttaccgattacctactgccttttgagttggcatccgttttattgttgatggccatgattggagcgattgttctggcccgtcgtgacgttcaatccgtggatcctgtcactggtcaagaggttgatcagggactgattgaaaaggcacgcactccattacttgttgaccagcctcgcgcctga

SEQ ID NO: 50580 - protein, 199 aa, Synechococcus sp. CC9311
MTIAASTQLICFLALSAVIVLGALGVVLLSNIVYSAFLLGGVFLAVAGLYLLLNASFVAAAQVLVYVGAVNVLILFAIMLVNKKEDLAPIPGLPIRRLLSGGVCVGLFALLTRVVVTTPWTEGPTPIGEDATVRIGEHLFTDYLLPFELASVLLLMAMIGAIVLARRDVQSVDPVTGQEVDQGLIEKARTPLLVDQPRA

SEQ ID NO: 50581 - DNA, 531 bp, Daucus carota
  CDS (1)..(531): transl_table=11
atggatttacccggaccaatacatgattttcttttagtctttctgggatcgggtcttatattaggaggtctgggagtggtattactccccaatccaatttattctgccttttcattaggattggttcttgtttgtacatccttattctatattctatcaaactcccattttgtagctgctgcgcaacttcttatttacgtaggagctataaatgttttaatcatttttgctgtaatgttcatgaatggttccgaatattacaaagattttcatctttggaccgttggggacggagttacgtcgatggtttgtacaagtatttttgtttcactaattactactattccagatacgtcatggtacgggattatttggactacaaaatcaaaccagattgtagagcaagatttgataagtaatagtcaacaaattgggattcatttatcaacagatttttttcttccatttgaacttatttcaataattcttttagtttcgttaataggtgcgattactgtagctcgtcaataa

SEQ ID NO: 50582 - protein, 176 aa, Daucus carota
MDLPGPIHDFLLVFLGSGLILGGLGVVLLPNPIYSAFSLGLVLVCTSLFYILSNSHFVAAAQLLIYVGAINVLIIFAVMFMNGSEYYKDFHLWTVGDGVTSMVCTSIFVSLITTIPDTSWYGIIWTTKSNQIVEQDLISNSQQIGIHLSTDFFLPFELISIILLVSLIGAITVARQ

SEQ ID NO: 50583 - DNA, 531 bp, Liriodendron tulipifera
  CDS (1)..(531): transl_table=11
atggatttacctggaccaatacatgatattcttttagtatttctagggtcaggtcttatattaggaggcctaggggtggtattacttaccaatccaatttattctgccttttcattgggattggttcttgtttgtatatccttattccatattccatctaactcctattttgtagctgctgcacagctccttatttacgtgggagccgtaaatgtcttaatcgtatttgctgtgatgttcatgaatggttcagaatattccaaagatttatatctttggacagttggagatggagttacttcactggtttgtacaagtattcttttttcactaattactactatctcagatacgtcatggtacgggattatttggactacaagatcaaaccagattatagagcaggacctgacaagtaacgttcaacaaattggaattcatttatcaacagatttttatcttccatttgaactcatttctataattcttttagttgccttgataggtgcaatttctatggctcgtcagtaa

SEQ ID NO: 50584 - protein, 176 aa, Liriodendron tulipifera
MDLPGPIHDILLVFLGSGLILGGLGVVLLTNPIYSAFSLGLVLVCISLFHIPSNSYFVAAAQLLIYVGAVNVLIVFAVMFMNGSEYSKDLYLWTVGDGVTSLVCTSILFSLITTISDTSWYGIIWTTRSNQIIEQDLTSNVQQIGIHLSTDFYLPFELISIILLVALIGAISMARQ

SEQ ID NO: 50585 - DNA, 630 bp, Zea perennis
  CDS (1)..(630)
atgattctttccgttttgtcgagccctgctttggtctctggtttgatggttgtacgtgctaaaaatccggtacattccgttttgtttcccatcctagtcttttgcgacacttctggtttacttattttgttaggtctcgacttctccgctatgatcttcccagtagttcatataggagctattgccgtttcattcctattcgtggttatgatgttcaatattcaaatagcggagattcacgaagaagtattgcgctatttaccagtgagtggtattattggactgatcttttggtgggaaatgttcttcattttagataatgaaaccattccattactaccaacccacagaaatacgacctctctgaaatatacggtttatgccggaaaggtacgaagttggactaatttggaaacattgggcaatttactttatacctactattccgtctggtttttggtttctagtctgattttattagtagctatgattggggctatagtactgactatgcataggactacaaaggtgaaaagacaggatgtattccgacgaaatgccttggattctaggaggactactattcatattcagaacagaaggttcttctcccacaaagaaaggggatga

SEQ ID NO: 50586 - protein, 209 aa, Zea perennis
MILSVLSSPALVSGLMVVRAKNPVHSVLFPILVFCDTSGLLILLGLDFSAMIFPVVHIGAIAVSFLFVVMMFNIQIAEIHEEVLRYLPVSGIIGLIFWWEMFFILDNETIPLLPTHRNTTSLKYTVYAGKVRSWTNLETLGNLLYTYYSVWFLVSSLILLVAMIGAIVLTMHRTTKVKRQDVFRRNALDSRRTTIHIQNRRFFSHKERG

SEQ ID NO: 50587 - DNA, 663 bp, Zea mays subsp. parviglumis
  CDS (1)..(663)
atgattctttccgttttgtcgagccctgctttggtctctggtttgatggttgtacgtgctaaaaatccggtacattccgttttgtttcccatcctagtcttttgcgacacttctggtttacttattttgttaggtctcgacttctccgctatgatcttcccagtagttcatataggagctattgccgtttcattcctattcgtggttatgatgttcaatattcaaatagcggagattcacgaagaagtattgcgctatttaccagtgagtggtattattggactgatcttttggtgggaaatgttcttcattttagataatgaaaccattccattactaccaacccacagaaatacgacctctctgaaatatacggtttatgccggaaaggtacgaagttggactaatttggaaacattgggcaatttactttatacctactattccgtctggtttttggtttctagtctgattttattagtagctatgattggggctatagtacttactatgcataggactacaaaggtgaaaagacaggatgtattccgacgaaatgccttggattctaggaggactactattcatattcagaacagaaggttcttctcccacaaaggggatgacgcacctgtcccccccgctgatccggaatccatttaa

SEQ ID NO: 50588 - protein, 220 aa, Zea mays subsp. parviglumis
MILSVLSSPALVSGLMVVRAKNPVHSVLFPILVFCDTSGLLILLGLDFSAMIFPVVHIGAIAVSFLFVVMMFNIQIAEIHEEVLRYLPVSGIIGLIFWWEMFFILDNETIPLLPTHRNTTSLKYTVYAGKVRSWTNLETLGNLLYTYYSVWFLVSSLILLVAMIGAIVLTMHRTTKVKRQDVFRRNALDSRRTTIHIQNRRFFSHKGDDAPVPPADPESI

SEQ ID NO: 50589 - DNA, 537 bp, Citrus sinensis
  CDS (1)..(537): transl_table=11
atggatttgcctggaccaatacacgattttattttagtttttctgggatcgggtcttatattaggaggtctgggagtggtattatttaccaacccaatttattctgccttttccttgggattggttcttgtttgtatatcattattctatattctatcaaattcccattttgtagctgccgcgcaactccttatttacgtgggagctgtaaatgttttaatcatatttgctgtaatgttcatgaacggctcagactattccaaagattttcagttgaatctttggactattggcgatggtcttacttctctggtttgtacaagtatttttttttcgctaatcactactattctcgatacatcgtggtacgggattatttggactacacgagccaaccagattattgaacaagatttgataagtaatagtcaacaaattggaattcatttatcaacagacttttttcttccatttgaactcgtttcaataattcttttagttgctttaataggtgcaattgccgtggcgcgtcaataa

SEQ ID NO: 50590 - protein, 178 aa, Citrus sinensis
MDLPGPIHDFILVFLGSGLILGGLGVVLFTNPIYSAFSLGLVLVCISLFYILSNSHFVAAAQLLIYVGAVNVLIIFAVMFMNGSDYSKDFQLNLWTIGDGLTSLVCTSIFFSLITTILDTSWYGIIWTTRANQIIEQDLISNSQQIGIHLSTDFFLPFELVSIILLVALIGAIAVARQ

SEQ ID NO: 50591 - DNA, 531 bp, Platanus occidentalis
  CDS (1)..(531): transl_table=11
atggatttacctggaccaatacatgattttcttttagtttttctgggatcaggtcttatattagggggtctgggagtggtattacttaccaatccaatttattctgccttttcgttgggattggttcttgtttgtatatccttattctatattccatcgaactcccattttgtagctgctgcgcagctccttatttacgtgggagccataaatgtcttaatcatatttgctgtgatgttcatgaatggttcagaatattacaatgatttccatctttggactgttggagatggagtcacttcactgctttgtacaagtatttttgtttcactaattactactatcccagacacgtcatggtacggggttatttggactacaagatcaaaccagattatagagcaggacttgataagtaacggtcaacaaattggaattcatttatcaacagatttttttcttccatttgaactcatttctataattcttttagttgccttaataggtgcaattgctatggcgcgtcagtaa

SEQ ID NO: 50592 - protein, 176 aa, Platanus occidentalis
MDLPGPIHDFLLVFLGSGLILGGLGVVLLTNPIYSAFSLGLVLVCISLFYIPSNSHFVAAAQLLIYVGAINVLIIFAVMFMNGSEYYNDFHLWTVGDGVTSLLCTSIFVSLITTIPDTSWYGVIWTTRSNQIIEQDLISNGQQIGIHLSTDFFLPFELISIILLVALIGAIAMARQ

SEQ ID NO: 50593 - DNA, 531 bp, Nandina domestica
  CDS (1)..(531): transl_table=11
atggatttacctgcaccaatacatgattttcttttagtatttttggggttgggtcttatagtcggcggtctaggagtagtattacttaccaatccaatttattctgccttttctttgggattggttcttgtttgtatatccttattccatattccagcgaactctcattttgtagctgctgcacagctccttatttacgtgggagccataaacgtattaattgtatttgctgtgatgttcatgaatggttcagaatattacaatgatttccatctttggaccgttggggatggagtcacttcgctggtttgtacaagtatttttgtttcactaattactactatctcagatacgtcatggtacgggattatttggactacaagatcaaaccaaattatagagcaagatttgataaataagggtcaacagcttgggattcatttatcaacagacttttttcttccatttgaacttatttctataattcttttagttgccttgataggtgcaattgctatggctcgccagtaa

SEQ ID NO: 50594 - protein, 176 aa, Nandina domestica
MDLPAPIHDFLLVFLGLGLIVGGLGVVLLTNPIYSAFSLGLVLVCISLFHIPANSHFVAAAQLLIYVGAINVLIVFAVMFMNGSEYYNDFHLWTVGDGVTSLVCTSIFVSLITTISDTSWYGIIWTTRSNQIIEQDLINKGQQLGIHLSTDFFLPFELISIILLVALIGAIAMARQ

SEQ ID NO: 50595 - DNA, 597 bp, Alkalilimnicola ehrlichei MLHE-1
  CDS (1)..(597): transl_table=11
atggagcaggtcattttctatgtgttcgccgcggtgctgctgtttgccgcgacgatggtcatcaccgcccgtaacccggtgcactgcgccctgtttctggtgttggcgtttttcaacagcgccattctctgggtgatggcgggcgcggagttcctcgggatcgccctggtggtggtctacgtgggtgccgtcatggtgttgttcctgttcgtggtgatgatgctcgacatcgggcggagcgttcaccaggagggcttcacccgatacctgccggccggcgcgttggtcgcggtgctgatggcggtgcagttgggcctggtcctggtttcggaccacaccggcatcgccggtggcgtgattccggaggtgcccgccgacgtcgacaacatccgcgggctcggtggcctgctctacaccacctatgtctacccgttcgagatcgccggggccatcctgttggtggccatcattgcggccatcgtgctcaccctccgccgccgggagggcaccaagcaccaggatgtggccaagcaggtgcgggtgcgccgcgaggaccgggtacgcctggtcagcatgaagtccgaggggcgggaataa

SEQ ID NO: 50596 - protein, 198 aa, Alkalilimnicola ehrlichei MLHE-1
MEQVIFYVFAAVLLFAATMVITARNPVHCALFLVLAFFNSAILWVMAGAEFLGIALVVVYVGAVMVLFLFVVMMLDIGRSVHQEGFTRYLPAGALVAVLMAVQLGLVLVSDHTGIAGGVIPEVPADVDNIRGLGGLLYTTYVYPFEIAGAILLVAIIAAIVLTLRRREGTKHQDVAKQVRVRREDRVRLVSMKSEGRE

SEQ ID NO: 50597 - DNA, 531 bp, Morus indica
  CDS (1)..(531): transl_table=11
atggatttgcctggaccaatacatgattttcttttagtctttctgggattaggtcttatcttaggaggtataggagtagtattacttaccaacccaatttattctgccttttcgctgggattagttcttgtttgtatatccttattatatattctatcaaattcatattttgtagccgccgcacaactccttatttacgtgggagctataaatgttttaatcatatttgctgtgatgttcatgaatggttcagaatattacaaagattttaatctttggaccgttgggaatgggtttactttgctgatttgtacaagtatttttggtttactaataactactattacggatacatcatggtacgggattatttggactacaagatcaaaccagattatagagcacgatttgataagtaatagtcaacaaattggaattcatttatcaacagatttttttcttccatttgaattcatctcaataattcttttagccgctttgataggtgcaattaccgtggcgcgtcaataa

SEQ ID NO: 50598 - protein, 176 aa, Morus indica
MDLPGPIHDFLLVFLGLGLILGGIGVVLLTNPIYSAFSLGLVLVCISLLYILSNSYFVAAAQLLIYVGAINVLIIFAVMFMNGSEYYKDFNLWTVGNGFTLLICTSIFGLLITTITDTSWYGIIWTTRSNQIIEHDLISNSQQIGIHLSTDFFLPFEFISIILLAALIGAITVARQ

SEQ ID NO: 50599 - DNA, 816 bp, Sorghum bicolor
  CDS (1)..(816)
atgatactttctgttttgtcgagccctgctttggtctctggtttgatggttgtacgtgctaaaaatccggtacattccgttttgtttcccatcctagtcttttgcgacacttctggtttacttattttgttaggtctcgacttctccgctatgatcttcccagtagttcatataggagctattgccgtttcattcctattcgtggttatgatgttcaatattcaaatagcggagattcacgaagaagtattgcgctatttaccagtgagtggtattattggactgatcttttggtgggaaatgttcttcattttagataatgaaaccattccattactaccaacccaaagaaatacgacctccctgggatatacggtttatgccggaaaggtacgaagttggactaatttggaaacattgggcaatttactttatacctactattccgtctggtttttggtttctagtttgattttattagtagctatgattggggctatagtactgactatgcataggactacaaaggtgaaaagacaggatgtattccgacgaaatgccttggattttaggaggactataatgaggaggccgagagctagcacgaaaacagtgattcttgaacggccaagaatcacagcaaagaacagaacacctcgttcccatttctctttttgtacggggaagtccgtggggacccactcccgaagtgtctcctcctgggccgaatttagcgagctcctacccgtagtggccccctacgttgaaactgtagttgaaactgcggggagtgtaccgatgccacaaaggccttag

SEQ ID NO: 50600 - protein, 271 aa, Sorghum bicolor
MILSVLSSPALVSGLMVVRAKNPVHSVLFPILVFCDTSGLLILLGLDFSAMIFPVVHIGAIAVSFLFVVMMFNIQIAEIHEEVLRYLPVSGIIGLIFWWEMFFILDNETIPLLPTQRNTTSLGYTVYAGKVRSWTNLETLGNLLYTYYSVWFLVSSLILLVAMIGAIVLTMHRTTKVKRQDVFRRNALDFRRTIMRRPRASTKTVILERPRITAKNRTPRSHFSFCTGKSVGTHSRSVSSWAEFSELLPVVAPYVETVVETAGSVPMPQRP

SEQ ID NO: 50601 - DNA, 531 bp, Jasminum nudiflorum
  CDS (1)..(531)
atggatttacctggaccaatacatgattttcttttagtctttttggaattgggtcttatattaggaagtctaggagtagtattccttcccaatccaatttactcggccttttcattgggattggttcttttttgtatatccttattctatattctattgaactcctattttgtagctgctgcgcagctccttatttatgtgggagctataaatgttttaatcatttttgctgtgatgttcatgaatggttcagaatattacaaagatttttatctttggaccgttggggatggagttacttcaatggtttgtacaagtctttttatttcactaattactactattccagatacgtcatggtacgggattatttggactacaaaatcaaaccagattatagagaaagatttgataagtaatagtcaacagattggaattcatttagtaacagatttttttcttccgtttgaactcatttcaataattcttttagtcgctttaataggtgcaattgctatagctcgtcaataa

SEQ ID NO: 50602 - protein, 176 aa, Jasminum nudiflorum
MDLPGPIHDFLLVFLELGLILGSLGVVFLPNPIYSAFSLGLVLFCISLFYILLNSYFVAAAQLLIYVGAINVLIIFAVMFMNGSEYYKDFYLWTVGDGVTSMVCTSLFISLITTIPDTSWYGIIWTTKSNQIIEKDLISNSQQIGIHLVTDFFLPFELISIILLVALIGAIAIARQ

SEQ ID NO: 50603 - DNA, 531 bp, Pelargonium x hortorum
  CDS (1)..(531): transl_table=11
atggatttgcccggaccaatacacgattttcttttagtttttctgggatcaggtattatattagggggtctaggggtcgtattacttaccaacccaatttattctgccttttctttgggatttgtttttatttgtatatctttattttatattctatcaaactcctattttgtagctgctgcacagctccttatttatgtaggagctataaatgttttaatactatttgctgtgatgttcatgaatggttcagaatattacaaagattttcatctttggactcttggggatgggcttacttcactaatttgtacaattctttttctttcactaattactactattctagatacatcatggtatggtattctttggactacaaaatcaaaccagattatagagaaagattttataagtaatagtcaacaacttggaattcttttatcaacagatttttttcttccatttgaactcatgtctataattcttttagttgctttgctaggtgcaattgctgcggctcgtcagtaa

SEQ ID NO: 50604 - protein, 176 aa, Pelargonium x hortorum
MDLPGPIHDFLLVFLGSGIILGGLGVVLLTNPIYSAFSLGFVFICISLFYILSNSYFVAAAQLLIYVGAINVLILFAVMFMNGSEYYKDFHLWTLGDGLTSLICTILFLSLITTILDTSWYGILWTTKSNQIIEKDFISNSQQLGILLSTDFFLPFELMSIILLVALLGAIAAARQ

SEQ ID NO: 50605 - DNA, 501 bp, Pseudomonas aeruginosa UCBPP-PA14
  CDS (1)..(501): transl_table=11
gtggaattcgctttctatttcgctgccggcgtcgccgtactggccacgctgcgggtcatcaccaacagcaacccggtgcatgccctgctctacctgatcatttccctgctggccatctcgatgaccttcttcagcctcggcgcacccttcgccggcgccctggagatcatcgtctacgctggcgccatcatggttctgttcgtcttcgtggtgatgatgctcaacctcggcccggccgtggtcgagcaggagcgcaagtggctcacgcccggcatctgggtcgggccttcggccctggccctggtcctgctggtggaactgctggtggtcctcgcccgcaccccgagcggtgccggcatcggccataccacggtagacgccaaggcggtcggcatcagcctctacggcccgtacctgctggtggtcgaactggcctccatgctgttgctcgcggccctggtcgctgcctatcacctgggtcgtcaagacgccaaacaataa

SEQ ID NO: 50606 - protein, 166 aa, Pseudomonas aeruginosa UCBPP-PA14
MEFAFYFAAGVAVLATLRVITNSNPVHALLYLIISLLAISMTFFSLGAPFAGALEIIVYAGAIMVLFVFVVMMLNLGPAVVEQERKWLTPGIWVGPSALALVLLVELLVVLARTPSGAGIGHTTVDAKAVGISLYGPYLLVVELASMLLLAALVAAYHLGRQDAKQ

SEQ ID NO: 50607 - DNA, 531 bp, Coffea arabica
  CDS (1)..(531): transl_table=11
atgaatttacctggaccaatacacgattttcttttagtctttctggggtcgggtctaatcttaggaggtctaggagtggtattacttcccaatccaatttattctgccttttcattgggattcgttcttgtttgtatatctttattctatattctattgaactcctactttgtagctgctgcgcagctgcttatttacgtaggagctataaatgttttaatcatttttgctgtgatgttcatgaatggctcagaatattacaaagattttcatctttggactattggggatggagttacttcggtggtttgtacaggtctttttatttcactaattactactattccagatatgtcatggtacggtattatttggactacaaaatcaaaccagattctagagcaagatttgataactaatagtcaacaaattggagttcatttatcaacagatttttttcttccatttgaactcgtttcaataattcttttagttgctttaataggtgcaattgctgtagctcgtcaataa

SEQ ID NO: 50608 - protein, 176 aa, Coffea arabica
MNLPGPIHDFLLVFLGSGLILGGLGVVLLPNPIYSAFSLGFVLVCISLFYILLNSYFVAAAQLLIYVGAINVLIIFAVMFMNGSEYYKDFHLWTIGDGVTSVVCTGLFISLITTIPDMSWYGIIWTTKSNQILEQDLITNSQQIGVHLSTDFFLPFELVSIILLVALIGAIAVARQ

SEQ ID NO: 50609 - DNA, 495 bp, Solibacter usitatus Ellin6076
  CDS (1)..(495): transl_table=11
atggacgttattctcttcctcacattcgccgtgatcgcggtggtctgcgccatcaatgtcgtggtgcagacgcaccccatctccagcgcgctttcgctggtcggagtcatgggctcgctcgcgatcctttacctgctgctcggggcggagttcatcgccgccgcgcaggtgattgtttacgcgggcgccatcatggtgctgttcgtcttcgtgattatgctgctgaacgccggcgccgagaccacgaaaggccgctcctacctgattcccggagccccgctcctgatcgtcttcctcgggctggtcgctttcttcgtgcagcgcatcttcccctccgccaccatggtccgcttcggcggctttaccggaggcggtcccagggatatcggcaacgcgctgttcacgacgtacctcctgcctttcgaagtaacgtcgctcctgatactgatcgccatcgtcggcgccattgtcctggcgcgaaaggaaatcgaatag

SEQ ID NO: 50610 - protein, 164 aa, Solibacter usitatus Ellin6076
MDVILFLTFAVIAVVCAINVVVQTHPISSALSLVGVMGSLAILYLLLGAEFIAAAQVIVYAGAIMVLFVFVIMLLNAGAETTKGRSYLIPGAPLLIVFLGLVAFFVQRIFPSATMVRFGGFTGGGPRDIGNALFTTYLLPFEVTSLLILIAIVGAIVLARKEIE

SEQ ID NO: 50611 - DNA, 591 bp, Magnetococcus sp. MC-1
  CDS (1)..(591): transl_table=11
atgttggtggacgtcgtcttctatctcctggctgcaatcatgttggtggccgcactacgggtaatcacggcaaagaaccccgtctcttcggtgatgtttttggtgctggcctttttcaccgctgccggcctgtttttgctgattgaggctgagtttttagcggtcattctggtgatggtttacatgggtgcggtggccattctgttcctatttgtggtgatgatgttggatgttgattttgctctgctgcgccaaggggcgcgggatcatctacccttgggcattgcggttggggcggtggtgctgtttgagtttgccgcagtagccagcagcatccaccctgagcagcatggggcggtggttggggaaaatgtgaacaacaccttagagattggtaaaattctttacacgaaatatctgttccccttcgaggtcgcttctttgattttgttggtggctttgattggggcagtggcgttggcacatcgtaaacgtaacaatgtgcggacacagaatatacctgaccagatcgcccgtactcgtgatgagtcggttgcgcttaaaaaggtcaaatctggcgagggggcctga

SEQ ID NO: 50612 - protein, 196 aa, Magnetococcus sp. MC-1
MLVDVVFYLLAAIMLVAALRVITAKNPVSSVMFLVLAFFTAAGLFLLIEAEFLAVILVMVYMGAVAILFLFVVMMLDVDFALLRQGARDHLPLGIAVGAVVLFEFAAVASSIHPEQHGAVVGENVNNTLEIGKILYTKYLFPFEVASLILLVALIGAVALAHRKRNNVRTQNIPDQIARTRDESVALKKVKSGEGA

SEQ ID NO: 50613 - DNA, 759 bp, Mycobacterium smegmatis str. MC2 155
  CDS (1)..(759): transl_table=11
atgaactccgacctgatgctgctggccgccgagggtgcgcgcacgtcgacgagcgaggccgtggtgttctgggtcgtcggcaccgtagccctcgtcggcgcgatcggcgtggtggccgcccgaaaggccgtgtactcggcagtgtttctggcctgcaccatgatttcgctggccgtgctctacatcgcgcaggacgcgccgttcctcggtgtggtgcagatcgtggtctacaccggcgcggtgatgatgctgttcctgttcgtgctgatgctcatcggcgtcgatctcaccgagtcgctcgtcgagacgatcaaggggcaccggatcgcggcgctgatcgcgggtgccgggttcgggatcctggtgatcgcgggtatcggcaacgtgtcggtcgccgggttcagcggtctggccgcggccaacagcggcggcaacgtcgagggcttggcggcgctgatcttcacgcggtacctgtgggcgttcgagttgaccagcgcgctgctgatcaccgcggcgctgggggcgatggtgctcgcgcaccgggaacgcttcgaacgccgcaagacccagcgggaactggccatcgaacgcttccagaccggcgggcatccgacgccgctgcccaatcccggtgtctacgcccggcacaactccgtcgacgtcccggcccgtctgcccgacgggtcggaatccccactgtcggtgagcacgatcctgccgcaccgcacggtcggcagcgcgaccaacgggaagaggtga

SEQ ID NO: 50614 - protein, 252 aa, Mycobacterium smegmatis str. MC2 155
MNSDLMLLAAEGARTSTSEAVVFWVVGTVALVGAIGVVAARKAVYSAVFLACTMISLAVLYIAQDAPFLGVVQIVVYTGAVMMLFLFVLMLIGVDLTESLVETIKGHRIAALIAGAGFGILVIAGIGNVSVAGFSGLAAANSGGNVEGLAALIFTRYLWAFELTSALLITAALGAMVLAHRERFERRKTQRELAIERFQTGGHPTPLPNPGVYARHNSVDVPARLPDGSESPLSVSTILPHRTVGSATNGKR

SEQ ID NO: 50615 - DNA, 531 bp, Gossypium barbadense
  CDS (1)..(531): transl_table=11
atggatttgcctggaccaatacacgattttcttttagtttttctgggatcgggtcttatattaggaggcctgggagtggtattacgtatcaatccaatttattctgccttttcattgggactagttcttgtttgtatatctttattttatattctcacaaattatcattttgtagctactgccaagctccttatttatgtgggagccataaatgttttaatcctatttgttgtgatgttcatgaatagttcagaatattataaagattttaatccatggaccattgggaatggccttacttcgttggtttgtacaagtattcttgtttctctaattagtactatattagatacatcatggtacgggattatttggactacaagatcaaatcaaattatagaacaagatttgataggtaatagtcaacaaattggaattcatttagcaactgatttttttcttccatttgaattcatttcaataattcttttagttgctttgataggtgcaattgatgtgactcttcaataa

SEQ ID NO: 50616 - protein, 176 aa, Gossypium barbadense
MDLPGPIHDFLLVFLGSGLILGGLGVVLRINPIYSAFSLGLVLVCISLFYILTNYHFVATAKLLIYVGAINVLILFVVMFMNSSEYYKDFNPWTIGNGLTSLVCTSILVSLISTILDTSWYGIIWTTRSNQIIEQDLIGNSQQIGIHLATDFFLPFEFISIILLVALIGAIDVTLQ

SEQ ID NO: 50617 - DNA, 603 bp, Azoarcus sp. BH72
  CDS (1)..(603): transl_table=11
atggaattcaagacggctgtcttctactttttggccgcgatcctggtgtttgccggattgcgcgtcatcaccgcgcgcaacccggtacatgcggcgttgttcctggtgttgtccttcttcacggcgggcggcatctggctgctgctgcaggcggagtttctcgcgatcacgctggtgatggtgtatgtcggcgcggtcatggtgctgttcctgttcgtggtcatgatgctcgacatcaacctcgaccgcatccgccagggcttctggaattacctcccggtcggcgcattgatcggcatcctgatggtggtcgagatggcgatggtcctgggtggccgctacttcgacctcgactcgatgccggccccgccgcccgctgcggctgactacagcaacaccgctgaactcggccgggtgctctacaccgattacgtctacccgttcgaactggcttcgctggtgctggtggtcgcgatggtggcagcggtttcgctgacgctgcgcaagcgtaaaggcaataagtatgtccagccgtcggaccaggttgcggtgaagcgcgaaggtcgggtcgaactggtgaagatgccggccgagacggaataa

SEQ ID NO: 50618 - protein, 200 aa, Azoarcus sp. BH72
MEFKTAVFYFLAAILVFAGLRVITARNPVHAALFLVLSFFTAGGIWLLLQAEFLAITLVMVYVGAVMVLFLFVVMMLDINLDRIRQGFWNYLPVGALIGILMVVEMAMVLGGRYFDLDSMPAPPPAAADYSNTAELGRVLYTDYVYPFELASLVLVVAMVAAVSLTLRKRKGNKYVQPSDQVAVKREGRVELVKMPAETE

SEQ ID NO: 50619 - DNA, 672 bp, Neisseria meningitidis FAM18
  CDS (1)..(672): transl_table=11
atgactttttccgcgattctgttctatatccttgccgccatcgtcctatacggcgcgctgcgtaccgttacagcgaaaaaccctgtccacgccgctttgcatctggtgttgaccttctgcgtgagcgcgatgctttggatgctgatgcaggctgagtttttgggcgtgacgctggtggtggtttacgtcggcgccgtgatggtgttgttcctgttcgtcgtgatgatgttgaacatcgacattgaagaaatgcgtgccggtttctggcggcacgcgcctgttgccggtgtggtcggcacattgttggcagttgccctgattctgattctggtcaatccgaaaaccgaccttgccgcatttgggctgatgaaagacattcccgccgattacaacaatatccgcgatttgggcagccgtatttataccgattatctgctgccgtttgaattggcggcggtattgctgctgttgggtatggtggccgcgattgcgctggttcaccgtaaaacggttaatccgaaacgtatggaacctgccgaccaagttaaagtacgcgccgaccaaggccgtatgcgcttggtgaaaatggaagccgtgaaaccgcaaaccgaatctgccgaagaaagcgaagtttcagacgacctcaagccgaaagaggagggcaaagcatga

SEQ ID NO: 50620 - protein, 223 aa, Neisseria meningitidis FAM18
MTFSAILFYILAAIVLYGALRTVTAKNPVHAALHLVLTFCVSAMLWMLMQAEFLGVTLVVVYVGAVMVLFLFVVMMLNIDIEEMRAGFWRHAPVAGVVGTLLAVALILILVNPKTDLAAFGLMKDIPADYNNIRDLGSRIYTDYLLPFELAAVLLLLGMVAAIALVHRKTVNPKRMEPADQVKVRADQGRMRLVKMEAVKPQTESAEESEVSDDLKPKEEGKA

SEQ ID NO: 50621 - DNA, 618 bp, Rickettsia sibirica 246
  CDS (1)..(618): transl_table=11
atgcctatatttttttatttatttgcaacattaataactatcagtagcgtatgcgttgtcttaagcaaaaattccgtatattcggtattatggttaatttttgcatttatcaacggtgcagggcttatgattttgcttggagcagaatttttagctatgatgctgatagtgatttatgttggagctgtagcagtattattcttatttgtgataatgatgctagatatgcattttaataagacaataacgcagctaaaagcaaatctagctttaagtatttttatagctttgattatgtttgccgatttagtaataattattttacttggtactaaaaatattaatttcaactccaatgtatcgtttaccataacaaataatatctcaaataccaaagcaataggaggcatactctacacagactttatgctaccgtttcaaatggcgggccttatattatttgtcgctatgattgcatgtattacgttaacactaaagaagcgtgagggagtaaaacgtcaagatatatcaaaacaactacgtcacaataaagaaaataccgtattaatgacaaagcctattctaaataaaggtgttgagaatattaaatatgaatga

SEQ ID NO: 50622 - protein, 205 aa, Rickettsia sibirica 246
MPIFFYLFATLITISSVCVVLSKNSVYSVLWLIFAFINGAGLMILLGAEFLAMMLIVIYVGAVAVLFLFVIMMLDMHFNKTITQLKANLALSIFIALIMFADLVIIILLGTKNINFNSNVSFTITNNISNTKAIGGILYTDFMLPFQMAGLILFVAMIACITLTLKKREGVKRQDISKQLRHNKENTVLMTKPILNKGVENIKYE

SEQ ID NO: 50623 - DNA, 618 bp, Rickettsia rickettsii
  CDS (1)..(618): transl_table=11
atgcctatatttttttatttatttgcaacattaataactatcagtagcgtatgcgttgtcttaagcaaaaattccgtatattcggtattatggttaatttttgcatttatcaacggtgcagggcttatgattttgcttggagcagaatttttagctatgatgctgatagtgatttatgttggagctgtagcattattattcttatctgtgataatgatgctagatatgcattttaataagacaataacgcagctaaaagcaaatctagctttaagtatttttatagctttgattatgtttgccgatttagtaataattattttacttggtactaaaaatattaatttcaactccaatgtatcgtttactataacaaataatatctcaaatactaaagcaataggaggcgtactctacacagactttatgctaccgtttcaaatggcgggccttatattatttgtcgctatgattgcatgtattacgttaacactaaagaagcgtgagggagtaaaacgtcaagatatatcaaaacaactacgtcacaataaagaaaataccgtattaatgacaaagcctattctaaataaaggtgttgagaatattaaatatgaatga

SEQ ID NO: 50624 - protein, 205 aa, Rickettsia rickettsii
MPIFFYLFATLITISSVCVVLSKNSVYSVLWLIFAFINGAGLMILLGAEFLAMMLIVIYVGAVALLFLSVIMMLDMHFNKTITQLKANLALSIFIALIMFADLVIIILLGTKNINFNSNVSFTITNNISNTKAIGGVLYTDFMLPFQMAGLILFVAMIACITLTLKKREGVKRQDISKQLRHNKENTVLMTKPILNKGVENIKYE

SEQ ID NO: 50625 - DNA, 525 bp, Bacillus cereus G9241
  CDS (1)..(525): transl_table=11
atgaatggcgagtttatagcattctttatactatccttgtctgcaattatcggcggcgttcttatgttgaatttaacgaaagtcatgcatatgatgctagctctcgttctgacattcctcagcattgcaggtttgtactttcttttatcagctgaatttatcggggttgcacaaattttactttactcgggtgcgatcaccattattatgatttttggcattatgttaacgaaacataatgcagaaaatgaatctcgtcttactcttcgaaaatggattatcttctttgcggttgtagcatttggggcagttatgtatttcgctgttaacaatattgattttgcaaatgaaagcacacaaggaagtttacctctccatgaaaaaaacacacttcaaatcggtacacttctctattcaaaatatattattccatttgagctaatctcagttattttacttgtagcacttgttggcgcaattattcttgcgaagaaggatgagaaagaggaggattccaatgagtag

SEQ ID NO: 50626 - protein, 174 aa, Bacillus cereus G9241
MNGEFIAFFILSLSAIIGGVLMLNLTKVMHMMLALVLTFLSIAGLYFLLSAEFIGVAQILLYSGAITIIMIFGIMLTKHNAENESRLTLRKWIIFFAVVAFGAVMYFAVNNIDFANESTQGSLPLHEKNTLQIGTLLYSKYIIPFELISVILLVALVGAIILAKKDEKEEDSNE

SEQ ID NO: 50627 - DNA, 711 bp, Crocosphaera watsonii WH 8501
  CDS (1)..(711): transl_table=11
atgaggacttgtactgagcttttcgaagtctgcttgtgttacagatgtatccattattcactaaaaaaaggagagtcaataagcgtgaatttagctgaaggagtccaaattatttcctttgccatcttagcaggattagttatcatcactgctttaggtgtggtcttgctggaaaatattgtttattctgccttcttattgggaggagtatttatcagtatttcggggatttatatcctgttaaatgctgatttcgtagctgctgcacaggtattaatttatgtaggtgcagtcaatgttttaatcttgtttgctatcatgttggttaataaaaaacaagattattccagcatacctacaccctggatacgtcgtggagcaactgctttagtttgtgcaggactctttgccctattagggacaatggttttgataaccccttggtccatagaaagtaatgctccggggttgattgaaaatactgttgtcgaaattggtaaacatttctttagcgattttctcttgccttttgagttggcatctgttctcttactgatggcaatggtaggagcaattgttttagcacgtcgtgactttattcccgatactttaccaacggaagatggtgttatcacttcattacaactgcctgaaaaattgagtgaactagaatcaagagaattgtctgcttctaaatcatctgaatcgtag

SEQ ID NO: 50628 - protein, 236 aa, Crocosphaera watsonii WH 8501
MRTCTELFEVCLCYRCIHYSLKKGESISVNLAEGVQIISFAILAGLVIITALGVVLLENIVYSAFLLGGVFISISGIYILLNADFVAAAQVLIYVGAVNVLILFAIMLVNKKQDYSSIPTPWIRRGATALVCAGLFALLGTMVLITPWSIESNAPGLIENTVVEIGKHFFSDFLLPFELASVLLLMAMVGAIVLARRDFIPDTLPTEDGVITSLQLPEKLSELESRELSASKSSES

SEQ ID NO: 50629 - DNA, 522 bp, Prosthecochloris aestuarii DSM 271
  CDS (1)..(522): transl_table=11
atgaccaacgtgacctataccattattttttatctctttgccgcgataacggttttttctgccgcatttgtcgtgttttcaaagaatgttatctactcggcgttttctcttctctttacctttttcggcgttgccgctctctacgtctatctgagtgcagattttatcgccgtcacccagatcgttgtctatgttggcggtattctggtcctccttcttttcggtgtcatgtttaccaacaagatcatgacgacttcgcttcgtaccgaggtggtcaacctgattcccggtatcgccattctttttgctgtgacagggggacttctctatgttttctatacccgggcgaactggtacagcactggcgttcagcttcaaggcagcgttgttgaacggatcggtcttgaaacgatgtcgcgctatgtgcttccatttgaaatggcatcgatactgcttcttctggctcttatcggtgcagcgtatctggccagatttgataaagtgcaaaataaagaacgataa

SEQ ID NO: 50630 - protein, 173 aa, Prosthecochloris aestuarii DSM 271
MTNVTYTIIFYLFAAITVFSAAFVVFSKNVIYSAFSLLFTFFGVAALYVYLSADFIAVTQIVVYVGGILVLLLFGVMFTNKIMTTSLRTEVVNLIPGIAILFAVTGGLLYVFYTRANWYSTGVQLQGSVVERIGLETMSRYVLPFEMASILLLLALIGAAYLARFDKVQNKER

SEQ ID NO: 50631 - DNA, 666 bp, Xylella fastidiosa Dixon
  CDS (1)..(666): transl_table=11
atggattgggtaaatattgctttctatctcttttccgctgtcgttgttgcagcggctggtgccgtcatcagtgtgcgtcatccggtgtatgccgtgttatgtctgattttgacgttcttttccatggcctgcatctggttgctcgttggtgccgagttcctgggagtgactctggtgttggtttacgttggcgcggtgatggtgctgttcttgtttgtggtgatgatgttggatatcgataccagtcgattacgtgagggttgggtcagatatttgcccgttggtctattggtggctggggtgatgctggtgcagatggtggtgttgatcggcgtgaagatgcgcatggcgacgccgttccctgtggataatgctgctgctcaggctgctgatacgtccaatctaatctggttggctcatagtttgttcaccgactttttgttcccgtttgagtttgcggcagtgattctgacggtggctgtgatcgctgccgtgatgctaacgctgcgcaagcgtgagggtgtgaagactcaggatccgagtcagcaaactcgggtgaagtctgctgatcgcctgcgtatcgttagcatgccaactgaaaaaccgattgctgtggttccgattcggagtgataccaacaacgatgcacaggagataacgccgtga

SEQ ID NO: 50632 - protein, 221 aa, Xylella fastidiosa Dixon
MDWVNIAFYLFSAVVVAAAGAVISVRHPVYAVLCLILTFFSMACIWLLVGAEFLGVTLVLVYVGAVMVLFLFVVMMLDIDTSRLREGWVRYLPVGLLVAGVMLVQMVVLIGVKMRMATPFPVDNAAAQAADTSNLIWLAHSLFTDFLFPFEFAAVILTVAVIAAVMLTLRKREGVKTQDPSQQTRVKSADRLRIVSMPTEKPIAVVPIRSDTNNDAQEITP

SEQ ID NO: 50633 - DNA, 603 bp, Sulfitobacter sp. EE-36
  CDS (1)..(603): transl_table=11
atgagcgttttcgcattttacctcttcgcgatcagcgtgatcgctggcgggctgttcactgtgatcagccgcaaccccgtgcattcggtgctgtggttgatcctgtccttcctcagcgcggcggggcttttcgtgctgctcaacgccgaattcgtcgcgatgctgctgatcattgtctatgtcggcgcggtcgcggttctgttcctgttcgttgttatgatgcttgatgtcgatttcgccgagctcaaggccgaaatggcgcgctatatgccactggccctgctgatcggtctggtgatcctgatgcaattcgttatggcgttcggcgcgtgggatgcgaactctgccgccgaaggtctgcgcacgcaggtgatcaccgacgaggtgcacaacaccgctgcattgggcctgatcctttatgatcaatacttcctgctgttccagctgtcgggtctgatcctgctggtcgcgatgatcggggcgattgtgctgacgctgcgccaccgtgcggatgtgaaacgccagaacgtggtcgatcagatgatgcgtgatccgaagctggcgatgaaactgaatgatgtgaaacccgggcagggcctttaa

SEQ ID NO: 50634 - protein, 200 aa, Sulfitobacter sp. EE-36
MSVFAFYLFAISVIAGGLFTVISRNPVHSVLWLILSFLSAAGLFVLLNAEFVAMLLIIVYVGAVAVLFLFVVMMLDVDFAELKAEMARYMPLALLIGLVILMQFVMAFGAWDANSAAEGLRTQVITDEVHNTAALGLILYDQYFLLFQLSGLILLVAMIGAIVLTLRHRADVKRQNVVDQMMRDPKLAMKLNDVKPGQGL

SEQ ID NO: 50635 - DNA, 609 bp, Roseovarius nubinhibens ISM
  CDS (1)..(609): transl_table=11
atgaccgtctttgcactggccttttacctgtttgcgacctgtgtgatcgtgggcgggctgttcaccgtgatcagccgcaacccggtgcattcggtcctgtggctgatcctgagctttctcagcgcggcggggcttttcgtgctgcttggtgccgagttcgtggcgatgctgttgatcatcgtctatgtcggcgcggtggcggttctcttcctcttcgtggtgatgatgctcgacgtggattttgccgagctcaaggccgagatggcgcgctatatgccgctggccctgctgatcggggtggtgcttttgatgcaatttgcgctcgcctatggcgcgtgggactttgccgaaggcgccgaggcggcgcgcggcgcggtcacgcccgatggggtcgagaacaccgcggccctcggcctgctgatctatgacaagtatttcctgctgttccaactgtccggtctcatcctgctggtggcgatggtgggggcgattgcgctgaccttgcgccaccgtcaggacgtcaagcgccagaacgttctggcccagatgtaccgcgatccggccaaggcgatggaactgcgcgatgtgaaaccggggcaggggctctga

SEQ ID NO: 50636 - protein, 202 aa, Roseovarius nubinhibens ISM
MTVFALAFYLFATCVIVGGLFTVISRNPVHSVLWLILSFLSAAGLFVLLGAEFVAMLLIIVYVGAVAVLFLFVVMMLDVDFAELKAEMARYMPLALLIGVVLLMQFALAYGAWDFAEGAEAARGAVTPDGVENTAALGLLIYDKYFLLFQLSGLILLVAMVGAIALTLRHRQDVKRQNVLAQMYRDPAKAMELRDVKPGQGL

SEQ ID NO: 50637 - DNA, 606 bp, Oceanicola batsensis HTCC2597
  CDS (1)..(606): transl_table=11
atgaccgctgccgcactggccttttacctgttcgcattttcgacgctcgccggcgggctctttaccgtcatcgcgcgcaacccggtgcattcggtgctctggctgatcctggccttcctgtcctcggccgggctcttcgtgctgctgggggcggaattcgtcgcgatgctgctgatcatcgtctatgtcggcgcggtggcggtgctcttcctcttcgtggtgatgatgctcgacatcgactttgccgcgctcaaggcggagatggcgaaatacatgccgctggccctgctgatcggggtcatcctgctgatgcagttcggcctggcctacggctcgtgggaggcgtcggacatggccgcctcgaaccgccttgccgccatgcccgagggcgagaacaccgccgggctggggctgctgatctacgaccagtacttcctgctcttccagctggccgggctgatcctgctggtggccatgataggcgccatcgtcctgaccctgcgccaccgcaccgacatcaagcgccagaacgtcctggcccagatgtggcgcgacccggccaagtcgatggagctcaaggacgtgaagccggggcaggggctctga

SEQ ID NO: 50638 - protein, 201 aa, Oceanicola batsensis HTCC2597
MTAAALAFYLFAFSTLAGGLFTVIARNPVHSVLWLILAFLSSAGLFVLLGAEFVAMLLIIVYVGAVAVLFLFVVMMLDIDFAALKAEMAKYMPLALLIGVILLMQFGLAYGSWEASDMAASNRLAAMPEGENTAGLGLLIYDQYFLLFQLAGLILLVAMIGAIVLTLRHRTDIKRQNVLAQMWRDPAKSMELKDVKPGQGL

SEQ ID NO: 50639 - DNA, 603 bp, Prochlorococcus marinus str. MIT 9211
  CDS (1)..(603): transl_table=11
atgtcaatatcaactagcacagagcaaatatgttttctcatccttggattaatagtaattggaggatccttaggggttgtattgctcaataacattgtttactctgcattcttacttggaggggtatttatgggcgtagctggattatatcttttattaaatgccagcttcgtagctgcagcacaaatccttgtttacgttggggctgtaaatgttttaatactttttgcaatcatgttggtaaataaaaaagaagaattaaaaccaatcaaagcattaagaactagaaaaattctttctgctggagtatgcacaggtttattaatacttttatttcgtgttgatataacaactccatggatcttccctggaccaaattccatcggtgaattatctactgaaaggataggggaacatcttttcactgactatctattaccttttgaacttgcttcagttctattattaatggcaatgataggagctatagttttggcaagaagagatgttttaataagtgatataggcactggagattctgttaatcaaagcctcattgaaaagtcaaacgagcaaatcttacttgatcaatcatctgaataa

SEQ ID NO: 50640 - protein, 200 aa, Prochlorococcus marinus str. MIT 9211
MSISTSTEQICFLILGLIVIGGSLGVVLLNNIVYSAFLLGGVFMGVAGLYLLLNASFVAAAQILVYVGAVNVLILFAIMLVNKKEELKPIKALRTRKILSAGVCTGLLILLFRVDITTPWIFPGPNSIGELSTERIGEHLFTDYLLPFELASVLLLMAMIGAIVLARRDVLISDIGTGDSVNQSLIEKSNEQILLDQSSE

SEQ ID NO: 50641 - DNA, 624 bp, Erythrobacter sp. NAP1
  CDS (1)..(624): transl_table=11
atgattcaagttcttgccttctacctgttcgcagggctcgtcatcgcgagtgcggtcatggtcatcatggcccgcaacccggtgcacagcgtcctgtggctcatcctctcgttcttcaacgcggcaggcctcatggtgctcgtcggtgccgagtttatcgcgatgctgctggtgatcgtttacgtcggcgcggtcgcggttttgttcctgttcgtggtgatgatgctcgacatcgactttgccgcaatgcgcgctggtttcatcaagaatttccctttgggaatcgcggttgcgctgatcctgctggctgagcttttccttggccttggcgcttatggcgcaggcggtatcgagcttggcacgcctgacggaaccgcagcggagcgcggcgatgtcagcaacattcaggctatcggtgctctactttacgggcgctacatcgtgctgttcgagatcgcggggatcatcctgctggttgcgatgattggcgcgatcgtccttacccaccgcgaagccaagccgggtgcgcgcggtcgtcaggacatcggcaagcagattcgccgccgccccgaagaggcaaccgtcatgaaaaatcccgaatacgggaagggggtcgagctgtga

SEQ ID NO: 50642 - protein, 207 aa, Erythrobacter sp. NAP1
MIQVLAFYLFAGLVIASAVMVIMARNPVHSVLWLILSFFNAAGLMVLVGAEFIAMLLVIVYVGAVAVLFLFVVMMLDIDFAAMRAGFIKNFPLGIAVALILLAELFLGLGAYGAGGIELGTPDGTAAERGDVSNIQAIGALLYGRYIVLFEIAGIILLVAMIGAIVLTHREAKPGARGRQDIGKQIRRRPEEATVMKNPEYGKGVEL

SEQ ID NO: 50643 - DNA, 603 bp, Synechococcus sp. RS9917
  CDS (1)..(603): transl_table=11
atgacgatcgcagcgtccacccagctcatctgttttgttgcccttgctgccgtggtggtgatcggcgccctcggcgtcgtgctcctgagcaacatcgtctattccgccttcctgttgggtggcgtgtttctggcggttgccggcctttatctcctcctcaatgccagcttcgtggctgcggcccaggtgttggtttatgtgggggcggtgaacgtgctgatcctgttcgcgatcatgctcgtgaacaaacgggaagacctggcgccgattcagggtctgccgattcggcggctgctctccgccggcgtctgtgccggtctgttcgccctgttggtgcgggtggtgatcaccacgccctgggctgtgccaggcccggcggcgatcggtgagggggcgaccgagcggatcggcgaacatctcttcaccgactacctgcttcccttcgagctggcgtcggtgttgttgctgatggcgatgatcggggcgatcgttctggcccgtcgcgatgtgcagtccaccgacctgggcaccggcgccgtcgccgatcagggcctgattgaaaaggcgcgcacacctctgcttgtcgatcagggtccctcctga

SEQ ID NO: 50644 - protein, 200 aa, Synechococcus sp. RS9917
MTIAASTQLICFVALAAVVVIGALGVVLLSNIVYSAFLLGGVFLAVAGLYLLLNASFVAAAQVLVYVGAVNVLILFAIMLVNKREDLAPIQGLPIRRLLSAGVCAGLFALLVRVVITTPWAVPGPAAIGEGATERIGEHLFTDYLLPFELASVLLLMAMIGAIVLARRDVQSTDLGTGAVADQGLIEKARTPLLVDQGPS

SEQ ID NO: 50645 - DNA, 627 bp, Synechococcus sp. WH 5701
  CDS (1)..(627): transl_table=11
atgacgatcgcgtccgtcacccagctcgtctgcttcatcgccctctccctcaccctggtgctgggctcactcggggttgtgctgctgcccaacatcgtctattcagccttcctgctggctggtgttttcctctccgtggctggtctttacctgctgctgaatgccagttttgttgctgcggcccaggtcctggtgtacgtgggcgccgtgaacgtgctgatcctgttcgcgatcatgctcgtgaacaagaaagaggccatggccgagatccccggcctgctcctgcgccgcttgctctccggggccgtctgcctcggtctgttcctgctgatcctgcgggtcgatctcaccaccccctgggctgtgccggggcccacccctctcggggatgacgccacggtgctgatcggcatccacctcttcagcgattatctgctgcccttcgagctggcctcggttctgctgctgatggcgatgatcggagcgatcgtgctcgcccgtcgcgacgtgttcagcagtgatgtgatcacgggtgaagccgccgatcaaggactgatcgaaaaagagcgcaccccactgctgctggagaacagcgccggcgataccaccctgctggaaaaagtctga

SEQ ID NO: 50646 - protein, 208 aa, Synechococcus sp. WH 5701
MTIASVTQLVCFIALSLTLVLGSLGVVLLPNIVYSAFLLAGVFLSVAGLYLLLNASFVAAAQVLVYVGAVNVLILFAIMLVNKKEAMAEIPGLLLRRLLSGAVCLGLFLLILRVDLTTPWAVPGPTPLGDDATVLIGIHLFSDYLLPFELASVLLLMAMIGAIVLARRDVFSSDVITGEAADQGLIEKERTPLLLENSAGDTTLLEKV

SEQ ID NO: 50647 - DNA, 600 bp, Synechococcus sp. WH 7805
  CDS (1)..(600): transl_table=11
atgacgatcgcagcgtcgacgcagctgatcagttttcttgttctcagcgcagtcatcgttctgggagccctcggtgttgtgctcctcagcaacattgtttattcggccttcctgctgggtggcgttttcctggctgtcgctggtctctacctgctgctcaatgccagctttgtggctgccgcccaggtgctggtgtacgtcggagcggtcaatgttctgatcctctttgcgatcatgctggtcaacaagcgcgaagacctggcaccgattcctgggatcgcggtccgtcgtcttctgtctggtggggtctgtgcaggcttgtttgttcttctgacccgcgtggttctcacaaccccttgggctgagggcccagagccgattggcgagggagcaacgatccgcatcggtgaacacctgttcaccgattatctgcttcccttcgagctggcttccgtattgcttttgatggccatgatcggtgccatcgtgttggcgcgacgtgatgttcaggcggttgaccctggaactggagaagctgttgatcaaggcctgattgaaaaggcgcgcactcctctgctggtggatcagccacccgcctga

SEQ ID NO: 50648 - protein, 199 aa, Synechococcus sp. WH 7805
MTIAASTQLISFLVLSAVIVLGALGVVLLSNIVYSAFLLGGVFLAVAGLYLLLNASFVAAAQVLVYVGAVNVLILFAIMLVNKREDLAPIPGIAVRRLLSGGVCAGLFVLLTRVVLTTPWAEGPEPIGEGATIRIGEHLFTDYLLPFELASVLLLMAMIGAIVLARRDVQAVDPGTGEAVDQGLIEKARTPLLVDQPPA

SEQ ID NO: 50649 - DNA, 603 bp, Synechococcus sp. RS9916
  CDS (1)..(603): transl_table=11
atgacgattgctgcgtccacccagctcatctgtttccttgtgctcgcatccgtggtcgccatcggcgccctcggtgtggtgcttctcagcaacatcgtttactccgccttcctgctcggaggtgtgttcatggcggtggcggggctctatctgcttctcaatgccagttttgtggcagcagcccaagtgctggtttacgtcggtgcggtcaacgttttgatcctgttcgcgatcatgctcgtgaacaagcgcgaagatctcgcccccattaagggtctccagacccggcgactgatttccggtggtgtctgtgccggtctcttcgctctcttggtgcgggtggctctgactaccccctgggccgtgcctggcccagcagcagtgggtgaagacgccaccgtgcggatcggtgaacacctcttcaccgactacctgcttccctttgagctcgcctccgttcttctgttgatggcgatgatcggtgcgatcgtgctggcacgccgtgatgtgcaggcgactgacctggggaccggccaggccgctgatcagggcttgatcgaaaagtcacgcacccctctgttggttgatcagcctccagcctga

SEQ ID NO: 50650 - protein, 200 aa, Synechococcus sp. RS9916
MTIAASTQLICFLVLASVVAIGALGVVLLSNIVYSAFLLGGVFMAVAGLYLLLNASFVAAAQVLVYVGAVNVLILFAIMLVNKREDLAPIKGLQTRRLISGGVCAGLFALLVRVALTTPWAVPGPAAVGEDATVRIGEHLFTDYLLPFELASVLLLMAMIGAIVLARRDVQATDLGTGQAADQGLIEKSRTPLLVDQPPA

SEQ ID NO: 50651 - DNA, 531 bp, Medicago truncatula
  CDS (1)..(531)
atggatttgcctgaaacgctacacgattttcttttagtctttctgggatcgggtattatattaggaagtctaggagtagtattacttaccaaccctattttttctgctttttcgttgggactggttcttgtttgtatatccttattatatattttatcaaactcccattttgtagctgcatcacagctacttatttacgtgggagctattaacattttaatcacatttgctgtgatgttcatgaatagttccgaatattaccaagattttaatctttggactgttggggatggaattactttgatagtttgtacaagtatttttgtttcactaataactattatttcagatacttcatggtacggaattatttggactacaagaccaaatcagattattgagcaagatttgataagtactagtcaacaaattggaattcatttatcaaccgatttttttcttccatttgaactaatttcaataattcttttagttgctttgataggtgcaattgttgtagctcgccagtaa

SEQ ID NO: 50652 - protein, 176 aa, Medicago truncatula
MDLPETLHDFLLVFLGSGIILGSLGVVLLTNPIFSAFSLGLVLVCISLLYILSNSHFVAASQLLIYVGAINILITFAVMFMNSSEYYQDFNLWTVGDGITLIVCTSIFVSLITIISDTSWYGIIWTTRPNQIIEQDLISTSQQIGIHLSTDFFLPFELISIILLVALIGAIVVARQ

SEQ ID NO: 50653 - DNA, 618 bp, Daucus carota
  CDS (1)..(618)
atgatactttctgttttgtcgagccttgctttggtctctgctttgatggttgtacgtgctaaaaatccggtacattccgtttcgttttccatcccagtctttcgcaacacttcaggtttacttcttttgttaggtctcgactttttcgctatgatcttcccagtagtttatataggagctatagccgtttcattcctattcgttgttatgatgttccatattcaaatagcggagattcacgaagaagtattgcgctatttaccagtgagtggtattattggactgatcttttggtgggaaatgttcttcattttagataatgaaagcattccattactaccaacccaaagaaatacgacctctctgagatatatggtttatgccggaaaggtacgaagttggactaatttggaaacattgggcaatttactttatacttactattccgtctggtttttggttcctagtctgattttattagtagccatgattggggctatagtactgactatgcataggactactaaggtgaaaagacaggatgtattccgacgaaatgctattgattctaggaggactataatgaggaggacgacagacccactcacgatcgactaa

SEQ ID NO: 50654 - protein, 205 aa, Daucus carota
MILSVLSSLALVSALMVVRAKNPVHSVSFSIPVFRNTSGLLLLLGLDFFAMIFPVVYIGAIAVSFLFVVMMFHIQIAEIHEEVLRYLPVSGIIGLIFWWEMFFILDNESIPLLPTQRNTTSLRYMVYAGKVRSWTNLETLGNLLYTYYSVWFLVPSLILLVAMIGAIVLTMHRTTKVKRQDVFRRNAIDSRRTIMRRTTDPLTID

SEQ ID NO: 50655 - DNA, 531 bp, Medicago truncatula
  CDS (1)..(531)
atggatttgcctgaaacgctacacgattttcttttagtctttctgggatcgggtattatattaggaagtctaggagtagtattacttaccaaccctattttttctgctttttcgttgggactggttcttgtttgtatatccttattatatattttatcaaactcccattttgtagctgcatcacagctacttatttacgtgggagctattaacattttaatcatatttgctgtgatgttcatgaatagttccgaatattaccaagattttaatctttggactgttggggatggaattactttgatagtttgtacaagtatttttgtttcactaataactattatttcagatacttcatggtacggaattatttggactacaagaccaaatcagattattgagcaagatttgataagtactagtcaacaaattggaattcatttatcaaccgatttttttcttccatttgaactaatttcaataattcttttagttgctttgataggtgcaattgttgtagctcgccagtaa

SEQ ID NO: 50656 - protein, 176 aa, Medicago truncatula
MDLPETLHDFLLVFLGSGIILGSLGVVLLTNPIFSAFSLGLVLVCISLLYILSNSHFVAASQLLIYVGAINILIIFAVMFMNSSEYYQDFNLWTVGDGITLIVCTSIFVSLITIISDTSWYGIIWTTRPNQIIEQDLISTSQQIGIHLSTDFFLPFELISIILLVALIGAIVVARQ

SEQ ID NO: 50657 - DNA, 531 bp, Cucumis sativus
  CDS (1)..(531)
atggatttgcctggaccgatacatgattttcttgtagtcttgttgggatcaggtcttatattaggaagtatgggagtactattatttaacaactccatttattctgctttttcgttgggactggttcttgtttctatatccttattctatattctagcaaacgcccagtttgtagctgctgcgcaactccttatttacgtgggagctataaatgttttaatcatatttgctgtgatgttcatgaagggttcagaatattccaaagattttaatctttggaccgttgggaatggagttacttttctggtttgtacaagtatttttgtttcactaatgactactattgtggatacgtcatggtatggtattatttggactacacgatcaaatcagattctagagcaagatttaataagtaatagtcaacaaattggaatttatttatcaacatatttttttcttccatttgaactcatttcgatcattcttttagctgctttgatcggcgcaattgccgtggctcgccagtaa

SEQ ID NO: 50658 - protein, 176 aa, Cucumis sativus
MDLPGPIHDFLVVLLGSGLILGSMGVLLFNNSIYSAFSLGLVLVSISLFYILANAQFVAAAQLLIYVGAINVLIIFAVMFMKGSEYSKDFNLWTVGNGVTFLVCTSIFVSLMTTIVDTSWYGIIWTTRSNQILEQDLISNSQQIGIYLSTYFFLPFELISIILLAALIGAIAVARQ

SEQ ID NO: 50659 - DNA, 513 bp, Rhodothermus marinus
  CDS (1)..(513): transl_table=11
atgattgcgcaactcctgttcttcctgctggccgtgacggccattgcggccgcactcggcatgctcatcgcgcgcaacccggtatcgagcgcgctgtggctggtgctcaacctgttctgcatcgccggcctgtacctgacgctccaggcgtcgtttctgggcgtgatccaggtgctgatctacgcaggcgccatcatggtgctgtttctgttcgtgatcatgctgttgaacctggaggcgctcccgcatccgcgccagatcgactggggcaaggtgctggctttcgtggtcacgatgattgtgctggcgcagctcgtctatgtggtggcgctgggtctggacgtgctgcccacgttcgtggccacgaccgagcaggccgccgtcacgggaagcgcacaggcgctgggacgggagttgctcacgcgctacatcatgccgctgcaggtgatcggcattctgctgctggcggctacgatcggggcggtcatgctggccaagcggcgcttcatctga

SEQ ID NO: 50660 - protein, 170 aa, Rhodothermus marinus
MIAQLLFFLLAVTAIAAALGMLIARNPVSSALWLVLNLFCIAGLYLTLQASFLGVIQVLIYAGAIMVLFLFVIMLLNLEALPHPRQIDWGKVLAFVVTMIVLAQLVYVVALGLDVLPTFVATTEQAAVTGSAQALGRELLTRYIMPLQVIGILLLAATIGAVMLAKRRFI

SEQ ID NO: 50661 - DNA, 672 bp, Fusarium oxysporum
  CDS (1)..(672): transl_table=4
atgtattatcaacttctagctatacctgagattttctcgaatgggtatttaaccggatctttagatataataaatataacagctttattatgcggtattttaataataattaataaaaaccctattgtatcagtaatatttctaataggtttatttgcaaatatatcagtatatttaatattaataggtcttacatttataggtttatcttatttaattgtttatattggggcagtttcaatattatttctatttatattaatgttaataaatataagaacaagcgaattacaaagtaataatagaaatagtgtatctttaggtttattaattacaattcttgcaaattttactatattccaagtacttccttattacatggcgatattaaataattacagtagtaaattaaatactatactatactatttaccttgaaataagtttagtgatatattaaaatatattaatagaaacttagatataacgaatgccaatattatgtttgtatcaagtaatagttgagataataatatggctgaaacaggacatacagcaacgataggacatatattatacacaagtcacaatatgtgaatatttatggctagttttatattactattagctatggtaggtgcaataataattactataaaaggtaaagattaa

SEQ ID NO: 50662 - protein, 223 aa, Fusarium oxysporum
MYYQLLAIPEIFSNGYLTGSLDIINITALLCGILIIINKNPIVSVIFLIGLFANISVYLILIGLTFIGLSYLIVYIGAVSILFLFILMLINIRTSELQSNNRNSVSLGLLITILANFTIFQVLPYYMAILNNYSSKLNTILYYLPWNKFSDILKYINRNLDITNANIMFVSSNSWDNNMAETGHTATIGHILYTSHNMWIFMASFILLLAMVGAIIITIKGKD

SEQ ID NO: 50663 - DNA, 618 bp, Lupinus albus
  CDS (1)..(618)
atgatactttctgttttgtcgagccctgctttggtctctggtttgatggttgcacgtgcaaaaaatccggtacattccgttttgtttcccatcccagtctttcgcgacacttcaggtttacttcttttgttaggtctcgacttctccgctatgattttcccagtagttcatataggggctatagccgtttcattcctattcgttgttatgctgttccatattcaaatagcggagattcacgaagaagtattgcgctatttaccagttagtggtattattggactgatcctttggtgggaaatgttcttcattttagataatgaaaccattccattactaccaacccaaagaaagacgacctctctgagatatacggtttatgccggaaaggtacgaagttggactaatttggaaacattgggcaatttactttatacatactatttcgtctggtttttggttcctagtctaattttattagttgccatgattggggctatagtacttactatgcataggactactcaggtaaaaagacaggatgttttccgacgaaatgctattgattttaggaggactataattaggaggacgactgacccactcacgatctactaa

SEQ ID NO: 50664 - protein, 205 aa, Lupinus albus
MILSVLSSPALVSGLMVARAKNPVHSVLFPIPVFRDTSGLLLLLGLDFSAMIFPVVHIGAIAVSFLFVVMLFHIQIAEIHEEVLRYLPVSGIIGLILWWEMFFILDNETIPLLPTQRKTTSLRYTVYAGKVRSWTNLETLGNLLYTYYFVWFLVPSLILLVAMIGAIVLTMHRTTQVKRQDVFRRNAIDFRRTIIRRTTDPLTIY

SEQ ID NO: 50665 - DNA, 501 bp, Rhizobium meliloti
  CDS (1)..(501): transl_table=11
atgcatcaggggttctttcttctgttcgctacggtgtccgtggtcacagccctgacgctggtcctggcgcgcaatccggttcacagcgcattggcgctgatggcgtgcttcctgcagatttccgcaatcttcgttatgctcggcgcgccgctgctcgcggtcatccagatcttcgtctatgtcggcgcgatcatggtcctgttcctgttcgtgatcatgatggtcgacgtgcgcgaagcggtgttgcagcgtttcatgcccggcggcaacttgccggcgctcgcgcttctcgtcctgctcggcgccgagatggtcgtgctggtgctctggagtgatcgctttatcgaatcgccgcccgtcgccgaacgcggcggcgatgcgatcagagatctcagcaagacgctcttctcggactatctcctgccgttcgaagtcgcctccgtcatcctgctggcggctctcgtcggcgccatcgtgctggcgcggaaggagcctggctga

SEQ ID NO: 50666 - protein, 166 aa, Rhizobium meliloti
MHQGFFLLFATVSVVTALTLVLARNPVHSALALMACFLQISAIFVMLGAPLLAVIQIFVYVGAIMVLFLFVIMMVDVREAVLQRFMPGGNLPALALLVLLGAEMVVLVLWSDRFIESPPVAERGGDAIRDLSKTLFSDYLLPFEVASVILLAALVGAIVLARKEPG

SEQ ID NO: 50667 - DNA, 603 bp, Paracoccus denitrificans
  CDS (1)..(603): transl_table=11
atgatgaccttcgctttctacctgttcgcgatcagcgcctgcgtcgccgggttcatggtcgtgatcggccgcaacccggtgcattcggtgttgtggctgatcctggccttcctgtccgcggcggggctgttcgtgctgcaaggcgcggagttcgtcgccatgctgctggtcgtggtctatgtcggcgccgtggcggtgctgttcctgttcgtcgtcatgatgctggacgtggatttcgccgagctgaagggcgaactggcgcgctacctgccgctggcgctggtgattggcgtcgtgctgctggcgcaactgggcatcgccttctcgggctggacgccctcggaccaggccgaaagcctgcgcgccgctccggtggatgcggcggtcgagaacaccctgggcctcggcctcgtgctttacgaccgctatgtgctgatgttccagcttgccggcctggtgctgctggtggcgatgatcggggcgatcgtgctgaccatgcgccaccgcaaggacgtcaagcgccagaacgtgctggaacagatgtggcgcgacccggccaagacgatggaattgaaggacgtgaagccggggcaggggctttga

SEQ ID NO: 50668 - protein, 200 aa, Paracoccus denitrificans
MMTFAFYLFAISACVAGFMVVIGRNPVHSVLWLILAFLSAAGLFVLQGAEFVAMLLVVVYVGAVAVLFLFVVMMLDVDFAELKGELARYLPLALVIGVVLLAQLGIAFSGWTPSDQAESLRAAPVDAAVENTLGLGLVLYDRYVLMFQLAGLVLLVAMIGAIVLTMRHRKDVKRQNVLEQMWRDPAKTMELKDVKPGQGL

SEQ ID NO: 50669 - DNA, 531 bp, Arabidopsis thaliana
  CDS (1)..(531)
atggatttgcctggaccaatacatgattttcttttagtttttctgggatccggtcttctagtagggggtctgggagtggtattacttcccaacccaatattttcagccttttccttaggatttgttcttgtttgtatatctttattgtatattctatcaaattcccattttgtagctgctgcacaactccttatttatgtgggggccataaatgttttaatcatatttgctgtgatgttcatgaatgattcagaatattccacagatttcaatctgtggaccattgggaatgggattacttcgttggtttgtacaactattctttttttattaatgtctactattctcgatacgtcatggtacggggttatttggactacaaaattaaaccagattctagagcaagatttaataagtaatagtcaacaaataggaattcatttatcaacagatttttttctgccatttgaactcatttcaataattcttttagttgctttgataggtgcaatttctgtggctcgtcaataa

SEQ ID NO: 50670 - protein, 176 aa, Arabidopsis thaliana
MDLPGPIHDFLLVFLGSGLLVGGLGVVLLPNPIFSAFSLGFVLVCISLLYILSNSHFVAAAQLLIYVGAINVLIIFAVMFMNDSEYSTDFNLWTIGNGITSLVCTTILFLLMSTILDTSWYGVIWTTKLNQILEQDLISNSQQIGIHLSTDFFLPFELISIILLVALIGAISVARQ

SEQ ID NO: 50671 - DNA, 531 bp, Hordeum vulgare
  CDS (1)..(531)
atggatttacctggaccaatacatgagattcttatgctatttgggggatttattcttctactagggggtctaggagtagtattacttaccaaccccatttattctgccttttcgctgggattagttcttgtttgtatatccttattctattttttattaaattcctactttgtagctgtcgcacaacttcttatttatgtgggagccataaatgtcttgatcatattcgctgtaatgttcgtaaatggctcagaatggtctaaagataagaattattggactattggagatgggttcacttcactcgtttgtataacttttgttttttcactaatgactactatcccagatacgtcatggtatggaattctttggactacaagatcaaaccaaatagtagaacagggtctcataaataatgttcaacaaattggaattcatttagcaaccgatttttatcttccgtttgaactcatttccataattcttctagtttctttaataggtgcaattactatggctcggcaataa

SEQ ID NO: 50672 - protein, 176 aa, Hordeum vulgare
MDLPGPIHEILMLFGGFILLLGGLGVVLLTNPIYSAFSLGLVLVCISLFYFLLNSYFVAVAQLLIYVGAINVLIIFAVMFVNGSEWSKDKNYWTIGDGFTSLVCITFVFSLMTTIPDTSWYGILWTTRSNQIVEQGLINNVQQIGIHLATDFYLPFELISIILLVSLIGAITMARQ

SEQ ID NO: 50673 - DNA, 531 bp, Lotus japonicus
  CDS (1)..(531)
atggatttgcccaaaacgctacatgattttcttttagtatttctgggatcgggtcttatattaggaagtctaggagtagtattacttaccaacccaatcttttctgctttttcgttgggactaactcttgtttgtatatctttattgtatattttatcaaactcccattttgtagctgcatcacagttacttatttacgtgggagctataaatgttttaatcatatttggtgtgatgttcatgaatggttcagaatattaccaagattttcgtctttggaccgttggcgatggaatgactttgatggtttgtacaagtatttttatttcactaataactactattccagatacatcatggtacgggattatttggactacaagatccaatcagattatagaacaagatttgataagtactagtcaacaaattggaattcatttatcaacagatttttttcttccatttgaactcatttcaataattcttttagctgctttaataggtgcaattgtcgtagctcgccagtga

SEQ ID NO: 50674 - protein, 176 aa, Lotus japonicus
MDLPKTLHDFLLVFLGSGLILGSLGVVLLTNPIFSAFSLGLTLVCISLLYILSNSHFVAASQLLIYVGAINVLIIFGVMFMNGSEYYQDFRLWTVGDGMTLMVCTSIFISLITTIPDTSWYGIIWTTRSNQIIEQDLISTSQQIGIHLSTDFFLPFELISIILLAALIGAIVVARQ

SEQ ID NO: 50675 - DNA, 531 bp, Zea mays
  CDS (1)..(531)
atggatttacctggaccaatacatgagattcttgtgctatttgggggatttggtcttctactaggaggtctaggagtagtattacttaccaacccaatttattctgccttttcgctgggattagttcttgtttgtatatccttattctattttttattaaattcctactttgtagctgtcgcacaacttcttatttatgtgggagccataaatgtcttgatcatatttgctgtaatgtttgtaaacggctcagagtggtctaaagataagaattattggactattggagatgggtttactttactcctttgtataactattcctttttcactaatgactactatcccagatacgtcgtggtatggaattctttggactacaagatcaaaccaaatagtagaacagggtctcataaataacgttcaacaaattgggattcatttagcaaccgatttttatcttccgtttgaactcatttccctaattcttctagtttctttaataggtgcaattactatggctcgacaataa

SEQ ID NO: 50676 - protein, 176 aa, Zea mays
MDLPGPIHEILVLFGGFGLLLGGLGVVLLTNPIYSAFSLGLVLVCISLFYFLLNSYFVAVAQLLIYVGAINVLIIFAVMFVNGSEWSKDKNYWTIGDGFTLLLCITIPFSLMTTIPDTSWYGILWTTRSNQIVEQGLINNVQQIGIHLATDFYLPFELISLILLVSLIGAITMARQ

SEQ ID NO: 50677 - DNA, 576 bp, Marchantia polymorpha
  CDS (1)..(576)
atgaaattaccagaatcattttatgaaactatttttctttttttagagtcaggtcttatattaggaagtttaggtgtaatattattaactaatatagtttattctgctctttttttaggttttgtttttgtttgtatatcgttattatatcttttattaaatgcagattttgtggctgccgcacaaattttaatttatgtaggagctgttaatgtattaattatttttgctgttatgttaataaataaaaaacaatattccaatttttttgtctattggacaataggtgatggtattactttaactctttgtacaagtatttttttattattaaataattttatttctaatacatcatggtctaaaatttttttaatgacaaagcctaatttagtagtaaaagatattattttaataaatacggttaggcatattggttcggaattattaactgaatttttacttccatttgaacttatgtcaataattcttttagttgctttaataggtgctattactttagctcgtcgtgaaaaaaaaattgaattagaaaaaaatgatttttttaatttttga

SEQ ID NO: 50678 - protein, 191 aa, Marchantia polymorpha
MKLPESFYETIFLFLESGLILGSLGVILLTNIVYSALFLGFVFVCISLLYLLLNADFVAAAQILIYVGAVNVLIIFAVMLINKKQYSNFFVYWTIGDGITLTLCTSIFLLLNNFISNTSWSKIFLMTKPNLVVKDIILINTVRHIGSELLTEFLLPFELMSIILLVALIGAITLARREKKIELEKNDFFNF

SEQ ID NO: 50679 - DNA, 570 bp, Mesostigma viride
  CDS (1)..(570)
atgagtttctctgaacaaatacaaaacctaagtttgctattgcttgaaataggtaccattattggagctttgggggttgtattgttaccaaacatactttattctggttttttattaggtggagtattgatttgtatagcaggcatttatcttttattaaatgctgaatttattgcagctgcacaagttttaatttatgtaggtgctataaatgtcattatattatttgcaatcatgttagttaataaaatagaaaatttaaatccatcgaataatcaaatgatgagaaatggtttgtcatctttcatctgtttttctttttttattctactatctaatatgatttttgatacacagtggatagatacggttggagtatctactaaatatagtatatctattattggaaatcacatatttagtgattttcttttaccttttgaaattgtttctgtattacttctagtaactttagtaggagctgtatttattgcaagaaaagaagatgcttctgaaatagaaatatctaaaatatcatttttaaatttacctgatccatctaaaaaataa

SEQ ID NO: 50680 - protein, 189 aa, Mesostigma viride
MSFSEQIQNLSLLLLEIGTIIGALGVVLLPNILYSGFLLGGVLICIAGIYLLLNAEFIAAAQVLIYVGAINVIILFAIMLVNKIENLNPSNNQMMRNGLSSFICFSFFILLSNMIFDTQWIDTVGVSTKYSISIIGNHIFSDFLLPFEIVSVLLLVTLVGAVFIARKEDASEIEISKISFLNLPDPSKK

SEQ ID NO: 50681 - DNA, 531 bp, Oenothera hookeri
  CDS (1)..(531)
atggatttgcctggaccaatacatgattttcttttagtttttctgggatcgggtcttatagtaggaggtctgggggtggtcttacttaccaatcccattttttctgccttttcgttgggattggttcttgtttgcatatccttattttttagtttatcaaactcctattttgtagcggctgcgcagctacttatttacgtgggagctataaatgttttaatcctatttgctgtgatgttcatgaatggttcagaatattccaaagatttgactctttggactgttggtgatgggattacgtcgttggtttgtacaagtatttttatttcactaattactactattctagatacgtcttggtacgggattatttggacgacaaaatcaaatcagattatagagcaagatttgataggtaatagtcaacaaattggaattcatttatcaactgatttttttcttccatttgagctgatttcaataatacttttagtttctttgataggtgcaattgccgttgctcgtcaatga

SEQ ID NO: 50682 - protein, 176 aa, Oenothera hookeri
MDLPGPIHDFLLVFLGSGLIVGGLGVVLLTNPIFSAFSLGLVLVCISLFFSLSNSYFVAAAQLLIYVGAINVLILFAVMFMNGSEYSKDLTLWTVGDGITSLVCTSIFISLITTILDTSWYGIIWTTKSNQIIEQDLIGNSQQIGIHLSTDFFLPFELISIILLVSLIGAIAVARQ

SEQ ID NO: 50683 - DNA, 531 bp, Oryza nivara
  CDS (1)..(531)
atggatttacctgggccaatacatgaaattcttgtgctatttgggggatttgttcttctactagggggtctaggggtggtattacttaccaacccaactttttctgctttttcgctaggattagttcttgtttgtatatccttattctatattttattgaattcctactttgtagctgtggcacaacttcttatttatgtgggagctataaatgtcttgatcatatttgccgtaatgttcgtaaatggctcagaatggtctaaagataagaatttttggactattggagatgggttcacttcactcgtttgtataactattcctttttcactaatgactactatcccagatacgtcatggtatggaattctttggactacaagatcaaaccaaatagtagaacagggtctcataaataacgttcaacaaattgggattcatttagcaaccgatttttatcttccatttgaactcatttccataattcttctagtttctttaataggtgcaattactatggctcggcaataa

SEQ ID NO: 50684 - protein, 176 aa, Oryza nivara
MDLPGPIHEILVLFGGFVLLLGGLGVVLLTNPTFSAFSLGLVLVCISLFYILLNSYFVAVAQLLIYVGAINVLIIFAVMFVNGSEWSKDKNFWTIGDGFTSLVCITIPFSLMTTIPDTSWYGILWTTRSNQIVEQGLINNVQQIGIHLATDFYLPFELISIILLVSLIGAITMARQ

SEQ ID NO: 50685 - DNA, 531 bp, Solanum lycopersicum
  CDS (1)..(531)
atggatttatctgaaccaatacatgattttcttttagtctttctaggatcgggtcttatattagggggtctaggagtggtattacttcccaatccaatttattcggccttttccttgggattggttcttgtttgtacatcgttattctatattctatctaacgcctattttgtagctgctgcgcagctacttatttacgtaggagctataaatgttttaatcatttttgctgtgatgttcatgaatggctcagaatattacaaggattttcatctttggaccgtaggagatggaattacttcgatggtttgtataagtctttttatttcactaattactactatttcagatacgtcatggtacgggattatttggactacaagatcaaaccagattatagagcaagattttctaagtaatagtcaacaaattggaattcatttatcaacagatttttttctcccatttgaacttatttccataatccttttagttgctttaataggtgcaattgctgtagctcgtcaataa

SEQ ID NO: 50686 - protein, 176 aa, Solanum lycopersicum
MDLSEPIHDFLLVFLGSGLILGGLGVVLLPNPIYSAFSLGLVLVCTSLFYILSNAYFVAAAQLLIYVGAINVLIIFAVMFMNGSEYYKDFHLWTVGDGITSMVCISLFISLITTISDTSWYGIIWTTRSNQIIEQDFLSNSQQIGIHLSTDFFLPFELISIILLVALIGAIAVARQ

SEQ ID NO: 50687 - DNA, 531 bp, Solanum tuberosum
  CDS (1)..(531)
atggatttatctgaaccaatacatgattttcttttagtctttctaggatcgggtcttatattagggggtctaggagtggtattacttcccaatccaatttattcggccttttccttgggattggttcttatttgtacatcgttattctatattctatctaactcctattttgtagctgctgcgcagctacttatttacgtaggagctataaatgttttaatcatttttgctgtgatgttcatgaatggctcagaatattacaaggattttcatctttggaccgtaggagatggaattacttcgatggtttgtataagtctttttatttcactaattactactatttcagatacgtcatggtacgggattatttggactacaagatcaaaccagattatagagcaagattttctaagtaatagtcaacaaattggaattcatttatcaacagatttttttctcccatttgaacttatttccataatccttttagttgctttaataggtgcaattgctgtagctcgtcaataa

SEQ ID NO: 50688 - protein, 176 aa, Solanum tuberosum
MDLSEPIHDFLLVFLGSGLILGGLGVVLLPNPIYSAFSLGLVLICTSLFYILSNSYFVAAAQLLIYVGAINVLIIFAVMFMNGSEYYKDFHLWTVGDGITSMVCISLFISLITTISDTSWYGIIWTTRSNQIIEQDFLSNSQQIGIHLSTDFFLPFELISIILLVALIGAIAVARQ

SEQ ID NO: 50689 - DNA, 683 bp, Glycine max
  CDS (97)..(627)
aatgcggagataattttagtatttaataagtttttttcctggtcatatcaataaggtcatgaaatttcgatttatttatctcttattttacatagaatggatttgcccgaaccgctacatgattttcttttagtctttcttggatcgggtcttatattaggaagtctgggagtagtattatttacgaatcccattttttctgctttttcattgggcctagttcttgtttgtatatctttattctatattttatcaaactcccattttgtagctgcatcacaactacttatttatgtgggcgctataaatgttttaataatatttgctgtgatgtttatgaatggttcggaatattaccaagattttcgtctttggactgttggggatggaattactttgatggtttgtacaagtatctttgtttcactaataactactattctagatacatcatggcacgggattatttggactacaagacccaatcagattatagagcaagatttgataagtactagtcaacaaattggaattcatttatcaacagatttttttcttccatttgaactaatttcaataatccttttagttgctttgataggtgcaattgtcgtagctcgccaataagaaatttttagaactaataatataaacaaaacccaaattcaatttttttttttttt

SEQ ID NO: 50690 - protein, 176 aa, Glycine max
MDLPEPLHDFLLVFLGSGLILGSLGVVLFTNPIFSAFSLGLVLVCISLFYILSNSHFVAASQLLIYVGAINVLIIFAVMFMNGSEYYQDFRLWTVGDGITLMVCTSIFVSLITTILDTSWHGIIWTTRPNQIIEQDLISTSQQIGIHLSTDFFLPFELISIILLVALIGAIVVARQ

SEQ ID NO: 50691 - DNA, 531 bp, Spinacia oleracea
  CDS (1)..(531)
atggatttacctggaccaatacatgattttcttttagtctttctggggtcgggtcttatattaggggctctaggagtggtattatttaccaatcctattttttctgccttttcattgggattggttcttgtgtgtatatctttattctatattctagcaaactcccactttgtagcttctgcacaactccttatttatgtgggagctataaatgtattaatcatattttctgtgatgttcatgagtggtccagaatatgacaaaaagtttcagctgtggactgttggggacggggttacttcattggtttgtataagtctttttgtttcattaattagtactattctaaatacatcttggtatgggattatttggactacaaaatcaaaccagattctcgaacaagatttaataaacgctagtcaacaaattggaattcatttatcaaccgatttttttcttccatttgaactcatttcaataattcttttagtttctttaataggtgcaattgctgtggctcgtcaataa

SEQ ID NO: 50692 - protein, 176 aa, Spinacia oleracea
MDLPGPIHDFLLVFLGSGLILGALGVVLFTNPIFSAFSLGLVLVCISLFYILANSHFVASAQLLIYVGAINVLIIFSVMFMSGPEYDKKFQLWTVGDGVTSLVCISLFVSLISTILNTSWYGIIWTTKSNQILEQDLINASQQIGIHLSTDFFLPFELISIILLVSLIGAIAVARQ

SEQ ID NO: 50693 - DNA, 531 bp, Nicotiana tabacum
  CDS (1)..(531)
atggatttatctgaaccaatacatgattttcttttagtctttctagggtcgggtcttatattagggggtctaggagtggtattacttcccaatccaatttattctgccttttccttgggattggttcttgtttgtacatcgttattctatattctatctaactcctattttgtagctgctgcgcagctacttatttacgtaggagctataaatgttttaatcatttttgctgtgatgttcatgaatggttcagaatattacaaagattttcatctttggaccgtaggagatggaattacttcgatggtttgtataagtctttttatttcactaattactactatttcagatacgtcatggtacgggattatttggactacaagatcaaaccagattatagagcaagattttataagtaatagtcaacaaattggaattcatttatcaacagatttttttcttccatttgaactgatttcaataatccttttagttgctttaataggtgcaattgctgtagctcgtcaataa

SEQ ID NO: 50694 - protein, 176 aa, Nicotiana tabacum
MDLSEPIHDFLLVFLGSGLILGGLGVVLLPNPIYSAFSLGLVLVCTSLFYILSNSYFVAAAQLLIYVGAINVLIIFAVMFMNGSEYYKDFHLWTVGDGITSMVCISLFISLITTISDTSWYGIIWTTRSNQIIEQDFISNSQQIGIHLSTDFFLPFELISIILLVALIGAIAVARQ

SEQ ID NO: 50695 - DNA, 531 bp, Triticum aestivum
  CDS (1)..(531)
atggatttacctggaccaatacatgagattcttatgctatttgggggatttgttcttctactagggggtctaggagtagtattacttaccaaccccatttattctgccttttcgctgggattagttcttgtttgtatatccttattctattttttattaaattcctactttgtagctgtcgcacaacttcttatttatgtgggagccataaatgtcttgatcatattcgctgtaatgttcgtaaatggctcagaatggtctaaagataagaattattggactattggagatgggttcacttcactcgtttgtataactattgttttttcactaatgactactatcccagatacgtcgtggtatggaattctttggactacaagatcaaaccaaatagtagaacagggtctcataaataatgttcaacaaattggaattcatttagcaaccgatttttatcttccgtttgaactcatttccataattcttctagtttctttaataggtgcaattactatggctcggcaataa

SEQ ID NO: 50696 - protein, 176 aa, Triticum aestivum
MDLPGPIHEILMLFGGFVLLLGGLGVVLLTNPIYSAFSLGLVLVCISLFYFLLNSYFVAVAQLLIYVGAINVLIIFAVMFVNGSEWSKDKNYWTIGDGFTSLVCITIVFSLMTTIPDTSWYGILWTTRSNQIVEQGLINNVQQIGIHLATDFYLPFELISIILLVSLIGAITMARQ

SEQ ID NO: 50697 - DNA, 468 bp, Candida parapsilosis
  CDS (1)..(468): transl_table=4
atgtttttaataagcggtattagtagtatattagctataggtctattatcgcctgtacaatcaattgtatgtttaatagtattatttgtaagtgcagcaattagtttatattctaatggatttgtacttatgggaatactttatgtacttatttatgttggagctatagctatattatttttatttatattatcattattaaatatcgaatataattataaaggtacaattcatccattaatatttactatattaattatatgtttaataccattagatttatcatatgaaacttatggaatagttgaaaatgttaatatagcttatccatttaatagtttattagattgagatttagaattaacaacagtaggatcattattatatactgaatatgctataccaatgattttaataggtttaattttaattctttctgttataggggctattgctataactaaataa

SEQ ID NO: 50698 - protein, 155 aa, Candida parapsilosis
MFLISGISSILAIGLLSPVQSIVCLIVLFVSAAISLYSNGFVLMGILYVLIYVGAIAILFLFILSLLNIEYNYKGTIHPLIFTILIICLIPLDLSYETYGIVENVNIAYPFNSLLDWDLELTTVGSLLYTEYAIPMILIGLILILSVIGAIAITK

SEQ ID NO: 50699 - DNA, 666 bp, Podospora anserina
  CDS (1)..(666): transl_table=4
atgaataataactatcccttattttgaataaacgaaattttaacaaatggttttgttgaatacatattagatatattttcaataatggcttttcttacaggaatatacgttattttaactaaaaaccctattgtatccgtattatttttaatactattatttggaggtatttcctcttatttgaatataataggtctaaatttcataggtttatcatatataatagtatatataggtgctgtatctatattatttttatttatcttgatgttaataaatattagaacaagtgaacttcaaagtaatactagtaatagtattcctttaacaatatttattggaattatatttagtaattttttatttccaatgttaccttatgatattgtcatgttaagtaatttctataataactattttagcgaggatttttatacaatagatgtaaatataaatgataataatttgaataatttatacaataatgtactgtattttatgactagtgtaatatgggatggatctgtaatagactttaatcatataacagctataggtaatataatgtatactatttataatatatgattaataatcgctagttttatacttttactagcaatggtgggatcaattgttataacaataaaacaaagaaaaatttag

SEQ ID NO: 50700 - protein, 221 aa, Podospora anserina
MNNNYPLFWINEILTNGFVEYILDIFSIMAFLTGIYVILTKNPIVSVLFLILLFGGISSYLNIIGLNFIGLSYIIVYIGAVSILFLFILMLINIRTSELQSNTSNSIPLTIFIGIIFSNFLFPMLPYDIVMLSNFYNNYFSEDFYTIDVNINDNNLNNLYNNVLYFMTSVIWDGSVIDFNHITAIGNIMYTIYNIWLIIASFILLLAMVGSIVITIKQRKI

SEQ ID NO: 50701 - DNA, 624 bp, Prototheca wickerhamii
  CDS (1)..(624)
atggattttttattttatatattttccagcttaacattaatatcaggctcactagtaattcaagcacgaaatccagtacattctgtactttttttagttttagtattttttaatgctgcgggcttattagtattattaggattagatttttttgcattgatatttttagttgtatatgtaggagctatagcagtattattcttatttgtagttatgatgctaaatataagaattactgaaattagtgaaaaaagattacgttatcttccagttggtggtgtattaggtgtactatttttatttgaaatttgtatacttattgataatgattgtattccattattatcttatgatatagaaaatacagcattattagctaattataaccaattatcttttatagattggcgtatgtatttatcaacatctcatacaatagatgctttaggaagtttattatatacatattacttttacttttttcttgtagctagtcttatattattagtagcaatgattggtgctattgtattaactatgcaaaaaggtattcgtattaaaagacaacaagtatttttacaaaacacaagagattttgctaaaactattagaaaagtcgcataa

SEQ ID NO: 50702 - protein, 207 aa, Prototheca wickerhamii
MDFLFYIFSSLTLISGSLVIQARNPVHSVLFLVLVFFNAAGLLVLLGLDFFALIFLVVYVGAIAVLFLFVVMMLNIRITEISEKRLRYLPVGGVLGVLFLFEICILIDNDCIPLLSYDIENTALLANYNQLSFIDWRMYLSTSHTIDALGSLLYTYYFYFFLVASLILLVAMIGAIVLTMQKGIRIKRQQVFLQNTRDFAKTIRKVA

SEQ ID NO: 50703 - DNA, 612 bp, Trichophyton rubrum
  CDS (1)..(612): transl_table=4
atgcaattagatttatatgtagacaaaataaataatggatttaattcaaatattttagatattttagcttttatcagtataatacttggtatttatactatagtaagtaaaaatcctgttgtttctgtattatttttaataggtttattttcaacaatttctatatatttaataatgataggtttaacatttataggtttatcttatttattagtatatattggagcagtatctattttatttttatttattttaatgttaattaatataagaatatctgaattagttagtacaaataataattatatacctttagctatattaagtatgattacattagtatatattttaggtcaaaaaataataactaatgtagtacagtttaatatattaaattcttttacatcttctttatttgaaaaaagttttaaagaatcgataaattattctaatagtttaagttgagatactaatttaatagatattacacatacaagtgctataggtaatataatgtatagtagttattcattctgacttattattatatcattaattcttttattagctatggtaggttcaatagttatttctataggtagagtaatttaa

SEQ ID NO: 50704 - protein, 203 aa, Trichophyton rubrum
MQLDLYVDKINNGFNSNILDILAFISIILGIYTIVSKNPVVSVLFLIGLFSTISIYLIMIGLTFIGLSYLLVYIGAVSILFLFILMLINIRISELVSTNNNYIPLAILSMITLVYILGQKIITNVVQFNILNSFTSSLFEKSFKESINYSNSLSWDTNLIDITHTSAIGNIMYSSYSFWLIIISLILLLAMVGSIVISIGRVI

SEQ ID NO: 50705 - DNA, 1286 bp, Triticum aestivum
  CDS (420)..(1163)
aaatacggcttccttaatatccaaatttcaacaagggggctgggctgctcgccttcatagaaaggcgaccgggcctagattagatgttcgcctttttatagaatagaaagagaaggtaaaggggggggggtttggagattctttcaagaatgcatggcttcctcctattccgcttcaacagaagcccttaaaatcctgctgctatggcagcaagggttatccatttcataggcgagggtgggggagaagcaagccgaacctctgatcgacccggacacgtcaaaaattctcggcgccgagagaaagacgagattcagtaagtaattcagtgagtgctttcttttataagaaagagcgtcggcttggaagaagaaaatgaaaatacgaacaaccgcgctggttgtaatagatcgacttgaatgcgtcttcttgctccagcattcaagttccatttcaagggaggacgacgtaccatgatactttctgttttgtcgagccctgctttggtctctggtttgatggttgtacgtgctaaaaatccggtacattccgttttgtttcccatcctagtcttttgcgacacttctggtttacttattttgttaggtctcgacttctccgctatgatctccccagtagttcatataggagctattgccgtttcattcctattcgtggttatgatgttcaatattcaaatagcggagattcacgaagaagtattacgctatttaccagtgagtggtattattggactgatcttttggtgggaaatgttcttcattttagataatgaaaccattccattactaccaacccacagaaatacgacctctctgagatatacggtttatgccggaaaggtacgaagttggactaatttggaaacattgggcaatttactttatacctactattccgtctggtttttggtttctagtctgattttattagttgctatgattggggctatagtacttactatgcataggactacaaaggtgaaaagacaggatgtattccgacgaaatgccttggattctaggagccatataatgaacaggactatttctccttttggccatagccatagaagaagcttctcctccggagcggggggaccgcctgacaattacaaagaaacctttaaaatgtggatttagtgctcagaatataaggatttccctggcttaaaatgcaagatagacagacttcttgcattccttgagcctggggagatcctattcatggtaaacacgttcccccgggactttcctctgctcgag

SEQ ID NO: 50706 - protein, 247 aa, Triticum aestivum
MRLLAPAFKFHFKGGRRTMILSVLSSPALVSGLMVVRAKNPVHSVLFPILVFCDTSGLLILLGLDFSAMISPVVHIGAIAVSFLFVVMMFNIQIAEIHEEVLRYLPVSGIIGLIFWWEMFFILDNETIPLLPTHRNTTSLRYTVYAGKVRSWTNLETLGNLLYTYYSVWFLVSSLILLVAMIGAIVLTMHRTTKVKRQDVFRRNALDSRSHIMNRTISPFGHSHRRSFSSGAGGPPDNYKETFKMWI

SEQ ID NO: 50707 - DNA, 609 bp, Rhodobacter capsulatus
  CDS (1)..(609): transl_table=11
atgacggtgttcgtattcgccttttacctctttgccgtggtggcggtggttgcgggcctcatggtggttttgtcgaagaacccggtgcatgcggttttgtggctgatcctgaccttcctctcggcggcggggcttttcgtgctgatgggggcggaattcgtcgccatgcttctgatcatcgtctatgtcggcgcggtggccgtgctcttcctcttcgtcgtgatgatgctcgacatcgatttcgcggcgctgcgggggcagcttgtgcgctatgcgccggtgggcgggctgatcgcgctggtgatgctggcgcagctcgccaccgggctgatggtctggaacacggccgatgcggccaatggcctgcgcgcggcgcccgcgcccgagggggtcgaaaacactgccgccctcggcatgatcctttatgacagatacctctacctcttccagggcgcgggtctggtgctgctcgtcgcgatgatcggggccattctgctgacgctgcggcaccgcaccgacatcaagcggcagaacgtgctggcgcagatgcaccgcgatccggccaaggcgctggagatggtcgacgtcaaaccggggcaggggctgtga

SEQ ID NO: 50708 - protein, 202 aa, Rhodobacter capsulatus
MTVFVFAFYLFAVVAVVAGLMVVLSKNPVHAVLWLILTFLSAAGLFVLMGAEFVAMLLIIVYVGAVAVLFLFVVMMLDIDFAALRGQLVRYAPVGGLIALVMLAQLATGLMVWNTADAANGLRAAPAPEGVENTAALGMILYDRYLYLFQGAGLVLLVAMIGAILLTLRHRTDIKRQNVLAQMHRDPAKALEMVDVKPGQGL

SEQ ID NO: 50709 - DNA, 22 bp, Artificial sequence
  primer
atgaatttagctgaaggtgttc

SEQ ID NO: 50710 - DNA, 22 bp, Artificial sequence
  primer
ttatttggaagcggaggttaac

SEQ ID NO: 50711 - protein, 191 aa, Artificial sequence
  consensus sequence
  Variant (2)..(5): Xaa in position 2 to 5 is any amino acid
  Variant (7)..(9): Xaa in position 7 to 9 is any amino acid
  Variant (11)..(13): Xaa in position 11 to 13 is any amino acid
  Variant (15)..(31): Xaa in position 15 to 31 is any amino acid
  Variant (33)..(40): Xaa in position 33 to 40 is any amino acid
  Variant (41)..(41): Xaa in position 41 is any or no amino acid
  Variant (43)..(43): Xaa in position 43 is any amino acid
  Variant (46)..(48): Xaa in position 46 to 48 is any amino acid
  Variant (50)..(51): Xaa in position 50 to 51 is any amino acid
  Variant (53)..(54): Xaa in position 53 to 54 is any amino acid
  Variant (56)..(105): Xaa in position 56 to 105 is any amino acid
  Variant (106)..(158): Xaa in position 106 to 158 is any or no amino acid
  Variant (160)..(169): Xaa in position 160 to 169 is any amino acid
  Variant (170)..(175): Xaa in position 170 to 175 is any or no amino acid
  Variant (177)..(182): Xaa in position 177 to 182 is any amino acid
  Variant (185)..(185): Xaa in position 185 is any amino acid
  Variant (187)..(188): Xaa in position 187 to 188 is any amino acid
VXXXXNXXXSXXXLXXXXXXXXXXXXXXXXXFXXXXXXXXXYXGAXXXLXXFXXMXXXXXXXXXXXXXXXXXXXXXXXXXXXXXXXXXXXXXXXXXXXXXXXXXXXXXXXXXXXXXXXXXXXXXXXXXXXXXXXXXXXXXXXXXXXXXXXXXXXXXXXGXXXXXXXXXXXXXXXXFXXXXXXLLXAXXGAI

SEQ ID NO: 50712 - protein, 15 aa, Artificial sequence
  protein pattern
  Variant (2)..(2): Xaa in position 2 is any amino acid
  Variant (5)..(5): Xaa in position 5 is Ile or Val
  Variant (6)..(6): Xaa in position 6 is any amino acid
  Variant (7)..(7): Xaa in position 7 is Ile, Met or Val
  Variant (9)..(9): Xaa in position 9 is Phe or Ile
  Variant (10)..(10): Xaa in position 10 is Ile, Leu or Val
  Variant (12)..(12): Xaa in position 12 is any amino acid
  Variant (13)..(13): Xaa in position 13 is Ile, Leu or Val
  Variant (14)..(14): Xaa in position 14 is any amino acid
  Variant (15)..(15): Xaa in position 15 is Phe, Leu or Met
YXGAXXXLXXFXXXX

SEQ ID NO: 50713 - DNA, 957 bp, Synechocystis sp.
  CDS (1)..(957): transl_table=11
atgttcaccgccgttgccccgccccaagaaaccctgccccgtgatttagtgggagccattcagagtctgaaaaaggaattgaatgcggtgattttggcccactattaccaagaagcggccatccaagacattgctgattatttaggggactccctggggttatcccaacaggcggccagcaccgatgccgatgtaatcgtttttgccggggtgcatttcatggcggaaacggccaaaattcttaatccccataagttggtacttttgccggatttagaggccggctgttccttggccgacagttgccccccccgggaatttgccgagtttaagcaacgccaccctgaccatttggtgattagctacattaattgcacagcggaaattaaagccctgagcgatattatttgcaccagttctaatgcggtgaaaattgttcaacaattgccgccggatcagaagataatttttgcccccgatcgcaatttaggtcgttacgttatggagcaaacggggcgagaaatggtgttgtggcagggtagttgcattgtccatgaaaccttttcggaacggcgtttgctggagctgaaaactcaatatccccaggcggaaatcattgcccatcctgaatgtgaaaaagccattctgcgccatgcagattttatcggctccaccacagcgttactgaattattcgggtaaatcccagggcaaagaatttatcgttggtacggagccgggcattattcaccaaatggaaaagctttccccctctaagcaattcattcccctgcccaataacagcaattgcgactgcaatgagtgtccctatatgcgtttgaatactttggaaaaactctactgggctatgcaacggcgatcgccggagattaccttaccggaggccaccatggcggcggctctgaaaccgatccagagaatgctggccatgtcctaa

SEQ ID NO: 50714 - protein, 318 aa, Synechocystis sp.
MFTAVAPPQETLPRDLVGAIQSLKKELNAVILAHYYQEAAIQDIADYLGDSLGLSQQAASTDADVIVFAGVHFMAETAKILNPHKLVLLPDLEAGCSLADSCPPREFAEFKQRHPDHLVISYINCTAEIKALSDIICTSSNAVKIVQQLPPDQKIIFAPDRNLGRYVMEQTGREMVLWQGSCIVHETFSERRLLELKTQYPQAEIIAHPECEKAILRHADFIGSTTALLNYSGKSQGKEFIVGTEPGIIHQMEKLSPSKQFIPLPNNSNCDCNECPYMRLNTLEKLYWAMQRRSPEITLPEATMAAALKPIQRMLAMS

SEQ ID NO: 50715 - DNA, 903 bp, Archaeoglobus fulgidus DSM 4304
  CDS (1)..(903): transl_table=11
atgttcgccgaacaaatgttcgacattgaaaggctgaaaaggcagaagaatgcggtcattctggcgcacaactaccagatactgccaattcagggcgttgcagacttcgttggagatagcttggaactatcaatggctgcaaaggatgttgatgcagacataatccttttctgcggagttgacttcatggcggagactgcagcaatcctgaatcccgataagaaggtgctgattccctcaacggaagcaatctgcccgatggcaatgcagattgatgcggagatggtgaaaaaggccaaggagaagtacaatgctcccttcgttgcctacgtaaacacccacgcagagacaaaggccgtggcggatgtttgttgcacctctgccaacgtggcgaaggttgtggagaaccttgatgctgaaagagttttgcttggtcctgacgcaaaccttgcgtggtatgctgccgagaaaacagggaaggaggttatagcggtcccgcaatatggaaactgctgtgttcaccagtctttcaccgctaaggatgttctgacagcgagggaaaagcatccggatgccaccataatagtgcatcctgagtgcagacctgaagtgcagaagcttgctgattttgtgggctctacaagccagatggtcagatttgtagagcaaagcgatgctgagaaggtgattataggaacggaaataggtctgattgagcggttgagacagcagagcgacaaaaccattctgcccctcaaagagagtgtctgcagggcgatgaagcggaacacgatggatggcgttgttaaagcgctcgttgaggagagaaatgtggttagagtggatgaaaaaattgccgagaaagcgagaagggcgatagagaggatgtttgagctatgttag

SEQ ID NO: 50716 - protein, 300 aa, Archaeoglobus fulgidus DSM 4304
MFAEQMFDIERLKRQKNAVILAHNYQILPIQGVADFVGDSLELSMAAKDVDADIILFCGVDFMAETAAILNPDKKVLIPSTEAICPMAMQIDAEMVKKAKEKYNAPFVAYVNTHAETKAVADVCCTSANVAKVVENLDAERVLLGPDANLAWYAAEKTGKEVIAVPQYGNCCVHQSFTAKDVLTAREKHPDATIIVHPECRPEVQKLADFVGSTSQMVRFVEQSDAEKVIIGTEIGLIERLRQQSDKTILPLKESVCRAMKRNTMDGVVKALVEERNVVRVDEKIAEKARRAIERMFELC

SEQ ID NO: 50717 - DNA, 2157 bp, Arabidopsis thaliana
  CDS (1)..(2157)
atggcgttagctctctccgtcgcacctacatcttcttctttgtcttccctcctctctcggacccctaacccttctcctaatttcagaacaactcatctgaatttcggttctcaaaggaggatttacacaatcaatcctctccttagatcctttaaatgccttcaatcatcttcaagagacgtaaatgcgtcacctttctcaatctcagctattgcttcttcttcttcttcatcacagaccacagagcttgtaccctataagcttcagagattagtcaaggaattcaaatccttgacagagccaattgatcgactcaaatgggttctccattacgctagtctccttcctcaaatgcccgagtcgtccaagactgaatcaaacagagttatgggctgcacagctcgtgtttggctagatgctgagttaggtcaagatgggaagatgaggttttgtgcagatagtgattcagatgtgtcgaaagggatgtgttcttgtttgattcaagttcttgatgaggcttctcctgtagaagttatggagttgaagactgaggatttagctgagcttaatgttggtttgttgggtggagagagatcgagagttaacacttggtataatgttcttgtgagtatgcagaagaagactcgacgattagtagcggagagggaaggtaaagttccttcctttgagccatttccttcacttgtgttaacggctcatggcattgaagctaaaggaagctttgctcaagctcaggcgaaatatttgtttccggaggagtcacgggttgaagaacttgtcaatgtgttgaaggaaaagaagataggagtggttgctcatttctatatggatccagaagtgcaaggggtcttgactgctgctcaaaagcattggccacatatctctatatctgattctcttgtcatggcagactcagctgtcacgatggctaaagctggatgtcagtttataacagttcttggtgttgatttcatgtccgaaaatgttcgtgccatcctagatcaagctgggtttgaaaaggttggtgtgtacaggatgtcagatgagaccattggttgttcacttgctgacgctgcttctgctcctgcttacttgaattatcttgaagctgcttctcgttctcctccttcactgcatgttgtttatataaatacatctttggagacaaaagcttttgctcatgagcttgtacctaccattacttgcacttcatctaatgttgtacagacgattctgcaggcgtttgctcaaatgccagagttaactgtttggtatggtcctgattcttacatgggagcgaatattgtaaagttattccagcagatgacattgatgactaatgaagaaatcgccaatattcaccctaaacacagcttagattccattaaatcattgcttccccgtcttcactatttccaggaaggaacctgcattgtacatcatctattcggtcacgaggtagtggagagaataaagtacatgtactgtgacgcctttcttacagcacatcttgaggttccaggtgaaatgttttcactagcaatggaagcaaagaaaagagagatgggtgttgttggatcaacacaaaacatactagacttcatcaagcagaaggttcaggaagcagtggaccggaatgttgatgaccacctccagtttgttcttggaacagagtcaggaatggtaacatcgattgtcgcggtgatcagaagtctgctaggttcttctgctaactcgaaattgaaggtggaagtagtgtttcctgtctcatcagactcgatgacaaaaacttcttcagatagttcaaactccattaaagttggtgatgtggcactaccggttgtaccgggagtagcaggtggtgaaggttgctctattcatggcggatgtgcatcatgcccatatatgaagatgaactcgcttagctcgctcttgaaagtttgccacaaactacctgacttggaaaatgtatatggaggattcatagcggagcgatttaaaagacaaactcctcaaggaaaactcatcgcggatgtcgggtgtgagccgatacttcacatgaggcacttccaagcgaataaggagctgccagacaagcttgttcatcaggtattaagttgtgagagcaagagatga

SEQ ID NO: 50718 - protein, 718 aa, Arabidopsis thaliana
MALALSVAPTSSSLSSLLSRTPNPSPNFRTTHLNFGSQRRIYTINPLLRSFKCLQSSSRDVNASPFSISAIASSSSSSQTTELVPYKLQRLVKEFKSLTEPIDRLKWVLHYASLLPQMPESSKTESNRVMGCTARVWLDAELGQDGKMRFCADSDSDVSKGMCSCLIQVLDEASPVEVMELKTEDLAELNVGLLGGERSRVNTWYNVLVSMQKKTRRLVAEREGKVPSFEPFPSLVLTAHGIEAKGSFAQAQAKYLFPEESRVEELVNVLKEKKIGVVAHFYMDPEVQGVLTAAQKHWPHISISDSLVMADSAVTMAKAGCQFITVLGVDFMSENVRAILDQAGFEKVGVYRMSDETIGCSLADAASAPAYLNYLEAASRSPPSLHVVYINTSLETKAFAHELVPTITCTSSNVVQTILQAFAQMPELTVWYGPDSYMGANIVKLFQQMTLMTNEEIANIHPKHSLDSIKSLLPRLHYFQEGTCIVHHLFGHEVVERIKYMYCDAFLTAHLEVPGEMFSLAMEAKKREMGVVGSTQNILDFIKQKVQEAVDRNVDDHLQFVLGTESGMVTSIVAVIRSLLGSSANSKLKVEVVFPVSSDSMTKTSSDSSNSIKVGDVALPVVPGVAGGEGCSIHGGCASCPYMKMNSLSSLLKVCHKLPDLENVYGGFIAERFKRQTPQGKLIADVGCEPILHMRHFQANKELPDKLVHQVLSCESKR

SEQ ID NO: 50719 - DNA, 972 bp, Xylella fastidiosa 9a5c
  CDS (1)..(972): transl_table=11
gtgaaccacgccgttttatcttcgtgtctcgataaatgcggcgactgtttcgcctcagaagcagcgcgtataaagtttgacaatgacattgaggcgatcttcgaactcaaacgcaaacgaaacgctgtcattcttgcgcataattaccaaactccagagatctttcatggtgttgccgacattgtgggtgacagtctcgcattagcccgcaaagcaattgatgtcgatgccgatgtgatcgtccttgccggagtgcatttcatggcagagaccgcaaaactgctgaatccagaaaaaaccgtactgatccccgatatggaggcaggctgctctttagcggagtcgattacaccggaagacgtggccttattacgtcagacgtatcctgggattcctattgtcacctatgtgaatacttcagcagccgtaaaagcggcttcagatatctgctgcacctcaggcaatgccaagaaggtggtggaagcacttggtgttcccaaagttctgatgattccagacgaatatttagcgcgcaatgttgccaaagaaacggaagtccagatcatttcatggcatggtcattgcgaagtccatgaacttttctcagccagcgatatcttgcagcttcgcgaaaatcatccaggtgtcaccgtactcgcccatcccgaatgtccgccggatgtggtggcagcagcagattttgcaggctcgacagcagcgatgtccgactatgtcactactaagcagcccaagcgagtcgtacttctcacagaatgctcaatgagcgataacatcgccgtccatcatccagatgttgagttcatcagctcctgcaatctttgcccgcacatgaaacggatcacgcttgccaatatccgaaccgccttggaagaaaaccgtcacgaagtcacggtagatgcaaaaattgcagcccccgcacgacgcgccgttgaaaggatgttggcgatatga

SEQ ID NO: 50720 - protein, 323 aa, Xylella fastidiosa 9a5c
MNHAVLSSCLDKCGDCFASEAARIKFDNDIEAIFELKRKRNAVILAHNYQTPEIFHGVADIVGDSLALARKAIDVDADVIVLAGVHFMAETAKLLNPEKTVLIPDMEAGCSLAESITPEDVALLRQTYPGIPIVTYVNTSAAVKAASDICCTSGNAKKVVEALGVPKVLMIPDEYLARNVAKETEVQIISWHGHCEVHELFSASDILQLRENHPGVTVLAHPECPPDVVAAADFAGSTAAMSDYVTTKQPKRVVLLTECSMSDNIAVHHPDVEFISSCNLCPHMKRITLANIRTALEENRHEVTVDAKIAAPARRAVERMLAI

SEQ ID NO: 50721 - DNA, 1287 bp, Corynebacterium glutamicum ATCC 13032
  CDS (1)..(1287): transl_table=11
atgaccacctcaatcaccccatctgtcaaccttgcattgaaaaatgccaatagctgcaacagtgaactcaaagacggaccctggttcctcgaccagcccggaatgccggatgtctacggccccggcgcgtcacaaaacgatccgatccctgcgcatgctccgcgccagcaggttctccccgaggagtaccagcgcgcaagtgatgacgaactgcatcgtaggatccgggaagcgaaagacaccctgggtgacaaagtggttatcctaggacacttctaccagcgcgatgaagttatccaacacgcagattttgttggtgactctttccaacttgcccgcgctgccaaaacccgacccgaggcggaagcgattgtgttctgcggtgtgcacttcatggctgaaaccgctgatctgttatccacggatgaacaatcagtgatcctccccaaccttgccgcaggttgctccatggcagacatggctgaccttgattccgtcgaagactgctgggagcaactcacctcaatttatggcgatgacaccctgatccctgtgacctacatgaattcctctgcagcgctcaaaggtttcgtgggtgagcacggcggaattgtatgcacctcctcaaatgcacgttccgtattggagtgggcgtttgaacgcggccaacgagtcctgttcttccccgatcagcacttgggtcgaaacaccgcgaaagccatgggcattgggatcgatcaaatgcccctgtggaatcccaacaaaccactgggtggcaacaccgtttccgagctagaaaacgcaaaggtactgctctggcatggtttctgctctgtacacaagcgctttactgtcgagcagatcaacaaagcccgcgccgagtaccccgacgttcacgtcatcgtgcaccctgaatcccccatgccagttgttgacgccgccgactcatccggatccactgacttcattgtgaaagccattcaagcagcaccggcaggatctacctttgcgatcggcaccgaaatcaacttggttcagcgcctggcagcccagtacccgcagcacaccatcttctgcctcgaccctgtcatctgcccatgctccaccatgtatcgcattcaccctggttacctggcctgggcacttgaggagttggtggctggaaacgtgattaaccagatttctgtctctgaatccgtggcggcaccggcgcgagtcgctttggaaaggatgctatctgttgttccagcagctcctgttactcctagctcctcgaaggatgcgtaa

SEQ ID NO: 50722 - protein, 428 aa, Corynebacterium glutamicum ATCC 13032
MTTSITPSVNLALKNANSCNSELKDGPWFLDQPGMPDVYGPGASQNDPIPAHAPRQQVLPEEYQRASDDELHRRIREAKDTLGDKVVILGHFYQRDEVIQHADFVGDSFQLARAAKTRPEAEAIVFCGVHFMAETADLLSTDEQSVILPNLAAGCSMADMADLDSVEDCWEQLTSIYGDDTLIPVTYMNSSAALKGFVGEHGGIVCTSSNARSVLEWAFERGQRVLFFPDQHLGRNTAKAMGIGIDQMPLWNPNKPLGGNTVSELENAKVLLWHGFCSVHKRFTVEQINKARAEYPDVHVIVHPESPMPVVDAADSSGSTDFIVKAIQAAPAGSTFAIGTEINLVQRLAAQYPQHTIFCLDPVICPCSTMYRIHPGYLAWALEELVAGNVINQISVSESVAAPARVALERMLSVVPAAPVTPSSSKDA

SEQ ID NO: 50723 - DNA, 960 bp, Thermosynechococcus elongatus BP-1
  CDS (1)..(960): transl_table=11
gtgtttgctacccttgctgccccccaacccccccttccccttgatctggtggccgctatccaggacctgaagcgggaactgaacgcggtcattctggcgcactactaccaagacccggccattcaggatgtggccgattacattggtgattccttggggctctcacggcaggcggccagtactaatgctgacgtcattgtctttgcaggggtgcatttcatggcggaaaccgccaagatcctcaaccccgataagttagtactgctgcccgatttggcggcgggctgttctttagcagatagttgtcctgcagatgcctttgctgcttttaaggcgcagtatcctgaccattgggtgatttcctacatcaactgctctgccgaaattaaggccctcagtgacattatctgcaccagttcgaatgcggtgaaaattgtccagcagttgccgccggatcaacccttgatttttgcccccgatcgcaaccttggccgctacgtgatggcgcaaacgggtcggcaaatggtgctttgggagggcagttgtattgtccatgaaaccttctcagagcgacgtatcctcgaactcaaggccacctaccccaacgctcaggtcattgcccaccccgaatgcgaagaggcggtgctgcgccatgccaatttcattggttcaacaaccgccctgctcaactacagccaaactgaagattgtgacacgtttatcgttgtcactgagccggggattctccaccagatgcagcggcgcaaccctcagaaaacctttattcctgcaccgcctcaggatcagacctgcaattgtaatgagtgcccctttatgcgtctgaataccctagaaaagctctatttgtgtatgcgcgatcgcaagccccaaattgagctgcccgaggacctgcgccttgcggccctcaagcccatccaacgcatgctggaaatgtcctaa

SEQ ID NO: 50724 - protein, 319 aa, Thermosynechococcus elongatus BP-1
MFATLAAPQPPLPLDLVAAIQDLKRELNAVILAHYYQDPAIQDVADYIGDSLGLSRQAASTNADVIVFAGVHFMAETAKILNPDKLVLLPDLAAGCSLADSCPADAFAAFKAQYPDHWVISYINCSAEIKALSDIICTSSNAVKIVQQLPPDQPLIFAPDRNLGRYVMAQTGRQMVLWEGSCIVHETFSERRILELKATYPNAQVIAHPECEEAVLRHANFIGSTTALLNYSQTEDCDTFIVVTEPGILHQMQRRNPQKTFIPAPPQDQTCNCNECPFMRLNTLEKLYLCMRDRKPQIELPEDLRLAALKPIQRMLEMS

SEQ ID NO: 50725 - DNA, 1059 bp, Pseudomonas putida KT2440
  CDS (1)..(1059): transl_table=11
atgacccagatttccgaacgccttttggttcaggcccacctcgacgccaagcagcccaacccgctgacagccgagcaggaggccgaataccgtgcggccatcgctgccgagctcaaagcccagaatgccgtgctggttgcccattactactgcgacccggtcatccaggcgctggctgaagaaaccggcggctgcgtgtccgactcgttggaaatggcccgcttcggcaagaaccacccggccgaaacggtcatcgtggccggtgtgcgcttcatgggcgagacggcaaaaatcctcaccccggaaaagcgcgtgctaatgccgacactggaggccacctgctcgctcgacctgggttgcccggtggaagagttctcggccttctgcgaccagcaccctgagcgcaccgtggtggtctacgccaacacgtccgcagcggtgaaggcacgcgccgactgggtggtgacttcgagctgtgccctggaaattgtcgaaagcctgatggacaacggcgaaaccatcatctggggcccggaccagcacctgggccgttacatccagaagcaaaccggtgccgacatgctgctgtgggacggtgcctgcatcgttcacgaagagttcaagtcgcgccagttggctgacatgaaggcgctgtacccggatgctgcgatcctggtgcaccccgagtcgccggaagcggtgatcgagctggccgacgcggtgggctccaccagccagctgatcaaggctgcccagaccctgccgaacaaaaccttcatcgtcgccaccgaccgcggcatcttctacaagatgcagcagttgtgcccggacaaggaattcgtcgaagcccccaccgccggcaacggcgcggcatgccgcagctgtgcgcattgcccgtggatggcgatgaacaccctggagcgggtgctggattgcctgcgtaacggcaccaacgaaattttcgttgacccggcgctggtgcccaaggcgatcaagccgcttaatcgcatgctggactttacccaggcggcgcggctgaagctgtctggtaatgcctga

SEQ ID NO: 50726 - protein, 352 aa, Pseudomonas putida KT2440
MTQISERLLVQAHLDAKQPNPLTAEQEAEYRAAIAAELKAQNAVLVAHYYCDPVIQALAEETGGCVSDSLEMARFGKNHPAETVIVAGVRFMGETAKILTPEKRVLMPTLEATCSLDLGCPVEEFSAFCDQHPERTVVVYANTSAAVKARADWVVTSSCALEIVESLMDNGETIIWGPDQHLGRYIQKQTGADMLLWDGACIVHEEFKSRQLADMKALYPDAAILVHPESPEAVIELADAVGSTSQLIKAAQTLPNKTFIVATDRGIFYKMQQLCPDKEFVEAPTAGNGAACRSCAHCPWMAMNTLERVLDCLRNGTNEIFVDPALVPKAIKPLNRMLDFTQAARLKLSGNA

SEQ ID NO: 50727 - DNA, 939 bp, Bacteroides thetaiotaomicron VPI-5482
  CDS (1)..(939): transl_table=11
atgaataatctcataaaggctattaatgagctgaagaaagaaaagaatgcaatcattctggggcactactaccagaagggtgaaatacaagatatcgccgattacgttggcgacagtctggcgttggctcaactggctgccaaaacggaggcggacatcattgtgatgtgcggcgttcactttatgggtgagacagcgaaggtgctttgtccggataagaaagtgctggtgcccgacatggaagcgggttgttcgctggcggacagttgtccggcggatcagtttgcgcagtttgtcaaagagcatccggggcacaccgttatttcgtacgtgaacacgacagctgccgtgaaggcggtaacggatgtggtggtgacttccactaatgcccggcagatcgtggaaagttttcccaaagatgagaaaataatctttggtccggaccggaatctgggaaattatatcaactcagttacgaacaggaatatgctgctttgggacggagcctgtcatgtgcacgaacagttctcggtggaaaagatcgtggaattgaaaacgcagcatccggaagcattggtgctggcacatcccgaatgcaaaagtacggtgctgaaactggcagatgtggtagggtctacagctgcactgctgaagtatgcggtgaaccacccggagaatacgtatatcgtggctaccgaatcgggtatcttgcatgagatgcagaagaagtgtccgcagacaacgtttatccccgctcctccgaacgatagcacctgtggatgtaacgagtgtagctttatgcggttgaatacgttagagaagctctatgagtgtctgaagaatgagtcaccggagattactgtagatcccgaaatagcggagaaggcagtgaggcctattcagcggatgctggagatttcggcgaagctgggattatga

SEQ ID NO: 50728 - protein, 312 aa, Bacteroides thetaiotaomicron VPI-5482
MNNLIKAINELKKEKNAIILGHYYQKGEIQDIADYVGDSLALAQLAAKTEADIIVMCGVHFMGETAKVLCPDKKVLVPDMEAGCSLADSCPADQFAQFVKEHPGHTVISYVNTTAAVKAVTDVVVTSTNARQIVESFPKDEKIIFGPDRNLGNYINSVTNRNMLLWDGACHVHEQFSVEKIVELKTQHPEALVLAHPECKSTVLKLADVVGSTAALLKYAVNHPENTYIVATESGILHEMQKKCPQTTFIPAPPNDSTCGCNECSFMRLNTLEKLYECLKNESPEITVDPEIAEKAVRPIQRMLEISAKLGL

SEQ ID NO: 50729 - DNA, 996 bp, Coxiella burnetii RSA 493
  CDS (1)..(996): transl_table=11
atgtcaataatcctttcaaacgaactcaagcagtcgatcgcccgcattagcgacctgttgaaagccgaaaacgcgacgctggtggcgcattattatacgcctgcagaaatccaggccttagccgatgaaaccggcggttttgtgggtgattccctggccatggcgcaatttggggtggagcaaccggcaaccaccttgatggttgccggagtccgatttatgggtgaaagtgcgaaaatattaagccccgacaaacgggtgctcatgccgacggtggaagccacctgctcgctggatttaggatgtccgattgaatcattttctcaattttgtgatgaaaatcccgatcgaacggttgtcgtctattgcaacacttctgccgcggtgaaagcgcgtgctgagtgggtggtgacgtcgtcgaatgcggttgaaattattcaccatctcgatgacgaaggtaaaaagattttgtgggcacccgaccgttatctcggcagttatttacaaaaaacaacgggagccgatatgattttatggaaaggcgcctgcattgtgcatgaagaattcaaaggggaggttttagctgaattgcgtaaacaatatcctcacgcggctgttttagttcatccagaatcgccgccttccgttgtcgaacaggcaaccgtggttgggtccacttcgcaattattgaaagcgtcccaagaattgccgaacgatacgcttatcgtggcgacggatcgaggaattttttacaaaatgcagcaattgtctcctcacaaaacttttatcgaagcgccgacagccggtcacggcgcgacctgccgaagttgcggtcattgcccgtggatggctatgaataatttacagagcttggaacaatccttaattactggcagtaatgaaattgttttagattccgaaatcatggccaaggctaaagtgccgctccaacggatgttggattttagttataaccgcattggagcaacagcatga

SEQ ID NO: 50730 - protein, 331 aa, Coxiella burnetii RSA 493
MSIILSNELKQSIARISDLLKAENATLVAHYYTPAEIQALADETGGFVGDSLAMAQFGVEQPATTLMVAGVRFMGESAKILSPDKRVLMPTVEATCSLDLGCPIESFSQFCDENPDRTVVVYCNTSAAVKARAEWVVTSSNAVEIIHHLDDEGKKILWAPDRYLGSYLQKTTGADMILWKGACIVHEEFKGEVLAELRKQYPHAAVLVHPESPPSVVEQATVVGSTSQLLKASQELPNDTLIVATDRGIFYKMQQLSPHKTFIEAPTAGHGATCRSCGHCPWMAMNNLQSLEQSLITGSNEIVLDSEIMAKAKVPLQRMLDFSYNRIGATA

SEQ ID NO: 50731 - DNA, 1245 bp, Streptomyces avermitilis MA-4680
  CDS (1)..(1245): transl_table=11
atgtcccgctggatcgcctccatgatccaagcgagccgcagaacagaaagggtgcgtgtcgtgaccaccgcccagccccaggagctcgacgtacagccgacgcccctcgccctgctgctgctcggccgtgaggccgacccgaggagtgagcgcggcgtcgagtgtcccggcgatctgccctcgccgtccgacccggacctggtcgagcgcgcccgcgcggccaaggagaagctcggggacaaggtcttcgtgctcggccaccactaccagcgcgacgaggtcatccagttcgcggacgtcaccggcgactccttcaagctggcccgggacgcggcggcgcgccccgaagccgagtacatcgtgttctgcggtgtgcacttcatggcggagtccgcggacatcctgacgggcgacgaccagaaggtcgtgctgccggacctggccgccgggtgctccatggccgacatggccaccgccgagcaggtcgccgagtgctgggacgtgctgaccgaggccggcatagccgagcaggtcgtacccgtctcgtacatgaactcgtccgcggacatcaaggcgttcacgggccggcacggcggcaccatctgcacctcgtcgaacgcgcagcgggcgctggagtgggccttcgagcagggctcgaaggtcctcttccttcccgaccagcacctgggccgcaacacggccgtgcgggacatggggatgtcgctcgacgactgcgtgctctacaacccgcacaagccgaacggcgggctgacggccgaggagctgcggtccgcgaagatgatcctgtggcggggccactgctccgtgcacggccgcttctcgctggactcggtgaacgacgtacgcgagcggatccccggcgtgaacgtcctcgtgcaccccgagtgcaagcacgaggtcgtggacgcggcggactacgtcggttcgaccgagtacatcatcaaggcgctggaagcggcgcccgcgggctccaagtgggccatcggtacggagctgaacctcgtacgccgcctggcgaaccgtttcgctcccgagggcaaggaaatcgtcttcctcgacaagacggtctgcttctgctcgacgatgaaccgcatcgacctgccgcatctggtgtggaccctggagtccctcgccgagggcaacctggtcaaccgcatcgaggtggaccgggagacggaacagttcgcgaagctggcgctggagcggatgctggcgctgccgtaa

SEQ ID NO: 50732 - protein, 414 aa, Streptomyces avermitilis MA-4680
MSRWIASMIQASRRTERVRVVTTAQPQELDVQPTPLALLLLGREADPRSERGVECPGDLPSPSDPDLVERARAAKEKLGDKVFVLGHHYQRDEVIQFADVTGDSFKLARDAAARPEAEYIVFCGVHFMAESADILTGDDQKVVLPDLAAGCSMADMATAEQVAECWDVLTEAGIAEQVVPVSYMNSSADIKAFTGRHGGTICTSSNAQRALEWAFEQGSKVLFLPDQHLGRNTAVRDMGMSLDDCVLYNPHKPNGGLTAEELRSAKMILWRGHCSVHGRFSLDSVNDVRERIPGVNVLVHPECKHEVVDAADYVGSTEYIIKALEAAPAGSKWAIGTELNLVRRLANRFAPEGKEIVFLDKTVCFCSTMNRIDLPHLVWTLESLAEGNLVNRIEVDRETEQFAKLALERMLALP

SEQ ID NO: 50733 - DNA, 1014 bp, Helicobacter hepaticus ATCC 51449
  CDS (1)..(1014): transl_table=11
atgtcagccacactcaccaatgaaattaaagatttactccataaactcaatgggcttttggtagcacattattatcaaaaagatgaaattgttgccttggcagatttatgtggagatagtttggagctttcccgtaaggcttcagcgagtgagaaaaatctcattgtattttgtggtgtagcatttatgggacaaagcgttaaggtgcttgctccacaaaagcgtgtgattatgcctcgtttagcgtgttgttctatggcaagaatgatagatagtgattattatgatgaaagcattgctcttttgcaatcctatggcttaagtaaagattctatctttcctattacttatattaattcaaatgctgatgttaaagcaaaagttgctcaaatgggagggcttgtttgcacaagtgcaaatgctcataagatttttaattttgcaaaggagcagggcaaaaagatattttttctccctgataaatgtctgggagagaatctcgctcgtttaaatagcaaaaaatccgcgatattgggcacagatgacaaagaaaaagtgcttagcgctgatgtgatttgctatgatggattctgttctgtgcatcagcttttcacgccacaagatattaccttttatcgtgaaaaatttgcagatattaaaattgtcgtgcatcctgaatgcgacccgagtgtcgtagaacttgctgattttgttggctcgacaagtcaaatcattgcttatgtgcaaaatttgcctttagagcaaaaagtggcagtaggcacagaatttaatcttgtcaatcgtttgcgtcctaaatataatggcaaacaaacaacctttgtccttagctcaagtaagcctcaatgtcccacaatgaatgaaacaactcttgaagatgtgcgtgatgtgcttcttgcttttgaagataataagcctattaatgaagtgtttttggataatgagattcaaaaatgggcaaaaatcgcccttgatagaatgcttgaactctcttaa

SEQ ID NO: 50734 - protein, 337 aa, Helicobacter hepaticus ATCC 51449
MSATLTNEIKDLLHKLNGLLVAHYYQKDEIVALADLCGDSLELSRKASASEKNLIVFCGVAFMGQSVKVLAPQKRVIMPRLACCSMARMIDSDYYDESIALLQSYGLSKDSIFPITYINSNADVKAKVAQMGGLVCTSANAHKIFNFAKEQGKKIFFLPDKCLGENLARLNSKKSAILGTDDKEKVLSADVICYDGFCSVHQLFTPQDITFYREKFADIKIVVHPECDPSVVELADFVGSTSQIIAYVQNLPLEQKVAVGTEFNLVNRLRPKYNGKQTTFVLSSSKPQCPTMNETTLEDVRDVLLAFEDNKPINEVFLDNEIQKWAKIALDRMLELS

SEQ ID NO: 50735 - DNA, 1032 bp, Prochlorococcus marinus subsp. marinus str. CCMP1375
  CDS (1)..(1032): transl_table=11
atgacagagggaaattggataagaacctctatactgcctcaaattgctaaaaagaaactgtctacagtttattcaactcaacagacggtattaccggatcccctaactagggatgaagtcaaaaaccaaattagattgctctgtaaagaaaaaaacgctgtaattctcgctcattactaccaagacgatttaattcaagacatagcccatttcataggcgattcattagaactttcacgcaaggctgctgaaacagaggcagaagtgattttattctgtggtgttcatttcatggcagagacagcaaagataatttgtcctgataaaaaggtaataattcctgatatggacgctggatgttctttagcagacgaatgtcctgaagaagactttaaaaaatttataaataaataccctgatcattatgtaattagctatataaattgttcagcagctgttaaagcacaaagtgatttgatatgtacaagcagtaatgctgttgatttagttaaaagaatacctctaaacataccaatcatatttgccccagataagaatttaggtaggtgggtagagaagcaaagtggtcgtaaaatgaaactatggcaaggttcttgtatggttcatgaaacatttagcgaagaaagtgttataaaattgaaattgcagcaccctaaagcagaaataattgctcatccagaatgtacagatcaacttttagattattcagacttcataggttcaactagtaaattgttatcacatgttcaaatatctccggctgaagaatttattgtgttaacagaaccaggtattattcatcaaatgagaattaaagagccgaaaaagaaattttttgaggttctagggctagatggatgtagttgtaactcttgcccttatatgcgactaaatacagcagagaaggtaattaaatcattgaaggaattaactcccgaaataattttagatgaagaagtgcaaaataaagcattaagaccaattaagaaaatgttgtcattaagtaagtag

SEQ ID NO: 50736 - protein, 343 aa, Prochlorococcus marinus subsp. marinus str. CCMP1375
MTEGNWIRTSILPQIAKKKLSTVYSTQQTVLPDPLTRDEVKNQIRLLCKEKNAVILAHYYQDDLIQDIAHFIGDSLELSRKAAETEAEVILFCGVHFMAETAKIICPDKKVIIPDMDAGCSLADECPEEDFKKFINKYPDHYVISYINCSAAVKAQSDLICTSSNAVDLVKRIPLNIPIIFAPDKNLGRWVEKQSGRKMKLWQGSCMVHETFSEESVIKLKLQHPKAEIIAHPECTDQLLDYSDFIGSTSKLLSHVQISPAEEFIVLTEPGIIHQMRIKEPKKKFFEVLGLDGCSCNSCPYMRLNTAEKVIKSLKELTPEIILDEEVQNKALRPIKKMLSLSK

SEQ ID NO: 50737 - DNA, 915 bp, Prochlorococcus marinus subsp. pastoris str. CCMP1986
  CDS (1)..(915): transl_table=11
ttgatttctgaaattaaggagctttgcttaaaagctaatgcgataattcttgctcattattatcaagcgccagaaattcaagatatcgctgattttattggagattctttagatctctctaggaaagcagcaaataatgatgcagacacaatagttttttgtggtgttcattttatggcagaaactgcgaaaatacttagcccaaacaaaacagttttattacctgatattgatgcaggttgttccttggctgatgattgtcctgcagaagagtttcaaaaatttagagaagaaaatcctgatcattatgttgtaagttatataaactgtactgcagaagtaaaagctcaaagtgatttaatttgcacaagtagcaatgctgtttcattagtagaaaaaattcctaaagataaaaaaattatatttgcgccagataaaaatcttggtcgatgggttcaaaaaaactcaggaagaaaacttaaactttggccaggcagctgtatagttcatgaaacatttagtgaagaggccttattaaaattaaagtacaaacatcccgatgcaaaagtaatcgcccatcctgagtgcagccaaaatttattagtactttcagattttattggttcaaccagtaagttattagatttcgttagtaatgattattctgatacttatatggttttaactgaacctgggataattcatcaaatgaaaaagaaagaacctaataaaaattttattgaagtaccagatattgatggttgtaaatgtaatgagtgtccatatatgaaattgaatacattagaaaaaattttagattgtttaaaaaacaattccccttcaattgaattagaccctgaaataattaaaaaagcttacaaaccaataaaaagaatgctggatatgagcatctaa

SEQ ID NO: 50738 - protein, 304 aa, Prochlorococcus marinus subsp. pastoris str. CCMP1986
MISEIKELCLKANAIILAHYYQAPEIQDIADFIGDSLDLSRKAANNDADTIVFCGVHFMAETAKILSPNKTVLLPDIDAGCSLADDCPAEEFQKFREENPDHYVVSYINCTAEVKAQSDLICTSSNAVSLVEKIPKDKKIIFAPDKNLGRWVQKNSGRKLKLWPGSCIVHETFSEEALLKLKYKHPDAKVIAHPECSQNLLVLSDFIGSTSKLLDFVSNDYSDTYMVLTEPGIIHQMKKKEPNKNFIEVPDIDGCKCNECPYMKLNTLEKILDCLKNNSPSIELDPEIIKKAYKPIKRMLDMSI

SEQ ID NO: 50739 - DNA, 1002 bp, Prochlorococcus marinus str. MIT 9313
  CDS (1)..(1002): transl_table=11
atggtccgaatgaccgctgtttgcaccgccaagacggtctctccagtgccatcaactaggaaagaattaaagggtgccattgctgaactacgcaaaaaactcaatgccgtgatcctggctcactactaccaggatccagagatccaagacatcgcagatttcattggggactccctggaactatcacgtagagctgctagcacaaatgctgatgtaatcgtgttctgcggggttcacttcatggctgaaacagcaaagattctcagcccggaaaaaattgtattgctaccagatctcgaagcggggtgctcccttgctgatgactgcccagccgatgagtttgctgctttcagagacaagcacccagaccacattgtggtgagctatatcaactgcacagctgctgttaaggcccaaagcgatctgatctgtacaagtagcaacgctgtagaacttgtaaatcaattaccgaaggatcaaccaatcctttttgctccagatcaaaacttgggcagatgggttcaaaagcagagcggcagaaaactgacgatctggcctggacgctgcatggtgcatgaaacattcagcgaagaagctctactgaaattaaaaatcatgcaccccgaggcaaaggtaatagcccatccggagtgcctagaaaatttactagagttggcggattatattggctcaacgagcaaattacttgaatttaccgagataagttcatgcacaaaatttatcgtactaacagagccaggaatcctacaccagatgaaattgaagaacccaaaaaaagaatttatggatgttccaggtattgacggatgtagttgcaatgaatgcccatatatgcgattgaatacattagaaaagctatggagctgcttaagcacaatgaagccatcaatagaaatcgaagagggggtacgtcaaaaggcttttattcctattcaacgaatgctaaacatgaaagaaacacaggaggctagtgaacattaa

SEQ ID NO: 50740 - protein, 333 aa, Prochlorococcus marinus str. MIT 9313
MVRMTAVCTAKTVSPVPSTRKELKGAIAELRKKLNAVILAHYYQDPEIQDIADFIGDSLELSRRAASTNADVIVFCGVHFMAETAKILSPEKIVLLPDLEAGCSLADDCPADEFAAFRDKHPDHIVVSYINCTAAVKAQSDLICTSSNAVELVNQLPKDQPILFAPDQNLGRWVQKQSGRKLTIWPGRCMVHETFSEEALLKLKIMHPEAKVIAHPECLENLLELADYIGSTSKLLEFTEISSCTKFIVLTEPGILHQMKLKNPKKEFMDVPGIDGCSCNECPYMRLNTLEKLWSCLSTMKPSIEIEEGVRQKAFIPIQRMLNMKETQEASEH

SEQ ID NO: 50741 - DNA, 933 bp, Synechococcus sp. WH 8102
  CDS (1)..(933): transl_table=11
atgagcgctgacaccgccctcgttgcggcgatcaaccgactccggcaggagcgcaatgctgtgatcctggcgcactattaccaggaacctgagatccaggacatcgctgatttcatcggtgattcactcgagctgtcccgcaaggccgccagcaccgatgccgatgtgatcgccttctgcggtgtccacttcatggcggaaaccgccaagatcctcagcccgcagaaaacggtcgtgctgccggaccttgatgccggctgctccctggcagacgattgtccagcagaggacttcgcggccttccgccagaagcatccggaccacctcgtggtgagttacatcaattgcaccgcggccgtgaaggctcagagcgatctgatctgcaccagcagcaatgccgtggatctggtccgccagctacccgcagacaggcccgttctgtttgctccggatcagaacctgggccgctgggtgcaacaacagagtggacgggaactgaccctctggccgggacgctgcatcgtccatgaaaccttcagtgaggaggcggttctccaactcaagcttgagcaccccgatgccgaggtgatcgcccacccggagtgccaggagaacctgctcgacctggcggacttcatcggctccaccagcaagctgctgaaccacacgcaatccagtgcggctgacaccttcattgttctgacggagccgggaatcctgcatcagatgaagcagcgggtaccgaccaaaaccctgatcgatgtaccgggactcgatggctgcagctgcaatgcctgcccctacatgcgtctgaacacactgcagaaactgcacgattgcctggagacgcttgaaccggcggtggaactcaacgaggagctccgccagcaagccctcagaccgatcgagcggatgctggaactgagtcgctga

SEQ ID NO: 50742 - protein, 310 aa, Synechococcus sp. WH 8102
MSADTALVAAINRLRQERNAVILAHYYQEPEIQDIADFIGDSLELSRKAASTDADVIAFCGVHFMAETAKILSPQKTVVLPDLDAGCSLADDCPAEDFAAFRQKHPDHLVVSYINCTAAVKAQSDLICTSSNAVDLVRQLPADRPVLFAPDQNLGRWVQQQSGRELTLWPGRCIVHETFSEEAVLQLKLEHPDAEVIAHPECQENLLDLADFIGSTSKLLNHTQSSAADTFIVLTEPGILHQMKQRVPTKTLIDVPGLDGCSCNACPYMRLNTLQKLHDCLETLEPAVELNEELRQQALRPIERMLELSR

SEQ ID NO: 50743 - DNA, 918 bp, Chromobacterium violaceum ATCC 12472
  CDS (1)..(918): transl_table=11
atgacgaaacgcgtcgtcactctcgctcattattacacccagccggaaatccagcagatggccgacaaggtgggggacagcctggagctgtccctgtacgccaaggaagcccaggccgacatcatcgtgttcgccggcgtgcgcttcatggccgagaccgcgaagatcctcaatccggaagccacggtgatcctgcccgacgccggctccacctgttccctggtgacccagaccgacgtcgccgagctgacccagtggcgcaagcgctacccggaccacgtgcacgtgtcctacatcaactccagcgccgaacacaaggccgtgtccgactggatcgtcaccagccgcaacgtcgacgacatcatcgcccacctgtacgccgagggtaagcaggtgatcttctcgccggaccgcaatatgggcggctacctgaacgacctgtacggctacgacatgccgctgtggtccgccgtgtgcgaagtgcacgacaagttcaacgaagccgcgctggccgaggccttcgaggcggtgcccggcgaaaagtacctgatcgcccatccggaaagcccgctgccggtgctgaagaaagccgattacgtcggttccacctccggcatgctgaactgggtgaaggcctaccagggcgacgccaaggcggtgatcttcgtcgccaccgaggacggcatcctgtacaacatgggcctggcccgtcccgacctggacctgcgccaggcgccgatctacgccggctgccagtgcaactcctgtccctacatgaagatgaacaccatagaggcggtgaagcgggcgcagcagggcgagggcctggtcatcgactacctgagcccggaacagatggacgccgcgcgcgtgcccatcgagcggatgctggaattcagcaaacgctactacgcctga

SEQ ID NO: 50744 - protein, 305 aa, Chromobacterium violaceum ATCC 12472
MTKRVVTLAHYYTQPEIQQMADKVGDSLELSLYAKEAQADIIVFAGVRFMAETAKILNPEATVILPDAGSTCSLVTQTDVAELTQWRKRYPDHVHVSYINSSAEHKAVSDWIVTSRNVDDIIAHLYAEGKQVIFSPDRNMGGYLNDLYGYDMPLWSAVCEVHDKFNEAALAEAFEAVPGEKYLIAHPESPLPVLKKADYVGSTSGMLNWVKAYQGDAKAVIFVATEDGILYNMGLARPDLDLRQAPIYAGCQCNSCPYMKMNTIEAVKRAQQGEGLVIDYLSPEQMDAARVPIERMLEFSKRYYA

SEQ ID NO: 50745 - DNA, 927 bp, Porphyromonas gingivalis W83
  CDS (1)..(927): transl_table=11
atgcaaacaaaggatattcttaaggagatagaacttctcaagaaagaacggaatgccattattttggcgcactactatgcacgccctgaggtgcaggacattgccgattatatcggcgattctcttggtctgtcccgtcaggctgccgatacggaggcggatacgatactcttttgcggagtccacttcatggccgaaacggcttcgattatttcgccgcagaagactatcctcactcccacgaaatacgccggttgttctttggccgaaggtgcctctgctgaaggcttgcgtcggtggaaggagcagaacccggatggactcatcgttagctatgtcaatacgactgccgaggtaaaggcttggacggactactgctgtacaagcagcaatgcactcaaggtagtggagagcttgcctcgagacagaaaaattctctttggcccggatagaaaccttggagcttatatctcgcgaaagacaggacgggagatggaactttggaatgcttcgtgtttcgtacatgagcgaattacggaagaatccatcttagaggctatggagctgtatcccgatgctgatattctcattcatccggagagcgagggctctcattcgccacgagtgctgagtagcgatcgctgctttatgtattccacggccggtattcttaatcatgctcgggagtccgacaaaaaaatgtttgttattgcgacagagccggagacgctacacgtgttgcggaaagaaaatccgggtaaaacgtttattgccattcaacccgacaaccgctgttttcatatgaaacaaacaggtttgtgggaggtcttggaagctctccgccacaaccgttatgaagtaaaggtgcctgctgaaatcagggagaaggctttgctctcgatcgagcgaatgctggccgttggctga

SEQ ID NO: 50746 - protein, 308 aa, Porphyromonas gingivalis W83
MQTKDILKEIELLKKERNAIILAHYYARPEVQDIADYIGDSLGLSRQAADTEADTILFCGVHFMAETASIISPQKTILTPTKYAGCSLAEGASAEGLRRWKEQNPDGLIVSYVNTTAEVKAWTDYCCTSSNALKVVESLPRDRKILFGPDRNLGAYISRKTGREMELWNASCFVHERITEESILEAMELYPDADILIHPESEGSHSPRVLSSDRCFMYSTAGILNHARESDKKMFVIATEPETLHVLRKENPGKTFIAIQPDNRCFHMKQTGLWEVLEALRHNRYEVKVPAEIREKALLSIERMLAVG

SEQ ID NO: 50747 - DNA, 993 bp, Wolinella succinogenes DSM 1740
  CDS (1)..(993): transl_table=11
ttgagtattcaagaagagatcaggattttaaaagagcgactggatgcggttttggtcgctcacttttaccagagagatgagattgtagagattgccgatatcacaggcgatagtttagagcttgccaagagggcgatgggctcacctcgctctttggtggtcttttgtggagtgggattcatggggcagagcgtgaagattctagccccccaaaagcgcgtggtgatgccgcgtctagcctgttgctccatggcaagaatgattgatagtgcctattttgatgaatcgatccaaaagctagaagagtatggacttttaaaagaggcgattcttccgctcgcttacatcaactctagcgccgaggtgaaagccaaagtcggggcgatggggggattggtctgcacctcggccaatgcggtgaagatcatgcaaaaagctcaagaatcgggcaaaaaaatcttctttttgcccgatcgatgtctagggcagaatcttgccaaacagggcgggcaaaaatcggccgtgctcggaagcagctccaaagaggaggtgcttggggcggatatcatctgctatgatggcttctgctccgtgcatcagctcttcaccccgcaagacattgagttctatcgccaaaaattcccggatattctcattgccgttcatcctgagtgcgatccaagcgtggtggaaagggctgattttgtgggttcgactagccaaatcatcacttttgtgaaaaatcttcccctagagcagaaagtcgcggtgggcacagaatataacctcgtcaatcgtctccgagagaagaacacctatgttttaagcagcaccaagcctgagtgtcccacgatgaatgagacgactttggaggatattttggagtgccttaaggcgtttgagcgaggcgagccgctcaatgagatcacgctagaggaggaggtgagattagaggcgcacctcgctctttcacgaatgatggagctctcatga

SEQ ID NO: 50748 - protein, 330 aa, Wolinella succinogenes DSM 1740
MSIQEEIRILKERLDAVLVAHFYQRDEIVEIADITGDSLELAKRAMGSPRSLVVFCGVGFMGQSVKILAPQKRVVMPRLACCSMARMIDSAYFDESIQKLEEYGLLKEAILPLAYINSSAEVKAKVGAMGGLVCTSANAVKIMQKAQESGKKIFFLPDRCLGQNLAKQGGQKSAVLGSSSKEEVLGADIICYDGFCSVHQLFTPQDIEFYRQKFPDILIAVHPECDPSVVERADFVGSTSQIITFVKNLPLEQKVAVGTEYNLVNRLREKNTYVLSSTKPECPTMNETTLEDILECLKAFERGEPLNEITLEEEVRLEAHLALSRMMELS

SEQ ID NO: 50749 - DNA, 960 bp, Gloeobacter violaceus PCC 7421
  CDS (1)..(960): transl_table=11
atgcttaccatccaacgtcccgccatcgatccccgcctggatctgtttgctgagatcgagcggctcaagcgcgagttgaacgcggtcatcctggcgcactactaccaagatcccgacatccaggatgtggccgactacatcggcgactcgctcggcctctcgcgccaggccgccgccaccgacgcccgggtaatcgtcttcgcgggtgtgcacttcatggccgagaccgccaagattctcaaccccaccaaacaggtgcttctgccggatctggccgccggttgctcgctttctgacaactgcccgtccgaccggttcgccgaatttctgcgggcctacccgggccacatcgtcatctcctatatcaactgctcggcggcggtcaaggcactcagcgacatcatctgcacctcggccaacgccgtggccatcgtcaatcagatccccaaagaccagccgattgtctttgcccccgaccgcaacctgggccgctatgtgatggcgcagagcgggcgggagatggtgctgtggccggggacgtgcatcgtgcacgagactttttcggagcgcaagctgatcgccctcaaggtgcgccaccccgacgccgaggtgatcgcccaccccgagtgcgaaccggcggtgctgcgccacgccgattttgtcggttcgaccaccgctctactcaagtacgcgggcaccagcgataggcgggccttcatcgtggtcaccgaggcgggcatcttgcaccagatgcaaaaagcccaccccgacaaactgttcatcccagcgccgcccgaggccgattgcgcctgcaacgagtgcccgttcatgcgcctcaacacccttgagaagctctacctgtgcatgcgcgaccgcacccccgaggtcaccctcgacgaagccacccgcctgcgcgccctcacgcccatcgagcggatgctcgcgatgagcccgaagtaa

SEQ ID NO: 50750 - protein, 319 aa, Gloeobacter violaceus PCC 7421
MLTIQRPAIDPRLDLFAEIERLKRELNAVILAHYYQDPDIQDVADYIGDSLGLSRQAAATDARVIVFAGVHFMAETAKILNPTKQVLLPDLAAGCSLSDNCPSDRFAEFLRAYPGHIVISYINCSAAVKALSDIICTSANAVAIVNQIPKDQPIVFAPDRNLGRYVMAQSGREMVLWPGTCIVHETFSERKLIALKVRHPDAEVIAHPECEPAVLRHADFVGSTTALLKYAGTSDRRAFIVVTEAGILHQMQKAHPDKLFIPAPPEADCACNECPFMRLNTLEKLYLCMRDRTPEVTLDEATRLRALTPIERMLAMSPK

SEQ ID NO: 50751 - DNA, 918 bp, Corynebacterium diphtheriae NCTC 13129
  CDS (1)..(918): transl_table=11
atgaatttgatggatctagctaatgagcacgatgctctcatcctggctcacaactaccagacgcccgagattcaagatgtggcacaccacgtcggagattctctagccttggcaaaaatcgccgccgaatctcaagcaagcacaattgtgttgtgcggagtttatttcatggctgagactacaaagattctcagtcccgaaaaacgtgtaattatccccgaacctgaagctggatgttcgttggcgtcttcaattaccgcagaacaactacgcgcatggaaagctgaacatcctgaagctgccgtagtggcgtacgtcaataccacggcagaagttaaggctctcagcgacgtctgttgcacctcttcaaacgctgtgcgcgtggttgaatcaatcgaccctgatcgcgatatcctattccttccggatcaatttctaggagcccatgttcagcgcgaaactggacgaaaaaacattcatgtgtggcttggggaatgccatgttcatgccgatatatctccgacacatattacggaaatggcacataacaacccgcaagcagacctatatgtccatcccgaatgcgggtgtacaacctcggcgctctggctagctagccaaggggatattccacaagcaagaatcctctctactggggggatgatggaggcagcacgaaaaactgccgcatccacagtgctagtagcaacagaaatagggatgctgcatcaactacgtaaagccaacacagcgactgatttcattccagtcaatccttatgctgcctgcccatttatgcaaatgataacaatggaaaaactagaaaaagcgctagtggaagggcaccatgaggtacacgttgatccggttttagcccaacgtgcacgtggagccgttgaggcgatgatcactctatga

SEQ ID NO: 50752 - protein, 305 aa, Corynebacterium diphtheriae NCTC 13129
MNLMDLANEHDALILAHNYQTPEIQDVAHHVGDSLALAKIAAESQASTIVLCGVYFMAETTKILSPEKRVIIPEPEAGCSLASSITAEQLRAWKAEHPEAAVVAYVNTTAEVKALSDVCCTSSNAVRVVESIDPDRDILFLPDQFLGAHVQRETGRKNIHVWLGECHVHADISPTHITEMAHNNPQADLYVHPECGCTTSALWLASQGDIPQARILSTGGMMEAARKTAASTVLVATEIGMLHQLRKANTATDFIPVNPYAACPFMQMITMEKLEKALVEGHHEVHVDPVLAQRARGAVEAMITL

SEQ ID NO: 50753 - DNA, 915 bp, Geobacter sulfurreducens PCA
  CDS (1)..(915): transl_table=11
atgcacgccaacgacatcagacaggacatacggaagctcctgaaggagcgtaacgctgtgctcctggcccacaactacatgagggacgaggtgcaggagattgccgacataaccggtgactcactcgccctctcccaggaggcggcccgcaccgacgcggacgtcatcgttttctgcggagttcacttcatggccgagtcagcctcgatcctctcgccggacaaaacggtccttctgccgcgcatggacgccggctgccccatggcagacatggtgaccgccgaggcgttgctggagatgaaggcccgccaccccgacgtacctgtcgtcacctacgtgaactcttcggcggcggttaaggccgtcagcgacatctgctgcacctcggccaatgctgtgaaggttgtgaattccctcccggacccggaggtaatcttcgttcccgaccgcaacctgggacagttcgtggcaaagcagtccgacaagacgttccacttctgggacggcttctgccccacccacgaacggctgaagcccgccgacgtccagaggctcaaggaagcccaccccgacgctctcttcatctgccatcccgagtgcaaccccttggtcgtggccctggcggaccatgtctgctccacgagcggtatgtatgacttctgccgcacgaatccggccaaacggttcatcatcggcaccgaggcggggattctctaccggctccggcttgagaatccggacaaggaattcatcctcgcctcgccggcgcttgtctgccccaatatgaagctgacctccctggaagatgtgctggcgagcctgcagaccatgtcgccggtggtgaaagtccccgaagaaatccgggtcccggccaagctcgccctggaccggatgatcgccatcccccgggactga

SEQ ID NO: 50754 - protein, 304 aa, Geobacter sulfurreducens PCA
MHANDIRQDIRKLLKERNAVLLAHNYMRDEVQEIADITGDSLALSQEAARTDADVIVFCGVHFMAESASILSPDKTVLLPRMDAGCPMADMVTAEALLEMKARHPDVPVVTYVNSSAAVKAVSDICCTSANAVKVVNSLPDPEVIFVPDRNLGQFVAKQSDKTFHFWDGFCPTHERLKPADVQRLKEAHPDALFICHPECNPLVVALADHVCSTSGMYDFCRTNPAKRFIIGTEAGILYRLRLENPDKEFILASPALVCPNMKLTSLEDVLASLQTMSPVVKVPEEIRVPAKLALDRMIAIPRD

SEQ ID NO: 50755 - DNA, 966 bp, Bdellovibrio bacteriovorus HD100
  CDS (1)..(966): transl_table=11
atgtcttatgatattgctgctgatattcagcgcctgaaaaaagaaaaaaacgccgtcattctggctcactattatgaagatggtgatatccaggatatcgccgactatgtcggtgacagcttctatctggcgaagatgggccaacaggtacagcaagacaccatcctgctggccggtgttgtgttcatggctgaaagcgtgaagatcctaaatcccaccaaaacagttttggttccggacatggaagccagctgttctcttgtcaaaggcgcgccttacgatcagtacctggcgtggcgccgccagcacccggacgggattgcggtgacctacattaattccagcgcggaagtgaaatccatttctgatgtgatcatcacttcttccaatgctcagcagatcgttgaatccattccgaaagaccgcaagatcttgttcggaccggatcagcacctgggtcgctggttgatgaaaaaactaaatcgtgaatttgtcctgtggccaggggcgtgcgaagtgcacgtgctgttcaatgcccgcaaacttcacgaactgatcgcccaacacccggatgcggtggtgattgcgcaccctgagtgcgatgaatccgtgttgcagtatgcttctgtggcaggctccacttcccgtttgctggaagaggttcagaaaaacccggcgaagaaattcatcgtggccactgaaactggtattttccaccagatgcaaaaacttcgtccggacgtgacgctgattcaagcgccggttctggatgccggttgttcttgcaacaactgcccgtacatgaagatgaacaacatggaaaagatcaaacacgctttggaaacattccagccgcaagtgggcctggatgaggcattgcgcctgaaagccaaggtgtctttggatcgcatgatggacatcaccagcggcaaacctgtcagctggcctgcggaattcacggtttaa

SEQ ID NO: 50756 - protein, 321 aa, Bdellovibrio bacteriovorus HD100
MSYDIAADIQRLKKEKNAVILAHYYEDGDIQDIADYVGDSFYLAKMGQQVQQDTILLAGVVFMAESVKILNPTKTVLVPDMEASCSLVKGAPYDQYLAWRRQHPDGIAVTYINSSAEVKSISDVIITSSNAQQIVESIPKDRKILFGPDQHLGRWLMKKLNREFVLWPGACEVHVLFNARKLHELIAQHPDAVVIAHPECDESVLQYASVAGSTSRLLEEVQKNPAKKFIVATETGIFHQMQKLRPDVTLIQAPVLDAGCSCNNCPYMKMNNMEKIKHALETFQPQVGLDEALRLKAKVSLDRMMDITSGKPVSWPAEFTV

SEQ ID NO: 50757 - DNA, 1107 bp, Bacillus cereus ATCC 10987
  CDS (1)..(1107): transl_table=11
atgagtattttagaaaaagtacaaccgattgaaacgatgttaccagagcgttattacacgatgtcaacagaagatatggaaaagcgggttcgtgaaattaaagaaaaaatgggggaaacactatttattccaggccatcattaccaaaaagatgaagtggtacaattttctgatgcagcaggagattcacttcagcttgcgcaagttgcagcgagcaataaaaaggcgaaatatattgtattttgcggtgtacactttatggcagaaacagcagatatgttaacgacagatgatcaaatcgttatcttaccagatatgcgtgcaggttgttcgatggcagatatggcagatattgaacaaacagaaagagcgtggaaagagctcacaaaattatttggagatacgatgattccgttaacgtatgtaaactctacagctgcaattaaagcgttttgcggtcgtaatggcggagcgacagtaacttcttctaatgcaaaacaaatggtatcttgggcgtttacacaaaaagagcgtctcgtctttttaccggaccaacatttaggaagaaatacaacgtacgacttaggtatcccgttagataaaatggcagtatgggatccgtatacagattcattagagtacgagggagatatagaagaaattcaagtgattttatggaaaggacattgttctgttcatcaaaattttacagtgaaaaacattgagaacgtacggaaaaatcagccggacatgaacattattgtacatccagaatgttgctacgaagttgtagctgcttcggattatgcaggttcaacgaaatacattattgatatgattgaagcggctccatccggaagtaaatgggcgattggtacagaaatgaatttagtgaaccgaattattcaacaacatccagataaagaaattgtttcacttaatccgtttatgtgtccgtgtttaacgatgaaccgaattgacctaccgcacttattatgggcacttgaaacgatagaaaaaggagaagaaattaacgttattagcgtagataaacaagtgactgaagaggcagttcttgcattaaatcgtatgttagagcgtgtgtaa

SEQ ID NO: 50758 - protein, 368 aa, Bacillus cereus ATCC 10987
MSILEKVQPIETMLPERYYTMSTEDMEKRVREIKEKMGETLFIPGHHYQKDEVVQFSDAAGDSLQLAQVAASNKKAKYIVFCGVHFMAETADMLTTDDQIVILPDMRAGCSMADMADIEQTERAWKELTKLFGDTMIPLTYVNSTAAIKAFCGRNGGATVTSSNAKQMVSWAFTQKERLVFLPDQHLGRNTTYDLGIPLDKMAVWDPYTDSLEYEGDIEEIQVILWKGHCSVHQNFTVKNIENVRKNQPDMNIIVHPECCYEVVAASDYAGSTKYIIDMIEAAPSGSKWAIGTEMNLVNRIIQQHPDKEIVSLNPFMCPCLTMNRIDLPHLLWALETIEKGEEINVISVDKQVTEEAVLALNRMLERV

SEQ ID NO: 50759 - DNA, 987 bp, Prochlorococcus marinus str. NATL1A
  CDS (1)..(987): transl_table=11
ttgaattggaaactaattactactgtttcctattacaagactgatatatcagtctcaaataaaaacaaaaatctcattgatgagatcaattttttgcgtaaaaaaagaaacgctataattcttgcccattactaccaagagcctgcgatacaggatattgcagattttattggagattcacttgaattatccagaaaagcttcagaaacaaatgcagaggttattgttttttgtggcgttcatttcatggccgaaacagcaaaaatcttgagtccaaataagattgttctccttcctgattttgatgctggatgcacactcgcagatgattgccaacctgatgacttccaaaaattcttagacaagcatcctgatcattttgccattagctatgtaaattgcagtgcagcggtaaaggcaaaaagtgacctaatttgcacaagtagtaacgccgttgatctggtaaacaaattaccaaaagatttacctattttattttcaccagataggaatcttggcagatgggttgaacgtcaaagtggtagaaaattaaccttgtggccaggcagatgtcttgtccatgaaacttttaatgaagaatctcttataaaattaaaaatcaaaaatccaaccgctgaagttcttgcccatcctgaatgtcaagagaatcttttagatttagcagatttcataggttcaacaagcaaattgctaaattattctcaaaatagtaagaaagataaatttatcgtgctaactgagccaggaataattcatcaaatgagattaaaagaccctttaaagacatatatagaagttcctggtctagatggttgtagttgcaatgaatgcccatacatgagaatgaataccttagaaaaagtattaaattgcctaaaagaaatgaatccagagttgcacatggacgaacaaattagattaatggcttataagccactgaaaaaaatgcttgatatgagtaattga

SEQ ID NO: 50760 - protein, 328 aa, Prochlorococcus marinus str. NATL1A
MNWKLITTVSYYKTDISVSNKNKNLIDEINFLRKKRNAIILAHYYQEPAIQDIADFIGDSLELSRKASETNAEVIVFCGVHFMAETAKILSPNKIVLLPDFDAGCTLADDCQPDDFQKFLDKHPDHFAISYVNCSAAVKAKSDLICTSSNAVDLVNKLPKDLPILFSPDRNLGRWVERQSGRKLTLWPGRCLVHETFNEESLIKLKIKNPTAEVLAHPECQENLLDLADFIGSTSKLLNYSQNSKKDKFIVLTEPGIIHQMRLKDPLKTYIEVPGLDGCSCNECPYMRMNTLEKVLNCLKEMNPELHMDEQIRLMAYKPLKKMLDMSN

SEQ ID NO: 50761 - DNA, 1002 bp, Prochlorococcus marinus str. MIT 9303
  CDS (1)..(1002): transl_table=11
atggtccgaatgaccgctgtttgcaccgccaagacggtctctccagtgccatcaactagaaaagaattcaagggtgccattgctgagctacgcaaaaaactcaatgccgtgatcctggctcactactaccaggatccagagatacaagacatcgccgatttcattggcgactccctggaactctcacgtagagctgctagcacaaatgctgatgtgatcgtgttctgcggggtgcacttcatggcagaaacagcaaagattctcagcccggaaaaaattgtattgctaccggatctcgaagcggggtgctcccttgctgatgactgccctgccgatgagtttgctgctttcagagacaagcacccagaccacattgtggtgagctatatcaactgcacagctgctgttaaagcccaaagcgatctgatctgcacgagtagcaatgctgtagctcttgtaagccaattaccaaaggatcgaccgatcctatttgcaccggatcaaaacctgggaaggtgggttcaaaagcagagcggaagagaactgacgatctggcctggacgctgcatggtgcatgaaacattcagcgaagaagctctgctaaaactaaaaatgatgcaccccgaagctaaagtaatagctcatccggagtgcctagaaaggctactagaattagcggattatgttggctctaccagcaaattacttgaatatacagaaacaaaccctggcacaaagtttatcgtactaacagagccaggcatcctgcaccagatgaaacagaggatgccaaacaaagaatttatggatgttccaggtattgacggttgcagctgcaatgaatgcccttatatgagactaaatacactagaaaaactctggagatgcttaagcacaatgaagccatcaatagaaattgaagagggagtacgtcaaaaggcgcttattccgattcaacgcatgttaaacatgaaagaaaaacaggaggctagtcaacattaa

SEQ ID NO: 50762 - protein, 333 aa, Prochlorococcus marinus str. MIT 9303
MVRMTAVCTAKTVSPVPSTRKEFKGAIAELRKKLNAVILAHYYQDPEIQDIADFIGDSLELSRRAASTNADVIVFCGVHFMAETAKILSPEKIVLLPDLEAGCSLADDCPADEFAAFRDKHPDHIVVSYINCTAAVKAQSDLICTSSNAVALVSQLPKDRPILFAPDQNLGRWVQKQSGRELTIWPGRCMVHETFSEEALLKLKMMHPEAKVIAHPECLERLLELADYVGSTSKLLEYTETNPGTKFIVLTEPGILHQMKQRMPNKEFMDVPGIDGCSCNECPYMRLNTLEKLWRCLSTMKPSIEIEEGVRQKALIPIQRMLNMKEKQEASQH

SEQ ID NO: 50763 - DNA, 915 bp, Clostridium thermocellum ATCC 27405
  CDS (1)..(915): transl_table=11
atgttggataggaatgagttgaaggaaagaataaaacaactgaaagaagaaaaaaatgccgtaatagtggcccataattatcaaaatgacgaagttcaggaaatagcggatgtaattggcgattcactggcactaagcaggtactgcgccaataatgacaaagatgttattgttttttgcggcgttcattttatggcggagagcgcaaaaatactttcgccgtcaaaaacagtattgcttgcggagattgatgccggctgtcctatggccgacatgataacggctgatgctttaagggaggcaaagaaaaagtatcccggagcagttgttgtttgttatgtcaattcatccgcggaggtaaaggccgaaagcgatatatgctgtacgtcgtcaaacgccgttgaggttgtaaaatcgattcctgaaaaggacatattgtttgtccccgacaaaaatttgggcagctatgttgctgagaaggttccggaaaaaaacataattttatgggaaggttattgtatcacgcatcacagaataagcgtcgagcaggtcagggaaattaagaaaattcatcctgacgctcttgtgcttgtgcatccggagtgccggaaagaagtctgtgaagaagcggattttgtcggcagtaccaagcagataattgactttgccgaaaaatccgaacattcaaagtttattataggcactgagatgggagtcttgtacaaacttaagagagataatccggacaaaactttctatctgctctctcagggactgatatgtccaaatatgaagaaaaccactttggaaagcgtgtacaatgcgttaaaagaaatgaaatatgaaataaaacttgatgaaaatataagattgaaggccaaaaaagctctggacagaatgatccggattggctga

SEQ ID NO: 50764 - protein, 304 aa, Clostridium thermocellum ATCC 27405
MLDRNELKERIKQLKEEKNAVIVAHNYQNDEVQEIADVIGDSLALSRYCANNDKDVIVFCGVHFMAESAKILSPSKTVLLAEIDAGCPMADMITADALREAKKKYPGAVVVCYVNSSAEVKAESDICCTSSNAVEVVKSIPEKDILFVPDKNLGSYVAEKVPEKNIILWEGYCITHHRISVEQVREIKKIHPDALVLVHPECRKEVCEEADFVGSTKQIIDFAEKSEHSKFIIGTEMGVLYKLKRDNPDKTFYLLSQGLICPNMKKTTLESVYNALKEMKYEIKLDENIRLKAKKALDRMIRIG

SEQ ID NO: 50765 - DNA, 1140 bp, Herminiimonas arsenicoxydans
  CDS (1)..(1140): transl_table=11
atgcagacccagtttattaaaacaattgaatttgaacgtcccgggatggaaagcggcagcagttgcgtggcccacgcgtgggcacgcacaccggcgacgccatcgccagaagaaaaaatcgccctgaaggaccgcatcagacacttgctgaaagagcgcgaagccgtattggtggcgcattactacgtcgatgccgatctgcaggatctggcggaagaaaccggcggctgcgtgtccgattcgctggaaatggcacgcttcggtcgcgatcatccggccaagacgctggtggtagccggcgtaaagttcatgggtgaaacggcgaaaatcctgagccctgaaaaaaccattctgatgccggatctggacgcgacctgttcgctggatctcggttgtccagtcgacgagttccatgctttctgcgatgcgcatcctgatcgcgtggtcgtcgtgtatgcgaataccagcgcggcagtgaaggcgcgcgcagactggatggtgacgtcatccatcggcttgaagatcgtcgagcatctgcatgtacaaggcaagaaaatcctgtgggcgccggacaagcatctgggcggctacatacaaaaacagactggcgccgatatgctgctgtggcagggttcctgcctggtgcacgatgaattcaaggcagtggaactggagctgctgaagaaggaacatccactggcgaaagtgctggtgcatccggaatcgcctgctgccgtcgtggcgctggccgatgcggtcggctcgacttcgcaactgatccatgctgcgcaaaccatggatgcgccggaattcatcgtcgctaccgacaacggtattttgcacaagatgaaaatggccgcgccgggcaaaattttcatcgatgcgccgactgccggcaatagtgcgacctgcaaaagctgtgcgcattgcccttggatggccatgaacggtttgcagaatctgctggacgtgctggaatcgggccgcaatgaaattcacgtcgatccggaaatcggtcgcaaggcaaccgtttgcatcgatcgcatgctcgatttcgctgccgcgcaaaaagccaatgtgcgtccatccagcgatctggcaaaagaacaaaaactgttttcaggaataggaccggcatga

SEQ ID NO: 50766 - protein, 379 aa, Herminiimonas arsenicoxydans
MQTQFIKTIEFERPGMESGSSCVAHAWARTPATPSPEEKIALKDRIRHLLKEREAVLVAHYYVDADLQDLAEETGGCVSDSLEMARFGRDHPAKTLVVAGVKFMGETAKILSPEKTILMPDLDATCSLDLGCPVDEFHAFCDAHPDRVVVVYANTSAAVKARADWMVTSSIGLKIVEHLHVQGKKILWAPDKHLGGYIQKQTGADMLLWQGSCLVHDEFKAVELELLKKEHPLAKVLVHPESPAAVVALADAVGSTSQLIHAAQTMDAPEFIVATDNGILHKMKMAAPGKIFIDAPTAGNSATCKSCAHCPWMAMNGLQNLLDVLESGRNEIHVDPEIGRKATVCIDRMLDFAAAQKANVRPSSDLAKEQKLFSGIGPA

SEQ ID NO: 50767 - DNA, 1143 bp, Burkholderia vietnamiensis G4
  CDS (1)..(1143): transl_table=11
atggagatggaatcgacgatcaaagccgtcgagtacgaccgaccggtctcggccgggaccgtctgtagcgtcgggcaagcatgggccaaagtgcccgatgcaccgtccgccgaagagcgcgccgctctcaaggcacgcatcaagacgctgctcgcacgcgaaaaggccgtgctggtcgcccactattacgtggacgccgaactgcaggaactggccgacgaaaccggcggatgcgtcgccgattcgctcgaaatggcccgcttcggccgcgaccacgacgcacaaacgctcgtcgtcgccggcgtgcgcttcatgggcgaaaccgcgaagatcctcagccccggcaagcgcgtgctgatgcccgatctcgacgccacctgctcactcgacctcggctgcccggccgacgaattctcggcgttctgcgacgcccatcccgatcgcaccgtcgtcgtctatgcgaacaccagcgccgccgtgaaagcgcgcgcggactggatggtcacgtcgtcgatcggcctcgagatcgtcgccgacctgcacgcacgcggcgaaaagatcatctgggcgccggatcgccatctcggcagctatatccagaagaagaccggcgcggacatgctgctgtggcaaggctcgtgcctcgtgcacgacgaattcaagggcatcgagctcgacttgctgcgcgccgaatacccggacgcgaaggtgctcgtgcaccccgagtcgccggaaaacgtcgtcgcgcaggcggacgtcgtcggttcgacgacgcagttgatcgacgccgcggtgaagctcgacgcgacgcacttcatcgtcgcgaccgatctcggcattctgcacaagatgcagctcgccgcaccgggcaagaccttcatcgccgcgccgacggcaggcaacagcgcaacctgcaagagctgcgcgcattgcccgtggatggccatgaacggcctcgcgaacctcgccgacgtgctcgagcgcggccacaacgagatcttcgtcgatccggcgatcgccgcgcgtgcgcgcgtgccgatcgaccggatgctcgatttcgcagcggcgcacaagaagcgcgtgcaggcgagcggcgatctgcagcgcgatcagcaactgttcgcgaacgtgggggcggcatga

SEQ ID NO: 50768 - protein, 380 aa, Burkholderia vietnamiensis G4
MEMESTIKAVEYDRPVSAGTVCSVGQAWAKVPDAPSAEERAALKARIKTLLAREKAVLVAHYYVDAELQELADETGGCVADSLEMARFGRDHDAQTLVVAGVRFMGETAKILSPGKRVLMPDLDATCSLDLGCPADEFSAFCDAHPDRTVVVYANTSAAVKARADWMVTSSIGLEIVADLHARGEKIIWAPDRHLGSYIQKKTGADMLLWQGSCLVHDEFKGIELDLLRAEYPDAKVLVHPESPENVVAQADVVGSTTQLIDAAVKLDATHFIVATDLGILHKMQLAAPGKTFIAAPTAGNSATCKSCAHCPWMAMNGLANLADVLERGHNEIFVDPAIAARARVPIDRMLDFAAAHKKRVQASGDLQRDQQLFANVGAA

SEQ ID NO: 50769 - DNA, 933 bp, Synechococcus sp. WH 7803
  CDS (1)..(933): transl_table=11
atgagcgctgaccccgccctcgtcgcggcgatcaaccgtctccgcaaggaacgcaacgctgtgatccttgcgcattactaccaggagcctgccattcaggacatcgctgatttcatcggcgactccctcgagctctcacgcaaagcggccagcaccgctgcggatgtgatcgtgttctgcggcgttcatttcatggctgaaaccgcaaagattctcagcccagagaaaacagtggtgctgcctgacctcgacgcgggatgttccctggcggatgattgtgcagccgatgaattcgcccgattccgcgctgagcatccggatcacctggtggtgagctacatcaattgcactgcggcggtgaaagcacagagcgatctgatctgcaccagcagcaatgcagttgacctggtcaatcagctgccggccgatcggccgatcctgtttgctccagatcagaatcttggtcgttgggtgcaacgccagagcggccgggagctcaccctttggcctgggcgatgcattgtgcatgaaaccttcagtgaggaggcggtgttacgcctgaagcttgaaaatccccaggctgaagtgatcgcccacccggaatgtttggagaatctcctggatctggccgatttcatcggctccaccagcaagcttctcaactacacgcaatcaagcccttcagacacattcattgtgttgacggagcctggaattctccaccagatgaagcagcgggttcctgacaaaaccctgatcgatgtgccaggcctcgatggctgcagctgcaatgcctgcccctacatgcgcctgaacaccttggagaagctccgtgattgtctggaaaccctctcaccgcagatcgcgatggacgaatccctgcgttcgaaggctgaggctccgatccggcgcatgcttgagatgagccgctga

SEQ ID NO: 50770 - protein, 310 aa, Synechococcus sp. WH 7803
MSADPALVAAINRLRKERNAVILAHYYQEPAIQDIADFIGDSLELSRKAASTAADVIVFCGVHFMAETAKILSPEKTVVLPDLDAGCSLADDCAADEFARFRAEHPDHLVVSYINCTAAVKAQSDLICTSSNAVDLVNQLPADRPILFAPDQNLGRWVQRQSGRELTLWPGRCIVHETFSEEAVLRLKLENPQAEVIAHPECLENLLDLADFIGSTSKLLNYTQSSPSDTFIVLTEPGILHQMKQRVPDKTLIDVPGLDGCSCNACPYMRLNTLEKLRDCLETLSPQIAMDESLRSKAEAPIRRMLEMSR

SEQ ID NO: 50771 - DNA, 933 bp, Thermus thermophilus HB27
  CDS (1)..(933): transl_table=11
atgggtaggatgcgtggggaagccctggcgcaagaggtcctcaggctcaagcgggagcggaacgccgtcatcctggcccactcctaccagctccccgaggtgcaggaggtggcggacttcgtgggggactccctgggcctcgcccgggaggcccaaaggacgcgggccgaggtcatcgtcttctgcggcgtccacttcatggcggagaccgccgccatcctgaaccccgagaagacggtgcttctgcccgacctggaggccggctgctccctcgccgacagcatccggcccgaggacgtcctggcctggaaggcaaagcaccccgacgggatcgtggtggcctacgtgaacaccaaggcggaggtcaaggccctggcggacgtctgcgtgacgagcgcgaacgccgtggaggtggtctcccggcttccccaggaccggcccatctacttcgtccccgacatgttcctaggggcccacgtggcccgggccacggggaggaggctggacctcttccccggggagtgccacgtgcacgcggggatccgggaggagcacctgaaggccctcctggaagcccacccgggggcggagttcctcatccacccggagtgcggctgcggcagcgggtgcctttacctcaagcccgacgccaagatgctctccacggaggggatggtgcgctacgccaagggggcggaggcccgggagttcgtggtggccacggaggtggggatcctccaccgcctcaagaaggaggccccggaaaaagccttcttcccggtgaagcccgacgccgtgtgcgagtacatgaagcggatcaccctggagaaggtctacctctccttgaaggagatgcgccacgtggtccgggtgcccgaggaggtggcggggagggcgcggcgggccctcgaggccatggtggccgtggggtga

SEQ ID NO: 50772 - protein, 310 aa, Thermus thermophilus HB27
MGRMRGEALAQEVLRLKRERNAVILAHSYQLPEVQEVADFVGDSLGLAREAQRTRAEVIVFCGVHFMAETAAILNPEKTVLLPDLEAGCSLADSIRPEDVLAWKAKHPDGIVVAYVNTKAEVKALADVCVTSANAVEVVSRLPQDRPIYFVPDMFLGAHVARATGRRLDLFPGECHVHAGIREEHLKALLEAHPGAEFLIHPECGCGSGCLYLKPDAKMLSTEGMVRYAKGAEAREFVVATEVGILHRLKKEAPEKAFFPVKPDAVCEYMKRITLEKVYLSLKEMRHVVRVPEEVAGRARRALEAMVAVG

SEQ ID NO: 50773 - DNA, 1077 bp, Desulfovibrio vulgaris subsp. vulgaris str. Hildenborough
  CDS (1)..(1077): transl_table=11
atgaccctccatcgccccacgcccgcatcctccggtgaaacgccacaagacgtggcacgtcgtatcgacgccctgcgggggcagcttggcgacgacgtgctcgtcatggggcaccattaccagcacgattcggtcatccgccacaccgacctgcgcggcgattcgctggaacttgcacgcaaggtggatgccatcagcgcgaagcacatcgtcttctgcggtgtctatttcatggccgaatcggcagccttgctcgcgcgtgacgggcagtccgtgcacatcccggaaagcgacgccaactgcgtcatgtcgcagatggcccccgcacagcgcgtggatgcggtgctgcgaaatctctccgggaccggacgcaatgtcataccactggcctacgtgaacacttcgctggcggtcaaagccgtcgtcggacggcacggcggtgccgtgtgcacctctgccaatgcgaagacgatgctgacgtgggcgcgcgaacgggctgacgcagtggtcttcctgccggacaagaaccttgcccggaacacggcagaccttctcggcatcgccgaagaccggagacatatcctcgacatccgggacggaggcgcggctgtggacatggacgccgcatcaggggccgaacttctgatgtggcccggctgttgcgccatccacgcccggttcaacctgcgccagatggaacgcatgagggacgagcaccccgggtgccgcatcgccgtccaccccgaatgttcgcccgaggtggttcgcgccgccgacgccgcaggatcaacgtcgttcctcatccgttacgccgaagaacagaagcccggtacgacgctcgtcatcggcactgaaatcaacctcgtcgaacgccttgcggcgcaacacgccggacgcatcaccgtattgccgctccttgagagcggctgttcccacatggcgcgtgtgacagcacccaagcttctcgccacgctcgaatccatcgccagcggcacggcctcacccgtagccatccccctcgacctgcaggacgacgcgcacgccgccctccaacgcatgctagaagcatgtgcctaa

SEQ ID NO: 50774 - protein, 358 aa, Desulfovibrio vulgaris subsp. vulgaris str. Hildenborough
MTLHRPTPASSGETPQDVARRIDALRGQLGDDVLVMGHHYQHDSVIRHTDLRGDSLELARKVDAISAKHIVFCGVYFMAESAALLARDGQSVHIPESDANCVMSQMAPAQRVDAVLRNLSGTGRNVIPLAYVNTSLAVKAVVGRHGGAVCTSANAKTMLTWARERADAVVFLPDKNLARNTADLLGIAEDRRHILDIRDGGAAVDMDAASGAELLMWPGCCAIHARFNLRQMERMRDEHPGCRIAVHPECSPEVVRAADAAGSTSFLIRYAEEQKPGTTLVIGTEINLVERLAAQHAGRITVLPLLESGCSHMARVTAPKLLATLESIASGTASPVAIPLDLQDDAHAALQRMLEACA

SEQ ID NO: 50775 - DNA, 1065 bp, Acinetobacter sp. ADP1
  CDS (1)..(1065): transl_table=11
atgaatgatgcgactttaattgcaaatgatgcaaaagtaatcgtgcaagcgcatttagatcgtttgggtgaacctaaggatcatcacttgagtccagatgtaaaacaggccaagttcgatcaaatcaaggaagaattaaaaaaacgtaatgctgttctggttgcgcattattattgtgatcctgacgttcaggagcttgctgagctgacgggaggctgtgtatctgactctctagaaatggcacgctttggtcgtgatcatgacgctacgaccttagttgtggctggtgttaaatttatgggcgaaacagccaaaattttatctccagaaaaaacgattctgatgccgaccctagaggcaacctgctcactagatttgggatgtccagttgatgagttctcggctttttgtgatcaacatccagatcatactgttgtggtgtatgccaatacctcagcggcagtgaaagcacgtgcagactgggtagtaacttcaagttgtgctgttgaaattattgaacatctagatagtttgggtgaaaagattatctgggcaccagatcaacatttaggccgttatattcaaaagaaaactggtgccgagatgttgctttgggatggttcttgtatcgtgcatgaagaattccgtgcccgtggcattgccaatatgaaagccttatatccagatgcagcagtgcttgtacatcctgaatcaccagaatcggtggttgagattgccgatgcagtaggcagtacatcgcaattgattaaggcagcacagactttaccaaatgaacgtttgattgtagccacagatcgtggaatcttttacaagatgcaacaagcagtaccgcataagattttggtggaagcaccaactgcgggcgaaggtgctacttgtcgctcatgtgcacattgcccgtggatggcaatgaatgagctggatggtattttgcatgttttacagcatgccgatcaggaaattcatgttgatccacagctcgctgaacgtgcaaaacttcctttagatcgaatgttgagctttagtgcatcgttgaagcgttaa

SEQ ID NO: 50776 - protein, 354 aa, Acinetobacter sp. ADP1
MNDATLIANDAKVIVQAHLDRLGEPKDHHLSPDVKQAKFDQIKEELKKRNAVLVAHYYCDPDVQELAELTGGCVSDSLEMARFGRDHDATTLVVAGVKFMGETAKILSPEKTILMPTLEATCSLDLGCPVDEFSAFCDQHPDHTVVVYANTSAAVKARADWVVTSSCAVEIIEHLDSLGEKIIWAPDQHLGRYIQKKTGAEMLLWDGSCIVHEEFRARGIANMKALYPDAAVLVHPESPESVVEIADAVGSTSQLIKAAQTLPNERLIVATDRGIFYKMQQAVPHKILVEAPTAGEGATCRSCAHCPWMAMNELDGILHVLQHADQEIHVDPQLAERAKLPLDRMLSFSASLKR

SEQ ID NO: 50777 - DNA, 1296 bp, Leifsonia xyli subsp. xyli str. CTCB07
  CDS (1)..(1296): transl_table=11
atgaccatcgcttcggtcgacaccaccatccggctcatctcgcgcggcgagctggacagcgccacctgcgcgcccgagctggcggaggcgccgtggctcttcgacgcggcagcgccatcgtacggcccgggcgcctcgcaggccgacccaatccccgccctcgcgccccggcagggcgagctgccggaggagtaccgcacggagagcgaggaggagctatccgggcgcatccacgccgcgaaggccaccctcggcgaccgtgtcgcggtcatggggcacttctaccagcgcgacgaggtcgtgcggttcgcggacttcgtgggcgactccttccagctcgcgaacgcggcgaaggcccggccggaggcggaggcgatcgtgttctgcggcgtccacttcatggctgagaccgcagacatcgtctcccggcccgaccagcgcgtcatcctgccgaacctcgcctccgggtgctcgatggccgacatggccgacctcgactcggtggaggagtgctgggaggcgctcgaggagctgtacggcgccgagcccgacgcagacggccgggtcccggttatcccggtgacctacatgaactcgtcggcggcgctgaaggcgttctgcggcgaacgcggcgggatcgtgtgtacctcctccaacgccgcgaccgtgctggagtgggcgttcgagcgcgggcagcgcgtgctgttcttccccgaccagcaccttggacgcaacacggcgaaggcgatgggcgtcccggtcgagcggattccgctgtggaacccgcggaagccgctcggcggcagcagcgagacgatgctgcgggacgcacgggtcatcctctggcacggcttctgctcggtacacaagcggttcaccgtggggcagatcgagcaggcgcgagccgcgttccccggcgtccgcgtcatcgtccatcccgaatgcccgatggaggtcgtggacgcagccgacgagagcggatcgacggactacattgtgaaggccatccaggcggcgcccgccggttcgacgttagccatcggcaccgagatcaacctcgtgcagcggctcgcggcgcagttcccgcagcacacggtcttctgcctcgactcggtggtgtgcccgtgctcgacgatgtaccgcatccaccccggctacctagcctgggtactcgagtcgctcgtgcgcggcgaggtcgtcaaccaggtgagcgtgccggccgcagtcgccggcccggcccgggcggcgctcgagcgcatgctcgccgcgcggccggacacgacgatggcggcctga

SEQ ID NO: 50778 - protein, 431 aa, Leifsonia xyli subsp. xyli str. CTCB07
MTIASVDTTIRLISRGELDSATCAPELAEAPWLFDAAAPSYGPGASQADPIPALAPRQGELPEEYRTESEEELSGRIHAAKATLGDRVAVMGHFYQRDEVVRFADFVGDSFQLANAAKARPEAEAIVFCGVHFMAETADIVSRPDQRVILPNLASGCSMADMADLDSVEECWEALEELYGAEPDADGRVPVIPVTYMNSSAALKAFCGERGGIVCTSSNAATVLEWAFERGQRVLFFPDQHLGRNTAKAMGVPVERIPLWNPRKPLGGSSETMLRDARVILWHGFCSVHKRFTVGQIEQARAAFPGVRVIVHPECPMEVVDAADESGSTDYIVKAIQAAPAGSTLAIGTEINLVQRLAAQFPQHTVFCLDSVVCPCSTMYRIHPGYLAWVLESLVRGEVVNQVSVPAAVAGPARAALERMLAARPDTTMAA

SEQ ID NO: 50779 - DNA, 1059 bp, Desulfotalea psychrophila LSv54
  CDS (1)..(1059): transl_table=11
atggccacaaaaaaacaagctactactgcttcactgactcttccctcatttgacgttccatcccatcccctcaggacacccatgactcctgaggcaaagaatgccctaaaggatgagataaagaccctgctcaaagagcaaaacggggtcttggtcgctcattactataccgatggtgacatacaggatcttgccgaagagacaggcggttgtgttgccgactcactggagatggcccgttttggcaccgaacaccctgccgacaccctggtggttgccggagtgaagttcatgggtgagaccgcaaagattctcaacaatgagaagcgagtccttatgcctgatctggctgcaacctgctcattagacgaaggttgccccagcgatattttctctgatttttgcgatcaataccctgatcacaccgtggttgtttatgccaacaccagtgctgccgtaaaagcccgggctgactgggtcgttacctctggaattgccctctccatcattgaccatcttgctaaaaagggtgaaaagatcctttggggccccgaccgtcatctcggtggctacgttcagcgcctcaccggagctgagatgatcttctggcccggttcctgcgttgtccacgaagagtttaaggcagcagcccttgaattgctccgagccaaacatcccgaagcagcgattcttgttcatccagaatcacctgcctcgattgtggctcaggccgatgtgattggctccaccaccgcccttattaaagccgtgcagagtatgccaaacaaggaatttattgtagccacagacatgggtatcttcaacaagatgcgccagttggctcctgataaggttcttattgaagcacccaccgccggcgaaggcgccacctgccacagctgtgcaaactgcccgtggatgggcatgaactctctagagaaaattgcccatagtctgcgtacaggtgcaggagagatcctcgtctctccggagctggccgtcaaggccgtactcccgattcgccgcatgctagactttgccaagaccctgaagaaatag

SEQ ID NO: 50780 - protein, 352 aa, Desulfotalea psychrophila LSv54
MATKKQATTASLTLPSFDVPSHPLRTPMTPEAKNALKDEIKTLLKEQNGVLVAHYYTDGDIQDLAEETGGCVADSLEMARFGTEHPADTLVVAGVKFMGETAKILNNEKRVLMPDLAATCSLDEGCPSDIFSDFCDQYPDHTVVVYANTSAAVKARADWVVTSGIALSIIDHLAKKGEKILWGPDRHLGGYVQRLTGAEMIFWPGSCVVHEEFKAAALELLRAKHPEAAILVHPESPASIVAQADVIGSTTALIKAVQSMPNKEFIVATDMGIFNKMRQLAPDKVLIEAPTAGEGATCHSCANCPWMGMNSLEKIAHSLRTGAGEILVSPELAVKAVLPIRRMLDFAKTLKK

SEQ ID NO: 50781 - DNA, 957 bp, Anaplasma marginale str. St. Maries
  CDS (1)..(957): transl_table=11
gtgtctagcgtatttgccgtcatgcttagcgactgtcgcgatttgtcacgcgaaatcagggacattgcgaagaaaaaaaacgcgatcattctggcccactactatcaggatgatgaagtccaagaaaccgcagattttgttggggattcccttgagctgtcaaagagggcagcatcaacagatgcggaggtcatcgtcttttgcggcgtgttcttcatggcagaagttgccaaaattctaaatcccggtaaaagggttataatgccagacctcaatgccggatgctcgttggcagaatcttgtagaggggaagactttaaaaatttccggcgtgcacatgaggaccactttgcaattacgtatatcaattcttctgcggaagtgaaatgctactcagacataatatgcacctcttccaacgccgttaagataattaacagcatacccaaagaccaaaaagtattgttcgctcctgacaggtttttgggagaatttctcaaacagaaaacgggcagggatatgctcttgtggcatggaagttgtgttgtgcacgaaaacttttccgaagccagccttgttgacttgtctgtgaggcataaagacgcccatattattgcacatccggaatgccctggtaatttgctaaaatatgcgcactgcataggctccaccacacacctattgcgctacgctgccgctcatgctgggtctaagttcattgtactgactgaagaggggttggtgtaccaaatgagaaaagcgtccccggggagcgagttttatgtagttaattctgccaagggctgtgaatcatgcagcaagtgcccatacatgcggctaaatactttagaaaagctctacaagtgtattatggatgagcaacccgaagtgacgatgagtgaggaaataatctccggcgcaaggaaaccgatcgaagcgatgatgcgcgcatcgtaa

SEQ ID NO: 50782 - protein, 318 aa, Anaplasma marginale str. St. Maries
MSSVFAVMLSDCRDLSREIRDIAKKKNAIILAHYYQDDEVQETADFVGDSLELSKRAASTDAEVIVFCGVFFMAEVAKILNPGKRVIMPDLNAGCSLAESCRGEDFKNFRRAHEDHFAITYINSSAEVKCYSDIICTSSNAVKIINSIPKDQKVLFAPDRFLGEFLKQKTGRDMLLWHGSCVVHENFSEASLVDLSVRHKDAHIIAHPECPGNLLKYAHCIGSTTHLLRYAAAHAGSKFIVLTEEGLVYQMRKASPGSEFYVVNSAKGCESCSKCPYMRLNTLEKLYKCIMDEQPEVTMSEEIISGARKPIEAMMRAS

SEQ ID NO: 50783 - DNA, 1053 bp, Silicibacter pomeroyi DSS-3
  CDS (1)..(1053): transl_table=11
gtgttcgaccttcccgctatgcgcgccaacctcgccgacaagtacgaccttgccccttcgcccacgcttgccgccgagatgagcgccgaatacgcccgcatggcgcgggtggtcacccccgccgactgggccattcacgcgccctatgtccgcgcgatcaaccagctcaaggccgagcgtggcgccgttatcctcggtcataactacatgacgccggaaatctatcacggcatttccgatttcgtcggcgacagcctgcaactggcgatcgaggccacccgcaccgacgccgatgtgatcgtgcaatgcggcgtgcatttcatggccgagacctcaaagatcctcagcccggacaagaccgtgctgatgccggatatggaagcgggctgttcgctggccgaaagcatcaccgccgagggcatcgcccagatgcgggcgaaatatcccggcgcgccggtggtctcttatgtgaacaccaccgccgaggtaaaggccgcctcggatatctgctgcacctcctccaacgccgcccagattgtcgccgccctgcccgaacacacgatcatcatgacccccgaccagtatctggcccagaacgtggccgcccaggtgccacaaaagaacgtggtctggtgggagggctcgtgcatcgtgcacgagcaatacagtgcccgcgacctgcgcgatttccgtgaatggaacccgggcacccggctgatcgcccaccccgaatgcccccccgatgtggtggccgaggccgatttctcgggctcgaccagcggcatcatcgactatgtcacgcgggagaagccacaaaaggcgctgctgatcaccgaatgttcgatggcctcgaacatcgccgatgccctgcccgaggtcgatttcgtcggcccctgcaacatgtgcccctatatgaagaagatcacgctggaaaaggtactctatgcgctcgacaccatgaccggtcaggtcgaggtagaccccgaggtcgcccggcaggcgcggctggcggtgcagcggatgatcgacctcagccggcaactgggggtctga

SEQ ID NO: 50784 - protein, 350 aa, Silicibacter pomeroyi DSS-3
MFDLPAMRANLADKYDLAPSPTLAAEMSAEYARMARVVTPADWAIHAPYVRAINQLKAERGAVILGHNYMTPEIYHGISDFVGDSLQLAIEATRTDADVIVQCGVHFMAETSKILSPDKTVLMPDMEAGCSLAESITAEGIAQMRAKYPGAPVVSYVNTTAEVKAASDICCTSSNAAQIVAALPEHTIIMTPDQYLAQNVAAQVPQKNVVWWEGSCIVHEQYSARDLRDFREWNPGTRLIAHPECPPDVVAEADFSGSTSGIIDYVTREKPQKALLITECSMASNIADALPEVDFVGPCNMCPYMKKITLEKVLYALDTMTGQVEVDPEVARQARLAVQRMIDLSRQLGV

SEQ ID NO: 50785 - DNA, 945 bp, Ehrlichia ruminantium str. Welgevonden
  CDS (1)..(945): transl_table=11
atgaaagaacttgatgttacacaactatctaatgagatacgtcgtttagctgagtacagcaatgcagtaattcttgctcattattatcaagatccagaaatacaagacatagctgattttattggtgattctttagagttatctagaaaagctgaaagtacaacagcagatgttattgtattttgtggtgtatattttatggctgaggttgctaaaattattaatcctctaaaaaaagttttgttaccagatttaagagctgggtgttctttagctgattcttgtgatgctaaaagcttcaaaaaatttcgtgagttacataaagactgtgtttcaattacatatataaattcttctgcagaggtaaaagcatattctgatataatttgtacttcctcaagtgctgaaaaaattataaagcaaataccggaagataaaaaaatcctttttgctccagataaatttttaggaagttttcttgagaagaaaactaataggaaatttattttatggccaggtacatgtattgtgcatgagagtttttctgagaaggaattgataaatataatgactagacatagtaaagcatatgttttagctcatcctgaatgtccagatcatttattaagacatgctcattttattggatctacaactcaattactaaaattttctgctgaaagacctaattcggaatttatcatattaactgaagaaggaatcattcaccagatgaaaaagatgtcttatgggagtactttctatacagttggtacttcttatgaagtatgtagttcatgtaataagtgtccacatatgagattgaatactttagaaaagttgtatttgtgtttaaaaaatggttatcctgaagttaatttagacaccaaaattagtgttatggctaaggaatcattagatgctatgttgagaatgacttgttag

SEQ ID NO: 50786 - protein, 314 aa, Ehrlichia ruminantium str. Welgevonden
MKELDVTQLSNEIRRLAEYSNAVILAHYYQDPEIQDIADFIGDSLELSRKAESTTADVIVFCGVYFMAEVAKIINPLKKVLLPDLRAGCSLADSCDAKSFKKFRELHKDCVSITYINSSAEVKAYSDIICTSSSAEKIIKQIPEDKKILFAPDKFLGSFLEKKTNRKFILWPGTCIVHESFSEKELINIMTRHSKAYVLAHPECPDHLLRHAHFIGSTTQLLKFSAERPNSEFIILTEEGIIHQMKKMSYGSTFYTVGTSYEVCSSCNKCPHMRLNTLEKLYLCLKNGYPEVNLDTKISVMAKESLDAMLRMTC

SEQ ID NO: 50787 - DNA, 1107 bp, Pseudomonas fluorescens Pf-5
  CDS (1)..(1107): transl_table=11
gtggtatactcgactttcgcgcctcaagcgcctgcaggtcttgcgaacatgacgcaaatttctgaacgccttctggttcaagcccacctcgacgccaagcagcccaaacccttgagcgctgcgcaagaggcccatctgcgtgccgccatcgctgccgagctcaaggctcaggatgcggtgctggttgcacacttctactgtgatccggtgattcaggccctggccgaagaaaccggtggctgcgtgtccgactccctggaaatggcccgcttcggcaatgcccatccggccaagaccgtgctggttgccggggtccgcttcatgggtgagacggcgaagattctcaaccctgaaaaacgggtgttgatgccgaccctggaagccacctgctcccttgaccttggctgcccggtggaagagttctcggccttctgcgaccagcatcccgagcgcaccgtggtggtctatgccaacacgtcggcggcggtcaaagcccgtgccgactgggtggtgacgtccagctgcgccctggaaatcgtcgaaagcctgatggataacggcgagaagatcatctggggccccgacaagcacctgggcacctacatccagcgccagaccggtgccgacatgctgctctgggacggtgcctgcatcgttcacgaggagttcaagtccaagcagctggaaggcatgaaggcgctgtatccggatgcggccattctggtgcacccggagtcccccagctcggtgatcgaactggccgatgcggtgggctccaccagtcagctgattgctgccgcgcagcgcctgccgaacaagaccttcatcgtcgccaccgaccgcggcatcttctacaagatgcagcagctgtgcccggacaaggtgttcatcgaggcgccgacggccggcaatggtgcggcgtgccgcagttgtgcccattgcccgtggatggccatgaataccctggagcgtaccctgcagtgcctgaaggatggcagcaacgagatcagcgtcgacccggcgctgatccccaatgcgctccgccctctgaagcgcatgctggatttcacccaggccgcgcggatgaaactggcgggcaacgcctga

SEQ ID NO: 50788 - protein, 368 aa, Pseudomonas fluorescens Pf-5
MVYSTFAPQAPAGLANMTQISERLLVQAHLDAKQPKPLSAAQEAHLRAAIAAELKAQDAVLVAHFYCDPVIQALAEETGGCVSDSLEMARFGNAHPAKTVLVAGVRFMGETAKILNPEKRVLMPTLEATCSLDLGCPVEEFSAFCDQHPERTVVVYANTSAAVKARADWVVTSSCALEIVESLMDNGEKIIWGPDKHLGTYIQRQTGADMLLWDGACIVHEEFKSKQLEGMKALYPDAAILVHPESPSSVIELADAVGSTSQLIAAAQRLPNKTFIVATDRGIFYKMQQLCPDKVFIEAPTAGNGAACRSCAHCPWMAMNTLERTLQCLKDGSNEISVDPALIPNALRPLKRMLDFTQAARMKLAGNA

SEQ ID NO: 50789 - DNA, 1140 bp, Psychrobacter arcticus 273-4
  CDS (1)..(1140): transl_table=11
atgaaaaattatccgtatgacgcgccgattatgagtactgacaatcgcattgccactcagatgaatatcgaatatgccaaagcaaaaatgcctgccgacttaccgcgtgcagaacgactagtggttgaagagagtattaaacagctattgaaggataacaatgccgtactagtcgcgcactactacgtcgacccttttattcaggatttggcattggctaccggcggctgtgttggtgattcgcttgagatggcacgctttgggcaggcgcatagtgcacagacactggtagtcgctggggtgcgctttatgggcgagtcggcaaagatactcagtatggaaaagaccgtcctgatgccagacttggaagcggagtgttcgcttgatttgggctgtccggccgatgagttttctgccttttgtgatgcgcatcctgagcgtacggtggtggtttatgccaataccagtgcagcggtgaaagcacgagctgattgggtagttacctcctcagtcggtatcgatatcgttcgtcatctacatgcgcaaggcgaacctattatttggggtccggatagacacctgggtaaatacatcgctcgtgagactggtgcagatatgctgctttggcaaggctcatgtatggtacataatgagtttaaagcgactgagcttgaacaactgaaagcggaatatcctaccgcaaaagtattggtgcatccagaatctccagacagtgtcgttgcgcttgccgatgtggttggctcgaccagtaaactattacaatctacctatgagatggatgccgatacctttatcgtcgcaactgatttgggtatcttgcacgaaatgcaaaagcgctcaccaaacaaacgctttttggccgcaccgactgcgggcgaaagtgccagctgcaagagctgtgctttttgtccatggatggcgatgaatgctctacaaggtatcgagcaatgcttgattaataatagcggtgaagtgttgatgacgcctgagctagcagccgcagcgagaaaaccattacaacgtatgcttgattttgccgaatcgcaaaaacagcgggtagcggcaagtggtgatatcgtcaaagaccgtcagctttttgcaaatgttggggcagcataa

SEQ ID NO: 50790 - protein, 379 aa, Psychrobacter arcticus 273-4
MKNYPYDAPIMSTDNRIATQMNIEYAKAKMPADLPRAERLVVEESIKQLLKDNNAVLVAHYYVDPFIQDLALATGGCVGDSLEMARFGQAHSAQTLVVAGVRFMGESAKILSMEKTVLMPDLEAECSLDLGCPADEFSAFCDAHPERTVVVYANTSAAVKARADWVVTSSVGIDIVRHLHAQGEPIIWGPDRHLGKYIARETGADMLLWQGSCMVHNEFKATELEQLKAEYPTAKVLVHPESPDSVVALADVVGSTSKLLQSTYEMDADTFIVATDLGILHEMQKRSPNKRFLAAPTAGESASCKSCAFCPWMAMNALQGIEQCLINNSGEVLMTPELAAAARKPLQRMLDFAESQKQRVAASGDIVKDRQLFANVGAA

SEQ ID NO: 50791 - DNA, 1059 bp, Colwellia psychrerythraea 34H
  CDS (1)..(1059): transl_table=11
atgagtataagtaatactgcggtagattttgattttcaatttccagccaaaccaaaacctttagccaatgatgaaaaggcacaatacatagagaaaattaaactgctcttaattgaaaagaatgccgtattggttgcgcattattatactgaccctgagattcaagctcttgcggaagaaaccggtggttgtgtcgctgattctctagagatggctcgttttggtaaacagcactcggcagagaccttaattgttgctggtgtgaagtttatgggcgaaacggctaaaattttaacaccagaaaaaactgttttaatgcctgagcttgaagcgacctgttcgttagacttaggttgtcctattgaagagttttctgctttttgtgatgagcatccagaccatacggttgttgtttatgcaaatacctcagcagcagttaaagctagggctgattgggtggtaacatcgagtattgcactagaaatagttgatatgcttgagagtgaaggtaagcctattctatgggggccagatcgtcacttgggttcatacatcgaaaaagaaacaggtgccaaaatgctgatgtggcagggcgcttgtatcgttcatgatgaattcaaagcaaatgcacttcgtgatctcaagctacaataccccgaggcagcagtacttgttcacccagagtcacctgctaacgttgttgaaatggccgatgctgtaggctcaaccagccagctaattaaagcaagccaagacatgcctaatacccactttatcgtcgcaacggataaaggtatcttttataagatggaacaagctaaccctggaaagacctttgtagccgctcctacaggcggtaacggtgcaacctgtagaagttgcgctagttgcccttggatggcaatgaatggtcttaaatctattcatgatgcgttagtcagccctgttggtaaagaaatcaacgttgatgaaaatctagctgcacaggccttaattcctttaaatagaatgcttaactttgccgcagaaaataaattaaaagtaaaaggtaatgcctag

SEQ ID NO: 50792 - protein, 352 aa, Colwellia psychrerythraea 34H
MSISNTAVDFDFQFPAKPKPLANDEKAQYIEKIKLLLIEKNAVLVAHYYTDPEIQALAEETGGCVADSLEMARFGKQHSAETLIVAGVKFMGETAKILTPEKTVLMPELEATCSLDLGCPIEEFSAFCDEHPDHTVVVYANTSAAVKARADWVVTSSIALEIVDMLESEGKPILWGPDRHLGSYIEKETGAKMLMWQGACIVHDEFKANALRDLKLQYPEAAVLVHPESPANVVEMADAVGSTSQLIKASQDMPNTHFIVATDKGIFYKMEQANPGKTFVAAPTGGNGATCRSCASCPWMAMNGLKSIHDALVSPVGKEINVDENLAAQALIPLNRMLNFAAENKLKVKGNA

SEQ ID NO: 50793 - DNA, 1149 bp, Pseudomonas syringae pv. phaseolicola 1448A
  CDS (1)..(1149): transl_table=11
ttggttgataagggtttccggcttttttattgcctgtatttcgggtgtaaacttgcctttcgcgctctagcgccttcaggtcccgcgaacatgacacagatctccgaacgtttcctggtgcaggctcatctcgatgcgaagcagcccaaagcgctgagcccggcagagcaggcgcgttaccgagccgacattgctgccgaactcaagaagcaggatgccgtgctggtcgctcactattattgcgacccggtcattcaggccctggccgatgaaaccggcggttgcgtggccgactctctggaaatggcccgcttcagcaataaccacgctgccagtactgtattggtcgcaggcgtgcgtttcatgggcgaaaccgcgaagattctcaacccggaaaaacgtgtgttcatgcccacgctcgaagccacctgttcgcttgacgtaggatgcccggtcgatgagttttccgcgttctgcgatcagcacccggagcgtaccgtggtggtgtatgccaacacctctgcagcggtcaaagcccgtgcggactgggtagtgacctctggctgtgcgctggagatcgtcgaaagcctgatggacaacggcgagaaaatcatctgggctccagacaagcatctgggtcgctatatccagcgtgaaaccggtgccgatatgttgctgtgggacggtgcctgcattgtccacgaagaattcaaatccaagcagcttgaagacatgaaagccttgtatcccgaggctgcgattctggttcacccggaatcgccggaagcagtgatcgagctggctgatgtggtcggctccaccagtcagatgattgccgccgcgcagcgcttgcccaacaagacgttcattgtggccaccgaccggggcatcttctacaagatgcagcagctgtgcccggacaagatcttcatcgaggcgcctacggccggtaacggcgctgcatgccgaagctgtgcacattgtccgtggatggcgatgaatacgcttgagcgcaccttgcagtgcctgcgcgagggtagcaatgagatattcgttgacccggctctgatccccaacgccgtacgtccgttgcagcgcatgctggacttcactcaggcggcgcgcttgcgacaagcgggtaatgcctga

SEQ ID NO: 50794 - protein, 382 aa, Pseudomonas syringae pv. phaseolicola 1448A
MVDKGFRLFYCLYFGCKLAFRALAPSGPANMTQISERFLVQAHLDAKQPKALSPAEQARYRADIAAELKKQDAVLVAHYYCDPVIQALADETGGCVADSLEMARFSNNHAASTVLVAGVRFMGETAKILNPEKRVFMPTLEATCSLDVGCPVDEFSAFCDQHPERTVVVYANTSAAVKARADWVVTSGCALEIVESLMDNGEKIIWAPDKHLGRYIQRETGADMLLWDGACIVHEEFKSKQLEDMKALYPEAAILVHPESPEAVIELADVVGSTSQMIAAAQRLPNKTFIVATDRGIFYKMQQLCPDKIFIEAPTAGNGAACRSCAHCPWMAMNTLERTLQCLREGSNEIFVDPALIPNAVRPLQRMLDFTQAARLRQAGNA

SEQ ID NO: 50795 - DNA, 999 bp, Thermobifida fusca YX
  CDS (1)..(999): transl_table=11
atggcaacggtcaccacctccgcggacacgatgacccgacaggagtgggccgccgaggtccgccgcctagcgaaggaacgcgacgcggtcatcctcgcgcacaactaccagcgccccgaaatccaggacgtcgccgactacaccggtgactccctggccctctcccgcctggcagccaccgttgaggcgagcaccatcgttttctgcggcgtgcacttcatggcggaaaccgccaaactgctctccccggagaaaaccgtcctgctccccgaccccgcggccgggtgctccctggcggacacgatcaccgccgaagacgtccgggcgtggcgcgccgagcaccccgacgccgtcgcggtcgcctacgtcaacaccaccgccgcggtcaaagccgaggtcgacatctgctgcacctcctccaacgcggctgacgtcatccggtccatccccgaagaccgggagatcctcttcctgcccgaccagttcctcggcgcccacgtcaaacgggtcaccggccgggacaacatccacgtgtggatgggcgaatgccacgtgcacgccgggatcgacggccacaccctgcggcagcgggtcgaagccgagcccgacgccgaactctacgtgcaccccgaatgcggctgcgcgacctcggcgctctacctggcttcctccggcatggtgcctgaagagcgggtcaaagtgctctccaccggaggcatgctgcgcgccgctgagaagaccaccgcacgcaaggtcctcatcgcgaccgagaccggcatgctgcaccagttgcgcgccgccaacccgtcgaccgtgttcgaaccggtgaactcgcgcgccgagtgccactacatgaagatgatcaccgcggaaaagctgttggcgtccctgcgggacgggaccacggaaatcaccgttcccgaggatgtggcagcccgggcccgcgcctcggtggagcgcatgatcgcgatcggttcaccgtcgcgcggcggcgaataa

SEQ ID NO: 50796 - protein, 332 aa, Thermobifida fusca YX
MATVTTSADTMTRQEWAAEVRRLAKERDAVILAHNYQRPEIQDVADYTGDSLALSRLAATVEASTIVFCGVHFMAETAKLLSPEKTVLLPDPAAGCSLADTITAEDVRAWRAEHPDAVAVAYVNTTAAVKAEVDICCTSSNAADVIRSIPEDREILFLPDQFLGAHVKRVTGRDNIHVWMGECHVHAGIDGHTLRQRVEAEPDAELYVHPECGCATSALYLASSGMVPEERVKVLSTGGMLRAAEKTTARKVLIATETGMLHQLRAANPSTVFEPVNSRAECHYMKMITAEKLLASLRDGTTEITVPEDVAARARASVERMIAIGSPSRGGE

SEQ ID NO: 50797 - DNA, 1155 bp, Ralstonia eutropha JMP134
  CDS (1)..(1155): transl_table=11
atgaccccacaatcgatcaagaccgtcgagttcgaaaagccggacctgacggataccgaaagccccgccggcggtagctgcgtggcccacgcctgggccaaggtgccccccgtgctgacgccggacgaacgccaggcgctcaaggcgcgcatcaagcggttgctgaaggaacgcaatgccgtgctggttgcccactattacgtggacgccgacctgcaggacctcgccgaagaaaccggcggctgcgtctccgactcgctcgaaatggcccgcttcggccgtgaccattcggcccagaccctggtcgtggccggcgtgcgcttcatgggcgaaaccgccaagatcctgagtccggaaaagaccatcctgatgccggacctggacgcgacctgctcgctcgacctcggctgccccgccgacgagtttgcggcgttctgtgacgcgcatccggatcgcaccgtggtcgtgtatgcgaacaccagcgcggcggtgaaggcgcgcgcggactggatggtgacgtccagcattggcctgaagatcgtgcagcacctgcatgcgcgcggcgagaagattctgtgggcgcccgacaagcacctcggcagctatatccagaaggagaccggcgccgacatgctgctgtggcagggctcgtgcctggtccatgacgagttcaagggcatcgaactcgacctgctgcgccgcgaatttccgaaggccaagattctcgtgcatccggagtcgccggccaatgtggtcgagcaggccgatgtggtgggctccacgtcgcaactcatcgcggccgcgcaggaactggacgcgaccgagttcatcgtggcgaccgacaacggcatcctgcacaagatgcggatggcggcaccgggcaagcatttcatcgaagctccgacggcgggcaacagcgctacctgcaagagctgcgcacattgcccgtggatggcgatgaatgcgctgtcgaacctggccgaagtgctcgagaccggccgcaacgagatccatgtggatccggccaccggccgacaggcggtgacctgcatcaatcgcatgctcgacttcgctgcgcagcagaaggccaatgtccggccggcggctgaccttgcgaaggaacaggccttgttccagggaatcggtccggcatga

SEQ ID NO: 50798 - protein, 384 aa, Ralstonia eutropha JMP134
MTPQSIKTVEFEKPDLTDTESPAGGSCVAHAWAKVPPVLTPDERQALKARIKRLLKERNAVLVAHYYVDADLQDLAEETGGCVSDSLEMARFGRDHSAQTLVVAGVRFMGETAKILSPEKTILMPDLDATCSLDLGCPADEFAAFCDAHPDRTVVVYANTSAAVKARADWMVTSSIGLKIVQHLHARGEKILWAPDKHLGSYIQKETGADMLLWQGSCLVHDEFKGIELDLLRREFPKAKILVHPESPANVVEQADVVGSTSQLIAAAQELDATEFIVATDNGILHKMRMAAPGKHFIEAPTAGNSATCKSCAHCPWMAMNALSNLAEVLETGRNEIHVDPATGRQAVTCINRMLDFAAQQKANVRPAADLAKEQALFQGIGPA

SEQ ID NO: 50799 - DNA, 909 bp, Dehalococcoides sp. CBDB1
  CDS (1)..(909): transl_table=11
atgtatagagagcttatttcgcacaagatagcggaactgaaaaaagagcgtaaggccattatactggcccacaactaccagcttggagaaattcaggacgcagcggattttgtgggtgattcgctggaactggcccgtaaggcggcaaaggttgatgccgaagtaatagtattttgcggagttcactttatggcggaaacagcggccattctcagccccgaaaagatagtgcttgcacctgaaccaagggccggttgccctatggcggatatgataagcggggcggaactcagggaattcaaatcccgtcatcccggactgccggtggtatgttatgttaactctacagctgaggtcaaggccgagtcggatatttgctgtacttcggctaatgccgtcaaagtggtggaaagcctgaaatcagatacagttttgttcgtacctgaccagtatctgggggcttttgtcaaagaacgcaccagtaaaaaaataataagctggccgggctattgccccagtcatgcacgcataaaaccagaagatattgtaaacctgaaaaaacactaccctgccgccaaagtaatagtccaccctgaaagccgccctgaggtaactgctctggcagacgaggttttatccaccgggcagatggttagctatgctgcccgggcggatgtcaaagagcttattgtaggtactgaaataggcatgatctaccgcctgcgcaaagaaaacccggacaagctttttataccggtatccgaacaggctgtgtgtgccaatatgaaaatgaccaccctgcccaaacttcttgccagtctggaaaatatgcaggcggtagtaagcgtaccggaagaaattcgcgttaaggcagtgggtgcggtggaacgaatgctgagggtggtataa

SEQ ID NO: 50800 - protein, 302 aa, Dehalococcoides sp. CBDB1
MYRELISHKIAELKKERKAIILAHNYQLGEIQDAADFVGDSLELARKAAKVDAEVIVFCGVHFMAETAAILSPEKIVLAPEPRAGCPMADMISGAELREFKSRHPGLPVVCYVNSTAEVKAESDICCTSANAVKVVESLKSDTVLFVPDQYLGAFVKERTSKKIISWPGYCPSHARIKPEDIVNLKKHYPAAKVIVHPESRPEVTALADEVLSTGQMVSYAARADVKELIVGTEIGMIYRLRKENPDKLFIPVSEQAVCANMKMTTLPKLLASLENMQAVVSVPEEIRVKAVGAVERMLRVV

SEQ ID NO: 50801 - DNA, 1032 bp, Thiobacillus denitrificans ATCC 25259
  CDS (1)..(1032): transl_table=11
atggtggaggaagtgctagacgccgaagagcgcgcctcgctcaagacccgcatcaagacgctgatgaaggagcaggatgcggtgctcgtcgcccactactacacctcggccgacctccaggatctggccgaggaaaccggcggctgcgtctccgattcgctcgagatggcgcgcttcggccacgcccacccggcgcgcacgctgaccgtcgcgggcgtgaaattcatgggcgagacggcgaagatcctcaaccccgagaagcgcgtcctgatgcccgatctcggcgccgaatgctcgctcgacctcgcctgtccggccgacgaattcacggccttctgcgacgcccaccccgatcgtctctcggtcgtctacgccaacaccagcgccgaagtcaaagcgcgtgccgactgggtcgtgacctctggtatcgcggtcaagatcgtgaaatacctgcaccagcagggccacaaactcttgtgggcgcccgaccgccacctcggcgaatacgtgcgtcgcgtcagcggcgcggacatgatcctgtggcagggctcatgcgtcgtgcacgaggccttcaaagccgaggccctcaaatcgctgcacgcggcgcacccggcggccgcggtactcgtgcatccggagtcgcccgagtcggtgatcgcgctggccgacatcgtcggctcgaccacgcagttgatcgaagcggtgcgcacgctacccaaccccgaattcatcgtcgcgaccgacaacggcatctttcacaagatgcacgcggccgcgcccggaaagacgctgatcgaggcgcccacggccggcgaaggcgcgacctgcgtctcgtgcgcgcactgcccgtggatggcgatgaacggcctgcgaaaactcgccgccgtgctcgaatccgcggcagtcggcaagcgcagcgccaacgagatccacgtcgaagaatcggtcggccagcgcgcgcggcgctcgatccagaaaatgctggacttcgccgcggccgaaaaagccggccgcatccagctcggcgactga

SEQ ID NO: 50802 - protein, 343 aa, Thiobacillus denitrificans ATCC 25259
MVEEVLDAEERASLKTRIKTLMKEQDAVLVAHYYTSADLQDLAEETGGCVSDSLEMARFGHAHPARTLTVAGVKFMGETAKILNPEKRVLMPDLGAECSLDLACPADEFTAFCDAHPDRLSVVYANTSAEVKARADWVVTSGIAVKIVKYLHQQGHKLLWAPDRHLGEYVRRVSGADMILWQGSCVVHEAFKAEALKSLHAAHPAAAVLVHPESPESVIALADIVGSTTQLIEAVRTLPNPEFIVATDNGIFHKMHAAAPGKTLIEAPTAGEGATCVSCAHCPWMAMNGLRKLAAVLESAAVGKRSANEIHVEESVGQRARRSIQKMLDFAAAEKAGRIQLGD

SEQ ID NO: 50803 - DNA, 975 bp, Anabaena variabilis ATCC 29413
  CDS (1)..(975): transl_table=11
gtgtttaccactgcctttgctcaacgggaacaaactcaaccaggtggactaccactagatttatttgctgctattgatagtctgaaaaaagaactcaatgcggtgattttggcacattattatcaagagccggatattcaagatattgcagactttataggcgattcattacaattagctagagccgcagccaagaccaatgcagatgtgattgtctttgctggcgttcattttatggcagagacagccaagattctcaatcctgagaaattggtactgttaccagatttaaatgcgggttgttctctagcagatagttgtccaccaaaagaatttgccgcttttaaagcagcacatcccgatcatttagtagtttcctatattaactgctctgctgaaattaaagctatgagcgatattatctgcacgagttccaacgccgtgaagattgtgcagcaaatccctaaagaacagccgattatttttgctcctgacagaaatttggggcgttatgtgatggaacagacgggacgggatttagtactgtggcagggtagctgtttggtacatgaaaccttctctgagaagaagattgtacagttaaaagttgctcatccccaagccgaggcgatcgctcacccagaatgtgaaagcagtgtcttgcgtcacgctagttttatcggctctacagcagctttactccaatactgccaaacaagccccagccaagaatttattgtggcgactgagccaggaattatccaccaaatgcagaaactagcacctaacaagcattttattcctgcgccgcccataaataattgtgcttgcaatgagtgtccattcatgcggttaaacaccctagaaaaactctactgggcgatgaaaaatcggactccggaaatcaccatgtcagaggatatccgtattgcggctttgcgaccaatgcaaagaatgttagagatgagtaattag

SEQ ID NO: 50804 - protein, 324 aa, Anabaena variabilis ATCC 29413
MFTTAFAQREQTQPGGLPLDLFAAIDSLKKELNAVILAHYYQEPDIQDIADFIGDSLQLARAAAKTNADVIVFAGVHFMAETAKILNPEKLVLLPDLNAGCSLADSCPPKEFAAFKAAHPDHLVVSYINCSAEIKAMSDIICTSSNAVKIVQQIPKEQPIIFAPDRNLGRYVMEQTGRDLVLWQGSCLVHETFSEKKIVQLKVAHPQAEAIAHPECESSVLRHASFIGSTAALLQYCQTSPSQEFIVATEPGIIHQMQKLAPNKHFIPAPPINNCACNECPFMRLNTLEKLYWAMKNRTPEITMSEDIRIAALRPMQRMLEMSN

SEQ ID NO: 50805 - DNA, 921 bp, Carboxydothermus hydrogenoformans Z-2901
  CDS (1)..(921): transl_table=11
atgtttgatgaaaaaacccaaaagattatggatgaggtggtgagacttaagaaagaaaaaaatgctattatccttgcccacctctatcaacgtcccgaagttcaggaagtagccgattacgttggtgattctctggggcttgcccgaactgcagctaataccgatgctgaagttattgtttttgccggtgttcattttatggctgaaagtgccaaaatcctttcaccggataaaatcgttttgcttccggaaattgaagcgggatgtcctttagccgataccattaccgcggaaagtttaagaaaaaagaaagctgaacatcccggggctattgtggttacctatgttaattcttcagccgaagttaaggctgaaagtgacattatttgtacttcggcaaatgcggtaaaagtcatagaaagcattcctccggagagggaaattatttttactccggaccgcaatttaggtgattacgtggctaagaaaacggggcgcaagttaatattgtgggacggctattgcaacacccatcaaaggcttactcccgatgatattcggcaggcaaaagccgagcatcctaatgctaaagtattggttcatcccgagtgccgcccggaggtggtggctttagccgatggtgtatttagcactaccggtattataaactacgtggtaaatgaccctggggatgaatttattatcggaacggaagcgggtattatgcatcagttaacaaaaaaggctcctcataaaaagtgttatcttgcttcaaagaaactaatttgtcctaatatgaagcttactactatcgaaaaagtaaaattagccttggaaactctggagccgcaaattgaggttgatccggaaattgctaaaaaagctcttcaggctttagagagaatgttggctattggttag

SEQ ID NO: 50806 - protein, 306 aa, Carboxydothermus hydrogenoformans Z-2901
MFDEKTQKIMDEVVRLKKEKNAIILAHLYQRPEVQEVADYVGDSLGLARTAANTDAEVIVFAGVHFMAESAKILSPDKIVLLPEIEAGCPLADTITAESLRKKKAEHPGAIVVTYVNSSAEVKAESDIICTSANAVKVIESIPPEREIIFTPDRNLGDYVAKKTGRKLILWDGYCNTHQRLTPDDIRQAKAEHPNAKVLVHPECRPEVVALADGVFSTTGIINYVVNDPGDEFIIGTEAGIMHQLTKKAPHKKCYLASKKLICPNMKLTTIEKVKLALETLEPQIEVDPEIAKKALQALERMLAIG

SEQ ID NO: 50807 - DNA, 933 bp, Synechococcus sp. CC9605
  CDS (1)..(933): transl_table=11
atgagcgctgacaccgcccttgttgcggcgatcaaccggctccgccaggaccgcaatgccgtgatcctggcgcactactaccaggaaccggagatacaggacatcgccgatttcgttggtgactccctggagctgtcgcgcaaggccgccagcacggatgccgatgtgatcgtgttctgcggcgtgcacttcatggcggagaccgccaagattctcagcccggaaaagacggtggtgctgccggatctagaggccggttgctctctggcggacgactgccccgctgatgagttcgcccgctttcgtgcagaacaccccgaccactttgtggtgagttacatcaactgcacggcagcagtgaaggcgcaaagcgatctgatctgcaccagcagcaatgcggttgatctggtgaaccaactgcctgccgatcagcccgttctgttcgccccggatcagaacctggggcgctgggttcagcaacagagcggtcgcgagctgaccctctggccaggacgctgcatcgttcatgagaccttcagcgaagaggccgttctggccctcaagcacgaacatcccacggctgaagtgatcgcccaccccgagtgccagcagaacctgctggacctggcggatttcattggatccaccagcaagctgttgaactacgccgaagagagctcctgcgaaagcttcatcgttctgacggaaccagggatcctccatcagatgcagcaacgggttccggagaaaaccctgctcgacgtgccagggatcgatggatgcagctgcaatgcctgcccctacatgcgtctcaacaccctggaaaaactgaaggcatgcctggagaccctcacgcctgcgatcgagatggatgaaccgatgcgtctgaaggccatgaaacccatgcagcgcatgcttgagatgagccggtga

SEQ ID NO: 50808 - protein, 310 aa, Synechococcus sp. CC9605
MSADTALVAAINRLRQDRNAVILAHYYQEPEIQDIADFVGDSLELSRKAASTDADVIVFCGVHFMAETAKILSPEKTVVLPDLEAGCSLADDCPADEFARFRAEHPDHFVVSYINCTAAVKAQSDLICTSSNAVDLVNQLPADQPVLFAPDQNLGRWVQQQSGRELTLWPGRCIVHETFSEEAVLALKHEHPTAEVIAHPECQQNLLDLADFIGSTSKLLNYAEESSCESFIVLTEPGILHQMQQRVPEKTLLDVPGIDGCSCNACPYMRLNTLEKLKACLETLTPAIEMDEPMRLKAMKPMQRMLEMSR

SEQ ID NO: 50809 - DNA, 915 bp, Geobacter metallireducens GS-15
  CDS (1)..(915): transl_table=11
atgcaggccgataccatcaagcaggaaatcaggcggctcctcaaggagcgcaacgccgtcctcctggctcacaactacatgcgggacgaggtgcaggaaatcgccgacatcaccggcgactccctggggctctcccaagaggcggccaaaaccgctgcggacgtgatcgtcttctgcggtgttcacttcatggccgagtcggcatccatcctctcgccccataagacggtgctcctgccgcggcgcgacgccggctgccccatggccgacatggtgacggtggagggactcctggagctgaaggccaggcatccgggcgtgccggttgtcacctacgtgaactcctcggcggcagtgaaggccgtgagcgacatctgctgcacctccgccaacgccgtgaaggtggtcaactccctcccggaccgggaggtgatcttcgtccccgaccggaacctgggccagttcgtggcgaagcagtcggacaaggccttccacttctgggacggctactgccccacccacgagcggctcaaggccgacgtggtggcgcgcctgaaggcagagaatcccgatgcccttttcatctgccaccccgaatgcaacccggcggtggtggccctggccgaccacgcctgctccacgagcggcatgtacgattactgccgcaagagtccggccaaacgcttcatcatcggcaccgaggcgggaatcctctacaagctccgcctggagaaccccgacaaggagttcatcctcgcctcgccggccctggtctgccccaacatgaagctcacctccctggaggacatcctcgatgccctcacgaccatggcgccggtggtgcaggtgcctgaggatatccgggtgcaagccaagcgggcactggaccggatgatcgccataccgagggactga

SEQ ID NO: 50810 - protein, 304 aa, Geobacter metallireducens GS-15
MQADTIKQEIRRLLKERNAVLLAHNYMRDEVQEIADITGDSLGLSQEAAKTAADVIVFCGVHFMAESASILSPHKTVLLPRRDAGCPMADMVTVEGLLELKARHPGVPVVTYVNSSAAVKAVSDICCTSANAVKVVNSLPDREVIFVPDRNLGQFVAKQSDKAFHFWDGYCPTHERLKADVVARLKAENPDALFICHPECNPAVVALADHACSTSGMYDYCRKSPAKRFIIGTEAGILYKLRLENPDKEFILASPALVCPNMKLTSLEDILDALTTMAPVVQVPEDIRVQAKRALDRMIAIPRD

SEQ ID NO: 50811 - DNA, 1137 bp, Burkholderia thailandensis E264
  CDS (1)..(1137): transl_table=11
atgcaatcggcgatcaaacccgtcgagtacgaccgcccgctcgcggcaggggcggcctgcggcgtgggcgaggcgtgggcgaaggtgcccgcgccgctcgctgccggcgagcgcgaggcgctgaaggcgcggatcaaggcgttgctcgaacgcgagaaggccgtgctggtcgcgcactattacgtcgacgcggagctgcaggaactcgcggacgagacgggcggctgcgttgccgattcgctggagatggcccgcttcgggcgcgaccacggcgcgcagacgctcgtggtcgccggcgtgcgtttcatgggcgagacggcgaagatcctgagcccgggcaagcgcgtgctgatgcccgacctcgacgcgacgtgctcgctcgatctcggttgcccggtcgacgagttttcccggttttgcgacgcgcatccggaccgtacggtcgtcgtctacgcgaacacgagcgccgcggtgaaggcgcgcgccgactggatggtcacgtcgtcgatcggccttgagatcgtcgccaatctgcacgcgcgcggcgagaagatcatctgggcgccggaccgccacctcggcggctacatccagaagaagacgggcgcggacatgctgatgtggcagggctcgtgtctcgtgcacgacgagttcaagggcatcgagctcgacttgctgcgcaacgaatacccggatgcgaagatcctcgtgcacccggaatcgccggagggcgtcgtcgcgctcgcggacgtcgtcggctcgacgacgcagttgatcgatgcggccgtgaagctcgacgctcagcgattcatcgtcgcgaccgatctcggcatcctgcacaagatgcggctcgcggcgcccggcaagaccttcatcgaggcgccgacggccggcaacagcgcgacgtgcaagagctgcgcgcactgcccgtggatggcgatgaacgtgctgtcgaacctcgccgacgtgctcgagcgcggtcacaacgagatcttcgtcgatgcggcgatcgccgagcgcgcgcgcgtgccgatcgaccggatgctcgatttcgccgcgcgccacaagcagcgcgtgcaggcgagcggcgatctgctgcgcgatcagcaactcttcgcgaacgtgggggcggcatga

SEQ ID NO: 50812 - protein, 378 aa, Burkholderia thailandensis E264
MQSAIKPVEYDRPLAAGAACGVGEAWAKVPAPLAAGEREALKARIKALLEREKAVLVAHYYVDAELQELADETGGCVADSLEMARFGRDHGAQTLVVAGVRFMGETAKILSPGKRVLMPDLDATCSLDLGCPVDEFSRFCDAHPDRTVVVYANTSAAVKARADWMVTSSIGLEIVANLHARGEKIIWAPDRHLGGYIQKKTGADMLMWQGSCLVHDEFKGIELDLLRNEYPDAKILVHPESPEGVVALADVVGSTTQLIDAAVKLDAQRFIVATDLGILHKMRLAAPGKTFIEAPTAGNSATCKSCAHCPWMAMNVLSNLADVLERGHNEIFVDAAIAERARVPIDRMLDFAARHKQRVQASGDLLRDQQLFANVGAA

SEQ ID NO: 50813 - DNA, 912 bp, Syntrophus aciditrophicus SB
  CDS (1)..(912): transl_table=11
atgagcttatcagacctgcagtcagaaatccgcgcgttgcttcatgaacggaacgccatcctgctggcgcattattatcagcgggaagaagttcaggaaattgccgatatacttggagattcgctggccctgagcatcgaggcggctcggacgaatgccgatgtcatcgtttttgccggtgttcatttcatggccgaaagcgcctccatcatttctccggacaagacagttcttctgccgcatctgggtgcgggatgccccctggccgacaagataacacccgtatcgctggcagaggccagaaaaaaataccccgacgccgcggtcgtcacctacatcaattcctccgcggagatcaaggcgcactccgacatctgctgcacctcggccaacgccgtcaaggtggtcaacagcctgacggatgcccggcagatcctcatgatccccgatggcaacctggcccgttacaccgccagattcacggataaggagatcatcccctgggaaggctactgccccttccatcatttcgtcctgcccgaggaggtcgcccgggcaaaagcggaacatcccggcgccctgttcatcgcccatccggaatgcaacgaggcggtcgtggcgatggcggactttgtgggcagcacgtccgcgatgatcgagttctgccggaaaacggatgtccgggaaatcattgtcggaacggaaatcgggatcatgaccccgctgaaaaagcagaatcccgaaaagattttcatttccccatcggaaagtcttgtctgtcagacgatgaaactgatcacgctggagaacattctcgcatccctgaaaacaatgaccccggtgatcaaggtgcctgaagcgatccgcatccccgcaaagagggctctggaccggatgctggccgtgcggtaa

SEQ ID NO: 50814 - protein, 303 aa, Syntrophus aciditrophicus SB
MSLSDLQSEIRALLHERNAILLAHYYQREEVQEIADILGDSLALSIEAARTNADVIVFAGVHFMAESASIISPDKTVLLPHLGAGCPLADKITPVSLAEARKKYPDAAVVTYINSSAEIKAHSDICCTSANAVKVVNSLTDARQILMIPDGNLARYTARFTDKEIIPWEGYCPFHHFVLPEEVARAKAEHPGALFIAHPECNEAVVAMADFVGSTSAMIEFCRKTDVREIIVGTEIGIMTPLKKQNPEKIFISPSESLVCQTMKLITLENILASLKTMTPVIKVPEAIRIPAKRALDRMLAVR

SEQ ID NO: 50815 - DNA, 912 bp, Syntrophus aciditrophicus SB
  CDS (1)..(912): transl_table=11
atggaaaacattattcaaaaaattcagaaactgaagcggaaacgtcaggccgtgatccttgcgcacaattaccagcgccctgaagtgcaggatatcgccgatttcgtgggagattccctggggctgtccatccaggccgcctcgacagacgccaaagtgatcgtcttctgtggcgtccacttcatggccgagacagcaaagatcttttcaccggagaagacggtcctgctgccggaccccgacgccggctgtcccatggcggacatgatcaccggagagcagttgcgggagctgaaagcccgacatccgggcgccaaggttctctgctatgtgaatacttcggcggaagtcaaggcggagtgcgatctctgctgtacctcggccaacgccgtcaccatggtccgggaggtgctgaagggtgctaaggaaatcatttttgcgccggaccagtatctggcggcttatgtggcggaacagacagggaggtcctttatcacctggcacggcttctgtccgactcacgcgaagattctgccggaagacgtcgaacgggaaaaggcattgcatcccaatgccgtgttcattgcccacccggaatgccggcccgcggtgacgcacctggcggacaaagtggcttccacggaagggatgtgccgatatgtgcaggaaacgcccgcaacggaaatcatcgtcgggacggaggtcgggattatccaccggatgaagaaggaaaatcccgaaaaggtgttctatccggtctcagaactggctgtctgtccgaacatgaagcgcaccacgctggaaaaggttctgtggagcctggaagataatgttcacgaagtgaacccgcctgcggaaattgcccgtcgggcttacgccagcatcgagaggatgctgaactaccgtccgtga

SEQ ID NO: 50816 - protein, 303 aa, Syntrophus aciditrophicus SB
MENIIQKIQKLKRKRQAVILAHNYQRPEVQDIADFVGDSLGLSIQAASTDAKVIVFCGVHFMAETAKIFSPEKTVLLPDPDAGCPMADMITGEQLRELKARHPGAKVLCYVNTSAEVKAECDLCCTSANAVTMVREVLKGAKEIIFAPDQYLAAYVAEQTGRSFITWHGFCPTHAKILPEDVEREKALHPNAVFIAHPECRPAVTHLADKVASTEGMCRYVQETPATEIIVGTEVGIIHRMKKENPEKVFYPVSELAVCPNMKRTTLEKVLWSLEDNVHEVNPPAEIARRAYASIERMLNYRP

SEQ ID NO: 50817 - DNA, 999 bp, Novosphingobium aromaticivorans DSM 12444
  CDS (1)..(999): transl_table=11
atgaccgtccagcctgcgaacctttccggactcgacctgcgcgccgagatcgaccgcctgcgcaaggagcgcaaggccgttatcctggcccactactaccagcggccggagatccaggatcttgccgatttcgtcggcgacagcctcgaactgtcgcgcaaggcggcagcaaccgacgcggaagtcatcgccttctgcggcgtgaagttcatggccgatacggccaagatcctcagcccagagaagatcgtcgtcctgcctgatctcgacgccggatgcagcctcgaggactcctgcccgccggacaagttcaaggccttccgcgaggcgcatcccgatcacatcgcgctgacctacatcaactgctcgaccgaggttaaggcgctctcggacgtcatcgtcacctcatccagcgcggaaacgatcctgtcgcagatcccgccggagcagaagatcatcttcggcccggaccggcacctcggcggctacctcaaccgcaagttcgggcgcgacatgctgctctggccgggcgtgtgcatcgtgcacgaggctttctcggagaccgagctgctgaagctcaaggcgcagcaccctgacgcgcccgtcgccgcgcatcccgaatgcccgccccacatcgtcgaccacgcggactacgtcgggtcgaccagcggcatcctgcaatatgccaagacgatgaccggcgacacgctgatcgttgcaaccgagccgcacatcatccaccagatggagctggcgatgcccgacaagaccttcatcggcgcgccgggggcggacggcaactgcaactgcaacatctgcccgtacatggcgctcaacacgatggaaaagctctacctcgcgctgcgcgacctgagcccgcgcattgaaatcgaggaagacatgcgcctcgccgccaaaaagagcctcgatcgcatgctcgatatggcgagcggcacggtcggcctgggcgacctgggagcacgtcccttcggtagctga

SEQ ID NO: 50818 - protein, 332 aa, Novosphingobium aromaticivorans DSM 12444
MTVQPANLSGLDLRAEIDRLRKERKAVILAHYYQRPEIQDLADFVGDSLELSRKAAATDAEVIAFCGVKFMADTAKILSPEKIVVLPDLDAGCSLEDSCPPDKFKAFREAHPDHIALTYINCSTEVKALSDVIVTSSSAETILSQIPPEQKIIFGPDRHLGGYLNRKFGRDMLLWPGVCIVHEAFSETELLKLKAQHPDAPVAAHPECPPHIVDHADYVGSTSGILQYAKTMTGDTLIVATEPHIIHQMELAMPDKTFIGAPGADGNCNCNICPYMALNTMEKLYLALRDLSPRIEIEEDMRLAAKKSLDRMLDMASGTVGLGDLGARPFGS

SEQ ID NO: 50819 - DNA, 948 bp, Neorickettsia sennetsu str. Miyayama
  CDS (1)..(948): transl_table=11
gtgggcttccttaaaaatcttgagagagagattgtggagctaaagaaaaagaaaaatgctgtaatacttgcacactactaccaagatgatgaattacaggatatagccgattttgtcggtgattctcttgatttatctaaaaaggcttcgaatacggatgctgaaatcattgttttctgtggagtgacattcatgggtgaagttgcaaagctgctaagcccaggaaaaaaagttattgtgccagatatggcagctggttgttctttagaggattcctgcaaagttgaacatttgaaaaaatttataagtcctgttgagaacccgtttgttttgacatatataaattcttcagttcatgttaaggcaatatcagattcaatatgtacctcgtctagtgctgaaaaaataataaacagtataccaaaagagaaaaatatcgtttttgctccggacaagtttttagggagctatttacagaaaagaacaggcagaaaaatgaaaatttggcaaggaacctgcatcgttcacgaaagtttctctgagaagcatgctatctcacttaaattagaaaatccagatgcaaaagttgttgctcacccagaatgtcctgatgtgcttatcaaatacgcggattttgttggatcaacatcgcaaatactttcatatataaaaaaatcgggcttcctaaagtttatagttctgactgagcctggaataatacaccaggcaaaaaagattcttccacacggtattttttttccagtggaatcagttaattcatctgggacatgtgctatgtgtaacaagtgtccccacatgagactaaacacaatggagaagttgtatcactgcttagacaaggaagaaccatcaatagaaatagatccatcaatctttgatgctgcaagatctgctgttgagaacatgtttttttacctgaataaatag

SEQ ID NO: 50820 - protein, 315 aa, Neorickettsia sennetsu str. Miyayama
MGFLKNLEREIVELKKKKNAVILAHYYQDDELQDIADFVGDSLDLSKKASNTDAEIIVFCGVTFMGEVAKLLSPGKKVIVPDMAAGCSLEDSCKVEHLKKFISPVENPFVLTYINSSVHVKAISDSICTSSSAEKIINSIPKEKNIVFAPDKFLGSYLQKRTGRKMKIWQGTCIVHESFSEKHAISLKLENPDAKVVAHPECPDVLIKYADFVGSTSQILSYIKKSGFLKFIVLTEPGIIHQAKKILPHGIFFPVESVNSSGTCAMCNKCPHMRLNTMEKLYHCLDKEEPSIEIDPSIFDAARSAVENMFFYLNK

SEQ ID NO: 50821 - DNA, 1026 bp, Francisella tularensis subsp. holarctica
  CDS (1)..(1026): transl_table=11
atgttaaacaaaaaacttataaaagataagatatcacaagctagacaagaattacctagtttgaaaattaaagatactgaaaaacaacaatatatgcgggaaattcaggagttattagaacaaaataatgcttgtttggtagcgcattattatgttgatgcagaaattcaagaattagctgagaaaactggtggatttgtcggtgattcgcttgctatggcgaagtttggcttagaaagcagctgtgacactttagtagttgcaggagttagatttatgggtgattccgctaagattttgaatcccgagaaaaaaattctaatgccaactctagaagcagagtgttcgctagatttaagttgtagtaatgatgagttcaaaaagtttatagaagctaatcctgatagagaagttgtggtttatgtcaatacagcagcagagattaaagctctagctgattggacagtaacatcatccaatgctttggagatttgttcacatctacacaagcaaggtaaaaagctactttggggacctgatagatttcttggtgattggattgctaagcaaactggtgcagatatgttgctgtatgacggtagttgtatagtacatgaggagtttaaagctcaagcgctagatgatttaatactagaacatccagatgctgcagttttagtacatcctgaatcaccagcagaaattatcaaaagagcagatgcagttggttcaacatctcaactaatagcagcaagccaaagacttagcaatacaaaatttattgttgctacagatacgggtgtattttataaaatgaaacagctatcaccacataaagagtttatcccagcgcctactgctggtcgtggtgcaacatgtcaatcatgtgcaaaatgcccttggatgaaactaaatcaacttaaaaatctaaaagattgtttaattaatcagactaacgaaatatttattgatgaagaagtaagacaaaaggcgcttatcccattaaataggatgataaatttctag

SEQ ID NO: 50822 - protein, 341 aa, Francisella tularensis subsp. holarctica
MLNKKLIKDKISQARQELPSLKIKDTEKQQYMREIQELLEQNNACLVAHYYVDAEIQELAEKTGGFVGDSLAMAKFGLESSCDTLVVAGVRFMGDSAKILNPEKKILMPTLEAECSLDLSCSNDEFKKFIEANPDREVVVYVNTAAEIKALADWTVTSSNALEICSHLHKQGKKLLWGPDRFLGDWIAKQTGADMLLYDGSCIVHEEFKAQALDDLILEHPDAAVLVHPESPAEIIKRADAVGSTSQLIAASQRLSNTKFIVATDTGVFYKMKQLSPHKEFIPAPTAGRGATCQSCAKCPWMKLNQLKNLKDCLINQTNEIFIDEEVRQKALIPLNRMINF

SEQ ID NO: 50823 - DNA, 921 bp, Methanococcoides burtonii DSM 6242
  CDS (1)..(921): transl_table=11
atgcaggacatgaaaaagatcattgaaaggatcaatattttaaaaacggaacttgatgcagttattcttgctcataactatcagcgtcctgaagtacaggacattgcagattttacaggcgattctcttggattaagccagcaagttgtcaattctgatgcagatgttatcgtattctgtggtgttgatttcatggcagagagtgcggccattctaagtccggaaaagatagtactccttccggaaaaggatgcaggctgccccatggctgaaatggtcgatgtcatatcacttgatgacgaaaagaagaaacatcctgatgctgctgttgtgtgctatgtgaactcatctgcactgataaaagcacagagtgatatttgctgcacctcagccaatgccatcgatgtggtgaactctctcgaggaagatgaggtgatctttgtcccggacaagaacctcggaaactatgttgcaggtttcacggataagatgatctactcatgggatggtttctgtcctacacatcaccagatgcgtggccatgacgtaattaaagcaaaagaggaacatcctgatgcactgttcctggcacatcccgaatgtcgcacagaagttctggaccttgctgatgaggtgttgagcacaaccggtatgttgaactatgcaaagaagtccgatgcaaaggaattcatcataggtacggagaacggactccttcacaggctgagtaaagagaatccggaaaagaagttatattatgtttccgagttcaccatctgtacgaacatgaagataacaactcttgaatccgtcctcgatgctcttgagaacatgcagtatgttatcactgtacctgaagatacaaggcttaaggcaaaggaagcccttgacaggatgcttgcggtcaaacgtactatgtga

SEQ ID NO: 50824 - protein, 306 aa, Methanococcoides burtonii DSM 6242
MQDMKKIIERINILKTELDAVILAHNYQRPEVQDIADFTGDSLGLSQQVVNSDADVIVFCGVDFMAESAAILSPEKIVLLPEKDAGCPMAEMVDVISLDDEKKKHPDAAVVCYVNSSALIKAQSDICCTSANAIDVVNSLEEDEVIFVPDKNLGNYVAGFTDKMIYSWDGFCPTHHQMRGHDVIKAKEEHPDALFLAHPECRTEVLDLADEVLSTTGMLNYAKKSDAKEFIIGTENGLLHRLSKENPEKKLYYVSEFTICTNMKITTLESVLDALENMQYVITVPEDTRLKAKEALDRMLAVKRTM

SEQ ID NO: 50825 - DNA, 921 bp, Methanococcoides burtonii DSM 6242
  CDS (1)..(921): transl_table=11
atgcaggacaggcaatctattatcaacaagataaattcattgaaaaaagaacgcaatgctgttattttggcgcattgctatgcacgggatgaagtgcaggatatcgcagactttgtaggcgattcgctggggctgagtcaggaagcggtagaccaggatgcggaagttattgttttttgtggcgtgagcttcatggcagagagtgcattcatcctctcccctgaaaaaacagttcttatgccggatgcagatgccgattgccctatggcggcaatggtggatgtcatatcacttcgtaaattaaaggcgcaacatccagatgccatggtcgtctgctatgtcaatacacgagctgacatcaaagcagaatgtgatatctgttgtacctcggcaaatgcagtggaagttgtaaattctctcgactcggacaaagttattttcgttcctgacaagaaccttgcagcatacgttgcaaaacatactgacaagaccatcattccatggaatggttattgccctacacacaatcagatacttgcagaagatgttgatcttgcaatgaacaagcacccaggggcggagctgatggcccatcctgaatgccgttcagaagttctggaaaaagcagaccatgtgttcagtactactggaatgcttgatcatgtaaaaagctctgacaataacgaattcatagtttctacggagcagggtatattgcaccagcttgagactgaaaatcccaataagaaattttatcctgtctcaaaatttacattttgtccggacatgaaaatgatagatctaagttctgtccttcgctgtcttgagaatatggagaccgttgtgaccgttccaaaagatattcaggtacgtgcaaaacgagctcttgatcgtatgcttgaagtaaaacgcaacaggtaa

SEQ ID NO: 50826 - protein, 306 aa, Methanococcoides burtonii DSM 6242
MQDRQSIINKINSLKKERNAVILAHCYARDEVQDIADFVGDSLGLSQEAVDQDAEVIVFCGVSFMAESAFILSPEKTVLMPDADADCPMAAMVDVISLRKLKAQHPDAMVVCYVNTRADIKAECDICCTSANAVEVVNSLDSDKVIFVPDKNLAAYVAKHTDKTIIPWNGYCPTHNQILAEDVDLAMNKHPGAELMAHPECRSEVLEKADHVFSTTGMLDHVKSSDNNEFIVSTEQGILHQLETENPNKKFYPVSKFTFCPDMKMIDLSSVLRCLENMETVVTVPKDIQVRAKRALDRMLEVKRNR

SEQ ID NO: 50827 - DNA, 1056 bp, Silicibacter sp. TM1040
  CDS (1)..(1056): transl_table=11
atgtcgctagatattcccgtgctgcgcagtgaattgtctcagcactacgatctcactccgaaccccgaactcgcagaagccatgtctgatgtctatcagcgcatgtcgcgcgtggtgtcgcccgtcgattgggtgctttatgcgccctacgtcaaggccatcaatgagctcaaggccaagcgcaacgccgtgatcctcggccacaactacatgacgcccgagatctttcacggcatctccgactttgtgggcgacagtctgcagctcgcgatcaaggcgaccgaggtcgaggccgatgtgatcgtgcaatgcggcgtgcatttcatggccgaaacctccaagatcctgagcccctccaaaacggtgctgatgcccgacatggatgcagggtgcagccttgcggagtcgatcaccgccgaaggggtcgaggagatgcgccgccgttaccccggcgcgccggttgtgtcttatgtgaacaccaccgccgaggtgaaagcggcctccgacatttgctgtacatcctccaacgcggcccagatcgtcggcgcaatggaaagcgacacggtcatcatgacgccggatcagtatctggcgcagaatgtggcccgcgatgtgccgcacaagaacgtggtctggtgggaaggctcctgcatcgtgcatgagcaatacaccgccaaggatctgcgcgatttccgcgaatggaaccccggcacccggctgatcgcgcaccccgaatgtccgccggatgtggtggcagaggccgatttctccggttccaccagcggcatcctcaaatacgtgacggatgagaagccggaaaaggcgctcctgatcaccgagtgttcaatggcctcgaacattgccgacgcattgcccgaagtcgaatttgtcggcccctgcaacatgtgcccctacatgaagaagatcacgctggagaaagtcctctggtcgctgcactccatggagggtcaggtcgaggtcgagcccgaaatggccgccaaggcgcgacacgcggtgcaggcgatgatcgacctgtcgcgcaagctgggcatctaa

SEQ ID NO: 50828 - protein, 351 aa, Silicibacter sp. TM1040
MSLDIPVLRSELSQHYDLTPNPELAEAMSDVYQRMSRVVSPVDWVLYAPYVKAINELKAKRNAVILGHNYMTPEIFHGISDFVGDSLQLAIKATEVEADVIVQCGVHFMAETSKILSPSKTVLMPDMDAGCSLAESITAEGVEEMRRRYPGAPVVSYVNTTAEVKAASDICCTSSNAAQIVGAMESDTVIMTPDQYLAQNVARDVPHKNVVWWEGSCIVHEQYTAKDLRDFREWNPGTRLIAHPECPPDVVAEADFSGSTSGILKYVTDEKPEKALLITECSMASNIADALPEVEFVGPCNMCPYMKKITLEKVLWSLHSMEGQVEVEPEMAAKARHAVQAMIDLSRKLGI

SEQ ID NO: 50829 - DNA, 933 bp, Myxococcus xanthus DK 1622
  CDS (1)..(933): transl_table=11
atgcgcgccgaagtcgactacgcgaaggaaatccaggagttcaagcgttccatgaacgcagtcatcctggcgcactattaccaggagagcgaagttcaggacctcgcggatttcgtgggagacagcctggcgctggcgcaagccgcggcgagcacgaaggcagacgtcatcgtcttctgtggcgtccatttcatggcggagacggcgaagattctcaatccgtcccggcaggtgctgttgccggacctcaaggcgggctgttcgctgtcggaccggtgcccgccgggagccttcaaggcgttcaaggacaaacacccgaacgccttcgtggtgagctacgtcaacagctccgccgcggtgaaggccatgagcgacgtcatctgcacgtcgtccaacgcggtgaaaatcgtgaaccaggtgccgaaggaccggcagattctcttcgcgccggaccagcacctcggccgctacgtgatgaagcagacgggccgcgacatggtgctgtggccgggcagctgcatcgtccacgaaatcttcagcgagaagaaactggtgcagctgaaggtggagtacccggaggcggaagtggtggcccaccccgagtgtgagcaggcggtgctgcgccacgcggacttcatcggctccaccaaggcgattctggattacgcggtgcgtagcccgaagcagcagttcatcgtggtgacggaggcgggcatcatccaccagatgaagcgggccgcgccgaacaagacgttcattcccgcgccgccggacaacggctgcgcgtgcaatgagtgcccgtacatgcggctgaacacgctggagaagctctggcggtgcatgaaggagcgcacgcccgagctgaccatgcccgaggacctgcgcgagcgtgctcgcgcgccgctgcaacgcatgctggactggtctcagtag

SEQ ID NO: 50830 - protein, 310 aa, Myxococcus xanthus DK 1622
MRAEVDYAKEIQEFKRSMNAVILAHYYQESEVQDLADFVGDSLALAQAAASTKADVIVFCGVHFMAETAKILNPSRQVLLPDLKAGCSLSDRCPPGAFKAFKDKHPNAFVVSYVNSSAAVKAMSDVICTSSNAVKIVNQVPKDRQILFAPDQHLGRYVMKQTGRDMVLWPGSCIVHEIFSEKKLVQLKVEYPEAEVVAHPECEQAVLRHADFIGSTKAILDYAVRSPKQQFIVVTEAGIIHQMKRAAPNKTFIPAPPDNGCACNECPYMRLNTLEKLWRCMKERTPELTMPEDLRERARAPLQRMLDWSQ

SEQ ID NO: 50831 - DNA, 969 bp, Rubrobacter xylanophilus DSM 9941
  CDS (1)..(969): transl_table=11
gtgcgggcggcaggcgcggtggtttccgctgttgaggggctggacctcttcgaggagatagaccggctgcgggaggagctcggggcggtgatcctggcccactactaccaggagcccgagatacaggacatcgcggacttcatcggggattcgttgcagctggcgcgtcaggcccagcggaccgacgcgcgggtcatcgtcttctgcggggtacacttcatggccgagacggccaagatcctcaacccggagaagaccgtggtgctgccggatctggaggcggggtgttcgctcgccgacagctgtccgccggagcggttcgccgcgttcctcgaggagcatcccgggcacgcggtcgtctcctacgtcaacacctcggcggcggtcaaggccctctccgacgtcatctgcacctcctccaacgccgagaaggtcatagccacgatcccggaggggaccccgatagtcttcgcccccgaccggcacctcggccgctatctcatggagcggaccgggcgcaagatggtgctgtggccggggacgtgcatggtgcacgtgcggttctcggagaagaagatccggcagctcaaggtgcgccaccccgacgccgaggtgctcgcgcaccccgagtgcgaggaggcggtcctgcggctcgcggaccacgtggggagcacctcctcgctgctccggcgggccgtagagagccccgcgcggcgcttcatcgtggccaccgagcccggcatcatccaccagatgaagaaggccgcccccggcaaggagtttgtccgggcgccggggcggggccctgagggttcctgcgaggcgtgcggcgagtgcccccacatgcgccgcaacaccctcgagaagctctaccggtgcatgcgggacctccgacccgagataaccctcgacgaggagctcaggctgcgagccctcaggcccatcgagcgcatgctggagatcgggtga

SEQ ID NO: 50832 - protein, 322 aa, Rubrobacter xylanophilus DSM 9941
MRAAGAVVSAVEGLDLFEEIDRLREELGAVILAHYYQEPEIQDIADFIGDSLQLARQAQRTDARVIVFCGVHFMAETAKILNPEKTVVLPDLEAGCSLADSCPPERFAAFLEEHPGHAVVSYVNTSAAVKALSDVICTSSNAEKVIATIPEGTPIVFAPDRHLGRYLMERTGRKMVLWPGTCMVHVRFSEKKIRQLKVRHPDAEVLAHPECEEAVLRLADHVGSTSSLLRRAVESPARRFIVATEPGIIHQMKKAAPGKEFVRAPGRGPEGSCEACGECPHMRRNTLEKLYRCMRDLRPEITLDEELRLRALRPIERMLEIG

SEQ ID NO: 50833 - DNA, 975 bp, Mesorhizobium sp. BNC1
  CDS (1)..(975): transl_table=11
atgctcgatatcccccgcaccgacgcgctttacgataaggtgaagcgagtgatcccgccgatcgaatggccggctttcgtggacgatatcgaggcaattctcgcgctgaagcgcaggcgcaacgcggtcatactggcgcacaactatcaaacgccggagatcttccactgcgttggcgacatcgtgggcgacagcctggcgctcgcccgcgaggcggtgaacacggatgccgatgtcatcgtgcttgccggcgtccatttcatggccgagacggcaaaactgctcaatccggaaaaaacggtgctgatcccggatatgggggcagggtgctcgctggccgattccatcacggcagaagatgtgcgcctgatgcgccagcattatccgggcgttcccgtgatcacttacgtcaacacgtcggcggcggtgaaggcggaatccgacatctgctgcacttccggcaatgcgcgcgcggtggtggaatcgcttggcgtgccgcgtgtgatcatgatcccggacgagtatctggcaaagaacattgccgctgaaacggacgtggagatcatcgcctggaaagggcattgcgaggtgcatgaacgcttcaccggggctgatatccgcgaattgcgggaggccaatcccggcgtggtggtgctcgcgcatcccgagtgcccgccggaagtggtcgcggaatcggatttctccggctccacggccgccatgtcggactatgtgggacgggaaaagccgcatcgcgtcgtgctgatgacggaatgctccatgagcgacaatgtcgcggtggctcatccggatgtcgagttcgtccgcccctgcaatctctgcccgcatatgaagcgcatcacgcttgccaatatccgcaaggcgttggaggagaaccagcacgtggtgacggtcgatcctgaggtggccgagcgcgcgcggcgcgccgtggagcggatgctcgctgtcaaatga

SEQ ID NO: 50834 - protein, 324 aa, Mesorhizobium sp. BNC1
MLDIPRTDALYDKVKRVIPPIEWPAFVDDIEAILALKRRRNAVILAHNYQTPEIFHCVGDIVGDSLALAREAVNTDADVIVLAGVHFMAETAKLLNPEKTVLIPDMGAGCSLADSITAEDVRLMRQHYPGVPVITYVNTSAAVKAESDICCTSGNARAVVESLGVPRVIMIPDEYLAKNIAAETDVEIIAWKGHCEVHERFTGADIRELREANPGVVVLAHPECPPEVVAESDFSGSTAAMSDYVGREKPHRVVLMTECSMSDNVAVAHPDVEFVRPCNLCPHMKRITLANIRKALEENQHVVTVDPEVAERARRAVERMLAVK

SEQ ID NO: 50835 - DNA, 1053 bp, Rhodococcus sp. RHA1
  CDS (1)..(1053): transl_table=11
gtgaaggagcaagccatgacgaccacgacgttgtgggcgggtaccaacccgcagattcaggacggtcccggcggttacgcgggcgtcgaggcgagcgaagagtgggctgccgagatcaaacggctggcgcgtgagcggggagcgacgctccttgcgcacaactatcagttgcccgccatccaggacgtggccgaccacgtcggcgactccctcgcgctctcgcgcatcgcggccgaagcgcccgaggacaccatcgtgttctgcggcgtgcacttcatggccgagaccgcgaagatcctcagccccgccaagaccgtgctgatcccggacgagcgtgccggctgctcgctggccgactcgatcaacgccgatcagctgcgggagtggaaggcggagttccccgacgccgtcgtcgtgtcgtacgtcaacaccaccgccgaggtgaagggtctgacggacatctgctgcacgtcgtccaacgccgtcgacgtggtcgcgtcgatcgaccccgaccgtgaggtcctgttcctgcccgaccagttcctcggcgcacacgtcaagcgcgtcaccggccgcaagaacatgcagatctgggcgggtgagtgccacgtccacgccggcatcaacggcgacgagctcaccgcgcaggccaaggcgcaccccggtgccgaactgttcgtgcaccccgaatgcggctgcgccacctcggctctctacctggccggtgaagggttcgtgcccgaggacaaggtgaagatcctgtcgacgggcggcatgctcgacgccgcccgcgcgaccggggcgaagcaggttctcgtggccaccgaggtcggcatgctgcaccagctgcgcaaggccgcgccggaggtcgatttccaggccgtcaacgaccgcgcgtcctgcccgtacatgaagatgatcacccccgcggccctgctccgctgcctgctcgagggcaaggacgaggttcacgtcgatctcgcgaccgcggagcgtgcccgcaaatcggtgcagcgcatgatcgagatcggaaacccgggcggcggcgagtga

SEQ ID NO: 50836 - protein, 350 aa, Rhodococcus sp. RHA1
MKEQAMTTTTLWAGTNPQIQDGPGGYAGVEASEEWAAEIKRLARERGATLLAHNYQLPAIQDVADHVGDSLALSRIAAEAPEDTIVFCGVHFMAETAKILSPAKTVLIPDERAGCSLADSINADQLREWKAEFPDAVVVSYVNTTAEVKGLTDICCTSSNAVDVVASIDPDREVLFLPDQFLGAHVKRVTGRKNMQIWAGECHVHAGINGDELTAQAKAHPGAELFVHPECGCATSALYLAGEGFVPEDKVKILSTGGMLDAARATGAKQVLVATEVGMLHQLRKAAPEVDFQAVNDRASCPYMKMITPAALLRCLLEGKDEVHVDLATAERARKSVQRMIEIGNPGGGE

SEQ ID NO: 50837 - DNA, 972 bp, Trichodesmium erythraeum IMS101
  CDS (1)..(972): transl_table=11
atgtttgcaactcaaactcgaatcaaccaaaattttaatagcataccagatgatttgtttgaagcgatcgccgacctaaagaaagaattaaatgctgttattctagctcactattaccaagaaccagatattcaagatattgccgactatattggtgactctcttggcctttctcaaaaagctgctgaaactgatgcagatgtaatagtttttgcgggagttcattttatggcagaaactgcgaaaattcttaacccaaataaactggtactgctaccagatctagatgcaggttgctccctcgccgatagttgtccaccagaagaatttggcaaatttaaggcggctcatcctgatgccatagtagtttcttatattaattgtactgctgctattaaggcaatgagtgatattatttgcaccagttccaactctgtcaaaatagttaaacaaataccaacagaccaaccgataatttttgccccagataagaacctcggtcgctatgtcatggaacaaactggacgagatttgattttgtggtcaggcagttgtattgttcacgagacattctctgagaaaaagattgtgcaattaaaaatagaacatcctgaagctgagattattgctcatccagaatgtgaaccaaatttattgcgtcatgccaattatattggttcgaccactgctttattaaaatattgccaagaaagccaagagcaagaatttattgtggcaactgaaccgggaattattcaccaaatgcaaaagagagaacccaagaaaaactttattcccgcacccgcaatgaataattgtgcttgtaacgaatgcccccacatgaggctgaataatttagaaaagctttatttagcaatgaaaaataagacgccagaaattatgattcctgaagaaacacgagtagcagcattaaaacctattcaaaagatgttggaactttcattcacataa

SEQ ID NO: 50838 - protein, 323 aa, Trichodesmium erythraeum IMS101
MFATQTRINQNFNSIPDDLFEAIADLKKELNAVILAHYYQEPDIQDIADYIGDSLGLSQKAAETDADVIVFAGVHFMAETAKILNPNKLVLLPDLDAGCSLADSCPPEEFGKFKAAHPDAIVVSYINCTAAIKAMSDIICTSSNSVKIVKQIPTDQPIIFAPDKNLGRYVMEQTGRDLILWSGSCIVHETFSEKKIVQLKIEHPEAEIIAHPECEPNLLRHANYIGSTTALLKYCQESQEQEFIVATEPGIIHQMQKREPKKNFIPAPAMNNCACNECPHMRLNNLEKLYLAMKNKTPEIMIPEETRVAALKPIQKMLELSFT

SEQ ID NO: 50839 - DNA, 936 bp, Synechococcus sp. CC9311
  CDS (1)..(936): transl_table=11
atgaaagaaactcccgatgatctcgtcagggcaatcaaccagcttcgaagcgaacgcaacgcagttgttttggcgcactattaccaggagcctgaaatacaagacatcgctgatttcattggtgattcgttagagctttcacgtaaagccgcaagcacagatgcggatgtcatcgtgttttgcggagtacatttcatggcagaaacggcaaaaatattaagtccggagaaaattgttctgctacctgataccgaagcaggctgttcactcgcagatgattgtccagccgatcaattcaaagccttcagggccaatcatcctgaacattttgttgtaagttatatcaactgcactgcagcagtaaaagcccaaagtgacttgatctgcacgagtagcaacgcggtagatttggttaaccaacttccatctaatcaaccaatcctatttgccccggatcaaaacctggggcgatgggtacaacaacaaagtggtcgcgaacttactttatggccgggacgatgcattgttcatgaaacttttagcgaagaagcattgttaaagcttaagctcaagcatccagatgctgaagtaattgctcaccctgagtgcatggaaaaccttcttgatctggctgatttcatcggttcaacaagcaaattattattgcacgcacagacgagcgctgcatcaacatatatcgtactcactgagccgggtatattgcatcaaatgcaaaaaatggttccgagtaaaacttttattgatgtgccaggacttgacggatgtagctgtaatacatgcccatacatgcgaatgaatactcttgaaaaactttggcagtgtctcgaaacactagagccaagaatcgagatggacgaagaaattagagtgaaagcattggagccaattcaacgaatgcttcaaatgagcaaatag

SEQ ID NO: 50840 - protein, 311 aa, Synechococcus sp. CC9311
MKETPDDLVRAINQLRSERNAVVLAHYYQEPEIQDIADFIGDSLELSRKAASTDADVIVFCGVHFMAETAKILSPEKIVLLPDTEAGCSLADDCPADQFKAFRANHPEHFVVSYINCTAAVKAQSDLICTSSNAVDLVNQLPSNQPILFAPDQNLGRWVQQQSGRELTLWPGRCIVHETFSEEALLKLKLKHPDAEVIAHPECMENLLDLADFIGSTSKLLLHAQTSAASTYIVLTEPGILHQMQKMVPSKTFIDVPGLDGCSCNTCPYMRMNTLEKLWQCLETLEPRIEMDEEIRVKALEPIQRMLQMSK

SEQ ID NO: 50841 - DNA, 1074 bp, Shewanella sp. MR-7
  CDS (1)..(1074): transl_table=11
atgagccccagcccatttgccccaacaatcgaaactattgattatccgtttccgcctaaaccaattcctctgtccgatgccgaaaaggcggactacaaggcaagtatcaagcagctgctgattgaaaaagatgcggtattggttgcccattattataccgaccctgaaattcaagcgctggctgaagaaactggcggttgtgtttccgactcactcgaaatggcgcgttttggccgcgatcatccagccaagacgttaatcgtcgccggggtgaagtttatgggtgaaaccgccaaaatcttaagcccagaaaaaaccattctgatgccgaccttggaggcgacctgttcattggacttaggttgccccatcgataaattcagcgccttctgtgatgcgcatcctgatcataccgtggtcgtttatgccaacacttcggcggcggtaaaagcccgtgccgattgggtagtcacctcaagtattgcccttgaaatcgttgagcacttagacagcgaaggcaaaaaaatcatttggggcccagaccgccatttaggcagttatattgccaaacaaacgggcgccgagatgttgatgtggcagggcgactgtattgttcacgatgagtttaaggccaatgcgctgcgtgatttaaagcgtgtttaccccgatgcggcgattctagtgcacccagagtcacccgcgagtgtggtagcgatggcggatgctgtcggctccaccagccagttgattaaagctgcgcaaaccatggctaatgagcgttttattgtggcgaccgatcgcggtattttctacaaaatgcaacaagcggcgccgggtaagacactgattgaagcacctactggcggtaatggtgccacctgtaagagctgtgctcactgtccttggatggcgatgaacggcttaaaggcgattgaagcgtccttaagtgacagcgacaaaacgactcacgaaatctttgtcgatgaagacttgcgagtaaaagcgttaatcccactgacccgtatgctcgatttcgctaaaacactgaatatgaaagtgaaaggcaacgcttaa

SEQ ID NO: 50842 - protein, 357 aa, Shewanella sp. MR-7
MSPSPFAPTIETIDYPFPPKPIPLSDAEKADYKASIKQLLIEKDAVLVAHYYTDPEIQALAEETGGCVSDSLEMARFGRDHPAKTLIVAGVKFMGETAKILSPEKTILMPTLEATCSLDLGCPIDKFSAFCDAHPDHTVVVYANTSAAVKARADWVVTSSIALEIVEHLDSEGKKIIWGPDRHLGSYIAKQTGAEMLMWQGDCIVHDEFKANALRDLKRVYPDAAILVHPESPASVVAMADAVGSTSQLIKAAQTMANERFIVATDRGIFYKMQQAAPGKTLIEAPTGGNGATCKSCAHCPWMAMNGLKAIEASLSDSDKTTHEIFVDEDLRVKALIPLTRMLDFAKTLNMKVKGNA

SEQ ID NO: 50843 - DNA, 1071 bp, Alkalilimnicola ehrlichei MLHE-1
  CDS (1)..(1071): transl_table=11
atgagcaaggcgcaggccatccgcatggaacgccctcggtattttcgtgagcagccgcagcaggcggcggaacgggtgagcggtagtgagcgcgaccgcttgatggagcgtatcagcgacctgttgcgcgaacgtgacgccgtgctggtggcccactactacaccgatccggacctgcagatcctggcggaccggaccggcggctatgtctccgattccctggatatggctcgcttcggcgccgagcacgaggcctccaccctggtggtggcgggggtgcgattcatgggcgagacggccaagatcctcacccccgagaagcgcgtgctcatgcccgacctggaggccacctgctcgctggacgagggctgcccgccggacgcgttctccgcctggtgtgatcggcaccccgaccgcaccgtggtggtctacgccaacacctcggcggcggtgaaggcgcgtgccgactgggtcgtgacctccagcatcgccctggacatcatcaaccatctgaaggcgcggggcgagaagatcctctggggtccggacaaacacctgggcgactacctgcagcgggagaccggggccgacatgctgctgtgggatggcagctgtatcgtccacgaggagttcaaggggctggaactggagaaactgcgaggggaacaccccgaggccaaggtgctggtccacccggaatcaccccgcgcggtggtcgagcaggccgatgtggtggggtccacctccaagctgctggaggcggtgaccaccatggatgcccgcgagtttatcgtcgccaccgacgccggcatcttccacaagatgctggagtcggccccggacaaggtgctgctcaaggcccccacggccggccgtggggccacctgctcaagctgcgcccactgcccctggatggccctgaacggcctgcacagcctgctccgggtgctggagcggggcgacaacgagatccaggtggacgaggcggtggccgagaaggcccgtgtctcgctgggccggatgatggacttcgcccgcgcgcacaagcgggccgtggccggtgatgcgtga

SEQ ID NO: 50844 - protein, 356 aa, Alkalilimnicola ehrlichei MLHE-1
MSKAQAIRMERPRYFREQPQQAAERVSGSERDRLMERISDLLRERDAVLVAHYYTDPDLQILADRTGGYVSDSLDMARFGAEHEASTLVVAGVRFMGETAKILTPEKRVLMPDLEATCSLDEGCPPDAFSAWCDRHPDRTVVVYANTSAAVKARADWVVTSSIALDIINHLKARGEKILWGPDKHLGDYLQRETGADMLLWDGSCIVHEEFKGLELEKLRGEHPEAKVLVHPESPRAVVEQADVVGSTSKLLEAVTTMDAREFIVATDAGIFHKMLESAPDKVLLKAPTAGRGATCSSCAHCPWMALNGLHSLLRVLERGDNEIQVDEAVAEKARVSLGRMMDFARAHKRAVAGDA

SEQ ID NO: 50845 - DNA, 1011 bp, Hyphomonas neptunium ATCC 15444
  CDS (1)..(1011): transl_table=11
gtgcaggatttcgtgacgccgatggaatggcccgcgattgcaccgctcgtggccggtatcaaccggctgaagcgcgaaaagaatgccgtgatcctggcgcacaattacatgacgccggacattttcagcctggtgggcgatttccgcggtgacagccttcagctggcgcgcgaggcctcacaggtgccccaaagcgtgatcgtgcaggcgggcgtgcatttcatggccgagacgtcgaaaatcctcgcgccggagaagaccgtgctgatcccctcgctggaagcaggctgctcgctggccagctcgatcaacggcgcggatgtgcgcctgatcaagcagaaattcccgaactatccgatcgtgacctatgtgaactgcaccgccgaggtgaaggccgagtgccacattacctgcacgagctccaacgccgcgcaggtggtggaagccatcgcgaaggaatggaattcggacaccgtgatcctcgtgcccgaccagtatctggcgaagaatgtggcggcgcagacgaatatccgcattctcacctggccgggcgcctgtgaggtgcatgagcagttttcggccgaggatgtggcgcagctgcgcgaagcacatcccggtgtcgtgatcctggcgcaccctgaatgcccgccggatgtgctggaagtcgctgactatgccggctcgacggcggcgctggcgaactatgtgtcggagaaacgcccgaacaaggtggtgctgctgaccgaatgttcgatgagcgacaatgtggcggcggtgaaccccggcgtgaatttcatccggccgtgtaacctctgcccgcacatgaagcgcatcacgctggaaaacatctatgactgcctgatgacgggcacgcatgaggtgaccattcccgaagacgtgcgggtgcgggcgaaagaagcgctcgacgcgatgctggccctgccgaaaatggagcggccgctggatttcgtgaccggcctcaagccgatggagcttgaactggtaaactag

SEQ ID NO: 50846 - protein, 336 aa, Hyphomonas neptunium ATCC 15444
MQDFVTPMEWPAIAPLVAGINRLKREKNAVILAHNYMTPDIFSLVGDFRGDSLQLAREASQVPQSVIVQAGVHFMAETSKILAPEKTVLIPSLEAGCSLASSINGADVRLIKQKFPNYPIVTYVNCTAEVKAECHITCTSSNAAQVVEAIAKEWNSDTVILVPDQYLAKNVAAQTNIRILTWPGACEVHEQFSAEDVAQLREAHPGVVILAHPECPPDVLEVADYAGSTAALANYVSEKRPNKVVLLTECSMSDNVAAVNPGVNFIRPCNLCPHMKRITLENIYDCLMTGTHEVTIPEDVRVRAKEALDAMLALPKMERPLDFVTGLKPMELELVN

SEQ ID NO: 50847 - DNA, 972 bp, Rhizobium leguminosarum bv. viciae 3841
  CDS (1)..(972): transl_table=11
atgaattatcctgtttccgcatcctcgctctacgagcgcgtcagccgcgtcattcccaaagccgaatggatgacgttcgaaaatgacgtcgacgcgatcctcgaactcaagcgccgccgcaacgccgtcattctcgcgcacaactatcagacaccggagatcttccacggcgtggccgatatcgtcggcgacagcctggcgctcgcccgcaaggcgatcgaggtcgacgccgatgtcatcgtgcttgccggcgtgcatttcatggccgagaccgccaagctgctgaaccctgagaaaacagtattgatcccggatctcggcgccggctgttcgctggcggattcgatcacgcccgaggatatcgccctgctgcgccaggcccatcccggcgtgcccatcgtcacctatgtcaacacctcggccgcagtgaaggctgcctccgacatctgctgcacctcgggcaatgccaagcaggtggtggaatcgctcggcgtgccgaaggtgctgatgatcccggacgaatatctggcgcgcaacgtcgcccgcgagactggcgtcgagatcatcgcctggcatggccattgcgaggtgcacgaactcttcaccgccgaggatgtgcgccagctgcgcgaaaaccatccgggcgtgacggtactcgcccatccggaatgcccgcccgaagtggtggcggaagccgatttcgccggctccaccgctgtcatgtcggactatgtcggcaggcagaagccggcacgcgtcgtgctgctcaccgaatgctcgatgagcgacaatgtcgccgtgcaccatcccgatgtcgagttcattcgcccctgcaatctctgcccgcatatgaagcgcatcacgctggccaatatccgcgcggcactcgaggaaaatcgccacgaggtcaccgtcgatccggcaattgcggtggccgcgcgccgcgccgtcgagaggatgctggcgatatga

SEQ ID NO: 50848 - protein, 323 aa, Rhizobium leguminosarum bv. viciae 3841
MNYPVSASSLYERVSRVIPKAEWMTFENDVDAILELKRRRNAVILAHNYQTPEIFHGVADIVGDSLALARKAIEVDADVIVLAGVHFMAETAKLLNPEKTVLIPDLGAGCSLADSITPEDIALLRQAHPGVPIVTYVNTSAAVKAASDICCTSGNAKQVVESLGVPKVLMIPDEYLARNVARETGVEIIAWHGHCEVHELFTAEDVRQLRENHPGVTVLAHPECPPEVVAEADFAGSTAVMSDYVGRQKPARVVLLTECSMSDNVAVHHPDVEFIRPCNLCPHMKRITLANIRAALEENRHEVTVDPAIAVAARRAVERMLAI

SEQ ID NO: 50849 - DNA, 930 bp, Solibacter usitatus Ellin6076
  CDS (1)..(930): transl_table=11
atgttgtccgttacctctattgccgacgaaatcctggaactcaagaaccagcggcgagccatcctgctcgcgcaccattaccaggagcccgaaattcaggaactcgccgacgtggtgggcgatagcctcgaactcgcccggaaggcgcgcgatttcgaaggcggcgtgatcgccttctgcggcgtctggttcatggccgaaaccgccaaagtgctcaaccccaagcgcgtggtggtggtgccggatcgcgaggccagttgcagcctggtggagagctgccccgtggaacccgtacgcgagttccgcctcaagcatcccgagtacgtggtggtcagctacatcaatacctccatcgaagtgaaggccgagagcgatatcctctgcacctcgcgcaacgccgtgaagatcgtgaattcgattcccgccgagaagccggtgctcttcctgccggacagcaacctgggaaattacgtccgcagagagaccggtcgcgagaacatgaagatctggcagggcacctgcatcgtgcacgcgacctttccggcgcggcggctggcgcaggccagggccgagcaccccgaagccgaagtggtggcgcaccccgagtgccccgcatccgtgctcgcgatggcggatttcatcggctctacctccgcgctcatcgaatactgcgtggccagcaaggcgcgcgagttcatcgtaatgaccgagagcggcgtaaattattcgctgcgcaagctcgcgccggagaagcagttctattacgtggccaacgaaaactgcaattgcagcgaatgcccgtacatgaagctcaacacgctggagaagctgcgcgattgcctgcgcgacctgcaaccgcgggtcgagctctccgacgacatcatgcggcgggcgctggtcccgctggagcgaatgctcgcggtgaaataa

SEQ ID NO: 50850 - protein, 309 aa, Solibacter usitatus Ellin6076
MLSVTSIADEILELKNQRRAILLAHHYQEPEIQELADVVGDSLELARKARDFEGGVIAFCGVWFMAETAKVLNPKRVVVVPDREASCSLVESCPVEPVREFRLKHPEYVVVSYINTSIEVKAESDILCTSRNAVKIVNSIPAEKPVLFLPDSNLGNYVRRETGRENMKIWQGTCIVHATFPARRLAQARAEHPEAEVVAHPECPASVLAMADFIGSTSALIEYCVASKAREFIVMTESGVNYSLRKLAPEKQFYYVANENCNCSECPYMKLNTLEKLRDCLRDLQPRVELSDDIMRRALVPLERMLAVK

SEQ ID NO: 50851 - DNA, 1014 bp, Mycobacterium sp. KMS
  CDS (1)..(1014): transl_table=11
gtgacgctgcttgacgagaccgcttcggcgcagttcggtgacgacgtcgcgcccaccgaggagtgggccgccgaagtccgccgcctggcccggcagcgcggggccactctgctcgcgcacaactaccagctgccggcgatccaggacgtcgccgaccacgtgggcgattcgctggccctgtcgcggatcgcggccgaggcgccggaggacaccatcgtgttctgcggtgtgcacttcatggccgagaccgccaagatcctctcgccggacaagaccgtgctgatccccgacgccagggcgggctgctcgctggccgattcgatcaccgccgaccagctgcgggagtggaaggccgaataccccggcgcggtggtcgtgtcgtacgtcaacaccaccgccgcggtgaaggccgagaccgacatctgctgcacctcgtccaacgccgtcgacgtcgtggcgtcgatccccgccgaccgtgaggtgctgttctgccccgaccagttcctcggcgcccatgtccgccgcgtcaccggccggacgaacatgcagatctgggccggcgagtgccacgtacacgccggcatcaacggtgacgagctcgccgaccaggcccgcgcgcatccggatgccgaactgttcgtccatcctgagtgcggatgcgccacctcggcgctctacctcgccggcgagggcgcgttccccgccgaccgggtgaagattttgtcgacgggcggcatgctcgacgcggcccgcgagagccgggccagccaggtgctggtggccaccgaggtcggcatgctgcaccaactgcgtcgtgcggccccggagatcgacttccaggcggtcaacgaccgggcctcgtgccggtacatgaagatgatcacgccggccgcgctgttgcgctgcctgacctacggcaccgacgaggtcgacgtcgaccacgagaccgcccggctggcccggcgcagcgtgcagcggatgatcgagatcgggcagcccggcggcggggaatga

SEQ ID NO: 50852 - protein, 337 aa, Mycobacterium sp. KMS
MTLLDETASAQFGDDVAPTEEWAAEVRRLARQRGATLLAHNYQLPAIQDVADHVGDSLALSRIAAEAPEDTIVFCGVHFMAETAKILSPDKTVLIPDARAGCSLADSITADQLREWKAEYPGAVVVSYVNTTAAVKAETDICCTSSNAVDVVASIPADREVLFCPDQFLGAHVRRVTGRTNMQIWAGECHVHAGINGDELADQARAHPDAELFVHPECGCATSALYLAGEGAFPADRVKILSTGGMLDAARESRASQVLVATEVGMLHQLRRAAPEIDFQAVNDRASCRYMKMITPAALLRCLTYGTDEVDVDHETARLARRSVQRMIEIGQPGGGE

SEQ ID NO: 50853 - DNA, 1113 bp, Neisseria meningitidis FAM18
  CDS (1)..(1113): transl_table=11
atgcaaaccgccgcccgccgctcgttcgattacgatatgcccctcattcaaacgccgacttccgcctgccaaatccgtcaggcgtgggcgaaggttgccgacacgcccgaccgcgaaacggcaggccgtctgaaagacgaaatcaaggctttgctgaaggagaaaaacgcggtcttggtggcgcattattatgttgatccgctgattcaggatttggctttggaaacgggcggatgcgtgggcgattcgctggaaatggcgcgctttggtgcggaacacgaagccgatacattagtggtggcgggcgtgcgtttcatgggcgagagcgcgaaaatcctctgccctgaaaaaacagtgctgatgcctgatttggaggcggaatgttctttggatttgggttgcccggaagaggcgttttcggcgttttgcgaccaacaccccgaccgcacggtggtggtgtacgccaacacttccgccgccgtgaaagcgcgtgccgactgggtggtaacgtcttcagtggcgttggaaatcgtgtcgtatctgaaatcgcgcggcgagaagctgatttggggacccgaccgccacctcggcgactacatctgccgcgaaacgggcgcggatatgctgttgtggcagggttcgtgcatcgtccacaacgaatttaaagggcaggagctggcggcgttgaaagcggaacatcccgacgcggtggtgctggttcatcctgaatcgccgcaaagcgtcatcgaactgggcgacgtggtcggctcgaccagcaaactgctcaaggccgccgtatcgcgtcctgaaaaaaaattcatcgtggcgaccgatttgggcatcctgcacgaaatgcaaaagcaggcgcccgacaaagaatttatcgccgcgccgacggcgggcaacggtggaagctgtaaaagctgcgcgttctgcccgtggatggcgatgaattcgctgggcggcatcaaatacgccctgacaagcggacgtaacgaaatcctgttggacaggaagctgggcgaagccgccaaactgcctttgcagcgtatgctcgacttcgcggcaggactcaaacgcggggatgtgttcaacggcatgggtcccgcctga

SEQ ID NO: 50854 - protein, 370 aa, Neisseria meningitidis FAM18
MQTAARRSFDYDMPLIQTPTSACQIRQAWAKVADTPDRETAGRLKDEIKALLKEKNAVLVAHYYVDPLIQDLALETGGCVGDSLEMARFGAEHEADTLVVAGVRFMGESAKILCPEKTVLMPDLEAECSLDLGCPEEAFSAFCDQHPDRTVVVYANTSAAVKARADWVVTSSVALEIVSYLKSRGEKLIWGPDRHLGDYICRETGADMLLWQGSCIVHNEFKGQELAALKAEHPDAVVLVHPESPQSVIELGDVVGSTSKLLKAAVSRPEKKFIVATDLGILHEMQKQAPDKEFIAAPTAGNGGSCKSCAFCPWMAMNSLGGIKYALTSGRNEILLDRKLGEAAKLPLQRMLDFAAGLKRGDVFNGMGPA

SEQ ID NO: 50855 - DNA, 1125 bp, Acidovorax sp. JS42
  CDS (1)..(1125): transl_table=11
atgaatacgaccgccatcaaggacgtcgagtacgaacagcccctcgcgggcgcggacggcgccacctgctccaccaagcacgcctgggcgcgtgtgccgcccgagttatcgcccgccgagcgtgccgcgctcaaggacaggatccgccgcctgctgaaagagaagaacgcggtgatggtgtcgcactactacgtgcacccggacctgcaggacctggccgaggaaaccggcggcatcgtcagcgattcgctggagatggcgcgctttggccgcgaccacgcggcgcagacactggtggtgagcggcgtgcgcttcatgggcgagacggccaagatcctcagccccgagaagaccgtgctcatgcccgacctggacgcgacctgctcgctggacctgggctgccccatcgacgagttcagcgctttctgcgaccagcaccccgaccgcacggtggtggtctacgccaacaccagcgccgccgtgaaggcgcgtgccgactggctggtcacgtccagctgcgcgctggacatcgtgcgtgcgctcaaggatgcgggccaacgaatcctgtgggcccccgaccgccacctgggcgcctacatcgagcgcgaaacgggcgccgacatggtgttctggaacggtgcatgcatcgtgcacgacgagttcaaggcgctggagttggagttgctcaagaaggaacacccgcaagccaaggtgctcgtgcaccccgagagcccgcccgaggtcgtggccctggccgacgccgtgggttcgacgtccgccatcctccaggctgcgcgtgaaatggacgcgcgcgagttcatcgtcgccaccgacaacggcatgatgcacaagctgcgcaggctcaaccccggcaagaccttccacgaggcccccaccgccggcaacagcgccacctgcaagagctgcgcgcattgcccctggatggccatgaacggactggccgacgtggcgcgcgtgctggagaccggcgccaacgccatccatgtggaccccgcgctgatcccgcgcgcgcgccaacccatcgaccgcatgctggccttcaccgcggcgctcaagagcggacagcccgcgggtgcgctggtgccgcatttcggggcggcctga

SEQ ID NO: 50856 - protein, 374 aa, Acidovorax sp. JS42
MNTTAIKDVEYEQPLAGADGATCSTKHAWARVPPELSPAERAALKDRIRRLLKEKNAVMVSHYYVHPDLQDLAEETGGIVSDSLEMARFGRDHAAQTLVVSGVRFMGETAKILSPEKTVLMPDLDATCSLDLGCPIDEFSAFCDQHPDRTVVVYANTSAAVKARADWLVTSSCALDIVRALKDAGQRILWAPDRHLGAYIERETGADMVFWNGACIVHDEFKALELELLKKEHPQAKVLVHPESPPEVVALADAVGSTSAILQAAREMDAREFIVATDNGMMHKLRRLNPGKTFHEAPTAGNSATCKSCAHCPWMAMNGLADVARVLETGANAIHVDPALIPRARQPIDRMLAFTAALKSGQPAGALVPHFGAA

SEQ ID NO: 50857 - DNA, 972 bp, Crocosphaera watsonii WH 8501
  CDS (1)..(972): transl_table=11
gtgttcactactgttagaccgacccgaccccaacctgcgatcgcacttcccaaagacttattttgtgccattgatgagctaaaaagagagttaaaagcggtagttttggctcattattaccaagatcctgatattcaagacattgctgactttatcggtgattctctgggactttctcaacaagcagccaccactgataaggaagtgattgtctttgcgggggttcactttatggcagaaactgctaaaattctcaatcctgataaattagtcttattacctgatctagaggccgggtgttctttagcagatagttgccccccgaaagagtttgctgagtttaaggagcaacatcccactgctattgttgtatcttatattaattgtaccgcagatatcaaagctatgagtgatgttatctgcaccagttccaatgcggttaaaattgttaatcaactcccgaaagatcgtcctattatttttggtccagatcgcaatttaggccggtatgttgcccaacaaacaggaagagatttaatcctgtggcaaggcagttgtattgtccatgaaacattctcagaaaagaaaattgttcagctaaagattgaacatcctaatgcggagattattgcccatcctgagtgcgaagaaacggttttacgccatgctaaatatattggttctaccacagccttattaaagtattctcagcaaagttctcaaggcacttttattgtagcgacggaaccaggtattatccatcaaatgcaaaaagaagccccaagtaaacggtttattccggcaccagctatgaataactgtagttgtaatgaatgcccccatatgcgtctgaataccttagaaaagttgtatttatccatgaagcataaacagccagaaattatcatggatgaatctattcgtcaagctgccttaaaaccgattcaaagaatgttagaaatgtctaagtaa

SEQ ID NO: 50858 - protein, 323 aa, Crocosphaera watsonii WH 8501
MFTTVRPTRPQPAIALPKDLFCAIDELKRELKAVVLAHYYQDPDIQDIADFIGDSLGLSQQAATTDKEVIVFAGVHFMAETAKILNPDKLVLLPDLEAGCSLADSCPPKEFAEFKEQHPTAIVVSYINCTADIKAMSDVICTSSNAVKIVNQLPKDRPIIFGPDRNLGRYVAQQTGRDLILWQGSCIVHETFSEKKIVQLKIEHPNAEIIAHPECEETVLRHAKYIGSTTALLKYSQQSSQGTFIVATEPGIIHQMQKEAPSKRFIPAPAMNNCSCNECPHMRLNTLEKLYLSMKHKQPEIIMDESIRQAALKPIQRMLEMSK

SEQ ID NO: 50859 - DNA, 969 bp, Prosthecochloris aestuarii DSM 271
  CDS (1)..(969): transl_table=11
atgacagcactacagccatacaccatcccttctcaggatgacagacagagcgttcttgccgacaagatcaaaaggctcagagaggagcgaaatgccattattctcgcccattactataccgttcctgaaattcagcaggttgccgatgtcgttggtgacagccttgccctggcccgtgcagccgaaacaaccgatgcagatgtgattgtttttgcaggtgtctatttcatgggagagacggcaaagattctcaatcccggaaaaacagtgctgatgcctgataattctgcgggctgtcctcttgctgacagttgtccggccgacagattccggtctttcagagagcagtatccggatgcgctggtgatcagttatatcaactccacggctgaaatcaaagctgagtcggatatcatctgtacctcatcgaacgcagtcgatatcgtcagtcagattccttcggataaacgaattattttcggaccggatagaaatctcggtagttacgtgatgcagcagcttgagcgcgagatgattctttggcagggtttctgctatgttcacgagtcgtatagttgggatgttatcgagacggcagttcggcagtttcccgatgcgcagctgattgcacaccccgaatgccgccgagaggttctcgatcatgctgatttcgttggttcgacgggcgctttgcttgcctatagccaaaagagtccggctgatgcatttatcgtagctaccgagccggggatcctctatgagatgaagaaacgctctccggaaaagagctttattgcggctcctaaagatatcgtctcttcccagagcgtctgcagtcagatgaagcagaatacgatggagaacctctgcaattgccttgagaccatggccccgcaaattgttgtcgacgagacgctggctgctggagcgttgaaatcaatcaggaaaatgctcgagatgtcgaaataa

SEQ ID NO: 50860 - protein, 322 aa, Prosthecochloris aestuarii DSM 271
MTALQPYTIPSQDDRQSVLADKIKRLREERNAIILAHYYTVPEIQQVADVVGDSLALARAAETTDADVIVFAGVYFMGETAKILNPGKTVLMPDNSAGCPLADSCPADRFRSFREQYPDALVISYINSTAEIKAESDIICTSSNAVDIVSQIPSDKRIIFGPDRNLGSYVMQQLEREMILWQGFCYVHESYSWDVIETAVRQFPDAQLIAHPECRREVLDHADFVGSTGALLAYSQKSPADAFIVATEPGILYEMKKRSPEKSFIAAPKDIVSSQSVCSQMKQNTMENLCNCLETMAPQIVVDETLAAGALKSIRKMLEMSK

SEQ ID NO: 50861 - DNA, 972 bp, Xylella fastidiosa Dixon
  CDS (1)..(972): transl_table=11
gtgaaccacgccgttttattttcgtgtatcgataaatgcggcgactgtttcgcctcagaagcagcgcgtataaagtttgacaatgacattgaggcgatcttcgaactcaaacgcaaacgaaacgctgtcattcttgcgcataattaccaaactccagagatctttcatggtgttgccgacattgtgggtgacagcctcgcattagcccgtaaggcaattgatgtcgatgccgatgtgatcgtccttgccggagtgcatttcatggcagagaccgcaaaactgctgaatccagaaaaaaccgtattgatccccgatatggaggcaggttgctctttagcggagtcgattacaccggaagacgtagccttattacgtcaggcgcatcctgacattcctattgtcacctatgtgaatacttcagcagccgtaaaagcggcttcagatatctgctgcacctcaggcaatgccaaaaaggtggtggaagcacttagtgttcccaaagttctaatgattccagacgaatatttagcacgcaatgttgccaaagaaacggaagtccagatcatttcatggcatggtcattgcgaagtccatgaacttttctcagccagcgatatcttgcagcttcgcgaaaatcatccaggtgtcaccgtactcgcccatcccgaatgtccgccagatgtggtggcagcagcagattttgcaggctccacagcagcgatgtccgactatgtcactactaagcagcccaagcgagtcgtacttctcacagaatgctcaatgagcgataacatcgccgtccatcatccagatgttgagttcatcagctcctgcaatctttgcccgcacatgaaacggatcacgcttaccaatatccgaaccgccttggaagaaaaccgtcacgaagtcacggtagatgcaaaaattgcagcccccgcacgacgcgccgttgaaaggatgttggcgatatga

SEQ ID NO: 50862 - protein, 323 aa, Xylella fastidiosa Dixon
MNHAVLFSCIDKCGDCFASEAARIKFDNDIEAIFELKRKRNAVILAHNYQTPEIFHGVADIVGDSLALARKAIDVDADVIVLAGVHFMAETAKLLNPEKTVLIPDMEAGCSLAESITPEDVALLRQAHPDIPIVTYVNTSAAVKAASDICCTSGNAKKVVEALSVPKVLMIPDEYLARNVAKETEVQIISWHGHCEVHELFSASDILQLRENHPGVTVLAHPECPPDVVAAADFAGSTAAMSDYVTTKQPKRVVLLTECSMSDNIAVHHPDVEFISSCNLCPHMKRITLTNIRTALEENRHEVTVDAKIAAPARRAVERMLAI

SEQ ID NO: 50863 - DNA, 972 bp, Xylella fastidiosa Ann-1
  CDS (1)..(972): transl_table=11
gtgaaccacgccgttttatcttcgtgtatcgataaatgcggcgactgtttcgcctcagaagcagcgcgtataaagtttgacaatgacattgaggcgatcttcgaactcaaacgcaaacgaaacgctgtcattcttgcgcataattaccaaactccagagatctttcatggtgttgccgacattgtgggtgacagcctcgcattagcccgtaaggcaattgatgtcgatgccgatgtgatcgtccttgccggagtgcatttcatggcagagaccgcaaaactgctgaatccagaaaaaaccgtattgatccccgatacggaggcaggttgctctttagcggagtcgattacaccggaagacgtagccttattacgtcaggcgcatcctggcattcctattgtcacctatgtgaatacttcagcagccgtaaaagcggcttcagatatctgctgcacctcaggcaatgccaaaaaggtggtggaagcacttggtgttcccaaagttctgatgattccagacgaatatttagcacgcaatgttgccaaagaaacggaagtccagatcatttcatggcatggtcattgcgaagtccatgaacttttctcagccagcgatattttgcagcttcgcgaaaatcatccaggtgtcaccgtactcgcccatcccgaatgtccgccggatgtggtggcagcagcagattttgcaggctccacagcagcgatgtccgactatgtcactactaagcagcccaagcgagtcgtacttctcacagaatgctcaatgagcgataacatcgccgtccatcatccagatgttgagttcatcagctcctgcaatctttgcccgcacatgaaacggatcacgcttgccaatatccgaaccgccttggaagaaaaccgtcacgaagtcacggtagatgcaaaaattgcagcccccgcacgacgcgccgttgaaaggatgttggcgatatga

SEQ ID NO: 50864 - protein, 323 aa, Xylella fastidiosa Ann-1
MNHAVLSSCIDKCGDCFASEAARIKFDNDIEAIFELKRKRNAVILAHNYQTPEIFHGVADIVGDSLALARKAIDVDADVIVLAGVHFMAETAKLLNPEKTVLIPDTEAGCSLAESITPEDVALLRQAHPGIPIVTYVNTSAAVKAASDICCTSGNAKKVVEALGVPKVLMIPDEYLARNVAKETEVQIISWHGHCEVHELFSASDILQLRENHPGVTVLAHPECPPDVVAAADFAGSTAAMSDYVTTKQPKRVVLLTECSMSDNIAVHHPDVEFISSCNLCPHMKRITLANIRTALEENRHEVTVDAKIAAPARRAVERMLAI

SEQ ID NO: 50865 - DNA, 1053 bp, Oceanicola batsensis HTCC2597
  CDS (1)..(1053): transl_table=11
ttgctcgaccagatcgcgttgcgcgccgaactcgccgatcactacgatctatctccgtccaccgacatcgccaaggcaaatgctgacatctacgcccggatggaccgtgtcgtgacgccccccgactgggcggtctacgcgccgtatgtcgccgcgatcaacaagctgaagaaggaacgcaacgcggtcatcctggcccacaattacatgacgccggagatctaccacggcatcgcggacgtggtcggcgacagcctgcagctggcgatcgaggcgaccaaggtcgaagccgacgtgatcgtgcaatgcggcgttcatttcatggccgagacgtcgaagatcctgaacccgtccaagacggtgctgatccccgacatggacgcgggctgttcgctggccgaaagcataacccccgccggcatcgccgagatgcgggcgaaataccccggtgcgccggtcgtcacctacgtgaacaccaccgccgaggtgaaggcggcatccgatatctgctgcacctcctcgaacgcggtgcagatcgtgcgcgggctggacgcggacacggtcatcatgacgccggacaagtacctggcgcagaacatcgcacagcaggtgccggaaaagcggatcgtctggtgggacgggtcgtgcatcgtgcacgaacaatacaccgcgcgggacctgaaggatttccgcgaatggaaccccggcacccggatcatcgcgcatcccgaatgcccccccgacgtggtggccgaggccgatttctcgggctcgaccagcgggatcatcgattacgtcacgcgggaacgtcctgaaaaggcgatgctggtgacggaatgttcgatggcctcgaacatctcggacgcgctgccggacgtggatttcgtgggcccctgcaacatgtgcccctacatgaagaagatcacgctggaaaaggtgctgtggtcgctgcacacgatgcagggcgcggtcgaggtcgacccggcggtggccgaccgggcgcgtatcgccgtgcagcgcatgatcgacctttccgccaagctggccggctga

SEQ ID NO: 50866 - protein, 350 aa, Oceanicola batsensis HTCC2597
MLDQIALRAELADHYDLSPSTDIAKANADIYARMDRVVTPPDWAVYAPYVAAINKLKKERNAVILAHNYMTPEIYHGIADVVGDSLQLAIEATKVEADVIVQCGVHFMAETSKILNPSKTVLIPDMDAGCSLAESITPAGIAEMRAKYPGAPVVTYVNTTAEVKAASDICCTSSNAVQIVRGLDADTVIMTPDKYLAQNIAQQVPEKRIVWWDGSCIVHEQYTARDLKDFREWNPGTRIIAHPECPPDVVAEADFSGSTSGIIDYVTRERPEKAMLVTECSMASNISDALPDVDFVGPCNMCPYMKKITLEKVLWSLHTMQGAVEVDPAVADRARIAVQRMIDLSAKLAG

SEQ ID NO: 50867 - DNA, 939 bp, Prochlorococcus marinus str. MIT 9211
  CDS (1)..(939): transl_table=11
atgccggttcccaagcgacgggaagttatcagagaaaagattgagctgctgtgtagagaaaaaaatgcaattattcttgctcattactaccaagatccagagattcaggatttagcgcactttattggggattcattggatctatctcgtaaagctgcaaaaacaaatgctgaagtaatagttttctgcggtgtacatttcatggctgaaacagcaaaaatcctaagtcctaataaaactgtattaattccagatttggatgctggttgttcgctggcagatgattgcccagaagatgcatttagaaagttttgcaataagagttcagaccattatgtaattagttatataaattgttccgccgctattaaagcccaaagtgacttaatatgcacaagtagtaatgcagttgaattagtaaaacaaattcctagagatgtaaatattatatttgctccagacaaaaatctaggccgttgggtagaaaagcaaagtggtaggaaaatgaacctatgggatggctcatgcattgtccacgaaacattcagtgaagaagaagtccttaaactaaaaattaatcatcccaatgcagaaattattgcccatccagaatgtcagcaaaatttgttagacttatctaattttattggttcaactagtagattgcttgattatatacaaaatagcaattcaagtgaatttatagttttaactgagccaggcatattacatcaaatgaaaataaaagagccccaaaaaaagttttttgatgtaccaggtattaatggatgtagctgtaatgaatgcccatacatgagacttaacacaattgaaaagctattaagttgcctagagactatgcagcctgagatcgaaataaaagaagatataagaatacgagcactaaagcccataaaaaaaatgttagaaatgagctaa

SEQ ID NO: 50868 - protein, 312 aa, Prochlorococcus marinus str. MIT 9211
MPVPKRREVIREKIELLCREKNAIILAHYYQDPEIQDLAHFIGDSLDLSRKAAKTNAEVIVFCGVHFMAETAKILSPNKTVLIPDLDAGCSLADDCPEDAFRKFCNKSSDHYVISYINCSAAIKAQSDLICTSSNAVELVKQIPRDVNIIFAPDKNLGRWVEKQSGRKMNLWDGSCIVHETFSEEEVLKLKINHPNAEIIAHPECQQNLLDLSNFIGSTSRLLDYIQNSNSSEFIVLTEPGILHQMKIKEPQKKFFDVPGINGCSCNECPYMRLNTIEKLLSCLETMQPEIEIKEDIRIRALKPIKKMLEMS

SEQ ID NO: 50869 - DNA, 1002 bp, Erythrobacter sp. NAP1
  CDS (1)..(1002): transl_table=11
atgagcatcgagaccaaagtgcccaccggcgacgatttgctggccgagatcaatcggcttcgcaaggagcgcaacgcggtcatcctcgcgcattattaccagacccccgatattcaggatatcgccgacttcgtgggcgacagccttgaactgtcacgcaaggccgccgaaaccgacgccgacgtcatcctgttctgcggcgtcaagttcatggcggacacggccaaaatcctgtcgcccgaaaagaccgttatcctgcctgacatggatgcaggctgcagcctcgaagacagctgcccgccggacaagttcaaggctttccgcgaagcgcatcccgatcacatcgcgctcacctacatcaactgctcgaccgaggtgaaagcgctttccgacgtcatcgtcaccagctccagcgcggagacgatcctgtcgcaaatcccgcctgagcagaaaatcatcttcggtcccgaccgccaccttggtggctggctcagccgcaatttcaatcgcgagatgcttctgtggccgggcgtgtgcatcgtacacgaggctttcagcgagaccgagctcctaaagctcaaggaacagcaccccgatgcgccgatcgccgcgcacccggaatgcccgcccgcgatcatcgaacacgccgatcacgtcgggtcgacaagctcaatcctgaacttcgccaagaacttcgaaggcgacacgcttatcgtcgcaactgaaccgcacatcatgcaccagatggagaaggcgcttcccgagaagaccttcatcggtgcgcccggtgcggacggcaactgcaactgcaacatctgcccctacatggcgttgaacaccatggagaagatgtacaccgccctgcgcgatctcgaaccgcgcatcgaaatcgacgaagacctgcgcctcaaagccaaggccagcctcgaccgcatgctcgagatggcaagcggcacggtcggcatgggcgatctcgggcaggtgccgttcaaggcggattga

SEQ ID NO: 50870 - protein, 333 aa, Erythrobacter sp. NAP1
MSIETKVPTGDDLLAEINRLRKERNAVILAHYYQTPDIQDIADFVGDSLELSRKAAETDADVILFCGVKFMADTAKILSPEKTVILPDMDAGCSLEDSCPPDKFKAFREAHPDHIALTYINCSTEVKALSDVIVTSSSAETILSQIPPEQKIIFGPDRHLGGWLSRNFNREMLLWPGVCIVHEAFSETELLKLKEQHPDAPIAAHPECPPAIIEHADHVGSTSSILNFAKNFEGDTLIVATEPHIMHQMEKALPEKTFIGAPGADGNCNCNICPYMALNTMEKMYTALRDLEPRIEIDEDLRLKAKASLDRMLEMASGTVGMGDLGQVPFKAD

SEQ ID NO: 50871 - DNA, 966 bp, Synechococcus sp. RS9917
  CDS (1)..(966): transl_table=11
atgaccgcggactccccagcgtccacggccgcgacagcggtgccggctgaccttcccgccgccatcgaagccctgcggcaagagcgccatgcggtgatcctggcgcactactaccaggaaccagagatccaggatgtcgccgatttcatcggagattcgctcgagctctcacgaaaagccgccgccaccgatgccgatgtgatcgtgttctgtggcgttcacttcatggcggaaacggccaagatcctcagccccaacaaaaccgtgctgcttccggatctggaggccggctgctccctggccgacgactgccctgccgacgccttcgccgcattccgcgcccagcatcccgatcacatcgtcgtcagttacatcaactgcacggccgctgtgaaagcccagagcgatctgatctgcaccagcagcaatgcggtggatctggtgaagcaactccccgccgatcggccgatcctgttcgcacccgatcgcaacctcggacgctgggtgcaacaacaaagcggccgggagctcaccctctggccagggcgctgcatcgtgcacgaaaccttcagtgaggaagcggtgctcaaactgcagctccaacatcctgaggcggaggtgatcgcccacccggaatgcctggaaccgttgttggatctggccgacttcatcggctccaccagcaagctgctgcaccacgccgaagccagcccagcgcctagcttcatcgtgctcaccgagcctggcatcctccatcagatggagcaacgccttccccagaaaacgttcctgtcggtgcccggaatcgatggctgcagctgcaatagctgcccctacatgcggctcaacacgctggaaaaactctggcgctgcctccacagcggccaaccggagatccagatggaggaagacctgcgcctgcgggcactggcgccgatccagaagatgttggagttgagcctctga

SEQ ID NO: 50872 - protein, 321 aa, Synechococcus sp. RS9917
MTADSPASTAATAVPADLPAAIEALRQERHAVILAHYYQEPEIQDVADFIGDSLELSRKAAATDADVIVFCGVHFMAETAKILSPNKTVLLPDLEAGCSLADDCPADAFAAFRAQHPDHIVVSYINCTAAVKAQSDLICTSSNAVDLVKQLPADRPILFAPDRNLGRWVQQQSGRELTLWPGRCIVHETFSEEAVLKLQLQHPEAEVIAHPECLEPLLDLADFIGSTSKLLHHAEASPAPSFIVLTEPGILHQMEQRLPQKTFLSVPGIDGCSCNSCPYMRLNTLEKLWRCLHSGQPEIQMEEDLRLRALAPIQKMLELSL

SEQ ID NO: 50873 - DNA, 957 bp, Synechococcus sp. WH 5701
  CDS (1)..(957): transl_table=11
ttggtttttgccgcccttgaagcccccaccaacccccgcgacctgccggccgcgatcgatgagctgcgccgagcccgcaaggccgtgatcctggctcactattaccagagccccgaaatccaggatgtggccgatttcatcggcgactcgctagagctctcgcgcaaggcagccggcactgatgccgaggtgatcgtgttctgcggcgttcacttcatggccgagaccgccaagattctcagccccggaaaaacggtgctgctgccggatctggaggcgggctgctccctggccgatgcctgccccgccgatggcttcgccgccttccgcgccgagcatccggaccacctggtggtgagctacatcaactgctcggcggcggtgaaggcccagagcgacctgatctgcaccagcagcaacgccgtgcgcctggtgcagcagctgccgactgatcggccgatcctgtttgcaccggatcagaacctgggccgctgggtggcccgccagagcggccgggagctcaccctctggccgggaggctgcatcgtccatgaaaccttcagcgagcaggcgctgctgcggctgaagctggagcacccgcaggccgaggtgatcgcccacccggagtgcctgcccaatctgctggatctggccgacttcatcggctccaccagccagctgctggcccgcgccgccagcagcgaggcccacagcttcctggtgctcaccgagcccggcatccttcaccagatgcgcctaaagctgccccacaaaaccttccatgaggtgcccggacaggacggctgcagctgcaacgcctgtccctacatgcggctgaacaccctggagaagctgtggcgctgcctggacacgatgagcccggcgatcgaactggatgaggagctgcgcgtcagggccctggcaccgatccagcgcatgctggagctgagccggtag

SEQ ID NO: 50874 - protein, 318 aa, Synechococcus sp. WH 5701
MVFAALEAPTNPRDLPAAIDELRRARKAVILAHYYQSPEIQDVADFIGDSLELSRKAAGTDAEVIVFCGVHFMAETAKILSPGKTVLLPDLEAGCSLADACPADGFAAFRAEHPDHLVVSYINCSAAVKAQSDLICTSSNAVRLVQQLPTDRPILFAPDQNLGRWVARQSGRELTLWPGGCIVHETFSEQALLRLKLEHPQAEVIAHPECLPNLLDLADFIGSTSQLLARAASSEAHSFLVLTEPGILHQMRLKLPHKTFHEVPGQDGCSCNACPYMRLNTLEKLWRCLDTMSPAIELDEELRVRALAPIQRMLELSR

SEQ ID NO: 50875 - DNA, 933 bp, Synechococcus sp. WH 7805
  CDS (1)..(933): transl_table=11
atgagcgctgacaccgcccttgttgcggcgatcaaccgactccgcaaggaacgcaacgctgtgatccttgcgcattactaccaggagccggcaatccaggacatcgctgatttcatcggcgattccctcgagctctcacgaaaagcggcaagcaccgatgcagatgtgatcgtgttctgcggcgttcatttcatggctgaaaccgcaaaaatcctcagtccagaaaaaacagttgttctgccggacctcgacgcgggatgctccctggcggatgactgtccagccgatgaattcgccagattccgcgctgagcatccggatcaccttgtggtgagctacatcaattgcaccgcggcggtgaaagcacagagtgatctgatctgcaccagcagcaatgctgtggacctggtcaatcagctgccggccgaccggccgatcttgtttgctccagatcagaatctcggccgttgggtgcagcgccagagcggccgtgacctcaccctctggccaggacgttgcatcgtccatgaaaccttcagtgaagaggcggtgttacgcctgaagctcgagaatcccaaagctgaggtaatcgctcacccggaatgccaggagaatcttctggatctggccgatttcatcggctccaccagcaaactgctcaattacacacaaacaagctgttccgacactttcattgtgttgactgagccggggattctccatcagatgaagcagcgggtgccggacaaaacgctgatcgatgtaccaggactcgatggctgcagctgcaacgcctgtccctacatgcgtctgaacacgctggagaagctgcgcgattgtcttgaaaaccttgcgcctcagatcgccatggaggaatcgctccgttctgatgccgaggctccgatccgccgcatgctcgagatgagtcgctga

SEQ ID NO: 50876 - protein, 310 aa, Synechococcus sp. WH 7805
MSADTALVAAINRLRKERNAVILAHYYQEPAIQDIADFIGDSLELSRKAASTDADVIVFCGVHFMAETAKILSPEKTVVLPDLDAGCSLADDCPADEFARFRAEHPDHLVVSYINCTAAVKAQSDLICTSSNAVDLVNQLPADRPILFAPDQNLGRWVQRQSGRDLTLWPGRCIVHETFSEEAVLRLKLENPKAEVIAHPECQENLLDLADFIGSTSKLLNYTQTSCSDTFIVLTEPGILHQMKQRVPDKTLIDVPGLDGCSCNACPYMRLNTLEKLRDCLENLAPQIAMEESLRSDAEAPIRRMLEMSR

SEQ ID NO: 50877 - DNA, 1062 bp, Photobacterium sp. SKA34
  CDS (1)..(1062): transl_table=11
atgagtattacatttgatccatcagagatggtatatccgtttccaccaaaaccagcccgactaactgatactgaaaaacagcaatatatcgagcaaattaaacaattgctaaaagaaaaagatgcagtattagtggcgcattattataccgatcctgaaatacaagcattggctgaagaaactggcggttttgttggtgattcactggaaatggctcgttttggtaatcaacatccagccaccaccttaattacttgtggtgtacgctttatgggagaatctgccaagatcctaacaccagaaaagcatgtattgatgccaaccttagatgcagaatgttcgcttgacttaggttgtcctattgatgcatttagcgagttttgcgatgctcaccccgatcatactgttgttgtttacgccaacacttcagctgcagtaaaagcacgtgctgattgggttgtaacgtcgagtattgcacttgaaattgttgagcatttagatagcgaagataaaaaaatcatttggggaccagatcgtcacttaggttcttatattcagaagaaaacaggtgcggagatgctgttgtggcagggtgaatgtattgttcacgacgagttttctgccaaagccctacgtgatatgaagcatttatatcctgacgccgctattcttgttcacccagaatcaccagcgagtgttgttgcattagctgatgctgtgggttcaacaagccagcttatcaaagctgcgaaagagctacctaatcagaagcttattgttgcaactgacaaaggtattttctttaagatgcagcaaatggtgccagagaaagaattagtagaggctccaacagcgggcgctggggcaacatgccgtagctgcgcacattgtccgtggatggcaatgaacggattgaaagcgatttataccgcattaaatgatggtggtgagcagcatgaaatttttgttgatgaatcgctacgtgaaaaatcactgatcccgttaaaccgaatgctagattttgcggctgaattgcagttaaaagtaaaaggtaatgcttaa

SEQ ID NO: 50878 - protein, 353 aa, Photobacterium sp. SKA34
MSITFDPSEMVYPFPPKPARLTDTEKQQYIEQIKQLLKEKDAVLVAHYYTDPEIQALAEETGGFVGDSLEMARFGNQHPATTLITCGVRFMGESAKILTPEKHVLMPTLDAECSLDLGCPIDAFSEFCDAHPDHTVVVYANTSAAVKARADWVVTSSIALEIVEHLDSEDKKIIWGPDRHLGSYIQKKTGAEMLLWQGECIVHDEFSAKALRDMKHLYPDAAILVHPESPASVVALADAVGSTSQLIKAAKELPNQKLIVATDKGIFFKMQQMVPEKELVEAPTAGAGATCRSCAHCPWMAMNGLKAIYTALNDGGEQHEIFVDESLREKSLIPLNRMLDFAAELQLKVKGNA

SEQ ID NO: 50879 - DNA, 1053 bp, Oceanospirillum sp. MED92
  CDS (1)..(1053): transl_table=11
atgctgagccaacaggatatttcggatcgcatccttattcaggagcactttgctaaagaacatcttccgcttgatatgaccattgagcaggtcgaagagcatcgtcagaagattaaacagcttcttaaagagaaggatgcctgcctggtcgcgcattactacactgaccctgtgcttcagcagcttgctgatgaaacaggcggctgtgtctctgattcccttgaaatggctcgctttggtaacgcgcatgaagcgagtacgctagtcgtagccggtgttaagtttatgggtgagacagcgaagatactgacacctgagaaaaaagtggtgatgccgactatagaggcaacatgttctctggatatcggttgtccaatcgatgagttttctgctttctgtgacgcgcatcctgatcatgaagtggttgtgtatgcgaatacatcggctgctgttaaagcacgcgctgactgggtggtgacctcgagcatcgcgcttcaggttgtagagcatcttgccgatcagggcaagaaagtgatttgggcgcctgataagcacctgggtacttatgttcagcgccagacaggcattgaaatgctgatgtgggatggtgcttgtattgttcatgaagagtttaaagcgaagggtattcttgatcttaaaaaggtttatcctgaagcggctgtgttagtacaccctgaatccccagacgctgttgttgaattggctgatgcagtgggttcaactactcagattatcaatgcagcacgtgacctgccgaatgagcagttcatcgtagcgactgacaaggcgatcttctacaagatgcagcaggctgcgccgggtaagcaattcattgaggcgcctacaggtggctcaggagcgacttgccgtagttgtgcgcattgcccgtggatggcaatgaatggacttgagagcgtgctacacgcccttgaaaccggcaaagatgaaatctttgtagatgaagagctgattgttgatgccagaaagccattgcagcgaatgctggatttctctgccagtcttaaaggttaa

SEQ ID NO: 50880 - protein, 350 aa, Oceanospirillum sp. MED92
MLSQQDISDRILIQEHFAKEHLPLDMTIEQVEEHRQKIKQLLKEKDACLVAHYYTDPVLQQLADETGGCVSDSLEMARFGNAHEASTLVVAGVKFMGETAKILTPEKKVVMPTIEATCSLDIGCPIDEFSAFCDAHPDHEVVVYANTSAAVKARADWVVTSSIALQVVEHLADQGKKVIWAPDKHLGTYVQRQTGIEMLMWDGACIVHEEFKAKGILDLKKVYPEAAVLVHPESPDAVVELADAVGSTTQIINAARDLPNEQFIVATDKAIFYKMQQAAPGKQFIEAPTGGSGATCRSCAHCPWMAMNGLESVLHALETGKDEIFVDEELIVDARKPLQRMLDFSASLKG

SEQ ID NO: 50881 - DNA, 1011 bp, Synechococcus sp. RS9916
  CDS (1)..(1011): transl_table=11
atgcctaggctgtggcccatcctgccgcagatggtccagatgaccgttgatttcaccccatcgacggccctgtctgctgccccgacgcctgctgaactccctgcggcgattgacgccctgcgccggaaaaaaaatgctgtgatcctggcgcattactaccaggagcccgaagtccaggacattgccgatttcatcggtgattcgctggagttgtcgcgcaaagccgctaacaccgatgcggacgtgatcgtgttctgcggcgtgcacttcatggccgagaccgccaagatcctcagccctcagaaaactgttctgctgccagatctggaggccggctgctccttggcagatgactgccctgctgatgcgtttgccgctttccgagctgagcatcccgaccacttcgtggtgagttacatcaattgcagtgcggcggtgaaggcccaaagcgatctgatctgcaccagcagtaacgccgtggatctcgtgcgccaattaccggccgaccgaccaattctgtttgcacccgatcgcaatctgggtcgctgggtccaggatcaaagcggacgggaactgaccctctggccagggcgctgcatcgtgcatgaaaccttcagcgaagaagcactgctcaagctgcagctgaaacacccagatgctgaagtcatcgcccatccggagtgcatccaaccgctgctggatttggccgacttcatcggctccaccagcaagctgttgaactatgccgagaccagcaactccaacactttcatcgtgctcacggagcccggcatcattcaccagatgcaacggcgcttgccccacaaggagtttctcgatgtgcctggcactgatggctgcagctgcaacgcctgcccctacatgcgcctgaacacgctggaaaagctgtggcactgcctgtccactggagcaccagccatcgagatggatgaaaccatgcgccaacgggctctcaagccgatcgaagccatgctcgcgatgagccgctaa

SEQ ID NO: 50882 - protein, 336 aa, Synechococcus sp. RS9916
MPRLWPILPQMVQMTVDFTPSTALSAAPTPAELPAAIDALRRKKNAVILAHYYQEPEVQDIADFIGDSLELSRKAANTDADVIVFCGVHFMAETAKILSPQKTVLLPDLEAGCSLADDCPADAFAAFRAEHPDHFVVSYINCSAAVKAQSDLICTSSNAVDLVRQLPADRPILFAPDRNLGRWVQDQSGRELTLWPGRCIVHETFSEEALLKLQLKHPDAEVIAHPECIQPLLDLADFIGSTSKLLNYAETSNSNTFIVLTEPGIIHQMQRRLPHKEFLDVPGTDGCSCNACPYMRLNTLEKLWHCLSTGAPAIEMDETMRQRALKPIEAMLAMSR

SEQ ID NO: 50883 - DNA, 1074 bp, marine gamma proteobacterium HTCC2080
  CDS (1)..(1074): transl_table=11
atgaccattgcccaatcacaactgaataaaattcgtgttcaagttcaagagcatctgagtcggaaccagcgttcggaaagatctcctgagcgccaagcgaacctagaggcggccattcgcgagttgttgctgcgcgaaaatgcggtaattgtcgctcactactacaccgccccagaaatacaggctcttgccgaggccaccggaggctgtgtttccgactctctagaaatggctcgttttggtcgcgaccacccggcagacaccttgattgttgcaggtgtgaaatttatgggggagaccgcaaagatactgacacccaataagcgggtgttaatgcctgatatggaggcgacctgttcattagacttaggttgtcctgtggaggaattcaccgctttttgcgacagccacccagatcgtgaggttgtggtttatgccaatacctctgcggctgtgaaggcgagggctgattgggtcgtaacctcaagcattgccctcgatgtcgccgaacatcttgccgcacaagataagaaaatcatctgggctcccgatcggcatttgggggattatgtgcgacgctccacgggagcagatatgcttatgtgggatggcgcctgcatagtgcatgaggagttcaaggctcggggtatcgcagacttaaagcaggtacacccagaggctgctgtattggttcatcccgaatctccggcatcggtgattgaaatggcagaccatgttggttcgactactcaaatcattaaggccgctaaggccatgcctcatgagacctttattgttgcaaccgatcaggggatatttttcaagctgcagcaggcagcgcccgaaaaaacgtttctcattgcgcctacggctggcaatggagcaacgtgccgaagctgtgcaaactgtccttggatggcgatgaacgatcttgagcgcctttcactggtattcgaaaggcctgacaacgaaattcatatcgatccagtactgggcaaggcagctatgcgtccactcgatcgtatgttgtcatttgcggaaagcctaaacagcggtgtcattggccgcgcctag

SEQ ID NO: 50884 - protein, 357 aa, marine gamma proteobacterium HTCC2080
MTIAQSQLNKIRVQVQEHLSRNQRSERSPERQANLEAAIRELLLRENAVIVAHYYTAPEIQALAEATGGCVSDSLEMARFGRDHPADTLIVAGVKFMGETAKILTPNKRVLMPDMEATCSLDLGCPVEEFTAFCDSHPDREVVVYANTSAAVKARADWVVTSSIALDVAEHLAAQDKKIIWAPDRHLGDYVRRSTGADMLMWDGACIVHEEFKARGIADLKQVHPEAAVLVHPESPASVIEMADHVGSTTQIIKAAKAMPHETFIVATDQGIFFKLQQAAPEKTFLIAPTAGNGATCRSCANCPWMAMNDLERLSLVFERPDNEIHIDPVLGKAAMRPLDRMLSFAESLNSGVIGRA

SEQ ID NO: 50885 - DNA, 1077 bp, Marinobacter sp. ELB17
  CDS (1)..(1077): transl_table=11
atgactaaagctgaagaccgtatccttgttcaggaatacctggcccacgccgcggagcccaagctccttagcgctgaagaaaaggcgcggctcgaacctcgcatcaaggctgctctgaaggagaaaaacgctgttctggtggcgcactattacacccacccagacattcagcgcttggctgaagaaagcggtggctgtgtcgccgactccctggaaatggcccgatttggcaatcaacatcccgcgtctaccgtggtggtggccggcgttcgttttatgggcgaaaccgctaaaatcctgaatccggaaaaaaccgttctaatgcctacccttgaggctacctgctcgctagatgtaggttgcccagcggatgagttttcagctttctgcgatgaacatccagaccgcactgtggtggtttacgccaacacctcggcggcggttaaagcccgcgccgattgggtcgtcacctcaagctgcgcccaggccattgtggaattgctggacgcccgcggtgaaaaaatcctgtgggcgccagacaaacacctgggccattgggtgcagaaaactaccggcgccgatatgctgctgtggaacggctcttgcattgtgcacgaagagttcaaacaccgtggcctggaagatcttaaagcgctttacccggatgccgccgtactggtacacccggaatcaccggatgcggtagtgaaattggccgacgttgtagggtctacctcacagctgatcaacgccgtacaaaccctgccgaacgaacgctttattgtggcgaccgacaacggcattttttataaaatgcagcagctggcgcccaacaagatcctgattgaagcgcccaccgccggtaacggtgcgacctgtcgcagctgcgcccagtgtccgtggatggctatgaatgggctggaaaacctgctggccgtgctggaagcgccaaagggccagaccagtaatcaggaagtgctggtagacgaagctctgcgtgaagacgctctgcggcctttacagcgcatgctggactttaccgccaacatgaatctgaaggcggccgggaacgcctag

SEQ ID NO: 50886 - protein, 358 aa, Marinobacter sp. ELB17
MTKAEDRILVQEYLAHAAEPKLLSAEEKARLEPRIKAALKEKNAVLVAHYYTHPDIQRLAEESGGCVADSLEMARFGNQHPASTVVVAGVRFMGETAKILNPEKTVLMPTLEATCSLDVGCPADEFSAFCDEHPDRTVVVYANTSAAVKARADWVVTSSCAQAIVELLDARGEKILWAPDKHLGHWVQKTTGADMLLWNGSCIVHEEFKHRGLEDLKALYPDAAVLVHPESPDAVVKLADVVGSTSQLINAVQTLPNERFIVATDNGIFYKMQQLAPNKILIEAPTAGNGATCRSCAQCPWMAMNGLENLLAVLEAPKGQTSNQEVLVDEALREDALRPLQRMLDFTANMNLKAAGNA

SEQ ID NO: 50887 - DNA, 942 bp, uncultured archaeon GZfos34G5
  CDS (1)..(942): transl_table=11
atggacaagcggaaagggtacgtagagcggatagaaaggttaaagcgcaggaaaaacgcaataattttagctcataactaccagagggcagaagttcaggatatagcggagtttgttggcgattccttagagcttgcgaggaaggcggtagatacgacctcagatattataatcttctgcggcgttgatttcatggcagaaaccgcggcgatactgaatcaggataaaaaagtatttattcctgatctcggtgcgatatgcccaatggcacagcaattaccggcagatgatttgcttgtagcaaagcgagagcatccggacgccgaggttgtgctctacgtaaacacacttgcagaaagtaaggtgctcgctgactgcatctgcacctctgcaaatgctcaggagatagttagggctatggacacatcaactatcctctttggtcctgaccacaatttagcatatcacgcacaaaaggcaacctcaaagcggattattccggtgcccgaacatgggctctgcccatcacatcatcagatagtattagaggatttgatgaatgcgaaggaagcgcactcagaagctaaaatcgccgttcatcccgagtgcatccctgaagttcaagacagcgcagattacatcgcttcaacgagtggcatggtgaaaatttgcaatgctgttgcggatacggaattcttgataggcacagaaatcgggctactgcataggctcaagaaggaattgccgggaaagaaattttatccaatctccgataccgcagtctgtccgcagatgaagatacacactttggcgaagatagaagcggcattagagaaggagaagccagaagttgttgttaagaaagaaattatggataaggcgaggagacctattgagcggatgctcgaaatatcaaaaaaaacacattcttcttcattgtaa

SEQ ID NO: 50888 - protein, 313 aa, uncultured archaeon GZfos34G5
MDKRKGYVERIERLKRRKNAIILAHNYQRAEVQDIAEFVGDSLELARKAVDTTSDIIIFCGVDFMAETAAILNQDKKVFIPDLGAICPMAQQLPADDLLVAKREHPDAEVVLYVNTLAESKVLADCICTSANAQEIVRAMDTSTILFGPDHNLAYHAQKATSKRIIPVPEHGLCPSHHQIVLEDLMNAKEAHSEAKIAVHPECIPEVQDSADYIASTSGMVKICNAVADTEFLIGTEIGLLHRLKKELPGKKFYPISDTAVCPQMKIHTLAKIEAALEKEKPEVVVKKEIMDKARRPIERMLEISKKTHSSSL

SEQ ID NO: 50889 - DNA, 933 bp, Methanosarcina acetivorans
  CDS (1)..(933): transl_table=11
atggaaaacggagttgttatggaagaccggttaattgcagaagaaataaaaaagctcaaagaagaaagaaacgcaataatccttgctcatttttacacccgcggggaagtacgggaatttgcggattttgttggggattccctttccctctgcagggaagcggtgaattcaaaagctgatgtcatagtctttgcaggtgttcattttatggcagagtcggcatcgattctttctcctgaaaaatcggttctgttgccggttccggaggcgggctgcccgatggcggatatggttaccgtggagactctcaggaaagaaaaagaaaagcacccggatgcagccgtcgtctgttatgtgaacagttcagccgccgtaaaagcggagtcggatatctgctgcacctcttcaaatgcagtaaatgtggtaaattcagttgagaacagggagattatttttgtcccggacaaaaaccttggagcctttgtatcccttcataccgacaaaaaaatacacctccggcccgggttttgccatgtccatgagaacatagggaaagaggatatcgaagaattaaaaaacctccatcctgaagcggaatttcttgcacaccccgaatgcaggcctgaagtcatgagttttgcagaccatatcctcagtacctccggaattgtgaaggaggcgggaagatcagagtccacagagtttataatcgggactgaaaaggaaattgttcagagcctgaaacggaaatacccggatagaaaattctaccccgtatcaaaaaaggctgtttgctacaatatgaaaaaggtcactcttgagtccattctgaacagcctccagaatatggaatatgaagtccaggtcccggaacatgtgagagcgaaagcaaaaaaggcacttgaccggatgctttcggttagcggaacttaa

SEQ ID NO: 50890 - protein, 310 aa, Methanosarcina acetivorans
MENGVVMEDRLIAEEIKKLKEERNAIILAHFYTRGEVREFADFVGDSLSLCREAVNSKADVIVFAGVHFMAESASILSPEKSVLLPVPEAGCPMADMVTVETLRKEKEKHPDAAVVCYVNSSAAVKAESDICCTSSNAVNVVNSVENREIIFVPDKNLGAFVSLHTDKKIHLRPGFCHVHENIGKEDIEELKNLHPEAEFLAHPECRPEVMSFADHILSTSGIVKEAGRSESTEFIIGTEKEIVQSLKRKYPDRKFYPVSKKAVCYNMKKVTLESILNSLQNMEYEVQVPEHVRAKAKKALDRMLSVSGT

SEQ ID NO: 50891 - DNA, 975 bp, Rhizobium loti
  CDS (1)..(975): transl_table=11
atgagcaccatccagccttcggccgctttcctgtatgaccgcgtccagcgcctgatcccgccgatcgaatggccagccttcgccggcgacatcgatgccatccttgatctgaagcggcagcgcaacgccgtcatcctggcgcacaactaccagacaccggagatttttcactgtgtcgccgatatcgtcggcgacagcctggcgctggcccgcaaggcgatgtcgaccgaagccgacgtcattgtgctggccggcgtccacttcatggccgagacggcaaagctgctcaatccgcaaaagacggtgctcattcccgatctgcgcgcaggctgttcgctggccgactcgattactgccgaggacattcgcctgctgcgacaacgctatcccggcgtacctgtcgtgacctacgtcaacacgtcggccgaggtcaaagccgagtctgacatctgctgtacctccggcaatgccaaagccatcgtcgaatcccttggcgtccccagggtgatcatgctgccggatgagtatctggctgagaatatcgccgcccagaccgacgtcgagatcatcgcctggaaagggcattgcgaggtgcatgagcgctttacgccggccgacatccgccagctgcgcgagaaccatcccggtgtgatcgtgctcgcgcatcccgaatgtccgcccgacgtggtcgcggaggccgatttttccggttcgaccgcggcaatgtcggactatgtcgaaaggcaaaagccgccacgcgtcgtgctgctgacggaatgctcgatgagcgacaatgtcgcgctccagcatcccgagctcgagttcatccggccctgcaatttgtgcccgcacatgaagcggataacgctcgccaacatccgttcggccctggagcagaaccgccacgtcgtgaccatcgagcccgggatcgccgggcgcgcgcgacttgccgtcgagcggatgctcgccgtatga

SEQ ID NO: 50892 - protein, 324 aa, Rhizobium loti
MSTIQPSAAFLYDRVQRLIPPIEWPAFAGDIDAILDLKRQRNAVILAHNYQTPEIFHCVADIVGDSLALARKAMSTEADVIVLAGVHFMAETAKLLNPQKTVLIPDLRAGCSLADSITAEDIRLLRQRYPGVPVVTYVNTSAEVKAESDICCTSGNAKAIVESLGVPRVIMLPDEYLAENIAAQTDVEIIAWKGHCEVHERFTPADIRQLRENHPGVIVLAHPECPPDVVAEADFSGSTAAMSDYVERQKPPRVVLLTECSMSDNVALQHPELEFIRPCNLCPHMKRITLANIRSALEQNRHVVTIEPGIAGRARLAVERMLAV

SEQ ID NO: 50893 - DNA, 1038 bp, Agrobacterium tumefaciens
  CDS (1)..(1038): transl_table=11
atgctcacaatgagaatatgtcttcgtgctacatatactcaaaaagagtataaatgggagagcaccgtgaacgagcagatttcagccgctagcctttatgaccgcgttgcccgtgtcattcccaaggccgaatggatgggctttcaggatgatgtcgaggcaatccttgaattgaagcgcaagcgcaacgctgtcatcctcgcacataattaccagacgccggaaatcttccatggcgtcgccgatattgtcggggacagtctcgcccttgcccgcaaggcaatggaggtggaagcggatgtgatcgttctggccggcgtgcatttcatggccgagacggcaaagctgctcaatccggaaaaaaccgtacttattccggatatggccgctggctgctcgcttgccgattccatcacgcccgaagacatcgcacttctgcgcaaggcctatcccggcgttcctgtcgtcacctatgtgaacacgtcagcggcggtgaaggcggcgtccgacatctgctgcacgtcaggtaatgcccgccaggtggtggaatcgctcggcgtgccgcgcgtgctgatgctgccggatgaatatctggcgaagaacgtcgccaaggaaaccagtgtcgagctgatcgcctggcgtggccattgcgaggtgcacgagcttttcaccgccgatgacatcagggaactgcgcgaaagccatcccggcgttatcgtgctggcgcatcccgaatgtccgcctgaggtcgtagacgctgcggatttctccggctccaccgccgtcatgtctgactatgtcggccgcgagcgccctgcccgcgtggtgcttctgacggaatgctcgatgagcgacaacgtcgccgtgcatcatcccgatgtcgagttcatccgcccctgcaatctctgcccgcatatgaagcgcatcacgcttggcaatatccgcacggcactggaggaaaatcgccatgaagtgacggtcgatccggccattgccggtgctgcccgtcgcgccgtggaaaggatgctgcagatatga

SEQ ID NO: 50894 - protein, 345 aa, Agrobacterium tumefaciens
MLTMRICLRATYTQKEYKWESTVNEQISAASLYDRVARVIPKAEWMGFQDDVEAILELKRKRNAVILAHNYQTPEIFHGVADIVGDSLALARKAMEVEADVIVLAGVHFMAETAKLLNPEKTVLIPDMAAGCSLADSITPEDIALLRKAYPGVPVVTYVNTSAAVKAASDICCTSGNARQVVESLGVPRVLMLPDEYLAKNVAKETSVELIAWRGHCEVHELFTADDIRELRESHPGVIVLAHPECPPEVVDAADFSGSTAVMSDYVGRERPARVVLLTECSMSDNVAVHHPDVEFIRPCNLCPHMKRITLGNIRTALEENRHEVTVDPAIAGAARRAVERMLQI

SEQ ID NO: 50895 - DNA, 969 bp, Aquifex aeolicus
  CDS (1)..(969): transl_table=11
atggtacagctcgccttaaaggaggagaaagaacttactaaggaggagataaaggaactccagaaagaagttaggagactcgcaaaggaaaagaacgctgtaatactcgctcactattatcagagaccggaggttcaagatatagcggattttgtaggagattctttagagctcgccagaaaggcttctcagacggacgcggacattattgtattctgcggtgttaggtttatgtgtgaaaccgcaaagatagtaaatcccgagaaaaaggttctccacccaaatccggaaagcggatgccccatggcagacatgataacggcaaagcaagtaagggaactcagggaaaagcatccggacgcggaattcgtagcctacataaacaccaccgcggacgttaaggcggaagtggacatatgcgtaacctccgcaaacgccccaaaaataataaagaaactcgaagctaaaaagatcgtattcctaccggatcaagctctcggtaactgggtggcaaagcaagttccggaaaaggaattcataatatggaaaggtttctgtcctccacactttgagtttacgtacaaggaactcgaaaagttaaaggaaatgtaccccgacgccaaggtggcagttcacccagagtgccaccccagagtcatagaacttgcggacttcgtaggatctacttcccagatactcaagtacgccacaagtgttgatgcaaaaagggtaatagtggtaaccgaagttggactcaagtacacactggaaaagattaatccgaataaggaatacattttcccccaatccatgaattactgcggaaccgtttactgttgtacaatgaagggaattacgctacctaaagtttacgagaccttaaagaacgaaataaacgaagtgacgcttcccaaagatattatagagagggcgaggagacccatagagaggatgctcgagctcagttaa

SEQ ID NO: 50896 - protein, 322 aa, Aquifex aeolicus
MVQLALKEEKELTKEEIKELQKEVRRLAKEKNAVILAHYYQRPEVQDIADFVGDSLELARKASQTDADIIVFCGVRFMCETAKIVNPEKKVLHPNPESGCPMADMITAKQVRELREKHPDAEFVAYINTTADVKAEVDICVTSANAPKIIKKLEAKKIVFLPDQALGNWVAKQVPEKEFIIWKGFCPPHFEFTYKELEKLKEMYPDAKVAVHPECHPRVIELADFVGSTSQILKYATSVDAKRVIVVTEVGLKYTLEKINPNKEYIFPQSMNYCGTVYCCTMKGITLPKVYETLKNEINEVTLPKDIIERARRPIERMLELS

SEQ ID NO: 50897 - DNA, 1107 bp, Bacillus subtilis
  CDS (1)..(1107): transl_table=11
atgtcaattcttgatgtgatcaaacaatcgaatgatatgatgcccgaaagttataaagaactatcgagaaaggatatggaaacgcgcgttgccgccattaagaaaaagttcggcagcaggctctttataccaggccatcattatcaaaaggatgaagtgatacaatttgctgaccaaacaggcgactccctgcaattggcccaagtagcggaaaaaaacaaagaagcggattatatcgtattttgcggcgttcactttatggcagaaaccgccgatatgctgacaagcgagcagcaaacggtcgtcctgccagatatgagagctggatgttctatggctgacatggctgacatgcagcagaccaatagggcatggaagaagcttcagcatatatttggagatacgatcatacctttaacttatgtgaactccactgcggagatcaaggcattcgtcggaaagcatggcggagcaactgtaacttcttcgaatgcgaaaaaagtgcttgaatgggcgtttacacagaaaaaaagaattttatttttgcctgatcagcatttagggagaaatacggcttatgatctgggcattgcgcttgaagatatggctgtgtgggatccgatgaaagatgaattagtagctgaatccgggcatacgaatgtgaaagtgattttgtggaaagggcattgctctgttcacgagaaattcaccactaaaaatatccatgatatgagagagcgagaccccgacattcagatcattgtgcacccggaatgttcacacgaagtcgtgacactaagcgatgataacggatcaacgaaatatattatcgacacaatcaaccaggctccggcgggaagcaagtgggcaatcgggacagaaatgaatcttgttcagcggatcattcacgagcatccagataaacaaatcgaatcactcaaccctgacatgtgcccttgcctgacaatgaaccgaattgatttgccgcatttgttgtggtcgctggaacaaattgaaaaaggagaaccttcaggcgtcatcaaggtgccaaaagccattcaggaagatgcactccttgccctgaatcgaatgctttcgatcacgtag

SEQ ID NO: 50898 - protein, 368 aa, Bacillus subtilis
MSILDVIKQSNDMMPESYKELSRKDMETRVAAIKKKFGSRLFIPGHHYQKDEVIQFADQTGDSLQLAQVAEKNKEADYIVFCGVHFMAETADMLTSEQQTVVLPDMRAGCSMADMADMQQTNRAWKKLQHIFGDTIIPLTYVNSTAEIKAFVGKHGGATVTSSNAKKVLEWAFTQKKRILFLPDQHLGRNTAYDLGIALEDMAVWDPMKDELVAESGHTNVKVILWKGHCSVHEKFTTKNIHDMRERDPDIQIIVHPECSHEVVTLSDDNGSTKYIIDTINQAPAGSKWAIGTEMNLVQRIIHEHPDKQIESLNPDMCPCLTMNRIDLPHLLWSLEQIEKGEPSGVIKVPKAIQEDALLALNRMLSIT

SEQ ID NO: 50899 - DNA, 969 bp, Chlorobium tepidum
  CDS (1)..(969): transl_table=11
atgaccatagcgaccgatatgcacaaagaggcggcgggcctttcgaccgaagcgctgctccggcgggtgcaggctctcaagaaggagatgaacgcgattatccttgcccactactacaccctgccggaaatccagcaggcggcggacatcgtgggcgacagcctcgccctggcgcgggcggcggagaagacgtcggcggacgtgatcgttttcgccggggtgtacttcatggccgagaccgccaagattctcaatcctggcaagatggtgctcatgcccgatccgggcgcgggctgcccgctggccgacagttgcccggaggaggagttccgcgccttccgccaggcgcatcccgacgccattgccattacctacgtcaactcgtcggcggcgatcaagaagctttcggacatcatctgcacctcgtcgaacgccgagcatatcgtgcggcagattccgccggagcagcagatcatcttcggtcctgaccgcaacctcggcgcatgggtgatgaagcgcaccgggcgcgacatgctgctctggcagggcttctgctatgtgcacgacgcctactccgaggtttacatgatccaagccaaggcgatgtatccggatgcggaattgatcgctcatcccgagtgccgcgaggaggtgctgcgtcaggcttcgttcgttggctcgacctcggccctgctcgattacaccgaaaagagtccgcgcaaaagcttcatcgtggcaaccgagccgggcattctttacgaaatggagaaacgctcgccgggcaaggttttcattcctgcgcccaaagacccggccaatccgcgcagcgtctgcaagcagatgaagcagaacacgcttgacaagctctatctctgcatggtgaaccgctcgcccgagatcaccgttgacgagagcctgcgcgaaggggcgctgaagtcgatcaaaagaatgctcgaaatgtccgcctga

SEQ ID NO: 50900 - protein, 322 aa, Chlorobium tepidum
MTIATDMHKEAAGLSTEALLRRVQALKKEMNAIILAHYYTLPEIQQAADIVGDSLALARAAEKTSADVIVFAGVYFMAETAKILNPGKMVLMPDPGAGCPLADSCPEEEFRAFRQAHPDAIAITYVNSSAAIKKLSDIICTSSNAEHIVRQIPPEQQIIFGPDRNLGAWVMKRTGRDMLLWQGFCYVHDAYSEVYMIQAKAMYPDAELIAHPECREEVLRQASFVGSTSALLDYTEKSPRKSFIVATEPGILYEMEKRSPGKVFIPAPKDPANPRSVCKQMKQNTLDKLYLCMVNRSPEITVDESLREGALKSIKRMLEMSA

SEQ ID NO: 50901 - DNA, 912 bp, Clostridium acetobutylicum
  CDS (1)..(912): transl_table=11
atggatcaaaatttaaaggaacaaatattagaactaaaacgccaaaaaaacgctataattctagctcactactatcaaagacctgaggtgcaggaaatagctgatttcattggtgattcatataatttaagtaaaattgccaaggaaaacgatgctgatacaatagttttctgtggagttaaatttatggctgaaagtgcaaaagtactgtcacctcaaaaaaaggttcttctaccgcaaccaaaagctggctgtccaatggcagatatggcagatgcagaaggccttgcagctctaaaagctaagcaccctaatgcaaaggtagtctcgtatataaactcttcagttgaggttaaagcattatgtgatacttgttgtacttcatccaatgcagcaaaaatagttaaaagaatagatagtgatgaaataatatttcttccagataagaatttaggttcctatgttcaagaaatggtgccagaaaaaaatataattttatgggatggcttctgtaaagttcataacatgataatcccaacagatatagaagaaatgaaaaataaatatggcgatatgaaaattctagctcatcctgaatgttggaagccagtaagagatatggcagactttataggtagtacaggtgcaatgatagattatgctgaaaaagatacgacctcagataaatatttagttgtaactgaaacaggaataatgtataaaatgcaggaaagagtacctaataagactttttatcctctaagaagtatggtttgtgtaaacatgaaagcaactcacttagaagatgtttataatagtcttgtaaattctacttttgaaataaatatagaagaaaacttaagacaaaaggcacttacttccctagaaaatatgttaatacttggaaggtga

SEQ ID NO: 50902 - protein, 303 aa, Clostridium acetobutylicum
MDQNLKEQILELKRQKNAIILAHYYQRPEVQEIADFIGDSYNLSKIAKENDADTIVFCGVKFMAESAKVLSPQKKVLLPQPKAGCPMADMADAEGLAALKAKHPNAKVVSYINSSVEVKALCDTCCTSSNAAKIVKRIDSDEIIFLPDKNLGSYVQEMVPEKNIILWDGFCKVHNMIIPTDIEEMKNKYGDMKILAHPECWKPVRDMADFIGSTGAMIDYAEKDTTSDKYLVVTETGIMYKMQERVPNKTFYPLRSMVCVNMKATHLEDVYNSLVNSTFEINIEENLRQKALTSLENMLILGR

SEQ ID NO: 50903 - DNA, 906 bp, Clostridium perfringens
  CDS (1)..(906): transl_table=11
atggatataagggacgaaatattaaagttaaaaaaagagaagggggctatcatattagcacattattatcaaattcctgaaatacaggaaattgctgattatgtaggcgattcatattacttaagtaaaatagcaaaggattgtgaagaaaatataatagttttttgtggggttaaatttatggcagaaagtgcaaagatactttcaccagaaaaaacggttatattaccagttatggaagcaggctgtgttatggcagacatggctacagaagagggactagctaaattaaaagaggaacatccaaatgccaaggttgtttgctatataaattcttcaactgaagtaaaagcattatctgatgtttgctgtacttcatctaatgctgaaaacataataaataatttagaagaaaaagaaattatatttttacctgatagaaatttagggtcttatattcaggaaaaaacaccagataaaaagtttatattatggaatggcttttgcatagttcatgaagctattcaaaaagaagaaattttaagattaaaaagtgagcatgaagggattttaacagtagctcatccagagtgtagcaaagaaataagagatatttcggatttcataggaagtactagtgaaataataaattttgtaaataattcttcaaataaaaaatttattataataacagaagaaggggtacttcatcagttgagaaaaaatggagaggaaaaagaattttatattccatatggaaagatggtttgtagaaatatgaaaatgactaccttaaaggatctttatgaaagtcttttaaaaatggaaaataaaattgaaatagatgaggatttaagattaaaggcatataattcattaaaaaatatgcataaacttgggggctaa

SEQ ID NO: 50904 - protein, 301 aa, Clostridium perfringens
MDIRDEILKLKKEKGAIILAHYYQIPEIQEIADYVGDSYYLSKIAKDCEENIIVFCGVKFMAESAKILSPEKTVILPVMEAGCVMADMATEEGLAKLKEEHPNAKVVCYINSSTEVKALSDVCCTSSNAENIINNLEEKEIIFLPDRNLGSYIQEKTPDKKFILWNGFCIVHEAIQKEEILRLKSEHEGILTVAHPECSKEIRDISDFIGSTSEIINFVNNSSNKKFIIITEEGVLHQLRKNGEEKEFYIPYGKMVCRNMKMTTLKDLYESLLKMENKIEIDEDLRLKAYNSLKNMHKLGG

SEQ ID NO: 50905 - DNA, 1044 bp, Escherichia coli O157
  CDS (1)..(1044): transl_table=11
atgagcgtgatgtttgatccagacacggcgatttatcctttccccccgaagccgacgccgttaagcattgatgaaaaagcgtattaccgcgagaagataaaacgtctgctaaaagaacgtaatgcggtgatggttgcccactactataccgatcccgaaattcaacaactggcagaagaaaccggtggctgtatttctgattctctggaaatggcgcgcttcggtgcaaagcatcccgcttctacgttgttagtcgctggggtgagatttatgggagaaaccgccaaaattctcagtccggaaaaaacaattctgatgccgacacttcaggctgagtgttcactggatctcggctgccctgttgaagaatttaacgcattttgcgatgcccatcccgatcgtactgtcgtcgtctacgccaacacttctgctgcggtaaaagcgcgggcagattgggtggtaacttcaagcattgccgtcgaacttattgatcatctggatagtttgggtgaaaaaatcatctgggcacccgacaaacatctggggcgttacgtgcaaaaaaagacgggcgcagacattttatgctggcagggtgcctgcattgtgcatgatgagtttaagactcaggcgttaacccgcttgcaagaagaatacccggatgctgccatactggtgcatccagaatcaccacaagctattgtcgatatggcggatgcggtcggttccaccagtcaactgatcgctgctgcgaaaacattgccacatcagaggcttattgtggcaaccgatcggggtattttctacaaaatgcagcaggcggtgccagataaagagttactggaagcaccaaccgcgggtgagggcgcaacctgccgcagctgcgcgcattgtccgtggatggccatgaatggcctccaggccatcgctgaggcattagaacaggaaggaagcaattacgaggttcatgttgatgaaaggctgcgagagagggcgctggtgccgctcaatcgtatgctggattttgcggctacactacgtggataa

SEQ ID NO: 50906 - protein, 347 aa, Escherichia coli O157
MSVMFDPDTAIYPFPPKPTPLSIDEKAYYREKIKRLLKERNAVMVAHYYTDPEIQQLAEETGGCISDSLEMARFGAKHPASTLLVAGVRFMGETAKILSPEKTILMPTLQAECSLDLGCPVEEFNAFCDAHPDRTVVVYANTSAAVKARADWVVTSSIAVELIDHLDSLGEKIIWAPDKHLGRYVQKKTGADILCWQGACIVHDEFKTQALTRLQEEYPDAAILVHPESPQAIVDMADAVGSTSQLIAAAKTLPHQRLIVATDRGIFYKMQQAVPDKELLEAPTAGEGATCRSCAHCPWMAMNGLQAIAEALEQEGSNYEVHVDERLRERALVPLNRMLDFAATLRG

SEQ ID NO: 50907 - DNA, 1044 bp, Escherichia coli
  CDS (1)..(1044): transl_table=11
atgagcgtaatgtttgatccagacacggcgatttatcctttccccccgaagccgacgccgttaagcattgatgaaaaagcgtattaccgcgagaagataaaacgtctgctaaaagaacgtaatgcggtgatggttgcccactactataccgatcccgaaattcaacaactggcagaagaaaccggtggctgtatttctgattctctggaaatggcgcgcttcggtgcaaagcatcccgcttctactttgttagtcgctggggtgagatttatgggagaaaccgccaaaattctcagtccggaaaaaacaattctgatgccgacacttcaggctgaatgttcactggatctcggctgccctgttgaagaatttaacgcattttgcgatgcccatcccgatcgtactgtcgtcgtctacgccaacacttctgctgcggtaaaagcgcgcgcagattgggtggtaacttcaagcattgccgtcgaacttattgatcatcttgatagtttgggtgaaaaaatcatctgggcacccgacaaacatctggggcgttacgtgcaaaaacagacgggtggagacattctatgctggcagggtgcctgtattgtgcatgatgaatttaagactcaggcgttaacccgcttgcaagaagaatacccggatgctgccatactggtgcatccagaatcaccacaagctattgtcgatatggcggatgcggtcggttccaccagtcaactgatcgctgctgcgaaaacattgccacatcagaggcttattgtggcaaccgatcggggtattttctacaaaatgcagcaggcggtgccagataaagagttactggaagcaccaaccgcaggtgagggtgcaacctgccgcagctgcgcgcattgtccgtggatggccatgaatggccttcaggccatcgcagaggcattagaacaggaaggaagcaatcacgaggttcatgttgatgaaaggctgcgagagagggcgctggtgccgctcaatcgtatgctggattttgcggctacactacgtggataa

SEQ ID NO: 50908 - protein, 347 aa, Escherichia coli
MSVMFDPDTAIYPFPPKPTPLSIDEKAYYREKIKRLLKERNAVMVAHYYTDPEIQQLAEETGGCISDSLEMARFGAKHPASTLLVAGVRFMGETAKILSPEKTILMPTLQAECSLDLGCPVEEFNAFCDAHPDRTVVVYANTSAAVKARADWVVTSSIAVELIDHLDSLGEKIIWAPDKHLGRYVQKQTGGDILCWQGACIVHDEFKTQALTRLQEEYPDAAILVHPESPQAIVDMADAVGSTSQLIAAAKTLPHQRLIVATDRGIFYKMQQAVPDKELLEAPTAGEGATCRSCAHCPWMAMNGLQAIAEALEQEGSNHEVHVDERLRERALVPLNRMLDFAATLRG

SEQ ID NO: 50909 - DNA, 945 bp, Ehrlichia chaffeensis
  CDS (1)..(945): transl_table=11
atgaaagaacttgatgtcataacactattgcaagaaatacgtcatttggctcaggaaagtaatgctgtaattcttgctcattactatcaggattcagagatacaagatattgctgattttattggtgattctttagaactttccagaaaggcagccaccacaacagctgatgttattgtattttgtggtgtgtactttatggctgaagttgcgaaaataattaatcctgccaaaaaggttttattaccagatttaaatgctggatgttctttagctgattcttgtgatgcagagagttttaaaaaatttcgtgagttacataaagattgtgtatcaattacatatataaattctttagcggaggttaaagcttattctgatatcatttgtacatcttcaagtgctgaaaagataataagacaaataccagaagaaaaacaaattctatttgctccagataaatttttgggagcttttctagaaaagaaaacgaataggaaaatgattttatggcctggtacttgtatagtgcatgaaagtttttctgaacgagagttaattgatatgatggttagacatgataaagcatatgttctagctcatcctgaatgtcctgggcatttactaaaatatgctcatttcattggatcgacaactcagttattaaaattttcttctgataatcctaattcagagtttatagtgttgactgaagaaggaattattcatcaaatgaaaaaagtttcttctggaagcactttttatatagtaaaaacttcagatagtggtggatgtgtttcatgtagtaaatgcccacatatgcgtttgaatactttagaaaaattgtatttatgtttaaaaaatggttatcctgaaattacccttgatcctgaaattagtagtatggctaaaaggtctttggatgccatgcttaaaatgagttaa

SEQ ID NO: 50910 - protein, 314 aa, Ehrlichia chaffeensis
MKELDVITLLQEIRHLAQESNAVILAHYYQDSEIQDIADFIGDSLELSRKAATTTADVIVFCGVYFMAEVAKIINPAKKVLLPDLNAGCSLADSCDAESFKKFRELHKDCVSITYINSLAEVKAYSDIICTSSSAEKIIRQIPEEKQILFAPDKFLGAFLEKKTNRKMILWPGTCIVHESFSERELIDMMVRHDKAYVLAHPECPGHLLKYAHFIGSTTQLLKFSSDNPNSEFIVLTEEGIIHQMKKVSSGSTFYIVKTSDSGGCVSCSKCPHMRLNTLEKLYLCLKNGYPEITLDPEISSMAKRSLDAMLKMS

SEQ ID NO: 50911 - DNA, 1011 bp, Helicobacter pylori
  CDS (1)..(1011): transl_table=11
atgccaactgataacgatttaaaagctgctattttggaattattgcgcgatttggacgtgcttttagtggctcatttttaccaaaaagatgagattgtagagttagcccattatacaggcgatagcctggagttagctaaaatcgcaagccaaagcgataaaaacctcatcgtgttttgcggggtgcattttatgggcgagagcgtgaaagccctagcctttgacaaacaagtgatcatgcccaaactctcatgctgttctatggcgaggatgattgatagccattattacgatagaagcgttcatttattaaaagaatgcggcgttaaagaattttaccccatcacttatatcaattctaacgctgaagtgaaagccaaagtcgctaaagatgatggcgtggtttgcacgagccgcaacgcttctaagatctttaatcacgctttaaaacaaaataaaaaaatcttttttttaccggataaatgcttgggggaaaatcttgccctagaaaatggcttaaaaagcgcgattttaggtgcaaatagccaagaagaaatcaaaaacgctgatgtggtttgttataacggcttttgttcggtgcatcagcttttcaaattagaagatattgaattttaccgccaaaaatacccggatattttaatcgctgtccatccagagtgcgagcctagcgtggtttctaacgctgattttagcggatcaacgagtcaaatcatagaatttgtagaaaagctaagccctaatcaaaaagtcgccataggcactgaaagccatttagtcaaccgcttgaaagccaagcgccaccatcaaaacactttcattctttctagcacgctcgccctttgccctaccatgaatgaaacgactttaaaagatttgtttgaagtcttaaaggcttacaaaaaccacagggcttacaatacgattgaattaaaagatgaggtggcgcgtttggccaaactcgctttaactaaaatgatggagttatcttaa

SEQ ID NO: 50912 - protein, 336 aa, Helicobacter pylori
MPTDNDLKAAILELLRDLDVLLVAHFYQKDEIVELAHYTGDSLELAKIASQSDKNLIVFCGVHFMGESVKALAFDKQVIMPKLSCCSMARMIDSHYYDRSVHLLKECGVKEFYPITYINSNAEVKAKVAKDDGVVCTSRNASKIFNHALKQNKKIFFLPDKCLGENLALENGLKSAILGANSQEEIKNADVVCYNGFCSVHQLFKLEDIEFYRQKYPDILIAVHPECEPSVVSNADFSGSTSQIIEFVEKLSPNQKVAIGTESHLVNRLKAKRHHQNTFILSSTLALCPTMNETTLKDLFEVLKAYKNHRAYNTIELKDEVARLAKLALTKMMELS

SEQ ID NO: 50913 - DNA, 924 bp, Methanococcus jannaschii
  CDS (1)..(924): transl_table=11
atgtctatggatatagtagaaagaataaacaaattaaaagaagaaaaaaatgcagtaatattggctcacaattatcaaccaaaggagatacagaaaatagctgattttcttggagattcattagagttgtgtataaaggcaaaagaaacagatgctgacataatagtattttgtggagtagattttatgggagagtcagcaaaaattttgaatccagagaaaaaagttttgatgccagagattgaaggaacccaatgcccaatggctcaccaactacccccagagattataaagaagtatagagagctttatccagaggctccattggttgtttatgtgaatacaacagcagagacaaaagcattagctgatattacatgcacatcagcaaatgcagatagagtagttaattccttggatgctgatacagttttatttggtccggataacaacttagcttattatgtgcaaaaaagaactgataaaaaagttatagctattcctgaagggggaggttgttatgtgcataaaaaattcacaatagatgatttaaagagagttaaaagcaaatatccaaatgctaaagttttaattcatccagaatgtagtccagaattgcaagataatgctgattacatagcaagcacaagtggaatattgaggattgttttagagtcagatgatgaagagtttataattggcactgaagttggaatgataaatagattggagatagagcttgaaaaattgggtaaaaagaaaaccttaattccattgaggaaagatgctatttgccacgagatgaaaagaataacattggagaagatagaaaaatgtttattagaggagagatatgaaattaaattagagaaagagattattgaaaaagctcaaaaagctattgaaagaatgcttagaatttag

SEQ ID NO: 50914 - protein, 307 aa, Methanococcus jannaschii
MSMDIVERINKLKEEKNAVILAHNYQPKEIQKIADFLGDSLELCIKAKETDADIIVFCGVDFMGESAKILNPEKKVLMPEIEGTQCPMAHQLPPEIIKKYRELYPEAPLVVYVNTTAETKALADITCTSANADRVVNSLDADTVLFGPDNNLAYYVQKRTDKKVIAIPEGGGCYVHKKFTIDDLKRVKSKYPNAKVLIHPECSPELQDNADYIASTSGILRIVLESDDEEFIIGTEVGMINRLEIELEKLGKKKTLIPLRKDAICHEMKRITLEKIEKCLLEERYEIKLEKEIIEKAQKAIERMLRI

SEQ ID NO: 50915 - DNA, 915 bp, Methanosarcina mazei
  CDS (1)..(915): transl_table=11
atgcagcaagcagaccttacaaaaaggattaatgaattgaagttaaaacgaaacgcagtaattctttctcattattattcacgccccgaagtccaggacattgcagattttgtcggtgactcccttgccctgagccaggaagccgtacgccaggacgctgatgttattgtcttctgcggcgtccattttatgggggaaagcgctgcaatcctttcccctaataaaacggttttgttgcctgaaattgatgctacctgcccgatggcagatatggtcaatgttgaaggccttaaaatattgaaagaaaaacaccctgaagcccctgttgtctcttatgtaaacagctcggctgcaataaaggcagaatcctatatatgctgcacctctgccaacgctgtggaagttgtaaactccctggacgcagacgaggtcatctttgtgcctgacaagaacctggctgcttatgttgcgtcccggactgacaagaaaatcattccctgggaagggcactgcccgacacaccaccagatccttcgggaagatgtcctgaaaatgaaagaaaagcatcctcgggctgaatttatagctcatcccgagtgccgccctgatgtccttgaacttgcagaccatgtggcaagcacgcggggcatgatcgtacacgcagagagatcgcctgcaaaggagtttataataggtacggagtgcgggcttattcatgggcttcttaaagcagttcctgaaaaaacatactactgcgtctctgaatttgcctgctgcccgagcatgaaaatggtcaaccttgaaaaagtcctgacttcccttgaaaaaatgcagcaaagagtaattgttcccgaagatgttagagccagggcaaaagaagcccttgatagaatgcttgcagtaaaaataaattaa

SEQ ID NO: 50916 - protein, 304 aa, Methanosarcina mazei
MQQADLTKRINELKLKRNAVILSHYYSRPEVQDIADFVGDSLALSQEAVRQDADVIVFCGVHFMGESAAILSPNKTVLLPEIDATCPMADMVNVEGLKILKEKHPEAPVVSYVNSSAAIKAESYICCTSANAVEVVNSLDADEVIFVPDKNLAAYVASRTDKKIIPWEGHCPTHHQILREDVLKMKEKHPRAEFIAHPECRPDVLELADHVASTRGMIVHAERSPAKEFIIGTECGLIHGLLKAVPEKTYYCVSEFACCPSMKMVNLEKVLTSLEKMQQRVIVPEDVRARAKEALDRMLAVKIN

SEQ ID NO: 50917 - DNA, 1059 bp, Pseudomonas aeruginosa
  CDS (1)..(1059): transl_table=11
atgacgcacatttccgaacgactcctggtacaggcccacctggccgccaagcaaccccgtgtgttgagcgagcaggagagcgccgagcatcgcgcggcgatcgcggccgaactgaaggcgcaaaatgctgtactggtggcgcattactactgcgacccggtgatccaggcgttggccgaggagaccggcggttgcgtatccgattcgctggagatggcccgtttcggcaaccagcatccggcgcagacggtggtcgtggccggggtgcgcttcatgggcgagacggcgaagatcctcaaccctgagaagcgtgtgctgatgccgaccctcgaagcgacctgctcgctcgacctgggatgcccggtggatgaattctcggctttctgcgaccagcacccggaacggaccgtggtggtctatgcgaacacctccgcggcggtgaaggcacgcgccgactgggtcgtgacctccagttgcgcggtggagatcgtcgaacacctgatggacaacggcgagcccatcctctgggcgccggaccagcacctgggacgctacatccagcgcgagacgggggccgacatgctgctctgggatggcgcctgtatcgtccacgaggagttcaaggccaagcagctggaagacatgaaggcgctctacccggacgccgccatcctggtccaccccgaatcgccggaaagcgtggtcgcgctggccgatgccgtgggctcgaccagccagttgatcaaggccgcgcagaccctgccgaacaagaccttcatcgtcgccaccgatcgcggcatcttctacaagatgcagcagttgtgcccggacaaggatttcatcgaggcccccaccgccggcaacggcgccgcctgccgcagctgcgcgcactgcccgtggatggcgatgaacacgctcgagcggaccctggcctgcctgcgcgagggcagcggggaaatcttcgtcgacccggcgttgatcccgcgggcggtccgtccgctcaagcgcatgctcgacttcacccaggccgcgcgcctgcgccaggccgggaacgcctga

SEQ ID NO: 50918 - protein, 352 aa, Pseudomonas aeruginosa
MTHISERLLVQAHLAAKQPRVLSEQESAEHRAAIAAELKAQNAVLVAHYYCDPVIQALAEETGGCVSDSLEMARFGNQHPAQTVVVAGVRFMGETAKILNPEKRVLMPTLEATCSLDLGCPVDEFSAFCDQHPERTVVVYANTSAAVKARADWVVTSSCAVEIVEHLMDNGEPILWAPDQHLGRYIQRETGADMLLWDGACIVHEEFKAKQLEDMKALYPDAAILVHPESPESVVALADAVGSTSQLIKAAQTLPNKTFIVATDRGIFYKMQQLCPDKDFIEAPTAGNGAACRSCAHCPWMAMNTLERTLACLREGSGEIFVDPALIPRAVRPLKRMLDFTQAARLRQAGNA

SEQ ID NO: 50919 - DNA, 1059 bp, Pseudomonas syringae pv
  CDS (1)..(1059): transl_table=11
atgacacagatttccgaacgctttctggtgcaggcgcaccttgatgccaagcagcccaaggcgctgagccccgaagagcaagcgcactaccgtgccgcgattgctgccgagctcaagaagcaggacgcggtcatggtcgctcattactattgcgacccggtgattcaggcgctcgccgaagaaaccggcggctgcgtggctgactccctggaaatggcgcgtttcagcaacaatcatccggccagcaccgtactggtcgccggtgtgcgtttcatgggcgagaccgccaagatcctcaacccggaaaaacgcgtgttcatgccgacgctggaagccacctgctcgcttgatgtgggttgcccggtcgatgagttttccgcgttttgcgatcagcatccagaacgtaccgtggtggtctacgccaacacctcggcggcagtaaaggcccgtgccgactgggtggtgacctcaggctgcgcactggaaatcgtcgaaagcctgatggacaacggcgaaaagatcatctgggcgcctgacaaacacctcggtcgctacattcagcgcgaaaccggcgccgacatgctgttgtgggacggtgcctgcatcgtccacgaagagttcaaatccaagcagctggaagacatgaaagccctgtaccccgaggctgcgattctggttcatccagagtctccggaagcggtcatcgagctggctgacgtggtcggctccaccagtcagatgattgcagccgcccagcgtctgccgaacaagatgtttattgtggccacggatcgaggcatcttctacaagatgcagcagctgtgcccggacaagatcttcattgaggcgcctacggccggtaacggtgcggcgtgccgcagttgcgcacattgcccgtggatggcgatgaatacgcttgagcgcaccttgcagtgcctgcgcgagggcggcaacgagatcttcgttgagcctgcgctgattcccaatgcagtgcgcccgctgcaacgcatgctggacttcacgcaggccgctcgcttacgtcaggcgggcaatgcctga

SEQ ID NO: 50920 - protein, 352 aa, Pseudomonas syringae pv
MTQISERFLVQAHLDAKQPKALSPEEQAHYRAAIAAELKKQDAVMVAHYYCDPVIQALAEETGGCVADSLEMARFSNNHPASTVLVAGVRFMGETAKILNPEKRVFMPTLEATCSLDVGCPVDEFSAFCDQHPERTVVVYANTSAAVKARADWVVTSGCALEIVESLMDNGEKIIWAPDKHLGRYIQRETGADMLLWDGACIVHEEFKSKQLEDMKALYPEAAILVHPESPEAVIELADVVGSTSQMIAAAQRLPNKMFIVATDRGIFYKMQQLCPDKIFIEAPTAGNGAACRSCAHCPWMAMNTLERTLQCLREGGNEIFVEPALIPNAVRPLQRMLDFTQAARLRQAGNA

SEQ ID NO: 50921 - DNA, 924 bp, Pyrobaculum aerophilum
  CDS (1)..(924): transl_table=11
atgctcaaggaagaggtgttaaggctgaagagggagaaaaacgcagtaatactcgcgcacaattatcaactgcccgaggtgaaggatgtggccgactttatcggcgactctcttaatttgtccatggaagccgctcggactaaagcagacattatagttttcgccggcgtgtatttcatggcggagacagccgccattttaaacccggataaaaaagtgttaatcccagaccccggcgccgggtgtagcctggcgtcttccgtctctgcggctgacgtgttggagtggagaagaaggcatcccaacggcgttgtagtcgcgtacataaacacatatgcagaggtaaaggcggtgtccgattacgtctgcacctcagccaattgtttgaaaataatagaggcaatacccagcgataggccggtgctcttcttgccggacaaatacctcggcctttatataaaggcaaagacgggcagagaaatagacatttgggacggcgagtgtcacgtacacgccaagatcacctctcctaaaattacggcgaaaattaaattgtacagagacgccgaggtgttaatacacccggagtgcgggtgcggaactgcgtgtctactagaactgcccaaaatggggctctccccaaaattcctctccacagagggcatggtcaagtacgtaaagcagtcgcccgcaaggaggttcataatagcgacagaagtcggcataatagaccggcttgagagggaggcgccgggcaaggaatatatacccgcggccgaagacgccatatgcgagtatatgaagttgataactttagacaaagtgcaccgctctcttaaagaggagatttatagagtagttgtccccgaggatattgcaaagaaggcgcggctggccattgagaggatgtttgaatttgcatga

SEQ ID NO: 50922 - protein, 307 aa, Pyrobaculum aerophilum
MLKEEVLRLKREKNAVILAHNYQLPEVKDVADFIGDSLNLSMEAARTKADIIVFAGVYFMAETAAILNPDKKVLIPDPGAGCSLASSVSAADVLEWRRRHPNGVVVAYINTYAEVKAVSDYVCTSANCLKIIEAIPSDRPVLFLPDKYLGLYIKAKTGREIDIWDGECHVHAKITSPKITAKIKLYRDAEVLIHPECGCGTACLLELPKMGLSPKFLSTEGMVKYVKQSPARRFIIATEVGIIDRLEREAPGKEYIPAAEDAICEYMKLITLDKVHRSLKEEIYRVVVPEDIAKKARLAIERMFEFA

SEQ ID NO: 50923 - DNA, 912 bp, Pyrococcus furiosus
  CDS (1)..(912): transl_table=11
atggaaaaggttgaggagcttaagaaggagattgaaaggttgaaaaaagagagaaacgcgataatcctagcccataactatcagctccctgaagttcaggatgtagcagatttcgttggagacagtcttgagctcgcgaggaaggccacaaaagttgatgcagatgtaatagtttttgctggagttgacttcatggcggaaactgccaaaatattaaacccggataagatagttctcatcccaaataagagagctacatgtgcaatggccaacatgcttaaagttaagcatatactcgaagctaagaaaaagtatccaaatgccccagtagtcctctacgtgaacagtacagctgagaccaaggcctatgcagacgtcaccgtaacctcagcaaatgcagttgatatcattagaaagctcgattctgacgtaattatctttggtccggacaagaatttagctcactatgtggctaaggtcactgggaaaaccataatccccatcccaccggaaggacactgctacgtccacaagaagttcacaattgaagatgtcgagagagccaaaaagctccatcccaatgcaaagcttatggttcaccccgaatgcaatccagaagtccaagagcatgctgatataatagtctcaacggggggaatgataagaagagcatgtgagtgggacgaatgggttgttttcacagagagggaaatggtgtataggctgagcaagctctatccaaacaagaagttttatccagccaaagaggatgcagtgtgcgttggaatgaaggccataacactgcaacatgtgtatgaatccctaagggatatgaaatatgaagtcaccgttccagaggagatagccgaaaaggcaagaaaagccattgaaagaatgcttgagatgagttga

SEQ ID NO: 50924 - protein, 303 aa, Pyrococcus furiosus
MEKVEELKKEIERLKKERNAIILAHNYQLPEVQDVADFVGDSLELARKATKVDADVIVFAGVDFMAETAKILNPDKIVLIPNKRATCAMANMLKVKHILEAKKKYPNAPVVLYVNSTAETKAYADVTVTSANAVDIIRKLDSDVIIFGPDKNLAHYVAKVTGKTIIPIPPEGHCYVHKKFTIEDVERAKKLHPNAKLMVHPECNPEVQEHADIIVSTGGMIRRACEWDEWVVFTEREMVYRLSKLYPNKKFYPAKEDAVCVGMKAITLQHVYESLRDMKYEVTVPEEIAEKARKAIERMLEMS

SEQ ID NO: 50925 - DNA, 903 bp, Pyrococcus horikoshii
  CDS (1)..(903): transl_table=11
atggatttagttgaagaaattttgaggcttaaagaggaaaggaatgcgataatactggcccataattatcagcttcctgaagttcaagacattgcggattttataggggatagccttgaacttgcaaggagggctactagggtagatgccgacgtcatagtattcgccggagtggatttcatggccgaaaccgctaagattttaaatccagataaagtcgttctcattccctctagggaagctacttgtgcaatggctaacatgcttaaggttgagcacatcctggaagctaagaggaagtatcccaatgctccagttgttctctacgtgaatagtacggctgaagctaaggcctatgctgacgttacagttacgtcagcgaacgccgttgaggtagtcaagaagcttgattcagatgtagtaatatttggccccgataagaatcttgctcattatgtagctaagatgactggaaaaaagattatcccagttccatctaagggtcattgctacgttcaccagaagttcacccttgatgacgttgagagggctaagaaactgcacccaaatgcaaagctaatgatccatcctgagtgcatcccagaggttcaggagaaagctgatattatagcctctactggcggaatgataaagagggcgtgcgagtgggatgagtgggtagtcttcacggagagggagatggtctacaggcttaggaaactatatccccaaaagaagttttaccctgcaagggaggatgcattctgcattgggatgaaggctataaccctcaagaatatctacgaatccctcaaggatatgaagtacaaagttgaggttccggaggagatcgctaggaaggctaggaaagccatagaaagaatgctggagatgagcaaatga

SEQ ID NO: 50926 - protein, 300 aa, Pyrococcus horikoshii
MDLVEEILRLKEERNAIILAHNYQLPEVQDIADFIGDSLELARRATRVDADVIVFAGVDFMAETAKILNPDKVVLIPSREATCAMANMLKVEHILEAKRKYPNAPVVLYVNSTAEAKAYADVTVTSANAVEVVKKLDSDVVIFGPDKNLAHYVAKMTGKKIIPVPSKGHCYVHQKFTLDDVERAKKLHPNAKLMIHPECIPEVQEKADIIASTGGMIKRACEWDEWVVFTEREMVYRLRKLYPQKKFYPAREDAFCIGMKAITLKNIYESLKDMKYKVEVPEEIARKARKAIERMLEMSK

SEQ ID NO: 50927 - DNA, 909 bp, Pyrococcus kodakaraensis
  CDS (1)..(909): transl_table=11
atggagaaggaaaagctcatcgaggagataaaccggctgaaggaggaacggaacgcgataattatggcccacaactaccagctgccggagatacaggacatagcggacttcctcggagacagccttgagctcgcgaggaaggcggtaaacattgacgctgacgtgatagtcttcgcgggcgttgacttcatggctgaaaccgcgaagatactcaaccccgaaaagacggttctcctgcccaccccaagggcgacctgcgcgatggccaacatgctcaccataaaacacatcattgaggccaagaaaaagtatccagatgctcccgtcgtcctctacgtgaacagttcagcggaggcgaaggcctacgccgacgttaccgttacctccgcaaacgctgctaaaatcgttgggaagcttgactccgacgttgttatcttcggcccggacaagaacctcgcccactacgtcgctaaagtcactggaaagaaagtcatccccgtccctcccaacggccactgctacgttcacaggaagtttacgctggaggacgttgaacgtgcgagaaaactttacccaaacgccaagctcatggttcaccctgagtgtgagccagaagtgcaggaacaggcggatataatcgtctccaccggcgggatgataaagagggcctgcgagcacgacgagtgggttgtcttcacggagagggagatggtttgccgtctccagaagctctatccgagcaagaagttctatcccgcaagggaagacgccacatgcattgggatgaaggcgataaccctcaaccacatttacgaatcactgagagacatgaaatacagggtagaagtcccggcggagatcgcagagaaggcgagaaaggcaatagagaggatgctggagatgagctaa

SEQ ID NO: 50928 - protein, 302 aa, Pyrococcus kodakaraensis
MEKEKLIEEINRLKEERNAIIMAHNYQLPEIQDIADFLGDSLELARKAVNIDADVIVFAGVDFMAETAKILNPEKTVLLPTPRATCAMANMLTIKHIIEAKKKYPDAPVVLYVNSSAEAKAYADVTVTSANAAKIVGKLDSDVVIFGPDKNLAHYVAKVTGKKVIPVPPNGHCYVHRKFTLEDVERARKLYPNAKLMVHPECEPEVQEQADIIVSTGGMIKRACEHDEWVVFTEREMVCRLQKLYPSKKFYPAREDATCIGMKAITLNHIYESLRDMKYRVEVPAEIAEKARKAIERMLEMS

SEQ ID NO: 50929 - DNA, 1149 bp, Ralstonia solanacearum
  CDS (1)..(1149): transl_table=11
atggaaacccacatcaagacggttgaattcgagcgcccgaatatgctcgccgaggcgcaatccggggccagttgcgtcgcgcacgcctgggccaaggtgccgccggctttgtcacgcgaggagcgcgacgccctgaaagcccgcatcaagcgtctgctcaaggagcggaatgcagtgctggtcgcgcactactacgtcgatgccgacctgcaggacctggccgaggagaccggggggtgcgtgtcggattcgctggagatggcccgcttcggccgtgaccactcggccaagacactggtggtggcaggcgtgcgcttcatgggtgagaccgccaagatcctgagtcctgaaaagaccgtgctgatgccggatctggatgcgacctgctcgctggacctgggttgtccgccggacacgttcgctgccttctgtgacgcgcatccggaccgcactgtcgtcgtctatgccaacaccagcgccgccgtgaaggcgcgcgccgactggatggtcacgtcctccatcggcctgaagatcgtgcagcatctgcacgagcagggacagaagatcctgtgggcgccggatcgccacctgggtagctacatccagcagcagaccggcgccgatatgctgctgtggcagggttcgtgcctggtccacgacgagttcaagggcgtggagctggacctgctgcgagccgagcatccgcacgccaaggtgttggtgcatccggagtcgccgccatcggtggtagcgcaggcggacgtggtgggctcgacctcgcagctgatcgctgcggcacagtcgctgccggcggacgcgttcatcgtcgcgaccgacaacggcatcctgcacaagatgcgcatggccgcgcccggcaagcgtttcatcgaggcgccgaccgccggcaacagcgccacgtgcaagagctgcgcgcactgcccgtggatggcgatgaacgccttgaccaacctggccgaggtgctcgagaccggccgcaacgaaatccacgtcgatccgcagatcggccagcaggcggtgcgctgcattacgcgcatgctggacttcgccgcgcgcgagaaaacgacagtccggccccagggcgatctggcggccaatacgcaactcttccaaggagtcggtccggcatga

SEQ ID NO: 50930 - protein, 382 aa, Ralstonia solanacearum
METHIKTVEFERPNMLAEAQSGASCVAHAWAKVPPALSREERDALKARIKRLLKERNAVLVAHYYVDADLQDLAEETGGCVSDSLEMARFGRDHSAKTLVVAGVRFMGETAKILSPEKTVLMPDLDATCSLDLGCPPDTFAAFCDAHPDRTVVVYANTSAAVKARADWMVTSSIGLKIVQHLHEQGQKILWAPDRHLGSYIQQQTGADMLLWQGSCLVHDEFKGVELDLLRAEHPHAKVLVHPESPPSVVAQADVVGSTSQLIAAAQSLPADAFIVATDNGILHKMRMAAPGKRFIEAPTAGNSATCKSCAHCPWMAMNALTNLAEVLETGRNEIHVDPQIGQQAVRCITRMLDFAAREKTTVRPQGDLAANTQLFQGVGPA

SEQ ID NO: 50931 - DNA, 1080 bp, Rhizobium meliloti
  CDS (1)..(1080): transl_table=11
atgaccactcttgaccttcgcaaggaagcggcgccccctccggccttcgtgagcgctgcggcacgcttcggcgtcatcgagaaaccggatctcgcctttaccccggctgtcgcgcgcgagaccgagcacctttacgaaaaggtaaaggacttcattcctgcgttcgagtgggcggcttatgcgccctacgttcatgcgatcaaccggctgaagaaggaacgtaacgcggtcatcctggcccacaattatcagacgccggacatctttcactgcgtggcggacatcgtcggcgattcgctccagcttgcgcgcgacgccaccaaggtcgacgcggagatcatcatccagtgcggcgtgcacttcatggccgagacctcaaagttgctcaatccggaaaaaacggtgctcattccggatgcgaaagcaggttgctcgctttcggagtcgatcaccggagcggatgtgcggctcctcagggaacgctatccgggcgtgccggtcgtcacctatgtcaacacctcggccggcgtgaaggcggagaccgacatctgctgcacgtcctccaacgtgctggcggtggtcgaaagcctcgagtccgacaccgtgctctgcatcccggacgagtatctggcgatgaacgtggcgcgtcagacgaacaagaagatcctgacctggaaaggtcattgcgaggtgcacgagcggttcacggcagccgaactcctggcttacaaggaagccaatcccggcatcgagatcgtcggccatccggaatgccaccccgacgtcatcgccgtctgcgatttctccggttcgacctcgggcatgatcaattacgtcaaggacaagcggccgcagcgggtgctgctggtgacggaatgctcgatggcgtcgaatatccaggcggaggtcaagggggtcgatttcgtcaagccgtgcaacctgtgtccgcacatgaagcgcatcacgctgccgaagatactcgacagcctgcttaacatgacggaagaggttctggtcgatccggcgatcgccgaccgcgcgcggctggcggtcgagcgcatggtgaacctcaagcagtga

SEQ ID NO: 50932 - protein, 359 aa, Rhizobium meliloti
MTTLDLRKEAAPPPAFVSAAARFGVIEKPDLAFTPAVARETEHLYEKVKDFIPAFEWAAYAPYVHAINRLKKERNAVILAHNYQTPDIFHCVADIVGDSLQLARDATKVDAEIIIQCGVHFMAETSKLLNPEKTVLIPDAKAGCSLSESITGADVRLLRERYPGVPVVTYVNTSAGVKAETDICCTSSNVLAVVESLESDTVLCIPDEYLAMNVARQTNKKILTWKGHCEVHERFTAAELLAYKEANPGIEIVGHPECHPDVIAVCDFSGSTSGMINYVKDKRPQRVLLVTECSMASNIQAEVKGVDFVKPCNLCPHMKRITLPKILDSLLNMTEEVLVDPAIADRARLAVERMVNLKQ

SEQ ID NO: 50933 - DNA, 1044 bp, Salmonella typhimurium
  CDS (1)..(1044): transl_table=11
atgagcgtaatgtttgacccacaagccgcaatctacccgttcccgccgaaaccaacgccgttgaacgacgacgaaaagcaattttatcgtgagaaaatcaagcggttgctcaaagagcgcaatgccgtcatggtggcgcactactacaccgatccggaaattcaacagttagcagaagaaaccggcggctgtatttccgactcactggaaatggcccgtttcggcacgaagcacgccgcatccacgctgctggtagcgggcgtacggtttatgggggaaaccgccaaaatcctcagcccggaaaagaccattcttatgcctaccctggcggcggaatgttcgctggatttaggctgcccaatagacgaatttagcgctttttgtgatgcgcaccctgacagaaccgtagtggtctatgctaacacctcggctgctgttaaagcgcgtgcggactgggttgtgacctccagtatcgccgtagaactgattgagcatctggatagtttgggggaaaaaattatctgggcgccggacagacacctggggaattacgtgcaaaaacagaccggggccgatgtactgtgctggcaaggagcgtgtatcgtgcatgacgagtttaaaactcaggcgttgacccgtttaaaaaaaatctatcccgatgccgctcttctggttcaccctgaatcgccgcagtccattgtcgagatggccgatgcggtgggctccaccagtcagcttattaaggcggcaaaaacgctgccgcacagacagcttatcgtggcgaccgatcgcggcatcttctacaaaatgcagcaggcggtgcctgaaaaagaactgcttgaagcgcccacggctggcgagggggcgacctgccgtagctgcgcgcactgtccgtggatggcgatgaatggcctgaaagccattgctgaagggctggagcagggaggcgcggcgcatgaaatacaggttgatgcggcgctacgcgagggcgcattactgccgctcaaccggatgctggattttgcggctacacttcgggcgtaa

SEQ ID NO: 50934 - protein, 347 aa, Salmonella typhimurium
MSVMFDPQAAIYPFPPKPTPLNDDEKQFYREKIKRLLKERNAVMVAHYYTDPEIQQLAEETGGCISDSLEMARFGTKHAASTLLVAGVRFMGETAKILSPEKTILMPTLAAECSLDLGCPIDEFSAFCDAHPDRTVVVYANTSAAVKARADWVVTSSIAVELIEHLDSLGEKIIWAPDRHLGNYVQKQTGADVLCWQGACIVHDEFKTQALTRLKKIYPDAALLVHPESPQSIVEMADAVGSTSQLIKAAKTLPHRQLIVATDRGIFYKMQQAVPEKELLEAPTAGEGATCRSCAHCPWMAMNGLKAIAEGLEQGGAAHEIQVDAALREGALLPLNRMLDFAATLRA

SEQ ID NO: 50935 - DNA, 1185 bp, Streptomyces coelicolor
  CDS (1)..(1185): transl_table=11
gtgaccaccgcccaaacccaggagctcgacgtacagccgacgcccctcgccctgctgctgctcggccgcgaggccgacccgaggagcgagcgcggtgtggagtgtcccggtgacctgccctcgccctccgacccggacctggtcgcacgcgcccgtgcggccaaggagaagctcggtgacaaggtcttcgtgctcggtcaccactaccagcgcgacgaggtcatccagttcgccgatgtcacgggcgactccttcaagctggcccgggacgcggcggcgcgcccggaggccgagtacatcgtcttctgcggtgtgcacttcatggcggagtcggccgacatcctgacctcgaacgaccagaaggtggtcctgcccgacctggcggccgggtgctccatggccgacatggccacggccgagcaggtcgccgaatgctgggacgtgctgaccgaggccgggatcgccgagcaggtcgtgcccgtgtcgtacatgaactcgtcggcggacatcaaggcgttcaccggcaagcacggcggcaccatctgcacctcctccaacgccgagcgcgccctgaactgggcgttcgagcagggcgagaaggtcctcttcctgcccgaccagcacctgggccgcaacacggcggtgcgggacctgggcatgtccctggaggactgcgtcgtctacaacccgcaccggccgaacggcgggctgacggcgaaggagctgcgcgacgcgaacatgatcctgtggcggggtcactgctcggtgcacggccgcttcagcctcgactcggtcaacgacgtgcgcgagcgcataccgggcgtgaacgtcctggtgcacccggagtgcaagcacgaggtcgtcgcggcggcggactacgtcggctcgaccgagtacatcatcaaggccctggaggcggccccggccggttccaagtgggccatcggcaccgagctgaacctggtccgccgcctggcgaaccgtttcgccgccgaggacaaggagatcgtcttcctcgacaagacggtctgcttctgctcgaccatgaaccgcatcgacctcccccacctggtctggacgctggagtccctcgccgagggcaccctggtcaaccgcatcgaggtggaccaggagacggaggccttcgccaagctggcgctggagcggatgctggcgctgccgtag

SEQ ID NO: 50936 - protein, 394 aa, Streptomyces coelicolor
MTTAQTQELDVQPTPLALLLLGREADPRSERGVECPGDLPSPSDPDLVARARAAKEKLGDKVFVLGHHYQRDEVIQFADVTGDSFKLARDAAARPEAEYIVFCGVHFMAESADILTSNDQKVVLPDLAAGCSMADMATAEQVAECWDVLTEAGIAEQVVPVSYMNSSADIKAFTGKHGGTICTSSNAERALNWAFEQGEKVLFLPDQHLGRNTAVRDLGMSLEDCVVYNPHRPNGGLTAKELRDANMILWRGHCSVHGRFSLDSVNDVRERIPGVNVLVHPECKHEVVAAADYVGSTEYIIKALEAAPAGSKWAIGTELNLVRRLANRFAAEDKEIVFLDKTVCFCSTMNRIDLPHLVWTLESLAEGTLVNRIEVDQETEAFAKLALERMLALP

SEQ ID NO: 50937 - DNA, 936 bp, Sulfolobus solfataricus
  CDS (1)..(936): transl_table=11
atgacaagagttgaagagttactcagtcaaataaagaacctaaaaactgaaaagaatgcaataattttaggacataattacatggaatactctgttcagttagtttcagacttcactggagattcttacgacttggcagttaaggcaatgaagacaaacgctaagataatattatttgcaggagtgtacttcatggcagaacaagcctcagcattaaatccaaacaagaaagtactctccccagatcctaatgcgggttgtacgttatctgattcacttgacgttaaaacattgcaagaatataaagagaagtaccctaatgccccagtagtgctttacataaataccagcatttatgctaaggctttagcagattacatagtaacatcttcaactgcagtgaaagtcgtgcagaaactaaacgcagatacaatactatttggaccagatgctaatctagctaactacgttcaacaaaaagttcccaataagaagattattaaagtaccgccaaatggtagatgtatagtacatgccaactatactaaacaactagtagaactagcaaggaagaagtaccctaatgctctattaatggctcatccagaggcaccattagaaattttagaaagcgcagatttcgtgggatccactaatcaaatgatacaattctcaaaagagaacaaaaatgaggagttcatagttgcaacggaaataggtatgataaatgctctgaagattaagaatccgagtaagaaattctatccactcgttacgacggaagcttgtgcttgtgctaggtgcccatatatgaatatgataaatttggaaaaggtaaagaggtctttagaggaagaggtttacgaggttaaggtaccagaggatattgcagaaagggttaaaagggcatttgaaaatactatgaagttgctataa

SEQ ID NO: 50938 - protein, 311 aa, Sulfolobus solfataricus
MTRVEELLSQIKNLKTEKNAIILGHNYMEYSVQLVSDFTGDSYDLAVKAMKTNAKIILFAGVYFMAEQASALNPNKKVLSPDPNAGCTLSDSLDVKTLQEYKEKYPNAPVVLYINTSIYAKALADYIVTSSTAVKVVQKLNADTILFGPDANLANYVQQKVPNKKIIKVPPNGRCIVHANYTKQLVELARKKYPNALLMAHPEAPLEILESADFVGSTNQMIQFSKENKNEEFIVATEIGMINALKIKNPSKKFYPLVTTEACACARCPYMNMINLEKVKRSLEEEVYEVKVPEDIAERVKRAFENTMKLL

SEQ ID NO: 50939 - DNA, 966 bp, Sulfolobus tokodaii
  CDS (1)..(966): transl_table=11
atgcacagaacacatgttcggggatatatgccagacgcagtggagttaataaaagaaataaagaatttaaagagaaataaaaacgcgataattttaggtcataattatatggagtatggagtacaattagtatcagatttcactggagattcttatgatttagcagtaaaagcaatgaaaacaaatgcagacattatagtattcgctggagtatattttatggcagaacaagcagcagcattaaatccagataaaaaagtattatccccagatcctaatgccggttgctctttatcggattccttagatgtagatactttaaaaaaatataaagaaatgtatcctaatgctccagtagtattgtatattaacactagtatttacacgaaagcattagcagattatattgtaacttcttcaactgctataaaagtagtgaaaagtttagacgcagacacaataatattcggtccagacgcaaatttagcaaattacgttgagagaaaaactgggaagagattagtaaaagtgccaccaaacggaagatgtatagtccatgccaattacacaagacaactagttgaattagcaagaaagaaatatcctaacgcaatactcatggcacatccagaaagtccattagaaatattagaagcatcagactttgtaggctcaacaaatcaaatgataaaatttgctaaagaaagtccctataaagaattcatagtagctacagagttaggtatgataaacgcattaaagttgcaagtaccagaaaaaacattctacccattagttactactgaagcttatgcatgtgcaagatgtccttatatggctatgataacattagaaaaaataaaaagatcactagaagaagaaatttatgaagtgaaagtacctaaggatatagcagaaagggcaaaagaagcatttgaaaggacaatgagactactaaacaactaa

SEQ ID NO: 50940 - protein, 321 aa, Sulfolobus tokodaii
MHRTHVRGYMPDAVELIKEIKNLKRNKNAIILGHNYMEYGVQLVSDFTGDSYDLAVKAMKTNADIIVFAGVYFMAEQAAALNPDKKVLSPDPNAGCSLSDSLDVDTLKKYKEMYPNAPVVLYINTSIYTKALADYIVTSSTAIKVVKSLDADTIIFGPDANLANYVERKTGKRLVKVPPNGRCIVHANYTRQLVELARKKYPNAILMAHPESPLEILEASDFVGSTNQMIKFAKESPYKEFIVATELGMINALKLQVPEKTFYPLVTTEAYACARCPYMAMITLEKIKRSLEEEIYEVKVPKDIAERAKEAFERTMRLLNN

SEQ ID NO: 50941 - DNA, 1062 bp, Vibrio parahaemolyticus
  CDS (1)..(1062): transl_table=11
atgagccacatattagataaaatcgacactgtttacccattcccaccaaaaccaattccgttaagcgaagaagaaaaatcgtcttatatcgcgagcatcaaagagctgctaaaacaaaaggacgcagtactgatcgcgcattactacaccgatcctgaaattcaagcactagcggaagaaacaggtggttttgttggtgattcattagaaatggctaagtttggtaaccgccacccagcaagcacactgattattgcaggcgtacgttttatgggtgagtcggctaaaattctgacaccagaaaaacgaattctaatgccaacgctggaagcggaatgttcacttgatctaggttgtccggcggacaaattcagtgaattctgtgatgcacacccagatcatacggttgttgtctacgcaaacacttctgcggcagtgaaagctcgtgctgactgggtggtcacatcaagcatcgcgcttgaaatcgtggaacatttagacgctgaagataagccaattatttggggaccagaccgtcatttgggctcatacattgccaataaaacgggcgcagatatgttgctttggcaaggtgagtgtgtagtccatgatgaattttctgctgatgcacttcgtaagatgaagagtgtttacccagatgctgcgattcttgttcatccagagtcaccagcaagtgtggtggaattggctgatgctgtcggctctacaagtcagcttatcaaggctgcgaaagaactcccttaccaacaaatgatcgtggcaacggataaaggcatcttctttaagatgcaacaattggtgccagaaaaagaattgatcgaagcgcctacggctggtgctggcgcgacttgtcgcagctgtgcacactgtccttggatggcaatgaacggtttgaaagcgattgaaaaagcgcttagtgaaggtggagaagagcacgaaatcttcgtagatgaagcgctacgagtgaagtctcttattccactgaaccgcatgctagactttgctgagcagctaaatatgcaagtgaaaggtaacgcgtaa

SEQ ID NO: 50942 - protein, 353 aa, Vibrio parahaemolyticus
MSHILDKIDTVYPFPPKPIPLSEEEKSSYIASIKELLKQKDAVLIAHYYTDPEIQALAEETGGFVGDSLEMAKFGNRHPASTLIIAGVRFMGESAKILTPEKRILMPTLEAECSLDLGCPADKFSEFCDAHPDHTVVVYANTSAAVKARADWVVTSSIALEIVEHLDAEDKPIIWGPDRHLGSYIANKTGADMLLWQGECVVHDEFSADALRKMKSVYPDAAILVHPESPASVVELADAVGSTSQLIKAAKELPYQQMIVATDKGIFFKMQQLVPEKELIEAPTAGAGATCRSCAHCPWMAMNGLKAIEKALSEGGEEHEIFVDEALRVKSLIPLNRMLDFAEQLNMQVKGNA

SEQ ID NO: 50943 - DNA, 1014 bp, Wigglesworthia glossinidia brevipalpis
  CDS (1)..(1014): transl_table=11
atgagtaaaaaaaaagaaaccgattcatatttatcgtctgatataaaaaaatctaaagattttaaaataatatcaaatttattaaaaatcaatgatgccgttattgtttctcattattatactactcctgatatacaagctattactgaggccacaggaggaaaagtagcagattctttagaaatggcaaagtttgggaaaaatcataaagcaaaaactttattagttgctggagtaagatttatgggtgaaactgctaaaattttaaatccagaaaaaatagttttaatgcctacgttaaaagcagaatgttctttagacttaagctgtccagaaaaagagtttaataaattttgtgataatcatccagatagaactatagttgtatatgcaaatacatcagctgctataaaagcaagagctcattggatagttacatctagtatagcaattgatcttattgattatttagatagacttggtgaaaaaataatatgggctccagataaacatttaggcagatacattcaaaaacaaactggagcagatatattaatatggaatggaacttgtatagttcatgatgaatttaaatcacaatcattattaaatatgaaaaaaatttatccaaaatctgctatattagctcatcctgagtctccggaaaacgttctgaatttagcagattttataggatctacaagtcaattaatacaagctgctaaatcaataaatcaaaaaacgatcattattgctactgataaaggaattttttttaaaatgcaacaagcttgtccagataaaatactaatagaagctccaacatcaggagaaggattaacgtgtttaagttgtgcaaggtgtccatggatgaaaatgaataatataaataggattataaaaagtttaactaataaaaaaaaacataatgaaataaatataccacatgatctacaaaaaaaggcgctaaaaccattaatgcgaatgttaaaattttcacaaaaagtaatttaa

SEQ ID NO: 50944 - protein, 337 aa, Wigglesworthia glossinidia brevipalpis
MSKKKETDSYLSSDIKKSKDFKIISNLLKINDAVIVSHYYTTPDIQAITEATGGKVADSLEMAKFGKNHKAKTLLVAGVRFMGETAKILNPEKIVLMPTLKAECSLDLSCPEKEFNKFCDNHPDRTIVVYANTSAAIKARAHWIVTSSIAIDLIDYLDRLGEKIIWAPDKHLGRYIQKQTGADILIWNGTCIVHDEFKSQSLLNMKKIYPKSAILAHPESPENVLNLADFIGSTSQLIQAAKSINQKTIIIATDKGIFFKMQQACPDKILIEAPTSGEGLTCLSCARCPWMKMNNINRIIKSLTNKKKHNEINIPHDLQKKALKPLMRMLKFSQKVI

SEQ ID NO: 50945 - DNA, 20 bp, Artificial sequence
  primer
atgttcaccgccgttgcccc

SEQ ID NO: 50946 - DNA, 20 bp, Artificial sequence
  primer
ttaggacatggccagcattc

SEQ ID NO: 50947 - protein, 446 aa, Artificial sequence
  consensus sequence
  Variant (2)..(3): Xaa in position 2 to 3 is any amino acid
  Variant (5)..(8): Xaa in position 5 to 8 is any amino acid
  Variant (9)..(11): Xaa in position 9 to 11 is any or no amino acid
  Variant (13)..(15): Xaa in position 13 to 15 is any amino acid
  Variant (18)..(18): Xaa in position 18 is any amino acid
  Variant (20)..(27): Xaa in position 20 to 27 is any amino acid
  Variant (28)..(28): Xaa in position 28 is any or no amino acid
  Variant (30)..(32): Xaa in position 30 to 32 is any amino acid
  Variant (34)..(37): Xaa in position 34 to 37 is any amino acid
  Variant (38)..(41): Xaa in position 38 to 41 is any or no amino acid
  Variant (45)..(54): Xaa in position 45 to 54 is any amino acid
  Variant (55)..(57): Xaa in position 55 to 57 is any or no amino acid
  Variant (59)..(64): Xaa in position 59 to 64 is any amino acid
  Variant (67)..(67): Xaa in position 67 is any amino acid
  Variant (70)..(70): Xaa in position 70 is any amino acid
  Variant (72)..(72): Xaa in position 72 is any amino acid
  Variant (77)..(77): Xaa in position 77 is any amino acid
  Variant (78)..(82): Xaa in position 78 to 82 is any or no amino acid
  Variant (84)..(84): Xaa in position 84 is any amino acid
  Variant (86)..(86): Xaa in position 86 is any amino acid
  Variant (88)..(89): Xaa in position 88 to 89 is any amino acid
  Variant (91)..(93): Xaa in position 91 to 93 is any amino acid
  Variant (94)..(94): Xaa in position 94 is any or no amino acid
  Variant (96)..(96): Xaa in position 96 is any amino acid
  Variant (98)..(115): Xaa in position 98 to 115 is any amino acid
  Variant (117)..(122): Xaa in position 117 to 122 is any amino acid
  Variant (123)..(135): Xaa in position 123 to 135 is any or no amino acid
  Variant (137)..(137): Xaa in position 137 is any amino acid
  Variant (139)..(140): Xaa in position 139 to 140 is any amino acid
  Variant (142)..(143): Xaa in position 142 to 143 is any amino acid
  Variant (146)..(147): Xaa in position 146 to 147 is any amino acid
  Variant (148)..(152): Xaa in position 148 to 152 is any or no amino acid
  Variant (154)..(156): Xaa in position 154 to 156 is any amino acid
  Variant (159)..(160): Xaa in position 159 to 160 is any amino acid
  Variant (162)..(176): Xaa in position 162 to 176 is any amino acid
  Variant (177)..(180): Xaa in position 177 to 180 is any or no amino acid
  Variant (183)..(184): Xaa in position 183 to 184 is any amino acid
  Variant (186)..(199): Xaa in position 186 to 199 is any amino acid
  Variant (200)..(225): Xaa in position 200 to 225 is any or no amino acid
  Variant (227)..(227): Xaa in position 227 is any amino acid
  Variant (228)..(229): Xaa in position 228 to 229 is any or no amino acid
  Variant (231)..(231): Xaa in position 231 is any amino acid
  Variant (233)..(233): Xaa in position 233 is any amino acid
  Variant (236)..(250): Xaa in position 236 to 250 is any amino acid
  Variant (252)..(257): Xaa in position 252 to 257 is any amino acid
  Variant (258)..(258): Xaa in position 258 is any or no amino acid
  Variant (262)..(269): Xaa in position 262 to 269 is any amino acid
  Variant (270)..(271): Xaa in position 270 to 271 is any or no amino acid
  Variant (274)..(275): Xaa in position 274 to 275 is any amino acid
  Variant (276)..(284): Xaa in position 276 to 284 is any or no amino acid
  Variant (288)..(303): Xaa in position 288 to 303 is any amino acid
  Variant (304)..(315): Xaa in position 304 to 315 is any or no amino acid
  Variant (317)..(328): Xaa in position 317 to 328 is any amino acid
  Variant (330)..(339): Xaa in position 330 to 339 is any amino acid
  Variant (340)..(391): Xaa in position 340 to 391 is any or no amino acid
  Variant (393)..(394): Xaa in position 393 to 394 is any amino acid
  Variant (396)..(399): Xaa in position 396 to 399 is any amino acid
  Variant (401)..(406): Xaa in position 401 to 406 is any amino acid
  Variant (408)..(423): Xaa in position 408 to 423 is any amino acid
  Variant (424)..(438): Xaa in position 424 to 438 is any or no amino acid
  Variant (440)..(444): Xaa in position 440 to 444 is any amino acid
IXXLXXXXXXXAXXXAHXYXXXXXXXXXAXXXGXXXXXXXXDSLXXXXXXXXXXXXXAXXXXXXGVXFMXEXAKILXXXXXXPXKXVXXPXXXXAXCXXXXXXXXXXXXXXXXXXPXXXXXXXXXXXXXXXXXXXYXNXXAXXKAXXXXXXXDXXXTSXXAXXXXXXXXXXXXXXXXXXXPDXXLXXXXXXXXXXXXXXXXXXXXXXXXXXXXXXXXXXXXXXXXWXXXGXCXVHXXXXXXXXXXXXXXXPXXXXXXXHPEXXXXXXXXXXADXXXXXXXXXXXGSTXXXXXXXXXXXXXXXXXXXXXXXXXXXXTXXXXXXXXXXXXPXXXXXXXXXXXXXXXXXXXXXXXXXXXXXXXXXXXXXXXXXXXXXXXXXXXXXXXXXXXXXXCXXMXXXXLXXXXXXLXXXXXXXXXXXXXXXXXXXXXXXXXXXXXXXAXXXXXRM

SEQ ID NO: 50948 - protein, 15 aa, Artificial sequence
  protein pattern
  Variant (2)..(2): Xaa in position 2 is any amino acid
  Variant (5)..(5): Xaa in position 5 is Ala or Gly
  Variant (6)..(6): Xaa in position 6 is Asp, Glu or Gln
  Variant (7)..(7): Xaa in position 7 is any amino acid
  Variant (8)..(8): Xaa in position 8 is Ala, Ser or Val
  Variant (9)..(9): Xaa in position 9 is any amino acid
  Variant (10)..(10): Xaa in position 10 is Ala, Ile, Leu or Val
  Variant (12)..(12): Xaa in position 12 is Ala, Cys, Asn, Ser or Thr
  Variant (14)..(14): Xaa in position 14 is any amino acid
VXFMXXXXXXLXPXK

SEQ ID NO: 50949 - protein, 13 aa, Artificial sequence
  protein pattern
  Variant (2)..(2): Xaa in position 2 is Ala, Ile or Val
  Variant (4)..(4): Xaa in position 4 is Cys, Ser or Thr
  Variant (5)..(5): Xaa in position 5 is any amino acid
  Variant (6)..(6): Xaa in position 6 is Ala, Ile or Val
  Variant (7)..(8): Xaa in position 7 to 8 is any amino acid
  Variant (11)..(11): Xaa in position 11 is any amino acid
  Variant (12)..(12): Xaa in position 12 is Ala, Cys, Ser, Thr or Val
YXNXXXXXKAXXD

SEQ ID NO: 50950 - DNA, 864 bp, Synechocystis sp.
  CDS (1)..(864): transl_table=11
atgaccgccgttaacctccaaaagaagaaatctgacctgagagctatctttggttactccatgactgccgtgtcggcggcctgtctattggccaccgttattcccctgtttgcggtgctgatttttgttgccattcagggtttccgcagccttaacctcaacctttttctcaaactacctccggctcccggtttggccggtggtggggtaggtaacgccattattgggactttcattgtggtggcgatcgccacggtgattgctgtacccatcggcgttttgagtgcggtttatctttccgaatttagcggcgataaccaagtggccagggcggtacgttttgccactaacctgttgagcggtattccttccatcattgccggggtatttgcctacggtgccttggtgtcttcggggctatttggtttttcggccattgcggggggggttgccctggcggtgttgatgttacccaccattatccgcaccaccgacgaagctttacagattgtgccccaggatattcgctgggctgccctgggggtaggggcctacaaataccaaactgttttatttgtggttctgcccgctgccctttcctccattatcaccggggtcacattggcgatcgccagggccgctggagaaacggctcccctaattttcactgctttgtactccaacttctggccccggggactaaaagaacccatcgctaccctggctgtgttggtttataactttgcgtcggtgccctacaaatcccaacaggaattggcctgggcggcttcgttattgctggtgtttctagtgctgattaccaacatcaccgcccgcttctttacccggaagaaggcttattaa

SEQ ID NO: 50951 - protein, 287 aa, Synechocystis sp.
MTAVNLQKKKSDLRAIFGYSMTAVSAACLLATVIPLFAVLIFVAIQGFRSLNLNLFLKLPPAPGLAGGGVGNAIIGTFIVVAIATVIAVPIGVLSAVYLSEFSGDNQVARAVRFATNLLSGIPSIIAGVFAYGALVSSGLFGFSAIAGGVALAVLMLPTIIRTTDEALQIVPQDIRWAALGVGAYKYQTVLFVVLPAALSSIITGVTLAIARAAGETAPLIFTALYSNFWPRGLKEPIATLAVLVYNFASVPYKSQQELAWAASLLLVFLVLITNITARFFTRKKAY

SEQ ID NO: 50952 - DNA, 825 bp, Clostridium difficile 630
  CDS (1)..(825): transl_table=11
atgagaaagttcaaagagaatctattgaagtcattagtatatctatcagcactatttacaatagtatcattagtagttatagtgggatttatatttataaagggaattggcaacatgaattttaatttcttatttagcaattattcagcatcaggtgatggtggtatacttccaatgataattacaacattatatacagtagtagtttctatagttgtagcaactcctataggaatattggctgctatatatttacaagaatatgctaaaaaaggaaaagcagttacagctataagatttgcaactgaaagtttatcagggataccatctatagtatatggattatttggaggaattttctttgtagttacattaaaaatgggatattccatagttgcaggttcacttacagttgcaataataatattaccagtaataattcgtacaacagaagaagctttaaaaacagttcctcaagcttatagagaatcatcattggcattaggagctacaaaatttcaaactttatataaggtagtacttccaagtgcaataccaggaattttatctggagtaatcttatcagttggtcgtataattggagaatcagctgcaatattacttacagcaggtactgtagccaagatgccaggtggaatatttgatagtgcaagaacattaactgtacactcatacttactgactaaagagagtggagatatagcaacagcagccagtataggaattgttttaatagtaattgtgttagcactaaacatgctagcaagatttgttgctaagaaattaaataaagctaattattaa

SEQ ID NO: 50953 - protein, 274 aa, Clostridium difficile 630
MRKFKENLLKSLVYLSALFTIVSLVVIVGFIFIKGIGNMNFNFLFSNYSASGDGGILPMIITTLYTVVVSIVVATPIGILAAIYLQEYAKKGKAVTAIRFATESLSGIPSIVYGLFGGIFFVVTLKMGYSIVAGSLTVAIIILPVIIRTTEEALKTVPQAYRESSLALGATKFQTLYKVVLPSAIPGILSGVILSVGRIIGESAAILLTAGTVAKMPGGIFDSARTLTVHSYLLTKESGDIATAASIGIVLIVIVLALNMLARFVAKKLNKANY

SEQ ID NO: 50954 - DNA, 852 bp, Archaeoglobus fulgidus DSM 4304
  CDS (1)..(852): transl_table=11
atgaaggccgatgaaatcaaagaagggcttttcatgcttctcgcattggctgcaacggtattcggagttgttgttcttgccgcactgcttgcttacaccttcgtcgaagcggcggcatggctcgatttgcagttcttaacctcccccccatcgagatttcctgaaaaagcagggatatttccatcccttgtgggctcaatcatggcaatagctctcgttggtgtgatggttttgcctcttggtgtgggagcggcaatataccttgaggagtatgccagaaagaactggctgacaaagctgattgagattaacatttcaaacctcgctgcagtgccatcaatcgtctacggtcttctcggcctcggccttttcgtctcaactctcggcttaaagcccggaatcgttcttgtgggatctctgactctgacgctgcttgttctgcccattgtaatcgttgcagcgcaagaatcgctgagagccgttccattctctcttagggaagcttccttggctgtgggagcgacgaagtggcagaccgtcaaaagcgttgttctcccaagctctcttccggggataatgactggagtgatactggcgctttcgagagccataggagagaccgcacctctcataatgatcggcgtcgcaacagcaaccttcacagccccaaaggacatcttcagcacctactcagccctgccaatgctaatcttcatgtggaccgacatgccgaaggaggaatttctgcatggtcttgctcctgcagccatcgtcgttttgctggcaataatgctctcgatgaacgccttcgccgtttatctgagaaacaaattcgcaaggaggttgagataa

SEQ ID NO: 50955 - protein, 283 aa, Archaeoglobus fulgidus DSM 4304
MKADEIKEGLFMLLALAATVFGVVVLAALLAYTFVEAAAWLDLQFLTSPPSRFPEKAGIFPSLVGSIMAIALVGVMVLPLGVGAAIYLEEYARKNWLTKLIEINISNLAAVPSIVYGLLGLGLFVSTLGLKPGIVLVGSLTLTLLVLPIVIVAAQESLRAVPFSLREASLAVGATKWQTVKSVVLPSSLPGIMTGVILALSRAIGETAPLIMIGVATATFTAPKDIFSTYSALPMLIFMWTDMPKEEFLHGLAPAAIVVLLAIMLSMNAFAVYLRNKFARRLR

SEQ ID NO: 50956 - DNA, 858 bp, Aquifex aeolicus VF5
  CDS (1)..(858): transl_table=11
atggaaggtcacgggaatttagaaaggtacgtaaagtggaggaagttcaagagcaacttaattctgtttttcacatttcttacagcactctacggactcgtctggcttgtttggataataaccgatgtaactataaaaggattttcaaaccttagtttggatcttctcctgaaggatcctactcccccgggcgtggagggtggtggtttaaaacacgccttcgtgggacatttaataatcacttctctggctgtagttctcggtgttcccataggcatagccgcaggagtattctttacggagtacggcaggtacagcaggtttgtctccttactcagggatcttacggacagtatagtgagcctaccttctataattgtcggaacatttatttacgctgtaatggtcaaaccggtgggacactttttcgccttaagcggttctgtttcgctagccttgttaatgcttccggttatagccataacaaccgcccagatgctgaaaatggttcccgactctttgagggaagctgcttacgccctcggagcgtataagtggcaggttataaaagacgtttccctctctgtcgcaaagaggggaatacttacgggagtaattctgggaattgccagaattacaggggaaaccgctccgcttctatttacttcgtttaacaacaactttaccacttacaacatatttgaacctatggcctcgctcactgttaccattttcgtttacgttatgggaccctacgacgactggcacagaaaagcgtgggctgcctcgctcatactcacaatcggaacgcttatgttcttcatccttgcaaaaatcctcgtcagagctaaaaagtaa

SEQ ID NO: 50957 - protein, 285 aa, Aquifex aeolicus VF5
MEGHGNLERYVKWRKFKSNLILFFTFLTALYGLVWLVWIITDVTIKGFSNLSLDLLLKDPTPPGVEGGGLKHAFVGHLIITSLAVVLGVPIGIAAGVFFTEYGRYSRFVSLLRDLTDSIVSLPSIIVGTFIYAVMVKPVGHFFALSGSVSLALLMLPVIAITTAQMLKMVPDSLREAAYALGAYKWQVIKDVSLSVAKRGILTGVILGIARITGETAPLLFTSFNNNFTTYNIFEPMASLTVTIFVYVMGPYDDWHRKAWAASLILTIGTLMFFILAKILVRAKK

SEQ ID NO: 50958 - DNA, 831 bp, Thermotoga maritima MSB8
  CDS (1)..(831): transl_table=11
atgagaaaagacctgatcgcttcgtacgttttcagagcagtgagttacgttgccttcgcagttgttgtgatcatgttcgtactggttctcgctggaggggtgaagtacttttcaccttcttttttcctggattacccgaagaacggtatgacggagggagggatctttcccgccatccttggcagtttctacctcatggtgctcacgtttctcatatcgattcctcttgggatcttcaccggagtgtttctctctgagtacggaaacaacgtgatcgcgaagtggatagatatctctctgaccgccctgagcggtattccttcggtcgtctacggactcttcggacttgcctttttctgcgtggcccttcagtttggaacttccatgctcgctgccgcgttgactctttctctcatgacacttcccgttatcgcttcttccacgagagaaaccctgaaggccatacctgttgagataagagaagcggcgctggcactcggtgcgacgaaagaagaggtgatcttcaaagttcttctccccgctgcgaggaaaggaatcataacagcggttctcgtcggtggtggaagagctctgggagagaccgctcctgttctgctcacaggagccgtgttctattcaacacagcttccgaagagtcttctctctcctgttatgaccctgccaacacacatatactacatcacagcggcgtacggcgagtcggcccagtggatggcgaagggaacggccgcttttctgatgatagtggttgccttgatatatggaacagctttctttttgaggaggagaaagaatggagcccatcattga

SEQ ID NO: 50959 - protein, 276 aa, Thermotoga maritima MSB8
MRKDLIASYVFRAVSYVAFAVVVIMFVLVLAGGVKYFSPSFFLDYPKNGMTEGGIFPAILGSFYLMVLTFLISIPLGIFTGVFLSEYGNNVIAKWIDISLTALSGIPSVVYGLFGLAFFCVALQFGTSMLAAALTLSLMTLPVIASSTRETLKAIPVEIREAALALGATKEEVIFKVLLPAARKGIITAVLVGGGRALGETAPVLLTGAVFYSTQLPKSLLSPVMTLPTHIYYITAAYGESAQWMAKGTAAFLMIVVALIYGTAFFLRRRKNGAHH

SEQ ID NO: 50960 - DNA, 897 bp, Deinococcus radiodurans R1
  CDS (1)..(897): transl_table=11
atgacgacgactgctgccccccccacccgcccggcaggcctgagcacgggccggcgcctgaacaacctgctgatgggcgcgctcatcgtgctcgccaccgccgtcgtggtcgcccccttgattctgattttcgtctacctgctcaaggaaggctttaccgccatgttcggcattcaggacggcaagctcagcaccgccaacctgaactttttcacccacgtccctgcgcccgaaggcgaaacgggcggcggcatgaaaaacgccattctcggcagcctggaaatgctggcgatggcctcggtcatcggggtcggcgtgggcgtggcgggcggcatcttcctcgccgagtacccccgccacccgctgatgcccaccatccggatgctcagcgacgtgctggccgggattcccgccatcgtgatggggctggtcgcctacgggctgctggtgctgacgatgggccacttcagcggcctcgccggggcgctcgcgctgggcttcctgatgattcccatcgtggtccgcaccaccgaggaagtgctcaagctggtgccgctgaccgtgcgcgaagcggggctgggcctcggcctgcccaaatggctggtcacgctcaaaatcgtgctgcctgccgccgccgggggcatcatcaccggcgtgatgctggcgctcgcccgcgtggccggggaagccgcgccgctgctctttaccgccttcggcaacaacctcgtcaacctcgaccccaccaagccgatgagcgccctgccgctggaaatctaccggggcgccacctccgcctacgacgaaaaccagcgtatggcgaaggcgggggcgttgctgctgattctgctgattttcgtcacgagtatgctcgcccggcgcttcagccgccgcaagtaa

SEQ ID NO: 50961 - protein, 298 aa, Deinococcus radiodurans R1
MTTTAAPPTRPAGLSTGRRLNNLLMGALIVLATAVVVAPLILIFVYLLKEGFTAMFGIQDGKLSTANLNFFTHVPAPEGETGGGMKNAILGSLEMLAMASVIGVGVGVAGGIFLAEYPRHPLMPTIRMLSDVLAGIPAIVMGLVAYGLLVLTMGHFSGLAGALALGFLMIPIVVRTTEEVLKLVPLTVREAGLGLGLPKWLVTLKIVLPAAAGGIITGVMLALARVAGEAAPLLFTAFGNNLVNLDPTKPMSALPLEIYRGATSAYDENQRMAKAGALLLILLIFVTSMLARRFSRRK

SEQ ID NO: 50962 - DNA, 891 bp, Escherichia coli O157:H7 EDL933
  CDS (1)..(891): transl_table=11
  misc_feature (517)..(517): r is g or a
atggctatggttgaaatgcaaaccactgcggcgctggcggaatcccgccgcaaaatgcaggcgcgtcgccgcctcaaaaaccgtattgcactgacgctctcaatggcgacgatggccttcggtctgttctggctgatctggattttaatgtccaccatcacccgcggtatcgacggtatgtcgctggcgctgttcactgaaatgacgccgccgcccaatacggaaggtggtggtctggcgaacgctctggcaggtagcgggctgttaattttgtgggccacggtattcggtacgccgctgggcattatggcggggatttatctggctgaatatggtcgtaaatcctggctggcagaagtgattcgcttcattaacgacattctgctctctgcgccgtcgattgtggttggtctgtttgtttacaccatcgtggtggcgcagatggagcacttctccggttgggcgggtgtgattgcgctggcgttgttgcaggtgccgattgttatccgcaccaccragaacatgctgaaactggtgccggacagcctgcgtgaagcggcttatgcgctgggtacaccgaagtggaagatgatctccgcgattacgctgaaagcgtcggtgtccgggatcatgaccggtatcctgctggcgattgcccgtattgctggtgaaaccgcgccgctgctgtttaccgcgctctccaaccagttctggagcacggacatgatgcagccgatcgccaacctgccggtgacgatctttaagtttgcgatgagcccgtttgcggaatggcagcaactggcctgggccggggtattgatcattaccctgtgcgtactgctgctgaacattctggcgcgcgttgttttcgcgaagaataaacacggttga

SEQ ID NO: 50963 - protein, 296 aa, Escherichia coli O157:H7 EDL933
  misc_feature (173)..(173): The Xaa at location 173 stands for Glu, or Lys.
MAMVEMQTTAALAESRRKMQARRRLKNRIALTLSMATMAFGLFWLIWILMSTITRGIDGMSLALFTEMTPPPNTEGGGLANALAGSGLLILWATVFGTPLGIMAGIYLAEYGRKSWLAEVIRFINDILLSAPSIVVGLFVYTIVVAQMEHFSGWAGVIALALLQVPIVIRTTXNMLKLVPDSLREAAYALGTPKWKMISAITLKASVSGIMTGILLAIARIAGETAPLLFTALSNQFWSTDMMQPIANLPVTIFKFAMSPFAEWQQLAWAGVLIITLCVLLLNILARVVFAKNKHG

SEQ ID NO: 50964 - DNA, 927 bp, Staphylococcus aureus subsp. aureus N315
  CDS (1)..(927): transl_table=11
atgacttcatctactaatgttaaagctttaatcgaaaaaaatattaataaaaaagggaagcataatgacaaaattataccagttattttagccgcaatttcagcgatttccattttaacaacactaggtatattaatcacattgcttttagaaaccatcacttttttcaccagaattccaataactgaatttctattttctactacttggaatcctaccggttcagaccctaagtttggtatctgggcattgataatagggactttaaaaatcacagttattgcgactatatttgcagttccagtcgggcttggtgcagcaatttatttaagtgaatatgcaagtgaccgtgcacgacgcataattaaaccgatattagaaattttagcaggaataccaacaattgtgtttggtttctttgcattaacctttgttacaccagtattaagatctttcatatcaggtcttggagagtttaatgctataagtcccggcttagttgtcggtattatgattgtccctctcatcacaagtttgagtgaggatgcaatggcatctgtaccaaataaaattcgagaaggtgcctatggacttggagcaactaaattagaagtagcaactaaagtcgtacttcccgcagcaacatcaggtattgtagcttcaatcgttctcgcgatttcaagagcaattggagaaacgatgattgtatcattagcggcaggtagttcgccaacagcttcattaagtttaacaagttcgattcaaacaatgactggatatattgttgagatagcgacaggtgatgcaacatttggatcaaatatttattacagtatttatgctgtagggttcacactatttatctttaccttaatcatgaatttactttctcagtggatttctaagcgttttagggaggagtattaa

SEQ ID NO: 50965 - protein, 308 aa, Staphylococcus aureus subsp. aureus N315
MTSSTNVKALIEKNINKKGKHNDKIIPVILAAISAISILTTLGILITLLLETITFFTRIPITEFLFSTTWNPTGSDPKFGIWALIIGTLKITVIATIFAVPVGLGAAIYLSEYASDRARRIIKPILEILAGIPTIVFGFFALTFVTPVLRSFISGLGEFNAISPGLVVGIMIVPLITSLSEDAMASVPNKIREGAYGLGATKLEVATKVVLPAATSGIVASIVLAISRAIGETMIVSLAAGSSPTASLSLTSSIQTMTGYIVEIATGDATFGSNIYYSIYAVGFTLFIFTLIMNLLSQWISKRFREEY

SEQ ID NO: 50966 - DNA, 873 bp, Synechocystis sp. PCC 6803
  CDS (1)..(873): transl_table=11
atgaaaagttctgcccctagtagtttacttgcgcccctatcctttttccgtaatggttttgcctgggtgatgggggggttgtcctttaccctcacccttgtggctctgctgcctttgttggctatcttagctgccattattcaacgaggtttgcccactctttcctgggaagtgtttatccatctaccagctccagtgggggtggaaggggaacccaacggttttgccaatgccattgtgggtactctgaccatggtcggactgggcgctctttttagtgtgcccctgggggtgatgactggggtatttttggcggagtttgcggccggctcggcgatcgccaatggggtacgttttgtcaccgtgattctgagcagtgtgccctcggtaattgtgggggtatttgcctatggagtactggttattaccaccaagcaattttcggcctacgccgggggtctagctttaggggtaattatgactcccattattgctttgactacagaagaagcgctgaaattagtgcctctccattaccgcctgggttccgctgccctgggggctagtaaatgggaaaccacagtcaaaacggtaattccctgtgccattcccgccattaccactggggtattgttagcagtggcgagggccgccggggaaacggctcctttgatgttcactgcgctcttcagtcaattctggcaagaggggttaatggcccccaccccttccctgcccgtactgatttacaactatgccagttctccttttgaagaacagaacgccattgcctggaccgcttctcttgtactattaatgctggttttgaccattaatctatcctcccgtctgctgatccgtcggcgtttttag

SEQ ID NO: 50967 - protein, 290 aa, Synechocystis sp. PCC 6803
MKSSAPSSLLAPLSFFRNGFAWVMGGLSFTLTLVALLPLLAILAAIIQRGLPTLSWEVFIHLPAPVGVEGEPNGFANAIVGTLTMVGLGALFSVPLGVMTGVFLAEFAAGSAIANGVRFVTVILSSVPSVIVGVFAYGVLVITTKQFSAYAGGLALGVIMTPIIALTTEEALKLVPLHYRLGSAALGASKWETTVKTVIPCAIPAITTGVLLAVARAAGETAPLMFTALFSQFWQEGLMAPTPSLPVLIYNYASSPFEEQNAIAWTASLVLLMLVLTINLSSRLLIRRRF

SEQ ID NO: 50968 - DNA, 879 bp, Nostoc sp. PCC 7120
  CDS (1)..(879): transl_table=11
atgaccaattcccaaccatcagaaactgaacttttagcatcagaattacgcagtcctctaccaccaagaagacttttatttacttatgccatgaatgcaatcgcttttgcattctccgctttggcattaattcctttattttccattctttgggaaattatttcacgaggaatcatcggtttaaaaacagaaatgttcgtcaaatctgtcatcgataacggatttggtaacgccattttagggactattacagttgtcgctattggctctttattcagtattcctgtagggttattcacaggtatatttttagcagaatttggacaaactagtccattagctcgctttgtacgctttatcgttagtatcctgactggtgttccctcaattgttgttgggatattcgcttatggtttaatagttttggctactaaacaatttagcgcgatcgctggtggatttgccttagccacaattatgttacctattatcgccttgactaccgaagaagccctcaaacttattcccatagaccaacgcctcgcctcagcagctttgggaggaacacgctttcaaactaccattcgtgtggttgttactgctgctatacccgcaattaccacaggtattttactagctgtagcccgtgctgctggtgaaacagcacccctaatttttacggccttatttagtctagattggtcagccggattactcggccccacagcttccttaccagtcttaatttacaacctttacaacgaccctgacccccagaaaagtcaactagtctggacgacttctatcgttttactcggtttagttttaagtgttagtttgctttcccgtttagttactcgtaagaaaaagattaaataa

SEQ ID NO: 50969 - protein, 292 aa, Nostoc sp. PCC 7120
MTNSQPSETELLASELRSPLPPRRLLFTYAMNAIAFAFSALALIPLFSILWEIISRGIIGLKTEMFVKSVIDNGFGNAILGTITVVAIGSLFSIPVGLFTGIFLAEFGQTSPLARFVRFIVSILTGVPSIVVGIFAYGLIVLATKQFSAIAGGFALATIMLPIIALTTEEALKLIPIDQRLASAALGGTRFQTTIRVVVTAAIPAITTGILLAVARAAGETAPLIFTALFSLDWSAGLLGPTASLPVLIYNLYNDPDPQKSQLVWTTSIVLLGLVLSVSLLSRLVTRKKKIK

SEQ ID NO: 50970 - DNA, 894 bp, Nostoc sp. PCC 7120
  CDS (1)..(894): transl_table=11
gtgagttggattatggaatctggttttgttgaaaggagtttaaatcgtaattcccagtctccccggacgctgtttaatacagcgatgactgttgttgcctttatttgtggcgcattggcaattttacccttaatcgcggtattgtcttatgtcctaattagaggctttagtagtttaagcttaagtgtatttactgagttgccacctgcacctatgagaccagggggaggatttggtaacgctatcttggggacactgctgatggtgggtatcggtgcggcaatcagtatcccatttggtgtgatggcagcaatttatttaacagagtttagcactggctcattggctagatgggtaaggtttgctactaatgttctcagtggtgtaccttctatcattgctggggtatttgcctatggtattgtagtcttgacactagttaagcttaatctaggttcctactctgcactcggtggagggttcgcactggcaatcttgatgttgccaattattgtaaaaactacagatgaagctttgcagttagtatcaaaagatttgcgacaggcctctgtaggtttaggtgcaactaaatttcaaacagtggcacaagttgtattgccagctgccttgccagcaattgtgacaggttcaaccttggcgatcgctcgcgcagccggagaaactgccccgttattgtttacagctttattctcaccattctggcctgatagcttattcagacccactgcttcccttgctgttttagtttttaactttgcaatttctccctttcaaaattggcagtcactagcttgggctgcgtctttaattttagtgttgatggttctcatcaccagtattattgcacgctgggtaactcgccaaaaagcttag

SEQ ID NO: 50971 - protein, 297 aa, Nostoc sp. PCC 7120
MSWIMESGFVERSLNRNSQSPRTLFNTAMTVVAFICGALAILPLIAVLSYVLIRGFSSLSLSVFTELPPAPMRPGGGFGNAILGTLLMVGIGAAISIPFGVMAAIYLTEFSTGSLARWVRFATNVLSGVPSIIAGVFAYGIVVLTLVKLNLGSYSALGGGFALAILMLPIIVKTTDEALQLVSKDLRQASVGLGATKFQTVAQVVLPAALPAIVTGSTLAIARAAGETAPLLFTALFSPFWPDSLFRPTASLAVLVFNFAISPFQNWQSLAWAASLILVLMVLITSIIARWVTRQKA

SEQ ID NO: 50972 - DNA, 885 bp, Unknown
  Unidentified
  CDS (1)..(885): transl_table=11
atgcgcacgccctccatcccggccgtccgcgccgactcggaaaagatcaagtcgcgcctgcaggcccgtcgccgcaacgtcaaccgcttggccctgacgctgtcgctggcggccatgggcttcggcctggtgtggctggcgtggatcctgtggaccacgctgacgctcggtatcgacgggttgtcgctgtcgctgttcacgcagatgacgccgccgccgaacacgccgggcggcggtctggccaacgccattgtcggcagcttcctgatggtggggctggccacgctggtcggcacgccgctgggcatcctggccggcatctacctgtccgagtacggcaagacctcggcgctggccagcgtcacgcgcttcatcaacgacatcctgctctcggcgccgtccatcgtgatcgggctgtttgtctacgcgatcgtggtggcgcgcgtgcatcacttctccggcatcgcgggcgtgatcgcgctggcgctgctgcaggtccccatcgtcgtgcgcaccaccgagaacatgctgaacctggtgcccaacgcgatgcgcgaggccgccatggcgctcggcacgcccaagtggaagatggtgctgtcgatcacgctgaaggcttcgtatgcgggtgtgatcaccggcgtgctgctggccatcgcccgcattgccggcgagacggcgccgctgctcttcaccgcgctgaacaaccagttctggagcctggacctgaaccagccgatcgccagcgtgccggtcgtgatcttccgctttgcgatgagcccgttccccgagtggcagcaactggcctgggccggggtgttcctgattacgctgggtgtgctggggctgaacgtcctcgcgcgtgccttgttcaccaagaaatga

SEQ ID NO: 50973 - protein, 294 aa, Unknown
  Unidentified
MRTPSIPAVRADSEKIKSRLQARRRNVNRLALTLSLAAMGFGLVWLAWILWTTLTLGIDGLSLSLFTQMTPPPNTPGGGLANAIVGSFLMVGLATLVGTPLGILAGIYLSEYGKTSALASVTRFINDILLSAPSIVIGLFVYAIVVARVHHFSGIAGVIALALLQVPIVVRTTENMLNLVPNAMREAAMALGTPKWKMVLSITLKASYAGVITGVLLAIARIAGETAPLLFTALNNQFWSLDLNQPIASVPVVIFRFAMSPFPEWQQLAWAGVFLITLGVLGLNVLARALFTKK

SEQ ID NO: 50974 - DNA, 825 bp, Clostridium perfringens str. 13
  CDS (1)..(825): transl_table=11
atgagaaaagttaaagataatatattaaatgggttagtttggttatcagccatatttacaataggaattcttgtaattattttaggattcatatttgtaaagggcataggaaaaataaatttaacattcttaacaagtaattattcagctggtggcggtggtggaatattgccaatgatagtaacaactttatggactgttttactttccttagcagtggctactcccataggagttttgggagctgtatatttacaagaatatgctaaacaaggaaagatggttaagtttataagatttgctactgaaagtttagcaggtattccttcaatcgtttatggattatttggaggtatattctttgtagtagctttaaaaatggggtattcaattttagcaggttcattaacagtatcaataataatcttacctgtaataattagaacaacagaagaggcattaaaaactgtgccggaatcatatagagaagcatccttaggattaggtgctacaaagtttcaaactttatataaagtaatattaccaagtgcaatgcctggaatactttcaggagtaatattatcaataggacgtataataggggaatcagcagctatattacttactgctggaactgttgcacaaatgccaaaaggaattttttcaagtgcaagaacacttacagttcaagcttaccttgtaacaaaggaaaaaggagatatagaaacagcagcggcagttggaatagttcttatagttataatactagcattaaatatttcagctaagttaatagctaaaaaatttaataaggcaaactattaa

SEQ ID NO: 50975 - protein, 274 aa, Clostridium perfringens str. 13
MRKVKDNILNGLVWLSAIFTIGILVIILGFIFVKGIGKINLTFLTSNYSAGGGGGILPMIVTTLWTVLLSLAVATPIGVLGAVYLQEYAKQGKMVKFIRFATESLAGIPSIVYGLFGGIFFVVALKMGYSILAGSLTVSIIILPVIIRTTEEALKTVPESYREASLGLGATKFQTLYKVILPSAMPGILSGVILSIGRIIGESAAILLTAGTVAQMPKGIFSSARTLTVQAYLVTKEKGDIETAAAVGIVLIVIILALNISAKLIAKKFNKANY

SEQ ID NO: 50976 - DNA, 924 bp, Corynebacterium glutamicum ATCC 13032
  CDS (1)..(924): transl_table=11
atgactaacaatgttgttactccgcgcatggatgagcctttaaagaagagctcagccttcaccgacatctcctccagccgtaagaccaccaacaccgcagcaaccgtcatcatttatggtgcgatgctcatcgcagctgtgccactggtttgggtgctgtggaccgtgatctctcgaggcatcgctccgatcctcactgctgattggtggtccacctcccaggctggcgtcatgctgatgctgccaggcggcggtgcagctcacgccatgatcggtaccttcatgcaggcggtagtcacctcggtgatttccattccaatcggtatcttcaccgcaatctacttggtggaatactccaacggtaaccgtctcggacgcttgaccaccttcatggttgacatcctcaccggtgttccttccatcgttgcggcactgttcgtgtactccttgtggatcgtgctcttcggcttcgaccgctccggcttcgcagtgtccctgtcactggtgattttgatggttccagtgatcatccgaaacaccgaagaaatgctccgcgttgttcctcaggatctgcgtgaagcgtcctacgcactgggcgtgccaaagtggaagaccatcgcaaagatcgttctcccaaccgcactgtccggtatcgtcaccggcgtcatgctcgcagtcgctcgtgtcatgggtgagtccgcaccagttctggtcttggttggttcctcccaggccatcaactggaacccattcggcggtccgcaggcttcccttccactgatgatgcttgatatgtacaaggccggcaccgcaccagcaacgctggacaagctgtggggcgcagccctcaccctggtgctcatcatcgctgtcctgaacattggcgcacgaatcatctccgccaagttctctgtcaagcaataa

SEQ ID NO: 50977 - protein, 307 aa, Corynebacterium glutamicum ATCC 13032
MTNNVVTPRMDEPLKKSSAFTDISSSRKTTNTAATVIIYGAMLIAAVPLVWVLWTVISRGIAPILTADWWSTSQAGVMLMLPGGGAAHAMIGTFMQAVVTSVISIPIGIFTAIYLVEYSNGNRLGRLTTFMVDILTGVPSIVAALFVYSLWIVLFGFDRSGFAVSLSLVILMVPVIIRNTEEMLRVVPQDLREASYALGVPKWKTIAKIVLPTALSGIVTGVMLAVARVMGESAPVLVLVGSSQAINWNPFGGPQASLPLMMLDMYKAGTAPATLDKLWGAALTLVLIIAVLNIGARIISAKFSVKQ

SEQ ID NO: 50978 - DNA, 903 bp, Methanosarcina acetivorans C2A
  CDS (1)..(903): transl_table=11
ttgaacagcacgaattttagaattctgaagggcaatatcttcatggggatatcctacttttcagcagcaaccgtagtcttggtccttttattcataatcgggataatagcaatcaaaggaattccttcgctaactcccgagtttgtattttcttccgagtcccaagtctttggctttggaggagccatagggaatgccattgtagggactatcctgctatcaaccctttctcccctgcttgccatcccttttgcaatagggactgcaatttacctgaaaaggtacgcaaaggaagggttttttaccagttcactgagctttttgcttgaggttctttcaggcactccttccattgtgctcgggcttttcgggtttcttttccttgccatccagatgaagtactttacagggggattttctttaatctcagggacaatagcccttgcaatacttgtcctgcctgtcatggaaaaagcaactgaaaatgcccttgacagcgtcccgctggaacttgaagatgcaagctatgcccttggagcgaccaagtgggagaccatcagtaaaatttctcttccttacgctatcctagggattattacaggtatattgctaagcatcgggagggctgccgaagagtccgcagtggttgtgctgacagccggctactctcagtttttcccggaatggaaagttgtccccaatgataagttcatcttcggggtaaaaatttatcctttccaggaccttgtggcggctctcccgataacggtttatcacgggtttgagttcccgaatatggtatcgccttccgaaagtttcggggctgccttcgtattgatccttatagtcatgctgatcaatttcacgacgcgcatgtttctgaggaggagaaagattggctga

SEQ ID NO: 50979 - protein, 300 aa, Methanosarcina acetivorans C2A
MNSTNFRILKGNIFMGISYFSAATVVLVLLFIIGIIAIKGIPSLTPEFVFSSESQVFGFGGAIGNAIVGTILLSTLSPLLAIPFAIGTAIYLKRYAKEGFFTSSLSFLLEVLSGTPSIVLGLFGFLFLAIQMKYFTGGFSLISGTIALAILVLPVMEKATENALDSVPLELEDASYALGATKWETISKISLPYAILGIITGILLSIGRAAEESAVVVLTAGYSQFFPEWKVVPNDKFIFGVKIYPFQDLVAALPITVYHGFEFPNMVSPSESFGAAFVLILIVMLINFTTRMFLRRRKIG

SEQ ID NO: 50980 - DNA, 888 bp, Thermoanaerobacter tengcongensis MB4
  CDS (1)..(888): transl_table=11
atgaaggcaaaactttacgataaaattgctacaatatatttttacgtggtagcagggtttttagtggcatttttgatttccctcataggatatattttgtatcaaggaaggacaaggcttaatttgtctttcttaacttcccctcccaagtttatggaggcaggaggaggtataggccctcagctttttaattcaattgaacttctggtgattaccttaattatctctgttccgattggacttggagcgggaatatacatggcagaatatgcaaggccagggctttttacagaggtaatacgcctgtctgttgagactttgtcttctatgccttctattgtcgttggccttttcggacttttggtttttgtcacaatgacaggttggggctattcacttatggcgggagctctggctcttacagttttaaaccttcctgtcatgacaagagtcagtgaggatgccataaagagtgttccaagtagcttgagggaagcgagttttgcccttggggcgacaaaatggcagactatcacaaaagtagttgtacctgctgccatgcctggaattttaactggaataattttaactgccggaagaatttttggagaagctgcggcactgctttatacagctggtatgagtagccctgccctgaatttttcaaacttaaatccttcaagcccaacttctcctttgaatttgttcaggccggcagagactttggctgtatatatttggaaagtaaatagcgaaggtttagctcctgatgcaaggcaaattgcggatggagcttctgcggtcttgcttttagcagttttgactttcaacctttttgcaaggtggttaggcggagttttgtatagaagaatgacaggtgaaagataa

SEQ ID NO: 50981 - protein, 295 aa, Thermoanaerobacter tengcongensis MB4
MKAKLYDKIATIYFYVVAGFLVAFLISLIGYILYQGRTRLNLSFLTSPPKFMEAGGGIGPQLFNSIELLVITLIISVPIGLGAGIYMAEYARPGLFTEVIRLSVETLSSMPSIVVGLFGLLVFVTMTGWGYSLMAGALALTVLNLPVMTRVSEDAIKSVPSSLREASFALGATKWQTITKVVVPAAMPGILTGIILTAGRIFGEAAALLYTAGMSSPALNFSNLNPSSPTSPLNLFRPAETLAVYIWKVNSEGLAPDARQIADGASAVLLLAVLTFNLFARWLGGVLYRRMTGER

SEQ ID NO: 50982 - DNA, 1065 bp, Streptomyces coelicolor A3(2)
  CDS (1)..(1065): transl_table=11
atgagccacgcaaccctgacccccgcccccaagaaccgcagctccctgcgcgccgccaccctgcccaagtggttcccctgggcggtcgcggccggctcggtcctcctcggcctcggcatcagcaccgccgccgggctgaacagcagcatccagtgggccctgatcgccgcggtcctcttcgtcggcggttcgtacggcatctcggcgcgcgtcgagggcggccggcaggccaaggaccgggtcgcgaccagcatggtctgggtcgccttcctgctggccctgatcccgctgctctccctcatctgggagaccgtgaagcagggcgtgaaggtcctcgacggctacttcctgacccactcgatgggcgtggtcggcgacagcgagcccggcggcggcatctaccacgccatcctcggcaccctggagcaggtcggcctcgccacgctgttctccgtgccggtcggcgtgctcaccgcgatctacctggtcgagtacggccgcggccggctcgccaaggccgtcaccttcttcgtggacgtcatgacgggcatcccgtccatcgtcgcgggcctgttcgtgctcagcctgtgggtgctgatcctggacatgggaccgtccggcgtcgcgggctccttcgccctgtgcatcctgatgatcccggtggtcgtccgctccaccgaggagatgctcaagctcgtcccgaacgagctgcgcgaggcgtccctcgccctgggcgtgccgaagtggcgcacgatcctcaaggtggtcctgccgacctcgatcggcggcatcgtcaccggcgtcatgctggccgtcgcccgcatcaccggcgagacggcccccgtactgctgctggtctggggcaccgacttcatcaacgcgaatcccttccaggatccgcaggagtcgctgccgatgtacatctacctccagtacggcgcgggctccgacgcggcctacgaccgtgcctgggcggcggccctgacgttgatcgccttcatcatgatcctcaacctcgcggcccgcggcgtcgcccgctggaaggccccgaagacgggtcgctga

SEQ ID NO: 50983 - protein, 354 aa, Streptomyces coelicolor A3(2)
MSHATLTPAPKNRSSLRAATLPKWFPWAVAAGSVLLGLGISTAAGLNSSIQWALIAAVLFVGGSYGISARVEGGRQAKDRVATSMVWVAFLLALIPLLSLIWETVKQGVKVLDGYFLTHSMGVVGDSEPGGGIYHAILGTLEQVGLATLFSVPVGVLTAIYLVEYGRGRLAKAVTFFVDVMTGIPSIVAGLFVLSLWVLILDMGPSGVAGSFALCILMIPVVVRSTEEMLKLVPNELREASLALGVPKWRTILKVVLPTSIGGIVTGVMLAVARITGETAPVLLLVWGTDFINANPFQDPQESLPMYIYLQYGAGSDAAYDRAWAAALTLIAFIMILNLAARGVARWKAPKTGR

SEQ ID NO: 50984 - DNA, 870 bp, Xanthomonas axonopodis pv. citri str. 306
  CDS (1)..(870): transl_table=11
atgtccgccgcttcggtgtcgcaatcgctgtacaaccgccgccgggtcaccaacgccatcgcgttgctgctctcgtgcgtcactgcattgtttggtctgttcttcctggcctggatcctgtggacgctggtgtccaagggcgtgccgggcatcgatctcaacttgtttaccaagatgacgccgccgccgatgcaggaaggcggcctgctcaacgccttcttcggcagtgcggtgatgtgcgggctggcactggcgatcggcacgccgctgggcatcgctgcaggcacctggctcgccgagtacggcaacgcgcgcaaggccggcgtggtggtgcgcttcgtcaacgacatcctgttgtcggcgccctcaatcgtgctgggcctgttcgtctacaccttgtacgtgatgcagaccggcggacgcttttcggcattcgccggtgcgctgtcgctggctttcatcgtgctgccggtggtggtgcgcaccaccgacgaaatgctgcggttggtgccggcgcagatgcgggaagcggcattgtcgctgggcattccccagtggaaagtcacggtgcaggtgctgtaccgcagcgcctcggcaggcatcgtcaccggcgtgctgctggcgctggcgcgcatcagcggcgaaaccgcaccgctgctgttcaccgcattcggcaaccagtactggaacagcaacatcttccagccgatggccagcgtgccggtgatcatgaatcaattcgccggcagcccgtacgacacctggcagacgctggcctgggccggcgcgctggtgctgaccgtgttcgtgttgctggtcagcctgggcgcgcgcgccctgctcttgcgcaacaagatctccaatgactga

SEQ ID NO: 50985 - protein, 289 aa, Xanthomonas axonopodis pv. citri str. 306
MSAASVSQSLYNRRRVTNAIALLLSCVTALFGLFFLAWILWTLVSKGVPGIDLNLFTKMTPPPMQEGGLLNAFFGSAVMCGLALAIGTPLGIAAGTWLAEYGNARKAGVVVRFVNDILLSAPSIVLGLFVYTLYVMQTGGRFSAFAGALSLAFIVLPVVVRTTDEMLRLVPAQMREAALSLGIPQWKVTVQVLYRSASAGIVTGVLLALARISGETAPLLFTAFGNQYWNSNIFQPMASVPVIMNQFAGSPYDTWQTLAWAGALVLTVFVLLVSLGARALLLRNKISND

SEQ ID NO: 50986 - DNA, 930 bp, Thermosynechococcus elongatus BP-1
  CDS (1)..(930): transl_table=11
atgattgacatgctgcggaaccctttggcgattcgagcctctgtaaaggcaaggacgcgctgggaaaagttttttattttccttggccttttttctatcgccattgcgctgctgacactggtactgctggtaggagatttgctcctgcggggggctcctatactgaactggaagtttttcacgtcacctcccagtggagatcctgctgaagcagggattttaaccgcatgggtaggtagcttactggttattctggttacaattgttgttgctgtaccattaggagtggcagcgggcatctaccttgaggagtatgcgccgaagaattggctgcttgatttcattgaaatcaacatcaccaatttggctggtgttccctccatcatttatggcctgttggccctggggttctttgtctatatcctcaagtggggtgaaagtattctgaccgctggctgcaccctagccttgttgattttaccggtgatcattgtcgccacacgggaagcgattcgcgcgattccccaaggtattcgtgagggtgcctatgctgtgggggccacccgttggcaaaccatcgccgatcacatcttgccctactccatgggtgggattctcactggtgtgatcgtgggggtgtcgcgggccttgggagaaacggcgccacttgtcactatcggtgcgttgacttttatcacttttttgcctgacgcgccactaaagggggagtttccctacgtttcgttcaaatggctctggtcaccctttacggtgttacccattcaaatgtttaactgggtatcacgcccccaggaagagtttcaggtgaatgcagctgcagcagggattgtcttgcttgtgctgactttgggcgtcaatgcgatggccatttaccttcgttatcgttttaggaagagcatcaaatggtaa

SEQ ID NO: 50987 - protein, 309 aa, Thermosynechococcus elongatus BP-1
MIDMLRNPLAIRASVKARTRWEKFFIFLGLFSIAIALLTLVLLVGDLLLRGAPILNWKFFTSPPSGDPAEAGILTAWVGSLLVILVTIVVAVPLGVAAGIYLEEYAPKNWLLDFIEINITNLAGVPSIIYGLLALGFFVYILKWGESILTAGCTLALLILPVIIVATREAIRAIPQGIREGAYAVGATRWQTIADHILPYSMGGILTGVIVGVSRALGETAPLVTIGALTFITFLPDAPLKGEFPYVSFKWLWSPFTVLPIQMFNWVSRPQEEFQVNAAAAGIVLLVLTLGVNAMAIYLRYRFRKSIKW

SEQ ID NO: 50988 - DNA, 1491 bp, Brucella suis 1330
  CDS (1)..(1491): transl_table=11
atgtccttctttctggttctcgtcagtgtcattgcaatcgggctgatcggattcttcattggccgtcagcgcgccgttgtgctggacaaggcgcagtttgcggctgcctccgggccggctggcgaaaaaatgcattcccgcccgcattatcacggctggtgggttttcctcgtttccgccctgcctgcattgcttttccttgcgatctgggctgtcggcacttcggtctatctcgaccatagtgctgccgcccgcctaccggttgaagtggaaggatcctacaccaatcgcagcctccagcttggcatggtgcgcggtctcgccaacgggcttgagcacctgacaccggctgaactggaaaatttccccgcttcctatcacgatgctcgcgcggccctggctgccaagggggtggcgctcgccaccgaaggccaggactatatggtcccgatcgccctctatctgaaaaagacgatggcgctcacccatacgattggctccgccctggcgctggtgatcgccgtggctggcctcatcttcggcctgtccacgatcaatcgccggatgcgtgcgcgcaacaatgtcgagcgcatcgtgctctggggcctcattgccgcatcgggcatcgccattttgacgacggttggcatcatctgctcgatgcttttccagaccatcagtttcttccagtcggtttccccgtgggaattcttcttcggcaccgtttgggatccgcgctttgccgctgccggttcgggtggacaggtaggtcagttcggcctgatcccgcttctggccggcacgctctatatcgcccttgtggccatgcttttcgcggtgccggtcggcctgttctcggctatctatatggcggaatatgcctcgccgcgggtgcgcaccgtggtgaagccggttctggagcttctggctggcattcccagcattgtttacggcttcttcgcgctggtgacggttgggcctttcctgcgcgatctctcgattgccattgcaggcggtcagggcttcatcatggcgcagagcgttttgacggccggtctcgtcatgggcgtcatgctcattcccttcgtctcgtcgctttccgacgatatcatcaccgccgttccccgcgcgctgcgcgacgggtcgctcggccttggcgcgacacgttccgaaacgatcaggcgcgtggttcttccggcagcccttccgggtatcgtgggcgcgctcctgatgactgcttcccgcgccatcggcgaaaccatgatcgtggttctggcggccggtgtggcggcgcgcatcaatatcaatcctttcgaggcgatgaccaccatcacggtgaagatcgtcaaccagcttaccggcgatcttgagttcaattcgccgcagacgctggtggccttcgcgcttggcatcacgcttttcgttctgacgctgatcatgaacatctttgcgctgcatatcgtgcgcaagtaccgggagcagtacgaataa

SEQ ID NO: 50989 - protein, 496 aa, Brucella suis 1330
MSFFLVLVSVIAIGLIGFFIGRQRAVVLDKAQFAAASGPAGEKMHSRPHYHGWWVFLVSALPALLFLAIWAVGTSVYLDHSAAARLPVEVEGSYTNRSLQLGMVRGLANGLEHLTPAELENFPASYHDARAALAAKGVALATEGQDYMVPIALYLKKTMALTHTIGSALALVIAVAGLIFGLSTINRRMRARNNVERIVLWGLIAASGIAILTTVGIICSMLFQTISFFQSVSPWEFFFGTVWDPRFAAAGSGGQVGQFGLIPLLAGTLYIALVAMLFAVPVGLFSAIYMAEYASPRVRTVVKPVLELLAGIPSIVYGFFALVTVGPFLRDLSIAIAGGQGFIMAQSVLTAGLVMGVMLIPFVSSLSDDIITAVPRALRDGSLGLGATRSETIRRVVLPAALPGIVGALLMTASRAIGETMIVVLAAGVAARININPFEAMTTITVKIVNQLTGDLEFNSPQTLVAFALGITLFVLTLIMNIFALHIVRKYREQYE

SEQ ID NO: 50990 - DNA, 873 bp, Shewanella oneidensis MR-1
  CDS (1)..(873): transl_table=11
atgccgcttcttttaaaaaaatcaggggacttaatagaaaccagtttcaaaatattattcctatgttgtgctatggcaggcgtgatttctgtttccactataggatggtttgtctttagcgaggggttaccagcacttaaagaggcaggtgtaatctcattcgttttaggtaaggagtggttaccacctgcgttatacggcattttacccatgattatcgcttcactcatctcgacaacgggtgcaataattattggggttccaattgcgatttttaccgccatatttcttgctgaacttgcaccaaaatggctagcaaatcttgtcaggcctgcagttgagctgctcgctggtattccttctgtagtatatggtttttttgggttggttattattgttccgggaatagaagctatttttgatattcccgcaggtaataccctcttggcagggattattgttctagcgatcatgattttgccgaccatcatcaccatttcagaaacttcattacgtgcattgccatcggtttataaagaaggtgcattggctctaggcgcatcccatatttacactatttttaacgtgcttgtccccgcggccaaaagcgggattctaacaggcgtaattttaggtgttgctcgtgctattggcgaaaccatggccatcatcatggtgatgggtaatgctcctgcaatgccaggatcgttacttgaacctgctagaacactaaccgctaatatcgcgatggaaatgtcttatgcaacaggcatccactccagtgctttatacgcaacaggtatagtattactcgcgttcatcgtattacttaatggttcgctgttgtatctcaatcgtaagaaggcttactaa

SEQ ID NO: 50991 - protein, 290 aa, Shewanella oneidensis MR-1
MPLLLKKSGDLIETSFKILFLCCAMAGVISVSTIGWFVFSEGLPALKEAGVISFVLGKEWLPPALYGILPMIIASLISTTGAIIIGVPIAIFTAIFLAELAPKWLANLVRPAVELLAGIPSVVYGFFGLVIIVPGIEAIFDIPAGNTLLAGIIVLAIMILPTIITISETSLRALPSVYKEGALALGASHIYTIFNVLVPAAKSGILTGVILGVARAIGETMAIIMVMGNAPAMPGSLLEPARTLTANIAMEMSYATGIHSSALYATGIVLLAFIVLLNGSLLYLNRKKAY

SEQ ID NO: 50992 - DNA, 936 bp, Streptococcus mutans UA159
  CDS (1)..(936): transl_table=11
atgaaaaatcaagaacttgctaaaaagctgacatctccttccaaaaattctcgtttggaaaaattcggaaagatgattacgcttttctgcttaatcttaattgttattattgtagcaatgattcttatttttgttgcccaaaagggattgtcaaccttttttgtgaataaaatcaatcctcttaaatttttgtttgggacagagtggcagccaaatgttaaaggagctgatggtaaaccattacttggggctttaccgatgatcttaggttcctttattgtaactattttatctgctattattgcgactccttttgctattggagcagcagtctttatgactgaaatttcacctaagtacggtgccaaaattttacagcctgtcgttgagcttttggtaggaattccttcagttgtttatggttttattggtttgcaaattgtggttccttttgtgagatctatttttggcggtactggttttgggattttatcaggggtttttgttctctttgttatgattttaccaacagtaacttttatgacagttgatagtttgaaggccgttccgaggcattataaggaagccagtcttgctatgggagctactcgctggcaaacgatttggcgtgtgattttaaatgctgctaagccaggtatttttacggccgttgtttttgggatggctcgagcttttggtgaagccttagctatccaaatggtagttggtaattcagctgttattccgacgtcattgaccacacctgcagcaactttgacatcagtcttaacaatgggaatcggtaatacggttatgggaaccgttcaaaataatgtcctttggtccttagccttagttcttctcattatgagtctggcctttaatatgctgatgagatttattacaagggaaggtaagaaaaattatgaacgctaa

SEQ ID NO: 50993 - protein, 311 aa, Streptococcus mutans UA159
MKNQELAKKLTSPSKNSRLEKFGKMITLFCLILIVIIVAMILIFVAQKGLSTFFVNKINPLKFLFGTEWQPNVKGADGKPLLGALPMILGSFIVTILSAIIATPFAIGAAVFMTEISPKYGAKILQPVVELLVGIPSVVYGFIGLQIVVPFVRSIFGGTGFGILSGVFVLFVMILPTVTFMTVDSLKAVPRHYKEASLAMGATRWQTIWRVILNAAKPGIFTAVVFGMARAFGEALAIQMVVGNSAVIPTSLTTPAATLTSVLTMGIGNTVMGTVQNNVLWSLALVLLIMSLAFNMLMRFITREGKKNYER

SEQ ID NO: 50994 - DNA, 933 bp, Corynebacterium efficiens YS-314
  CDS (1)..(933): transl_table=11
atgactaacaacgtttccgcaatcagcaccccgcgcatggatgagcagctgaagaacagctccgccttcacggacatctccggtcgacgcaaggctgtcgacggtttcgcagccgtcctgatctacggggccatgttcatcgcggccatccccctggtctgggtcctctggaccgtgatctcccgtggcctgggcccgatcctcaccgtcgactggtggaccacctcccagcagggcatcctgctccagctgcccggtggcggtgcggcacacgccatcatcggcaccatggttcaggccgtgatcacctcggtcgtgtccatcccgatcggtatcttcaccgcgatctacctggttgagtacgccaacggcaaccgcctcggccgcatcaccaccttcatggtggacatcctcaccggtgtgccctccatcgtcgccgcgctgttcatctactccatgtggatcgtgctcttcggtttcgaccgttctggtctcgccgtgtcactgtccctggtcatcctcatggtgccggtgatcatccgaaacaccgaggagatgctgcgcgtcgttccccacgacctgcgcgaggcatcctatgcactgggcgtgccgaagtggaagaccatcgccaagatcgtgctgccgaccgcactgtccggcatcgtcaccggtgtcatgctggccatcgcccgcatcatgggtgaatccgccccggttctggtgctcgtcggttccacgcaggccaccaactgggaccccaccaccggcccgcagtcctcgcttccactgatgatgctggacatgtacaaagccggtaccgcgccggccaccctggacaagctgtggggcgcagccctcaccctggtcctgatcattctcgccctcaacatcggcgcccgactgatctcggccaagttctcggtcaagcagtaa

SEQ ID NO: 50995 - protein, 310 aa, Corynebacterium efficiens YS-314
MTNNVSAISTPRMDEQLKNSSAFTDISGRRKAVDGFAAVLIYGAMFIAAIPLVWVLWTVISRGLGPILTVDWWTTSQQGILLQLPGGGAAHAIIGTMVQAVITSVVSIPIGIFTAIYLVEYANGNRLGRITTFMVDILTGVPSIVAALFIYSMWIVLFGFDRSGLAVSLSLVILMVPVIIRNTEEMLRVVPHDLREASYALGVPKWKTIAKIVLPTALSGIVTGVMLAIARIMGESAPVLVLVGSTQATNWDPTTGPQSSLPLMMLDMYKAGTAPATLDKLWGAALTLVLIILALNIGARLISAKFSVKQ

SEQ ID NO: 50996 - DNA, 894 bp, Pseudomonas putida KT2440
  CDS (1)..(894): transl_table=11
atgactgacctgacgacccctgtagccgcgctgcccagcctgcagcgcaagctggaaggccgcgccctgcgcagcctggtattgaccaccctggcctggttcgcggcactggtggccagcgtgccgctgatttccgtgctgtacatgctgatcactcgcggcggggcacgccttaacctggaagtgttcaccgagctgccgccgactggcttcgagatgggcggtggtttcggtaacgctatggccggtaccttcgtcatggtcggcattgccgccgccatcgctgtgccggtcggtatcctggcagcggtgttcctggccgaactcggccccgacagcaaactggccaacgctgcgcgctttgccgccaagatgctcactggcctgccatcgatcctggccggggtgtttgcctacgccttggtggtgatgaccaccggtacctactcggcaccggcaggcggcgtggcgctggcggtgctgatgctgccgatcgtggtgctgaccgccgaagagtcgatgaagatggtgcccaagatcatgaaggacgccgcctacggcatgggttgcacccgtgcccaggtgatctggaagatcgtcctgcctaccggcctgccggccatcctcaccggggtgatgctggctgtggcccgcgcggctggcgaaaccgcgccactgctgttcaccgcattgttcagcaactactggatctaccacgacggcgacatggcggtgatgaaccccacagcctcgcttgcggtactgatctacaacttctccggcatgccgttcgacaaccagctggaactcgcctgggcggcctcgctggtgctggtaatgatcgtgctggtcatcaacattttgagccgagtcttcggcaagcccaagtattga

SEQ ID NO: 50997 - protein, 297 aa, Pseudomonas putida KT2440
MTDLTTPVAALPSLQRKLEGRALRSLVLTTLAWFAALVASVPLISVLYMLITRGGARLNLEVFTELPPTGFEMGGGFGNAMAGTFVMVGIAAAIAVPVGILAAVFLAELGPDSKLANAARFAAKMLTGLPSILAGVFAYALVVMTTGTYSAPAGGVALAVLMLPIVVLTAEESMKMVPKIMKDAAYGMGCTRAQVIWKIVLPTGLPAILTGVMLAVARAAGETAPLLFTALFSNYWIYHDGDMAVMNPTASLAVLIYNFSGMPFDNQLELAWAASLVLVMIVLVINILSRVFGKPKY

SEQ ID NO: 50998 - DNA, 846 bp, Bradyrhizobium japonicum USDA 110
  CDS (1)..(846): transl_table=11
atgaacccgatctattcacgccgccgccgcaaggacatcgtcgttcgcggactctgcatcgccgccgccgccttcggcgtcacctggcttgcgctgatcctgatcacgctgctttacaacggcatcgccggtctgaacctcgagattttcgtggcagatacgccgccgccgggctcgaccgaaggcggcctgcgcaacgccatcgtcggttcgatcatcatgaccgtgctcggcgtcggcatcggcgcgccgctcggcctgttcgccggcacctatctcgccgagtacggccgcaacgaccgcctgacctcggtgatccgcttcatcaacgacatcctgctctcggcgccctcgatcatcatcggcctgttcatctacggcgcggtggtggtgccgatgcgcggcttctcggcgatcgcaggcagcctcgcgctcgccgtcatcgtcatcccggtagtgctgcgcacgaccgaggacatgctgctgctggtgccgaacgcgctgcgcgaggcggcgtccgcgctcggcctgccgcgctcgctggtgatcaagcggatcgcctatcgtgccgcccgctccggcctcatcaccggcgtgctgctcgccaccgcccgcgtcgccggcgagaccgcgccgctgctcttcaccgcgctgtcgaaccagttcttcagccttggcctgaacaagacgatggcgaacctgccggtcaccatcaacaacttcgtccagagcccctacgcctattggaagcagctcgcctggagcggcgcgctgctgatcacgattaccgtgcttgccctgaatattggcgcgcgcatccttggcgccgagaggaccgcaaaatga

SEQ ID NO: 50999 - protein, 281 aa, Bradyrhizobium japonicum USDA 110
MNPIYSRRRRKDIVVRGLCIAAAAFGVTWLALILITLLYNGIAGLNLEIFVADTPPPGSTEGGLRNAIVGSIIMTVLGVGIGAPLGLFAGTYLAEYGRNDRLTSVIRFINDILLSAPSIIIGLFIYGAVVVPMRGFSAIAGSLALAVIVIPVVLRTTEDMLLLVPNALREAASALGLPRSLVIKRIAYRAARSGLITGVLLATARVAGETAPLLFTALSNQFFSLGLNKTMANLPVTINNFVQSPYAYWKQLAWSGALLITITVLALNIGARILGAERTAK

SEQ ID NO: 51000 - DNA, 885 bp, Lactobacillus plantarum WCFS1
  CDS (1)..(885): transl_table=11
atgaacgctaaacgcatcgataaaattgccactggcgtgctatacggcgtcgcagcctttgtggtcatcatcttagttgccctattgggatacattctgatccaaggggtgcccaaaatttcgtggcattttttaacgtcgccggccctggcttttgaagcgggtggtgggattggcattcagttgtttaactccttctacttactatttttagcgttattgatttcattaccgatttcactgggtgcggggatctatctaaatgaatatgcgccgcaaaatacggtgactggcctgattcggacgaccattgaaattctgagttcattgccatccgtagtcgtggggctgttcggatacttgttctttgtagtgcagttcaagttaggcttctcgattctttccggggcgtttgcgctgaccgtgtttaacttaccgattttaacccggagtattgaggaagcactcgccaatatctcagataatcaacgggaggccggctacgcgttagggctatcacgttgggagacggtgacgaagatcgtggttcccgctgccttaccaagcattttaacgggggtcgtcttgagtgccgggcggatctttggtgaagccgcagctttaatctacactgcgggtcaaagtgcaccagccttggactttggtaactggaatccatttgatatcagtagtccactcagtccactacgtccagccgaaacgttggccgttcatatttggaagatcaactcagaaggaattatgccggacgcgaaagccgtttcggcgggggcttcagccgtattaattattgcggtattgctctttaacttcttagctcgttggcttggcaaacgcttgtacaaacacttaaccgctgaataa

SEQ ID NO: 51001 - protein, 294 aa, Lactobacillus plantarum WCFS1
MNAKRIDKIATGVLYGVAAFVVIILVALLGYILIQGVPKISWHFLTSPALAFEAGGGIGIQLFNSFYLLFLALLISLPISLGAGIYLNEYAPQNTVTGLIRTTIEILSSLPSVVVGLFGYLFFVVQFKLGFSILSGAFALTVFNLPILTRSIEEALANISDNQREAGYALGLSRWETVTKIVVPAALPSILTGVVLSAGRIFGEAAALIYTAGQSAPALDFGNWNPFDISSPLSPLRPAETLAVHIWKINSEGIMPDAKAVSAGASAVLIIAVLLFNFLARWLGKRLYKHLTAE

SEQ ID NO: 51002 - DNA, 894 bp, Tropheryma whipplei str. Twist
  CDS (1)..(894): transl_table=11
atgactaagttacctccgcgtaaaaatatgcacaagagacgtgtaagaaatagggtgtttacctgtgttgtttacgcttcttttgtaatcgcgatattaccccttctgtcacttttttatacgacgattgcaagtggtttaggacgctttgatattgcattttttacacgtaccatggatggcactgttaacgctggaggtggtgccttgcatgcaattatgggcagttttgaaataacaatacttgcagctctaatcggtattccacttggcttattggttgcaatttttttagttgagtatgggtctgggggttttttgtctcgcacagttgccctcggggtggatgtaatggccggcataccatcgattgttgttggactttttgtatatgccttttttagtcttgttcttgatcaacccggtatccgctcgggctttctgggcgctgttgcgctctccattttgatgttaccgatagtcatacgctctgcggttgaagtcttgagacttgtcccaaatgacctcagagaagcggcttatgccctgggaactccaaaatggcggacaatactttttatcgttttaccaactgctttttctggtattgccactggttcagcccttgcaattgcgcgagcagtcggagaaactgcacctcttttgattgttgcaggttttaccaattcgcttaatctaaacccgtttgtagggcgcatgatgaccctccctgtttatgtctacacacaatactcatctcctggtgtcgatgtaggcgcatttttggataggtcgtggtcagcagctcttgttcttattgcaattgcagtctctttttatatcttagctcagatagtttctaaaatgattgccccaaaatctacgaatcgttga

SEQ ID NO: 51003 - protein, 297 aa, Tropheryma whipplei str. Twist
MTKLPPRKNMHKRRVRNRVFTCVVYASFVIAILPLLSLFYTTIASGLGRFDIAFFTRTMDGTVNAGGGALHAIMGSFEITILAALIGIPLGLLVAIFLVEYGSGGFLSRTVALGVDVMAGIPSIVVGLFVYAFFSLVLDQPGIRSGFLGAVALSILMLPIVIRSAVEVLRLVPNDLREAAYALGTPKWRTILFIVLPTAFSGIATGSALAIARAVGETAPLLIVAGFTNSLNLNPFVGRMMTLPVYVYTQYSSPGVDVGAFLDRSWSAALVLIAIAVSFYILAQIVSKMIAPKSTNR

SEQ ID NO: 51004 - DNA, 873 bp, Pseudomonas syringae pv. tomato str. DC3000
  CDS (1)..(873): transl_table=11
atgacgggcagcgagcgtatttaccgggctcgcaatttcaagaacaagattgcgatggtgctcagttgtggcgccactgcgtttggcctgttgtggctggtctggatcctgctgaccactatcatcaaaggcatcgatgcgctcaacctgcagttgtttaccggcatgacgccaccacctggcactgagggtggtctggccaacgcgttctacggcagcgttctgatgtccggcatcggcctgctgatcggcacaccgatcggcctgatggccggcatctggctggccgagtttgcccgctacaccaagttgggcaacactgtgcgcttcatcaacgacatcctgctgtcggcaccgtccattgtgctcggcctgttcgtttacaccgttgtggtgttgccgctcaacgcggtcacaggccatcaggtgggcttttcggcactggccggtgccttggcgctggcgctgctggtcatcccggttgtggtgcgcaccaccgacgaaatgatgcaactgcaaccctcgaccatgcgtgaagctgcgctggcactgggtgtgccgcaatggaagctgaccctgcaaatcgttctgcgcgccgccaaggcgggcgtggtcacaggtgtcctgctggcgctggcacgtatcaccggcgaaaccgcgccgctgttgtttaccgctttcggcaaccagttctggagcagcgatctgctcaaaccaatcgccagtgttccggtggtggttttccagtacgcaatgagcccgtttgaagactggcactccctcgcatgggccggtgcactggtcatgacgctgttcgtactgatactgagtctgctgtctcgcttaattcttctgcgcaatagggcgtcctga

SEQ ID NO: 51005 - protein, 290 aa, Pseudomonas syringae pv. tomato str. DC3000
MTGSERIYRARNFKNKIAMVLSCGATAFGLLWLVWILLTTIIKGIDALNLQLFTGMTPPPGTEGGLANAFYGSVLMSGIGLLIGTPIGLMAGIWLAEFARYTKLGNTVRFINDILLSAPSIVLGLFVYTVVVLPLNAVTGHQVGFSALAGALALALLVIPVVVRTTDEMMQLQPSTMREAALALGVPQWKLTLQIVLRAAKAGVVTGVLLALARITGETAPLLFTAFGNQFWSSDLLKPIASVPVVVFQYAMSPFEDWHSLAWAGALVMTLFVLILSLLSRLILLRNRAS

SEQ ID NO: 51006 - DNA, 891 bp, Salmonella enterica subsp. enterica serovar Typhi Ty2
  CDS (1)..(891): transl_table=11
atggctacgcttgatatgcagaacaccgcgcagctcgcggaattccgtcgcaagatgcaggcgcgtcgccgcatgaagaaccgtatcgcactaacgctctcaatggcgacgatggcatttggcctgttctggctgatctggattttgatgtccaccatcacgcgcggcattgatggtatgtcgctggcgctgtttaccgaaatgacgccgccgccgaacacggcgggcggcgggctggcgaacgccctggcggggagtggattattgattctctgggctaccgtattgggtacgccgctggggattatggcgggtatttacctggccgagtatggccgtaaatcctggctggcggaaatcattcgctttattaacgacattctgctttccgcgccgtcaattgttgtggggctgtttgtttacaccatcgtggtggcgcagatgcagcacttctccggctgggcaggggtgattgcgctggcgctgttgcaggtgccgatcgttatccgtaccactgaaaacatgctcaagctggtaccggatagcctgcgtgaagccgcttatgcgctgggtacgccgaagtggaagatgatctccgcgattacgctgaaagcctctatctccgggattatgaccggtattctgctggctattgcgcgtatcgccggggaaacggcgccattgttgtttaccgcgctctcgaaccagttctggagcaccgacatgatgcagccgatcgccaacctgccggtgaccatttttaaattcgcgatgagcccgtttgccgaatggcaacaattagcctgggcgggcgtgctgattattaccctgtgcgtactgctgctgaatattctggcgcgtgttgttttcgcgaagaaaaaacacggttaa

SEQ ID NO: 51007 - protein, 296 aa, Salmonella enterica subsp. enterica serovar Typhi Ty2
MATLDMQNTAQLAEFRRKMQARRRMKNRIALTLSMATMAFGLFWLIWILMSTITRGIDGMSLALFTEMTPPPNTAGGGLANALAGSGLLILWATVLGTPLGIMAGIYLAEYGRKSWLAEIIRFINDILLSAPSIVVGLFVYTIVVAQMQHFSGWAGVIALALLQVPIVIRTTENMLKLVPDSLREAAYALGTPKWKMISAITLKASISGIMTGILLAIARIAGETAPLLFTALSNQFWSTDMMQPIANLPVTIFKFAMSPFAEWQQLAWAGVLIITLCVLLLNILARVVFAKKKHG

SEQ ID NO: 51008 - DNA, 1062 bp, Streptomyces avermitilis MA-4680
  CDS (1)..(1062): transl_table=11
atgagcaacgcagccgtcaccgacaagcgcccgagcaccctgcgcggtgccagcctgccgaagtggtcgccgtgggcgatcgccgcgggctccgtcgccctcgccgtggtcatcggcgtgctgggcggcctcggcagcaaggtccagtggggtctgatcgccgcactgctcttcgtcctgggtacgtacgccgtcgccgccaaggtcgagggccgccgccaggccaaggaccgggtcgccaccagcctcgtctgggtctgcttcctgatcgccgtcgtcccgctggcctccctgatctgggagaccgtcaagcgcggcgtgaaggtcttcgacgtctacttcctgacccactccatgggtgtggtcgccgacaccgagaccggcggcggtatctaccacgcgatcatcggcaccctggagcaggtcggcatcgccaccctgatcgccgtgccgatcggtgtgctcaccgcgatctacctggtcgagtacgggcggggcaggctcgccaaggccgtcaccttcttcgtcgacgtcatgacgggcatcccgtcgatcgtcgccggcctgttcgttctcagcttctggatcctgatcctggacatgggctactccggtttcgccggttcgctcgcgctgtccatcctgatgatgcccgtggtggtccgctccaccgaggagatgctcaagctcgtaccgaacgagctgcgcgaggcctccctcgcgctgggcatcccgaagtggcgcaccatcctcaaggtggttctgccgacgtccatcggtggtatcaccacgggtgtgatgctcgcggtcgcgcgcatcacgggtgagaccgccccggtgctgctcctggtctggggcacgaacttcatcaacaccaacccgttctcggacccgcaggcctcgctgccgctgtacatctaccagcagtacgcgaacagtgccggttcgggcgcggcctacgaccgggcctgggcggcggcactcgccctcatcgccttcgtcatgatcctcaacctggcggcgcgcggcatcgcgcgctggaaggccccacggactcgatga

SEQ ID NO: 51009 - protein, 353 aa, Streptomyces avermitilis MA-4680
MSNAAVTDKRPSTLRGASLPKWSPWAIAAGSVALAVVIGVLGGLGSKVQWGLIAALLFVLGTYAVAAKVEGRRQAKDRVATSLVWVCFLIAVVPLASLIWETVKRGVKVFDVYFLTHSMGVVADTETGGGIYHAIIGTLEQVGIATLIAVPIGVLTAIYLVEYGRGRLAKAVTFFVDVMTGIPSIVAGLFVLSFWILILDMGYSGFAGSLALSILMMPVVVRSTEEMLKLVPNELREASLALGIPKWRTILKVVLPTSIGGITTGVMLAVARITGETAPVLLLVWGTNFINTNPFSDPQASLPLYIYQQYANSAGSGAAYDRAWAAALALIAFVMILNLAARGIARWKAPRTR

SEQ ID NO: 51010 - DNA, 936 bp, Nitrosomonas europaea ATCC 19718
  CDS (1)..(936): transl_table=11
atgctacctatgaatcaccctgacaatctgaatgaaatacgtaccatcattgcttatcacaagcgttgggacttactggcgctggtagcaggtgttaccgcactgatgatcgcgattctgacgttcatcgcactgttcgggagtatggtcatcgacggaatgccacgcctgacctgggaatttttcacctcctttccctctcgcaaaccggaagcggccggaattctctccgcatgggtcggcacgacattgatcatgctggtgacagcggcagcggccgttcctctcggtgtggcggccggtgtttatcttgaagaatacgcaccgaaaaacctcatcaccgaaatcatcgaaatcaatgtcaccaatctggcgggtgtaccctccattatttatggtctgctggcactggggctgttcgtctatcaactcggactgggccagagtatcctctcagccgggctgacactggcgctgctgattctgccaatcgtcatcgttgcaacccgtgaagcgatcagatccattcccgtttccatccgtgaaggagcttatgccctgggggcaaccaaatggcaaacagtatcagatcatgtcctgccttattccgcagccggtattctgacgggagtcattatcggactggcgcgtgcgattggagaaacagcaccaatcatcacgatcggtgcactgacattcattgcttttctgcctccatcccccattcaggatcagttcccgttcgtatcgttccaatggctgatggagccatttacagttatgccaattcagatgttcaactggatatcgagaccgcaagaagcctttcagcataatgcagcggctgccggcctggtactggtcgtcatgacgttactgatgaacggactcgctatttatctgcgctatcgtctgcgtaaaaatatcaagtggtaa

SEQ ID NO: 51011 - protein, 311 aa, Nitrosomonas europaea ATCC 19718
MLPMNHPDNLNEIRTIIAYHKRWDLLALVAGVTALMIAILTFIALFGSMVIDGMPRLTWEFFTSFPSRKPEAAGILSAWVGTTLIMLVTAAAAVPLGVAAGVYLEEYAPKNLITEIIEINVTNLAGVPSIIYGLLALGLFVYQLGLGQSILSAGLTLALLILPIVIVATREAIRSIPVSIREGAYALGATKWQTVSDHVLPYSAAGILTGVIIGLARAIGETAPIITIGALTFIAFLPPSPIQDQFPFVSFQWLMEPFTVMPIQMFNWISRPQEAFQHNAAAAGLVLVVMTLLMNGLAIYLRYRLRKNIKW

SEQ ID NO: 51012 - DNA, 915 bp, Prochlorococcus marinus subsp. marinus str. CCMP1375
  CDS (1)..(915): transl_table=11
atgacaatttcaaaacttaaagctaatcttatatacgatccaaaatctaaaagaaatttaactgagaagttatttacatcaatatctgctattttttcaattattgcaatcttacctcttgtacttgttcttgcatatattctcattaaaggtggttctcaaattagttgggagacattaatattagagcctgagcctcctggcgacgatttgttgtcagcaggtggaatagggcctgcaattattggtacatttattatatctagcattgcatcaataatatcaataccaattggagtaggaggaggaatttaccttgctgaatatgctaaaggaggtcccttttccagatttataaggtttggaactaatgtacttgcgggagtcccttccataattgccggtgtttttatttatgctgtaatagttgccactaaagtactatttgggagcatgtttagcggcattgctggaggtatggccctatcaattttaatgcttccaacagtaatcaaaaccacagatgaaagcttgaaacttgtctcagatgaccttaggagaggatctttagggataggcgcttctatgtttacaacagttattcggataactcttcctgcagcatttagatcaattgcaacgggaattgtattaggcctagcaagagcggctggggagacagctcctctaattttcactgcactcttctctcgttattacttaacaggctttggtgatttgttctatgaaatgggttcattatctgtattgatttataactttgcactcgaaccatacgaagcacaaaatgaactagcctgggcagcatccttcatactagttgtgttactactttccatgaatatattatctaaacttgttagcgatatagcatcaggtgattcaaataaataa

SEQ ID NO: 51013 - protein, 304 aa, Prochlorococcus marinus subsp. marinus str. CCMP1375
MTISKLKANLIYDPKSKRNLTEKLFTSISAIFSIIAILPLVLVLAYILIKGGSQISWETLILEPEPPGDDLLSAGGIGPAIIGTFIISSIASIISIPIGVGGGIYLAEYAKGGPFSRFIRFGTNVLAGVPSIIAGVFIYAVIVATKVLFGSMFSGIAGGMALSILMLPTVIKTTDESLKLVSDDLRRGSLGIGASMFTTVIRITLPAAFRSIATGIVLGLARAAGETAPLIFTALFSRYYLTGFGDLFYEMGSLSVLIYNFALEPYEAQNELAWAASFILVVLLLSMNILSKLVSDIASGDSNK

SEQ ID NO: 51014 - DNA, 837 bp, Bordetella pertussis Tohama I
  CDS (1)..(837): transl_table=11
atgaacaacggcgtctaccggcgccgccacctggtcaacaaggtcatgttgaccatctcgctgggcgcgctgctgttcggcctgttctggctgttctggatcatcgcgaccctgctggtcaagggcgcgcccgcgctgtcgttcacgctgttcacggaaattacgcccccgcccgggcaggccggcggcctgctcaacgccgtggtgggcagcgtgctgatggccggcgtgggcaccctgatcggcacgccggtgggcatcctggccggcacctacctggccgagtacggccagcgcggctggctggcgccggccacgcgctttctcaacgacgtgctgctgtcggcgccgtccatcatcatcggcctgttcatctacgccgtgtacgtggcccaggtcggccactactcgggctgggccggcgcgctggcgctgtccatcctggtgatcccggtggtggtgcgcaccaccgacaacatgctgctgctggtgcccaacagcctgcgcgaggccaccgccgcgctgggctgccccaagtggcgcatgatcaccctggtgtgctatcgcgccgccaagaccggcatcatcaccggcgtgctgctggcgattgcccgcatctcgggcgagaccgcgccgctgctgttcaccgcgctgtccaaccagttcatgtcgctgaacatgaacgcgcccatggccaacctgccggtcgtcatctaccagtacgccgccagccccttcaaagactggaacaacctggcctgggctggcgccacgctcatcacgctgctggtgctgggcatcaacatcctggcccgcaacctgttccgcaaatcgtga

SEQ ID NO: 51015 - protein, 278 aa, Bordetella pertussis Tohama I
MNNGVYRRRHLVNKVMLTISLGALLFGLFWLFWIIATLLVKGAPALSFTLFTEITPPPGQAGGLLNAVVGSVLMAGVGTLIGTPVGILAGTYLAEYGQRGWLAPATRFLNDVLLSAPSIIIGLFIYAVYVAQVGHYSGWAGALALSILVIPVVVRTTDNMLLLVPNSLREATAALGCPKWRMITLVCYRAAKTGIITGVLLAIARISGETAPLLFTALSNQFMSLNMNAPMANLPVVIYQYAASPFKDWNNLAWAGATLITLLVLGINILARNLFRKS

SEQ ID NO: 51016 - DNA, 858 bp, Bordetella bronchiseptica RB50
  CDS (1)..(858): transl_table=11
atggctcaatcggcaatctccatgaacaacggcgtctaccggcgccgccacctggtcaacaaggtcatgttgaccatctcgctgggcgcgctgctgttcggcctgttctggctgttctggattatcgcgaccctgctggtcaagggcgcgcccgcgctgtcgttcacgctgttcacggagatcacgcccccgcccgggcaggccggcggcctgctcaacgccgtggtgggcagcgtgctgatggccggcgtgggcaccctgatcggcacgccggtgggcatcctggccggcacctacctggccgagtacggccagcgcggctggctggcgccggccacgcgctttctcaacgacgtgctgctgtcggcgccgtccatcatcatcggcctgttcatctacgccgtgtacgtggcccaggtcggccactactcgggctgggccggcgcgctggcgctgtccatcctggtgattccggtggtggtgcgcaccaccgacaacatgctgctgctggtgcccaacagcctgcgcgaggccaccgccgcgctgggctgccccaagtggcgcatgatcaccctggtgtgctatcgcgccgccaagaccggcatcatcaccggcgtgctgctggcgattgcccgcatctcgggcgagaccgcgccgctgctgttcacggcgctgtccaaccagttcatgtcgctgaacatgaacgcgcccatggccaacctgccggtcgtcatctaccagtacgccgccagccccttcaaagactggaacaacctggcctgggccggcgccacgctcatcacgctgctggtgctgggcatcaacatcctggcccgcaacctgttccgcaaatcgtga

SEQ ID NO: 51017 - protein, 285 aa, Bordetella bronchiseptica RB50
MAQSAISMNNGVYRRRHLVNKVMLTISLGALLFGLFWLFWIIATLLVKGAPALSFTLFTEITPPPGQAGGLLNAVVGSVLMAGVGTLIGTPVGILAGTYLAEYGQRGWLAPATRFLNDVLLSAPSIIIGLFIYAVYVAQVGHYSGWAGALALSILVIPVVVRTTDNMLLLVPNSLREATAALGCPKWRMITLVCYRAAKTGIITGVLLAIARISGETAPLLFTALSNQFMSLNMNAPMANLPVVIYQYAASPFKDWNNLAWAGATLITLLVLGINILARNLFRKS

SEQ ID NO: 51018 - DNA, 894 bp, Prochlorococcus marinus subsp. pastoris str. CCMP1986
  CDS (1)..(894): transl_table=11
atgaattctctttattaccagaaaaaactatcaagaaatgtgggagataaattcttcacttctttatcagttttttgcgcactcattgcaatacttcctttgatttttgtagttacttatattcttattaaagggggagctcagataaatcttgatctatttactttagaaccaaatcctcctggagatgatttagatgcagggggaattaatcctgcattaattgggacactaataattacaactattgcttcaattatcgccataccagtaggggtaggcggaggtatttatctagctgaatattcaaaggggggggctttttcaaaatttattcgattcggagttaatgttttagctggtgttccttcaataattgcaggtgtatttatttatgccttaatcgtttcaacaaaaattttatttggcagtatgtacagtggtttagcaggtggtatggctctttcaatattgatgttgcctacagttataaaaactactgatgaaggtttaaagttagtaccaaatgaattaaggtatgcttctctaggcataggagcaagtatgtatacaacaatattaaaaataactttaccttcagcatttagatctattgctactggtgttgtgcttggaatcgcaagagcagcaggcgaaacggcaccattaatttttactgctttattctcttattactacataacgggatttggagatttgttctatgaaatgggctctttagcggtgctgatatacaattttgcccttgaaccttatgatgcgcagaataaactagcttgggcagcttcttttattcttgttataacaatactgtcagtgaatatattttcacggatattggccgcttttactgagaaaaccaagagggtatga

SEQ ID NO: 51019 - protein, 297 aa, Prochlorococcus marinus subsp. pastoris str. CCMP1986
MNSLYYQKKLSRNVGDKFFTSLSVFCALIAILPLIFVVTYILIKGGAQINLDLFTLEPNPPGDDLDAGGINPALIGTLIITTIASIIAIPVGVGGGIYLAEYSKGGAFSKFIRFGVNVLAGVPSIIAGVFIYALIVSTKILFGSMYSGLAGGMALSILMLPTVIKTTDEGLKLVPNELRYASLGIGASMYTTILKITLPSAFRSIATGVVLGIARAAGETAPLIFTALFSYYYITGFGDLFYEMGSLAVLIYNFALEPYDAQNKLAWAASFILVITILSVNIFSRILAAFTEKTKRV

SEQ ID NO: 51020 - DNA, 921 bp, Prochlorococcus marinus str. MIT 9313
  CDS (1)..(921): transl_table=11
atgaaatcaatgactagcgaagcgatttcaacaagtggggatctatcctccaatctttactacaagccaggcttgaggcgtaatagaattaatagaatttgcacaatattatcgggattattttcatccgtagccattctgccactaattcttgttttaacctatgtaattttcaaaggagcaaccagattaagtatctctctttttactatgcttccgcctcccccaggactcgatggcggaggtattggcaacgcaatcctcggaactattattgtcacctccatagccggaatgatcgctatacctgttggtgttggtggaggtatctaccttgccgaatatgcacgtgaaggaccattctctagatttatacgttttggaaccaatgttctttcaggtgttccttcaattattactggcgtctttgtctacgatataattgtctcttcacgggtcattattggcagttcatacagtgcgatagctggcggagtagcactctcaatcctgatgttgccaacagtgataaaaaccactgatgaaggcctaaaactggtaccagataaccttcgcaaaggtgcacttggagtaggcgcctctaaatttgttaccatatcccacattacattgccaatggcatttactccaatcgctacaggagtcgttctttcagttgctcgggcagctggtgaaacagcaccattgatttttacagcactcttttcatatttttggcctagtggttcagatgctttcttcaatccaatcgcgacactttcggttttgatttataatttttcaactcaaccctatcaagttcagaatgaattggcttgggcagcatcatttgttcttgtagtatttattctcgcgatgaatatcctttcacgctggattggccacttaacctcaaaatga

SEQ ID NO: 51021 - protein, 306 aa, Prochlorococcus marinus str. MIT 9313
MKSMTSEAISTSGDLSSNLYYKPGLRRNRINRICTILSGLFSSVAILPLILVLTYVIFKGATRLSISLFTMLPPPPGLDGGGIGNAILGTIIVTSIAGMIAIPVGVGGGIYLAEYAREGPFSRFIRFGTNVLSGVPSIITGVFVYDIIVSSRVIIGSSYSAIAGGVALSILMLPTVIKTTDEGLKLVPDNLRKGALGVGASKFVTISHITLPMAFTPIATGVVLSVARAAGETAPLIFTALFSYFWPSGSDAFFNPIATLSVLIYNFSTQPYQVQNELAWAASFVLVVFILAMNILSRWIGHLTSK

SEQ ID NO: 51022 - DNA, 924 bp, Chromobacterium violaceum ATCC 12472
  CDS (1)..(924): transl_table=11
atgaaagacgtctcaacgatgagccaagcgacaatgaacgacgccttgcgcaccgcccccgcctccggcctgaagcaggacagcgccgtctaccgccggcgccggctgaccaaccgcctgaccatggtcgcctccatcctgaccatggccttcggcctgttctggctgttctggatcctgatcacgctgctgcagcatggtctgtccggcatcaactggcaggtgttcaccgaaagcacgccgccgccgggatccgccggcggcctggccaacgccatctacggcagcctggtgatgaccggcttcggcacgctgttcggcacgccgatcggcatcctggccggcatctacctggccgagttcggccagcgcggctggctggcgccggccacccgcttcatcaacgacatcctgctgtcggcgccctccatcgtgatcggcctgttcgtgtacgaggtgtacgtggtgtcggtcggacacttttccggctgggccggctccttcgcgctggccatcctggtgatcccggtggtggtgcgcaccaccgagaacatgctgcgcctggtgccgggcagcctgcgcgaagccgccgccgcgctgggcgcgccgcaatggaaggtgacgttgaccgtgacgctgcgcgcggccaaggccggcgtgctcaccggcatcctgctggccgtggcgcgcatttccggcgaaaccgcgccgctgctgttcaccgcgctgaacaaccagttcttcaacagcaatatgaaccagccgatggccaacctgcccatcgtgatcttccagttcgcgatgagcccctacgaggactggcaccagctggcctgggccggctcgctgctgatcaccttcagcgtcctcgccctgaacatcgtcgcccgctggatgggcggccgcaagaatcaatcgaattaa

SEQ ID NO: 51023 - protein, 307 aa, Chromobacterium violaceum ATCC 12472
MKDVSTMSQATMNDALRTAPASGLKQDSAVYRRRRLTNRLTMVASILTMAFGLFWLFWILITLLQHGLSGINWQVFTESTPPPGSAGGLANAIYGSLVMTGFGTLFGTPIGILAGIYLAEFGQRGWLAPATRFINDILLSAPSIVIGLFVYEVYVVSVGHFSGWAGSFALAILVIPVVVRTTENMLRLVPGSLREAAAALGAPQWKVTLTVTLRAAKAGVLTGILLAVARISGETAPLLFTALNNQFFNSNMNQPMANLPIVIFQFAMSPYEDWHQLAWAGSLLITFSVLALNIVARWMGGRKNQSN

SEQ ID NO: 51024 - DNA, 915 bp, Gloeobacter violaceus PCC 7421
  CDS (1)..(915): transl_table=11
atggacgcggtgcaactgcgtgaggcgatcaaaagccgcaagcgcgccgatctcagctttgccgccgccggattgctggcgctgctggtcgggctggtgacgctgacggcgttgatggtggatctggccgtcgacggtaccgcccggttgcggcctgaattttttacttcctttccctcccgctttgccgagcaggccgggatcttgtcggcctgggtgggcagctgcctggtgatgctggtgacggcggcggcggcggtgcctttgggggtggcgtcgggcatttacctggaggagtacgcccccaaaaactggttcaccgagattatcgaggtcaatatcaccaacctcgccggggtgccttcgatcatcttcgggctgatggctttggggttatttgtctacggtctgggattgggggagagcatcctcactgccgggctcaccctggcactgcttatcttgcctatcgtgatcgtctcgacgcgcgaatcgctgcgggcggtgcccgactcgatccgcgaagccgcctacgccctcggggccacccgctggcaggtggtgagcgaccatatcctgccctattcgaccggcggcatcctgacagggatcatcatcggcctctcgcgggcgatcggcgagacggccccgcttatcaccatcggtgctttgacctttatcgccttcttgccggatttacccttgcgggccgagtttccgtttttctccttccagtggctttcctcgggcttcacggtgctgcccatccagatgttcaactgggtgtcgcgcccccaagaggcttttcagctcaacgctgctgccgccggactggtgcttatcgtgatgaccctcggcatgaacgcgctcgccatctacttgcgctactcttttcgcaaacgcatcaagtggtaa

SEQ ID NO: 51025 - protein, 304 aa, Gloeobacter violaceus PCC 7421
MDAVQLREAIKSRKRADLSFAAAGLLALLVGLVTLTALMVDLAVDGTARLRPEFFTSFPSRFAEQAGILSAWVGSCLVMLVTAAAAVPLGVASGIYLEEYAPKNWFTEIIEVNITNLAGVPSIIFGLMALGLFVYGLGLGESILTAGLTLALLILPIVIVSTRESLRAVPDSIREAAYALGATRWQVVSDHILPYSTGGILTGIIIGLSRAIGETAPLITIGALTFIAFLPDLPLRAEFPFFSFQWLSSGFTVLPIQMFNWVSRPQEAFQLNAAAAGLVLIVMTLGMNALAIYLRYSFRKRIKW

SEQ ID NO: 51026 - DNA, 888 bp, Gloeobacter violaceus PCC 7421
  CDS (1)..(888): transl_table=11
atgacaacctcccttaggcccgaacagccggtttccgacgatctgacaagcccgctcgaaccggggcgggcgctgtttacgaccagcatgaccaccctgtcggtcgtcttcacgttctttgcgatcatcccgcttttttcggtgctgatctacgtactcatccagggtttctcctccttgagcccggacatcttcaccgagttgcccgccccggccggcacccccggcggcggcttcggcaacgccattcagggcacgctgctgatggtgggcattgctgcactgatcagcgtcccgtttggggtactttcgggtatttttctttctgagtatgcccgcgacgatcgggggatcattgaagttgtccgcttcggggtcaacgttctggccggtgtgccttcgatcgtgatcggtgtattcgcctacggcgtggtggtgctctccaccaagaccttctcggcttacgcgggaggcttcgccctcgccatcttgatgctgcccatcatcgtgcgcacgaccgaagaggcgctcaaactagtgccctgggaattgcgcctgggctcgctgggactgggagccgatcgcttcaacacgatcgcccgggtgatcgtcccggcggccctgccggggatcatcaccggcgtgatgctcgcggtctcccgcgccgccggtgagacggcgccgctgctgtttaccgcgctgttcagccagtactggattgacaaggtgggccagccgaccgcttcgctggcggtgttaatctttaactacgcgaccacaccctacgcagatctgcaacgcaaggcgtggggagcttccctcctgctactgatcttggtgctggccatcagcatcatctcccgttatgtcttccgtcgtcgtttctaa

SEQ ID NO: 51027 - protein, 295 aa, Gloeobacter violaceus PCC 7421
MTTSLRPEQPVSDDLTSPLEPGRALFTTSMTTLSVVFTFFAIIPLFSVLIYVLIQGFSSLSPDIFTELPAPAGTPGGGFGNAIQGTLLMVGIAALISVPFGVLSGIFLSEYARDDRGIIEVVRFGVNVLAGVPSIVIGVFAYGVVVLSTKTFSAYAGGFALAILMLPIIVRTTEEALKLVPWELRLGSLGLGADRFNTIARVIVPAALPGIITGVMLAVSRAAGETAPLLFTALFSQYWIDKVGQPTASLAVLIFNYATTPYADLQRKAWGASLLLLILVLAISIISRYVFRRRF

SEQ ID NO: 51028 - DNA, 885 bp, Photorhabdus luminescens subsp. laumondii TTO1
  CDS (1)..(885): transl_table=11
atggcaacgatagacagacaaaagcctattgatgctaatgtacgtagctgtaaacaggcatggcgccgtcaaaaaaatcgcatcgctctgctgttatcaatggcgaccatgttgtttggtctgttttggttggtgtggattctgttttctaccgtcaccaaaggtttcgacggcatgtcactggcgttgttcaccgaaatgacaccgccaccgaatacggaaggtggtggtttggcaaatgccattgtgggcagtggattactgatcctgtgggcgacagttatcggtacgcctctggggatcatggcgggtatctatttggcggaatatggccgccggtcatggctggcagaggtgatccgctttataaacgatatcttgctgtcagccccttctattgttgtcggtttatttgtttacatggtcgttgtgacaaaaatgcagcatttttccggttgggcgggggtgattgctttggcgttgttacaggtgccgattgtgatcaggaccacagaaaacatgttaaaactggttcctgatagcctgcgcgaagccgcttatgccttaggtacaccgaaatggaagatgatttcagccatcacgctgaaagcatcggtatccggcattatcaccggtgtgctgctggcgattgctcgaattgctggggaaacagcgccattgctgttcacctctctttccaatcagttctggagtactgacctgagccagccaattgctaacttaccggtcaccatctttaaatttgctatgagtccattctccgaatggcagcaactggcgtgggccggcgtattattgatcaccctgtgtgtattgctgattaacattgtggcgcgtgtgctgtttgccaagaaaaagcactga

SEQ ID NO: 51029 - protein, 294 aa, Photorhabdus luminescens subsp. laumondii TTO1
MATIDRQKPIDANVRSCKQAWRRQKNRIALLLSMATMLFGLFWLVWILFSTVTKGFDGMSLALFTEMTPPPNTEGGGLANAIVGSGLLILWATVIGTPLGIMAGIYLAEYGRRSWLAEVIRFINDILLSAPSIVVGLFVYMVVVTKMQHFSGWAGVIALALLQVPIVIRTTENMLKLVPDSLREAAYALGTPKWKMISAITLKASVSGIITGVLLAIARIAGETAPLLFTSLSNQFWSTDLSQPIANLPVTIFKFAMSPFSEWQQLAWAGVLLITLCVLLINIVARVLFAKKKH

SEQ ID NO: 51030 - DNA, 864 bp, Corynebacterium diphtheriae NCTC 13129
  CDS (1)..(864): transl_table=11
atgactgtttcgtttactcgtcgcctgcgcaacagcgttgccactgtcgcggtgactttcgccattgttgcagctatcgtgccgttgctttcggtgctgtataccttgatcagtcacggtgttggcacgatcatcacctcatcgtggtggatctcctcccaaaagggcgtgatgtattcggttgctggtggtggcgcgctccacgcgatgatcggcaccttggtgcaaacgcttctgtgcagcgctgttgctatcccgctaggtgttttagctgcgatcttccttgtggaatacgccggtgattcccgcctgggcaaaatgtgcaccttcatggtggacgtcatgacgggtatcccgtcaatcgtagccgcgttgtttgtctattccttatggatcgtgcttcttgacttcgaacgctctggtattgcggtatcaatagcgctgctgatcttgatggtgcccgtggtggttcgtacgactgaagagatgctgcgcatcgttccacaggacctgcgggaggcgtcgttagccctcggagtgcctcgatggcgcacgatcgtaagcgtagtggtacctacagccctacctggaattattaccggtgtgatgcttgcgattgcacgcgtgatgggggaatctgcgcccgtgctcattttggtgggaagcacccaagtgatcaattgggatgcggtatctggcccgcagtcttccttgccgctgatgatgttggacatgttcaaggcgggtactgccgatgccgtattggacaagatgtggggcgcggggttgaccttggtgcttcttatttctcttttgaccattggagctcgtgtgatctccgcgaaaacgaaagtcgccgtataa

SEQ ID NO: 51031 - protein, 287 aa, Corynebacterium diphtheriae NCTC 13129
MTVSFTRRLRNSVATVAVTFAIVAAIVPLLSVLYTLISHGVGTIITSSWWISSQKGVMYSVAGGGALHAMIGTLVQTLLCSAVAIPLGVLAAIFLVEYAGDSRLGKMCTFMVDVMTGIPSIVAALFVYSLWIVLLDFERSGIAVSIALLILMVPVVVRTTEEMLRIVPQDLREASLALGVPRWRTIVSVVVPTALPGIITGVMLAIARVMGESAPVLILVGSTQVINWDAVSGPQSSLPLMMLDMFKAGTADAVLDKMWGAGLTLVLLISLLTIGARVISAKTKVAV

SEQ ID NO: 51032 - DNA, 864 bp, Rhodopseudomonas palustris CGA009
  CDS (1)..(864): transl_table=11
atgtcgccgatccatctcgacaatccgatctacaagcggcgtcatcgcaacgatctggtgatcaaggtcttgtgctcggcggcggcgctgttcggcgtcacctggctggcgctgatcctgttcacgctgttctggaacggccttgccggcctcaacttcgaagtgttcacccagaacacgccgccgcccggctcgaccaccggcggtctgctcaatgccatcgtcggctcgatcatcatgacgatcctcggcgtcggcatcggcgcgccgctcgggctgttcgccggcacctacctcgccgagtacggcaagtacgacaagctgacctcggtgatccgtttcatcaacgacatcctgctcagcgcgccgtcgatcatcatcggcctgttcatctatggcgcggtggtggtgacgatgggccggttctcggcgcttgccggcgcgctggcgctggcggtgattgtgatcccggtggtggtgcgcaccaccgaggacatgctgctgctggtgccgagctcgctgcgtgaagccgcctcggcgctcggcctgccgcgctcgctggtgatccggcgcatcgcctaccgggcggcccgcgccggcctgatcaccggcatcctgctggcgaccgcccgcgtcgccggcgagaccgcgccgctgctgttcaccgcgctgagcaaccagttcttcagcctggatctgaccaagacgatggccaacctgccggtgaccatcaacaacttcgtccagagcccctacgcctactggaagcagctcgcctggagcggcgcgctgctgatcaccctgaccgtgcttgccctgaacattggcgcgcgcatcatcggcgccgagaggaccacgaaatga

SEQ ID NO: 51033 - protein, 287 aa, Rhodopseudomonas palustris CGA009
MSPIHLDNPIYKRRHRNDLVIKVLCSAAALFGVTWLALILFTLFWNGLAGLNFEVFTQNTPPPGSTTGGLLNAIVGSIIMTILGVGIGAPLGLFAGTYLAEYGKYDKLTSVIRFINDILLSAPSIIIGLFIYGAVVVTMGRFSALAGALALAVIVIPVVVRTTEDMLLLVPSSLREAASALGLPRSLVIRRIAYRAARAGLITGILLATARVAGETAPLLFTALSNQFFSLDLTKTMANLPVTINNFVQSPYAYWKQLAWSGALLITLTVLALNIGARIIGAERTTK

SEQ ID NO: 51034 - DNA, 921 bp, Geobacter sulfurreducens PCA
  CDS (1)..(921): transl_table=11
atgcaacagtccgttacggaaatcaggcggctcatcgcccgccacaagttctgggattacgtgttcgccatcgtgggtctcatctgcctgctggtggggattctcaccctcatggggctgttcgcccaactggtggcggacggcgcgccgcggctgaagccccacttcttcacctccttcccctcgcgcttccctgaggaggcggggattctctcggcctgggtcggcaccatcctggtcatgctggtgaccgccttcgtggcggtgccgctgggagtcgccgccggcgtctacctggaagagtacgctcccaagaactggctcacggccattatcgagatcaacgtgacgaacctggccggggtcccctccatcgtcttcggcctgctggctctcggtctcttcgtctaccagttgaacttcggccagagcatcctgtccgccggcctcaccctggcgctgctgatcctgccgatcgtgatcgtggccacccgggaatcgctacgcgccgtgcccggcagcatccgcgaggcggcctatgccctgggcgccacccgctggcagatggtttccaatcacgtgctcccctactcttcatccggcattctcacgggggtaattatcggcctgtcgcgggccatcggcgagacggcgccggtcatcaccatcggggcactaaccttcatcgcgtttctgccccattcgccgatttccggccagtttcccttcatcagcttcgaatggctcaaggatccgttcacggtcatgccgatccagatgttcaactggacctcccggccggaggaggagttccagctcaacgcggcggcagccggcgtggtgctcctggccatgaccctggccatgaacgcggtggcgatctttctccgctaccatatccgtaaaaagatcaagtggtga

SEQ ID NO: 51035 - protein, 306 aa, Geobacter sulfurreducens PCA
MQQSVTEIRRLIARHKFWDYVFAIVGLICLLVGILTLMGLFAQLVADGAPRLKPHFFTSFPSRFPEEAGILSAWVGTILVMLVTAFVAVPLGVAAGVYLEEYAPKNWLTAIIEINVTNLAGVPSIVFGLLALGLFVYQLNFGQSILSAGLTLALLILPIVIVATRESLRAVPGSIREAAYALGATRWQMVSNHVLPYSSSGILTGVIIGLSRAIGETAPVITIGALTFIAFLPHSPISGQFPFISFEWLKDPFTVMPIQMFNWTSRPEEEFQLNAAAAGVVLLAMTLAMNAVAIFLRYHIRKKIKW

SEQ ID NO: 51036 - DNA, 915 bp, Mycobacterium avium subsp. paratuberculosis K-10
  CDS (1)..(915): transl_table=11
atgacctcgatgctggaccgcccgctcaagtcgcggacgttctcgccgctgtcccgacgccgtcgagccgcgaattccgttgcgaccgtgctggtttcgttgtcgttgctggtcgcggtgaccccgctggtgatggtgctgtgctcggtggtcgtcaaggggttcagggcgatcacctcgaccgtgtggtggtcgcactcgcaggccgggatgaccgcgttcgtgaccgggggcggtgcctatcacgcgctggtcggcaccgtgctgcagggattggtgtgcgcggcgatctccatcccgatcggcctgatggtggccatctatctggtcgagtacggcggcggcaccccgctcggccggctggcctcgttcatggtggacatcctgagcggggtgccttcgatcgtggcggcgttgttcgtctatgcgctgtgcgtggccacgctggggctgccgcgctcggagttcgcggtgtcgctggcgctggtcctgctgatgctgccggtgatcgtgcgggccaccgaggagatgctgcggatcgtcccggtggatctgcgcgaggccagctacgcgctgggcatcaccaagtggaagaccatcgcccgggtggtcctgcccaccgggctgtccggcatcgtcaccggcatcttgctggcgatggcccgggtgatgggggagacggcgccgctgctgatcctggtcggctatgcacagtcgatgaacttcgacatcttcagcgggttcatggggacgctgcccggcatgatgtacaaccaggcgtcggccggcgcgggcatcaaccccatccccacggatcggttgtggggtgccgcgttgaccctcatcctggtgatcgccacgatcaatgtcgtggcccgggtaataaccaagttccttggcgccagaaagtcatag

SEQ ID NO: 51037 - protein, 304 aa, Mycobacterium avium subsp. paratuberculosis K-10
MTSMLDRPLKSRTFSPLSRRRRAANSVATVLVSLSLLVAVTPLVMVLCSVVVKGFRAITSTVWWSHSQAGMTAFVTGGGAYHALVGTVLQGLVCAAISIPIGLMVAIYLVEYGGGTPLGRLASFMVDILSGVPSIVAALFVYALCVATLGLPRSEFAVSLALVLLMLPVIVRATEEMLRIVPVDLREASYALGITKWKTIARVVLPTGLSGIVTGILLAMARVMGETAPLLILVGYAQSMNFDIFSGFMGTLPGMMYNQASAGAGINPIPTDRLWGAALTLILVIATINVVARVITKFLGARKS

SEQ ID NO: 51038 - DNA, 867 bp, Methanococcus maripaludis S2
  CDS (1)..(867): transl_table=11
ttgaataactccaaaaaagccaaaattgaagaaaaaattgtatttggtattttttacctgtttgcctttattgtagttggcatattatccacaattgttggttacgtatttattaacgggatcggcgcaataaacatggaattcttctttggtgattcaaacccgataaacgtgattttgggatttgaaagatcatttgatggaatctggaattcgataattggaactcttgcattagttgtcctttcgattctgctatccattccgttcggagttttgggtgcaatatatcttcatgaatatgcttcagacaataaattaacacaagcgattagattttcatcagacagccttgcaggacttccttcaattgtatttggtatttttgggtacgctcttgcaataaaaacagttggtccatcattattaatcgggggacttactttatcgttcatggttcttccaattataatgcgggcaacagaagaaggtttaaaatcagttgcaccaggacttagggaaggaagccttgcacttggtgctacaaaatggcagacaattactaaagtagtaattccctcagcccttccccagatgattactggaattatccttgcaatgggaagaagtgcagaagaaactgctgcaatcatgtttaccgcggctactgcattttcatttggaattggattatttaatagggttgaaacattatcatttagtttatatgtgctttcaaccgaatattctaatgcagaagaacttaaaatggcttatggaattgcacttgtcttgattgcaatcatgtttgtattatttacaattgcaaacgtcgttaaaaatagattcaaactcatgcaaagctaa

SEQ ID NO: 51039 - protein, 288 aa, Methanococcus maripaludis S2
MNNSKKAKIEEKIVFGIFYLFAFIVVGILSTIVGYVFINGIGAINMEFFFGDSNPINVILGFERSFDGIWNSIIGTLALVVLSILLSIPFGVLGAIYLHEYASDNKLTQAIRFSSDSLAGLPSIVFGIFGYALAIKTVGPSLLIGGLTLSFMVLPIIMRATEEGLKSVAPGLREGSLALGATKWQTITKVVIPSALPQMITGIILAMGRSAEETAAIMFTAATAFSFGIGLFNRVETLSFSLYVLSTEYSNAEELKMAYGIALVLIAIMFVLFTIANVVKNRFKLMQS

SEQ ID NO: 51040 - DNA, 894 bp, Prochlorococcus marinus str. AS9601
  CDS (1)..(894): transl_table=11
atgaattcactctattaccagaaaagattatcaagaaatataggagataaattctttacttctttatcagtaatttgcgcattgatcgcagtactccctttgatttttctggtgacttatattctcatcaaaggtggatcccaaattacaccagaactatttactttagaaccaaatccccctggagatgatttagatgcaggtggtattaatcctgcattgatcgggacattaataattacaaccattgcttcaattattgctataccagtaggtgtcggaggaggcatatatctagcggaatattctaaaggcggtgctttttcaagatttattagatttggagttaatgttctggcgggagtcccttcaattattgctggagtatttatttatgccttaattgtttcaacaaaaattttgtttggaagtatgtatagcggtttggcaggaggtatggctctttcaatattgatgttgcctacagttataaaaactactgatgaaggtttaaagttggttcctaatgaattgcgatatgcgtctcttggagttggagcaagtatgtatacaactatattgaaagttactttgccctctgcctttaggtctattgctactggcgttgtacttggaatcgcaagagctgcaggtgaaacagcacctttgatatttacggctttattctcttactactacataacaggctttggggacttgttttatgagatgggttccttggctgtattgatatataactttgcccttgaaccttatgatgctcaaaataaattagcatgggcagcttcctttattcttgttttgtcgatactatcagtaaatatattttcaaggatattggccgcttttacagagaaaactaagagagtataa

SEQ ID NO: 51041 - protein, 297 aa, Prochlorococcus marinus str. AS9601
MNSLYYQKRLSRNIGDKFFTSLSVICALIAVLPLIFLVTYILIKGGSQITPELFTLEPNPPGDDLDAGGINPALIGTLIITTIASIIAIPVGVGGGIYLAEYSKGGAFSRFIRFGVNVLAGVPSIIAGVFIYALIVSTKILFGSMYSGLAGGMALSILMLPTVIKTTDEGLKLVPNELRYASLGVGASMYTTILKVTLPSAFRSIATGVVLGIARAAGETAPLIFTALFSYYYITGFGDLFYEMGSLAVLIYNFALEPYDAQNKLAWAASFILVLSILSVNIFSRILAAFTEKTKRV

SEQ ID NO: 51042 - DNA, 894 bp, Prochlorococcus marinus str. MIT 9515
  CDS (1)..(894): transl_table=11
atgaattcactttattaccagaaaagattatcaagaaatataggagataaattctttacttctttatcagtaatttgtgcagtaatagcgatactgcctttgatttttctggttacttatattcttattaaaggtggatctcaaattacaccagaactatttacgttagaaccaaatccacctggagatgatttagatgcaggtggtattaatcctgcattagtagggacattaataatcacttccattgcttcaattattgcgattccagtaggtgttggaggcggtatatatttagcagagtactcaaaaggaggccttttttcgagatttatcaggttcggggtaaatgttttagctggagtaccttcaattattgctggagtatttatttatgccttaattgtttcaacaaagatcttatttggaagtatgtatagcggtttggctggaggtatggccctttcaatattgatgttacctacaattatcaaaacaactgatgaaggtctaaagttagtgcccaatgaattaagatatgcctctcttggagttggagcaagtatgtatacaacaatattaaaagtaaccctaccctctgcatttagatcaattgctactggtgttgtacttggcattgcaagagctgcaggggaaacagcacctttgatatttactgctttattttcttactactacataactggttttggagatttgttttatgagatgggttcattggccgtattgatatataattttgctcttgaaccatatgatgcacagaataaacttgcttgggcagcttcctttattcttgttttatcggtactatcagtaaatatattctcaaggatattaaccgcttttaatgagaaaactaagagagtataa

SEQ ID NO: 51043 - protein, 297 aa, Prochlorococcus marinus str. MIT 9515
MNSLYYQKRLSRNIGDKFFTSLSVICAVIAILPLIFLVTYILIKGGSQITPELFTLEPNPPGDDLDAGGINPALVGTLIITSIASIIAIPVGVGGGIYLAEYSKGGLFSRFIRFGVNVLAGVPSIIAGVFIYALIVSTKILFGSMYSGLAGGMALSILMLPTIIKTTDEGLKLVPNELRYASLGVGASMYTTILKVTLPSAFRSIATGVVLGIARAAGETAPLIFTALFSYYYITGFGDLFYEMGSLAVLIYNFALEPYDAQNKLAWAASFILVLSVLSVNIFSRILTAFNEKTKRV

SEQ ID NO: 51044 - DNA, 915 bp, Prochlorococcus marinus str. NATL1A
  CDS (1)..(915): transl_table=11
atgaattacacttcacaaaaatcactaacttataatccctctctaactagaaatattgggaataaagccttaactatagcttctgctctttttgccatcatatctgtacttcctttaatattagtcataagctatgtattgattaaaggtggaagttatataaacttagatacattaatacttgaaccagagccacctggagatgatcttctctcagctggaggaatagggccagcaattactggaacttttataatgtcagttatagcttcaataatatcaatacctgttggagtaggaggtggaatatatcttgccgaatattcaaaatcaggaaagtttgctaaatttataaggtttggatcaaatgtacttgcaggggttccttctataattgctggtgtatttatatacgcaattattgtctctagcaaaatactatttggttcaatgttcagcggtattgcaggcggaatatcactttcaattttaatggtgccaacaataataaaaactactgatgaagcacttaaattagttccaaatgacatgagaagagctgcatttggagttggtgcatcaaaattcacaatgataacaaatattacattaccagctgcatttagttcaatttctacaggcgtattattagcactcgccagggcagcaggagaaacagctccattaatatttacagctcttttctcccgttactacattacaagttttgatgatcttttctatgaaatgggttcattatcagtgttaatttacaattttgcacttgaaccatatgaagcccaaaatcaactagcatgggcagcatcattcatattagttgttgtacttttaagtcttaatatcctttcaagatggataggaacacttggtgcttttacaaaaaataaagtatga

SEQ ID NO: 51045 - protein, 304 aa, Prochlorococcus marinus str. NATL1A
MNYTSQKSLTYNPSLTRNIGNKALTIASALFAIISVLPLILVISYVLIKGGSYINLDTLILEPEPPGDDLLSAGGIGPAITGTFIMSVIASIISIPVGVGGGIYLAEYSKSGKFAKFIRFGSNVLAGVPSIIAGVFIYAIIVSSKILFGSMFSGIAGGISLSILMVPTIIKTTDEALKLVPNDMRRAAFGVGASKFTMITNITLPAAFSSISTGVLLALARAAGETAPLIFTALFSRYYITSFDDLFYEMGSLSVLIYNFALEPYEAQNQLAWAASFILVVVLLSLNILSRWIGTLGAFTKNKV

SEQ ID NO: 51046 - DNA, 921 bp, Prochlorococcus marinus str. MIT 9303
  CDS (1)..(921): transl_table=11
atgaaatcaatgactagcgaagcgacttctacaagtggggatctatcctccaatctttactacaagcccgctttgagacgcaatagaattaatagagcttttacaatattatccggattgttttcatttgtagccattctgccactaattcttgtcttaacctatgtaattgtcaaaggagcaaccagattaagtatctcactttttactatgcttccgcctccaccaggactcgatggcggaggtattggcaatgccatcttgggaactattattgtcacttgcatagccggaatgatcgctatacctgttggagttggtggaggtatctacctagccgaatatgcacgtgaaggagcattctctagatttatacgttttggcaccaatgttctttccggtgttccttcaattatcactggtgtctttgtctacgatataattgtgtcttcacgggtcatccttggcagttcatacagtgccatagctggcggagtagcactctcaatcctgatgttgccaacagtgataaaaaccactgatgaaggtctaaaactggtaccagacaacctacgcaaaggtgcacttggagtaggcgcctctaaattcgtaaccattacccacatcacattgccaatggcatttactccaatcgctacaggagtcgttctttcagttgctcgagcagctggtgaaacagcaccattgatttttacagcactcttttcatatttttggcctactggttcagatgctttcttcaatccaatcgcgacactttcggttttaatttataatttttcaactcaaccctatcaagtccagaatgaattggcttgggcagcttcatttattcttgtagtatttattctcgcgatgaatgtcctttcacgctggattggccacttaacctcaaaatga

SEQ ID NO: 51047 - protein, 306 aa, Prochlorococcus marinus str. MIT 9303
MKSMTSEATSTSGDLSSNLYYKPALRRNRINRAFTILSGLFSFVAILPLILVLTYVIVKGATRLSISLFTMLPPPPGLDGGGIGNAILGTIIVTCIAGMIAIPVGVGGGIYLAEYAREGAFSRFIRFGTNVLSGVPSIITGVFVYDIIVSSRVILGSSYSAIAGGVALSILMLPTVIKTTDEGLKLVPDNLRKGALGVGASKFVTITHITLPMAFTPIATGVVLSVARAAGETAPLIFTALFSYFWPTGSDAFFNPIATLSVLIYNFSTQPYQVQNELAWAASFILVVFILAMNVLSRWIGHLTSK

SEQ ID NO: 51048 - DNA, 930 bp, Desulfovibrio vulgaris subsp. vulgaris str. Hildenborough
  CDS (1)..(930): transl_table=11
atgccccgcactgccttcgcctcacagcagacggccaccctcggcaacattggccacatgcctcaggattccggctatgtgaaacgccgcaagcctctgcaacgattcatgttcggcctgttccatgtcgccgtgttcatcaatgcggcggccctcgccatcatctgcggcttcgtcctctaccacggtctgcccgccatcagttgggagtttctcaccgcctttccgcgtgactccatgaccaagggcggcatcctgccgtgcatcctcggcaccatcgccctcagctacggttcaatgctcatcgccctgccatggggagtggccacagccatctacctgcaggagtacgcccgccccggcccgctggtgcacgccatacgtctgaccatcaacaacctggcaggggtgccttcggtcgtcttcggcctgttcggactctcgatgttcgtcaccgccatgaagatgggagtcagcctgctggcgggcatgttcacgctggcggcactggtgctgccgctcatcatcggggcatccgaagaggcactgcgctcggtctcgcagacctaccgcgaagcgtcactggggcttggggccaccaagtggcagaccatctcgctggtggtgcttcccgccgcgctgcccagcatcctcaccggggccatccttgccgtcggtcgcgccgcaggtgagacggcagccatcatgttcacggctgccatgttcttcagcccccgcctgcccggttcgctgttcgacagtgtcatggccctgccctaccacatctatgtgctggcgacggcaggtactgaaatcgaactgacgcgccccatgcaattcggcacctcgctggtgctcatcgtgctggtgctgggcatgaacctcatggccatcatcatgcgggcgcgactccagcgcagactccgctga

SEQ ID NO: 51049 - protein, 309 aa, Desulfovibrio vulgaris subsp. vulgaris str. Hildenborough
MPRTAFASQQTATLGNIGHMPQDSGYVKRRKPLQRFMFGLFHVAVFINAAALAIICGFVLYHGLPAISWEFLTAFPRDSMTKGGILPCILGTIALSYGSMLIALPWGVATAIYLQEYARPGPLVHAIRLTINNLAGVPSVVFGLFGLSMFVTAMKMGVSLLAGMFTLAALVLPLIIGASEEALRSVSQTYREASLGLGATKWQTISLVVLPAALPSILTGAILAVGRAAGETAAIMFTAAMFFSPRLPGSLFDSVMALPYHIYVLATAGTEIELTRPMQFGTSLVLIVLVLGMNLMAIIMRARLQRRLR

SEQ ID NO: 51050 - DNA, 885 bp, Listeria monocytogenes str. 4b F2365
  CDS (1)..(885): transl_table=11
atgaatgtaaaaacaaaagataaaatcgcgacaggcgttttctatgctattgctgtattaattgtcattattttagctggcttacttggctatattttagtaaaaggtgttccgcaacttagctggaagtttttgacgaccccaccacagtcgttccaagctggcggcggaatcggtcctgaaatctggaattcattttatatgctcgttattacgatgattatttctgttcctatctcgctcggtgcgggaatttatatggcagaatatgcgcgtaaaaattggattacagatttaattcgcacaacgattgaagtgctttcctcacttccatctattgtcgtagggctattcggtttccttgtttttgttattcaaatggggtggagcttctcggttatttccggggcgcttacactaacgattttcaatttaccactattaattcgtgttgtcgaagaggcacttaatgctattccaaacacgcagcgtgaagcagggcttgctctaggtttatccagatgggaaacaatcacgcgagtacttgttccagccgcactcccggcaattattaccggagttatcttagcagcaggacgggtatttggtgaagcagcggcgcttattttcacagccggtcaaagtacacctattcttgatttcactgactggaatccggtcaatccagcttcaccactaaatattttccgcccagcagaaacattagctgttcatatttggaaaattaatggtgagggaattatgccagatgcacaagccgtttctgacggagcttctgcggtattaattctttccgtattacttttcaacgtcttagctcgcctgcttggaaaatttgtttataaacgcatgacctcgtcttaa

SEQ ID NO: 51051 - protein, 294 aa, Listeria monocytogenes str. 4b F2365
MNVKTKDKIATGVFYAIAVLIVIILAGLLGYILVKGVPQLSWKFLTTPPQSFQAGGGIGPEIWNSFYMLVITMIISVPISLGAGIYMAEYARKNWITDLIRTTIEVLSSLPSIVVGLFGFLVFVIQMGWSFSVISGALTLTIFNLPLLIRVVEEALNAIPNTQREAGLALGLSRWETITRVLVPAALPAIITGVILAAGRVFGEAAALIFTAGQSTPILDFTDWNPVNPASPLNIFRPAETLAVHIWKINGEGIMPDAQAVSDGASAVLILSVLLFNVLARLLGKFVYKRMTSS

SEQ ID NO: 51052 - DNA, 888 bp, Erwinia carotovora subsp. atroseptica SCRI1043
  CDS (1)..(888): transl_table=11
atggctacattaggcatagaacaagaagccgcactggaacgctcacggcgtaaaatgcaggcctggcgccgccagaaaaaccgtattgcactgtttttatccatgtctacgatggccttcggcctgttctggctggtatggatcctgttctcgaccgttacccgaggcgtggatggcatgtctctggcgttatttaccgaaatgacaccaccgccaaataccgcgggtggtgggttggcgaatgccatcgtcgggagcggattgctgatcctgtggtcgacgctgctgggtacgccgctgggcattatggcgggtatctatctggcggaatacggtcgtaaatcctggatcgctgaagtgattcgtttcatcaatgacattctgctgtcagcgccgtccattgtggtcggcctgtttgtctacacgctcgtggtggcaaagatgcagcacttctccggttgggctggggtaattgcgctggcgctgttgcaggtgccgattgtgattcgtaccaccgagaacatgctcaaactcgtgccggatagcctgcgtgaagccgcttatgcgctgggtacgccgaaatggaaaatgatttctgcgattacgctgaaagcatcggtatcgggcatcatcaccggggtgttactggctatcgcgcgtattgccggggaaacggcgccgttgctgtttacgtcgctgtcgaatcagttctggagcacggatatgatgcatccgattgctaacctgcccgttaccatcttcaaatttgcgatgagcccatttgtggaatggcaacagttggcctgggcgggtgtactgctgattacgctgtgcgttctgctactgaatattctggcgcgtgttattttctccccgaagacacattag

SEQ ID NO: 51053 - protein, 295 aa, Erwinia carotovora subsp. atroseptica SCRI1043
MATLGIEQEAALERSRRKMQAWRRQKNRIALFLSMSTMAFGLFWLVWILFSTVTRGVDGMSLALFTEMTPPPNTAGGGLANAIVGSGLLILWSTLLGTPLGIMAGIYLAEYGRKSWIAEVIRFINDILLSAPSIVVGLFVYTLVVAKMQHFSGWAGVIALALLQVPIVIRTTENMLKLVPDSLREAAYALGTPKWKMISAITLKASVSGIITGVLLAIARIAGETAPLLFTSLSNQFWSTDMMHPIANLPVTIFKFAMSPFVEWQQLAWAGVLLITLCVLLLNILARVIFSPKTH

SEQ ID NO: 51054 - DNA, 927 bp, Propionibacterium acnes KPA171202
  CDS (1)..(927): transl_table=11
atgagcgccaccacccctgaccacatcacccaccatggcgacaacacgcccggacagctagatctctcccgcccgtctggtaaacggactatcaagagcggctgcgcctcagcattcatgatcgtggccaccgtactggctgttatcccactggcctggctgctcttcgcggccgtccggcgcggcatcggatcactattccacgcgtcgtggtggacccactcgatggatccctccttcgacttggccgagcagggcgccatccacgctatcgtcggaacccttgaaattggccttattacatcgattatctcggtaccgatcgctctgatgaccgcgatcttcctagtcgagtacgcccgcggaactaagatcgccaaggtcattagcttcgccgtcgacgtgctaaccggtgtaccttcaatcgtcgcggccctcttcgtcttcgccgtagtcgttaccaccttcggtggcacccaatccgcgtgggcctcctcgttggccctcatgatcctcatggttccgacggtgctgcgatcaaccgaggaaatgctcaagctcgtgccagactctttgcgtgaggcctccttcgccctgggcgtctctcaatggaagacgatcatgaaggtcgtcttgccaacctccatgactggcatcctcaccggtatcgtgctgggcttagctcgagttatgggcgaaacggctccgctgatcgtgttgctgcagttcaacaccgagttgacctttaatccgtcaacaccaaacttcgcgacgctgccgaccgtcatcactaacgcttacacccagggcggcgtcgataccccggtggtgtggggagccgctattaccctcatcatcctggtcatgggactcaacctcattgcccgtcggatctcccgccgctacatgcgccgcatgggcaagtga

SEQ ID NO: 51055 - protein, 308 aa, Propionibacterium acnes KPA171202
MSATTPDHITHHGDNTPGQLDLSRPSGKRTIKSGCASAFMIVATVLAVIPLAWLLFAAVRRGIGSLFHASWWTHSMDPSFDLAEQGAIHAIVGTLEIGLITSIISVPIALMTAIFLVEYARGTKIAKVISFAVDVLTGVPSIVAALFVFAVVVTTFGGTQSAWASSLALMILMVPTVLRSTEEMLKLVPDSLREASFALGVSQWKTIMKVVLPTSMTGILTGIVLGLARVMGETAPLIVLLQFNTELTFNPSTPNFATLPTVITNAYTQGGVDTPVVWGAAITLIILVMGLNLIARRISRRYMRRMGK

SEQ ID NO: 51056 - DNA, 1089 bp, Leifsonia xyli subsp. xyli str. CTCB07
  CDS (1)..(1089): transl_table=11
atggccaccgccacagccgcaacgcggcccctcgcgaacgcctacaccgccggtaaactgcctccgtgggccccctggaccatactggccgtctgctgggccgtcttcagcgcggtcttcgccatcctggctgccagcggcgcgaccaaggacttcaacatcgtgggcgctctcttcttcgggaccgtgctgtttgatatcgcgatctacaccacctcgctcctggtcgagggctcgcgcaaaacgaaggaccgtctggtgacctcgctcgtcgccaccgcgttcatcgtcgcgctgctgccgctgatctcgctgggctggacggtcatcacgcagggcctcgaacgcttcgaccccgttttcttctcggagtcgatgcgcaatgtcatcggcgcgggcggtggcgcgctgcacgccatcgtcggcacgctgctcatcacgctcatggcggcgctcatctccgtgccgatcggactgctcacctcgatctacctggtggagtacgggcggggtacgctggcgcgggggatcaccttcttcgtggatgtcatgaccggcatcccctcgatcgtcgccggcctcttcgcctatgcgctcttcgccctgatcttcggccccgccatccgcaacggcttcatcggatcggtcgccctttccgtgctgatgatcccggtcgtcgtccggtcaagcgaggagatcctgcagatcgtcccgaatgaactgcgcgaggcctcgctcgccctcggcgtcccgaaatggctgaccgtcctgaaggtcgtgctgcccacgtcgatcgccggtctcgtgaccggcgtcatgctggccgtcgcccgcgtcatcggcgagaccgcgccgctgctgatcgtcgccggcttcacgaccagcacgaactacgacctgtccaacgaccggatgatgacactgccggtgttcgtgtacacgcagtacacgcaggccgccggtcttcacgcccaggactcgatcgaccgggcctgggccggagcgctgaccctgatcctcatcgtcatgctcctgaacctcgccggtcgcgtcgccgccaaggctttctccccccagcgcggtcgctga

SEQ ID NO: 51057 - protein, 362 aa, Leifsonia xyli subsp. xyli str. CTCB07
MATATAATRPLANAYTAGKLPPWAPWTILAVCWAVFSAVFAILAASGATKDFNIVGALFFGTVLFDIAIYTTSLLVEGSRKTKDRLVTSLVATAFIVALLPLISLGWTVITQGLERFDPVFFSESMRNVIGAGGGALHAIVGTLLITLMAALISVPIGLLTSIYLVEYGRGTLARGITFFVDVMTGIPSIVAGLFAYALFALIFGPAIRNGFIGSVALSVLMIPVVVRSSEEILQIVPNELREASLALGVPKWLTVLKVVLPTSIAGLVTGVMLAVARVIGETAPLLIVAGFTTSTNYDLSNDRMMTLPVFVYTQYTQAAGLHAQDSIDRAWAGALTLILIVMLLNLAGRVAAKAFSPQRGR

SEQ ID NO: 51058 - DNA, 798 bp, Symbiobacterium thermophilum IAM 14863
  CDS (1)..(798): transl_table=11
gtgaggccgctgctcagcgccctggcgctcgcggtgacgggcgtgatggtggggctgctggccgcgctcgccgccgggggagccgggagcctcacgcccgagttcttgttcaccctcccggccgcggcgggacgggagggcggcatcctcccggcgatcctctccacgctgtggctggccgcgggcagcctcgcgctggcgctgccgctgggggtcggtaccgcgctgtacctggcggagtacgcgcccccaggccgatgggttgcggccatccgcagcctcaccgagacgctggccggcgtcccgtccatcctcttcgggctcttcgggttttccgtgttcgtcgtgcggctggggtgggggccttcgctcctcgccgggagcgcgacgctggccctcatgctgctgccgaccgtcatccgcaccagcgaggaggccgtggcggccgtgccgcaggagctgagggagggggcggccgcgctgggggcgacccggtgggatgccgtccgccggatcgtgctgccgcaggcggcgccggggatcctcaccggcgcgctgctggccctggggcgggcggccggggagaccgcagccgtgctcctgaccgccgggacggaccttgccctgcccaggtcgcccctggacccggggcggtcgatggcggtccacctttacctgctggcgggggaggggttgtcggacggccgggcccacgccacggccctcgccctggtctgcggcgtcatggtgctgaacgcgctggcgcagttgctcatgggcgggaggcgggacaggtga

SEQ ID NO: 51059 - protein, 265 aa, Symbiobacterium thermophilum IAM 14863
MRPLLSALALAVTGVMVGLLAALAAGGAGSLTPEFLFTLPAAAGREGGILPAILSTLWLAAGSLALALPLGVGTALYLAEYAPPGRWVAAIRSLTETLAGVPSILFGLFGFSVFVVRLGWGPSLLAGSATLALMLLPTVIRTSEEAVAAVPQELREGAAALGATRWDAVRRIVLPQAAPGILTGALLALGRAAGETAAVLLTAGTDLALPRSPLDPGRSMAVHLYLLAGEGLSDGRAHATALALVCGVMVLNALAQLLMGGRRDR

SEQ ID NO: 51060 - DNA, 852 bp, Symbiobacterium thermophilum IAM 14863
  CDS (1)..(852): transl_table=11
atgacccgacagcagatcgccgaccgggtggccacggccgtgctctgggcggcgggcatcctcatcctgctcatcctggccggctttctcctgccgatcctcatcgaggggctgcccgtcgtcgactggcagttcctcaccacccgctccagcgcctaccgggccggcggcggtgtgggggcgcagctcttcaacacgatctacatcaccggcctgtcgctgctcttctccctccccgtcggggtgggcgccgggatctacatggccgagtacgccaagcccgggcgcatgacggatctcatccggctctccgtggaggccctggcctcggttccctccatcgtgctggggctgttcggcatgatcctcttcgtcaactacatgggctggggcttcaccatcctgggcggaagcctgagcctggcgctgcttaacctgccggtcctggtgcgcaacacggaggaggcggtacgcgccgtgccccagtcctaccgggagggctccctgggcctgggcgcgacccagtggcagaccatctcccgggtagtgctgcccagcgccctgccaggcatcctcaccggcctgacgcttgtggcgggccgcgccctgggcgagacggccgtgctgatctacaccgccggcgtcaccgcctcccgccacttcccgaacccggacctgatgatcgccggcgagacactggccgtgcgcatctggtcggtgacctcggaggggctggtgcccgacgcggaccggatcgcaatgggcgcctccgccctgttgatcctgctggtgctcttcgtcaacttcctgatcgccctgccgctgtaccggtaccggcggcgcatgcggtag

SEQ ID NO: 51061 - protein, 283 aa, Symbiobacterium thermophilum IAM 14863
MTRQQIADRVATAVLWAAGILILLILAGFLLPILIEGLPVVDWQFLTTRSSAYRAGGGVGAQLFNTIYITGLSLLFSLPVGVGAGIYMAEYAKPGRMTDLIRLSVEALASVPSIVLGLFGMILFVNYMGWGFTILGGSLSLALLNLPVLVRNTEEAVRAVPQSYREGSLGLGATQWQTISRVVLPSALPGILTGLTLVAGRALGETAVLIYTAGVTASRHFPNPDLMIAGETLAVRIWSVTSEGLVPDADRIAMGASALLILLVLFVNFLIALPLYRYRRRMR

SEQ ID NO: 51062 - DNA, 888 bp, Bacillus licheniformis ATCC 14580
  CDS (1)..(888): transl_table=11
atgaacagcaaagtaacagatcgtttagcaaccggtgtttttggattgattgctgcggtaatcgccgctattcttgtcggtttgttcgcttatatcatcatcaatggtgtttcgcatatcagcctcagctttttaacttcgcgttcaagtgcgctgtcaagcggcggaggaattcgagatcagctgttcaactcgttttatattctcgtgctgacgatgctgatcacggttcccctgggagtcggcgggggaatttatatggcggaatatgcgcccgcaaacaaattgaccgattttatccgtgtctgtattgaagttttgtcatcccttccttcgatcgttatggggatgttcggcatgctgatgtttgtaaatctgaccggatgggggtacagcattatcggaggagcgcttgctttgacgattttcaacctgcctgtcatggtcagggtgacagaagatgcgatccgctccgtacctaaggagcaaaaagaggcttcccttgctttaggcgtgtccaaatggcacacgattaaaacggtattgattcctggcgcggtgccgtccatcatcacaggcgcgattcttgcgtcgggccgtgtatttggcgaagctgccgctttgctgtttacagccggactaaccacgccgagactgaattttgccgattggaatccgttttctgagacatcgccgctcaatattttcagaccggctgaaacgctggccgttcatatttggaatgtaaacacacaggggatcatccccgatgctgaagcgatcgcaaacggcgcatccgccgttctcgttctgtccgtcttgatctttaacctggcagcccgatggctcggctcttttattcataaaaagttaacggcaaacaaataa

SEQ ID NO: 51063 - protein, 295 aa, Bacillus licheniformis ATCC 14580
MNSKVTDRLATGVFGLIAAVIAAILVGLFAYIIINGVSHISLSFLTSRSSALSSGGGIRDQLFNSFYILVLTMLITVPLGVGGGIYMAEYAPANKLTDFIRVCIEVLSSLPSIVMGMFGMLMFVNLTGWGYSIIGGALALTIFNLPVMVRVTEDAIRSVPKEQKEASLALGVSKWHTIKTVLIPGAVPSIITGAILASGRVFGEAAALLFTAGLTTPRLNFADWNPFSETSPLNIFRPAETLAVHIWNVNTQGIIPDAEAIANGASAVLVLSVLIFNLAARWLGSFIHKKLTANK

SEQ ID NO: 51064 - DNA, 873 bp, Burkholderia pseudomallei K96243
  CDS (1)..(873): transl_table=11
atgccggggccggacggcgcggcgctcgacgcgatgcgcgcgcgcctgcagcgccgccgcaaggcgaccaacgtcgtcgcgctcaccgcgtcgctcgccgcgatggccttcggtctgctctggctcgtctggattctctacacgacgctgcatctcggcgtcggcgggctgtcgctcgcgctcttcaccgaatcgacgccgccgccgaacacggcgggcggcggcctcgcgaacgcgatcgtcggcagcctgctgctcgtcgcgctcgcgacgttcgtcggcacgccgatcggcatcctcgcgggcgtgtacctggccgagtatggccagaagagctggctcgcgagcgtgatgcgcttcatcaacgacatcctgctgtcggcgccgtcgatcgtcgtcgggctgttcgtgtatgcgctcgtcgtcgcgaaatccggccacttcagcggctgggcgggcgtgatcgcgctcgcgctgctgcagattccgatcgtgatccgcacgaccgagaacatgctgaagctcgtgccgaacgcgctgcgcgaggccgcgttcgcgctcggcacgccgaagtggcggatgatcctgaaaatcacgctgcgcgcatcggtgggtgggatcgtcacgggcgtgctgctcgcggtcgcgcgcatcgctggcgaaaccgcgccgctgctcttcaccgcgctgtcgaaccagttcttctcggccgacatgagccagccgatggcgaacctgcccgtcacgatcttcaagttcgcgatgagcccgttcgcggaatggcagtcgctcgcatgggcgggtgtgttcctgattacgctcggggtgctggggctcaatatcctcgcgcgctcgatcttctcgaaaaagtaa

SEQ ID NO: 51065 - protein, 290 aa, Burkholderia pseudomallei K96243
MPGPDGAALDAMRARLQRRRKATNVVALTASLAAMAFGLLWLVWILYTTLHLGVGGLSLALFTESTPPPNTAGGGLANAIVGSLLLVALATFVGTPIGILAGVYLAEYGQKSWLASVMRFINDILLSAPSIVVGLFVYALVVAKSGHFSGWAGVIALALLQIPIVIRTTENMLKLVPNALREAAFALGTPKWRMILKITLRASVGGIVTGVLLAVARIAGETAPLLFTALSNQFFSADMSQPMANLPVTIFKFAMSPFAEWQSLAWAGVFLITLGVLGLNILARSIFSKK

SEQ ID NO: 51066 - DNA, 924 bp, Azoarcus sp. EbN1
  CDS (1)..(924): transl_table=11
atgattcccgcggatctctccggtattcagcgcatcatccggcgcaacaagcgacgggacctgatttttgcgatcttcggtttcgtggcgttgctgatcggcgtgctgacctttctcgcattgttcctgcagatggcctttgcgggatgggagcgattgaccccggacttcttcacctctttcccgtcacgacgtgccggtcaggcagggatcctctccgcctgggtgggctcggtgctcgtgatgctggtgactgcggtgtcggccgtcccgctgggtgtcgctgcaggggtgtacctcgaggaatatgcgacgaggagtttcgtcaccgatctcatagaaatcaacgtgaccaatctcgccggggtaccttcgatcgtctacggactgctcgcgctcggggtcttcgtctacgccttcggcttcggccagagcatcctgtcggcgggcctgacgctgggcctgctgatccttcccgtcgtcatcgttgccacgcgggaggcgatccgctcgattccgcagcacatccgcgaaggggcctatgcgctgggggccacgcgttggcaggtcacgcgtgatcatatcgtgccctattcgatgcctggcatccttaccggtgtcatcatcggcatgtcgcgggcgatcggtgaaacggcgccggtcatcacgatcggcgcgctgaccttcatcgccttcctgccggagtcgccgatcgggccggagtttccctgggtgaacttcgagtggctgaaatcggggttcaccgtcatgccgatccagatgttcaactggacttcccgtccggaggaggctttccagcagaacgccgccgccgccggtttcgtgctggttctcatgaccctggccatgaacgcgatttccatctggattcgttatcatctgcgcaaggacatcaaatggtag

SEQ ID NO: 51067 - protein, 307 aa, Azoarcus sp. EbN1
MIPADLSGIQRIIRRNKRRDLIFAIFGFVALLIGVLTFLALFLQMAFAGWERLTPDFFTSFPSRRAGQAGILSAWVGSVLVMLVTAVSAVPLGVAAGVYLEEYATRSFVTDLIEINVTNLAGVPSIVYGLLALGVFVYAFGFGQSILSAGLTLGLLILPVVIVATREAIRSIPQHIREGAYALGATRWQVTRDHIVPYSMPGILTGVIIGMSRAIGETAPVITIGALTFIAFLPESPIGPEFPWVNFEWLKSGFTVMPIQMFNWTSRPEEAFQQNAAAAGFVLVLMTLAMNAISIWIRYHLRKDIKW

SEQ ID NO: 51068 - DNA, 900 bp, Synechococcus elongatus PCC 6301
  CDS (1)..(900): transl_table=11
ttgttcaagcccaaccgtgagcgcaaccggcgcaacgagttgatcgtcaaggcaatctttggcattttcgcctttgtctcagtcttgacgacattgggcatcgttttcacgctgatctttgaaacctacgagtttttcaaagaaattccgctaattcgttttctgacagaaacccgctggacgcctcttttcccaagcgctcagtttggaattgtagtgctcctatcaggaaccttctcgactactctgattgctctgctggtggcagtccccttggggctgctgagcgctatctgcctaagtgagtacgccacacctcgggcacgaaacctgctcaagccagccttagaagtgattgctggtgtccctagcgttgtctttggctactttgctcttctctttgtgacgcccttgctgcaatcctttattcctgggttgcaggggtttaataccctctccgctgggatggttttggggattgcaatcaccccgctggtcgcttcactcagcgaggacgccatttttgcagtgcctagcagcatgcgcgaaggggcctatgccttgggtgcaacaaagcgcgaaaccattgtctccgtcgttctacctgctgctttgtcgggaattgtcgcctcgattgtcttggcgatctcgcgcgctgtcggtgagacgatgattgtggcgatcgcggcgggcttaaccccaaatctaaccctcaaccccctagaaccggcccagaccatgacctcctttattgtgcaggtcagtttgggagacaccccaacaggttcactggcctacaaaaccatttttgccgtggggatgaccctgttcttgctgacgctcgtgctcaacatctttagctactggttcgtgcgtcgcttccaggagaaatacgaataa

SEQ ID NO: 51069 - protein, 299 aa, Synechococcus elongatus PCC 6301
MFKPNRERNRRNELIVKAIFGIFAFVSVLTTLGIVFTLIFETYEFFKEIPLIRFLTETRWTPLFPSAQFGIVVLLSGTFSTTLIALLVAVPLGLLSAICLSEYATPRARNLLKPALEVIAGVPSVVFGYFALLFVTPLLQSFIPGLQGFNTLSAGMVLGIAITPLVASLSEDAIFAVPSSMREGAYALGATKRETIVSVVLPAALSGIVASIVLAISRAVGETMIVAIAAGLTPNLTLNPLEPAQTMTSFIVQVSLGDTPTGSLAYKTIFAVGMTLFLLTLVLNIFSYWFVRRFQEKYE

SEQ ID NO: 51070 - DNA, 852 bp, Dehalococcoides ethenogenes 195
  CDS (1)..(852): transl_table=11
atgcttaaattttcctcccgcagtacccagaaagtggcatttacaatattatgggcggcaggcattattactttgctagttctgctgcttatcataggttatattattgtacgtgggctgcccggtttctcctgggatttcctgattaccccgccggctggcggtctggcaggagaggggggtatttcctctacaattgtgactactctttatctggtcgggctgaccctgctgatactggtaccggtgggtatcggggcggctatatacctggtggaatatgcaccggacaaccgcctgacccggtttatacgttatggagttcaaactctggcgggtgtgccttctatcctgtttggtttgttcgggtttgctctgtttgtgaccgcccttcatttccgcttttccatactttcgggcgctcttaccctggcctgtctgctgctgccggtgcttattaccgctaccgaagaagccttaaaggctgtcccccgctcttaccgggcaggggctatggctctgggggctaccaagtggcaggcggtgacccatgtaatactgccggcggctttgcctggtattgcaaccggggtaattctgtgtgccggacgggcattgggtgagaccgcctgtctgtacgtgactatgggcgggagtgccgctatgccggagtcacttctttcaggcgggcgctcactggcactgcatgtcttttatctggctaccgaaaccaacgctatggataaagctatggcgacagccgcagttttaatagtgattattgtaggcttaaacggactgaccaattttatttcccggcgtttccagaaacgcatctgcggaggagtttaa

SEQ ID NO: 51071 - protein, 283 aa, Dehalococcoides ethenogenes 195
MLKFSSRSTQKVAFTILWAAGIITLLVLLLIIGYIIVRGLPGFSWDFLITPPAGGLAGEGGISSTIVTTLYLVGLTLLILVPVGIGAAIYLVEYAPDNRLTRFIRYGVQTLAGVPSILFGLFGFALFVTALHFRFSILSGALTLACLLLPVLITATEEALKAVPRSYRAGAMALGATKWQAVTHVILPAALPGIATGVILCAGRALGETACLYVTMGGSAAMPESLLSGGRSLALHVFYLATETNAMDKAMATAAVLIVIIVGLNGLTNFISRRFQKRICGGV

SEQ ID NO: 51072 - DNA, 876 bp, Bacteroides fragilis NCTC 9343
  CDS (1)..(876): transl_table=11
atggaaatactgaataatacaaaagctaaaagacgttcgcaggggatcgctttcggcatattccggctgctgagtttatgcattgtgctgattttgttcgcgattctgggattcatcatctataagggtatcggcgtgatcagctgggattttctgaccaccgctcctactgacgggatgacgggaggaggcatctggccggctatcgtgggtacattctacctgatggtgggcagtgcgctgtttgcctttccggtgggtgtgatgagtggtatttacatgaacgagtatgcgccgaagggcaaactggtacgctttatccgggtgatgaccaacaacctgagcggtattccgtcgattgttttcggtctcttcggtatggcgctgtttgttaattatatggatttcggcgatagtattctggcgggttcgctgacgttggggctgctttgcgtacctttggtgatccgtactacggaagaggcattgaaggcaataccggacagcatgcgcgagggaagccgtgcactgggagctaccaagcttcagaccatctggcacgtgattctgcctatgggaatgccgaatatcatcaccggattgattctggccttgggacgtgtgtcgggagaaacggctccgatcctgttcacttgtgcggcgtatttcctcccgcaattgcccacaagcatcttagatcaatgtatggcattgccctatcacttgtatgtgatatcgaccagcggaacggatatggaggcacagttgcctctggcttatggaacggccttggtactgattgtaatcatactcctggtgaacctgctggccaatgccttgcgaaagtattttgagaagaaagtaaaaatgaattag

SEQ ID NO: 51073 - protein, 291 aa, Bacteroides fragilis NCTC 9343
MEILNNTKAKRRSQGIAFGIFRLLSLCIVLILFAILGFIIYKGIGVISWDFLTTAPTDGMTGGGIWPAIVGTFYLMVGSALFAFPVGVMSGIYMNEYAPKGKLVRFIRVMTNNLSGIPSIVFGLFGMALFVNYMDFGDSILAGSLTLGLLCVPLVIRTTEEALKAIPDSMREGSRALGATKLQTIWHVILPMGMPNIITGLILALGRVSGETAPILFTCAAYFLPQLPTSILDQCMALPYHLYVISTSGTDMEAQLPLAYGTALVLIVIILLVNLLANALRKYFEKKVKMN

SEQ ID NO: 51074 - DNA, 885 bp, Pseudomonas syringae pv. syringae B728a
  CDS (1)..(885): transl_table=11
atgagtaaggatgtgaccggcagcgagcacctgtatcgggttcgcagtatcaagaacaagattgcgatggtactcagctgtggcgccaccgccttcggcctgctgtggctggtgtggattctgctgaccaccatcatcaagggtatcgacgcgctcaacctgcaactgttcaccggcatgactccgccgccgggcaccgagggtggtctggccaacgcgttctacggcagcgtgctgatgtccggcatcggcctgctgatcggtacgccgatcggcctgatggccggcatctggctggccgagtttgcccgctacaccaaactgggcaacacggttcgcttcatcaacgacatcctgctctcggcaccttccatcgtgctcggcctgttcgtctacaccgtcgtggttctgccactcaacgcggtgacaggccatcaggtgggcttttcggcgattgccggcgcgctggcgctggcattgctggtgatcccggtggtggtgcgtaccactgacgaaatgatgcaattgcaaccctcgaccatgcgtgaagctgcgctggcgctgggtgtgccgcaatggaagctgaccctgcaaatcgtcctgcgcgcagccaaggccggtgtggtaaccggcgtattgctcgcattggcacgcatcaccggcgaaaccgcgccgctgctgttcaccgctttcggcaatcagttctggagcagcgatctgctcaaacccatcgccagtgttccggtggtggttttccagtacgccatgagcccgttcgatgactggcactccctggcatgggccggtgcgctggtcatgacgttgttcgtactgatactgagtctgctgtctcgcttaattcttctgcgcaatagggcgtcctga

SEQ ID NO: 51075 - protein, 294 aa, Pseudomonas syringae pv. syringae B728a
MSKDVTGSEHLYRVRSIKNKIAMVLSCGATAFGLLWLVWILLTTIIKGIDALNLQLFTGMTPPPGTEGGLANAFYGSVLMSGIGLLIGTPIGLMAGIWLAEFARYTKLGNTVRFINDILLSAPSIVLGLFVYTVVVLPLNAVTGHQVGFSAIAGALALALLVIPVVVRTTDEMMQLQPSTMREAALALGVPQWKLTLQIVLRAAKAGVVTGVLLALARITGETAPLLFTAFGNQFWSSDLLKPIASVPVVVFQYAMSPFDDWHSLAWAGALVMTLFVLILSLLSRLILLRNRAS

SEQ ID NO: 51076 - DNA, 915 bp, Psychrobacter arcticus 273-4
  CDS (1)..(915): transl_table=11
atgactttagcgactgtcaccactgatattgaccaaagcagccagccggctttgcgctttgaagaccgctataacaaacgtttatatcataagcgtcgcctgatcaatagattggggcttggttttgctatctcagctattgcttttggtttgttttggctgacgtggattttgatgacgctttttgttgagggttttcaagggttgatcgagatgccggtatttatggcagatacaccgccgcccatgggtgacggtggtttacgtaatgccattattggttcagtgatgattgccttgttaggtcttgcgattggtacaccgatcggaatgatggcaggtatctatttagcggaattctcacaaggcagtctgttgggcaaagtcacccgttttctaaacgatattttgctgtcagcgccctctatcgttattggtctgttcgtctatgctctgatggtaaaaggtcaaagcttctccggctggtcgggtgcggttgcgcttgccttgattgtcattccgatcgtcgtgcgcaccactgagaatatgctaaatcttgtaccaaatactttgcgtgaagcggcgtatgcattgggtacgccaaagtggaagctgataagcacagtcacgcttaaagcggctaaagcaggtctaactacaggggtgctgctggcatttgcccgtatcactggcgagactgcgccgttgctatttaccgcattaaacaatcagtacttcagtaccgatatgagccaaccgatggcaaatttaccaaatactatttatcagtttgccatgagcccttatgacaactggcatgcacttgcatgggcagcagcattactgattaccgcaacggtattgatagtcaatattctcgcgcgctttattggcggtaaagatcatacaagatag

SEQ ID NO: 51077 - protein, 304 aa, Psychrobacter arcticus 273-4
MTLATVTTDIDQSSQPALRFEDRYNKRLYHKRRLINRLGLGFAISAIAFGLFWLTWILMTLFVEGFQGLIEMPVFMADTPPPMGDGGLRNAIIGSVMIALLGLAIGTPIGMMAGIYLAEFSQGSLLGKVTRFLNDILLSAPSIVIGLFVYALMVKGQSFSGWSGAVALALIVIPIVVRTTENMLNLVPNTLREAAYALGTPKWKLISTVTLKAAKAGLTTGVLLAFARITGETAPLLFTALNNQYFSTDMSQPMANLPNTIYQFAMSPYDNWHALAWAAALLITATVLIVNILARFIGGKDHTR

SEQ ID NO: 51078 - DNA, 885 bp, Pseudomonas syringae pv. phaseolicola 1448A
  CDS (1)..(885): transl_table=11
atgagtaaggatgtgactggcagcgagagcctgtatcgggttcgcagcatcaagaacaagattgcgatggtgctcagctgtggtgccactgccttcggcctgctgtggctggtgtggattctgctgaccaccatcatcaagggtatcgacgcgctcaacctgcagttgttcaccggtatgaccccgccacctggcaccgagggtggtctggccaacgcgttctacggcagcgtgctgatgtcgggcataggcctgttgatcggtacaccaatcggcctgatggccggtatctggctggccgagtttgctcgctacaccaagctgggtaacgcagtacgcttcatcaacgacatcctgctgtcggcaccttccatcgtgctcggcctgttcgtttataccgttgtggtactgccactcaacgcagtcacaggccatcaggtgggcttttcggcgattgccggtgcgctggctctggcattgctggtcatcccggtggtggtgcgtaccactgacgaaatgatgcaactgcaaccctcgaccatgcgtgaagccgcactggcgctgggtgtgccgcaatggaagctgactctgcaaatcgtcctgcgcgctgccaaggcgggtgtggttaccggcgtattgctcgcattggcacgtatcaccggcgaaaccgcgccgctgctgttcaccgctttcggcaaccagttctggagcagtgatctgctcaaaccaatcgccagtgttccggtggtggttttccagtacgccatgagcccgttcgatgactggcactccctggcatgggccggtgcgctggtcatgacgttgttcgtactgatactgagtctgctgtctcgcttaattcttctgcgcaatagggcgtcctga

SEQ ID NO: 51079 - protein, 294 aa, Pseudomonas syringae pv. phaseolicola 1448A
MSKDVTGSESLYRVRSIKNKIAMVLSCGATAFGLLWLVWILLTTIIKGIDALNLQLFTGMTPPPGTEGGLANAFYGSVLMSGIGLLIGTPIGLMAGIWLAEFARYTKLGNAVRFINDILLSAPSIVLGLFVYTVVVLPLNAVTGHQVGFSAIAGALALALLVIPVVVRTTDEMMQLQPSTMREAALALGVPQWKLTLQIVLRAAKAGVVTGVLLALARITGETAPLLFTAFGNQFWSSDLLKPIASVPVVVFQYAMSPFDDWHSLAWAGALVMTLFVLILSLLSRLILLRNRAS

SEQ ID NO: 51080 - DNA, 1086 bp, Thermobifida fusca YX
  CDS (1)..(1086): transl_table=11
atgtccgccacgaaactgtctgctccggagaagaccgtgccgcctcggccgctcgcgccctcactcggcgccaagccgctgcctgccctgttcccgccgaccctgctcgccggggtcgccctggtcgcggccgggctgctgtacgcgctcgggtggtggaaccccgcggtgtgggccatcgtcaccgcggtgggctacatggtgctcatcaccgcggcctcggccctcgtcgagaaccgccgcaaagccaaagaccgcctggtcaccgccatcgtctacacctgtttcggcatcgccatggtgccgctggtctccctgctgtggacggtgctctccaaaggcctggtccggttggacggctacttcctgaccgtctccatgaacggggtcacgccgagcatggacgccggcggcgcctaccacgccatcctcggcaccctgctcatgacgctcatggccgcgctgatctcggtgcccatcggtctgatgaccgcgatctacctggtggagtacggccaggggcggctcaagcgggcgatcaccttcttcgtggacgtgatgaccggtatcccctccatcgtggccggtctgttcgtggtggcgctgtggatcctgctgttcggtccgggcaagaccaacggcgcggccggtgcgatctcactctcggtcctgatgattccggtggtcgtgcgctcctgcgaggagatgctgcgcctcgtgcccaacgagctgcgggaagcctcctacgcgctgggggtgcccaagtggcttaccgtggtcaaggtggtcctgcccaccgctatcgcggggctcaccaccggtgtgatgctggccttggcgcgggtcatcggcgagaccgccccgctcatcctcactgcgggctcctcagcggtcgccatcaacgccaacctgttcgagggacaaatgatgagccttccggtgttcatctactcacaggtgcgcatgggcggcgtcatcaactacgagcgtgcttgggccggggcgctgacgctgatcatcatcgtgatgctgttgttcctcgccgcccgcctggtctcgcacttcttcgccccgaagacgcggtaa

SEQ ID NO: 51081 - protein, 361 aa, Thermobifida fusca YX
MSATKLSAPEKTVPPRPLAPSLGAKPLPALFPPTLLAGVALVAAGLLYALGWWNPAVWAIVTAVGYMVLITAASALVENRRKAKDRLVTAIVYTCFGIAMVPLVSLLWTVLSKGLVRLDGYFLTVSMNGVTPSMDAGGAYHAILGTLLMTLMAALISVPIGLMTAIYLVEYGQGRLKRAITFFVDVMTGIPSIVAGLFVVALWILLFGPGKTNGAAGAISLSVLMIPVVVRSCEEMLRLVPNELREASYALGVPKWLTVVKVVLPTAIAGLTTGVMLALARVIGETAPLILTAGSSAVAINANLFEGQMMSLPVFIYSQVRMGGVINYERAWAGALTLIIIVMLLFLAARLVSHFFAPKTR

SEQ ID NO: 51082 - DNA, 915 bp, Prochlorococcus marinus str. NATL2A
  CDS (1)..(915): transl_table=11
atgaaatacacttcaaaaaaatcactaacttataatccctctctaactagaaatattgggaataaagccttaactatagcttctgctctttttgctatcatatctgtacttcctttaatattagtcataagctatgtattaattaaaggtggaagttatataaacttagatacattaatacttgaacccgagccacccggagatgatcttctctcagctggaggaatagggccagcaattactggaacttttataatgtcagttatagcttcaataatatcaatacctgttggagtaggaggtggaatatatcttgccgaatattcaaaatcaggaaagtttgctaaatttataaggtttggatcaaatgtacttgcaggggttccttctataattgctggtgtatttatatacgcaattattgtctctaccaaaatactatttggttcaatgtttagcggtattgcaggcggaatatcactttcaattttaatggtgccaacaataataaaaactactgatgaagcacttaaattagttccaaatgacatgagaagagctgcatttggagttggtgcatcaaaattcacaatgataacaaatattacattaccagcagcatttagttcaatttctacaggcgtattattagcactcgccagggccgcaggagaaacagctccattaatatttacagctcttttctcccgttactacattacaagttttgatgatcttttctatgaaatgggttcattatcagtgttaatttacaattttgcacttgaaccatatgaagcccaaaatcaactagcatgggcagcatcattcatattagttgttgtacttttaagtcttaatatcctttcaagatggataggcacacttggtgctttttcaaaaaataaagtatga

SEQ ID NO: 51083 - protein, 304 aa, Prochlorococcus marinus str. NATL2A
MKYTSKKSLTYNPSLTRNIGNKALTIASALFAIISVLPLILVISYVLIKGGSYINLDTLILEPEPPGDDLLSAGGIGPAITGTFIMSVIASIISIPVGVGGGIYLAEYSKSGKFAKFIRFGSNVLAGVPSIIAGVFIYAIIVSTKILFGSMFSGIAGGISLSILMVPTIIKTTDEALKLVPNDMRRAAFGVGASKFTMITNITLPAAFSSISTGVLLALARAAGETAPLIFTALFSRYYITSFDDLFYEMGSLSVLIYNFALEPYEAQNQLAWAASFILVVVLLSLNILSRWIGTLGAFSKNKV

SEQ ID NO: 51084 - DNA, 903 bp, Ralstonia eutropha JMP134
  CDS (1)..(903): transl_table=11
atgaaccaggcgagccacgctgtgtcttccgcatcgattcccgctgtacggcccgacgccgacgctgtgcgcacgcgcctgcaagcgcgccgccgccgcaccaacctgattgcactggccgcgtcgctgggcgccatgggtttcggcctgttctggctggcctggatcctgttcaccacggtcacgctgggcgtcggcggcctgtcgctggacctcttcacgcagatgacgcccgcgccgaataccgccggtggcggcctcgccaatgcgattttcggtagcttcgtgatggttggtgtcgccacgctgttcggcacgccgctgggcatcctggccggcatttacctggccgaatatggcaaggcgtcgccgctggccagcttcatccgcttcatcaacgacatcctgctgtcggcgccgtcgatcgtgatcggcctgttcgtctacgccctggtggtgacccgcatggggcacttctcgggctgggcgggtgcatgcgcactggcactgctgcagattccgatcgtggtccgtacgaccgagaacatgctgaacctggtgcccaacgctctgcgtgaagccgccttcgcgcttggcacgccgaaatggaagatggtgctgtcgatcacggtgaagtcgtcctacgccggcatcgttaccggcgtgctgctggccgtggcgcgtattgccggcgaaactgcaccgctgctgttcaccgcgctgtccaaccagttctggaccagtgacctgaacaagccgatggcaaacctgcctgtgacgattttccgcttcgccatgagcccgttcacggaatggcagcaactggcctgggcaggcgtgttcctcattacgatcggtgtgcttgcgctcaatatcgtggcgcgcatgctgttcaagaagtaa

SEQ ID NO: 51085 - protein, 300 aa, Ralstonia eutropha JMP134
MNQASHAVSSASIPAVRPDADAVRTRLQARRRRTNLIALAASLGAMGFGLFWLAWILFTTVTLGVGGLSLDLFTQMTPAPNTAGGGLANAIFGSFVMVGVATLFGTPLGILAGIYLAEYGKASPLASFIRFINDILLSAPSIVIGLFVYALVVTRMGHFSGWAGACALALLQIPIVVRTTENMLNLVPNALREAAFALGTPKWKMVLSITVKSSYAGIVTGVLLAVARIAGETAPLLFTALSNQFWTSDLNKPMANLPVTIFRFAMSPFTEWQQLAWAGVFLITIGVLALNIVARMLFKK

SEQ ID NO: 51086 - DNA, 846 bp, Thiobacillus denitrificans ATCC 25259
  CDS (1)..(846): transl_table=11
atgatgagtttgtacggacgccgggtttggaaaaaccgcatcggcatcacgctgtcgatggtggcgatgagcctcgggctgatcgcgctgctgtggatattgtggacgctgttttcgaagggattcgcggcgctgagcctggatctgttcgcgcaggacacgccggcgcctggctcggaaggcggcggcctgcgcaatgccatcgtcggcagcggtttgatcctgctgttctcgatgctgatctcgacgcccatcggcattctggccgggatctatctcgccgaattcggccgggtttcgaagttcgcctcgttcacccgcttcatgaccgacatcatgctgtcggcgccgtccatcgtcatcggcctcttcgtctacgccctgttcgtcgcgacgacgggtggcttctcaggctgggcagggtcgctggccttggcgctgatcgcgattcccgtcgtggtgcgcacgaccgagaacatgctgaaactggtgccgacgagtctgcgtgaggcggcgttcgcagtcggtgcgccgcgctggcaggtatccctcaaggtaaccctgcgcgcggtgaagtcgggtgtggcgaccggcgtgctgctggcgatggcgcggatcaccggcgaaacggcgccgctcctcttcacggcgctgaacaaccagttcttcagcaccaagatggccgagcccatgggcaacctgcccgtggtgatctaccagttcgcgctcagtccgtacgacaactggatcaaccttgcctggggcggcgccttgctgatcgccttcgtcgtcctcgcggtcaacatcggcgtgcgtgtggtcttccgcaacaaagacaaacgttaa

SEQ ID NO: 51087 - protein, 281 aa, Thiobacillus denitrificans ATCC 25259
MMSLYGRRVWKNRIGITLSMVAMSLGLIALLWILWTLFSKGFAALSLDLFAQDTPAPGSEGGGLRNAIVGSGLILLFSMLISTPIGILAGIYLAEFGRVSKFASFTRFMTDIMLSAPSIVIGLFVYALFVATTGGFSGWAGSLALALIAIPVVVRTTENMLKLVPTSLREAAFAVGAPRWQVSLKVTLRAVKSGVATGVLLAMARITGETAPLLFTALNNQFFSTKMAEPMGNLPVVIYQFALSPYDNWINLAWGGALLIAFVVLAVNIGVRVVFRNKDKR

SEQ ID NO: 51088 - DNA, 882 bp, Anabaena variabilis ATCC 29413
  CDS (1)..(882): transl_table=11
atgaatgctgattttcctgaaaggagtttaactcgcgcccccatgtctggacggacgctgtttaatacgatgatgacaggagtagcattcctgtgtggagcattagctctgttgccgctattggcagtactatcttatgtcatcattaaaggttttagtagtctcaatctaagtatatttacagaattgccgcccgcacctctaagacagggaggaggttttggtaatgccattttgggtacactattaatggtaggaattggtgcattaattagtattccattaggtgtaatagcggcaatttatttaacagagtttagctctggtaaactagccagatggattaggtttgctactaatgtcctgagcggagttccttctattattgctggtgtatttgcttatgggattatagttctgacattggtaaagctgaatttaggttcttattcagctattggcgggggatttgcattagcaatcttaatgctgccaattattgtgagaactactgacgaagctttacagctagtttcgcaagatttgcgccaagcatctgtaggtttgggagctactaattttcaaacagtaacacaagttgtcttgccagctgctttaccggcaattgtcacaggatcaacattggcgatcgcccgtgctgctggagaaactgcacctttattgtttactgccttattttcaccattctggcctaatagcttatttaaacccacagcttcgctggctgttttggtttacaactttgccatttctccgtttaaaaattggcagtcactagcctgggctgcatctttgattttggtgttgatggttctcatcaccagtatcattgctcgctgggcaactcgtcaaaaagcttag

SEQ ID NO: 51089 - protein, 293 aa, Anabaena variabilis ATCC 29413
MNADFPERSLTRAPMSGRTLFNTMMTGVAFLCGALALLPLLAVLSYVIIKGFSSLNLSIFTELPPAPLRQGGGFGNAILGTLLMVGIGALISIPLGVIAAIYLTEFSSGKLARWIRFATNVLSGVPSIIAGVFAYGIIVLTLVKLNLGSYSAIGGGFALAILMLPIIVRTTDEALQLVSQDLRQASVGLGATNFQTVTQVVLPAALPAIVTGSTLAIARAAGETAPLLFTALFSPFWPNSLFKPTASLAVLVYNFAISPFKNWQSLAWAASLILVLMVLITSIIARWATRQKA

SEQ ID NO: 51090 - DNA, 882 bp, Anabaena variabilis ATCC 29413
  CDS (1)..(882): transl_table=11
atgaccagttctcaaccgtcagaaattgaccagcttttagcgtcagagttatgtagtcctctaccaccaagaagacttttctttacttatgtaatgaatgtgatcgcttttgcattctctgcattagctttaattcctttattttcgattctttgggaaattattacacgaggaatcatcggtttaaaagcagaaatgtttgtcaaatctgtcatcgataacggatttggtaatgccattttaggaactattacagttgttgctcttggttctttattcagtattcctatagggttgtttacaggcatatttttagcagaatttggacaaactagtccgttagctcgctttgtccgctttatcgttagtatcctgactggtgttccctcaattgttgttggtatcttcgcttatggtttaatagttttggctactaaacaatttagcgcgatcgctggtggattcgccttagccacaatcatgttacctatcatcgccctgactactgaagaagccttaaaactcattcccatagaccaacgcctcgcctcagccgccttgggaggaacgcgctttcaaactaccattcgtatcgttgttactgctgctatacccgcaattaccacaggtattttactagctgtagcccgtgctgctggtgaaacagcacccctaatttttacagccttatttagtctagattggtcagccggattactcggccccacagcttccttaccagtcttaatttacaacctttacaacgaccctgacccccagaaaaatcaactcgtctggacaacttctatcgttttactaggcttagttttgagctttagtttgctttctcgtttagttactcgtaagaagaaaattaaatag

SEQ ID NO: 51091 - protein, 293 aa, Anabaena variabilis ATCC 29413
MTSSQPSEIDQLLASELCSPLPPRRLFFTYVMNVIAFAFSALALIPLFSILWEIITRGIIGLKAEMFVKSVIDNGFGNAILGTITVVALGSLFSIPIGLFTGIFLAEFGQTSPLARFVRFIVSILTGVPSIVVGIFAYGLIVLATKQFSAIAGGFALATIMLPIIALTTEEALKLIPIDQRLASAALGGTRFQTTIRIVVTAAIPAITTGILLAVARAAGETAPLIFTALFSLDWSAGLLGPTASLPVLIYNLYNDPDPQKNQLVWTTSIVLLGLVLSFSLLSRLVTRKKKIK

SEQ ID NO: 51092 - DNA, 888 bp, Streptococcus agalactiae A909
  CDS (1)..(888): transl_table=11
atgaacgctaaaaaggctgacaaattagcaactacaatactctatagtattgcagctatcatcgttacaatcctcgcctctcttttaatttttattcttgttcgcggattgccacacgtatcttggtcatttttaactgggaaatcatcatcatatgaagcaggaggcggtattggaatacaattatacaattcctttttcctacttattgttactctgattatttctattcctctatctttaggagctggaatatacctctcagaatatgctaaaaaaggacgtttaacaaactttgttagaacatgtatcgaaattttgtcatctcttccttctgttgtagttggtctgtttggttacctaatcttcgttgttcaatttcaatatggcttctcaattatctcaggtgccttagcacttactgtttttaacttaccccaaatgacacgtagtgttgaagatagccttcaaaatgtacaccacacacagcgtgaagcaggattggccctaggtatttctcgttgggaaacggtcatttacgtcgttgtccctgaagctctgccaagtattgtaactggtgttgtgctagcttcaggacgtattttcggtgaggcagcagcacttatttatacagctggtcaatctgctccagcacttgattggtcaaattggaacgtccttagtgttacaagtccaatctcaattttccgtcaagcagaaactttagctgttcatatttggaaagttaatagcgaagggacaatccctgatgcaacacaagtatctgccggtagcgccgcagtcttattggttgttattcttattttcaacctttcagctcgctcgatcggtaagaaacttcattcgaaattaacctcgtctaattaa

SEQ ID NO: 51093 - protein, 295 aa, Streptococcus agalactiae A909
MNAKKADKLATTILYSIAAIIVTILASLLIFILVRGLPHVSWSFLTGKSSSYEAGGGIGIQLYNSFFLLIVTLIISIPLSLGAGIYLSEYAKKGRLTNFVRTCIEILSSLPSVVVGLFGYLIFVVQFQYGFSIISGALALTVFNLPQMTRSVEDSLQNVHHTQREAGLALGISRWETVIYVVVPEALPSIVTGVVLASGRIFGEAAALIYTAGQSAPALDWSNWNVLSVTSPISIFRQAETLAVHIWKVNSEGTIPDATQVSAGSAAVLLVVILIFNLSARSIGKKLHSKLTSSN

SEQ ID NO: 51094 - DNA, 879 bp, Streptococcus agalactiae A909
  CDS (1)..(879): transl_table=11
atggaaaatattaaccaaagaacgtcaaaacaatatttagcatctttaaaaaaagatcccctttccttctttctttttgctattgtctatttgggagcaattctaagttttgctacaattgcatttgttgttatttatattttagttaaggggcttcctcatgtgaatactggcttgtttgcatggacttataatactcagaacgtttcactattaccagctttcattaacactatctttatcatcgccttaactttattatttgcagttccacttggtattggtggatcaatttatctaacggaatatgctagacgtgataatccttatctcaaaattatccgtgttgcaaccgagacattggcagggataccttcaattatttatggtttgtttggtgcattattttttgtaaaatacacacacttaggcttatctttgatatcgggttctctgactttgagcatcatgattttacctttgattatgaggacaactgaagaagctttactatctgttccggattcttatcgagaaggagcctttgcgcttggtgctggtaaattgagaaccatatttaaaatcgtattacctagtgctatgtctggtatttttgctggtattattttagcggtaggacgtatcattggtgagtcagcagcacttattttcacagctggaacagttgcaaaagtagcacattcggtatttagttcatctcgtactttagcagtacatatgtatgctatttcgggtgagggcttatatgttgaccaaacttatgcgactgcggtcatcttattgcttttagttattattgtcaattttgtatctggactagtagccaaacgattaggaagtgagtcgaacagtgagtaa

SEQ ID NO: 51095 - protein, 292 aa, Streptococcus agalactiae A909
MENINQRTSKQYLASLKKDPLSFFLFAIVYLGAILSFATIAFVVIYILVKGLPHVNTGLFAWTYNTQNVSLLPAFINTIFIIALTLLFAVPLGIGGSIYLTEYARRDNPYLKIIRVATETLAGIPSIIYGLFGALFFVKYTHLGLSLISGSLTLSIMILPLIMRTTEEALLSVPDSYREGAFALGAGKLRTIFKIVLPSAMSGIFAGIILAVGRIIGESAALIFTAGTVAKVAHSVFSSSRTLAVHMYAISGEGLYVDQTYATAVILLLLVIIVNFVSGLVAKRLGSESNSE

SEQ ID NO: 51096 - DNA, 894 bp, Burkholderia sp. 383
  CDS (1)..(894): transl_table=11
atgagcgagcccatcatgaatttcccgggtccggacggcgccgtgctcgacgcgatgcgcaatcgcctgcagcgcaagcgcaaggccatcaacgcgatcgcgctggctgcgtcactcggcgcgatggccttcggcctgctgtggctcgtgtggattctctacacgacggtgcatctcggcatcagcggcctgtcgctgcaactgttcacggaatcgacgccggcaccgaacacggagggcggcggtctcgcgaacgcgatcgtcggcagcctgctgctgtgcggcttcggcacgctggtcggcacgccgatcggcatcctcgcgggcgtctatctcgccgaatacggccagaagaacctgctggcgagcacgatccgtttcatcaacgacatcctgctgtccgcgccgtcgatcgtcatcggcctgttcgtgtatgcgatcgtcgtcgcgaagtcggggcgcttctcgggctgggccggcgtgattgcgctcgccctgctgcagattccgatcgtgatccgcacgaccgagaacatgctgaagctcgtgccgaacgcgctgcgtgaagcggccttcgcgctcggtacgccgaagtggcgcatggtgctgaagatcacgctgcgcgcatcggtcggcgggatcgtgacgggcgtgctgcttgccatcgcgcgaatcgccggcgaaacggcgccgctgctgttcaccgcgctgtcgaaccagttcttctcgtgggacatgagccagccgatggcgaacctgccggtcacgatctacaagttcgcgatgagcccgttcgcggaatggcagtcgctggcgtgggcgggcgtgtttctgattacgctcggggtgctcggactcaacatcctggcgcgctcgatcttctcgaaaaagtaa

SEQ ID NO: 51097 - protein, 297 aa, Burkholderia sp. 383
MSEPIMNFPGPDGAVLDAMRNRLQRKRKAINAIALAASLGAMAFGLLWLVWILYTTVHLGISGLSLQLFTESTPAPNTEGGGLANAIVGSLLLCGFGTLVGTPIGILAGVYLAEYGQKNLLASTIRFINDILLSAPSIVIGLFVYAIVVAKSGRFSGWAGVIALALLQIPIVIRTTENMLKLVPNALREAAFALGTPKWRMVLKITLRASVGGIVTGVLLAIARIAGETAPLLFTALSNQFFSWDMSQPMANLPVTIYKFAMSPFAEWQSLAWAGVFLITLGVLGLNILARSIFSKK

SEQ ID NO: 51098 - DNA, 918 bp, Synechococcus sp. CC9605
  CDS (1)..(918): transl_table=11
atgactcagacgctcacccactaccaagccgagtcagcccctgacctcagctacaagccccttcaacgcagaaacatcagcagcggggcactctcgtttctggcggcactgttcgcagtcatcgctgttctgcccctgatcctggtgctgggttacgtgctggtgcaggggggcagcaagatcagcctggccctgctgacgcaactgcctccaccgccaggcctcgaagaaggcggcatcgccaatgcgatcgttgggaccctggtagtgacggctgttgctggcctgatcgctgttccagtgggcgttggcggcggtgtttttctggccgaatattcccgatctggatggttcgctcagttcatccgcttcggcaccaatgtgctggccggggtgccatcgatcattgccggcgtgttcatctacggaaccatcgtcaccagccgaattctgttcgggaacgcctacagcgctgtcgccggtggcatggcactggcggtgctgatgctgcccacagtgatcaaaaccactgatgaaggcctgaagctggtgcccgacgacctacggcgtgctgccctgggggtgggcgcatcccgattcgtcaccatcattcgaatcacactccctgccgctttcacaccaatcgcaaccggcgttgtccttgctgtcgccagagcagcaggggaaacggctccgctgcttttcacagccctgttctcaccgttctggtcggatctgctcacgccggaagggatcttttctccaatcgccaccctctcggtgatgatctacaacttcgcgatcgagccctacgaatttcacaacgaactggcctgggccgcatcatttgtgctcgttgtgatgatcctggccctaaacctcttctctcgctggctggcgcgatttgctgccaaataa

SEQ ID NO: 51099 - protein, 305 aa, Synechococcus sp. CC9605
MTQTLTHYQAESAPDLSYKPLQRRNISSGALSFLAALFAVIAVLPLILVLGYVLVQGGSKISLALLTQLPPPPGLEEGGIANAIVGTLVVTAVAGLIAVPVGVGGGVFLAEYSRSGWFAQFIRFGTNVLAGVPSIIAGVFIYGTIVTSRILFGNAYSAVAGGMALAVLMLPTVIKTTDEGLKLVPDDLRRAALGVGASRFVTIIRITLPAAFTPIATGVVLAVARAAGETAPLLFTALFSPFWSDLLTPEGIFSPIATLSVMIYNFAIEPYEFHNELAWAASFVLVVMILALNLFSRWLARFAAK

SEQ ID NO: 51100 - DNA, 840 bp, Geobacter metallireducens GS-15
  CDS (1)..(840): transl_table=11
atgaacatcgtcactcgccggaacctgaaaaactccataatcaccatttccatggtctgcgccaccgtggccgtcctcgtgccgctggggctgatcttcttccacatcatgaagatgggggccagctccatcaacctggacttcttcatccacatcccgaaaccgaccggagaaaccggtggcgggatggccaacggcatggtggggtcggcgctcctgatcgcgcttgcttccaccatcggcataccggtcggggtcttcggggccctctacctggtggagttcggcggaagccgcatctccaacaccgtccgctttgccgcggatgtcctctccggcgtgccgtccatcatcaccggcatggtggcctacaccctcctggtggtgccgatgaagggcttctccgccctggccggagccgtggccctgtcgctcatcatggtccccatcgtgctccgcaccaccgaggaacagttgaagatggttcccggttccctgcgggaggcctccctggctctgggagtgcccctctggcgcacgagcctcaaggtgaccctgaggagcgccacgaaaggggtcatgaccggcatcctcctggccattgcccggatcgccggcgaaaccgctccgctcctcttcaccgccctggggaaccagttctggagcaagaagctgaccgagccgatcgccgccatgccgctgcagatcttcaacttcgccatcgccccctacgaagactggcacaagcttgcctgggcgggagccctggtcctcgtgacgatcatgttcgggttgagcctcacggcccgctacctgggcagaagcagacagcagtcgtaa

SEQ ID NO: 51101 - protein, 279 aa, Geobacter metallireducens GS-15
MNIVTRRNLKNSIITISMVCATVAVLVPLGLIFFHIMKMGASSINLDFFIHIPKPTGETGGGMANGMVGSALLIALASTIGIPVGVFGALYLVEFGGSRISNTVRFAADVLSGVPSIITGMVAYTLLVVPMKGFSALAGAVALSLIMVPIVLRTTEEQLKMVPGSLREASLALGVPLWRTSLKVTLRSATKGVMTGILLAIARIAGETAPLLFTALGNQFWSKKLTEPIAAMPLQIFNFAIAPYEDWHKLAWAGALVLVTIMFGLSLTARYLGRSRQQS

SEQ ID NO: 51102 - DNA, 894 bp, Desulfovibrio desulfuricans G20
  CDS (1)..(894): transl_table=11
gtgcagcatgccgcaagcacactggttcaggaccagaaatttctgcagcgccgcaagccttttcagactttcatgttcatgctgttcagggcctcagtggtgctcaacgcccttgcgctggccgtcatatgcggctttgtgctcttttacggtctgcccgcggtcaactgggaatttctgacagcccacccgcgcgacgcaatgacagccggcggcatatttccctgcatactcggcaccattgccctgagctacggttccatgctcattgctttgccgtggggggtgtgcaccgccatatacctgcatgaatacgccagaccaggcccctttgtgcatgccatgcgtctggccatcaacaatctggccggtgtgccctctgtggttttcggcctgttcgggctggcgttctttgtgacgctcatgcagatgggtgtcagcctgcttgccggtatgttcacgctggcggcgcttatcctgccgcttatcatcggcgcatccgaagaagccctgcgctctgtttcacagacataccgcgaagcctcgctggcgctgggagccaccaaatggcagactctggccaaggtggtgctgcccgcggccacgccgggcattctgaccggcgccattctgggcataggcagagccgccggagaaacagcggccatcatgttcaccgcagccatgtttttcagccccaagctgcccggctctgtctttgacagcgtaatggcgctgccctaccacatatatgtactggccaccgcaggcatagacatagaaaaaacccgtccgctgcagtacggcactgcgctggtgctcatagtgctggtgctgggcatgaatctgcttgccatcatcatacgtgccagattgcagcgaaagctgcgctag

SEQ ID NO: 51103 - protein, 297 aa, Desulfovibrio desulfuricans G20
MQHAASTLVQDQKFLQRRKPFQTFMFMLFRASVVLNALALAVICGFVLFYGLPAVNWEFLTAHPRDAMTAGGIFPCILGTIALSYGSMLIALPWGVCTAIYLHEYARPGPFVHAMRLAINNLAGVPSVVFGLFGLAFFVTLMQMGVSLLAGMFTLAALILPLIIGASEEALRSVSQTYREASLALGATKWQTLAKVVLPAATPGILTGAILGIGRAAGETAAIMFTAAMFFSPKLPGSVFDSVMALPYHIYVLATAGIDIEKTRPLQYGTALVLIVLVLGMNLLAIIIRARLQRKLR

SEQ ID NO: 51104 - DNA, 912 bp, Synechococcus elongatus PCC 7942
  CDS (1)..(912): transl_table=11
atggctgccacagttcccaaccaacccgcagcagcgccggctcgtccctttcggcctcgcctcgcccatcgttatcgtctcgacgcagtgatgatgacggctgcttggacgggtgttgcgatcgcgctgctcgtcttgctggcgttgatcagcgatgtcttccgcagcggcattccctacctcaattgggatttcttgaccagcttcccctcgcgtcgccccagtagtgctgggattctttccgcttgggtcggaaccgtctactcgatctttttggttggcttgattggtttccccttgggtgtgggtgcagggatttacctcgaggagtttgcgccagacaactggtttacccgtctggtagaaatcaacgtcaacaatttggctggcgttcctgccatcatctacggtctgctgggtctagagctgtttgtgcggattgcctcgccggttacaggcggtcgcagcttgctatcgggttctttgacgctggcgctgctgatccttccgattgtgatcgtttcgactcgggagtcactgcgggctgttcctgacagtacccgtcaggcaggctttgcccttggtgctacccgttggcaagtcgttcgtacgatcatcgtcccagaagcggcttcggggatcttgaccggtacgattctgggcatttcccgtgcgatcggtgaagcagctcccctgattacgattggggcgttgaccttcatttccttcctgcccgacaacctccaaagtccctttaccgtcctgccaattcaaatctttaactgggtctctcgtccccaggctgagttccagaatttggcggcggccgcgatcatcgtgttgctagcgattttgctaaccatgaactcgatcgcgatcgtgattcgcaacaagttgcaagtcaaacgctaa

SEQ ID NO: 51105 - protein, 303 aa, Synechococcus elongatus PCC 7942
MAATVPNQPAAAPARPFRPRLAHRYRLDAVMMTAAWTGVAIALLVLLALISDVFRSGIPYLNWDFLTSFPSRRPSSAGILSAWVGTVYSIFLVGLIGFPLGVGAGIYLEEFAPDNWFTRLVEINVNNLAGVPAIIYGLLGLELFVRIASPVTGGRSLLSGSLTLALLILPIVIVSTRESLRAVPDSTRQAGFALGATRWQVVRTIIVPEAASGILTGTILGISRAIGEAAPLITIGALTFISFLPDNLQSPFTVLPIQIFNWVSRPQAEFQNLAAAAIIVLLAILLTMNSIAIVIRNKLQVKR

SEQ ID NO: 51106 - DNA, 933 bp, Moorella thermoacetica ATCC 39073
  CDS (1)..(933): transl_table=11
gtgaaagctcgactggtggatcacgtggcaacattttttttctggctgggagcgggtattattttggtgttgctgggcgtcctggtaggctacgtgctgtttaaagggggcaagtggctcgacctggcttttattacccggccgccggagaatcttaaagccggcggcggtgttgggccccagctctttaattccttttacctcctggtcttatccatgctctttaccattcccctgggtgtaggggccggtatttacctggcggaatacgctggcagcggcgacgtaaacccggcccttgctctgccccgtagcaaaagggcgactaattacctgctggcggcattaaatctctccatcgagaccctggcttccctcccctccattgtcgttggcctttttggcctgctagtttttgtcgtcagcaccggctgggggtactccctgatggccggggctctggccctgacggtcttgaatttaccggtaatggtgcgtatcagcctggaagcgcttcaagcagtacccagggacctcaaagaggccagcctggccctgggggcttcccgttgggagaccatctggaaggtagttttgccggccgccttcccggggctggtaacgggcgggatcattaccgccggccgggttttcggcgaggccgctgcccttttgtataccgccggaatgagtagcccggtcctggatttcagcgactggaaccccctgcatcccaactcccccttaaatcctttccggccggcggctaccctggcagttcacatttggaaaatcaactcggaggggttaattcccgatgtcaggcgggtggccgacggttccgccgccctcttgattatcgttgtcttggtatttaatctattggcccgttggctgggaaacgttttgtaccggcgcatgacggccagttag

SEQ ID NO: 51107 - protein, 310 aa, Moorella thermoacetica ATCC 39073
MKARLVDHVATFFFWLGAGIILVLLGVLVGYVLFKGGKWLDLAFITRPPENLKAGGGVGPQLFNSFYLLVLSMLFTIPLGVGAGIYLAEYAGSGDVNPALALPRSKRATNYLLAALNLSIETLASLPSIVVGLFGLLVFVVSTGWGYSLMAGALALTVLNLPVMVRISLEALQAVPRDLKEASLALGASRWETIWKVVLPAAFPGLVTGGIITAGRVFGEAAALLYTAGMSSPVLDFSDWNPLHPNSPLNPFRPAATLAVHIWKINSEGLIPDVRRVADGSAALLIIVVLVFNLLARWLGNVLYRRMTAS

SEQ ID NO: 51108 - DNA, 894 bp, Burkholderia thailandensis E264
  CDS (1)..(894): transl_table=11
atgagcgcgccgatcgtcaacatgccgggtccggacggagcggtgctcgacgcgatgcgcgcgcgcttgcagcgccgccgcaaggtgaccaacgtgatcgcgctgaccgcgtcgctcgccgcgatggcgttcggcctgctctggctcgtctggattctctacacgacgctgcatctcgggatcggcgggctgtcgctcacgctcttcaccgaatcgacgccgccgccggacacggcgggcggcgggctcgcgaacgcgatcgtcggcagcctgctgcttgtcgcgctcgcgacgttcatcggcacgccgatcggcattctcgcgggcgtctacctcgccgagtacggccagaagagctggctcgcgagcgtgatgcgcttcatcaacgacatcctgctgtccgcgccgtcgatcgtcgtcggtctgttcgtgtacgcgctcgtcgtcgcgaaatccggccacttcagcggctgggccggcgtgatcgcgctcgcgctgttgcagatcccgatcgtgatccgcacgaccgagaacatgctgaagctcgtgccgaatgcgctgcgcgaggccgcgttcgcgctcggcacgccgaagtggcggatgatcctgaagatcacgctgcgcgcgtcggtgggcgggatcgtcacgggcgtgctgctcgcggtcgcgcggatcgcgggcgaaaccgcgccgctgctcttcaccgcgctgtcgaaccagtttttctcggtcgacatgagccagccgatggcgaacctgcccgtcacgatcttcaagttcgcgatgagcccgttcgcgcaatggcagtcgctcgcgtgggcgggcgtgtttctgattacgctcggggtgctgggactcaatatcctcgcgcgctcggtcttctcgaaaaagtaa

SEQ ID NO: 51109 - protein, 297 aa, Burkholderia thailandensis E264
MSAPIVNMPGPDGAVLDAMRARLQRRRKVTNVIALTASLAAMAFGLLWLVWILYTTLHLGIGGLSLTLFTESTPPPDTAGGGLANAIVGSLLLVALATFIGTPIGILAGVYLAEYGQKSWLASVMRFINDILLSAPSIVVGLFVYALVVAKSGHFSGWAGVIALALLQIPIVIRTTENMLKLVPNALREAAFALGTPKWRMILKITLRASVGGIVTGVLLAVARIAGETAPLLFTALSNQFFSVDMSQPMANLPVTIFKFAMSPFAQWQSLAWAGVFLITLGVLGLNILARSVFSKK

SEQ ID NO: 51110 - DNA, 882 bp, Syntrophus aciditrophicus SB
  CDS (1)..(882): transl_table=11
atgaaacggacgggggaaaaactgacgatctggtattcgtggacctgcgggctgattctgtccgccgctgttttctccattctcgcctaccttgtattcaaaggggccggaacgcttaatatgaagctgatcttcggggatgcttcccctctgagggctgttttccttcagcagcgcgttttcgagggcctgttccccgctatcgtcggcacctttatcctggtcgctctgtccattgctttcgcgctgccgatcggcttcgccacgggcatttacctcgcggaatacgcggacttccgggtcaaaaacgccttcaacctgatttttgatatccttgccggcattccgtccatcgtggtggggctcttcggattcgcgctggctgtttttctccacaagcactattccagcagcatccagccgtgcctccttatctcgagtcttgccctcgcctttctcgttctgccgtacatcatccggaccacgcagatcgccctggaaggtctttctcccgatacccgcctgacggccctcgcccttggggcaacgaaactgcagaacctgttttatgtcctgattccccagtccctttccggaatggtcagcgggctcattctggccatcggccgctgcgcggaggatacagcggtcatcatgctaacgggagtcgtagtggcggcgggagttccgaaatccgctcttgccccctatgaagcgctgccgttctacatctattacatttcttcccagtacacctcgccggaagaactgatgaacggttatggagcggccctgattctgcttctactctgcctgttccttttcaccctcgccttcgtcatcaaaaaacgcctcacctatctcgctttttatcgcccatga

SEQ ID NO: 51111 - protein, 293 aa, Syntrophus aciditrophicus SB
MKRTGEKLTIWYSWTCGLILSAAVFSILAYLVFKGAGTLNMKLIFGDASPLRAVFLQQRVFEGLFPAIVGTFILVALSIAFALPIGFATGIYLAEYADFRVKNAFNLIFDILAGIPSIVVGLFGFALAVFLHKHYSSSIQPCLLISSLALAFLVLPYIIRTTQIALEGLSPDTRLTALALGATKLQNLFYVLIPQSLSGMVSGLILAIGRCAEDTAVIMLTGVVVAAGVPKSALAPYEALPFYIYYISSQYTSPEELMNGYGAALILLLLCLFLFTLAFVIKKRLTYLAFYRP

SEQ ID NO: 51112 - DNA, 876 bp, Syntrophus aciditrophicus SB
  CDS (1)..(876): transl_table=11
ttggtaaaaattatcatgaaatggaaatggcgttatattaagcagaatctttttatgggtgcggtttctctatgcgcccttctgatcattcttgccctgggtggaatactcttttatattttcagcaacggccttcaggcgatcaactgggaattcctgaccagcccccctcgtgattccatgacccgagggggcatcatgccggcgattctcgggaccctgtaccttacgctgggggcgattacggtggccctgccgctgggcatcgcctcggcggtttatctgacggaatacgcgcgtcaggggctgataatccggattatccgcctgggggtgaactgtcttgccggtattccttccgtggttttcggactgttcggcctgggtttttttgtcgttttcctgcaattcggatcatgcattctctccggagcgctgaccctgggattccttgtcctgccgaccattatcggggcatctgaggaagcgctcaaagctgttcctcagaccttccgggaagcgtcactggccttgggcgtttccaaatggcgcaccatatctcggattgtcctgccaaacgccctgccgggaattctgaccggttccattctgggaataggacgcgccgccggtgaaacggcgccgatcatgttcacggctgccgcgtttttcaccgcgaagctgccttcgtcaattttcgacgaggtgatggccttaccctaccatatttatgttctggcaacggccggaacccggatcgaggaaacccgtccccttcagttcggaacggcccttgttctgatggcgctggttctgggaatcgacctgttcgcaatcatcattcgaagccgtatgcgcaaaaagaaaaggtggtaa

SEQ ID NO: 51113 - protein, 291 aa, Syntrophus aciditrophicus SB
MVKIIMKWKWRYIKQNLFMGAVSLCALLIILALGGILFYIFSNGLQAINWEFLTSPPRDSMTRGGIMPAILGTLYLTLGAITVALPLGIASAVYLTEYARQGLIIRIIRLGVNCLAGIPSVVFGLFGLGFFVVFLQFGSCILSGALTLGFLVLPTIIGASEEALKAVPQTFREASLALGVSKWRTISRIVLPNALPGILTGSILGIGRAAGETAPIMFTAAAFFTAKLPSSIFDEVMALPYHIYVLATAGTRIEETRPLQFGTALVLMALVLGIDLFAIIIRSRMRKKKRW

SEQ ID NO: 51114 - DNA, 1065 bp, Frankia sp. CcI3
  CDS (1)..(1065): transl_table=11
atgaaaaccgcgaccgttcccggcagcgccgtcgcgggcggtgaggaccggctgcagctgcggggccgggtcctgccccgctgggtaccgctcgccgccgctgccggtgccgtcgtcctgacggtcctgatctatctggtgacctcgatctccagcaggatccagttcctcctgctggtcgccgtcttcttcatcctcgcgatgaccgtgccctcgacgctggtcgagggcgcccgccgggcccgggaccggttcgcgacgaacctggtctacgccgccttcctgctagcggtcatccccctgctcgcggtgctcgtgaatgtgatcgagaagggtgcgaggcggctgcgccccggattcttcactcactcgatgaacggcatcggtgcccgtgacgtcggcggtggcatctaccacgcgatcatcggcacagtggagcaggtcgcgttggcgagcctgctggccgtgccgttcggtctgctggtggccatctacctggtggaatatggccgcggccgggtcagccgggtgatcagtttctttgtcgacgtgctcaccggtcttccctcgatcatcgcgggtctgttcatcctggcgttctggatcctcgcccttcaccagggcttctccggattcgcgggtgccctggccctcacggtgctcatgattccgatcgtggtgcgctccgccgaggaaatgctgaagctcgttccggacgagctgcgggaggccagctacgccctcggggtggcgcgttggcggaccatcctcaaggtggtcgtccccaccgcgttgcccgggatcgtgaccggcgtcatgctcgcggtcgcccgcgttgccggcgagatcgcgccgctgctgctgaccgtcttcggcacgaacctcatcaacgccaacccgttctccggggagcagtccgcactgccgctgtacatctactcgcaggccggccagccgcagcaggcggcggtggaccgggcctgggccgccgccctggtactcatcgtcatcatcatgctgctcaacttcatcgctcgtctgatcgccggacgctcgcggctgtga

SEQ ID NO: 51115 - protein, 354 aa, Frankia sp. CcI3
MKTATVPGSAVAGGEDRLQLRGRVLPRWVPLAAAAGAVVLTVLIYLVTSISSRIQFLLLVAVFFILAMTVPSTLVEGARRARDRFATNLVYAAFLLAVIPLLAVLVNVIEKGARRLRPGFFTHSMNGIGARDVGGGIYHAIIGTVEQVALASLLAVPFGLLVAIYLVEYGRGRVSRVISFFVDVLTGLPSIIAGLFILAFWILALHQGFSGFAGALALTVLMIPIVVRSAEEMLKLVPDELREASYALGVARWRTILKVVVPTALPGIVTGVMLAVARVAGEIAPLLLTVFGTNLINANPFSGEQSALPLYIYSQAGQPQQAAVDRAWAAALVLIVIIMLLNFIARLIAGRSRL

SEQ ID NO: 51116 - DNA, 897 bp, Burkholderia xenovorans LB400
  CDS (1)..(897): transl_table=11
atgagccagcccactttgaatatgccgggttcgaccgacgccgccgcgctcgaagcgatgcgcgtgcgtctgcaagggcgccgccgcatgaagaatgcggtcgcgctgaccttgtcgctcgccgcgatggcgttcggtctggtctggctgatctggattctgtacacgaccttgcgcctcggtgtcggcggtttgtccgtcgagctgttcacgcaatcgacgccgccgccgaacaccgacggcggtggcctcgccaacgcgatcgtcggcagtttgatgctggttgggctcgccacgttcgtcggtacgccgatcggcattctggccggcgtgtatctcgccgaatacggccagaggggctggctcgcgagcttcacgcgtttcatcaacgacattctgctgtcggcgccttcgatcgtggtcggtctcttcgtatacgcactggttgtcgcgaagatgggccacttcagcggctgggccggtgtgttcgcgctcgcgttgctgcagattccgatcgtgatccgcaccacggaaaacatgctgaaactggtgccgaacgcgctgcgtgaagccgctttcgcactcggcacgccgaagtggaagatggtgctgtcgatcacgctgaaggcttcgatcgcgggtatcgtcaccggcgtgttgctcggcgtggcacgtatcgcgggtgaaaccgcgccgctgctgttcacggcgctgtcgaaccagttcttctcgctgaacatggaccagccggtcgcgaacctgccggtcacgatctacaagtttgcgatgagcccgttcgcgcagtggcaatcgctcgcgtgggccggcgtcttcctgatcacgctcgcggtgctgggactgaacatcctcgcgcgcacgatcttcacgaacaagtaa

SEQ ID NO: 51117 - protein, 298 aa, Burkholderia xenovorans LB400
MSQPTLNMPGSTDAAALEAMRVRLQGRRRMKNAVALTLSLAAMAFGLVWLIWILYTTLRLGVGGLSVELFTQSTPPPNTDGGGLANAIVGSLMLVGLATFVGTPIGILAGVYLAEYGQRGWLASFTRFINDILLSAPSIVVGLFVYALVVAKMGHFSGWAGVFALALLQIPIVIRTTENMLKLVPNALREAAFALGTPKWKMVLSITLKASIAGIVTGVLLGVARIAGETAPLLFTALSNQFFSLNMDQPVANLPVTIYKFAMSPFAQWQSLAWAGVFLITLAVLGLNILARTIFTNK

SEQ ID NO: 51118 - DNA, 903 bp, Ralstonia metallidurans CH34
  CDS (1)..(903): transl_table=11
atgaaccaagccagtcaagccgtgtcaacttcgtccatccccgccgtacgtcccgactcggacgccgtgcgcacgcgcctgcagggctcgcgccgacgcatgaacatgtacgcgctgaccgcgtcgctggccgcgatgggtttcggcctgttctggctggcatggattctctggaccaccatctcgctgggcgtcggtggtctgtcgctcgacctgttcacgcagatgacgccggccccgaacaccgccggcggcggtctggccaacgccatcttcggcagcttcgtgctggtgggcatggccacgctggtcggcacgccgctgggtatcctggccggcatctacctggccgaatatggcaagaagtcgccgctggccagtttgatccgcttcatcaacgacatcctgctgtcggccccgtcgatcgtgatcggcctgttcgtctatgccatcgtggtgacccgcatgggccatttctcgggctgggccggtgtctgcgcgctggcactgctgcaggtgccgatcgtggtccgtaccaccgagaacatgctgaacctggtgccgaacgcactgcgtgaagcagccgttgcgcttggcacgcccaagtggaagatggtgatgtcgatcacgatcaagtcgtcgtacgcgggcatcgtgaccggtgtgctgctggccgtggcccgtatcgctggcgaaaccgcgccgctactgttcaccgcgctgtccaaccagttctggagcgccgacctgaacaagccgatggccaacctgccggtgacgatcttccgctttgccatgagcccgttcaccgaatggcagcaactggcatgggccggcgtgttcctgattacgattggtgtgcttgcgctgaacatcatcgcgcgcatgcttttcaagaagtaa
